United States Patent Application Publication US 2014/0004565 A1 - sequence listing, part 122

SEQ ID NO: 3062657 - RNA, 19 nt, Artificial Sequence
  Description of Artificial Sequence: Synthetic oligonucleotide
uugaaucuaaaggugaugg

SEQ ID NO: 3062658 - RNA, 19 nt, Artificial Sequence
  Description of Artificial Sequence: Synthetic oligonucleotide
aaugucuucauugggcagc

SEQ ID NO: 3062659 - RNA, 19 nt, Artificial Sequence
  Description of Artificial Sequence: Synthetic oligonucleotide
uguuccaugagauaguagu

SEQ ID NO: 3062660 - RNA, 19 nt, Artificial Sequence
  Description of Artificial Sequence: Synthetic oligonucleotide
aauaucucuguccaugcug

SEQ ID NO: 3062661 - RNA, 19 nt, Artificial Sequence
  Description of Artificial Sequence: Synthetic oligonucleotide
aaucuaaaggugauggugg

SEQ ID NO: 3062662 - RNA, 19 nt, Artificial Sequence
  Description of Artificial Sequence: Synthetic oligonucleotide
uugaagaggaggcuuaucc

SEQ ID NO: 3062663 - RNA, 19 nt, Artificial Sequence
  Description of Artificial Sequence: Synthetic oligonucleotide
ucagggauuaaaaucuucc

SEQ ID NO: 3062664 - RNA, 19 nt, Artificial Sequence
  Description of Artificial Sequence: Synthetic oligonucleotide
ucuucucccacguagacug

SEQ ID NO: 3062665 - RNA, 19 nt, Artificial Sequence
  Description of Artificial Sequence: Synthetic oligonucleotide
acagauauaauuugucuca

SEQ ID NO: 3062666 - RNA, 19 nt, Artificial Sequence
  Description of Artificial Sequence: Synthetic oligonucleotide
ucuugaacagauauaauuu

SEQ ID NO: 3062667 - RNA, 19 nt, Artificial Sequence
  Description of Artificial Sequence: Synthetic oligonucleotide
ugugggaaugucuucauug

SEQ ID NO: 3062668 - RNA, 19 nt, Artificial Sequence
  Description of Artificial Sequence: Synthetic oligonucleotide
gauuaaaaucuuccuuugg

SEQ ID NO: 3062669 - RNA, 19 nt, Artificial Sequence
  Description of Artificial Sequence: Synthetic oligonucleotide
uuaaaaucuuccuuugggu

SEQ ID NO: 3062670 - RNA, 19 nt, Artificial Sequence
  Description of Artificial Sequence: Synthetic oligonucleotide
aggaggcuuauccagaggg

SEQ ID NO: 3062671 - RNA, 19 nt, Artificial Sequence
  Description of Artificial Sequence: Synthetic oligonucleotide
uggaucuucucccacguag

SEQ ID NO: 3062672 - RNA, 19 nt, Artificial Sequence
  Description of Artificial Sequence: Synthetic oligonucleotide
ugagaaugaggcuggaacc

SEQ ID NO: 3062673 - RNA, 19 nt, Artificial Sequence
  Description of Artificial Sequence: Synthetic oligonucleotide
ucuucauugggcagcuugg

SEQ ID NO: 3062674 - RNA, 19 nt, Artificial Sequence
  Description of Artificial Sequence: Synthetic oligonucleotide
gaaucuaaaggugauggug

SEQ ID NO: 3062675 - RNA, 19 nt, Artificial Sequence
  Description of Artificial Sequence: Synthetic oligonucleotide
uugaacagauauaauuugu

SEQ ID NO: 3062676 - RNA, 19 nt, Artificial Sequence
  Description of Artificial Sequence: Synthetic oligonucleotide
ucucuguccaugcuguggg

SEQ ID NO: 3062677 - RNA, 19 nt, Artificial Sequence
  Description of Artificial Sequence: Synthetic oligonucleotide
cuugaacagauauaauuug

SEQ ID NO: 3062678 - RNA, 19 nt, Artificial Sequence
  Description of Artificial Sequence: Synthetic oligonucleotide
ggaaaauggaguuuccagg

SEQ ID NO: 3062679 - RNA, 19 nt, Artificial Sequence
  Description of Artificial Sequence: Synthetic oligonucleotide
uuauccagagggcugggag

SEQ ID NO: 3062680 - RNA, 19 nt, Artificial Sequence
  Description of Artificial Sequence: Synthetic oligonucleotide
ugaacagauauaauuuguc

SEQ ID NO: 3062681 - RNA, 19 nt, Artificial Sequence
  Description of Artificial Sequence: Synthetic oligonucleotide
ugggagaucuggaaugccg

SEQ ID NO: 3062682 - RNA, 19 nt, Artificial Sequence
  Description of Artificial Sequence: Synthetic oligonucleotide
ugucucagggauuaaaauc

SEQ ID NO: 3062683 - RNA, 19 nt, Artificial Sequence
  Description of Artificial Sequence: Synthetic oligonucleotide
gaaaucggcauccccuugg

SEQ ID NO: 3062684 - RNA, 19 nt, Artificial Sequence
  Description of Artificial Sequence: Synthetic oligonucleotide
uuucggacauccuugaauc

SEQ ID NO: 3062685 - RNA, 19 nt, Artificial Sequence
  Description of Artificial Sequence: Synthetic oligonucleotide
ucauugggcagcuuggucu

SEQ ID NO: 3062686 - RNA, 19 nt, Artificial Sequence
  Description of Artificial Sequence: Synthetic oligonucleotide
aucuaaaggugaugguggc

SEQ ID NO: 3062687 - RNA, 19 nt, Artificial Sequence
  Description of Artificial Sequence: Synthetic oligonucleotide
uccuugaaucuaaagguga

SEQ ID NO: 3062688 - RNA, 19 nt, Artificial Sequence
  Description of Artificial Sequence: Synthetic oligonucleotide
aaaucuuccuuuggguggg

SEQ ID NO: 3062689 - RNA, 19 nt, Artificial Sequence
  Description of Artificial Sequence: Synthetic oligonucleotide
cugagaaugaggcuggaac

SEQ ID NO: 3062690 - RNA, 19 nt, Artificial Sequence
  Description of Artificial Sequence: Synthetic oligonucleotide
uuugucucagggauuaaaa

SEQ ID NO: 3062691 - RNA, 19 nt, Artificial Sequence
  Description of Artificial Sequence: Synthetic oligonucleotide
auauaauuugucucaggga

SEQ ID NO: 3062692 - RNA, 19 nt, Artificial Sequence
  Description of Artificial Sequence: Synthetic oligonucleotide
agauauaauuugucucagg

SEQ ID NO: 3062693 - RNA, 19 nt, Artificial Sequence
  Description of Artificial Sequence: Synthetic oligonucleotide
uuuucggacauccuugaau

SEQ ID NO: 3062694 - RNA, 19 nt, Artificial Sequence
  Description of Artificial Sequence: Synthetic oligonucleotide
gaggcuggaaccuuucuug

SEQ ID NO: 3062695 - RNA, 19 nt, Artificial Sequence
  Description of Artificial Sequence: Synthetic oligonucleotide
ugggaaugucuucauuggg

SEQ ID NO: 3062696 - RNA, 19 nt, Artificial Sequence
  Description of Artificial Sequence: Synthetic oligonucleotide
gaaccuuucuugaagagga

SEQ ID NO: 3062697 - RNA, 19 nt, Artificial Sequence
  Description of Artificial Sequence: Synthetic oligonucleotide
uguuggaaaauggaguuuc

SEQ ID NO: 3062698 - RNA, 19 nt, Artificial Sequence
  Description of Artificial Sequence: Synthetic oligonucleotide
aucggcauccccuugguga

SEQ ID NO: 3062699 - RNA, 19 nt, Artificial Sequence
  Description of Artificial Sequence: Synthetic oligonucleotide
augucaggaggcugcauac

SEQ ID NO: 3062700 - RNA, 19 nt, Artificial Sequence
  Description of Artificial Sequence: Synthetic oligonucleotide
gugggaaugucuucauugg

SEQ ID NO: 3062701 - RNA, 19 nt, Artificial Sequence
  Description of Artificial Sequence: Synthetic oligonucleotide
aaauaucucuguccaugcu

SEQ ID NO: 3062702 - RNA, 19 nt, Artificial Sequence
  Description of Artificial Sequence: Synthetic oligonucleotide
ugggaugucaggaggcugc

SEQ ID NO: 3062703 - RNA, 19 nt, Artificial Sequence
  Description of Artificial Sequence: Synthetic oligonucleotide
gacauccuugaaucuaaag

SEQ ID NO: 3062704 - RNA, 19 nt, Artificial Sequence
  Description of Artificial Sequence: Synthetic oligonucleotide
cuaaaggugaugguggcug

SEQ ID NO: 3062705 - RNA, 19 nt, Artificial Sequence
  Description of Artificial Sequence: Synthetic oligonucleotide
gaaaauggaguuuccaggu

SEQ ID NO: 3062706 - RNA, 19 nt, Artificial Sequence
  Description of Artificial Sequence: Synthetic oligonucleotide
cuuugggugggcucugugg

SEQ ID NO: 3062707 - RNA, 19 nt, Artificial Sequence
  Description of Artificial Sequence: Synthetic oligonucleotide
uccaugagauaguaguuaa

SEQ ID NO: 3062708 - RNA, 19 nt, Artificial Sequence
  Description of Artificial Sequence: Synthetic oligonucleotide
gaacagauauaauuugucu

SEQ ID NO: 3062709 - RNA, 19 nt, Artificial Sequence
  Description of Artificial Sequence: Synthetic oligonucleotide
aguuuccagguggaaaucg

SEQ ID NO: 3062710 - RNA, 19 nt, Artificial Sequence
  Description of Artificial Sequence: Synthetic oligonucleotide
gucuucauugggcagcuug

SEQ ID NO: 3062711 - RNA, 19 nt, Artificial Sequence
  Description of Artificial Sequence: Synthetic oligonucleotide
gaaugucuucauugggcag

SEQ ID NO: 3062712 - RNA, 19 nt, Artificial Sequence
  Description of Artificial Sequence: Synthetic oligonucleotide
ugaaucuaaaggugauggu

SEQ ID NO: 3062713 - RNA, 19 nt, Artificial Sequence
  Description of Artificial Sequence: Synthetic oligonucleotide
uaauuugucucagggauua

SEQ ID NO: 3062714 - RNA, 19 nt, Artificial Sequence
  Description of Artificial Sequence: Synthetic oligonucleotide
cauccuugaaucuaaaggu

SEQ ID NO: 3062715 - RNA, 19 nt, Artificial Sequence
  Description of Artificial Sequence: Synthetic oligonucleotide
agggauuaaaaucuuccuu

SEQ ID NO: 3062716 - RNA, 19 nt, Artificial Sequence
  Description of Artificial Sequence: Synthetic oligonucleotide
agaggaggcuuauccagag

SEQ ID NO: 3062717 - RNA, 19 nt, Artificial Sequence
  Description of Artificial Sequence: Synthetic oligonucleotide
uuggugacugggaaugggu

SEQ ID NO: 3062718 - RNA, 19 nt, Artificial Sequence
  Description of Artificial Sequence: Synthetic oligonucleotide
accuuucuugaagaggagg

SEQ ID NO: 3062719 - RNA, 19 nt, Artificial Sequence
  Description of Artificial Sequence: Synthetic oligonucleotide
ggauuaaaaucuuccuuug

SEQ ID NO: 3062720 - RNA, 19 nt, Artificial Sequence
  Description of Artificial Sequence: Synthetic oligonucleotide
aaugaggcuggaaccuuuc

SEQ ID NO: 3062721 - RNA, 19 nt, Artificial Sequence
  Description of Artificial Sequence: Synthetic oligonucleotide
gagaucuggaaugccgggg

SEQ ID NO: 3062722 - RNA, 19 nt, Artificial Sequence
  Description of Artificial Sequence: Synthetic oligonucleotide
uugucucagggauuaaaau

SEQ ID NO: 3062723 - RNA, 19 nt, Artificial Sequence
  Description of Artificial Sequence: Synthetic oligonucleotide
ccuuucuugaagaggaggc

SEQ ID NO: 3062724 - RNA, 19 nt, Artificial Sequence
  Description of Artificial Sequence: Synthetic oligonucleotide
uauccagagggcugggaga

SEQ ID NO: 3062725 - RNA, 19 nt, Artificial Sequence
  Description of Artificial Sequence: Synthetic oligonucleotide
caugagauaguaguuaaaa

SEQ ID NO: 3062726 - RNA, 19 nt, Artificial Sequence
  Description of Artificial Sequence: Synthetic oligonucleotide
ugcauacacucucauggau

SEQ ID NO: 3062727 - RNA, 19 nt, Artificial Sequence
  Description of Artificial Sequence: Synthetic oligonucleotide
aaaucggcauccccuuggu

SEQ ID NO: 3062728 - RNA, 19 nt, Artificial Sequence
  Description of Artificial Sequence: Synthetic oligonucleotide
uucuugaagaggaggcuua

SEQ ID NO: 3062729 - RNA, 19 nt, Artificial Sequence
  Description of Artificial Sequence: Synthetic oligonucleotide
ggaaccuuucuugaagagg

SEQ ID NO: 3062730 - RNA, 19 nt, Artificial Sequence
  Description of Artificial Sequence: Synthetic oligonucleotide
caggaggcugcauacacuc

SEQ ID NO: 3062731 - RNA, 19 nt, Artificial Sequence
  Description of Artificial Sequence: Synthetic oligonucleotide
uacacucucauggaucuuc

SEQ ID NO: 3062732 - RNA, 19 nt, Artificial Sequence
  Description of Artificial Sequence: Synthetic oligonucleotide
guuuccagguggaaaucgg

SEQ ID NO: 3062733 - RNA, 19 nt, Artificial Sequence
  Description of Artificial Sequence: Synthetic oligonucleotide
acguagacugagaaugagg

SEQ ID NO: 3062734 - RNA, 19 nt, Artificial Sequence
  Description of Artificial Sequence: Synthetic oligonucleotide
uuggucuugaacagauaua

SEQ ID NO: 3062735 - RNA, 19 nt, Artificial Sequence
  Description of Artificial Sequence: Synthetic oligonucleotide
gaugucaggaggcugcaua

SEQ ID NO: 3062736 - RNA, 19 nt, Artificial Sequence
  Description of Artificial Sequence: Synthetic oligonucleotide
aauggaguuuccaggugga

SEQ ID NO: 3062737 - RNA, 19 nt, Artificial Sequence
  Description of Artificial Sequence: Synthetic oligonucleotide
ugcugugggaaugucuuca

SEQ ID NO: 3062738 - RNA, 19 nt, Artificial Sequence
  Description of Artificial Sequence: Synthetic oligonucleotide
cuugaaucuaaaggugaug

SEQ ID NO: 3062739 - RNA, 19 nt, Artificial Sequence
  Description of Artificial Sequence: Synthetic oligonucleotide
auaucucuguccaugcugu

SEQ ID NO: 3062740 - RNA, 19 nt, Artificial Sequence
  Description of Artificial Sequence: Synthetic oligonucleotide
cagauauaauuugucucag

SEQ ID NO: 3062741 - RNA, 19 nt, Artificial Sequence
  Description of Artificial Sequence: Synthetic oligonucleotide
gcuggaaccuuucuugaag

SEQ ID NO: 3062742 - RNA, 19 nt, Artificial Sequence
  Description of Artificial Sequence: Synthetic oligonucleotide
uucauugggcagcuugguc

SEQ ID NO: 3062743 - RNA, 19 nt, Artificial Sequence
  Description of Artificial Sequence: Synthetic oligonucleotide
gaucuucucccacguagac

SEQ ID NO: 3062744 - RNA, 19 nt, Artificial Sequence
  Description of Artificial Sequence: Synthetic oligonucleotide
cugugggaugucaggaggc

SEQ ID NO: 3062745 - RNA, 19 nt, Artificial Sequence
  Description of Artificial Sequence: Synthetic oligonucleotide
uuccaugagauaguaguua

SEQ ID NO: 3062746 - RNA, 19 nt, Artificial Sequence
  Description of Artificial Sequence: Synthetic oligonucleotide
ugaggcuggaaccuuucuu

SEQ ID NO: 3062747 - RNA, 19 nt, Artificial Sequence
  Description of Artificial Sequence: Synthetic oligonucleotide
uuucuugaagaggaggcuu

SEQ ID NO: 3062748 - RNA, 19 nt, Artificial Sequence
  Description of Artificial Sequence: Synthetic oligonucleotide
ggaaugucuucauugggca

SEQ ID NO: 3062749 - RNA, 19 nt, Artificial Sequence
  Description of Artificial Sequence: Synthetic oligonucleotide
auccuugaaucuaaaggug

SEQ ID NO: 3062750 - RNA, 19 nt, Artificial Sequence
  Description of Artificial Sequence: Synthetic oligonucleotide
gucaggaggcugcauacac

SEQ ID NO: 3062751 - RNA, 19 nt, Artificial Sequence
  Description of Artificial Sequence: Synthetic oligonucleotide
cuuggugacugggaauggg

SEQ ID NO: 3062752 - RNA, 19 nt, Artificial Sequence
  Description of Artificial Sequence: Synthetic oligonucleotide
gucucagggauuaaaaucu

SEQ ID NO: 3062753 - RNA, 19 nt, Artificial Sequence
  Description of Artificial Sequence: Synthetic oligonucleotide
cucagggauuaaaaucuuc

SEQ ID NO: 3062754 - RNA, 19 nt, Artificial Sequence
  Description of Artificial Sequence: Synthetic oligonucleotide
aaucggcauccccuuggug

SEQ ID NO: 3062755 - RNA, 19 nt, Artificial Sequence
  Description of Artificial Sequence: Synthetic oligonucleotide
aagaggaggcuuauccaga

SEQ ID NO: 3062756 - RNA, 19 nt, Artificial Sequence
  Description of Artificial Sequence: Synthetic oligonucleotide
cccacguagacugagaaug

SEQ ID NO: 3062757 - RNA, 19 nt, Artificial Sequence
  Description of Artificial Sequence: Synthetic oligonucleotide
uggaguuuccagguggaaa

SEQ ID NO: 3062758 - RNA, 19 nt, Artificial Sequence
  Description of Artificial Sequence: Synthetic oligonucleotide
gggaaugucuucauugggc

SEQ ID NO: 3062759 - RNA, 19 nt, Artificial Sequence
  Description of Artificial Sequence: Synthetic oligonucleotide
ucuaaaggugaugguggcu

SEQ ID NO: 3062760 - RNA, 19 nt, Artificial Sequence
  Description of Artificial Sequence: Synthetic oligonucleotide
uguccaugcugugggaaug

SEQ ID NO: 3062761 - RNA, 19 nt, Artificial Sequence
  Description of Artificial Sequence: Synthetic oligonucleotide
ucuuccuuugggugggcuc

SEQ ID NO: 3062762 - RNA, 19 nt, Artificial Sequence
  Description of Artificial Sequence: Synthetic oligonucleotide
cagguggaaaucggcaucc

SEQ ID NO: 3062763 - RNA, 19 nt, Artificial Sequence
  Description of Artificial Sequence: Synthetic oligonucleotide
cauacacucucauggaucu

SEQ ID NO: 3062764 - RNA, 19 nt, Artificial Sequence
  Description of Artificial Sequence: Synthetic oligonucleotide
cuuggucuugaacagauau

SEQ ID NO: 3062765 - RNA, 19 nt, Artificial Sequence
  Description of Artificial Sequence: Synthetic oligonucleotide
cuggaaccuuucuugaaga

SEQ ID NO: 3062766 - RNA, 19 nt, Artificial Sequence
  Description of Artificial Sequence: Synthetic oligonucleotide
uucggacauccuugaaucu

SEQ ID NO: 3062767 - RNA, 19 nt, Artificial Sequence
  Description of Artificial Sequence: Synthetic oligonucleotide
aaucuuccuuugggugggc

SEQ ID NO: 3062768 - RNA, 19 nt, Artificial Sequence
  Description of Artificial Sequence: Synthetic oligonucleotide
gcagcuuggucuugaacag

SEQ ID NO: 3062769 - RNA, 19 nt, Artificial Sequence
  Description of Artificial Sequence: Synthetic oligonucleotide
agagggcugggagaucugg

SEQ ID NO: 3062770 - RNA, 19 nt, Artificial Sequence
  Description of Artificial Sequence: Synthetic oligonucleotide
auuugucucagggauuaaa

SEQ ID NO: 3062771 - RNA, 19 nt, Artificial Sequence
  Description of Artificial Sequence: Synthetic oligonucleotide
ucucccacguagacugaga

SEQ ID NO: 3062772 - RNA, 19 nt, Artificial Sequence
  Description of Artificial Sequence: Synthetic oligonucleotide
ggcugggagaucuggaaug

SEQ ID NO: 3062773 - RNA, 19 nt, Artificial Sequence
  Description of Artificial Sequence: Synthetic oligonucleotide
ucggcauccccuuggugac

SEQ ID NO: 3062774 - RNA, 19 nt, Artificial Sequence
  Description of Artificial Sequence: Synthetic oligonucleotide
uggaaaucggcauccccuu

SEQ ID NO: 3062775 - RNA, 19 nt, Artificial Sequence
  Description of Artificial Sequence: Synthetic oligonucleotide
ucucagggauuaaaaucuu

SEQ ID NO: 3062776 - RNA, 19 nt, Artificial Sequence
  Description of Artificial Sequence: Synthetic oligonucleotide
uggugacugggaauggguu

SEQ ID NO: 3062777 - RNA, 19 nt, Artificial Sequence
  Description of Artificial Sequence: Synthetic oligonucleotide
uucucccacguagacugag

SEQ ID NO: 3062778 - RNA, 19 nt, Artificial Sequence
  Description of Artificial Sequence: Synthetic oligonucleotide
aaccuuucuugaagaggag

SEQ ID NO: 3062779 - RNA, 19 nt, Artificial Sequence
  Description of Artificial Sequence: Synthetic oligonucleotide
ucggacauccuugaaucua

SEQ ID NO: 3062780 - RNA, 19 nt, Artificial Sequence
  Description of Artificial Sequence: Synthetic oligonucleotide
ugugggaugucaggaggcu

SEQ ID NO: 3062781 - RNA, 19 nt, Artificial Sequence
  Description of Artificial Sequence: Synthetic oligonucleotide
gguggaaaucggcaucccc

SEQ ID NO: 3062782 - RNA, 19 nt, Artificial Sequence
  Description of Artificial Sequence: Synthetic oligonucleotide
cacguagacugagaaugag

SEQ ID NO: 3062783 - RNA, 19 nt, Artificial Sequence
  Description of Artificial Sequence: Synthetic oligonucleotide
aggcuggaaccuuucuuga

SEQ ID NO: 3062784 - RNA, 19 nt, Artificial Sequence
  Description of Artificial Sequence: Synthetic oligonucleotide
uaucucuguccaugcugug

SEQ ID NO: 3062785 - RNA, 19 nt, Artificial Sequence
  Description of Artificial Sequence: Synthetic oligonucleotide
ggcuuauccagagggcugg

SEQ ID NO: 3062786 - RNA, 19 nt, Artificial Sequence
  Description of Artificial Sequence: Synthetic oligonucleotide
gagaaugaggcuggaaccu

SEQ ID NO: 3062787 - RNA, 19 nt, Artificial Sequence
  Description of Artificial Sequence: Synthetic oligonucleotide
agggcugggagaucuggaa

SEQ ID NO: 3062788 - RNA, 19 nt, Artificial Sequence
  Description of Artificial Sequence: Synthetic oligonucleotide
augaggcuggaaccuuucu

SEQ ID NO: 3062789 - RNA, 19 nt, Artificial Sequence
  Description of Artificial Sequence: Synthetic oligonucleotide
ggaggcugcauacacucuc

SEQ ID NO: 3062790 - RNA, 19 nt, Artificial Sequence
  Description of Artificial Sequence: Synthetic oligonucleotide
agcuuggucuugaacagau

SEQ ID NO: 3062791 - RNA, 19 nt, Artificial Sequence
  Description of Artificial Sequence: Synthetic oligonucleotide
agguggaaaucggcauccc

SEQ ID NO: 3062792 - RNA, 19 nt, Artificial Sequence
  Description of Artificial Sequence: Synthetic oligonucleotide
auaauuugucucagggauu

SEQ ID NO: 3062793 - RNA, 19 nt, Artificial Sequence
  Description of Artificial Sequence: Synthetic oligonucleotide
ugucaggaggcugcauaca

SEQ ID NO: 3062794 - RNA, 19 nt, Artificial Sequence
  Description of Artificial Sequence: Synthetic oligonucleotide
aucuucucccacguagacu

SEQ ID NO: 3062795 - RNA, 19 nt, Artificial Sequence
  Description of Artificial Sequence: Synthetic oligonucleotide
cauccccuuggugacuggg

SEQ ID NO: 3062796 - RNA, 19 nt, Artificial Sequence
  Description of Artificial Sequence: Synthetic oligonucleotide
uugggugggcucuguggga

SEQ ID NO: 3062797 - RNA, 19 nt, Artificial Sequence
  Description of Artificial Sequence: Synthetic oligonucleotide
gaggcuuauccagagggcu

SEQ ID NO: 3062798 - RNA, 19 nt, Artificial Sequence
  Description of Artificial Sequence: Synthetic oligonucleotide
caugcugugggaaugucuu

SEQ ID NO: 3062799 - RNA, 19 nt, Artificial Sequence
  Description of Artificial Sequence: Synthetic oligonucleotide
guggaaaucggcauccccu

SEQ ID NO: 3062800 - RNA, 19 nt, Artificial Sequence
  Description of Artificial Sequence: Synthetic oligonucleotide
cagggauuaaaaucuuccu

SEQ ID NO: 3062801 - RNA, 19 nt, Artificial Sequence
  Description of Artificial Sequence: Synthetic oligonucleotide
ggaguuuccagguggaaau

SEQ ID NO: 3062802 - RNA, 19 nt, Artificial Sequence
  Description of Artificial Sequence: Synthetic oligonucleotide
gguguuggaaaauggaguu

SEQ ID NO: 3062803 - RNA, 19 nt, Artificial Sequence
  Description of Artificial Sequence: Synthetic oligonucleotide
augucuucauugggcagcu

SEQ ID NO: 3062804 - RNA, 19 nt, Artificial Sequence
  Description of Artificial Sequence: Synthetic oligonucleotide
aauuugucucagggauuaa

SEQ ID NO: 3062805 - RNA, 19 nt, Artificial Sequence
  Description of Artificial Sequence: Synthetic oligonucleotide
guagacugagaaugaggcu

SEQ ID NO: 3062806 - RNA, 19 nt, Artificial Sequence
  Description of Artificial Sequence: Synthetic oligonucleotide
cuugaagaggaggcuuauc

SEQ ID NO: 3062807 - RNA, 19 nt, Artificial Sequence
  Description of Artificial Sequence: Synthetic oligonucleotide
uugggcagcuuggucuuga

SEQ ID NO: 3062808 - RNA, 19 nt, Artificial Sequence
  Description of Artificial Sequence: Synthetic oligonucleotide
auccagagggcugggagau

SEQ ID NO: 3062809 - RNA, 19 nt, Artificial Sequence
  Description of Artificial Sequence: Synthetic oligonucleotide
gaggcugcauacacucuca

SEQ ID NO: 3062810 - RNA, 19 nt, Artificial Sequence
  Description of Artificial Sequence: Synthetic oligonucleotide
gcauacacucucauggauc

SEQ ID NO: 3062811 - RNA, 19 nt, Artificial Sequence
  Description of Artificial Sequence: Synthetic oligonucleotide
aggcuuauccagagggcug

SEQ ID NO: 3062812 - RNA, 19 nt, Artificial Sequence
  Description of Artificial Sequence: Synthetic oligonucleotide
gaguuuccagguggaaauc

SEQ ID NO: 3062813 - RNA, 19 nt, Artificial Sequence
  Description of Artificial Sequence: Synthetic oligonucleotide
cugggagaucuggaaugcc

SEQ ID NO: 3062814 - RNA, 19 nt, Artificial Sequence
  Description of Artificial Sequence: Synthetic oligonucleotide
ggaaaucggcauccccuug

SEQ ID NO: 3062815 - RNA, 19 nt, Artificial Sequence
  Description of Artificial Sequence: Synthetic oligonucleotide
agaaugaggcuggaaccuu

SEQ ID NO: 3062816 - RNA, 19 nt, Artificial Sequence
  Description of Artificial Sequence: Synthetic oligonucleotide
acugagaaugaggcuggaa

SEQ ID NO: 3062817 - RNA, 19 nt, Artificial Sequence
  Description of Artificial Sequence: Synthetic oligonucleotide
cucccacguagacugagaa

SEQ ID NO: 3062818 - RNA, 19 nt, Artificial Sequence
  Description of Artificial Sequence: Synthetic oligonucleotide
gugggaugucaggaggcug

SEQ ID NO: 3062819 - RNA, 19 nt, Artificial Sequence
  Description of Artificial Sequence: Synthetic oligonucleotide
ugggugggcucugugggau

SEQ ID NO: 3062820 - RNA, 19 nt, Artificial Sequence
  Description of Artificial Sequence: Synthetic oligonucleotide
gcugggagaucuggaaugc

SEQ ID NO: 3062821 - RNA, 19 nt, Artificial Sequence
  Description of Artificial Sequence: Synthetic oligonucleotide
ggaggcuuauccagagggc

SEQ ID NO: 3062822 - RNA, 19 nt, Artificial Sequence
  Description of Artificial Sequence: Synthetic oligonucleotide
cauggaucuucucccacgu

SEQ ID NO: 3062823 - RNA, 19 nt, Artificial Sequence
  Description of Artificial Sequence: Synthetic oligonucleotide
cacucucauggaucuucuc

SEQ ID NO: 3062824 - RNA, 19 nt, Artificial Sequence
  Description of Artificial Sequence: Synthetic oligonucleotide
cuuucuugaagaggaggcu

SEQ ID NO: 3062825 - RNA, 19 nt, Artificial Sequence
  Description of Artificial Sequence: Synthetic oligonucleotide
aggcugcauacacucucau

SEQ ID NO: 3062826 - RNA, 19 nt, Artificial Sequence
  Description of Artificial Sequence: Synthetic oligonucleotide
ggguguuggaaaauggagu

SEQ ID NO: 3062827 - RNA, 19 nt, Artificial Sequence
  Description of Artificial Sequence: Synthetic oligonucleotide
ccagguggaaaucggcauc

SEQ ID NO: 3062828 - RNA, 19 nt, Artificial Sequence
  Description of Artificial Sequence: Synthetic oligonucleotide
aucuuccuuugggugggcu

SEQ ID NO: 3062829 - RNA, 19 nt, Artificial Sequence
  Description of Artificial Sequence: Synthetic oligonucleotide
ggaucuucucccacguaga

SEQ ID NO: 3062830 - RNA, 19 nt, Artificial Sequence
  Description of Artificial Sequence: Synthetic oligonucleotide
uuccuuugggugggcucug

SEQ ID NO: 3062831 - RNA, 19 nt, Artificial Sequence
  Description of Artificial Sequence: Synthetic oligonucleotide
auggaucuucucccacgua

SEQ ID NO: 3062832 - RNA, 19 nt, Artificial Sequence
  Description of Artificial Sequence: Synthetic oligonucleotide
cuuccuuugggugggcucu

SEQ ID NO: 3062833 - RNA, 19 nt, Artificial Sequence
  Description of Artificial Sequence: Synthetic oligonucleotide
ugggcagcuuggucuugaa

SEQ ID NO: 3062834 - RNA, 19 nt, Artificial Sequence
  Description of Artificial Sequence: Synthetic oligonucleotide
cuuauccagagggcuggga

SEQ ID NO: 3062835 - RNA, 19 nt, Artificial Sequence
  Description of Artificial Sequence: Synthetic oligonucleotide
auccccuuggugacuggga

SEQ ID NO: 3062836 - RNA, 19 nt, Artificial Sequence
  Description of Artificial Sequence: Synthetic oligonucleotide
auggaguuuccagguggaa

SEQ ID NO: 3062837 - RNA, 19 nt, Artificial Sequence
  Description of Artificial Sequence: Synthetic oligonucleotide
ggcauccccuuggugacug

SEQ ID NO: 3062838 - RNA, 19 nt, Artificial Sequence
  Description of Artificial Sequence: Synthetic oligonucleotide
guuccaugagauaguaguu

SEQ ID NO: 3062839 - RNA, 19 nt, Artificial Sequence
  Description of Artificial Sequence: Synthetic oligonucleotide
gacugagaaugaggcugga

SEQ ID NO: 3062840 - RNA, 19 nt, Artificial Sequence
  Description of Artificial Sequence: Synthetic oligonucleotide
uccuuugggugggcucugu

SEQ ID NO: 3062841 - RNA, 19 nt, Artificial Sequence
  Description of Artificial Sequence: Synthetic oligonucleotide
cucuguccaugcuguggga

SEQ ID NO: 3062842 - RNA, 19 nt, Artificial Sequence
  Description of Artificial Sequence: Synthetic oligonucleotide
aggaggcugcauacacucu

SEQ ID NO: 3062843 - RNA, 19 nt, Artificial Sequence
  Description of Artificial Sequence: Synthetic oligonucleotide
ggcuggaaccuuucuugaa

SEQ ID NO: 3062844 - RNA, 19 nt, Artificial Sequence
  Description of Artificial Sequence: Synthetic oligonucleotide
ggugacugggaauggguuu

SEQ ID NO: 3062845 - RNA, 19 nt, Artificial Sequence
  Description of Artificial Sequence: Synthetic oligonucleotide
ccuuggugacugggaaugg

SEQ ID NO: 3062846 - RNA, 19 nt, Artificial Sequence
  Description of Artificial Sequence: Synthetic oligonucleotide
gugacugggaauggguuuu

SEQ ID NO: 3062847 - RNA, 19 nt, Artificial Sequence
  Description of Artificial Sequence: Synthetic oligonucleotide
cuucucccacguagacuga

SEQ ID NO: 3062848 - RNA, 19 nt, Artificial Sequence
  Description of Artificial Sequence: Synthetic oligonucleotide
ccacguagacugagaauga

SEQ ID NO: 3062849 - RNA, 19 nt, Artificial Sequence
  Description of Artificial Sequence: Synthetic oligonucleotide
cauugggcagcuuggucuu

SEQ ID NO: 3062850 - RNA, 19 nt, Artificial Sequence
  Description of Artificial Sequence: Synthetic oligonucleotide
cuguccaugcugugggaau

SEQ ID NO: 3062851 - RNA, 19 nt, Artificial Sequence
  Description of Artificial Sequence: Synthetic oligonucleotide
ccaugagauaguaguuaaa

SEQ ID NO: 3062852 - RNA, 19 nt, Artificial Sequence
  Description of Artificial Sequence: Synthetic oligonucleotide
cuucauugggcagcuuggu

SEQ ID NO: 3062853 - RNA, 19 nt, Artificial Sequence
  Description of Artificial Sequence: Synthetic oligonucleotide
cagcuuggucuugaacaga

SEQ ID NO: 3062854 - RNA, 19 nt, Artificial Sequence
  Description of Artificial Sequence: Synthetic oligonucleotide
auacacucucauggaucuu

SEQ ID NO: 3062855 - RNA, 19 nt, Artificial Sequence
  Description of Artificial Sequence: Synthetic oligonucleotide
ccuuugggugggcucugug

SEQ ID NO: 3062856 - RNA, 19 nt, Artificial Sequence
  Description of Artificial Sequence: Synthetic oligonucleotide
uccagagggcugggagauc

SEQ ID NO: 3062857 - RNA, 19 nt, Artificial Sequence
  Description of Artificial Sequence: Synthetic oligonucleotide
gcauccccuuggugacugg

SEQ ID NO: 3062858 - RNA, 19 nt, Artificial Sequence
  Description of Artificial Sequence: Synthetic oligonucleotide
guguuggaaaauggaguuu

SEQ ID NO: 3062859 - RNA, 19 nt, Artificial Sequence
  Description of Artificial Sequence: Synthetic oligonucleotide
cggacauccuugaaucuaa

SEQ ID NO: 3062860 - RNA, 19 nt, Artificial Sequence
  Description of Artificial Sequence: Synthetic oligonucleotide
gggugggcucugugggaug

SEQ ID NO: 3062861 - RNA, 19 nt, Artificial Sequence
  Description of Artificial Sequence: Synthetic oligonucleotide
ugucuucauugggcagcuu

SEQ ID NO: 3062862 - RNA, 19 nt, Artificial Sequence
  Description of Artificial Sequence: Synthetic oligonucleotide
gggaugucaggaggcugca

SEQ ID NO: 3062863 - RNA, 19 nt, Artificial Sequence
  Description of Artificial Sequence: Synthetic oligonucleotide
ggacauccuugaaucuaaa

SEQ ID NO: 3062864 - RNA, 19 nt, Artificial Sequence
  Description of Artificial Sequence: Synthetic oligonucleotide
ggucuugaacagauauaau

SEQ ID NO: 3062865 - RNA, 19 nt, Artificial Sequence
  Description of Artificial Sequence: Synthetic oligonucleotide
gggcugggagaucuggaau

SEQ ID NO: 3062866 - RNA, 19 nt, Artificial Sequence
  Description of Artificial Sequence: Synthetic oligonucleotide
cugugggaaugucuucauu

SEQ ID NO: 3062867 - RNA, 19 nt, Artificial Sequence
  Description of Artificial Sequence: Synthetic oligonucleotide
gcugugggaaugucuucau

SEQ ID NO: 3062868 - RNA, 19 nt, Artificial Sequence
  Description of Artificial Sequence: Synthetic oligonucleotide
ccagagggcugggagaucu

SEQ ID NO: 3062869 - RNA, 19 nt, Artificial Sequence
  Description of Artificial Sequence: Synthetic oligonucleotide
gugggcucugugggauguc

SEQ ID NO: 3062870 - RNA, 19 nt, Artificial Sequence
  Description of Artificial Sequence: Synthetic oligonucleotide
gcuuggucuugaacagaua

SEQ ID NO: 3062871 - RNA, 19 nt, Artificial Sequence
  Description of Artificial Sequence: Synthetic oligonucleotide
ggaugucaggaggcugcau

SEQ ID NO: 3062872 - RNA, 19 nt, Artificial Sequence
  Description of Artificial Sequence: Synthetic oligonucleotide
ccccuuggugacugggaau

SEQ ID NO: 3062873 - RNA, 19 nt, Artificial Sequence
  Description of Artificial Sequence: Synthetic oligonucleotide
cggcauccccuuggugacu

SEQ ID NO: 3062874 - RNA, 19 nt, Artificial Sequence
  Description of Artificial Sequence: Synthetic oligonucleotide
aaaguuuuggucuaauuuc

SEQ ID NO: 3062875 - RNA, 19 nt, Artificial Sequence
  Description of Artificial Sequence: Synthetic oligonucleotide
aaagauuccguuucuuugc

SEQ ID NO: 3062876 - RNA, 19 nt, Artificial Sequence
  Description of Artificial Sequence: Synthetic oligonucleotide
aagaagaaaguuuuggucu

SEQ ID NO: 3062877 - RNA, 19 nt, Artificial Sequence
  Description of Artificial Sequence: Synthetic oligonucleotide
aaaagauuccguuucuuug

SEQ ID NO: 3062878 - RNA, 19 nt, Artificial Sequence
  Description of Artificial Sequence: Synthetic oligonucleotide
uggccuuuuaacuagagcc

SEQ ID NO: 3062879 - RNA, 19 nt, Artificial Sequence
  Description of Artificial Sequence: Synthetic oligonucleotide
aacacggcagaucaaagag

SEQ ID NO: 3062880 - RNA, 19 nt, Artificial Sequence
  Description of Artificial Sequence: Synthetic oligonucleotide
ucuaccaaaacuucaacac

SEQ ID NO: 3062881 - RNA, 19 nt, Artificial Sequence
  Description of Artificial Sequence: Synthetic oligonucleotide
uuuggaacacggcagauca

SEQ ID NO: 3062882 - RNA, 19 nt, Artificial Sequence
  Description of Artificial Sequence: Synthetic oligonucleotide
aacuucaacacuucuucuc

SEQ ID NO: 3062883 - RNA, 19 nt, Artificial Sequence
  Description of Artificial Sequence: Synthetic oligonucleotide
gauuccguuucuuugcucg

SEQ ID NO: 3062884 - RNA, 19 nt, Artificial Sequence
  Description of Artificial Sequence: Synthetic oligonucleotide
agaucaaagagcuggcugg

SEQ ID NO: 3062885 - RNA, 19 nt, Artificial Sequence
  Description of Artificial Sequence: Synthetic oligonucleotide
cuucuucucaagaagaaag

SEQ ID NO: 3062886 - RNA, 19 nt, Artificial Sequence
  Description of Artificial Sequence: Synthetic oligonucleotide
uuaacuagagccauucuuc

SEQ ID NO: 3062887 - RNA, 19 nt, Artificial Sequence
  Description of Artificial Sequence: Synthetic oligonucleotide
agagccauucuucagguuc

SEQ ID NO: 3062888 - RNA, 19 nt, Artificial Sequence
  Description of Artificial Sequence: Synthetic oligonucleotide
uucagcaggacacuggcag

SEQ ID NO: 3062889 - RNA, 19 nt, Artificial Sequence
  Description of Artificial Sequence: Synthetic oligonucleotide
aaaaggaauacucuaccaa

SEQ ID NO: 3062890 - RNA, 19 nt, Artificial Sequence
  Description of Artificial Sequence: Synthetic oligonucleotide
acuagagccauucuucagg

SEQ ID NO: 3062891 - RNA, 19 nt, Artificial Sequence
  Description of Artificial Sequence: Synthetic oligonucleotide
aaaggaauacucuaccaaa

SEQ ID NO: 3062892 - RNA, 19 nt, Artificial Sequence
  Description of Artificial Sequence: Synthetic oligonucleotide
ucugcugccagccaggcug

SEQ ID NO: 3062893 - RNA, 19 nt, Artificial Sequence
  Description of Artificial Sequence: Synthetic oligonucleotide
aauacucuaccaaaacuuc

SEQ ID NO: 3062894 - RNA, 19 nt, Artificial Sequence
  Description of Artificial Sequence: Synthetic oligonucleotide
uuuuggucuaauuucuuug

SEQ ID NO: 3062895 - RNA, 19 nt, Artificial Sequence
  Description of Artificial Sequence: Synthetic oligonucleotide
uuuaacuagagccauucuu

SEQ ID NO: 3062896 - RNA, 19 nt, Artificial Sequence
  Description of Artificial Sequence: Synthetic oligonucleotide
ugaagcgagaugcaaacgu

SEQ ID NO: 3062897 - RNA, 19 nt, Artificial Sequence
  Description of Artificial Sequence: Synthetic oligonucleotide
ucaagaagaaaguuuuggu

SEQ ID NO: 3062898 - RNA, 19 nt, Artificial Sequence
  Description of Artificial Sequence: Synthetic oligonucleotide
aggaauacucuaccaaaac

SEQ ID NO: 3062899 - RNA, 19 nt, Artificial Sequence
  Description of Artificial Sequence: Synthetic oligonucleotide
ugagggugaagcgagaugc

SEQ ID NO: 3062900 - RNA, 19 nt, Artificial Sequence
  Description of Artificial Sequence: Synthetic oligonucleotide
aggacgaccagcccugucc

SEQ ID NO: 3062901 - RNA, 19 nt, Artificial Sequence
  Description of Artificial Sequence: Synthetic oligonucleotide
agguucuugagggugaagc

SEQ ID NO: 3062902 - RNA, 19 nt, Artificial Sequence
  Description of Artificial Sequence: Synthetic oligonucleotide
caagaagaaaguuuugguc

SEQ ID NO: 3062903 - RNA, 19 nt, Artificial Sequence
  Description of Artificial Sequence: Synthetic oligonucleotide
acuggcaggguccacgggc

SEQ ID NO: 3062904 - RNA, 19 nt, Artificial Sequence
  Description of Artificial Sequence: Synthetic oligonucleotide
guucuuucgggacagcagg

SEQ ID NO: 3062905 - RNA, 19 nt, Artificial Sequence
  Description of Artificial Sequence: Synthetic oligonucleotide
cucaagaagaaaguuuugg

SEQ ID NO: 3062906 - RNA, 19 nt, Artificial Sequence
  Description of Artificial Sequence: Synthetic oligonucleotide
uucuugagggugaagcgag

SEQ ID NO: 3062907 - RNA, 19 nt, Artificial Sequence
  Description of Artificial Sequence: Synthetic oligonucleotide
aagcgagaugcaaacgucc

SEQ ID NO: 3062908 - RNA, 19 nt, Artificial Sequence
  Description of Artificial Sequence: Synthetic oligonucleotide
ucaacacuucuucucaaga

SEQ ID NO: 3062909 - RNA, 19 nt, Artificial Sequence
  Description of Artificial Sequence: Synthetic oligonucleotide
gagaguuuggaacacggca

SEQ ID NO: 3062910 - RNA, 19 nt, Artificial Sequence
  Description of Artificial Sequence: Synthetic oligonucleotide
cuuugcgugcuucagcagg

SEQ ID NO: 3062911 - RNA, 19 nt, Artificial Sequence
  Description of Artificial Sequence: Synthetic oligonucleotide
ugugucugcugccagccag

SEQ ID NO: 3062912 - RNA, 19 nt, Artificial Sequence
  Description of Artificial Sequence: Synthetic oligonucleotide
acuucaacacuucuucuca

SEQ ID NO: 3062913 - RNA, 19 nt, Artificial Sequence
  Description of Artificial Sequence: Synthetic oligonucleotide
uaccaaaacuucaacacuu

SEQ ID NO: 3062914 - RNA, 19 nt, Artificial Sequence
  Description of Artificial Sequence: Synthetic oligonucleotide
aacuagagccauucuucag

SEQ ID NO: 3062915 - RNA, 19 nt, Artificial Sequence
  Description of Artificial Sequence: Synthetic oligonucleotide
uucuucucaagaagaaagu

SEQ ID NO: 3062916 - RNA, 19 nt, Artificial Sequence
  Description of Artificial Sequence: Synthetic oligonucleotide
uucaacacuucuucucaag

SEQ ID NO: 3062917 - RNA, 19 nt, Artificial Sequence
  Description of Artificial Sequence: Synthetic oligonucleotide
ucaaagagcuggcugguuc

SEQ ID NO: 3062918 - RNA, 19 nt, Artificial Sequence
  Description of Artificial Sequence: Synthetic oligonucleotide
acucuaccaaaacuucaac

SEQ ID NO: 3062919 - RNA, 19 nt, Artificial Sequence
  Description of Artificial Sequence: Synthetic oligonucleotide
uuucgggacagcaggacga

SEQ ID NO: 3062920 - RNA, 19 nt, Artificial Sequence
  Description of Artificial Sequence: Synthetic oligonucleotide
uacucuaccaaaacuucaa

SEQ ID NO: 3062921 - RNA, 19 nt, Artificial Sequence
  Description of Artificial Sequence: Synthetic oligonucleotide
cauucuucagguucuugag

SEQ ID NO: 3062922 - RNA, 19 nt, Artificial Sequence
  Description of Artificial Sequence: Synthetic oligonucleotide
augcaaacguccccaacgg

SEQ ID NO: 3062923 - RNA, 19 nt, Artificial Sequence
  Description of Artificial Sequence: Synthetic oligonucleotide
gaaaguuuuggucuaauuu

SEQ ID NO: 3062924 - RNA, 19 nt, Artificial Sequence
  Description of Artificial Sequence: Synthetic oligonucleotide
uaacuagagccauucuuca

SEQ ID NO: 3062925 - RNA, 19 nt, Artificial Sequence
  Description of Artificial Sequence: Synthetic oligonucleotide
uccguuucuuugcucggcg

SEQ ID NO: 3062926 - RNA, 19 nt, Artificial Sequence
  Description of Artificial Sequence: Synthetic oligonucleotide
ugcuucagcaggacacugg

SEQ ID NO: 3062927 - RNA, 19 nt, Artificial Sequence
  Description of Artificial Sequence: Synthetic oligonucleotide
aagauuccguuucuuugcu

SEQ ID NO: 3062928 - RNA, 19 nt, Artificial Sequence
  Description of Artificial Sequence: Synthetic oligonucleotide
cuuuuaacuagagccauuc

SEQ ID NO: 3062929 - RNA, 19 nt, Artificial Sequence
  Description of Artificial Sequence: Synthetic oligonucleotide
aaacguccccaacggagag

SEQ ID NO: 3062930 - RNA, 19 nt, Artificial Sequence
  Description of Artificial Sequence: Synthetic oligonucleotide
agaguuuggaacacggcag

SEQ ID NO: 3062931 - RNA, 19 nt, Artificial Sequence
  Description of Artificial Sequence: Synthetic oligonucleotide
uuuuaacuagagccauucu

SEQ ID NO: 3062932 - RNA, 19 nt, Artificial Sequence
  Description of Artificial Sequence: Synthetic oligonucleotide
uuggucuaauuucuuugga

SEQ ID NO: 3062933 - RNA, 19 nt, Artificial Sequence
  Description of Artificial Sequence: Synthetic oligonucleotide
uggucuaauuucuuuggaa

SEQ ID NO: 3062934 - RNA, 19 nt, Artificial Sequence
  Description of Artificial Sequence: Synthetic oligonucleotide
aucugugucugcugccagc

SEQ ID NO: 3062935 - RNA, 19 nt, Artificial Sequence
  Description of Artificial Sequence: Synthetic oligonucleotide
caggcugucggucuuugcg

SEQ ID NO: 3062936 - RNA, 19 nt, Artificial Sequence
  Description of Artificial Sequence: Synthetic oligonucleotide
uuugcgugcuucagcagga

SEQ ID NO: 3062937 - RNA, 19 nt, Artificial Sequence
  Description of Artificial Sequence: Synthetic oligonucleotide
cuuucgggacagcaggacg

SEQ ID NO: 3062938 - RNA, 19 nt, Artificial Sequence
  Description of Artificial Sequence: Synthetic oligonucleotide
aacggagaguuuggaacac

SEQ ID NO: 3062939 - RNA, 19 nt, Artificial Sequence
  Description of Artificial Sequence: Synthetic oligonucleotide
cagaucaaagagcuggcug

SEQ ID NO: 3062940 - RNA, 19 nt, Artificial Sequence
  Description of Artificial Sequence: Synthetic oligonucleotide
accagcccuguccaaacac

SEQ ID NO: 3062941 - RNA, 19 nt, Artificial Sequence
  Description of Artificial Sequence: Synthetic oligonucleotide
agaugcaaacguccccaac

SEQ ID NO: 3062942 - RNA, 19 nt, Artificial Sequence
  Description of Artificial Sequence: Synthetic oligonucleotide
gacagcaggacgaccagcc

SEQ ID NO: 3062943 - RNA, 19 nt, Artificial Sequence
  Description of Artificial Sequence: Synthetic oligonucleotide
agcgagaugcaaacguccc

SEQ ID NO: 3062944 - RNA, 19 nt, Artificial Sequence
  Description of Artificial Sequence: Synthetic oligonucleotide
cucuaccaaaacuucaaca

SEQ ID NO: 3062945 - RNA, 19 nt, Artificial Sequence
  Description of Artificial Sequence: Synthetic oligonucleotide
gaacacggcagaucaaaga

SEQ ID NO: 3062946 - RNA, 19 nt, Artificial Sequence
  Description of Artificial Sequence: Synthetic oligonucleotide
gguucuugagggugaagcg

SEQ ID NO: 3062947 - RNA, 19 nt, Artificial Sequence
  Description of Artificial Sequence: Synthetic oligonucleotide
aaggaauacucuaccaaaa

SEQ ID NO: 3062948 - RNA, 19 nt, Artificial Sequence
  Description of Artificial Sequence: Synthetic oligonucleotide
agaagaaaguuuuggucua

SEQ ID NO: 3062949 - RNA, 19 nt, Artificial Sequence
  Description of Artificial Sequence: Synthetic oligonucleotide
gacacuggcaggguccacg

SEQ ID NO: 3062950 - RNA, 19 nt, Artificial Sequence
  Description of Artificial Sequence: Synthetic oligonucleotide
uugagggugaagcgagaug

SEQ ID NO: 3062951 - RNA, 19 nt, Artificial Sequence
  Description of Artificial Sequence: Synthetic oligonucleotide
auuccguuucuuugcucgg

SEQ ID NO: 3062952 - RNA, 19 nt, Artificial Sequence
  Description of Artificial Sequence: Synthetic oligonucleotide
uuugcucggcguaucugug

SEQ ID NO: 3062953 - RNA, 19 nt, Artificial Sequence
  Description of Artificial Sequence: Synthetic oligonucleotide
ucugugucugcugccagcc

SEQ ID NO: 3062954 - RNA, 19 nt, Artificial Sequence
  Description of Artificial Sequence: Synthetic oligonucleotide
gucuuugcgugcuucagca

SEQ ID NO: 3062955 - RNA, 19 nt, Artificial Sequence
  Description of Artificial Sequence: Synthetic oligonucleotide
gaauacucuaccaaaacuu

SEQ ID NO: 3062956 - RNA, 19 nt, Artificial Sequence
  Description of Artificial Sequence: Synthetic oligonucleotide
uccccaacggagaguuugg

SEQ ID NO: 3062957 - RNA, 19 nt, Artificial Sequence
  Description of Artificial Sequence: Synthetic oligonucleotide
acacggcagaucaaagagc

SEQ ID NO: 3062958 - RNA, 19 nt, Artificial Sequence
  Description of Artificial Sequence: Synthetic oligonucleotide
gucuaauuucuuuggaaaa

SEQ ID NO: 3062959 - RNA, 19 nt, Artificial Sequence
  Description of Artificial Sequence: Synthetic oligonucleotide
ucuucucaagaagaaaguu

SEQ ID NO: 3062960 - RNA, 19 nt, Artificial Sequence
  Description of Artificial Sequence: Synthetic oligonucleotide
ccaacggagaguuuggaac

SEQ ID NO: 3062961 - RNA, 19 nt, Artificial Sequence
  Description of Artificial Sequence: Synthetic oligonucleotide
caggacacuggcagggucc

SEQ ID NO: 3062962 - RNA, 19 nt, Artificial Sequence
  Description of Artificial Sequence: Synthetic oligonucleotide
ggugaagcgagaugcaaac

SEQ ID NO: 3062963 - RNA, 19 nt, Artificial Sequence
  Description of Artificial Sequence: Synthetic oligonucleotide
agaaaguuuuggucuaauu

SEQ ID NO: 3062964 - RNA, 19 nt, Artificial Sequence
  Description of Artificial Sequence: Synthetic oligonucleotide
ggucuaauuucuuuggaaa

SEQ ID NO: 3062965 - RNA, 19 nt, Artificial Sequence
  Description of Artificial Sequence: Synthetic oligonucleotide
uucuuucgggacagcagga

SEQ ID NO: 3062966 - RNA, 19 nt, Artificial Sequence
  Description of Artificial Sequence: Synthetic oligonucleotide
cuggccuuuuaacuagagc

SEQ ID NO: 3062967 - RNA, 19 nt, Artificial Sequence
  Description of Artificial Sequence: Synthetic oligonucleotide
uggaacacggcagaucaaa

SEQ ID NO: 3062968 - RNA, 19 nt, Artificial Sequence
  Description of Artificial Sequence: Synthetic oligonucleotide
accaaaacuucaacacuuc

SEQ ID NO: 3062969 - RNA, 19 nt, Artificial Sequence
  Description of Artificial Sequence: Synthetic oligonucleotide
agauuccguuucuuugcuc

SEQ ID NO: 3062970 - RNA, 19 nt, Artificial Sequence
  Description of Artificial Sequence: Synthetic oligonucleotide
acacuggcaggguccacgg

SEQ ID NO: 3062971 - RNA, 19 nt, Artificial Sequence
  Description of Artificial Sequence: Synthetic oligonucleotide
gaguuuggaacacggcaga

SEQ ID NO: 3062972 - RNA, 19 nt, Artificial Sequence
  Description of Artificial Sequence: Synthetic oligonucleotide
cuucagguucuugagggug

SEQ ID NO: 3062973 - RNA, 19 nt, Artificial Sequence
  Description of Artificial Sequence: Synthetic oligonucleotide
uucuuugcucggcguaucu

SEQ ID NO: 3062974 - RNA, 19 nt, Artificial Sequence
  Description of Artificial Sequence: Synthetic oligonucleotide
acgggcuggccuuuuaacu

SEQ ID NO: 3062975 - RNA, 19 nt, Artificial Sequence
  Description of Artificial Sequence: Synthetic oligonucleotide
gaagcgagaugcaaacguc

SEQ ID NO: 3062976 - RNA, 19 nt, Artificial Sequence
  Description of Artificial Sequence: Synthetic oligonucleotide
caacggagaguuuggaaca

SEQ ID NO: 3062977 - RNA, 19 nt, Artificial Sequence
  Description of Artificial Sequence: Synthetic oligonucleotide
cugccagccaggcugucgg

SEQ ID NO: 3062978 - RNA, 19 nt, Artificial Sequence
  Description of Artificial Sequence: Synthetic oligonucleotide
ucuuugcgugcuucagcag

SEQ ID NO: 3062979 - RNA, 19 nt, Artificial Sequence
  Description of Artificial Sequence: Synthetic oligonucleotide
ugcaaacguccccaacgga

SEQ ID NO: 3062980 - RNA, 19 nt, Artificial Sequence
  Description of Artificial Sequence: Synthetic oligonucleotide
auacucuaccaaaacuuca

SEQ ID NO: 3062981 - RNA, 19 nt, Artificial Sequence
  Description of Artificial Sequence: Synthetic oligonucleotide
aagaaaguuuuggucuaau

SEQ ID NO: 3062982 - RNA, 19 nt, Artificial Sequence
  Description of Artificial Sequence: Synthetic oligonucleotide
ucuucagguucuugagggu

SEQ ID NO: 3062983 - RNA, 19 nt, Artificial Sequence
  Description of Artificial Sequence: Synthetic oligonucleotide
gcaaacguccccaacggag

SEQ ID NO: 3062984 - RNA, 19 nt, Artificial Sequence
  Description of Artificial Sequence: Synthetic oligonucleotide
ugguucuuucgggacagca

SEQ ID NO: 3062985 - RNA, 19 nt, Artificial Sequence
  Description of Artificial Sequence: Synthetic oligonucleotide
ugcucggcguaucuguguc

SEQ ID NO: 3062986 - RNA, 19 nt, Artificial Sequence
  Description of Artificial Sequence: Synthetic oligonucleotide
ugcgugcuucagcaggaca

SEQ ID NO: 3062987 - RNA, 19 nt, Artificial Sequence
  Description of Artificial Sequence: Synthetic oligonucleotide
caacacuucuucucaagaa

SEQ ID NO: 3062988 - RNA, 19 nt, Artificial Sequence
  Description of Artificial Sequence: Synthetic oligonucleotide
caaacguccccaacggaga

SEQ ID NO: 3062989 - RNA, 19 nt, Artificial Sequence
  Description of Artificial Sequence: Synthetic oligonucleotide
ucuugagggugaagcgaga

SEQ ID NO: 3062990 - RNA, 19 nt, Artificial Sequence
  Description of Artificial Sequence: Synthetic oligonucleotide
ggaauacucuaccaaaacu

SEQ ID NO: 3062991 - RNA, 19 nt, Artificial Sequence
  Description of Artificial Sequence: Synthetic oligonucleotide
ucuuugcucggcguaucug

SEQ ID NO: 3062992 - RNA, 19 nt, Artificial Sequence
  Description of Artificial Sequence: Synthetic oligonucleotide
guccccaacggagaguuug

SEQ ID NO: 3062993 - RNA, 19 nt, Artificial Sequence
  Description of Artificial Sequence: Synthetic oligonucleotide
ucuuucgggacagcaggac

SEQ ID NO: 3062994 - RNA, 19 nt, Artificial Sequence
  Description of Artificial Sequence: Synthetic oligonucleotide
gugaagcgagaugcaaacg

SEQ ID NO: 3062995 - RNA, 19 nt, Artificial Sequence
  Description of Artificial Sequence: Synthetic oligonucleotide
aggcugucggucuuugcgu

SEQ ID NO: 3062996 - RNA, 19 nt, Artificial Sequence
  Description of Artificial Sequence: Synthetic oligonucleotide
guucuugagggugaagcga

SEQ ID NO: 3062997 - RNA, 19 nt, Artificial Sequence
  Description of Artificial Sequence: Synthetic oligonucleotide
cacggcagaucaaagagcu

SEQ ID NO: 3062998 - RNA, 19 nt, Artificial Sequence
  Description of Artificial Sequence: Synthetic oligonucleotide
cagcaggacacuggcaggg

SEQ ID NO: 3062999 - RNA, 19 nt, Artificial Sequence
  Description of Artificial Sequence: Synthetic oligonucleotide
cuucucaagaagaaaguuu

SEQ ID NO: 3063000 - RNA, 19 nt, Artificial Sequence
  Description of Artificial Sequence: Synthetic oligonucleotide
ucggucuuugcgugcuuca

SEQ ID NO: 3063001 - RNA, 19 nt, Artificial Sequence
  Description of Artificial Sequence: Synthetic oligonucleotide
uuccguuucuuugcucggc

SEQ ID NO: 3063002 - RNA, 19 nt, Artificial Sequence
  Description of Artificial Sequence: Synthetic oligonucleotide
gguucuuucgggacagcag

SEQ ID NO: 3063003 - RNA, 19 nt, Artificial Sequence
  Description of Artificial Sequence: Synthetic oligonucleotide
cuaccaaaacuucaacacu

SEQ ID NO: 3063004 - RNA, 19 nt, Artificial Sequence
  Description of Artificial Sequence: Synthetic oligonucleotide
gcuggcugguucuuucggg

SEQ ID NO: 3063005 - RNA, 19 nt, Artificial Sequence
  Description of Artificial Sequence: Synthetic oligonucleotide
caaaacuucaacacuucuu

SEQ ID NO: 3063006 - RNA, 19 nt, Artificial Sequence
  Description of Artificial Sequence: Synthetic oligonucleotide
acggagaguuuggaacacg

SEQ ID NO: 3063007 - RNA, 19 nt, Artificial Sequence
  Description of Artificial Sequence: Synthetic oligonucleotide
ggucuuugcgugcuucagc

SEQ ID NO: 3063008 - RNA, 19 nt, Artificial Sequence
  Description of Artificial Sequence: Synthetic oligonucleotide
uggcugguucuuucgggac

SEQ ID NO: 3063009 - RNA, 19 nt, Artificial Sequence
  Description of Artificial Sequence: Synthetic oligonucleotide
cacgggcuggccuuuuaac

SEQ ID NO: 3063010 - RNA, 19 nt, Artificial Sequence
  Description of Artificial Sequence: Synthetic oligonucleotide
uugcucggcguaucugugu

SEQ ID NO: 3063011 - RNA, 19 nt, Artificial Sequence
  Description of Artificial Sequence: Synthetic oligonucleotide
guaucugugucugcugcca

SEQ ID NO: 3063012 - RNA, 19 nt, Artificial Sequence
  Description of Artificial Sequence: Synthetic oligonucleotide
cggcagaucaaagagcugg

SEQ ID NO: 3063013 - RNA, 19 nt, Artificial Sequence
  Description of Artificial Sequence: Synthetic oligonucleotide
cuuugcucggcguaucugu

SEQ ID NO: 3063014 - RNA, 19 nt, Artificial Sequence
  Description of Artificial Sequence: Synthetic oligonucleotide
cucggcguaucugugucug

SEQ ID NO: 3063015 - RNA, 19 nt, Artificial Sequence
  Description of Artificial Sequence: Synthetic oligonucleotide
gcguaucugugucugcugc

SEQ ID NO: 3063016 - RNA, 19 nt, Artificial Sequence
  Description of Artificial Sequence: Synthetic oligonucleotide
gaagaaaguuuuggucuaa

SEQ ID NO: 3063017 - RNA, 19 nt, Artificial Sequence
  Description of Artificial Sequence: Synthetic oligonucleotide
uuggaacacggcagaucaa

SEQ ID NO: 3063018 - RNA, 19 nt, Artificial Sequence
  Description of Artificial Sequence: Synthetic oligonucleotide
gggcuggccuuuuaacuag

SEQ ID NO: 3063019 - RNA, 19 nt, Artificial Sequence
  Description of Artificial Sequence: Synthetic oligonucleotide
cuggcugguucuuucggga

SEQ ID NO: 3063020 - RNA, 19 nt, Artificial Sequence
  Description of Artificial Sequence: Synthetic oligonucleotide
agcaggacgaccagcccug

SEQ ID NO: 3063021 - RNA, 19 nt, Artificial Sequence
  Description of Artificial Sequence: Synthetic oligonucleotide
uuucuuugcucggcguauc

SEQ ID NO: 3063022 - RNA, 19 nt, Artificial Sequence
  Description of Artificial Sequence: Synthetic oligonucleotide
cggagaguuuggaacacgg

SEQ ID NO: 3063023 - RNA, 19 nt, Artificial Sequence
  Description of Artificial Sequence: Synthetic oligonucleotide
cuagagccauucuucaggu

SEQ ID NO: 3063024 - RNA, 19 nt, Artificial Sequence
  Description of Artificial Sequence: Synthetic oligonucleotide
ggaacacggcagaucaaag

SEQ ID NO: 3063025 - RNA, 19 nt, Artificial Sequence
  Description of Artificial Sequence: Synthetic oligonucleotide
ugucugcugccagccaggc

SEQ ID NO: 3063026 - RNA, 19 nt, Artificial Sequence
  Description of Artificial Sequence: Synthetic oligonucleotide
aacguccccaacggagagu

SEQ ID NO: 3063027 - RNA, 19 nt, Artificial Sequence
  Description of Artificial Sequence: Synthetic oligonucleotide
cuucaacacuucuucucaa

SEQ ID NO: 3063028 - RNA, 19 nt, Artificial Sequence
  Description of Artificial Sequence: Synthetic oligonucleotide
gcccuguccaaacacaaaa

SEQ ID NO: 3063029 - RNA, 19 nt, Artificial Sequence
  Description of Artificial Sequence: Synthetic oligonucleotide
caaagagcuggcugguucu

SEQ ID NO: 3063030 - RNA, 19 nt, Artificial Sequence
  Description of Artificial Sequence: Synthetic oligonucleotide
ucggcguaucugugucugc

SEQ ID NO: 3063031 - RNA, 19 nt, Artificial Sequence
  Description of Artificial Sequence: Synthetic oligonucleotide
gcugguucuuucgggacag

SEQ ID NO: 3063032 - RNA, 19 nt, Artificial Sequence
  Description of Artificial Sequence: Synthetic oligonucleotide
aaagagcuggcugguucuu

SEQ ID NO: 3063033 - RNA, 19 nt, Artificial Sequence
  Description of Artificial Sequence: Synthetic oligonucleotide
aguuuggaacacggcagau

SEQ ID NO: 3063034 - RNA, 19 nt, Artificial Sequence
  Description of Artificial Sequence: Synthetic oligonucleotide
gagaugcaaacguccccaa

SEQ ID NO: 3063035 - RNA, 19 nt, Artificial Sequence
  Description of Artificial Sequence: Synthetic oligonucleotide
ggagaguuuggaacacggc

SEQ ID NO: 3063036 - RNA, 19 nt, Artificial Sequence
  Description of Artificial Sequence: Synthetic oligonucleotide
uucgggacagcaggacgac

SEQ ID NO: 3063037 - RNA, 19 nt, Artificial Sequence
  Description of Artificial Sequence: Synthetic oligonucleotide
ggccuuuuaacuagagcca

SEQ ID NO: 3063038 - RNA, 19 nt, Artificial Sequence
  Description of Artificial Sequence: Synthetic oligonucleotide
gcgagaugcaaacgucccc

SEQ ID NO: 3063039 - RNA, 19 nt, Artificial Sequence
  Description of Artificial Sequence: Synthetic oligonucleotide
agggugaagcgagaugcaa

SEQ ID NO: 3063040 - RNA, 19 nt, Artificial Sequence
  Description of Artificial Sequence: Synthetic oligonucleotide
aguuuuggucuaauuucuu

SEQ ID NO: 3063041 - RNA, 19 nt, Artificial Sequence
  Description of Artificial Sequence: Synthetic oligonucleotide
aggguccacgggcuggccu

SEQ ID NO: 3063042 - RNA, 19 nt, Artificial Sequence
  Description of Artificial Sequence: Synthetic oligonucleotide
gcgugcuucagcaggacac

SEQ ID NO: 3063043 - RNA, 19 nt, Artificial Sequence
  Description of Artificial Sequence: Synthetic oligonucleotide
acguccccaacggagaguu

SEQ ID NO: 3063044 - RNA, 19 nt, Artificial Sequence
  Description of Artificial Sequence: Synthetic oligonucleotide
ggcagaucaaagagcuggc

SEQ ID NO: 3063045 - RNA, 19 nt, Artificial Sequence
  Description of Artificial Sequence: Synthetic oligonucleotide
cuucagcaggacacuggca

SEQ ID NO: 3063046 - RNA, 19 nt, Artificial Sequence
  Description of Artificial Sequence: Synthetic oligonucleotide
ggcugucggucuuugcgug

SEQ ID NO: 3063047 - RNA, 19 nt, Artificial Sequence
  Description of Artificial Sequence: Synthetic oligonucleotide
gaucaaagagcuggcuggu

SEQ ID NO: 3063048 - RNA, 19 nt, Artificial Sequence
  Description of Artificial Sequence: Synthetic oligonucleotide
aagagcuggcugguucuuu

SEQ ID NO: 3063049 - RNA, 19 nt, Artificial Sequence
  Description of Artificial Sequence: Synthetic oligonucleotide
ggcguaucugugucugcug

SEQ ID NO: 3063050 - RNA, 19 nt, Artificial Sequence
  Description of Artificial Sequence: Synthetic oligonucleotide
gaccagcccuguccaaaca

SEQ ID NO: 3063051 - RNA, 19 nt, Artificial Sequence
  Description of Artificial Sequence: Synthetic oligonucleotide
gugcuucagcaggacacug

SEQ ID NO: 3063052 - RNA, 19 nt, Artificial Sequence
  Description of Artificial Sequence: Synthetic oligonucleotide
ucgggacagcaggacgacc

SEQ ID NO: 3063053 - RNA, 19 nt, Artificial Sequence
  Description of Artificial Sequence: Synthetic oligonucleotide
gagggugaagcgagaugca

SEQ ID NO: 3063054 - RNA, 19 nt, Artificial Sequence
  Description of Artificial Sequence: Synthetic oligonucleotide
cagcccuguccaaacacaa

SEQ ID NO: 3063055 - RNA, 19 nt, Artificial Sequence
  Description of Artificial Sequence: Synthetic oligonucleotide
acgaccagcccuguccaaa

SEQ ID NO: 3063056 - RNA, 19 nt, Artificial Sequence
  Description of Artificial Sequence: Synthetic oligonucleotide
cacuggcaggguccacggg

SEQ ID NO: 3063057 - RNA, 19 nt, Artificial Sequence
  Description of Artificial Sequence: Synthetic oligonucleotide
cguaucugugucugcugcc

SEQ ID NO: 3063058 - RNA, 19 nt, Artificial Sequence
  Description of Artificial Sequence: Synthetic oligonucleotide
ggcugguucuuucgggaca

SEQ ID NO: 3063059 - RNA, 19 nt, Artificial Sequence
  Description of Artificial Sequence: Synthetic oligonucleotide
gcugucggucuuugcgugc

SEQ ID NO: 3063060 - RNA, 19 nt, Artificial Sequence
  Description of Artificial Sequence: Synthetic oligonucleotide
gucggucuuugcgugcuuc

SEQ ID NO: 3063061 - RNA, 19 nt, Artificial Sequence
  Description of Artificial Sequence: Synthetic oligonucleotide
ggacgaccagcccugucca

SEQ ID NO: 3063062 - RNA, 19 nt, Artificial Sequence
  Description of Artificial Sequence: Synthetic oligonucleotide
uugcgugcuucagcaggac

SEQ ID NO: 3063063 - RNA, 19 nt, Artificial Sequence
  Description of Artificial Sequence: Synthetic oligonucleotide
guuucuuugcucggcguau

SEQ ID NO: 3063064 - RNA, 19 nt, Artificial Sequence
  Description of Artificial Sequence: Synthetic oligonucleotide
gcuggccuuuuaacuagag

SEQ ID NO: 3063065 - RNA, 19 nt, Artificial Sequence
  Description of Artificial Sequence: Synthetic oligonucleotide
uccacgggcuggccuuuua

SEQ ID NO: 3063066 - RNA, 19 nt, Artificial Sequence
  Description of Artificial Sequence: Synthetic oligonucleotide
aucaaagagcuggcugguu

SEQ ID NO: 3063067 - RNA, 19 nt, Artificial Sequence
  Description of Artificial Sequence: Synthetic oligonucleotide
agcaggacacuggcagggu

SEQ ID NO: 3063068 - RNA, 19 nt, Artificial Sequence
  Description of Artificial Sequence: Synthetic oligonucleotide
cagcaggacgaccagcccu

SEQ ID NO: 3063069 - RNA, 19 nt, Artificial Sequence
  Description of Artificial Sequence: Synthetic oligonucleotide
gcaggacacuggcaggguc

SEQ ID NO: 3063070 - RNA, 19 nt, Artificial Sequence
  Description of Artificial Sequence: Synthetic oligonucleotide
ugucggucuuugcgugcuu

SEQ ID NO: 3063071 - RNA, 19 nt, Artificial Sequence
  Description of Artificial Sequence: Synthetic oligonucleotide
gggugaagcgagaugcaaa

SEQ ID NO: 3063072 - RNA, 19 nt, Artificial Sequence
  Description of Artificial Sequence: Synthetic oligonucleotide
ugccagccaggcugucggu

SEQ ID NO: 3063073 - RNA, 19 nt, Artificial Sequence
  Description of Artificial Sequence: Synthetic oligonucleotide
cuugagggugaagcgagau

SEQ ID NO: 3063074 - RNA, 19 nt, Artificial Sequence
  Description of Artificial Sequence: Synthetic oligonucleotide
cugguucuuucgggacagc

SEQ ID NO: 3063075 - RNA, 19 nt, Artificial Sequence
  Description of Artificial Sequence: Synthetic oligonucleotide
gacgaccagcccuguccaa

SEQ ID NO: 3063076 - RNA, 19 nt, Artificial Sequence
  Description of Artificial Sequence: Synthetic oligonucleotide
agcccuguccaaacacaaa

SEQ ID NO: 3063077 - RNA, 19 nt, Artificial Sequence
  Description of Artificial Sequence: Synthetic oligonucleotide
cuggcaggguccacgggcu

SEQ ID NO: 3063078 - RNA, 19 nt, Artificial Sequence
  Description of Artificial Sequence: Synthetic oligonucleotide
ccaaaacuucaacacuucu

SEQ ID NO: 3063079 - RNA, 19 nt, Artificial Sequence
  Description of Artificial Sequence: Synthetic oligonucleotide
ccagcccuguccaaacaca

SEQ ID NO: 3063080 - RNA, 19 nt, Artificial Sequence
  Description of Artificial Sequence: Synthetic oligonucleotide
caggacgaccagcccuguc

SEQ ID NO: 3063081 - RNA, 19 nt, Artificial Sequence
  Description of Artificial Sequence: Synthetic oligonucleotide
cgggacagcaggacgacca

SEQ ID NO: 3063082 - RNA, 19 nt, Artificial Sequence
  Description of Artificial Sequence: Synthetic oligonucleotide
cugugucugcugccagcca

SEQ ID NO: 3063083 - RNA, 19 nt, Artificial Sequence
  Description of Artificial Sequence: Synthetic oligonucleotide
cccaacggagaguuuggaa

SEQ ID NO: 3063084 - RNA, 19 nt, Artificial Sequence
  Description of Artificial Sequence: Synthetic oligonucleotide
ccaggcugucggucuuugc

SEQ ID NO: 3063085 - RNA, 19 nt, Artificial Sequence
  Description of Artificial Sequence: Synthetic oligonucleotide
cgaccagcccuguccaaac

SEQ ID NO: 3063086 - RNA, 19 nt, Artificial Sequence
  Description of Artificial Sequence: Synthetic oligonucleotide
gccuuuuaacuagagccau

SEQ ID NO: 3063087 - RNA, 19 nt, Artificial Sequence
  Description of Artificial Sequence: Synthetic oligonucleotide
cugucggucuuugcgugcu

SEQ ID NO: 3063088 - RNA, 19 nt, Artificial Sequence
  Description of Artificial Sequence: Synthetic oligonucleotide
gcagaucaaagagcuggcu

SEQ ID NO: 3063089 - RNA, 19 nt, Artificial Sequence
  Description of Artificial Sequence: Synthetic oligonucleotide
caggguccacgggcuggcc

SEQ ID NO: 3063090 - RNA, 19 nt, Artificial Sequence
  Description of Artificial Sequence: Synthetic oligonucleotide
gccaggcugucggucuuug

SEQ ID NO: 3063091 - RNA, 19 nt, Artificial Sequence
  Description of Artificial Sequence: Synthetic oligonucleotide
ggcuggccuuuuaacuaga

SEQ ID NO: 3063092 - RNA, 19 nt, Artificial Sequence
  Description of Artificial Sequence: Synthetic oligonucleotide
cgggcuggccuuuuaacua

SEQ ID NO: 3063093 - RNA, 19 nt, Artificial Sequence
  Description of Artificial Sequence: Synthetic oligonucleotide
cguuucuuugcucggcgua

SEQ ID NO: 3063094 - RNA, 19 nt, Artificial Sequence
  Description of Artificial Sequence: Synthetic oligonucleotide
cggucuuugcgugcuucag

SEQ ID NO: 3063095 - RNA, 19 nt, Artificial Sequence
  Description of Artificial Sequence: Synthetic oligonucleotide
gccagccaggcugucgguc

SEQ ID NO: 3063096 - RNA, 19 nt, Artificial Sequence
  Description of Artificial Sequence: Synthetic oligonucleotide
cugcugccagccaggcugu

SEQ ID NO: 3063097 - RNA, 19 nt, Artificial Sequence
  Description of Artificial Sequence: Synthetic oligonucleotide
agccaggcugucggucuuu

SEQ ID NO: 3063098 - RNA, 19 nt, Artificial Sequence
  Description of Artificial Sequence: Synthetic oligonucleotide
ccagccaggcugucggucu

SEQ ID NO: 3063099 - RNA, 19 nt, Artificial Sequence
  Description of Artificial Sequence: Synthetic oligonucleotide
ccuuuuaacuagagccauu

SEQ ID NO: 3063100 - RNA, 19 nt, Artificial Sequence
  Description of Artificial Sequence: Synthetic oligonucleotide
ggguccacgggcuggccuu

SEQ ID NO: 3063101 - RNA, 19 nt, Artificial Sequence
  Description of Artificial Sequence: Synthetic oligonucleotide
ccacgggcuggccuuuuaa

SEQ ID NO: 3063102 - RNA, 19 nt, Artificial Sequence
  Description of Artificial Sequence: Synthetic oligonucleotide
gcucggcguaucugugucu

SEQ ID NO: 3063103 - RNA, 19 nt, Artificial Sequence
  Description of Artificial Sequence: Synthetic oligonucleotide
ggacacuggcaggguccac

SEQ ID NO: 3063104 - RNA, 19 nt, Artificial Sequence
  Description of Artificial Sequence: Synthetic oligonucleotide
ccguuucuuugcucggcgu

SEQ ID NO: 3063105 - RNA, 19 nt, Artificial Sequence
  Description of Artificial Sequence: Synthetic oligonucleotide
ccccaacggagaguuugga

SEQ ID NO: 3063106 - RNA, 19 nt, Artificial Sequence
  Description of Artificial Sequence: Synthetic oligonucleotide
cagccaggcugucggucuu

SEQ ID NO: 3063107 - RNA, 19 nt, Artificial Sequence
  Description of Artificial Sequence: Synthetic oligonucleotide
cggcguaucugugucugcu

SEQ ID NO: 3063108 - RNA, 19 nt, Artificial Sequence
  Description of Artificial Sequence: Synthetic oligonucleotide
gcaggacgaccagcccugu

SEQ ID NO: 3063109 - RNA, 19 nt, Artificial Sequence
  Description of Artificial Sequence: Synthetic oligonucleotide
gguccacgggcuggccuuu

SEQ ID NO: 3063110 - RNA, 19 nt, Artificial Sequence
  Description of Artificial Sequence: Synthetic oligonucleotide
guccacgggcuggccuuuu

SEQ ID NO: 3063111 - RNA, 19 nt, Artificial Sequence
  Description of Artificial Sequence: Synthetic oligonucleotide
aaagugaucagauauaagc

SEQ ID NO: 3063112 - RNA, 19 nt, Artificial Sequence
  Description of Artificial Sequence: Synthetic oligonucleotide
aauguaaacauacauuucc

SEQ ID NO: 3063113 - RNA, 19 nt, Artificial Sequence
  Description of Artificial Sequence: Synthetic oligonucleotide
aauuauagaagucuugugc

SEQ ID NO: 3063114 - RNA, 19 nt, Artificial Sequence
  Description of Artificial Sequence: Synthetic oligonucleotide
uuaaguauaguaauuauag

SEQ ID NO: 3063115 - RNA, 19 nt, Artificial Sequence
  Description of Artificial Sequence: Synthetic oligonucleotide
auuuguauaaaauacagca

SEQ ID NO: 3063116 - RNA, 19 nt, Artificial Sequence
  Description of Artificial Sequence: Synthetic oligonucleotide
uuuuaaaucaacaaauaca

SEQ ID NO: 3063117 - RNA, 19 nt, Artificial Sequence
  Description of Artificial Sequence: Synthetic oligonucleotide
aacaauuuguauaaaauac

SEQ ID NO: 3063118 - RNA, 19 nt, Artificial Sequence
  Description of Artificial Sequence: Synthetic oligonucleotide
aaaaguuauauuaagagug

SEQ ID NO: 3063119 - RNA, 19 nt, Artificial Sequence
  Description of Artificial Sequence: Synthetic oligonucleotide
uuuaaaucaacaaauacaa

SEQ ID NO: 3063120 - RNA, 19 nt, Artificial Sequence
  Description of Artificial Sequence: Synthetic oligonucleotide
auaaaaguuauauuaagag

SEQ ID NO: 3063121 - RNA, 19 nt, Artificial Sequence
  Description of Artificial Sequence: Synthetic oligonucleotide
uauaaaauacagcaaauca

SEQ ID NO: 3063122 - RNA, 19 nt, Artificial Sequence
  Description of Artificial Sequence: Synthetic oligonucleotide
aaucaaauuugcuagagcu

SEQ ID NO: 3063123 - RNA, 19 nt, Artificial Sequence
  Description of Artificial Sequence: Synthetic oligonucleotide
aauaaagacauaucuuuuc

SEQ ID NO: 3063124 - RNA, 19 nt, Artificial Sequence
  Description of Artificial Sequence: Synthetic oligonucleotide
gauuauaaaaguuauauua

SEQ ID NO: 3063125 - RNA, 19 nt, Artificial Sequence
  Description of Artificial Sequence: Synthetic oligonucleotide
uaaaucaacaaauacaaaa

SEQ ID NO: 3063126 - RNA, 19 nt, Artificial Sequence
  Description of Artificial Sequence: Synthetic oligonucleotide
ucaacaaauacaaaaguga

SEQ ID NO: 3063127 - RNA, 19 nt, Artificial Sequence
  Description of Artificial Sequence: Synthetic oligonucleotide
ucagauauaagcaauguaa

SEQ ID NO: 3063128 - RNA, 19 nt, Artificial Sequence
  Description of Artificial Sequence: Synthetic oligonucleotide
aaguauaguaauuauagaa

SEQ ID NO: 3063129 - RNA, 19 nt, Artificial Sequence
  Description of Artificial Sequence: Synthetic oligonucleotide
uuuaaaagauuauaaaagu

SEQ ID NO: 3063130 - RNA, 19 nt, Artificial Sequence
  Description of Artificial Sequence: Synthetic oligonucleotide
aaagacauaucuuuucuug

SEQ ID NO: 3063131 - RNA, 19 nt, Artificial Sequence
  Description of Artificial Sequence: Synthetic oligonucleotide
aaaucaaauuugcuagagc

SEQ ID NO: 3063132 - RNA, 19 nt, Artificial Sequence
  Description of Artificial Sequence: Synthetic oligonucleotide
agagaguuuauuuuaaaag

SEQ ID NO: 3063133 - RNA, 19 nt, Artificial Sequence
  Description of Artificial Sequence: Synthetic oligonucleotide
uaaagcauaauuuaaguau

SEQ ID NO: 3063134 - RNA, 19 nt, Artificial Sequence
  Description of Artificial Sequence: Synthetic oligonucleotide
uuaauugucugcuauaaac

SEQ ID NO: 3063135 - RNA, 19 nt, Artificial Sequence
  Description of Artificial Sequence: Synthetic oligonucleotide
uauauuaagagugauaaaa

SEQ ID NO: 3063136 - RNA, 19 nt, Artificial Sequence
  Description of Artificial Sequence: Synthetic oligonucleotide
ucaaaacucauucuaaaca

SEQ ID NO: 3063137 - RNA, 19 nt, Artificial Sequence
  Description of Artificial Sequence: Synthetic oligonucleotide
uaaaagauuauaaaaguua

SEQ ID NO: 3063138 - RNA, 19 nt, Artificial Sequence
  Description of Artificial Sequence: Synthetic oligonucleotide
agcaaaucaaauuugcuag

SEQ ID NO: 3063139 - RNA, 19 nt, Artificial Sequence
  Description of Artificial Sequence: Synthetic oligonucleotide
acaaauacaaaagugauca

SEQ ID NO: 3063140 - RNA, 19 nt, Artificial Sequence
  Description of Artificial Sequence: Synthetic oligonucleotide
aagauuauaaaaguuauau

SEQ ID NO: 3063141 - RNA, 19 nt, Artificial Sequence
  Description of Artificial Sequence: Synthetic oligonucleotide
ucugcuauaaacugguucc

SEQ ID NO: 3063142 - RNA, 19 nt, Artificial Sequence
  Description of Artificial Sequence: Synthetic oligonucleotide
acauacauuucccaguccc

SEQ ID NO: 3063143 - RNA, 19 nt, Artificial Sequence
  Description of Artificial Sequence: Synthetic oligonucleotide
aaacauacauuucccaguc

SEQ ID NO: 3063144 - RNA, 19 nt, Artificial Sequence
  Description of Artificial Sequence: Synthetic oligonucleotide
ugcuaauaaagacauaucu

SEQ ID NO: 3063145 - RNA, 19 nt, Artificial Sequence
  Description of Artificial Sequence: Synthetic oligonucleotide
uacaaaagugaucagauau

SEQ ID NO: 3063146 - RNA, 19 nt, Artificial Sequence
  Description of Artificial Sequence: Synthetic oligonucleotide
uuguauaaaauacagcaaa

SEQ ID NO: 3063147 - RNA, 19 nt, Artificial Sequence
  Description of Artificial Sequence: Synthetic oligonucleotide
aaucaacaaauacaaaagu

SEQ ID NO: 3063148 - RNA, 19 nt, Artificial Sequence
  Description of Artificial Sequence: Synthetic oligonucleotide
aauugucugcuauaaacug

SEQ ID NO: 3063149 - RNA, 19 nt, Artificial Sequence
  Description of Artificial Sequence: Synthetic oligonucleotide
caauuuguauaaaauacag

SEQ ID NO: 3063150 - RNA, 19 nt, Artificial Sequence
  Description of Artificial Sequence: Synthetic oligonucleotide
agucuugugcuauauuucc

SEQ ID NO: 3063151 - RNA, 19 nt, Artificial Sequence
  Description of Artificial Sequence: Synthetic oligonucleotide
auaagcaauguaaacauac

SEQ ID NO: 3063152 - RNA, 19 nt, Artificial Sequence
  Description of Artificial Sequence: Synthetic oligonucleotide
aaacaauuuguauaaaaua

SEQ ID NO: 3063153 - RNA, 19 nt, Artificial Sequence
  Description of Artificial Sequence: Synthetic oligonucleotide
agauauaagcaauguaaac

SEQ ID NO: 3063154 - RNA, 19 nt, Artificial Sequence
  Description of Artificial Sequence: Synthetic oligonucleotide
uaaaaguuauauuaagagu

SEQ ID NO: 3063155 - RNA, 19 nt, Artificial Sequence
  Description of Artificial Sequence: Synthetic oligonucleotide
cuuuucuuguguuugacag

SEQ ID NO: 3063156 - RNA, 19 nt, Artificial Sequence
  Description of Artificial Sequence: Synthetic oligonucleotide
uauauuucccuucuaaguc

SEQ ID NO: 3063157 - RNA, 19 nt, Artificial Sequence
  Description of Artificial Sequence: Synthetic oligonucleotide
auaauuuaaguauaguaau

SEQ ID NO: 3063158 - RNA, 19 nt, Artificial Sequence
  Description of Artificial Sequence: Synthetic oligonucleotide
aauuaagagaguuuauuuu

SEQ ID NO: 3063159 - RNA, 19 nt, Artificial Sequence
  Description of Artificial Sequence: Synthetic oligonucleotide
gauauaagcaauguaaaca

SEQ ID NO: 3063160 - RNA, 19 nt, Artificial Sequence
  Description of Artificial Sequence: Synthetic oligonucleotide
uaagucucaaaacucauuc

SEQ ID NO: 3063161 - RNA, 19 nt, Artificial Sequence
  Description of Artificial Sequence: Synthetic oligonucleotide
auuauagaagucuugugcu

SEQ ID NO: 3063162 - RNA, 19 nt, Artificial Sequence
  Description of Artificial Sequence: Synthetic oligonucleotide
gagaguuuauuuuaaaaga

SEQ ID NO: 3063163 - RNA, 19 nt, Artificial Sequence
  Description of Artificial Sequence: Synthetic oligonucleotide
aguauaguaauuauagaag

SEQ ID NO: 3063164 - RNA, 19 nt, Artificial Sequence
  Description of Artificial Sequence: Synthetic oligonucleotide
ucaaauuugcuagagcugc

SEQ ID NO: 3063165 - RNA, 19 nt, Artificial Sequence
  Description of Artificial Sequence: Synthetic oligonucleotide
aaauacaaaagugaucaga

SEQ ID NO: 3063166 - RNA, 19 nt, Artificial Sequence
  Description of Artificial Sequence: Synthetic oligonucleotide
uuuaaguauaguaauuaua

SEQ ID NO: 3063167 - RNA, 19 nt, Artificial Sequence
  Description of Artificial Sequence: Synthetic oligonucleotide
guuuuaaaucaacaaauac

SEQ ID NO: 3063168 - RNA, 19 nt, Artificial Sequence
  Description of Artificial Sequence: Synthetic oligonucleotide
uaauugucugcuauaaacu

SEQ ID NO: 3063169 - RNA, 19 nt, Artificial Sequence
  Description of Artificial Sequence: Synthetic oligonucleotide
auauaagcaauguaaacau

SEQ ID NO: 3063170 - RNA, 19 nt, Artificial Sequence
  Description of Artificial Sequence: Synthetic oligonucleotide
guaaacauacauuucccag

SEQ ID NO: 3063171 - RNA, 19 nt, Artificial Sequence
  Description of Artificial Sequence: Synthetic oligonucleotide
aauacaaaagugaucagau

SEQ ID NO: 3063172 - RNA, 19 nt, Artificial Sequence
  Description of Artificial Sequence: Synthetic oligonucleotide
aaaagauuauaaaaguuau

SEQ ID NO: 3063173 - RNA, 19 nt, Artificial Sequence
  Description of Artificial Sequence: Synthetic oligonucleotide
aauuuaaguauaguaauua

SEQ ID NO: 3063174 - RNA, 19 nt, Artificial Sequence
  Description of Artificial Sequence: Synthetic oligonucleotide
uacagcaaaucaaauuugc

SEQ ID NO: 3063175 - RNA, 19 nt, Artificial Sequence
  Description of Artificial Sequence: Synthetic oligonucleotide
guuauauuaagagugauaa

SEQ ID NO: 3063176 - RNA, 19 nt, Artificial Sequence
  Description of Artificial Sequence: Synthetic oligonucleotide
uuuguauaaaauacagcaa

SEQ ID NO: 3063177 - RNA, 19 nt, Artificial Sequence
  Description of Artificial Sequence: Synthetic oligonucleotide
aagagaguuuauuuuaaaa

SEQ ID NO: 3063178 - RNA, 19 nt, Artificial Sequence
  Description of Artificial Sequence: Synthetic oligonucleotide
auucuaaacaauuuguaua

SEQ ID NO: 3063179 - RNA, 19 nt, Artificial Sequence
  Description of Artificial Sequence: Synthetic oligonucleotide
uucuaagucucaaaacuca

SEQ ID NO: 3063180 - RNA, 19 nt, Artificial Sequence
  Description of Artificial Sequence: Synthetic oligonucleotide
auaaagacauaucuuuucu

SEQ ID NO: 3063181 - RNA, 19 nt, Artificial Sequence
  Description of Artificial Sequence: Synthetic oligonucleotide
uaaacauacauuucccagu

SEQ ID NO: 3063182 - RNA, 19 nt, Artificial Sequence
  Description of Artificial Sequence: Synthetic oligonucleotide
acucauucuaaacaauuug

SEQ ID NO: 3063183 - RNA, 19 nt, Artificial Sequence
  Description of Artificial Sequence: Synthetic oligonucleotide
aacauacauuucccagucc

SEQ ID NO: 3063184 - RNA, 19 nt, Artificial Sequence
  Description of Artificial Sequence: Synthetic oligonucleotide
aagcaauguaaacauacau

SEQ ID NO: 3063185 - RNA, 19 nt, Artificial Sequence
  Description of Artificial Sequence: Synthetic oligonucleotide
aagacauaucuuuucuugu

SEQ ID NO: 3063186 - RNA, 19 nt, Artificial Sequence
  Description of Artificial Sequence: Synthetic oligonucleotide
uguaaacauacauuuccca

SEQ ID NO: 3063187 - RNA, 19 nt, Artificial Sequence
  Description of Artificial Sequence: Synthetic oligonucleotide
ugaucagauauaagcaaug

SEQ ID NO: 3063188 - RNA, 19 nt, Artificial Sequence
  Description of Artificial Sequence: Synthetic oligonucleotide
aacugguuccuuuugaauu

SEQ ID NO: 3063189 - RNA, 19 nt, Artificial Sequence
  Description of Artificial Sequence: Synthetic oligonucleotide
uauaaacugguuccuuuug

SEQ ID NO: 3063190 - RNA, 19 nt, Artificial Sequence
  Description of Artificial Sequence: Synthetic oligonucleotide
uaauuauagaagucuugug

SEQ ID NO: 3063191 - RNA, 19 nt, Artificial Sequence
  Description of Artificial Sequence: Synthetic oligonucleotide
ugugcuauauuucccuucu

SEQ ID NO: 3063192 - RNA, 19 nt, Artificial Sequence
  Description of Artificial Sequence: Synthetic oligonucleotide
aucaacaaauacaaaagug

SEQ ID NO: 3063193 - RNA, 19 nt, Artificial Sequence
  Description of Artificial Sequence: Synthetic oligonucleotide
uaaguauaguaauuauaga

SEQ ID NO: 3063194 - RNA, 19 nt, Artificial Sequence
  Description of Artificial Sequence: Synthetic oligonucleotide
uuaagagaguuuauuuuaa

SEQ ID NO: 3063195 - RNA, 19 nt, Artificial Sequence
  Description of Artificial Sequence: Synthetic oligonucleotide
uaagcaauguaaacauaca

SEQ ID NO: 3063196 - RNA, 19 nt, Artificial Sequence
  Description of Artificial Sequence: Synthetic oligonucleotide
auguaaacauacauuuccc

SEQ ID NO: 3063197 - RNA, 19 nt, Artificial Sequence
  Description of Artificial Sequence: Synthetic oligonucleotide
uuccuuuugaauuauucua

SEQ ID NO: 3063198 - RNA, 19 nt, Artificial Sequence
  Description of Artificial Sequence: Synthetic oligonucleotide
uaauuuaaguauaguaauu

SEQ ID NO: 3063199 - RNA, 19 nt, Artificial Sequence
  Description of Artificial Sequence: Synthetic oligonucleotide
aagugaucagauauaagca

SEQ ID NO: 3063200 - RNA, 19 nt, Artificial Sequence
  Description of Artificial Sequence: Synthetic oligonucleotide
aaaguuauauuaagaguga

SEQ ID NO: 3063201 - RNA, 19 nt, Artificial Sequence
  Description of Artificial Sequence: Synthetic oligonucleotide
auaaagcauaauuuaagua

SEQ ID NO: 3063202 - RNA, 19 nt, Artificial Sequence
  Description of Artificial Sequence: Synthetic oligonucleotide
auuuaaguauaguaauuau

SEQ ID NO: 3063203 - RNA, 19 nt, Artificial Sequence
  Description of Artificial Sequence: Synthetic oligonucleotide
ucauucuaaacaauuugua

SEQ ID NO: 3063204 - RNA, 19 nt, Artificial Sequence
  Description of Artificial Sequence: Synthetic oligonucleotide
uugucugcuauaaacuggu

SEQ ID NO: 3063205 - RNA, 19 nt, Artificial Sequence
  Description of Artificial Sequence: Synthetic oligonucleotide
cucaaaacucauucuaaac

SEQ ID NO: 3063206 - RNA, 19 nt, Artificial Sequence
  Description of Artificial Sequence: Synthetic oligonucleotide
auaaaauacagcaaaucaa

SEQ ID NO: 3063207 - RNA, 19 nt, Artificial Sequence
  Description of Artificial Sequence: Synthetic oligonucleotide
uaauaaagacauaucuuuu

SEQ ID NO: 3063208 - RNA, 19 nt, Artificial Sequence
  Description of Artificial Sequence: Synthetic oligonucleotide
uccuuuugaauuauucuau

SEQ ID NO: 3063209 - RNA, 19 nt, Artificial Sequence
  Description of Artificial Sequence: Synthetic oligonucleotide
acagguuuuaaaucaacaa

SEQ ID NO: 3063210 - RNA, 19 nt, Artificial Sequence
  Description of Artificial Sequence: Synthetic oligonucleotide
aagucuugugcuauauuuc

SEQ ID NO: 3063211 - RNA, 19 nt, Artificial Sequence
  Description of Artificial Sequence: Synthetic oligonucleotide
ucuugugcuauauuucccu

SEQ ID NO: 3063212 - RNA, 19 nt, Artificial Sequence
  Description of Artificial Sequence: Synthetic oligonucleotide
ugcuauauuucccuucuaa

SEQ ID NO: 3063213 - RNA, 19 nt, Artificial Sequence
  Description of Artificial Sequence: Synthetic oligonucleotide
uagagcugcuaauaaagac

SEQ ID NO: 3063214 - RNA, 19 nt, Artificial Sequence
  Description of Artificial Sequence: Synthetic oligonucleotide
agacauaucuuuucuugug

SEQ ID NO: 3063215 - RNA, 19 nt, Artificial Sequence
  Description of Artificial Sequence: Synthetic oligonucleotide
agugaucagauauaagcaa

SEQ ID NO: 3063216 - RNA, 19 nt, Artificial Sequence
  Description of Artificial Sequence: Synthetic oligonucleotide
cuucuaagucucaaaacuc

SEQ ID NO: 3063217 - RNA, 19 nt, Artificial Sequence
  Description of Artificial Sequence: Synthetic oligonucleotide
auaucuuuucuuguguuug

SEQ ID NO: 3063218 - RNA, 19 nt, Artificial Sequence
  Description of Artificial Sequence: Synthetic oligonucleotide
uuucuuguguuugacaguc

SEQ ID NO: 3063219 - RNA, 19 nt, Artificial Sequence
  Description of Artificial Sequence: Synthetic oligonucleotide
uuucccaguccccacauaa

SEQ ID NO: 3063220 - RNA, 19 nt, Artificial Sequence
  Description of Artificial Sequence: Synthetic oligonucleotide
aaagcauaauuuaaguaua

SEQ ID NO: 3063221 - RNA, 19 nt, Artificial Sequence
  Description of Artificial Sequence: Synthetic oligonucleotide
guauaguaauuauagaagu

SEQ ID NO: 3063222 - RNA, 19 nt, Artificial Sequence
  Description of Artificial Sequence: Synthetic oligonucleotide
ucccaguccccacauaaag

SEQ ID NO: 3063223 - RNA, 19 nt, Artificial Sequence
  Description of Artificial Sequence: Synthetic oligonucleotide
aagcauaauuuaaguauag

SEQ ID NO: 3063224 - RNA, 19 nt, Artificial Sequence
  Description of Artificial Sequence: Synthetic oligonucleotide
acaauuuguauaaaauaca

SEQ ID NO: 3063225 - RNA, 19 nt, Artificial Sequence
  Description of Artificial Sequence: Synthetic oligonucleotide
auugucugcuauaaacugg

SEQ ID NO: 3063226 - RNA, 19 nt, Artificial Sequence
  Description of Artificial Sequence: Synthetic oligonucleotide
ucucaaaacucauucuaaa

SEQ ID NO: 3063227 - RNA, 19 nt, Artificial Sequence
  Description of Artificial Sequence: Synthetic oligonucleotide
uguguuugacagucucugg

SEQ ID NO: 3063228 - RNA, 19 nt, Artificial Sequence
  Description of Artificial Sequence: Synthetic oligonucleotide
caaaacucauucuaaacaa

SEQ ID NO: 3063229 - RNA, 19 nt, Artificial Sequence
  Description of Artificial Sequence: Synthetic oligonucleotide
ucuuaauugucugcuauaa

SEQ ID NO: 3063230 - RNA, 19 nt, Artificial Sequence
  Description of Artificial Sequence: Synthetic oligonucleotide
uuguguuugacagucucug

SEQ ID NO: 3063231 - RNA, 19 nt, Artificial Sequence
  Description of Artificial Sequence: Synthetic oligonucleotide
auaaacugguuccuuuuga

SEQ ID NO: 3063232 - RNA, 19 nt, Artificial Sequence
  Description of Artificial Sequence: Synthetic oligonucleotide
aaaagugaucagauauaag

SEQ ID NO: 3063233 - RNA, 19 nt, Artificial Sequence
  Description of Artificial Sequence: Synthetic oligonucleotide
agauuauaaaaguuauauu

SEQ ID NO: 3063234 - RNA, 19 nt, Artificial Sequence
  Description of Artificial Sequence: Synthetic oligonucleotide
acccacagguuuuaaauca

SEQ ID NO: 3063235 - RNA, 19 nt, Artificial Sequence
  Description of Artificial Sequence: Synthetic oligonucleotide
uaguaauuauagaagucuu

SEQ ID NO: 3063236 - RNA, 19 nt, Artificial Sequence
  Description of Artificial Sequence: Synthetic oligonucleotide
cuaauaaagacauaucuuu

SEQ ID NO: 3063237 - RNA, 19 nt, Artificial Sequence
  Description of Artificial Sequence: Synthetic oligonucleotide
caaaucaaauuugcuagag

SEQ ID NO: 3063238 - RNA, 19 nt, Artificial Sequence
  Description of Artificial Sequence: Synthetic oligonucleotide
agucucaaaacucauucua

SEQ ID NO: 3063239 - RNA, 19 nt, Artificial Sequence
  Description of Artificial Sequence: Synthetic oligonucleotide
guauaaaauacagcaaauc

SEQ ID NO: 3063240 - RNA, 19 nt, Artificial Sequence
  Description of Artificial Sequence: Synthetic oligonucleotide
aaacugguuccuuuugaau

SEQ ID NO: 3063241 - RNA, 19 nt, Artificial Sequence
  Description of Artificial Sequence: Synthetic oligonucleotide
agacccacagguuuuaaau

SEQ ID NO: 3063242 - RNA, 19 nt, Artificial Sequence
  Description of Artificial Sequence: Synthetic oligonucleotide
guuugacagucucuggucc

SEQ ID NO: 3063243 - RNA, 19 nt, Artificial Sequence
  Description of Artificial Sequence: Synthetic oligonucleotide
uaaacugguuccuuuugaa

SEQ ID NO: 3063244 - RNA, 19 nt, Artificial Sequence
  Description of Artificial Sequence: Synthetic oligonucleotide
aguaauuauagaagucuug

SEQ ID NO: 3063245 - RNA, 19 nt, Artificial Sequence
  Description of Artificial Sequence: Synthetic oligonucleotide
ucccuucuaagucucaaaa

SEQ ID NO: 3063246 - RNA, 19 nt, Artificial Sequence
  Description of Artificial Sequence: Synthetic oligonucleotide
uuugacagucucugguccc

SEQ ID NO: 3063247 - RNA, 19 nt, Artificial Sequence
  Description of Artificial Sequence: Synthetic oligonucleotide
aaacucauucuaaacaauu

SEQ ID NO: 3063248 - RNA, 19 nt, Artificial Sequence
  Description of Artificial Sequence: Synthetic oligonucleotide
uuauauuaagagugauaaa

SEQ ID NO: 3063249 - RNA, 19 nt, Artificial Sequence
  Description of Artificial Sequence: Synthetic oligonucleotide
agagcugcuaauaaagaca

SEQ ID NO: 3063250 - RNA, 19 nt, Artificial Sequence
  Description of Artificial Sequence: Synthetic oligonucleotide
uguuugacagucucugguc

SEQ ID NO: 3063251 - RNA, 19 nt, Artificial Sequence
  Description of Artificial Sequence: Synthetic oligonucleotide
uaagagaguuuauuuuaaa

SEQ ID NO: 3063252 - RNA, 19 nt, Artificial Sequence
  Description of Artificial Sequence: Synthetic oligonucleotide
uuugcuagagcugcuaaua

SEQ ID NO: 3063253 - RNA, 19 nt, Artificial Sequence
  Description of Artificial Sequence: Synthetic oligonucleotide
uuuucuuguguuugacagu

SEQ ID NO: 3063254 - RNA, 19 nt, Artificial Sequence
  Description of Artificial Sequence: Synthetic oligonucleotide
uauagaagucuugugcuau

SEQ ID NO: 3063255 - RNA, 19 nt, Artificial Sequence
  Description of Artificial Sequence: Synthetic oligonucleotide
uaucuuuucuuguguuuga

SEQ ID NO: 3063256 - RNA, 19 nt, Artificial Sequence
  Description of Artificial Sequence: Synthetic oligonucleotide
cacauaaagcauaauuuaa

SEQ ID NO: 3063257 - RNA, 19 nt, Artificial Sequence
  Description of Artificial Sequence: Synthetic oligonucleotide
cauaaagcauaauuuaagu

SEQ ID NO: 3063258 - RNA, 19 nt, Artificial Sequence
  Description of Artificial Sequence: Synthetic oligonucleotide
gaagucuugugcuauauuu

SEQ ID NO: 3063259 - RNA, 19 nt, Artificial Sequence
  Description of Artificial Sequence: Synthetic oligonucleotide
uaaagacauaucuuuucuu

SEQ ID NO: 3063260 - RNA, 19 nt, Artificial Sequence
  Description of Artificial Sequence: Synthetic oligonucleotide
gcuagagcugcuaauaaag

SEQ ID NO: 3063261 - RNA, 19 nt, Artificial Sequence
  Description of Artificial Sequence: Synthetic oligonucleotide
uauuucccuucuaagucuc

SEQ ID NO: 3063262 - RNA, 19 nt, Artificial Sequence
  Description of Artificial Sequence: Synthetic oligonucleotide
uuauagaagucuugugcua

SEQ ID NO: 3063263 - RNA, 19 nt, Artificial Sequence
  Description of Artificial Sequence: Synthetic oligonucleotide
aaguuauauuaagagugau

SEQ ID NO: 3063264 - RNA, 19 nt, Artificial Sequence
  Description of Artificial Sequence: Synthetic oligonucleotide
gcauaauuuaaguauagua

SEQ ID NO: 3063265 - RNA, 19 nt, Artificial Sequence
  Description of Artificial Sequence: Synthetic oligonucleotide
cagguuuuaaaucaacaaa

SEQ ID NO: 3063266 - RNA, 19 nt, Artificial Sequence
  Description of Artificial Sequence: Synthetic oligonucleotide
aaagauuauaaaaguuaua

SEQ ID NO: 3063267 - RNA, 19 nt, Artificial Sequence
  Description of Artificial Sequence: Synthetic oligonucleotide
caaauacaaaagugaucag

SEQ ID NO: 3063268 - RNA, 19 nt, Artificial Sequence
  Description of Artificial Sequence: Synthetic oligonucleotide
gucugcuauaaacugguuc

SEQ ID NO: 3063269 - RNA, 19 nt, Artificial Sequence
  Description of Artificial Sequence: Synthetic oligonucleotide
aaaacucauucuaaacaau

SEQ ID NO: 3063270 - RNA, 19 nt, Artificial Sequence
  Description of Artificial Sequence: Synthetic oligonucleotide
aucagauauaagcaaugua

SEQ ID NO: 3063271 - RNA, 19 nt, Artificial Sequence
  Description of Artificial Sequence: Synthetic oligonucleotide
guaauuauagaagucuugu

SEQ ID NO: 3063272 - RNA, 19 nt, Artificial Sequence
  Description of Artificial Sequence: Synthetic oligonucleotide
cuauauuucccuucuaagu

SEQ ID NO: 3063273 - RNA, 19 nt, Artificial Sequence
  Description of Artificial Sequence: Synthetic oligonucleotide
cagauauaagcaauguaaa

SEQ ID NO: 3063274 - RNA, 19 nt, Artificial Sequence
  Description of Artificial Sequence: Synthetic oligonucleotide
aacucauucuaaacaauuu

SEQ ID NO: 3063275 - RNA, 19 nt, Artificial Sequence
  Description of Artificial Sequence: Synthetic oligonucleotide
agucucuggucccagcucu

SEQ ID NO: 3063276 - RNA, 19 nt, Artificial Sequence
  Description of Artificial Sequence: Synthetic oligonucleotide
cacagguuuuaaaucaaca

SEQ ID NO: 3063277 - RNA, 19 nt, Artificial Sequence
  Description of Artificial Sequence: Synthetic oligonucleotide
aagacccacagguuuuaaa

SEQ ID NO: 3063278 - RNA, 19 nt, Artificial Sequence
  Description of Artificial Sequence: Synthetic oligonucleotide
ugcuagagcugcuaauaaa

SEQ ID NO: 3063279 - RNA, 19 nt, Artificial Sequence
  Description of Artificial Sequence: Synthetic oligonucleotide
cucauucuaaacaauuugu

SEQ ID NO: 3063280 - RNA, 19 nt, Artificial Sequence
  Description of Artificial Sequence: Synthetic oligonucleotide
agcaauguaaacauacauu

SEQ ID NO: 3063281 - RNA, 19 nt, Artificial Sequence
  Description of Artificial Sequence: Synthetic oligonucleotide
cagcaaaucaaauuugcua

SEQ ID NO: 3063282 - RNA, 19 nt, Artificial Sequence
  Description of Artificial Sequence: Synthetic oligonucleotide
uugcuagagcugcuaauaa

SEQ ID NO: 3063283 - RNA, 19 nt, Artificial Sequence
  Description of Artificial Sequence: Synthetic oligonucleotide
uggucccagcucuuaauug

SEQ ID NO: 3063284 - RNA, 19 nt, Artificial Sequence
  Description of Artificial Sequence: Synthetic oligonucleotide
cugcuaauaaagacauauc

SEQ ID NO: 3063285 - RNA, 19 nt, Artificial Sequence
  Description of Artificial Sequence: Synthetic oligonucleotide
gacccacagguuuuaaauc

SEQ ID NO: 3063286 - RNA, 19 nt, Artificial Sequence
  Description of Artificial Sequence: Synthetic oligonucleotide
uugugcuauauuucccuuc

SEQ ID NO: 3063287 - RNA, 19 nt, Artificial Sequence
  Description of Artificial Sequence: Synthetic oligonucleotide
agcauaauuuaaguauagu

SEQ ID NO: 3063288 - RNA, 19 nt, Artificial Sequence
  Description of Artificial Sequence: Synthetic oligonucleotide
guuccuuuugaauuauucu

SEQ ID NO: 3063289 - RNA, 19 nt, Artificial Sequence
  Description of Artificial Sequence: Synthetic oligonucleotide
acagucucuggucccagcu

SEQ ID NO: 3063290 - RNA, 19 nt, Artificial Sequence
  Description of Artificial Sequence: Synthetic oligonucleotide
auuugcuagagcugcuaau

SEQ ID NO: 3063291 - RNA, 19 nt, Artificial Sequence
  Description of Artificial Sequence: Synthetic oligonucleotide
gacauaucuuuucuugugu

SEQ ID NO: 3063292 - RNA, 19 nt, Artificial Sequence
  Description of Artificial Sequence: Synthetic oligonucleotide
caaaagugaucagauauaa

SEQ ID NO: 3063293 - RNA, 19 nt, Artificial Sequence
  Description of Artificial Sequence: Synthetic oligonucleotide
gcaauguaaacauacauuu

SEQ ID NO: 3063294 - RNA, 19 nt, Artificial Sequence
  Description of Artificial Sequence: Synthetic oligonucleotide
cuagagcugcuaauaaaga

SEQ ID NO: 3063295 - RNA, 19 nt, Artificial Sequence
  Description of Artificial Sequence: Synthetic oligonucleotide
cauucuaaacaauuuguau

SEQ ID NO: 3063296 - RNA, 19 nt, Artificial Sequence
  Description of Artificial Sequence: Synthetic oligonucleotide
aaauuugcuagagcugcua

SEQ ID NO: 3063297 - RNA, 19 nt, Artificial Sequence
  Description of Artificial Sequence: Synthetic oligonucleotide
auacaaaagugaucagaua

SEQ ID NO: 3063298 - RNA, 19 nt, Artificial Sequence
  Description of Artificial Sequence: Synthetic oligonucleotide
aguuauauuaagagugaua

SEQ ID NO: 3063299 - RNA, 19 nt, Artificial Sequence
  Description of Artificial Sequence: Synthetic oligonucleotide
caacaaauacaaaagugau

SEQ ID NO: 3063300 - RNA, 19 nt, Artificial Sequence
  Description of Artificial Sequence: Synthetic oligonucleotide
acagcaaaucaaauuugcu

SEQ ID NO: 3063301 - RNA, 19 nt, Artificial Sequence
  Description of Artificial Sequence: Synthetic oligonucleotide
acauuucccaguccccaca

SEQ ID NO: 3063302 - RNA, 19 nt, Artificial Sequence
  Description of Artificial Sequence: Synthetic oligonucleotide
ucccagcucuuaauugucu

SEQ ID NO: 3063303 - RNA, 19 nt, Artificial Sequence
  Description of Artificial Sequence: Synthetic oligonucleotide
acaaaagugaucagauaua

SEQ ID NO: 3063304 - RNA, 19 nt, Artificial Sequence
  Description of Artificial Sequence: Synthetic oligonucleotide
gaucagauauaagcaaugu

SEQ ID NO: 3063305 - RNA, 19 nt, Artificial Sequence
  Description of Artificial Sequence: Synthetic oligonucleotide
aaaagacccacagguuuua

SEQ ID NO: 3063306 - RNA, 19 nt, Artificial Sequence
  Description of Artificial Sequence: Synthetic oligonucleotide
gguuccuuuugaauuauuc

SEQ ID NO: 3063307 - RNA, 19 nt, Artificial Sequence
  Description of Artificial Sequence: Synthetic oligonucleotide
uuucccuucuaagucucaa

SEQ ID NO: 3063308 - RNA, 19 nt, Artificial Sequence
  Description of Artificial Sequence: Synthetic oligonucleotide
uagaagucuugugcuauau

SEQ ID NO: 3063309 - RNA, 19 nt, Artificial Sequence
  Description of Artificial Sequence: Synthetic oligonucleotide
gucuugugcuauauuuccc

SEQ ID NO: 3063310 - RNA, 19 nt, Artificial Sequence
  Description of Artificial Sequence: Synthetic oligonucleotide
uugacagucucugguccca

SEQ ID NO: 3063311 - RNA, 19 nt, Artificial Sequence
  Description of Artificial Sequence: Synthetic oligonucleotide
cuuaauugucugcuauaaa

SEQ ID NO: 3063312 - RNA, 19 nt, Artificial Sequence
  Description of Artificial Sequence: Synthetic oligonucleotide
guguuugacagucucuggu

SEQ ID NO: 3063313 - RNA, 19 nt, Artificial Sequence
  Description of Artificial Sequence: Synthetic oligonucleotide
auagaagucuugugcuaua

SEQ ID NO: 3063314 - RNA, 19 nt, Artificial Sequence
  Description of Artificial Sequence: Synthetic oligonucleotide
agaagucuugugcuauauu

SEQ ID NO: 3063315 - RNA, 19 nt, Artificial Sequence
  Description of Artificial Sequence: Synthetic oligonucleotide
uucccaguccccacauaaa

SEQ ID NO: 3063316 - RNA, 19 nt, Artificial Sequence
  Description of Artificial Sequence: Synthetic oligonucleotide
gacagucucuggucccagc

SEQ ID NO: 3063317 - RNA, 19 nt, Artificial Sequence
  Description of Artificial Sequence: Synthetic oligonucleotide
gcugcuaauaaagacauau

SEQ ID NO: 3063318 - RNA, 19 nt, Artificial Sequence
  Description of Artificial Sequence: Synthetic oligonucleotide
gucucaaaacucauucuaa

SEQ ID NO: 3063319 - RNA, 19 nt, Artificial Sequence
  Description of Artificial Sequence: Synthetic oligonucleotide
gguuuuaaaucaacaaaua

SEQ ID NO: 3063320 - RNA, 19 nt, Artificial Sequence
  Description of Artificial Sequence: Synthetic oligonucleotide
ccuucuaagucucaaaacu

SEQ ID NO: 3063321 - RNA, 19 nt, Artificial Sequence
  Description of Artificial Sequence: Synthetic oligonucleotide
ccagcucuuaauugucugc

SEQ ID NO: 3063322 - RNA, 19 nt, Artificial Sequence
  Description of Artificial Sequence: Synthetic oligonucleotide
gagcugcuaauaaagacau

SEQ ID NO: 3063323 - RNA, 19 nt, Artificial Sequence
  Description of Artificial Sequence: Synthetic oligonucleotide
ccacauaaagcauaauuua

SEQ ID NO: 3063324 - RNA, 19 nt, Artificial Sequence
  Description of Artificial Sequence: Synthetic oligonucleotide
ccaguccccacauaaagca

SEQ ID NO: 3063325 - RNA, 19 nt, Artificial Sequence
  Description of Artificial Sequence: Synthetic oligonucleotide
ugcuauaaacugguuccuu

SEQ ID NO: 3063326 - RNA, 19 nt, Artificial Sequence
  Description of Artificial Sequence: Synthetic oligonucleotide
cucuuaauugucugcuaua

SEQ ID NO: 3063327 - RNA, 19 nt, Artificial Sequence
  Description of Artificial Sequence: Synthetic oligonucleotide
cccuucuaagucucaaaac

SEQ ID NO: 3063328 - RNA, 19 nt, Artificial Sequence
  Description of Artificial Sequence: Synthetic oligonucleotide
aaagacccacagguuuuaa

SEQ ID NO: 3063329 - RNA, 19 nt, Artificial Sequence
  Description of Artificial Sequence: Synthetic oligonucleotide
cccaguccccacauaaagc

SEQ ID NO: 3063330 - RNA, 19 nt, Artificial Sequence
  Description of Artificial Sequence: Synthetic oligonucleotide
agcucuuaauugucugcua

SEQ ID NO: 3063331 - RNA, 19 nt, Artificial Sequence
  Description of Artificial Sequence: Synthetic oligonucleotide
ugacagucucuggucccag

SEQ ID NO: 3063332 - RNA, 19 nt, Artificial Sequence
  Description of Artificial Sequence: Synthetic oligonucleotide
cuauaaacugguuccuuuu

SEQ ID NO: 3063333 - RNA, 19 nt, Artificial Sequence
  Description of Artificial Sequence: Synthetic oligonucleotide
gugaucagauauaagcaau

SEQ ID NO: 3063334 - RNA, 19 nt, Artificial Sequence
  Description of Artificial Sequence: Synthetic oligonucleotide
ugucugcuauaaacugguu

SEQ ID NO: 3063335 - RNA, 19 nt, Artificial Sequence
  Description of Artificial Sequence: Synthetic oligonucleotide
aguccccacauaaagcaua

SEQ ID NO: 3063336 - RNA, 19 nt, Artificial Sequence
  Description of Artificial Sequence: Synthetic oligonucleotide
ccacagguuuuaaaucaac

SEQ ID NO: 3063337 - RNA, 19 nt, Artificial Sequence
  Description of Artificial Sequence: Synthetic oligonucleotide
gcuaauaaagacauaucuu

SEQ ID NO: 3063338 - RNA, 19 nt, Artificial Sequence
  Description of Artificial Sequence: Synthetic oligonucleotide
cuaagucucaaaacucauu

SEQ ID NO: 3063339 - RNA, 19 nt, Artificial Sequence
  Description of Artificial Sequence: Synthetic oligonucleotide
ggucccagcucuuaauugu

SEQ ID NO: 3063340 - RNA, 19 nt, Artificial Sequence
  Description of Artificial Sequence: Synthetic oligonucleotide
cagucucuggucccagcuc

SEQ ID NO: 3063341 - RNA, 19 nt, Artificial Sequence
  Description of Artificial Sequence: Synthetic oligonucleotide
cccacauaaagcauaauuu

SEQ ID NO: 3063342 - RNA, 19 nt, Artificial Sequence
  Description of Artificial Sequence: Synthetic oligonucleotide
cccagcucuuaauugucug

SEQ ID NO: 3063343 - RNA, 19 nt, Artificial Sequence
  Description of Artificial Sequence: Synthetic oligonucleotide
caaauuugcuagagcugcu

SEQ ID NO: 3063344 - RNA, 19 nt, Artificial Sequence
  Description of Artificial Sequence: Synthetic oligonucleotide
gucccagcucuuaauuguc

SEQ ID NO: 3063345 - RNA, 19 nt, Artificial Sequence
  Description of Artificial Sequence: Synthetic oligonucleotide
gcuauaaacugguuccuuu

SEQ ID NO: 3063346 - RNA, 19 nt, Artificial Sequence
  Description of Artificial Sequence: Synthetic oligonucleotide
auuucccaguccccacaua

SEQ ID NO: 3063347 - RNA, 19 nt, Artificial Sequence
  Description of Artificial Sequence: Synthetic oligonucleotide
auuucccuucuaagucuca

SEQ ID NO: 3063348 - RNA, 19 nt, Artificial Sequence
  Description of Artificial Sequence: Synthetic oligonucleotide
gcucuuaauugucugcuau

SEQ ID NO: 3063349 - RNA, 19 nt, Artificial Sequence
  Description of Artificial Sequence: Synthetic oligonucleotide
guccccacauaaagcauaa

SEQ ID NO: 3063350 - RNA, 19 nt, Artificial Sequence
  Description of Artificial Sequence: Synthetic oligonucleotide
cagcucuuaauugucugcu

SEQ ID NO: 3063351 - RNA, 19 nt, Artificial Sequence
  Description of Artificial Sequence: Synthetic oligonucleotide
cuugugcuauauuucccuu

SEQ ID NO: 3063352 - RNA, 19 nt, Artificial Sequence
  Description of Artificial Sequence: Synthetic oligonucleotide
cucuggucccagcucuuaa

SEQ ID NO: 3063353 - RNA, 19 nt, Artificial Sequence
  Description of Artificial Sequence: Synthetic oligonucleotide
uccccacauaaagcauaau

SEQ ID NO: 3063354 - RNA, 19 nt, Artificial Sequence
  Description of Artificial Sequence: Synthetic oligonucleotide
gugcuauauuucccuucua

SEQ ID NO: 3063355 - RNA, 19 nt, Artificial Sequence
  Description of Artificial Sequence: Synthetic oligonucleotide
cugcuauaaacugguuccu

SEQ ID NO: 3063356 - RNA, 19 nt, Artificial Sequence
  Description of Artificial Sequence: Synthetic oligonucleotide
ccccacauaaagcauaauu

SEQ ID NO: 3063357 - RNA, 19 nt, Artificial Sequence
  Description of Artificial Sequence: Synthetic oligonucleotide
cuggucccagcucuuaauu

SEQ ID NO: 3063358 - RNA, 19 nt, Artificial Sequence
  Description of Artificial Sequence: Synthetic oligonucleotide
cccacagguuuuaaaucaa

SEQ ID NO: 3063359 - RNA, 19 nt, Artificial Sequence
  Description of Artificial Sequence: Synthetic oligonucleotide
agcugcuaauaaagacaua

SEQ ID NO: 3063360 - RNA, 19 nt, Artificial Sequence
  Description of Artificial Sequence: Synthetic oligonucleotide
ccuuuugaauuauucuauu

SEQ ID NO: 3063361 - RNA, 19 nt, Artificial Sequence
  Description of Artificial Sequence: Synthetic oligonucleotide
caguccccacauaaagcau

SEQ ID NO: 3063362 - RNA, 19 nt, Artificial Sequence
  Description of Artificial Sequence: Synthetic oligonucleotide
cugguuccuuuugaauuau

SEQ ID NO: 3063363 - RNA, 19 nt, Artificial Sequence
  Description of Artificial Sequence: Synthetic oligonucleotide
aaaaucuggauauaacucc

SEQ ID NO: 3063364 - RNA, 19 nt, Artificial Sequence
  Description of Artificial Sequence: Synthetic oligonucleotide
gaugucauuguacucaugg

SEQ ID NO: 3063365 - RNA, 19 nt, Artificial Sequence
  Description of Artificial Sequence: Synthetic oligonucleotide
ugcucagucacucaggucu

SEQ ID NO: 3063366 - RNA, 19 nt, Artificial Sequence
  Description of Artificial Sequence: Synthetic oligonucleotide
ggauauaacuccuuggugg

SEQ ID NO: 3063367 - RNA, 19 nt, Artificial Sequence
  Description of Artificial Sequence: Synthetic oligonucleotide
aaugucagaguucaaaguu

SEQ ID NO: 3063368 - RNA, 19 nt, Artificial Sequence
  Description of Artificial Sequence: Synthetic oligonucleotide
agcgauaugguccuccagc

SEQ ID NO: 3063369 - RNA, 19 nt, Artificial Sequence
  Description of Artificial Sequence: Synthetic oligonucleotide
ugaaugucagaguucaaag

SEQ ID NO: 3063370 - RNA, 19 nt, Artificial Sequence
  Description of Artificial Sequence: Synthetic oligonucleotide
uauacgaauguacugucug

SEQ ID NO: 3063371 - RNA, 19 nt, Artificial Sequence
  Description of Artificial Sequence: Synthetic oligonucleotide
aaaucugccagacucucug

SEQ ID NO: 3063372 - RNA, 19 nt, Artificial Sequence
  Description of Artificial Sequence: Synthetic oligonucleotide
ugugccacauccuugaugu

SEQ ID NO: 3063373 - RNA, 19 nt, Artificial Sequence
  Description of Artificial Sequence: Synthetic oligonucleotide
uuuacuaacugggaaaucu

SEQ ID NO: 3063374 - RNA, 19 nt, Artificial Sequence
  Description of Artificial Sequence: Synthetic oligonucleotide
aaacuauacgaauguacug

SEQ ID NO: 3063375 - RNA, 19 nt, Artificial Sequence
  Description of Artificial Sequence: Synthetic oligonucleotide
gacaccucgggucagagcc

SEQ ID NO: 3063376 - RNA, 19 nt, Artificial Sequence
  Description of Artificial Sequence: Synthetic oligonucleotide
ucuggauauaacuccuugg

SEQ ID NO: 3063377 - RNA, 19 nt, Artificial Sequence
  Description of Artificial Sequence: Synthetic oligonucleotide
aacuauacgaauguacugu

SEQ ID NO: 3063378 - RNA, 19 nt, Artificial Sequence
  Description of Artificial Sequence: Synthetic oligonucleotide
aacuccuugguggugacac

SEQ ID NO: 3063379 - RNA, 19 nt, Artificial Sequence
  Description of Artificial Sequence: Synthetic oligonucleotide
uagaccaaaaucuggauau

SEQ ID NO: 3063380 - RNA, 19 nt, Artificial Sequence
  Description of Artificial Sequence: Synthetic oligonucleotide
caaaaucuggauauaacuc

SEQ ID NO: 3063381 - RNA, 19 nt, Artificial Sequence
  Description of Artificial Sequence: Synthetic oligonucleotide
guacucauggaggagagcg

SEQ ID NO: 3063382 - RNA, 19 nt, Artificial Sequence
  Description of Artificial Sequence: Synthetic oligonucleotide
gauaugguccuccagcuca

SEQ ID NO: 3063383 - RNA, 19 nt, Artificial Sequence
  Description of Artificial Sequence: Synthetic oligonucleotide
acuauacgaauguacuguc

SEQ ID NO: 3063384 - RNA, 19 nt, Artificial Sequence
  Description of Artificial Sequence: Synthetic oligonucleotide
ccuucuuuuacuaacuggg

SEQ ID NO: 3063385 - RNA, 19 nt, Artificial Sequence
  Description of Artificial Sequence: Synthetic oligonucleotide
uacuaacugggaaaucucc

SEQ ID NO: 3063386 - RNA, 19 nt, Artificial Sequence
  Description of Artificial Sequence: Synthetic oligonucleotide
auggaggagagcgauaugg

SEQ ID NO: 3063387 - RNA, 19 nt, Artificial Sequence
  Description of Artificial Sequence: Synthetic oligonucleotide
agacucucugcucagucac

SEQ ID NO: 3063388 - RNA, 19 nt, Artificial Sequence
  Description of Artificial Sequence: Synthetic oligonucleotide
gucauuguacucauggagg

SEQ ID NO: 3063389 - RNA, 19 nt, Artificial Sequence
  Description of Artificial Sequence: Synthetic oligonucleotide
uucuuuuacuaacugggaa

SEQ ID NO: 3063390 - RNA, 19 nt, Artificial Sequence
  Description of Artificial Sequence: Synthetic oligonucleotide
ucaggucuagaccaaaauc

SEQ ID NO: 3063391 - RNA, 19 nt, Artificial Sequence
  Description of Artificial Sequence: Synthetic oligonucleotide
uuucccagcagcaucugug

SEQ ID NO: 3063392 - RNA, 19 nt, Artificial Sequence
  Description of Artificial Sequence: Synthetic oligonucleotide
aaucugccagacucucugc

SEQ ID NO: 3063393 - RNA, 19 nt, Artificial Sequence
  Description of Artificial Sequence: Synthetic oligonucleotide
uggauauaacuccuuggug

SEQ ID NO: 3063394 - RNA, 19 nt, Artificial Sequence
  Description of Artificial Sequence: Synthetic oligonucleotide
auacgaauguacugucugg

SEQ ID NO: 3063395 - RNA, 19 nt, Artificial Sequence
  Description of Artificial Sequence: Synthetic oligonucleotide
ucauuguacucauggagga

SEQ ID NO: 3063396 - RNA, 19 nt, Artificial Sequence
  Description of Artificial Sequence: Synthetic oligonucleotide
uacgaauguacugucuggg

SEQ ID NO: 3063397 - RNA, 19 nt, Artificial Sequence
  Description of Artificial Sequence: Synthetic oligonucleotide
uuucauguuccccauccac

SEQ ID NO: 3063398 - RNA, 19 nt, Artificial Sequence
  Description of Artificial Sequence: Synthetic oligonucleotide
uaacugggaaaucuccuug

SEQ ID NO: 3063399 - RNA, 19 nt, Artificial Sequence
  Description of Artificial Sequence: Synthetic oligonucleotide
uccuugaugucauuguacu

SEQ ID NO: 3063400 - RNA, 19 nt, Artificial Sequence
  Description of Artificial Sequence: Synthetic oligonucleotide
gaggagagcgauauggucc

SEQ ID NO: 3063401 - RNA, 19 nt, Artificial Sequence
  Description of Artificial Sequence: Synthetic oligonucleotide
uucauguuccccauccacu

SEQ ID NO: 3063402 - RNA, 19 nt, Artificial Sequence
  Description of Artificial Sequence: Synthetic oligonucleotide
ucucugcucagucacucag

SEQ ID NO: 3063403 - RNA, 19 nt, Artificial Sequence
  Description of Artificial Sequence: Synthetic oligonucleotide
ugucagaguucaaaguuuc

SEQ ID NO: 3063404 - RNA, 19 nt, Artificial Sequence
  Description of Artificial Sequence: Synthetic oligonucleotide
uuccccauccacuuguccc

SEQ ID NO: 3063405 - RNA, 19 nt, Artificial Sequence
  Description of Artificial Sequence: Synthetic oligonucleotide
gucacucaggucuagacca

SEQ ID NO: 3063406 - RNA, 19 nt, Artificial Sequence
  Description of Artificial Sequence: Synthetic oligonucleotide
guucaaaguuuccucacug

SEQ ID NO: 3063407 - RNA, 19 nt, Artificial Sequence
  Description of Artificial Sequence: Synthetic oligonucleotide
uauaacuccuuggugguga

SEQ ID NO: 3063408 - RNA, 19 nt, Artificial Sequence
  Description of Artificial Sequence: Synthetic oligonucleotide
ucagaguucaaaguuuccu

SEQ ID NO: 3063409 - RNA, 19 nt, Artificial Sequence
  Description of Artificial Sequence: Synthetic oligonucleotide
aaaucuggauauaacuccu

SEQ ID NO: 3063410 - RNA, 19 nt, Artificial Sequence
  Description of Artificial Sequence: Synthetic oligonucleotide
guagccuucuuuuacuaac

SEQ ID NO: 3063411 - RNA, 19 nt, Artificial Sequence
  Description of Artificial Sequence: Synthetic oligonucleotide
aacugggaaaucuccuugu

SEQ ID NO: 3063412 - RNA, 19 nt, Artificial Sequence
  Description of Artificial Sequence: Synthetic oligonucleotide
uuguacucauggaggagag

SEQ ID NO: 3063413 - RNA, 19 nt, Artificial Sequence
  Description of Artificial Sequence: Synthetic oligonucleotide
accaaaaucuggauauaac

SEQ ID NO: 3063414 - RNA, 19 nt, Artificial Sequence
  Description of Artificial Sequence: Synthetic oligonucleotide
cuugaugucauuguacuca

SEQ ID NO: 3063415 - RNA, 19 nt, Artificial Sequence
  Description of Artificial Sequence: Synthetic oligonucleotide
ucugcucagucacucaggu

SEQ ID NO: 3063416 - RNA, 19 nt, Artificial Sequence
  Description of Artificial Sequence: Synthetic oligonucleotide
aucuggauauaacuccuug

SEQ ID NO: 3063417 - RNA, 19 nt, Artificial Sequence
  Description of Artificial Sequence: Synthetic oligonucleotide
uuacuaacugggaaaucuc

SEQ ID NO: 3063418 - RNA, 19 nt, Artificial Sequence
  Description of Artificial Sequence: Synthetic oligonucleotide
gaaaucuccuuguccagca

SEQ ID NO: 3063419 - RNA, 19 nt, Artificial Sequence
  Description of Artificial Sequence: Synthetic oligonucleotide
auuguacucauggaggaga

SEQ ID NO: 3063420 - RNA, 19 nt, Artificial Sequence
  Description of Artificial Sequence: Synthetic oligonucleotide
aauguacugucugggucuc

SEQ ID NO: 3063421 - RNA, 19 nt, Artificial Sequence
  Description of Artificial Sequence: Synthetic oligonucleotide
aguucaaaguuuccucacu

SEQ ID NO: 3063422 - RNA, 19 nt, Artificial Sequence
  Description of Artificial Sequence: Synthetic oligonucleotide
acugggaaaucuccuuguc

SEQ ID NO: 3063423 - RNA, 19 nt, Artificial Sequence
  Description of Artificial Sequence: Synthetic oligonucleotide
cagaguucaaaguuuccuc

SEQ ID NO: 3063424 - RNA, 19 nt, Artificial Sequence
  Description of Artificial Sequence: Synthetic oligonucleotide
ucagagccagcuuucccag

SEQ ID NO: 3063425 - RNA, 19 nt, Artificial Sequence
  Description of Artificial Sequence: Synthetic oligonucleotide
agcucacccacacgguagc

SEQ ID NO: 3063426 - RNA, 19 nt, Artificial Sequence
  Description of Artificial Sequence: Synthetic oligonucleotide
uuuucauguuccccaucca

SEQ ID NO: 3063427 - RNA, 19 nt, Artificial Sequence
  Description of Artificial Sequence: Synthetic oligonucleotide
gaguucaaaguuuccucac

SEQ ID NO: 3063428 - RNA, 19 nt, Artificial Sequence
  Description of Artificial Sequence: Synthetic oligonucleotide
gaauguacugucugggucu

SEQ ID NO: 3063429 - RNA, 19 nt, Artificial Sequence
  Description of Artificial Sequence: Synthetic oligonucleotide
cagcaucugugccacaucc

SEQ ID NO: 3063430 - RNA, 19 nt, Artificial Sequence
  Description of Artificial Sequence: Synthetic oligonucleotide
gauauaacuccuugguggu

SEQ ID NO: 3063431 - RNA, 19 nt, Artificial Sequence
  Description of Artificial Sequence: Synthetic oligonucleotide
uacugucugggucucugug

SEQ ID NO: 3063432 - RNA, 19 nt, Artificial Sequence
  Description of Artificial Sequence: Synthetic oligonucleotide
ucuagaccaaaaucuggau

SEQ ID NO: 3063433 - RNA, 19 nt, Artificial Sequence
  Description of Artificial Sequence: Synthetic oligonucleotide
caggucuagaccaaaaucu

SEQ ID NO: 3063434 - RNA, 19 nt, Artificial Sequence
  Description of Artificial Sequence: Synthetic oligonucleotide
uagccuucuuuuacuaacu

SEQ ID NO: 3063435 - RNA, 19 nt, Artificial Sequence
  Description of Artificial Sequence: Synthetic oligonucleotide
ugccacauccuugauguca

SEQ ID NO: 3063436 - RNA, 19 nt, Artificial Sequence
  Description of Artificial Sequence: Synthetic oligonucleotide
auaacuccuugguggugac

SEQ ID NO: 3063437 - RNA, 19 nt, Artificial Sequence
  Description of Artificial Sequence: Synthetic oligonucleotide
ucauggaggagagcgauau

SEQ ID NO: 3063438 - RNA, 19 nt, Artificial Sequence
  Description of Artificial Sequence: Synthetic oligonucleotide
agagccagcuuucccagca

SEQ ID NO: 3063439 - RNA, 19 nt, Artificial Sequence
  Description of Artificial Sequence: Synthetic oligonucleotide
uguacugucugggucucug

SEQ ID NO: 3063440 - RNA, 19 nt, Artificial Sequence
  Description of Artificial Sequence: Synthetic oligonucleotide
uucccagcagcaucugugc

SEQ ID NO: 3063441 - RNA, 19 nt, Artificial Sequence
  Description of Artificial Sequence: Synthetic oligonucleotide
aggagagcgauaugguccu

SEQ ID NO: 3063442 - RNA, 19 nt, Artificial Sequence
  Description of Artificial Sequence: Synthetic oligonucleotide
cagcaugucccguuucucc

SEQ ID NO: 3063443 - RNA, 19 nt, Artificial Sequence
  Description of Artificial Sequence: Synthetic oligonucleotide
uccagcaugucccguuucu

SEQ ID NO: 3063444 - RNA, 19 nt, Artificial Sequence
  Description of Artificial Sequence: Synthetic oligonucleotide
cuugguggugacaccucgg

SEQ ID NO: 3063445 - RNA, 19 nt, Artificial Sequence
  Description of Artificial Sequence: Synthetic oligonucleotide
uggaggagagcgauauggu

SEQ ID NO: 3063446 - RNA, 19 nt, Artificial Sequence
  Description of Artificial Sequence: Synthetic oligonucleotide
gucagagccagcuuuccca

SEQ ID NO: 3063447 - RNA, 19 nt, Artificial Sequence
  Description of Artificial Sequence: Synthetic oligonucleotide
gccuucuuuuacuaacugg

SEQ ID NO: 3063448 - RNA, 19 nt, Artificial Sequence
  Description of Artificial Sequence: Synthetic oligonucleotide
augucauuguacucaugga

SEQ ID NO: 3063449 - RNA, 19 nt, Artificial Sequence
  Description of Artificial Sequence: Synthetic oligonucleotide
ucauguuccccauccacuu

SEQ ID NO: 3063450 - RNA, 19 nt, Artificial Sequence
  Description of Artificial Sequence: Synthetic oligonucleotide
acugucugggucucugugu

SEQ ID NO: 3063451 - RNA, 19 nt, Artificial Sequence
  Description of Artificial Sequence: Synthetic oligonucleotide
cacgguagccuucuuuuac

SEQ ID NO: 3063452 - RNA, 19 nt, Artificial Sequence
  Description of Artificial Sequence: Synthetic oligonucleotide
gucuagaccaaaaucugga

SEQ ID NO: 3063453 - RNA, 19 nt, Artificial Sequence
  Description of Artificial Sequence: Synthetic oligonucleotide
uacucauggaggagagcga

SEQ ID NO: 3063454 - RNA, 19 nt, Artificial Sequence
  Description of Artificial Sequence: Synthetic oligonucleotide
agccuucuuuuacuaacug

SEQ ID NO: 3063455 - RNA, 19 nt, Artificial Sequence
  Description of Artificial Sequence: Synthetic oligonucleotide
cagucacucaggucuagac

SEQ ID NO: 3063456 - RNA, 19 nt, Artificial Sequence
  Description of Artificial Sequence: Synthetic oligonucleotide
acuaacugggaaaucuccu

SEQ ID NO: 3063457 - RNA, 19 nt, Artificial Sequence
  Description of Artificial Sequence: Synthetic oligonucleotide
cuucuuuuacuaacuggga

SEQ ID NO: 3063458 - RNA, 19 nt, Artificial Sequence
  Description of Artificial Sequence: Synthetic oligonucleotide
acgaauguacugucugggu

SEQ ID NO: 3063459 - RNA, 19 nt, Artificial Sequence
  Description of Artificial Sequence: Synthetic oligonucleotide
cucugcucagucacucagg

SEQ ID NO: 3063460 - RNA, 19 nt, Artificial Sequence
  Description of Artificial Sequence: Synthetic oligonucleotide
ggucuagaccaaaaucugg

SEQ ID NO: 3063461 - RNA, 19 nt, Artificial Sequence
  Description of Artificial Sequence: Synthetic oligonucleotide
ucgggucagagccagcuuu

SEQ ID NO: 3063462 - RNA, 19 nt, Artificial Sequence
  Description of Artificial Sequence: Synthetic oligonucleotide
gguggugacaccucggguc

SEQ ID NO: 3063463 - RNA, 19 nt, Artificial Sequence
  Description of Artificial Sequence: Synthetic oligonucleotide
acgguagccuucuuuuacu

SEQ ID NO: 3063464 - RNA, 19 nt, Artificial Sequence
  Description of Artificial Sequence: Synthetic oligonucleotide
aaaaucugccagacucucu

SEQ ID NO: 3063465 - RNA, 19 nt, Artificial Sequence
  Description of Artificial Sequence: Synthetic oligonucleotide
aggucuagaccaaaaucug

SEQ ID NO: 3063466 - RNA, 19 nt, Artificial Sequence
  Description of Artificial Sequence: Synthetic oligonucleotide
cauccacuugucccugugg

SEQ ID NO: 3063467 - RNA, 19 nt, Artificial Sequence
  Description of Artificial Sequence: Synthetic oligonucleotide
caucugugccacauccuug

SEQ ID NO: 3063468 - RNA, 19 nt, Artificial Sequence
  Description of Artificial Sequence: Synthetic oligonucleotide
gagagcgauaugguccucc

SEQ ID NO: 3063469 - RNA, 19 nt, Artificial Sequence
  Description of Artificial Sequence: Synthetic oligonucleotide
uccccauccacuugucccu

SEQ ID NO: 3063470 - RNA, 19 nt, Artificial Sequence
  Description of Artificial Sequence: Synthetic oligonucleotide
agagcgauaugguccucca

SEQ ID NO: 3063471 - RNA, 19 nt, Artificial Sequence
  Description of Artificial Sequence: Synthetic oligonucleotide
uuuuacuaacugggaaauc

SEQ ID NO: 3063472 - RNA, 19 nt, Artificial Sequence
  Description of Artificial Sequence: Synthetic oligonucleotide
aaaucuccuuguccagcau

SEQ ID NO: 3063473 - RNA, 19 nt, Artificial Sequence
  Description of Artificial Sequence: Synthetic oligonucleotide
cuagaccaaaaucuggaua

SEQ ID NO: 3063474 - RNA, 19 nt, Artificial Sequence
  Description of Artificial Sequence: Synthetic oligonucleotide
cuggauauaacuccuuggu

SEQ ID NO: 3063475 - RNA, 19 nt, Artificial Sequence
  Description of Artificial Sequence: Synthetic oligonucleotide
cagcucacccacacgguag

SEQ ID NO: 3063476 - RNA, 19 nt, Artificial Sequence
  Description of Artificial Sequence: Synthetic oligonucleotide
uuucuccuucaguuucuga

SEQ ID NO: 3063477 - RNA, 19 nt, Artificial Sequence
  Description of Artificial Sequence: Synthetic oligonucleotide
ucugccagacucucugcuc

SEQ ID NO: 3063478 - RNA, 19 nt, Artificial Sequence
  Description of Artificial Sequence: Synthetic oligonucleotide
gaccaaaaucuggauauaa

SEQ ID NO: 3063479 - RNA, 19 nt, Artificial Sequence
  Description of Artificial Sequence: Synthetic oligonucleotide
cauuguacucauggaggag

SEQ ID NO: 3063480 - RNA, 19 nt, Artificial Sequence
  Description of Artificial Sequence: Synthetic oligonucleotide
cugaaugucagaguucaaa

SEQ ID NO: 3063481 - RNA, 19 nt, Artificial Sequence
  Description of Artificial Sequence: Synthetic oligonucleotide
cacuugucccugugggccg

SEQ ID NO: 3063482 - RNA, 19 nt, Artificial Sequence
  Description of Artificial Sequence: Synthetic oligonucleotide
ucccagcagcaucugugcc

SEQ ID NO: 3063483 - RNA, 19 nt, Artificial Sequence
  Description of Artificial Sequence: Synthetic oligonucleotide
auaugguccuccagcucac

SEQ ID NO: 3063484 - RNA, 19 nt, Artificial Sequence
  Description of Artificial Sequence: Synthetic oligonucleotide
cugugccacauccuugaug

SEQ ID NO: 3063485 - RNA, 19 nt, Artificial Sequence
  Description of Artificial Sequence: Synthetic oligonucleotide
uguacucauggaggagagc

SEQ ID NO: 3063486 - RNA, 19 nt, Artificial Sequence
  Description of Artificial Sequence: Synthetic oligonucleotide
gagcgauaugguccuccag

SEQ ID NO: 3063487 - RNA, 19 nt, Artificial Sequence
  Description of Artificial Sequence: Synthetic oligonucleotide
ugguggugacaccucgggu

SEQ ID NO: 3063488 - RNA, 19 nt, Artificial Sequence
  Description of Artificial Sequence: Synthetic oligonucleotide
ccaaaaucuggauauaacu

SEQ ID NO: 3063489 - RNA, 19 nt, Artificial Sequence
  Description of Artificial Sequence: Synthetic oligonucleotide
ucacccacacgguagccuu

SEQ ID NO: 3063490 - RNA, 19 nt, Artificial Sequence
  Description of Artificial Sequence: Synthetic oligonucleotide
auauaacuccuugguggug

SEQ ID NO: 3063491 - RNA, 19 nt, Artificial Sequence
  Description of Artificial Sequence: Synthetic oligonucleotide
ucugaaugucagaguucaa

SEQ ID NO: 3063492 - RNA, 19 nt, Artificial Sequence
  Description of Artificial Sequence: Synthetic oligonucleotide
acucauggaggagagcgau

SEQ ID NO: 3063493 - RNA, 19 nt, Artificial Sequence
  Description of Artificial Sequence: Synthetic oligonucleotide
ugacaccucgggucagagc

SEQ ID NO: 3063494 - RNA, 19 nt, Artificial Sequence
  Description of Artificial Sequence: Synthetic oligonucleotide
ucagucacucaggucuaga

SEQ ID NO: 3063495 - RNA, 19 nt, Artificial Sequence
  Description of Artificial Sequence: Synthetic oligonucleotide
ggaaaucuccuuguccagc

SEQ ID NO: 3063496 - RNA, 19 nt, Artificial Sequence
  Description of Artificial Sequence: Synthetic oligonucleotide
gucagaguucaaaguuucc

SEQ ID NO: 3063497 - RNA, 19 nt, Artificial Sequence
  Description of Artificial Sequence: Synthetic oligonucleotide
ucacucaggucuagaccaa

SEQ ID NO: 3063498 - RNA, 19 nt, Artificial Sequence
  Description of Artificial Sequence: Synthetic oligonucleotide
guggugacaccucggguca

SEQ ID NO: 3063499 - RNA, 19 nt, Artificial Sequence
  Description of Artificial Sequence: Synthetic oligonucleotide
guuccccauccacuugucc

SEQ ID NO: 3063500 - RNA, 19 nt, Artificial Sequence
  Description of Artificial Sequence: Synthetic oligonucleotide
agcuuucccagcagcaucu

SEQ ID NO: 3063501 - RNA, 19 nt, Artificial Sequence
  Description of Artificial Sequence: Synthetic oligonucleotide
cauguuccccauccacuug

SEQ ID NO: 3063502 - RNA, 19 nt, Artificial Sequence
  Description of Artificial Sequence: Synthetic oligonucleotide
ugccagacucucugcucag

SEQ ID NO: 3063503 - RNA, 19 nt, Artificial Sequence
  Description of Artificial Sequence: Synthetic oligonucleotide
aaucuggauauaacuccuu

SEQ ID NO: 3063504 - RNA, 19 nt, Artificial Sequence
  Description of Artificial Sequence: Synthetic oligonucleotide
uuguccagcaugucccguu

SEQ ID NO: 3063505 - RNA, 19 nt, Artificial Sequence
  Description of Artificial Sequence: Synthetic oligonucleotide
ggaggagagcgauaugguc

SEQ ID NO: 3063506 - RNA, 19 nt, Artificial Sequence
  Description of Artificial Sequence: Synthetic oligonucleotide
augucagaguucaaaguuu

SEQ ID NO: 3063507 - RNA, 19 nt, Artificial Sequence
  Description of Artificial Sequence: Synthetic oligonucleotide
gggaaaucuccuuguccag

SEQ ID NO: 3063508 - RNA, 19 nt, Artificial Sequence
  Description of Artificial Sequence: Synthetic oligonucleotide
uguccagcaugucccguuu

SEQ ID NO: 3063509 - RNA, 19 nt, Artificial Sequence
  Description of Artificial Sequence: Synthetic oligonucleotide
cugccagacucucugcuca

SEQ ID NO: 3063510 - RNA, 19 nt, Artificial Sequence
  Description of Artificial Sequence: Synthetic oligonucleotide
agcagcaucugugccacau

SEQ ID NO: 3063511 - RNA, 19 nt, Artificial Sequence
  Description of Artificial Sequence: Synthetic oligonucleotide
gagccagcuuucccagcag

SEQ ID NO: 3063512 - RNA, 19 nt, Artificial Sequence
  Description of Artificial Sequence: Synthetic oligonucleotide
ugucccugugggccguaga

SEQ ID NO: 3063513 - RNA, 19 nt, Artificial Sequence
  Description of Artificial Sequence: Synthetic oligonucleotide
cuuuuacuaacugggaaau

SEQ ID NO: 3063514 - RNA, 19 nt, Artificial Sequence
  Description of Artificial Sequence: Synthetic oligonucleotide
uccuugguggugacaccuc

SEQ ID NO: 3063515 - RNA, 19 nt, Artificial Sequence
  Description of Artificial Sequence: Synthetic oligonucleotide
cuauacgaauguacugucu

SEQ ID NO: 3063516 - RNA, 19 nt, Artificial Sequence
  Description of Artificial Sequence: Synthetic oligonucleotide
ccuugguggugacaccucg

SEQ ID NO: 3063517 - RNA, 19 nt, Artificial Sequence
  Description of Artificial Sequence: Synthetic oligonucleotide
ccacuugucccugugggcc

SEQ ID NO: 3063518 - RNA, 19 nt, Artificial Sequence
  Description of Artificial Sequence: Synthetic oligonucleotide
ggucagagccagcuuuccc

SEQ ID NO: 3063519 - RNA, 19 nt, Artificial Sequence
  Description of Artificial Sequence: Synthetic oligonucleotide
cauggaggagagcgauaug

SEQ ID NO: 3063520 - RNA, 19 nt, Artificial Sequence
  Description of Artificial Sequence: Synthetic oligonucleotide
ucugugccacauccuugau

SEQ ID NO: 3063521 - RNA, 19 nt, Artificial Sequence
  Description of Artificial Sequence: Synthetic oligonucleotide
uaugguccuccagcucacc

SEQ ID NO: 3063522 - RNA, 19 nt, Artificial Sequence
  Description of Artificial Sequence: Synthetic oligonucleotide
cgaauguacugucuggguc

SEQ ID NO: 3063523 - RNA, 19 nt, Artificial Sequence
  Description of Artificial Sequence: Synthetic oligonucleotide
gguccuccagcucacccac

SEQ ID NO: 3063524 - RNA, 19 nt, Artificial Sequence
  Description of Artificial Sequence: Synthetic oligonucleotide
cuaacugggaaaucuccuu

SEQ ID NO: 3063525 - RNA, 19 nt, Artificial Sequence
  Description of Artificial Sequence: Synthetic oligonucleotide
acacgguagccuucuuuua

SEQ ID NO: 3063526 - RNA, 19 nt, Artificial Sequence
  Description of Artificial Sequence: Synthetic oligonucleotide
cagagccagcuuucccagc

SEQ ID NO: 3063527 - RNA, 19 nt, Artificial Sequence
  Description of Artificial Sequence: Synthetic oligonucleotide
gugacaccucgggucagag

SEQ ID NO: 3063528 - RNA, 19 nt, Artificial Sequence
  Description of Artificial Sequence: Synthetic oligonucleotide
gguagccuucuuuuacuaa

SEQ ID NO: 3063529 - RNA, 19 nt, Artificial Sequence
  Description of Artificial Sequence: Synthetic oligonucleotide
ccguuucuccuucaguuuc

SEQ ID NO: 3063530 - RNA, 19 nt, Artificial Sequence
  Description of Artificial Sequence: Synthetic oligonucleotide
uaacuccuugguggugaca

SEQ ID NO: 3063531 - RNA, 19 nt, Artificial Sequence
  Description of Artificial Sequence: Synthetic oligonucleotide
cugugggccguagauaaaa

SEQ ID NO: 3063532 - RNA, 19 nt, Artificial Sequence
  Description of Artificial Sequence: Synthetic oligonucleotide
cacacgguagccuucuuuu

SEQ ID NO: 3063533 - RNA, 19 nt, Artificial Sequence
  Description of Artificial Sequence: Synthetic oligonucleotide
ccuugaugucauuguacuc

SEQ ID NO: 3063534 - RNA, 19 nt, Artificial Sequence
  Description of Artificial Sequence: Synthetic oligonucleotide
acucaggucuagaccaaaa

SEQ ID NO: 3063535 - RNA, 19 nt, Artificial Sequence
  Description of Artificial Sequence: Synthetic oligonucleotide
cugcucagucacucagguc

SEQ ID NO: 3063536 - RNA, 19 nt, Artificial Sequence
  Description of Artificial Sequence: Synthetic oligonucleotide
ccuuguccagcaugucccg

SEQ ID NO: 3063537 - RNA, 19 nt, Artificial Sequence
  Description of Artificial Sequence: Synthetic oligonucleotide
cucagucacucaggucuag

SEQ ID NO: 3063538 - RNA, 19 nt, Artificial Sequence
  Description of Artificial Sequence: Synthetic oligonucleotide
agaccaaaaucuggauaua

SEQ ID NO: 3063539 - RNA, 19 nt, Artificial Sequence
  Description of Artificial Sequence: Synthetic oligonucleotide
caccucgggucagagccag

SEQ ID NO: 3063540 - RNA, 19 nt, Artificial Sequence
  Description of Artificial Sequence: Synthetic oligonucleotide
cucucugcucagucacuca

SEQ ID NO: 3063541 - RNA, 19 nt, Artificial Sequence
  Description of Artificial Sequence: Synthetic oligonucleotide
cucaggucuagaccaaaau

SEQ ID NO: 3063542 - RNA, 19 nt, Artificial Sequence
  Description of Artificial Sequence: Synthetic oligonucleotide
ugucugggucucuguguuu

SEQ ID NO: 3063543 - RNA, 19 nt, Artificial Sequence
  Description of Artificial Sequence: Synthetic oligonucleotide
ccagacucucugcucaguc

SEQ ID NO: 3063544 - RNA, 19 nt, Artificial Sequence
  Description of Artificial Sequence: Synthetic oligonucleotide
uggugacaccucgggucag

SEQ ID NO: 3063545 - RNA, 19 nt, Artificial Sequence
  Description of Artificial Sequence: Synthetic oligonucleotide
uugucccugugggccguag

SEQ ID NO: 3063546 - RNA, 19 nt, Artificial Sequence
  Description of Artificial Sequence: Synthetic oligonucleotide
ucccugugggccguagaua

SEQ ID NO: 3063547 - RNA, 19 nt, Artificial Sequence
  Description of Artificial Sequence: Synthetic oligonucleotide
ccagcagcaucugugccac

SEQ ID NO: 3063548 - RNA, 19 nt, Artificial Sequence
  Description of Artificial Sequence: Synthetic oligonucleotide
cccugugggccguagauaa

SEQ ID NO: 3063549 - RNA, 19 nt, Artificial Sequence
  Description of Artificial Sequence: Synthetic oligonucleotide
gcgauaugguccuccagcu

SEQ ID NO: 3063550 - RNA, 19 nt, Artificial Sequence
  Description of Artificial Sequence: Synthetic oligonucleotide
cacccacacgguagccuuc

SEQ ID NO: 3063551 - RNA, 19 nt, Artificial Sequence
  Description of Artificial Sequence: Synthetic oligonucleotide
acuugucccugugggccgu

SEQ ID NO: 3063552 - RNA, 19 nt, Artificial Sequence
  Description of Artificial Sequence: Synthetic oligonucleotide
cucauggaggagagcgaua

SEQ ID NO: 3063553 - RNA, 19 nt, Artificial Sequence
  Description of Artificial Sequence: Synthetic oligonucleotide
gucccugugggccguagau

SEQ ID NO: 3063554 - RNA, 19 nt, Artificial Sequence
  Description of Artificial Sequence: Synthetic oligonucleotide
ccauccacuugucccugug

SEQ ID NO: 3063555 - RNA, 19 nt, Artificial Sequence
  Description of Artificial Sequence: Synthetic oligonucleotide
guacugucugggucucugu

SEQ ID NO: 3063556 - RNA, 19 nt, Artificial Sequence
  Description of Artificial Sequence: Synthetic oligonucleotide
cuuucccagcagcaucugu

SEQ ID NO: 3063557 - RNA, 19 nt, Artificial Sequence
  Description of Artificial Sequence: Synthetic oligonucleotide
gggucagagccagcuuucc

SEQ ID NO: 3063558 - RNA, 19 nt, Artificial Sequence
  Description of Artificial Sequence: Synthetic oligonucleotide
cugucugggucucuguguu

SEQ ID NO: 3063559 - RNA, 19 nt, Artificial Sequence
  Description of Artificial Sequence: Synthetic oligonucleotide
gcaucugugccacauccuu

SEQ ID NO: 3063560 - RNA, 19 nt, Artificial Sequence
  Description of Artificial Sequence: Synthetic oligonucleotide
accucgggucagagccagc

SEQ ID NO: 3063561 - RNA, 19 nt, Artificial Sequence
  Description of Artificial Sequence: Synthetic oligonucleotide
auguacugucugggucucu

SEQ ID NO: 3063562 - RNA, 19 nt, Artificial Sequence
  Description of Artificial Sequence: Synthetic oligonucleotide
gacucucugcucagucacu

SEQ ID NO: 3063563 - RNA, 19 nt, Artificial Sequence
  Description of Artificial Sequence: Synthetic oligonucleotide
cacucaggucuagaccaaa

SEQ ID NO: 3063564 - RNA, 19 nt, Artificial Sequence
  Description of Artificial Sequence: Synthetic oligonucleotide
cucacccacacgguagccu

SEQ ID NO: 3063565 - RNA, 19 nt, Artificial Sequence
  Description of Artificial Sequence: Synthetic oligonucleotide
ggugacaccucgggucaga

SEQ ID NO: 3063566 - RNA, 19 nt, Artificial Sequence
  Description of Artificial Sequence: Synthetic oligonucleotide
cgauaugguccuccagcuc

SEQ ID NO: 3063567 - RNA, 19 nt, Artificial Sequence
  Description of Artificial Sequence: Synthetic oligonucleotide
ccagcaugucccguuucuc

SEQ ID NO: 3063568 - RNA, 19 nt, Artificial Sequence
  Description of Artificial Sequence: Synthetic oligonucleotide
gcuuucccagcagcaucug

SEQ ID NO: 3063569 - RNA, 19 nt, Artificial Sequence
  Description of Artificial Sequence: Synthetic oligonucleotide
gcucacccacacgguagcc

SEQ ID NO: 3063570 - RNA, 19 nt, Artificial Sequence
  Description of Artificial Sequence: Synthetic oligonucleotide
cgggucagagccagcuuuc

SEQ ID NO: 3063571 - RNA, 19 nt, Artificial Sequence
  Description of Artificial Sequence: Synthetic oligonucleotide
cuuguccagcaugucccgu

SEQ ID NO: 3063572 - RNA, 19 nt, Artificial Sequence
  Description of Artificial Sequence: Synthetic oligonucleotide
ccagcucacccacacggua

SEQ ID NO: 3063573 - RNA, 19 nt, Artificial Sequence
  Description of Artificial Sequence: Synthetic oligonucleotide
gccacauccuugaugucau

SEQ ID NO: 3063574 - RNA, 19 nt, Artificial Sequence
  Description of Artificial Sequence: Synthetic oligonucleotide
gcucagucacucaggucua

SEQ ID NO: 3063575 - RNA, 19 nt, Artificial Sequence
  Description of Artificial Sequence: Synthetic oligonucleotide
ggagagcgauaugguccuc

SEQ ID NO: 3063576 - RNA, 19 nt, Artificial Sequence
  Description of Artificial Sequence: Synthetic oligonucleotide
cgguagccuucuuuuacua

SEQ ID NO: 3063577 - RNA, 19 nt, Artificial Sequence
  Description of Artificial Sequence: Synthetic oligonucleotide
cagcagcaucugugccaca

SEQ ID NO: 3063578 - RNA, 19 nt, Artificial Sequence
  Description of Artificial Sequence: Synthetic oligonucleotide
ccugugggccguagauaaa

SEQ ID NO: 3063579 - RNA, 19 nt, Artificial Sequence
  Description of Artificial Sequence: Synthetic oligonucleotide
cucgggucagagccagcuu

SEQ ID NO: 3063580 - RNA, 19 nt, Artificial Sequence
  Description of Artificial Sequence: Synthetic oligonucleotide
ccucgggucagagccagcu

SEQ ID NO: 3063581 - RNA, 19 nt, Artificial Sequence
  Description of Artificial Sequence: Synthetic oligonucleotide
cccguuucuccuucaguuu

SEQ ID NO: 3063582 - RNA, 19 nt, Artificial Sequence
  Description of Artificial Sequence: Synthetic oligonucleotide
ccacacgguagccuucuuu

SEQ ID NO: 3063583 - RNA, 19 nt, Artificial Sequence
  Description of Artificial Sequence: Synthetic oligonucleotide
cuugucccugugggccgua

SEQ ID NO: 3063584 - RNA, 19 nt, Artificial Sequence
  Description of Artificial Sequence: Synthetic oligonucleotide
gccagacucucugcucagu

SEQ ID NO: 3063585 - RNA, 19 nt, Artificial Sequence
  Description of Artificial Sequence: Synthetic oligonucleotide
aauguugucauugucauuc

SEQ ID NO: 3063586 - RNA, 19 nt, Artificial Sequence
  Description of Artificial Sequence: Synthetic oligonucleotide
gauguuuucuccgagaugg

SEQ ID NO: 3063587 - RNA, 19 nt, Artificial Sequence
  Description of Artificial Sequence: Synthetic oligonucleotide
gaugguaucaaauuuaaaa

SEQ ID NO: 3063588 - RNA, 19 nt, Artificial Sequence
  Description of Artificial Sequence: Synthetic oligonucleotide
gaagaaguggaucugauca

SEQ ID NO: 3063589 - RNA, 19 nt, Artificial Sequence
  Description of Artificial Sequence: Synthetic oligonucleotide
ugagaauuggccuuggaca

SEQ ID NO: 3063590 - RNA, 19 nt, Artificial Sequence
  Description of Artificial Sequence: Synthetic oligonucleotide
auuacaggcacccagcuug

SEQ ID NO: 3063591 - RNA, 19 nt, Artificial Sequence
  Description of Artificial Sequence: Synthetic oligonucleotide
aaaauguugucauugucau

SEQ ID NO: 3063592 - RNA, 19 nt, Artificial Sequence
  Description of Artificial Sequence: Synthetic oligonucleotide
uuuggcaaagaagaagugg

SEQ ID NO: 3063593 - RNA, 19 nt, Artificial Sequence
  Description of Artificial Sequence: Synthetic oligonucleotide
aguggaucugaucagaugu

SEQ ID NO: 3063594 - RNA, 19 nt, Artificial Sequence
  Description of Artificial Sequence: Synthetic oligonucleotide
gucauugucauucuuggag

SEQ ID NO: 3063595 - RNA, 19 nt, Artificial Sequence
  Description of Artificial Sequence: Synthetic oligonucleotide
uuggcaaagaagaagugga

SEQ ID NO: 3063596 - RNA, 19 nt, Artificial Sequence
  Description of Artificial Sequence: Synthetic oligonucleotide
ugaucagauguuuucuccg

SEQ ID NO: 3063597 - RNA, 19 nt, Artificial Sequence
  Description of Artificial Sequence: Synthetic oligonucleotide
cuugagagugucauuacag

SEQ ID NO: 3063598 - RNA, 19 nt, Artificial Sequence
  Description of Artificial Sequence: Synthetic oligonucleotide
uuggccauagcaaaagcug

SEQ ID NO: 3063599 - RNA, 19 nt, Artificial Sequence
  Description of Artificial Sequence: Synthetic oligonucleotide
ugucauuacaggcacccag

SEQ ID NO: 3063600 - RNA, 19 nt, Artificial Sequence
  Description of Artificial Sequence: Synthetic oligonucleotide
agagugucauuacaggcac

SEQ ID NO: 3063601 - RNA, 19 nt, Artificial Sequence
  Description of Artificial Sequence: Synthetic oligonucleotide
aaaagcuguggagauacuc

SEQ ID NO: 3063602 - RNA, 19 nt, Artificial Sequence
  Description of Artificial Sequence: Synthetic oligonucleotide
uugagagugucauuacagg

SEQ ID NO: 3063603 - RNA, 19 nt, Artificial Sequence
  Description of Artificial Sequence: Synthetic oligonucleotide
uguggagauacucaagggu

SEQ ID NO: 3063604 - RNA, 19 nt, Artificial Sequence
  Description of Artificial Sequence: Synthetic oligonucleotide
agaaaauguugucauuguc

SEQ ID NO: 3063605 - RNA, 19 nt, Artificial Sequence
  Description of Artificial Sequence: Synthetic oligonucleotide
ugagagugucauuacaggc

SEQ ID NO: 3063606 - RNA, 19 nt, Artificial Sequence
  Description of Artificial Sequence: Synthetic oligonucleotide
gagcgguaaaugcacaugg

SEQ ID NO: 3063607 - RNA, 19 nt, Artificial Sequence
  Description of Artificial Sequence: Synthetic oligonucleotide
gaaaauguugucauuguca

SEQ ID NO: 3063608 - RNA, 19 nt, Artificial Sequence
  Description of Artificial Sequence: Synthetic oligonucleotide
augcacaugggauucacag

SEQ ID NO: 3063609 - RNA, 19 nt, Artificial Sequence
  Description of Artificial Sequence: Synthetic oligonucleotide
aagaaguggaucugaucag

SEQ ID NO: 3063610 - RNA, 19 nt, Artificial Sequence
  Description of Artificial Sequence: Synthetic oligonucleotide
ucgucaguggccuucuugg

SEQ ID NO: 3063611 - RNA, 19 nt, Artificial Sequence
  Description of Artificial Sequence: Synthetic oligonucleotide
uugagaauuggccuuggac

SEQ ID NO: 3063612 - RNA, 19 nt, Artificial Sequence
  Description of Artificial Sequence: Synthetic oligonucleotide
cauucuuggagucugccag

SEQ ID NO: 3063613 - RNA, 19 nt, Artificial Sequence
  Description of Artificial Sequence: Synthetic oligonucleotide
aagggugacaagaaaaugu

SEQ ID NO: 3063614 - RNA, 19 nt, Artificial Sequence
  Description of Artificial Sequence: Synthetic oligonucleotide
cuuggagucugccaggugc

SEQ ID NO: 3063615 - RNA, 19 nt, Artificial Sequence
  Description of Artificial Sequence: Synthetic oligonucleotide
cauagcaaaagcuguggag

SEQ ID NO: 3063616 - RNA, 19 nt, Artificial Sequence
  Description of Artificial Sequence: Synthetic oligonucleotide
cuucucuaggccaucuucg

SEQ ID NO: 3063617 - RNA, 19 nt, Artificial Sequence
  Description of Artificial Sequence: Synthetic oligonucleotide
ugcugauagaagguggugg

SEQ ID NO: 3063618 - RNA, 19 nt, Artificial Sequence
  Description of Artificial Sequence: Synthetic oligonucleotide
ugacaagaaaauguuguca

SEQ ID NO: 3063619 - RNA, 19 nt, Artificial Sequence
  Description of Artificial Sequence: Synthetic oligonucleotide
uggcaaauugagaauuggc

SEQ ID NO: 3063620 - RNA, 19 nt, Artificial Sequence
  Description of Artificial Sequence: Synthetic oligonucleotide
uuggagagcgguaaaugca

SEQ ID NO: 3063621 - RNA, 19 nt, Artificial Sequence
  Description of Artificial Sequence: Synthetic oligonucleotide
ucauugucauucuuggagu

SEQ ID NO: 3063622 - RNA, 19 nt, Artificial Sequence
  Description of Artificial Sequence: Synthetic oligonucleotide
auagcaaaagcuguggaga

SEQ ID NO: 3063623 - RNA, 19 nt, Artificial Sequence
  Description of Artificial Sequence: Synthetic oligonucleotide
agaagaaguggaucugauc

SEQ ID NO: 3063624 - RNA, 19 nt, Artificial Sequence
  Description of Artificial Sequence: Synthetic oligonucleotide
ucaagggugacaagaaaau

SEQ ID NO: 3063625 - RNA, 19 nt, Artificial Sequence
  Description of Artificial Sequence: Synthetic oligonucleotide
aaaugcacaugggauucac

SEQ ID NO: 3063626 - RNA, 19 nt, Artificial Sequence
  Description of Artificial Sequence: Synthetic oligonucleotide
guuggagagcgguaaaugc

SEQ ID NO: 3063627 - RNA, 19 nt, Artificial Sequence
  Description of Artificial Sequence: Synthetic oligonucleotide
ucaguggccuucuugguug

SEQ ID NO: 3063628 - RNA, 19 nt, Artificial Sequence
  Description of Artificial Sequence: Synthetic oligonucleotide
cugaucagauguuuucucc

SEQ ID NO: 3063629 - RNA, 19 nt, Artificial Sequence
  Description of Artificial Sequence: Synthetic oligonucleotide
gcacaugggauucacaggg

SEQ ID NO: 3063630 - RNA, 19 nt, Artificial Sequence
  Description of Artificial Sequence: Synthetic oligonucleotide
aaagaagaaguggaucuga

SEQ ID NO: 3063631 - RNA, 19 nt, Artificial Sequence
  Description of Artificial Sequence: Synthetic oligonucleotide
aguuuggcaaagaagaagu

SEQ ID NO: 3063632 - RNA, 19 nt, Artificial Sequence
  Description of Artificial Sequence: Synthetic oligonucleotide
aaauugagaauuggccuug

SEQ ID NO: 3063633 - RNA, 19 nt, Artificial Sequence
  Description of Artificial Sequence: Synthetic oligonucleotide
aaagcuguggagauacuca

SEQ ID NO: 3063634 - RNA, 19 nt, Artificial Sequence
  Description of Artificial Sequence: Synthetic oligonucleotide
ugcacaugggauucacagg

SEQ ID NO: 3063635 - RNA, 19 nt, Artificial Sequence
  Description of Artificial Sequence: Synthetic oligonucleotide
aaguggaucugaucagaug

SEQ ID NO: 3063636 - RNA, 19 nt, Artificial Sequence
  Description of Artificial Sequence: Synthetic oligonucleotide
gaucugaucagauguuuuc

SEQ ID NO: 3063637 - RNA, 19 nt, Artificial Sequence
  Description of Artificial Sequence: Synthetic oligonucleotide
acaggcacccagcuuggcc

SEQ ID NO: 3063638 - RNA, 19 nt, Artificial Sequence
  Description of Artificial Sequence: Synthetic oligonucleotide
agacccuacgguugguggc

SEQ ID NO: 3063639 - RNA, 19 nt, Artificial Sequence
  Description of Artificial Sequence: Synthetic oligonucleotide
gcuguggagauacucaagg

SEQ ID NO: 3063640 - RNA, 19 nt, Artificial Sequence
  Description of Artificial Sequence: Synthetic oligonucleotide
guugucauugucauucuug

SEQ ID NO: 3063641 - RNA, 19 nt, Artificial Sequence
  Description of Artificial Sequence: Synthetic oligonucleotide
uggagagcgguaaaugcac

SEQ ID NO: 3063642 - RNA, 19 nt, Artificial Sequence
  Description of Artificial Sequence: Synthetic oligonucleotide
ggcaaauugagaauuggcc

SEQ ID NO: 3063643 - RNA, 19 nt, Artificial Sequence
  Description of Artificial Sequence: Synthetic oligonucleotide
ucagauguuuucuccgaga

SEQ ID NO: 3063644 - RNA, 19 nt, Artificial Sequence
  Description of Artificial Sequence: Synthetic oligonucleotide
aaaaccuccaucagcugcu

SEQ ID NO: 3063645 - RNA, 19 nt, Artificial Sequence
  Description of Artificial Sequence: Synthetic oligonucleotide
auacucaagggugacaaga

SEQ ID NO: 3063646 - RNA, 19 nt, Artificial Sequence
  Description of Artificial Sequence: Synthetic oligonucleotide
uaggccaucuucgucagug

SEQ ID NO: 3063647 - RNA, 19 nt, Artificial Sequence
  Description of Artificial Sequence: Synthetic oligonucleotide
guggagauacucaagggug

SEQ ID NO: 3063648 - RNA, 19 nt, Artificial Sequence
  Description of Artificial Sequence: Synthetic oligonucleotide
uucgucaguggccuucuug

SEQ ID NO: 3063649 - RNA, 19 nt, Artificial Sequence
  Description of Artificial Sequence: Synthetic oligonucleotide
ucugaucagauguuuucuc

SEQ ID NO: 3063650 - RNA, 19 nt, Artificial Sequence
  Description of Artificial Sequence: Synthetic oligonucleotide
cuguggagauacucaaggg

SEQ ID NO: 3063651 - RNA, 19 nt, Artificial Sequence
  Description of Artificial Sequence: Synthetic oligonucleotide
aauugagaauuggccuugg

SEQ ID NO: 3063652 - RNA, 19 nt, Artificial Sequence
  Description of Artificial Sequence: Synthetic oligonucleotide
augggauucacagggaugu

SEQ ID NO: 3063653 - RNA, 19 nt, Artificial Sequence
  Description of Artificial Sequence: Synthetic oligonucleotide
gacaagaaaauguugucau

SEQ ID NO: 3063654 - RNA, 19 nt, Artificial Sequence
  Description of Artificial Sequence: Synthetic oligonucleotide
ucauuacaggcacccagcu

SEQ ID NO: 3063655 - RNA, 19 nt, Artificial Sequence
  Description of Artificial Sequence: Synthetic oligonucleotide
ucauucuuggagucugcca

SEQ ID NO: 3063656 - RNA, 19 nt, Artificial Sequence
  Description of Artificial Sequence: Synthetic oligonucleotide
aucagauguuuucuccgag

SEQ ID NO: 3063657 - RNA, 19 nt, Artificial Sequence
  Description of Artificial Sequence: Synthetic oligonucleotide
uggccauagcaaaagcugu

SEQ ID NO: 3063658 - RNA, 19 nt, Artificial Sequence
  Description of Artificial Sequence: Synthetic oligonucleotide
aagcuguggagauacucaa

SEQ ID NO: 3063659 - RNA, 19 nt, Artificial Sequence
  Description of Artificial Sequence: Synthetic oligonucleotide
uuacaggcacccagcuugg

SEQ ID NO: 3063660 - RNA, 19 nt, Artificial Sequence
  Description of Artificial Sequence: Synthetic oligonucleotide
gauucacagggaugucccg

SEQ ID NO: 3063661 - RNA, 19 nt, Artificial Sequence
  Description of Artificial Sequence: Synthetic oligonucleotide
uugucauucuuggagucug

SEQ ID NO: 3063662 - RNA, 19 nt, Artificial Sequence
  Description of Artificial Sequence: Synthetic oligonucleotide
uacucaagggugacaagaa

SEQ ID NO: 3063663 - RNA, 19 nt, Artificial Sequence
  Description of Artificial Sequence: Synthetic oligonucleotide
acaguucccagacccuacg

SEQ ID NO: 3063664 - RNA, 19 nt, Artificial Sequence
  Description of Artificial Sequence: Synthetic oligonucleotide
gagagugucauuacaggca

SEQ ID NO: 3063665 - RNA, 19 nt, Artificial Sequence
  Description of Artificial Sequence: Synthetic oligonucleotide
agauacucaagggugacaa

SEQ ID NO: 3063666 - RNA, 19 nt, Artificial Sequence
  Description of Artificial Sequence: Synthetic oligonucleotide
uccgagaugguaucaaauu

SEQ ID NO: 3063667 - RNA, 19 nt, Artificial Sequence
  Description of Artificial Sequence: Synthetic oligonucleotide
uuuucuccgagaugguauc

SEQ ID NO: 3063668 - RNA, 19 nt, Artificial Sequence
  Description of Artificial Sequence: Synthetic oligonucleotide
guaaaugcacaugggauuc

SEQ ID NO: 3063669 - RNA, 19 nt, Artificial Sequence
  Description of Artificial Sequence: Synthetic oligonucleotide
gauacucaagggugacaag

SEQ ID NO: 3063670 - RNA, 19 nt, Artificial Sequence
  Description of Artificial Sequence: Synthetic oligonucleotide
gccaggugcugauagaagg

SEQ ID NO: 3063671 - RNA, 19 nt, Artificial Sequence
  Description of Artificial Sequence: Synthetic oligonucleotide
caguuuggcaaagaagaag

SEQ ID NO: 3063672 - RNA, 19 nt, Artificial Sequence
  Description of Artificial Sequence: Synthetic oligonucleotide
uucccagacccuacgguug

SEQ ID NO: 3063673 - RNA, 19 nt, Artificial Sequence
  Description of Artificial Sequence: Synthetic oligonucleotide
cucaagggugacaagaaaa

SEQ ID NO: 3063674 - RNA, 19 nt, Artificial Sequence
  Description of Artificial Sequence: Synthetic oligonucleotide
gaucagauguuuucuccga

SEQ ID NO: 3063675 - RNA, 19 nt, Artificial Sequence
  Description of Artificial Sequence: Synthetic oligonucleotide
ugauagaaggugguggcaa

SEQ ID NO: 3063676 - RNA, 19 nt, Artificial Sequence
  Description of Artificial Sequence: Synthetic oligonucleotide
cucuaggccaucuucguca

SEQ ID NO: 3063677 - RNA, 19 nt, Artificial Sequence
  Description of Artificial Sequence: Synthetic oligonucleotide
guggcaaauugagaauugg

SEQ ID NO: 3063678 - RNA, 19 nt, Artificial Sequence
  Description of Artificial Sequence: Synthetic oligonucleotide
uuggccuuggacaguuccc

SEQ ID NO: 3063679 - RNA, 19 nt, Artificial Sequence
  Description of Artificial Sequence: Synthetic oligonucleotide
ucccagacccuacgguugg

SEQ ID NO: 3063680 - RNA, 19 nt, Artificial Sequence
  Description of Artificial Sequence: Synthetic oligonucleotide
gugacaagaaaauguuguc

SEQ ID NO: 3063681 - RNA, 19 nt, Artificial Sequence
  Description of Artificial Sequence: Synthetic oligonucleotide
ucuaggccaucuucgucag

SEQ ID NO: 3063682 - RNA, 19 nt, Artificial Sequence
  Description of Artificial Sequence: Synthetic oligonucleotide
agauguuuucuccgagaug

SEQ ID NO: 3063683 - RNA, 19 nt, Artificial Sequence
  Description of Artificial Sequence: Synthetic oligonucleotide
caugggauucacagggaug

SEQ ID NO: 3063684 - RNA, 19 nt, Artificial Sequence
  Description of Artificial Sequence: Synthetic oligonucleotide
cagacccuacgguuggugg

SEQ ID NO: 3063685 - RNA, 19 nt, Artificial Sequence
  Description of Artificial Sequence: Synthetic oligonucleotide
cauugucauucuuggaguc

SEQ ID NO: 3063686 - RNA, 19 nt, Artificial Sequence
  Description of Artificial Sequence: Synthetic oligonucleotide
ugucauugucauucuugga

SEQ ID NO: 3063687 - RNA, 19 nt, Artificial Sequence
  Description of Artificial Sequence: Synthetic oligonucleotide
aguucccagacccuacggu

SEQ ID NO: 3063688 - RNA, 19 nt, Artificial Sequence
  Description of Artificial Sequence: Synthetic oligonucleotide
gcugauagaaggugguggc

SEQ ID NO: 3063689 - RNA, 19 nt, Artificial Sequence
  Description of Artificial Sequence: Synthetic oligonucleotide
aaauguugucauugucauu

SEQ ID NO: 3063690 - RNA, 19 nt, Artificial Sequence
  Description of Artificial Sequence: Synthetic oligonucleotide
uagcaaaagcuguggagau

SEQ ID NO: 3063691 - RNA, 19 nt, Artificial Sequence
  Description of Artificial Sequence: Synthetic oligonucleotide
uuggagucugccaggugcu

SEQ ID NO: 3063692 - RNA, 19 nt, Artificial Sequence
  Description of Artificial Sequence: Synthetic oligonucleotide
uucucuaggccaucuucgu

SEQ ID NO: 3063693 - RNA, 19 nt, Artificial Sequence
  Description of Artificial Sequence: Synthetic oligonucleotide
ugccaggugcugauagaag

SEQ ID NO: 3063694 - RNA, 19 nt, Artificial Sequence
  Description of Artificial Sequence: Synthetic oligonucleotide
gucauuacaggcacccagc

SEQ ID NO: 3063695 - RNA, 19 nt, Artificial Sequence
  Description of Artificial Sequence: Synthetic oligonucleotide
ugucauucuuggagucugc

SEQ ID NO: 3063696 - RNA, 19 nt, Artificial Sequence
  Description of Artificial Sequence: Synthetic oligonucleotide
gucugccaggugcugauag

SEQ ID NO: 3063697 - RNA, 19 nt, Artificial Sequence
  Description of Artificial Sequence: Synthetic oligonucleotide
aucugaucagauguuuucu

SEQ ID NO: 3063698 - RNA, 19 nt, Artificial Sequence
  Description of Artificial Sequence: Synthetic oligonucleotide
gagaugguaucaaauuuaa

SEQ ID NO: 3063699 - RNA, 19 nt, Artificial Sequence
  Description of Artificial Sequence: Synthetic oligonucleotide
gcaaaagcuguggagauac

SEQ ID NO: 3063700 - RNA, 19 nt, Artificial Sequence
  Description of Artificial Sequence: Synthetic oligonucleotide
acaugggauucacagggau

SEQ ID NO: 3063701 - RNA, 19 nt, Artificial Sequence
  Description of Artificial Sequence: Synthetic oligonucleotide
uucuugguuggagagcggu

SEQ ID NO: 3063702 - RNA, 19 nt, Artificial Sequence
  Description of Artificial Sequence: Synthetic oligonucleotide
agaaguggaucugaucaga

SEQ ID NO: 3063703 - RNA, 19 nt, Artificial Sequence
  Description of Artificial Sequence: Synthetic oligonucleotide
caucagcugcuugagagug

SEQ ID NO: 3063704 - RNA, 19 nt, Artificial Sequence
  Description of Artificial Sequence: Synthetic oligonucleotide
uggcaaagaagaaguggau

SEQ ID NO: 3063705 - RNA, 19 nt, Artificial Sequence
  Description of Artificial Sequence: Synthetic oligonucleotide
gggaccuucuucucuaggc

SEQ ID NO: 3063706 - RNA, 19 nt, Artificial Sequence
  Description of Artificial Sequence: Synthetic oligonucleotide
agcuuggccauagcaaaag

SEQ ID NO: 3063707 - RNA, 19 nt, Artificial Sequence
  Description of Artificial Sequence: Synthetic oligonucleotide
aggugcugauagaaggugg

SEQ ID NO: 3063708 - RNA, 19 nt, Artificial Sequence
  Description of Artificial Sequence: Synthetic oligonucleotide
aagaagaaguggaucugau

SEQ ID NO: 3063709 - RNA, 19 nt, Artificial Sequence
  Description of Artificial Sequence: Synthetic oligonucleotide
acgguugguggccuccggg

SEQ ID NO: 3063710 - RNA, 19 nt, Artificial Sequence
  Description of Artificial Sequence: Synthetic oligonucleotide
gcaaauugagaauuggccu

SEQ ID NO: 3063711 - RNA, 19 nt, Artificial Sequence
  Description of Artificial Sequence: Synthetic oligonucleotide
ucucuaggccaucuucguc

SEQ ID NO: 3063712 - RNA, 19 nt, Artificial Sequence
  Description of Artificial Sequence: Synthetic oligonucleotide
auugucauucuuggagucu

SEQ ID NO: 3063713 - RNA, 19 nt, Artificial Sequence
  Description of Artificial Sequence: Synthetic oligonucleotide
aucuucgucaguggccuuc

SEQ ID NO: 3063714 - RNA, 19 nt, Artificial Sequence
  Description of Artificial Sequence: Synthetic oligonucleotide
ccuucuugguuggagagcg

SEQ ID NO: 3063715 - RNA, 19 nt, Artificial Sequence
  Description of Artificial Sequence: Synthetic oligonucleotide
gauagaaggugguggcaaa

SEQ ID NO: 3063716 - RNA, 19 nt, Artificial Sequence
  Description of Artificial Sequence: Synthetic oligonucleotide
agagcgguaaaugcacaug

SEQ ID NO: 3063717 - RNA, 19 nt, Artificial Sequence
  Description of Artificial Sequence: Synthetic oligonucleotide
ugcuugagagugucauuac

SEQ ID NO: 3063718 - RNA, 19 nt, Artificial Sequence
  Description of Artificial Sequence: Synthetic oligonucleotide
ugguggcaaauugagaauu

SEQ ID NO: 3063719 - RNA, 19 nt, Artificial Sequence
  Description of Artificial Sequence: Synthetic oligonucleotide
auugagaauuggccuugga

SEQ ID NO: 3063720 - RNA, 19 nt, Artificial Sequence
  Description of Artificial Sequence: Synthetic oligonucleotide
ucuccgagaugguaucaaa

SEQ ID NO: 3063721 - RNA, 19 nt, Artificial Sequence
  Description of Artificial Sequence: Synthetic oligonucleotide
ucagcugcuugagaguguc

SEQ ID NO: 3063722 - RNA, 19 nt, Artificial Sequence
  Description of Artificial Sequence: Synthetic oligonucleotide
ggaccuucuucucuaggcc

SEQ ID NO: 3063723 - RNA, 19 nt, Artificial Sequence
  Description of Artificial Sequence: Synthetic oligonucleotide
ggugacaagaaaauguugu

SEQ ID NO: 3063724 - RNA, 19 nt, Artificial Sequence
  Description of Artificial Sequence: Synthetic oligonucleotide
agcgguaaaugcacauggg

SEQ ID NO: 3063725 - RNA, 19 nt, Artificial Sequence
  Description of Artificial Sequence: Synthetic oligonucleotide
aaugcacaugggauucaca

SEQ ID NO: 3063726 - RNA, 19 nt, Artificial Sequence
  Description of Artificial Sequence: Synthetic oligonucleotide
acucaagggugacaagaaa

SEQ ID NO: 3063727 - RNA, 19 nt, Artificial Sequence
  Description of Artificial Sequence: Synthetic oligonucleotide
guugguggccuccgggacc

SEQ ID NO: 3063728 - RNA, 19 nt, Artificial Sequence
  Description of Artificial Sequence: Synthetic oligonucleotide
ggauucacagggauguccc

SEQ ID NO: 3063729 - RNA, 19 nt, Artificial Sequence
  Description of Artificial Sequence: Synthetic oligonucleotide
uguuuucuccgagauggua

SEQ ID NO: 3063730 - RNA, 19 nt, Artificial Sequence
  Description of Artificial Sequence: Synthetic oligonucleotide
aggccaucuucgucagugg

SEQ ID NO: 3063731 - RNA, 19 nt, Artificial Sequence
  Description of Artificial Sequence: Synthetic oligonucleotide
uaaaugcacaugggauuca

SEQ ID NO: 3063732 - RNA, 19 nt, Artificial Sequence
  Description of Artificial Sequence: Synthetic oligonucleotide
uacgguugguggccuccgg

SEQ ID NO: 3063733 - RNA, 19 nt, Artificial Sequence
  Description of Artificial Sequence: Synthetic oligonucleotide
ucuugguuggagagcggua

SEQ ID NO: 3063734 - RNA, 19 nt, Artificial Sequence
  Description of Artificial Sequence: Synthetic oligonucleotide
cuuggccauagcaaaagcu

SEQ ID NO: 3063735 - RNA, 19 nt, Artificial Sequence
  Description of Artificial Sequence: Synthetic oligonucleotide
uggccuuggacaguuccca

SEQ ID NO: 3063736 - RNA, 19 nt, Artificial Sequence
  Description of Artificial Sequence: Synthetic oligonucleotide
aaccuccaucagcugcuug

SEQ ID NO: 3063737 - RNA, 19 nt, Artificial Sequence
  Description of Artificial Sequence: Synthetic oligonucleotide
cuuggacaguucccagacc

SEQ ID NO: 3063738 - RNA, 19 nt, Artificial Sequence
  Description of Artificial Sequence: Synthetic oligonucleotide
caguucccagacccuacgg

SEQ ID NO: 3063739 - RNA, 19 nt, Artificial Sequence
  Description of Artificial Sequence: Synthetic oligonucleotide
gacccuacgguugguggcc

SEQ ID NO: 3063740 - RNA, 19 nt, Artificial Sequence
  Description of Artificial Sequence: Synthetic oligonucleotide
gccauagcaaaagcugugg

SEQ ID NO: 3063741 - RNA, 19 nt, Artificial Sequence
  Description of Artificial Sequence: Synthetic oligonucleotide
uugguuggagagcgguaaa

SEQ ID NO: 3063742 - RNA, 19 nt, Artificial Sequence
  Description of Artificial Sequence: Synthetic oligonucleotide
uucuuggagucugccaggu

SEQ ID NO: 3063743 - RNA, 19 nt, Artificial Sequence
  Description of Artificial Sequence: Synthetic oligonucleotide
caaauugagaauuggccuu

SEQ ID NO: 3063744 - RNA, 19 nt, Artificial Sequence
  Description of Artificial Sequence: Synthetic oligonucleotide
agggugacaagaaaauguu

SEQ ID NO: 3063745 - RNA, 19 nt, Artificial Sequence
  Description of Artificial Sequence: Synthetic oligonucleotide
uuucuccgagaugguauca

SEQ ID NO: 3063746 - RNA, 19 nt, Artificial Sequence
  Description of Artificial Sequence: Synthetic oligonucleotide
agcugcuugagagugucau

SEQ ID NO: 3063747 - RNA, 19 nt, Artificial Sequence
  Description of Artificial Sequence: Synthetic oligonucleotide
caggcacccagcuuggcca

SEQ ID NO: 3063748 - RNA, 19 nt, Artificial Sequence
  Description of Artificial Sequence: Synthetic oligonucleotide
uggaucugaucagauguuu

SEQ ID NO: 3063749 - RNA, 19 nt, Artificial Sequence
  Description of Artificial Sequence: Synthetic oligonucleotide
gguuggagagcgguaaaug

SEQ ID NO: 3063750 - RNA, 19 nt, Artificial Sequence
  Description of Artificial Sequence: Synthetic oligonucleotide
cuucuugguuggagagcgg

SEQ ID NO: 3063751 - RNA, 19 nt, Artificial Sequence
  Description of Artificial Sequence: Synthetic oligonucleotide
uccgggaccuucuucucua

SEQ ID NO: 3063752 - RNA, 19 nt, Artificial Sequence
  Description of Artificial Sequence: Synthetic oligonucleotide
gggauucacagggaugucc

SEQ ID NO: 3063753 - RNA, 19 nt, Artificial Sequence
  Description of Artificial Sequence: Synthetic oligonucleotide
ggccuucuugguuggagag

SEQ ID NO: 3063754 - RNA, 19 nt, Artificial Sequence
  Description of Artificial Sequence: Synthetic oligonucleotide
uucuccgagaugguaucaa

SEQ ID NO: 3063755 - RNA, 19 nt, Artificial Sequence
  Description of Artificial Sequence: Synthetic oligonucleotide
gcgguaaaugcacauggga

SEQ ID NO: 3063756 - RNA, 19 nt, Artificial Sequence
  Description of Artificial Sequence: Synthetic oligonucleotide
ccuuggacaguucccagac

SEQ ID NO: 3063757 - RNA, 19 nt, Artificial Sequence
  Description of Artificial Sequence: Synthetic oligonucleotide
gacaguucccagacccuac

SEQ ID NO: 3063758 - RNA, 19 nt, Artificial Sequence
  Description of Artificial Sequence: Synthetic oligonucleotide
cuugguuggagagcgguaa

SEQ ID NO: 3063759 - RNA, 19 nt, Artificial Sequence
  Description of Artificial Sequence: Synthetic oligonucleotide
uagaaggugguggcaaauu

SEQ ID NO: 3063760 - RNA, 19 nt, Artificial Sequence
  Description of Artificial Sequence: Synthetic oligonucleotide
gguaaaugcacaugggauu

SEQ ID NO: 3063761 - RNA, 19 nt, Artificial Sequence
  Description of Artificial Sequence: Synthetic oligonucleotide
auagaaggugguggcaaau

SEQ ID NO: 3063762 - RNA, 19 nt, Artificial Sequence
  Description of Artificial Sequence: Synthetic oligonucleotide
gguggcaaauugagaauug

SEQ ID NO: 3063763 - RNA, 19 nt, Artificial Sequence
  Description of Artificial Sequence: Synthetic oligonucleotide
uugguggccuccgggaccu

SEQ ID NO: 3063764 - RNA, 19 nt, Artificial Sequence
  Description of Artificial Sequence: Synthetic oligonucleotide
cugcuugagagugucauua

SEQ ID NO: 3063765 - RNA, 19 nt, Artificial Sequence
  Description of Artificial Sequence: Synthetic oligonucleotide
ugguuggagagcgguaaau

SEQ ID NO: 3063766 - RNA, 19 nt, Artificial Sequence
  Description of Artificial Sequence: Synthetic oligonucleotide
gagauacucaagggugaca

SEQ ID NO: 3063767 - RNA, 19 nt, Artificial Sequence
  Description of Artificial Sequence: Synthetic oligonucleotide
agcuguggagauacucaag

SEQ ID NO: 3063768 - RNA, 19 nt, Artificial Sequence
  Description of Artificial Sequence: Synthetic oligonucleotide
guuuucuccgagaugguau

SEQ ID NO: 3063769 - RNA, 19 nt, Artificial Sequence
  Description of Artificial Sequence: Synthetic oligonucleotide
gcuugagagugucauuaca

SEQ ID NO: 3063770 - RNA, 19 nt, Artificial Sequence
  Description of Artificial Sequence: Synthetic oligonucleotide
caguggccuucuugguugg

SEQ ID NO: 3063771 - RNA, 19 nt, Artificial Sequence
  Description of Artificial Sequence: Synthetic oligonucleotide
agaauuggccuuggacagu

SEQ ID NO: 3063772 - RNA, 19 nt, Artificial Sequence
  Description of Artificial Sequence: Synthetic oligonucleotide
gggugacaagaaaauguug

SEQ ID NO: 3063773 - RNA, 19 nt, Artificial Sequence
  Description of Artificial Sequence: Synthetic oligonucleotide
gagugucauuacaggcacc

SEQ ID NO: 3063774 - RNA, 19 nt, Artificial Sequence
  Description of Artificial Sequence: Synthetic oligonucleotide
agaugguaucaaauuuaaa

SEQ ID NO: 3063775 - RNA, 19 nt, Artificial Sequence
  Description of Artificial Sequence: Synthetic oligonucleotide
gugcugauagaagguggug

SEQ ID NO: 3063776 - RNA, 19 nt, Artificial Sequence
  Description of Artificial Sequence: Synthetic oligonucleotide
cuacgguugguggccuccg

SEQ ID NO: 3063777 - RNA, 19 nt, Artificial Sequence
  Description of Artificial Sequence: Synthetic oligonucleotide
gagagcgguaaaugcacau

SEQ ID NO: 3063778 - RNA, 19 nt, Artificial Sequence
  Description of Artificial Sequence: Synthetic oligonucleotide
cagauguuuucuccgagau

SEQ ID NO: 3063779 - RNA, 19 nt, Artificial Sequence
  Description of Artificial Sequence: Synthetic oligonucleotide
cacaugggauucacaggga

SEQ ID NO: 3063780 - RNA, 19 nt, Artificial Sequence
  Description of Artificial Sequence: Synthetic oligonucleotide
cugauagaaggugguggca

SEQ ID NO: 3063781 - RNA, 19 nt, Artificial Sequence
  Description of Artificial Sequence: Synthetic oligonucleotide
gaaguggaucugaucagau

SEQ ID NO: 3063782 - RNA, 19 nt, Artificial Sequence
  Description of Artificial Sequence: Synthetic oligonucleotide
guucccagacccuacgguu

SEQ ID NO: 3063783 - RNA, 19 nt, Artificial Sequence
  Description of Artificial Sequence: Synthetic oligonucleotide
uggagucugccaggugcug

SEQ ID NO: 3063784 - RNA, 19 nt, Artificial Sequence
  Description of Artificial Sequence: Synthetic oligonucleotide
agcaaaagcuguggagaua

SEQ ID NO: 3063785 - RNA, 19 nt, Artificial Sequence
  Description of Artificial Sequence: Synthetic oligonucleotide
gaauuggccuuggacaguu

SEQ ID NO: 3063786 - RNA, 19 nt, Artificial Sequence
  Description of Artificial Sequence: Synthetic oligonucleotide
accuucuucucuaggccau

SEQ ID NO: 3063787 - RNA, 19 nt, Artificial Sequence
  Description of Artificial Sequence: Synthetic oligonucleotide
aaaccuccaucagcugcuu

SEQ ID NO: 3063788 - RNA, 19 nt, Artificial Sequence
  Description of Artificial Sequence: Synthetic oligonucleotide
cuccgagaugguaucaaau

SEQ ID NO: 3063789 - RNA, 19 nt, Artificial Sequence
  Description of Artificial Sequence: Synthetic oligonucleotide
ggccuuggacaguucccag

SEQ ID NO: 3063790 - RNA, 19 nt, Artificial Sequence
  Description of Artificial Sequence: Synthetic oligonucleotide
cgagaugguaucaaauuua

SEQ ID NO: 3063791 - RNA, 19 nt, Artificial Sequence
  Description of Artificial Sequence: Synthetic oligonucleotide
uacaggcacccagcuuggc

SEQ ID NO: 3063792 - RNA, 19 nt, Artificial Sequence
  Description of Artificial Sequence: Synthetic oligonucleotide
gagucugccaggugcugau

SEQ ID NO: 3063793 - RNA, 19 nt, Artificial Sequence
  Description of Artificial Sequence: Synthetic oligonucleotide
auguuuucuccgagauggu

SEQ ID NO: 3063794 - RNA, 19 nt, Artificial Sequence
  Description of Artificial Sequence: Synthetic oligonucleotide
ugggauucacagggauguc

SEQ ID NO: 3063795 - RNA, 19 nt, Artificial Sequence
  Description of Artificial Sequence: Synthetic oligonucleotide
cagcuuggccauagcaaaa

SEQ ID NO: 3063796 - RNA, 19 nt, Artificial Sequence
  Description of Artificial Sequence: Synthetic oligonucleotide
aucagcugcuugagagugu

SEQ ID NO: 3063797 - RNA, 19 nt, Artificial Sequence
  Description of Artificial Sequence: Synthetic oligonucleotide
gccuuggacaguucccaga

SEQ ID NO: 3063798 - RNA, 19 nt, Artificial Sequence
  Description of Artificial Sequence: Synthetic oligonucleotide
gucaguggccuucuugguu

SEQ ID NO: 3063799 - RNA, 19 nt, Artificial Sequence
  Description of Artificial Sequence: Synthetic oligonucleotide
cccagcuuggccauagcaa

SEQ ID NO: 3063800 - RNA, 19 nt, Artificial Sequence
  Description of Artificial Sequence: Synthetic oligonucleotide
gugucauuacaggcaccca

SEQ ID NO: 3063801 - RNA, 19 nt, Artificial Sequence
  Description of Artificial Sequence: Synthetic oligonucleotide
aggcacccagcuuggccau

SEQ ID NO: 3063802 - RNA, 19 nt, Artificial Sequence
  Description of Artificial Sequence: Synthetic oligonucleotide
ccuacgguugguggccucc

SEQ ID NO: 3063803 - RNA, 19 nt, Artificial Sequence
  Description of Artificial Sequence: Synthetic oligonucleotide
ggugcugauagaagguggu

SEQ ID NO: 3063804 - RNA, 19 nt, Artificial Sequence
  Description of Artificial Sequence: Synthetic oligonucleotide
cacccagcuuggccauagc

SEQ ID NO: 3063805 - RNA, 19 nt, Artificial Sequence
  Description of Artificial Sequence: Synthetic oligonucleotide
gcacccagcuuggccauag

SEQ ID NO: 3063806 - RNA, 19 nt, Artificial Sequence
  Description of Artificial Sequence: Synthetic oligonucleotide
ggagucugccaggugcuga

SEQ ID NO: 3063807 - RNA, 19 nt, Artificial Sequence
  Description of Artificial Sequence: Synthetic oligonucleotide
ggagagcgguaaaugcaca

SEQ ID NO: 3063808 - RNA, 19 nt, Artificial Sequence
  Description of Artificial Sequence: Synthetic oligonucleotide
gccuccgggaccuucuucu

SEQ ID NO: 3063809 - RNA, 19 nt, Artificial Sequence
  Description of Artificial Sequence: Synthetic oligonucleotide
caaaagcuguggagauacu

SEQ ID NO: 3063810 - RNA, 19 nt, Artificial Sequence
  Description of Artificial Sequence: Synthetic oligonucleotide
cauuacaggcacccagcuu

SEQ ID NO: 3063811 - RNA, 19 nt, Artificial Sequence
  Description of Artificial Sequence: Synthetic oligonucleotide
aguggccuucuugguugga

SEQ ID NO: 3063812 - RNA, 19 nt, Artificial Sequence
  Description of Artificial Sequence: Synthetic oligonucleotide
ggacaguucccagacccua

SEQ ID NO: 3063813 - RNA, 19 nt, Artificial Sequence
  Description of Artificial Sequence: Synthetic oligonucleotide
cgguaaaugcacaugggau

SEQ ID NO: 3063814 - RNA, 19 nt, Artificial Sequence
  Description of Artificial Sequence: Synthetic oligonucleotide
uggccuccgggaccuucuu

SEQ ID NO: 3063815 - RNA, 19 nt, Artificial Sequence
  Description of Artificial Sequence: Synthetic oligonucleotide
acccuacgguugguggccu

SEQ ID NO: 3063816 - RNA, 19 nt, Artificial Sequence
  Description of Artificial Sequence: Synthetic oligonucleotide
cagcugcuugagaguguca

SEQ ID NO: 3063817 - RNA, 19 nt, Artificial Sequence
  Description of Artificial Sequence: Synthetic oligonucleotide
ccgagaugguaucaaauuu

SEQ ID NO: 3063818 - RNA, 19 nt, Artificial Sequence
  Description of Artificial Sequence: Synthetic oligonucleotide
ccaggugcugauagaaggu

SEQ ID NO: 3063819 - RNA, 19 nt, Artificial Sequence
  Description of Artificial Sequence: Synthetic oligonucleotide
ccagacccuacgguuggug

SEQ ID NO: 3063820 - RNA, 19 nt, Artificial Sequence
  Description of Artificial Sequence: Synthetic oligonucleotide
guggaucugaucagauguu

SEQ ID NO: 3063821 - RNA, 19 nt, Artificial Sequence
  Description of Artificial Sequence: Synthetic oligonucleotide
cuccgggaccuucuucucu

SEQ ID NO: 3063822 - RNA, 19 nt, Artificial Sequence
  Description of Artificial Sequence: Synthetic oligonucleotide
ggaucugaucagauguuuu

SEQ ID NO: 3063823 - RNA, 19 nt, Artificial Sequence
  Description of Artificial Sequence: Synthetic oligonucleotide
cgggaccuucuucucuagg

SEQ ID NO: 3063824 - RNA, 19 nt, Artificial Sequence
  Description of Artificial Sequence: Synthetic oligonucleotide
ccaucuucgucaguggccu

SEQ ID NO: 3063825 - RNA, 19 nt, Artificial Sequence
  Description of Artificial Sequence: Synthetic oligonucleotide
agucugccaggugcugaua

SEQ ID NO: 3063826 - RNA, 19 nt, Artificial Sequence
  Description of Artificial Sequence: Synthetic oligonucleotide
ccgggaccuucuucucuag

SEQ ID NO: 3063827 - RNA, 19 nt, Artificial Sequence
  Description of Artificial Sequence: Synthetic oligonucleotide
ccaucagcugcuugagagu

SEQ ID NO: 3063828 - RNA, 19 nt, Artificial Sequence
  Description of Artificial Sequence: Synthetic oligonucleotide
ggccuccgggaccuucuuc

SEQ ID NO: 3063829 - RNA, 19 nt, Artificial Sequence
  Description of Artificial Sequence: Synthetic oligonucleotide
ccuccgggaccuucuucuc

SEQ ID NO: 3063830 - RNA, 19 nt, Artificial Sequence
  Description of Artificial Sequence: Synthetic oligonucleotide
ccuucuucucuaggccauc

SEQ ID NO: 3063831 - RNA, 19 nt, Artificial Sequence
  Description of Artificial Sequence: Synthetic oligonucleotide
gguggccuccgggaccuuc

SEQ ID NO: 3063832 - RNA, 19 nt, Artificial Sequence
  Description of Artificial Sequence: Synthetic oligonucleotide
gcugcuugagagugucauu

SEQ ID NO: 3063833 - RNA, 19 nt, Artificial Sequence
  Description of Artificial Sequence: Synthetic oligonucleotide
cgguugguggccuccggga

SEQ ID NO: 3063834 - RNA, 19 nt, Artificial Sequence
  Description of Artificial Sequence: Synthetic oligonucleotide
cuaggccaucuucgucagu

SEQ ID NO: 3063835 - RNA, 19 nt, Artificial Sequence
  Description of Artificial Sequence: Synthetic oligonucleotide
cccuacgguugguggccuc

SEQ ID NO: 3063836 - RNA, 19 nt, Artificial Sequence
  Description of Artificial Sequence: Synthetic oligonucleotide
caucuucgucaguggccuu

SEQ ID NO: 3063837 - RNA, 19 nt, Artificial Sequence
  Description of Artificial Sequence: Synthetic oligonucleotide
cuucgucaguggccuucuu

SEQ ID NO: 3063838 - RNA, 19 nt, Artificial Sequence
  Description of Artificial Sequence: Synthetic oligonucleotide
ugguggccuccgggaccuu

SEQ ID NO: 3063839 - RNA, 19 nt, Artificial Sequence
  Description of Artificial Sequence: Synthetic oligonucleotide
ggcacccagcuuggccaua

SEQ ID NO: 3063840 - RNA, 19 nt, Artificial Sequence
  Description of Artificial Sequence: Synthetic oligonucleotide
cccagacccuacgguuggu

SEQ ID NO: 3063841 - RNA, 19 nt, Artificial Sequence
  Description of Artificial Sequence: Synthetic oligonucleotide
aauauggugguauagcuga

SEQ ID NO: 3063842 - RNA, 19 nt, Artificial Sequence
  Description of Artificial Sequence: Synthetic oligonucleotide
cucacugggaacaauaugg

SEQ ID NO: 3063843 - RNA, 19 nt, Artificial Sequence
  Description of Artificial Sequence: Synthetic oligonucleotide
aacaauauggugguauagc

SEQ ID NO: 3063844 - RNA, 19 nt, Artificial Sequence
  Description of Artificial Sequence: Synthetic oligonucleotide
auagcugaaguuuuccagc

SEQ ID NO: 3063845 - RNA, 19 nt, Artificial Sequence
  Description of Artificial Sequence: Synthetic oligonucleotide
aaguuuuccagcuggcacg

SEQ ID NO: 3063846 - RNA, 19 nt, Artificial Sequence
  Description of Artificial Sequence: Synthetic oligonucleotide
ucaugguugggacaguggg

SEQ ID NO: 3063847 - RNA, 19 nt, Artificial Sequence
  Description of Artificial Sequence: Synthetic oligonucleotide
uuuagacucaguucaugcg

SEQ ID NO: 3063848 - RNA, 19 nt, Artificial Sequence
  Description of Artificial Sequence: Synthetic oligonucleotide
uauagcugaaguuuuccag

SEQ ID NO: 3063849 - RNA, 19 nt, Artificial Sequence
  Description of Artificial Sequence: Synthetic oligonucleotide
ugccuuuagacucaguuca

SEQ ID NO: 3063850 - RNA, 19 nt, Artificial Sequence
  Description of Artificial Sequence: Synthetic oligonucleotide
acugggaacaauauggugg

SEQ ID NO: 3063851 - RNA, 19 nt, Artificial Sequence
  Description of Artificial Sequence: Synthetic oligonucleotide
cuuuagacucaguucaugc

SEQ ID NO: 3063852 - RNA, 19 nt, Artificial Sequence
  Description of Artificial Sequence: Synthetic oligonucleotide
uauccuuguuuguaggagg

SEQ ID NO: 3063853 - RNA, 19 nt, Artificial Sequence
  Description of Artificial Sequence: Synthetic oligonucleotide
uuagacucaguucaugcgu

SEQ ID NO: 3063854 - RNA, 19 nt, Artificial Sequence
  Description of Artificial Sequence: Synthetic oligonucleotide
uacacugccaccaccuggg

SEQ ID NO: 3063855 - RNA, 19 nt, Artificial Sequence
  Description of Artificial Sequence: Synthetic oligonucleotide
cuugucuugggcuucuagg

SEQ ID NO: 3063856 - RNA, 19 nt, Artificial Sequence
  Description of Artificial Sequence: Synthetic oligonucleotide
acaauauggugguauagcu

SEQ ID NO: 3063857 - RNA, 19 nt, Artificial Sequence
  Description of Artificial Sequence: Synthetic oligonucleotide
uucuaggauugucacaggc

SEQ ID NO: 3063858 - RNA, 19 nt, Artificial Sequence
  Description of Artificial Sequence: Synthetic oligonucleotide
ugcuccuggccacaaaagg

SEQ ID NO: 3063859 - RNA, 19 nt, Artificial Sequence
  Description of Artificial Sequence: Synthetic oligonucleotide
gaaguuuuccagcuggcac

SEQ ID NO: 3063860 - RNA, 19 nt, Artificial Sequence
  Description of Artificial Sequence: Synthetic oligonucleotide
cacaaaaggguacacugcc

SEQ ID NO: 3063861 - RNA, 19 nt, Artificial Sequence
  Description of Artificial Sequence: Synthetic oligonucleotide
cuaggauugucacaggcug

SEQ ID NO: 3063862 - RNA, 19 nt, Artificial Sequence
  Description of Artificial Sequence: Synthetic oligonucleotide
ugggcucuggaguugaaag

SEQ ID NO: 3063863 - RNA, 19 nt, Artificial Sequence
  Description of Artificial Sequence: Synthetic oligonucleotide
uguaggagggccacgauuu

SEQ ID NO: 3063864 - RNA, 19 nt, Artificial Sequence
  Description of Artificial Sequence: Synthetic oligonucleotide
aguucaugcgugcuccugg

SEQ ID NO: 3063865 - RNA, 19 nt, Artificial Sequence
  Description of Artificial Sequence: Synthetic oligonucleotide
ugcuugguauccuuguuug

SEQ ID NO: 3063866 - RNA, 19 nt, Artificial Sequence
  Description of Artificial Sequence: Synthetic oligonucleotide
uugucuugggcuucuagga

SEQ ID NO: 3063867 - RNA, 19 nt, Artificial Sequence
  Description of Artificial Sequence: Synthetic oligonucleotide
ucuucauguauccccgucu

SEQ ID NO: 3063868 - RNA, 19 nt, Artificial Sequence
  Description of Artificial Sequence: Synthetic oligonucleotide
uuuuccagcuggcacguac

SEQ ID NO: 3063869 - RNA, 19 nt, Artificial Sequence
  Description of Artificial Sequence: Synthetic oligonucleotide
ugggcuucuaggauuguca

SEQ ID NO: 3063870 - RNA, 19 nt, Artificial Sequence
  Description of Artificial Sequence: Synthetic oligonucleotide
uaggauugucacaggcugg

SEQ ID NO: 3063871 - RNA, 19 nt, Artificial Sequence
  Description of Artificial Sequence: Synthetic oligonucleotide
ucuugggcuucuaggauug

SEQ ID NO: 3063872 - RNA, 19 nt, Artificial Sequence
  Description of Artificial Sequence: Synthetic oligonucleotide
ucucacugggaacaauaug

SEQ ID NO: 3063873 - RNA, 19 nt, Artificial Sequence
  Description of Artificial Sequence: Synthetic oligonucleotide
ucauguauccccgucuggc

SEQ ID NO: 3063874 - RNA, 19 nt, Artificial Sequence
  Description of Artificial Sequence: Synthetic oligonucleotide
caaaaggguacacugccac

SEQ ID NO: 3063875 - RNA, 19 nt, Artificial Sequence
  Description of Artificial Sequence: Synthetic oligonucleotide
aggauugucacaggcuggc

SEQ ID NO: 3063876 - RNA, 19 nt, Artificial Sequence
  Description of Artificial Sequence: Synthetic oligonucleotide
aaccagcgacuguuguugc

SEQ ID NO: 3063877 - RNA, 19 nt, Artificial Sequence
  Description of Artificial Sequence: Synthetic oligonucleotide
guguccaccaaccagcgac

SEQ ID NO: 3063878 - RNA, 19 nt, Artificial Sequence
  Description of Artificial Sequence: Synthetic oligonucleotide
uagacucaguucaugcgug

SEQ ID NO: 3063879 - RNA, 19 nt, Artificial Sequence
  Description of Artificial Sequence: Synthetic oligonucleotide
uggaguugaaagccagcag

SEQ ID NO: 3063880 - RNA, 19 nt, Artificial Sequence
  Description of Artificial Sequence: Synthetic oligonucleotide
caauauggugguauagcug

SEQ ID NO: 3063881 - RNA, 19 nt, Artificial Sequence
  Description of Artificial Sequence: Synthetic oligonucleotide
uucauguauccccgucugg

SEQ ID NO: 3063882 - RNA, 19 nt, Artificial Sequence
  Description of Artificial Sequence: Synthetic oligonucleotide
gaacaauauggugguauag

SEQ ID NO: 3063883 - RNA, 19 nt, Artificial Sequence
  Description of Artificial Sequence: Synthetic oligonucleotide
ucaugcgugcuccuggcca

SEQ ID NO: 3063884 - RNA, 19 nt, Artificial Sequence
  Description of Artificial Sequence: Synthetic oligonucleotide
cagucuucauguauccccg

SEQ ID NO: 3063885 - RNA, 19 nt, Artificial Sequence
  Description of Artificial Sequence: Synthetic oligonucleotide
agacucaguucaugcgugc

SEQ ID NO: 3063886 - RNA, 19 nt, Artificial Sequence
  Description of Artificial Sequence: Synthetic oligonucleotide
uugaaagccagcagucuuc

SEQ ID NO: 3063887 - RNA, 19 nt, Artificial Sequence
  Description of Artificial Sequence: Synthetic oligonucleotide
ucuugucuugggcuucuag

SEQ ID NO: 3063888 - RNA, 19 nt, Artificial Sequence
  Description of Artificial Sequence: Synthetic oligonucleotide
ugggucaugguugggacag

SEQ ID NO: 3063889 - RNA, 19 nt, Artificial Sequence
  Description of Artificial Sequence: Synthetic oligonucleotide
uuuccagcuggcacguacc

SEQ ID NO: 3063890 - RNA, 19 nt, Artificial Sequence
  Description of Artificial Sequence: Synthetic oligonucleotide
caugguugggacagugggg

SEQ ID NO: 3063891 - RNA, 19 nt, Artificial Sequence
  Description of Artificial Sequence: Synthetic oligonucleotide
auggugguauagcugaagu

SEQ ID NO: 3063892 - RNA, 19 nt, Artificial Sequence
  Description of Artificial Sequence: Synthetic oligonucleotide
uguugcuugguauccuugu

SEQ ID NO: 3063893 - RNA, 19 nt, Artificial Sequence
  Description of Artificial Sequence: Synthetic oligonucleotide
ucacugggaacaauauggu

SEQ ID NO: 3063894 - RNA, 19 nt, Artificial Sequence
  Description of Artificial Sequence: Synthetic oligonucleotide
acucaguucaugcgugcuc

SEQ ID NO: 3063895 - RNA, 19 nt, Artificial Sequence
  Description of Artificial Sequence: Synthetic oligonucleotide
guacacugccaccaccugg

SEQ ID NO: 3063896 - RNA, 19 nt, Artificial Sequence
  Description of Artificial Sequence: Synthetic oligonucleotide
gccacaaaaggguacacug

SEQ ID NO: 3063897 - RNA, 19 nt, Artificial Sequence
  Description of Artificial Sequence: Synthetic oligonucleotide
cuggccugccuuuagacuc

SEQ ID NO: 3063898 - RNA, 19 nt, Artificial Sequence
  Description of Artificial Sequence: Synthetic oligonucleotide
ucuggaguugaaagccagc

SEQ ID NO: 3063899 - RNA, 19 nt, Artificial Sequence
  Description of Artificial Sequence: Synthetic oligonucleotide
gcagucuucauguaucccc

SEQ ID NO: 3063900 - RNA, 19 nt, Artificial Sequence
  Description of Artificial Sequence: Synthetic oligonucleotide
guauccuuguuuguaggag

SEQ ID NO: 3063901 - RNA, 19 nt, Artificial Sequence
  Description of Artificial Sequence: Synthetic oligonucleotide
aggguacacugccaccacc

SEQ ID NO: 3063902 - RNA, 19 nt, Artificial Sequence
  Description of Artificial Sequence: Synthetic oligonucleotide
uauggugguauagcugaag

SEQ ID NO: 3063903 - RNA, 19 nt, Artificial Sequence
  Description of Artificial Sequence: Synthetic oligonucleotide
cucaguucaugcgugcucc

SEQ ID NO: 3063904 - RNA, 19 nt, Artificial Sequence
  Description of Artificial Sequence: Synthetic oligonucleotide
uagcugaaguuuuccagcu

SEQ ID NO: 3063905 - RNA, 19 nt, Artificial Sequence
  Description of Artificial Sequence: Synthetic oligonucleotide
uuguugcuugguauccuug

SEQ ID NO: 3063906 - RNA, 19 nt, Artificial Sequence
  Description of Artificial Sequence: Synthetic oligonucleotide
cauguauccccgucuggcc

SEQ ID NO: 3063907 - RNA, 19 nt, Artificial Sequence
  Description of Artificial Sequence: Synthetic oligonucleotide
cuucauguauccccgucug

SEQ ID NO: 3063908 - RNA, 19 nt, Artificial Sequence
  Description of Artificial Sequence: Synthetic oligonucleotide
uucucacugggaacaauau

SEQ ID NO: 3063909 - RNA, 19 nt, Artificial Sequence
  Description of Artificial Sequence: Synthetic oligonucleotide
ugaaguuuuccagcuggca

SEQ ID NO: 3063910 - RNA, 19 nt, Artificial Sequence
  Description of Artificial Sequence: Synthetic oligonucleotide
auccuuguuuguaggaggg

SEQ ID NO: 3063911 - RNA, 19 nt, Artificial Sequence
  Description of Artificial Sequence: Synthetic oligonucleotide
cucuggaguugaaagccag

SEQ ID NO: 3063912 - RNA, 19 nt, Artificial Sequence
  Description of Artificial Sequence: Synthetic oligonucleotide
guauagcugaaguuuucca

SEQ ID NO: 3063913 - RNA, 19 nt, Artificial Sequence
  Description of Artificial Sequence: Synthetic oligonucleotide
uccccuucuugucuugggc

SEQ ID NO: 3063914 - RNA, 19 nt, Artificial Sequence
  Description of Artificial Sequence: Synthetic oligonucleotide
cugaaguuuuccagcuggc

SEQ ID NO: 3063915 - RNA, 19 nt, Artificial Sequence
  Description of Artificial Sequence: Synthetic oligonucleotide
ccuguguccaccaaccagc

SEQ ID NO: 3063916 - RNA, 19 nt, Artificial Sequence
  Description of Artificial Sequence: Synthetic oligonucleotide
caaccagcgacuguuguug

SEQ ID NO: 3063917 - RNA, 19 nt, Artificial Sequence
  Description of Artificial Sequence: Synthetic oligonucleotide
uugcuugguauccuuguuu

SEQ ID NO: 3063918 - RNA, 19 nt, Artificial Sequence
  Description of Artificial Sequence: Synthetic oligonucleotide
ugggacaguggggacagag

SEQ ID NO: 3063919 - RNA, 19 nt, Artificial Sequence
  Description of Artificial Sequence: Synthetic oligonucleotide
cugccuuuagacucaguuc

SEQ ID NO: 3063920 - RNA, 19 nt, Artificial Sequence
  Description of Artificial Sequence: Synthetic oligonucleotide
agcagucuucauguauccc

SEQ ID NO: 3063921 - RNA, 19 nt, Artificial Sequence
  Description of Artificial Sequence: Synthetic oligonucleotide
gggacagaggguugggugg

SEQ ID NO: 3063922 - RNA, 19 nt, Artificial Sequence
  Description of Artificial Sequence: Synthetic oligonucleotide
agcuccuucucacugggaa

SEQ ID NO: 3063923 - RNA, 19 nt, Artificial Sequence
  Description of Artificial Sequence: Synthetic oligonucleotide
augguugggacagugggga

SEQ ID NO: 3063924 - RNA, 19 nt, Artificial Sequence
  Description of Artificial Sequence: Synthetic oligonucleotide
ugaaagccagcagucuuca

SEQ ID NO: 3063925 - RNA, 19 nt, Artificial Sequence
  Description of Artificial Sequence: Synthetic oligonucleotide
ugucuugggcuucuaggau

SEQ ID NO: 3063926 - RNA, 19 nt, Artificial Sequence
  Description of Artificial Sequence: Synthetic oligonucleotide
uuccccuucuugucuuggg

SEQ ID NO: 3063927 - RNA, 19 nt, Artificial Sequence
  Description of Artificial Sequence: Synthetic oligonucleotide
uuguaggagggccacgauu

SEQ ID NO: 3063928 - RNA, 19 nt, Artificial Sequence
  Description of Artificial Sequence: Synthetic oligonucleotide
gaguugaaagccagcaguc

SEQ ID NO: 3063929 - RNA, 19 nt, Artificial Sequence
  Description of Artificial Sequence: Synthetic oligonucleotide
ugguauagcugaaguuuuc

SEQ ID NO: 3063930 - RNA, 19 nt, Artificial Sequence
  Description of Artificial Sequence: Synthetic oligonucleotide
cacugggaacaauauggug

SEQ ID NO: 3063931 - RNA, 19 nt, Artificial Sequence
  Description of Artificial Sequence: Synthetic oligonucleotide
uggguuccccuucuugucu

SEQ ID NO: 3063932 - RNA, 19 nt, Artificial Sequence
  Description of Artificial Sequence: Synthetic oligonucleotide
cuuguuuguaggagggcca

SEQ ID NO: 3063933 - RNA, 19 nt, Artificial Sequence
  Description of Artificial Sequence: Synthetic oligonucleotide
auguauccccgucuggccu

SEQ ID NO: 3063934 - RNA, 19 nt, Artificial Sequence
  Description of Artificial Sequence: Synthetic oligonucleotide
uuccagcuggcacguaccc

SEQ ID NO: 3063935 - RNA, 19 nt, Artificial Sequence
  Description of Artificial Sequence: Synthetic oligonucleotide
cagcagucuucauguaucc

SEQ ID NO: 3063936 - RNA, 19 nt, Artificial Sequence
  Description of Artificial Sequence: Synthetic oligonucleotide
cuguuguugcuugguaucc

SEQ ID NO: 3063937 - RNA, 19 nt, Artificial Sequence
  Description of Artificial Sequence: Synthetic oligonucleotide
gguauagcugaaguuuucc

SEQ ID NO: 3063938 - RNA, 19 nt, Artificial Sequence
  Description of Artificial Sequence: Synthetic oligonucleotide
accaccugggucaugguug

SEQ ID NO: 3063939 - RNA, 19 nt, Artificial Sequence
  Description of Artificial Sequence: Synthetic oligonucleotide
uguccaccaaccagcgacu

SEQ ID NO: 3063940 - RNA, 19 nt, Artificial Sequence
  Description of Artificial Sequence: Synthetic oligonucleotide
guugggacaguggggacag

SEQ ID NO: 3063941 - RNA, 19 nt, Artificial Sequence
  Description of Artificial Sequence: Synthetic oligonucleotide
uguuuguaggagggccacg

SEQ ID NO: 3063942 - RNA, 19 nt, Artificial Sequence
  Description of Artificial Sequence: Synthetic oligonucleotide
gauugucacaggcuggccu

SEQ ID NO: 3063943 - RNA, 19 nt, Artificial Sequence
  Description of Artificial Sequence: Synthetic oligonucleotide
cuucuaggauugucacagg

SEQ ID NO: 3063944 - RNA, 19 nt, Artificial Sequence
  Description of Artificial Sequence: Synthetic oligonucleotide
aguugaaagccagcagucu

SEQ ID NO: 3063945 - RNA, 19 nt, Artificial Sequence
  Description of Artificial Sequence: Synthetic oligonucleotide
uucaugcgugcuccuggcc

SEQ ID NO: 3063946 - RNA, 19 nt, Artificial Sequence
  Description of Artificial Sequence: Synthetic oligonucleotide
agcgacuguuguugcuugg

SEQ ID NO: 3063947 - RNA, 19 nt, Artificial Sequence
  Description of Artificial Sequence: Synthetic oligonucleotide
guucaugcgugcuccuggc

SEQ ID NO: 3063948 - RNA, 19 nt, Artificial Sequence
  Description of Artificial Sequence: Synthetic oligonucleotide
ggcucuggaguugaaagcc

SEQ ID NO: 3063949 - RNA, 19 nt, Artificial Sequence
  Description of Artificial Sequence: Synthetic oligonucleotide
ggaguugaaagccagcagu

SEQ ID NO: 3063950 - RNA, 19 nt, Artificial Sequence
  Description of Artificial Sequence: Synthetic oligonucleotide
gcuccuggccacaaaaggg

SEQ ID NO: 3063951 - RNA, 19 nt, Artificial Sequence
  Description of Artificial Sequence: Synthetic oligonucleotide
cuucucacugggaacaaua

SEQ ID NO: 3063952 - RNA, 19 nt, Artificial Sequence
  Description of Artificial Sequence: Synthetic oligonucleotide
uuguuuguaggagggccac

SEQ ID NO: 3063953 - RNA, 19 nt, Artificial Sequence
  Description of Artificial Sequence: Synthetic oligonucleotide
uggugguauagcugaaguu

SEQ ID NO: 3063954 - RNA, 19 nt, Artificial Sequence
  Description of Artificial Sequence: Synthetic oligonucleotide
gucaugguugggacagugg

SEQ ID NO: 3063955 - RNA, 19 nt, Artificial Sequence
  Description of Artificial Sequence: Synthetic oligonucleotide
guuuguaggagggccacga

SEQ ID NO: 3063956 - RNA, 19 nt, Artificial Sequence
  Description of Artificial Sequence: Synthetic oligonucleotide
uccccgucuggccucugag

SEQ ID NO: 3063957 - RNA, 19 nt, Artificial Sequence
  Description of Artificial Sequence: Synthetic oligonucleotide
uguuguugcuugguauccu

SEQ ID NO: 3063958 - RNA, 19 nt, Artificial Sequence
  Description of Artificial Sequence: Synthetic oligonucleotide
uguauccccgucuggccuc

SEQ ID NO: 3063959 - RNA, 19 nt, Artificial Sequence
  Description of Artificial Sequence: Synthetic oligonucleotide
uuuguaggagggccacgau

SEQ ID NO: 3063960 - RNA, 19 nt, Artificial Sequence
  Description of Artificial Sequence: Synthetic oligonucleotide
cuggaguugaaagccagca

SEQ ID NO: 3063961 - RNA, 19 nt, Artificial Sequence
  Description of Artificial Sequence: Synthetic oligonucleotide
ccacaaaaggguacacugc

SEQ ID NO: 3063962 - RNA, 19 nt, Artificial Sequence
  Description of Artificial Sequence: Synthetic oligonucleotide
ccuuguuuguaggagggcc

SEQ ID NO: 3063963 - RNA, 19 nt, Artificial Sequence
  Description of Artificial Sequence: Synthetic oligonucleotide
accaaccagcgacuguugu

SEQ ID NO: 3063964 - RNA, 19 nt, Artificial Sequence
  Description of Artificial Sequence: Synthetic oligonucleotide
uggccucugagcuccuucu

SEQ ID NO: 3063965 - RNA, 19 nt, Artificial Sequence
  Description of Artificial Sequence: Synthetic oligonucleotide
caugcgugcuccuggccac

SEQ ID NO: 3063966 - RNA, 19 nt, Artificial Sequence
  Description of Artificial Sequence: Synthetic oligonucleotide
uccaccaaccagcgacugu

SEQ ID NO: 3063967 - RNA, 19 nt, Artificial Sequence
  Description of Artificial Sequence: Synthetic oligonucleotide
gguugggugggcucuggag

SEQ ID NO: 3063968 - RNA, 19 nt, Artificial Sequence
  Description of Artificial Sequence: Synthetic oligonucleotide
aguuuuccagcuggcacgu

SEQ ID NO: 3063969 - RNA, 19 nt, Artificial Sequence
  Description of Artificial Sequence: Synthetic oligonucleotide
gguauccuuguuuguagga

SEQ ID NO: 3063970 - RNA, 19 nt, Artificial Sequence
  Description of Artificial Sequence: Synthetic oligonucleotide
gacuguuguugcuugguau

SEQ ID NO: 3063971 - RNA, 19 nt, Artificial Sequence
  Description of Artificial Sequence: Synthetic oligonucleotide
ggggacagaggguugggug

SEQ ID NO: 3063972 - RNA, 19 nt, Artificial Sequence
  Description of Artificial Sequence: Synthetic oligonucleotide
uccuuguuuguaggagggc

SEQ ID NO: 3063973 - RNA, 19 nt, Artificial Sequence
  Description of Artificial Sequence: Synthetic oligonucleotide
uggccugccuuuagacuca

SEQ ID NO: 3063974 - RNA, 19 nt, Artificial Sequence
  Description of Artificial Sequence: Synthetic oligonucleotide
gucuucauguauccccguc

SEQ ID NO: 3063975 - RNA, 19 nt, Artificial Sequence
  Description of Artificial Sequence: Synthetic oligonucleotide
uugggugggcucuggaguu

SEQ ID NO: 3063976 - RNA, 19 nt, Artificial Sequence
  Description of Artificial Sequence: Synthetic oligonucleotide
acaaaaggguacacugcca

SEQ ID NO: 3063977 - RNA, 19 nt, Artificial Sequence
  Description of Artificial Sequence: Synthetic oligonucleotide
ccagcagucuucauguauc

SEQ ID NO: 3063978 - RNA, 19 nt, Artificial Sequence
  Description of Artificial Sequence: Synthetic oligonucleotide
uguguccaccaaccagcga

SEQ ID NO: 3063979 - RNA, 19 nt, Artificial Sequence
  Description of Artificial Sequence: Synthetic oligonucleotide
cuugguauccuuguuugua

SEQ ID NO: 3063980 - RNA, 19 nt, Artificial Sequence
  Description of Artificial Sequence: Synthetic oligonucleotide
guugggugggcucuggagu

SEQ ID NO: 3063981 - RNA, 19 nt, Artificial Sequence
  Description of Artificial Sequence: Synthetic oligonucleotide
ucacaggcuggccugccuu

SEQ ID NO: 3063982 - RNA, 19 nt, Artificial Sequence
  Description of Artificial Sequence: Synthetic oligonucleotide
agaggguugggugggcucu

SEQ ID NO: 3063983 - RNA, 19 nt, Artificial Sequence
  Description of Artificial Sequence: Synthetic oligonucleotide
ucaguucaugcgugcuccu

SEQ ID NO: 3063984 - RNA, 19 nt, Artificial Sequence
  Description of Artificial Sequence: Synthetic oligonucleotide
cugggaacaauaugguggu

SEQ ID NO: 3063985 - RNA, 19 nt, Artificial Sequence
  Description of Artificial Sequence: Synthetic oligonucleotide
agucuucauguauccccgu

SEQ ID NO: 3063986 - RNA, 19 nt, Artificial Sequence
  Description of Artificial Sequence: Synthetic oligonucleotide
guuccccuucuugucuugg

SEQ ID NO: 3063987 - RNA, 19 nt, Artificial Sequence
  Description of Artificial Sequence: Synthetic oligonucleotide
guugaaagccagcagucuu

SEQ ID NO: 3063988 - RNA, 19 nt, Artificial Sequence
  Description of Artificial Sequence: Synthetic oligonucleotide
uugggcuucuaggauuguc

SEQ ID NO: 3063989 - RNA, 19 nt, Artificial Sequence
  Description of Artificial Sequence: Synthetic oligonucleotide
gggcucuggaguugaaagc

SEQ ID NO: 3063990 - RNA, 19 nt, Artificial Sequence
  Description of Artificial Sequence: Synthetic oligonucleotide
uccagcuggcacguacccc

SEQ ID NO: 3063991 - RNA, 19 nt, Artificial Sequence
  Description of Artificial Sequence: Synthetic oligonucleotide
guaggagggccacgauuug

SEQ ID NO: 3063992 - RNA, 19 nt, Artificial Sequence
  Description of Artificial Sequence: Synthetic oligonucleotide
ggaacaauauggugguaua

SEQ ID NO: 3063993 - RNA, 19 nt, Artificial Sequence
  Description of Artificial Sequence: Synthetic oligonucleotide
cagcgacuguuguugcuug

SEQ ID NO: 3063994 - RNA, 19 nt, Artificial Sequence
  Description of Artificial Sequence: Synthetic oligonucleotide
accugggucaugguuggga

SEQ ID NO: 3063995 - RNA, 19 nt, Artificial Sequence
  Description of Artificial Sequence: Synthetic oligonucleotide
accagcgacuguuguugcu

SEQ ID NO: 3063996 - RNA, 19 nt, Artificial Sequence
  Description of Artificial Sequence: Synthetic oligonucleotide
ggugguauagcugaaguuu

SEQ ID NO: 3063997 - RNA, 19 nt, Artificial Sequence
  Description of Artificial Sequence: Synthetic oligonucleotide
gggcuucuaggauugucac

SEQ ID NO: 3063998 - RNA, 19 nt, Artificial Sequence
  Description of Artificial Sequence: Synthetic oligonucleotide
uugucacaggcuggccugc

SEQ ID NO: 3063999 - RNA, 19 nt, Artificial Sequence
  Description of Artificial Sequence: Synthetic oligonucleotide
cuccuggccacaaaagggu

SEQ ID NO: 3064000 - RNA, 19 nt, Artificial Sequence
  Description of Artificial Sequence: Synthetic oligonucleotide
gugcuccuggccacaaaag

SEQ ID NO: 3064001 - RNA, 19 nt, Artificial Sequence
  Description of Artificial Sequence: Synthetic oligonucleotide
ugguugggacaguggggac

SEQ ID NO: 3064002 - RNA, 19 nt, Artificial Sequence
  Description of Artificial Sequence: Synthetic oligonucleotide
cuggccucugagcuccuuc

SEQ ID NO: 3064003 - RNA, 19 nt, Artificial Sequence
  Description of Artificial Sequence: Synthetic oligonucleotide
cuggccacaaaaggguaca

SEQ ID NO: 3064004 - RNA, 19 nt, Artificial Sequence
  Description of Artificial Sequence: Synthetic oligonucleotide
cagaggguugggugggcuc

SEQ ID NO: 3064005 - RNA, 19 nt, Artificial Sequence
  Description of Artificial Sequence: Synthetic oligonucleotide
gguacacugccaccaccug

SEQ ID NO: 3064006 - RNA, 19 nt, Artificial Sequence
  Description of Artificial Sequence: Synthetic oligonucleotide
ggucaugguugggacagug

SEQ ID NO: 3064007 - RNA, 19 nt, Artificial Sequence
  Description of Artificial Sequence: Synthetic oligonucleotide
caccaaccagcgacuguug

SEQ ID NO: 3064008 - RNA, 19 nt, Artificial Sequence
  Description of Artificial Sequence: Synthetic oligonucleotide
ccugggucaugguugggac

SEQ ID NO: 3064009 - RNA, 19 nt, Artificial Sequence
  Description of Artificial Sequence: Synthetic oligonucleotide
cccuguguccaccaaccag

SEQ ID NO: 3064010 - RNA, 19 nt, Artificial Sequence
  Description of Artificial Sequence: Synthetic oligonucleotide
ugucacaggcuggccugcc

SEQ ID NO: 3064011 - RNA, 19 nt, Artificial Sequence
  Description of Artificial Sequence: Synthetic oligonucleotide
ccucugagcuccuucucac

SEQ ID NO: 3064012 - RNA, 19 nt, Artificial Sequence
  Description of Artificial Sequence: Synthetic oligonucleotide
ggcuggccugccuuuagac

SEQ ID NO: 3064013 - RNA, 19 nt, Artificial Sequence
  Description of Artificial Sequence: Synthetic oligonucleotide
ccuggccacaaaaggguac

SEQ ID NO: 3064014 - RNA, 19 nt, Artificial Sequence
  Description of Artificial Sequence: Synthetic oligonucleotide
gcuccuucucacugggaac

SEQ ID NO: 3064015 - RNA, 19 nt, Artificial Sequence
  Description of Artificial Sequence: Synthetic oligonucleotide
caguucaugcgugcuccug

SEQ ID NO: 3064016 - RNA, 19 nt, Artificial Sequence
  Description of Artificial Sequence: Synthetic oligonucleotide
aggcuccauucuggguucc

SEQ ID NO: 3064017 - RNA, 19 nt, Artificial Sequence
  Description of Artificial Sequence: Synthetic oligonucleotide
cugggucaugguugggaca

SEQ ID NO: 3064018 - RNA, 19 nt, Artificial Sequence
  Description of Artificial Sequence: Synthetic oligonucleotide
uggccacaaaaggguacac

SEQ ID NO: 3064019 - RNA, 19 nt, Artificial Sequence
  Description of Artificial Sequence: Synthetic oligonucleotide
ggcuucuaggauugucaca

SEQ ID NO: 3064020 - RNA, 19 nt, Artificial Sequence
  Description of Artificial Sequence: Synthetic oligonucleotide
gucuugggcuucuaggauu

SEQ ID NO: 3064021 - RNA, 19 nt, Artificial Sequence
  Description of Artificial Sequence: Synthetic oligonucleotide
caguggggacagaggguug

SEQ ID NO: 3064022 - RNA, 19 nt, Artificial Sequence
  Description of Artificial Sequence: Synthetic oligonucleotide
ccuuuagacucaguucaug

SEQ ID NO: 3064023 - RNA, 19 nt, Artificial Sequence
  Description of Artificial Sequence: Synthetic oligonucleotide
ugggugggcucuggaguug

SEQ ID NO: 3064024 - RNA, 19 nt, Artificial Sequence
  Description of Artificial Sequence: Synthetic oligonucleotide
guuguugcuugguauccuu

SEQ ID NO: 3064025 - RNA, 19 nt, Artificial Sequence
  Description of Artificial Sequence: Synthetic oligonucleotide
uccuucucacugggaacaa

SEQ ID NO: 3064026 - RNA, 19 nt, Artificial Sequence
  Description of Artificial Sequence: Synthetic oligonucleotide
gggaacaauauggugguau

SEQ ID NO: 3064027 - RNA, 19 nt, Artificial Sequence
  Description of Artificial Sequence: Synthetic oligonucleotide
gguugggacaguggggaca

SEQ ID NO: 3064028 - RNA, 19 nt, Artificial Sequence
  Description of Artificial Sequence: Synthetic oligonucleotide
aggguugggugggcucugg

SEQ ID NO: 3064029 - RNA, 19 nt, Artificial Sequence
  Description of Artificial Sequence: Synthetic oligonucleotide
gccucugagcuccuucuca

SEQ ID NO: 3064030 - RNA, 19 nt, Artificial Sequence
  Description of Artificial Sequence: Synthetic oligonucleotide
gacucaguucaugcgugcu

SEQ ID NO: 3064031 - RNA, 19 nt, Artificial Sequence
  Description of Artificial Sequence: Synthetic oligonucleotide
auauggugguauagcugaa

SEQ ID NO: 3064032 - RNA, 19 nt, Artificial Sequence
  Description of Artificial Sequence: Synthetic oligonucleotide
auccccgucuggccucuga

SEQ ID NO: 3064033 - RNA, 19 nt, Artificial Sequence
  Description of Artificial Sequence: Synthetic oligonucleotide
gguuccccuucuugucuug

SEQ ID NO: 3064034 - RNA, 19 nt, Artificial Sequence
  Description of Artificial Sequence: Synthetic oligonucleotide
gacaguggggacagagggu

SEQ ID NO: 3064035 - RNA, 19 nt, Artificial Sequence
  Description of Artificial Sequence: Synthetic oligonucleotide
guccaccaaccagcgacug

SEQ ID NO: 3064036 - RNA, 19 nt, Artificial Sequence
  Description of Artificial Sequence: Synthetic oligonucleotide
gcuccauucuggguucccc

SEQ ID NO: 3064037 - RNA, 19 nt, Artificial Sequence
  Description of Artificial Sequence: Synthetic oligonucleotide
gaggguugggugggcucug

SEQ ID NO: 3064038 - RNA, 19 nt, Artificial Sequence
  Description of Artificial Sequence: Synthetic oligonucleotide
auucuggguuccccuucuu

SEQ ID NO: 3064039 - RNA, 19 nt, Artificial Sequence
  Description of Artificial Sequence: Synthetic oligonucleotide
gugguauagcugaaguuuu

SEQ ID NO: 3064040 - RNA, 19 nt, Artificial Sequence
  Description of Artificial Sequence: Synthetic oligonucleotide
cuccauucuggguuccccu

SEQ ID NO: 3064041 - RNA, 19 nt, Artificial Sequence
  Description of Artificial Sequence: Synthetic oligonucleotide
ggauugucacaggcuggcc

SEQ ID NO: 3064042 - RNA, 19 nt, Artificial Sequence
  Description of Artificial Sequence: Synthetic oligonucleotide
ugggaacaauaugguggua

SEQ ID NO: 3064043 - RNA, 19 nt, Artificial Sequence
  Description of Artificial Sequence: Synthetic oligonucleotide
ccugccuuuagacucaguu

SEQ ID NO: 3064044 - RNA, 19 nt, Artificial Sequence
  Description of Artificial Sequence: Synthetic oligonucleotide
gugggcucuggaguugaaa

SEQ ID NO: 3064045 - RNA, 19 nt, Artificial Sequence
  Description of Artificial Sequence: Synthetic oligonucleotide
ugcgugcuccuggccacaa

SEQ ID NO: 3064046 - RNA, 19 nt, Artificial Sequence
  Description of Artificial Sequence: Synthetic oligonucleotide
agccagcagucuucaugua

SEQ ID NO: 3064047 - RNA, 19 nt, Artificial Sequence
  Description of Artificial Sequence: Synthetic oligonucleotide
ggguacacugccaccaccu

SEQ ID NO: 3064048 - RNA, 19 nt, Artificial Sequence
  Description of Artificial Sequence: Synthetic oligonucleotide
cucugagcuccuucucacu

SEQ ID NO: 3064049 - RNA, 19 nt, Artificial Sequence
  Description of Artificial Sequence: Synthetic oligonucleotide
gcucuggaguugaaagcca

SEQ ID NO: 3064050 - RNA, 19 nt, Artificial Sequence
  Description of Artificial Sequence: Synthetic oligonucleotide
gaaagccagcagucuucau

SEQ ID NO: 3064051 - RNA, 19 nt, Artificial Sequence
  Description of Artificial Sequence: Synthetic oligonucleotide
ccccgucuggccucugagc

SEQ ID NO: 3064052 - RNA, 19 nt, Artificial Sequence
  Description of Artificial Sequence: Synthetic oligonucleotide
uucuugucuugggcuucua

SEQ ID NO: 3064053 - RNA, 19 nt, Artificial Sequence
  Description of Artificial Sequence: Synthetic oligonucleotide
gccagcagucuucauguau

SEQ ID NO: 3064054 - RNA, 19 nt, Artificial Sequence
  Description of Artificial Sequence: Synthetic oligonucleotide
gcuggccugccuuuagacu

SEQ ID NO: 3064055 - RNA, 19 nt, Artificial Sequence
  Description of Artificial Sequence: Synthetic oligonucleotide
acaggcuggccugccuuua

SEQ ID NO: 3064056 - RNA, 19 nt, Artificial Sequence
  Description of Artificial Sequence: Synthetic oligonucleotide
gagcuccuucucacuggga

SEQ ID NO: 3064057 - RNA, 19 nt, Artificial Sequence
  Description of Artificial Sequence: Synthetic oligonucleotide
gcuugguauccuuguuugu

SEQ ID NO: 3064058 - RNA, 19 nt, Artificial Sequence
  Description of Artificial Sequence: Synthetic oligonucleotide
cuucuugucuugggcuucu

SEQ ID NO: 3064059 - RNA, 19 nt, Artificial Sequence
  Description of Artificial Sequence: Synthetic oligonucleotide
augcgugcuccuggccaca

SEQ ID NO: 3064060 - RNA, 19 nt, Artificial Sequence
  Description of Artificial Sequence: Synthetic oligonucleotide
ggcuccauucuggguuccc

SEQ ID NO: 3064061 - RNA, 19 nt, Artificial Sequence
  Description of Artificial Sequence: Synthetic oligonucleotide
uugggacaguggggacaga

SEQ ID NO: 3064062 - RNA, 19 nt, Artificial Sequence
  Description of Artificial Sequence: Synthetic oligonucleotide
ggccacaaaaggguacacu

SEQ ID NO: 3064063 - RNA, 19 nt, Artificial Sequence
  Description of Artificial Sequence: Synthetic oligonucleotide
cccgucuggccucugagcu

SEQ ID NO: 3064064 - RNA, 19 nt, Artificial Sequence
  Description of Artificial Sequence: Synthetic oligonucleotide
ggguugggugggcucugga

SEQ ID NO: 3064065 - RNA, 19 nt, Artificial Sequence
  Description of Artificial Sequence: Synthetic oligonucleotide
caccaccugggucaugguu

SEQ ID NO: 3064066 - RNA, 19 nt, Artificial Sequence
  Description of Artificial Sequence: Synthetic oligonucleotide
ccgucuggccucugagcuc

SEQ ID NO: 3064067 - RNA, 19 nt, Artificial Sequence
  Description of Artificial Sequence: Synthetic oligonucleotide
uauccccgucuggccucug

SEQ ID NO: 3064068 - RNA, 19 nt, Artificial Sequence
  Description of Artificial Sequence: Synthetic oligonucleotide
ggccugccuuuagacucag

SEQ ID NO: 3064069 - RNA, 19 nt, Artificial Sequence
  Description of Artificial Sequence: Synthetic oligonucleotide
ugccaccaccugggucaug

SEQ ID NO: 3064070 - RNA, 19 nt, Artificial Sequence
  Description of Artificial Sequence: Synthetic oligonucleotide
gcgacuguuguugcuuggu

SEQ ID NO: 3064071 - RNA, 19 nt, Artificial Sequence
  Description of Artificial Sequence: Synthetic oligonucleotide
cacaggcuggccugccuuu

SEQ ID NO: 3064072 - RNA, 19 nt, Artificial Sequence
  Description of Artificial Sequence: Synthetic oligonucleotide
guauccccgucuggccucu

SEQ ID NO: 3064073 - RNA, 19 nt, Artificial Sequence
  Description of Artificial Sequence: Synthetic oligonucleotide
ccaaccagcgacuguuguu

SEQ ID NO: 3064074 - RNA, 19 nt, Artificial Sequence
  Description of Artificial Sequence: Synthetic oligonucleotide
ccaccaaccagcgacuguu

SEQ ID NO: 3064075 - RNA, 19 nt, Artificial Sequence
  Description of Artificial Sequence: Synthetic oligonucleotide
guuuuccagcuggcacgua

SEQ ID NO: 3064076 - RNA, 19 nt, Artificial Sequence
  Description of Artificial Sequence: Synthetic oligonucleotide
cgacuguuguugcuuggua

SEQ ID NO: 3064077 - RNA, 19 nt, Artificial Sequence
  Description of Artificial Sequence: Synthetic oligonucleotide
cuugggcuucuaggauugu

SEQ ID NO: 3064078 - RNA, 19 nt, Artificial Sequence
  Description of Artificial Sequence: Synthetic oligonucleotide
gccuuuagacucaguucau

SEQ ID NO: 3064079 - RNA, 19 nt, Artificial Sequence
  Description of Artificial Sequence: Synthetic oligonucleotide
ccagcgacuguuguugcuu

SEQ ID NO: 3064080 - RNA, 19 nt, Artificial Sequence
  Description of Artificial Sequence: Synthetic oligonucleotide
ggugggcucuggaguugaa

SEQ ID NO: 3064081 - RNA, 19 nt, Artificial Sequence
  Description of Artificial Sequence: Synthetic oligonucleotide
gcgugcuccuggccacaaa

SEQ ID NO: 3064082 - RNA, 19 nt, Artificial Sequence
  Description of Artificial Sequence: Synthetic oligonucleotide
ccuucucacugggaacaau

SEQ ID NO: 3064083 - RNA, 19 nt, Artificial Sequence
  Description of Artificial Sequence: Synthetic oligonucleotide
gggucaugguugggacagu

SEQ ID NO: 3064084 - RNA, 19 nt, Artificial Sequence
  Description of Artificial Sequence: Synthetic oligonucleotide
cugccaccaccugggucau

SEQ ID NO: 3064085 - RNA, 19 nt, Artificial Sequence
  Description of Artificial Sequence: Synthetic oligonucleotide
gucuggccucugagcuccu

SEQ ID NO: 3064086 - RNA, 19 nt, Artificial Sequence
  Description of Artificial Sequence: Synthetic oligonucleotide
ccaccaccugggucauggu

SEQ ID NO: 3064087 - RNA, 19 nt, Artificial Sequence
  Description of Artificial Sequence: Synthetic oligonucleotide
uuugcuaugaugcugaugg

SEQ ID NO: 3064088 - RNA, 19 nt, Artificial Sequence
  Description of Artificial Sequence: Synthetic oligonucleotide
uucauuacagucaacaagg

SEQ ID NO: 3064089 - RNA, 19 nt, Artificial Sequence
  Description of Artificial Sequence: Synthetic oligonucleotide
aauaucggcaaccaucagc

SEQ ID NO: 3064090 - RNA, 19 nt, Artificial Sequence
  Description of Artificial Sequence: Synthetic oligonucleotide
acaaggaaaucuuugcugc

SEQ ID NO: 3064091 - RNA, 19 nt, Artificial Sequence
  Description of Artificial Sequence: Synthetic oligonucleotide
aacaauauuuggcauuuuc

SEQ ID NO: 3064092 - RNA, 19 nt, Artificial Sequence
  Description of Artificial Sequence: Synthetic oligonucleotide
cauuuuaucuucauuacag

SEQ ID NO: 3064093 - RNA, 19 nt, Artificial Sequence
  Description of Artificial Sequence: Synthetic oligonucleotide
uuuaucuucauuacaguca

SEQ ID NO: 3064094 - RNA, 19 nt, Artificial Sequence
  Description of Artificial Sequence: Synthetic oligonucleotide
auauuuggcauuuucauga

SEQ ID NO: 3064095 - RNA, 19 nt, Artificial Sequence
  Description of Artificial Sequence: Synthetic oligonucleotide
uuuggcauuuucaugaaga

SEQ ID NO: 3064096 - RNA, 19 nt, Artificial Sequence
  Description of Artificial Sequence: Synthetic oligonucleotide
uauaauggagaccuuguug

SEQ ID NO: 3064097 - RNA, 19 nt, Artificial Sequence
  Description of Artificial Sequence: Synthetic oligonucleotide
uuuucaugaagacacugcc

SEQ ID NO: 3064098 - RNA, 19 nt, Artificial Sequence
  Description of Artificial Sequence: Synthetic oligonucleotide
caagccuuugcuaugaugc

SEQ ID NO: 3064099 - RNA, 19 nt, Artificial Sequence
  Description of Artificial Sequence: Synthetic oligonucleotide
gaugguuacguuucgcugg

SEQ ID NO: 3064100 - RNA, 19 nt, Artificial Sequence
  Description of Artificial Sequence: Synthetic oligonucleotide
uuaaagaugguuacguuuc

SEQ ID NO: 3064101 - RNA, 19 nt, Artificial Sequence
  Description of Artificial Sequence: Synthetic oligonucleotide
auaauggagaccuuguugu

SEQ ID NO: 3064102 - RNA, 19 nt, Artificial Sequence
  Description of Artificial Sequence: Synthetic oligonucleotide
ugaguuggcagugacaagg

SEQ ID NO: 3064103 - RNA, 19 nt, Artificial Sequence
  Description of Artificial Sequence: Synthetic oligonucleotide
cuuguuguggagaacgugg

SEQ ID NO: 3064104 - RNA, 19 nt, Artificial Sequence
  Description of Artificial Sequence: Synthetic oligonucleotide
auuacagucaacaagggca

SEQ ID NO: 3064105 - RNA, 19 nt, Artificial Sequence
  Description of Artificial Sequence: Synthetic oligonucleotide
cuggacuaaauuuaggcgc

SEQ ID NO: 3064106 - RNA, 19 nt, Artificial Sequence
  Description of Artificial Sequence: Synthetic oligonucleotide
aaaucuuugcugcaaacaa

SEQ ID NO: 3064107 - RNA, 19 nt, Artificial Sequence
  Description of Artificial Sequence: Synthetic oligonucleotide
uaaauuuaggcgcguuucg

SEQ ID NO: 3064108 - RNA, 19 nt, Artificial Sequence
  Description of Artificial Sequence: Synthetic oligonucleotide
aucacuaucugugaguugg

SEQ ID NO: 3064109 - RNA, 19 nt, Artificial Sequence
  Description of Artificial Sequence: Synthetic oligonucleotide
aauuuaggcgcguuucguc

SEQ ID NO: 3064110 - RNA, 19 nt, Artificial Sequence
  Description of Artificial Sequence: Synthetic oligonucleotide
gauaauaucggcaaccauc

SEQ ID NO: 3064111 - RNA, 19 nt, Artificial Sequence
  Description of Artificial Sequence: Synthetic oligonucleotide
uucaugaagacacugccgu

SEQ ID NO: 3064112 - RNA, 19 nt, Artificial Sequence
  Description of Artificial Sequence: Synthetic oligonucleotide
uuucaugaagacacugccg

SEQ ID NO: 3064113 - RNA, 19 nt, Artificial Sequence
  Description of Artificial Sequence: Synthetic oligonucleotide
uggacuaaauuuaggcgcg

SEQ ID NO: 3064114 - RNA, 19 nt, Artificial Sequence
  Description of Artificial Sequence: Synthetic oligonucleotide
aaccucaucagccaagccu

SEQ ID NO: 3064115 - RNA, 19 nt, Artificial Sequence
  Description of Artificial Sequence: Synthetic oligonucleotide
cuucauuacagucaacaag

SEQ ID NO: 3064116 - RNA, 19 nt, Artificial Sequence
  Description of Artificial Sequence: Synthetic oligonucleotide
uuuuaucuucauuacaguc

SEQ ID NO: 3064117 - RNA, 19 nt, Artificial Sequence
  Description of Artificial Sequence: Synthetic oligonucleotide
aagggcaaccucaucagcc

SEQ ID NO: 3064118 - RNA, 19 nt, Artificial Sequence
  Description of Artificial Sequence: Synthetic oligonucleotide
ugcugcaaacaauauuugg

SEQ ID NO: 3064119 - RNA, 19 nt, Artificial Sequence
  Description of Artificial Sequence: Synthetic oligonucleotide
aauggagaccuuguugugg

SEQ ID NO: 3064120 - RNA, 19 nt, Artificial Sequence
  Description of Artificial Sequence: Synthetic oligonucleotide
accaucagcuuaaagaugg

SEQ ID NO: 3064121 - RNA, 19 nt, Artificial Sequence
  Description of Artificial Sequence: Synthetic oligonucleotide
ucauuuuaucuucauuaca

SEQ ID NO: 3064122 - RNA, 19 nt, Artificial Sequence
  Description of Artificial Sequence: Synthetic oligonucleotide
cuugauaauaucggcaacc

SEQ ID NO: 3064123 - RNA, 19 nt, Artificial Sequence
  Description of Artificial Sequence: Synthetic oligonucleotide
aaagaugguuacguuucgc

SEQ ID NO: 3064124 - RNA, 19 nt, Artificial Sequence
  Description of Artificial Sequence: Synthetic oligonucleotide
aagaugguuacguuucgcu

SEQ ID NO: 3064125 - RNA, 19 nt, Artificial Sequence
  Description of Artificial Sequence: Synthetic oligonucleotide
ugugcuugauaauaucggc

SEQ ID NO: 3064126 - RNA, 19 nt, Artificial Sequence
  Description of Artificial Sequence: Synthetic oligonucleotide
uucauuuuaucuucauuac

SEQ ID NO: 3064127 - RNA, 19 nt, Artificial Sequence
  Description of Artificial Sequence: Synthetic oligonucleotide
ucagcuuaaagaugguuac

SEQ ID NO: 3064128 - RNA, 19 nt, Artificial Sequence
  Description of Artificial Sequence: Synthetic oligonucleotide
gaagacacugccgugcugg

SEQ ID NO: 3064129 - RNA, 19 nt, Artificial Sequence
  Description of Artificial Sequence: Synthetic oligonucleotide
uaaagaugguuacguuucg

SEQ ID NO: 3064130 - RNA, 19 nt, Artificial Sequence
  Description of Artificial Sequence: Synthetic oligonucleotide
gugacaaucacuaucugug

SEQ ID NO: 3064131 - RNA, 19 nt, Artificial Sequence
  Description of Artificial Sequence: Synthetic oligonucleotide
uccgguuccuauaauggag

SEQ ID NO: 3064132 - RNA, 19 nt, Artificial Sequence
  Description of Artificial Sequence: Synthetic oligonucleotide
acugccgugcuggagaucc

SEQ ID NO: 3064133 - RNA, 19 nt, Artificial Sequence
  Description of Artificial Sequence: Synthetic oligonucleotide
ugugacaaucacuaucugu

SEQ ID NO: 3064134 - RNA, 19 nt, Artificial Sequence
  Description of Artificial Sequence: Synthetic oligonucleotide
cugugcuugauaauaucgg

SEQ ID NO: 3064135 - RNA, 19 nt, Artificial Sequence
  Description of Artificial Sequence: Synthetic oligonucleotide
gacaaucacuaucugugag

SEQ ID NO: 3064136 - RNA, 19 nt, Artificial Sequence
  Description of Artificial Sequence: Synthetic oligonucleotide
gaccuuguuguggagaacg

SEQ ID NO: 3064137 - RNA, 19 nt, Artificial Sequence
  Description of Artificial Sequence: Synthetic oligonucleotide
acuaucugugaguuggcag

SEQ ID NO: 3064138 - RNA, 19 nt, Artificial Sequence
  Description of Artificial Sequence: Synthetic oligonucleotide
uucgcuggacuaaauuuag

SEQ ID NO: 3064139 - RNA, 19 nt, Artificial Sequence
  Description of Artificial Sequence: Synthetic oligonucleotide
ugacaaggaaaucuuugcu

SEQ ID NO: 3064140 - RNA, 19 nt, Artificial Sequence
  Description of Artificial Sequence: Synthetic oligonucleotide
ugugaguuggcagugacaa

SEQ ID NO: 3064141 - RNA, 19 nt, Artificial Sequence
  Description of Artificial Sequence: Synthetic oligonucleotide
ggcauuuucaugaagacac

SEQ ID NO: 3064142 - RNA, 19 nt, Artificial Sequence
  Description of Artificial Sequence: Synthetic oligonucleotide
acagucaacaagggcaacc

SEQ ID NO: 3064143 - RNA, 19 nt, Artificial Sequence
  Description of Artificial Sequence: Synthetic oligonucleotide
ugcuugauaauaucggcaa

SEQ ID NO: 3064144 - RNA, 19 nt, Artificial Sequence
  Description of Artificial Sequence: Synthetic oligonucleotide
aucuucauuacagucaaca

SEQ ID NO: 3064145 - RNA, 19 nt, Artificial Sequence
  Description of Artificial Sequence: Synthetic oligonucleotide
gcaaccaucagcuuaaaga

SEQ ID NO: 3064146 - RNA, 19 nt, Artificial Sequence
  Description of Artificial Sequence: Synthetic oligonucleotide
auaauaucggcaaccauca

SEQ ID NO: 3064147 - RNA, 19 nt, Artificial Sequence
  Description of Artificial Sequence: Synthetic oligonucleotide
ugcugugacaaucacuauc

SEQ ID NO: 3064148 - RNA, 19 nt, Artificial Sequence
  Description of Artificial Sequence: Synthetic oligonucleotide
uuucgcuggacuaaauuua

SEQ ID NO: 3064149 - RNA, 19 nt, Artificial Sequence
  Description of Artificial Sequence: Synthetic oligonucleotide
acaaucacuaucugugagu

SEQ ID NO: 3064150 - RNA, 19 nt, Artificial Sequence
  Description of Artificial Sequence: Synthetic oligonucleotide
cauuacagucaacaagggc

SEQ ID NO: 3064151 - RNA, 19 nt, Artificial Sequence
  Description of Artificial Sequence: Synthetic oligonucleotide
uuacagucaacaagggcaa

SEQ ID NO: 3064152 - RNA, 19 nt, Artificial Sequence
  Description of Artificial Sequence: Synthetic oligonucleotide
ucagccaagccuuugcuau

SEQ ID NO: 3064153 - RNA, 19 nt, Artificial Sequence
  Description of Artificial Sequence: Synthetic oligonucleotide
gcuggacuaaauuuaggcg

SEQ ID NO: 3064154 - RNA, 19 nt, Artificial Sequence
  Description of Artificial Sequence: Synthetic oligonucleotide
auaucggcaaccaucagcu

SEQ ID NO: 3064155 - RNA, 19 nt, Artificial Sequence
  Description of Artificial Sequence: Synthetic oligonucleotide
ucaucagccaagccuuugc

SEQ ID NO: 3064156 - RNA, 19 nt, Artificial Sequence
  Description of Artificial Sequence: Synthetic oligonucleotide
ucuucauuacagucaacaa

SEQ ID NO: 3064157 - RNA, 19 nt, Artificial Sequence
  Description of Artificial Sequence: Synthetic oligonucleotide
auuuaggcgcguuucgucu

SEQ ID NO: 3064158 - RNA, 19 nt, Artificial Sequence
  Description of Artificial Sequence: Synthetic oligonucleotide
cuaaauuuaggcgcguuuc

SEQ ID NO: 3064159 - RNA, 19 nt, Artificial Sequence
  Description of Artificial Sequence: Synthetic oligonucleotide
agaugguuacguuucgcug

SEQ ID NO: 3064160 - RNA, 19 nt, Artificial Sequence
  Description of Artificial Sequence: Synthetic oligonucleotide
uugauaauaucggcaacca

SEQ ID NO: 3064161 - RNA, 19 nt, Artificial Sequence
  Description of Artificial Sequence: Synthetic oligonucleotide
uccuauaauggagaccuug

SEQ ID NO: 3064162 - RNA, 19 nt, Artificial Sequence
  Description of Artificial Sequence: Synthetic oligonucleotide
acaagggcaaccucaucag

SEQ ID NO: 3064163 - RNA, 19 nt, Artificial Sequence
  Description of Artificial Sequence: Synthetic oligonucleotide
acaauauuuggcauuuuca

SEQ ID NO: 3064164 - RNA, 19 nt, Artificial Sequence
  Description of Artificial Sequence: Synthetic oligonucleotide
gaaaucuuugcugcaaaca

SEQ ID NO: 3064165 - RNA, 19 nt, Artificial Sequence
  Description of Artificial Sequence: Synthetic oligonucleotide
guuccuauaauggagaccu

SEQ ID NO: 3064166 - RNA, 19 nt, Artificial Sequence
  Description of Artificial Sequence: Synthetic oligonucleotide
gacuccgguuccuauaaug

SEQ ID NO: 3064167 - RNA, 19 nt, Artificial Sequence
  Description of Artificial Sequence: Synthetic oligonucleotide
cugcaaacaauauuuggca

SEQ ID NO: 3064168 - RNA, 19 nt, Artificial Sequence
  Description of Artificial Sequence: Synthetic oligonucleotide
caugaagacacugccgugc

SEQ ID NO: 3064169 - RNA, 19 nt, Artificial Sequence
  Description of Artificial Sequence: Synthetic oligonucleotide
agugacaaggaaaucuuug

SEQ ID NO: 3064170 - RNA, 19 nt, Artificial Sequence
  Description of Artificial Sequence: Synthetic oligonucleotide
aaauuuaggcgcguuucgu

SEQ ID NO: 3064171 - RNA, 19 nt, Artificial Sequence
  Description of Artificial Sequence: Synthetic oligonucleotide
uuggcauuuucaugaagac

SEQ ID NO: 3064172 - RNA, 19 nt, Artificial Sequence
  Description of Artificial Sequence: Synthetic oligonucleotide
agcuuaaagaugguuacgu

SEQ ID NO: 3064173 - RNA, 19 nt, Artificial Sequence
  Description of Artificial Sequence: Synthetic oligonucleotide
uucgucuuuugccuggcgu

SEQ ID NO: 3064174 - RNA, 19 nt, Artificial Sequence
  Description of Artificial Sequence: Synthetic oligonucleotide
agauccaucgucucacccu

SEQ ID NO: 3064175 - RNA, 19 nt, Artificial Sequence
  Description of Artificial Sequence: Synthetic oligonucleotide
ucacccuucauuuuaucuu

SEQ ID NO: 3064176 - RNA, 19 nt, Artificial Sequence
  Description of Artificial Sequence: Synthetic oligonucleotide
aaucacuaucugugaguug

SEQ ID NO: 3064177 - RNA, 19 nt, Artificial Sequence
  Description of Artificial Sequence: Synthetic oligonucleotide
ugcuaugaugcugauggca

SEQ ID NO: 3064178 - RNA, 19 nt, Artificial Sequence
  Description of Artificial Sequence: Synthetic oligonucleotide
acuccgguuccuauaaugg

SEQ ID NO: 3064179 - RNA, 19 nt, Artificial Sequence
  Description of Artificial Sequence: Synthetic oligonucleotide
ucgucuuuugccuggcgug

SEQ ID NO: 3064180 - RNA, 19 nt, Artificial Sequence
  Description of Artificial Sequence: Synthetic oligonucleotide
ugcaaacaauauuuggcau

SEQ ID NO: 3064181 - RNA, 19 nt, Artificial Sequence
  Description of Artificial Sequence: Synthetic oligonucleotide
ucugugaguuggcagugac

SEQ ID NO: 3064182 - RNA, 19 nt, Artificial Sequence
  Description of Artificial Sequence: Synthetic oligonucleotide
ugacaaucacuaucuguga

SEQ ID NO: 3064183 - RNA, 19 nt, Artificial Sequence
  Description of Artificial Sequence: Synthetic oligonucleotide
gcugcaaacaauauuuggc

SEQ ID NO: 3064184 - RNA, 19 nt, Artificial Sequence
  Description of Artificial Sequence: Synthetic oligonucleotide
uugcugcaaacaauauuug

SEQ ID NO: 3064185 - RNA, 19 nt, Artificial Sequence
  Description of Artificial Sequence: Synthetic oligonucleotide
auuuggcauuuucaugaag

SEQ ID NO: 3064186 - RNA, 19 nt, Artificial Sequence
  Description of Artificial Sequence: Synthetic oligonucleotide
ugcuggagauccaucgucu

SEQ ID NO: 3064187 - RNA, 19 nt, Artificial Sequence
  Description of Artificial Sequence: Synthetic oligonucleotide
acuaaauuuaggcgcguuu

SEQ ID NO: 3064188 - RNA, 19 nt, Artificial Sequence
  Description of Artificial Sequence: Synthetic oligonucleotide
uuguuguggagaacguggu

SEQ ID NO: 3064189 - RNA, 19 nt, Artificial Sequence
  Description of Artificial Sequence: Synthetic oligonucleotide
ucggcaaccaucagcuuaa

SEQ ID NO: 3064190 - RNA, 19 nt, Artificial Sequence
  Description of Artificial Sequence: Synthetic oligonucleotide
gcugugcuugauaauaucg

SEQ ID NO: 3064191 - RNA, 19 nt, Artificial Sequence
  Description of Artificial Sequence: Synthetic oligonucleotide
ucgcuggacuaaauuuagg

SEQ ID NO: 3064192 - RNA, 19 nt, Artificial Sequence
  Description of Artificial Sequence: Synthetic oligonucleotide
gacacugccgugcuggaga

SEQ ID NO: 3064193 - RNA, 19 nt, Artificial Sequence
  Description of Artificial Sequence: Synthetic oligonucleotide
uaauggagaccuuguugug

SEQ ID NO: 3064194 - RNA, 19 nt, Artificial Sequence
  Description of Artificial Sequence: Synthetic oligonucleotide
auggagaccuuguugugga

SEQ ID NO: 3064195 - RNA, 19 nt, Artificial Sequence
  Description of Artificial Sequence: Synthetic oligonucleotide
aagccuuugcuaugaugcu

SEQ ID NO: 3064196 - RNA, 19 nt, Artificial Sequence
  Description of Artificial Sequence: Synthetic oligonucleotide
ugauaauaucggcaaccau

SEQ ID NO: 3064197 - RNA, 19 nt, Artificial Sequence
  Description of Artificial Sequence: Synthetic oligonucleotide
aucgucucacccuucauuu

SEQ ID NO: 3064198 - RNA, 19 nt, Artificial Sequence
  Description of Artificial Sequence: Synthetic oligonucleotide
aaucuuugcugcaaacaau

SEQ ID NO: 3064199 - RNA, 19 nt, Artificial Sequence
  Description of Artificial Sequence: Synthetic oligonucleotide
gagauccaucgucucaccc

SEQ ID NO: 3064200 - RNA, 19 nt, Artificial Sequence
  Description of Artificial Sequence: Synthetic oligonucleotide
aaggaaaucuuugcugcaa

SEQ ID NO: 3064201 - RNA, 19 nt, Artificial Sequence
  Description of Artificial Sequence: Synthetic oligonucleotide
cacccuucauuuuaucuuc

SEQ ID NO: 3064202 - RNA, 19 nt, Artificial Sequence
  Description of Artificial Sequence: Synthetic oligonucleotide
ucaugaagacacugccgug

SEQ ID NO: 3064203 - RNA, 19 nt, Artificial Sequence
  Description of Artificial Sequence: Synthetic oligonucleotide
uggagauccaucgucucac

SEQ ID NO: 3064204 - RNA, 19 nt, Artificial Sequence
  Description of Artificial Sequence: Synthetic oligonucleotide
uaauaucggcaaccaucag

SEQ ID NO: 3064205 - RNA, 19 nt, Artificial Sequence
  Description of Artificial Sequence: Synthetic oligonucleotide
agucaacaagggcaaccuc

SEQ ID NO: 3064206 - RNA, 19 nt, Artificial Sequence
  Description of Artificial Sequence: Synthetic oligonucleotide
uggcauuuucaugaagaca

SEQ ID NO: 3064207 - RNA, 19 nt, Artificial Sequence
  Description of Artificial Sequence: Synthetic oligonucleotide
aucagcuuaaagaugguua

SEQ ID NO: 3064208 - RNA, 19 nt, Artificial Sequence
  Description of Artificial Sequence: Synthetic oligonucleotide
ucuuugcugcaaacaauau

SEQ ID NO: 3064209 - RNA, 19 nt, Artificial Sequence
  Description of Artificial Sequence: Synthetic oligonucleotide
aucggcaaccaucagcuua

SEQ ID NO: 3064210 - RNA, 19 nt, Artificial Sequence
  Description of Artificial Sequence: Synthetic oligonucleotide
uauuuggcauuuucaugaa

SEQ ID NO: 3064211 - RNA, 19 nt, Artificial Sequence
  Description of Artificial Sequence: Synthetic oligonucleotide
aaccaucagcuuaaagaug

SEQ ID NO: 3064212 - RNA, 19 nt, Artificial Sequence
  Description of Artificial Sequence: Synthetic oligonucleotide
uugccuggcgugcaccugc

SEQ ID NO: 3064213 - RNA, 19 nt, Artificial Sequence
  Description of Artificial Sequence: Synthetic oligonucleotide
gagaccuuguuguggagaa

SEQ ID NO: 3064214 - RNA, 19 nt, Artificial Sequence
  Description of Artificial Sequence: Synthetic oligonucleotide
uguuguggagaacgugguc

SEQ ID NO: 3064215 - RNA, 19 nt, Artificial Sequence
  Description of Artificial Sequence: Synthetic oligonucleotide
uuuugccuggcgugcaccu

SEQ ID NO: 3064216 - RNA, 19 nt, Artificial Sequence
  Description of Artificial Sequence: Synthetic oligonucleotide
caaccaucagcuuaaagau

SEQ ID NO: 3064217 - RNA, 19 nt, Artificial Sequence
  Description of Artificial Sequence: Synthetic oligonucleotide
ucacuaucugugaguuggc

SEQ ID NO: 3064218 - RNA, 19 nt, Artificial Sequence
  Description of Artificial Sequence: Synthetic oligonucleotide
augaagacacugccgugcu

SEQ ID NO: 3064219 - RNA, 19 nt, Artificial Sequence
  Description of Artificial Sequence: Synthetic oligonucleotide
guuacguuucgcuggacua

SEQ ID NO: 3064220 - RNA, 19 nt, Artificial Sequence
  Description of Artificial Sequence: Synthetic oligonucleotide
aggaaaucuuugcugcaaa

SEQ ID NO: 3064221 - RNA, 19 nt, Artificial Sequence
  Description of Artificial Sequence: Synthetic oligonucleotide
agggcaaccucaucagcca

SEQ ID NO: 3064222 - RNA, 19 nt, Artificial Sequence
  Description of Artificial Sequence: Synthetic oligonucleotide
ugcaccugcugugacaauc

SEQ ID NO: 3064223 - RNA, 19 nt, Artificial Sequence
  Description of Artificial Sequence: Synthetic oligonucleotide
augguuacguuucgcugga

SEQ ID NO: 3064224 - RNA, 19 nt, Artificial Sequence
  Description of Artificial Sequence: Synthetic oligonucleotide
cuaucugugaguuggcagu

SEQ ID NO: 3064225 - RNA, 19 nt, Artificial Sequence
  Description of Artificial Sequence: Synthetic oligonucleotide
uuacguuucgcuggacuaa

SEQ ID NO: 3064226 - RNA, 19 nt, Artificial Sequence
  Description of Artificial Sequence: Synthetic oligonucleotide
cagcuuaaagaugguuacg

SEQ ID NO: 3064227 - RNA, 19 nt, Artificial Sequence
  Description of Artificial Sequence: Synthetic oligonucleotide
ugaagacacugccgugcug

SEQ ID NO: 3064228 - RNA, 19 nt, Artificial Sequence
  Description of Artificial Sequence: Synthetic oligonucleotide
guuggcagugacaaggaaa

SEQ ID NO: 3064229 - RNA, 19 nt, Artificial Sequence
  Description of Artificial Sequence: Synthetic oligonucleotide
aggccaugccgaccgacuc

SEQ ID NO: 3064230 - RNA, 19 nt, Artificial Sequence
  Description of Artificial Sequence: Synthetic oligonucleotide
ucuuuugccuggcgugcac

SEQ ID NO: 3064231 - RNA, 19 nt, Artificial Sequence
  Description of Artificial Sequence: Synthetic oligonucleotide
ggaaaucuuugcugcaaac

SEQ ID NO: 3064232 - RNA, 19 nt, Artificial Sequence
  Description of Artificial Sequence: Synthetic oligonucleotide
cgcuggacuaaauuuaggc

SEQ ID NO: 3064233 - RNA, 19 nt, Artificial Sequence
  Description of Artificial Sequence: Synthetic oligonucleotide
gcacaggccaugccgaccg

SEQ ID NO: 3064234 - RNA, 19 nt, Artificial Sequence
  Description of Artificial Sequence: Synthetic oligonucleotide
guuucgcuggacuaaauuu

SEQ ID NO: 3064235 - RNA, 19 nt, Artificial Sequence
  Description of Artificial Sequence: Synthetic oligonucleotide
guuguggagaacguggucu

SEQ ID NO: 3064236 - RNA, 19 nt, Artificial Sequence
  Description of Artificial Sequence: Synthetic oligonucleotide
gugcuugauaauaucggca

SEQ ID NO: 3064237 - RNA, 19 nt, Artificial Sequence
  Description of Artificial Sequence: Synthetic oligonucleotide
aagacacugccgugcugga

SEQ ID NO: 3064238 - RNA, 19 nt, Artificial Sequence
  Description of Artificial Sequence: Synthetic oligonucleotide
uugcuaugaugcugauggc

SEQ ID NO: 3064239 - RNA, 19 nt, Artificial Sequence
  Description of Artificial Sequence: Synthetic oligonucleotide
gcuaugaugcugauggcac

SEQ ID NO: 3064240 - RNA, 19 nt, Artificial Sequence
  Description of Artificial Sequence: Synthetic oligonucleotide
uaucuucauuacagucaac

SEQ ID NO: 3064241 - RNA, 19 nt, Artificial Sequence
  Description of Artificial Sequence: Synthetic oligonucleotide
ccugcugugacaaucacua

SEQ ID NO: 3064242 - RNA, 19 nt, Artificial Sequence
  Description of Artificial Sequence: Synthetic oligonucleotide
uuguggagaacguggucuu

SEQ ID NO: 3064243 - RNA, 19 nt, Artificial Sequence
  Description of Artificial Sequence: Synthetic oligonucleotide
caaggaaaucuuugcugca

SEQ ID NO: 3064244 - RNA, 19 nt, Artificial Sequence
  Description of Artificial Sequence: Synthetic oligonucleotide
uuuaggcgcguuucgucuu

SEQ ID NO: 3064245 - RNA, 19 nt, Artificial Sequence
  Description of Artificial Sequence: Synthetic oligonucleotide
gugcuggagauccaucguc

SEQ ID NO: 3064246 - RNA, 19 nt, Artificial Sequence
  Description of Artificial Sequence: Synthetic oligonucleotide
cuuugcuaugaugcugaug

SEQ ID NO: 3064247 - RNA, 19 nt, Artificial Sequence
  Description of Artificial Sequence: Synthetic oligonucleotide
gcgcguuucgucuuuugcc

SEQ ID NO: 3064248 - RNA, 19 nt, Artificial Sequence
  Description of Artificial Sequence: Synthetic oligonucleotide
cuuuugccuggcgugcacc

SEQ ID NO: 3064249 - RNA, 19 nt, Artificial Sequence
  Description of Artificial Sequence: Synthetic oligonucleotide
aucagccaagccuuugcua

SEQ ID NO: 3064250 - RNA, 19 nt, Artificial Sequence
  Description of Artificial Sequence: Synthetic oligonucleotide
cuaugaugcugauggcaca

SEQ ID NO: 3064251 - RNA, 19 nt, Artificial Sequence
  Description of Artificial Sequence: Synthetic oligonucleotide
cuggcgugcaccugcugug

SEQ ID NO: 3064252 - RNA, 19 nt, Artificial Sequence
  Description of Artificial Sequence: Synthetic oligonucleotide
uggagaccuuguuguggag

SEQ ID NO: 3064253 - RNA, 19 nt, Artificial Sequence
  Description of Artificial Sequence: Synthetic oligonucleotide
ugccgaccgacuccgguuc

SEQ ID NO: 3064254 - RNA, 19 nt, Artificial Sequence
  Description of Artificial Sequence: Synthetic oligonucleotide
ccgugcuggagauccaucg

SEQ ID NO: 3064255 - RNA, 19 nt, Artificial Sequence
  Description of Artificial Sequence: Synthetic oligonucleotide
uacguuucgcuggacuaaa

SEQ ID NO: 3064256 - RNA, 19 nt, Artificial Sequence
  Description of Artificial Sequence: Synthetic oligonucleotide
accucaucagccaagccuu

SEQ ID NO: 3064257 - RNA, 19 nt, Artificial Sequence
  Description of Artificial Sequence: Synthetic oligonucleotide
gugaguuggcagugacaag

SEQ ID NO: 3064258 - RNA, 19 nt, Artificial Sequence
  Description of Artificial Sequence: Synthetic oligonucleotide
gguuccuauaauggagacc

SEQ ID NO: 3064259 - RNA, 19 nt, Artificial Sequence
  Description of Artificial Sequence: Synthetic oligonucleotide
aguuggcagugacaaggaa

SEQ ID NO: 3064260 - RNA, 19 nt, Artificial Sequence
  Description of Artificial Sequence: Synthetic oligonucleotide
acaggccaugccgaccgac

SEQ ID NO: 3064261 - RNA, 19 nt, Artificial Sequence
  Description of Artificial Sequence: Synthetic oligonucleotide
cucacccuucauuuuaucu

SEQ ID NO: 3064262 - RNA, 19 nt, Artificial Sequence
  Description of Artificial Sequence: Synthetic oligonucleotide
agaccuuguuguggagaac

SEQ ID NO: 3064263 - RNA, 19 nt, Artificial Sequence
  Description of Artificial Sequence: Synthetic oligonucleotide
cuccgguuccuauaaugga

SEQ ID NO: 3064264 - RNA, 19 nt, Artificial Sequence
  Description of Artificial Sequence: Synthetic oligonucleotide
caaccucaucagccaagcc

SEQ ID NO: 3064265 - RNA, 19 nt, Artificial Sequence
  Description of Artificial Sequence: Synthetic oligonucleotide
cugugacaaucacuaucug

SEQ ID NO: 3064266 - RNA, 19 nt, Artificial Sequence
  Description of Artificial Sequence: Synthetic oligonucleotide
cuggagauccaucgucuca

SEQ ID NO: 3064267 - RNA, 19 nt, Artificial Sequence
  Description of Artificial Sequence: Synthetic oligonucleotide
aaacaauauuuggcauuuu

SEQ ID NO: 3064268 - RNA, 19 nt, Artificial Sequence
  Description of Artificial Sequence: Synthetic oligonucleotide
gcuugauaauaucggcaac

SEQ ID NO: 3064269 - RNA, 19 nt, Artificial Sequence
  Description of Artificial Sequence: Synthetic oligonucleotide
uuaggcgcguuucgucuuu

SEQ ID NO: 3064270 - RNA, 19 nt, Artificial Sequence
  Description of Artificial Sequence: Synthetic oligonucleotide
ggcgcguuucgucuuuugc

SEQ ID NO: 3064271 - RNA, 19 nt, Artificial Sequence
  Description of Artificial Sequence: Synthetic oligonucleotide
gaguuggcagugacaagga

SEQ ID NO: 3064272 - RNA, 19 nt, Artificial Sequence
  Description of Artificial Sequence: Synthetic oligonucleotide
gcugugacaaucacuaucu

SEQ ID NO: 3064273 - RNA, 19 nt, Artificial Sequence
  Description of Artificial Sequence: Synthetic oligonucleotide
agccaagccuuugcuauga

SEQ ID NO: 3064274 - RNA, 19 nt, Artificial Sequence
  Description of Artificial Sequence: Synthetic oligonucleotide
caaacaauauuuggcauuu

SEQ ID NO: 3064275 - RNA, 19 nt, Artificial Sequence
  Description of Artificial Sequence: Synthetic oligonucleotide
guuucgucuuuugccuggc

SEQ ID NO: 3064276 - RNA, 19 nt, Artificial Sequence
  Description of Artificial Sequence: Synthetic oligonucleotide
gauccaucgucucacccuu

SEQ ID NO: 3064277 - RNA, 19 nt, Artificial Sequence
  Description of Artificial Sequence: Synthetic oligonucleotide
uuugccuggcgugcaccug

SEQ ID NO: 3064278 - RNA, 19 nt, Artificial Sequence
  Description of Artificial Sequence: Synthetic oligonucleotide
cucaucagccaagccuuug

SEQ ID NO: 3064279 - RNA, 19 nt, Artificial Sequence
  Description of Artificial Sequence: Synthetic oligonucleotide
cagccaagccuuugcuaug

SEQ ID NO: 3064280 - RNA, 19 nt, Artificial Sequence
  Description of Artificial Sequence: Synthetic oligonucleotide
cuuugcugcaaacaauauu

SEQ ID NO: 3064281 - RNA, 19 nt, Artificial Sequence
  Description of Artificial Sequence: Synthetic oligonucleotide
auggcacaggccaugccga

SEQ ID NO: 3064282 - RNA, 19 nt, Artificial Sequence
  Description of Artificial Sequence: Synthetic oligonucleotide
cugugaguuggcagugaca

SEQ ID NO: 3064283 - RNA, 19 nt, Artificial Sequence
  Description of Artificial Sequence: Synthetic oligonucleotide
cguuucgucuuuugccugg

SEQ ID NO: 3064284 - RNA, 19 nt, Artificial Sequence
  Description of Artificial Sequence: Synthetic oligonucleotide
augccgaccgacuccgguu

SEQ ID NO: 3064285 - RNA, 19 nt, Artificial Sequence
  Description of Artificial Sequence: Synthetic oligonucleotide
accgacuccgguuccuaua

SEQ ID NO: 3064286 - RNA, 19 nt, Artificial Sequence
  Description of Artificial Sequence: Synthetic oligonucleotide
ccaagccuuugcuaugaug

SEQ ID NO: 3064287 - RNA, 19 nt, Artificial Sequence
  Description of Artificial Sequence: Synthetic oligonucleotide
ggagauccaucgucucacc

SEQ ID NO: 3064288 - RNA, 19 nt, Artificial Sequence
  Description of Artificial Sequence: Synthetic oligonucleotide
gcaaacaauauuuggcauu

SEQ ID NO: 3064289 - RNA, 19 nt, Artificial Sequence
  Description of Artificial Sequence: Synthetic oligonucleotide
ucgucucacccuucauuuu

SEQ ID NO: 3064290 - RNA, 19 nt, Artificial Sequence
  Description of Artificial Sequence: Synthetic oligonucleotide
ggcugugcuugauaauauc

SEQ ID NO: 3064291 - RNA, 19 nt, Artificial Sequence
  Description of Artificial Sequence: Synthetic oligonucleotide
agacacugccgugcuggag

SEQ ID NO: 3064292 - RNA, 19 nt, Artificial Sequence
  Description of Artificial Sequence: Synthetic oligonucleotide
gccaugccgaccgacuccg

SEQ ID NO: 3064293 - RNA, 19 nt, Artificial Sequence
  Description of Artificial Sequence: Synthetic oligonucleotide
acacugccgugcuggagau

SEQ ID NO: 3064294 - RNA, 19 nt, Artificial Sequence
  Description of Artificial Sequence: Synthetic oligonucleotide
gguuacguuucgcuggacu

SEQ ID NO: 3064295 - RNA, 19 nt, Artificial Sequence
  Description of Artificial Sequence: Synthetic oligonucleotide
ggcaaccucaucagccaag

SEQ ID NO: 3064296 - RNA, 19 nt, Artificial Sequence
  Description of Artificial Sequence: Synthetic oligonucleotide
uuccuauaauggagaccuu

SEQ ID NO: 3064297 - RNA, 19 nt, Artificial Sequence
  Description of Artificial Sequence: Synthetic oligonucleotide
accuuguuguggagaacgu

SEQ ID NO: 3064298 - RNA, 19 nt, Artificial Sequence
  Description of Artificial Sequence: Synthetic oligonucleotide
aucugugaguuggcaguga

SEQ ID NO: 3064299 - RNA, 19 nt, Artificial Sequence
  Description of Artificial Sequence: Synthetic oligonucleotide
caaucacuaucugugaguu

SEQ ID NO: 3064300 - RNA, 19 nt, Artificial Sequence
  Description of Artificial Sequence: Synthetic oligonucleotide
cacuaucugugaguuggca

SEQ ID NO: 3064301 - RNA, 19 nt, Artificial Sequence
  Description of Artificial Sequence: Synthetic oligonucleotide
ggagaccuuguuguggaga

SEQ ID NO: 3064302 - RNA, 19 nt, Artificial Sequence
  Description of Artificial Sequence: Synthetic oligonucleotide
cuauaauggagaccuuguu

SEQ ID NO: 3064303 - RNA, 19 nt, Artificial Sequence
  Description of Artificial Sequence: Synthetic oligonucleotide
aggcgcguuucgucuuuug

SEQ ID NO: 3064304 - RNA, 19 nt, Artificial Sequence
  Description of Artificial Sequence: Synthetic oligonucleotide
ggccaugccgaccgacucc

SEQ ID NO: 3064305 - RNA, 19 nt, Artificial Sequence
  Description of Artificial Sequence: Synthetic oligonucleotide
uggcgugcaccugcuguga

SEQ ID NO: 3064306 - RNA, 19 nt, Artificial Sequence
  Description of Artificial Sequence: Synthetic oligonucleotide
ccuauaauggagaccuugu

SEQ ID NO: 3064307 - RNA, 19 nt, Artificial Sequence
  Description of Artificial Sequence: Synthetic oligonucleotide
ugccuggcgugcaccugcu

SEQ ID NO: 3064308 - RNA, 19 nt, Artificial Sequence
  Description of Artificial Sequence: Synthetic oligonucleotide
uaucggcaaccaucagcuu

SEQ ID NO: 3064309 - RNA, 19 nt, Artificial Sequence
  Description of Artificial Sequence: Synthetic oligonucleotide
gcguuucgucuuuugccug

SEQ ID NO: 3064310 - RNA, 19 nt, Artificial Sequence
  Description of Artificial Sequence: Synthetic oligonucleotide
ccuuguuguggagaacgug

SEQ ID NO: 3064311 - RNA, 19 nt, Artificial Sequence
  Description of Artificial Sequence: Synthetic oligonucleotide
cagucaacaagggcaaccu

SEQ ID NO: 3064312 - RNA, 19 nt, Artificial Sequence
  Description of Artificial Sequence: Synthetic oligonucleotide
ccgguuccuauaauggaga

SEQ ID NO: 3064313 - RNA, 19 nt, Artificial Sequence
  Description of Artificial Sequence: Synthetic oligonucleotide
ugccgugcuggagauccau

SEQ ID NO: 3064314 - RNA, 19 nt, Artificial Sequence
  Description of Artificial Sequence: Synthetic oligonucleotide
caucagccaagccuuugcu

SEQ ID NO: 3064315 - RNA, 19 nt, Artificial Sequence
  Description of Artificial Sequence: Synthetic oligonucleotide
gucuuuugccuggcgugca

SEQ ID NO: 3064316 - RNA, 19 nt, Artificial Sequence
  Description of Artificial Sequence: Synthetic oligonucleotide
caucgucucacccuucauu

SEQ ID NO: 3064317 - RNA, 19 nt, Artificial Sequence
  Description of Artificial Sequence: Synthetic oligonucleotide
auccaucgucucacccuuc

SEQ ID NO: 3064318 - RNA, 19 nt, Artificial Sequence
  Description of Artificial Sequence: Synthetic oligonucleotide
gacuaaauuuaggcgcguu

SEQ ID NO: 3064319 - RNA, 19 nt, Artificial Sequence
  Description of Artificial Sequence: Synthetic oligonucleotide
gcaccugcugugacaauca

SEQ ID NO: 3064320 - RNA, 19 nt, Artificial Sequence
  Description of Artificial Sequence: Synthetic oligonucleotide
ugguuacguuucgcuggac

SEQ ID NO: 3064321 - RNA, 19 nt, Artificial Sequence
  Description of Artificial Sequence: Synthetic oligonucleotide
cgguuccuauaauggagac

SEQ ID NO: 3064322 - RNA, 19 nt, Artificial Sequence
  Description of Artificial Sequence: Synthetic oligonucleotide
cgucuuuugccuggcgugc

SEQ ID NO: 3064323 - RNA, 19 nt, Artificial Sequence
  Description of Artificial Sequence: Synthetic oligonucleotide
caugccgaccgacuccggu

SEQ ID NO: 3064324 - RNA, 19 nt, Artificial Sequence
  Description of Artificial Sequence: Synthetic oligonucleotide
cagugacaaggaaaucuuu

SEQ ID NO: 3064325 - RNA, 19 nt, Artificial Sequence
  Description of Artificial Sequence: Synthetic oligonucleotide
caucagcuuaaagaugguu

SEQ ID NO: 3064326 - RNA, 19 nt, Artificial Sequence
  Description of Artificial Sequence: Synthetic oligonucleotide
caggccaugccgaccgacu

SEQ ID NO: 3064327 - RNA, 19 nt, Artificial Sequence
  Description of Artificial Sequence: Synthetic oligonucleotide
ggcgugcaccugcugugac

SEQ ID NO: 3064328 - RNA, 19 nt, Artificial Sequence
  Description of Artificial Sequence: Synthetic oligonucleotide
gcgugcaccugcugugaca

SEQ ID NO: 3064329 - RNA, 19 nt, Artificial Sequence
  Description of Artificial Sequence: Synthetic oligonucleotide
gaccgacuccgguuccuau

SEQ ID NO: 3064330 - RNA, 19 nt, Artificial Sequence
  Description of Artificial Sequence: Synthetic oligonucleotide
gggcaaccucaucagccaa

SEQ ID NO: 3064331 - RNA, 19 nt, Artificial Sequence
  Description of Artificial Sequence: Synthetic oligonucleotide
gucucacccuucauuuuau

SEQ ID NO: 3064332 - RNA, 19 nt, Artificial Sequence
  Description of Artificial Sequence: Synthetic oligonucleotide
ccgacuccgguuccuauaa

SEQ ID NO: 3064333 - RNA, 19 nt, Artificial Sequence
  Description of Artificial Sequence: Synthetic oligonucleotide
uaggcgcguuucgucuuuu

SEQ ID NO: 3064334 - RNA, 19 nt, Artificial Sequence
  Description of Artificial Sequence: Synthetic oligonucleotide
cgucucacccuucauuuua

SEQ ID NO: 3064335 - RNA, 19 nt, Artificial Sequence
  Description of Artificial Sequence: Synthetic oligonucleotide
gccgaccgacuccgguucc

SEQ ID NO: 3064336 - RNA, 19 nt, Artificial Sequence
  Description of Artificial Sequence: Synthetic oligonucleotide
cgcguuucgucuuuugccu

SEQ ID NO: 3064337 - RNA, 19 nt, Artificial Sequence
  Description of Artificial Sequence: Synthetic oligonucleotide
ccuggcgugcaccugcugu

SEQ ID NO: 3064338 - RNA, 19 nt, Artificial Sequence
  Description of Artificial Sequence: Synthetic oligonucleotide
cugcugugacaaucacuau

SEQ ID NO: 3064339 - RNA, 19 nt, Artificial Sequence
  Description of Artificial Sequence: Synthetic oligonucleotide
cugccgugcuggagaucca

SEQ ID NO: 3064340 - RNA, 19 nt, Artificial Sequence
  Description of Artificial Sequence: Synthetic oligonucleotide
cgugcaccugcugugacaa

SEQ ID NO: 3064341 - RNA, 19 nt, Artificial Sequence
  Description of Artificial Sequence: Synthetic oligonucleotide
ggacuaaauuuaggcgcgu

SEQ ID NO: 3064342 - RNA, 19 nt, Artificial Sequence
  Description of Artificial Sequence: Synthetic oligonucleotide
ccaugccgaccgacuccgg

SEQ ID NO: 3064343 - RNA, 19 nt, Artificial Sequence
  Description of Artificial Sequence: Synthetic oligonucleotide
cacaggccaugccgaccga

SEQ ID NO: 3064344 - RNA, 19 nt, Artificial Sequence
  Description of Artificial Sequence: Synthetic oligonucleotide
cacugccgugcuggagauc

SEQ ID NO: 3064345 - RNA, 19 nt, Artificial Sequence
  Description of Artificial Sequence: Synthetic oligonucleotide
gccgugcuggagauccauc

SEQ ID NO: 3064346 - RNA, 19 nt, Artificial Sequence
  Description of Artificial Sequence: Synthetic oligonucleotide
gccuggcgugcaccugcug

SEQ ID NO: 3064347 - RNA, 19 nt, Artificial Sequence
  Description of Artificial Sequence: Synthetic oligonucleotide
ccaucagcuuaaagauggu

SEQ ID NO: 3064348 - RNA, 19 nt, Artificial Sequence
  Description of Artificial Sequence: Synthetic oligonucleotide
cccuucauuuuaucuucau

SEQ ID NO: 3064349 - RNA, 19 nt, Artificial Sequence
  Description of Artificial Sequence: Synthetic oligonucleotide
cgugcuggagauccaucgu

SEQ ID NO: 3064350 - RNA, 19 nt, Artificial Sequence
  Description of Artificial Sequence: Synthetic oligonucleotide
gccaagccuuugcuaugau

SEQ ID NO: 3064351 - RNA, 19 nt, Artificial Sequence
  Description of Artificial Sequence: Synthetic oligonucleotide
ccuuugcuaugaugcugau

SEQ ID NO: 3064352 - RNA, 19 nt, Artificial Sequence
  Description of Artificial Sequence: Synthetic oligonucleotide
ccaucgucucacccuucau

SEQ ID NO: 3064353 - RNA, 19 nt, Artificial Sequence
  Description of Artificial Sequence: Synthetic oligonucleotide
ccucaucagccaagccuuu

SEQ ID NO: 3064354 - RNA, 19 nt, Artificial Sequence
  Description of Artificial Sequence: Synthetic oligonucleotide
ccgaccgacuccgguuccu

SEQ ID NO: 3064355 - RNA, 19 nt, Artificial Sequence
  Description of Artificial Sequence: Synthetic oligonucleotide
cgaccgacuccgguuccua

SEQ ID NO: 3064356 - RNA, 19 nt, Artificial Sequence
  Description of Artificial Sequence: Synthetic oligonucleotide
cgacuccgguuccuauaau

SEQ ID NO: 3064357 - RNA, 19 nt, Artificial Sequence
  Description of Artificial Sequence: Synthetic oligonucleotide
cggcaaccaucagcuuaaa

SEQ ID NO: 3064358 - RNA, 19 nt, Artificial Sequence
  Description of Artificial Sequence: Synthetic oligonucleotide
gaagauaccacagugacgc

SEQ ID NO: 3064359 - RNA, 19 nt, Artificial Sequence
  Description of Artificial Sequence: Synthetic oligonucleotide
uauuuuauguaacucagaa

SEQ ID NO: 3064360 - RNA, 19 nt, Artificial Sequence
  Description of Artificial Sequence: Synthetic oligonucleotide
ugcaguaguagccaaagca

SEQ ID NO: 3064361 - RNA, 19 nt, Artificial Sequence
  Description of Artificial Sequence: Synthetic oligonucleotide
uauguaacucagaaggccc

SEQ ID NO: 3064362 - RNA, 19 nt, Artificial Sequence
  Description of Artificial Sequence: Synthetic oligonucleotide
uauucucggugaaagaaag

SEQ ID NO: 3064363 - RNA, 19 nt, Artificial Sequence
  Description of Artificial Sequence: Synthetic oligonucleotide
accacagugacgcugacag

SEQ ID NO: 3064364 - RNA, 19 nt, Artificial Sequence
  Description of Artificial Sequence: Synthetic oligonucleotide
uuuauguaacucagaaggc

SEQ ID NO: 3064365 - RNA, 19 nt, Artificial Sequence
  Description of Artificial Sequence: Synthetic oligonucleotide
gaaagaaaggcuggggugg

SEQ ID NO: 3064366 - RNA, 19 nt, Artificial Sequence
  Description of Artificial Sequence: Synthetic oligonucleotide
auuuuauguaacucagaag

SEQ ID NO: 3064367 - RNA, 19 nt, Artificial Sequence
  Description of Artificial Sequence: Synthetic oligonucleotide
uuauguaacucagaaggcc

SEQ ID NO: 3064368 - RNA, 19 nt, Artificial Sequence
  Description of Artificial Sequence: Synthetic oligonucleotide
ugaaagaaaggcuggggug

SEQ ID NO: 3064369 - RNA, 19 nt, Artificial Sequence
  Description of Artificial Sequence: Synthetic oligonucleotide
aacucagaaggcccuguac

SEQ ID NO: 3064370 - RNA, 19 nt, Artificial Sequence
  Description of Artificial Sequence: Synthetic oligonucleotide
agguauuuuauguaacuca

SEQ ID NO: 3064371 - RNA, 19 nt, Artificial Sequence
  Description of Artificial Sequence: Synthetic oligonucleotide
ugugccagguauuuuaugu

SEQ ID NO: 3064372 - RNA, 19 nt, Artificial Sequence
  Description of Artificial Sequence: Synthetic oligonucleotide
gacaccuuuauucucggug

SEQ ID NO: 3064373 - RNA, 19 nt, Artificial Sequence
  Description of Artificial Sequence: Synthetic oligonucleotide
acuggaagauaccacagug

SEQ ID NO: 3064374 - RNA, 19 nt, Artificial Sequence
  Description of Artificial Sequence: Synthetic oligonucleotide
guuccagacaccuuuauuc

SEQ ID NO: 3064375 - RNA, 19 nt, Artificial Sequence
  Description of Artificial Sequence: Synthetic oligonucleotide
uuuauucucggugaaagaa

SEQ ID NO: 3064376 - RNA, 19 nt, Artificial Sequence
  Description of Artificial Sequence: Synthetic oligonucleotide
uucucggugaaagaaaggc

SEQ ID NO: 3064377 - RNA, 19 nt, Artificial Sequence
  Description of Artificial Sequence: Synthetic oligonucleotide
ugcaguugaguccuggccc

SEQ ID NO: 3064378 - RNA, 19 nt, Artificial Sequence
  Description of Artificial Sequence: Synthetic oligonucleotide
gauggucugguacuggaag

SEQ ID NO: 3064379 - RNA, 19 nt, Artificial Sequence
  Description of Artificial Sequence: Synthetic oligonucleotide
ucagugcugggucagacac

SEQ ID NO: 3064380 - RNA, 19 nt, Artificial Sequence
  Description of Artificial Sequence: Synthetic oligonucleotide
cucggugaaagaaaggcug

SEQ ID NO: 3064381 - RNA, 19 nt, Artificial Sequence
  Description of Artificial Sequence: Synthetic oligonucleotide
ucggugaaagaaaggcugg

SEQ ID NO: 3064382 - RNA, 19 nt, Artificial Sequence
  Description of Artificial Sequence: Synthetic oligonucleotide
aaagcagaccacaugcgag

SEQ ID NO: 3064383 - RNA, 19 nt, Artificial Sequence
  Description of Artificial Sequence: Synthetic oligonucleotide
ucagaggcgcuuuccaagg

SEQ ID NO: 3064384 - RNA, 19 nt, Artificial Sequence
  Description of Artificial Sequence: Synthetic oligonucleotide
uuauucucggugaaagaaa

SEQ ID NO: 3064385 - RNA, 19 nt, Artificial Sequence
  Description of Artificial Sequence: Synthetic oligonucleotide
uccaaggucagguuagcca

SEQ ID NO: 3064386 - RNA, 19 nt, Artificial Sequence
  Description of Artificial Sequence: Synthetic oligonucleotide
caguugaugcaggagaugg

SEQ ID NO: 3064387 - RNA, 19 nt, Artificial Sequence
  Description of Artificial Sequence: Synthetic oligonucleotide
agugcaguugaguccuggc

SEQ ID NO: 3064388 - RNA, 19 nt, Artificial Sequence
  Description of Artificial Sequence: Synthetic oligonucleotide
ugcugggucagacacucag

SEQ ID NO: 3064389 - RNA, 19 nt, Artificial Sequence
  Description of Artificial Sequence: Synthetic oligonucleotide
uccuguuugugccagguau

SEQ ID NO: 3064390 - RNA, 19 nt, Artificial Sequence
  Description of Artificial Sequence: Synthetic oligonucleotide
gguucucgagccuauaucc

SEQ ID NO: 3064391 - RNA, 19 nt, Artificial Sequence
  Description of Artificial Sequence: Synthetic oligonucleotide
gacgcugacagucgaugcg

SEQ ID NO: 3064392 - RNA, 19 nt, Artificial Sequence
  Description of Artificial Sequence: Synthetic oligonucleotide
acucagaaggcccuguaca

SEQ ID NO: 3064393 - RNA, 19 nt, Artificial Sequence
  Description of Artificial Sequence: Synthetic oligonucleotide
aagcagaccacaugcgagu

SEQ ID NO: 3064394 - RNA, 19 nt, Artificial Sequence
  Description of Artificial Sequence: Synthetic oligonucleotide
ucugguacuggaagauacc

SEQ ID NO: 3064395 - RNA, 19 nt, Artificial Sequence
  Description of Artificial Sequence: Synthetic oligonucleotide
acaccuuuauucucgguga

SEQ ID NO: 3064396 - RNA, 19 nt, Artificial Sequence
  Description of Artificial Sequence: Synthetic oligonucleotide
uauauccuguuugugccag

SEQ ID NO: 3064397 - RNA, 19 nt, Artificial Sequence
  Description of Artificial Sequence: Synthetic oligonucleotide
ucucggugaaagaaaggcu

SEQ ID NO: 3064398 - RNA, 19 nt, Artificial Sequence
  Description of Artificial Sequence: Synthetic oligonucleotide
ugaugcaggagauggucug

SEQ ID NO: 3064399 - RNA, 19 nt, Artificial Sequence
  Description of Artificial Sequence: Synthetic oligonucleotide
uuccagacaccuuuauucu

SEQ ID NO: 3064400 - RNA, 19 nt, Artificial Sequence
  Description of Artificial Sequence: Synthetic oligonucleotide
agugcugggucagacacuc

SEQ ID NO: 3064401 - RNA, 19 nt, Artificial Sequence
  Description of Artificial Sequence: Synthetic oligonucleotide
ucugugcaguugaugcagg

SEQ ID NO: 3064402 - RNA, 19 nt, Artificial Sequence
  Description of Artificial Sequence: Synthetic oligonucleotide
ugugccgaugacuugcagu

SEQ ID NO: 3064403 - RNA, 19 nt, Artificial Sequence
  Description of Artificial Sequence: Synthetic oligonucleotide
uucucgagccuauauccug

SEQ ID NO: 3064404 - RNA, 19 nt, Artificial Sequence
  Description of Artificial Sequence: Synthetic oligonucleotide
ccuauauccuguuugugcc

SEQ ID NO: 3064405 - RNA, 19 nt, Artificial Sequence
  Description of Artificial Sequence: Synthetic oligonucleotide
cugggucagacacucagag

SEQ ID NO: 3064406 - RNA, 19 nt, Artificial Sequence
  Description of Artificial Sequence: Synthetic oligonucleotide
ugcgagucugugcaguuga

SEQ ID NO: 3064407 - RNA, 19 nt, Artificial Sequence
  Description of Artificial Sequence: Synthetic oligonucleotide
uguacagcugauucccacu

SEQ ID NO: 3064408 - RNA, 19 nt, Artificial Sequence
  Description of Artificial Sequence: Synthetic oligonucleotide
uugaugcaggagauggucu

SEQ ID NO: 3064409 - RNA, 19 nt, Artificial Sequence
  Description of Artificial Sequence: Synthetic oligonucleotide
cuugcaguaguagccaaag

SEQ ID NO: 3064410 - RNA, 19 nt, Artificial Sequence
  Description of Artificial Sequence: Synthetic oligonucleotide
cucagaaggcccuguacag

SEQ ID NO: 3064411 - RNA, 19 nt, Artificial Sequence
  Description of Artificial Sequence: Synthetic oligonucleotide
acagcugauucccacugug

SEQ ID NO: 3064412 - RNA, 19 nt, Artificial Sequence
  Description of Artificial Sequence: Synthetic oligonucleotide
cucagaggcgcuuuccaag

SEQ ID NO: 3064413 - RNA, 19 nt, Artificial Sequence
  Description of Artificial Sequence: Synthetic oligonucleotide
gguacuggaagauaccaca

SEQ ID NO: 3064414 - RNA, 19 nt, Artificial Sequence
  Description of Artificial Sequence: Synthetic oligonucleotide
aggugcugcgguuccagac

SEQ ID NO: 3064415 - RNA, 19 nt, Artificial Sequence
  Description of Artificial Sequence: Synthetic oligonucleotide
uacuggaagauaccacagu

SEQ ID NO: 3064416 - RNA, 19 nt, Artificial Sequence
  Description of Artificial Sequence: Synthetic oligonucleotide
ugcgguuccagacaccuuu

SEQ ID NO: 3064417 - RNA, 19 nt, Artificial Sequence
  Description of Artificial Sequence: Synthetic oligonucleotide
agaggcgcuuuccaagguc

SEQ ID NO: 3064418 - RNA, 19 nt, Artificial Sequence
  Description of Artificial Sequence: Synthetic oligonucleotide
ugugcaguugaugcaggag

SEQ ID NO: 3064419 - RNA, 19 nt, Artificial Sequence
  Description of Artificial Sequence: Synthetic oligonucleotide
aaggcuggggugguucucg

SEQ ID NO: 3064420 - RNA, 19 nt, Artificial Sequence
  Description of Artificial Sequence: Synthetic oligonucleotide
ugggucagacacucagagg

SEQ ID NO: 3064421 - RNA, 19 nt, Artificial Sequence
  Description of Artificial Sequence: Synthetic oligonucleotide
cacagugacgcugacaguc

SEQ ID NO: 3064422 - RNA, 19 nt, Artificial Sequence
  Description of Artificial Sequence: Synthetic oligonucleotide
ucucgagccuauauccugu

SEQ ID NO: 3064423 - RNA, 19 nt, Artificial Sequence
  Description of Artificial Sequence: Synthetic oligonucleotide
agaaaggcuggggugguuc

SEQ ID NO: 3064424 - RNA, 19 nt, Artificial Sequence
  Description of Artificial Sequence: Synthetic oligonucleotide
ugguacuggaagauaccac

SEQ ID NO: 3064425 - RNA, 19 nt, Artificial Sequence
  Description of Artificial Sequence: Synthetic oligonucleotide
uuugugccagguauuuuau

SEQ ID NO: 3064426 - RNA, 19 nt, Artificial Sequence
  Description of Artificial Sequence: Synthetic oligonucleotide
ugguucucgagccuauauc

SEQ ID NO: 3064427 - RNA, 19 nt, Artificial Sequence
  Description of Artificial Sequence: Synthetic oligonucleotide
guuugugccagguauuuua

SEQ ID NO: 3064428 - RNA, 19 nt, Artificial Sequence
  Description of Artificial Sequence: Synthetic oligonucleotide
gccuauauccuguuugugc

SEQ ID NO: 3064429 - RNA, 19 nt, Artificial Sequence
  Description of Artificial Sequence: Synthetic oligonucleotide
gauaccacagugacgcuga

SEQ ID NO: 3064430 - RNA, 19 nt, Artificial Sequence
  Description of Artificial Sequence: Synthetic oligonucleotide
gaugcaggagauggucugg

SEQ ID NO: 3064431 - RNA, 19 nt, Artificial Sequence
  Description of Artificial Sequence: Synthetic oligonucleotide
guacagcugauucccacug

SEQ ID NO: 3064432 - RNA, 19 nt, Artificial Sequence
  Description of Artificial Sequence: Synthetic oligonucleotide
ugacgcugacagucgaugc

SEQ ID NO: 3064433 - RNA, 19 nt, Artificial Sequence
  Description of Artificial Sequence: Synthetic oligonucleotide
agguuagccaggugcugcg

SEQ ID NO: 3064434 - RNA, 19 nt, Artificial Sequence
  Description of Artificial Sequence: Synthetic oligonucleotide
ugacuugcaguaguagcca

SEQ ID NO: 3064435 - RNA, 19 nt, Artificial Sequence
  Description of Artificial Sequence: Synthetic oligonucleotide
uugcaguaguagccaaagc

SEQ ID NO: 3064436 - RNA, 19 nt, Artificial Sequence
  Description of Artificial Sequence: Synthetic oligonucleotide
cuggggugguucucgagcc

SEQ ID NO: 3064437 - RNA, 19 nt, Artificial Sequence
  Description of Artificial Sequence: Synthetic oligonucleotide
agauaccacagugacgcug

SEQ ID NO: 3064438 - RNA, 19 nt, Artificial Sequence
  Description of Artificial Sequence: Synthetic oligonucleotide
ccaaggucagguuagccag

SEQ ID NO: 3064439 - RNA, 19 nt, Artificial Sequence
  Description of Artificial Sequence: Synthetic oligonucleotide
guugaugcaggagaugguc

SEQ ID NO: 3064440 - RNA, 19 nt, Artificial Sequence
  Description of Artificial Sequence: Synthetic oligonucleotide
gagauggucugguacugga

SEQ ID NO: 3064441 - RNA, 19 nt, Artificial Sequence
  Description of Artificial Sequence: Synthetic oligonucleotide
gugcaguugaguccuggcc

SEQ ID NO: 3064442 - RNA, 19 nt, Artificial Sequence
  Description of Artificial Sequence: Synthetic oligonucleotide
gucugguacuggaagauac

SEQ ID NO: 3064443 - RNA, 19 nt, Artificial Sequence
  Description of Artificial Sequence: Synthetic oligonucleotide
ucagaaggcccuguacagc

SEQ ID NO: 3064444 - RNA, 19 nt, Artificial Sequence
  Description of Artificial Sequence: Synthetic oligonucleotide
cacugugccgaugacuugc

SEQ ID NO: 3064445 - RNA, 19 nt, Artificial Sequence
  Description of Artificial Sequence: Synthetic oligonucleotide
cagguauuuuauguaacuc

SEQ ID NO: 3064446 - RNA, 19 nt, Artificial Sequence
  Description of Artificial Sequence: Synthetic oligonucleotide
ggugaaagaaaggcugggg

SEQ ID NO: 3064447 - RNA, 19 nt, Artificial Sequence
  Description of Artificial Sequence: Synthetic oligonucleotide
agccaaagcagaccacaug

SEQ ID NO: 3064448 - RNA, 19 nt, Artificial Sequence
  Description of Artificial Sequence: Synthetic oligonucleotide
uguaacucagaaggcccug

SEQ ID NO: 3064449 - RNA, 19 nt, Artificial Sequence
  Description of Artificial Sequence: Synthetic oligonucleotide
acacucagaggcgcuuucc

SEQ ID NO: 3064450 - RNA, 19 nt, Artificial Sequence
  Description of Artificial Sequence: Synthetic oligonucleotide
aaagaaaggcugggguggu

SEQ ID NO: 3064451 - RNA, 19 nt, Artificial Sequence
  Description of Artificial Sequence: Synthetic oligonucleotide
ccuuuauucucggugaaag

SEQ ID NO: 3064452 - RNA, 19 nt, Artificial Sequence
  Description of Artificial Sequence: Synthetic oligonucleotide
cuguacagcugauucccac

SEQ ID NO: 3064453 - RNA, 19 nt, Artificial Sequence
  Description of Artificial Sequence: Synthetic oligonucleotide
caaagcagaccacaugcga

SEQ ID NO: 3064454 - RNA, 19 nt, Artificial Sequence
  Description of Artificial Sequence: Synthetic oligonucleotide
cagacaccuuuauucucgg

SEQ ID NO: 3064455 - RNA, 19 nt, Artificial Sequence
  Description of Artificial Sequence: Synthetic oligonucleotide
cuggaagauaccacaguga

SEQ ID NO: 3064456 - RNA, 19 nt, Artificial Sequence
  Description of Artificial Sequence: Synthetic oligonucleotide
gugaaagaaaggcuggggu

SEQ ID NO: 3064457 - RNA, 19 nt, Artificial Sequence
  Description of Artificial Sequence: Synthetic oligonucleotide
cuuuauucucggugaaaga

SEQ ID NO: 3064458 - RNA, 19 nt, Artificial Sequence
  Description of Artificial Sequence: Synthetic oligonucleotide
acgcugacagucgaugcgg

SEQ ID NO: 3064459 - RNA, 19 nt, Artificial Sequence
  Description of Artificial Sequence: Synthetic oligonucleotide
uugugccagguauuuuaug

SEQ ID NO: 3064460 - RNA, 19 nt, Artificial Sequence
  Description of Artificial Sequence: Synthetic oligonucleotide
uauccuguuugugccaggu

SEQ ID NO: 3064461 - RNA, 19 nt, Artificial Sequence
  Description of Artificial Sequence: Synthetic oligonucleotide
uccagacaccuuuauucuc

SEQ ID NO: 3064462 - RNA, 19 nt, Artificial Sequence
  Description of Artificial Sequence: Synthetic oligonucleotide
aaaggcuggggugguucuc

SEQ ID NO: 3064463 - RNA, 19 nt, Artificial Sequence
  Description of Artificial Sequence: Synthetic oligonucleotide
gaaggcccuguacagcuga

SEQ ID NO: 3064464 - RNA, 19 nt, Artificial Sequence
  Description of Artificial Sequence: Synthetic oligonucleotide
cagcugauucccacugugc

SEQ ID NO: 3064465 - RNA, 19 nt, Artificial Sequence
  Description of Artificial Sequence: Synthetic oligonucleotide
auucucggugaaagaaagg

SEQ ID NO: 3064466 - RNA, 19 nt, Artificial Sequence
  Description of Artificial Sequence: Synthetic oligonucleotide
aaggucagguuagccaggu

SEQ ID NO: 3064467 - RNA, 19 nt, Artificial Sequence
  Description of Artificial Sequence: Synthetic oligonucleotide
ggaagauaccacagugacg

SEQ ID NO: 3064468 - RNA, 19 nt, Artificial Sequence
  Description of Artificial Sequence: Synthetic oligonucleotide
uacagcugauucccacugu

SEQ ID NO: 3064469 - RNA, 19 nt, Artificial Sequence
  Description of Artificial Sequence: Synthetic oligonucleotide
cagaccacaugcgagucug

SEQ ID NO: 3064470 - RNA, 19 nt, Artificial Sequence
  Description of Artificial Sequence: Synthetic oligonucleotide
acagugacgcugacagucg

SEQ ID NO: 3064471 - RNA, 19 nt, Artificial Sequence
  Description of Artificial Sequence: Synthetic oligonucleotide
aagauaccacagugacgcu

SEQ ID NO: 3064472 - RNA, 19 nt, Artificial Sequence
  Description of Artificial Sequence: Synthetic oligonucleotide
cagguuagccaggugcugc

SEQ ID NO: 3064473 - RNA, 19 nt, Artificial Sequence
  Description of Artificial Sequence: Synthetic oligonucleotide
aguagccaaagcagaccac

SEQ ID NO: 3064474 - RNA, 19 nt, Artificial Sequence
  Description of Artificial Sequence: Synthetic oligonucleotide
uagccaaagcagaccacau

SEQ ID NO: 3064475 - RNA, 19 nt, Artificial Sequence
  Description of Artificial Sequence: Synthetic oligonucleotide
uuuccaaggucagguuagc

SEQ ID NO: 3064476 - RNA, 19 nt, Artificial Sequence
  Description of Artificial Sequence: Synthetic oligonucleotide
gugccgaugacuugcagua

SEQ ID NO: 3064477 - RNA, 19 nt, Artificial Sequence
  Description of Artificial Sequence: Synthetic oligonucleotide
uuccaaggucagguuagcc

SEQ ID NO: 3064478 - RNA, 19 nt, Artificial Sequence
  Description of Artificial Sequence: Synthetic oligonucleotide
uaacucagaaggcccugua

SEQ ID NO: 3064479 - RNA, 19 nt, Artificial Sequence
  Description of Artificial Sequence: Synthetic oligonucleotide
agcagaccacaugcgaguc

SEQ ID NO: 3064480 - RNA, 19 nt, Artificial Sequence
  Description of Artificial Sequence: Synthetic oligonucleotide
gucagacacucagaggcgc

SEQ ID NO: 3064481 - RNA, 19 nt, Artificial Sequence
  Description of Artificial Sequence: Synthetic oligonucleotide
ccaaagcagaccacaugcg

SEQ ID NO: 3064482 - RNA, 19 nt, Artificial Sequence
  Description of Artificial Sequence: Synthetic oligonucleotide
gcaggagauggucugguac

SEQ ID NO: 3064483 - RNA, 19 nt, Artificial Sequence
  Description of Artificial Sequence: Synthetic oligonucleotide
gugacgcugacagucgaug

SEQ ID NO: 3064484 - RNA, 19 nt, Artificial Sequence
  Description of Artificial Sequence: Synthetic oligonucleotide
gaccacaugcgagucugug

SEQ ID NO: 3064485 - RNA, 19 nt, Artificial Sequence
  Description of Artificial Sequence: Synthetic oligonucleotide
ucagguuagccaggugcug

SEQ ID NO: 3064486 - RNA, 19 nt, Artificial Sequence
  Description of Artificial Sequence: Synthetic oligonucleotide
acucagaggcgcuuuccaa

SEQ ID NO: 3064487 - RNA, 19 nt, Artificial Sequence
  Description of Artificial Sequence: Synthetic oligonucleotide
cuauauccuguuugugcca

SEQ ID NO: 3064488 - RNA, 19 nt, Artificial Sequence
  Description of Artificial Sequence: Synthetic oligonucleotide
ugucagugcugggucagac

SEQ ID NO: 3064489 - RNA, 19 nt, Artificial Sequence
  Description of Artificial Sequence: Synthetic oligonucleotide
auaccacagugacgcugac

SEQ ID NO: 3064490 - RNA, 19 nt, Artificial Sequence
  Description of Artificial Sequence: Synthetic oligonucleotide
gaggcgcuuuccaagguca

SEQ ID NO: 3064491 - RNA, 19 nt, Artificial Sequence
  Description of Artificial Sequence: Synthetic oligonucleotide
gcuggggugguucucgagc

SEQ ID NO: 3064492 - RNA, 19 nt, Artificial Sequence
  Description of Artificial Sequence: Synthetic oligonucleotide
cugguacuggaagauacca

SEQ ID NO: 3064493 - RNA, 19 nt, Artificial Sequence
  Description of Artificial Sequence: Synthetic oligonucleotide
cugauucccacugugccga

SEQ ID NO: 3064494 - RNA, 19 nt, Artificial Sequence
  Description of Artificial Sequence: Synthetic oligonucleotide
gagccuauauccuguuugu

SEQ ID NO: 3064495 - RNA, 19 nt, Artificial Sequence
  Description of Artificial Sequence: Synthetic oligonucleotide
auguaacucagaaggcccu

SEQ ID NO: 3064496 - RNA, 19 nt, Artificial Sequence
  Description of Artificial Sequence: Synthetic oligonucleotide
acaugcgagucugugcagu

SEQ ID NO: 3064497 - RNA, 19 nt, Artificial Sequence
  Description of Artificial Sequence: Synthetic oligonucleotide
aggagauggucugguacug

SEQ ID NO: 3064498 - RNA, 19 nt, Artificial Sequence
  Description of Artificial Sequence: Synthetic oligonucleotide
gacacucagaggcgcuuuc

SEQ ID NO: 3064499 - RNA, 19 nt, Artificial Sequence
  Description of Artificial Sequence: Synthetic oligonucleotide
uuagccaggugcugcgguu

SEQ ID NO: 3064500 - RNA, 19 nt, Artificial Sequence
  Description of Artificial Sequence: Synthetic oligonucleotide
ggcccuguacagcugauuc

SEQ ID NO: 3064501 - RNA, 19 nt, Artificial Sequence
  Description of Artificial Sequence: Synthetic oligonucleotide
agcagccgcugucagugcu

SEQ ID NO: 3064502 - RNA, 19 nt, Artificial Sequence
  Description of Artificial Sequence: Synthetic oligonucleotide
gcaguugaguccuggcccc

SEQ ID NO: 3064503 - RNA, 19 nt, Artificial Sequence
  Description of Artificial Sequence: Synthetic oligonucleotide
cgagccuauauccuguuug

SEQ ID NO: 3064504 - RNA, 19 nt, Artificial Sequence
  Description of Artificial Sequence: Synthetic oligonucleotide
cccuguacagcugauuccc

SEQ ID NO: 3064505 - RNA, 19 nt, Artificial Sequence
  Description of Artificial Sequence: Synthetic oligonucleotide
ggucagacacucagaggcg

SEQ ID NO: 3064506 - RNA, 19 nt, Artificial Sequence
  Description of Artificial Sequence: Synthetic oligonucleotide
agccuauauccuguuugug

SEQ ID NO: 3064507 - RNA, 19 nt, Artificial Sequence
  Description of Artificial Sequence: Synthetic oligonucleotide
gacuugcaguaguagccaa

SEQ ID NO: 3064508 - RNA, 19 nt, Artificial Sequence
  Description of Artificial Sequence: Synthetic oligonucleotide
agacaccuuuauucucggu

SEQ ID NO: 3064509 - RNA, 19 nt, Artificial Sequence
  Description of Artificial Sequence: Synthetic oligonucleotide
cagaaggcccuguacagcu

SEQ ID NO: 3064510 - RNA, 19 nt, Artificial Sequence
  Description of Artificial Sequence: Synthetic oligonucleotide
aguugaugcaggagauggu

SEQ ID NO: 3064511 - RNA, 19 nt, Artificial Sequence
  Description of Artificial Sequence: Synthetic oligonucleotide
gugcugcgguuccagacac

SEQ ID NO: 3064512 - RNA, 19 nt, Artificial Sequence
  Description of Artificial Sequence: Synthetic oligonucleotide
cagugcaguugaguccugg

SEQ ID NO: 3064513 - RNA, 19 nt, Artificial Sequence
  Description of Artificial Sequence: Synthetic oligonucleotide
ugccgaugacuugcaguag

SEQ ID NO: 3064514 - RNA, 19 nt, Artificial Sequence
  Description of Artificial Sequence: Synthetic oligonucleotide
uaccacagugacgcugaca

SEQ ID NO: 3064515 - RNA, 19 nt, Artificial Sequence
  Description of Artificial Sequence: Synthetic oligonucleotide
gucagugcugggucagaca

SEQ ID NO: 3064516 - RNA, 19 nt, Artificial Sequence
  Description of Artificial Sequence: Synthetic oligonucleotide
ggugcugcgguuccagaca

SEQ ID NO: 3064517 - RNA, 19 nt, Artificial Sequence
  Description of Artificial Sequence: Synthetic oligonucleotide
ggagauggucugguacugg

SEQ ID NO: 3064518 - RNA, 19 nt, Artificial Sequence
  Description of Artificial Sequence: Synthetic oligonucleotide
ucgagccuauauccuguuu

SEQ ID NO: 3064519 - RNA, 19 nt, Artificial Sequence
  Description of Artificial Sequence: Synthetic oligonucleotide
caggagauggucugguacu

SEQ ID NO: 3064520 - RNA, 19 nt, Artificial Sequence
  Description of Artificial Sequence: Synthetic oligonucleotide
uggggugguucucgagccu

SEQ ID NO: 3064521 - RNA, 19 nt, Artificial Sequence
  Description of Artificial Sequence: Synthetic oligonucleotide
gugccagguauuuuaugua

SEQ ID NO: 3064522 - RNA, 19 nt, Artificial Sequence
  Description of Artificial Sequence: Synthetic oligonucleotide
gaaaggcuggggugguucu

SEQ ID NO: 3064523 - RNA, 19 nt, Artificial Sequence
  Description of Artificial Sequence: Synthetic oligonucleotide
ugcugcgguuccagacacc

SEQ ID NO: 3064524 - RNA, 19 nt, Artificial Sequence
  Description of Artificial Sequence: Synthetic oligonucleotide
uguuugugccagguauuuu

SEQ ID NO: 3064525 - RNA, 19 nt, Artificial Sequence
  Description of Artificial Sequence: Synthetic oligonucleotide
ugcaggagauggucuggua

SEQ ID NO: 3064526 - RNA, 19 nt, Artificial Sequence
  Description of Artificial Sequence: Synthetic oligonucleotide
cacucagaggcgcuuucca

SEQ ID NO: 3064527 - RNA, 19 nt, Artificial Sequence
  Description of Artificial Sequence: Synthetic oligonucleotide
gauucccacugugccgaug

SEQ ID NO: 3064528 - RNA, 19 nt, Artificial Sequence
  Description of Artificial Sequence: Synthetic oligonucleotide
accuuuauucucggugaaa

SEQ ID NO: 3064529 - RNA, 19 nt, Artificial Sequence
  Description of Artificial Sequence: Synthetic oligonucleotide
augcaggagauggucuggu

SEQ ID NO: 3064530 - RNA, 19 nt, Artificial Sequence
  Description of Artificial Sequence: Synthetic oligonucleotide
gcccuguacagcugauucc

SEQ ID NO: 3064531 - RNA, 19 nt, Artificial Sequence
  Description of Artificial Sequence: Synthetic oligonucleotide
cugugcaguugaugcagga

SEQ ID NO: 3064532 - RNA, 19 nt, Artificial Sequence
  Description of Artificial Sequence: Synthetic oligonucleotide
augcgagucugugcaguug

SEQ ID NO: 3064533 - RNA, 19 nt, Artificial Sequence
  Description of Artificial Sequence: Synthetic oligonucleotide
acuugcaguaguagccaaa

SEQ ID NO: 3064534 - RNA, 19 nt, Artificial Sequence
  Description of Artificial Sequence: Synthetic oligonucleotide
gcuuuccaaggucagguua

SEQ ID NO: 3064535 - RNA, 19 nt, Artificial Sequence
  Description of Artificial Sequence: Synthetic oligonucleotide
uucccacugugccgaugac

SEQ ID NO: 3064536 - RNA, 19 nt, Artificial Sequence
  Description of Artificial Sequence: Synthetic oligonucleotide
cagccgcugucagugcugg

SEQ ID NO: 3064537 - RNA, 19 nt, Artificial Sequence
  Description of Artificial Sequence: Synthetic oligonucleotide
uagccaggugcugcgguuc

SEQ ID NO: 3064538 - RNA, 19 nt, Artificial Sequence
  Description of Artificial Sequence: Synthetic oligonucleotide
agauggucugguacuggaa

SEQ ID NO: 3064539 - RNA, 19 nt, Artificial Sequence
  Description of Artificial Sequence: Synthetic oligonucleotide
cugugccgaugacuugcag

SEQ ID NO: 3064540 - RNA, 19 nt, Artificial Sequence
  Description of Artificial Sequence: Synthetic oligonucleotide
ggcgcuuuccaaggucagg

SEQ ID NO: 3064541 - RNA, 19 nt, Artificial Sequence
  Description of Artificial Sequence: Synthetic oligonucleotide
guuagccaggugcugcggu

SEQ ID NO: 3064542 - RNA, 19 nt, Artificial Sequence
  Description of Artificial Sequence: Synthetic oligonucleotide
gucagguuagccaggugcu

SEQ ID NO: 3064543 - RNA, 19 nt, Artificial Sequence
  Description of Artificial Sequence: Synthetic oligonucleotide
auccuguuugugccaggua

SEQ ID NO: 3064544 - RNA, 19 nt, Artificial Sequence
  Description of Artificial Sequence: Synthetic oligonucleotide
aagaaaggcuggggugguu

SEQ ID NO: 3064545 - RNA, 19 nt, Artificial Sequence
  Description of Artificial Sequence: Synthetic oligonucleotide
gguuagccaggugcugcgg

SEQ ID NO: 3064546 - RNA, 19 nt, Artificial Sequence
  Description of Artificial Sequence: Synthetic oligonucleotide
agaaggcccuguacagcug

SEQ ID NO: 3064547 - RNA, 19 nt, Artificial Sequence
  Description of Artificial Sequence: Synthetic oligonucleotide
ccagguauuuuauguaacu

SEQ ID NO: 3064548 - RNA, 19 nt, Artificial Sequence
  Description of Artificial Sequence: Synthetic oligonucleotide
acugugccgaugacuugca

SEQ ID NO: 3064549 - RNA, 19 nt, Artificial Sequence
  Description of Artificial Sequence: Synthetic oligonucleotide
caccuuuauucucggugaa

SEQ ID NO: 3064550 - RNA, 19 nt, Artificial Sequence
  Description of Artificial Sequence: Synthetic oligonucleotide
agugacgcugacagucgau

SEQ ID NO: 3064551 - RNA, 19 nt, Artificial Sequence
  Description of Artificial Sequence: Synthetic oligonucleotide
gugguucucgagccuauau

SEQ ID NO: 3064552 - RNA, 19 nt, Artificial Sequence
  Description of Artificial Sequence: Synthetic oligonucleotide
agacacucagaggcgcuuu

SEQ ID NO: 3064553 - RNA, 19 nt, Artificial Sequence
  Description of Artificial Sequence: Synthetic oligonucleotide
gcaguugaugcaggagaug

SEQ ID NO: 3064554 - RNA, 19 nt, Artificial Sequence
  Description of Artificial Sequence: Synthetic oligonucleotide
guucucgagccuauauccu

SEQ ID NO: 3064555 - RNA, 19 nt, Artificial Sequence
  Description of Artificial Sequence: Synthetic oligonucleotide
agccgcugucagugcuggg

SEQ ID NO: 3064556 - RNA, 19 nt, Artificial Sequence
  Description of Artificial Sequence: Synthetic oligonucleotide
cagugacgcugacagucga

SEQ ID NO: 3064557 - RNA, 19 nt, Artificial Sequence
  Description of Artificial Sequence: Synthetic oligonucleotide
aggcgcuuuccaaggucag

SEQ ID NO: 3064558 - RNA, 19 nt, Artificial Sequence
  Description of Artificial Sequence: Synthetic oligonucleotide
guaacucagaaggcccugu

SEQ ID NO: 3064559 - RNA, 19 nt, Artificial Sequence
  Description of Artificial Sequence: Synthetic oligonucleotide
aggcuggggugguucucga

SEQ ID NO: 3064560 - RNA, 19 nt, Artificial Sequence
  Description of Artificial Sequence: Synthetic oligonucleotide
ggcgagcagccgcugucag

SEQ ID NO: 3064561 - RNA, 19 nt, Artificial Sequence
  Description of Artificial Sequence: Synthetic oligonucleotide
ggcuggggugguucucgag

SEQ ID NO: 3064562 - RNA, 19 nt, Artificial Sequence
  Description of Artificial Sequence: Synthetic oligonucleotide
aaggcccuguacagcugau

SEQ ID NO: 3064563 - RNA, 19 nt, Artificial Sequence
  Description of Artificial Sequence: Synthetic oligonucleotide
gccgaugacuugcaguagu

SEQ ID NO: 3064564 - RNA, 19 nt, Artificial Sequence
  Description of Artificial Sequence: Synthetic oligonucleotide
cggugaaagaaaggcuggg

SEQ ID NO: 3064565 - RNA, 19 nt, Artificial Sequence
  Description of Artificial Sequence: Synthetic oligonucleotide
gguuccagacaccuuuauu

SEQ ID NO: 3064566 - RNA, 19 nt, Artificial Sequence
  Description of Artificial Sequence: Synthetic oligonucleotide
ggggcgagcagccgcuguc

SEQ ID NO: 3064567 - RNA, 19 nt, Artificial Sequence
  Description of Artificial Sequence: Synthetic oligonucleotide
caggugcugcgguuccaga

SEQ ID NO: 3064568 - RNA, 19 nt, Artificial Sequence
  Description of Artificial Sequence: Synthetic oligonucleotide
gcugcgguuccagacaccu

SEQ ID NO: 3064569 - RNA, 19 nt, Artificial Sequence
  Description of Artificial Sequence: Synthetic oligonucleotide
ccaggugcugcgguuccag

SEQ ID NO: 3064570 - RNA, 19 nt, Artificial Sequence
  Description of Artificial Sequence: Synthetic oligonucleotide
agaccacaugcgagucugu

SEQ ID NO: 3064571 - RNA, 19 nt, Artificial Sequence
  Description of Artificial Sequence: Synthetic oligonucleotide
gcugggucagacacucaga

SEQ ID NO: 3064572 - RNA, 19 nt, Artificial Sequence
  Description of Artificial Sequence: Synthetic oligonucleotide
gcgcuuuccaaggucaggu

SEQ ID NO: 3064573 - RNA, 19 nt, Artificial Sequence
  Description of Artificial Sequence: Synthetic oligonucleotide
cuguuugugccagguauuu

SEQ ID NO: 3064574 - RNA, 19 nt, Artificial Sequence
  Description of Artificial Sequence: Synthetic oligonucleotide
cccacugugccgaugacuu

SEQ ID NO: 3064575 - RNA, 19 nt, Artificial Sequence
  Description of Artificial Sequence: Synthetic oligonucleotide
caugcgagucugugcaguu

SEQ ID NO: 3064576 - RNA, 19 nt, Artificial Sequence
  Description of Artificial Sequence: Synthetic oligonucleotide
ccgcugucagugcuggguc

SEQ ID NO: 3064577 - RNA, 19 nt, Artificial Sequence
  Description of Artificial Sequence: Synthetic oligonucleotide
acagugcaguugaguccug

SEQ ID NO: 3064578 - RNA, 19 nt, Artificial Sequence
  Description of Artificial Sequence: Synthetic oligonucleotide
gcagccgcugucagugcug

SEQ ID NO: 3064579 - RNA, 19 nt, Artificial Sequence
  Description of Artificial Sequence: Synthetic oligonucleotide
cgcugacagucgaugcggc

SEQ ID NO: 3064580 - RNA, 19 nt, Artificial Sequence
  Description of Artificial Sequence: Synthetic oligonucleotide
aggcccuguacagcugauu

SEQ ID NO: 3064581 - RNA, 19 nt, Artificial Sequence
  Description of Artificial Sequence: Synthetic oligonucleotide
ccacugugccgaugacuug

SEQ ID NO: 3064582 - RNA, 19 nt, Artificial Sequence
  Description of Artificial Sequence: Synthetic oligonucleotide
ggucugguacuggaagaua

SEQ ID NO: 3064583 - RNA, 19 nt, Artificial Sequence
  Description of Artificial Sequence: Synthetic oligonucleotide
cugucagugcugggucaga

SEQ ID NO: 3064584 - RNA, 19 nt, Artificial Sequence
  Description of Artificial Sequence: Synthetic oligonucleotide
gcagaccacaugcgagucu

SEQ ID NO: 3064585 - RNA, 19 nt, Artificial Sequence
  Description of Artificial Sequence: Synthetic oligonucleotide
cagaggcgcuuuccaaggu

SEQ ID NO: 3064586 - RNA, 19 nt, Artificial Sequence
  Description of Artificial Sequence: Synthetic oligonucleotide
gccgcugucagugcugggu

SEQ ID NO: 3064587 - RNA, 19 nt, Artificial Sequence
  Description of Artificial Sequence: Synthetic oligonucleotide
ggggugguucucgagccua

SEQ ID NO: 3064588 - RNA, 19 nt, Artificial Sequence
  Description of Artificial Sequence: Synthetic oligonucleotide
cucgagccuauauccuguu

SEQ ID NO: 3064589 - RNA, 19 nt, Artificial Sequence
  Description of Artificial Sequence: Synthetic oligonucleotide
gggcgagcagccgcuguca

SEQ ID NO: 3064590 - RNA, 19 nt, Artificial Sequence
  Description of Artificial Sequence: Synthetic oligonucleotide
ccuguuugugccagguauu

SEQ ID NO: 3064591 - RNA, 19 nt, Artificial Sequence
  Description of Artificial Sequence: Synthetic oligonucleotide
ggugguucucgagccuaua

SEQ ID NO: 3064592 - RNA, 19 nt, Artificial Sequence
  Description of Artificial Sequence: Synthetic oligonucleotide
gugcugggucagacacuca

SEQ ID NO: 3064593 - RNA, 19 nt, Artificial Sequence
  Description of Artificial Sequence: Synthetic oligonucleotide
cagacacucagaggcgcuu

SEQ ID NO: 3064594 - RNA, 19 nt, Artificial Sequence
  Description of Artificial Sequence: Synthetic oligonucleotide
gcgagcagccgcugucagu

SEQ ID NO: 3064595 - RNA, 19 nt, Artificial Sequence
  Description of Artificial Sequence: Synthetic oligonucleotide
gcgguuccagacaccuuua

SEQ ID NO: 3064596 - RNA, 19 nt, Artificial Sequence
  Description of Artificial Sequence: Synthetic oligonucleotide
cugcgguuccagacaccuu

SEQ ID NO: 3064597 - RNA, 19 nt, Artificial Sequence
  Description of Artificial Sequence: Synthetic oligonucleotide
ccacagugacgcugacagu

SEQ ID NO: 3064598 - RNA, 19 nt, Artificial Sequence
  Description of Artificial Sequence: Synthetic oligonucleotide
gggugguucucgagccuau

SEQ ID NO: 3064599 - RNA, 19 nt, Artificial Sequence
  Description of Artificial Sequence: Synthetic oligonucleotide
gcgagucugugcaguugau

SEQ ID NO: 3064600 - RNA, 19 nt, Artificial Sequence
  Description of Artificial Sequence: Synthetic oligonucleotide
cgcuuuccaaggucagguu

SEQ ID NO: 3064601 - RNA, 19 nt, Artificial Sequence
  Description of Artificial Sequence: Synthetic oligonucleotide
cgguuccagacaccuuuau

SEQ ID NO: 3064602 - RNA, 19 nt, Artificial Sequence
  Description of Artificial Sequence: Synthetic oligonucleotide
auaaaguaggaauuggggc

SEQ ID NO: 3064603 - RNA, 19 nt, Artificial Sequence
  Description of Artificial Sequence: Synthetic oligonucleotide
uucacauccauaaaguagg

SEQ ID NO: 3064604 - RNA, 19 nt, Artificial Sequence
  Description of Artificial Sequence: Synthetic oligonucleotide
uuuuauagcauccugggca

SEQ ID NO: 3064605 - RNA, 19 nt, Artificial Sequence
  Description of Artificial Sequence: Synthetic oligonucleotide
ugauuuuauagcauccugg

SEQ ID NO: 3064606 - RNA, 19 nt, Artificial Sequence
  Description of Artificial Sequence: Synthetic oligonucleotide
agagggaugaaggagaucc

SEQ ID NO: 3064607 - RNA, 19 nt, Artificial Sequence
  Description of Artificial Sequence: Synthetic oligonucleotide
ugugcauggcuaaagaccg

SEQ ID NO: 3064608 - RNA, 19 nt, Artificial Sequence
  Description of Artificial Sequence: Synthetic oligonucleotide
gauuuuauagcauccuggg

SEQ ID NO: 3064609 - RNA, 19 nt, Artificial Sequence
  Description of Artificial Sequence: Synthetic oligonucleotide
aauguguuuauuugggaug

SEQ ID NO: 3064610 - RNA, 19 nt, Artificial Sequence
  Description of Artificial Sequence: Synthetic oligonucleotide
cucaucuugaaucaggugc

SEQ ID NO: 3064611 - RNA, 19 nt, Artificial Sequence
  Description of Artificial Sequence: Synthetic oligonucleotide
caaaauguguuuauuuggg

SEQ ID NO: 3064612 - RNA, 19 nt, Artificial Sequence
  Description of Artificial Sequence: Synthetic oligonucleotide
aaucaggugcuuuucagug

SEQ ID NO: 3064613 - RNA, 19 nt, Artificial Sequence
  Description of Artificial Sequence: Synthetic oligonucleotide
uaaaguaggaauuggggcu

SEQ ID NO: 3064614 - RNA, 19 nt, Artificial Sequence
  Description of Artificial Sequence: Synthetic oligonucleotide
uugugcauggcuaaagacc

SEQ ID NO: 3064615 - RNA, 19 nt, Artificial Sequence
  Description of Artificial Sequence: Synthetic oligonucleotide
aaauguguuuauuugggau

SEQ ID NO: 3064616 - RNA, 19 nt, Artificial Sequence
  Description of Artificial Sequence: Synthetic oligonucleotide
uccaaaauguguuuauuug

SEQ ID NO: 3064617 - RNA, 19 nt, Artificial Sequence
  Description of Artificial Sequence: Synthetic oligonucleotide
auuuuauagcauccugggc

SEQ ID NO: 3064618 - RNA, 19 nt, Artificial Sequence
  Description of Artificial Sequence: Synthetic oligonucleotide
cuucacauccauaaaguag

SEQ ID NO: 3064619 - RNA, 19 nt, Artificial Sequence
  Description of Artificial Sequence: Synthetic oligonucleotide
uucuggagagggaugaagg

SEQ ID NO: 3064620 - RNA, 19 nt, Artificial Sequence
  Description of Artificial Sequence: Synthetic oligonucleotide
accguggugauuuuauagc

SEQ ID NO: 3064621 - RNA, 19 nt, Artificial Sequence
  Description of Artificial Sequence: Synthetic oligonucleotide
acauccauaaaguaggaau

SEQ ID NO: 3064622 - RNA, 19 nt, Artificial Sequence
  Description of Artificial Sequence: Synthetic oligonucleotide
augaaggagauccuuugcg

SEQ ID NO: 3064623 - RNA, 19 nt, Artificial Sequence
  Description of Artificial Sequence: Synthetic oligonucleotide
guuuauuugggaugguucc

SEQ ID NO: 3064624 - RNA, 19 nt, Artificial Sequence
  Description of Artificial Sequence: Synthetic oligonucleotide
aaaauguguuuauuuggga

SEQ ID NO: 3064625 - RNA, 19 nt, Artificial Sequence
  Description of Artificial Sequence: Synthetic oligonucleotide
uuugcgagaggcauguucu

SEQ ID NO: 3064626 - RNA, 19 nt, Artificial Sequence
  Description of Artificial Sequence: Synthetic oligonucleotide
uccucuuuuccucuucugg

SEQ ID NO: 3064627 - RNA, 19 nt, Artificial Sequence
  Description of Artificial Sequence: Synthetic oligonucleotide
uguuuauuugggaugguuc

SEQ ID NO: 3064628 - RNA, 19 nt, Artificial Sequence
  Description of Artificial Sequence: Synthetic oligonucleotide
ugaaggagcauccuucugu

SEQ ID NO: 3064629 - RNA, 19 nt, Artificial Sequence
  Description of Artificial Sequence: Synthetic oligonucleotide
acaagacuaccguuugugc

SEQ ID NO: 3064630 - RNA, 19 nt, Artificial Sequence
  Description of Artificial Sequence: Synthetic oligonucleotide
uugcuuuuccgccuguggg

SEQ ID NO: 3064631 - RNA, 19 nt, Artificial Sequence
  Description of Artificial Sequence: Synthetic oligonucleotide
aaaguaggaauuggggcuc

SEQ ID NO: 3064632 - RNA, 19 nt, Artificial Sequence
  Description of Artificial Sequence: Synthetic oligonucleotide
ugaaucaggugcuuuucag

SEQ ID NO: 3064633 - RNA, 19 nt, Artificial Sequence
  Description of Artificial Sequence: Synthetic oligonucleotide
aguggagcagccaacacac

SEQ ID NO: 3064634 - RNA, 19 nt, Artificial Sequence
  Description of Artificial Sequence: Synthetic oligonucleotide
gaaggagauccuuugcgag

SEQ ID NO: 3064635 - RNA, 19 nt, Artificial Sequence
  Description of Artificial Sequence: Synthetic oligonucleotide
ucaucuugaaucaggugcu

SEQ ID NO: 3064636 - RNA, 19 nt, Artificial Sequence
  Description of Artificial Sequence: Synthetic oligonucleotide
uccauaaaguaggaauugg

SEQ ID NO: 3064637 - RNA, 19 nt, Artificial Sequence
  Description of Artificial Sequence: Synthetic oligonucleotide
uuugggaugguucccacuc

SEQ ID NO: 3064638 - RNA, 19 nt, Artificial Sequence
  Description of Artificial Sequence: Synthetic oligonucleotide
agaggcauguucucguagg

SEQ ID NO: 3064639 - RNA, 19 nt, Artificial Sequence
  Description of Artificial Sequence: Synthetic oligonucleotide
uuuauagcauccugggcac

SEQ ID NO: 3064640 - RNA, 19 nt, Artificial Sequence
  Description of Artificial Sequence: Synthetic oligonucleotide
aagacuaccguuugugcau

SEQ ID NO: 3064641 - RNA, 19 nt, Artificial Sequence
  Description of Artificial Sequence: Synthetic oligonucleotide
uucccacucaucuugaauc

SEQ ID NO: 3064642 - RNA, 19 nt, Artificial Sequence
  Description of Artificial Sequence: Synthetic oligonucleotide
uggugauuuuauagcaucc

SEQ ID NO: 3064643 - RNA, 19 nt, Artificial Sequence
  Description of Artificial Sequence: Synthetic oligonucleotide
auguguuuauuugggaugg

SEQ ID NO: 3064644 - RNA, 19 nt, Artificial Sequence
  Description of Artificial Sequence: Synthetic oligonucleotide
uuugugcauggcuaaagac

SEQ ID NO: 3064645 - RNA, 19 nt, Artificial Sequence
  Description of Artificial Sequence: Synthetic oligonucleotide
aucaggugcuuuucagugc

SEQ ID NO: 3064646 - RNA, 19 nt, Artificial Sequence
  Description of Artificial Sequence: Synthetic oligonucleotide
ugaaggagauccuuugcga

SEQ ID NO: 3064647 - RNA, 19 nt, Artificial Sequence
  Description of Artificial Sequence: Synthetic oligonucleotide
aggagcauccuucugucag

SEQ ID NO: 3064648 - RNA, 19 nt, Artificial Sequence
  Description of Artificial Sequence: Synthetic oligonucleotide
gaugaaggagauccuuugc

SEQ ID NO: 3064649 - RNA, 19 nt, Artificial Sequence
  Description of Artificial Sequence: Synthetic oligonucleotide
ccaaaauguguuuauuugg

SEQ ID NO: 3064650 - RNA, 19 nt, Artificial Sequence
  Description of Artificial Sequence: Synthetic oligonucleotide
aggaauuggggcucugcac

SEQ ID NO: 3064651 - RNA, 19 nt, Artificial Sequence
  Description of Artificial Sequence: Synthetic oligonucleotide
uccugggcacuucacaucc

SEQ ID NO: 3064652 - RNA, 19 nt, Artificial Sequence
  Description of Artificial Sequence: Synthetic oligonucleotide
ucagccuugcuuuuccgcc

SEQ ID NO: 3064653 - RNA, 19 nt, Artificial Sequence
  Description of Artificial Sequence: Synthetic oligonucleotide
ucaggugcuuuucagugcu

SEQ ID NO: 3064654 - RNA, 19 nt, Artificial Sequence
  Description of Artificial Sequence: Synthetic oligonucleotide
uguucucguagggaggucg

SEQ ID NO: 3064655 - RNA, 19 nt, Artificial Sequence
  Description of Artificial Sequence: Synthetic oligonucleotide
uguguuuccucuuuuccuc

SEQ ID NO: 3064656 - RNA, 19 nt, Artificial Sequence
  Description of Artificial Sequence: Synthetic oligonucleotide
uuuccucuucuggagaggg

SEQ ID NO: 3064657 - RNA, 19 nt, Artificial Sequence
  Description of Artificial Sequence: Synthetic oligonucleotide
uggcuaaagaccgugguga

SEQ ID NO: 3064658 - RNA, 19 nt, Artificial Sequence
  Description of Artificial Sequence: Synthetic oligonucleotide
aaggagauccuuugcgaga

SEQ ID NO: 3064659 - RNA, 19 nt, Artificial Sequence
  Description of Artificial Sequence: Synthetic oligonucleotide
gugauuuuauagcauccug

SEQ ID NO: 3064660 - RNA, 19 nt, Artificial Sequence
  Description of Artificial Sequence: Synthetic oligonucleotide
uuucagugcugcuuccucc

SEQ ID NO: 3064661 - RNA, 19 nt, Artificial Sequence
  Description of Artificial Sequence: Synthetic oligonucleotide
cuuuuccucuucuggagag

SEQ ID NO: 3064662 - RNA, 19 nt, Artificial Sequence
  Description of Artificial Sequence: Synthetic oligonucleotide
uuuauuugggaugguuccc

SEQ ID NO: 3064663 - RNA, 19 nt, Artificial Sequence
  Description of Artificial Sequence: Synthetic oligonucleotide
uugaaucaggugcuuuuca

SEQ ID NO: 3064664 - RNA, 19 nt, Artificial Sequence
  Description of Artificial Sequence: Synthetic oligonucleotide
uaggaauuggggcucugca

SEQ ID NO: 3064665 - RNA, 19 nt, Artificial Sequence
  Description of Artificial Sequence: Synthetic oligonucleotide
uccugaaggagcauccuuc

SEQ ID NO: 3064666 - RNA, 19 nt, Artificial Sequence
  Description of Artificial Sequence: Synthetic oligonucleotide
aacacacaagacuaccguu

SEQ ID NO: 3064667 - RNA, 19 nt, Artificial Sequence
  Description of Artificial Sequence: Synthetic oligonucleotide
auccaaaauguguuuauuu

SEQ ID NO: 3064668 - RNA, 19 nt, Artificial Sequence
  Description of Artificial Sequence: Synthetic oligonucleotide
ucuggagagggaugaagga

SEQ ID NO: 3064669 - RNA, 19 nt, Artificial Sequence
  Description of Artificial Sequence: Synthetic oligonucleotide
cuugcuuuuccgccugugg

SEQ ID NO: 3064670 - RNA, 19 nt, Artificial Sequence
  Description of Artificial Sequence: Synthetic oligonucleotide
uggagcagccaacacacaa

SEQ ID NO: 3064671 - RNA, 19 nt, Artificial Sequence
  Description of Artificial Sequence: Synthetic oligonucleotide
ggaauuggggcucugcacc

SEQ ID NO: 3064672 - RNA, 19 nt, Artificial Sequence
  Description of Artificial Sequence: Synthetic oligonucleotide
gaggcauguucucguaggg

SEQ ID NO: 3064673 - RNA, 19 nt, Artificial Sequence
  Description of Artificial Sequence: Synthetic oligonucleotide
ugcuuuuccgccugugggc

SEQ ID NO: 3064674 - RNA, 19 nt, Artificial Sequence
  Description of Artificial Sequence: Synthetic oligonucleotide
ugugggcugacagaggaca

SEQ ID NO: 3064675 - RNA, 19 nt, Artificial Sequence
  Description of Artificial Sequence: Synthetic oligonucleotide
ggcauguucucguagggag

SEQ ID NO: 3064676 - RNA, 19 nt, Artificial Sequence
  Description of Artificial Sequence: Synthetic oligonucleotide
uccuccugaaggagcaucc

SEQ ID NO: 3064677 - RNA, 19 nt, Artificial Sequence
  Description of Artificial Sequence: Synthetic oligonucleotide
uuauuugggaugguuccca

SEQ ID NO: 3064678 - RNA, 19 nt, Artificial Sequence
  Description of Artificial Sequence: Synthetic oligonucleotide
ucuugaaucaggugcuuuu

SEQ ID NO: 3064679 - RNA, 19 nt, Artificial Sequence
  Description of Artificial Sequence: Synthetic oligonucleotide
auggcuaaagaccguggug

SEQ ID NO: 3064680 - RNA, 19 nt, Artificial Sequence
  Description of Artificial Sequence: Synthetic oligonucleotide
uuuucagugcugcuuccuc

SEQ ID NO: 3064681 - RNA, 19 nt, Artificial Sequence
  Description of Artificial Sequence: Synthetic oligonucleotide
guggugauuuuauagcauc

SEQ ID NO: 3064682 - RNA, 19 nt, Artificial Sequence
  Description of Artificial Sequence: Synthetic oligonucleotide
aggugcuuuucagugcugc

SEQ ID NO: 3064683 - RNA, 19 nt, Artificial Sequence
  Description of Artificial Sequence: Synthetic oligonucleotide
uccgccugugggcugacag

SEQ ID NO: 3064684 - RNA, 19 nt, Artificial Sequence
  Description of Artificial Sequence: Synthetic oligonucleotide
cuuugcgagaggcauguuc

SEQ ID NO: 3064685 - RNA, 19 nt, Artificial Sequence
  Description of Artificial Sequence: Synthetic oligonucleotide
gaaggagcauccuucuguc

SEQ ID NO: 3064686 - RNA, 19 nt, Artificial Sequence
  Description of Artificial Sequence: Synthetic oligonucleotide
gagauccuuugcgagaggc

SEQ ID NO: 3064687 - RNA, 19 nt, Artificial Sequence
  Description of Artificial Sequence: Synthetic oligonucleotide
ugcgagaggcauguucucg

SEQ ID NO: 3064688 - RNA, 19 nt, Artificial Sequence
  Description of Artificial Sequence: Synthetic oligonucleotide
caagacuaccguuugugca

SEQ ID NO: 3064689 - RNA, 19 nt, Artificial Sequence
  Description of Artificial Sequence: Synthetic oligonucleotide
ugcuuccuccugaaggagc

SEQ ID NO: 3064690 - RNA, 19 nt, Artificial Sequence
  Description of Artificial Sequence: Synthetic oligonucleotide
cacaagacuaccguuugug

SEQ ID NO: 3064691 - RNA, 19 nt, Artificial Sequence
  Description of Artificial Sequence: Synthetic oligonucleotide
acaguggagcagccaacac

SEQ ID NO: 3064692 - RNA, 19 nt, Artificial Sequence
  Description of Artificial Sequence: Synthetic oligonucleotide
aggagauccuuugcgagag

SEQ ID NO: 3064693 - RNA, 19 nt, Artificial Sequence
  Description of Artificial Sequence: Synthetic oligonucleotide
uuuuccucuucuggagagg

SEQ ID NO: 3064694 - RNA, 19 nt, Artificial Sequence
  Description of Artificial Sequence: Synthetic oligonucleotide
uaccguuugugcauggcua

SEQ ID NO: 3064695 - RNA, 19 nt, Artificial Sequence
  Description of Artificial Sequence: Synthetic oligonucleotide
gagaggcauguucucguag

SEQ ID NO: 3064696 - RNA, 19 nt, Artificial Sequence
  Description of Artificial Sequence: Synthetic oligonucleotide
ugcauggcuaaagaccgug

SEQ ID NO: 3064697 - RNA, 19 nt, Artificial Sequence
  Description of Artificial Sequence: Synthetic oligonucleotide
cugacagaggacaguggag

SEQ ID NO: 3064698 - RNA, 19 nt, Artificial Sequence
  Description of Artificial Sequence: Synthetic oligonucleotide
ucacauccauaaaguagga

SEQ ID NO: 3064699 - RNA, 19 nt, Artificial Sequence
  Description of Artificial Sequence: Synthetic oligonucleotide
uucagugcugcuuccuccu

SEQ ID NO: 3064700 - RNA, 19 nt, Artificial Sequence
  Description of Artificial Sequence: Synthetic oligonucleotide
aggacaguggagcagccaa

SEQ ID NO: 3064701 - RNA, 19 nt, Artificial Sequence
  Description of Artificial Sequence: Synthetic oligonucleotide
gagcagccaacacacaaga

SEQ ID NO: 3064702 - RNA, 19 nt, Artificial Sequence
  Description of Artificial Sequence: Synthetic oligonucleotide
auuggggcucugcaccagg

SEQ ID NO: 3064703 - RNA, 19 nt, Artificial Sequence
  Description of Artificial Sequence: Synthetic oligonucleotide
acuaccguuugugcauggc

SEQ ID NO: 3064704 - RNA, 19 nt, Artificial Sequence
  Description of Artificial Sequence: Synthetic oligonucleotide
ggaugaaggagauccuuug

SEQ ID NO: 3064705 - RNA, 19 nt, Artificial Sequence
  Description of Artificial Sequence: Synthetic oligonucleotide
cacacaagacuaccguuug

SEQ ID NO: 3064706 - RNA, 19 nt, Artificial Sequence
  Description of Artificial Sequence: Synthetic oligonucleotide
acucaucuugaaucaggug

SEQ ID NO: 3064707 - RNA, 19 nt, Artificial Sequence
  Description of Artificial Sequence: Synthetic oligonucleotide
ugucagccuugcuuuuccg

SEQ ID NO: 3064708 - RNA, 19 nt, Artificial Sequence
  Description of Artificial Sequence: Synthetic oligonucleotide
auccugggcacuucacauc

SEQ ID NO: 3064709 - RNA, 19 nt, Artificial Sequence
  Description of Artificial Sequence: Synthetic oligonucleotide
uggggcucugcaccaggcg

SEQ ID NO: 3064710 - RNA, 19 nt, Artificial Sequence
  Description of Artificial Sequence: Synthetic oligonucleotide
ccaacacacaagacuaccg

SEQ ID NO: 3064711 - RNA, 19 nt, Artificial Sequence
  Description of Artificial Sequence: Synthetic oligonucleotide
uccuuugcgagaggcaugu

SEQ ID NO: 3064712 - RNA, 19 nt, Artificial Sequence
  Description of Artificial Sequence: Synthetic oligonucleotide
ucucguagggaggucguca

SEQ ID NO: 3064713 - RNA, 19 nt, Artificial Sequence
  Description of Artificial Sequence: Synthetic oligonucleotide
aagaccguggugauuuuau

SEQ ID NO: 3064714 - RNA, 19 nt, Artificial Sequence
  Description of Artificial Sequence: Synthetic oligonucleotide
uauuugggaugguucccac

SEQ ID NO: 3064715 - RNA, 19 nt, Artificial Sequence
  Description of Artificial Sequence: Synthetic oligonucleotide
cagaggacaguggagcagc

SEQ ID NO: 3064716 - RNA, 19 nt, Artificial Sequence
  Description of Artificial Sequence: Synthetic oligonucleotide
aaggagcauccuucuguca

SEQ ID NO: 3064717 - RNA, 19 nt, Artificial Sequence
  Description of Artificial Sequence: Synthetic oligonucleotide
cuucuggagagggaugaag

SEQ ID NO: 3064718 - RNA, 19 nt, Artificial Sequence
  Description of Artificial Sequence: Synthetic oligonucleotide
gacagaggacaguggagca

SEQ ID NO: 3064719 - RNA, 19 nt, Artificial Sequence
  Description of Artificial Sequence: Synthetic oligonucleotide
gaaucaggugcuuuucagu

SEQ ID NO: 3064720 - RNA, 19 nt, Artificial Sequence
  Description of Artificial Sequence: Synthetic oligonucleotide
cugucagccuugcuuuucc

SEQ ID NO: 3064721 - RNA, 19 nt, Artificial Sequence
  Description of Artificial Sequence: Synthetic oligonucleotide
uccucuucuggagagggau

SEQ ID NO: 3064722 - RNA, 19 nt, Artificial Sequence
  Description of Artificial Sequence: Synthetic oligonucleotide
auuugggaugguucccacu

SEQ ID NO: 3064723 - RNA, 19 nt, Artificial Sequence
  Description of Artificial Sequence: Synthetic oligonucleotide
cuugaaucaggugcuuuuc

SEQ ID NO: 3064724 - RNA, 19 nt, Artificial Sequence
  Description of Artificial Sequence: Synthetic oligonucleotide
cagccaacacacaagacua

SEQ ID NO: 3064725 - RNA, 19 nt, Artificial Sequence
  Description of Artificial Sequence: Synthetic oligonucleotide
uugggaugguucccacuca

SEQ ID NO: 3064726 - RNA, 19 nt, Artificial Sequence
  Description of Artificial Sequence: Synthetic oligonucleotide
uauccaaaauguguuuauu

SEQ ID NO: 3064727 - RNA, 19 nt, Artificial Sequence
  Description of Artificial Sequence: Synthetic oligonucleotide
gacuaccguuugugcaugg

SEQ ID NO: 3064728 - RNA, 19 nt, Artificial Sequence
  Description of Artificial Sequence: Synthetic oligonucleotide
aauuggggcucugcaccag

SEQ ID NO: 3064729 - RNA, 19 nt, Artificial Sequence
  Description of Artificial Sequence: Synthetic oligonucleotide
ccacucaucuugaaucagg

SEQ ID NO: 3064730 - RNA, 19 nt, Artificial Sequence
  Description of Artificial Sequence: Synthetic oligonucleotide
ugggaugguucccacucau

SEQ ID NO: 3064731 - RNA, 19 nt, Artificial Sequence
  Description of Artificial Sequence: Synthetic oligonucleotide
cucguagggaggucgucac

SEQ ID NO: 3064732 - RNA, 19 nt, Artificial Sequence
  Description of Artificial Sequence: Synthetic oligonucleotide
cacuucacauccauaaagu

SEQ ID NO: 3064733 - RNA, 19 nt, Artificial Sequence
  Description of Artificial Sequence: Synthetic oligonucleotide
uagcauccugggcacuuca

SEQ ID NO: 3064734 - RNA, 19 nt, Artificial Sequence
  Description of Artificial Sequence: Synthetic oligonucleotide
gagcauccuucugucagcc

SEQ ID NO: 3064735 - RNA, 19 nt, Artificial Sequence
  Description of Artificial Sequence: Synthetic oligonucleotide
aggucgucaccacuggaaa

SEQ ID NO: 3064736 - RNA, 19 nt, Artificial Sequence
  Description of Artificial Sequence: Synthetic oligonucleotide
uagggaggucgucaccacu

SEQ ID NO: 3064737 - RNA, 19 nt, Artificial Sequence
  Description of Artificial Sequence: Synthetic oligonucleotide
uucuuguguuuccucuuuu

SEQ ID NO: 3064738 - RNA, 19 nt, Artificial Sequence
  Description of Artificial Sequence: Synthetic oligonucleotide
gacaguggagcagccaaca

SEQ ID NO: 3064739 - RNA, 19 nt, Artificial Sequence
  Description of Artificial Sequence: Synthetic oligonucleotide
acacaagacuaccguuugu

SEQ ID NO: 3064740 - RNA, 19 nt, Artificial Sequence
  Description of Artificial Sequence: Synthetic oligonucleotide
uauagcauccugggcacuu

SEQ ID NO: 3064741 - RNA, 19 nt, Artificial Sequence
  Description of Artificial Sequence: Synthetic oligonucleotide
ugguucccacucaucuuga

SEQ ID NO: 3064742 - RNA, 19 nt, Artificial Sequence
  Description of Artificial Sequence: Synthetic oligonucleotide
accguuugugcauggcuaa

SEQ ID NO: 3064743 - RNA, 19 nt, Artificial Sequence
  Description of Artificial Sequence: Synthetic oligonucleotide
guaggaauuggggcucugc

SEQ ID NO: 3064744 - RNA, 19 nt, Artificial Sequence
  Description of Artificial Sequence: Synthetic oligonucleotide
caguggagcagccaacaca

SEQ ID NO: 3064745 - RNA, 19 nt, Artificial Sequence
  Description of Artificial Sequence: Synthetic oligonucleotide
acacacaagacuaccguuu

SEQ ID NO: 3064746 - RNA, 19 nt, Artificial Sequence
  Description of Artificial Sequence: Synthetic oligonucleotide
auagcauccugggcacuuc

SEQ ID NO: 3064747 - RNA, 19 nt, Artificial Sequence
  Description of Artificial Sequence: Synthetic oligonucleotide
uuuuccgccugugggcuga

SEQ ID NO: 3064748 - RNA, 19 nt, Artificial Sequence
  Description of Artificial Sequence: Synthetic oligonucleotide
ucguagggaggucgucacc

SEQ ID NO: 3064749 - RNA, 19 nt, Artificial Sequence
  Description of Artificial Sequence: Synthetic oligonucleotide
agugcugcuuccuccugaa

SEQ ID NO: 3064750 - RNA, 19 nt, Artificial Sequence
  Description of Artificial Sequence: Synthetic oligonucleotide
cuaaagaccguggugauuu

SEQ ID NO: 3064751 - RNA, 19 nt, Artificial Sequence
  Description of Artificial Sequence: Synthetic oligonucleotide
auccuucugucagccuugc

SEQ ID NO: 3064752 - RNA, 19 nt, Artificial Sequence
  Description of Artificial Sequence: Synthetic oligonucleotide
gcagccaacacacaagacu

SEQ ID NO: 3064753 - RNA, 19 nt, Artificial Sequence
  Description of Artificial Sequence: Synthetic oligonucleotide
agaggacaguggagcagcc

SEQ ID NO: 3064754 - RNA, 19 nt, Artificial Sequence
  Description of Artificial Sequence: Synthetic oligonucleotide
agccaacacacaagacuac

SEQ ID NO: 3064755 - RNA, 19 nt, Artificial Sequence
  Description of Artificial Sequence: Synthetic oligonucleotide
aaagaccguggugauuuua

SEQ ID NO: 3064756 - RNA, 19 nt, Artificial Sequence
  Description of Artificial Sequence: Synthetic oligonucleotide
gggcacuucacauccauaa

SEQ ID NO: 3064757 - RNA, 19 nt, Artificial Sequence
  Description of Artificial Sequence: Synthetic oligonucleotide
uuccucuucuggagaggga

SEQ ID NO: 3064758 - RNA, 19 nt, Artificial Sequence
  Description of Artificial Sequence: Synthetic oligonucleotide
ggagcagccaacacacaag

SEQ ID NO: 3064759 - RNA, 19 nt, Artificial Sequence
  Description of Artificial Sequence: Synthetic oligonucleotide
agcagccaacacacaagac

SEQ ID NO: 3064760 - RNA, 19 nt, Artificial Sequence
  Description of Artificial Sequence: Synthetic oligonucleotide
ggucgucaccacuggaaag

SEQ ID NO: 3064761 - RNA, 19 nt, Artificial Sequence
  Description of Artificial Sequence: Synthetic oligonucleotide
aaguaggaauuggggcucu

SEQ ID NO: 3064762 - RNA, 19 nt, Artificial Sequence
  Description of Artificial Sequence: Synthetic oligonucleotide
cugaaggagcauccuucug

SEQ ID NO: 3064763 - RNA, 19 nt, Artificial Sequence
  Description of Artificial Sequence: Synthetic oligonucleotide
gaggucgucaccacuggaa

SEQ ID NO: 3064764 - RNA, 19 nt, Artificial Sequence
  Description of Artificial Sequence: Synthetic oligonucleotide
ucugucagccuugcuuuuc

SEQ ID NO: 3064765 - RNA, 19 nt, Artificial Sequence
  Description of Artificial Sequence: Synthetic oligonucleotide
gcugcuuccuccugaagga

SEQ ID NO: 3064766 - RNA, 19 nt, Artificial Sequence
  Description of Artificial Sequence: Synthetic oligonucleotide
ggagcauccuucugucagc

SEQ ID NO: 3064767 - RNA, 19 nt, Artificial Sequence
  Description of Artificial Sequence: Synthetic oligonucleotide
gauccuuugcgagaggcau

SEQ ID NO: 3064768 - RNA, 19 nt, Artificial Sequence
  Description of Artificial Sequence: Synthetic oligonucleotide
cucuucuggagagggauga

SEQ ID NO: 3064769 - RNA, 19 nt, Artificial Sequence
  Description of Artificial Sequence: Synthetic oligonucleotide
agccuugcuuuuccgccug

SEQ ID NO: 3064770 - RNA, 19 nt, Artificial Sequence
  Description of Artificial Sequence: Synthetic oligonucleotide
uguguuuauuugggauggu

SEQ ID NO: 3064771 - RNA, 19 nt, Artificial Sequence
  Description of Artificial Sequence: Synthetic oligonucleotide
caacacacaagacuaccgu

SEQ ID NO: 3064772 - RNA, 19 nt, Artificial Sequence
  Description of Artificial Sequence: Synthetic oligonucleotide
agcauccugggcacuucac

SEQ ID NO: 3064773 - RNA, 19 nt, Artificial Sequence
  Description of Artificial Sequence: Synthetic oligonucleotide
ggggcucugcaccaggcgc

SEQ ID NO: 3064774 - RNA, 19 nt, Artificial Sequence
  Description of Artificial Sequence: Synthetic oligonucleotide
agacuaccguuugugcaug

SEQ ID NO: 3064775 - RNA, 19 nt, Artificial Sequence
  Description of Artificial Sequence: Synthetic oligonucleotide
gccaacacacaagacuacc

SEQ ID NO: 3064776 - RNA, 19 nt, Artificial Sequence
  Description of Artificial Sequence: Synthetic oligonucleotide
cacucaucuugaaucaggu

SEQ ID NO: 3064777 - RNA, 19 nt, Artificial Sequence
  Description of Artificial Sequence: Synthetic oligonucleotide
gcauguucucguagggagg

SEQ ID NO: 3064778 - RNA, 19 nt, Artificial Sequence
  Description of Artificial Sequence: Synthetic oligonucleotide
cuucugucagccuugcuuu

SEQ ID NO: 3064779 - RNA, 19 nt, Artificial Sequence
  Description of Artificial Sequence: Synthetic oligonucleotide
agauccuuugcgagaggca

SEQ ID NO: 3064780 - RNA, 19 nt, Artificial Sequence
  Description of Artificial Sequence: Synthetic oligonucleotide
uugcgagaggcauguucuc

SEQ ID NO: 3064781 - RNA, 19 nt, Artificial Sequence
  Description of Artificial Sequence: Synthetic oligonucleotide
ugggcacuucacauccaua

SEQ ID NO: 3064782 - RNA, 19 nt, Artificial Sequence
  Description of Artificial Sequence: Synthetic oligonucleotide
ugggcugacagaggacagu

SEQ ID NO: 3064783 - RNA, 19 nt, Artificial Sequence
  Description of Artificial Sequence: Synthetic oligonucleotide
guagggaggucgucaccac

SEQ ID NO: 3064784 - RNA, 19 nt, Artificial Sequence
  Description of Artificial Sequence: Synthetic oligonucleotide
uuauagcauccugggcacu

SEQ ID NO: 3064785 - RNA, 19 nt, Artificial Sequence
  Description of Artificial Sequence: Synthetic oligonucleotide
agaccguggugauuuuaua

SEQ ID NO: 3064786 - RNA, 19 nt, Artificial Sequence
  Description of Artificial Sequence: Synthetic oligonucleotide
gggaggucgucaccacugg

SEQ ID NO: 3064787 - RNA, 19 nt, Artificial Sequence
  Description of Artificial Sequence: Synthetic oligonucleotide
aggcauguucucguaggga

SEQ ID NO: 3064788 - RNA, 19 nt, Artificial Sequence
  Description of Artificial Sequence: Synthetic oligonucleotide
agggaugaaggagauccuu

SEQ ID NO: 3064789 - RNA, 19 nt, Artificial Sequence
  Description of Artificial Sequence: Synthetic oligonucleotide
cauggcuaaagaccguggu

SEQ ID NO: 3064790 - RNA, 19 nt, Artificial Sequence
  Description of Artificial Sequence: Synthetic oligonucleotide
cugugggcugacagaggac

SEQ ID NO: 3064791 - RNA, 19 nt, Artificial Sequence
  Description of Artificial Sequence: Synthetic oligonucleotide
aucuugaaucaggugcuuu

SEQ ID NO: 3064792 - RNA, 19 nt, Artificial Sequence
  Description of Artificial Sequence: Synthetic oligonucleotide
gaugguucccacucaucuu

SEQ ID NO: 3064793 - RNA, 19 nt, Artificial Sequence
  Description of Artificial Sequence: Synthetic oligonucleotide
cuuuuccgccugugggcug

SEQ ID NO: 3064794 - RNA, 19 nt, Artificial Sequence
  Description of Artificial Sequence: Synthetic oligonucleotide
gcuuuucagugcugcuucc

SEQ ID NO: 3064795 - RNA, 19 nt, Artificial Sequence
  Description of Artificial Sequence: Synthetic oligonucleotide
gcauggcuaaagaccgugg

SEQ ID NO: 3064796 - RNA, 19 nt, Artificial Sequence
  Description of Artificial Sequence: Synthetic oligonucleotide
ucuucuggagagggaugaa

SEQ ID NO: 3064797 - RNA, 19 nt, Artificial Sequence
  Description of Artificial Sequence: Synthetic oligonucleotide
uaaagaccguggugauuuu

SEQ ID NO: 3064798 - RNA, 19 nt, Artificial Sequence
  Description of Artificial Sequence: Synthetic oligonucleotide
gggcugacagaggacagug

SEQ ID NO: 3064799 - RNA, 19 nt, Artificial Sequence
  Description of Artificial Sequence: Synthetic oligonucleotide
cuaccguuugugcauggcu

SEQ ID NO: 3064800 - RNA, 19 nt, Artificial Sequence
  Description of Artificial Sequence: Synthetic oligonucleotide
uucugucagccuugcuuuu

SEQ ID NO: 3064801 - RNA, 19 nt, Artificial Sequence
  Description of Artificial Sequence: Synthetic oligonucleotide
gugggcugacagaggacag

SEQ ID NO: 3064802 - RNA, 19 nt, Artificial Sequence
  Description of Artificial Sequence: Synthetic oligonucleotide
agcauccuucugucagccu

SEQ ID NO: 3064803 - RNA, 19 nt, Artificial Sequence
  Description of Artificial Sequence: Synthetic oligonucleotide
cugcuuccuccugaaggag

SEQ ID NO: 3064804 - RNA, 19 nt, Artificial Sequence
  Description of Artificial Sequence: Synthetic oligonucleotide
auguucucguagggagguc

SEQ ID NO: 3064805 - RNA, 19 nt, Artificial Sequence
  Description of Artificial Sequence: Synthetic oligonucleotide
uccuucugucagccuugcu

SEQ ID NO: 3064806 - RNA, 19 nt, Artificial Sequence
  Description of Artificial Sequence: Synthetic oligonucleotide
auccuuugcgagaggcaug

SEQ ID NO: 3064807 - RNA, 19 nt, Artificial Sequence
  Description of Artificial Sequence: Synthetic oligonucleotide
cauccugggcacuucacau

SEQ ID NO: 3064808 - RNA, 19 nt, Artificial Sequence
  Description of Artificial Sequence: Synthetic oligonucleotide
ggugauuuuauagcauccu

SEQ ID NO: 3064809 - RNA, 19 nt, Artificial Sequence
  Description of Artificial Sequence: Synthetic oligonucleotide
aguaggaauuggggcucug

SEQ ID NO: 3064810 - RNA, 19 nt, Artificial Sequence
  Description of Artificial Sequence: Synthetic oligonucleotide
ccguggugauuuuauagca

SEQ ID NO: 3064811 - RNA, 19 nt, Artificial Sequence
  Description of Artificial Sequence: Synthetic oligonucleotide
ggagauccuuugcgagagg

SEQ ID NO: 3064812 - RNA, 19 nt, Artificial Sequence
  Description of Artificial Sequence: Synthetic oligonucleotide
guucccacucaucuugaau

SEQ ID NO: 3064813 - RNA, 19 nt, Artificial Sequence
  Description of Artificial Sequence: Synthetic oligonucleotide
gcauccugggcacuucaca

SEQ ID NO: 3064814 - RNA, 19 nt, Artificial Sequence
  Description of Artificial Sequence: Synthetic oligonucleotide
cauguucucguagggaggu

SEQ ID NO: 3064815 - RNA, 19 nt, Artificial Sequence
  Description of Artificial Sequence: Synthetic oligonucleotide
ccugugggcugacagagga

SEQ ID NO: 3064816 - RNA, 19 nt, Artificial Sequence
  Description of Artificial Sequence: Synthetic oligonucleotide
gaggacaguggagcagcca

SEQ ID NO: 3064817 - RNA, 19 nt, Artificial Sequence
  Description of Artificial Sequence: Synthetic oligonucleotide
guguuuccucuuuuccucu

SEQ ID NO: 3064818 - RNA, 19 nt, Artificial Sequence
  Description of Artificial Sequence: Synthetic oligonucleotide
uucucguagggaggucguc

SEQ ID NO: 3064819 - RNA, 19 nt, Artificial Sequence
  Description of Artificial Sequence: Synthetic oligonucleotide
ggcugacagaggacagugg

SEQ ID NO: 3064820 - RNA, 19 nt, Artificial Sequence
  Description of Artificial Sequence: Synthetic oligonucleotide
caggugcuuuucagugcug

SEQ ID NO: 3064821 - RNA, 19 nt, Artificial Sequence
  Description of Artificial Sequence: Synthetic oligonucleotide
ggcacuucacauccauaaa

SEQ ID NO: 3064822 - RNA, 19 nt, Artificial Sequence
  Description of Artificial Sequence: Synthetic oligonucleotide
cacauccauaaaguaggaa

SEQ ID NO: 3064823 - RNA, 19 nt, Artificial Sequence
  Description of Artificial Sequence: Synthetic oligonucleotide
cguuugugcauggcuaaag

SEQ ID NO: 3064824 - RNA, 19 nt, Artificial Sequence
  Description of Artificial Sequence: Synthetic oligonucleotide
ccucuucuggagagggaug

SEQ ID NO: 3064825 - RNA, 19 nt, Artificial Sequence
  Description of Artificial Sequence: Synthetic oligonucleotide
guguuuauuugggaugguu

SEQ ID NO: 3064826 - RNA, 19 nt, Artificial Sequence
  Description of Artificial Sequence: Synthetic oligonucleotide
cuuuucagugcugcuuccu

SEQ ID NO: 3064827 - RNA, 19 nt, Artificial Sequence
  Description of Artificial Sequence: Synthetic oligonucleotide
gcauccuucugucagccuu

SEQ ID NO: 3064828 - RNA, 19 nt, Artificial Sequence
  Description of Artificial Sequence: Synthetic oligonucleotide
ggacaguggagcagccaac

SEQ ID NO: 3064829 - RNA, 19 nt, Artificial Sequence
  Description of Artificial Sequence: Synthetic oligonucleotide
ggugcuuuucagugcugcu

SEQ ID NO: 3064830 - RNA, 19 nt, Artificial Sequence
  Description of Artificial Sequence: Synthetic oligonucleotide
gagggaugaaggagauccu

SEQ ID NO: 3064831 - RNA, 19 nt, Artificial Sequence
  Description of Artificial Sequence: Synthetic oligonucleotide
ccuucugucagccuugcuu

SEQ ID NO: 3064832 - RNA, 19 nt, Artificial Sequence
  Description of Artificial Sequence: Synthetic oligonucleotide
cccacucaucuugaaucag

SEQ ID NO: 3064833 - RNA, 19 nt, Artificial Sequence
  Description of Artificial Sequence: Synthetic oligonucleotide
gcgagaggcauguucucgu

SEQ ID NO: 3064834 - RNA, 19 nt, Artificial Sequence
  Description of Artificial Sequence: Synthetic oligonucleotide
cugggcacuucacauccau

SEQ ID NO: 3064835 - RNA, 19 nt, Artificial Sequence
  Description of Artificial Sequence: Synthetic oligonucleotide
gguucccacucaucuugaa

SEQ ID NO: 3064836 - RNA, 19 nt, Artificial Sequence
  Description of Artificial Sequence: Synthetic oligonucleotide
cgccugugggcugacagag

SEQ ID NO: 3064837 - RNA, 19 nt, Artificial Sequence
  Description of Artificial Sequence: Synthetic oligonucleotide
cguagggaggucgucacca

SEQ ID NO: 3064838 - RNA, 19 nt, Artificial Sequence
  Description of Artificial Sequence: Synthetic oligonucleotide
guucucguagggaggucgu

SEQ ID NO: 3064839 - RNA, 19 nt, Artificial Sequence
  Description of Artificial Sequence: Synthetic oligonucleotide
ccugaaggagcauccuucu

SEQ ID NO: 3064840 - RNA, 19 nt, Artificial Sequence
  Description of Artificial Sequence: Synthetic oligonucleotide
cuccugaaggagcauccuu

SEQ ID NO: 3064841 - RNA, 19 nt, Artificial Sequence
  Description of Artificial Sequence: Synthetic oligonucleotide
gcuuuuccgccugugggcu

SEQ ID NO: 3064842 - RNA, 19 nt, Artificial Sequence
  Description of Artificial Sequence: Synthetic oligonucleotide
ggcuaaagaccguggugau

SEQ ID NO: 3064843 - RNA, 19 nt, Artificial Sequence
  Description of Artificial Sequence: Synthetic oligonucleotide
uuuccgccugugggcugac

SEQ ID NO: 3064844 - RNA, 19 nt, Artificial Sequence
  Description of Artificial Sequence: Synthetic oligonucleotide
ccuugcuuuuccgccugug

SEQ ID NO: 3064845 - RNA, 19 nt, Artificial Sequence
  Description of Artificial Sequence: Synthetic oligonucleotide
gggaugaaggagauccuuu

SEQ ID NO: 3064846 - RNA, 19 nt, Artificial Sequence
  Description of Artificial Sequence: Synthetic oligonucleotide
guggagcagccaacacaca

SEQ ID NO: 3064847 - RNA, 19 nt, Artificial Sequence
  Description of Artificial Sequence: Synthetic oligonucleotide
uuccgccugugggcugaca

SEQ ID NO: 3064848 - RNA, 19 nt, Artificial Sequence
  Description of Artificial Sequence: Synthetic oligonucleotide
cucugcaccaggcgcuuuu

SEQ ID NO: 3064849 - RNA, 19 nt, Artificial Sequence
  Description of Artificial Sequence: Synthetic oligonucleotide
cguggugauuuuauagcau

SEQ ID NO: 3064850 - RNA, 19 nt, Artificial Sequence
  Description of Artificial Sequence: Synthetic oligonucleotide
gugcauggcuaaagaccgu

SEQ ID NO: 3064851 - RNA, 19 nt, Artificial Sequence
  Description of Artificial Sequence: Synthetic oligonucleotide
caucuugaaucaggugcuu

SEQ ID NO: 3064852 - RNA, 19 nt, Artificial Sequence
  Description of Artificial Sequence: Synthetic oligonucleotide
ccgccugugggcugacaga

SEQ ID NO: 3064853 - RNA, 19 nt, Artificial Sequence
  Description of Artificial Sequence: Synthetic oligonucleotide
ccugggcacuucacaucca

SEQ ID NO: 3064854 - RNA, 19 nt, Artificial Sequence
  Description of Artificial Sequence: Synthetic oligonucleotide
gcuaaagaccguggugauu

SEQ ID NO: 3064855 - RNA, 19 nt, Artificial Sequence
  Description of Artificial Sequence: Synthetic oligonucleotide
ccguuugugcauggcuaaa

SEQ ID NO: 3064856 - RNA, 19 nt, Artificial Sequence
  Description of Artificial Sequence: Synthetic oligonucleotide
gccuugcuuuuccgccugu

SEQ ID NO: 3064857 - RNA, 19 nt, Artificial Sequence
  Description of Artificial Sequence: Synthetic oligonucleotide
ccuccugaaggagcauccu

SEQ ID NO: 3064858 - RNA, 19 nt, Artificial Sequence
  Description of Artificial Sequence: Synthetic oligonucleotide
ccuuugcgagaggcauguu

SEQ ID NO: 3064859 - RNA, 19 nt, Artificial Sequence
  Description of Artificial Sequence: Synthetic oligonucleotide
uuuugaaccgcuuugaggg

SEQ ID NO: 3064860 - RNA, 19 nt, Artificial Sequence
  Description of Artificial Sequence: Synthetic oligonucleotide
uguuuaugcacacaggaca

SEQ ID NO: 3064861 - RNA, 19 nt, Artificial Sequence
  Description of Artificial Sequence: Synthetic oligonucleotide
uguuggauggcauugagga

SEQ ID NO: 3064862 - RNA, 19 nt, Artificial Sequence
  Description of Artificial Sequence: Synthetic oligonucleotide
  modified_base (2)..(2): a, c, u, g, unknown or other
anauauacugauccaccuc

SEQ ID NO: 3064863 - RNA, 19 nt, Artificial Sequence
  Description of Artificial Sequence: Synthetic oligonucleotide
agggagaugggccagggcc

SEQ ID NO: 3064864 - RNA, 19 nt, Artificial Sequence
  Description of Artificial Sequence: Synthetic oligonucleotide
augaucaucuggcuggggc

SEQ ID NO: 3064865 - RNA, 19 nt, Artificial Sequence
  Description of Artificial Sequence: Synthetic oligonucleotide
aucuccaugacauugggca

SEQ ID NO: 3064866 - RNA, 19 nt, Artificial Sequence
  Description of Artificial Sequence: Synthetic oligonucleotide
gugaggucugacuugaugg

SEQ ID NO: 3064867 - RNA, 19 nt, Artificial Sequence
  Description of Artificial Sequence: Synthetic oligonucleotide
aacucggaguguuggaugg

SEQ ID NO: 3064868 - RNA, 19 nt, Artificial Sequence
  Description of Artificial Sequence: Synthetic oligonucleotide
  modified_base (15)..(15): a, c, u, g, unknown or other
uugaggaugccccanauau

SEQ ID NO: 3064869 - RNA, 19 nt, Artificial Sequence
  Description of Artificial Sequence: Synthetic oligonucleotide
aacuggugcucccaggagg

SEQ ID NO: 3064870 - RNA, 19 nt, Artificial Sequence
  Description of Artificial Sequence: Synthetic oligonucleotide
ugaggggaugccaucaggg

SEQ ID NO: 3064871 - RNA, 19 nt, Artificial Sequence
  Description of Artificial Sequence: Synthetic oligonucleotide
uagucguuggaacuggugc

SEQ ID NO: 3064872 - RNA, 19 nt, Artificial Sequence
  Description of Artificial Sequence: Synthetic oligonucleotide
guuuugaaccgcuuugagg

SEQ ID NO: 3064873 - RNA, 19 nt, Artificial Sequence
  Description of Artificial Sequence: Synthetic oligonucleotide
acuugaugggcacuggccg

SEQ ID NO: 3064874 - RNA, 19 nt, Artificial Sequence
  Description of Artificial Sequence: Synthetic oligonucleotide
augcacacaggacaccucc

SEQ ID NO: 3064875 - RNA, 19 nt, Artificial Sequence
  Description of Artificial Sequence: Synthetic oligonucleotide
acaggacaccuccaggucc

SEQ ID NO: 3064876 - RNA, 19 nt, Artificial Sequence
  Description of Artificial Sequence: Synthetic oligonucleotide
augacauugggcaugauca

SEQ ID NO: 3064877 - RNA, 19 nt, Artificial Sequence
  Description of Artificial Sequence: Synthetic oligonucleotide
ucagggucguccuugaugu

SEQ ID NO: 3064878 - RNA, 19 nt, Artificial Sequence
  Description of Artificial Sequence: Synthetic oligonucleotide
gaagcggguagggagaugg

SEQ ID NO: 3064879 - RNA, 19 nt, Artificial Sequence
  Description of Artificial Sequence: Synthetic oligonucleotide
uucaaacucggaguguugg

SEQ ID NO: 3064880 - RNA, 19 nt, Artificial Sequence
  Description of Artificial Sequence: Synthetic oligonucleotide
cagagcagcaaucaucucc

SEQ ID NO: 3064881 - RNA, 19 nt, Artificial Sequence
  Description of Artificial Sequence: Synthetic oligonucleotide
ugggccagggcccagagca

SEQ ID NO: 3064882 - RNA, 19 nt, Artificial Sequence
  Description of Artificial Sequence: Synthetic oligonucleotide
auggcauugaggaugcccc

SEQ ID NO: 3064883 - RNA, 19 nt, Artificial Sequence
  Description of Artificial Sequence: Synthetic oligonucleotide
uacugauccaccuccagac

SEQ ID NO: 3064884 - RNA, 19 nt, Artificial Sequence
  Description of Artificial Sequence: Synthetic oligonucleotide
ugaggucugacuugauggg

SEQ ID NO: 3064885 - RNA, 19 nt, Artificial Sequence
  Description of Artificial Sequence: Synthetic oligonucleotide
gaccucuucaaacucggag

SEQ ID NO: 3064886 - RNA, 19 nt, Artificial Sequence
  Description of Artificial Sequence: Synthetic oligonucleotide
gaugccaucagggucgucc

SEQ ID NO: 3064887 - RNA, 19 nt, Artificial Sequence
  Description of Artificial Sequence: Synthetic oligonucleotide
aaacucggaguguuggaug

SEQ ID NO: 3064888 - RNA, 19 nt, Artificial Sequence
  Description of Artificial Sequence: Synthetic oligonucleotide
ggcaugaucaucuggcugg

SEQ ID NO: 3064889 - RNA, 19 nt, Artificial Sequence
  Description of Artificial Sequence: Synthetic oligonucleotide
agcagggcuguuuaugcac

SEQ ID NO: 3064890 - RNA, 19 nt, Artificial Sequence
  Description of Artificial Sequence: Synthetic oligonucleotide
ugugaggucugacuugaug

SEQ ID NO: 3064891 - RNA, 19 nt, Artificial Sequence
  Description of Artificial Sequence: Synthetic oligonucleotide
  modified_base (13)..(13): a, c, u, g, unknown or other
gaggaugccccanauauac

SEQ ID NO: 3064892 - RNA, 19 nt, Artificial Sequence
  Description of Artificial Sequence: Synthetic oligonucleotide
uauacugauccaccuccag

SEQ ID NO: 3064893 - RNA, 19 nt, Artificial Sequence
  Description of Artificial Sequence: Synthetic oligonucleotide
augguuuugaaccgcuuug

SEQ ID NO: 3064894 - RNA, 19 nt, Artificial Sequence
  Description of Artificial Sequence: Synthetic oligonucleotide
  modified_base (7)..(7): a, c, u, g, unknown or other
gccccanauauacugaucc

SEQ ID NO: 3064895 - RNA, 19 nt, Artificial Sequence
  Description of Artificial Sequence: Synthetic oligonucleotide
gggcucaugguuuugaacc

SEQ ID NO: 3064896 - RNA, 19 nt, Artificial Sequence
  Description of Artificial Sequence: Synthetic oligonucleotide
acugauccaccuccagacc

SEQ ID NO: 3064897 - RNA, 19 nt, Artificial Sequence
  Description of Artificial Sequence: Synthetic oligonucleotide
aaccgcuuugaggggaugc

SEQ ID NO: 3064898 - RNA, 19 nt, Artificial Sequence
  Description of Artificial Sequence: Synthetic oligonucleotide
uuugaaccgcuuugagggg

SEQ ID NO: 3064899 - RNA, 19 nt, Artificial Sequence
  Description of Artificial Sequence: Synthetic oligonucleotide
uugaggggaugccaucagg

SEQ ID NO: 3064900 - RNA, 19 nt, Artificial Sequence
  Description of Artificial Sequence: Synthetic oligonucleotide
cugcauguggggucaaugg

SEQ ID NO: 3064901 - RNA, 19 nt, Artificial Sequence
  Description of Artificial Sequence: Synthetic oligonucleotide
gauggcauugaggaugccc

SEQ ID NO: 3064902 - RNA, 19 nt, Artificial Sequence
  Description of Artificial Sequence: Synthetic oligonucleotide
accuccagaccccucgagc

SEQ ID NO: 3064903 - RNA, 19 nt, Artificial Sequence
  Description of Artificial Sequence: Synthetic oligonucleotide
  modified_base (4)..(4): a, c, u, g, unknown or other
ccanauauacugauccacc

SEQ ID NO: 3064904 - RNA, 19 nt, Artificial Sequence
  Description of Artificial Sequence: Synthetic oligonucleotide
uuugaggggaugccaucag

SEQ ID NO: 3064905 - RNA, 19 nt, Artificial Sequence
  Description of Artificial Sequence: Synthetic oligonucleotide
cugauccaccuccagaccc

SEQ ID NO: 3064906 - RNA, 19 nt, Artificial Sequence
  Description of Artificial Sequence: Synthetic oligonucleotide
uggauggcauugaggaugc

SEQ ID NO: 3064907 - RNA, 19 nt, Artificial Sequence
  Description of Artificial Sequence: Synthetic oligonucleotide
cuguuuaugcacacaggac

SEQ ID NO: 3064908 - RNA, 19 nt, Artificial Sequence
  Description of Artificial Sequence: Synthetic oligonucleotide
caugacauugggcaugauc

SEQ ID NO: 3064909 - RNA, 19 nt, Artificial Sequence
  Description of Artificial Sequence: Synthetic oligonucleotide
ugaugugaggucugacuug

SEQ ID NO: 3064910 - RNA, 19 nt, Artificial Sequence
  Description of Artificial Sequence: Synthetic oligonucleotide
aguguuggauggcauugag

SEQ ID NO: 3064911 - RNA, 19 nt, Artificial Sequence
  Description of Artificial Sequence: Synthetic oligonucleotide
uuaugcacacaggacaccu

SEQ ID NO: 3064912 - RNA, 19 nt, Artificial Sequence
  Description of Artificial Sequence: Synthetic oligonucleotide
ucugacuugaugggcacug

SEQ ID NO: 3064913 - RNA, 19 nt, Artificial Sequence
  Description of Artificial Sequence: Synthetic oligonucleotide
ugacuugaugggcacuggc

SEQ ID NO: 3064914 - RNA, 19 nt, Artificial Sequence
  Description of Artificial Sequence: Synthetic oligonucleotide
ugaucaucuggcuggggcu

SEQ ID NO: 3064915 - RNA, 19 nt, Artificial Sequence
  Description of Artificial Sequence: Synthetic oligonucleotide
ggaggaagcggguagggag

SEQ ID NO: 3064916 - RNA, 19 nt, Artificial Sequence
  Description of Artificial Sequence: Synthetic oligonucleotide
auacugauccaccuccaga

SEQ ID NO: 3064917 - RNA, 19 nt, Artificial Sequence
  Description of Artificial Sequence: Synthetic oligonucleotide
  modified_base (11)..(11): a, c, u, g, unknown or other
ggaugccccanauauacug

SEQ ID NO: 3064918 - RNA, 19 nt, Artificial Sequence
  Description of Artificial Sequence: Synthetic oligonucleotide
agucguuggaacuggugcu

SEQ ID NO: 3064919 - RNA, 19 nt, Artificial Sequence
  Description of Artificial Sequence: Synthetic oligonucleotide
ugauccaccuccagacccc

SEQ ID NO: 3064920 - RNA, 19 nt, Artificial Sequence
  Description of Artificial Sequence: Synthetic oligonucleotide
  modified_base (14)..(14): a, c, u, g, unknown or other
ugaggaugccccanauaua

SEQ ID NO: 3064921 - RNA, 19 nt, Artificial Sequence
  Description of Artificial Sequence: Synthetic oligonucleotide
guuuaugcacacaggacac

SEQ ID NO: 3064922 - RNA, 19 nt, Artificial Sequence
  Description of Artificial Sequence: Synthetic oligonucleotide
aggaggaggaagcggguag

SEQ ID NO: 3064923 - RNA, 19 nt, Artificial Sequence
  Description of Artificial Sequence: Synthetic oligonucleotide
uuggaacuggugcucccag

SEQ ID NO: 3064924 - RNA, 19 nt, Artificial Sequence
  Description of Artificial Sequence: Synthetic oligonucleotide
gcuguuuaugcacacagga

SEQ ID NO: 3064925 - RNA, 19 nt, Artificial Sequence
  Description of Artificial Sequence: Synthetic oligonucleotide
ucaaacucggaguguugga

SEQ ID NO: 3064926 - RNA, 19 nt, Artificial Sequence
  Description of Artificial Sequence: Synthetic oligonucleotide
gacuugaugggcacuggcc

SEQ ID NO: 3064927 - RNA, 19 nt, Artificial Sequence
  Description of Artificial Sequence: Synthetic oligonucleotide
cuugaugggcacuggccgc

SEQ ID NO: 3064928 - RNA, 19 nt, Artificial Sequence
  Description of Artificial Sequence: Synthetic oligonucleotide
acauugggcaugaucaucu

SEQ ID NO: 3064929 - RNA, 19 nt, Artificial Sequence
  Description of Artificial Sequence: Synthetic oligonucleotide
uguggggucaauggugacc

SEQ ID NO: 3064930 - RNA, 19 nt, Artificial Sequence
  Description of Artificial Sequence: Synthetic oligonucleotide
gaugugaggucugacuuga

SEQ ID NO: 3064931 - RNA, 19 nt, Artificial Sequence
  Description of Artificial Sequence: Synthetic oligonucleotide
agcagcaaucaucuccaug

SEQ ID NO: 3064932 - RNA, 19 nt, Artificial Sequence
  Description of Artificial Sequence: Synthetic oligonucleotide
uuuaugcacacaggacacc

SEQ ID NO: 3064933 - RNA, 19 nt, Artificial Sequence
  Description of Artificial Sequence: Synthetic oligonucleotide
agcggguagggagaugggc

SEQ ID NO: 3064934 - RNA, 19 nt, Artificial Sequence
  Description of Artificial Sequence: Synthetic oligonucleotide
  modified_base (16)..(16): a, c, u, g, unknown or other
auugaggaugccccanaua

SEQ ID NO: 3064935 - RNA, 19 nt, Artificial Sequence
  Description of Artificial Sequence: Synthetic oligonucleotide
agagcagcaaucaucucca

SEQ ID NO: 3064936 - RNA, 19 nt, Artificial Sequence
  Description of Artificial Sequence: Synthetic oligonucleotide
uggaacuggugcucccagg

SEQ ID NO: 3064937 - RNA, 19 nt, Artificial Sequence
  Description of Artificial Sequence: Synthetic oligonucleotide
  modified_base (10)..(10): a, c, u, g, unknown or other
gaugccccanauauacuga

SEQ ID NO: 3064938 - RNA, 19 nt, Artificial Sequence
  Description of Artificial Sequence: Synthetic oligonucleotide
gugaccucuucaaacucgg

SEQ ID NO: 3064939 - RNA, 19 nt, Artificial Sequence
  Description of Artificial Sequence: Synthetic oligonucleotide
ugguuuugaaccgcuuuga

SEQ ID NO: 3064940 - RNA, 19 nt, Artificial Sequence
  Description of Artificial Sequence: Synthetic oligonucleotide
gggcuguuuaugcacacag

SEQ ID NO: 3064941 - RNA, 19 nt, Artificial Sequence
  Description of Artificial Sequence: Synthetic oligonucleotide
accgcuuugaggggaugcc

SEQ ID NO: 3064942 - RNA, 19 nt, Artificial Sequence
  Description of Artificial Sequence: Synthetic oligonucleotide
gaacuggugcucccaggag

SEQ ID NO: 3064943 - RNA, 19 nt, Artificial Sequence
  Description of Artificial Sequence: Synthetic oligonucleotide
  modified_base (3)..(3): a, c, u, g, unknown or other
canauauacugauccaccu

SEQ ID NO: 3064944 - RNA, 19 nt, Artificial Sequence
  Description of Artificial Sequence: Synthetic oligonucleotide
caggacaccuccagguccc

SEQ ID NO: 3064945 - RNA, 19 nt, Artificial Sequence
  Description of Artificial Sequence: Synthetic oligonucleotide
gguuuugaaccgcuuugag

SEQ ID NO: 3064946 - RNA, 19 nt, Artificial Sequence
  Description of Artificial Sequence: Synthetic oligonucleotide
ggcucaugguuuugaaccg

SEQ ID NO: 3064947 - RNA, 19 nt, Artificial Sequence
  Description of Artificial Sequence: Synthetic oligonucleotide
cauguggggucaaugguga

SEQ ID NO: 3064948 - RNA, 19 nt, Artificial Sequence
  Description of Artificial Sequence: Synthetic oligonucleotide
uccagaccccucgagcagg

SEQ ID NO: 3064949 - RNA, 19 nt, Artificial Sequence
  Description of Artificial Sequence: Synthetic oligonucleotide
ucgagcagggcuguuuaug

SEQ ID NO: 3064950 - RNA, 19 nt, Artificial Sequence
  Description of Artificial Sequence: Synthetic oligonucleotide
ggugaccucuucaaacucg

SEQ ID NO: 3064951 - RNA, 19 nt, Artificial Sequence
  Description of Artificial Sequence: Synthetic oligonucleotide
uguagucguuggaacuggu

SEQ ID NO: 3064952 - RNA, 19 nt, Artificial Sequence
  Description of Artificial Sequence: Synthetic oligonucleotide
guguuggauggcauugagg

SEQ ID NO: 3064953 - RNA, 19 nt, Artificial Sequence
  Description of Artificial Sequence: Synthetic oligonucleotide
augggcacuggccgccagc

SEQ ID NO: 3064954 - RNA, 19 nt, Artificial Sequence
  Description of Artificial Sequence: Synthetic oligonucleotide
acaccuccaggucccucgc

SEQ ID NO: 3064955 - RNA, 19 nt, Artificial Sequence
  Description of Artificial Sequence: Synthetic oligonucleotide
uugaaccgcuuugagggga

SEQ ID NO: 3064956 - RNA, 19 nt, Artificial Sequence
  Description of Artificial Sequence: Synthetic oligonucleotide
uaugcacacaggacaccuc

SEQ ID NO: 3064957 - RNA, 19 nt, Artificial Sequence
  Description of Artificial Sequence: Synthetic oligonucleotide
ucguccuugaugugagguc

SEQ ID NO: 3064958 - RNA, 19 nt, Artificial Sequence
  Description of Artificial Sequence: Synthetic oligonucleotide
cuguagucguuggaacugg

SEQ ID NO: 3064959 - RNA, 19 nt, Artificial Sequence
  Description of Artificial Sequence: Synthetic oligonucleotide
agaccccucgagcagggcu

SEQ ID NO: 3064960 - RNA, 19 nt, Artificial Sequence
  Description of Artificial Sequence: Synthetic oligonucleotide
ugacauugggcaugaucau

SEQ ID NO: 3064961 - RNA, 19 nt, Artificial Sequence
  Description of Artificial Sequence: Synthetic oligonucleotide
ugggcaugaucaucuggcu

SEQ ID NO: 3064962 - RNA, 19 nt, Artificial Sequence
  Description of Artificial Sequence: Synthetic oligonucleotide
gacauugggcaugaucauc

SEQ ID NO: 3064963 - RNA, 19 nt, Artificial Sequence
  Description of Artificial Sequence: Synthetic oligonucleotide
ucuccaugacauugggcau

SEQ ID NO: 3064964 - RNA, 19 nt, Artificial Sequence
  Description of Artificial Sequence: Synthetic oligonucleotide
  modified_base (8)..(8): a, c, u, g, unknown or other
ugccccanauauacugauc

SEQ ID NO: 3064965 - RNA, 19 nt, Artificial Sequence
  Description of Artificial Sequence: Synthetic oligonucleotide
uccaugacauugggcauga

SEQ ID NO: 3064966 - RNA, 19 nt, Artificial Sequence
  Description of Artificial Sequence: Synthetic oligonucleotide
uugaugggcacuggccgcc

SEQ ID NO: 3064967 - RNA, 19 nt, Artificial Sequence
  Description of Artificial Sequence: Synthetic oligonucleotide
  modified_base (9)..(9): a, c, u, g, unknown or other
augccccanauauacugau

SEQ ID NO: 3064968 - RNA, 19 nt, Artificial Sequence
  Description of Artificial Sequence: Synthetic oligonucleotide
auguggggucaauggugac

SEQ ID NO: 3064969 - RNA, 19 nt, Artificial Sequence
  Description of Artificial Sequence: Synthetic oligonucleotide
  modified_base (5)..(5): a, c, u, g, unknown or other
cccanauauacugauccac

SEQ ID NO: 3064970 - RNA, 19 nt, Artificial Sequence
  Description of Artificial Sequence: Synthetic oligonucleotide
ggaguguuggauggcauug

SEQ ID NO: 3064971 - RNA, 19 nt, Artificial Sequence
  Description of Artificial Sequence: Synthetic oligonucleotide
ucguuggaacuggugcucc

SEQ ID NO: 3064972 - RNA, 19 nt, Artificial Sequence
  Description of Artificial Sequence: Synthetic oligonucleotide
ugaaccgcuuugaggggau

SEQ ID NO: 3064973 - RNA, 19 nt, Artificial Sequence
  Description of Artificial Sequence: Synthetic oligonucleotide
cuccaugacauugggcaug

SEQ ID NO: 3064974 - RNA, 19 nt, Artificial Sequence
  Description of Artificial Sequence: Synthetic oligonucleotide
guagucguuggaacuggug

SEQ ID NO: 3064975 - RNA, 19 nt, Artificial Sequence
  Description of Artificial Sequence: Synthetic oligonucleotide
ggaacuggugcucccagga

SEQ ID NO: 3064976 - RNA, 19 nt, Artificial Sequence
  Description of Artificial Sequence: Synthetic oligonucleotide
agggucguccuugauguga

SEQ ID NO: 3064977 - RNA, 19 nt, Artificial Sequence
  Description of Artificial Sequence: Synthetic oligonucleotide
ugaccucuucaaacucgga

SEQ ID NO: 3064978 - RNA, 19 nt, Artificial Sequence
  Description of Artificial Sequence: Synthetic oligonucleotide
acucggaguguuggauggc

SEQ ID NO: 3064979 - RNA, 19 nt, Artificial Sequence
  Description of Artificial Sequence: Synthetic oligonucleotide
cuuugaggggaugccauca

SEQ ID NO: 3064980 - RNA, 19 nt, Artificial Sequence
  Description of Artificial Sequence: Synthetic oligonucleotide
ucaugguuuugaaccgcuu

SEQ ID NO: 3064981 - RNA, 19 nt, Artificial Sequence
  Description of Artificial Sequence: Synthetic oligonucleotide
uggcauugaggaugcccca

SEQ ID NO: 3064982 - RNA, 19 nt, Artificial Sequence
  Description of Artificial Sequence: Synthetic oligonucleotide
aggucugacuugaugggca

SEQ ID NO: 3064983 - RNA, 19 nt, Artificial Sequence
  Description of Artificial Sequence: Synthetic oligonucleotide
cauugggcaugaucaucug

SEQ ID NO: 3064984 - RNA, 19 nt, Artificial Sequence
  Description of Artificial Sequence: Synthetic oligonucleotide
gaucaucuggcuggggcuc

SEQ ID NO: 3064985 - RNA, 19 nt, Artificial Sequence
  Description of Artificial Sequence: Synthetic oligonucleotide
acuggugcucccaggagga

SEQ ID NO: 3064986 - RNA, 19 nt, Artificial Sequence
  Description of Artificial Sequence: Synthetic oligonucleotide
ucggaguguuggauggcau

SEQ ID NO: 3064987 - RNA, 19 nt, Artificial Sequence
  Description of Artificial Sequence: Synthetic oligonucleotide
auauacugauccaccucca

SEQ ID NO: 3064988 - RNA, 19 nt, Artificial Sequence
  Description of Artificial Sequence: Synthetic oligonucleotide
cagcaaucaucuccaugac

SEQ ID NO: 3064989 - RNA, 19 nt, Artificial Sequence
  Description of Artificial Sequence: Synthetic oligonucleotide
gaggaagcggguagggaga

SEQ ID NO: 3064990 - RNA, 19 nt, Artificial Sequence
  Description of Artificial Sequence: Synthetic oligonucleotide
gagcagggcuguuuaugca

SEQ ID NO: 3064991 - RNA, 19 nt, Artificial Sequence
  Description of Artificial Sequence: Synthetic oligonucleotide
gaccccucgagcagggcug

SEQ ID NO: 3064992 - RNA, 19 nt, Artificial Sequence
  Description of Artificial Sequence: Synthetic oligonucleotide
gcauguggggucaauggug

SEQ ID NO: 3064993 - RNA, 19 nt, Artificial Sequence
  Description of Artificial Sequence: Synthetic oligonucleotide
cugacuugaugggcacugg

SEQ ID NO: 3064994 - RNA, 19 nt, Artificial Sequence
  Description of Artificial Sequence: Synthetic oligonucleotide
gggcaugaucaucuggcug

SEQ ID NO: 3064995 - RNA, 19 nt, Artificial Sequence
  Description of Artificial Sequence: Synthetic oligonucleotide
cuccagaccccucgagcag

SEQ ID NO: 3064996 - RNA, 19 nt, Artificial Sequence
  Description of Artificial Sequence: Synthetic oligonucleotide
ggcuguuuaugcacacagg

SEQ ID NO: 3064997 - RNA, 19 nt, Artificial Sequence
  Description of Artificial Sequence: Synthetic oligonucleotide
aagcggguagggagauggg

SEQ ID NO: 3064998 - RNA, 19 nt, Artificial Sequence
  Description of Artificial Sequence: Synthetic oligonucleotide
uggggcucaugguuuugaa

SEQ ID NO: 3064999 - RNA, 19 nt, Artificial Sequence
  Description of Artificial Sequence: Synthetic oligonucleotide
uggcuggggcucaugguuu

SEQ ID NO: 3065000 - RNA, 19 nt, Artificial Sequence
  Description of Artificial Sequence: Synthetic oligonucleotide
gaguguuggauggcauuga

SEQ ID NO: 3065001 - RNA, 19 nt, Artificial Sequence
  Description of Artificial Sequence: Synthetic oligonucleotide
cagggcuguuuaugcacac

SEQ ID NO: 3065002 - RNA, 19 nt, Artificial Sequence
  Description of Artificial Sequence: Synthetic oligonucleotide
gaugggcacuggccgccag

SEQ ID NO: 3065003 - RNA, 19 nt, Artificial Sequence
  Description of Artificial Sequence: Synthetic oligonucleotide
ugggcacuggccgccagcu

SEQ ID NO: 3065004 - RNA, 19 nt, Artificial Sequence
  Description of Artificial Sequence: Synthetic oligonucleotide
cgagcagggcuguuuaugc

SEQ ID NO: 3065005 - RNA, 19 nt, Artificial Sequence
  Description of Artificial Sequence: Synthetic oligonucleotide
agggcccagagcagcaauc

SEQ ID NO: 3065006 - RNA, 19 nt, Artificial Sequence
  Description of Artificial Sequence: Synthetic oligonucleotide
caugaucaucuggcugggg

SEQ ID NO: 3065007 - RNA, 19 nt, Artificial Sequence
  Description of Artificial Sequence: Synthetic oligonucleotide
guuggaacuggugcuccca

SEQ ID NO: 3065008 - RNA, 19 nt, Artificial Sequence
  Description of Artificial Sequence: Synthetic oligonucleotide
gaggggaugccaucagggu

SEQ ID NO: 3065009 - RNA, 19 nt, Artificial Sequence
  Description of Artificial Sequence: Synthetic oligonucleotide
gucguuggaacuggugcuc

SEQ ID NO: 3065010 - RNA, 19 nt, Artificial Sequence
  Description of Artificial Sequence: Synthetic oligonucleotide
guggggucaauggugaccu

SEQ ID NO: 3065011 - RNA, 19 nt, Artificial Sequence
  Description of Artificial Sequence: Synthetic oligonucleotide
ggucugacuugaugggcac

SEQ ID NO: 3065012 - RNA, 19 nt, Artificial Sequence
  Description of Artificial Sequence: Synthetic oligonucleotide
gcggguagggagaugggcc

SEQ ID NO: 3065013 - RNA, 19 nt, Artificial Sequence
  Description of Artificial Sequence: Synthetic oligonucleotide
ggggcucaugguuuugaac

SEQ ID NO: 3065014 - RNA, 19 nt, Artificial Sequence
  Description of Artificial Sequence: Synthetic oligonucleotide
acuggccgccagcugcaug

SEQ ID NO: 3065015 - RNA, 19 nt, Artificial Sequence
  Description of Artificial Sequence: Synthetic oligonucleotide
gguagggagaugggccagg

SEQ ID NO: 3065016 - RNA, 19 nt, Artificial Sequence
  Description of Artificial Sequence: Synthetic oligonucleotide
cucaugguuuugaaccgcu

SEQ ID NO: 3065017 - RNA, 19 nt, Artificial Sequence
  Description of Artificial Sequence: Synthetic oligonucleotide
gccgccagcugcauguggg

SEQ ID NO: 3065018 - RNA, 19 nt, Artificial Sequence
  Description of Artificial Sequence: Synthetic oligonucleotide
aggaggaagcggguaggga

SEQ ID NO: 3065019 - RNA, 19 nt, Artificial Sequence
  Description of Artificial Sequence: Synthetic oligonucleotide
gcugcauguggggucaaug

SEQ ID NO: 3065020 - RNA, 19 nt, Artificial Sequence
  Description of Artificial Sequence: Synthetic oligonucleotide
caugguuuugaaccgcuuu

SEQ ID NO: 3065021 - RNA, 19 nt, Artificial Sequence
  Description of Artificial Sequence: Synthetic oligonucleotide
agggcuguuuaugcacaca

SEQ ID NO: 3065022 - RNA, 19 nt, Artificial Sequence
  Description of Artificial Sequence: Synthetic oligonucleotide
uccaggucccucgcucaca

SEQ ID NO: 3065023 - RNA, 19 nt, Artificial Sequence
  Description of Artificial Sequence: Synthetic oligonucleotide
gcaugaucaucuggcuggg

SEQ ID NO: 3065024 - RNA, 19 nt, Artificial Sequence
  Description of Artificial Sequence: Synthetic oligonucleotide
cucggaguguuggauggca

SEQ ID NO: 3065025 - RNA, 19 nt, Artificial Sequence
  Description of Artificial Sequence: Synthetic oligonucleotide
gggucguccuugaugugag

SEQ ID NO: 3065026 - RNA, 19 nt, Artificial Sequence
  Description of Artificial Sequence: Synthetic oligonucleotide
caccuccagaccccucgag

SEQ ID NO: 3065027 - RNA, 19 nt, Artificial Sequence
  Description of Artificial Sequence: Synthetic oligonucleotide
gccaucagggucguccuug

SEQ ID NO: 3065028 - RNA, 19 nt, Artificial Sequence
  Description of Artificial Sequence: Synthetic oligonucleotide
  modified_base (12)..(12): a, c, u, g, unknown or other
aggaugccccanauauacu

SEQ ID NO: 3065029 - RNA, 19 nt, Artificial Sequence
  Description of Artificial Sequence: Synthetic oligonucleotide
cuggccgccagcugcaugu

SEQ ID NO: 3065030 - RNA, 19 nt, Artificial Sequence
  Description of Artificial Sequence: Synthetic oligonucleotide
gucguccuugaugugaggu

SEQ ID NO: 3065031 - RNA, 19 nt, Artificial Sequence
  Description of Artificial Sequence: Synthetic oligonucleotide
gcucaugguuuugaaccgc

SEQ ID NO: 3065032 - RNA, 19 nt, Artificial Sequence
  Description of Artificial Sequence: Synthetic oligonucleotide
cuccaggucccucgcucac

SEQ ID NO: 3065033 - RNA, 19 nt, Artificial Sequence
  Description of Artificial Sequence: Synthetic oligonucleotide
ggugcucccaggaggagga

SEQ ID NO: 3065034 - RNA, 19 nt, Artificial Sequence
  Description of Artificial Sequence: Synthetic oligonucleotide
ggucguccuugaugugagg

SEQ ID NO: 3065035 - RNA, 19 nt, Artificial Sequence
  Description of Artificial Sequence: Synthetic oligonucleotide
ccuccagaccccucgagca

SEQ ID NO: 3065036 - RNA, 19 nt, Artificial Sequence
  Description of Artificial Sequence: Synthetic oligonucleotide
gaaccgcuuugaggggaug

SEQ ID NO: 3065037 - RNA, 19 nt, Artificial Sequence
  Description of Artificial Sequence: Synthetic oligonucleotide
gcuuugaggggaugccauc

SEQ ID NO: 3065038 - RNA, 19 nt, Artificial Sequence
  Description of Artificial Sequence: Synthetic oligonucleotide
ugaugggcacuggccgcca

SEQ ID NO: 3065039 - RNA, 19 nt, Artificial Sequence
  Description of Artificial Sequence: Synthetic oligonucleotide
gaggaggaggaagcgggua

SEQ ID NO: 3065040 - RNA, 19 nt, Artificial Sequence
  Description of Artificial Sequence: Synthetic oligonucleotide
aggaagcggguagggagau

SEQ ID NO: 3065041 - RNA, 19 nt, Artificial Sequence
  Description of Artificial Sequence: Synthetic oligonucleotide
caaacucggaguguuggau

SEQ ID NO: 3065042 - RNA, 19 nt, Artificial Sequence
  Description of Artificial Sequence: Synthetic oligonucleotide
  modified_base (17)..(17): a, c, u, g, unknown or other
cauugaggaugccccanau

SEQ ID NO: 3065043 - RNA, 19 nt, Artificial Sequence
  Description of Artificial Sequence: Synthetic oligonucleotide
  modified_base (18)..(18): a, c, u, g, unknown or other
gcauugaggaugccccana

SEQ ID NO: 3065044 - RNA, 19 nt, Artificial Sequence
  Description of Artificial Sequence: Synthetic oligonucleotide
ccagaccccucgagcaggg

SEQ ID NO: 3065045 - RNA, 19 nt, Artificial Sequence
  Description of Artificial Sequence: Synthetic oligonucleotide
ugccaucagggucguccuu

SEQ ID NO: 3065046 - RNA, 19 nt, Artificial Sequence
  Description of Artificial Sequence: Synthetic oligonucleotide
gcucccaggaggaggagga

SEQ ID NO: 3065047 - RNA, 19 nt, Artificial Sequence
  Description of Artificial Sequence: Synthetic oligonucleotide
  modified_base (6)..(6): a, c, u, g, unknown or other
ccccanauauacugaucca

SEQ ID NO: 3065048 - RNA, 19 nt, Artificial Sequence
  Description of Artificial Sequence: Synthetic oligonucleotide
cagggucguccuugaugug

SEQ ID NO: 3065049 - RNA, 19 nt, Artificial Sequence
  Description of Artificial Sequence: Synthetic oligonucleotide
cuggggcucaugguuuuga

SEQ ID NO: 3065050 - RNA, 19 nt, Artificial Sequence
  Description of Artificial Sequence: Synthetic oligonucleotide
gagaugggccagggcccag

SEQ ID NO: 3065051 - RNA, 19 nt, Artificial Sequence
  Description of Artificial Sequence: Synthetic oligonucleotide
ggccgccagcugcaugugg

SEQ ID NO: 3065052 - RNA, 19 nt, Artificial Sequence
  Description of Artificial Sequence: Synthetic oligonucleotide
cuggugcucccaggaggag

SEQ ID NO: 3065053 - RNA, 19 nt, Artificial Sequence
  Description of Artificial Sequence: Synthetic oligonucleotide
gcagggcuguuuaugcaca

SEQ ID NO: 3065054 - RNA, 19 nt, Artificial Sequence
  Description of Artificial Sequence: Synthetic oligonucleotide
ggguagggagaugggccag

SEQ ID NO: 3065055 - RNA, 19 nt, Artificial Sequence
  Description of Artificial Sequence: Synthetic oligonucleotide
uggggucaauggugaccuc

SEQ ID NO: 3065056 - RNA, 19 nt, Artificial Sequence
  Description of Artificial Sequence: Synthetic oligonucleotide
ccgccagcugcaugugggg

SEQ ID NO: 3065057 - RNA, 19 nt, Artificial Sequence
  Description of Artificial Sequence: Synthetic oligonucleotide
cguuggaacuggugcuccc

SEQ ID NO: 3065058 - RNA, 19 nt, Artificial Sequence
  Description of Artificial Sequence: Synthetic oligonucleotide
  modified_base (19)..(19): a, c, u, g, unknown or other
ggcauugaggaugccccan

SEQ ID NO: 3065059 - RNA, 19 nt, Artificial Sequence
  Description of Artificial Sequence: Synthetic oligonucleotide
ggggucaauggugaccucu

SEQ ID NO: 3065060 - RNA, 19 nt, Artificial Sequence
  Description of Artificial Sequence: Synthetic oligonucleotide
caaucaucuccaugacauu

SEQ ID NO: 3065061 - RNA, 19 nt, Artificial Sequence
  Description of Artificial Sequence: Synthetic oligonucleotide
auccaccuccagaccccuc

SEQ ID NO: 3065062 - RNA, 19 nt, Artificial Sequence
  Description of Artificial Sequence: Synthetic oligonucleotide
gauccaccuccagaccccu

SEQ ID NO: 3065063 - RNA, 19 nt, Artificial Sequence
  Description of Artificial Sequence: Synthetic oligonucleotide
uggccgccagcugcaugug

SEQ ID NO: 3065064 - RNA, 19 nt, Artificial Sequence
  Description of Artificial Sequence: Synthetic oligonucleotide
cucuucaaacucggagugu

SEQ ID NO: 3065065 - RNA, 19 nt, Artificial Sequence
  Description of Artificial Sequence: Synthetic oligonucleotide
ggagaugggccagggccca

SEQ ID NO: 3065066 - RNA, 19 nt, Artificial Sequence
  Description of Artificial Sequence: Synthetic oligonucleotide
agcugcauguggggucaau

SEQ ID NO: 3065067 - RNA, 19 nt, Artificial Sequence
  Description of Artificial Sequence: Synthetic oligonucleotide
cagaccccucgagcagggc

SEQ ID NO: 3065068 - RNA, 19 nt, Artificial Sequence
  Description of Artificial Sequence: Synthetic oligonucleotide
ccagagcagcaaucaucuc

SEQ ID NO: 3065069 - RNA, 19 nt, Artificial Sequence
  Description of Artificial Sequence: Synthetic oligonucleotide
ccuccaggucccucgcuca

SEQ ID NO: 3065070 - RNA, 19 nt, Artificial Sequence
  Description of Artificial Sequence: Synthetic oligonucleotide
ggaagcggguagggagaug

SEQ ID NO: 3065071 - RNA, 19 nt, Artificial Sequence
  Description of Artificial Sequence: Synthetic oligonucleotide
gucugacuugaugggcacu

SEQ ID NO: 3065072 - RNA, 19 nt, Artificial Sequence
  Description of Artificial Sequence: Synthetic oligonucleotide
augugaggucugacuugau

SEQ ID NO: 3065073 - RNA, 19 nt, Artificial Sequence
  Description of Artificial Sequence: Synthetic oligonucleotide
gagcagcaaucaucuccau

SEQ ID NO: 3065074 - RNA, 19 nt, Artificial Sequence
  Description of Artificial Sequence: Synthetic oligonucleotide
cggguagggagaugggcca

SEQ ID NO: 3065075 - RNA, 19 nt, Artificial Sequence
  Description of Artificial Sequence: Synthetic oligonucleotide
gcuggggcucaugguuuug

SEQ ID NO: 3065076 - RNA, 19 nt, Artificial Sequence
  Description of Artificial Sequence: Synthetic oligonucleotide
ccucgagcagggcuguuua

SEQ ID NO: 3065077 - RNA, 19 nt, Artificial Sequence
  Description of Artificial Sequence: Synthetic oligonucleotide
cucgagcagggcuguuuau

SEQ ID NO: 3065078 - RNA, 19 nt, Artificial Sequence
  Description of Artificial Sequence: Synthetic oligonucleotide
ggauggcauugaggaugcc

SEQ ID NO: 3065079 - RNA, 19 nt, Artificial Sequence
  Description of Artificial Sequence: Synthetic oligonucleotide
cguccuugaugugaggucu

SEQ ID NO: 3065080 - RNA, 19 nt, Artificial Sequence
  Description of Artificial Sequence: Synthetic oligonucleotide
cagggcccagagcagcaau

SEQ ID NO: 3065081 - RNA, 19 nt, Artificial Sequence
  Description of Artificial Sequence: Synthetic oligonucleotide
ggacaccuccaggucccuc

SEQ ID NO: 3065082 - RNA, 19 nt, Artificial Sequence
  Description of Artificial Sequence: Synthetic oligonucleotide
ccgcuuugaggggaugcca

SEQ ID NO: 3065083 - RNA, 19 nt, Artificial Sequence
  Description of Artificial Sequence: Synthetic oligonucleotide
ccaccuccagaccccucga

SEQ ID NO: 3065084 - RNA, 19 nt, Artificial Sequence
  Description of Artificial Sequence: Synthetic oligonucleotide
ggcuggggcucaugguuuu

SEQ ID NO: 3065085 - RNA, 19 nt, Artificial Sequence
  Description of Artificial Sequence: Synthetic oligonucleotide
caccuccaggucccucgcu

SEQ ID NO: 3065086 - RNA, 19 nt, Artificial Sequence
  Description of Artificial Sequence: Synthetic oligonucleotide
cgcuuugaggggaugccau

SEQ ID NO: 3065087 - RNA, 19 nt, Artificial Sequence
  Description of Artificial Sequence: Synthetic oligonucleotide
cggaguguuggauggcauu

SEQ ID NO: 3065088 - RNA, 19 nt, Artificial Sequence
  Description of Artificial Sequence: Synthetic oligonucleotide
cagcugcauguggggucaa

SEQ ID NO: 3065089 - RNA, 19 nt, Artificial Sequence
  Description of Artificial Sequence: Synthetic oligonucleotide
cccucgagcagggcuguuu

SEQ ID NO: 3065090 - RNA, 19 nt, Artificial Sequence
  Description of Artificial Sequence: Synthetic oligonucleotide
cacuggccgccagcugcau

SEQ ID NO: 3065091 - RNA, 19 nt, Artificial Sequence
  Description of Artificial Sequence: Synthetic oligonucleotide
cgccagcugcauguggggu

SEQ ID NO: 3065092 - RNA, 19 nt, Artificial Sequence
  Description of Artificial Sequence: Synthetic oligonucleotide
ccaugacauugggcaugau

SEQ ID NO: 3065093 - RNA, 19 nt, Artificial Sequence
  Description of Artificial Sequence: Synthetic oligonucleotide
ccccucgagcagggcuguu

SEQ ID NO: 3065094 - RNA, 19 nt, Artificial Sequence
  Description of Artificial Sequence: Synthetic oligonucleotide
  modified_base (1)..(1): a, c, u, g, unknown or other
nauauacugauccaccucc

SEQ ID NO: 3065095 - RNA, 19 nt, Artificial Sequence
  Description of Artificial Sequence: Synthetic oligonucleotide
ucagaagaaggucagaucg

SEQ ID NO: 3065096 - RNA, 19 nt, Artificial Sequence
  Description of Artificial Sequence: Synthetic oligonucleotide
uugauaaagaaguugaugc

SEQ ID NO: 3065097 - RNA, 19 nt, Artificial Sequence
  Description of Artificial Sequence: Synthetic oligonucleotide
uuuauagucugcaaagggg

SEQ ID NO: 3065098 - RNA, 19 nt, Artificial Sequence
  Description of Artificial Sequence: Synthetic oligonucleotide
uuuuauagucugcaaaggg

SEQ ID NO: 3065099 - RNA, 19 nt, Artificial Sequence
  Description of Artificial Sequence: Synthetic oligonucleotide
aaggauacggcuuuaaaga

SEQ ID NO: 3065100 - RNA, 19 nt, Artificial Sequence
  Description of Artificial Sequence: Synthetic oligonucleotide
aaagaaguugaugccagcc

SEQ ID NO: 3065101 - RNA, 19 nt, Artificial Sequence
  Description of Artificial Sequence: Synthetic oligonucleotide
uucgucaccaacaucaacc

SEQ ID NO: 3065102 - RNA, 19 nt, Artificial Sequence
  Description of Artificial Sequence: Synthetic oligonucleotide
ugaucugguaggaagacag

SEQ ID NO: 3065103 - RNA, 19 nt, Artificial Sequence
  Description of Artificial Sequence: Synthetic oligonucleotide
uuauagucugcaaaggggc

SEQ ID NO: 3065104 - RNA, 19 nt, Artificial Sequence
  Description of Artificial Sequence: Synthetic oligonucleotide
gaaggauacggcuuuaaag

SEQ ID NO: 3065105 - RNA, 19 nt, Artificial Sequence
  Description of Artificial Sequence: Synthetic oligonucleotide
aacaucaaccuugauaaag

SEQ ID NO: 3065106 - RNA, 19 nt, Artificial Sequence
  Description of Artificial Sequence: Synthetic oligonucleotide
uuaaagacggugaacuucu

SEQ ID NO: 3065107 - RNA, 19 nt, Artificial Sequence
  Description of Artificial Sequence: Synthetic oligonucleotide
gauacggcuuuaaagacgg

SEQ ID NO: 3065108 - RNA, 19 nt, Artificial Sequence
  Description of Artificial Sequence: Synthetic oligonucleotide
ugggauuucaccgugucgg

SEQ ID NO: 3065109 - RNA, 19 nt, Artificial Sequence
  Description of Artificial Sequence: Synthetic oligonucleotide
ugcagaaucagaagaaggu

SEQ ID NO: 3065110 - RNA, 19 nt, Artificial Sequence
  Description of Artificial Sequence: Synthetic oligonucleotide
ugauaaagaaguugaugcc

SEQ ID NO: 3065111 - RNA, 19 nt, Artificial Sequence
  Description of Artificial Sequence: Synthetic oligonucleotide
uuguugaucugguaggaag

SEQ ID NO: 3065112 - RNA, 19 nt, Artificial Sequence
  Description of Artificial Sequence: Synthetic oligonucleotide
cuuguuuucauggggaagg

SEQ ID NO: 3065113 - RNA, 19 nt, Artificial Sequence
  Description of Artificial Sequence: Synthetic oligonucleotide
uucucuuucucuucaagcu

SEQ ID NO: 3065114 - RNA, 19 nt, Artificial Sequence
  Description of Artificial Sequence: Synthetic oligonucleotide
guugaugccagccaccacc

SEQ ID NO: 3065115 - RNA, 19 nt, Artificial Sequence
  Description of Artificial Sequence: Synthetic oligonucleotide
aagacggugaacuucugau

SEQ ID NO: 3065116 - RNA, 19 nt, Artificial Sequence
  Description of Artificial Sequence: Synthetic oligonucleotide
aggauacggcuuuaaagac

SEQ ID NO: 3065117 - RNA, 19 nt, Artificial Sequence
  Description of Artificial Sequence: Synthetic oligonucleotide
uuucucuucaagcugggau

SEQ ID NO: 3065118 - RNA, 19 nt, Artificial Sequence
  Description of Artificial Sequence: Synthetic oligonucleotide
uguugaucugguaggaaga

SEQ ID NO: 3065119 - RNA, 19 nt, Artificial Sequence
  Description of Artificial Sequence: Synthetic oligonucleotide
aagaaguugaugccagcca

SEQ ID NO: 3065120 - RNA, 19 nt, Artificial Sequence
  Description of Artificial Sequence: Synthetic oligonucleotide
gauaaagaaguugaugcca

SEQ ID NO: 3065121 - RNA, 19 nt, Artificial Sequence
  Description of Artificial Sequence: Synthetic oligonucleotide
uggggaaggggcuugaaca

SEQ ID NO: 3065122 - RNA, 19 nt, Artificial Sequence
  Description of Artificial Sequence: Synthetic oligonucleotide
uuuaaagacggugaacuuc

SEQ ID NO: 3065123 - RNA, 19 nt, Artificial Sequence
  Description of Artificial Sequence: Synthetic oligonucleotide
caagggcuuguuuucaugg

SEQ ID NO: 3065124 - RNA, 19 nt, Artificial Sequence
  Description of Artificial Sequence: Synthetic oligonucleotide
aggaagacagggucaaggg

SEQ ID NO: 3065125 - RNA, 19 nt, Artificial Sequence
  Description of Artificial Sequence: Synthetic oligonucleotide
aaucagaagaaggucagau

SEQ ID NO: 3065126 - RNA, 19 nt, Artificial Sequence
  Description of Artificial Sequence: Synthetic oligonucleotide
cuugauaaagaaguugaug

SEQ ID NO: 3065127 - RNA, 19 nt, Artificial Sequence
  Description of Artificial Sequence: Synthetic oligonucleotide
cugcagaaucagaagaagg

SEQ ID NO: 3065128 - RNA, 19 nt, Artificial Sequence
  Description of Artificial Sequence: Synthetic oligonucleotide
aaccuugauaaagaaguug

SEQ ID NO: 3065129 - RNA, 19 nt, Artificial Sequence
  Description of Artificial Sequence: Synthetic oligonucleotide
ucugcaaaggggcugcaga

SEQ ID NO: 3065130 - RNA, 19 nt, Artificial Sequence
  Description of Artificial Sequence: Synthetic oligonucleotide
aucagaagaaggucagauc

SEQ ID NO: 3065131 - RNA, 19 nt, Artificial Sequence
  Description of Artificial Sequence: Synthetic oligonucleotide
uguugccugaaggauacgg

SEQ ID NO: 3065132 - RNA, 19 nt, Artificial Sequence
  Description of Artificial Sequence: Synthetic oligonucleotide
guuuucauggggaaggggc

SEQ ID NO: 3065133 - RNA, 19 nt, Artificial Sequence
  Description of Artificial Sequence: Synthetic oligonucleotide
ucucuuucucuucaagcug

SEQ ID NO: 3065134 - RNA, 19 nt, Artificial Sequence
  Description of Artificial Sequence: Synthetic oligonucleotide
gucaccaacaucaaccuug

SEQ ID NO: 3065135 - RNA, 19 nt, Artificial Sequence
  Description of Artificial Sequence: Synthetic oligonucleotide
aaagacggugaacuucuga

SEQ ID NO: 3065136 - RNA, 19 nt, Artificial Sequence
  Description of Artificial Sequence: Synthetic oligonucleotide
accaacaucaaccuugaua

SEQ ID NO: 3065137 - RNA, 19 nt, Artificial Sequence
  Description of Artificial Sequence: Synthetic oligonucleotide
cuugaacacccucaagugc

SEQ ID NO: 3065138 - RNA, 19 nt, Artificial Sequence
  Description of Artificial Sequence: Synthetic oligonucleotide
accaccuguugccugaagg

SEQ ID NO: 3065139 - RNA, 19 nt, Artificial Sequence
  Description of Artificial Sequence: Synthetic oligonucleotide
auaaagaaguugaugccag

SEQ ID NO: 3065140 - RNA, 19 nt, Artificial Sequence
  Description of Artificial Sequence: Synthetic oligonucleotide
uuuucauggggaaggggcu

SEQ ID NO: 3065141 - RNA, 19 nt, Artificial Sequence
  Description of Artificial Sequence: Synthetic oligonucleotide
aggucagaucgucaugucg

SEQ ID NO: 3065142 - RNA, 19 nt, Artificial Sequence
  Description of Artificial Sequence: Synthetic oligonucleotide
gaacuucugauucucuuuc

SEQ ID NO: 3065143 - RNA, 19 nt, Artificial Sequence
  Description of Artificial Sequence: Synthetic oligonucleotide
agggcuuguuuucaugggg

SEQ ID NO: 3065144 - RNA, 19 nt, Artificial Sequence
  Description of Artificial Sequence: Synthetic oligonucleotide
ucugguaggaagacagggu

SEQ ID NO: 3065145 - RNA, 19 nt, Artificial Sequence
  Description of Artificial Sequence: Synthetic oligonucleotide
uucaccgugucggagaucu

SEQ ID NO: 3065146 - RNA, 19 nt, Artificial Sequence
  Description of Artificial Sequence: Synthetic oligonucleotide
agaagaaggucagaucguc

SEQ ID NO: 3065147 - RNA, 19 nt, Artificial Sequence
  Description of Artificial Sequence: Synthetic oligonucleotide
uucaagcugggauuucacc

SEQ ID NO: 3065148 - RNA, 19 nt, Artificial Sequence
  Description of Artificial Sequence: Synthetic oligonucleotide
accuugauaaagaaguuga

SEQ ID NO: 3065149 - RNA, 19 nt, Artificial Sequence
  Description of Artificial Sequence: Synthetic oligonucleotide
cagaaucagaagaagguca

SEQ ID NO: 3065150 - RNA, 19 nt, Artificial Sequence
  Description of Artificial Sequence: Synthetic oligonucleotide
ucuuucucuucaagcuggg

SEQ ID NO: 3065151 - RNA, 19 nt, Artificial Sequence
  Description of Artificial Sequence: Synthetic oligonucleotide
ccaacaucaaccuugauaa

SEQ ID NO: 3065152 - RNA, 19 nt, Artificial Sequence
  Description of Artificial Sequence: Synthetic oligonucleotide
gauuucaccgugucggaga

SEQ ID NO: 3065153 - RNA, 19 nt, Artificial Sequence
  Description of Artificial Sequence: Synthetic oligonucleotide
aaggucagaucgucauguc

SEQ ID NO: 3065154 - RNA, 19 nt, Artificial Sequence
  Description of Artificial Sequence: Synthetic oligonucleotide
aucuccugcgucucggccg

SEQ ID NO: 3065155 - RNA, 19 nt, Artificial Sequence
  Description of Artificial Sequence: Synthetic oligonucleotide
uacggcuuuaaagacggug

SEQ ID NO: 3065156 - RNA, 19 nt, Artificial Sequence
  Description of Artificial Sequence: Synthetic oligonucleotide
agaaucagaagaaggucag

SEQ ID NO: 3065157 - RNA, 19 nt, Artificial Sequence
  Description of Artificial Sequence: Synthetic oligonucleotide
uaaagaaguugaugccagc

SEQ ID NO: 3065158 - RNA, 19 nt, Artificial Sequence
  Description of Artificial Sequence: Synthetic oligonucleotide
ugaaggauacggcuuuaaa

SEQ ID NO: 3065159 - RNA, 19 nt, Artificial Sequence
  Description of Artificial Sequence: Synthetic oligonucleotide
auggggaaggggcuugaac

SEQ ID NO: 3065160 - RNA, 19 nt, Artificial Sequence
  Description of Artificial Sequence: Synthetic oligonucleotide
aaaggggcugcagaaucag

SEQ ID NO: 3065161 - RNA, 19 nt, Artificial Sequence
  Description of Artificial Sequence: Synthetic oligonucleotide
ugaacuucugauucucuuu

SEQ ID NO: 3065162 - RNA, 19 nt, Artificial Sequence
  Description of Artificial Sequence: Synthetic oligonucleotide
uuuuguugaucugguagga

SEQ ID NO: 3065163 - RNA, 19 nt, Artificial Sequence
  Description of Artificial Sequence: Synthetic oligonucleotide
ucaccaacaucaaccuuga

SEQ ID NO: 3065164 - RNA, 19 nt, Artificial Sequence
  Description of Artificial Sequence: Synthetic oligonucleotide
aaggggcuugaacacccuc

SEQ ID NO: 3065165 - RNA, 19 nt, Artificial Sequence
  Description of Artificial Sequence: Synthetic oligonucleotide
aacacccucaagugcacaa

SEQ ID NO: 3065166 - RNA, 19 nt, Artificial Sequence
  Description of Artificial Sequence: Synthetic oligonucleotide
ugguaggaagacaggguca

SEQ ID NO: 3065167 - RNA, 19 nt, Artificial Sequence
  Description of Artificial Sequence: Synthetic oligonucleotide
uucucuucaagcugggauu

SEQ ID NO: 3065168 - RNA, 19 nt, Artificial Sequence
  Description of Artificial Sequence: Synthetic oligonucleotide
uguuuucauggggaagggg

SEQ ID NO: 3065169 - RNA, 19 nt, Artificial Sequence
  Description of Artificial Sequence: Synthetic oligonucleotide
cugguaggaagacaggguc

SEQ ID NO: 3065170 - RNA, 19 nt, Artificial Sequence
  Description of Artificial Sequence: Synthetic oligonucleotide
ucaagggcuuguuuucaug

SEQ ID NO: 3065171 - RNA, 19 nt, Artificial Sequence
  Description of Artificial Sequence: Synthetic oligonucleotide
aucaaccuugauaaagaag

SEQ ID NO: 3065172 - RNA, 19 nt, Artificial Sequence
  Description of Artificial Sequence: Synthetic oligonucleotide
ugcgucucggccguggccg

SEQ ID NO: 3065173 - RNA, 19 nt, Artificial Sequence
  Description of Artificial Sequence: Synthetic oligonucleotide
aaguugaugccagccacca

SEQ ID NO: 3065174 - RNA, 19 nt, Artificial Sequence
  Description of Artificial Sequence: Synthetic oligonucleotide
uucugauucucuuucucuu

SEQ ID NO: 3065175 - RNA, 19 nt, Artificial Sequence
  Description of Artificial Sequence: Synthetic oligonucleotide
acaucaaccuugauaaaga

SEQ ID NO: 3065176 - RNA, 19 nt, Artificial Sequence
  Description of Artificial Sequence: Synthetic oligonucleotide
ucuucaagcugggauuuca

SEQ ID NO: 3065177 - RNA, 19 nt, Artificial Sequence
  Description of Artificial Sequence: Synthetic oligonucleotide
ucgucaccaacaucaaccu

SEQ ID NO: 3065178 - RNA, 19 nt, Artificial Sequence
  Description of Artificial Sequence: Synthetic oligonucleotide
uuguuuucauggggaaggg

SEQ ID NO: 3065179 - RNA, 19 nt, Artificial Sequence
  Description of Artificial Sequence: Synthetic oligonucleotide
gaagacagggucaagggcu

SEQ ID NO: 3065180 - RNA, 19 nt, Artificial Sequence
  Description of Artificial Sequence: Synthetic oligonucleotide
agaucuccugcgucucggc

SEQ ID NO: 3065181 - RNA, 19 nt, Artificial Sequence
  Description of Artificial Sequence: Synthetic oligonucleotide
ucggagaucuccugcgucu

SEQ ID NO: 3065182 - RNA, 19 nt, Artificial Sequence
  Description of Artificial Sequence: Synthetic oligonucleotide
uuucgucaccaacaucaac

SEQ ID NO: 3065183 - RNA, 19 nt, Artificial Sequence
  Description of Artificial Sequence: Synthetic oligonucleotide
aagcugggauuucaccgug

SEQ ID NO: 3065184 - RNA, 19 nt, Artificial Sequence
  Description of Artificial Sequence: Synthetic oligonucleotide
agaaggucagaucgucaug

SEQ ID NO: 3065185 - RNA, 19 nt, Artificial Sequence
  Description of Artificial Sequence: Synthetic oligonucleotide
uugaugccagccaccaccu

SEQ ID NO: 3065186 - RNA, 19 nt, Artificial Sequence
  Description of Artificial Sequence: Synthetic oligonucleotide
agggucaagggcuuguuuu

SEQ ID NO: 3065187 - RNA, 19 nt, Artificial Sequence
  Description of Artificial Sequence: Synthetic oligonucleotide
uuuucgucaccaacaucaa

SEQ ID NO: 3065188 - RNA, 19 nt, Artificial Sequence
  Description of Artificial Sequence: Synthetic oligonucleotide
gaaguugaugccagccacc

SEQ ID NO: 3065189 - RNA, 19 nt, Artificial Sequence
  Description of Artificial Sequence: Synthetic oligonucleotide
ggauacggcuuuaaagacg

SEQ ID NO: 3065190 - RNA, 19 nt, Artificial Sequence
  Description of Artificial Sequence: Synthetic oligonucleotide
gcuugaacacccucaagug

SEQ ID NO: 3065191 - RNA, 19 nt, Artificial Sequence
  Description of Artificial Sequence: Synthetic oligonucleotide
gagaucuccugcgucucgg

SEQ ID NO: 3065192 - RNA, 19 nt, Artificial Sequence
  Description of Artificial Sequence: Synthetic oligonucleotide
gaucugguaggaagacagg

SEQ ID NO: 3065193 - RNA, 19 nt, Artificial Sequence
  Description of Artificial Sequence: Synthetic oligonucleotide
auagucugcaaaggggcug

SEQ ID NO: 3065194 - RNA, 19 nt, Artificial Sequence
  Description of Artificial Sequence: Synthetic oligonucleotide
aguugaugccagccaccac

SEQ ID NO: 3065195 - RNA, 19 nt, Artificial Sequence
  Description of Artificial Sequence: Synthetic oligonucleotide
cugggauuucaccgugucg

SEQ ID NO: 3065196 - RNA, 19 nt, Artificial Sequence
  Description of Artificial Sequence: Synthetic oligonucleotide
acggcuuuaaagacgguga

SEQ ID NO: 3065197 - RNA, 19 nt, Artificial Sequence
  Description of Artificial Sequence: Synthetic oligonucleotide
gaucuccugcgucucggcc

SEQ ID NO: 3065198 - RNA, 19 nt, Artificial Sequence
  Description of Artificial Sequence: Synthetic oligonucleotide
cuucaagcugggauuucac

SEQ ID NO: 3065199 - RNA, 19 nt, Artificial Sequence
  Description of Artificial Sequence: Synthetic oligonucleotide
guugccugaaggauacggc

SEQ ID NO: 3065200 - RNA, 19 nt, Artificial Sequence
  Description of Artificial Sequence: Synthetic oligonucleotide
uagucugcaaaggggcugc

SEQ ID NO: 3065201 - RNA, 19 nt, Artificial Sequence
  Description of Artificial Sequence: Synthetic oligonucleotide
ggaagacagggucaagggc

SEQ ID NO: 3065202 - RNA, 19 nt, Artificial Sequence
  Description of Artificial Sequence: Synthetic oligonucleotide
gacggcgcuccacacauca

SEQ ID NO: 3065203 - RNA, 19 nt, Artificial Sequence
  Description of Artificial Sequence: Synthetic oligonucleotide
ugaacacccucaagugcac

SEQ ID NO: 3065204 - RNA, 19 nt, Artificial Sequence
  Description of Artificial Sequence: Synthetic oligonucleotide
cuccacacaucaucuuggc

SEQ ID NO: 3065205 - RNA, 19 nt, Artificial Sequence
  Description of Artificial Sequence: Synthetic oligonucleotide
gaaggucagaucgucaugu

SEQ ID NO: 3065206 - RNA, 19 nt, Artificial Sequence
  Description of Artificial Sequence: Synthetic oligonucleotide
uugaucugguaggaagaca

SEQ ID NO: 3065207 - RNA, 19 nt, Artificial Sequence
  Description of Artificial Sequence: Synthetic oligonucleotide
auuucaccgugucggagau

SEQ ID NO: 3065208 - RNA, 19 nt, Artificial Sequence
  Description of Artificial Sequence: Synthetic oligonucleotide
uaaagacggugaacuucug

SEQ ID NO: 3065209 - RNA, 19 nt, Artificial Sequence
  Description of Artificial Sequence: Synthetic oligonucleotide
guugaucugguaggaagac

SEQ ID NO: 3065210 - RNA, 19 nt, Artificial Sequence
  Description of Artificial Sequence: Synthetic oligonucleotide
gaugccagccaccaccugu

SEQ ID NO: 3065211 - RNA, 19 nt, Artificial Sequence
  Description of Artificial Sequence: Synthetic oligonucleotide
ugucggagaucuccugcgu

SEQ ID NO: 3065212 - RNA, 19 nt, Artificial Sequence
  Description of Artificial Sequence: Synthetic oligonucleotide
gcuuuaaagacggugaacu

SEQ ID NO: 3065213 - RNA, 19 nt, Artificial Sequence
  Description of Artificial Sequence: Synthetic oligonucleotide
acggugaacuucugauucu

SEQ ID NO: 3065214 - RNA, 19 nt, Artificial Sequence
  Description of Artificial Sequence: Synthetic oligonucleotide
gaagaaggucagaucguca

SEQ ID NO: 3065215 - RNA, 19 nt, Artificial Sequence
  Description of Artificial Sequence: Synthetic oligonucleotide
ugccugaaggauacggcuu

SEQ ID NO: 3065216 - RNA, 19 nt, Artificial Sequence
  Description of Artificial Sequence: Synthetic oligonucleotide
ucuccugcgucucggccgu

SEQ ID NO: 3065217 - RNA, 19 nt, Artificial Sequence
  Description of Artificial Sequence: Synthetic oligonucleotide
uucauggggaaggggcuug

SEQ ID NO: 3065218 - RNA, 19 nt, Artificial Sequence
  Description of Artificial Sequence: Synthetic oligonucleotide
ggcuugaacacccucaagu

SEQ ID NO: 3065219 - RNA, 19 nt, Artificial Sequence
  Description of Artificial Sequence: Synthetic oligonucleotide
ccuguugccugaaggauac

SEQ ID NO: 3065220 - RNA, 19 nt, Artificial Sequence
  Description of Artificial Sequence: Synthetic oligonucleotide
ggucagaucgucaugucga

SEQ ID NO: 3065221 - RNA, 19 nt, Artificial Sequence
  Description of Artificial Sequence: Synthetic oligonucleotide
caaaggggcugcagaauca

SEQ ID NO: 3065222 - RNA, 19 nt, Artificial Sequence
  Description of Artificial Sequence: Synthetic oligonucleotide
gcuccacacaucaucuugg

SEQ ID NO: 3065223 - RNA, 19 nt, Artificial Sequence
  Description of Artificial Sequence: Synthetic oligonucleotide
gcaaaggggcugcagaauc

SEQ ID NO: 3065224 - RNA, 19 nt, Artificial Sequence
  Description of Artificial Sequence: Synthetic oligonucleotide
ggaaggggcuugaacaccc

SEQ ID NO: 3065225 - RNA, 19 nt, Artificial Sequence
  Description of Artificial Sequence: Synthetic oligonucleotide
gaaucagaagaaggucaga

SEQ ID NO: 3065226 - RNA, 19 nt, Artificial Sequence
  Description of Artificial Sequence: Synthetic oligonucleotide
gggcugcagaaucagaaga

SEQ ID NO: 3065227 - RNA, 19 nt, Artificial Sequence
  Description of Artificial Sequence: Synthetic oligonucleotide
ggggcugcagaaucagaag

SEQ ID NO: 3065228 - RNA, 19 nt, Artificial Sequence
  Description of Artificial Sequence: Synthetic oligonucleotide
cagaucgucaugucgauuu

SEQ ID NO: 3065229 - RNA, 19 nt, Artificial Sequence
  Description of Artificial Sequence: Synthetic oligonucleotide
uggcggacggcgcuccaca

SEQ ID NO: 3065230 - RNA, 19 nt, Artificial Sequence
  Description of Artificial Sequence: Synthetic oligonucleotide
gcagaaucagaagaagguc

SEQ ID NO: 3065231 - RNA, 19 nt, Artificial Sequence
  Description of Artificial Sequence: Synthetic oligonucleotide
aggggcugcagaaucagaa

SEQ ID NO: 3065232 - RNA, 19 nt, Artificial Sequence
  Description of Artificial Sequence: Synthetic oligonucleotide
ugcaaaggggcugcagaau

SEQ ID NO: 3065233 - RNA, 19 nt, Artificial Sequence
  Description of Artificial Sequence: Synthetic oligonucleotide
aggggcuugaacacccuca

SEQ ID NO: 3065234 - RNA, 19 nt, Artificial Sequence
  Description of Artificial Sequence: Synthetic oligonucleotide
ggagaucuccugcgucucg

SEQ ID NO: 3065235 - RNA, 19 nt, Artificial Sequence
  Description of Artificial Sequence: Synthetic oligonucleotide
gucggagaucuccugcguc

SEQ ID NO: 3065236 - RNA, 19 nt, Artificial Sequence
  Description of Artificial Sequence: Synthetic oligonucleotide
gcuuguuuucauggggaag

SEQ ID NO: 3065237 - RNA, 19 nt, Artificial Sequence
  Description of Artificial Sequence: Synthetic oligonucleotide
ggggaaggggcuugaacac

SEQ ID NO: 3065238 - RNA, 19 nt, Artificial Sequence
  Description of Artificial Sequence: Synthetic oligonucleotide
uccugcgucucggccgugg

SEQ ID NO: 3065239 - RNA, 19 nt, Artificial Sequence
  Description of Artificial Sequence: Synthetic oligonucleotide
uuucauggggaaggggcuu

SEQ ID NO: 3065240 - RNA, 19 nt, Artificial Sequence
  Description of Artificial Sequence: Synthetic oligonucleotide
agaucgucaugucgauuuu

SEQ ID NO: 3065241 - RNA, 19 nt, Artificial Sequence
  Description of Artificial Sequence: Synthetic oligonucleotide
aagacagggucaagggcuu

SEQ ID NO: 3065242 - RNA, 19 nt, Artificial Sequence
  Description of Artificial Sequence: Synthetic oligonucleotide
cugcaaaggggcugcagaa

SEQ ID NO: 3065243 - RNA, 19 nt, Artificial Sequence
  Description of Artificial Sequence: Synthetic oligonucleotide
ucggccguggccggcugcg

SEQ ID NO: 3065244 - RNA, 19 nt, Artificial Sequence
  Description of Artificial Sequence: Synthetic oligonucleotide
caagcugggauuucaccgu

SEQ ID NO: 3065245 - RNA, 19 nt, Artificial Sequence
  Description of Artificial Sequence: Synthetic oligonucleotide
ggauuucaccgugucggag

SEQ ID NO: 3065246 - RNA, 19 nt, Artificial Sequence
  Description of Artificial Sequence: Synthetic oligonucleotide
gggucaagggcuuguuuuc

SEQ ID NO: 3065247 - RNA, 19 nt, Artificial Sequence
  Description of Artificial Sequence: Synthetic oligonucleotide
guaggaagacagggucaag

SEQ ID NO: 3065248 - RNA, 19 nt, Artificial Sequence
  Description of Artificial Sequence: Synthetic oligonucleotide
ggcuuuaaagacggugaac

SEQ ID NO: 3065249 - RNA, 19 nt, Artificial Sequence
  Description of Artificial Sequence: Synthetic oligonucleotide
guggccggcugcguggcgg

SEQ ID NO: 3065250 - RNA, 19 nt, Artificial Sequence
  Description of Artificial Sequence: Synthetic oligonucleotide
aaggggcugcagaaucaga

SEQ ID NO: 3065251 - RNA, 19 nt, Artificial Sequence
  Description of Artificial Sequence: Synthetic oligonucleotide
gguaggaagacagggucaa

SEQ ID NO: 3065252 - RNA, 19 nt, Artificial Sequence
  Description of Artificial Sequence: Synthetic oligonucleotide
ugccagccaccaccuguug

SEQ ID NO: 3065253 - RNA, 19 nt, Artificial Sequence
  Description of Artificial Sequence: Synthetic oligonucleotide
ucauggggaaggggcuuga

SEQ ID NO: 3065254 - RNA, 19 nt, Artificial Sequence
  Description of Artificial Sequence: Synthetic oligonucleotide
gucugcaaaggggcugcag

SEQ ID NO: 3065255 - RNA, 19 nt, Artificial Sequence
  Description of Artificial Sequence: Synthetic oligonucleotide
cuuuaaagacggugaacuu

SEQ ID NO: 3065256 - RNA, 19 nt, Artificial Sequence
  Description of Artificial Sequence: Synthetic oligonucleotide
ggcugcguggcggacggcg

SEQ ID NO: 3065257 - RNA, 19 nt, Artificial Sequence
  Description of Artificial Sequence: Synthetic oligonucleotide
cagaagaaggucagaucgu

SEQ ID NO: 3065258 - RNA, 19 nt, Artificial Sequence
  Description of Artificial Sequence: Synthetic oligonucleotide
gcugggauuucaccguguc

SEQ ID NO: 3065259 - RNA, 19 nt, Artificial Sequence
  Description of Artificial Sequence: Synthetic oligonucleotide
ucagaucgucaugucgauu

SEQ ID NO: 3065260 - RNA, 19 nt, Artificial Sequence
  Description of Artificial Sequence: Synthetic oligonucleotide
accuguugccugaaggaua

SEQ ID NO: 3065261 - RNA, 19 nt, Artificial Sequence
  Description of Artificial Sequence: Synthetic oligonucleotide
cugcgucucggccguggcc

SEQ ID NO: 3065262 - RNA, 19 nt, Artificial Sequence
  Description of Artificial Sequence: Synthetic oligonucleotide
accgugucggagaucuccu

SEQ ID NO: 3065263 - RNA, 19 nt, Artificial Sequence
  Description of Artificial Sequence: Synthetic oligonucleotide
cgugucggagaucuccugc

SEQ ID NO: 3065264 - RNA, 19 nt, Artificial Sequence
  Description of Artificial Sequence: Synthetic oligonucleotide
gaacacccucaagugcaca

SEQ ID NO: 3065265 - RNA, 19 nt, Artificial Sequence
  Description of Artificial Sequence: Synthetic oligonucleotide
gggaaggggcuugaacacc

SEQ ID NO: 3065266 - RNA, 19 nt, Artificial Sequence
  Description of Artificial Sequence: Synthetic oligonucleotide
acacccucaagugcacaaa

SEQ ID NO: 3065267 - RNA, 19 nt, Artificial Sequence
  Description of Artificial Sequence: Synthetic oligonucleotide
gggcuuguuuucaugggga

SEQ ID NO: 3065268 - RNA, 19 nt, Artificial Sequence
  Description of Artificial Sequence: Synthetic oligonucleotide
gccagccaccaccuguugc

SEQ ID NO: 3065269 - RNA, 19 nt, Artificial Sequence
  Description of Artificial Sequence: Synthetic oligonucleotide
caacaucaaccuugauaaa

SEQ ID NO: 3065270 - RNA, 19 nt, Artificial Sequence
  Description of Artificial Sequence: Synthetic oligonucleotide
ccaccuguugccugaagga

SEQ ID NO: 3065271 - RNA, 19 nt, Artificial Sequence
  Description of Artificial Sequence: Synthetic oligonucleotide
ggcuuguuuucauggggaa

SEQ ID NO: 3065272 - RNA, 19 nt, Artificial Sequence
  Description of Artificial Sequence: Synthetic oligonucleotide
gccguggccggcugcgugg

SEQ ID NO: 3065273 - RNA, 19 nt, Artificial Sequence
  Description of Artificial Sequence: Synthetic oligonucleotide
ggcugcagaaucagaagaa

SEQ ID NO: 3065274 - RNA, 19 nt, Artificial Sequence
  Description of Artificial Sequence: Synthetic oligonucleotide
gggcuugaacacccucaag

SEQ ID NO: 3065275 - RNA, 19 nt, Artificial Sequence
  Description of Artificial Sequence: Synthetic oligonucleotide
gggauuucaccgugucgga

SEQ ID NO: 3065276 - RNA, 19 nt, Artificial Sequence
  Description of Artificial Sequence: Synthetic oligonucleotide
ucucggccguggccggcug

SEQ ID NO: 3065277 - RNA, 19 nt, Artificial Sequence
  Description of Artificial Sequence: Synthetic oligonucleotide
ggucaagggcuuguuuuca

SEQ ID NO: 3065278 - RNA, 19 nt, Artificial Sequence
  Description of Artificial Sequence: Synthetic oligonucleotide
agacagggucaagggcuug

SEQ ID NO: 3065279 - RNA, 19 nt, Artificial Sequence
  Description of Artificial Sequence: Synthetic oligonucleotide
ggggcuugaacacccucaa

SEQ ID NO: 3065280 - RNA, 19 nt, Artificial Sequence
  Description of Artificial Sequence: Synthetic oligonucleotide
cuguugccugaaggauacg

SEQ ID NO: 3065281 - RNA, 19 nt, Artificial Sequence
  Description of Artificial Sequence: Synthetic oligonucleotide
cugaaggauacggcuuuaa

SEQ ID NO: 3065282 - RNA, 19 nt, Artificial Sequence
  Description of Artificial Sequence: Synthetic oligonucleotide
gacagggucaagggcuugu

SEQ ID NO: 3065283 - RNA, 19 nt, Artificial Sequence
  Description of Artificial Sequence: Synthetic oligonucleotide
uggccggcugcguggcgga

SEQ ID NO: 3065284 - RNA, 19 nt, Artificial Sequence
  Description of Artificial Sequence: Synthetic oligonucleotide
acccucaagugcacaaauu

SEQ ID NO: 3065285 - RNA, 19 nt, Artificial Sequence
  Description of Artificial Sequence: Synthetic oligonucleotide
gucagaucgucaugucgau

SEQ ID NO: 3065286 - RNA, 19 nt, Artificial Sequence
  Description of Artificial Sequence: Synthetic oligonucleotide
caccaccuguugccugaag

SEQ ID NO: 3065287 - RNA, 19 nt, Artificial Sequence
  Description of Artificial Sequence: Synthetic oligonucleotide
gucaagggcuuguuuucau

SEQ ID NO: 3065288 - RNA, 19 nt, Artificial Sequence
  Description of Artificial Sequence: Synthetic oligonucleotide
agcugggauuucaccgugu

SEQ ID NO: 3065289 - RNA, 19 nt, Artificial Sequence
  Description of Artificial Sequence: Synthetic oligonucleotide
augccagccaccaccuguu

SEQ ID NO: 3065290 - RNA, 19 nt, Artificial Sequence
  Description of Artificial Sequence: Synthetic oligonucleotide
gccaccaccuguugccuga

SEQ ID NO: 3065291 - RNA, 19 nt, Artificial Sequence
  Description of Artificial Sequence: Synthetic oligonucleotide
acagggucaagggcuuguu

SEQ ID NO: 3065292 - RNA, 19 nt, Artificial Sequence
  Description of Artificial Sequence: Synthetic oligonucleotide
ucaccgugucggagaucuc

SEQ ID NO: 3065293 - RNA, 19 nt, Artificial Sequence
  Description of Artificial Sequence: Synthetic oligonucleotide
uuucaccgugucggagauc

SEQ ID NO: 3065294 - RNA, 19 nt, Artificial Sequence
  Description of Artificial Sequence: Synthetic oligonucleotide
cucggccguggccggcugc

SEQ ID NO: 3065295 - RNA, 19 nt, Artificial Sequence
  Description of Artificial Sequence: Synthetic oligonucleotide
ugcguggcggacggcgcuc

SEQ ID NO: 3065296 - RNA, 19 nt, Artificial Sequence
  Description of Artificial Sequence: Synthetic oligonucleotide
agucugcaaaggggcugca

SEQ ID NO: 3065297 - RNA, 19 nt, Artificial Sequence
  Description of Artificial Sequence: Synthetic oligonucleotide
cacccucaagugcacaaau

SEQ ID NO: 3065298 - RNA, 19 nt, Artificial Sequence
  Description of Artificial Sequence: Synthetic oligonucleotide
ggcgcuccacacaucaucu

SEQ ID NO: 3065299 - RNA, 19 nt, Artificial Sequence
  Description of Artificial Sequence: Synthetic oligonucleotide
auacggcuuuaaagacggu

SEQ ID NO: 3065300 - RNA, 19 nt, Artificial Sequence
  Description of Artificial Sequence: Synthetic oligonucleotide
ggugaacuucugauucucu

SEQ ID NO: 3065301 - RNA, 19 nt, Artificial Sequence
  Description of Artificial Sequence: Synthetic oligonucleotide
ccucaagugcacaaauuuu

SEQ ID NO: 3065302 - RNA, 19 nt, Artificial Sequence
  Description of Artificial Sequence: Synthetic oligonucleotide
ccuugauaaagaaguugau

SEQ ID NO: 3065303 - RNA, 19 nt, Artificial Sequence
  Description of Artificial Sequence: Synthetic oligonucleotide
gaaggggcuugaacacccu

SEQ ID NO: 3065304 - RNA, 19 nt, Artificial Sequence
  Description of Artificial Sequence: Synthetic oligonucleotide
ggccguggccggcugcgug

SEQ ID NO: 3065305 - RNA, 19 nt, Artificial Sequence
  Description of Artificial Sequence: Synthetic oligonucleotide
guggcggacggcgcuccac

SEQ ID NO: 3065306 - RNA, 19 nt, Artificial Sequence
  Description of Artificial Sequence: Synthetic oligonucleotide
ccugcgucucggccguggc

SEQ ID NO: 3065307 - RNA, 19 nt, Artificial Sequence
  Description of Artificial Sequence: Synthetic oligonucleotide
caccuguugccugaaggau

SEQ ID NO: 3065308 - RNA, 19 nt, Artificial Sequence
  Description of Artificial Sequence: Synthetic oligonucleotide
cggcgcuccacacaucauc

SEQ ID NO: 3065309 - RNA, 19 nt, Artificial Sequence
  Description of Artificial Sequence: Synthetic oligonucleotide
gccggcugcguggcggacg

SEQ ID NO: 3065310 - RNA, 19 nt, Artificial Sequence
  Description of Artificial Sequence: Synthetic oligonucleotide
ggcggacggcgcuccacac

SEQ ID NO: 3065311 - RNA, 19 nt, Artificial Sequence
  Description of Artificial Sequence: Synthetic oligonucleotide
ccgugucggagaucuccug

SEQ ID NO: 3065312 - RNA, 19 nt, Artificial Sequence
  Description of Artificial Sequence: Synthetic oligonucleotide
gccugaaggauacggcuuu

SEQ ID NO: 3065313 - RNA, 19 nt, Artificial Sequence
  Description of Artificial Sequence: Synthetic oligonucleotide
gcgucucggccguggccgg

SEQ ID NO: 3065314 - RNA, 19 nt, Artificial Sequence
  Description of Artificial Sequence: Synthetic oligonucleotide
gcugcguggcggacggcgc

SEQ ID NO: 3065315 - RNA, 19 nt, Artificial Sequence
  Description of Artificial Sequence: Synthetic oligonucleotide
cggugaacuucugauucuc

SEQ ID NO: 3065316 - RNA, 19 nt, Artificial Sequence
  Description of Artificial Sequence: Synthetic oligonucleotide
gcggacggcgcuccacaca

SEQ ID NO: 3065317 - RNA, 19 nt, Artificial Sequence
  Description of Artificial Sequence: Synthetic oligonucleotide
cauggggaaggggcuugaa

SEQ ID NO: 3065318 - RNA, 19 nt, Artificial Sequence
  Description of Artificial Sequence: Synthetic oligonucleotide
cagggucaagggcuuguuu

SEQ ID NO: 3065319 - RNA, 19 nt, Artificial Sequence
  Description of Artificial Sequence: Synthetic oligonucleotide
acggcgcuccacacaucau

SEQ ID NO: 3065320 - RNA, 19 nt, Artificial Sequence
  Description of Artificial Sequence: Synthetic oligonucleotide
cggcuuuaaagacggugaa

SEQ ID NO: 3065321 - RNA, 19 nt, Artificial Sequence
  Description of Artificial Sequence: Synthetic oligonucleotide
cugcguggcggacggcgcu

SEQ ID NO: 3065322 - RNA, 19 nt, Artificial Sequence
  Description of Artificial Sequence: Synthetic oligonucleotide
gcguggcggacggcgcucc

SEQ ID NO: 3065323 - RNA, 19 nt, Artificial Sequence
  Description of Artificial Sequence: Synthetic oligonucleotide
cggagaucuccugcgucuc

SEQ ID NO: 3065324 - RNA, 19 nt, Artificial Sequence
  Description of Artificial Sequence: Synthetic oligonucleotide
cagccaccaccuguugccu

SEQ ID NO: 3065325 - RNA, 19 nt, Artificial Sequence
  Description of Artificial Sequence: Synthetic oligonucleotide
ccguggccggcugcguggc

SEQ ID NO: 3065326 - RNA, 19 nt, Artificial Sequence
  Description of Artificial Sequence: Synthetic oligonucleotide
ccugaaggauacggcuuua

SEQ ID NO: 3065327 - RNA, 19 nt, Artificial Sequence
  Description of Artificial Sequence: Synthetic oligonucleotide
caccaacaucaaccuugau

SEQ ID NO: 3065328 - RNA, 19 nt, Artificial Sequence
  Description of Artificial Sequence: Synthetic oligonucleotide
cggacggcgcuccacacau

SEQ ID NO: 3065329 - RNA, 19 nt, Artificial Sequence
  Description of Artificial Sequence: Synthetic oligonucleotide
cuccugcgucucggccgug

SEQ ID NO: 3065330 - RNA, 19 nt, Artificial Sequence
  Description of Artificial Sequence: Synthetic oligonucleotide
ggacggcgcuccacacauc

SEQ ID NO: 3065331 - RNA, 19 nt, Artificial Sequence
  Description of Artificial Sequence: Synthetic oligonucleotide
cgucucggccguggccggc

SEQ ID NO: 3065332 - RNA, 19 nt, Artificial Sequence
  Description of Artificial Sequence: Synthetic oligonucleotide
ggccggcugcguggcggac

SEQ ID NO: 3065333 - RNA, 19 nt, Artificial Sequence
  Description of Artificial Sequence: Synthetic oligonucleotide
ccaccaccuguugccugaa

SEQ ID NO: 3065334 - RNA, 19 nt, Artificial Sequence
  Description of Artificial Sequence: Synthetic oligonucleotide
cgucaccaacaucaaccuu

SEQ ID NO: 3065335 - RNA, 19 nt, Artificial Sequence
  Description of Artificial Sequence: Synthetic oligonucleotide
cguggcggacggcgcucca

SEQ ID NO: 3065336 - RNA, 19 nt, Artificial Sequence
  Description of Artificial Sequence: Synthetic oligonucleotide
cggccguggccggcugcgu

SEQ ID NO: 3065337 - RNA, 19 nt, Artificial Sequence
  Description of Artificial Sequence: Synthetic oligonucleotide
gacuccauaaacuaaaacg

SEQ ID NO: 3065338 - RNA, 19 nt, Artificial Sequence
  Description of Artificial Sequence: Synthetic oligonucleotide
aaacacaacagcaaaagcc

SEQ ID NO: 3065339 - RNA, 19 nt, Artificial Sequence
  Description of Artificial Sequence: Synthetic oligonucleotide
aaaucaacucccucuaucc

SEQ ID NO: 3065340 - RNA, 19 nt, Artificial Sequence
  Description of Artificial Sequence: Synthetic oligonucleotide
aauagccacaucuggaugc

SEQ ID NO: 3065341 - RNA, 19 nt, Artificial Sequence
  Description of Artificial Sequence: Synthetic oligonucleotide
aacagcaaaagccugcagc

SEQ ID NO: 3065342 - RNA, 19 nt, Artificial Sequence
  Description of Artificial Sequence: Synthetic oligonucleotide
acuaaaacgaaacggucgc

SEQ ID NO: 3065343 - RNA, 19 nt, Artificial Sequence
  Description of Artificial Sequence: Synthetic oligonucleotide
uuacaaauggccccgagag

SEQ ID NO: 3065344 - RNA, 19 nt, Artificial Sequence
  Description of Artificial Sequence: Synthetic oligonucleotide
gaaacggucgcucagagug

SEQ ID NO: 3065345 - RNA, 19 nt, Artificial Sequence
  Description of Artificial Sequence: Synthetic oligonucleotide
agaauuuccaagcacauca

SEQ ID NO: 3065346 - RNA, 19 nt, Artificial Sequence
  Description of Artificial Sequence: Synthetic oligonucleotide
acauuuucuacucgguucc

SEQ ID NO: 3065347 - RNA, 19 nt, Artificial Sequence
  Description of Artificial Sequence: Synthetic oligonucleotide
agcuuuuccauuuggaggg

SEQ ID NO: 3065348 - RNA, 19 nt, Artificial Sequence
  Description of Artificial Sequence: Synthetic oligonucleotide
guuagauuggucaauagcc

SEQ ID NO: 3065349 - RNA, 19 nt, Artificial Sequence
  Description of Artificial Sequence: Synthetic oligonucleotide
aacuaaaacgaaacggucg

SEQ ID NO: 3065350 - RNA, 19 nt, Artificial Sequence
  Description of Artificial Sequence: Synthetic oligonucleotide
acaaauggccccgagagcc

SEQ ID NO: 3065351 - RNA, 19 nt, Artificial Sequence
  Description of Artificial Sequence: Synthetic oligonucleotide
uguuagauuggucaauagc

SEQ ID NO: 3065352 - RNA, 19 nt, Artificial Sequence
  Description of Artificial Sequence: Synthetic oligonucleotide
gguuccuucacuuacaaag

SEQ ID NO: 3065353 - RNA, 19 nt, Artificial Sequence
  Description of Artificial Sequence: Synthetic oligonucleotide
uguuauuacaaauggcccc

SEQ ID NO: 3065354 - RNA, 19 nt, Artificial Sequence
  Description of Artificial Sequence: Synthetic oligonucleotide
aaaagccugcagcuuuucc

SEQ ID NO: 3065355 - RNA, 19 nt, Artificial Sequence
  Description of Artificial Sequence: Synthetic oligonucleotide
ucaacaagcccacugacuc

SEQ ID NO: 3065356 - RNA, 19 nt, Artificial Sequence
  Description of Artificial Sequence: Synthetic oligonucleotide
aauugcagcuguuauuaca

SEQ ID NO: 3065357 - RNA, 19 nt, Artificial Sequence
  Description of Artificial Sequence: Synthetic oligonucleotide
aaacuaaaacgaaacgguc

SEQ ID NO: 3065358 - RNA, 19 nt, Artificial Sequence
  Description of Artificial Sequence: Synthetic oligonucleotide
uuagauuggucaauagcca

SEQ ID NO: 3065359 - RNA, 19 nt, Artificial Sequence
  Description of Artificial Sequence: Synthetic oligonucleotide
uccuucacuuacaaaggcg

SEQ ID NO: 3065360 - RNA, 19 nt, Artificial Sequence
  Description of Artificial Sequence: Synthetic oligonucleotide
aaagccugcagcuuuucca

SEQ ID NO: 3065361 - RNA, 19 nt, Artificial Sequence
  Description of Artificial Sequence: Synthetic oligonucleotide
acuuacaaaggcgagcugg

SEQ ID NO: 3065362 - RNA, 19 nt, Artificial Sequence
  Description of Artificial Sequence: Synthetic oligonucleotide
gugaacagaauuuccaagc

SEQ ID NO: 3065363 - RNA, 19 nt, Artificial Sequence
  Description of Artificial Sequence: Synthetic oligonucleotide
aacacaacagcaaaagccu

SEQ ID NO: 3065364 - RNA, 19 nt, Artificial Sequence
  Description of Artificial Sequence: Synthetic oligonucleotide
cuguuauuacaaauggccc

SEQ ID NO: 3065365 - RNA, 19 nt, Artificial Sequence
  Description of Artificial Sequence: Synthetic oligonucleotide
aucuggaugcucaacaagc

SEQ ID NO: 3065366 - RNA, 19 nt, Artificial Sequence
  Description of Artificial Sequence: Synthetic oligonucleotide
ugaacagaauuuccaagca

SEQ ID NO: 3065367 - RNA, 19 nt, Artificial Sequence
  Description of Artificial Sequence: Synthetic oligonucleotide
agugaacagaauuuccaag

SEQ ID NO: 3065368 - RNA, 19 nt, Artificial Sequence
  Description of Artificial Sequence: Synthetic oligonucleotide
uccauaaacuaaaacgaaa

SEQ ID NO: 3065369 - RNA, 19 nt, Artificial Sequence
  Description of Artificial Sequence: Synthetic oligonucleotide
guuauuacaaauggccccg

SEQ ID NO: 3065370 - RNA, 19 nt, Artificial Sequence
  Description of Artificial Sequence: Synthetic oligonucleotide
uuauaagcggcugugugag

SEQ ID NO: 3065371 - RNA, 19 nt, Artificial Sequence
  Description of Artificial Sequence: Synthetic oligonucleotide
aaaacgaaacggucgcuca

SEQ ID NO: 3065372 - RNA, 19 nt, Artificial Sequence
  Description of Artificial Sequence: Synthetic oligonucleotide
ucaacucccucuauccagg

SEQ ID NO: 3065373 - RNA, 19 nt, Artificial Sequence
  Description of Artificial Sequence: Synthetic oligonucleotide
ggugcgaaguguuagauug

SEQ ID NO: 3065374 - RNA, 19 nt, Artificial Sequence
  Description of Artificial Sequence: Synthetic oligonucleotide
cuauccagggaauugcagc

SEQ ID NO: 3065375 - RNA, 19 nt, Artificial Sequence
  Description of Artificial Sequence: Synthetic oligonucleotide
cagcuuuuccauuuggagg

SEQ ID NO: 3065376 - RNA, 19 nt, Artificial Sequence
  Description of Artificial Sequence: Synthetic oligonucleotide
uggaugcucaacaagccca

SEQ ID NO: 3065377 - RNA, 19 nt, Artificial Sequence
  Description of Artificial Sequence: Synthetic oligonucleotide
auuauaagcggcuguguga

SEQ ID NO: 3065378 - RNA, 19 nt, Artificial Sequence
  Description of Artificial Sequence: Synthetic oligonucleotide
aagcacaucaccaaacaca

SEQ ID NO: 3065379 - RNA, 19 nt, Artificial Sequence
  Description of Artificial Sequence: Synthetic oligonucleotide
acuccauaaacuaaaacga

SEQ ID NO: 3065380 - RNA, 19 nt, Artificial Sequence
  Description of Artificial Sequence: Synthetic oligonucleotide
gcuguuauuacaaauggcc

SEQ ID NO: 3065381 - RNA, 19 nt, Artificial Sequence
  Description of Artificial Sequence: Synthetic oligonucleotide
acagcaaaagccugcagcu

SEQ ID NO: 3065382 - RNA, 19 nt, Artificial Sequence
  Description of Artificial Sequence: Synthetic oligonucleotide
cagcuguuauuacaaaugg

SEQ ID NO: 3065383 - RNA, 19 nt, Artificial Sequence
  Description of Artificial Sequence: Synthetic oligonucleotide
ucuggaugcucaacaagcc

SEQ ID NO: 3065384 - RNA, 19 nt, Artificial Sequence
  Description of Artificial Sequence: Synthetic oligonucleotide
acucgguuccuucacuuac

SEQ ID NO: 3065385 - RNA, 19 nt, Artificial Sequence
  Description of Artificial Sequence: Synthetic oligonucleotide
gaaaucaacucccucuauc

SEQ ID NO: 3065386 - RNA, 19 nt, Artificial Sequence
  Description of Artificial Sequence: Synthetic oligonucleotide
aaacgaaacggucgcucag

SEQ ID NO: 3065387 - RNA, 19 nt, Artificial Sequence
  Description of Artificial Sequence: Synthetic oligonucleotide
auaagcggcugugugagac

SEQ ID NO: 3065388 - RNA, 19 nt, Artificial Sequence
  Description of Artificial Sequence: Synthetic oligonucleotide
ucuauccagggaauugcag

SEQ ID NO: 3065389 - RNA, 19 nt, Artificial Sequence
  Description of Artificial Sequence: Synthetic oligonucleotide
uuuuccauuuggaggguca

SEQ ID NO: 3065390 - RNA, 19 nt, Artificial Sequence
  Description of Artificial Sequence: Synthetic oligonucleotide
ucaauagccacaucuggau

SEQ ID NO: 3065391 - RNA, 19 nt, Artificial Sequence
  Description of Artificial Sequence: Synthetic oligonucleotide
cacauuuucuacucgguuc

SEQ ID NO: 3065392 - RNA, 19 nt, Artificial Sequence
  Description of Artificial Sequence: Synthetic oligonucleotide
aaucaacucccucuaucca

SEQ ID NO: 3065393 - RNA, 19 nt, Artificial Sequence
  Description of Artificial Sequence: Synthetic oligonucleotide
uggucaauagccacaucug

SEQ ID NO: 3065394 - RNA, 19 nt, Artificial Sequence
  Description of Artificial Sequence: Synthetic oligonucleotide
cuuacaaaggcgagcuggc

SEQ ID NO: 3065395 - RNA, 19 nt, Artificial Sequence
  Description of Artificial Sequence: Synthetic oligonucleotide
uauccagggaauugcagcu

SEQ ID NO: 3065396 - RNA, 19 nt, Artificial Sequence
  Description of Artificial Sequence: Synthetic oligonucleotide
auuacaaauggccccgaga

SEQ ID NO: 3065397 - RNA, 19 nt, Artificial Sequence
  Description of Artificial Sequence: Synthetic oligonucleotide
ucacuuacaaaggcgagcu

SEQ ID NO: 3065398 - RNA, 19 nt, Artificial Sequence
  Description of Artificial Sequence: Synthetic oligonucleotide
agggucacauuuucuacuc

SEQ ID NO: 3065399 - RNA, 19 nt, Artificial Sequence
  Description of Artificial Sequence: Synthetic oligonucleotide
cauuauaagcggcugugug

SEQ ID NO: 3065400 - RNA, 19 nt, Artificial Sequence
  Description of Artificial Sequence: Synthetic oligonucleotide
uacaaaggcgagcuggcac

SEQ ID NO: 3065401 - RNA, 19 nt, Artificial Sequence
  Description of Artificial Sequence: Synthetic oligonucleotide
ccauaaacuaaaacgaaac

SEQ ID NO: 3065402 - RNA, 19 nt, Artificial Sequence
  Description of Artificial Sequence: Synthetic oligonucleotide
gaacagaauuuccaagcac

SEQ ID NO: 3065403 - RNA, 19 nt, Artificial Sequence
  Description of Artificial Sequence: Synthetic oligonucleotide
uagauuggucaauagccac

SEQ ID NO: 3065404 - RNA, 19 nt, Artificial Sequence
  Description of Artificial Sequence: Synthetic oligonucleotide
ugcucaacaagcccacuga

SEQ ID NO: 3065405 - RNA, 19 nt, Artificial Sequence
  Description of Artificial Sequence: Synthetic oligonucleotide
uauuacaaauggccccgag

SEQ ID NO: 3065406 - RNA, 19 nt, Artificial Sequence
  Description of Artificial Sequence: Synthetic oligonucleotide
gaggaggaaaucaacuccc

SEQ ID NO: 3065407 - RNA, 19 nt, Artificial Sequence
  Description of Artificial Sequence: Synthetic oligonucleotide
aaggcgagcuggcacagcu

SEQ ID NO: 3065408 - RNA, 19 nt, Artificial Sequence
  Description of Artificial Sequence: Synthetic oligonucleotide
uucacuuacaaaggcgagc

SEQ ID NO: 3065409 - RNA, 19 nt, Artificial Sequence
  Description of Artificial Sequence: Synthetic oligonucleotide
agcuguuauuacaaauggc

SEQ ID NO: 3065410 - RNA, 19 nt, Artificial Sequence
  Description of Artificial Sequence: Synthetic oligonucleotide
ugacuccauaaacuaaaac

SEQ ID NO: 3065411 - RNA, 19 nt, Artificial Sequence
  Description of Artificial Sequence: Synthetic oligonucleotide
cagagugaacagaauuucc

SEQ ID NO: 3065412 - RNA, 19 nt, Artificial Sequence
  Description of Artificial Sequence: Synthetic oligonucleotide
uuuucuacucgguuccuuc

SEQ ID NO: 3065413 - RNA, 19 nt, Artificial Sequence
  Description of Artificial Sequence: Synthetic oligonucleotide
ggucacauuuucuacucgg

SEQ ID NO: 3065414 - RNA, 19 nt, Artificial Sequence
  Description of Artificial Sequence: Synthetic oligonucleotide
uuuccaagcacaucaccaa

SEQ ID NO: 3065415 - RNA, 19 nt, Artificial Sequence
  Description of Artificial Sequence: Synthetic oligonucleotide
uccaagcacaucaccaaac

SEQ ID NO: 3065416 - RNA, 19 nt, Artificial Sequence
  Description of Artificial Sequence: Synthetic oligonucleotide
gagagcccauuauaagcgg

SEQ ID NO: 3065417 - RNA, 19 nt, Artificial Sequence
  Description of Artificial Sequence: Synthetic oligonucleotide
gaggaaaucaacucccucu

SEQ ID NO: 3065418 - RNA, 19 nt, Artificial Sequence
  Description of Artificial Sequence: Synthetic oligonucleotide
ggaggaggaaaucaacucc

SEQ ID NO: 3065419 - RNA, 19 nt, Artificial Sequence
  Description of Artificial Sequence: Synthetic oligonucleotide
acaaaggcgagcuggcaca

SEQ ID NO: 3065420 - RNA, 19 nt, Artificial Sequence
  Description of Artificial Sequence: Synthetic oligonucleotide
uaaaacgaaacggucgcuc

SEQ ID NO: 3065421 - RNA, 19 nt, Artificial Sequence
  Description of Artificial Sequence: Synthetic oligonucleotide
aacaagcccacugacucca

SEQ ID NO: 3065422 - RNA, 19 nt, Artificial Sequence
  Description of Artificial Sequence: Synthetic oligonucleotide
ugcagcuguuauuacaaau

SEQ ID NO: 3065423 - RNA, 19 nt, Artificial Sequence
  Description of Artificial Sequence: Synthetic oligonucleotide
gaaguguuagauuggucaa

SEQ ID NO: 3065424 - RNA, 19 nt, Artificial Sequence
  Description of Artificial Sequence: Synthetic oligonucleotide
aagcccacugacuccauaa

SEQ ID NO: 3065425 - RNA, 19 nt, Artificial Sequence
  Description of Artificial Sequence: Synthetic oligonucleotide
acucccucuauccagggaa

SEQ ID NO: 3065426 - RNA, 19 nt, Artificial Sequence
  Description of Artificial Sequence: Synthetic oligonucleotide
aagccugcagcuuuuccau

SEQ ID NO: 3065427 - RNA, 19 nt, Artificial Sequence
  Description of Artificial Sequence: Synthetic oligonucleotide
uacaaauggccccgagagc

SEQ ID NO: 3065428 - RNA, 19 nt, Artificial Sequence
  Description of Artificial Sequence: Synthetic oligonucleotide
cuucacuuacaaaggcgag

SEQ ID NO: 3065429 - RNA, 19 nt, Artificial Sequence
  Description of Artificial Sequence: Synthetic oligonucleotide
uuucuacucgguuccuuca

SEQ ID NO: 3065430 - RNA, 19 nt, Artificial Sequence
  Description of Artificial Sequence: Synthetic oligonucleotide
uggagggucacauuuucua

SEQ ID NO: 3065431 - RNA, 19 nt, Artificial Sequence
  Description of Artificial Sequence: Synthetic oligonucleotide
augcucaacaagcccacug

SEQ ID NO: 3065432 - RNA, 19 nt, Artificial Sequence
  Description of Artificial Sequence: Synthetic oligonucleotide
ucacauuuucuacucgguu

SEQ ID NO: 3065433 - RNA, 19 nt, Artificial Sequence
  Description of Artificial Sequence: Synthetic oligonucleotide
cuggaugcucaacaagccc

SEQ ID NO: 3065434 - RNA, 19 nt, Artificial Sequence
  Description of Artificial Sequence: Synthetic oligonucleotide
gagugaacagaauuuccaa

SEQ ID NO: 3065435 - RNA, 19 nt, Artificial Sequence
  Description of Artificial Sequence: Synthetic oligonucleotide
ucgcucagagugaacagaa

SEQ ID NO: 3065436 - RNA, 19 nt, Artificial Sequence
  Description of Artificial Sequence: Synthetic oligonucleotide
agagcccauuauaagcggc

SEQ ID NO: 3065437 - RNA, 19 nt, Artificial Sequence
  Description of Artificial Sequence: Synthetic oligonucleotide
gcagcuuuuccauuuggag

SEQ ID NO: 3065438 - RNA, 19 nt, Artificial Sequence
  Description of Artificial Sequence: Synthetic oligonucleotide
ucuacucgguuccuucacu

SEQ ID NO: 3065439 - RNA, 19 nt, Artificial Sequence
  Description of Artificial Sequence: Synthetic oligonucleotide
uccagggaauugcagcugu

SEQ ID NO: 3065440 - RNA, 19 nt, Artificial Sequence
  Description of Artificial Sequence: Synthetic oligonucleotide
caucuggaugcucaacaag

SEQ ID NO: 3065441 - RNA, 19 nt, Artificial Sequence
  Description of Artificial Sequence: Synthetic oligonucleotide
auugcagcuguuauuacaa

SEQ ID NO: 3065442 - RNA, 19 nt, Artificial Sequence
  Description of Artificial Sequence: Synthetic oligonucleotide
agcaaaagccugcagcuuu

SEQ ID NO: 3065443 - RNA, 19 nt, Artificial Sequence
  Description of Artificial Sequence: Synthetic oligonucleotide
caagcacaucaccaaacac

SEQ ID NO: 3065444 - RNA, 19 nt, Artificial Sequence
  Description of Artificial Sequence: Synthetic oligonucleotide
uccauuuggagggucacau

SEQ ID NO: 3065445 - RNA, 19 nt, Artificial Sequence
  Description of Artificial Sequence: Synthetic oligonucleotide
uucuacucgguuccuucac

SEQ ID NO: 3065446 - RNA, 19 nt, Artificial Sequence
  Description of Artificial Sequence: Synthetic oligonucleotide
acugacuccauaaacuaaa

SEQ ID NO: 3065447 - RNA, 19 nt, Artificial Sequence
  Description of Artificial Sequence: Synthetic oligonucleotide
guguuagauuggucaauag

SEQ ID NO: 3065448 - RNA, 19 nt, Artificial Sequence
  Description of Artificial Sequence: Synthetic oligonucleotide
uuccaagcacaucaccaaa

SEQ ID NO: 3065449 - RNA, 19 nt, Artificial Sequence
  Description of Artificial Sequence: Synthetic oligonucleotide
aggaaaucaacucccucua

SEQ ID NO: 3065450 - RNA, 19 nt, Artificial Sequence
  Description of Artificial Sequence: Synthetic oligonucleotide
agggaauugcagcuguuau

SEQ ID NO: 3065451 - RNA, 19 nt, Artificial Sequence
  Description of Artificial Sequence: Synthetic oligonucleotide
aacgaaacggucgcucaga

SEQ ID NO: 3065452 - RNA, 19 nt, Artificial Sequence
  Description of Artificial Sequence: Synthetic oligonucleotide
agcacaucaccaaacacaa

SEQ ID NO: 3065453 - RNA, 19 nt, Artificial Sequence
  Description of Artificial Sequence: Synthetic oligonucleotide
ccaaacacaacagcaaaag

SEQ ID NO: 3065454 - RNA, 19 nt, Artificial Sequence
  Description of Artificial Sequence: Synthetic oligonucleotide
acgaaacggucgcucagag

SEQ ID NO: 3065455 - RNA, 19 nt, Artificial Sequence
  Description of Artificial Sequence: Synthetic oligonucleotide
caauagccacaucuggaug

SEQ ID NO: 3065456 - RNA, 19 nt, Artificial Sequence
  Description of Artificial Sequence: Synthetic oligonucleotide
gcagcuguuauuacaaaug

SEQ ID NO: 3065457 - RNA, 19 nt, Artificial Sequence
  Description of Artificial Sequence: Synthetic oligonucleotide
uuggagggucacauuuucu

SEQ ID NO: 3065458 - RNA, 19 nt, Artificial Sequence
  Description of Artificial Sequence: Synthetic oligonucleotide
ugcgaaguguuagauuggu

SEQ ID NO: 3065459 - RNA, 19 nt, Artificial Sequence
  Description of Artificial Sequence: Synthetic oligonucleotide
ccgagagcccauuauaagc

SEQ ID NO: 3065460 - RNA, 19 nt, Artificial Sequence
  Description of Artificial Sequence: Synthetic oligonucleotide
acaucuggaugcucaacaa

SEQ ID NO: 3065461 - RNA, 19 nt, Artificial Sequence
  Description of Artificial Sequence: Synthetic oligonucleotide
gaauugcagcuguuauuac

SEQ ID NO: 3065462 - RNA, 19 nt, Artificial Sequence
  Description of Artificial Sequence: Synthetic oligonucleotide
caacaagcccacugacucc

SEQ ID NO: 3065463 - RNA, 19 nt, Artificial Sequence
  Description of Artificial Sequence: Synthetic oligonucleotide
uucggugcgaaguguuaga

SEQ ID NO: 3065464 - RNA, 19 nt, Artificial Sequence
  Description of Artificial Sequence: Synthetic oligonucleotide
cgagagcccauuauaagcg

SEQ ID NO: 3065465 - RNA, 19 nt, Artificial Sequence
  Description of Artificial Sequence: Synthetic oligonucleotide
aaguguuagauuggucaau

SEQ ID NO: 3065466 - RNA, 19 nt, Artificial Sequence
  Description of Artificial Sequence: Synthetic oligonucleotide
aaaggcgagcuggcacagc

SEQ ID NO: 3065467 - RNA, 19 nt, Artificial Sequence
  Description of Artificial Sequence: Synthetic oligonucleotide
cuccauaaacuaaaacgaa

SEQ ID NO: 3065468 - RNA, 19 nt, Artificial Sequence
  Description of Artificial Sequence: Synthetic oligonucleotide
ucgguuccuucacuuacaa

SEQ ID NO: 3065469 - RNA, 19 nt, Artificial Sequence
  Description of Artificial Sequence: Synthetic oligonucleotide
ggcgagcuggcacagcugg

SEQ ID NO: 3065470 - RNA, 19 nt, Artificial Sequence
  Description of Artificial Sequence: Synthetic oligonucleotide
aguguuagauuggucaaua

SEQ ID NO: 3065471 - RNA, 19 nt, Artificial Sequence
  Description of Artificial Sequence: Synthetic oligonucleotide
aacucccucuauccaggga

SEQ ID NO: 3065472 - RNA, 19 nt, Artificial Sequence
  Description of Artificial Sequence: Synthetic oligonucleotide
cuucggugcgaaguguuag

SEQ ID NO: 3065473 - RNA, 19 nt, Artificial Sequence
  Description of Artificial Sequence: Synthetic oligonucleotide
auuggucaauagccacauc

SEQ ID NO: 3065474 - RNA, 19 nt, Artificial Sequence
  Description of Artificial Sequence: Synthetic oligonucleotide
agauuggucaauagccaca

SEQ ID NO: 3065475 - RNA, 19 nt, Artificial Sequence
  Description of Artificial Sequence: Synthetic oligonucleotide
cgaaguguuagauugguca

SEQ ID NO: 3065476 - RNA, 19 nt, Artificial Sequence
  Description of Artificial Sequence: Synthetic oligonucleotide
uuuccauuuggagggucac

SEQ ID NO: 3065477 - RNA, 19 nt, Artificial Sequence
  Description of Artificial Sequence: Synthetic oligonucleotide
ggaauugcagcuguuauua

SEQ ID NO: 3065478 - RNA, 19 nt, Artificial Sequence
  Description of Artificial Sequence: Synthetic oligonucleotide
cugcagcuuuuccauuugg

SEQ ID NO: 3065479 - RNA, 19 nt, Artificial Sequence
  Description of Artificial Sequence: Synthetic oligonucleotide
caaauggccccgagagccc

SEQ ID NO: 3065480 - RNA, 19 nt, Artificial Sequence
  Description of Artificial Sequence: Synthetic oligonucleotide
uuacaaaggcgagcuggca

SEQ ID NO: 3065481 - RNA, 19 nt, Artificial Sequence
  Description of Artificial Sequence: Synthetic oligonucleotide
gagggucacauuuucuacu

SEQ ID NO: 3065482 - RNA, 19 nt, Artificial Sequence
  Description of Artificial Sequence: Synthetic oligonucleotide
gggaggaggaaaucaacuc

SEQ ID NO: 3065483 - RNA, 19 nt, Artificial Sequence
  Description of Artificial Sequence: Synthetic oligonucleotide
uuauuacaaauggccccga

SEQ ID NO: 3065484 - RNA, 19 nt, Artificial Sequence
  Description of Artificial Sequence: Synthetic oligonucleotide
ggagggucacauuuucuac

SEQ ID NO: 3065485 - RNA, 19 nt, Artificial Sequence
  Description of Artificial Sequence: Synthetic oligonucleotide
ccuucacuuacaaaggcga

SEQ ID NO: 3065486 - RNA, 19 nt, Artificial Sequence
  Description of Artificial Sequence: Synthetic oligonucleotide
acagaauuuccaagcacau

SEQ ID NO: 3065487 - RNA, 19 nt, Artificial Sequence
  Description of Artificial Sequence: Synthetic oligonucleotide
aaauggccccgagagccca

SEQ ID NO: 3065488 - RNA, 19 nt, Artificial Sequence
  Description of Artificial Sequence: Synthetic oligonucleotide
caacucccucuauccaggg

SEQ ID NO: 3065489 - RNA, 19 nt, Artificial Sequence
  Description of Artificial Sequence: Synthetic oligonucleotide
uaagcggcugugugagacu

SEQ ID NO: 3065490 - RNA, 19 nt, Artificial Sequence
  Description of Artificial Sequence: Synthetic oligonucleotide
ggcacagcuggggaggugg

SEQ ID NO: 3065491 - RNA, 19 nt, Artificial Sequence
  Description of Artificial Sequence: Synthetic oligonucleotide
cucagagugaacagaauuu

SEQ ID NO: 3065492 - RNA, 19 nt, Artificial Sequence
  Description of Artificial Sequence: Synthetic oligonucleotide
uauaagcggcugugugaga

SEQ ID NO: 3065493 - RNA, 19 nt, Artificial Sequence
  Description of Artificial Sequence: Synthetic oligonucleotide
acacaacagcaaaagccug

SEQ ID NO: 3065494 - RNA, 19 nt, Artificial Sequence
  Description of Artificial Sequence: Synthetic oligonucleotide
cucuauccagggaauugca

SEQ ID NO: 3065495 - RNA, 19 nt, Artificial Sequence
  Description of Artificial Sequence: Synthetic oligonucleotide
cauuuggagggucacauuu

SEQ ID NO: 3065496 - RNA, 19 nt, Artificial Sequence
  Description of Artificial Sequence: Synthetic oligonucleotide
cagaauuuccaagcacauc

SEQ ID NO: 3065497 - RNA, 19 nt, Artificial Sequence
  Description of Artificial Sequence: Synthetic oligonucleotide
agccacaucuggaugcuca

SEQ ID NO: 3065498 - RNA, 19 nt, Artificial Sequence
  Description of Artificial Sequence: Synthetic oligonucleotide
gugcgaaguguuagauugg

SEQ ID NO: 3065499 - RNA, 19 nt, Artificial Sequence
  Description of Artificial Sequence: Synthetic oligonucleotide
uuccauuuggagggucaca

SEQ ID NO: 3065500 - RNA, 19 nt, Artificial Sequence
  Description of Artificial Sequence: Synthetic oligonucleotide
auagccacaucuggaugcu

SEQ ID NO: 3065501 - RNA, 19 nt, Artificial Sequence
  Description of Artificial Sequence: Synthetic oligonucleotide
gggucacauuuucuacucg

SEQ ID NO: 3065502 - RNA, 19 nt, Artificial Sequence
  Description of Artificial Sequence: Synthetic oligonucleotide
aacggucgcucagagugaa

SEQ ID NO: 3065503 - RNA, 19 nt, Artificial Sequence
  Description of Artificial Sequence: Synthetic oligonucleotide
uacucgguuccuucacuua

SEQ ID NO: 3065504 - RNA, 19 nt, Artificial Sequence
  Description of Artificial Sequence: Synthetic oligonucleotide
uugcagcuguuauuacaaa

SEQ ID NO: 3065505 - RNA, 19 nt, Artificial Sequence
  Description of Artificial Sequence: Synthetic oligonucleotide
aaacggucgcucagaguga

SEQ ID NO: 3065506 - RNA, 19 nt, Artificial Sequence
  Description of Artificial Sequence: Synthetic oligonucleotide
ggucgcucagagugaacag

SEQ ID NO: 3065507 - RNA, 19 nt, Artificial Sequence
  Description of Artificial Sequence: Synthetic oligonucleotide
gauuggucaauagccacau

SEQ ID NO: 3065508 - RNA, 19 nt, Artificial Sequence
  Description of Artificial Sequence: Synthetic oligonucleotide
agcccauuauaagcggcug

SEQ ID NO: 3065509 - RNA, 19 nt, Artificial Sequence
  Description of Artificial Sequence: Synthetic oligonucleotide
ucggugcgaaguguuagau

SEQ ID NO: 3065510 - RNA, 19 nt, Artificial Sequence
  Description of Artificial Sequence: Synthetic oligonucleotide
ucacuucggugcgaagugu

SEQ ID NO: 3065511 - RNA, 19 nt, Artificial Sequence
  Description of Artificial Sequence: Synthetic oligonucleotide
cacugacuccauaaacuaa

SEQ ID NO: 3065512 - RNA, 19 nt, Artificial Sequence
  Description of Artificial Sequence: Synthetic oligonucleotide
ccucuauccagggaauugc

SEQ ID NO: 3065513 - RNA, 19 nt, Artificial Sequence
  Description of Artificial Sequence: Synthetic oligonucleotide
cugacuccauaaacuaaaa

SEQ ID NO: 3065514 - RNA, 19 nt, Artificial Sequence
  Description of Artificial Sequence: Synthetic oligonucleotide
cucgguuccuucacuuaca

SEQ ID NO: 3065515 - RNA, 19 nt, Artificial Sequence
  Description of Artificial Sequence: Synthetic oligonucleotide
cuuuuccauuuggaggguc

SEQ ID NO: 3065516 - RNA, 19 nt, Artificial Sequence
  Description of Artificial Sequence: Synthetic oligonucleotide
gucgcucagagugaacaga

SEQ ID NO: 3065517 - RNA, 19 nt, Artificial Sequence
  Description of Artificial Sequence: Synthetic oligonucleotide
cucaacaagcccacugacu

SEQ ID NO: 3065518 - RNA, 19 nt, Artificial Sequence
  Description of Artificial Sequence: Synthetic oligonucleotide
caaaggcgagcuggcacag

SEQ ID NO: 3065519 - RNA, 19 nt, Artificial Sequence
  Description of Artificial Sequence: Synthetic oligonucleotide
auuuggagggucacauuuu

SEQ ID NO: 3065520 - RNA, 19 nt, Artificial Sequence
  Description of Artificial Sequence: Synthetic oligonucleotide
auuuucuacucgguuccuu

SEQ ID NO: 3065521 - RNA, 19 nt, Artificial Sequence
  Description of Artificial Sequence: Synthetic oligonucleotide
gguggggaggaggaaauca

SEQ ID NO: 3065522 - RNA, 19 nt, Artificial Sequence
  Description of Artificial Sequence: Synthetic oligonucleotide
agcccacugacuccauaaa

SEQ ID NO: 3065523 - RNA, 19 nt, Artificial Sequence
  Description of Artificial Sequence: Synthetic oligonucleotide
auccagggaauugcagcug

SEQ ID NO: 3065524 - RNA, 19 nt, Artificial Sequence
  Description of Artificial Sequence: Synthetic oligonucleotide
cccauuauaagcggcugug

SEQ ID NO: 3065525 - RNA, 19 nt, Artificial Sequence
  Description of Artificial Sequence: Synthetic oligonucleotide
cacuuacaaaggcgagcug

SEQ ID NO: 3065526 - RNA, 19 nt, Artificial Sequence
  Description of Artificial Sequence: Synthetic oligonucleotide
cccgagagcccauuauaag

SEQ ID NO: 3065527 - RNA, 19 nt, Artificial Sequence
  Description of Artificial Sequence: Synthetic oligonucleotide
gagcuggcacagcugggga

SEQ ID NO: 3065528 - RNA, 19 nt, Artificial Sequence
  Description of Artificial Sequence: Synthetic oligonucleotide
cagcuggggagguggggag

SEQ ID NO: 3065529 - RNA, 19 nt, Artificial Sequence
  Description of Artificial Sequence: Synthetic oligonucleotide
agguggggaggaggaaauc

SEQ ID NO: 3065530 - RNA, 19 nt, Artificial Sequence
  Description of Artificial Sequence: Synthetic oligonucleotide
ccaagcacaucaccaaaca

SEQ ID NO: 3065531 - RNA, 19 nt, Artificial Sequence
  Description of Artificial Sequence: Synthetic oligonucleotide
cacagcuggggaggugggg

SEQ ID NO: 3065532 - RNA, 19 nt, Artificial Sequence
  Description of Artificial Sequence: Synthetic oligonucleotide
caaaagccugcagcuuuuc

SEQ ID NO: 3065533 - RNA, 19 nt, Artificial Sequence
  Description of Artificial Sequence: Synthetic oligonucleotide
gagcccauuauaagcggcu

SEQ ID NO: 3065534 - RNA, 19 nt, Artificial Sequence
  Description of Artificial Sequence: Synthetic oligonucleotide
gcucagagugaacagaauu

SEQ ID NO: 3065535 - RNA, 19 nt, Artificial Sequence
  Description of Artificial Sequence: Synthetic oligonucleotide
ggaugcucaacaagcccac

SEQ ID NO: 3065536 - RNA, 19 nt, Artificial Sequence
  Description of Artificial Sequence: Synthetic oligonucleotide
guggggaggaggaaaucaa

SEQ ID NO: 3065537 - RNA, 19 nt, Artificial Sequence
  Description of Artificial Sequence: Synthetic oligonucleotide
gucacauuuucuacucggu

SEQ ID NO: 3065538 - RNA, 19 nt, Artificial Sequence
  Description of Artificial Sequence: Synthetic oligonucleotide
cccacugacuccauaaacu

SEQ ID NO: 3065539 - RNA, 19 nt, Artificial Sequence
  Description of Artificial Sequence: Synthetic oligonucleotide
ccacugacuccauaaacua

SEQ ID NO: 3065540 - RNA, 19 nt, Artificial Sequence
  Description of Artificial Sequence: Synthetic oligonucleotide
cccucuauccagggaauug

SEQ ID NO: 3065541 - RNA, 19 nt, Artificial Sequence
  Description of Artificial Sequence: Synthetic oligonucleotide
ucccucuauccagggaauu

SEQ ID NO: 3065542 - RNA, 19 nt, Artificial Sequence
  Description of Artificial Sequence: Synthetic oligonucleotide
cagggaauugcagcuguua

SEQ ID NO: 3065543 - RNA, 19 nt, Artificial Sequence
  Description of Artificial Sequence: Synthetic oligonucleotide
acuucggugcgaaguguua

SEQ ID NO: 3065544 - RNA, 19 nt, Artificial Sequence
  Description of Artificial Sequence: Synthetic oligonucleotide
ggagguggggaggaggaaa

SEQ ID NO: 3065545 - RNA, 19 nt, Artificial Sequence
  Description of Artificial Sequence: Synthetic oligonucleotide
gcggcugugugagacugug

SEQ ID NO: 3065546 - RNA, 19 nt, Artificial Sequence
  Description of Artificial Sequence: Synthetic oligonucleotide
cuaaaacgaaacggucgcu

SEQ ID NO: 3065547 - RNA, 19 nt, Artificial Sequence
  Description of Artificial Sequence: Synthetic oligonucleotide
ggggaggaggaaaucaacu

SEQ ID NO: 3065548 - RNA, 19 nt, Artificial Sequence
  Description of Artificial Sequence: Synthetic oligonucleotide
cuacucgguuccuucacuu

SEQ ID NO: 3065549 - RNA, 19 nt, Artificial Sequence
  Description of Artificial Sequence: Synthetic oligonucleotide
acggucgcucagagugaac

SEQ ID NO: 3065550 - RNA, 19 nt, Artificial Sequence
  Description of Artificial Sequence: Synthetic oligonucleotide
agccugcagcuuuuccauu

SEQ ID NO: 3065551 - RNA, 19 nt, Artificial Sequence
  Description of Artificial Sequence: Synthetic oligonucleotide
gagguggggaggaggaaau

SEQ ID NO: 3065552 - RNA, 19 nt, Artificial Sequence
  Description of Artificial Sequence: Synthetic oligonucleotide
gggaauugcagcuguuauu

SEQ ID NO: 3065553 - RNA, 19 nt, Artificial Sequence
  Description of Artificial Sequence: Synthetic oligonucleotide
aauggccccgagagcccau

SEQ ID NO: 3065554 - RNA, 19 nt, Artificial Sequence
  Description of Artificial Sequence: Synthetic oligonucleotide
uggccccgagagcccauua

SEQ ID NO: 3065555 - RNA, 19 nt, Artificial Sequence
  Description of Artificial Sequence: Synthetic oligonucleotide
gaugcucaacaagcccacu

SEQ ID NO: 3065556 - RNA, 19 nt, Artificial Sequence
  Description of Artificial Sequence: Synthetic oligonucleotide
uagccacaucuggaugcuc

SEQ ID NO: 3065557 - RNA, 19 nt, Artificial Sequence
  Description of Artificial Sequence: Synthetic oligonucleotide
ggaaaucaacucccucuau

SEQ ID NO: 3065558 - RNA, 19 nt, Artificial Sequence
  Description of Artificial Sequence: Synthetic oligonucleotide
aggcgagcuggcacagcug

SEQ ID NO: 3065559 - RNA, 19 nt, Artificial Sequence
  Description of Artificial Sequence: Synthetic oligonucleotide
ccccgagagcccauuauaa

SEQ ID NO: 3065560 - RNA, 19 nt, Artificial Sequence
  Description of Artificial Sequence: Synthetic oligonucleotide
cacuucggugcgaaguguu

SEQ ID NO: 3065561 - RNA, 19 nt, Artificial Sequence
  Description of Artificial Sequence: Synthetic oligonucleotide
gcgaaguguuagauugguc

SEQ ID NO: 3065562 - RNA, 19 nt, Artificial Sequence
  Description of Artificial Sequence: Synthetic oligonucleotide
gcccauuauaagcggcugu

SEQ ID NO: 3065563 - RNA, 19 nt, Artificial Sequence
  Description of Artificial Sequence: Synthetic oligonucleotide
gccccgagagcccauuaua

SEQ ID NO: 3065564 - RNA, 19 nt, Artificial Sequence
  Description of Artificial Sequence: Synthetic oligonucleotide
gcgagcuggcacagcuggg

SEQ ID NO: 3065565 - RNA, 19 nt, Artificial Sequence
  Description of Artificial Sequence: Synthetic oligonucleotide
cauuuucuacucgguuccu

SEQ ID NO: 3065566 - RNA, 19 nt, Artificial Sequence
  Description of Artificial Sequence: Synthetic oligonucleotide
cucccucuauccagggaau

SEQ ID NO: 3065567 - RNA, 19 nt, Artificial Sequence
  Description of Artificial Sequence: Synthetic oligonucleotide
agcggcugugugagacugu

SEQ ID NO: 3065568 - RNA, 19 nt, Artificial Sequence
  Description of Artificial Sequence: Synthetic oligonucleotide
gcuggggagguggggagga

SEQ ID NO: 3065569 - RNA, 19 nt, Artificial Sequence
  Description of Artificial Sequence: Synthetic oligonucleotide
cggucgcucagagugaaca

SEQ ID NO: 3065570 - RNA, 19 nt, Artificial Sequence
  Description of Artificial Sequence: Synthetic oligonucleotide
auggccccgagagcccauu

SEQ ID NO: 3065571 - RNA, 19 nt, Artificial Sequence
  Description of Artificial Sequence: Synthetic oligonucleotide
ccauuauaagcggcugugu

SEQ ID NO: 3065572 - RNA, 19 nt, Artificial Sequence
  Description of Artificial Sequence: Synthetic oligonucleotide
gcaaaagccugcagcuuuu

SEQ ID NO: 3065573 - RNA, 19 nt, Artificial Sequence
  Description of Artificial Sequence: Synthetic oligonucleotide
cagcaaaagccugcagcuu

SEQ ID NO: 3065574 - RNA, 19 nt, Artificial Sequence
  Description of Artificial Sequence: Synthetic oligonucleotide
ggccccgagagcccauuau

SEQ ID NO: 3065575 - RNA, 19 nt, Artificial Sequence
  Description of Artificial Sequence: Synthetic oligonucleotide
gcuuuuccauuuggagggu

SEQ ID NO: 3065576 - RNA, 19 nt, Artificial Sequence
  Description of Artificial Sequence: Synthetic oligonucleotide
cgguuccuucacuuacaaa

SEQ ID NO: 3065577 - RNA, 19 nt, Artificial Sequence
  Description of Artificial Sequence: Synthetic oligonucleotide
ccauuuggagggucacauu

SEQ ID NO: 3065578 - RNA, 19 nt, Artificial Sequence
  Description of Artificial Sequence: Synthetic oligonucleotide
cgaaacggucgcucagagu

SEQ ID NO: 3065579 - RNA, 19 nt, Artificial Sequence
  Description of Artificial Sequence: Synthetic oligonucleotide
ccagggaauugcagcuguu

SEQ ID NO: 3065580 - RNA, 19 nt, Artificial Sequence
  Description of Artificial Sequence: Synthetic oligonucleotide
cgcucagagugaacagaau

SEQ ID NO: 3065581 - RNA, 19 nt, Artificial Sequence
  Description of Artificial Sequence: Synthetic oligonucleotide
cggugcgaaguguuagauu

SEQ ID NO: 3065582 - RNA, 19 nt, Artificial Sequence
  Description of Artificial Sequence: Synthetic oligonucleotide
cggcugugugagacugugu

SEQ ID NO: 3065583 - RNA, 19 nt, Artificial Sequence
  Description of Artificial Sequence: Synthetic oligonucleotide
uaaggguuacgucaggugg

SEQ ID NO: 3065584 - RNA, 19 nt, Artificial Sequence
  Description of Artificial Sequence: Synthetic oligonucleotide
gaaguacucauucaggacc

SEQ ID NO: 3065585 - RNA, 19 nt, Artificial Sequence
  Description of Artificial Sequence: Synthetic oligonucleotide
aguagaaguacucauucag

SEQ ID NO: 3065586 - RNA, 19 nt, Artificial Sequence
  Description of Artificial Sequence: Synthetic oligonucleotide
ucauucaggaccucggugg

SEQ ID NO: 3065587 - RNA, 19 nt, Artificial Sequence
  Description of Artificial Sequence: Synthetic oligonucleotide
aacucauuugcaugccugc

SEQ ID NO: 3065588 - RNA, 19 nt, Artificial Sequence
  Description of Artificial Sequence: Synthetic oligonucleotide
gaugugucggaucugggcg

SEQ ID NO: 3065589 - RNA, 19 nt, Artificial Sequence
  Description of Artificial Sequence: Synthetic oligonucleotide
aauuugcgauguaugaugc

SEQ ID NO: 3065590 - RNA, 19 nt, Artificial Sequence
  Description of Artificial Sequence: Synthetic oligonucleotide
ucauuugcaugccugcucg

SEQ ID NO: 3065591 - RNA, 19 nt, Artificial Sequence
  Description of Artificial Sequence: Synthetic oligonucleotide
gaauuugcgauguaugaug

SEQ ID NO: 3065592 - RNA, 19 nt, Artificial Sequence
  Description of Artificial Sequence: Synthetic oligonucleotide
uaugaugcugaccaugcgc

SEQ ID NO: 3065593 - RNA, 19 nt, Artificial Sequence
  Description of Artificial Sequence: Synthetic oligonucleotide
gaacgcaggaucaugacgg

SEQ ID NO: 3065594 - RNA, 19 nt, Artificial Sequence
  Description of Artificial Sequence: Synthetic oligonucleotide
uguaugaugcugaccaugc

SEQ ID NO: 3065595 - RNA, 19 nt, Artificial Sequence
  Description of Artificial Sequence: Synthetic oligonucleotide
agaaguacucauucaggac

SEQ ID NO: 3065596 - RNA, 19 nt, Artificial Sequence
  Description of Artificial Sequence: Synthetic oligonucleotide
agaugugucggaucugggc

SEQ ID NO: 3065597 - RNA, 19 nt, Artificial Sequence
  Description of Artificial Sequence: Synthetic oligonucleotide
uagaaguacucauucagga

SEQ ID NO: 3065598 - RNA, 19 nt, Artificial Sequence
  Description of Artificial Sequence: Synthetic oligonucleotide
agguucaugacgugggucg

SEQ ID NO: 3065599 - RNA, 19 nt, Artificial Sequence
  Description of Artificial Sequence: Synthetic oligonucleotide
augacggccucgcaggugc

SEQ ID NO: 3065600 - RNA, 19 nt, Artificial Sequence
  Description of Artificial Sequence: Synthetic oligonucleotide
agaacgcaggaucaugacg

SEQ ID NO: 3065601 - RNA, 19 nt, Artificial Sequence
  Description of Artificial Sequence: Synthetic oligonucleotide
uacucauucaggaccucgg

SEQ ID NO: 3065602 - RNA, 19 nt, Artificial Sequence
  Description of Artificial Sequence: Synthetic oligonucleotide
uuugcgauguaugaugcug

SEQ ID NO: 3065603 - RNA, 19 nt, Artificial Sequence
  Description of Artificial Sequence: Synthetic oligonucleotide
gaagcgagaacgcaggauc

SEQ ID NO: 3065604 - RNA, 19 nt, Artificial Sequence
  Description of Artificial Sequence: Synthetic oligonucleotide
gaucaugacggccucgcag

SEQ ID NO: 3065605 - RNA, 19 nt, Artificial Sequence
  Description of Artificial Sequence: Synthetic oligonucleotide
aucugggcgagcuugcuuc

SEQ ID NO: 3065606 - RNA, 19 nt, Artificial Sequence
  Description of Artificial Sequence: Synthetic oligonucleotide
aacgcaggaucaugacggc

SEQ ID NO: 3065607 - RNA, 19 nt, Artificial Sequence
  Description of Artificial Sequence: Synthetic oligonucleotide
guagaaguacucauucagg

SEQ ID NO: 3065608 - RNA, 19 nt, Artificial Sequence
  Description of Artificial Sequence: Synthetic oligonucleotide
  modified_base (10)..(10): a, c, u, g, unknown or other
ucgguggccnguuugcuga

SEQ ID NO: 3065609 - RNA, 19 nt, Artificial Sequence
  Description of Artificial Sequence: Synthetic oligonucleotide
guagaugugucggaucugg

SEQ ID NO: 3065610 - RNA, 19 nt, Artificial Sequence
  Description of Artificial Sequence: Synthetic oligonucleotide
ucgugaacucauuugcaug

SEQ ID NO: 3065611 - RNA, 19 nt, Artificial Sequence
  Description of Artificial Sequence: Synthetic oligonucleotide
ucccucagcagguucauga

SEQ ID NO: 3065612 - RNA, 19 nt, Artificial Sequence
  Description of Artificial Sequence: Synthetic oligonucleotide
gauggcacugaauuugcga

SEQ ID NO: 3065613 - RNA, 19 nt, Artificial Sequence
  Description of Artificial Sequence: Synthetic oligonucleotide
aaggguuacgucagguggg

SEQ ID NO: 3065614 - RNA, 19 nt, Artificial Sequence
  Description of Artificial Sequence: Synthetic oligonucleotide
gguccaggaagcgagaacg

SEQ ID NO: 3065615 - RNA, 19 nt, Artificial Sequence
  Description of Artificial Sequence: Synthetic oligonucleotide
ucguacuucuccagcuccg

SEQ ID NO: 3065616 - RNA, 19 nt, Artificial Sequence
  Description of Artificial Sequence: Synthetic oligonucleotide
caggaagcgagaacgcagg

SEQ ID NO: 3065617 - RNA, 19 nt, Artificial Sequence
  Description of Artificial Sequence: Synthetic oligonucleotide
uugcgauguaugaugcuga

SEQ ID NO: 3065618 - RNA, 19 nt, Artificial Sequence
  Description of Artificial Sequence: Synthetic oligonucleotide
ugggucgugaacucauuug

SEQ ID NO: 3065619 - RNA, 19 nt, Artificial Sequence
  Description of Artificial Sequence: Synthetic oligonucleotide
uggauggcacugaauuugc

SEQ ID NO: 3065620 - RNA, 19 nt, Artificial Sequence
  Description of Artificial Sequence: Synthetic oligonucleotide
auggcacugaauuugcgau

SEQ ID NO: 3065621 - RNA, 19 nt, Artificial Sequence
  Description of Artificial Sequence: Synthetic oligonucleotide
cugaauuugcgauguauga

SEQ ID NO: 3065622 - RNA, 19 nt, Artificial Sequence
  Description of Artificial Sequence: Synthetic oligonucleotide
aggaucaugacggccucgc

SEQ ID NO: 3065623 - RNA, 19 nt, Artificial Sequence
  Description of Artificial Sequence: Synthetic oligonucleotide
ugaauuugcgauguaugau

SEQ ID NO: 3065624 - RNA, 19 nt, Artificial Sequence
  Description of Artificial Sequence: Synthetic oligonucleotide
agcuccgagugguagaugu

SEQ ID NO: 3065625 - RNA, 19 nt, Artificial Sequence
  Description of Artificial Sequence: Synthetic oligonucleotide
gaacucauuugcaugccug

SEQ ID NO: 3065626 - RNA, 19 nt, Artificial Sequence
  Description of Artificial Sequence: Synthetic oligonucleotide
ugaacucauuugcaugccu

SEQ ID NO: 3065627 - RNA, 19 nt, Artificial Sequence
  Description of Artificial Sequence: Synthetic oligonucleotide
ucaggugggaguagaagua

SEQ ID NO: 3065628 - RNA, 19 nt, Artificial Sequence
  Description of Artificial Sequence: Synthetic oligonucleotide
gaccaugcgcuccaucucc

SEQ ID NO: 3065629 - RNA, 19 nt, Artificial Sequence
  Description of Artificial Sequence: Synthetic oligonucleotide
uggcgguccaggaagcgag

SEQ ID NO: 3065630 - RNA, 19 nt, Artificial Sequence
  Description of Artificial Sequence: Synthetic oligonucleotide
cuggauggcacugaauuug

SEQ ID NO: 3065631 - RNA, 19 nt, Artificial Sequence
  Description of Artificial Sequence: Synthetic oligonucleotide
aaguacucauucaggaccu

SEQ ID NO: 3065632 - RNA, 19 nt, Artificial Sequence
  Description of Artificial Sequence: Synthetic oligonucleotide
ggaguagaaguacucauuc

SEQ ID NO: 3065633 - RNA, 19 nt, Artificial Sequence
  Description of Artificial Sequence: Synthetic oligonucleotide
gaugcugaccaugcgcucc

SEQ ID NO: 3065634 - RNA, 19 nt, Artificial Sequence
  Description of Artificial Sequence: Synthetic oligonucleotide
ugggaguagaaguacucau

SEQ ID NO: 3065635 - RNA, 19 nt, Artificial Sequence
  Description of Artificial Sequence: Synthetic oligonucleotide
cuugcuucgguaguccgag

SEQ ID NO: 3065636 - RNA, 19 nt, Artificial Sequence
  Description of Artificial Sequence: Synthetic oligonucleotide
gaguagaaguacucauuca

SEQ ID NO: 3065637 - RNA, 19 nt, Artificial Sequence
  Description of Artificial Sequence: Synthetic oligonucleotide
guaugaugcugaccaugcg

SEQ ID NO: 3065638 - RNA, 19 nt, Artificial Sequence
  Description of Artificial Sequence: Synthetic oligonucleotide
ugcucguacuucuccagcu

SEQ ID NO: 3065639 - RNA, 19 nt, Artificial Sequence
  Description of Artificial Sequence: Synthetic oligonucleotide
auguaugaugcugaccaug

SEQ ID NO: 3065640 - RNA, 19 nt, Artificial Sequence
  Description of Artificial Sequence: Synthetic oligonucleotide
guacucauucaggaccucg

SEQ ID NO: 3065641 - RNA, 19 nt, Artificial Sequence
  Description of Artificial Sequence: Synthetic oligonucleotide
aaguugcggcguuuccguc

SEQ ID NO: 3065642 - RNA, 19 nt, Artificial Sequence
  Description of Artificial Sequence: Synthetic oligonucleotide
  modified_base (19)..(19): a, c, u, g, unknown or other
uucaggaccucgguggccn

SEQ ID NO: 3065643 - RNA, 19 nt, Artificial Sequence
  Description of Artificial Sequence: Synthetic oligonucleotide
cucauucaggaccucggug

SEQ ID NO: 3065644 - RNA, 19 nt, Artificial Sequence
  Description of Artificial Sequence: Synthetic oligonucleotide
gggucgugaacucauuugc

SEQ ID NO: 3065645 - RNA, 19 nt, Artificial Sequence
  Description of Artificial Sequence: Synthetic oligonucleotide
agcuugcuucgguaguccg

SEQ ID NO: 3065646 - RNA, 19 nt, Artificial Sequence
  Description of Artificial Sequence: Synthetic oligonucleotide
ugcucccucagcagguuca

SEQ ID NO: 3065647 - RNA, 19 nt, Artificial Sequence
  Description of Artificial Sequence: Synthetic oligonucleotide
  modified_base (2)..(2): a, c, u, g, unknown or other
cnguuugcugaaguugcgg

SEQ ID NO: 3065648 - RNA, 19 nt, Artificial Sequence
  Description of Artificial Sequence: Synthetic oligonucleotide
uggcacugaauuugcgaug

SEQ ID NO: 3065649 - RNA, 19 nt, Artificial Sequence
  Description of Artificial Sequence: Synthetic oligonucleotide
gagaacgcaggaucaugac

SEQ ID NO: 3065650 - RNA, 19 nt, Artificial Sequence
  Description of Artificial Sequence: Synthetic oligonucleotide
  modified_base (14)..(14): a, c, u, g, unknown or other
gaccucgguggccnguuug

SEQ ID NO: 3065651 - RNA, 19 nt, Artificial Sequence
  Description of Artificial Sequence: Synthetic oligonucleotide
ucugggcgagcuugcuucg

SEQ ID NO: 3065652 - RNA, 19 nt, Artificial Sequence
  Description of Artificial Sequence: Synthetic oligonucleotide
ucuggauggcacugaauuu

SEQ ID NO: 3065653 - RNA, 19 nt, Artificial Sequence
  Description of Artificial Sequence: Synthetic oligonucleotide
cucauuugcaugccugcuc

SEQ ID NO: 3065654 - RNA, 19 nt, Artificial Sequence
  Description of Artificial Sequence: Synthetic oligonucleotide
aguugcggcguuuccgucu

SEQ ID NO: 3065655 - RNA, 19 nt, Artificial Sequence
  Description of Artificial Sequence: Synthetic oligonucleotide
cauucaggaccucgguggc

SEQ ID NO: 3065656 - RNA, 19 nt, Artificial Sequence
  Description of Artificial Sequence: Synthetic oligonucleotide
uucaugacgugggucguga

SEQ ID NO: 3065657 - RNA, 19 nt, Artificial Sequence
  Description of Artificial Sequence: Synthetic oligonucleotide
cgugaacucauuugcaugc

SEQ ID NO: 3065658 - RNA, 19 nt, Artificial Sequence
  Description of Artificial Sequence: Synthetic oligonucleotide
ugcgcuccaucuccuuggg

SEQ ID NO: 3065659 - RNA, 19 nt, Artificial Sequence
  Description of Artificial Sequence: Synthetic oligonucleotide
acucauucaggaccucggu

SEQ ID NO: 3065660 - RNA, 19 nt, Artificial Sequence
  Description of Artificial Sequence: Synthetic oligonucleotide
auuugcgauguaugaugcu

SEQ ID NO: 3065661 - RNA, 19 nt, Artificial Sequence
  Description of Artificial Sequence: Synthetic oligonucleotide
caugacgugggucgugaac

SEQ ID NO: 3065662 - RNA, 19 nt, Artificial Sequence
  Description of Artificial Sequence: Synthetic oligonucleotide
cgauguaugaugcugacca

SEQ ID NO: 3065663 - RNA, 19 nt, Artificial Sequence
  Description of Artificial Sequence: Synthetic oligonucleotide
auucaggaccucgguggcc

SEQ ID NO: 3065664 - RNA, 19 nt, Artificial Sequence
  Description of Artificial Sequence: Synthetic oligonucleotide
  modified_base (13)..(13): a, c, u, g, unknown or other
accucgguggccnguuugc

SEQ ID NO: 3065665 - RNA, 19 nt, Artificial Sequence
  Description of Artificial Sequence: Synthetic oligonucleotide
uccaggaagcgagaacgca

SEQ ID NO: 3065666 - RNA, 19 nt, Artificial Sequence
  Description of Artificial Sequence: Synthetic oligonucleotide
aagcgagaacgcaggauca

SEQ ID NO: 3065667 - RNA, 19 nt, Artificial Sequence
  Description of Artificial Sequence: Synthetic oligonucleotide
cucgcaggugcucugcuuc

SEQ ID NO: 3065668 - RNA, 19 nt, Artificial Sequence
  Description of Artificial Sequence: Synthetic oligonucleotide
gaaguugcggcguuuccgu

SEQ ID NO: 3065669 - RNA, 19 nt, Artificial Sequence
  Description of Artificial Sequence: Synthetic oligonucleotide
uccgagugguagauguguc

SEQ ID NO: 3065670 - RNA, 19 nt, Artificial Sequence
  Description of Artificial Sequence: Synthetic oligonucleotide
  modified_base (4)..(4): a, c, u, g, unknown or other
gccnguuugcugaaguugc

SEQ ID NO: 3065671 - RNA, 19 nt, Artificial Sequence
  Description of Artificial Sequence: Synthetic oligonucleotide
ugaccaugcgcuccaucuc

SEQ ID NO: 3065672 - RNA, 19 nt, Artificial Sequence
  Description of Artificial Sequence: Synthetic oligonucleotide
ucagcagguucaugacgug

SEQ ID NO: 3065673 - RNA, 19 nt, Artificial Sequence
  Description of Artificial Sequence: Synthetic oligonucleotide
cucagcagguucaugacgu

SEQ ID NO: 3065674 - RNA, 19 nt, Artificial Sequence
  Description of Artificial Sequence: Synthetic oligonucleotide
augugucggaucugggcga

SEQ ID NO: 3065675 - RNA, 19 nt, Artificial Sequence
  Description of Artificial Sequence: Synthetic oligonucleotide
caugcgcuccaucuccuug

SEQ ID NO: 3065676 - RNA, 19 nt, Artificial Sequence
  Description of Artificial Sequence: Synthetic oligonucleotide
cagcagguucaugacgugg

SEQ ID NO: 3065677 - RNA, 19 nt, Artificial Sequence
  Description of Artificial Sequence: Synthetic oligonucleotide
ugcggcucugcucccucag

SEQ ID NO: 3065678 - RNA, 19 nt, Artificial Sequence
  Description of Artificial Sequence: Synthetic oligonucleotide
uacgucaggugggaguaga

SEQ ID NO: 3065679 - RNA, 19 nt, Artificial Sequence
  Description of Artificial Sequence: Synthetic oligonucleotide
cugcucguacuucuccagc

SEQ ID NO: 3065680 - RNA, 19 nt, Artificial Sequence
  Description of Artificial Sequence: Synthetic oligonucleotide
ccaggaagcgagaacgcag

SEQ ID NO: 3065681 - RNA, 19 nt, Artificial Sequence
  Description of Artificial Sequence: Synthetic oligonucleotide
guugcggcguuuccgucug

SEQ ID NO: 3065682 - RNA, 19 nt, Artificial Sequence
  Description of Artificial Sequence: Synthetic oligonucleotide
ucuggcgguccaggaagcg

SEQ ID NO: 3065683 - RNA, 19 nt, Artificial Sequence
  Description of Artificial Sequence: Synthetic oligonucleotide
agugcggcucugcucccuc

SEQ ID NO: 3065684 - RNA, 19 nt, Artificial Sequence
  Description of Artificial Sequence: Synthetic oligonucleotide
ugugucggaucugggcgag

SEQ ID NO: 3065685 - RNA, 19 nt, Artificial Sequence
  Description of Artificial Sequence: Synthetic oligonucleotide
ucaugacggccucgcaggu

SEQ ID NO: 3065686 - RNA, 19 nt, Artificial Sequence
  Description of Artificial Sequence: Synthetic oligonucleotide
  modified_base (11)..(11): a, c, u, g, unknown or other
cucgguggccnguuugcug

SEQ ID NO: 3065687 - RNA, 19 nt, Artificial Sequence
  Description of Artificial Sequence: Synthetic oligonucleotide
acucauuugcaugccugcu

SEQ ID NO: 3065688 - RNA, 19 nt, Artificial Sequence
  Description of Artificial Sequence: Synthetic oligonucleotide
cugaccaugcgcuccaucu

SEQ ID NO: 3065689 - RNA, 19 nt, Artificial Sequence
  Description of Artificial Sequence: Synthetic oligonucleotide
gagugguagaugugucgga

SEQ ID NO: 3065690 - RNA, 19 nt, Artificial Sequence
  Description of Artificial Sequence: Synthetic oligonucleotide
gugaacucauuugcaugcc

SEQ ID NO: 3065691 - RNA, 19 nt, Artificial Sequence
  Description of Artificial Sequence: Synthetic oligonucleotide
ugggcgagcuugcuucggu

SEQ ID NO: 3065692 - RNA, 19 nt, Artificial Sequence
  Description of Artificial Sequence: Synthetic oligonucleotide
guuacgucaggugggagua

SEQ ID NO: 3065693 - RNA, 19 nt, Artificial Sequence
  Description of Artificial Sequence: Synthetic oligonucleotide
ggcgagcuugcuucgguag

SEQ ID NO: 3065694 - RNA, 19 nt, Artificial Sequence
  Description of Artificial Sequence: Synthetic oligonucleotide
gagcuugcuucgguagucc

SEQ ID NO: 3065695 - RNA, 19 nt, Artificial Sequence
  Description of Artificial Sequence: Synthetic oligonucleotide
uuccgucuggcgguccagg

SEQ ID NO: 3065696 - RNA, 19 nt, Artificial Sequence
  Description of Artificial Sequence: Synthetic oligonucleotide
caggugggaguagaaguac

SEQ ID NO: 3065697 - RNA, 19 nt, Artificial Sequence
  Description of Artificial Sequence: Synthetic oligonucleotide
  modified_base (5)..(5): a, c, u, g, unknown or other
ggccnguuugcugaaguug

SEQ ID NO: 3065698 - RNA, 19 nt, Artificial Sequence
  Description of Artificial Sequence: Synthetic oligonucleotide
gugggaguagaaguacuca

SEQ ID NO: 3065699 - RNA, 19 nt, Artificial Sequence
  Description of Artificial Sequence: Synthetic oligonucleotide
aggaagcgagaacgcagga

SEQ ID NO: 3065700 - RNA, 19 nt, Artificial Sequence
  Description of Artificial Sequence: Synthetic oligonucleotide
ccgagugguagaugugucg

SEQ ID NO: 3065701 - RNA, 19 nt, Artificial Sequence
  Description of Artificial Sequence: Synthetic oligonucleotide
aguacucauucaggaccuc

SEQ ID NO: 3065702 - RNA, 19 nt, Artificial Sequence
  Description of Artificial Sequence: Synthetic oligonucleotide
ugacgugggucgugaacuc

SEQ ID NO: 3065703 - RNA, 19 nt, Artificial Sequence
  Description of Artificial Sequence: Synthetic oligonucleotide
augcugaccaugcgcucca

SEQ ID NO: 3065704 - RNA, 19 nt, Artificial Sequence
  Description of Artificial Sequence: Synthetic oligonucleotide
  modified_base (3)..(3): a, c, u, g, unknown or other
ccnguuugcugaaguugcg

SEQ ID NO: 3065705 - RNA, 19 nt, Artificial Sequence
  Description of Artificial Sequence: Synthetic oligonucleotide
uccgucuggcgguccagga

SEQ ID NO: 3065706 - RNA, 19 nt, Artificial Sequence
  Description of Artificial Sequence: Synthetic oligonucleotide
ucgcaggugcucugcuuca

SEQ ID NO: 3065707 - RNA, 19 nt, Artificial Sequence
  Description of Artificial Sequence: Synthetic oligonucleotide
ccucagcagguucaugacg

SEQ ID NO: 3065708 - RNA, 19 nt, Artificial Sequence
  Description of Artificial Sequence: Synthetic oligonucleotide
uuacgucaggugggaguag

SEQ ID NO: 3065709 - RNA, 19 nt, Artificial Sequence
  Description of Artificial Sequence: Synthetic oligonucleotide
gucgugaacucauuugcau

SEQ ID NO: 3065710 - RNA, 19 nt, Artificial Sequence
  Description of Artificial Sequence: Synthetic oligonucleotide
  modified_base (6)..(6): a, c, u, g, unknown or other
uggccnguuugcugaaguu

SEQ ID NO: 3065711 - RNA, 19 nt, Artificial Sequence
  Description of Artificial Sequence: Synthetic oligonucleotide
ugcggcguuuccgucuggc

SEQ ID NO: 3065712 - RNA, 19 nt, Artificial Sequence
  Description of Artificial Sequence: Synthetic oligonucleotide
uuuccgucuggcgguccag

SEQ ID NO: 3065713 - RNA, 19 nt, Artificial Sequence
  Description of Artificial Sequence: Synthetic oligonucleotide
auuugcaugccugcucgua

SEQ ID NO: 3065714 - RNA, 19 nt, Artificial Sequence
  Description of Artificial Sequence: Synthetic oligonucleotide
  modified_base (18)..(18): a, c, u, g, unknown or other
ucaggaccucgguggccng

SEQ ID NO: 3065715 - RNA, 19 nt, Artificial Sequence
  Description of Artificial Sequence: Synthetic oligonucleotide
  modified_base (7)..(7): a, c, u, g, unknown or other
guggccnguuugcugaagu

SEQ ID NO: 3065716 - RNA, 19 nt, Artificial Sequence
  Description of Artificial Sequence: Synthetic oligonucleotide
guuuccgucuggcggucca

SEQ ID NO: 3065717 - RNA, 19 nt, Artificial Sequence
  Description of Artificial Sequence: Synthetic oligonucleotide
aggguuacgucagguggga

SEQ ID NO: 3065718 - RNA, 19 nt, Artificial Sequence
  Description of Artificial Sequence: Synthetic oligonucleotide
gauguaugaugcugaccau

SEQ ID NO: 3065719 - RNA, 19 nt, Artificial Sequence
  Description of Artificial Sequence: Synthetic oligonucleotide
aggugggaguagaaguacu

SEQ ID NO: 3065720 - RNA, 19 nt, Artificial Sequence
  Description of Artificial Sequence: Synthetic oligonucleotide
guccaggaagcgagaacgc

SEQ ID NO: 3065721 - RNA, 19 nt, Artificial Sequence
  Description of Artificial Sequence: Synthetic oligonucleotide
ucaugacgugggucgugaa

SEQ ID NO: 3065722 - RNA, 19 nt, Artificial Sequence
  Description of Artificial Sequence: Synthetic oligonucleotide
gguuacgucaggugggagu

SEQ ID NO: 3065723 - RNA, 19 nt, Artificial Sequence
  Description of Artificial Sequence: Synthetic oligonucleotide
ggugggaguagaaguacuc

SEQ ID NO: 3065724 - RNA, 19 nt, Artificial Sequence
  Description of Artificial Sequence: Synthetic oligonucleotide
guucaugacgugggucgug

SEQ ID NO: 3065725 - RNA, 19 nt, Artificial Sequence
  Description of Artificial Sequence: Synthetic oligonucleotide
ggauggcacugaauuugcg

SEQ ID NO: 3065726 - RNA, 19 nt, Artificial Sequence
  Description of Artificial Sequence: Synthetic oligonucleotide
uugcugaaguugcggcguu

SEQ ID NO: 3065727 - RNA, 19 nt, Artificial Sequence
  Description of Artificial Sequence: Synthetic oligonucleotide
ccugcucguacuucuccag

SEQ ID NO: 3065728 - RNA, 19 nt, Artificial Sequence
  Description of Artificial Sequence: Synthetic oligonucleotide
gacgugggucgugaacuca

SEQ ID NO: 3065729 - RNA, 19 nt, Artificial Sequence
  Description of Artificial Sequence: Synthetic oligonucleotide
caugacggccucgcaggug

SEQ ID NO: 3065730 - RNA, 19 nt, Artificial Sequence
  Description of Artificial Sequence: Synthetic oligonucleotide
ggucgugaacucauuugca

SEQ ID NO: 3065731 - RNA, 19 nt, Artificial Sequence
  Description of Artificial Sequence: Synthetic oligonucleotide
uugcggcguuuccgucugg

SEQ ID NO: 3065732 - RNA, 19 nt, Artificial Sequence
  Description of Artificial Sequence: Synthetic oligonucleotide
agcgagaacgcaggaucau

SEQ ID NO: 3065733 - RNA, 19 nt, Artificial Sequence
  Description of Artificial Sequence: Synthetic oligonucleotide
ggcacugaauuugcgaugu

SEQ ID NO: 3065734 - RNA, 19 nt, Artificial Sequence
  Description of Artificial Sequence: Synthetic oligonucleotide
gcggcguuuccgucuggcg

SEQ ID NO: 3065735 - RNA, 19 nt, Artificial Sequence
  Description of Artificial Sequence: Synthetic oligonucleotide
cggcguuuccgucuggcgg

SEQ ID NO: 3065736 - RNA, 19 nt, Artificial Sequence
  Description of Artificial Sequence: Synthetic oligonucleotide
gcgauguaugaugcugacc

SEQ ID NO: 3065737 - RNA, 19 nt, Artificial Sequence
  Description of Artificial Sequence: Synthetic oligonucleotide
acggccucgcaggugcucu

SEQ ID NO: 3065738 - RNA, 19 nt, Artificial Sequence
  Description of Artificial Sequence: Synthetic oligonucleotide
cacugaauuugcgauguau

SEQ ID NO: 3065739 - RNA, 19 nt, Artificial Sequence
  Description of Artificial Sequence: Synthetic oligonucleotide
acgugggucgugaacucau

SEQ ID NO: 3065740 - RNA, 19 nt, Artificial Sequence
  Description of Artificial Sequence: Synthetic oligonucleotide
cgagaacgcaggaucauga

SEQ ID NO: 3065741 - RNA, 19 nt, Artificial Sequence
  Description of Artificial Sequence: Synthetic oligonucleotide
cugggcgagcuugcuucgg

SEQ ID NO: 3065742 - RNA, 19 nt, Artificial Sequence
  Description of Artificial Sequence: Synthetic oligonucleotide
gcgagaacgcaggaucaug

SEQ ID NO: 3065743 - RNA, 19 nt, Artificial Sequence
  Description of Artificial Sequence: Synthetic oligonucleotide
  modified_base (16)..(16): a, c, u, g, unknown or other
aggaccucgguggccnguu

SEQ ID NO: 3065744 - RNA, 19 nt, Artificial Sequence
  Description of Artificial Sequence: Synthetic oligonucleotide
cugcucccucagcagguuc

SEQ ID NO: 3065745 - RNA, 19 nt, Artificial Sequence
  Description of Artificial Sequence: Synthetic oligonucleotide
gcugaaguugcggcguuuc

SEQ ID NO: 3065746 - RNA, 19 nt, Artificial Sequence
  Description of Artificial Sequence: Synthetic oligonucleotide
cacggggcgagugcggcuc

SEQ ID NO: 3065747 - RNA, 19 nt, Artificial Sequence
  Description of Artificial Sequence: Synthetic oligonucleotide
ucugcucccucagcagguu

SEQ ID NO: 3065748 - RNA, 19 nt, Artificial Sequence
  Description of Artificial Sequence: Synthetic oligonucleotide
cccucagcagguucaugac

SEQ ID NO: 3065749 - RNA, 19 nt, Artificial Sequence
  Description of Artificial Sequence: Synthetic oligonucleotide
ugacggccucgcaggugcu

SEQ ID NO: 3065750 - RNA, 19 nt, Artificial Sequence
  Description of Artificial Sequence: Synthetic oligonucleotide
cuccgagugguagaugugu

SEQ ID NO: 3065751 - RNA, 19 nt, Artificial Sequence
  Description of Artificial Sequence: Synthetic oligonucleotide
accaugcgcuccaucuccu

SEQ ID NO: 3065752 - RNA, 19 nt, Artificial Sequence
  Description of Artificial Sequence: Synthetic oligonucleotide
gaucugggcgagcuugcuu

SEQ ID NO: 3065753 - RNA, 19 nt, Artificial Sequence
  Description of Artificial Sequence: Synthetic oligonucleotide
ggcguuuccgucuggcggu

SEQ ID NO: 3065754 - RNA, 19 nt, Artificial Sequence
  Description of Artificial Sequence: Synthetic oligonucleotide
ugcugaaguugcggcguuu

SEQ ID NO: 3065755 - RNA, 19 nt, Artificial Sequence
  Description of Artificial Sequence: Synthetic oligonucleotide
ggcgagugcggcucugcuc

SEQ ID NO: 3065756 - RNA, 19 nt, Artificial Sequence
  Description of Artificial Sequence: Synthetic oligonucleotide
cucugcucccucagcaggu

SEQ ID NO: 3065757 - RNA, 19 nt, Artificial Sequence
  Description of Artificial Sequence: Synthetic oligonucleotide
ggggccacggggcgagugc

SEQ ID NO: 3065758 - RNA, 19 nt, Artificial Sequence
  Description of Artificial Sequence: Synthetic oligonucleotide
cuggcgguccaggaagcga

SEQ ID NO: 3065759 - RNA, 19 nt, Artificial Sequence
  Description of Artificial Sequence: Synthetic oligonucleotide
gugggucgugaacucauuu

SEQ ID NO: 3065760 - RNA, 19 nt, Artificial Sequence
  Description of Artificial Sequence: Synthetic oligonucleotide
ggaucaugacggccucgca

SEQ ID NO: 3065761 - RNA, 19 nt, Artificial Sequence
  Description of Artificial Sequence: Synthetic oligonucleotide
gggccacggggcgagugcg

SEQ ID NO: 3065762 - RNA, 19 nt, Artificial Sequence
  Description of Artificial Sequence: Synthetic oligonucleotide
cgucaggugggaguagaag

SEQ ID NO: 3065763 - RNA, 19 nt, Artificial Sequence
  Description of Artificial Sequence: Synthetic oligonucleotide
  modified_base (8)..(8): a, c, u, g, unknown or other
gguggccnguuugcugaag

SEQ ID NO: 3065764 - RNA, 19 nt, Artificial Sequence
  Description of Artificial Sequence: Synthetic oligonucleotide
gcuugcuucgguaguccga

SEQ ID NO: 3065765 - RNA, 19 nt, Artificial Sequence
  Description of Artificial Sequence: Synthetic oligonucleotide
acgucaggugggaguagaa

SEQ ID NO: 3065766 - RNA, 19 nt, Artificial Sequence
  Description of Artificial Sequence: Synthetic oligonucleotide
gcgcuccaucuccuugggg

SEQ ID NO: 3065767 - RNA, 19 nt, Artificial Sequence
  Description of Artificial Sequence: Synthetic oligonucleotide
gcugaccaugcgcuccauc

SEQ ID NO: 3065768 - RNA, 19 nt, Artificial Sequence
  Description of Artificial Sequence: Synthetic oligonucleotide
gacggccucgcaggugcuc

SEQ ID NO: 3065769 - RNA, 19 nt, Artificial Sequence
  Description of Artificial Sequence: Synthetic oligonucleotide
ggguuacgucaggugggag

SEQ ID NO: 3065770 - RNA, 19 nt, Artificial Sequence
  Description of Artificial Sequence: Synthetic oligonucleotide
gcuccgagugguagaugug

SEQ ID NO: 3065771 - RNA, 19 nt, Artificial Sequence
  Description of Artificial Sequence: Synthetic oligonucleotide
acggggcgagugcggcucu

SEQ ID NO: 3065772 - RNA, 19 nt, Artificial Sequence
  Description of Artificial Sequence: Synthetic oligonucleotide
gggaguagaaguacucauu

SEQ ID NO: 3065773 - RNA, 19 nt, Artificial Sequence
  Description of Artificial Sequence: Synthetic oligonucleotide
gugcggcucugcucccuca

SEQ ID NO: 3065774 - RNA, 19 nt, Artificial Sequence
  Description of Artificial Sequence: Synthetic oligonucleotide
cggaucugggcgagcuugc

SEQ ID NO: 3065775 - RNA, 19 nt, Artificial Sequence
  Description of Artificial Sequence: Synthetic oligonucleotide
ggaagcgagaacgcaggau

SEQ ID NO: 3065776 - RNA, 19 nt, Artificial Sequence
  Description of Artificial Sequence: Synthetic oligonucleotide
cgcaggaucaugacggccu

SEQ ID NO: 3065777 - RNA, 19 nt, Artificial Sequence
  Description of Artificial Sequence: Synthetic oligonucleotide
gccacggggcgagugcggc

SEQ ID NO: 3065778 - RNA, 19 nt, Artificial Sequence
  Description of Artificial Sequence: Synthetic oligonucleotide
cgagcuugcuucgguaguc

SEQ ID NO: 3065779 - RNA, 19 nt, Artificial Sequence
  Description of Artificial Sequence: Synthetic oligonucleotide
ugcugaccaugcgcuccau

SEQ ID NO: 3065780 - RNA, 19 nt, Artificial Sequence
  Description of Artificial Sequence: Synthetic oligonucleotide
ggccucgcaggugcucugc

SEQ ID NO: 3065781 - RNA, 19 nt, Artificial Sequence
  Description of Artificial Sequence: Synthetic oligonucleotide
gcgagcuugcuucgguagu

SEQ ID NO: 3065782 - RNA, 19 nt, Artificial Sequence
  Description of Artificial Sequence: Synthetic oligonucleotide
ggccacggggcgagugcgg

SEQ ID NO: 3065783 - RNA, 19 nt, Artificial Sequence
  Description of Artificial Sequence: Synthetic oligonucleotide
ggggcgagugcggcucugc

SEQ ID NO: 3065784 - RNA, 19 nt, Artificial Sequence
  Description of Artificial Sequence: Synthetic oligonucleotide
gguucaugacgugggucgu

SEQ ID NO: 3065785 - RNA, 19 nt, Artificial Sequence
  Description of Artificial Sequence: Synthetic oligonucleotide
gggcgagcuugcuucggua

SEQ ID NO: 3065786 - RNA, 19 nt, Artificial Sequence
  Description of Artificial Sequence: Synthetic oligonucleotide
gagugcggcucugcucccu

SEQ ID NO: 3065787 - RNA, 19 nt, Artificial Sequence
  Description of Artificial Sequence: Synthetic oligonucleotide
gcacugaauuugcgaugua

SEQ ID NO: 3065788 - RNA, 19 nt, Artificial Sequence
  Description of Artificial Sequence: Synthetic oligonucleotide
gcgguccaggaagcgagaa

SEQ ID NO: 3065789 - RNA, 19 nt, Artificial Sequence
  Description of Artificial Sequence: Synthetic oligonucleotide
ggcgguccaggaagcgaga

SEQ ID NO: 3065790 - RNA, 19 nt, Artificial Sequence
  Description of Artificial Sequence: Synthetic oligonucleotide
cguacuucuccagcuccga

SEQ ID NO: 3065791 - RNA, 19 nt, Artificial Sequence
  Description of Artificial Sequence: Synthetic oligonucleotide
cgagugcggcucugcuccc

SEQ ID NO: 3065792 - RNA, 19 nt, Artificial Sequence
  Description of Artificial Sequence: Synthetic oligonucleotide
ggaucugggcgagcuugcu

SEQ ID NO: 3065793 - RNA, 19 nt, Artificial Sequence
  Description of Artificial Sequence: Synthetic oligonucleotide
cgcaggugcucugcuucag

SEQ ID NO: 3065794 - RNA, 19 nt, Artificial Sequence
  Description of Artificial Sequence: Synthetic oligonucleotide
gggcgagugcggcucugcu

SEQ ID NO: 3065795 - RNA, 19 nt, Artificial Sequence
  Description of Artificial Sequence: Synthetic oligonucleotide
gcguuuccgucuggcgguc

SEQ ID NO: 3065796 - RNA, 19 nt, Artificial Sequence
  Description of Artificial Sequence: Synthetic oligonucleotide
cguuuccgucuggcggucc

SEQ ID NO: 3065797 - RNA, 19 nt, Artificial Sequence
  Description of Artificial Sequence: Synthetic oligonucleotide
  modified_base (17)..(17): a, c, u, g, unknown or other
caggaccucgguggccngu

SEQ ID NO: 3065798 - RNA, 19 nt, Artificial Sequence
  Description of Artificial Sequence: Synthetic oligonucleotide
gccucgcaggugcucugcu

SEQ ID NO: 3065799 - RNA, 19 nt, Artificial Sequence
  Description of Artificial Sequence: Synthetic oligonucleotide
cggccucgcaggugcucug

SEQ ID NO: 3065800 - RNA, 19 nt, Artificial Sequence
  Description of Artificial Sequence: Synthetic oligonucleotide
gcucccucagcagguucau

SEQ ID NO: 3065801 - RNA, 19 nt, Artificial Sequence
  Description of Artificial Sequence: Synthetic oligonucleotide
  modified_base (12)..(12): a, c, u, g, unknown or other
ccucgguggccnguuugcu

SEQ ID NO: 3065802 - RNA, 19 nt, Artificial Sequence
  Description of Artificial Sequence: Synthetic oligonucleotide
  modified_base (15)..(15): a, c, u, g, unknown or other
ggaccucgguggccnguuu

SEQ ID NO: 3065803 - RNA, 19 nt, Artificial Sequence
  Description of Artificial Sequence: Synthetic oligonucleotide
ccucgcaggugcucugcuu

SEQ ID NO: 3065804 - RNA, 19 nt, Artificial Sequence
  Description of Artificial Sequence: Synthetic oligonucleotide
  modified_base (9)..(9): a, c, u, g, unknown or other
cgguggccnguuugcugaa

SEQ ID NO: 3065805 - RNA, 19 nt, Artificial Sequence
  Description of Artificial Sequence: Synthetic oligonucleotide
ccacggggcgagugcggcu

SEQ ID NO: 3065806 - RNA, 19 nt, Artificial Sequence
  Description of Artificial Sequence: Synthetic oligonucleotide
cgugggucgugaacucauu

SEQ ID NO: 3065807 - RNA, 19 nt, Artificial Sequence
  Description of Artificial Sequence: Synthetic oligonucleotide
cggggcgagugcggcucug

SEQ ID NO: 3065808 - RNA, 19 nt, Artificial Sequence
  Description of Artificial Sequence: Synthetic oligonucleotide
aguacaaauaaauagaggc

SEQ ID NO: 3065809 - RNA, 19 nt, Artificial Sequence
  Description of Artificial Sequence: Synthetic oligonucleotide
aauaaauagaggcugaggu

SEQ ID NO: 3065810 - RNA, 19 nt, Artificial Sequence
  Description of Artificial Sequence: Synthetic oligonucleotide
caagaguacaaauaaauag

SEQ ID NO: 3065811 - RNA, 19 nt, Artificial Sequence
  Description of Artificial Sequence: Synthetic oligonucleotide
agcguguggaacuugacgc

SEQ ID NO: 3065812 - RNA, 19 nt, Artificial Sequence
  Description of Artificial Sequence: Synthetic oligonucleotide
aagugaacucuacggaugc

SEQ ID NO: 3065813 - RNA, 19 nt, Artificial Sequence
  Description of Artificial Sequence: Synthetic oligonucleotide
ucacaagugaacucuacgg

SEQ ID NO: 3065814 - RNA, 19 nt, Artificial Sequence
  Description of Artificial Sequence: Synthetic oligonucleotide
uaaauagaggcugaggucc

SEQ ID NO: 3065815 - RNA, 19 nt, Artificial Sequence
  Description of Artificial Sequence: Synthetic oligonucleotide
uguccagcuucucaaagcg

SEQ ID NO: 3065816 - RNA, 19 nt, Artificial Sequence
  Description of Artificial Sequence: Synthetic oligonucleotide
aagaguacaaauaaauaga

SEQ ID NO: 3065817 - RNA, 19 nt, Artificial Sequence
  Description of Artificial Sequence: Synthetic oligonucleotide
auaaauagaggcugagguc

SEQ ID NO: 3065818 - RNA, 19 nt, Artificial Sequence
  Description of Artificial Sequence: Synthetic oligonucleotide
aaggacuugccacaggucu

SEQ ID NO: 3065819 - RNA, 19 nt, Artificial Sequence
  Description of Artificial Sequence: Synthetic oligonucleotide
aaaguuguacugcaccucu

SEQ ID NO: 3065820 - RNA, 19 nt, Artificial Sequence
  Description of Artificial Sequence: Synthetic oligonucleotide
aguuguacugcaccucugc

SEQ ID NO: 3065821 - RNA, 19 nt, Artificial Sequence
  Description of Artificial Sequence: Synthetic oligonucleotide
uucaugugccaguuaagcg

SEQ ID NO: 3065822 - RNA, 19 nt, Artificial Sequence
  Description of Artificial Sequence: Synthetic oligonucleotide
uguacugcaccucugcugu

SEQ ID NO: 3065823 - RNA, 19 nt, Artificial Sequence
  Description of Artificial Sequence: Synthetic oligonucleotide
uggaacuugacgcugucca

SEQ ID NO: 3065824 - RNA, 19 nt, Artificial Sequence
  Description of Artificial Sequence: Synthetic oligonucleotide
ugaaggacuugccacaggu

SEQ ID NO: 3065825 - RNA, 19 nt, Artificial Sequence
  Description of Artificial Sequence: Synthetic oligonucleotide
agaguacaaauaaauagag

SEQ ID NO: 3065826 - RNA, 19 nt, Artificial Sequence
  Description of Artificial Sequence: Synthetic oligonucleotide
aaaucucacacugcagggg

SEQ ID NO: 3065827 - RNA, 19 nt, Artificial Sequence
  Description of Artificial Sequence: Synthetic oligonucleotide
uccggguggcuuuugagcg

SEQ ID NO: 3065828 - RNA, 19 nt, Artificial Sequence
  Description of Artificial Sequence: Synthetic oligonucleotide
gcaaaucucacacugcagg

SEQ ID NO: 3065829 - RNA, 19 nt, Artificial Sequence
  Description of Artificial Sequence: Synthetic oligonucleotide
caaaucucacacugcaggg

SEQ ID NO: 3065830 - RNA, 19 nt, Artificial Sequence
  Description of Artificial Sequence: Synthetic oligonucleotide
gauucuuccucuugaagga

SEQ ID NO: 3065831 - RNA, 19 nt, Artificial Sequence
  Description of Artificial Sequence: Synthetic oligonucleotide
uccagcuucucaaagcgcu

SEQ ID NO: 3065832 - RNA, 19 nt, Artificial Sequence
  Description of Artificial Sequence: Synthetic oligonucleotide
ugcccaagaguacaaauaa

SEQ ID NO: 3065833 - RNA, 19 nt, Artificial Sequence
  Description of Artificial Sequence: Synthetic oligonucleotide
cucacaagugaacucuacg

SEQ ID NO: 3065834 - RNA, 19 nt, Artificial Sequence
  Description of Artificial Sequence: Synthetic oligonucleotide
agaugauucuuccucuuga

SEQ ID NO: 3065835 - RNA, 19 nt, Artificial Sequence
  Description of Artificial Sequence: Synthetic oligonucleotide
ugaacucuacggaugccug

SEQ ID NO: 3065836 - RNA, 19 nt, Artificial Sequence
  Description of Artificial Sequence: Synthetic oligonucleotide
acaagugaacucuacggau

SEQ ID NO: 3065837 - RNA, 19 nt, Artificial Sequence
  Description of Artificial Sequence: Synthetic oligonucleotide
caagugaacucuacggaug

SEQ ID NO: 3065838 - RNA, 19 nt, Artificial Sequence
  Description of Artificial Sequence: Synthetic oligonucleotide
aacuugacgcuguccagcu

SEQ ID NO: 3065839 - RNA, 19 nt, Artificial Sequence
  Description of Artificial Sequence: Synthetic oligonucleotide
aagcgaugcgcgcugccgg

SEQ ID NO: 3065840 - RNA, 19 nt, Artificial Sequence
  Description of Artificial Sequence: Synthetic oligonucleotide
uuguacugcaccucugcug

SEQ ID NO: 3065841 - RNA, 19 nt, Artificial Sequence
  Description of Artificial Sequence: Synthetic oligonucleotide
gacacgaugcccaagagua

SEQ ID NO: 3065842 - RNA, 19 nt, Artificial Sequence
  Description of Artificial Sequence: Synthetic oligonucleotide
ugccacaggucucacaagu

SEQ ID NO: 3065843 - RNA, 19 nt, Artificial Sequence
  Description of Artificial Sequence: Synthetic oligonucleotide
guacccgcaaaucucacac

SEQ ID NO: 3065844 - RNA, 19 nt, Artificial Sequence
  Description of Artificial Sequence: Synthetic oligonucleotide
aaauagaggcugagguccg

SEQ ID NO: 3065845 - RNA, 19 nt, Artificial Sequence
  Description of Artificial Sequence: Synthetic oligonucleotide
ucgcacguaaaguuguacu

SEQ ID NO: 3065846 - RNA, 19 nt, Artificial Sequence
  Description of Artificial Sequence: Synthetic oligonucleotide
uccagaugauucuuccucu

SEQ ID NO: 3065847 - RNA, 19 nt, Artificial Sequence
  Description of Artificial Sequence: Synthetic oligonucleotide
cuugacgcuguccagcuuc

SEQ ID NO: 3065848 - RNA, 19 nt, Artificial Sequence
  Description of Artificial Sequence: Synthetic oligonucleotide
aagcgcuuuccacagcgcu

SEQ ID NO: 3065849 - RNA, 19 nt, Artificial Sequence
  Description of Artificial Sequence: Synthetic oligonucleotide
ugccaguuaagcgaugcgc

SEQ ID NO: 3065850 - RNA, 19 nt, Artificial Sequence
  Description of Artificial Sequence: Synthetic oligonucleotide
acccgcaaaucucacacug

SEQ ID NO: 3065851 - RNA, 19 nt, Artificial Sequence
  Description of Artificial Sequence: Synthetic oligonucleotide
ugugccaguuaagcgaugc

SEQ ID NO: 3065852 - RNA, 19 nt, Artificial Sequence
  Description of Artificial Sequence: Synthetic oligonucleotide
acugguacccgcaaaucuc

SEQ ID NO: 3065853 - RNA, 19 nt, Artificial Sequence
  Description of Artificial Sequence: Synthetic oligonucleotide
uuccucuugaaggacuugc

SEQ ID NO: 3065854 - RNA, 19 nt, Artificial Sequence
  Description of Artificial Sequence: Synthetic oligonucleotide
uggcuuuugagcgugugga

SEQ ID NO: 3065855 - RNA, 19 nt, Artificial Sequence
  Description of Artificial Sequence: Synthetic oligonucleotide
uccucuugaaggacuugcc

SEQ ID NO: 3065856 - RNA, 19 nt, Artificial Sequence
  Description of Artificial Sequence: Synthetic oligonucleotide
aggucucacaagugaacuc

SEQ ID NO: 3065857 - RNA, 19 nt, Artificial Sequence
  Description of Artificial Sequence: Synthetic oligonucleotide
cuccagaugauucuuccuc

SEQ ID NO: 3065858 - RNA, 19 nt, Artificial Sequence
  Description of Artificial Sequence: Synthetic oligonucleotide
uagaggcugagguccgugg

SEQ ID NO: 3065859 - RNA, 19 nt, Artificial Sequence
  Description of Artificial Sequence: Synthetic oligonucleotide
ugugcuucuucaugugcca

SEQ ID NO: 3065860 - RNA, 19 nt, Artificial Sequence
  Description of Artificial Sequence: Synthetic oligonucleotide
ucaggugggcuuguggucc

SEQ ID NO: 3065861 - RNA, 19 nt, Artificial Sequence
  Description of Artificial Sequence: Synthetic oligonucleotide
gaacuugacgcuguccagc

SEQ ID NO: 3065862 - RNA, 19 nt, Artificial Sequence
  Description of Artificial Sequence: Synthetic oligonucleotide
uaagcgaugcgcgcugccg

SEQ ID NO: 3065863 - RNA, 19 nt, Artificial Sequence
  Description of Artificial Sequence: Synthetic oligonucleotide
agaggcugagguccguggg

SEQ ID NO: 3065864 - RNA, 19 nt, Artificial Sequence
  Description of Artificial Sequence: Synthetic oligonucleotide
ugcaccuccagaugauucu

SEQ ID NO: 3065865 - RNA, 19 nt, Artificial Sequence
  Description of Artificial Sequence: Synthetic oligonucleotide
aguuaagcgaugcgcgcug

SEQ ID NO: 3065866 - RNA, 19 nt, Artificial Sequence
  Description of Artificial Sequence: Synthetic oligonucleotide
ucucacaagugaacucuac

SEQ ID NO: 3065867 - RNA, 19 nt, Artificial Sequence
  Description of Artificial Sequence: Synthetic oligonucleotide
uuuccacagcgcucgcacg

SEQ ID NO: 3065868 - RNA, 19 nt, Artificial Sequence
  Description of Artificial Sequence: Synthetic oligonucleotide
guggcuuuugagcgugugg

SEQ ID NO: 3065869 - RNA, 19 nt, Artificial Sequence
  Description of Artificial Sequence: Synthetic oligonucleotide
acaggucucacaagugaac

SEQ ID NO: 3065870 - RNA, 19 nt, Artificial Sequence
  Description of Artificial Sequence: Synthetic oligonucleotide
uaaaguuguacugcaccuc

SEQ ID NO: 3065871 - RNA, 19 nt, Artificial Sequence
  Description of Artificial Sequence: Synthetic oligonucleotide
agcuucucaaagcgcuuuc

SEQ ID NO: 3065872 - RNA, 19 nt, Artificial Sequence
  Description of Artificial Sequence: Synthetic oligonucleotide
guaaaguuguacugcaccu

SEQ ID NO: 3065873 - RNA, 19 nt, Artificial Sequence
  Description of Artificial Sequence: Synthetic oligonucleotide
acagcgcucgcacguaaag

SEQ ID NO: 3065874 - RNA, 19 nt, Artificial Sequence
  Description of Artificial Sequence: Synthetic oligonucleotide
uuaagcgaugcgcgcugcc

SEQ ID NO: 3065875 - RNA, 19 nt, Artificial Sequence
  Description of Artificial Sequence: Synthetic oligonucleotide
cacaagugaacucuacgga

SEQ ID NO: 3065876 - RNA, 19 nt, Artificial Sequence
  Description of Artificial Sequence: Synthetic oligonucleotide
ugggcuugugguccgggug

SEQ ID NO: 3065877 - RNA, 19 nt, Artificial Sequence
  Description of Artificial Sequence: Synthetic oligonucleotide
agugaacucuacggaugcc

SEQ ID NO: 3065878 - RNA, 19 nt, Artificial Sequence
  Description of Artificial Sequence: Synthetic oligonucleotide
uggacacgaugcccaagag

SEQ ID NO: 3065879 - RNA, 19 nt, Artificial Sequence
  Description of Artificial Sequence: Synthetic oligonucleotide
cguaaaguuguacugcacc

SEQ ID NO: 3065880 - RNA, 19 nt, Artificial Sequence
  Description of Artificial Sequence: Synthetic oligonucleotide
ugugcgccggugcaccucc

SEQ ID NO: 3065881 - RNA, 19 nt, Artificial Sequence
  Description of Artificial Sequence: Synthetic oligonucleotide
agcgaugcgcgcugccggc

SEQ ID NO: 3065882 - RNA, 19 nt, Artificial Sequence
  Description of Artificial Sequence: Synthetic oligonucleotide
ugcuucuucaugugccagu

SEQ ID NO: 3065883 - RNA, 19 nt, Artificial Sequence
  Description of Artificial Sequence: Synthetic oligonucleotide
ugcaccucugcugugugcu

SEQ ID NO: 3065884 - RNA, 19 nt, Artificial Sequence
  Description of Artificial Sequence: Synthetic oligonucleotide
guccggguggcuuuugagc

SEQ ID NO: 3065885 - RNA, 19 nt, Artificial Sequence
  Description of Artificial Sequence: Synthetic oligonucleotide
cacguaaaguuguacugca

SEQ ID NO: 3065886 - RNA, 19 nt, Artificial Sequence
  Description of Artificial Sequence: Synthetic oligonucleotide
guacaaauaaauagaggcu

SEQ ID NO: 3065887 - RNA, 19 nt, Artificial Sequence
  Description of Artificial Sequence: Synthetic oligonucleotide
cagaugauucuuccucuug

SEQ ID NO: 3065888 - RNA, 19 nt, Artificial Sequence
  Description of Artificial Sequence: Synthetic oligonucleotide
agcgcucgcacguaaaguu

SEQ ID NO: 3065889 - RNA, 19 nt, Artificial Sequence
  Description of Artificial Sequence: Synthetic oligonucleotide
gacgcuguccagcuucuca

SEQ ID NO: 3065890 - RNA, 19 nt, Artificial Sequence
  Description of Artificial Sequence: Synthetic oligonucleotide
ucaaagcgcuuuccacagc

SEQ ID NO: 3065891 - RNA, 19 nt, Artificial Sequence
  Description of Artificial Sequence: Synthetic oligonucleotide
gaggcugagguccgugggc

SEQ ID NO: 3065892 - RNA, 19 nt, Artificial Sequence
  Description of Artificial Sequence: Synthetic oligonucleotide
gccaguuaagcgaugcgcg

SEQ ID NO: 3065893 - RNA, 19 nt, Artificial Sequence
  Description of Artificial Sequence: Synthetic oligonucleotide
aggggugucucuccugugu

SEQ ID NO: 3065894 - RNA, 19 nt, Artificial Sequence
  Description of Artificial Sequence: Synthetic oligonucleotide
acguaaaguuguacugcac

SEQ ID NO: 3065895 - RNA, 19 nt, Artificial Sequence
  Description of Artificial Sequence: Synthetic oligonucleotide
ucucacacugcaggggugu

SEQ ID NO: 3065896 - RNA, 19 nt, Artificial Sequence
  Description of Artificial Sequence: Synthetic oligonucleotide
gaacucuacggaugccuga

SEQ ID NO: 3065897 - RNA, 19 nt, Artificial Sequence
  Description of Artificial Sequence: Synthetic oligonucleotide
uguggaacuugacgcuguc

SEQ ID NO: 3065898 - RNA, 19 nt, Artificial Sequence
  Description of Artificial Sequence: Synthetic oligonucleotide
cuuuugagcguguggaacu

SEQ ID NO: 3065899 - RNA, 19 nt, Artificial Sequence
  Description of Artificial Sequence: Synthetic oligonucleotide
aggcugagguccgugggcg

SEQ ID NO: 3065900 - RNA, 19 nt, Artificial Sequence
  Description of Artificial Sequence: Synthetic oligonucleotide
gaugcccaagaguacaaau

SEQ ID NO: 3065901 - RNA, 19 nt, Artificial Sequence
  Description of Artificial Sequence: Synthetic oligonucleotide
uugacgcuguccagcuucu

SEQ ID NO: 3065902 - RNA, 19 nt, Artificial Sequence
  Description of Artificial Sequence: Synthetic oligonucleotide
gggcuugugguccgggugg

SEQ ID NO: 3065903 - RNA, 19 nt, Artificial Sequence
  Description of Artificial Sequence: Synthetic oligonucleotide
cugguacccgcaaaucuca

SEQ ID NO: 3065904 - RNA, 19 nt, Artificial Sequence
  Description of Artificial Sequence: Synthetic oligonucleotide
aaguuguacugcaccucug

SEQ ID NO: 3065905 - RNA, 19 nt, Artificial Sequence
  Description of Artificial Sequence: Synthetic oligonucleotide
ggaacuugacgcuguccag

SEQ ID NO: 3065906 - RNA, 19 nt, Artificial Sequence
  Description of Artificial Sequence: Synthetic oligonucleotide
aauagaggcugagguccgu

SEQ ID NO: 3065907 - RNA, 19 nt, Artificial Sequence
  Description of Artificial Sequence: Synthetic oligonucleotide
uugccacaggucucacaag

SEQ ID NO: 3065908 - RNA, 19 nt, Artificial Sequence
  Description of Artificial Sequence: Synthetic oligonucleotide
aggacuugccacaggucuc

SEQ ID NO: 3065909 - RNA, 19 nt, Artificial Sequence
  Description of Artificial Sequence: Synthetic oligonucleotide
gcacguaaaguuguacugc

SEQ ID NO: 3065910 - RNA, 19 nt, Artificial Sequence
  Description of Artificial Sequence: Synthetic oligonucleotide
acugcaccucugcugugug

SEQ ID NO: 3065911 - RNA, 19 nt, Artificial Sequence
  Description of Artificial Sequence: Synthetic oligonucleotide
acgcuguccagcuucucaa

SEQ ID NO: 3065912 - RNA, 19 nt, Artificial Sequence
  Description of Artificial Sequence: Synthetic oligonucleotide
agcgcuuuccacagcgcuc

SEQ ID NO: 3065913 - RNA, 19 nt, Artificial Sequence
  Description of Artificial Sequence: Synthetic oligonucleotide
cacaggucucacaagugaa

SEQ ID NO: 3065914 - RNA, 19 nt, Artificial Sequence
  Description of Artificial Sequence: Synthetic oligonucleotide
acacgaugcccaagaguac

SEQ ID NO: 3065915 - RNA, 19 nt, Artificial Sequence
  Description of Artificial Sequence: Synthetic oligonucleotide
gcgcgggugggucaggugg

SEQ ID NO: 3065916 - RNA, 19 nt, Artificial Sequence
  Description of Artificial Sequence: Synthetic oligonucleotide
uuuugagcguguggaacuu

SEQ ID NO: 3065917 - RNA, 19 nt, Artificial Sequence
  Description of Artificial Sequence: Synthetic oligonucleotide
auagaggcugagguccgug

SEQ ID NO: 3065918 - RNA, 19 nt, Artificial Sequence
  Description of Artificial Sequence: Synthetic oligonucleotide
ugguacccgcaaaucucac

SEQ ID NO: 3065919 - RNA, 19 nt, Artificial Sequence
  Description of Artificial Sequence: Synthetic oligonucleotide
uacccgcaaaucucacacu

SEQ ID NO: 3065920 - RNA, 19 nt, Artificial Sequence
  Description of Artificial Sequence: Synthetic oligonucleotide
gaaggacuugccacagguc

SEQ ID NO: 3065921 - RNA, 19 nt, Artificial Sequence
  Description of Artificial Sequence: Synthetic oligonucleotide
cucgcacguaaaguuguac

SEQ ID NO: 3065922 - RNA, 19 nt, Artificial Sequence
  Description of Artificial Sequence: Synthetic oligonucleotide
ccaguuaagcgaugcgcgc

SEQ ID NO: 3065923 - RNA, 19 nt, Artificial Sequence
  Description of Artificial Sequence: Synthetic oligonucleotide
augcccaagaguacaaaua

SEQ ID NO: 3065924 - RNA, 19 nt, Artificial Sequence
  Description of Artificial Sequence: Synthetic oligonucleotide
cacgaugcccaagaguaca

SEQ ID NO: 3065925 - RNA, 19 nt, Artificial Sequence
  Description of Artificial Sequence: Synthetic oligonucleotide
ugguccggguggcuuuuga

SEQ ID NO: 3065926 - RNA, 19 nt, Artificial Sequence
  Description of Artificial Sequence: Synthetic oligonucleotide
gcuuuugagcguguggaac

SEQ ID NO: 3065927 - RNA, 19 nt, Artificial Sequence
  Description of Artificial Sequence: Synthetic oligonucleotide
ugcgccggugcaccuccag

SEQ ID NO: 3065928 - RNA, 19 nt, Artificial Sequence
  Description of Artificial Sequence: Synthetic oligonucleotide
gggucaggugggcuugugg

SEQ ID NO: 3065929 - RNA, 19 nt, Artificial Sequence
  Description of Artificial Sequence: Synthetic oligonucleotide
gcgcuuuccacagcgcucg

SEQ ID NO: 3065930 - RNA, 19 nt, Artificial Sequence
  Description of Artificial Sequence: Synthetic oligonucleotide
cgcacguaaaguuguacug

SEQ ID NO: 3065931 - RNA, 19 nt, Artificial Sequence
  Description of Artificial Sequence: Synthetic oligonucleotide
caggugggcuugugguccg

SEQ ID NO: 3065932 - RNA, 19 nt, Artificial Sequence
  Description of Artificial Sequence: Synthetic oligonucleotide
guuaagcgaugcgcgcugc

SEQ ID NO: 3065933 - RNA, 19 nt, Artificial Sequence
  Description of Artificial Sequence: Synthetic oligonucleotide
caccuccagaugauucuuc

SEQ ID NO: 3065934 - RNA, 19 nt, Artificial Sequence
  Description of Artificial Sequence: Synthetic oligonucleotide
guuguacugcaccucugcu

SEQ ID NO: 3065935 - RNA, 19 nt, Artificial Sequence
  Description of Artificial Sequence: Synthetic oligonucleotide
cugcaccucugcugugugc

SEQ ID NO: 3065936 - RNA, 19 nt, Artificial Sequence
  Description of Artificial Sequence: Synthetic oligonucleotide
gguccggguggcuuuugag

SEQ ID NO: 3065937 - RNA, 19 nt, Artificial Sequence
  Description of Artificial Sequence: Synthetic oligonucleotide
gugaacucuacggaugccu

SEQ ID NO: 3065938 - RNA, 19 nt, Artificial Sequence
  Description of Artificial Sequence: Synthetic oligonucleotide
cccaagaguacaaauaaau

SEQ ID NO: 3065939 - RNA, 19 nt, Artificial Sequence
  Description of Artificial Sequence: Synthetic oligonucleotide
cucugcugugugcuucuuc

SEQ ID NO: 3065940 - RNA, 19 nt, Artificial Sequence
  Description of Artificial Sequence: Synthetic oligonucleotide
gugcaccuccagaugauuc

SEQ ID NO: 3065941 - RNA, 19 nt, Artificial Sequence
  Description of Artificial Sequence: Synthetic oligonucleotide
uugugguccggguggcuuu

SEQ ID NO: 3065942 - RNA, 19 nt, Artificial Sequence
  Description of Artificial Sequence: Synthetic oligonucleotide
cacugguacccgcaaaucu

SEQ ID NO: 3065943 - RNA, 19 nt, Artificial Sequence
  Description of Artificial Sequence: Synthetic oligonucleotide
gguccgugggcgcgggugg

SEQ ID NO: 3065944 - RNA, 19 nt, Artificial Sequence
  Description of Artificial Sequence: Synthetic oligonucleotide
gugugugcgccggugcacc

SEQ ID NO: 3065945 - RNA, 19 nt, Artificial Sequence
  Description of Artificial Sequence: Synthetic oligonucleotide
ggucucacaagugaacucu

SEQ ID NO: 3065946 - RNA, 19 nt, Artificial Sequence
  Description of Artificial Sequence: Synthetic oligonucleotide
ugagguccgugggcgcggg

SEQ ID NO: 3065947 - RNA, 19 nt, Artificial Sequence
  Description of Artificial Sequence: Synthetic oligonucleotide
guccagcuucucaaagcgc

SEQ ID NO: 3065948 - RNA, 19 nt, Artificial Sequence
  Description of Artificial Sequence: Synthetic oligonucleotide
gguacccgcaaaucucaca

SEQ ID NO: 3065949 - RNA, 19 nt, Artificial Sequence
  Description of Artificial Sequence: Synthetic oligonucleotide
ugugugcgccggugcaccu

SEQ ID NO: 3065950 - RNA, 19 nt, Artificial Sequence
  Description of Artificial Sequence: Synthetic oligonucleotide
ggucaggugggcuuguggu

SEQ ID NO: 3065951 - RNA, 19 nt, Artificial Sequence
  Description of Artificial Sequence: Synthetic oligonucleotide
agguccgugggcgcgggug

SEQ ID NO: 3065952 - RNA, 19 nt, Artificial Sequence
  Description of Artificial Sequence: Synthetic oligonucleotide
gcugccggcacugguaccc

SEQ ID NO: 3065953 - RNA, 19 nt, Artificial Sequence
  Description of Artificial Sequence: Synthetic oligonucleotide
cccgcaaaucucacacugc

SEQ ID NO: 3065954 - RNA, 19 nt, Artificial Sequence
  Description of Artificial Sequence: Synthetic oligonucleotide
cugagguccgugggcgcgg

SEQ ID NO: 3065955 - RNA, 19 nt, Artificial Sequence
  Description of Artificial Sequence: Synthetic oligonucleotide
gcugagguccgugggcgcg

SEQ ID NO: 3065956 - RNA, 19 nt, Artificial Sequence
  Description of Artificial Sequence: Synthetic oligonucleotide
guacugcaccucugcugug

SEQ ID NO: 3065957 - RNA, 19 nt, Artificial Sequence
  Description of Artificial Sequence: Synthetic oligonucleotide
ccgcaaaucucacacugca

SEQ ID NO: 3065958 - RNA, 19 nt, Artificial Sequence
  Description of Artificial Sequence: Synthetic oligonucleotide
caggucucacaagugaacu

SEQ ID NO: 3065959 - RNA, 19 nt, Artificial Sequence
  Description of Artificial Sequence: Synthetic oligonucleotide
ccacaggucucacaaguga

SEQ ID NO: 3065960 - RNA, 19 nt, Artificial Sequence
  Description of Artificial Sequence: Synthetic oligonucleotide
ugccggcacugguacccgc

SEQ ID NO: 3065961 - RNA, 19 nt, Artificial Sequence
  Description of Artificial Sequence: Synthetic oligonucleotide
ggugggucaggugggcuug

SEQ ID NO: 3065962 - RNA, 19 nt, Artificial Sequence
  Description of Artificial Sequence: Synthetic oligonucleotide
cgcaaaucucacacugcag

SEQ ID NO: 3065963 - RNA, 19 nt, Artificial Sequence
  Description of Artificial Sequence: Synthetic oligonucleotide
caggggugucucuccugug

SEQ ID NO: 3065964 - RNA, 19 nt, Artificial Sequence
  Description of Artificial Sequence: Synthetic oligonucleotide
gguggcuuuugagcgugug

SEQ ID NO: 3065965 - RNA, 19 nt, Artificial Sequence
  Description of Artificial Sequence: Synthetic oligonucleotide
ggacacgaugcccaagagu

SEQ ID NO: 3065966 - RNA, 19 nt, Artificial Sequence
  Description of Artificial Sequence: Synthetic oligonucleotide
ggacuugccacaggucuca

SEQ ID NO: 3065967 - RNA, 19 nt, Artificial Sequence
  Description of Artificial Sequence: Synthetic oligonucleotide
acgaugcccaagaguacaa

SEQ ID NO: 3065968 - RNA, 19 nt, Artificial Sequence
  Description of Artificial Sequence: Synthetic oligonucleotide
ugggucaggugggcuugug

SEQ ID NO: 3065969 - RNA, 19 nt, Artificial Sequence
  Description of Artificial Sequence: Synthetic oligonucleotide
ugcgcgcugccggcacugg

SEQ ID NO: 3065970 - RNA, 19 nt, Artificial Sequence
  Description of Artificial Sequence: Synthetic oligonucleotide
gccacaggucucacaagug

SEQ ID NO: 3065971 - RNA, 19 nt, Artificial Sequence
  Description of Artificial Sequence: Synthetic oligonucleotide
ggcuuuugagcguguggaa

SEQ ID NO: 3065972 - RNA, 19 nt, Artificial Sequence
  Description of Artificial Sequence: Synthetic oligonucleotide
uccacagcgcucgcacgua

SEQ ID NO: 3065973 - RNA, 19 nt, Artificial Sequence
  Description of Artificial Sequence: Synthetic oligonucleotide
ggugggcuugugguccggg

SEQ ID NO: 3065974 - RNA, 19 nt, Artificial Sequence
  Description of Artificial Sequence: Synthetic oligonucleotide
cugccggcacugguacccg

SEQ ID NO: 3065975 - RNA, 19 nt, Artificial Sequence
  Description of Artificial Sequence: Synthetic oligonucleotide
caguuaagcgaugcgcgcu

SEQ ID NO: 3065976 - RNA, 19 nt, Artificial Sequence
  Description of Artificial Sequence: Synthetic oligonucleotide
gccggugcaccuccagaug

SEQ ID NO: 3065977 - RNA, 19 nt, Artificial Sequence
  Description of Artificial Sequence: Synthetic oligonucleotide
gugggcgcgggugggucag

SEQ ID NO: 3065978 - RNA, 19 nt, Artificial Sequence
  Description of Artificial Sequence: Synthetic oligonucleotide
gucucacaagugaacucua

SEQ ID NO: 3065979 - RNA, 19 nt, Artificial Sequence
  Description of Artificial Sequence: Synthetic oligonucleotide
augcgcgcugccggcacug

SEQ ID NO: 3065980 - RNA, 19 nt, Artificial Sequence
  Description of Artificial Sequence: Synthetic oligonucleotide
cacagcgcucgcacguaaa

SEQ ID NO: 3065981 - RNA, 19 nt, Artificial Sequence
  Description of Artificial Sequence: Synthetic oligonucleotide
gcgcucgcacguaaaguug

SEQ ID NO: 3065982 - RNA, 19 nt, Artificial Sequence
  Description of Artificial Sequence: Synthetic oligonucleotide
aggugggcuugugguccgg

SEQ ID NO: 3065983 - RNA, 19 nt, Artificial Sequence
  Description of Artificial Sequence: Synthetic oligonucleotide
ccggugcaccuccagauga

SEQ ID NO: 3065984 - RNA, 19 nt, Artificial Sequence
  Description of Artificial Sequence: Synthetic oligonucleotide
guccgugggcgcggguggg

SEQ ID NO: 3065985 - RNA, 19 nt, Artificial Sequence
  Description of Artificial Sequence: Synthetic oligonucleotide
ggcugagguccgugggcgc

SEQ ID NO: 3065986 - RNA, 19 nt, Artificial Sequence
  Description of Artificial Sequence: Synthetic oligonucleotide
gcaggggugucucuccugu

SEQ ID NO: 3065987 - RNA, 19 nt, Artificial Sequence
  Description of Artificial Sequence: Synthetic oligonucleotide
gugucucuccugugugugu

SEQ ID NO: 3065988 - RNA, 19 nt, Artificial Sequence
  Description of Artificial Sequence: Synthetic oligonucleotide
cguguggaacuugacgcug

SEQ ID NO: 3065989 - RNA, 19 nt, Artificial Sequence
  Description of Artificial Sequence: Synthetic oligonucleotide
guguggaacuugacgcugu

SEQ ID NO: 3065990 - RNA, 19 nt, Artificial Sequence
  Description of Artificial Sequence: Synthetic oligonucleotide
augugccaguuaagcgaug

SEQ ID NO: 3065991 - RNA, 19 nt, Artificial Sequence
  Description of Artificial Sequence: Synthetic oligonucleotide
gcgcugccggcacugguac

SEQ ID NO: 3065992 - RNA, 19 nt, Artificial Sequence
  Description of Artificial Sequence: Synthetic oligonucleotide
gcacugguacccgcaaauc

SEQ ID NO: 3065993 - RNA, 19 nt, Artificial Sequence
  Description of Artificial Sequence: Synthetic oligonucleotide
ugacgcuguccagcuucuc

SEQ ID NO: 3065994 - RNA, 19 nt, Artificial Sequence
  Description of Artificial Sequence: Synthetic oligonucleotide
gcccaagaguacaaauaaa

SEQ ID NO: 3065995 - RNA, 19 nt, Artificial Sequence
  Description of Artificial Sequence: Synthetic oligonucleotide
uccgugggcgcgggugggu

SEQ ID NO: 3065996 - RNA, 19 nt, Artificial Sequence
  Description of Artificial Sequence: Synthetic oligonucleotide
gaugcgcgcugccggcacu

SEQ ID NO: 3065997 - RNA, 19 nt, Artificial Sequence
  Description of Artificial Sequence: Synthetic oligonucleotide
gcguguggaacuugacgcu

SEQ ID NO: 3065998 - RNA, 19 nt, Artificial Sequence
  Description of Artificial Sequence: Synthetic oligonucleotide
ggcuugugguccggguggc

SEQ ID NO: 3065999 - RNA, 19 nt, Artificial Sequence
  Description of Artificial Sequence: Synthetic oligonucleotide
gugggcuugugguccgggu

SEQ ID NO: 3066000 - RNA, 19 nt, Artificial Sequence
  Description of Artificial Sequence: Synthetic oligonucleotide
cgcgggugggucagguggg

SEQ ID NO: 3066001 - RNA, 19 nt, Artificial Sequence
  Description of Artificial Sequence: Synthetic oligonucleotide
ugggcgcgggugggucagg

SEQ ID NO: 3066002 - RNA, 19 nt, Artificial Sequence
  Description of Artificial Sequence: Synthetic oligonucleotide
ggcgcgggugggucaggug

SEQ ID NO: 3066003 - RNA, 19 nt, Artificial Sequence
  Description of Artificial Sequence: Synthetic oligonucleotide
gcuuuccacagcgcucgca

SEQ ID NO: 3066004 - RNA, 19 nt, Artificial Sequence
  Description of Artificial Sequence: Synthetic oligonucleotide
gugugcgccggugcaccuc

SEQ ID NO: 3066005 - RNA, 19 nt, Artificial Sequence
  Description of Artificial Sequence: Synthetic oligonucleotide
gugguccggguggcuuuug

SEQ ID NO: 3066006 - RNA, 19 nt, Artificial Sequence
  Description of Artificial Sequence: Synthetic oligonucleotide
cagcgcucgcacguaaagu

SEQ ID NO: 3066007 - RNA, 19 nt, Artificial Sequence
  Description of Artificial Sequence: Synthetic oligonucleotide
gcgccggugcaccuccaga

SEQ ID NO: 3066008 - RNA, 19 nt, Artificial Sequence
  Description of Artificial Sequence: Synthetic oligonucleotide
ccuccagaugauucuuccu

SEQ ID NO: 3066009 - RNA, 19 nt, Artificial Sequence
  Description of Artificial Sequence: Synthetic oligonucleotide
cagcuucucaaagcgcuuu

SEQ ID NO: 3066010 - RNA, 19 nt, Artificial Sequence
  Description of Artificial Sequence: Synthetic oligonucleotide
cggguggcuuuugagcgug

SEQ ID NO: 3066011 - RNA, 19 nt, Artificial Sequence
  Description of Artificial Sequence: Synthetic oligonucleotide
gggugggucaggugggcuu

SEQ ID NO: 3066012 - RNA, 19 nt, Artificial Sequence
  Description of Artificial Sequence: Synthetic oligonucleotide
gccggcacugguacccgca

SEQ ID NO: 3066013 - RNA, 19 nt, Artificial Sequence
  Description of Artificial Sequence: Synthetic oligonucleotide
gcgggugggucaggugggc

SEQ ID NO: 3066014 - RNA, 19 nt, Artificial Sequence
  Description of Artificial Sequence: Synthetic oligonucleotide
cgaugcgcgcugccggcac

SEQ ID NO: 3066015 - RNA, 19 nt, Artificial Sequence
  Description of Artificial Sequence: Synthetic oligonucleotide
cgcucgcacguaaaguugu

SEQ ID NO: 3066016 - RNA, 19 nt, Artificial Sequence
  Description of Artificial Sequence: Synthetic oligonucleotide
gcucgcacguaaaguugua

SEQ ID NO: 3066017 - RNA, 19 nt, Artificial Sequence
  Description of Artificial Sequence: Synthetic oligonucleotide
ggugcaccuccagaugauu

SEQ ID NO: 3066018 - RNA, 19 nt, Artificial Sequence
  Description of Artificial Sequence: Synthetic oligonucleotide
gagguccgugggcgcgggu

SEQ ID NO: 3066019 - RNA, 19 nt, Artificial Sequence
  Description of Artificial Sequence: Synthetic oligonucleotide
ccacagcgcucgcacguaa

SEQ ID NO: 3066020 - RNA, 19 nt, Artificial Sequence
  Description of Artificial Sequence: Synthetic oligonucleotide
cgcugccggcacugguacc

SEQ ID NO: 3066021 - RNA, 19 nt, Artificial Sequence
  Description of Artificial Sequence: Synthetic oligonucleotide
gcaccuccagaugauucuu

SEQ ID NO: 3066022 - RNA, 19 nt, Artificial Sequence
  Description of Artificial Sequence: Synthetic oligonucleotide
gcgaugcgcgcugccggca

SEQ ID NO: 3066023 - RNA, 19 nt, Artificial Sequence
  Description of Artificial Sequence: Synthetic oligonucleotide
gugggucaggugggcuugu

SEQ ID NO: 3066024 - RNA, 19 nt, Artificial Sequence
  Description of Artificial Sequence: Synthetic oligonucleotide
cgcuuuccacagcgcucgc

SEQ ID NO: 3066025 - RNA, 19 nt, Artificial Sequence
  Description of Artificial Sequence: Synthetic oligonucleotide
cgcuguccagcuucucaaa

SEQ ID NO: 3066026 - RNA, 19 nt, Artificial Sequence
  Description of Artificial Sequence: Synthetic oligonucleotide
ccggcacugguacccgcaa

SEQ ID NO: 3066027 - RNA, 19 nt, Artificial Sequence
  Description of Artificial Sequence: Synthetic oligonucleotide
cgcgcugccggcacuggua

SEQ ID NO: 3066028 - RNA, 19 nt, Artificial Sequence
  Description of Artificial Sequence: Synthetic oligonucleotide
cgaugcccaagaguacaaa

SEQ ID NO: 3066029 - RNA, 19 nt, Artificial Sequence
  Description of Artificial Sequence: Synthetic oligonucleotide
ccgugggcgcggguggguc

SEQ ID NO: 3066030 - RNA, 19 nt, Artificial Sequence
  Description of Artificial Sequence: Synthetic oligonucleotide
ccggguggcuuuugagcgu

SEQ ID NO: 3066031 - RNA, 19 nt, Artificial Sequence
  Description of Artificial Sequence: Synthetic oligonucleotide
cgugggcgcggguggguca

SEQ ID NO: 3066032 - RNA, 19 nt, Artificial Sequence
  Description of Artificial Sequence: Synthetic oligonucleotide
gugcgccggugcaccucca

SEQ ID NO: 3066033 - RNA, 19 nt, Artificial Sequence
  Description of Artificial Sequence: Synthetic oligonucleotide
cgccggugcaccuccagau

SEQ ID NO: 3066034 - RNA, 19 nt, Artificial Sequence
  Description of Artificial Sequence: Synthetic oligonucleotide
gcuugugguccggguggcu

SEQ ID NO: 3066035 - RNA, 19 nt, Artificial Sequence
  Description of Artificial Sequence: Synthetic oligonucleotide
gcgcgcugccggcacuggu

SEQ ID NO: 3066036 - RNA, 19 nt, Artificial Sequence
  Description of Artificial Sequence: Synthetic oligonucleotide
gggcgcgggugggucaggu

SEQ ID NO: 3066037 - RNA, 19 nt, Artificial Sequence
  Description of Artificial Sequence: Synthetic oligonucleotide
ggguggcuuuugagcgugu

SEQ ID NO: 3066038 - RNA, 19 nt, Artificial Sequence
  Description of Artificial Sequence: Synthetic oligonucleotide
cggugcaccuccagaugau

SEQ ID NO: 3066039 - RNA, 19 nt, Artificial Sequence
  Description of Artificial Sequence: Synthetic oligonucleotide
cgggugggucaggugggcu

SEQ ID NO: 3066040 - RNA, 19 nt, Artificial Sequence
  Description of Artificial Sequence: Synthetic oligonucleotide
acugauaugaacuggaagc

SEQ ID NO: 3066041 - RNA, 19 nt, Artificial Sequence
  Description of Artificial Sequence: Synthetic oligonucleotide
aaggaagaaaacaaaaugc

SEQ ID NO: 3066042 - RNA, 19 nt, Artificial Sequence
  Description of Artificial Sequence: Synthetic oligonucleotide
aaaggaagaaaacaaaaug

SEQ ID NO: 3066043 - RNA, 19 nt, Artificial Sequence
  Description of Artificial Sequence: Synthetic oligonucleotide
agaaaucagauauugcucc

SEQ ID NO: 3066044 - RNA, 19 nt, Artificial Sequence
  Description of Artificial Sequence: Synthetic oligonucleotide
ugugccuugacuuugcugg

SEQ ID NO: 3066045 - RNA, 19 nt, Artificial Sequence
  Description of Artificial Sequence: Synthetic oligonucleotide
uuuuauugaaucuaggauc

SEQ ID NO: 3066046 - RNA, 19 nt, Artificial Sequence
  Description of Artificial Sequence: Synthetic oligonucleotide
uuuauugaaucuaggauca

SEQ ID NO: 3066047 - RNA, 19 nt, Artificial Sequence
  Description of Artificial Sequence: Synthetic oligonucleotide
aacaacauucccaauaagg

SEQ ID NO: 3066048 - RNA, 19 nt, Artificial Sequence
  Description of Artificial Sequence: Synthetic oligonucleotide
ugagaaaucagauauugcu

SEQ ID NO: 3066049 - RNA, 19 nt, Artificial Sequence
  Description of Artificial Sequence: Synthetic oligonucleotide
aaagaagccacugauauga

SEQ ID NO: 3066050 - RNA, 19 nt, Artificial Sequence
  Description of Artificial Sequence: Synthetic oligonucleotide
gaaaacaaaaugcuuuucc

SEQ ID NO: 3066051 - RNA, 19 nt, Artificial Sequence
  Description of Artificial Sequence: Synthetic oligonucleotide
ucagucaagccaaagaagc

SEQ ID NO: 3066052 - RNA, 19 nt, Artificial Sequence
  Description of Artificial Sequence: Synthetic oligonucleotide
aacaaaaugcuuuuccuga

SEQ ID NO: 3066053 - RNA, 19 nt, Artificial Sequence
  Description of Artificial Sequence: Synthetic oligonucleotide
aggaauucauuccacaagg

SEQ ID NO: 3066054 - RNA, 19 nt, Artificial Sequence
  Description of Artificial Sequence: Synthetic oligonucleotide
aaacaaaaugcuuuuccug

SEQ ID NO: 3066055 - RNA, 19 nt, Artificial Sequence
  Description of Artificial Sequence: Synthetic oligonucleotide
aaaguuuguagauggcauc

SEQ ID NO: 3066056 - RNA, 19 nt, Artificial Sequence
  Description of Artificial Sequence: Synthetic oligonucleotide
uauugcuccauuuuguuca

SEQ ID NO: 3066057 - RNA, 19 nt, Artificial Sequence
  Description of Artificial Sequence: Synthetic oligonucleotide
ugaaucuaggaucagagua

SEQ ID NO: 3066058 - RNA, 19 nt, Artificial Sequence
  Description of Artificial Sequence: Synthetic oligonucleotide
aguagcauaagcuuuggga

SEQ ID NO: 3066059 - RNA, 19 nt, Artificial Sequence
  Description of Artificial Sequence: Synthetic oligonucleotide
aauucauuccacaaggcug

SEQ ID NO: 3066060 - RNA, 19 nt, Artificial Sequence
  Description of Artificial Sequence: Synthetic oligonucleotide
uuuguagauggcaucaaug

SEQ ID NO: 3066061 - RNA, 19 nt, Artificial Sequence
  Description of Artificial Sequence: Synthetic oligonucleotide
agcucucuccauuuaaugc

SEQ ID NO: 3066062 - RNA, 19 nt, Artificial Sequence
  Description of Artificial Sequence: Synthetic oligonucleotide
uuccugagaaaucagauau

SEQ ID NO: 3066063 - RNA, 19 nt, Artificial Sequence
  Description of Artificial Sequence: Synthetic oligonucleotide
aaucuaggaucagaguagc

SEQ ID NO: 3066064 - RNA, 19 nt, Artificial Sequence
  Description of Artificial Sequence: Synthetic oligonucleotide
aauaaggaauucauuccac

SEQ ID NO: 3066065 - RNA, 19 nt, Artificial Sequence
  Description of Artificial Sequence: Synthetic oligonucleotide
ugucagucaagccaaagaa

SEQ ID NO: 3066066 - RNA, 19 nt, Artificial Sequence
  Description of Artificial Sequence: Synthetic oligonucleotide
ucuccauugguccagcucu

SEQ ID NO: 3066067 - RNA, 19 nt, Artificial Sequence
  Description of Artificial Sequence: Synthetic oligonucleotide
aaaucagagcucuuuucug

SEQ ID NO: 3066068 - RNA, 19 nt, Artificial Sequence
  Description of Artificial Sequence: Synthetic oligonucleotide
auucauuccacaaggcugc

SEQ ID NO: 3066069 - RNA, 19 nt, Artificial Sequence
  Description of Artificial Sequence: Synthetic oligonucleotide
aaaaugcuuuuccugagaa

SEQ ID NO: 3066070 - RNA, 19 nt, Artificial Sequence
  Description of Artificial Sequence: Synthetic oligonucleotide
aaucagagcucuuuucugu

SEQ ID NO: 3066071 - RNA, 19 nt, Artificial Sequence
  Description of Artificial Sequence: Synthetic oligonucleotide
auugaaucuaggaucagag

SEQ ID NO: 3066072 - RNA, 19 nt, Artificial Sequence
  Description of Artificial Sequence: Synthetic oligonucleotide
agcuuugggaacaacauuc

SEQ ID NO: 3066073 - RNA, 19 nt, Artificial Sequence
  Description of Artificial Sequence: Synthetic oligonucleotide
ucugcuuuccucaccagga

SEQ ID NO: 3066074 - RNA, 19 nt, Artificial Sequence
  Description of Artificial Sequence: Synthetic oligonucleotide
gaaucuaggaucagaguag

SEQ ID NO: 3066075 - RNA, 19 nt, Artificial Sequence
  Description of Artificial Sequence: Synthetic oligonucleotide
uuuuccugagaaaucagau

SEQ ID NO: 3066076 - RNA, 19 nt, Artificial Sequence
  Description of Artificial Sequence: Synthetic oligonucleotide
agggucucuccauuggucc

SEQ ID NO: 3066077 - RNA, 19 nt, Artificial Sequence
  Description of Artificial Sequence: Synthetic oligonucleotide
cauuccacaaggcugcagg

SEQ ID NO: 3066078 - RNA, 19 nt, Artificial Sequence
  Description of Artificial Sequence: Synthetic oligonucleotide
aaggcugcagggucucucc

SEQ ID NO: 3066079 - RNA, 19 nt, Artificial Sequence
  Description of Artificial Sequence: Synthetic oligonucleotide
uguucugcuuuccucacca

SEQ ID NO: 3066080 - RNA, 19 nt, Artificial Sequence
  Description of Artificial Sequence: Synthetic oligonucleotide
auauugcuccauuuuguuc

SEQ ID NO: 3066081 - RNA, 19 nt, Artificial Sequence
  Description of Artificial Sequence: Synthetic oligonucleotide
uaagcuuugggaacaacau

SEQ ID NO: 3066082 - RNA, 19 nt, Artificial Sequence
  Description of Artificial Sequence: Synthetic oligonucleotide
ucuuuucugucuccaggcg

SEQ ID NO: 3066083 - RNA, 19 nt, Artificial Sequence
  Description of Artificial Sequence: Synthetic oligonucleotide
uucugcuuuccucaccagg

SEQ ID NO: 3066084 - RNA, 19 nt, Artificial Sequence
  Description of Artificial Sequence: Synthetic oligonucleotide
aacauucccaauaaggaau

SEQ ID NO: 3066085 - RNA, 19 nt, Artificial Sequence
  Description of Artificial Sequence: Synthetic oligonucleotide
uccauuuaaugcuccugcg

SEQ ID NO: 3066086 - RNA, 19 nt, Artificial Sequence
  Description of Artificial Sequence: Synthetic oligonucleotide
uugucagucaagccaaaga

SEQ ID NO: 3066087 - RNA, 19 nt, Artificial Sequence
  Description of Artificial Sequence: Synthetic oligonucleotide
uaaggaauucauuccacaa

SEQ ID NO: 3066088 - RNA, 19 nt, Artificial Sequence
  Description of Artificial Sequence: Synthetic oligonucleotide
uagauggcaucaauggaca

SEQ ID NO: 3066089 - RNA, 19 nt, Artificial Sequence
  Description of Artificial Sequence: Synthetic oligonucleotide
uggacaaggggaaaucaga

SEQ ID NO: 3066090 - RNA, 19 nt, Artificial Sequence
  Description of Artificial Sequence: Synthetic oligonucleotide
auaaggaauucauuccaca

SEQ ID NO: 3066091 - RNA, 19 nt, Artificial Sequence
  Description of Artificial Sequence: Synthetic oligonucleotide
gacuuugcuggccucaggc

SEQ ID NO: 3066092 - RNA, 19 nt, Artificial Sequence
  Description of Artificial Sequence: Synthetic oligonucleotide
acaaaaugcuuuuccugag

SEQ ID NO: 3066093 - RNA, 19 nt, Artificial Sequence
  Description of Artificial Sequence: Synthetic oligonucleotide
cuccauuuaaugcuccugc

SEQ ID NO: 3066094 - RNA, 19 nt, Artificial Sequence
  Description of Artificial Sequence: Synthetic oligonucleotide
uugggaacaacauucccaa

SEQ ID NO: 3066095 - RNA, 19 nt, Artificial Sequence
  Description of Artificial Sequence: Synthetic oligonucleotide
aaguuuguagauggcauca

SEQ ID NO: 3066096 - RNA, 19 nt, Artificial Sequence
  Description of Artificial Sequence: Synthetic oligonucleotide
acaacauucccaauaagga

SEQ ID NO: 3066097 - RNA, 19 nt, Artificial Sequence
  Description of Artificial Sequence: Synthetic oligonucleotide
agaagccacugauaugaac

SEQ ID NO: 3066098 - RNA, 19 nt, Artificial Sequence
  Description of Artificial Sequence: Synthetic oligonucleotide
uucccaauaaggaauucau

SEQ ID NO: 3066099 - RNA, 19 nt, Artificial Sequence
  Description of Artificial Sequence: Synthetic oligonucleotide
ucagauauugcuccauuuu

SEQ ID NO: 3066100 - RNA, 19 nt, Artificial Sequence
  Description of Artificial Sequence: Synthetic oligonucleotide
guagcauaagcuuugggaa

SEQ ID NO: 3066101 - RNA, 19 nt, Artificial Sequence
  Description of Artificial Sequence: Synthetic oligonucleotide
acuuugcuggccucaggcc

SEQ ID NO: 3066102 - RNA, 19 nt, Artificial Sequence
  Description of Artificial Sequence: Synthetic oligonucleotide
uuuaaugcuccugcgguug

SEQ ID NO: 3066103 - RNA, 19 nt, Artificial Sequence
  Description of Artificial Sequence: Synthetic oligonucleotide
aggaagaaaacaaaaugcu

SEQ ID NO: 3066104 - RNA, 19 nt, Artificial Sequence
  Description of Artificial Sequence: Synthetic oligonucleotide
ucagaguagcauaagcuuu

SEQ ID NO: 3066105 - RNA, 19 nt, Artificial Sequence
  Description of Artificial Sequence: Synthetic oligonucleotide
guagauggcaucaauggac

SEQ ID NO: 3066106 - RNA, 19 nt, Artificial Sequence
  Description of Artificial Sequence: Synthetic oligonucleotide
ugcuuuuccugagaaauca

SEQ ID NO: 3066107 - RNA, 19 nt, Artificial Sequence
  Description of Artificial Sequence: Synthetic oligonucleotide
aagccacugauaugaacug

SEQ ID NO: 3066108 - RNA, 19 nt, Artificial Sequence
  Description of Artificial Sequence: Synthetic oligonucleotide
ugaacuggaagcccuguuc

SEQ ID NO: 3066109 - RNA, 19 nt, Artificial Sequence
  Description of Artificial Sequence: Synthetic oligonucleotide
cagauauugcuccauuuug

SEQ ID NO: 3066110 - RNA, 19 nt, Artificial Sequence
  Description of Artificial Sequence: Synthetic oligonucleotide
uauugaaucuaggaucaga

SEQ ID NO: 3066111 - RNA, 19 nt, Artificial Sequence
  Description of Artificial Sequence: Synthetic oligonucleotide
acuggaagcccuguucugc

SEQ ID NO: 3066112 - RNA, 19 nt, Artificial Sequence
  Description of Artificial Sequence: Synthetic oligonucleotide
ucuaggaucagaguagcau

SEQ ID NO: 3066113 - RNA, 19 nt, Artificial Sequence
  Description of Artificial Sequence: Synthetic oligonucleotide
ggccaaaguuuguagaugg

SEQ ID NO: 3066114 - RNA, 19 nt, Artificial Sequence
  Description of Artificial Sequence: Synthetic oligonucleotide
gacaaggggaaaucagagc

SEQ ID NO: 3066115 - RNA, 19 nt, Artificial Sequence
  Description of Artificial Sequence: Synthetic oligonucleotide
cugauaugaacuggaagcc

SEQ ID NO: 3066116 - RNA, 19 nt, Artificial Sequence
  Description of Artificial Sequence: Synthetic oligonucleotide
aauggacaaggggaaauca

SEQ ID NO: 3066117 - RNA, 19 nt, Artificial Sequence
  Description of Artificial Sequence: Synthetic oligonucleotide
gaggcaaaggaagaaaaca

SEQ ID NO: 3066118 - RNA, 19 nt, Artificial Sequence
  Description of Artificial Sequence: Synthetic oligonucleotide
agagcucuuuucugucucc

SEQ ID NO: 3066119 - RNA, 19 nt, Artificial Sequence
  Description of Artificial Sequence: Synthetic oligonucleotide
cauugguccagcucucucc

SEQ ID NO: 3066120 - RNA, 19 nt, Artificial Sequence
  Description of Artificial Sequence: Synthetic oligonucleotide
ccaauaaggaauucauucc

SEQ ID NO: 3066121 - RNA, 19 nt, Artificial Sequence
  Description of Artificial Sequence: Synthetic oligonucleotide
gaaaucagagcucuuuucu

SEQ ID NO: 3066122 - RNA, 19 nt, Artificial Sequence
  Description of Artificial Sequence: Synthetic oligonucleotide
cugagaaaucagauauugc

SEQ ID NO: 3066123 - RNA, 19 nt, Artificial Sequence
  Description of Artificial Sequence: Synthetic oligonucleotide
gagaaaucagauauugcuc

SEQ ID NO: 3066124 - RNA, 19 nt, Artificial Sequence
  Description of Artificial Sequence: Synthetic oligonucleotide
aucagagcucuuuucuguc

SEQ ID NO: 3066125 - RNA, 19 nt, Artificial Sequence
  Description of Artificial Sequence: Synthetic oligonucleotide
cccaauaaggaauucauuc

SEQ ID NO: 3066126 - RNA, 19 nt, Artificial Sequence
  Description of Artificial Sequence: Synthetic oligonucleotide
ugcagggucucuccauugg

SEQ ID NO: 3066127 - RNA, 19 nt, Artificial Sequence
  Description of Artificial Sequence: Synthetic oligonucleotide
auaagcuuugggaacaaca

SEQ ID NO: 3066128 - RNA, 19 nt, Artificial Sequence
  Description of Artificial Sequence: Synthetic oligonucleotide
gucuccaggcguuuuauug

SEQ ID NO: 3066129 - RNA, 19 nt, Artificial Sequence
  Description of Artificial Sequence: Synthetic oligonucleotide
ucuccaggcguuuuauuga

SEQ ID NO: 3066130 - RNA, 19 nt, Artificial Sequence
  Description of Artificial Sequence: Synthetic oligonucleotide
ugauaugaacuggaagccc

SEQ ID NO: 3066131 - RNA, 19 nt, Artificial Sequence
  Description of Artificial Sequence: Synthetic oligonucleotide
cacugauaugaacuggaag

SEQ ID NO: 3066132 - RNA, 19 nt, Artificial Sequence
  Description of Artificial Sequence: Synthetic oligonucleotide
guuuuauugaaucuaggau

SEQ ID NO: 3066133 - RNA, 19 nt, Artificial Sequence
  Description of Artificial Sequence: Synthetic oligonucleotide
uaggaucagaguagcauaa

SEQ ID NO: 3066134 - RNA, 19 nt, Artificial Sequence
  Description of Artificial Sequence: Synthetic oligonucleotide
aaucagauauugcuccauu

SEQ ID NO: 3066135 - RNA, 19 nt, Artificial Sequence
  Description of Artificial Sequence: Synthetic oligonucleotide
auuccacaaggcugcaggg

SEQ ID NO: 3066136 - RNA, 19 nt, Artificial Sequence
  Description of Artificial Sequence: Synthetic oligonucleotide
cagaguagcauaagcuuug

SEQ ID NO: 3066137 - RNA, 19 nt, Artificial Sequence
  Description of Artificial Sequence: Synthetic oligonucleotide
ggcaucaauggacaagggg

SEQ ID NO: 3066138 - RNA, 19 nt, Artificial Sequence
  Description of Artificial Sequence: Synthetic oligonucleotide
uuuccugagaaaucagaua

SEQ ID NO: 3066139 - RNA, 19 nt, Artificial Sequence
  Description of Artificial Sequence: Synthetic oligonucleotide
gaagccacugauaugaacu

SEQ ID NO: 3066140 - RNA, 19 nt, Artificial Sequence
  Description of Artificial Sequence: Synthetic oligonucleotide
gaacaacauucccaauaag

SEQ ID NO: 3066141 - RNA, 19 nt, Artificial Sequence
  Description of Artificial Sequence: Synthetic oligonucleotide
uagcauaagcuuugggaac

SEQ ID NO: 3066142 - RNA, 19 nt, Artificial Sequence
  Description of Artificial Sequence: Synthetic oligonucleotide
gaauucauuccacaaggcu

SEQ ID NO: 3066143 - RNA, 19 nt, Artificial Sequence
  Description of Artificial Sequence: Synthetic oligonucleotide
uugaaucuaggaucagagu

SEQ ID NO: 3066144 - RNA, 19 nt, Artificial Sequence
  Description of Artificial Sequence: Synthetic oligonucleotide
caccaggaggcaaaggaag

SEQ ID NO: 3066145 - RNA, 19 nt, Artificial Sequence
  Description of Artificial Sequence: Synthetic oligonucleotide
uuuucugucuccaggcguu

SEQ ID NO: 3066146 - RNA, 19 nt, Artificial Sequence
  Description of Artificial Sequence: Synthetic oligonucleotide
gaaaucagauauugcucca

SEQ ID NO: 3066147 - RNA, 19 nt, Artificial Sequence
  Description of Artificial Sequence: Synthetic oligonucleotide
cagucaagccaaagaagcc

SEQ ID NO: 3066148 - RNA, 19 nt, Artificial Sequence
  Description of Artificial Sequence: Synthetic oligonucleotide
gaguagcauaagcuuuggg

SEQ ID NO: 3066149 - RNA, 19 nt, Artificial Sequence
  Description of Artificial Sequence: Synthetic oligonucleotide
agucaagccaaagaagcca

SEQ ID NO: 3066150 - RNA, 19 nt, Artificial Sequence
  Description of Artificial Sequence: Synthetic oligonucleotide
aacuggaagcccuguucug

SEQ ID NO: 3066151 - RNA, 19 nt, Artificial Sequence
  Description of Artificial Sequence: Synthetic oligonucleotide
ggaucagaguagcauaagc

SEQ ID NO: 3066152 - RNA, 19 nt, Artificial Sequence
  Description of Artificial Sequence: Synthetic oligonucleotide
cucaggccaaaguuuguag

SEQ ID NO: 3066153 - RNA, 19 nt, Artificial Sequence
  Description of Artificial Sequence: Synthetic oligonucleotide
cucaccaggaggcaaagga

SEQ ID NO: 3066154 - RNA, 19 nt, Artificial Sequence
  Description of Artificial Sequence: Synthetic oligonucleotide
ucaccaggaggcaaaggaa

SEQ ID NO: 3066155 - RNA, 19 nt, Artificial Sequence
  Description of Artificial Sequence: Synthetic oligonucleotide
auucccaauaaggaauuca

SEQ ID NO: 3066156 - RNA, 19 nt, Artificial Sequence
  Description of Artificial Sequence: Synthetic oligonucleotide
cuuuuccugagaaaucaga

SEQ ID NO: 3066157 - RNA, 19 nt, Artificial Sequence
  Description of Artificial Sequence: Synthetic oligonucleotide
aagcuuugggaacaacauu

SEQ ID NO: 3066158 - RNA, 19 nt, Artificial Sequence
  Description of Artificial Sequence: Synthetic oligonucleotide
agauauugcuccauuuugu

SEQ ID NO: 3066159 - RNA, 19 nt, Artificial Sequence
  Description of Artificial Sequence: Synthetic oligonucleotide
gucagucaagccaaagaag

SEQ ID NO: 3066160 - RNA, 19 nt, Artificial Sequence
  Description of Artificial Sequence: Synthetic oligonucleotide
auugguccagcucucucca

SEQ ID NO: 3066161 - RNA, 19 nt, Artificial Sequence
  Description of Artificial Sequence: Synthetic oligonucleotide
aaaucagauauugcuccau

SEQ ID NO: 3066162 - RNA, 19 nt, Artificial Sequence
  Description of Artificial Sequence: Synthetic oligonucleotide
ucaauggacaaggggaaau

SEQ ID NO: 3066163 - RNA, 19 nt, Artificial Sequence
  Description of Artificial Sequence: Synthetic oligonucleotide
gcaucaauggacaagggga

SEQ ID NO: 3066164 - RNA, 19 nt, Artificial Sequence
  Description of Artificial Sequence: Synthetic oligonucleotide
agcauaagcuuugggaaca

SEQ ID NO: 3066165 - RNA, 19 nt, Artificial Sequence
  Description of Artificial Sequence: Synthetic oligonucleotide
ucagagcucuuuucugucu

SEQ ID NO: 3066166 - RNA, 19 nt, Artificial Sequence
  Description of Artificial Sequence: Synthetic oligonucleotide
aucagauauugcuccauuu

SEQ ID NO: 3066167 - RNA, 19 nt, Artificial Sequence
  Description of Artificial Sequence: Synthetic oligonucleotide
ugacuuugcuggccucagg

SEQ ID NO: 3066168 - RNA, 19 nt, Artificial Sequence
  Description of Artificial Sequence: Synthetic oligonucleotide
gauaugaacuggaagcccu

SEQ ID NO: 3066169 - RNA, 19 nt, Artificial Sequence
  Description of Artificial Sequence: Synthetic oligonucleotide
aaugcuccugcgguuguca

SEQ ID NO: 3066170 - RNA, 19 nt, Artificial Sequence
  Description of Artificial Sequence: Synthetic oligonucleotide
uccagcucucuccauuuaa

SEQ ID NO: 3066171 - RNA, 19 nt, Artificial Sequence
  Description of Artificial Sequence: Synthetic oligonucleotide
caacauucccaauaaggaa

SEQ ID NO: 3066172 - RNA, 19 nt, Artificial Sequence
  Description of Artificial Sequence: Synthetic oligonucleotide
agaguagcauaagcuuugg

SEQ ID NO: 3066173 - RNA, 19 nt, Artificial Sequence
  Description of Artificial Sequence: Synthetic oligonucleotide
uuaaugcuccugcgguugu

SEQ ID NO: 3066174 - RNA, 19 nt, Artificial Sequence
  Description of Artificial Sequence: Synthetic oligonucleotide
uuauugaaucuaggaucag

SEQ ID NO: 3066175 - RNA, 19 nt, Artificial Sequence
  Description of Artificial Sequence: Synthetic oligonucleotide
auggacaaggggaaaucag

SEQ ID NO: 3066176 - RNA, 19 nt, Artificial Sequence
  Description of Artificial Sequence: Synthetic oligonucleotide
caagccaaagaagccacug

SEQ ID NO: 3066177 - RNA, 19 nt, Artificial Sequence
  Description of Artificial Sequence: Synthetic oligonucleotide
ccauuuaaugcuccugcgg

SEQ ID NO: 3066178 - RNA, 19 nt, Artificial Sequence
  Description of Artificial Sequence: Synthetic oligonucleotide
auuuaaugcuccugcgguu

SEQ ID NO: 3066179 - RNA, 19 nt, Artificial Sequence
  Description of Artificial Sequence: Synthetic oligonucleotide
ggaacaacauucccaauaa

SEQ ID NO: 3066180 - RNA, 19 nt, Artificial Sequence
  Description of Artificial Sequence: Synthetic oligonucleotide
uuugcuggccucaggccaa

SEQ ID NO: 3066181 - RNA, 19 nt, Artificial Sequence
  Description of Artificial Sequence: Synthetic oligonucleotide
cauuuaaugcuccugcggu

SEQ ID NO: 3066182 - RNA, 19 nt, Artificial Sequence
  Description of Artificial Sequence: Synthetic oligonucleotide
ugcgguugucagucaagcc

SEQ ID NO: 3066183 - RNA, 19 nt, Artificial Sequence
  Description of Artificial Sequence: Synthetic oligonucleotide
ccugagaaaucagauauug

SEQ ID NO: 3066184 - RNA, 19 nt, Artificial Sequence
  Description of Artificial Sequence: Synthetic oligonucleotide
cuaggaucagaguagcaua

SEQ ID NO: 3066185 - RNA, 19 nt, Artificial Sequence
  Description of Artificial Sequence: Synthetic oligonucleotide
cucucuccauuuaaugcuc

SEQ ID NO: 3066186 - RNA, 19 nt, Artificial Sequence
  Description of Artificial Sequence: Synthetic oligonucleotide
ucaagccaaagaagccacu

SEQ ID NO: 3066187 - RNA, 19 nt, Artificial Sequence
  Description of Artificial Sequence: Synthetic oligonucleotide
cagcucucuccauuuaaug

SEQ ID NO: 3066188 - RNA, 19 nt, Artificial Sequence
  Description of Artificial Sequence: Synthetic oligonucleotide
ucccaauaaggaauucauu

SEQ ID NO: 3066189 - RNA, 19 nt, Artificial Sequence
  Description of Artificial Sequence: Synthetic oligonucleotide
aagcccuguucugcuuucc

SEQ ID NO: 3066190 - RNA, 19 nt, Artificial Sequence
  Description of Artificial Sequence: Synthetic oligonucleotide
gaacuggaagcccuguucu

SEQ ID NO: 3066191 - RNA, 19 nt, Artificial Sequence
  Description of Artificial Sequence: Synthetic oligonucleotide
cuuugcuggccucaggcca

SEQ ID NO: 3066192 - RNA, 19 nt, Artificial Sequence
  Description of Artificial Sequence: Synthetic oligonucleotide
agcucuuuucugucuccag

SEQ ID NO: 3066193 - RNA, 19 nt, Artificial Sequence
  Description of Artificial Sequence: Synthetic oligonucleotide
ggacaaggggaaaucagag

SEQ ID NO: 3066194 - RNA, 19 nt, Artificial Sequence
  Description of Artificial Sequence: Synthetic oligonucleotide
ggcguuuuauugaaucuag

SEQ ID NO: 3066195 - RNA, 19 nt, Artificial Sequence
  Description of Artificial Sequence: Synthetic oligonucleotide
caucaauggacaaggggaa

SEQ ID NO: 3066196 - RNA, 19 nt, Artificial Sequence
  Description of Artificial Sequence: Synthetic oligonucleotide
caaggggaaaucagagcuc

SEQ ID NO: 3066197 - RNA, 19 nt, Artificial Sequence
  Description of Artificial Sequence: Synthetic oligonucleotide
agccacugauaugaacugg

SEQ ID NO: 3066198 - RNA, 19 nt, Artificial Sequence
  Description of Artificial Sequence: Synthetic oligonucleotide
ggaaaucagagcucuuuuc

SEQ ID NO: 3066199 - RNA, 19 nt, Artificial Sequence
  Description of Artificial Sequence: Synthetic oligonucleotide
uugacuuugcuggccucag

SEQ ID NO: 3066200 - RNA, 19 nt, Artificial Sequence
  Description of Artificial Sequence: Synthetic oligonucleotide
guugucagucaagccaaag

SEQ ID NO: 3066201 - RNA, 19 nt, Artificial Sequence
  Description of Artificial Sequence: Synthetic oligonucleotide
gauauugcuccauuuuguu

SEQ ID NO: 3066202 - RNA, 19 nt, Artificial Sequence
  Description of Artificial Sequence: Synthetic oligonucleotide
ucugucuccaggcguuuua

SEQ ID NO: 3066203 - RNA, 19 nt, Artificial Sequence
  Description of Artificial Sequence: Synthetic oligonucleotide
uuccucaccaggaggcaaa

SEQ ID NO: 3066204 - RNA, 19 nt, Artificial Sequence
  Description of Artificial Sequence: Synthetic oligonucleotide
caaaaugcuuuuccugaga

SEQ ID NO: 3066205 - RNA, 19 nt, Artificial Sequence
  Description of Artificial Sequence: Synthetic oligonucleotide
augcuuuuccugagaaauc

SEQ ID NO: 3066206 - RNA, 19 nt, Artificial Sequence
  Description of Artificial Sequence: Synthetic oligonucleotide
uaugaacuggaagcccugu

SEQ ID NO: 3066207 - RNA, 19 nt, Artificial Sequence
  Description of Artificial Sequence: Synthetic oligonucleotide
caaaguuuguagauggcau

SEQ ID NO: 3066208 - RNA, 19 nt, Artificial Sequence
  Description of Artificial Sequence: Synthetic oligonucleotide
gucaagccaaagaagccac

SEQ ID NO: 3066209 - RNA, 19 nt, Artificial Sequence
  Description of Artificial Sequence: Synthetic oligonucleotide
gcgguugucagucaagcca

SEQ ID NO: 3066210 - RNA, 19 nt, Artificial Sequence
  Description of Artificial Sequence: Synthetic oligonucleotide
uccugagaaaucagauauu

SEQ ID NO: 3066211 - RNA, 19 nt, Artificial Sequence
  Description of Artificial Sequence: Synthetic oligonucleotide
gcaaaggaagaaaacaaaa

SEQ ID NO: 3066212 - RNA, 19 nt, Artificial Sequence
  Description of Artificial Sequence: Synthetic oligonucleotide
cugcgguugucagucaagc

SEQ ID NO: 3066213 - RNA, 19 nt, Artificial Sequence
  Description of Artificial Sequence: Synthetic oligonucleotide
cagagcucuuuucugucuc

SEQ ID NO: 3066214 - RNA, 19 nt, Artificial Sequence
  Description of Artificial Sequence: Synthetic oligonucleotide
aggccaaaguuuguagaug

SEQ ID NO: 3066215 - RNA, 19 nt, Artificial Sequence
  Description of Artificial Sequence: Synthetic oligonucleotide
caauggacaaggggaaauc

SEQ ID NO: 3066216 - RNA, 19 nt, Artificial Sequence
  Description of Artificial Sequence: Synthetic oligonucleotide
aggaucagaguagcauaag

SEQ ID NO: 3066217 - RNA, 19 nt, Artificial Sequence
  Description of Artificial Sequence: Synthetic oligonucleotide
uggccucaggccaaaguuu

SEQ ID NO: 3066218 - RNA, 19 nt, Artificial Sequence
  Description of Artificial Sequence: Synthetic oligonucleotide
aggaggcaaaggaagaaaa

SEQ ID NO: 3066219 - RNA, 19 nt, Artificial Sequence
  Description of Artificial Sequence: Synthetic oligonucleotide
cucuccauugguccagcuc

SEQ ID NO: 3066220 - RNA, 19 nt, Artificial Sequence
  Description of Artificial Sequence: Synthetic oligonucleotide
ucauuccacaaggcugcag

SEQ ID NO: 3066221 - RNA, 19 nt, Artificial Sequence
  Description of Artificial Sequence: Synthetic oligonucleotide
cugcuuuccucaccaggag

SEQ ID NO: 3066222 - RNA, 19 nt, Artificial Sequence
  Description of Artificial Sequence: Synthetic oligonucleotide
ccaggcguuuuauugaauc

SEQ ID NO: 3066223 - RNA, 19 nt, Artificial Sequence
  Description of Artificial Sequence: Synthetic oligonucleotide
gugugccuugacuuugcug

SEQ ID NO: 3066224 - RNA, 19 nt, Artificial Sequence
  Description of Artificial Sequence: Synthetic oligonucleotide
ggaauucauuccacaaggc

SEQ ID NO: 3066225 - RNA, 19 nt, Artificial Sequence
  Description of Artificial Sequence: Synthetic oligonucleotide
auaugaacuggaagcccug

SEQ ID NO: 3066226 - RNA, 19 nt, Artificial Sequence
  Description of Artificial Sequence: Synthetic oligonucleotide
cagggucucuccauugguc

SEQ ID NO: 3066227 - RNA, 19 nt, Artificial Sequence
  Description of Artificial Sequence: Synthetic oligonucleotide
uuccacaaggcugcagggu

SEQ ID NO: 3066228 - RNA, 19 nt, Artificial Sequence
  Description of Artificial Sequence: Synthetic oligonucleotide
ugguccagcucucuccauu

SEQ ID NO: 3066229 - RNA, 19 nt, Artificial Sequence
  Description of Artificial Sequence: Synthetic oligonucleotide
uccugcgguugucagucaa

SEQ ID NO: 3066230 - RNA, 19 nt, Artificial Sequence
  Description of Artificial Sequence: Synthetic oligonucleotide
cuguucugcuuuccucacc

SEQ ID NO: 3066231 - RNA, 19 nt, Artificial Sequence
  Description of Artificial Sequence: Synthetic oligonucleotide
auugcuccauuuuguucau

SEQ ID NO: 3066232 - RNA, 19 nt, Artificial Sequence
  Description of Artificial Sequence: Synthetic oligonucleotide
aggcguuuuauugaaucua

SEQ ID NO: 3066233 - RNA, 19 nt, Artificial Sequence
  Description of Artificial Sequence: Synthetic oligonucleotide
gaagcccuguucugcuuuc

SEQ ID NO: 3066234 - RNA, 19 nt, Artificial Sequence
  Description of Artificial Sequence: Synthetic oligonucleotide
ugccuugacuuugcuggcc

SEQ ID NO: 3066235 - RNA, 19 nt, Artificial Sequence
  Description of Artificial Sequence: Synthetic oligonucleotide
augaacuggaagcccuguu

SEQ ID NO: 3066236 - RNA, 19 nt, Artificial Sequence
  Description of Artificial Sequence: Synthetic oligonucleotide
augcuccugcgguugucag

SEQ ID NO: 3066237 - RNA, 19 nt, Artificial Sequence
  Description of Artificial Sequence: Synthetic oligonucleotide
cauaagcuuugggaacaac

SEQ ID NO: 3066238 - RNA, 19 nt, Artificial Sequence
  Description of Artificial Sequence: Synthetic oligonucleotide
guucugcuuuccucaccag

SEQ ID NO: 3066239 - RNA, 19 nt, Artificial Sequence
  Description of Artificial Sequence: Synthetic oligonucleotide
gcguuuuauugaaucuagg

SEQ ID NO: 3066240 - RNA, 19 nt, Artificial Sequence
  Description of Artificial Sequence: Synthetic oligonucleotide
uccucaccaggaggcaaag

SEQ ID NO: 3066241 - RNA, 19 nt, Artificial Sequence
  Description of Artificial Sequence: Synthetic oligonucleotide
acauucccaauaaggaauu

SEQ ID NO: 3066242 - RNA, 19 nt, Artificial Sequence
  Description of Artificial Sequence: Synthetic oligonucleotide
gcucucuccauuuaaugcu

SEQ ID NO: 3066243 - RNA, 19 nt, Artificial Sequence
  Description of Artificial Sequence: Synthetic oligonucleotide
cuugacuuugcuggccuca

SEQ ID NO: 3066244 - RNA, 19 nt, Artificial Sequence
  Description of Artificial Sequence: Synthetic oligonucleotide
cuuuucugucuccaggcgu

SEQ ID NO: 3066245 - RNA, 19 nt, Artificial Sequence
  Description of Artificial Sequence: Synthetic oligonucleotide
cugcagggucucuccauug

SEQ ID NO: 3066246 - RNA, 19 nt, Artificial Sequence
  Description of Artificial Sequence: Synthetic oligonucleotide
aguuuguagauggcaucaa

SEQ ID NO: 3066247 - RNA, 19 nt, Artificial Sequence
  Description of Artificial Sequence: Synthetic oligonucleotide
ggcaaaggaagaaaacaaa

SEQ ID NO: 3066248 - RNA, 19 nt, Artificial Sequence
  Description of Artificial Sequence: Synthetic oligonucleotide
gugccuugacuuugcuggc

SEQ ID NO: 3066249 - RNA, 19 nt, Artificial Sequence
  Description of Artificial Sequence: Synthetic oligonucleotide
agcccuguucugcuuuccu

SEQ ID NO: 3066250 - RNA, 19 nt, Artificial Sequence
  Description of Artificial Sequence: Synthetic oligonucleotide
guuuguagauggcaucaau

SEQ ID NO: 3066251 - RNA, 19 nt, Artificial Sequence
  Description of Artificial Sequence: Synthetic oligonucleotide
uccaggcguuuuauugaau

SEQ ID NO: 3066252 - RNA, 19 nt, Artificial Sequence
  Description of Artificial Sequence: Synthetic oligonucleotide
aucaauggacaaggggaaa

SEQ ID NO: 3066253 - RNA, 19 nt, Artificial Sequence
  Description of Artificial Sequence: Synthetic oligonucleotide
ucucuccauugguccagcu

SEQ ID NO: 3066254 - RNA, 19 nt, Artificial Sequence
  Description of Artificial Sequence: Synthetic oligonucleotide
uucauuccacaaggcugca

SEQ ID NO: 3066255 - RNA, 19 nt, Artificial Sequence
  Description of Artificial Sequence: Synthetic oligonucleotide
ccaaaguuuguagauggca

SEQ ID NO: 3066256 - RNA, 19 nt, Artificial Sequence
  Description of Artificial Sequence: Synthetic oligonucleotide
gagcucuuuucugucucca

SEQ ID NO: 3066257 - RNA, 19 nt, Artificial Sequence
  Description of Artificial Sequence: Synthetic oligonucleotide
aagaagccacugauaugaa

SEQ ID NO: 3066258 - RNA, 19 nt, Artificial Sequence
  Description of Artificial Sequence: Synthetic oligonucleotide
ugucuccaggcguuuuauu

SEQ ID NO: 3066259 - RNA, 19 nt, Artificial Sequence
  Description of Artificial Sequence: Synthetic oligonucleotide
ugggaacaacauucccaau

SEQ ID NO: 3066260 - RNA, 19 nt, Artificial Sequence
  Description of Artificial Sequence: Synthetic oligonucleotide
cuccaggcguuuuauugaa

SEQ ID NO: 3066261 - RNA, 19 nt, Artificial Sequence
  Description of Artificial Sequence: Synthetic oligonucleotide
gcuuuuccugagaaaucag

SEQ ID NO: 3066262 - RNA, 19 nt, Artificial Sequence
  Description of Artificial Sequence: Synthetic oligonucleotide
cauucccaauaaggaauuc

SEQ ID NO: 3066263 - RNA, 19 nt, Artificial Sequence
  Description of Artificial Sequence: Synthetic oligonucleotide
caggcguuuuauugaaucu

SEQ ID NO: 3066264 - RNA, 19 nt, Artificial Sequence
  Description of Artificial Sequence: Synthetic oligonucleotide
cuccauugguccagcucuc

SEQ ID NO: 3066265 - RNA, 19 nt, Artificial Sequence
  Description of Artificial Sequence: Synthetic oligonucleotide
ggccucaggccaaaguuug

SEQ ID NO: 3066266 - RNA, 19 nt, Artificial Sequence
  Description of Artificial Sequence: Synthetic oligonucleotide
gccacugauaugaacugga

SEQ ID NO: 3066267 - RNA, 19 nt, Artificial Sequence
  Description of Artificial Sequence: Synthetic oligonucleotide
caggccaaaguuuguagau

SEQ ID NO: 3066268 - RNA, 19 nt, Artificial Sequence
  Description of Artificial Sequence: Synthetic oligonucleotide
aucuaggaucagaguagca

SEQ ID NO: 3066269 - RNA, 19 nt, Artificial Sequence
  Description of Artificial Sequence: Synthetic oligonucleotide
uaaugcuccugcgguuguc

SEQ ID NO: 3066270 - RNA, 19 nt, Artificial Sequence
  Description of Artificial Sequence: Synthetic oligonucleotide
cccuguucugcuuuccuca

SEQ ID NO: 3066271 - RNA, 19 nt, Artificial Sequence
  Description of Artificial Sequence: Synthetic oligonucleotide
uggaagcccuguucugcuu

SEQ ID NO: 3066272 - RNA, 19 nt, Artificial Sequence
  Description of Artificial Sequence: Synthetic oligonucleotide
ccugcgguugucagucaag

SEQ ID NO: 3066273 - RNA, 19 nt, Artificial Sequence
  Description of Artificial Sequence: Synthetic oligonucleotide
gccaaaguuuguagauggc

SEQ ID NO: 3066274 - RNA, 19 nt, Artificial Sequence
  Description of Artificial Sequence: Synthetic oligonucleotide
ccuguucugcuuuccucac

SEQ ID NO: 3066275 - RNA, 19 nt, Artificial Sequence
  Description of Artificial Sequence: Synthetic oligonucleotide
cuggccucaggccaaaguu

SEQ ID NO: 3066276 - RNA, 19 nt, Artificial Sequence
  Description of Artificial Sequence: Synthetic oligonucleotide
cacaaggcugcagggucuc

SEQ ID NO: 3066277 - RNA, 19 nt, Artificial Sequence
  Description of Artificial Sequence: Synthetic oligonucleotide
uuucugucuccaggcguuu

SEQ ID NO: 3066278 - RNA, 19 nt, Artificial Sequence
  Description of Artificial Sequence: Synthetic oligonucleotide
uugguccagcucucuccau

SEQ ID NO: 3066279 - RNA, 19 nt, Artificial Sequence
  Description of Artificial Sequence: Synthetic oligonucleotide
cuggaagcccuguucugcu

SEQ ID NO: 3066280 - RNA, 19 nt, Artificial Sequence
  Description of Artificial Sequence: Synthetic oligonucleotide
uucugucuccaggcguuuu

SEQ ID NO: 3066281 - RNA, 19 nt, Artificial Sequence
  Description of Artificial Sequence: Synthetic oligonucleotide
gggaaaucagagcucuuuu

SEQ ID NO: 3066282 - RNA, 19 nt, Artificial Sequence
  Description of Artificial Sequence: Synthetic oligonucleotide
gcccuguucugcuuuccuc

SEQ ID NO: 3066283 - RNA, 19 nt, Artificial Sequence
  Description of Artificial Sequence: Synthetic oligonucleotide
uugcuccauuuuguucauc

SEQ ID NO: 3066284 - RNA, 19 nt, Artificial Sequence
  Description of Artificial Sequence: Synthetic oligonucleotide
ccauugguccagcucucuc

SEQ ID NO: 3066285 - RNA, 19 nt, Artificial Sequence
  Description of Artificial Sequence: Synthetic oligonucleotide
ugcuggccucaggccaaag

SEQ ID NO: 3066286 - RNA, 19 nt, Artificial Sequence
  Description of Artificial Sequence: Synthetic oligonucleotide
gccaaagaagccacugaua

SEQ ID NO: 3066287 - RNA, 19 nt, Artificial Sequence
  Description of Artificial Sequence: Synthetic oligonucleotide
ccacugauaugaacuggaa

SEQ ID NO: 3066288 - RNA, 19 nt, Artificial Sequence
  Description of Artificial Sequence: Synthetic oligonucleotide
cgguugucagucaagccaa

SEQ ID NO: 3066289 - RNA, 19 nt, Artificial Sequence
  Description of Artificial Sequence: Synthetic oligonucleotide
ccuugacuuugcuggccuc

SEQ ID NO: 3066290 - RNA, 19 nt, Artificial Sequence
  Description of Artificial Sequence: Synthetic oligonucleotide
guccagcucucuccauuua

SEQ ID NO: 3066291 - RNA, 19 nt, Artificial Sequence
  Description of Artificial Sequence: Synthetic oligonucleotide
ggggaaaucagagcucuuu

SEQ ID NO: 3066292 - RNA, 19 nt, Artificial Sequence
  Description of Artificial Sequence: Synthetic oligonucleotide
gccuugacuuugcuggccu

SEQ ID NO: 3066293 - RNA, 19 nt, Artificial Sequence
  Description of Artificial Sequence: Synthetic oligonucleotide
ccucaccaggaggcaaagg

SEQ ID NO: 3066294 - RNA, 19 nt, Artificial Sequence
  Description of Artificial Sequence: Synthetic oligonucleotide
uugcuggccucaggccaaa

SEQ ID NO: 3066295 - RNA, 19 nt, Artificial Sequence
  Description of Artificial Sequence: Synthetic oligonucleotide
ggaagcccuguucugcuuu

SEQ ID NO: 3066296 - RNA, 19 nt, Artificial Sequence
  Description of Artificial Sequence: Synthetic oligonucleotide
gcagggucucuccauuggu

SEQ ID NO: 3066297 - RNA, 19 nt, Artificial Sequence
  Description of Artificial Sequence: Synthetic oligonucleotide
gguccagcucucuccauuu

SEQ ID NO: 3066298 - RNA, 19 nt, Artificial Sequence
  Description of Artificial Sequence: Synthetic oligonucleotide
gcauaagcuuugggaacaa

SEQ ID NO: 3066299 - RNA, 19 nt, Artificial Sequence
  Description of Artificial Sequence: Synthetic oligonucleotide
cuccugcgguugucaguca

SEQ ID NO: 3066300 - RNA, 19 nt, Artificial Sequence
  Description of Artificial Sequence: Synthetic oligonucleotide
ccagcucucuccauuuaau

SEQ ID NO: 3066301 - RNA, 19 nt, Artificial Sequence
  Description of Artificial Sequence: Synthetic oligonucleotide
cugucuccaggcguuuuau

SEQ ID NO: 3066302 - RNA, 19 nt, Artificial Sequence
  Description of Artificial Sequence: Synthetic oligonucleotide
gguugucagucaagccaaa

SEQ ID NO: 3066303 - RNA, 19 nt, Artificial Sequence
  Description of Artificial Sequence: Synthetic oligonucleotide
gcugcagggucucuccauu

SEQ ID NO: 3066304 - RNA, 19 nt, Artificial Sequence
  Description of Artificial Sequence: Synthetic oligonucleotide
ccucaggccaaaguuugua

SEQ ID NO: 3066305 - RNA, 19 nt, Artificial Sequence
  Description of Artificial Sequence: Synthetic oligonucleotide
ggcugcagggucucuccau

SEQ ID NO: 3066306 - RNA, 19 nt, Artificial Sequence
  Description of Artificial Sequence: Synthetic oligonucleotide
ccacaaggcugcagggucu

SEQ ID NO: 3066307 - RNA, 19 nt, Artificial Sequence
  Description of Artificial Sequence: Synthetic oligonucleotide
gccucaggccaaaguuugu

SEQ ID NO: 3066308 - RNA, 19 nt, Artificial Sequence
  Description of Artificial Sequence: Synthetic oligonucleotide
auauacagcacauuguuuc

SEQ ID NO: 3066309 - RNA, 19 nt, Artificial Sequence
  Description of Artificial Sequence: Synthetic oligonucleotide
uguacuuauauacagcaca

SEQ ID NO: 3066310 - RNA, 19 nt, Artificial Sequence
  Description of Artificial Sequence: Synthetic oligonucleotide
aacucugaagagcugcucc

SEQ ID NO: 3066311 - RNA, 19 nt, Artificial Sequence
  Description of Artificial Sequence: Synthetic oligonucleotide
aaugaucugcuuuaagaag

SEQ ID NO: 3066312 - RNA, 19 nt, Artificial Sequence
  Description of Artificial Sequence: Synthetic oligonucleotide
uuuaagaagucacuaggag

SEQ ID NO: 3066313 - RNA, 19 nt, Artificial Sequence
  Description of Artificial Sequence: Synthetic oligonucleotide
acuuauauacagcacauug

SEQ ID NO: 3066314 - RNA, 19 nt, Artificial Sequence
  Description of Artificial Sequence: Synthetic oligonucleotide
ucauuguuaacuacccucg

SEQ ID NO: 3066315 - RNA, 19 nt, Artificial Sequence
  Description of Artificial Sequence: Synthetic oligonucleotide
uugaguuucaccacaacug

SEQ ID NO: 3066316 - RNA, 19 nt, Artificial Sequence
  Description of Artificial Sequence: Synthetic oligonucleotide
uccauuuacauacucuucc

SEQ ID NO: 3066317 - RNA, 19 nt, Artificial Sequence
  Description of Artificial Sequence: Synthetic oligonucleotide
ugaguuucaccacaacugg

SEQ ID NO: 3066318 - RNA, 19 nt, Artificial Sequence
  Description of Artificial Sequence: Synthetic oligonucleotide
uguguacuuauauacagca

SEQ ID NO: 3066319 - RNA, 19 nt, Artificial Sequence
  Description of Artificial Sequence: Synthetic oligonucleotide
auuuacauacucuuccguc

SEQ ID NO: 3066320 - RNA, 19 nt, Artificial Sequence
  Description of Artificial Sequence: Synthetic oligonucleotide
uuguuaacuacccucgcag

SEQ ID NO: 3066321 - RNA, 19 nt, Artificial Sequence
  Description of Artificial Sequence: Synthetic oligonucleotide
agugcuauguucauguagc

SEQ ID NO: 3066322 - RNA, 19 nt, Artificial Sequence
  Description of Artificial Sequence: Synthetic oligonucleotide
auacucuuccgucuguucc

SEQ ID NO: 3066323 - RNA, 19 nt, Artificial Sequence
  Description of Artificial Sequence: Synthetic oligonucleotide
uaagaagucacuaggaguu

SEQ ID NO: 3066324 - RNA, 19 nt, Artificial Sequence
  Description of Artificial Sequence: Synthetic oligonucleotide
uuaagaagucacuaggagu

SEQ ID NO: 3066325 - RNA, 19 nt, Artificial Sequence
  Description of Artificial Sequence: Synthetic oligonucleotide
cuucuguguacuuauauac

SEQ ID NO: 3066326 - RNA, 19 nt, Artificial Sequence
  Description of Artificial Sequence: Synthetic oligonucleotide
aguuuguuuccgcagacuc

SEQ ID NO: 3066327 - RNA, 19 nt, Artificial Sequence
  Description of Artificial Sequence: Synthetic oligonucleotide
ucgauaauccacuccagag

SEQ ID NO: 3066328 - RNA, 19 nt, Artificial Sequence
  Description of Artificial Sequence: Synthetic oligonucleotide
uuauauacagcacauuguu

SEQ ID NO: 3066329 - RNA, 19 nt, Artificial Sequence
  Description of Artificial Sequence: Synthetic oligonucleotide
uguucauguagccauccag

SEQ ID NO: 3066330 - RNA, 19 nt, Artificial Sequence
  Description of Artificial Sequence: Synthetic oligonucleotide
cauguagccauccaggcag

SEQ ID NO: 3066331 - RNA, 19 nt, Artificial Sequence
  Description of Artificial Sequence: Synthetic oligonucleotide
uauccaacucugaagagcu

SEQ ID NO: 3066332 - RNA, 19 nt, Artificial Sequence
  Description of Artificial Sequence: Synthetic oligonucleotide
uguuccagugcuauguuca

SEQ ID NO: 3066333 - RNA, 19 nt, Artificial Sequence
  Description of Artificial Sequence: Synthetic oligonucleotide
uuuacauacucuuccgucu

SEQ ID NO: 3066334 - RNA, 19 nt, Artificial Sequence
  Description of Artificial Sequence: Synthetic oligonucleotide
gucacuaggaguuuguuuc

SEQ ID NO: 3066335 - RNA, 19 nt, Artificial Sequence
  Description of Artificial Sequence: Synthetic oligonucleotide
aguuucaccacaacuggcc

SEQ ID NO: 3066336 - RNA, 19 nt, Artificial Sequence
  Description of Artificial Sequence: Synthetic oligonucleotide
ugcuuuaagaagucacuag

SEQ ID NO: 3066337 - RNA, 19 nt, Artificial Sequence
  Description of Artificial Sequence: Synthetic oligonucleotide
agacucauuguuaacuacc

SEQ ID NO: 3066338 - RNA, 19 nt, Artificial Sequence
  Description of Artificial Sequence: Synthetic oligonucleotide
cucauuguuaacuacccuc

SEQ ID NO: 3066339 - RNA, 19 nt, Artificial Sequence
  Description of Artificial Sequence: Synthetic oligonucleotide
ucugcuuuaagaagucacu

SEQ ID NO: 3066340 - RNA, 19 nt, Artificial Sequence
  Description of Artificial Sequence: Synthetic oligonucleotide
gcuuuaagaagucacuagg

SEQ ID NO: 3066341 - RNA, 19 nt, Artificial Sequence
  Description of Artificial Sequence: Synthetic oligonucleotide
cagcuguccauuuacauac

SEQ ID NO: 3066342 - RNA, 19 nt, Artificial Sequence
  Description of Artificial Sequence: Synthetic oligonucleotide
uccagugcuauguucaugu

SEQ ID NO: 3066343 - RNA, 19 nt, Artificial Sequence
  Description of Artificial Sequence: Synthetic oligonucleotide
uguuuccgcagacucauug

SEQ ID NO: 3066344 - RNA, 19 nt, Artificial Sequence
  Description of Artificial Sequence: Synthetic oligonucleotide
ucggaugaaugcaucgccg

SEQ ID NO: 3066345 - RNA, 19 nt, Artificial Sequence
  Description of Artificial Sequence: Synthetic oligonucleotide
uuaacuacccucgcagccg

SEQ ID NO: 3066346 - RNA, 19 nt, Artificial Sequence
  Description of Artificial Sequence: Synthetic oligonucleotide
aaugcaucgccguacuuau

SEQ ID NO: 3066347 - RNA, 19 nt, Artificial Sequence
  Description of Artificial Sequence: Synthetic oligonucleotide
ucugaagagcugcuccugg

SEQ ID NO: 3066348 - RNA, 19 nt, Artificial Sequence
  Description of Artificial Sequence: Synthetic oligonucleotide
uauacagcacauuguuucc

SEQ ID NO: 3066349 - RNA, 19 nt, Artificial Sequence
  Description of Artificial Sequence: Synthetic oligonucleotide
uccugguaucuucacaucc

SEQ ID NO: 3066350 - RNA, 19 nt, Artificial Sequence
  Description of Artificial Sequence: Synthetic oligonucleotide
auccggagcccucacaggc

SEQ ID NO: 3066351 - RNA, 19 nt, Artificial Sequence
  Description of Artificial Sequence: Synthetic oligonucleotide
ucuucagcuguccauuuac

SEQ ID NO: 3066352 - RNA, 19 nt, Artificial Sequence
  Description of Artificial Sequence: Synthetic oligonucleotide
acuaggaguuuguuuccgc

SEQ ID NO: 3066353 - RNA, 19 nt, Artificial Sequence
  Description of Artificial Sequence: Synthetic oligonucleotide
uucuguguacuuauauaca

SEQ ID NO: 3066354 - RNA, 19 nt, Artificial Sequence
  Description of Artificial Sequence: Synthetic oligonucleotide
uuacauacucuuccgucug

SEQ ID NO: 3066355 - RNA, 19 nt, Artificial Sequence
  Description of Artificial Sequence: Synthetic oligonucleotide
uucauguagccauccaggc

SEQ ID NO: 3066356 - RNA, 19 nt, Artificial Sequence
  Description of Artificial Sequence: Synthetic oligonucleotide
guuaacuacccucgcagcc

SEQ ID NO: 3066357 - RNA, 19 nt, Artificial Sequence
  Description of Artificial Sequence: Synthetic oligonucleotide
guucauguagccauccagg

SEQ ID NO: 3066358 - RNA, 19 nt, Artificial Sequence
  Description of Artificial Sequence: Synthetic oligonucleotide
uguccauuuacauacucuu

SEQ ID NO: 3066359 - RNA, 19 nt, Artificial Sequence
  Description of Artificial Sequence: Synthetic oligonucleotide
acuuauucuucagcugucc

SEQ ID NO: 3066360 - RNA, 19 nt, Artificial Sequence
  Description of Artificial Sequence: Synthetic oligonucleotide
ugcaucgccguacuuauuc

SEQ ID NO: 3066361 - RNA, 19 nt, Artificial Sequence
  Description of Artificial Sequence: Synthetic oligonucleotide
ucuuccgucuguuccagug

SEQ ID NO: 3066362 - RNA, 19 nt, Artificial Sequence
  Description of Artificial Sequence: Synthetic oligonucleotide
auuguuaacuacccucgca

SEQ ID NO: 3066363 - RNA, 19 nt, Artificial Sequence
  Description of Artificial Sequence: Synthetic oligonucleotide
uguuuccucggaugaaugc

SEQ ID NO: 3066364 - RNA, 19 nt, Artificial Sequence
  Description of Artificial Sequence: Synthetic oligonucleotide
uccucggaugaaugcaucg

SEQ ID NO: 3066365 - RNA, 19 nt, Artificial Sequence
  Description of Artificial Sequence: Synthetic oligonucleotide
cuuuaagaagucacuagga

SEQ ID NO: 3066366 - RNA, 19 nt, Artificial Sequence
  Description of Artificial Sequence: Synthetic oligonucleotide
acauuguuuccucggauga

SEQ ID NO: 3066367 - RNA, 19 nt, Artificial Sequence
  Description of Artificial Sequence: Synthetic oligonucleotide
agaguugaguuucaccaca

SEQ ID NO: 3066368 - RNA, 19 nt, Artificial Sequence
  Description of Artificial Sequence: Synthetic oligonucleotide
cuguguacuuauauacagc

SEQ ID NO: 3066369 - RNA, 19 nt, Artificial Sequence
  Description of Artificial Sequence: Synthetic oligonucleotide
guuucaccacaacuggccg

SEQ ID NO: 3066370 - RNA, 19 nt, Artificial Sequence
  Description of Artificial Sequence: Synthetic oligonucleotide
uguuaacuacccucgcagc

SEQ ID NO: 3066371 - RNA, 19 nt, Artificial Sequence
  Description of Artificial Sequence: Synthetic oligonucleotide
uaggaguuuguuuccgcag

SEQ ID NO: 3066372 - RNA, 19 nt, Artificial Sequence
  Description of Artificial Sequence: Synthetic oligonucleotide
uccaaugaucugcuuuaag

SEQ ID NO: 3066373 - RNA, 19 nt, Artificial Sequence
  Description of Artificial Sequence: Synthetic oligonucleotide
uccaacucugaagagcugc

SEQ ID NO: 3066374 - RNA, 19 nt, Artificial Sequence
  Description of Artificial Sequence: Synthetic oligonucleotide
gacucauuguuaacuaccc

SEQ ID NO: 3066375 - RNA, 19 nt, Artificial Sequence
  Description of Artificial Sequence: Synthetic oligonucleotide
ucuucuguguacuuauaua

SEQ ID NO: 3066376 - RNA, 19 nt, Artificial Sequence
  Description of Artificial Sequence: Synthetic oligonucleotide
uccagaguugaguuucacc

SEQ ID NO: 3066377 - RNA, 19 nt, Artificial Sequence
  Description of Artificial Sequence: Synthetic oligonucleotide
uaacuacccucgcagccgg

SEQ ID NO: 3066378 - RNA, 19 nt, Artificial Sequence
  Description of Artificial Sequence: Synthetic oligonucleotide
ucauguagccauccaggca

SEQ ID NO: 3066379 - RNA, 19 nt, Artificial Sequence
  Description of Artificial Sequence: Synthetic oligonucleotide
aguugaguuucaccacaac

SEQ ID NO: 3066380 - RNA, 19 nt, Artificial Sequence
  Description of Artificial Sequence: Synthetic oligonucleotide
uauauacagcacauuguuu

SEQ ID NO: 3066381 - RNA, 19 nt, Artificial Sequence
  Description of Artificial Sequence: Synthetic oligonucleotide
acagcacauuguuuccucg

SEQ ID NO: 3066382 - RNA, 19 nt, Artificial Sequence
  Description of Artificial Sequence: Synthetic oligonucleotide
uuuguuuccgcagacucau

SEQ ID NO: 3066383 - RNA, 19 nt, Artificial Sequence
  Description of Artificial Sequence: Synthetic oligonucleotide
caaugaucugcuuuaagaa

SEQ ID NO: 3066384 - RNA, 19 nt, Artificial Sequence
  Description of Artificial Sequence: Synthetic oligonucleotide
gaugaaugcaucgccguac

SEQ ID NO: 3066385 - RNA, 19 nt, Artificial Sequence
  Description of Artificial Sequence: Synthetic oligonucleotide
cacauuguuuccucggaug

SEQ ID NO: 3066386 - RNA, 19 nt, Artificial Sequence
  Description of Artificial Sequence: Synthetic oligonucleotide
ucagcuguccauuuacaua

SEQ ID NO: 3066387 - RNA, 19 nt, Artificial Sequence
  Description of Artificial Sequence: Synthetic oligonucleotide
cucggaugaaugcaucgcc

SEQ ID NO: 3066388 - RNA, 19 nt, Artificial Sequence
  Description of Artificial Sequence: Synthetic oligonucleotide
acaacuggccguccaauga

SEQ ID NO: 3066389 - RNA, 19 nt, Artificial Sequence
  Description of Artificial Sequence: Synthetic oligonucleotide
cagugcuauguucauguag

SEQ ID NO: 3066390 - RNA, 19 nt, Artificial Sequence
  Description of Artificial Sequence: Synthetic oligonucleotide
gauaauccacuccagaguu

SEQ ID NO: 3066391 - RNA, 19 nt, Artificial Sequence
  Description of Artificial Sequence: Synthetic oligonucleotide
uccgcagacucauuguuaa

SEQ ID NO: 3066392 - RNA, 19 nt, Artificial Sequence
  Description of Artificial Sequence: Synthetic oligonucleotide
ugaucugcuuuaagaaguc

SEQ ID NO: 3066393 - RNA, 19 nt, Artificial Sequence
  Description of Artificial Sequence: Synthetic oligonucleotide
uaucuucacauccgucucu

SEQ ID NO: 3066394 - RNA, 19 nt, Artificial Sequence
  Description of Artificial Sequence: Synthetic oligonucleotide
ucacuaggaguuuguuucc

SEQ ID NO: 3066395 - RNA, 19 nt, Artificial Sequence
  Description of Artificial Sequence: Synthetic oligonucleotide
uacccucgcagccggaucc

SEQ ID NO: 3066396 - RNA, 19 nt, Artificial Sequence
  Description of Artificial Sequence: Synthetic oligonucleotide
guacuuauucuucagcugu

SEQ ID NO: 3066397 - RNA, 19 nt, Artificial Sequence
  Description of Artificial Sequence: Synthetic oligonucleotide
uacucuuccgucuguucca

SEQ ID NO: 3066398 - RNA, 19 nt, Artificial Sequence
  Description of Artificial Sequence: Synthetic oligonucleotide
cuuauauacagcacauugu

SEQ ID NO: 3066399 - RNA, 19 nt, Artificial Sequence
  Description of Artificial Sequence: Synthetic oligonucleotide
aggaguuuguuuccgcaga

SEQ ID NO: 3066400 - RNA, 19 nt, Artificial Sequence
  Description of Artificial Sequence: Synthetic oligonucleotide
uuuccucggaugaaugcau

SEQ ID NO: 3066401 - RNA, 19 nt, Artificial Sequence
  Description of Artificial Sequence: Synthetic oligonucleotide
acauccgucucuucugugu

SEQ ID NO: 3066402 - RNA, 19 nt, Artificial Sequence
  Description of Artificial Sequence: Synthetic oligonucleotide
uccacuccagaguugaguu

SEQ ID NO: 3066403 - RNA, 19 nt, Artificial Sequence
  Description of Artificial Sequence: Synthetic oligonucleotide
cagcacauuguuuccucgg

SEQ ID NO: 3066404 - RNA, 19 nt, Artificial Sequence
  Description of Artificial Sequence: Synthetic oligonucleotide
uauucuucagcuguccauu

SEQ ID NO: 3066405 - RNA, 19 nt, Artificial Sequence
  Description of Artificial Sequence: Synthetic oligonucleotide
cauuguuaacuacccucgc

SEQ ID NO: 3066406 - RNA, 19 nt, Artificial Sequence
  Description of Artificial Sequence: Synthetic oligonucleotide
uacuuauucuucagcuguc

SEQ ID NO: 3066407 - RNA, 19 nt, Artificial Sequence
  Description of Artificial Sequence: Synthetic oligonucleotide
uuccgucuguuccagugcu

SEQ ID NO: 3066408 - RNA, 19 nt, Artificial Sequence
  Description of Artificial Sequence: Synthetic oligonucleotide
agcugcuccugguaucuuc

SEQ ID NO: 3066409 - RNA, 19 nt, Artificial Sequence
  Description of Artificial Sequence: Synthetic oligonucleotide
ugcuauguucauguagcca

SEQ ID NO: 3066410 - RNA, 19 nt, Artificial Sequence
  Description of Artificial Sequence: Synthetic oligonucleotide
cagacucauuguuaacuac

SEQ ID NO: 3066411 - RNA, 19 nt, Artificial Sequence
  Description of Artificial Sequence: Synthetic oligonucleotide
uuuccgcagacucauuguu

SEQ ID NO: 3066412 - RNA, 19 nt, Artificial Sequence
  Description of Artificial Sequence: Synthetic oligonucleotide
uccaggcaggccaggaccc

SEQ ID NO: 3066413 - RNA, 19 nt, Artificial Sequence
  Description of Artificial Sequence: Synthetic oligonucleotide
ccagaguugaguuucacca

SEQ ID NO: 3066414 - RNA, 19 nt, Artificial Sequence
  Description of Artificial Sequence: Synthetic oligonucleotide
ucacauccgucucuucugu

SEQ ID NO: 3066415 - RNA, 19 nt, Artificial Sequence
  Description of Artificial Sequence: Synthetic oligonucleotide
acucugaagagcugcuccu

SEQ ID NO: 3066416 - RNA, 19 nt, Artificial Sequence
  Description of Artificial Sequence: Synthetic oligonucleotide
uuucaccacaacuggccgu

SEQ ID NO: 3066417 - RNA, 19 nt, Artificial Sequence
  Description of Artificial Sequence: Synthetic oligonucleotide
uggccguccaaugaucugc

SEQ ID NO: 3066418 - RNA, 19 nt, Artificial Sequence
  Description of Artificial Sequence: Synthetic oligonucleotide
agcacauuguuuccucgga

SEQ ID NO: 3066419 - RNA, 19 nt, Artificial Sequence
  Description of Artificial Sequence: Synthetic oligonucleotide
ccauuuacauacucuuccg

SEQ ID NO: 3066420 - RNA, 19 nt, Artificial Sequence
  Description of Artificial Sequence: Synthetic oligonucleotide
gauccggagcccucacagg

SEQ ID NO: 3066421 - RNA, 19 nt, Artificial Sequence
  Description of Artificial Sequence: Synthetic oligonucleotide
augaaugcaucgccguacu

SEQ ID NO: 3066422 - RNA, 19 nt, Artificial Sequence
  Description of Artificial Sequence: Synthetic oligonucleotide
acucauuguuaacuacccu

SEQ ID NO: 3066423 - RNA, 19 nt, Artificial Sequence
  Description of Artificial Sequence: Synthetic oligonucleotide
ugaagagcugcuccuggua

SEQ ID NO: 3066424 - RNA, 19 nt, Artificial Sequence
  Description of Artificial Sequence: Synthetic oligonucleotide
uacagcacauuguuuccuc

SEQ ID NO: 3066425 - RNA, 19 nt, Artificial Sequence
  Description of Artificial Sequence: Synthetic oligonucleotide
ccaaugaucugcuuuaaga

SEQ ID NO: 3066426 - RNA, 19 nt, Artificial Sequence
  Description of Artificial Sequence: Synthetic oligonucleotide
guaucuucacauccgucuc

SEQ ID NO: 3066427 - RNA, 19 nt, Artificial Sequence
  Description of Artificial Sequence: Synthetic oligonucleotide
cagaguugaguuucaccac

SEQ ID NO: 3066428 - RNA, 19 nt, Artificial Sequence
  Description of Artificial Sequence: Synthetic oligonucleotide
agucacuaggaguuuguuu

SEQ ID NO: 3066429 - RNA, 19 nt, Artificial Sequence
  Description of Artificial Sequence: Synthetic oligonucleotide
ugcuccugguaucuucaca

SEQ ID NO: 3066430 - RNA, 19 nt, Artificial Sequence
  Description of Artificial Sequence: Synthetic oligonucleotide
agaagucacuaggaguuug

SEQ ID NO: 3066431 - RNA, 19 nt, Artificial Sequence
  Description of Artificial Sequence: Synthetic oligonucleotide
agcccucacaggccgggcc

SEQ ID NO: 3066432 - RNA, 19 nt, Artificial Sequence
  Description of Artificial Sequence: Synthetic oligonucleotide
aucgccguacuuauucuuc

SEQ ID NO: 3066433 - RNA, 19 nt, Artificial Sequence
  Description of Artificial Sequence: Synthetic oligonucleotide
auccgucucuucuguguac

SEQ ID NO: 3066434 - RNA, 19 nt, Artificial Sequence
  Description of Artificial Sequence: Synthetic oligonucleotide
ggauccggagcccucacag

SEQ ID NO: 3066435 - RNA, 19 nt, Artificial Sequence
  Description of Artificial Sequence: Synthetic oligonucleotide
auuguuuccucggaugaau

SEQ ID NO: 3066436 - RNA, 19 nt, Artificial Sequence
  Description of Artificial Sequence: Synthetic oligonucleotide
ccugguaucuucacauccg

SEQ ID NO: 3066437 - RNA, 19 nt, Artificial Sequence
  Description of Artificial Sequence: Synthetic oligonucleotide
caggaccccucgauaaucc

SEQ ID NO: 3066438 - RNA, 19 nt, Artificial Sequence
  Description of Artificial Sequence: Synthetic oligonucleotide
cuuccgucuguuccagugc

SEQ ID NO: 3066439 - RNA, 19 nt, Artificial Sequence
  Description of Artificial Sequence: Synthetic oligonucleotide
gguaucuucacauccgucu

SEQ ID NO: 3066440 - RNA, 19 nt, Artificial Sequence
  Description of Artificial Sequence: Synthetic oligonucleotide
aacuggccguccaaugauc

SEQ ID NO: 3066441 - RNA, 19 nt, Artificial Sequence
  Description of Artificial Sequence: Synthetic oligonucleotide
gaguuucaccacaacuggc

SEQ ID NO: 3066442 - RNA, 19 nt, Artificial Sequence
  Description of Artificial Sequence: Synthetic oligonucleotide
cuaggaguuuguuuccgca

SEQ ID NO: 3066443 - RNA, 19 nt, Artificial Sequence
  Description of Artificial Sequence: Synthetic oligonucleotide
ucgccguacuuauucuuca

SEQ ID NO: 3066444 - RNA, 19 nt, Artificial Sequence
  Description of Artificial Sequence: Synthetic oligonucleotide
gaaugcaucgccguacuua

SEQ ID NO: 3066445 - RNA, 19 nt, Artificial Sequence
  Description of Artificial Sequence: Synthetic oligonucleotide
cuauguucauguagccauc

SEQ ID NO: 3066446 - RNA, 19 nt, Artificial Sequence
  Description of Artificial Sequence: Synthetic oligonucleotide
uucaccacaacuggccguc

SEQ ID NO: 3066447 - RNA, 19 nt, Artificial Sequence
  Description of Artificial Sequence: Synthetic oligonucleotide
ugguaucuucacauccguc

SEQ ID NO: 3066448 - RNA, 19 nt, Artificial Sequence
  Description of Artificial Sequence: Synthetic oligonucleotide
cauacucuuccgucuguuc

SEQ ID NO: 3066449 - RNA, 19 nt, Artificial Sequence
  Description of Artificial Sequence: Synthetic oligonucleotide
gugcuauguucauguagcc

SEQ ID NO: 3066450 - RNA, 19 nt, Artificial Sequence
  Description of Artificial Sequence: Synthetic oligonucleotide
cacaacuggccguccaaug

SEQ ID NO: 3066451 - RNA, 19 nt, Artificial Sequence
  Description of Artificial Sequence: Synthetic oligonucleotide
cacuaggaguuuguuuccg

SEQ ID NO: 3066452 - RNA, 19 nt, Artificial Sequence
  Description of Artificial Sequence: Synthetic oligonucleotide
uuccgcagacucauuguua

SEQ ID NO: 3066453 - RNA, 19 nt, Artificial Sequence
  Description of Artificial Sequence: Synthetic oligonucleotide
cucgauaauccacuccaga

SEQ ID NO: 3066454 - RNA, 19 nt, Artificial Sequence
  Description of Artificial Sequence: Synthetic oligonucleotide
auguucauguagccaucca

SEQ ID NO: 3066455 - RNA, 19 nt, Artificial Sequence
  Description of Artificial Sequence: Synthetic oligonucleotide
ucuguuccagugcuauguu

SEQ ID NO: 3066456 - RNA, 19 nt, Artificial Sequence
  Description of Artificial Sequence: Synthetic oligonucleotide
uucuucagcuguccauuua

SEQ ID NO: 3066457 - RNA, 19 nt, Artificial Sequence
  Description of Artificial Sequence: Synthetic oligonucleotide
uccggagcccucacaggcc

SEQ ID NO: 3066458 - RNA, 19 nt, Artificial Sequence
  Description of Artificial Sequence: Synthetic oligonucleotide
cucgcagccggauccggag

SEQ ID NO: 3066459 - RNA, 19 nt, Artificial Sequence
  Description of Artificial Sequence: Synthetic oligonucleotide
gcuauguucauguagccau

SEQ ID NO: 3066460 - RNA, 19 nt, Artificial Sequence
  Description of Artificial Sequence: Synthetic oligonucleotide
auacagcacauuguuuccu

SEQ ID NO: 3066461 - RNA, 19 nt, Artificial Sequence
  Description of Artificial Sequence: Synthetic oligonucleotide
cuguuccagugcuauguuc

SEQ ID NO: 3066462 - RNA, 19 nt, Artificial Sequence
  Description of Artificial Sequence: Synthetic oligonucleotide
uuccucggaugaaugcauc

SEQ ID NO: 3066463 - RNA, 19 nt, Artificial Sequence
  Description of Artificial Sequence: Synthetic oligonucleotide
auccacuccagaguugagu

SEQ ID NO: 3066464 - RNA, 19 nt, Artificial Sequence
  Description of Artificial Sequence: Synthetic oligonucleotide
uccgucucuucuguguacu

SEQ ID NO: 3066465 - RNA, 19 nt, Artificial Sequence
  Description of Artificial Sequence: Synthetic oligonucleotide
guguacuuauauacagcac

SEQ ID NO: 3066466 - RNA, 19 nt, Artificial Sequence
  Description of Artificial Sequence: Synthetic oligonucleotide
guuuguuuccgcagacuca

SEQ ID NO: 3066467 - RNA, 19 nt, Artificial Sequence
  Description of Artificial Sequence: Synthetic oligonucleotide
accccucgauaauccacuc

SEQ ID NO: 3066468 - RNA, 19 nt, Artificial Sequence
  Description of Artificial Sequence: Synthetic oligonucleotide
uccgcggacgcgcgcggcg

SEQ ID NO: 3066469 - RNA, 19 nt, Artificial Sequence
  Description of Artificial Sequence: Synthetic oligonucleotide
uuccagugcuauguucaug

SEQ ID NO: 3066470 - RNA, 19 nt, Artificial Sequence
  Description of Artificial Sequence: Synthetic oligonucleotide
uacuuauauacagcacauu

SEQ ID NO: 3066471 - RNA, 19 nt, Artificial Sequence
  Description of Artificial Sequence: Synthetic oligonucleotide
cuucagcuguccauuuaca

SEQ ID NO: 3066472 - RNA, 19 nt, Artificial Sequence
  Description of Artificial Sequence: Synthetic oligonucleotide
auucuucagcuguccauuu

SEQ ID NO: 3066473 - RNA, 19 nt, Artificial Sequence
  Description of Artificial Sequence: Synthetic oligonucleotide
aauccacuccagaguugag

SEQ ID NO: 3066474 - RNA, 19 nt, Artificial Sequence
  Description of Artificial Sequence: Synthetic oligonucleotide
ggaguuuguuuccgcagac

SEQ ID NO: 3066475 - RNA, 19 nt, Artificial Sequence
  Description of Artificial Sequence: Synthetic oligonucleotide
guagccauccaggcaggcc

SEQ ID NO: 3066476 - RNA, 19 nt, Artificial Sequence
  Description of Artificial Sequence: Synthetic oligonucleotide
gccguacuuauucuucagc

SEQ ID NO: 3066477 - RNA, 19 nt, Artificial Sequence
  Description of Artificial Sequence: Synthetic oligonucleotide
aagaagucacuaggaguuu

SEQ ID NO: 3066478 - RNA, 19 nt, Artificial Sequence
  Description of Artificial Sequence: Synthetic oligonucleotide
aagucacuaggaguuuguu

SEQ ID NO: 3066479 - RNA, 19 nt, Artificial Sequence
  Description of Artificial Sequence: Synthetic oligonucleotide
cuguccauuuacauacucu

SEQ ID NO: 3066480 - RNA, 19 nt, Artificial Sequence
  Description of Artificial Sequence: Synthetic oligonucleotide
guccauuuacauacucuuc

SEQ ID NO: 3066481 - RNA, 19 nt, Artificial Sequence
  Description of Artificial Sequence: Synthetic oligonucleotide
cauccaggcaggccaggac

SEQ ID NO: 3066482 - RNA, 19 nt, Artificial Sequence
  Description of Artificial Sequence: Synthetic oligonucleotide
uguagccauccaggcaggc

SEQ ID NO: 3066483 - RNA, 19 nt, Artificial Sequence
  Description of Artificial Sequence: Synthetic oligonucleotide
cauuuacauacucuuccgu

SEQ ID NO: 3066484 - RNA, 19 nt, Artificial Sequence
  Description of Artificial Sequence: Synthetic oligonucleotide
acaggccgggccuccgcgg

SEQ ID NO: 3066485 - RNA, 19 nt, Artificial Sequence
  Description of Artificial Sequence: Synthetic oligonucleotide
acuggccguccaaugaucu

SEQ ID NO: 3066486 - RNA, 19 nt, Artificial Sequence
  Description of Artificial Sequence: Synthetic oligonucleotide
ucgcagccggauccggagc

SEQ ID NO: 3066487 - RNA, 19 nt, Artificial Sequence
  Description of Artificial Sequence: Synthetic oligonucleotide
gucuguuccagugcuaugu

SEQ ID NO: 3066488 - RNA, 19 nt, Artificial Sequence
  Description of Artificial Sequence: Synthetic oligonucleotide
accacaacuggccguccaa

SEQ ID NO: 3066489 - RNA, 19 nt, Artificial Sequence
  Description of Artificial Sequence: Synthetic oligonucleotide
acucuuccgucuguuccag

SEQ ID NO: 3066490 - RNA, 19 nt, Artificial Sequence
  Description of Artificial Sequence: Synthetic oligonucleotide
guacuuauauacagcacau

SEQ ID NO: 3066491 - RNA, 19 nt, Artificial Sequence
  Description of Artificial Sequence: Synthetic oligonucleotide
ugaaugcaucgccguacuu

SEQ ID NO: 3066492 - RNA, 19 nt, Artificial Sequence
  Description of Artificial Sequence: Synthetic oligonucleotide
cguacuuauucuucagcug

SEQ ID NO: 3066493 - RNA, 19 nt, Artificial Sequence
  Description of Artificial Sequence: Synthetic oligonucleotide
cuccugguaucuucacauc

SEQ ID NO: 3066494 - RNA, 19 nt, Artificial Sequence
  Description of Artificial Sequence: Synthetic oligonucleotide
aggaccccucgauaaucca

SEQ ID NO: 3066495 - RNA, 19 nt, Artificial Sequence
  Description of Artificial Sequence: Synthetic oligonucleotide
ucacaggccgggccuccgc

SEQ ID NO: 3066496 - RNA, 19 nt, Artificial Sequence
  Description of Artificial Sequence: Synthetic oligonucleotide
cucugaagagcugcuccug

SEQ ID NO: 3066497 - RNA, 19 nt, Artificial Sequence
  Description of Artificial Sequence: Synthetic oligonucleotide
cacaggccgggccuccgcg

SEQ ID NO: 3066498 - RNA, 19 nt, Artificial Sequence
  Description of Artificial Sequence: Synthetic oligonucleotide
cccucgauaauccacucca

SEQ ID NO: 3066499 - RNA, 19 nt, Artificial Sequence
  Description of Artificial Sequence: Synthetic oligonucleotide
gucucuucuguguacuuau

SEQ ID NO: 3066500 - RNA, 19 nt, Artificial Sequence
  Description of Artificial Sequence: Synthetic oligonucleotide
guuuccgcagacucauugu

SEQ ID NO: 3066501 - RNA, 19 nt, Artificial Sequence
  Description of Artificial Sequence: Synthetic oligonucleotide
ucuucacauccgucucuuc

SEQ ID NO: 3066502 - RNA, 19 nt, Artificial Sequence
  Description of Artificial Sequence: Synthetic oligonucleotide
gaguugaguuucaccacaa

SEQ ID NO: 3066503 - RNA, 19 nt, Artificial Sequence
  Description of Artificial Sequence: Synthetic oligonucleotide
cuggccguccaaugaucug

SEQ ID NO: 3066504 - RNA, 19 nt, Artificial Sequence
  Description of Artificial Sequence: Synthetic oligonucleotide
cacauccgucucuucugug

SEQ ID NO: 3066505 - RNA, 19 nt, Artificial Sequence
  Description of Artificial Sequence: Synthetic oligonucleotide
gaagucacuaggaguuugu

SEQ ID NO: 3066506 - RNA, 19 nt, Artificial Sequence
  Description of Artificial Sequence: Synthetic oligonucleotide
cugcuuuaagaagucacua

SEQ ID NO: 3066507 - RNA, 19 nt, Artificial Sequence
  Description of Artificial Sequence: Synthetic oligonucleotide
aucuucacauccgucucuu

SEQ ID NO: 3066508 - RNA, 19 nt, Artificial Sequence
  Description of Artificial Sequence: Synthetic oligonucleotide
auguagccauccaggcagg

SEQ ID NO: 3066509 - RNA, 19 nt, Artificial Sequence
  Description of Artificial Sequence: Synthetic oligonucleotide
gcagacucauuguuaacua

SEQ ID NO: 3066510 - RNA, 19 nt, Artificial Sequence
  Description of Artificial Sequence: Synthetic oligonucleotide
gcuguccauuuacauacuc

SEQ ID NO: 3066511 - RNA, 19 nt, Artificial Sequence
  Description of Artificial Sequence: Synthetic oligonucleotide
acauacucuuccgucuguu

SEQ ID NO: 3066512 - RNA, 19 nt, Artificial Sequence
  Description of Artificial Sequence: Synthetic oligonucleotide
caacucugaagagcugcuc

SEQ ID NO: 3066513 - RNA, 19 nt, Artificial Sequence
  Description of Artificial Sequence: Synthetic oligonucleotide
gaccccucgauaauccacu

SEQ ID NO: 3066514 - RNA, 19 nt, Artificial Sequence
  Description of Artificial Sequence: Synthetic oligonucleotide
cugcuccugguaucuucac

SEQ ID NO: 3066515 - RNA, 19 nt, Artificial Sequence
  Description of Artificial Sequence: Synthetic oligonucleotide
cuacccucgcagccggauc

SEQ ID NO: 3066516 - RNA, 19 nt, Artificial Sequence
  Description of Artificial Sequence: Synthetic oligonucleotide
uccgucuguuccagugcua

SEQ ID NO: 3066517 - RNA, 19 nt, Artificial Sequence
  Description of Artificial Sequence: Synthetic oligonucleotide
ccucggaugaaugcaucgc

SEQ ID NO: 3066518 - RNA, 19 nt, Artificial Sequence
  Description of Artificial Sequence: Synthetic oligonucleotide
ccucgauaauccacuccag

SEQ ID NO: 3066519 - RNA, 19 nt, Artificial Sequence
  Description of Artificial Sequence: Synthetic oligonucleotide
gcuccugguaucuucacau

SEQ ID NO: 3066520 - RNA, 19 nt, Artificial Sequence
  Description of Artificial Sequence: Synthetic oligonucleotide
cauccgucucuucugugua

SEQ ID NO: 3066521 - RNA, 19 nt, Artificial Sequence
  Description of Artificial Sequence: Synthetic oligonucleotide
cugguaucuucacauccgu

SEQ ID NO: 3066522 - RNA, 19 nt, Artificial Sequence
  Description of Artificial Sequence: Synthetic oligonucleotide
cuccagaguugaguuucac

SEQ ID NO: 3066523 - RNA, 19 nt, Artificial Sequence
  Description of Artificial Sequence: Synthetic oligonucleotide
acuacccucgcagccggau

SEQ ID NO: 3066524 - RNA, 19 nt, Artificial Sequence
  Description of Artificial Sequence: Synthetic oligonucleotide
ucaccacaacuggccgucc

SEQ ID NO: 3066525 - RNA, 19 nt, Artificial Sequence
  Description of Artificial Sequence: Synthetic oligonucleotide
cauuguuuccucggaugaa

SEQ ID NO: 3066526 - RNA, 19 nt, Artificial Sequence
  Description of Artificial Sequence: Synthetic oligonucleotide
gaguuuguuuccgcagacu

SEQ ID NO: 3066527 - RNA, 19 nt, Artificial Sequence
  Description of Artificial Sequence: Synthetic oligonucleotide
ccguacuuauucuucagcu

SEQ ID NO: 3066528 - RNA, 19 nt, Artificial Sequence
  Description of Artificial Sequence: Synthetic oligonucleotide
ggaccccucgauaauccac

SEQ ID NO: 3066529 - RNA, 19 nt, Artificial Sequence
  Description of Artificial Sequence: Synthetic oligonucleotide
uuguuuccgcagacucauu

SEQ ID NO: 3066530 - RNA, 19 nt, Artificial Sequence
  Description of Artificial Sequence: Synthetic oligonucleotide
ggaugaaugcaucgccgua

SEQ ID NO: 3066531 - RNA, 19 nt, Artificial Sequence
  Description of Artificial Sequence: Synthetic oligonucleotide
ggccaggaccccucgauaa

SEQ ID NO: 3066532 - RNA, 19 nt, Artificial Sequence
  Description of Artificial Sequence: Synthetic oligonucleotide
ccggagcccucacaggccg

SEQ ID NO: 3066533 - RNA, 19 nt, Artificial Sequence
  Description of Artificial Sequence: Synthetic oligonucleotide
ggagcccucacaggccggg

SEQ ID NO: 3066534 - RNA, 19 nt, Artificial Sequence
  Description of Artificial Sequence: Synthetic oligonucleotide
aggccaggaccccucgaua

SEQ ID NO: 3066535 - RNA, 19 nt, Artificial Sequence
  Description of Artificial Sequence: Synthetic oligonucleotide
aggccgggccuccgcggac

SEQ ID NO: 3066536 - RNA, 19 nt, Artificial Sequence
  Description of Artificial Sequence: Synthetic oligonucleotide
auccaacucugaagagcug

SEQ ID NO: 3066537 - RNA, 19 nt, Artificial Sequence
  Description of Artificial Sequence: Synthetic oligonucleotide
acccucgcagccggauccg

SEQ ID NO: 3066538 - RNA, 19 nt, Artificial Sequence
  Description of Artificial Sequence: Synthetic oligonucleotide
ccccucgauaauccacucc

SEQ ID NO: 3066539 - RNA, 19 nt, Artificial Sequence
  Description of Artificial Sequence: Synthetic oligonucleotide
agcuguccauuuacauacu

SEQ ID NO: 3066540 - RNA, 19 nt, Artificial Sequence
  Description of Artificial Sequence: Synthetic oligonucleotide
caacuggccguccaaugau

SEQ ID NO: 3066541 - RNA, 19 nt, Artificial Sequence
  Description of Artificial Sequence: Synthetic oligonucleotide
gcugcuccugguaucuuca

SEQ ID NO: 3066542 - RNA, 19 nt, Artificial Sequence
  Description of Artificial Sequence: Synthetic oligonucleotide
guccaaugaucugcuuuaa

SEQ ID NO: 3066543 - RNA, 19 nt, Artificial Sequence
  Description of Artificial Sequence: Synthetic oligonucleotide
cguccaaugaucugcuuua

SEQ ID NO: 3066544 - RNA, 19 nt, Artificial Sequence
  Description of Artificial Sequence: Synthetic oligonucleotide
aacuacccucgcagccgga

SEQ ID NO: 3066545 - RNA, 19 nt, Artificial Sequence
  Description of Artificial Sequence: Synthetic oligonucleotide
gagcccucacaggccgggc

SEQ ID NO: 3066546 - RNA, 19 nt, Artificial Sequence
  Description of Artificial Sequence: Synthetic oligonucleotide
ccaggaccccucgauaauc

SEQ ID NO: 3066547 - RNA, 19 nt, Artificial Sequence
  Description of Artificial Sequence: Synthetic oligonucleotide
cgauaauccacuccagagu

SEQ ID NO: 3066548 - RNA, 19 nt, Artificial Sequence
  Description of Artificial Sequence: Synthetic oligonucleotide
cgcagccggauccggagcc

SEQ ID NO: 3066549 - RNA, 19 nt, Artificial Sequence
  Description of Artificial Sequence: Synthetic oligonucleotide
caucgccguacuuauucuu

SEQ ID NO: 3066550 - RNA, 19 nt, Artificial Sequence
  Description of Artificial Sequence: Synthetic oligonucleotide
cgccguacuuauucuucag

SEQ ID NO: 3066551 - RNA, 19 nt, Artificial Sequence
  Description of Artificial Sequence: Synthetic oligonucleotide
gcacauuguuuccucggau

SEQ ID NO: 3066552 - RNA, 19 nt, Artificial Sequence
  Description of Artificial Sequence: Synthetic oligonucleotide
gcaucgccguacuuauucu

SEQ ID NO: 3066553 - RNA, 19 nt, Artificial Sequence
  Description of Artificial Sequence: Synthetic oligonucleotide
ccgcagacucauuguuaac

SEQ ID NO: 3066554 - RNA, 19 nt, Artificial Sequence
  Description of Artificial Sequence: Synthetic oligonucleotide
caggccaggaccccucgau

SEQ ID NO: 3066555 - RNA, 19 nt, Artificial Sequence
  Description of Artificial Sequence: Synthetic oligonucleotide
caggccgggccuccgcgga

SEQ ID NO: 3066556 - RNA, 19 nt, Artificial Sequence
  Description of Artificial Sequence: Synthetic oligonucleotide
ggccgggccuccgcggacg

SEQ ID NO: 3066557 - RNA, 19 nt, Artificial Sequence
  Description of Artificial Sequence: Synthetic oligonucleotide
cgucuguuccagugcuaug

SEQ ID NO: 3066558 - RNA, 19 nt, Artificial Sequence
  Description of Artificial Sequence: Synthetic oligonucleotide
cgcagacucauuguuaacu

SEQ ID NO: 3066559 - RNA, 19 nt, Artificial Sequence
  Description of Artificial Sequence: Synthetic oligonucleotide
cuccgcggacgcgcgcggc

SEQ ID NO: 3066560 - RNA, 19 nt, Artificial Sequence
  Description of Artificial Sequence: Synthetic oligonucleotide
gcagccggauccggagccc

SEQ ID NO: 3066561 - RNA, 19 nt, Artificial Sequence
  Description of Artificial Sequence: Synthetic oligonucleotide
ccguccaaugaucugcuuu

SEQ ID NO: 3066562 - RNA, 19 nt, Artificial Sequence
  Description of Artificial Sequence: Synthetic oligonucleotide
augcaucgccguacuuauu

SEQ ID NO: 3066563 - RNA, 19 nt, Artificial Sequence
  Description of Artificial Sequence: Synthetic oligonucleotide
cggaugaaugcaucgccgu

SEQ ID NO: 3066564 - RNA, 19 nt, Artificial Sequence
  Description of Artificial Sequence: Synthetic oligonucleotide
gcaggccaggaccccucga

SEQ ID NO: 3066565 - RNA, 19 nt, Artificial Sequence
  Description of Artificial Sequence: Synthetic oligonucleotide
ccucacaggccgggccucc

SEQ ID NO: 3066566 - RNA, 19 nt, Artificial Sequence
  Description of Artificial Sequence: Synthetic oligonucleotide
ccuccgcggacgcgcgcgg

SEQ ID NO: 3066567 - RNA, 19 nt, Artificial Sequence
  Description of Artificial Sequence: Synthetic oligonucleotide
ccucgcagccggauccgga

SEQ ID NO: 3066568 - RNA, 19 nt, Artificial Sequence
  Description of Artificial Sequence: Synthetic oligonucleotide
cucuuccgucuguuccagu

SEQ ID NO: 3066569 - RNA, 19 nt, Artificial Sequence
  Description of Artificial Sequence: Synthetic oligonucleotide
cgggccuccgcggacgcgc

SEQ ID NO: 3066570 - RNA, 19 nt, Artificial Sequence
  Description of Artificial Sequence: Synthetic oligonucleotide
gggccuccgcggacgcgcg

SEQ ID NO: 3066571 - RNA, 19 nt, Artificial Sequence
  Description of Artificial Sequence: Synthetic oligonucleotide
ccagugcuauguucaugua

SEQ ID NO: 3066572 - RNA, 19 nt, Artificial Sequence
  Description of Artificial Sequence: Synthetic oligonucleotide
ccggauccggagcccucac

SEQ ID NO: 3066573 - RNA, 19 nt, Artificial Sequence
  Description of Artificial Sequence: Synthetic oligonucleotide
ggccguccaaugaucugcu

SEQ ID NO: 3066574 - RNA, 19 nt, Artificial Sequence
  Description of Artificial Sequence: Synthetic oligonucleotide
cccucgcagccggauccgg

SEQ ID NO: 3066575 - RNA, 19 nt, Artificial Sequence
  Description of Artificial Sequence: Synthetic oligonucleotide
gccaggaccccucgauaau

SEQ ID NO: 3066576 - RNA, 19 nt, Artificial Sequence
  Description of Artificial Sequence: Synthetic oligonucleotide
gccgggccuccgcggacgc

SEQ ID NO: 3066577 - RNA, 19 nt, Artificial Sequence
  Description of Artificial Sequence: Synthetic oligonucleotide
cggagcccucacaggccgg

SEQ ID NO: 3066578 - RNA, 19 nt, Artificial Sequence
  Description of Artificial Sequence: Synthetic oligonucleotide
caggcaggccaggaccccu

SEQ ID NO: 3066579 - RNA, 19 nt, Artificial Sequence
  Description of Artificial Sequence: Synthetic oligonucleotide
ggccuccgcggacgcgcgc

SEQ ID NO: 3066580 - RNA, 19 nt, Artificial Sequence
  Description of Artificial Sequence: Synthetic oligonucleotide
cgucucuucuguguacuua

SEQ ID NO: 3066581 - RNA, 19 nt, Artificial Sequence
  Description of Artificial Sequence: Synthetic oligonucleotide
ccgucuguuccagugcuau

SEQ ID NO: 3066582 - RNA, 19 nt, Artificial Sequence
  Description of Artificial Sequence: Synthetic oligonucleotide
gagcugcuccugguaucuu

SEQ ID NO: 3066583 - RNA, 19 nt, Artificial Sequence
  Description of Artificial Sequence: Synthetic oligonucleotide
ccacuccagaguugaguuu

SEQ ID NO: 3066584 - RNA, 19 nt, Artificial Sequence
  Description of Artificial Sequence: Synthetic oligonucleotide
cggauccggagcccucaca

SEQ ID NO: 3066585 - RNA, 19 nt, Artificial Sequence
  Description of Artificial Sequence: Synthetic oligonucleotide
ccacaacuggccguccaau

SEQ ID NO: 3066586 - RNA, 19 nt, Artificial Sequence
  Description of Artificial Sequence: Synthetic oligonucleotide
ccgggccuccgcggacgcg

SEQ ID NO: 3066587 - RNA, 19 nt, Artificial Sequence
  Description of Artificial Sequence: Synthetic oligonucleotide
gccguccaaugaucugcuu

SEQ ID NO: 3066588 - RNA, 19 nt, Artificial Sequence
  Description of Artificial Sequence: Synthetic oligonucleotide
ccgucucuucuguguacuu

SEQ ID NO: 3066589 - RNA, 19 nt, Artificial Sequence
  Description of Artificial Sequence: Synthetic oligonucleotide
ccgcggacgcgcgcggcga

SEQ ID NO: 3066590 - RNA, 19 nt, Artificial Sequence
  Description of Artificial Sequence: Synthetic oligonucleotide
gaaaacagcauguacacug

SEQ ID NO: 3066591 - RNA, 19 nt, Artificial Sequence
  Description of Artificial Sequence: Synthetic oligonucleotide
uuuguucacaugaaaacag

SEQ ID NO: 3066592 - RNA, 19 nt, Artificial Sequence
  Description of Artificial Sequence: Synthetic oligonucleotide
aagaguuuaacgcuguuga

SEQ ID NO: 3066593 - RNA, 19 nt, Artificial Sequence
  Description of Artificial Sequence: Synthetic oligonucleotide
augaaaacagcauguacac

SEQ ID NO: 3066594 - RNA, 19 nt, Artificial Sequence
  Description of Artificial Sequence: Synthetic oligonucleotide
uucacaugaaaacagcaug

SEQ ID NO: 3066595 - RNA, 19 nt, Artificial Sequence
  Description of Artificial Sequence: Synthetic oligonucleotide
aacgcuguugagcaugcgc

SEQ ID NO: 3066596 - RNA, 19 nt, Artificial Sequence
  Description of Artificial Sequence: Synthetic oligonucleotide
aacaaagucaggugaagca

SEQ ID NO: 3066597 - RNA, 19 nt, Artificial Sequence
  Description of Artificial Sequence: Synthetic oligonucleotide
uccagaacgagucuggggc

SEQ ID NO: 3066598 - RNA, 19 nt, Artificial Sequence
  Description of Artificial Sequence: Synthetic oligonucleotide
auguacacugaccacuucc

SEQ ID NO: 3066599 - RNA, 19 nt, Artificial Sequence
  Description of Artificial Sequence: Synthetic oligonucleotide
ucugccgcugccuugagcg

SEQ ID NO: 3066600 - RNA, 19 nt, Artificial Sequence
  Description of Artificial Sequence: Synthetic oligonucleotide
acaugaaaacagcauguac

SEQ ID NO: 3066601 - RNA, 19 nt, Artificial Sequence
  Description of Artificial Sequence: Synthetic oligonucleotide
aguuuaacgcuguugagca

SEQ ID NO: 3066602 - RNA, 19 nt, Artificial Sequence
  Description of Artificial Sequence: Synthetic oligonucleotide
agaacuuccagaacgaguc

SEQ ID NO: 3066603 - RNA, 19 nt, Artificial Sequence
  Description of Artificial Sequence: Synthetic oligonucleotide
agugcaaggagcaacaaag

SEQ ID NO: 3066604 - RNA, 19 nt, Artificial Sequence
  Description of Artificial Sequence: Synthetic oligonucleotide
caaggagcaacaaagucag

SEQ ID NO: 3066605 - RNA, 19 nt, Artificial Sequence
  Description of Artificial Sequence: Synthetic oligonucleotide
caugaaaacagcauguaca

SEQ ID NO: 3066606 - RNA, 19 nt, Artificial Sequence
  Description of Artificial Sequence: Synthetic oligonucleotide
ucaggugaagcacaggaga

SEQ ID NO: 3066607 - RNA, 19 nt, Artificial Sequence
  Description of Artificial Sequence: Synthetic oligonucleotide
uuuuguucacaugaaaaca

SEQ ID NO: 3066608 - RNA, 19 nt, Artificial Sequence
  Description of Artificial Sequence: Synthetic oligonucleotide
acagcauguacacugacca

SEQ ID NO: 3066609 - RNA, 19 nt, Artificial Sequence
  Description of Artificial Sequence: Synthetic oligonucleotide
ggagacaagaguuuaacgc

SEQ ID NO: 3066610 - RNA, 19 nt, Artificial Sequence
  Description of Artificial Sequence: Synthetic oligonucleotide
ucacaugaaaacagcaugu

SEQ ID NO: 3066611 - RNA, 19 nt, Artificial Sequence
  Description of Artificial Sequence: Synthetic oligonucleotide
uguucacaugaaaacagca

SEQ ID NO: 3066612 - RNA, 19 nt, Artificial Sequence
  Description of Artificial Sequence: Synthetic oligonucleotide
aacagcauguacacugacc

SEQ ID NO: 3066613 - RNA, 19 nt, Artificial Sequence
  Description of Artificial Sequence: Synthetic oligonucleotide
agaguaggaaugugugugc

SEQ ID NO: 3066614 - RNA, 19 nt, Artificial Sequence
  Description of Artificial Sequence: Synthetic oligonucleotide
ugucucagcugcaaagagg

SEQ ID NO: 3066615 - RNA, 19 nt, Artificial Sequence
  Description of Artificial Sequence: Synthetic oligonucleotide
aaacagcauguacacugac

SEQ ID NO: 3066616 - RNA, 19 nt, Artificial Sequence
  Description of Artificial Sequence: Synthetic oligonucleotide
gaaugugugugcugcagag

SEQ ID NO: 3066617 - RNA, 19 nt, Artificial Sequence
  Description of Artificial Sequence: Synthetic oligonucleotide
acaaccagaacuuccagaa

SEQ ID NO: 3066618 - RNA, 19 nt, Artificial Sequence
  Description of Artificial Sequence: Synthetic oligonucleotide
acacugaccacuuccagug

SEQ ID NO: 3066619 - RNA, 19 nt, Artificial Sequence
  Description of Artificial Sequence: Synthetic oligonucleotide
uuuaacgcuguugagcaug

SEQ ID NO: 3066620 - RNA, 19 nt, Artificial Sequence
  Description of Artificial Sequence: Synthetic oligonucleotide
acaaagucaggugaagcac

SEQ ID NO: 3066621 - RNA, 19 nt, Artificial Sequence
  Description of Artificial Sequence: Synthetic oligonucleotide
aagcacaggagacaagagu

SEQ ID NO: 3066622 - RNA, 19 nt, Artificial Sequence
  Description of Artificial Sequence: Synthetic oligonucleotide
aacagaguaggaaugugug

SEQ ID NO: 3066623 - RNA, 19 nt, Artificial Sequence
  Description of Artificial Sequence: Synthetic oligonucleotide
ugaagcacaggagacaaga

SEQ ID NO: 3066624 - RNA, 19 nt, Artificial Sequence
  Description of Artificial Sequence: Synthetic oligonucleotide
gagguagugaccuggucag

SEQ ID NO: 3066625 - RNA, 19 nt, Artificial Sequence
  Description of Artificial Sequence: Synthetic oligonucleotide
uuguucacaugaaaacagc

SEQ ID NO: 3066626 - RNA, 19 nt, Artificial Sequence
  Description of Artificial Sequence: Synthetic oligonucleotide
aggagacaagaguuuaacg

SEQ ID NO: 3066627 - RNA, 19 nt, Artificial Sequence
  Description of Artificial Sequence: Synthetic oligonucleotide
uguacacugaccacuucca

SEQ ID NO: 3066628 - RNA, 19 nt, Artificial Sequence
  Description of Artificial Sequence: Synthetic oligonucleotide
uugugcucuacccacugcc

SEQ ID NO: 3066629 - RNA, 19 nt, Artificial Sequence
  Description of Artificial Sequence: Synthetic oligonucleotide
gaguuuaacgcuguugagc

SEQ ID NO: 3066630 - RNA, 19 nt, Artificial Sequence
  Description of Artificial Sequence: Synthetic oligonucleotide
guugagcaugcgcagauag

SEQ ID NO: 3066631 - RNA, 19 nt, Artificial Sequence
  Description of Artificial Sequence: Synthetic oligonucleotide
ucuggggcagaacagagua

SEQ ID NO: 3066632 - RNA, 19 nt, Artificial Sequence
  Description of Artificial Sequence: Synthetic oligonucleotide
agauaguucugccgcugcc

SEQ ID NO: 3066633 - RNA, 19 nt, Artificial Sequence
  Description of Artificial Sequence: Synthetic oligonucleotide
uggggcagaacagaguagg

SEQ ID NO: 3066634 - RNA, 19 nt, Artificial Sequence
  Description of Artificial Sequence: Synthetic oligonucleotide
ugugcugcagaguuccuug

SEQ ID NO: 3066635 - RNA, 19 nt, Artificial Sequence
  Description of Artificial Sequence: Synthetic oligonucleotide
uagugaccuggucagauac

SEQ ID NO: 3066636 - RNA, 19 nt, Artificial Sequence
  Description of Artificial Sequence: Synthetic oligonucleotide
ugcgcagauaguucugccg

SEQ ID NO: 3066637 - RNA, 19 nt, Artificial Sequence
  Description of Artificial Sequence: Synthetic oligonucleotide
ugcaaggagcaacaaaguc

SEQ ID NO: 3066638 - RNA, 19 nt, Artificial Sequence
  Description of Artificial Sequence: Synthetic oligonucleotide
caaagagguagugaccugg

SEQ ID NO: 3066639 - RNA, 19 nt, Artificial Sequence
  Description of Artificial Sequence: Synthetic oligonucleotide
cucagcugcaaagagguag

SEQ ID NO: 3066640 - RNA, 19 nt, Artificial Sequence
  Description of Artificial Sequence: Synthetic oligonucleotide
acacguuggcauugggagc

SEQ ID NO: 3066641 - RNA, 19 nt, Artificial Sequence
  Description of Artificial Sequence: Synthetic oligonucleotide
guaggaaugugugugcugc

SEQ ID NO: 3066642 - RNA, 19 nt, Artificial Sequence
  Description of Artificial Sequence: Synthetic oligonucleotide
aagagguagugaccugguc

SEQ ID NO: 3066643 - RNA, 19 nt, Artificial Sequence
  Description of Artificial Sequence: Synthetic oligonucleotide
uuaacgcuguugagcaugc

SEQ ID NO: 3066644 - RNA, 19 nt, Artificial Sequence
  Description of Artificial Sequence: Synthetic oligonucleotide
uccuugagcagcuggggcc

SEQ ID NO: 3066645 - RNA, 19 nt, Artificial Sequence
  Description of Artificial Sequence: Synthetic oligonucleotide
uccagugcaaggagcaaca

SEQ ID NO: 3066646 - RNA, 19 nt, Artificial Sequence
  Description of Artificial Sequence: Synthetic oligonucleotide
uuccagaacgagucugggg

SEQ ID NO: 3066647 - RNA, 19 nt, Artificial Sequence
  Description of Artificial Sequence: Synthetic oligonucleotide
cagaguaggaaugugugug

SEQ ID NO: 3066648 - RNA, 19 nt, Artificial Sequence
  Description of Artificial Sequence: Synthetic oligonucleotide
gaguuccuugagcagcugg

SEQ ID NO: 3066649 - RNA, 19 nt, Artificial Sequence
  Description of Artificial Sequence: Synthetic oligonucleotide
gagcaacaaagucagguga

SEQ ID NO: 3066650 - RNA, 19 nt, Artificial Sequence
  Description of Artificial Sequence: Synthetic oligonucleotide
aggagcaacaaagucaggu

SEQ ID NO: 3066651 - RNA, 19 nt, Artificial Sequence
  Description of Artificial Sequence: Synthetic oligonucleotide
ucagcugcaaagagguagu

SEQ ID NO: 3066652 - RNA, 19 nt, Artificial Sequence
  Description of Artificial Sequence: Synthetic oligonucleotide
gagacaagaguuuaacgcu

SEQ ID NO: 3066653 - RNA, 19 nt, Artificial Sequence
  Description of Artificial Sequence: Synthetic oligonucleotide
aaagucaggugaagcacag

SEQ ID NO: 3066654 - RNA, 19 nt, Artificial Sequence
  Description of Artificial Sequence: Synthetic oligonucleotide
uacacugaccacuuccagu

SEQ ID NO: 3066655 - RNA, 19 nt, Artificial Sequence
  Description of Artificial Sequence: Synthetic oligonucleotide
agaguuuaacgcuguugag

SEQ ID NO: 3066656 - RNA, 19 nt, Artificial Sequence
  Description of Artificial Sequence: Synthetic oligonucleotide
aacuuccagaacgagucug

SEQ ID NO: 3066657 - RNA, 19 nt, Artificial Sequence
  Description of Artificial Sequence: Synthetic oligonucleotide
gcugcaaagagguagugac

SEQ ID NO: 3066658 - RNA, 19 nt, Artificial Sequence
  Description of Artificial Sequence: Synthetic oligonucleotide
agcaugcgcagauaguucu

SEQ ID NO: 3066659 - RNA, 19 nt, Artificial Sequence
  Description of Artificial Sequence: Synthetic oligonucleotide
gaugccccggagcacaacc

SEQ ID NO: 3066660 - RNA, 19 nt, Artificial Sequence
  Description of Artificial Sequence: Synthetic oligonucleotide
gauacacguuggcauuggg

SEQ ID NO: 3066661 - RNA, 19 nt, Artificial Sequence
  Description of Artificial Sequence: Synthetic oligonucleotide
cuggucagauacacguugg

SEQ ID NO: 3066662 - RNA, 19 nt, Artificial Sequence
  Description of Artificial Sequence: Synthetic oligonucleotide
gaccacuuccagugcaagg

SEQ ID NO: 3066663 - RNA, 19 nt, Artificial Sequence
  Description of Artificial Sequence: Synthetic oligonucleotide
cugugucucagcugcaaag

SEQ ID NO: 3066664 - RNA, 19 nt, Artificial Sequence
  Description of Artificial Sequence: Synthetic oligonucleotide
aaaacagcauguacacuga

SEQ ID NO: 3066665 - RNA, 19 nt, Artificial Sequence
  Description of Artificial Sequence: Synthetic oligonucleotide
uuccuugagcagcuggggc

SEQ ID NO: 3066666 - RNA, 19 nt, Artificial Sequence
  Description of Artificial Sequence: Synthetic oligonucleotide
ugugucucagcugcaaaga

SEQ ID NO: 3066667 - RNA, 19 nt, Artificial Sequence
  Description of Artificial Sequence: Synthetic oligonucleotide
agcauguacacugaccacu

SEQ ID NO: 3066668 - RNA, 19 nt, Artificial Sequence
  Description of Artificial Sequence: Synthetic oligonucleotide
augcgcagauaguucugcc

SEQ ID NO: 3066669 - RNA, 19 nt, Artificial Sequence
  Description of Artificial Sequence: Synthetic oligonucleotide
ugaccuggucagauacacg

SEQ ID NO: 3066670 - RNA, 19 nt, Artificial Sequence
  Description of Artificial Sequence: Synthetic oligonucleotide
acagaguaggaaugugugu

SEQ ID NO: 3066671 - RNA, 19 nt, Artificial Sequence
  Description of Artificial Sequence: Synthetic oligonucleotide
aguuccuugagcagcuggg

SEQ ID NO: 3066672 - RNA, 19 nt, Artificial Sequence
  Description of Artificial Sequence: Synthetic oligonucleotide
ugcagaguuccuugagcag

SEQ ID NO: 3066673 - RNA, 19 nt, Artificial Sequence
  Description of Artificial Sequence: Synthetic oligonucleotide
ugagcaugcgcagauaguu

SEQ ID NO: 3066674 - RNA, 19 nt, Artificial Sequence
  Description of Artificial Sequence: Synthetic oligonucleotide
augugugugcugcagaguu

SEQ ID NO: 3066675 - RNA, 19 nt, Artificial Sequence
  Description of Artificial Sequence: Synthetic oligonucleotide
uggucagauacacguuggc

SEQ ID NO: 3066676 - RNA, 19 nt, Artificial Sequence
  Description of Artificial Sequence: Synthetic oligonucleotide
ucagauacacguuggcauu

SEQ ID NO: 3066677 - RNA, 19 nt, Artificial Sequence
  Description of Artificial Sequence: Synthetic oligonucleotide
gaccuggucagauacacgu

SEQ ID NO: 3066678 - RNA, 19 nt, Artificial Sequence
  Description of Artificial Sequence: Synthetic oligonucleotide
caagaguuuaacgcuguug

SEQ ID NO: 3066679 - RNA, 19 nt, Artificial Sequence
  Description of Artificial Sequence: Synthetic oligonucleotide
auugggagcugaugccccg

SEQ ID NO: 3066680 - RNA, 19 nt, Artificial Sequence
  Description of Artificial Sequence: Synthetic oligonucleotide
ugcugcagaguuccuugag

SEQ ID NO: 3066681 - RNA, 19 nt, Artificial Sequence
  Description of Artificial Sequence: Synthetic oligonucleotide
ggagcaacaaagucaggug

SEQ ID NO: 3066682 - RNA, 19 nt, Artificial Sequence
  Description of Artificial Sequence: Synthetic oligonucleotide
caggugaagcacaggagac

SEQ ID NO: 3066683 - RNA, 19 nt, Artificial Sequence
  Description of Artificial Sequence: Synthetic oligonucleotide
accacuuccagugcaagga

SEQ ID NO: 3066684 - RNA, 19 nt, Artificial Sequence
  Description of Artificial Sequence: Synthetic oligonucleotide
acugaccacuuccagugca

SEQ ID NO: 3066685 - RNA, 19 nt, Artificial Sequence
  Description of Artificial Sequence: Synthetic oligonucleotide
cugcaaagagguagugacc

SEQ ID NO: 3066686 - RNA, 19 nt, Artificial Sequence
  Description of Artificial Sequence: Synthetic oligonucleotide
cauugggagcugaugcccc

SEQ ID NO: 3066687 - RNA, 19 nt, Artificial Sequence
  Description of Artificial Sequence: Synthetic oligonucleotide
acuuccagaacgagucugg

SEQ ID NO: 3066688 - RNA, 19 nt, Artificial Sequence
  Description of Artificial Sequence: Synthetic oligonucleotide
ugugcucuacccacugccu

SEQ ID NO: 3066689 - RNA, 19 nt, Artificial Sequence
  Description of Artificial Sequence: Synthetic oligonucleotide
agcacaggagacaagaguu

SEQ ID NO: 3066690 - RNA, 19 nt, Artificial Sequence
  Description of Artificial Sequence: Synthetic oligonucleotide
agacaagaguuuaacgcug

SEQ ID NO: 3066691 - RNA, 19 nt, Artificial Sequence
  Description of Artificial Sequence: Synthetic oligonucleotide
gugucucagcugcaaagag

SEQ ID NO: 3066692 - RNA, 19 nt, Artificial Sequence
  Description of Artificial Sequence: Synthetic oligonucleotide
ucuacccacugccuguguc

SEQ ID NO: 3066693 - RNA, 19 nt, Artificial Sequence
  Description of Artificial Sequence: Synthetic oligonucleotide
uugagcaugcgcagauagu

SEQ ID NO: 3066694 - RNA, 19 nt, Artificial Sequence
  Description of Artificial Sequence: Synthetic oligonucleotide
gagcacaaccagaacuucc

SEQ ID NO: 3066695 - RNA, 19 nt, Artificial Sequence
  Description of Artificial Sequence: Synthetic oligonucleotide
cacuuccagugcaaggagc

SEQ ID NO: 3066696 - RNA, 19 nt, Artificial Sequence
  Description of Artificial Sequence: Synthetic oligonucleotide
agaacagaguaggaaugug

SEQ ID NO: 3066697 - RNA, 19 nt, Artificial Sequence
  Description of Artificial Sequence: Synthetic oligonucleotide
cugcagaguuccuugagca

SEQ ID NO: 3066698 - RNA, 19 nt, Artificial Sequence
  Description of Artificial Sequence: Synthetic oligonucleotide
aaugugugugcugcagagu

SEQ ID NO: 3066699 - RNA, 19 nt, Artificial Sequence
  Description of Artificial Sequence: Synthetic oligonucleotide
gugugugcugcagaguucc

SEQ ID NO: 3066700 - RNA, 19 nt, Artificial Sequence
  Description of Artificial Sequence: Synthetic oligonucleotide
ugaaaacagcauguacacu

SEQ ID NO: 3066701 - RNA, 19 nt, Artificial Sequence
  Description of Artificial Sequence: Synthetic oligonucleotide
ugcucuacccacugccugu

SEQ ID NO: 3066702 - RNA, 19 nt, Artificial Sequence
  Description of Artificial Sequence: Synthetic oligonucleotide
gcaaggagcaacaaaguca

SEQ ID NO: 3066703 - RNA, 19 nt, Artificial Sequence
  Description of Artificial Sequence: Synthetic oligonucleotide
guacacugaccacuuccag

SEQ ID NO: 3066704 - RNA, 19 nt, Artificial Sequence
  Description of Artificial Sequence: Synthetic oligonucleotide
gagcugaugccccggagca

SEQ ID NO: 3066705 - RNA, 19 nt, Artificial Sequence
  Description of Artificial Sequence: Synthetic oligonucleotide
cagcuugugcucuacccac

SEQ ID NO: 3066706 - RNA, 19 nt, Artificial Sequence
  Description of Artificial Sequence: Synthetic oligonucleotide
caggagacaagaguuuaac

SEQ ID NO: 3066707 - RNA, 19 nt, Artificial Sequence
  Description of Artificial Sequence: Synthetic oligonucleotide
acuuccagugcaaggagca

SEQ ID NO: 3066708 - RNA, 19 nt, Artificial Sequence
  Description of Artificial Sequence: Synthetic oligonucleotide
agauacacguuggcauugg

SEQ ID NO: 3066709 - RNA, 19 nt, Artificial Sequence
  Description of Artificial Sequence: Synthetic oligonucleotide
gucagauacacguuggcau

SEQ ID NO: 3066710 - RNA, 19 nt, Artificial Sequence
  Description of Artificial Sequence: Synthetic oligonucleotide
cugccuugagcgcagcuug

SEQ ID NO: 3066711 - RNA, 19 nt, Artificial Sequence
  Description of Artificial Sequence: Synthetic oligonucleotide
uuccagugcaaggagcaac

SEQ ID NO: 3066712 - RNA, 19 nt, Artificial Sequence
  Description of Artificial Sequence: Synthetic oligonucleotide
aagucaggugaagcacagg

SEQ ID NO: 3066713 - RNA, 19 nt, Artificial Sequence
  Description of Artificial Sequence: Synthetic oligonucleotide
agcacaaccagaacuucca

SEQ ID NO: 3066714 - RNA, 19 nt, Artificial Sequence
  Description of Artificial Sequence: Synthetic oligonucleotide
aacgagucuggggcagaac

SEQ ID NO: 3066715 - RNA, 19 nt, Artificial Sequence
  Description of Artificial Sequence: Synthetic oligonucleotide
guuccuugagcagcugggg

SEQ ID NO: 3066716 - RNA, 19 nt, Artificial Sequence
  Description of Artificial Sequence: Synthetic oligonucleotide
ugccccggagcacaaccag

SEQ ID NO: 3066717 - RNA, 19 nt, Artificial Sequence
  Description of Artificial Sequence: Synthetic oligonucleotide
cagauaguucugccgcugc

SEQ ID NO: 3066718 - RNA, 19 nt, Artificial Sequence
  Description of Artificial Sequence: Synthetic oligonucleotide
uuggcauugggagcugaug

SEQ ID NO: 3066719 - RNA, 19 nt, Artificial Sequence
  Description of Artificial Sequence: Synthetic oligonucleotide
caugcgcagauaguucugc

SEQ ID NO: 3066720 - RNA, 19 nt, Artificial Sequence
  Description of Artificial Sequence: Synthetic oligonucleotide
acugccugugucucagcug

SEQ ID NO: 3066721 - RNA, 19 nt, Artificial Sequence
  Description of Artificial Sequence: Synthetic oligonucleotide
aggaaugugugugcugcag

SEQ ID NO: 3066722 - RNA, 19 nt, Artificial Sequence
  Description of Artificial Sequence: Synthetic oligonucleotide
ugugugugcugcagaguuc

SEQ ID NO: 3066723 - RNA, 19 nt, Artificial Sequence
  Description of Artificial Sequence: Synthetic oligonucleotide
gugaccuggucagauacac

SEQ ID NO: 3066724 - RNA, 19 nt, Artificial Sequence
  Description of Artificial Sequence: Synthetic oligonucleotide
cacaaccagaacuuccaga

SEQ ID NO: 3066725 - RNA, 19 nt, Artificial Sequence
  Description of Artificial Sequence: Synthetic oligonucleotide
cuuccagaacgagucuggg

SEQ ID NO: 3066726 - RNA, 19 nt, Artificial Sequence
  Description of Artificial Sequence: Synthetic oligonucleotide
cuugugcucuacccacugc

SEQ ID NO: 3066727 - RNA, 19 nt, Artificial Sequence
  Description of Artificial Sequence: Synthetic oligonucleotide
gaacagaguaggaaugugu

SEQ ID NO: 3066728 - RNA, 19 nt, Artificial Sequence
  Description of Artificial Sequence: Synthetic oligonucleotide
auacacguuggcauuggga

SEQ ID NO: 3066729 - RNA, 19 nt, Artificial Sequence
  Description of Artificial Sequence: Synthetic oligonucleotide
ugaccacuuccagugcaag

SEQ ID NO: 3066730 - RNA, 19 nt, Artificial Sequence
  Description of Artificial Sequence: Synthetic oligonucleotide
uaggaaugugugugcugca

SEQ ID NO: 3066731 - RNA, 19 nt, Artificial Sequence
  Description of Artificial Sequence: Synthetic oligonucleotide
gcgcagauaguucugccgc

SEQ ID NO: 3066732 - RNA, 19 nt, Artificial Sequence
  Description of Artificial Sequence: Synthetic oligonucleotide
gcagaguuccuugagcagc

SEQ ID NO: 3066733 - RNA, 19 nt, Artificial Sequence
  Description of Artificial Sequence: Synthetic oligonucleotide
ggcauugggagcugaugcc

SEQ ID NO: 3066734 - RNA, 19 nt, Artificial Sequence
  Description of Artificial Sequence: Synthetic oligonucleotide
auaguucugccgcugccuu

SEQ ID NO: 3066735 - RNA, 19 nt, Artificial Sequence
  Description of Artificial Sequence: Synthetic oligonucleotide
acgcuguugagcaugcgca

SEQ ID NO: 3066736 - RNA, 19 nt, Artificial Sequence
  Description of Artificial Sequence: Synthetic oligonucleotide
gcugcagaguuccuugagc

SEQ ID NO: 3066737 - RNA, 19 nt, Artificial Sequence
  Description of Artificial Sequence: Synthetic oligonucleotide
aguucugccgcugccuuga

SEQ ID NO: 3066738 - RNA, 19 nt, Artificial Sequence
  Description of Artificial Sequence: Synthetic oligonucleotide
gucucagcugcaaagaggu

SEQ ID NO: 3066739 - RNA, 19 nt, Artificial Sequence
  Description of Artificial Sequence: Synthetic oligonucleotide
agcaacaaagucaggugaa

SEQ ID NO: 3066740 - RNA, 19 nt, Artificial Sequence
  Description of Artificial Sequence: Synthetic oligonucleotide
gcagaacagaguaggaaug

SEQ ID NO: 3066741 - RNA, 19 nt, Artificial Sequence
  Description of Artificial Sequence: Synthetic oligonucleotide
caaccagaacuuccagaac

SEQ ID NO: 3066742 - RNA, 19 nt, Artificial Sequence
  Description of Artificial Sequence: Synthetic oligonucleotide
gugcucuacccacugccug

SEQ ID NO: 3066743 - RNA, 19 nt, Artificial Sequence
  Description of Artificial Sequence: Synthetic oligonucleotide
cuggggcagaacagaguag

SEQ ID NO: 3066744 - RNA, 19 nt, Artificial Sequence
  Description of Artificial Sequence: Synthetic oligonucleotide
agcugcaaagagguaguga

SEQ ID NO: 3066745 - RNA, 19 nt, Artificial Sequence
  Description of Artificial Sequence: Synthetic oligonucleotide
accagaacuuccagaacga

SEQ ID NO: 3066746 - RNA, 19 nt, Artificial Sequence
  Description of Artificial Sequence: Synthetic oligonucleotide
cagauacacguuggcauug

SEQ ID NO: 3066747 - RNA, 19 nt, Artificial Sequence
  Description of Artificial Sequence: Synthetic oligonucleotide
uucugccgcugccuugagc

SEQ ID NO: 3066748 - RNA, 19 nt, Artificial Sequence
  Description of Artificial Sequence: Synthetic oligonucleotide
uaguucugccgcugccuug

SEQ ID NO: 3066749 - RNA, 19 nt, Artificial Sequence
  Description of Artificial Sequence: Synthetic oligonucleotide
gagucuggggcagaacaga

SEQ ID NO: 3066750 - RNA, 19 nt, Artificial Sequence
  Description of Artificial Sequence: Synthetic oligonucleotide
aaggagcaacaaagucagg

SEQ ID NO: 3066751 - RNA, 19 nt, Artificial Sequence
  Description of Artificial Sequence: Synthetic oligonucleotide
cagcauguacacugaccac

SEQ ID NO: 3066752 - RNA, 19 nt, Artificial Sequence
  Description of Artificial Sequence: Synthetic oligonucleotide
uggggccacuucucugggg

SEQ ID NO: 3066753 - RNA, 19 nt, Artificial Sequence
  Description of Artificial Sequence: Synthetic oligonucleotide
cuugagcgcagcuugugcu

SEQ ID NO: 3066754 - RNA, 19 nt, Artificial Sequence
  Description of Artificial Sequence: Synthetic oligonucleotide
acaagaguuuaacgcuguu

SEQ ID NO: 3066755 - RNA, 19 nt, Artificial Sequence
  Description of Artificial Sequence: Synthetic oligonucleotide
gauaguucugccgcugccu

SEQ ID NO: 3066756 - RNA, 19 nt, Artificial Sequence
  Description of Artificial Sequence: Synthetic oligonucleotide
gcaacaaagucaggugaag

SEQ ID NO: 3066757 - RNA, 19 nt, Artificial Sequence
  Description of Artificial Sequence: Synthetic oligonucleotide
agcuggggccacuucucug

SEQ ID NO: 3066758 - RNA, 19 nt, Artificial Sequence
  Description of Artificial Sequence: Synthetic oligonucleotide
cagaacuuccagaacgagu

SEQ ID NO: 3066759 - RNA, 19 nt, Artificial Sequence
  Description of Artificial Sequence: Synthetic oligonucleotide
ggcagaacagaguaggaau

SEQ ID NO: 3066760 - RNA, 19 nt, Artificial Sequence
  Description of Artificial Sequence: Synthetic oligonucleotide
cagaacgagucuggggcag

SEQ ID NO: 3066761 - RNA, 19 nt, Artificial Sequence
  Description of Artificial Sequence: Synthetic oligonucleotide
ugggagcugaugccccgga

SEQ ID NO: 3066762 - RNA, 19 nt, Artificial Sequence
  Description of Artificial Sequence: Synthetic oligonucleotide
uaacgcuguugagcaugcg

SEQ ID NO: 3066763 - RNA, 19 nt, Artificial Sequence
  Description of Artificial Sequence: Synthetic oligonucleotide
gagcaugcgcagauaguuc

SEQ ID NO: 3066764 - RNA, 19 nt, Artificial Sequence
  Description of Artificial Sequence: Synthetic oligonucleotide
ugccuugagcgcagcuugu

SEQ ID NO: 3066765 - RNA, 19 nt, Artificial Sequence
  Description of Artificial Sequence: Synthetic oligonucleotide
ggugaagcacaggagacaa

SEQ ID NO: 3066766 - RNA, 19 nt, Artificial Sequence
  Description of Artificial Sequence: Synthetic oligonucleotide
cacugaccacuuccagugc

SEQ ID NO: 3066767 - RNA, 19 nt, Artificial Sequence
  Description of Artificial Sequence: Synthetic oligonucleotide
ugugugcugcagaguuccu

SEQ ID NO: 3066768 - RNA, 19 nt, Artificial Sequence
  Description of Artificial Sequence: Synthetic oligonucleotide
gcauugggagcugaugccc

SEQ ID NO: 3066769 - RNA, 19 nt, Artificial Sequence
  Description of Artificial Sequence: Synthetic oligonucleotide
cauguacacugaccacuuc

SEQ ID NO: 3066770 - RNA, 19 nt, Artificial Sequence
  Description of Artificial Sequence: Synthetic oligonucleotide
ggucagauacacguuggca

SEQ ID NO: 3066771 - RNA, 19 nt, Artificial Sequence
  Description of Artificial Sequence: Synthetic oligonucleotide
gacaagaguuuaacgcugu

SEQ ID NO: 3066772 - RNA, 19 nt, Artificial Sequence
  Description of Artificial Sequence: Synthetic oligonucleotide
gcagcuugugcucuaccca

SEQ ID NO: 3066773 - RNA, 19 nt, Artificial Sequence
  Description of Artificial Sequence: Synthetic oligonucleotide
cuggggccacuucucuggg

SEQ ID NO: 3066774 - RNA, 19 nt, Artificial Sequence
  Description of Artificial Sequence: Synthetic oligonucleotide
ugccgcugccuugagcgca

SEQ ID NO: 3066775 - RNA, 19 nt, Artificial Sequence
  Description of Artificial Sequence: Synthetic oligonucleotide
acaggagacaagaguuuaa

SEQ ID NO: 3066776 - RNA, 19 nt, Artificial Sequence
  Description of Artificial Sequence: Synthetic oligonucleotide
gcacaaccagaacuuccag

SEQ ID NO: 3066777 - RNA, 19 nt, Artificial Sequence
  Description of Artificial Sequence: Synthetic oligonucleotide
agcugaugccccggagcac

SEQ ID NO: 3066778 - RNA, 19 nt, Artificial Sequence
  Description of Artificial Sequence: Synthetic oligonucleotide
gaacuuccagaacgagucu

SEQ ID NO: 3066779 - RNA, 19 nt, Artificial Sequence
  Description of Artificial Sequence: Synthetic oligonucleotide
ucucagcugcaaagaggua

SEQ ID NO: 3066780 - RNA, 19 nt, Artificial Sequence
  Description of Artificial Sequence: Synthetic oligonucleotide
cagugcaaggagcaacaaa

SEQ ID NO: 3066781 - RNA, 19 nt, Artificial Sequence
  Description of Artificial Sequence: Synthetic oligonucleotide
guagugaccuggucagaua

SEQ ID NO: 3066782 - RNA, 19 nt, Artificial Sequence
  Description of Artificial Sequence: Synthetic oligonucleotide
cacaugaaaacagcaugua

SEQ ID NO: 3066783 - RNA, 19 nt, Artificial Sequence
  Description of Artificial Sequence: Synthetic oligonucleotide
ccuugagcgcagcuugugc

SEQ ID NO: 3066784 - RNA, 19 nt, Artificial Sequence
  Description of Artificial Sequence: Synthetic oligonucleotide
gaguaggaaugugugugcu

SEQ ID NO: 3066785 - RNA, 19 nt, Artificial Sequence
  Description of Artificial Sequence: Synthetic oligonucleotide
agugaccuggucagauaca

SEQ ID NO: 3066786 - RNA, 19 nt, Artificial Sequence
  Description of Artificial Sequence: Synthetic oligonucleotide
gugaagcacaggagacaag

SEQ ID NO: 3066787 - RNA, 19 nt, Artificial Sequence
  Description of Artificial Sequence: Synthetic oligonucleotide
cgcagcuugugcucuaccc

SEQ ID NO: 3066788 - RNA, 19 nt, Artificial Sequence
  Description of Artificial Sequence: Synthetic oligonucleotide
cacaggagacaagaguuua

SEQ ID NO: 3066789 - RNA, 19 nt, Artificial Sequence
  Description of Artificial Sequence: Synthetic oligonucleotide
cugaccacuuccagugcaa

SEQ ID NO: 3066790 - RNA, 19 nt, Artificial Sequence
  Description of Artificial Sequence: Synthetic oligonucleotide
cacguuggcauugggagcu

SEQ ID NO: 3066791 - RNA, 19 nt, Artificial Sequence
  Description of Artificial Sequence: Synthetic oligonucleotide
cuacccacugccugugucu

SEQ ID NO: 3066792 - RNA, 19 nt, Artificial Sequence
  Description of Artificial Sequence: Synthetic oligonucleotide
ugccugugucucagcugca

SEQ ID NO: 3066793 - RNA, 19 nt, Artificial Sequence
  Description of Artificial Sequence: Synthetic oligonucleotide
cagaguuccuugagcagcu

SEQ ID NO: 3066794 - RNA, 19 nt, Artificial Sequence
  Description of Artificial Sequence: Synthetic oligonucleotide
gcagauaguucugccgcug

SEQ ID NO: 3066795 - RNA, 19 nt, Artificial Sequence
  Description of Artificial Sequence: Synthetic oligonucleotide
agaacgagucuggggcaga

SEQ ID NO: 3066796 - RNA, 19 nt, Artificial Sequence
  Description of Artificial Sequence: Synthetic oligonucleotide
cagaacagaguaggaaugu

SEQ ID NO: 3066797 - RNA, 19 nt, Artificial Sequence
  Description of Artificial Sequence: Synthetic oligonucleotide
gugcugcagaguuccuuga

SEQ ID NO: 3066798 - RNA, 19 nt, Artificial Sequence
  Description of Artificial Sequence: Synthetic oligonucleotide
ugagcagcuggggccacuu

SEQ ID NO: 3066799 - RNA, 19 nt, Artificial Sequence
  Description of Artificial Sequence: Synthetic oligonucleotide
agaguuccuugagcagcug

SEQ ID NO: 3066800 - RNA, 19 nt, Artificial Sequence
  Description of Artificial Sequence: Synthetic oligonucleotide
cugccgcugccuugagcgc

SEQ ID NO: 3066801 - RNA, 19 nt, Artificial Sequence
  Description of Artificial Sequence: Synthetic oligonucleotide
gcugaugccccggagcaca

SEQ ID NO: 3066802 - RNA, 19 nt, Artificial Sequence
  Description of Artificial Sequence: Synthetic oligonucleotide
cgagucuggggcagaacag

SEQ ID NO: 3066803 - RNA, 19 nt, Artificial Sequence
  Description of Artificial Sequence: Synthetic oligonucleotide
gaacgagucuggggcagaa

SEQ ID NO: 3066804 - RNA, 19 nt, Artificial Sequence
  Description of Artificial Sequence: Synthetic oligonucleotide
agcuugugcucuacccacu

SEQ ID NO: 3066805 - RNA, 19 nt, Artificial Sequence
  Description of Artificial Sequence: Synthetic oligonucleotide
ccagaacuuccagaacgag

SEQ ID NO: 3066806 - RNA, 19 nt, Artificial Sequence
  Description of Artificial Sequence: Synthetic oligonucleotide
cagcugcaaagagguagug

SEQ ID NO: 3066807 - RNA, 19 nt, Artificial Sequence
  Description of Artificial Sequence: Synthetic oligonucleotide
gggagcugaugccccggag

SEQ ID NO: 3066808 - RNA, 19 nt, Artificial Sequence
  Description of Artificial Sequence: Synthetic oligonucleotide
acccacugccugugucuca

SEQ ID NO: 3066809 - RNA, 19 nt, Artificial Sequence
  Description of Artificial Sequence: Synthetic oligonucleotide
ggagcacaaccagaacuuc

SEQ ID NO: 3066810 - RNA, 19 nt, Artificial Sequence
  Description of Artificial Sequence: Synthetic oligonucleotide
gggcagaacagaguaggaa

SEQ ID NO: 3066811 - RNA, 19 nt, Artificial Sequence
  Description of Artificial Sequence: Synthetic oligonucleotide
uugagcagcuggggccacu

SEQ ID NO: 3066812 - RNA, 19 nt, Artificial Sequence
  Description of Artificial Sequence: Synthetic oligonucleotide
guucugccgcugccuugag

SEQ ID NO: 3066813 - RNA, 19 nt, Artificial Sequence
  Description of Artificial Sequence: Synthetic oligonucleotide
gugcaaggagcaacaaagu

SEQ ID NO: 3066814 - RNA, 19 nt, Artificial Sequence
  Description of Artificial Sequence: Synthetic oligonucleotide
ugaugccccggagcacaac

SEQ ID NO: 3066815 - RNA, 19 nt, Artificial Sequence
  Description of Artificial Sequence: Synthetic oligonucleotide
agguagugaccuggucaga

SEQ ID NO: 3066816 - RNA, 19 nt, Artificial Sequence
  Description of Artificial Sequence: Synthetic oligonucleotide
augccccggagcacaacca

SEQ ID NO: 3066817 - RNA, 19 nt, Artificial Sequence
  Description of Artificial Sequence: Synthetic oligonucleotide
cacugccugugucucagcu

SEQ ID NO: 3066818 - RNA, 19 nt, Artificial Sequence
  Description of Artificial Sequence: Synthetic oligonucleotide
guuuaacgcuguugagcau

SEQ ID NO: 3066819 - RNA, 19 nt, Artificial Sequence
  Description of Artificial Sequence: Synthetic oligonucleotide
ccggagcacaaccagaacu

SEQ ID NO: 3066820 - RNA, 19 nt, Artificial Sequence
  Description of Artificial Sequence: Synthetic oligonucleotide
cccacugccugugucucag

SEQ ID NO: 3066821 - RNA, 19 nt, Artificial Sequence
  Description of Artificial Sequence: Synthetic oligonucleotide
gguagugaccuggucagau

SEQ ID NO: 3066822 - RNA, 19 nt, Artificial Sequence
  Description of Artificial Sequence: Synthetic oligonucleotide
gcaugcgcagauaguucug

SEQ ID NO: 3066823 - RNA, 19 nt, Artificial Sequence
  Description of Artificial Sequence: Synthetic oligonucleotide
cgcuguugagcaugcgcag

SEQ ID NO: 3066824 - RNA, 19 nt, Artificial Sequence
  Description of Artificial Sequence: Synthetic oligonucleotide
ccagaacgagucuggggca

SEQ ID NO: 3066825 - RNA, 19 nt, Artificial Sequence
  Description of Artificial Sequence: Synthetic oligonucleotide
cuuccagugcaaggagcaa

SEQ ID NO: 3066826 - RNA, 19 nt, Artificial Sequence
  Description of Artificial Sequence: Synthetic oligonucleotide
gccuugagcgcagcuugug

SEQ ID NO: 3066827 - RNA, 19 nt, Artificial Sequence
  Description of Artificial Sequence: Synthetic oligonucleotide
acguuggcauugggagcug

SEQ ID NO: 3066828 - RNA, 19 nt, Artificial Sequence
  Description of Artificial Sequence: Synthetic oligonucleotide
gcagcuggggccacuucuc

SEQ ID NO: 3066829 - RNA, 19 nt, Artificial Sequence
  Description of Artificial Sequence: Synthetic oligonucleotide
ggggcagaacagaguagga

SEQ ID NO: 3066830 - RNA, 19 nt, Artificial Sequence
  Description of Artificial Sequence: Synthetic oligonucleotide
cugaugccccggagcacaa

SEQ ID NO: 3066831 - RNA, 19 nt, Artificial Sequence
  Description of Artificial Sequence: Synthetic oligonucleotide
ccccggagcacaaccagaa

SEQ ID NO: 3066832 - RNA, 19 nt, Artificial Sequence
  Description of Artificial Sequence: Synthetic oligonucleotide
gucuggggcagaacagagu

SEQ ID NO: 3066833 - RNA, 19 nt, Artificial Sequence
  Description of Artificial Sequence: Synthetic oligonucleotide
gcgcagcuugugcucuacc

SEQ ID NO: 3066834 - RNA, 19 nt, Artificial Sequence
  Description of Artificial Sequence: Synthetic oligonucleotide
guuggcauugggagcugau

SEQ ID NO: 3066835 - RNA, 19 nt, Artificial Sequence
  Description of Artificial Sequence: Synthetic oligonucleotide
cccggagcacaaccagaac

SEQ ID NO: 3066836 - RNA, 19 nt, Artificial Sequence
  Description of Artificial Sequence: Synthetic oligonucleotide
ccugugucucagcugcaaa

SEQ ID NO: 3066837 - RNA, 19 nt, Artificial Sequence
  Description of Artificial Sequence: Synthetic oligonucleotide
gccgcugccuugagcgcag

SEQ ID NO: 3066838 - RNA, 19 nt, Artificial Sequence
  Description of Artificial Sequence: Synthetic oligonucleotide
gugugcugcagaguuccuu

SEQ ID NO: 3066839 - RNA, 19 nt, Artificial Sequence
  Description of Artificial Sequence: Synthetic oligonucleotide
gcauguacacugaccacuu

SEQ ID NO: 3066840 - RNA, 19 nt, Artificial Sequence
  Description of Artificial Sequence: Synthetic oligonucleotide
gccugugucucagcugcaa

SEQ ID NO: 3066841 - RNA, 19 nt, Artificial Sequence
  Description of Artificial Sequence: Synthetic oligonucleotide
cggagcacaaccagaacuu

SEQ ID NO: 3066842 - RNA, 19 nt, Artificial Sequence
  Description of Artificial Sequence: Synthetic oligonucleotide
gccccggagcacaaccaga

SEQ ID NO: 3066843 - RNA, 19 nt, Artificial Sequence
  Description of Artificial Sequence: Synthetic oligonucleotide
cucuacccacugccugugu

SEQ ID NO: 3066844 - RNA, 19 nt, Artificial Sequence
  Description of Artificial Sequence: Synthetic oligonucleotide
gcugccuugagcgcagcuu

SEQ ID NO: 3066845 - RNA, 19 nt, Artificial Sequence
  Description of Artificial Sequence: Synthetic oligonucleotide
gcacaggagacaagaguuu

SEQ ID NO: 3066846 - RNA, 19 nt, Artificial Sequence
  Description of Artificial Sequence: Synthetic oligonucleotide
cgcagauaguucugccgcu

SEQ ID NO: 3066847 - RNA, 19 nt, Artificial Sequence
  Description of Artificial Sequence: Synthetic oligonucleotide
cguuggcauugggagcuga

SEQ ID NO: 3066848 - RNA, 19 nt, Artificial Sequence
  Description of Artificial Sequence: Synthetic oligonucleotide
ccgcugccuugagcgcagc

SEQ ID NO: 3066849 - RNA, 19 nt, Artificial Sequence
  Description of Artificial Sequence: Synthetic oligonucleotide
aauaagugcacaguguucg

SEQ ID NO: 3066850 - RNA, 19 nt, Artificial Sequence
  Description of Artificial Sequence: Synthetic oligonucleotide
cugaaaaugggcuucaccg

SEQ ID NO: 3066851 - RNA, 19 nt, Artificial Sequence
  Description of Artificial Sequence: Synthetic oligonucleotide
auuaauguguguccgcugc

SEQ ID NO: 3066852 - RNA, 19 nt, Artificial Sequence
  Description of Artificial Sequence: Synthetic oligonucleotide
ucuguuucauggaagaacc

SEQ ID NO: 3066853 - RNA, 19 nt, Artificial Sequence
  Description of Artificial Sequence: Synthetic oligonucleotide
auuucucggacuuuauccc

SEQ ID NO: 3066854 - RNA, 19 nt, Artificial Sequence
  Description of Artificial Sequence: Synthetic oligonucleotide
cauuucucggacuuuaucc

SEQ ID NO: 3066855 - RNA, 19 nt, Artificial Sequence
  Description of Artificial Sequence: Synthetic oligonucleotide
ugugacaugagcauucuuc

SEQ ID NO: 3066856 - RNA, 19 nt, Artificial Sequence
  Description of Artificial Sequence: Synthetic oligonucleotide
agaucaacuacucuggggu

SEQ ID NO: 3066857 - RNA, 19 nt, Artificial Sequence
  Description of Artificial Sequence: Synthetic oligonucleotide
acugaaaaugggcuucacc

SEQ ID NO: 3066858 - RNA, 19 nt, Artificial Sequence
  Description of Artificial Sequence: Synthetic oligonucleotide
augggcuucaccgaggugc

SEQ ID NO: 3066859 - RNA, 19 nt, Artificial Sequence
  Description of Artificial Sequence: Synthetic oligonucleotide
augagcauucuucaugaac

SEQ ID NO: 3066860 - RNA, 19 nt, Artificial Sequence
  Description of Artificial Sequence: Synthetic oligonucleotide
uggaagaaccgcauuaaug

SEQ ID NO: 3066861 - RNA, 19 nt, Artificial Sequence
  Description of Artificial Sequence: Synthetic oligonucleotide
accgcauuaaugugugucc

SEQ ID NO: 3066862 - RNA, 19 nt, Artificial Sequence
  Description of Artificial Sequence: Synthetic oligonucleotide
gaaaaugggcuucaccgag

SEQ ID NO: 3066863 - RNA, 19 nt, Artificial Sequence
  Description of Artificial Sequence: Synthetic oligonucleotide
uccagcuggaauaagugca

SEQ ID NO: 3066864 - RNA, 19 nt, Artificial Sequence
  Description of Artificial Sequence: Synthetic oligonucleotide
uccaucuuucccuuaauga

SEQ ID NO: 3066865 - RNA, 19 nt, Artificial Sequence
  Description of Artificial Sequence: Synthetic oligonucleotide
uguuucuguuucauggaag

SEQ ID NO: 3066866 - RNA, 19 nt, Artificial Sequence
  Description of Artificial Sequence: Synthetic oligonucleotide
gacaugagcauucuucaug

SEQ ID NO: 3066867 - RNA, 19 nt, Artificial Sequence
  Description of Artificial Sequence: Synthetic oligonucleotide
aauguguguccgcugcuuc

SEQ ID NO: 3066868 - RNA, 19 nt, Artificial Sequence
  Description of Artificial Sequence: Synthetic oligonucleotide
aaccgcauuaauguguguc

SEQ ID NO: 3066869 - RNA, 19 nt, Artificial Sequence
  Description of Artificial Sequence: Synthetic oligonucleotide
caggagaucaacuacucug

SEQ ID NO: 3066870 - RNA, 19 nt, Artificial Sequence
  Description of Artificial Sequence: Synthetic oligonucleotide
caucuuucccuuaaugacc

SEQ ID NO: 3066871 - RNA, 19 nt, Artificial Sequence
  Description of Artificial Sequence: Synthetic oligonucleotide
uuucccuuaaugaccagga

SEQ ID NO: 3066872 - RNA, 19 nt, Artificial Sequence
  Description of Artificial Sequence: Synthetic oligonucleotide
auggaugguuuccuggagc

SEQ ID NO: 3066873 - RNA, 19 nt, Artificial Sequence
  Description of Artificial Sequence: Synthetic oligonucleotide
ucccuuaaugaccaggaga

SEQ ID NO: 3066874 - RNA, 19 nt, Artificial Sequence
  Description of Artificial Sequence: Synthetic oligonucleotide
uguuucacggugaugucca

SEQ ID NO: 3066875 - RNA, 19 nt, Artificial Sequence
  Description of Artificial Sequence: Synthetic oligonucleotide
gagaucaacuacucugggg

SEQ ID NO: 3066876 - RNA, 19 nt, Artificial Sequence
  Description of Artificial Sequence: Synthetic oligonucleotide
cuucaugaacauuucucgg

SEQ ID NO: 3066877 - RNA, 19 nt, Artificial Sequence
  Description of Artificial Sequence: Synthetic oligonucleotide
cuuggccucguucaggucg

SEQ ID NO: 3066878 - RNA, 19 nt, Artificial Sequence
  Description of Artificial Sequence: Synthetic oligonucleotide
uguuucauggaagaaccgc

SEQ ID NO: 3066879 - RNA, 19 nt, Artificial Sequence
  Description of Artificial Sequence: Synthetic oligonucleotide
uuucucggacuuuaucccg

SEQ ID NO: 3066880 - RNA, 19 nt, Artificial Sequence
  Description of Artificial Sequence: Synthetic oligonucleotide
uguccagcuggaauaagug

SEQ ID NO: 3066881 - RNA, 19 nt, Artificial Sequence
  Description of Artificial Sequence: Synthetic oligonucleotide
acaugagcauucuucauga

SEQ ID NO: 3066882 - RNA, 19 nt, Artificial Sequence
  Description of Artificial Sequence: Synthetic oligonucleotide
ugaaaaugggcuucaccga

SEQ ID NO: 3066883 - RNA, 19 nt, Artificial Sequence
  Description of Artificial Sequence: Synthetic oligonucleotide
uggaauaagugcacagugu

SEQ ID NO: 3066884 - RNA, 19 nt, Artificial Sequence
  Description of Artificial Sequence: Synthetic oligonucleotide
ucauggaagaaccgcauua

SEQ ID NO: 3066885 - RNA, 19 nt, Artificial Sequence
  Description of Artificial Sequence: Synthetic oligonucleotide
uucacggugauguccagcu

SEQ ID NO: 3066886 - RNA, 19 nt, Artificial Sequence
  Description of Artificial Sequence: Synthetic oligonucleotide
cuggaauaagugcacagug

SEQ ID NO: 3066887 - RNA, 19 nt, Artificial Sequence
  Description of Artificial Sequence: Synthetic oligonucleotide
aagugcacaguguucggca

SEQ ID NO: 3066888 - RNA, 19 nt, Artificial Sequence
  Description of Artificial Sequence: Synthetic oligonucleotide
cuuaaugaccaggagauca

SEQ ID NO: 3066889 - RNA, 19 nt, Artificial Sequence
  Description of Artificial Sequence: Synthetic oligonucleotide
acauuucucggacuuuauc

SEQ ID NO: 3066890 - RNA, 19 nt, Artificial Sequence
  Description of Artificial Sequence: Synthetic oligonucleotide
uucuguuucauggaagaac

SEQ ID NO: 3066891 - RNA, 19 nt, Artificial Sequence
  Description of Artificial Sequence: Synthetic oligonucleotide
gaagaaccgcauuaaugug

SEQ ID NO: 3066892 - RNA, 19 nt, Artificial Sequence
  Description of Artificial Sequence: Synthetic oligonucleotide
ucggacuuuaucccguccc

SEQ ID NO: 3066893 - RNA, 19 nt, Artificial Sequence
  Description of Artificial Sequence: Synthetic oligonucleotide
aaaugggcuucaccgaggu

SEQ ID NO: 3066894 - RNA, 19 nt, Artificial Sequence
  Description of Artificial Sequence: Synthetic oligonucleotide
uucaggucgcgacugaaaa

SEQ ID NO: 3066895 - RNA, 19 nt, Artificial Sequence
  Description of Artificial Sequence: Synthetic oligonucleotide
uuaaugaccaggagaucaa

SEQ ID NO: 3066896 - RNA, 19 nt, Artificial Sequence
  Description of Artificial Sequence: Synthetic oligonucleotide
aagaaccgcauuaaugugu

SEQ ID NO: 3066897 - RNA, 19 nt, Artificial Sequence
  Description of Artificial Sequence: Synthetic oligonucleotide
auguguguccgcugcuucc

SEQ ID NO: 3066898 - RNA, 19 nt, Artificial Sequence
  Description of Artificial Sequence: Synthetic oligonucleotide
cacauggaugguuuccugg

SEQ ID NO: 3066899 - RNA, 19 nt, Artificial Sequence
  Description of Artificial Sequence: Synthetic oligonucleotide
cacggugauguccagcugg

SEQ ID NO: 3066900 - RNA, 19 nt, Artificial Sequence
  Description of Artificial Sequence: Synthetic oligonucleotide
guuucuguuucauggaaga

SEQ ID NO: 3066901 - RNA, 19 nt, Artificial Sequence
  Description of Artificial Sequence: Synthetic oligonucleotide
ugaccaggagaucaacuac

SEQ ID NO: 3066902 - RNA, 19 nt, Artificial Sequence
  Description of Artificial Sequence: Synthetic oligonucleotide
auaccaagcgcgguagagc

SEQ ID NO: 3066903 - RNA, 19 nt, Artificial Sequence
  Description of Artificial Sequence: Synthetic oligonucleotide
uuuaucccgucccuguuuc

SEQ ID NO: 3066904 - RNA, 19 nt, Artificial Sequence
  Description of Artificial Sequence: Synthetic oligonucleotide
aaaaugggcuucaccgagg

SEQ ID NO: 3066905 - RNA, 19 nt, Artificial Sequence
  Description of Artificial Sequence: Synthetic oligonucleotide
ucuggggucugugacauga

SEQ ID NO: 3066906 - RNA, 19 nt, Artificial Sequence
  Description of Artificial Sequence: Synthetic oligonucleotide
aggagaucaacuacucugg

SEQ ID NO: 3066907 - RNA, 19 nt, Artificial Sequence
  Description of Artificial Sequence: Synthetic oligonucleotide
gauaccaagcgcgguagag

SEQ ID NO: 3066908 - RNA, 19 nt, Artificial Sequence
  Description of Artificial Sequence: Synthetic oligonucleotide
auaagugcacaguguucgg

SEQ ID NO: 3066909 - RNA, 19 nt, Artificial Sequence
  Description of Artificial Sequence: Synthetic oligonucleotide
agcuggaauaagugcacag

SEQ ID NO: 3066910 - RNA, 19 nt, Artificial Sequence
  Description of Artificial Sequence: Synthetic oligonucleotide
uaccaagcgcgguagagcu

SEQ ID NO: 3066911 - RNA, 19 nt, Artificial Sequence
  Description of Artificial Sequence: Synthetic oligonucleotide
agugcacaguguucggcac

SEQ ID NO: 3066912 - RNA, 19 nt, Artificial Sequence
  Description of Artificial Sequence: Synthetic oligonucleotide
uggaugguuuccuggagcu

SEQ ID NO: 3066913 - RNA, 19 nt, Artificial Sequence
  Description of Artificial Sequence: Synthetic oligonucleotide
augaacauuucucggacuu

SEQ ID NO: 3066914 - RNA, 19 nt, Artificial Sequence
  Description of Artificial Sequence: Synthetic oligonucleotide
auucuucaugaacauuucu

SEQ ID NO: 3066915 - RNA, 19 nt, Artificial Sequence
  Description of Artificial Sequence: Synthetic oligonucleotide
uucaccgaggugcugccug

SEQ ID NO: 3066916 - RNA, 19 nt, Artificial Sequence
  Description of Artificial Sequence: Synthetic oligonucleotide
agcgcgguagagcucgcgc

SEQ ID NO: 3066917 - RNA, 19 nt, Artificial Sequence
  Description of Artificial Sequence: Synthetic oligonucleotide
aaugaccaggagaucaacu

SEQ ID NO: 3066918 - RNA, 19 nt, Artificial Sequence
  Description of Artificial Sequence: Synthetic oligonucleotide
uuucauggaagaaccgcau

SEQ ID NO: 3066919 - RNA, 19 nt, Artificial Sequence
  Description of Artificial Sequence: Synthetic oligonucleotide
ggaagaaccgcauuaaugu

SEQ ID NO: 3066920 - RNA, 19 nt, Artificial Sequence
  Description of Artificial Sequence: Synthetic oligonucleotide
acauggaugguuuccugga

SEQ ID NO: 3066921 - RNA, 19 nt, Artificial Sequence
  Description of Artificial Sequence: Synthetic oligonucleotide
ucgcgacugaaaaugggcu

SEQ ID NO: 3066922 - RNA, 19 nt, Artificial Sequence
  Description of Artificial Sequence: Synthetic oligonucleotide
gugacaugagcauucuuca

SEQ ID NO: 3066923 - RNA, 19 nt, Artificial Sequence
  Description of Artificial Sequence: Synthetic oligonucleotide
uucccuuaaugaccaggag

SEQ ID NO: 3066924 - RNA, 19 nt, Artificial Sequence
  Description of Artificial Sequence: Synthetic oligonucleotide
augaccaggagaucaacua

SEQ ID NO: 3066925 - RNA, 19 nt, Artificial Sequence
  Description of Artificial Sequence: Synthetic oligonucleotide
uuaauguguguccgcugcu

SEQ ID NO: 3066926 - RNA, 19 nt, Artificial Sequence
  Description of Artificial Sequence: Synthetic oligonucleotide
acaguguucggcaccuccc

SEQ ID NO: 3066927 - RNA, 19 nt, Artificial Sequence
  Description of Artificial Sequence: Synthetic oligonucleotide
ugccgcaagccgcuggccg

SEQ ID NO: 3066928 - RNA, 19 nt, Artificial Sequence
  Description of Artificial Sequence: Synthetic oligonucleotide
ucccgucccuguuucacgg

SEQ ID NO: 3066929 - RNA, 19 nt, Artificial Sequence
  Description of Artificial Sequence: Synthetic oligonucleotide
caggucgcgacugaaaaug

SEQ ID NO: 3066930 - RNA, 19 nt, Artificial Sequence
  Description of Artificial Sequence: Synthetic oligonucleotide
cuguuucauggaagaaccg

SEQ ID NO: 3066931 - RNA, 19 nt, Artificial Sequence
  Description of Artificial Sequence: Synthetic oligonucleotide
ugccgcagcagccugccgc

SEQ ID NO: 3066932 - RNA, 19 nt, Artificial Sequence
  Description of Artificial Sequence: Synthetic oligonucleotide
ccaucuuucccuuaaugac

SEQ ID NO: 3066933 - RNA, 19 nt, Artificial Sequence
  Description of Artificial Sequence: Synthetic oligonucleotide
uaagugcacaguguucggc

SEQ ID NO: 3066934 - RNA, 19 nt, Artificial Sequence
  Description of Artificial Sequence: Synthetic oligonucleotide
uggggucugugacaugagc

SEQ ID NO: 3066935 - RNA, 19 nt, Artificial Sequence
  Description of Artificial Sequence: Synthetic oligonucleotide
guccagcuggaauaagugc

SEQ ID NO: 3066936 - RNA, 19 nt, Artificial Sequence
  Description of Artificial Sequence: Synthetic oligonucleotide
uucucggacuuuaucccgu

SEQ ID NO: 3066937 - RNA, 19 nt, Artificial Sequence
  Description of Artificial Sequence: Synthetic oligonucleotide
agaaccgcauuaaugugug

SEQ ID NO: 3066938 - RNA, 19 nt, Artificial Sequence
  Description of Artificial Sequence: Synthetic oligonucleotide
gaauaagugcacaguguuc

SEQ ID NO: 3066939 - RNA, 19 nt, Artificial Sequence
  Description of Artificial Sequence: Synthetic oligonucleotide
acuacucuggggucuguga

SEQ ID NO: 3066940 - RNA, 19 nt, Artificial Sequence
  Description of Artificial Sequence: Synthetic oligonucleotide
cacaguguucggcaccucc

SEQ ID NO: 3066941 - RNA, 19 nt, Artificial Sequence
  Description of Artificial Sequence: Synthetic oligonucleotide
cuguuucacggugaugucc

SEQ ID NO: 3066942 - RNA, 19 nt, Artificial Sequence
  Description of Artificial Sequence: Synthetic oligonucleotide
cauuaauguguguccgcug

SEQ ID NO: 3066943 - RNA, 19 nt, Artificial Sequence
  Description of Artificial Sequence: Synthetic oligonucleotide
cuacucuggggucugugac

SEQ ID NO: 3066944 - RNA, 19 nt, Artificial Sequence
  Description of Artificial Sequence: Synthetic oligonucleotide
gucgcgacugaaaaugggc

SEQ ID NO: 3066945 - RNA, 19 nt, Artificial Sequence
  Description of Artificial Sequence: Synthetic oligonucleotide
gugauguccagcuggaaua

SEQ ID NO: 3066946 - RNA, 19 nt, Artificial Sequence
  Description of Artificial Sequence: Synthetic oligonucleotide
accucccgauaccaagcgc

SEQ ID NO: 3066947 - RNA, 19 nt, Artificial Sequence
  Description of Artificial Sequence: Synthetic oligonucleotide
cuccaucuuucccuuaaug

SEQ ID NO: 3066948 - RNA, 19 nt, Artificial Sequence
  Description of Artificial Sequence: Synthetic oligonucleotide
ccucccgauaccaagcgcg

SEQ ID NO: 3066949 - RNA, 19 nt, Artificial Sequence
  Description of Artificial Sequence: Synthetic oligonucleotide
aucuuucccuuaaugacca

SEQ ID NO: 3066950 - RNA, 19 nt, Artificial Sequence
  Description of Artificial Sequence: Synthetic oligonucleotide
gaucaacuacucugggguc

SEQ ID NO: 3066951 - RNA, 19 nt, Artificial Sequence
  Description of Artificial Sequence: Synthetic oligonucleotide
cauggaugguuuccuggag

SEQ ID NO: 3066952 - RNA, 19 nt, Artificial Sequence
  Description of Artificial Sequence: Synthetic oligonucleotide
uucauggaagaaccgcauu

SEQ ID NO: 3066953 - RNA, 19 nt, Artificial Sequence
  Description of Artificial Sequence: Synthetic oligonucleotide
uucggcaccucccgauacc

SEQ ID NO: 3066954 - RNA, 19 nt, Artificial Sequence
  Description of Artificial Sequence: Synthetic oligonucleotide
ucgguguuucuguuucaug

SEQ ID NO: 3066955 - RNA, 19 nt, Artificial Sequence
  Description of Artificial Sequence: Synthetic oligonucleotide
aucccgucccuguuucacg

SEQ ID NO: 3066956 - RNA, 19 nt, Artificial Sequence
  Description of Artificial Sequence: Synthetic oligonucleotide
uuggccucguucaggucgc

SEQ ID NO: 3066957 - RNA, 19 nt, Artificial Sequence
  Description of Artificial Sequence: Synthetic oligonucleotide
ggagaucaacuacucuggg

SEQ ID NO: 3066958 - RNA, 19 nt, Artificial Sequence
  Description of Artificial Sequence: Synthetic oligonucleotide
uagagcucgcgcacccucc

SEQ ID NO: 3066959 - RNA, 19 nt, Artificial Sequence
  Description of Artificial Sequence: Synthetic oligonucleotide
agcagccugccgcaagccg

SEQ ID NO: 3066960 - RNA, 19 nt, Artificial Sequence
  Description of Artificial Sequence: Synthetic oligonucleotide
aucaacuacucuggggucu

SEQ ID NO: 3066961 - RNA, 19 nt, Artificial Sequence
  Description of Artificial Sequence: Synthetic oligonucleotide
accaggagaucaacuacuc

SEQ ID NO: 3066962 - RNA, 19 nt, Artificial Sequence
  Description of Artificial Sequence: Synthetic oligonucleotide
ucaacuacucuggggucug

SEQ ID NO: 3066963 - RNA, 19 nt, Artificial Sequence
  Description of Artificial Sequence: Synthetic oligonucleotide
caguguucggcaccucccg

SEQ ID NO: 3066964 - RNA, 19 nt, Artificial Sequence
  Description of Artificial Sequence: Synthetic oligonucleotide
uuucacggugauguccagc

SEQ ID NO: 3066965 - RNA, 19 nt, Artificial Sequence
  Description of Artificial Sequence: Synthetic oligonucleotide
acacauggaugguuuccug

SEQ ID NO: 3066966 - RNA, 19 nt, Artificial Sequence
  Description of Artificial Sequence: Synthetic oligonucleotide
cucccgauaccaagcgcgg

SEQ ID NO: 3066967 - RNA, 19 nt, Artificial Sequence
  Description of Artificial Sequence: Synthetic oligonucleotide
agagcucgcgcacccuccg

SEQ ID NO: 3066968 - RNA, 19 nt, Artificial Sequence
  Description of Artificial Sequence: Synthetic oligonucleotide
aacuacucuggggucugug

SEQ ID NO: 3066969 - RNA, 19 nt, Artificial Sequence
  Description of Artificial Sequence: Synthetic oligonucleotide
auggaagaaccgcauuaau

SEQ ID NO: 3066970 - RNA, 19 nt, Artificial Sequence
  Description of Artificial Sequence: Synthetic oligonucleotide
uaaugaccaggagaucaac

SEQ ID NO: 3066971 - RNA, 19 nt, Artificial Sequence
  Description of Artificial Sequence: Synthetic oligonucleotide
ugacaugagcauucuucau

SEQ ID NO: 3066972 - RNA, 19 nt, Artificial Sequence
  Description of Artificial Sequence: Synthetic oligonucleotide
uuucuguuucauggaagaa

SEQ ID NO: 3066973 - RNA, 19 nt, Artificial Sequence
  Description of Artificial Sequence: Synthetic oligonucleotide
gaacauuucucggacuuua

SEQ ID NO: 3066974 - RNA, 19 nt, Artificial Sequence
  Description of Artificial Sequence: Synthetic oligonucleotide
ugcacaguguucggcaccu

SEQ ID NO: 3066975 - RNA, 19 nt, Artificial Sequence
  Description of Artificial Sequence: Synthetic oligonucleotide
uguguguccgcugcuucca

SEQ ID NO: 3066976 - RNA, 19 nt, Artificial Sequence
  Description of Artificial Sequence: Synthetic oligonucleotide
ucugugacaugagcauucu

SEQ ID NO: 3066977 - RNA, 19 nt, Artificial Sequence
  Description of Artificial Sequence: Synthetic oligonucleotide
ugauguccagcuggaauaa

SEQ ID NO: 3066978 - RNA, 19 nt, Artificial Sequence
  Description of Artificial Sequence: Synthetic oligonucleotide
ucaggucgcgacugaaaau

SEQ ID NO: 3066979 - RNA, 19 nt, Artificial Sequence
  Description of Artificial Sequence: Synthetic oligonucleotide
uuuccuggagcuccaucuu

SEQ ID NO: 3066980 - RNA, 19 nt, Artificial Sequence
  Description of Artificial Sequence: Synthetic oligonucleotide
caccucccgauaccaagcg

SEQ ID NO: 3066981 - RNA, 19 nt, Artificial Sequence
  Description of Artificial Sequence: Synthetic oligonucleotide
auguccagcuggaauaagu

SEQ ID NO: 3066982 - RNA, 19 nt, Artificial Sequence
  Description of Artificial Sequence: Synthetic oligonucleotide
cugcuuccacacauggaug

SEQ ID NO: 3066983 - RNA, 19 nt, Artificial Sequence
  Description of Artificial Sequence: Synthetic oligonucleotide
uaucccgucccuguuucac

SEQ ID NO: 3066984 - RNA, 19 nt, Artificial Sequence
  Description of Artificial Sequence: Synthetic oligonucleotide
uccgcugcuuccacacaug

SEQ ID NO: 3066985 - RNA, 19 nt, Artificial Sequence
  Description of Artificial Sequence: Synthetic oligonucleotide
cuggagcuccaucuuuccc

SEQ ID NO: 3066986 - RNA, 19 nt, Artificial Sequence
  Description of Artificial Sequence: Synthetic oligonucleotide
gacuuuaucccgucccugu

SEQ ID NO: 3066987 - RNA, 19 nt, Artificial Sequence
  Description of Artificial Sequence: Synthetic oligonucleotide
ugcugccugccgcagcagc

SEQ ID NO: 3066988 - RNA, 19 nt, Artificial Sequence
  Description of Artificial Sequence: Synthetic oligonucleotide
uguguccgcugcuuccaca

SEQ ID NO: 3066989 - RNA, 19 nt, Artificial Sequence
  Description of Artificial Sequence: Synthetic oligonucleotide
guguuucuguuucauggaa

SEQ ID NO: 3066990 - RNA, 19 nt, Artificial Sequence
  Description of Artificial Sequence: Synthetic oligonucleotide
gucugugacaugagcauuc

SEQ ID NO: 3066991 - RNA, 19 nt, Artificial Sequence
  Description of Artificial Sequence: Synthetic oligonucleotide
ggcaccucccgauaccaag

SEQ ID NO: 3066992 - RNA, 19 nt, Artificial Sequence
  Description of Artificial Sequence: Synthetic oligonucleotide
guguccgcugcuuccacac

SEQ ID NO: 3066993 - RNA, 19 nt, Artificial Sequence
  Description of Artificial Sequence: Synthetic oligonucleotide
gguguuucuguuucaugga

SEQ ID NO: 3066994 - RNA, 19 nt, Artificial Sequence
  Description of Artificial Sequence: Synthetic oligonucleotide
ucuuucccuuaaugaccag

SEQ ID NO: 3066995 - RNA, 19 nt, Artificial Sequence
  Description of Artificial Sequence: Synthetic oligonucleotide
gauguccagcuggaauaag

SEQ ID NO: 3066996 - RNA, 19 nt, Artificial Sequence
  Description of Artificial Sequence: Synthetic oligonucleotide
ucaccgaggugcugccugc

SEQ ID NO: 3066997 - RNA, 19 nt, Artificial Sequence
  Description of Artificial Sequence: Synthetic oligonucleotide
ucgcgcacccuccgcuugg

SEQ ID NO: 3066998 - RNA, 19 nt, Artificial Sequence
  Description of Artificial Sequence: Synthetic oligonucleotide
uccacacauggaugguuuc

SEQ ID NO: 3066999 - RNA, 19 nt, Artificial Sequence
  Description of Artificial Sequence: Synthetic oligonucleotide
accgaggugcugccugccg

SEQ ID NO: 3067000 - RNA, 19 nt, Artificial Sequence
  Description of Artificial Sequence: Synthetic oligonucleotide
uguucggcaccucccgaua

SEQ ID NO: 3067001 - RNA, 19 nt, Artificial Sequence
  Description of Artificial Sequence: Synthetic oligonucleotide
aacauuucucggacuuuau

SEQ ID NO: 3067002 - RNA, 19 nt, Artificial Sequence
  Description of Artificial Sequence: Synthetic oligonucleotide
uuccuggagcuccaucuuu

SEQ ID NO: 3067003 - RNA, 19 nt, Artificial Sequence
  Description of Artificial Sequence: Synthetic oligonucleotide
aguguucggcaccucccga

SEQ ID NO: 3067004 - RNA, 19 nt, Artificial Sequence
  Description of Artificial Sequence: Synthetic oligonucleotide
cucggacuuuaucccgucc

SEQ ID NO: 3067005 - RNA, 19 nt, Artificial Sequence
  Description of Artificial Sequence: Synthetic oligonucleotide
aggucgcgacugaaaaugg

SEQ ID NO: 3067006 - RNA, 19 nt, Artificial Sequence
  Description of Artificial Sequence: Synthetic oligonucleotide
ccaagcgcgguagagcucg

SEQ ID NO: 3067007 - RNA, 19 nt, Artificial Sequence
  Description of Artificial Sequence: Synthetic oligonucleotide
acuuuaucccgucccuguu

SEQ ID NO: 3067008 - RNA, 19 nt, Artificial Sequence
  Description of Artificial Sequence: Synthetic oligonucleotide
guagagcucgcgcacccuc

SEQ ID NO: 3067009 - RNA, 19 nt, Artificial Sequence
  Description of Artificial Sequence: Synthetic oligonucleotide
ugaacauuucucggacuuu

SEQ ID NO: 3067010 - RNA, 19 nt, Artificial Sequence
  Description of Artificial Sequence: Synthetic oligonucleotide
gugcacaguguucggcacc

SEQ ID NO: 3067011 - RNA, 19 nt, Artificial Sequence
  Description of Artificial Sequence: Synthetic oligonucleotide
ggaauaagugcacaguguu

SEQ ID NO: 3067012 - RNA, 19 nt, Artificial Sequence
  Description of Artificial Sequence: Synthetic oligonucleotide
cucguucaggucgcgacug

SEQ ID NO: 3067013 - RNA, 19 nt, Artificial Sequence
  Description of Artificial Sequence: Synthetic oligonucleotide
uaauguguguccgcugcuu

SEQ ID NO: 3067014 - RNA, 19 nt, Artificial Sequence
  Description of Artificial Sequence: Synthetic oligonucleotide
cauggaagaaccgcauuaa

SEQ ID NO: 3067015 - RNA, 19 nt, Artificial Sequence
  Description of Artificial Sequence: Synthetic oligonucleotide
uuaucccgucccuguuuca

SEQ ID NO: 3067016 - RNA, 19 nt, Artificial Sequence
  Description of Artificial Sequence: Synthetic oligonucleotide
ucggcaccucccgauacca

SEQ ID NO: 3067017 - RNA, 19 nt, Artificial Sequence
  Description of Artificial Sequence: Synthetic oligonucleotide
cuccgcuuggccucguuca

SEQ ID NO: 3067018 - RNA, 19 nt, Artificial Sequence
  Description of Artificial Sequence: Synthetic oligonucleotide
guucggcaccucccgauac

SEQ ID NO: 3067019 - RNA, 19 nt, Artificial Sequence
  Description of Artificial Sequence: Synthetic oligonucleotide
gcugcuuccacacauggau

SEQ ID NO: 3067020 - RNA, 19 nt, Artificial Sequence
  Description of Artificial Sequence: Synthetic oligonucleotide
ucguucaggucgcgacuga

SEQ ID NO: 3067021 - RNA, 19 nt, Artificial Sequence
  Description of Artificial Sequence: Synthetic oligonucleotide
ucucggacuuuaucccguc

SEQ ID NO: 3067022 - RNA, 19 nt, Artificial Sequence
  Description of Artificial Sequence: Synthetic oligonucleotide
gaccaggagaucaacuacu

SEQ ID NO: 3067023 - RNA, 19 nt, Artificial Sequence
  Description of Artificial Sequence: Synthetic oligonucleotide
aagcgcgguagagcucgcg

SEQ ID NO: 3067024 - RNA, 19 nt, Artificial Sequence
  Description of Artificial Sequence: Synthetic oligonucleotide
guuucacggugauguccag

SEQ ID NO: 3067025 - RNA, 19 nt, Artificial Sequence
  Description of Artificial Sequence: Synthetic oligonucleotide
uguccgcugcuuccacaca

SEQ ID NO: 3067026 - RNA, 19 nt, Artificial Sequence
  Description of Artificial Sequence: Synthetic oligonucleotide
agcucgcgcacccuccgcu

SEQ ID NO: 3067027 - RNA, 19 nt, Artificial Sequence
  Description of Artificial Sequence: Synthetic oligonucleotide
ggucgcgacugaaaauggg

SEQ ID NO: 3067028 - RNA, 19 nt, Artificial Sequence
  Description of Artificial Sequence: Synthetic oligonucleotide
ccagcuggaauaagugcac

SEQ ID NO: 3067029 - RNA, 19 nt, Artificial Sequence
  Description of Artificial Sequence: Synthetic oligonucleotide
ggcuucaccgaggugcugc

SEQ ID NO: 3067030 - RNA, 19 nt, Artificial Sequence
  Description of Artificial Sequence: Synthetic oligonucleotide
cuggggucugugacaugag

SEQ ID NO: 3067031 - RNA, 19 nt, Artificial Sequence
  Description of Artificial Sequence: Synthetic oligonucleotide
ggggucugugacaugagca

SEQ ID NO: 3067032 - RNA, 19 nt, Artificial Sequence
  Description of Artificial Sequence: Synthetic oligonucleotide
gacugaaaaugggcuucac

SEQ ID NO: 3067033 - RNA, 19 nt, Artificial Sequence
  Description of Artificial Sequence: Synthetic oligonucleotide
cccuuaaugaccaggagau

SEQ ID NO: 3067034 - RNA, 19 nt, Artificial Sequence
  Description of Artificial Sequence: Synthetic oligonucleotide
ccgcauuaauguguguccg

SEQ ID NO: 3067035 - RNA, 19 nt, Artificial Sequence
  Description of Artificial Sequence: Synthetic oligonucleotide
ugccugccgcagcagccug

SEQ ID NO: 3067036 - RNA, 19 nt, Artificial Sequence
  Description of Artificial Sequence: Synthetic oligonucleotide
gccucgguguuucuguuuc

SEQ ID NO: 3067037 - RNA, 19 nt, Artificial Sequence
  Description of Artificial Sequence: Synthetic oligonucleotide
ggugauguccagcuggaau

SEQ ID NO: 3067038 - RNA, 19 nt, Artificial Sequence
  Description of Artificial Sequence: Synthetic oligonucleotide
gcagcagccugccgcaagc

SEQ ID NO: 3067039 - RNA, 19 nt, Artificial Sequence
  Description of Artificial Sequence: Synthetic oligonucleotide
gccucguucaggucgcgac

SEQ ID NO: 3067040 - RNA, 19 nt, Artificial Sequence
  Description of Artificial Sequence: Synthetic oligonucleotide
ccuggagcuccaucuuucc

SEQ ID NO: 3067041 - RNA, 19 nt, Artificial Sequence
  Description of Artificial Sequence: Synthetic oligonucleotide
ccacacauggaugguuucc

SEQ ID NO: 3067042 - RNA, 19 nt, Artificial Sequence
  Description of Artificial Sequence: Synthetic oligonucleotide
gcgacugaaaaugggcuuc

SEQ ID NO: 3067043 - RNA, 19 nt, Artificial Sequence
  Description of Artificial Sequence: Synthetic oligonucleotide
ggacuuuaucccgucccug

SEQ ID NO: 3067044 - RNA, 19 nt, Artificial Sequence
  Description of Artificial Sequence: Synthetic oligonucleotide
acggugauguccagcugga

SEQ ID NO: 3067045 - RNA, 19 nt, Artificial Sequence
  Description of Artificial Sequence: Synthetic oligonucleotide
cgcauuaauguguguccgc

SEQ ID NO: 3067046 - RNA, 19 nt, Artificial Sequence
  Description of Artificial Sequence: Synthetic oligonucleotide
ucccuguuucacggugaug

SEQ ID NO: 3067047 - RNA, 19 nt, Artificial Sequence
  Description of Artificial Sequence: Synthetic oligonucleotide
ccgcugcuuccacacaugg

SEQ ID NO: 3067048 - RNA, 19 nt, Artificial Sequence
  Description of Artificial Sequence: Synthetic oligonucleotide
gagcucgcgcacccuccgc

SEQ ID NO: 3067049 - RNA, 19 nt, Artificial Sequence
  Description of Artificial Sequence: Synthetic oligonucleotide
cucgcgcacccuccgcuug

SEQ ID NO: 3067050 - RNA, 19 nt, Artificial Sequence
  Description of Artificial Sequence: Synthetic oligonucleotide
ucccgauaccaagcgcggu

SEQ ID NO: 3067051 - RNA, 19 nt, Artificial Sequence
  Description of Artificial Sequence: Synthetic oligonucleotide
gaggugcugccugccgcag

SEQ ID NO: 3067052 - RNA, 19 nt, Artificial Sequence
  Description of Artificial Sequence: Synthetic oligonucleotide
gguuuccuggagcuccauc

SEQ ID NO: 3067053 - RNA, 19 nt, Artificial Sequence
  Description of Artificial Sequence: Synthetic oligonucleotide
guucaggucgcgacugaaa

SEQ ID NO: 3067054 - RNA, 19 nt, Artificial Sequence
  Description of Artificial Sequence: Synthetic oligonucleotide
accaagcgcgguagagcuc

SEQ ID NO: 3067055 - RNA, 19 nt, Artificial Sequence
  Description of Artificial Sequence: Synthetic oligonucleotide
gcuucaccgaggugcugcc

SEQ ID NO: 3067056 - RNA, 19 nt, Artificial Sequence
  Description of Artificial Sequence: Synthetic oligonucleotide
gcaccucccgauaccaagc

SEQ ID NO: 3067057 - RNA, 19 nt, Artificial Sequence
  Description of Artificial Sequence: Synthetic oligonucleotide
cccuguuucacggugaugu

SEQ ID NO: 3067058 - RNA, 19 nt, Artificial Sequence
  Description of Artificial Sequence: Synthetic oligonucleotide
gcauuaauguguguccgcu

SEQ ID NO: 3067059 - RNA, 19 nt, Artificial Sequence
  Description of Artificial Sequence: Synthetic oligonucleotide
cacacauggaugguuuccu

SEQ ID NO: 3067060 - RNA, 19 nt, Artificial Sequence
  Description of Artificial Sequence: Synthetic oligonucleotide
ccgauaccaagcgcgguag

SEQ ID NO: 3067061 - RNA, 19 nt, Artificial Sequence
  Description of Artificial Sequence: Synthetic oligonucleotide
guguguccgcugcuuccac

SEQ ID NO: 3067062 - RNA, 19 nt, Artificial Sequence
  Description of Artificial Sequence: Synthetic oligonucleotide
gcuggaauaagugcacagu

SEQ ID NO: 3067063 - RNA, 19 nt, Artificial Sequence
  Description of Artificial Sequence: Synthetic oligonucleotide
ccugccgcaagccgcuggc

SEQ ID NO: 3067064 - RNA, 19 nt, Artificial Sequence
  Description of Artificial Sequence: Synthetic oligonucleotide
cuuuaucccgucccuguuu

SEQ ID NO: 3067065 - RNA, 19 nt, Artificial Sequence
  Description of Artificial Sequence: Synthetic oligonucleotide
gccgcaagccgcuggccgc

SEQ ID NO: 3067066 - RNA, 19 nt, Artificial Sequence
  Description of Artificial Sequence: Synthetic oligonucleotide
cagcagccugccgcaagcc

SEQ ID NO: 3067067 - RNA, 19 nt, Artificial Sequence
  Description of Artificial Sequence: Synthetic oligonucleotide
caagcgcgguagagcucgc

SEQ ID NO: 3067068 - RNA, 19 nt, Artificial Sequence
  Description of Artificial Sequence: Synthetic oligonucleotide
ccgaggugcugccugccgc

SEQ ID NO: 3067069 - RNA, 19 nt, Artificial Sequence
  Description of Artificial Sequence: Synthetic oligonucleotide
cagcuggaauaagugcaca

SEQ ID NO: 3067070 - RNA, 19 nt, Artificial Sequence
  Description of Artificial Sequence: Synthetic oligonucleotide
guccgcugcuuccacacau

SEQ ID NO: 3067071 - RNA, 19 nt, Artificial Sequence
  Description of Artificial Sequence: Synthetic oligonucleotide
gcugccugccgcagcagcc

SEQ ID NO: 3067072 - RNA, 19 nt, Artificial Sequence
  Description of Artificial Sequence: Synthetic oligonucleotide
ccuguuucacggugauguc

SEQ ID NO: 3067073 - RNA, 19 nt, Artificial Sequence
  Description of Artificial Sequence: Synthetic oligonucleotide
gaaccgcauuaaugugugu

SEQ ID NO: 3067074 - RNA, 19 nt, Artificial Sequence
  Description of Artificial Sequence: Synthetic oligonucleotide
guguucggcaccucccgau

SEQ ID NO: 3067075 - RNA, 19 nt, Artificial Sequence
  Description of Artificial Sequence: Synthetic oligonucleotide
caccgaggugcugccugcc

SEQ ID NO: 3067076 - RNA, 19 nt, Artificial Sequence
  Description of Artificial Sequence: Synthetic oligonucleotide
gccugccgcaagccgcugg

SEQ ID NO: 3067077 - RNA, 19 nt, Artificial Sequence
  Description of Artificial Sequence: Synthetic oligonucleotide
uggccucguucaggucgcg

SEQ ID NO: 3067078 - RNA, 19 nt, Artificial Sequence
  Description of Artificial Sequence: Synthetic oligonucleotide
cucuggggucugugacaug

SEQ ID NO: 3067079 - RNA, 19 nt, Artificial Sequence
  Description of Artificial Sequence: Synthetic oligonucleotide
ccgucccuguuucacggug

SEQ ID NO: 3067080 - RNA, 19 nt, Artificial Sequence
  Description of Artificial Sequence: Synthetic oligonucleotide
gcgcgguagagcucgcgca

SEQ ID NO: 3067081 - RNA, 19 nt, Artificial Sequence
  Description of Artificial Sequence: Synthetic oligonucleotide
cugccgcaagccgcuggcc

SEQ ID NO: 3067082 - RNA, 19 nt, Artificial Sequence
  Description of Artificial Sequence: Synthetic oligonucleotide
cacccuccgcuuggccucg

SEQ ID NO: 3067083 - RNA, 19 nt, Artificial Sequence
  Description of Artificial Sequence: Synthetic oligonucleotide
ccuuaaugaccaggagauc

SEQ ID NO: 3067084 - RNA, 19 nt, Artificial Sequence
  Description of Artificial Sequence: Synthetic oligonucleotide
cugccgcagcagccugccg

SEQ ID NO: 3067085 - RNA, 19 nt, Artificial Sequence
  Description of Artificial Sequence: Synthetic oligonucleotide
ugguuuccuggagcuccau

SEQ ID NO: 3067086 - RNA, 19 nt, Artificial Sequence
  Description of Artificial Sequence: Synthetic oligonucleotide
gccgcagcagccugccgca

SEQ ID NO: 3067087 - RNA, 19 nt, Artificial Sequence
  Description of Artificial Sequence: Synthetic oligonucleotide
gcgguagagcucgcgcacc

SEQ ID NO: 3067088 - RNA, 19 nt, Artificial Sequence
  Description of Artificial Sequence: Synthetic oligonucleotide
cucgguguuucuguuucau

SEQ ID NO: 3067089 - RNA, 19 nt, Artificial Sequence
  Description of Artificial Sequence: Synthetic oligonucleotide
cgguagagcucgcgcaccc

SEQ ID NO: 3067090 - RNA, 19 nt, Artificial Sequence
  Description of Artificial Sequence: Synthetic oligonucleotide
ccugccgcagcagccugcc

SEQ ID NO: 3067091 - RNA, 19 nt, Artificial Sequence
  Description of Artificial Sequence: Synthetic oligonucleotide
cgcgguagagcucgcgcac

SEQ ID NO: 3067092 - RNA, 19 nt, Artificial Sequence
  Description of Artificial Sequence: Synthetic oligonucleotide
cccgauaccaagcgcggua

SEQ ID NO: 3067093 - RNA, 19 nt, Artificial Sequence
  Description of Artificial Sequence: Synthetic oligonucleotide
ccgcuuggccucguucagg

SEQ ID NO: 3067094 - RNA, 19 nt, Artificial Sequence
  Description of Artificial Sequence: Synthetic oligonucleotide
gugcugccugccgcagcag

SEQ ID NO: 3067095 - RNA, 19 nt, Artificial Sequence
  Description of Artificial Sequence: Synthetic oligonucleotide
cagccugccgcaagccgcu

SEQ ID NO: 3067096 - RNA, 19 nt, Artificial Sequence
  Description of Artificial Sequence: Synthetic oligonucleotide
ccaggagaucaacuacucu

SEQ ID NO: 3067097 - RNA, 19 nt, Artificial Sequence
  Description of Artificial Sequence: Synthetic oligonucleotide
ggucugugacaugagcauu

SEQ ID NO: 3067098 - RNA, 19 nt, Artificial Sequence
  Description of Artificial Sequence: Synthetic oligonucleotide
cgcagcagccugccgcaag

SEQ ID NO: 3067099 - RNA, 19 nt, Artificial Sequence
  Description of Artificial Sequence: Synthetic oligonucleotide
cgucccuguuucacgguga

SEQ ID NO: 3067100 - RNA, 19 nt, Artificial Sequence
  Description of Artificial Sequence: Synthetic oligonucleotide
cugugacaugagcauucuu

SEQ ID NO: 3067101 - RNA, 19 nt, Artificial Sequence
  Description of Artificial Sequence: Synthetic oligonucleotide
ccucgguguuucuguuuca

SEQ ID NO: 3067102 - RNA, 19 nt, Artificial Sequence
  Description of Artificial Sequence: Synthetic oligonucleotide
cgaggugcugccugccgca

SEQ ID NO: 3067103 - RNA, 19 nt, Artificial Sequence
  Description of Artificial Sequence: Synthetic oligonucleotide
gcuuccacacauggauggu

SEQ ID NO: 3067104 - RNA, 19 nt, Artificial Sequence
  Description of Artificial Sequence: Synthetic oligonucleotide
agccugccgcaagccgcug

SEQ ID NO: 3067105 - RNA, 19 nt, Artificial Sequence
  Description of Artificial Sequence: Synthetic oligonucleotide
gcgcacccuccgcuuggcc

SEQ ID NO: 3067106 - RNA, 19 nt, Artificial Sequence
  Description of Artificial Sequence: Synthetic oligonucleotide
cugccugccgcagcagccu

SEQ ID NO: 3067107 - RNA, 19 nt, Artificial Sequence
  Description of Artificial Sequence: Synthetic oligonucleotide
cgacugaaaaugggcuuca

SEQ ID NO: 3067108 - RNA, 19 nt, Artificial Sequence
  Description of Artificial Sequence: Synthetic oligonucleotide
cgcugcuuccacacaugga

SEQ ID NO: 3067109 - RNA, 19 nt, Artificial Sequence
  Description of Artificial Sequence: Synthetic oligonucleotide
gccugccgcagcagccugc

SEQ ID NO: 3067110 - RNA, 19 nt, Artificial Sequence
  Description of Artificial Sequence: Synthetic oligonucleotide
ccucguucaggucgcgacu

SEQ ID NO: 3067111 - RNA, 19 nt, Artificial Sequence
  Description of Artificial Sequence: Synthetic oligonucleotide
gguagagcucgcgcacccu

SEQ ID NO: 3067112 - RNA, 19 nt, Artificial Sequence
  Description of Artificial Sequence: Synthetic oligonucleotide
ggccucguucaggucgcga

SEQ ID NO: 3067113 - RNA, 19 nt, Artificial Sequence
  Description of Artificial Sequence: Synthetic oligonucleotide
cuucaccgaggugcugccu

SEQ ID NO: 3067114 - RNA, 19 nt, Artificial Sequence
  Description of Artificial Sequence: Synthetic oligonucleotide
cgcuuggccucguucaggu

SEQ ID NO: 3067115 - RNA, 19 nt, Artificial Sequence
  Description of Artificial Sequence: Synthetic oligonucleotide
cggacuuuaucccgucccu

SEQ ID NO: 3067116 - RNA, 19 nt, Artificial Sequence
  Description of Artificial Sequence: Synthetic oligonucleotide
cgauaccaagcgcgguaga

SEQ ID NO: 3067117 - RNA, 19 nt, Artificial Sequence
  Description of Artificial Sequence: Synthetic oligonucleotide
ggccucgguguuucuguuu

SEQ ID NO: 3067118 - RNA, 19 nt, Artificial Sequence
  Description of Artificial Sequence: Synthetic oligonucleotide
caacuacucuggggucugu

SEQ ID NO: 3067119 - RNA, 19 nt, Artificial Sequence
  Description of Artificial Sequence: Synthetic oligonucleotide
cgcacccuccgcuuggccu

SEQ ID NO: 3067120 - RNA, 19 nt, Artificial Sequence
  Description of Artificial Sequence: Synthetic oligonucleotide
cgcgacugaaaaugggcuu

SEQ ID NO: 3067121 - RNA, 19 nt, Artificial Sequence
  Description of Artificial Sequence: Synthetic oligonucleotide
cguucaggucgcgacugaa

SEQ ID NO: 3067122 - RNA, 19 nt, Artificial Sequence
  Description of Artificial Sequence: Synthetic oligonucleotide
gcacaguguucggcaccuc

SEQ ID NO: 3067123 - RNA, 19 nt, Artificial Sequence
  Description of Artificial Sequence: Synthetic oligonucleotide
acccuccgcuuggccucgu

SEQ ID NO: 3067124 - RNA, 19 nt, Artificial Sequence
  Description of Artificial Sequence: Synthetic oligonucleotide
gcucgcgcacccuccgcuu

SEQ ID NO: 3067125 - RNA, 19 nt, Artificial Sequence
  Description of Artificial Sequence: Synthetic oligonucleotide
cgcgcacccuccgcuuggc

SEQ ID NO: 3067126 - RNA, 19 nt, Artificial Sequence
  Description of Artificial Sequence: Synthetic oligonucleotide
cccgucccuguuucacggu

SEQ ID NO: 3067127 - RNA, 19 nt, Artificial Sequence
  Description of Artificial Sequence: Synthetic oligonucleotide
cggcaccucccgauaccaa

SEQ ID NO: 3067128 - RNA, 19 nt, Artificial Sequence
  Description of Artificial Sequence: Synthetic oligonucleotide
ccgcagcagccugccgcaa

SEQ ID NO: 3067129 - RNA, 19 nt, Artificial Sequence
  Description of Artificial Sequence: Synthetic oligonucleotide
cccuccgcuuggccucguu

SEQ ID NO: 3067130 - RNA, 19 nt, Artificial Sequence
  Description of Artificial Sequence: Synthetic oligonucleotide
augacaucaacccugaagg

SEQ ID NO: 3067131 - RNA, 19 nt, Artificial Sequence
  Description of Artificial Sequence: Synthetic oligonucleotide
agcuucaugacaucaaccc

SEQ ID NO: 3067132 - RNA, 19 nt, Artificial Sequence
  Description of Artificial Sequence: Synthetic oligonucleotide
auaggcaucauucaccagg

SEQ ID NO: 3067133 - RNA, 19 nt, Artificial Sequence
  Description of Artificial Sequence: Synthetic oligonucleotide
uuuggcugaagaaaucugg

SEQ ID NO: 3067134 - RNA, 19 nt, Artificial Sequence
  Description of Artificial Sequence: Synthetic oligonucleotide
uucagucugagacuuuugg

SEQ ID NO: 3067135 - RNA, 19 nt, Artificial Sequence
  Description of Artificial Sequence: Synthetic oligonucleotide
augaggcugaaguaguccc

SEQ ID NO: 3067136 - RNA, 19 nt, Artificial Sequence
  Description of Artificial Sequence: Synthetic oligonucleotide
gaagaaaucuggguggacg

SEQ ID NO: 3067137 - RNA, 19 nt, Artificial Sequence
  Description of Artificial Sequence: Synthetic oligonucleotide
ucauucaccaggucgaaug

SEQ ID NO: 3067138 - RNA, 19 nt, Artificial Sequence
  Description of Artificial Sequence: Synthetic oligonucleotide
ucgguggcaauucaugagg

SEQ ID NO: 3067139 - RNA, 19 nt, Artificial Sequence
  Description of Artificial Sequence: Synthetic oligonucleotide
uuggcugaagaaaucuggg

SEQ ID NO: 3067140 - RNA, 19 nt, Artificial Sequence
  Description of Artificial Sequence: Synthetic oligonucleotide
aacccugaaggaucggugg

SEQ ID NO: 3067141 - RNA, 19 nt, Artificial Sequence
  Description of Artificial Sequence: Synthetic oligonucleotide
uucccaggaacccagcuag

SEQ ID NO: 3067142 - RNA, 19 nt, Artificial Sequence
  Description of Artificial Sequence: Synthetic oligonucleotide
ugaaguagucccgagucgg

SEQ ID NO: 3067143 - RNA, 19 nt, Artificial Sequence
  Description of Artificial Sequence: Synthetic oligonucleotide
cuucaugacaucaacccug

SEQ ID NO: 3067144 - RNA, 19 nt, Artificial Sequence
  Description of Artificial Sequence: Synthetic oligonucleotide
caugacaucaacccugaag

SEQ ID NO: 3067145 - RNA, 19 nt, Artificial Sequence
  Description of Artificial Sequence: Synthetic oligonucleotide
aucuggguggacgagacgc

SEQ ID NO: 3067146 - RNA, 19 nt, Artificial Sequence
  Description of Artificial Sequence: Synthetic oligonucleotide
ugagacuuuuggcugaaga

SEQ ID NO: 3067147 - RNA, 19 nt, Artificial Sequence
  Description of Artificial Sequence: Synthetic oligonucleotide
ucgaaugcuucucugagaa

SEQ ID NO: 3067148 - RNA, 19 nt, Artificial Sequence
  Description of Artificial Sequence: Synthetic oligonucleotide
aagaaaucuggguggacga

SEQ ID NO: 3067149 - RNA, 19 nt, Artificial Sequence
  Description of Artificial Sequence: Synthetic oligonucleotide
aagcuucaugacaucaacc

SEQ ID NO: 3067150 - RNA, 19 nt, Artificial Sequence
  Description of Artificial Sequence: Synthetic oligonucleotide
uucgcagaagaacccaucc

SEQ ID NO: 3067151 - RNA, 19 nt, Artificial Sequence
  Description of Artificial Sequence: Synthetic oligonucleotide
auucaugaggcugaaguag

SEQ ID NO: 3067152 - RNA, 19 nt, Artificial Sequence
  Description of Artificial Sequence: Synthetic oligonucleotide
caguguucgcagaagaacc

SEQ ID NO: 3067153 - RNA, 19 nt, Artificial Sequence
  Description of Artificial Sequence: Synthetic oligonucleotide
ggcaucauucaccaggucg

SEQ ID NO: 3067154 - RNA, 19 nt, Artificial Sequence
  Description of Artificial Sequence: Synthetic oligonucleotide
aauucaugaggcugaagua

SEQ ID NO: 3067155 - RNA, 19 nt, Artificial Sequence
  Description of Artificial Sequence: Synthetic oligonucleotide
aaaucuggguggacgagac

SEQ ID NO: 3067156 - RNA, 19 nt, Artificial Sequence
  Description of Artificial Sequence: Synthetic oligonucleotide
ucagguggcugcaaggcgc

SEQ ID NO: 3067157 - RNA, 19 nt, Artificial Sequence
  Description of Artificial Sequence: Synthetic oligonucleotide
gcugaagaaaucugggugg

SEQ ID NO: 3067158 - RNA, 19 nt, Artificial Sequence
  Description of Artificial Sequence: Synthetic oligonucleotide
gaagcuucaugacaucaac

SEQ ID NO: 3067159 - RNA, 19 nt, Artificial Sequence
  Description of Artificial Sequence: Synthetic oligonucleotide
ugcugaagcuucaugacau

SEQ ID NO: 3067160 - RNA, 19 nt, Artificial Sequence
  Description of Artificial Sequence: Synthetic oligonucleotide
ugaggcugaaguagucccg

SEQ ID NO: 3067161 - RNA, 19 nt, Artificial Sequence
  Description of Artificial Sequence: Synthetic oligonucleotide
uucaugaggcugaaguagu

SEQ ID NO: 3067162 - RNA, 19 nt, Artificial Sequence
  Description of Artificial Sequence: Synthetic oligonucleotide
agucugagacuuuuggcug

SEQ ID NO: 3067163 - RNA, 19 nt, Artificial Sequence
  Description of Artificial Sequence: Synthetic oligonucleotide
acaucaacccugaaggauc

SEQ ID NO: 3067164 - RNA, 19 nt, Artificial Sequence
  Description of Artificial Sequence: Synthetic oligonucleotide
agucgggucagguggcugc

SEQ ID NO: 3067165 - RNA, 19 nt, Artificial Sequence
  Description of Artificial Sequence: Synthetic oligonucleotide
gacgagacgcugcaguugc

SEQ ID NO: 3067166 - RNA, 19 nt, Artificial Sequence
  Description of Artificial Sequence: Synthetic oligonucleotide
ugugcugaagcuucaugac

SEQ ID NO: 3067167 - RNA, 19 nt, Artificial Sequence
  Description of Artificial Sequence: Synthetic oligonucleotide
uucaugacaucaacccuga

SEQ ID NO: 3067168 - RNA, 19 nt, Artificial Sequence
  Description of Artificial Sequence: Synthetic oligonucleotide
caggaacccagcuagucgc

SEQ ID NO: 3067169 - RNA, 19 nt, Artificial Sequence
  Description of Artificial Sequence: Synthetic oligonucleotide
aguguucgcagaagaaccc

SEQ ID NO: 3067170 - RNA, 19 nt, Artificial Sequence
  Description of Artificial Sequence: Synthetic oligonucleotide
ugaagcuucaugacaucaa

SEQ ID NO: 3067171 - RNA, 19 nt, Artificial Sequence
  Description of Artificial Sequence: Synthetic oligonucleotide
uggcaauucaugaggcuga

SEQ ID NO: 3067172 - RNA, 19 nt, Artificial Sequence
  Description of Artificial Sequence: Synthetic oligonucleotide
caucaacccugaaggaucg

SEQ ID NO: 3067173 - RNA, 19 nt, Artificial Sequence
  Description of Artificial Sequence: Synthetic oligonucleotide
aucgguggcaauucaugag

SEQ ID NO: 3067174 - RNA, 19 nt, Artificial Sequence
  Description of Artificial Sequence: Synthetic oligonucleotide
aguagucccgagucggguc

SEQ ID NO: 3067175 - RNA, 19 nt, Artificial Sequence
  Description of Artificial Sequence: Synthetic oligonucleotide
gagacgcugcaguugcugg

SEQ ID NO: 3067176 - RNA, 19 nt, Artificial Sequence
  Description of Artificial Sequence: Synthetic oligonucleotide
ggcugaagaaaucugggug

SEQ ID NO: 3067177 - RNA, 19 nt, Artificial Sequence
  Description of Artificial Sequence: Synthetic oligonucleotide
gagacuuuuggcugaagaa

SEQ ID NO: 3067178 - RNA, 19 nt, Artificial Sequence
  Description of Artificial Sequence: Synthetic oligonucleotide
gaagaacccauccccacuc

SEQ ID NO: 3067179 - RNA, 19 nt, Artificial Sequence
  Description of Artificial Sequence: Synthetic oligonucleotide
uaggcaucauucaccaggu

SEQ ID NO: 3067180 - RNA, 19 nt, Artificial Sequence
  Description of Artificial Sequence: Synthetic oligonucleotide
acccugaaggaucgguggc

SEQ ID NO: 3067181 - RNA, 19 nt, Artificial Sequence
  Description of Artificial Sequence: Synthetic oligonucleotide
aaucuggguggacgagacg

SEQ ID NO: 3067182 - RNA, 19 nt, Artificial Sequence
  Description of Artificial Sequence: Synthetic oligonucleotide
aguuccagcacuggcccgc

SEQ ID NO: 3067183 - RNA, 19 nt, Artificial Sequence
  Description of Artificial Sequence: Synthetic oligonucleotide
agcguugcugcucagcagu

SEQ ID NO: 3067184 - RNA, 19 nt, Artificial Sequence
  Description of Artificial Sequence: Synthetic oligonucleotide
gaaugcuucucugagaagu

SEQ ID NO: 3067185 - RNA, 19 nt, Artificial Sequence
  Description of Artificial Sequence: Synthetic oligonucleotide
ucgcagaagaacccauccc

SEQ ID NO: 3067186 - RNA, 19 nt, Artificial Sequence
  Description of Artificial Sequence: Synthetic oligonucleotide
aaugcuucucugagaagug

SEQ ID NO: 3067187 - RNA, 19 nt, Artificial Sequence
  Description of Artificial Sequence: Synthetic oligonucleotide
gaucgguggcaauucauga

SEQ ID NO: 3067188 - RNA, 19 nt, Artificial Sequence
  Description of Artificial Sequence: Synthetic oligonucleotide
cugaaguagucccgagucg

SEQ ID NO: 3067189 - RNA, 19 nt, Artificial Sequence
  Description of Artificial Sequence: Synthetic oligonucleotide
uuucagucugagacuuuug

SEQ ID NO: 3067190 - RNA, 19 nt, Artificial Sequence
  Description of Artificial Sequence: Synthetic oligonucleotide
agaagaacccauccccacu

SEQ ID NO: 3067191 - RNA, 19 nt, Artificial Sequence
  Description of Artificial Sequence: Synthetic oligonucleotide
cugugcugaagcuucauga

SEQ ID NO: 3067192 - RNA, 19 nt, Artificial Sequence
  Description of Artificial Sequence: Synthetic oligonucleotide
cauucaccaggucgaaugc

SEQ ID NO: 3067193 - RNA, 19 nt, Artificial Sequence
  Description of Artificial Sequence: Synthetic oligonucleotide
guggcaauucaugaggcug

SEQ ID NO: 3067194 - RNA, 19 nt, Artificial Sequence
  Description of Artificial Sequence: Synthetic oligonucleotide
ugcucagcagucuccuucc

SEQ ID NO: 3067195 - RNA, 19 nt, Artificial Sequence
  Description of Artificial Sequence: Synthetic oligonucleotide
agacuuuuggcugaagaaa

SEQ ID NO: 3067196 - RNA, 19 nt, Artificial Sequence
  Description of Artificial Sequence: Synthetic oligonucleotide
uugcucuugcccgaggcag

SEQ ID NO: 3067197 - RNA, 19 nt, Artificial Sequence
  Description of Artificial Sequence: Synthetic oligonucleotide
aacccauccccacucucca

SEQ ID NO: 3067198 - RNA, 19 nt, Artificial Sequence
  Description of Artificial Sequence: Synthetic oligonucleotide
cauugcucuugcccgaggc

SEQ ID NO: 3067199 - RNA, 19 nt, Artificial Sequence
  Description of Artificial Sequence: Synthetic oligonucleotide
ugcaguugcugguaccugu

SEQ ID NO: 3067200 - RNA, 19 nt, Artificial Sequence
  Description of Artificial Sequence: Synthetic oligonucleotide
agaacccauccccacucuc

SEQ ID NO: 3067201 - RNA, 19 nt, Artificial Sequence
  Description of Artificial Sequence: Synthetic oligonucleotide
caugaggcugaaguagucc

SEQ ID NO: 3067202 - RNA, 19 nt, Artificial Sequence
  Description of Artificial Sequence: Synthetic oligonucleotide
uuuucagucugagacuuuu

SEQ ID NO: 3067203 - RNA, 19 nt, Artificial Sequence
  Description of Artificial Sequence: Synthetic oligonucleotide
ugacaucaacccugaagga

SEQ ID NO: 3067204 - RNA, 19 nt, Artificial Sequence
  Description of Artificial Sequence: Synthetic oligonucleotide
caaggcgcggcaguguucg

SEQ ID NO: 3067205 - RNA, 19 nt, Artificial Sequence
  Description of Artificial Sequence: Synthetic oligonucleotide
uucaccaggucgaaugcuu

SEQ ID NO: 3067206 - RNA, 19 nt, Artificial Sequence
  Description of Artificial Sequence: Synthetic oligonucleotide
aaggaucgguggcaauuca

SEQ ID NO: 3067207 - RNA, 19 nt, Artificial Sequence
  Description of Artificial Sequence: Synthetic oligonucleotide
ggucgaaugcuucucugag

SEQ ID NO: 3067208 - RNA, 19 nt, Artificial Sequence
  Description of Artificial Sequence: Synthetic oligonucleotide
gaaguagucccgagucggg

SEQ ID NO: 3067209 - RNA, 19 nt, Artificial Sequence
  Description of Artificial Sequence: Synthetic oligonucleotide
gaacccauccccacucucc

SEQ ID NO: 3067210 - RNA, 19 nt, Artificial Sequence
  Description of Artificial Sequence: Synthetic oligonucleotide
cugguaccugugcugaagc

SEQ ID NO: 3067211 - RNA, 19 nt, Artificial Sequence
  Description of Artificial Sequence: Synthetic oligonucleotide
uguucgcagaagaacccau

SEQ ID NO: 3067212 - RNA, 19 nt, Artificial Sequence
  Description of Artificial Sequence: Synthetic oligonucleotide
gucagguggcugcaaggcg

SEQ ID NO: 3067213 - RNA, 19 nt, Artificial Sequence
  Description of Artificial Sequence: Synthetic oligonucleotide
uauaggcaucauucaccag

SEQ ID NO: 3067214 - RNA, 19 nt, Artificial Sequence
  Description of Artificial Sequence: Synthetic oligonucleotide
gaacccagcuagucgcacc

SEQ ID NO: 3067215 - RNA, 19 nt, Artificial Sequence
  Description of Artificial Sequence: Synthetic oligonucleotide
gcugaaguagucccgaguc

SEQ ID NO: 3067216 - RNA, 19 nt, Artificial Sequence
  Description of Artificial Sequence: Synthetic oligonucleotide
ugaaggaucgguggcaauu

SEQ ID NO: 3067217 - RNA, 19 nt, Artificial Sequence
  Description of Artificial Sequence: Synthetic oligonucleotide
ucaacccugaaggaucggu

SEQ ID NO: 3067218 - RNA, 19 nt, Artificial Sequence
  Description of Artificial Sequence: Synthetic oligonucleotide
ucaugaggcugaaguaguc

SEQ ID NO: 3067219 - RNA, 19 nt, Artificial Sequence
  Description of Artificial Sequence: Synthetic oligonucleotide
caacccugaaggaucggug

SEQ ID NO: 3067220 - RNA, 19 nt, Artificial Sequence
  Description of Artificial Sequence: Synthetic oligonucleotide
aagaacccauccccacucu

SEQ ID NO: 3067221 - RNA, 19 nt, Artificial Sequence
  Description of Artificial Sequence: Synthetic oligonucleotide
aggucgaaugcuucucuga

SEQ ID NO: 3067222 - RNA, 19 nt, Artificial Sequence
  Description of Artificial Sequence: Synthetic oligonucleotide
agucuccuucccaggaacc

SEQ ID NO: 3067223 - RNA, 19 nt, Artificial Sequence
  Description of Artificial Sequence: Synthetic oligonucleotide
ugcuucucugagaaguguu

SEQ ID NO: 3067224 - RNA, 19 nt, Artificial Sequence
  Description of Artificial Sequence: Synthetic oligonucleotide
gaaaucuggguggacgaga

SEQ ID NO: 3067225 - RNA, 19 nt, Artificial Sequence
  Description of Artificial Sequence: Synthetic oligonucleotide
auugcucuugcccgaggca

SEQ ID NO: 3067226 - RNA, 19 nt, Artificial Sequence
  Description of Artificial Sequence: Synthetic oligonucleotide
cagaagaacccauccccac

SEQ ID NO: 3067227 - RNA, 19 nt, Artificial Sequence
  Description of Artificial Sequence: Synthetic oligonucleotide
uggguggacgagacgcugc

SEQ ID NO: 3067228 - RNA, 19 nt, Artificial Sequence
  Description of Artificial Sequence: Synthetic oligonucleotide
agaaaucuggguggacgag

SEQ ID NO: 3067229 - RNA, 19 nt, Artificial Sequence
  Description of Artificial Sequence: Synthetic oligonucleotide
cagucugagacuuuuggcu

SEQ ID NO: 3067230 - RNA, 19 nt, Artificial Sequence
  Description of Artificial Sequence: Synthetic oligonucleotide
ucaccaggucgaaugcuuc

SEQ ID NO: 3067231 - RNA, 19 nt, Artificial Sequence
  Description of Artificial Sequence: Synthetic oligonucleotide
gaaggaucgguggcaauuc

SEQ ID NO: 3067232 - RNA, 19 nt, Artificial Sequence
  Description of Artificial Sequence: Synthetic oligonucleotide
guugcugcucagcagucuc

SEQ ID NO: 3067233 - RNA, 19 nt, Artificial Sequence
  Description of Artificial Sequence: Synthetic oligonucleotide
aaguagucccgagucgggu

SEQ ID NO: 3067234 - RNA, 19 nt, Artificial Sequence
  Description of Artificial Sequence: Synthetic oligonucleotide
agcacuggcccgcauugcu

SEQ ID NO: 3067235 - RNA, 19 nt, Artificial Sequence
  Description of Artificial Sequence: Synthetic oligonucleotide
cugcucagcagucuccuuc

SEQ ID NO: 3067236 - RNA, 19 nt, Artificial Sequence
  Description of Artificial Sequence: Synthetic oligonucleotide
uugcugguaccugugcuga

SEQ ID NO: 3067237 - RNA, 19 nt, Artificial Sequence
  Description of Artificial Sequence: Synthetic oligonucleotide
ugcucuugcccgaggcagc

SEQ ID NO: 3067238 - RNA, 19 nt, Artificial Sequence
  Description of Artificial Sequence: Synthetic oligonucleotide
cuccuucccaggaacccag

SEQ ID NO: 3067239 - RNA, 19 nt, Artificial Sequence
  Description of Artificial Sequence: Synthetic oligonucleotide
guaccugugcugaagcuuc

SEQ ID NO: 3067240 - RNA, 19 nt, Artificial Sequence
  Description of Artificial Sequence: Synthetic oligonucleotide
cccgcauugcucuugcccg

SEQ ID NO: 3067241 - RNA, 19 nt, Artificial Sequence
  Description of Artificial Sequence: Synthetic oligonucleotide
gugcugaagcuucaugaca

SEQ ID NO: 3067242 - RNA, 19 nt, Artificial Sequence
  Description of Artificial Sequence: Synthetic oligonucleotide
cccgagucgggucaggugg

SEQ ID NO: 3067243 - RNA, 19 nt, Artificial Sequence
  Description of Artificial Sequence: Synthetic oligonucleotide
accaggucgaaugcuucuc

SEQ ID NO: 3067244 - RNA, 19 nt, Artificial Sequence
  Description of Artificial Sequence: Synthetic oligonucleotide
cagucuccuucccaggaac

SEQ ID NO: 3067245 - RNA, 19 nt, Artificial Sequence
  Description of Artificial Sequence: Synthetic oligonucleotide
gcaguuccagcacuggccc

SEQ ID NO: 3067246 - RNA, 19 nt, Artificial Sequence
  Description of Artificial Sequence: Synthetic oligonucleotide
gaggcagcguugcugcuca

SEQ ID NO: 3067247 - RNA, 19 nt, Artificial Sequence
  Description of Artificial Sequence: Synthetic oligonucleotide
ucuccuucccaggaaccca

SEQ ID NO: 3067248 - RNA, 19 nt, Artificial Sequence
  Description of Artificial Sequence: Synthetic oligonucleotide
ucuugcccgaggcagcguu

SEQ ID NO: 3067249 - RNA, 19 nt, Artificial Sequence
  Description of Artificial Sequence: Synthetic oligonucleotide
cgcagaagaacccaucccc

SEQ ID NO: 3067250 - RNA, 19 nt, Artificial Sequence
  Description of Artificial Sequence: Synthetic oligonucleotide
cagguggcugcaaggcgcg

SEQ ID NO: 3067251 - RNA, 19 nt, Artificial Sequence
  Description of Artificial Sequence: Synthetic oligonucleotide
ccaggaacccagcuagucg

SEQ ID NO: 3067252 - RNA, 19 nt, Artificial Sequence
  Description of Artificial Sequence: Synthetic oligonucleotide
ugguaccugugcugaagcu

SEQ ID NO: 3067253 - RNA, 19 nt, Artificial Sequence
  Description of Artificial Sequence: Synthetic oligonucleotide
caggucgaaugcuucucug

SEQ ID NO: 3067254 - RNA, 19 nt, Artificial Sequence
  Description of Artificial Sequence: Synthetic oligonucleotide
acgcugcaguugcugguac

SEQ ID NO: 3067255 - RNA, 19 nt, Artificial Sequence
  Description of Artificial Sequence: Synthetic oligonucleotide
cugaagcuucaugacauca

SEQ ID NO: 3067256 - RNA, 19 nt, Artificial Sequence
  Description of Artificial Sequence: Synthetic oligonucleotide
guagucccgagucggguca

SEQ ID NO: 3067257 - RNA, 19 nt, Artificial Sequence
  Description of Artificial Sequence: Synthetic oligonucleotide
agcgcugccgcaguuccag

SEQ ID NO: 3067258 - RNA, 19 nt, Artificial Sequence
  Description of Artificial Sequence: Synthetic oligonucleotide
gucugagacuuuuggcuga

SEQ ID NO: 3067259 - RNA, 19 nt, Artificial Sequence
  Description of Artificial Sequence: Synthetic oligonucleotide
agacgcugcaguugcuggu

SEQ ID NO: 3067260 - RNA, 19 nt, Artificial Sequence
  Description of Artificial Sequence: Synthetic oligonucleotide
cuuuuggcugaagaaaucu

SEQ ID NO: 3067261 - RNA, 19 nt, Artificial Sequence
  Description of Artificial Sequence: Synthetic oligonucleotide
ugccgcaguuccagcacug

SEQ ID NO: 3067262 - RNA, 19 nt, Artificial Sequence
  Description of Artificial Sequence: Synthetic oligonucleotide
gucgaaugcuucucugaga

SEQ ID NO: 3067263 - RNA, 19 nt, Artificial Sequence
  Description of Artificial Sequence: Synthetic oligonucleotide
aaggcgcggcaguguucgc

SEQ ID NO: 3067264 - RNA, 19 nt, Artificial Sequence
  Description of Artificial Sequence: Synthetic oligonucleotide
uggacgagacgcugcaguu

SEQ ID NO: 3067265 - RNA, 19 nt, Artificial Sequence
  Description of Artificial Sequence: Synthetic oligonucleotide
ggaucgguggcaauucaug

SEQ ID NO: 3067266 - RNA, 19 nt, Artificial Sequence
  Description of Artificial Sequence: Synthetic oligonucleotide
gacaucaacccugaaggau

SEQ ID NO: 3067267 - RNA, 19 nt, Artificial Sequence
  Description of Artificial Sequence: Synthetic oligonucleotide
gcaguguucgcagaagaac

SEQ ID NO: 3067268 - RNA, 19 nt, Artificial Sequence
  Description of Artificial Sequence: Synthetic oligonucleotide
auucaccaggucgaaugcu

SEQ ID NO: 3067269 - RNA, 19 nt, Artificial Sequence
  Description of Artificial Sequence: Synthetic oligonucleotide
ucccgagucgggucaggug

SEQ ID NO: 3067270 - RNA, 19 nt, Artificial Sequence
  Description of Artificial Sequence: Synthetic oligonucleotide
gaggcugaaguagucccga

SEQ ID NO: 3067271 - RNA, 19 nt, Artificial Sequence
  Description of Artificial Sequence: Synthetic oligonucleotide
gggucagguggcugcaagg

SEQ ID NO: 3067272 - RNA, 19 nt, Artificial Sequence
  Description of Artificial Sequence: Synthetic oligonucleotide
gcaucauucaccaggucga

SEQ ID NO: 3067273 - RNA, 19 nt, Artificial Sequence
  Description of Artificial Sequence: Synthetic oligonucleotide
uggcccgcauugcucuugc

SEQ ID NO: 3067274 - RNA, 19 nt, Artificial Sequence
  Description of Artificial Sequence: Synthetic oligonucleotide
aggcugaaguagucccgag

SEQ ID NO: 3067275 - RNA, 19 nt, Artificial Sequence
  Description of Artificial Sequence: Synthetic oligonucleotide
uaccugugcugaagcuuca

SEQ ID NO: 3067276 - RNA, 19 nt, Artificial Sequence
  Description of Artificial Sequence: Synthetic oligonucleotide
aggcaucauucaccagguc

SEQ ID NO: 3067277 - RNA, 19 nt, Artificial Sequence
  Description of Artificial Sequence: Synthetic oligonucleotide
ucugagacuuuuggcugaa

SEQ ID NO: 3067278 - RNA, 19 nt, Artificial Sequence
  Description of Artificial Sequence: Synthetic oligonucleotide
ggucagguggcugcaaggc

SEQ ID NO: 3067279 - RNA, 19 nt, Artificial Sequence
  Description of Artificial Sequence: Synthetic oligonucleotide
uccccacucuccacacccc

SEQ ID NO: 3067280 - RNA, 19 nt, Artificial Sequence
  Description of Artificial Sequence: Synthetic oligonucleotide
augcuucucugagaagugu

SEQ ID NO: 3067281 - RNA, 19 nt, Artificial Sequence
  Description of Artificial Sequence: Synthetic oligonucleotide
uccuucccaggaacccagc

SEQ ID NO: 3067282 - RNA, 19 nt, Artificial Sequence
  Description of Artificial Sequence: Synthetic oligonucleotide
caguuccagcacuggcccg

SEQ ID NO: 3067283 - RNA, 19 nt, Artificial Sequence
  Description of Artificial Sequence: Synthetic oligonucleotide
cugaagaaaucugggugga

SEQ ID NO: 3067284 - RNA, 19 nt, Artificial Sequence
  Description of Artificial Sequence: Synthetic oligonucleotide
uugcccgaggcagcguugc

SEQ ID NO: 3067285 - RNA, 19 nt, Artificial Sequence
  Description of Artificial Sequence: Synthetic oligonucleotide
cagcguugcugcucagcag

SEQ ID NO: 3067286 - RNA, 19 nt, Artificial Sequence
  Description of Artificial Sequence: Synthetic oligonucleotide
gcccgcauugcucuugccc

SEQ ID NO: 3067287 - RNA, 19 nt, Artificial Sequence
  Description of Artificial Sequence: Synthetic oligonucleotide
ucaugacaucaacccugaa

SEQ ID NO: 3067288 - RNA, 19 nt, Artificial Sequence
  Description of Artificial Sequence: Synthetic oligonucleotide
gcagcguugcugcucagca

SEQ ID NO: 3067289 - RNA, 19 nt, Artificial Sequence
  Description of Artificial Sequence: Synthetic oligonucleotide
cuugcccgaggcagcguug

SEQ ID NO: 3067290 - RNA, 19 nt, Artificial Sequence
  Description of Artificial Sequence: Synthetic oligonucleotide
guggacgagacgcugcagu

SEQ ID NO: 3067291 - RNA, 19 nt, Artificial Sequence
  Description of Artificial Sequence: Synthetic oligonucleotide
guucgcagaagaacccauc

SEQ ID NO: 3067292 - RNA, 19 nt, Artificial Sequence
  Description of Artificial Sequence: Synthetic oligonucleotide
cucagcagucuccuuccca

SEQ ID NO: 3067293 - RNA, 19 nt, Artificial Sequence
  Description of Artificial Sequence: Synthetic oligonucleotide
cccgaggcagcguugcugc

SEQ ID NO: 3067294 - RNA, 19 nt, Artificial Sequence
  Description of Artificial Sequence: Synthetic oligonucleotide
aucaacccugaaggaucgg

SEQ ID NO: 3067295 - RNA, 19 nt, Artificial Sequence
  Description of Artificial Sequence: Synthetic oligonucleotide
guguucgcagaagaaccca

SEQ ID NO: 3067296 - RNA, 19 nt, Artificial Sequence
  Description of Artificial Sequence: Synthetic oligonucleotide
gcugguaccugugcugaag

SEQ ID NO: 3067297 - RNA, 19 nt, Artificial Sequence
  Description of Artificial Sequence: Synthetic oligonucleotide
ucccaggaacccagcuagu

SEQ ID NO: 3067298 - RNA, 19 nt, Artificial Sequence
  Description of Artificial Sequence: Synthetic oligonucleotide
cauccccacucuccacacc

SEQ ID NO: 3067299 - RNA, 19 nt, Artificial Sequence
  Description of Artificial Sequence: Synthetic oligonucleotide
ggcgcggcaguguucgcag

SEQ ID NO: 3067300 - RNA, 19 nt, Artificial Sequence
  Description of Artificial Sequence: Synthetic oligonucleotide
cuucccaggaacccagcua

SEQ ID NO: 3067301 - RNA, 19 nt, Artificial Sequence
  Description of Artificial Sequence: Synthetic oligonucleotide
guggcugcaaggcgcggca

SEQ ID NO: 3067302 - RNA, 19 nt, Artificial Sequence
  Description of Artificial Sequence: Synthetic oligonucleotide
aucauucaccaggucgaau

SEQ ID NO: 3067303 - RNA, 19 nt, Artificial Sequence
  Description of Artificial Sequence: Synthetic oligonucleotide
aggaucgguggcaauucau

SEQ ID NO: 3067304 - RNA, 19 nt, Artificial Sequence
  Description of Artificial Sequence: Synthetic oligonucleotide
ccagcacuggcccgcauug

SEQ ID NO: 3067305 - RNA, 19 nt, Artificial Sequence
  Description of Artificial Sequence: Synthetic oligonucleotide
gagucgggucagguggcug

SEQ ID NO: 3067306 - RNA, 19 nt, Artificial Sequence
  Description of Artificial Sequence: Synthetic oligonucleotide
ccugugcugaagcuucaug

SEQ ID NO: 3067307 - RNA, 19 nt, Artificial Sequence
  Description of Artificial Sequence: Synthetic oligonucleotide
gcuucaugacaucaacccu

SEQ ID NO: 3067308 - RNA, 19 nt, Artificial Sequence
  Description of Artificial Sequence: Synthetic oligonucleotide
ccagcgcugccgcaguucc

SEQ ID NO: 3067309 - RNA, 19 nt, Artificial Sequence
  Description of Artificial Sequence: Synthetic oligonucleotide
uagucccgagucgggucag

SEQ ID NO: 3067310 - RNA, 19 nt, Artificial Sequence
  Description of Artificial Sequence: Synthetic oligonucleotide
gcucuugcccgaggcagcg

SEQ ID NO: 3067311 - RNA, 19 nt, Artificial Sequence
  Description of Artificial Sequence: Synthetic oligonucleotide
gacgcugcaguugcuggua

SEQ ID NO: 3067312 - RNA, 19 nt, Artificial Sequence
  Description of Artificial Sequence: Synthetic oligonucleotide
ggacgagacgcugcaguug

SEQ ID NO: 3067313 - RNA, 19 nt, Artificial Sequence
  Description of Artificial Sequence: Synthetic oligonucleotide
gcauugcucuugcccgagg

SEQ ID NO: 3067314 - RNA, 19 nt, Artificial Sequence
  Description of Artificial Sequence: Synthetic oligonucleotide
cugcaguugcugguaccug

SEQ ID NO: 3067315 - RNA, 19 nt, Artificial Sequence
  Description of Artificial Sequence: Synthetic oligonucleotide
cgguggcaauucaugaggc

SEQ ID NO: 3067316 - RNA, 19 nt, Artificial Sequence
  Description of Artificial Sequence: Synthetic oligonucleotide
gcugccgcaguuccagcac

SEQ ID NO: 3067317 - RNA, 19 nt, Artificial Sequence
  Description of Artificial Sequence: Synthetic oligonucleotide
cugagacuuuuggcugaag

SEQ ID NO: 3067318 - RNA, 19 nt, Artificial Sequence
  Description of Artificial Sequence: Synthetic oligonucleotide
gcugaagcuucaugacauc

SEQ ID NO: 3067319 - RNA, 19 nt, Artificial Sequence
  Description of Artificial Sequence: Synthetic oligonucleotide
agucccgagucgggucagg

SEQ ID NO: 3067320 - RNA, 19 nt, Artificial Sequence
  Description of Artificial Sequence: Synthetic oligonucleotide
uggcugcaaggcgcggcag

SEQ ID NO: 3067321 - RNA, 19 nt, Artificial Sequence
  Description of Artificial Sequence: Synthetic oligonucleotide
aggaacccagcuagucgca

SEQ ID NO: 3067322 - RNA, 19 nt, Artificial Sequence
  Description of Artificial Sequence: Synthetic oligonucleotide
gcaauucaugaggcugaag

SEQ ID NO: 3067323 - RNA, 19 nt, Artificial Sequence
  Description of Artificial Sequence: Synthetic oligonucleotide
gcugcaaggcgcggcagug

SEQ ID NO: 3067324 - RNA, 19 nt, Artificial Sequence
  Description of Artificial Sequence: Synthetic oligonucleotide
ugcccgaggcagcguugcu

SEQ ID NO: 3067325 - RNA, 19 nt, Artificial Sequence
  Description of Artificial Sequence: Synthetic oligonucleotide
aggcgcggcaguguucgca

SEQ ID NO: 3067326 - RNA, 19 nt, Artificial Sequence
  Description of Artificial Sequence: Synthetic oligonucleotide
cacuggcccgcauugcucu

SEQ ID NO: 3067327 - RNA, 19 nt, Artificial Sequence
  Description of Artificial Sequence: Synthetic oligonucleotide
gguggcaauucaugaggcu

SEQ ID NO: 3067328 - RNA, 19 nt, Artificial Sequence
  Description of Artificial Sequence: Synthetic oligonucleotide
ggguggacgagacgcugca

SEQ ID NO: 3067329 - RNA, 19 nt, Artificial Sequence
  Description of Artificial Sequence: Synthetic oligonucleotide
ccgcaguuccagcacuggc

SEQ ID NO: 3067330 - RNA, 19 nt, Artificial Sequence
  Description of Artificial Sequence: Synthetic oligonucleotide
cagcacuggcccgcauugc

SEQ ID NO: 3067331 - RNA, 19 nt, Artificial Sequence
  Description of Artificial Sequence: Synthetic oligonucleotide
ggcagcguugcugcucagc

SEQ ID NO: 3067332 - RNA, 19 nt, Artificial Sequence
  Description of Artificial Sequence: Synthetic oligonucleotide
ccauccccacucuccacac

SEQ ID NO: 3067333 - RNA, 19 nt, Artificial Sequence
  Description of Artificial Sequence: Synthetic oligonucleotide
caucauucaccaggucgaa

SEQ ID NO: 3067334 - RNA, 19 nt, Artificial Sequence
  Description of Artificial Sequence: Synthetic oligonucleotide
ggcugaaguagucccgagu

SEQ ID NO: 3067335 - RNA, 19 nt, Artificial Sequence
  Description of Artificial Sequence: Synthetic oligonucleotide
caccaggucgaaugcuucu

SEQ ID NO: 3067336 - RNA, 19 nt, Artificial Sequence
  Description of Artificial Sequence: Synthetic oligonucleotide
ggcaguguucgcagaagaa

SEQ ID NO: 3067337 - RNA, 19 nt, Artificial Sequence
  Description of Artificial Sequence: Synthetic oligonucleotide
gccgcaguuccagcacugg

SEQ ID NO: 3067338 - RNA, 19 nt, Artificial Sequence
  Description of Artificial Sequence: Synthetic oligonucleotide
ggaacccagcuagucgcac

SEQ ID NO: 3067339 - RNA, 19 nt, Artificial Sequence
  Description of Artificial Sequence: Synthetic oligonucleotide
cuucucugagaaguguuuu

SEQ ID NO: 3067340 - RNA, 19 nt, Artificial Sequence
  Description of Artificial Sequence: Synthetic oligonucleotide
cgaaugcuucucugagaag

SEQ ID NO: 3067341 - RNA, 19 nt, Artificial Sequence
  Description of Artificial Sequence: Synthetic oligonucleotide
gguggacgagacgcugcag

SEQ ID NO: 3067342 - RNA, 19 nt, Artificial Sequence
  Description of Artificial Sequence: Synthetic oligonucleotide
agguggcugcaaggcgcgg

SEQ ID NO: 3067343 - RNA, 19 nt, Artificial Sequence
  Description of Artificial Sequence: Synthetic oligonucleotide
ccgagucgggucagguggc

SEQ ID NO: 3067344 - RNA, 19 nt, Artificial Sequence
  Description of Artificial Sequence: Synthetic oligonucleotide
gcucagcagucuccuuccc

SEQ ID NO: 3067345 - RNA, 19 nt, Artificial Sequence
  Description of Artificial Sequence: Synthetic oligonucleotide
gcggcaguguucgcagaag

SEQ ID NO: 3067346 - RNA, 19 nt, Artificial Sequence
  Description of Artificial Sequence: Synthetic oligonucleotide
gcagucuccuucccaggaa

SEQ ID NO: 3067347 - RNA, 19 nt, Artificial Sequence
  Description of Artificial Sequence: Synthetic oligonucleotide
uuccagcacuggcccgcau

SEQ ID NO: 3067348 - RNA, 19 nt, Artificial Sequence
  Description of Artificial Sequence: Synthetic oligonucleotide
cccauccccacucuccaca

SEQ ID NO: 3067349 - RNA, 19 nt, Artificial Sequence
  Description of Artificial Sequence: Synthetic oligonucleotide
gcugcaguugcugguaccu

SEQ ID NO: 3067350 - RNA, 19 nt, Artificial Sequence
  Description of Artificial Sequence: Synthetic oligonucleotide
cccaggaacccagcuaguc

SEQ ID NO: 3067351 - RNA, 19 nt, Artificial Sequence
  Description of Artificial Sequence: Synthetic oligonucleotide
aggcagcguugcugcucag

SEQ ID NO: 3067352 - RNA, 19 nt, Artificial Sequence
  Description of Artificial Sequence: Synthetic oligonucleotide
gguaccugugcugaagcuu

SEQ ID NO: 3067353 - RNA, 19 nt, Artificial Sequence
  Description of Artificial Sequence: Synthetic oligonucleotide
gucgggucagguggcugca

SEQ ID NO: 3067354 - RNA, 19 nt, Artificial Sequence
  Description of Artificial Sequence: Synthetic oligonucleotide
ucgggucagguggcugcaa

SEQ ID NO: 3067355 - RNA, 19 nt, Artificial Sequence
  Description of Artificial Sequence: Synthetic oligonucleotide
gcccgaggcagcguugcug

SEQ ID NO: 3067356 - RNA, 19 nt, Artificial Sequence
  Description of Artificial Sequence: Synthetic oligonucleotide
ggcaauucaugaggcugaa

SEQ ID NO: 3067357 - RNA, 19 nt, Artificial Sequence
  Description of Artificial Sequence: Synthetic oligonucleotide
guuccagcacuggcccgca

SEQ ID NO: 3067358 - RNA, 19 nt, Artificial Sequence
  Description of Artificial Sequence: Synthetic oligonucleotide
cgggucagguggcugcaag

SEQ ID NO: 3067359 - RNA, 19 nt, Artificial Sequence
  Description of Artificial Sequence: Synthetic oligonucleotide
cugccgcaguuccagcacu

SEQ ID NO: 3067360 - RNA, 19 nt, Artificial Sequence
  Description of Artificial Sequence: Synthetic oligonucleotide
gcacuggcccgcauugcuc

SEQ ID NO: 3067361 - RNA, 19 nt, Artificial Sequence
  Description of Artificial Sequence: Synthetic oligonucleotide
cugaaggaucgguggcaau

SEQ ID NO: 3067362 - RNA, 19 nt, Artificial Sequence
  Description of Artificial Sequence: Synthetic oligonucleotide
cccugaaggaucgguggca

SEQ ID NO: 3067363 - RNA, 19 nt, Artificial Sequence
  Description of Artificial Sequence: Synthetic oligonucleotide
gcuucucugagaaguguuu

SEQ ID NO: 3067364 - RNA, 19 nt, Artificial Sequence
  Description of Artificial Sequence: Synthetic oligonucleotide
ggcccgcauugcucuugcc

SEQ ID NO: 3067365 - RNA, 19 nt, Artificial Sequence
  Description of Artificial Sequence: Synthetic oligonucleotide
cagcgcugccgcaguucca

SEQ ID NO: 3067366 - RNA, 19 nt, Artificial Sequence
  Description of Artificial Sequence: Synthetic oligonucleotide
ggcugcaaggcgcggcagu

SEQ ID NO: 3067367 - RNA, 19 nt, Artificial Sequence
  Description of Artificial Sequence: Synthetic oligonucleotide
cggcaguguucgcagaaga

SEQ ID NO: 3067368 - RNA, 19 nt, Artificial Sequence
  Description of Artificial Sequence: Synthetic oligonucleotide
ccaggucgaaugcuucucu

SEQ ID NO: 3067369 - RNA, 19 nt, Artificial Sequence
  Description of Artificial Sequence: Synthetic oligonucleotide
gucccgagucgggucaggu

SEQ ID NO: 3067370 - RNA, 19 nt, Artificial Sequence
  Description of Artificial Sequence: Synthetic oligonucleotide
cgcauugcucuugcccgag

SEQ ID NO: 3067371 - RNA, 19 nt, Artificial Sequence
  Description of Artificial Sequence: Synthetic oligonucleotide
gcaaggcgcggcaguguuc

SEQ ID NO: 3067372 - RNA, 19 nt, Artificial Sequence
  Description of Artificial Sequence: Synthetic oligonucleotide
gcguugcugcucagcaguc

SEQ ID NO: 3067373 - RNA, 19 nt, Artificial Sequence
  Description of Artificial Sequence: Synthetic oligonucleotide
ccgcauugcucuugcccga

SEQ ID NO: 3067374 - RNA, 19 nt, Artificial Sequence
  Description of Artificial Sequence: Synthetic oligonucleotide
gcgcugccgcaguuccagc

SEQ ID NO: 3067375 - RNA, 19 nt, Artificial Sequence
  Description of Artificial Sequence: Synthetic oligonucleotide
cgaggcagcguugcugcuc

SEQ ID NO: 3067376 - RNA, 19 nt, Artificial Sequence
  Description of Artificial Sequence: Synthetic oligonucleotide
cgcugccgcaguuccagca

SEQ ID NO: 3067377 - RNA, 19 nt, Artificial Sequence
  Description of Artificial Sequence: Synthetic oligonucleotide
ccuucccaggaacccagcu

SEQ ID NO: 3067378 - RNA, 19 nt, Artificial Sequence
  Description of Artificial Sequence: Synthetic oligonucleotide
cccagcgcugccgcaguuc

SEQ ID NO: 3067379 - RNA, 19 nt, Artificial Sequence
  Description of Artificial Sequence: Synthetic oligonucleotide
cugcaaggcgcggcagugu

SEQ ID NO: 3067380 - RNA, 19 nt, Artificial Sequence
  Description of Artificial Sequence: Synthetic oligonucleotide
cgcggcaguguucgcagaa

SEQ ID NO: 3067381 - RNA, 19 nt, Artificial Sequence
  Description of Artificial Sequence: Synthetic oligonucleotide
gcgcggcaguguucgcaga

SEQ ID NO: 3067382 - RNA, 19 nt, Artificial Sequence
  Description of Artificial Sequence: Synthetic oligonucleotide
cucuugcccgaggcagcgu

SEQ ID NO: 3067383 - RNA, 19 nt, Artificial Sequence
  Description of Artificial Sequence: Synthetic oligonucleotide
cguugcugcucagcagucu

SEQ ID NO: 3067384 - RNA, 19 nt, Artificial Sequence
  Description of Artificial Sequence: Synthetic oligonucleotide
ccgaggcagcguugcugcu

SEQ ID NO: 3067385 - RNA, 19 nt, Artificial Sequence
  Description of Artificial Sequence: Synthetic oligonucleotide
cgagucgggucagguggcu

SEQ ID NO: 3067386 - RNA, 19 nt, Artificial Sequence
  Description of Artificial Sequence: Synthetic oligonucleotide
ccccagcgcugccgcaguu

SEQ ID NO: 3067387 - RNA, 19 nt, Artificial Sequence
  Description of Artificial Sequence: Synthetic oligonucleotide
aauugggagaaucugacgg

SEQ ID NO: 3067388 - RNA, 19 nt, Artificial Sequence
  Description of Artificial Sequence: Synthetic oligonucleotide
uugagugugacacagauaa

SEQ ID NO: 3067389 - RNA, 19 nt, Artificial Sequence
  Description of Artificial Sequence: Synthetic oligonucleotide
aagcaugacucauaggugg

SEQ ID NO: 3067390 - RNA, 19 nt, Artificial Sequence
  Description of Artificial Sequence: Synthetic oligonucleotide
uucauguucuuaaagaugu

SEQ ID NO: 3067391 - RNA, 19 nt, Artificial Sequence
  Description of Artificial Sequence: Synthetic oligonucleotide
aaucugacgguaauaaggc

SEQ ID NO: 3067392 - RNA, 19 nt, Artificial Sequence
  Description of Artificial Sequence: Synthetic oligonucleotide
uuaaagauguucagaauug

SEQ ID NO: 3067393 - RNA, 19 nt, Artificial Sequence
  Description of Artificial Sequence: Synthetic oligonucleotide
gaaucugacgguaauaagg

SEQ ID NO: 3067394 - RNA, 19 nt, Artificial Sequence
  Description of Artificial Sequence: Synthetic oligonucleotide
ugucaguucagcaagcaug

SEQ ID NO: 3067395 - RNA, 19 nt, Artificial Sequence
  Description of Artificial Sequence: Synthetic oligonucleotide
aacuagaugcuggaggacc

SEQ ID NO: 3067396 - RNA, 19 nt, Artificial Sequence
  Description of Artificial Sequence: Synthetic oligonucleotide
auguacuugauguugauga

SEQ ID NO: 3067397 - RNA, 19 nt, Artificial Sequence
  Description of Artificial Sequence: Synthetic oligonucleotide
agauguucagaauugggag

SEQ ID NO: 3067398 - RNA, 19 nt, Artificial Sequence
  Description of Artificial Sequence: Synthetic oligonucleotide
acgguaauaaggcaccagc

SEQ ID NO: 3067399 - RNA, 19 nt, Artificial Sequence
  Description of Artificial Sequence: Synthetic oligonucleotide
uucuuaaagauguucagaa

SEQ ID NO: 3067400 - RNA, 19 nt, Artificial Sequence
  Description of Artificial Sequence: Synthetic oligonucleotide
ugugacacagauaaccugu

SEQ ID NO: 3067401 - RNA, 19 nt, Artificial Sequence
  Description of Artificial Sequence: Synthetic oligonucleotide
ugcuggaggaccuugagug

SEQ ID NO: 3067402 - RNA, 19 nt, Artificial Sequence
  Description of Artificial Sequence: Synthetic oligonucleotide
aguucagcaagcaugacuc

SEQ ID NO: 3067403 - RNA, 19 nt, Artificial Sequence
  Description of Artificial Sequence: Synthetic oligonucleotide
aggaccuugagugugacac

SEQ ID NO: 3067404 - RNA, 19 nt, Artificial Sequence
  Description of Artificial Sequence: Synthetic oligonucleotide
uccaaugucuccuggauca

SEQ ID NO: 3067405 - RNA, 19 nt, Artificial Sequence
  Description of Artificial Sequence: Synthetic oligonucleotide
ugacacaacuagaugcugg

SEQ ID NO: 3067406 - RNA, 19 nt, Artificial Sequence
  Description of Artificial Sequence: Synthetic oligonucleotide
acauucauguucuuaaaga

SEQ ID NO: 3067407 - RNA, 19 nt, Artificial Sequence
  Description of Artificial Sequence: Synthetic oligonucleotide
ucugacgguaauaaggcac

SEQ ID NO: 3067408 - RNA, 19 nt, Artificial Sequence
  Description of Artificial Sequence: Synthetic oligonucleotide
aaagauguucagaauuggg

SEQ ID NO: 3067409 - RNA, 19 nt, Artificial Sequence
  Description of Artificial Sequence: Synthetic oligonucleotide
uguucuuaaagauguucag

SEQ ID NO: 3067410 - RNA, 19 nt, Artificial Sequence
  Description of Artificial Sequence: Synthetic oligonucleotide
uucacauucauguucuuaa

SEQ ID NO: 3067411 - RNA, 19 nt, Artificial Sequence
  Description of Artificial Sequence: Synthetic oligonucleotide
auagguggguaccauguac

SEQ ID NO: 3067412 - RNA, 19 nt, Artificial Sequence
  Description of Artificial Sequence: Synthetic oligonucleotide
gagugugacacagauaacc

SEQ ID NO: 3067413 - RNA, 19 nt, Artificial Sequence
  Description of Artificial Sequence: Synthetic oligonucleotide
cacaacuagaugcuggagg

SEQ ID NO: 3067414 - RNA, 19 nt, Artificial Sequence
  Description of Artificial Sequence: Synthetic oligonucleotide
uaaagauguucagaauugg

SEQ ID NO: 3067415 - RNA, 19 nt, Artificial Sequence
  Description of Artificial Sequence: Synthetic oligonucleotide
aagauguucagaauuggga

SEQ ID NO: 3067416 - RNA, 19 nt, Artificial Sequence
  Description of Artificial Sequence: Synthetic oligonucleotide
acaacuagaugcuggagga

SEQ ID NO: 3067417 - RNA, 19 nt, Artificial Sequence
  Description of Artificial Sequence: Synthetic oligonucleotide
agaauugggagaaucugac

SEQ ID NO: 3067418 - RNA, 19 nt, Artificial Sequence
  Description of Artificial Sequence: Synthetic oligonucleotide
ucauagguggguaccaugu

SEQ ID NO: 3067419 - RNA, 19 nt, Artificial Sequence
  Description of Artificial Sequence: Synthetic oligonucleotide
ucccauaacgcucgaaggc

SEQ ID NO: 3067420 - RNA, 19 nt, Artificial Sequence
  Description of Artificial Sequence: Synthetic oligonucleotide
gaauugggagaaucugacg

SEQ ID NO: 3067421 - RNA, 19 nt, Artificial Sequence
  Description of Artificial Sequence: Synthetic oligonucleotide
ucuccgcugacacaacuag

SEQ ID NO: 3067422 - RNA, 19 nt, Artificial Sequence
  Description of Artificial Sequence: Synthetic oligonucleotide
aauaaggcaccagcgcuuc

SEQ ID NO: 3067423 - RNA, 19 nt, Artificial Sequence
  Description of Artificial Sequence: Synthetic oligonucleotide
  modified_base (10)..(10): a, c, u, g, unknown or other
acagaugacnguggcgacc

SEQ ID NO: 3067424 - RNA, 19 nt, Artificial Sequence
  Description of Artificial Sequence: Synthetic oligonucleotide
cuucugcuggcuauagucg

SEQ ID NO: 3067425 - RNA, 19 nt, Artificial Sequence
  Description of Artificial Sequence: Synthetic oligonucleotide
aaggcaccagcgcuucgcc

SEQ ID NO: 3067426 - RNA, 19 nt, Artificial Sequence
  Description of Artificial Sequence: Synthetic oligonucleotide
uugaugaaggcauccuccc

SEQ ID NO: 3067427 - RNA, 19 nt, Artificial Sequence
  Description of Artificial Sequence: Synthetic oligonucleotide
  modified_base (7)..(7): a, c, u, g, unknown or other
gaugacnguggcgaccagg

SEQ ID NO: 3067428 - RNA, 19 nt, Artificial Sequence
  Description of Artificial Sequence: Synthetic oligonucleotide
gauguucagaauugggaga

SEQ ID NO: 3067429 - RNA, 19 nt, Artificial Sequence
  Description of Artificial Sequence: Synthetic oligonucleotide
auccccggaguucacauuc

SEQ ID NO: 3067430 - RNA, 19 nt, Artificial Sequence
  Description of Artificial Sequence: Synthetic oligonucleotide
uauagucgaugccaucccc

SEQ ID NO: 3067431 - RNA, 19 nt, Artificial Sequence
  Description of Artificial Sequence: Synthetic oligonucleotide
cugacgguaauaaggcacc

SEQ ID NO: 3067432 - RNA, 19 nt, Artificial Sequence
  Description of Artificial Sequence: Synthetic oligonucleotide
aaggcuuccaaugucuccu

SEQ ID NO: 3067433 - RNA, 19 nt, Artificial Sequence
  Description of Artificial Sequence: Synthetic oligonucleotide
agaaucugacgguaauaag

SEQ ID NO: 3067434 - RNA, 19 nt, Artificial Sequence
  Description of Artificial Sequence: Synthetic oligonucleotide
guugaugaaggcauccucc

SEQ ID NO: 3067435 - RNA, 19 nt, Artificial Sequence
  Description of Artificial Sequence: Synthetic oligonucleotide
gauguugaugaaggcaucc

SEQ ID NO: 3067436 - RNA, 19 nt, Artificial Sequence
  Description of Artificial Sequence: Synthetic oligonucleotide
uguugaugaaggcauccuc

SEQ ID NO: 3067437 - RNA, 19 nt, Artificial Sequence
  Description of Artificial Sequence: Synthetic oligonucleotide
gguaauaaggcaccagcgc

SEQ ID NO: 3067438 - RNA, 19 nt, Artificial Sequence
  Description of Artificial Sequence: Synthetic oligonucleotide
  modified_base (4)..(4): a, c, u, g, unknown or other
gacnguggcgaccagggga

SEQ ID NO: 3067439 - RNA, 19 nt, Artificial Sequence
  Description of Artificial Sequence: Synthetic oligonucleotide
uccgcugacacaacuagau

SEQ ID NO: 3067440 - RNA, 19 nt, Artificial Sequence
  Description of Artificial Sequence: Synthetic oligonucleotide
ucgaaggcuuccaaugucu

SEQ ID NO: 3067441 - RNA, 19 nt, Artificial Sequence
  Description of Artificial Sequence: Synthetic oligonucleotide
cucccauaacgcucgaagg

SEQ ID NO: 3067442 - RNA, 19 nt, Artificial Sequence
  Description of Artificial Sequence: Synthetic oligonucleotide
gguaccauguacuugaugu

SEQ ID NO: 3067443 - RNA, 19 nt, Artificial Sequence
  Description of Artificial Sequence: Synthetic oligonucleotide
uagguggguaccauguacu

SEQ ID NO: 3067444 - RNA, 19 nt, Artificial Sequence
  Description of Artificial Sequence: Synthetic oligonucleotide
uaccauguacuugauguug

SEQ ID NO: 3067445 - RNA, 19 nt, Artificial Sequence
  Description of Artificial Sequence: Synthetic oligonucleotide
gaucaggucgccaauguuc

SEQ ID NO: 3067446 - RNA, 19 nt, Artificial Sequence
  Description of Artificial Sequence: Synthetic oligonucleotide
aaugucuccuggaucaggu

SEQ ID NO: 3067447 - RNA, 19 nt, Artificial Sequence
  Description of Artificial Sequence: Synthetic oligonucleotide
guggguaccauguacuuga

SEQ ID NO: 3067448 - RNA, 19 nt, Artificial Sequence
  Description of Artificial Sequence: Synthetic oligonucleotide
auguucuuaaagauguuca

SEQ ID NO: 3067449 - RNA, 19 nt, Artificial Sequence
  Description of Artificial Sequence: Synthetic oligonucleotide
uagucgaugccauccccgg

SEQ ID NO: 3067450 - RNA, 19 nt, Artificial Sequence
  Description of Artificial Sequence: Synthetic oligonucleotide
uccccucccauaacgcucg

SEQ ID NO: 3067451 - RNA, 19 nt, Artificial Sequence
  Description of Artificial Sequence: Synthetic oligonucleotide
  modified_base (6)..(6): a, c, u, g, unknown or other
augacnguggcgaccaggg

SEQ ID NO: 3067452 - RNA, 19 nt, Artificial Sequence
  Description of Artificial Sequence: Synthetic oligonucleotide
caagcaugacucauaggug

SEQ ID NO: 3067453 - RNA, 19 nt, Artificial Sequence
  Description of Artificial Sequence: Synthetic oligonucleotide
cauguucuuaaagauguuc

SEQ ID NO: 3067454 - RNA, 19 nt, Artificial Sequence
  Description of Artificial Sequence: Synthetic oligonucleotide
ugaugaaggcauccucccc

SEQ ID NO: 3067455 - RNA, 19 nt, Artificial Sequence
  Description of Artificial Sequence: Synthetic oligonucleotide
gagggaucccuucugcagc

SEQ ID NO: 3067456 - RNA, 19 nt, Artificial Sequence
  Description of Artificial Sequence: Synthetic oligonucleotide
auugggagaaucugacggu

SEQ ID NO: 3067457 - RNA, 19 nt, Artificial Sequence
  Description of Artificial Sequence: Synthetic oligonucleotide
gcaagcaugacucauaggu

SEQ ID NO: 3067458 - RNA, 19 nt, Artificial Sequence
  Description of Artificial Sequence: Synthetic oligonucleotide
gacacaacuagaugcugga

SEQ ID NO: 3067459 - RNA, 19 nt, Artificial Sequence
  Description of Artificial Sequence: Synthetic oligonucleotide
gaugcuggaggaccuugag

SEQ ID NO: 3067460 - RNA, 19 nt, Artificial Sequence
  Description of Artificial Sequence: Synthetic oligonucleotide
aggucgccaauguucuccc

SEQ ID NO: 3067461 - RNA, 19 nt, Artificial Sequence
  Description of Artificial Sequence: Synthetic oligonucleotide
auccuccccucccauaacg

SEQ ID NO: 3067462 - RNA, 19 nt, Artificial Sequence
  Description of Artificial Sequence: Synthetic oligonucleotide
cuauagucgaugccauccc

SEQ ID NO: 3067463 - RNA, 19 nt, Artificial Sequence
  Description of Artificial Sequence: Synthetic oligonucleotide
gaccuugagugugacacag

SEQ ID NO: 3067464 - RNA, 19 nt, Artificial Sequence
  Description of Artificial Sequence: Synthetic oligonucleotide
guacuugauguugaugaag

SEQ ID NO: 3067465 - RNA, 19 nt, Artificial Sequence
  Description of Artificial Sequence: Synthetic oligonucleotide
gagaaucugacgguaauaa

SEQ ID NO: 3067466 - RNA, 19 nt, Artificial Sequence
  Description of Artificial Sequence: Synthetic oligonucleotide
uaauaaggcaccagcgcuu

SEQ ID NO: 3067467 - RNA, 19 nt, Artificial Sequence
  Description of Artificial Sequence: Synthetic oligonucleotide
uucugcuggcuauagucga

SEQ ID NO: 3067468 - RNA, 19 nt, Artificial Sequence
  Description of Artificial Sequence: Synthetic oligonucleotide
uguacuugauguugaugaa

SEQ ID NO: 3067469 - RNA, 19 nt, Artificial Sequence
  Description of Artificial Sequence: Synthetic oligonucleotide
guaauaaggcaccagcgcu

SEQ ID NO: 3067470 - RNA, 19 nt, Artificial Sequence
  Description of Artificial Sequence: Synthetic oligonucleotide
gucgaugccauccccggag

SEQ ID NO: 3067471 - RNA, 19 nt, Artificial Sequence
  Description of Artificial Sequence: Synthetic oligonucleotide
auagucgaugccauccccg

SEQ ID NO: 3067472 - RNA, 19 nt, Artificial Sequence
  Description of Artificial Sequence: Synthetic oligonucleotide
auaacgcucgaaggcuucc

SEQ ID NO: 3067473 - RNA, 19 nt, Artificial Sequence
  Description of Artificial Sequence: Synthetic oligonucleotide
ggaguucacauucauguuc

SEQ ID NO: 3067474 - RNA, 19 nt, Artificial Sequence
  Description of Artificial Sequence: Synthetic oligonucleotide
cagcaagcaugacucauag

SEQ ID NO: 3067475 - RNA, 19 nt, Artificial Sequence
  Description of Artificial Sequence: Synthetic oligonucleotide
ugacucauagguggguacc

SEQ ID NO: 3067476 - RNA, 19 nt, Artificial Sequence
  Description of Artificial Sequence: Synthetic oligonucleotide
gcuauagucgaugccaucc

SEQ ID NO: 3067477 - RNA, 19 nt, Artificial Sequence
  Description of Artificial Sequence: Synthetic oligonucleotide
ucagcaagcaugacucaua

SEQ ID NO: 3067478 - RNA, 19 nt, Artificial Sequence
  Description of Artificial Sequence: Synthetic oligonucleotide
cagaauugggagaaucuga

SEQ ID NO: 3067479 - RNA, 19 nt, Artificial Sequence
  Description of Artificial Sequence: Synthetic oligonucleotide
gaugaaggcauccuccccu

SEQ ID NO: 3067480 - RNA, 19 nt, Artificial Sequence
  Description of Artificial Sequence: Synthetic oligonucleotide
uguucucccucuucugcug

SEQ ID NO: 3067481 - RNA, 19 nt, Artificial Sequence
  Description of Artificial Sequence: Synthetic oligonucleotide
augaaggcauccuccccuc

SEQ ID NO: 3067482 - RNA, 19 nt, Artificial Sequence
  Description of Artificial Sequence: Synthetic oligonucleotide
agugugacacagauaaccu

SEQ ID NO: 3067483 - RNA, 19 nt, Artificial Sequence
  Description of Artificial Sequence: Synthetic oligonucleotide
guucuuaaagauguucaga

SEQ ID NO: 3067484 - RNA, 19 nt, Artificial Sequence
  Description of Artificial Sequence: Synthetic oligonucleotide
uuccaaugucuccuggauc

SEQ ID NO: 3067485 - RNA, 19 nt, Artificial Sequence
  Description of Artificial Sequence: Synthetic oligonucleotide
  modified_base (5)..(5): a, c, u, g, unknown or other
ugacnguggcgaccagggg

SEQ ID NO: 3067486 - RNA, 19 nt, Artificial Sequence
  Description of Artificial Sequence: Synthetic oligonucleotide
uaaggcaccagcgcuucgc

SEQ ID NO: 3067487 - RNA, 19 nt, Artificial Sequence
  Description of Artificial Sequence: Synthetic oligonucleotide
aaggcauccuccccuccca

SEQ ID NO: 3067488 - RNA, 19 nt, Artificial Sequence
  Description of Artificial Sequence: Synthetic oligonucleotide
ucacauucauguucuuaaa

SEQ ID NO: 3067489 - RNA, 19 nt, Artificial Sequence
  Description of Artificial Sequence: Synthetic oligonucleotide
auguucucccucuucugcu

SEQ ID NO: 3067490 - RNA, 19 nt, Artificial Sequence
  Description of Artificial Sequence: Synthetic oligonucleotide
agcaagcaugacucauagg

SEQ ID NO: 3067491 - RNA, 19 nt, Artificial Sequence
  Description of Artificial Sequence: Synthetic oligonucleotide
ugauguugaugaaggcauc

SEQ ID NO: 3067492 - RNA, 19 nt, Artificial Sequence
  Description of Artificial Sequence: Synthetic oligonucleotide
cuggcuauagucgaugcca

SEQ ID NO: 3067493 - RNA, 19 nt, Artificial Sequence
  Description of Artificial Sequence: Synthetic oligonucleotide
cgcugacacaacuagaugc

SEQ ID NO: 3067494 - RNA, 19 nt, Artificial Sequence
  Description of Artificial Sequence: Synthetic oligonucleotide
uccuggaucaggucgccaa

SEQ ID NO: 3067495 - RNA, 19 nt, Artificial Sequence
  Description of Artificial Sequence: Synthetic oligonucleotide
cucauagguggguaccaug

SEQ ID NO: 3067496 - RNA, 19 nt, Artificial Sequence
  Description of Artificial Sequence: Synthetic oligonucleotide
accaucuccgcugacacaa

SEQ ID NO: 3067497 - RNA, 19 nt, Artificial Sequence
  Description of Artificial Sequence: Synthetic oligonucleotide
  modified_base (3)..(3): a, c, u, g, unknown or other
acnguggcgaccaggggag

SEQ ID NO: 3067498 - RNA, 19 nt, Artificial Sequence
  Description of Artificial Sequence: Synthetic oligonucleotide
guucagaauugggagaauc

SEQ ID NO: 3067499 - RNA, 19 nt, Artificial Sequence
  Description of Artificial Sequence: Synthetic oligonucleotide
ucgcccaccaucuccgcug

SEQ ID NO: 3067500 - RNA, 19 nt, Artificial Sequence
  Description of Artificial Sequence: Synthetic oligonucleotide
guucucccucuucugcugg

SEQ ID NO: 3067501 - RNA, 19 nt, Artificial Sequence
  Description of Artificial Sequence: Synthetic oligonucleotide
caggucgccaauguucucc

SEQ ID NO: 3067502 - RNA, 19 nt, Artificial Sequence
  Description of Artificial Sequence: Synthetic oligonucleotide
ucgccaauguucucccucu

SEQ ID NO: 3067503 - RNA, 19 nt, Artificial Sequence
  Description of Artificial Sequence: Synthetic oligonucleotide
caauguucucccucuucug

SEQ ID NO: 3067504 - RNA, 19 nt, Artificial Sequence
  Description of Artificial Sequence: Synthetic oligonucleotide
gacgguaauaaggcaccag

SEQ ID NO: 3067505 - RNA, 19 nt, Artificial Sequence
  Description of Artificial Sequence: Synthetic oligonucleotide
gucaguucagcaagcauga

SEQ ID NO: 3067506 - RNA, 19 nt, Artificial Sequence
  Description of Artificial Sequence: Synthetic oligonucleotide
cauguacuugauguugaug

SEQ ID NO: 3067507 - RNA, 19 nt, Artificial Sequence
  Description of Artificial Sequence: Synthetic oligonucleotide
uccuccccucccauaacgc

SEQ ID NO: 3067508 - RNA, 19 nt, Artificial Sequence
  Description of Artificial Sequence: Synthetic oligonucleotide
agcaugacucauagguggg

SEQ ID NO: 3067509 - RNA, 19 nt, Artificial Sequence
  Description of Artificial Sequence: Synthetic oligonucleotide
ggagggaucccuucugcag

SEQ ID NO: 3067510 - RNA, 19 nt, Artificial Sequence
  Description of Artificial Sequence: Synthetic oligonucleotide
uucagcaagcaugacucau

SEQ ID NO: 3067511 - RNA, 19 nt, Artificial Sequence
  Description of Artificial Sequence: Synthetic oligonucleotide
aucugacgguaauaaggca

SEQ ID NO: 3067512 - RNA, 19 nt, Artificial Sequence
  Description of Artificial Sequence: Synthetic oligonucleotide
  modified_base (11)..(11): a, c, u, g, unknown or other
gacagaugacnguggcgac

SEQ ID NO: 3067513 - RNA, 19 nt, Artificial Sequence
  Description of Artificial Sequence: Synthetic oligonucleotide
uggaggaccuugaguguga

SEQ ID NO: 3067514 - RNA, 19 nt, Artificial Sequence
  Description of Artificial Sequence: Synthetic oligonucleotide
ugggagaaucugacgguaa

SEQ ID NO: 3067515 - RNA, 19 nt, Artificial Sequence
  Description of Artificial Sequence: Synthetic oligonucleotide
ugagugugacacagauaac

SEQ ID NO: 3067516 - RNA, 19 nt, Artificial Sequence
  Description of Artificial Sequence: Synthetic oligonucleotide
aacgcucgaaggcuuccaa

SEQ ID NO: 3067517 - RNA, 19 nt, Artificial Sequence
  Description of Artificial Sequence: Synthetic oligonucleotide
aucaggucgccaauguucu

SEQ ID NO: 3067518 - RNA, 19 nt, Artificial Sequence
  Description of Artificial Sequence: Synthetic oligonucleotide
cauaacgcucgaaggcuuc

SEQ ID NO: 3067519 - RNA, 19 nt, Artificial Sequence
  Description of Artificial Sequence: Synthetic oligonucleotide
cucgaaggcuuccaauguc

SEQ ID NO: 3067520 - RNA, 19 nt, Artificial Sequence
  Description of Artificial Sequence: Synthetic oligonucleotide
aggcaccagcgcuucgccc

SEQ ID NO: 3067521 - RNA, 19 nt, Artificial Sequence
  Description of Artificial Sequence: Synthetic oligonucleotide
uggcuauagucgaugccau

SEQ ID NO: 3067522 - RNA, 19 nt, Artificial Sequence
  Description of Artificial Sequence: Synthetic oligonucleotide
caaugucuccuggaucagg

SEQ ID NO: 3067523 - RNA, 19 nt, Artificial Sequence
  Description of Artificial Sequence: Synthetic oligonucleotide
auaaggcaccagcgcuucg

SEQ ID NO: 3067524 - RNA, 19 nt, Artificial Sequence
  Description of Artificial Sequence: Synthetic oligonucleotide
ucugcuggcuauagucgau

SEQ ID NO: 3067525 - RNA, 19 nt, Artificial Sequence
  Description of Artificial Sequence: Synthetic oligonucleotide
gaguucacauucauguucu

SEQ ID NO: 3067526 - RNA, 19 nt, Artificial Sequence
  Description of Artificial Sequence: Synthetic oligonucleotide
gaugccauccccggaguuc

SEQ ID NO: 3067527 - RNA, 19 nt, Artificial Sequence
  Description of Artificial Sequence: Synthetic oligonucleotide
ccucccauaacgcucgaag

SEQ ID NO: 3067528 - RNA, 19 nt, Artificial Sequence
  Description of Artificial Sequence: Synthetic oligonucleotide
augcuggaggaccuugagu

SEQ ID NO: 3067529 - RNA, 19 nt, Artificial Sequence
  Description of Artificial Sequence: Synthetic oligonucleotide
accauguacuugauguuga

SEQ ID NO: 3067530 - RNA, 19 nt, Artificial Sequence
  Description of Artificial Sequence: Synthetic oligonucleotide
auguugaugaaggcauccu

SEQ ID NO: 3067531 - RNA, 19 nt, Artificial Sequence
  Description of Artificial Sequence: Synthetic oligonucleotide
acuagaugcuggaggaccu

SEQ ID NO: 3067532 - RNA, 19 nt, Artificial Sequence
  Description of Artificial Sequence: Synthetic oligonucleotide
gucgccaauguucucccuc

SEQ ID NO: 3067533 - RNA, 19 nt, Artificial Sequence
  Description of Artificial Sequence: Synthetic oligonucleotide
agggaucccuucugcagcu

SEQ ID NO: 3067534 - RNA, 19 nt, Artificial Sequence
  Description of Artificial Sequence: Synthetic oligonucleotide
gaucccuucugcagcugcc

SEQ ID NO: 3067535 - RNA, 19 nt, Artificial Sequence
  Description of Artificial Sequence: Synthetic oligonucleotide
cuggaggaccuugagugug

SEQ ID NO: 3067536 - RNA, 19 nt, Artificial Sequence
  Description of Artificial Sequence: Synthetic oligonucleotide
acacaacuagaugcuggag

SEQ ID NO: 3067537 - RNA, 19 nt, Artificial Sequence
  Description of Artificial Sequence: Synthetic oligonucleotide
uugggagaaucugacggua

SEQ ID NO: 3067538 - RNA, 19 nt, Artificial Sequence
  Description of Artificial Sequence: Synthetic oligonucleotide
cgguaauaaggcaccagcg

SEQ ID NO: 3067539 - RNA, 19 nt, Artificial Sequence
  Description of Artificial Sequence: Synthetic oligonucleotide
cuccccucccauaacgcuc

SEQ ID NO: 3067540 - RNA, 19 nt, Artificial Sequence
  Description of Artificial Sequence: Synthetic oligonucleotide
aggggagggaucccuucug

SEQ ID NO: 3067541 - RNA, 19 nt, Artificial Sequence
  Description of Artificial Sequence: Synthetic oligonucleotide
agcgcuucgcccaccaucu

SEQ ID NO: 3067542 - RNA, 19 nt, Artificial Sequence
  Description of Artificial Sequence: Synthetic oligonucleotide
uucucccucuucugcuggc

SEQ ID NO: 3067543 - RNA, 19 nt, Artificial Sequence
  Description of Artificial Sequence: Synthetic oligonucleotide
uucgcccaccaucuccgcu

SEQ ID NO: 3067544 - RNA, 19 nt, Artificial Sequence
  Description of Artificial Sequence: Synthetic oligonucleotide
ucgaugccauccccggagu

SEQ ID NO: 3067545 - RNA, 19 nt, Artificial Sequence
  Description of Artificial Sequence: Synthetic oligonucleotide
ugacgguaauaaggcacca

SEQ ID NO: 3067546 - RNA, 19 nt, Artificial Sequence
  Description of Artificial Sequence: Synthetic oligonucleotide
  modified_base (9)..(9): a, c, u, g, unknown or other
cagaugacnguggcgacca

SEQ ID NO: 3067547 - RNA, 19 nt, Artificial Sequence
  Description of Artificial Sequence: Synthetic oligonucleotide
ucccuucugcagcugcccu

SEQ ID NO: 3067548 - RNA, 19 nt, Artificial Sequence
  Description of Artificial Sequence: Synthetic oligonucleotide
gacucauagguggguacca

SEQ ID NO: 3067549 - RNA, 19 nt, Artificial Sequence
  Description of Artificial Sequence: Synthetic oligonucleotide
cugacacaacuagaugcug

SEQ ID NO: 3067550 - RNA, 19 nt, Artificial Sequence
  Description of Artificial Sequence: Synthetic oligonucleotide
cagcgcuucgcccaccauc

SEQ ID NO: 3067551 - RNA, 19 nt, Artificial Sequence
  Description of Artificial Sequence: Synthetic oligonucleotide
ucccucuucugcuggcuau

SEQ ID NO: 3067552 - RNA, 19 nt, Artificial Sequence
  Description of Artificial Sequence: Synthetic oligonucleotide
augccauccccggaguuca

SEQ ID NO: 3067553 - RNA, 19 nt, Artificial Sequence
  Description of Artificial Sequence: Synthetic oligonucleotide
uccccggaguucacauuca

SEQ ID NO: 3067554 - RNA, 19 nt, Artificial Sequence
  Description of Artificial Sequence: Synthetic oligonucleotide
uaacgcucgaaggcuucca

SEQ ID NO: 3067555 - RNA, 19 nt, Artificial Sequence
  Description of Artificial Sequence: Synthetic oligonucleotide
caguucagcaagcaugacu

SEQ ID NO: 3067556 - RNA, 19 nt, Artificial Sequence
  Description of Artificial Sequence: Synthetic oligonucleotide
ggaucccuucugcagcugc

SEQ ID NO: 3067557 - RNA, 19 nt, Artificial Sequence
  Description of Artificial Sequence: Synthetic oligonucleotide
agucgaugccauccccgga

SEQ ID NO: 3067558 - RNA, 19 nt, Artificial Sequence
  Description of Artificial Sequence: Synthetic oligonucleotide
ccggaguucacauucaugu

SEQ ID NO: 3067559 - RNA, 19 nt, Artificial Sequence
  Description of Artificial Sequence: Synthetic oligonucleotide
gcuggcuauagucgaugcc

SEQ ID NO: 3067560 - RNA, 19 nt, Artificial Sequence
  Description of Artificial Sequence: Synthetic oligonucleotide
aggcuuccaaugucuccug

SEQ ID NO: 3067561 - RNA, 19 nt, Artificial Sequence
  Description of Artificial Sequence: Synthetic oligonucleotide
agguggguaccauguacuu

SEQ ID NO: 3067562 - RNA, 19 nt, Artificial Sequence
  Description of Artificial Sequence: Synthetic oligonucleotide
ggcuuccaaugucuccugg

SEQ ID NO: 3067563 - RNA, 19 nt, Artificial Sequence
  Description of Artificial Sequence: Synthetic oligonucleotide
guucagcaagcaugacuca

SEQ ID NO: 3067564 - RNA, 19 nt, Artificial Sequence
  Description of Artificial Sequence: Synthetic oligonucleotide
cuugagugugacacagaua

SEQ ID NO: 3067565 - RNA, 19 nt, Artificial Sequence
  Description of Artificial Sequence: Synthetic oligonucleotide
caacuagaugcuggaggac

SEQ ID NO: 3067566 - RNA, 19 nt, Artificial Sequence
  Description of Artificial Sequence: Synthetic oligonucleotide
ggcaccagcgcuucgccca

SEQ ID NO: 3067567 - RNA, 19 nt, Artificial Sequence
  Description of Artificial Sequence: Synthetic oligonucleotide
gguggguaccauguacuug

SEQ ID NO: 3067568 - RNA, 19 nt, Artificial Sequence
  Description of Artificial Sequence: Synthetic oligonucleotide
cugcuggcuauagucgaug

SEQ ID NO: 3067569 - RNA, 19 nt, Artificial Sequence
  Description of Artificial Sequence: Synthetic oligonucleotide
acgcucgaaggcuuccaau

SEQ ID NO: 3067570 - RNA, 19 nt, Artificial Sequence
  Description of Artificial Sequence: Synthetic oligonucleotide
  modified_base (8)..(8): a, c, u, g, unknown or other
agaugacnguggcgaccag

SEQ ID NO: 3067571 - RNA, 19 nt, Artificial Sequence
  Description of Artificial Sequence: Synthetic oligonucleotide
ucaguucagcaagcaugac

SEQ ID NO: 3067572 - RNA, 19 nt, Artificial Sequence
  Description of Artificial Sequence: Synthetic oligonucleotide
uguucagaauugggagaau

SEQ ID NO: 3067573 - RNA, 19 nt, Artificial Sequence
  Description of Artificial Sequence: Synthetic oligonucleotide
gugacacagauaaccuguc

SEQ ID NO: 3067574 - RNA, 19 nt, Artificial Sequence
  Description of Artificial Sequence: Synthetic oligonucleotide
gcuuccaaugucuccugga

SEQ ID NO: 3067575 - RNA, 19 nt, Artificial Sequence
  Description of Artificial Sequence: Synthetic oligonucleotide
accagcgcuucgcccacca

SEQ ID NO: 3067576 - RNA, 19 nt, Artificial Sequence
  Description of Artificial Sequence: Synthetic oligonucleotide
ccaccaucuccgcugacac

SEQ ID NO: 3067577 - RNA, 19 nt, Artificial Sequence
  Description of Artificial Sequence: Synthetic oligonucleotide
uggguaccauguacuugau

SEQ ID NO: 3067578 - RNA, 19 nt, Artificial Sequence
  Description of Artificial Sequence: Synthetic oligonucleotide
cuuccaaugucuccuggau

SEQ ID NO: 3067579 - RNA, 19 nt, Artificial Sequence
  Description of Artificial Sequence: Synthetic oligonucleotide
cgcucgaaggcuuccaaug

SEQ ID NO: 3067580 - RNA, 19 nt, Artificial Sequence
  Description of Artificial Sequence: Synthetic oligonucleotide
aguucacauucauguucuu

SEQ ID NO: 3067581 - RNA, 19 nt, Artificial Sequence
  Description of Artificial Sequence: Synthetic oligonucleotide
gcgaccaggggagggaucc

SEQ ID NO: 3067582 - RNA, 19 nt, Artificial Sequence
  Description of Artificial Sequence: Synthetic oligonucleotide
cuucgcccaccaucuccgc

SEQ ID NO: 3067583 - RNA, 19 nt, Artificial Sequence
  Description of Artificial Sequence: Synthetic oligonucleotide
ucaggucgccaauguucuc

SEQ ID NO: 3067584 - RNA, 19 nt, Artificial Sequence
  Description of Artificial Sequence: Synthetic oligonucleotide
ggguaccauguacuugaug

SEQ ID NO: 3067585 - RNA, 19 nt, Artificial Sequence
  Description of Artificial Sequence: Synthetic oligonucleotide
cuccgcugacacaacuaga

SEQ ID NO: 3067586 - RNA, 19 nt, Artificial Sequence
  Description of Artificial Sequence: Synthetic oligonucleotide
caugacucauaggugggua

SEQ ID NO: 3067587 - RNA, 19 nt, Artificial Sequence
  Description of Artificial Sequence: Synthetic oligonucleotide
cauccuccccucccauaac

SEQ ID NO: 3067588 - RNA, 19 nt, Artificial Sequence
  Description of Artificial Sequence: Synthetic oligonucleotide
gccaauguucucccucuuc

SEQ ID NO: 3067589 - RNA, 19 nt, Artificial Sequence
  Description of Artificial Sequence: Synthetic oligonucleotide
gcauccuccccucccauaa

SEQ ID NO: 3067590 - RNA, 19 nt, Artificial Sequence
  Description of Artificial Sequence: Synthetic oligonucleotide
cauagguggguaccaugua

SEQ ID NO: 3067591 - RNA, 19 nt, Artificial Sequence
  Description of Artificial Sequence: Synthetic oligonucleotide
guaccauguacuugauguu

SEQ ID NO: 3067592 - RNA, 19 nt, Artificial Sequence
  Description of Artificial Sequence: Synthetic oligonucleotide
aucuccgcugacacaacua

SEQ ID NO: 3067593 - RNA, 19 nt, Artificial Sequence
  Description of Artificial Sequence: Synthetic oligonucleotide
gcugacacaacuagaugcu

SEQ ID NO: 3067594 - RNA, 19 nt, Artificial Sequence
  Description of Artificial Sequence: Synthetic oligonucleotide
gggagggaucccuucugca

SEQ ID NO: 3067595 - RNA, 19 nt, Artificial Sequence
  Description of Artificial Sequence: Synthetic oligonucleotide
cccggaguucacauucaug

SEQ ID NO: 3067596 - RNA, 19 nt, Artificial Sequence
  Description of Artificial Sequence: Synthetic oligonucleotide
cagcugcccugucaguuca

SEQ ID NO: 3067597 - RNA, 19 nt, Artificial Sequence
  Description of Artificial Sequence: Synthetic oligonucleotide
ccaauguucucccucuucu

SEQ ID NO: 3067598 - RNA, 19 nt, Artificial Sequence
  Description of Artificial Sequence: Synthetic oligonucleotide
ggcuauagucgaugccauc

SEQ ID NO: 3067599 - RNA, 19 nt, Artificial Sequence
  Description of Artificial Sequence: Synthetic oligonucleotide
ggagaaucugacgguaaua

SEQ ID NO: 3067600 - RNA, 19 nt, Artificial Sequence
  Description of Artificial Sequence: Synthetic oligonucleotide
ggaccuugagugugacaca

SEQ ID NO: 3067601 - RNA, 19 nt, Artificial Sequence
  Description of Artificial Sequence: Synthetic oligonucleotide
gcagcugcccugucaguuc

SEQ ID NO: 3067602 - RNA, 19 nt, Artificial Sequence
  Description of Artificial Sequence: Synthetic oligonucleotide
cccugucaguucagcaagc

SEQ ID NO: 3067603 - RNA, 19 nt, Artificial Sequence
  Description of Artificial Sequence: Synthetic oligonucleotide
aggcauccuccccucccau

SEQ ID NO: 3067604 - RNA, 19 nt, Artificial Sequence
  Description of Artificial Sequence: Synthetic oligonucleotide
caucuccgcugacacaacu

SEQ ID NO: 3067605 - RNA, 19 nt, Artificial Sequence
  Description of Artificial Sequence: Synthetic oligonucleotide
gcucgaaggcuuccaaugu

SEQ ID NO: 3067606 - RNA, 19 nt, Artificial Sequence
  Description of Artificial Sequence: Synthetic oligonucleotide
ccgcugacacaacuagaug

SEQ ID NO: 3067607 - RNA, 19 nt, Artificial Sequence
  Description of Artificial Sequence: Synthetic oligonucleotide
ugccauccccggaguucac

SEQ ID NO: 3067608 - RNA, 19 nt, Artificial Sequence
  Description of Artificial Sequence: Synthetic oligonucleotide
caccaucuccgcugacaca

SEQ ID NO: 3067609 - RNA, 19 nt, Artificial Sequence
  Description of Artificial Sequence: Synthetic oligonucleotide
ccuugagugugacacagau

SEQ ID NO: 3067610 - RNA, 19 nt, Artificial Sequence
  Description of Artificial Sequence: Synthetic oligonucleotide
cugucaguucagcaagcau

SEQ ID NO: 3067611 - RNA, 19 nt, Artificial Sequence
  Description of Artificial Sequence: Synthetic oligonucleotide
uggcgaccaggggagggau

SEQ ID NO: 3067612 - RNA, 19 nt, Artificial Sequence
  Description of Artificial Sequence: Synthetic oligonucleotide
guggcgaccaggggaggga

SEQ ID NO: 3067613 - RNA, 19 nt, Artificial Sequence
  Description of Artificial Sequence: Synthetic oligonucleotide
gcugcccugucaguucagc

SEQ ID NO: 3067614 - RNA, 19 nt, Artificial Sequence
  Description of Artificial Sequence: Synthetic oligonucleotide
cccuucugcagcugcccug

SEQ ID NO: 3067615 - RNA, 19 nt, Artificial Sequence
  Description of Artificial Sequence: Synthetic oligonucleotide
  modified_base (2)..(2): a, c, u, g, unknown or other
cnguggcgaccaggggagg

SEQ ID NO: 3067616 - RNA, 19 nt, Artificial Sequence
  Description of Artificial Sequence: Synthetic oligonucleotide
ggaggaccuugagugugac

SEQ ID NO: 3067617 - RNA, 19 nt, Artificial Sequence
  Description of Artificial Sequence: Synthetic oligonucleotide
ccucuucugcuggcuauag

SEQ ID NO: 3067618 - RNA, 19 nt, Artificial Sequence
  Description of Artificial Sequence: Synthetic oligonucleotide
ccaaugucuccuggaucag

SEQ ID NO: 3067619 - RNA, 19 nt, Artificial Sequence
  Description of Artificial Sequence: Synthetic oligonucleotide
gaccaggggagggaucccu

SEQ ID NO: 3067620 - RNA, 19 nt, Artificial Sequence
  Description of Artificial Sequence: Synthetic oligonucleotide
ccaggggagggaucccuuc

SEQ ID NO: 3067621 - RNA, 19 nt, Artificial Sequence
  Description of Artificial Sequence: Synthetic oligonucleotide
cucuucugcuggcuauagu

SEQ ID NO: 3067622 - RNA, 19 nt, Artificial Sequence
  Description of Artificial Sequence: Synthetic oligonucleotide
ccugucaguucagcaagca

SEQ ID NO: 3067623 - RNA, 19 nt, Artificial Sequence
  Description of Artificial Sequence: Synthetic oligonucleotide
cucccucuucugcuggcua

SEQ ID NO: 3067624 - RNA, 19 nt, Artificial Sequence
  Description of Artificial Sequence: Synthetic oligonucleotide
gcuggaggaccuugagugu

SEQ ID NO: 3067625 - RNA, 19 nt, Artificial Sequence
  Description of Artificial Sequence: Synthetic oligonucleotide
cccauaacgcucgaaggcu

SEQ ID NO: 3067626 - RNA, 19 nt, Artificial Sequence
  Description of Artificial Sequence: Synthetic oligonucleotide
ccaucuccgcugacacaac

SEQ ID NO: 3067627 - RNA, 19 nt, Artificial Sequence
  Description of Artificial Sequence: Synthetic oligonucleotide
accaggggagggaucccuu

SEQ ID NO: 3067628 - RNA, 19 nt, Artificial Sequence
  Description of Artificial Sequence: Synthetic oligonucleotide
ggaucaggucgccaauguu

SEQ ID NO: 3067629 - RNA, 19 nt, Artificial Sequence
  Description of Artificial Sequence: Synthetic oligonucleotide
cuccuggaucaggucgcca

SEQ ID NO: 3067630 - RNA, 19 nt, Artificial Sequence
  Description of Artificial Sequence: Synthetic oligonucleotide
ggcauccuccccucccaua

SEQ ID NO: 3067631 - RNA, 19 nt, Artificial Sequence
  Description of Artificial Sequence: Synthetic oligonucleotide
gggaucccuucugcagcug

SEQ ID NO: 3067632 - RNA, 19 nt, Artificial Sequence
  Description of Artificial Sequence: Synthetic oligonucleotide
caccagcgcuucgcccacc

SEQ ID NO: 3067633 - RNA, 19 nt, Artificial Sequence
  Description of Artificial Sequence: Synthetic oligonucleotide
gcaugacucauaggugggu

SEQ ID NO: 3067634 - RNA, 19 nt, Artificial Sequence
  Description of Artificial Sequence: Synthetic oligonucleotide
gccauccccggaguucaca

SEQ ID NO: 3067635 - RNA, 19 nt, Artificial Sequence
  Description of Artificial Sequence: Synthetic oligonucleotide
cuagaugcuggaggaccuu

SEQ ID NO: 3067636 - RNA, 19 nt, Artificial Sequence
  Description of Artificial Sequence: Synthetic oligonucleotide
cauccccggaguucacauu

SEQ ID NO: 3067637 - RNA, 19 nt, Artificial Sequence
  Description of Artificial Sequence: Synthetic oligonucleotide
ccauguacuugauguugau

SEQ ID NO: 3067638 - RNA, 19 nt, Artificial Sequence
  Description of Artificial Sequence: Synthetic oligonucleotide
ccauaacgcucgaaggcuu

SEQ ID NO: 3067639 - RNA, 19 nt, Artificial Sequence
  Description of Artificial Sequence: Synthetic oligonucleotide
ccuccccucccauaacgcu

SEQ ID NO: 3067640 - RNA, 19 nt, Artificial Sequence
  Description of Artificial Sequence: Synthetic oligonucleotide
ccauccccggaguucacau

SEQ ID NO: 3067641 - RNA, 19 nt, Artificial Sequence
  Description of Artificial Sequence: Synthetic oligonucleotide
cugcagcugcccugucagu

SEQ ID NO: 3067642 - RNA, 19 nt, Artificial Sequence
  Description of Artificial Sequence: Synthetic oligonucleotide
ccuucugcagcugcccugu

SEQ ID NO: 3067643 - RNA, 19 nt, Artificial Sequence
  Description of Artificial Sequence: Synthetic oligonucleotide
ggcgaccaggggagggauc

SEQ ID NO: 3067644 - RNA, 19 nt, Artificial Sequence
  Description of Artificial Sequence: Synthetic oligonucleotide
ggucgccaauguucucccu

SEQ ID NO: 3067645 - RNA, 19 nt, Artificial Sequence
  Description of Artificial Sequence: Synthetic oligonucleotide
gcgcuucgcccaccaucuc

SEQ ID NO: 3067646 - RNA, 19 nt, Artificial Sequence
  Description of Artificial Sequence: Synthetic oligonucleotide
gcccaccaucuccgcugac

SEQ ID NO: 3067647 - RNA, 19 nt, Artificial Sequence
  Description of Artificial Sequence: Synthetic oligonucleotide
cgaccaggggagggauccc

SEQ ID NO: 3067648 - RNA, 19 nt, Artificial Sequence
  Description of Artificial Sequence: Synthetic oligonucleotide
ccccggaguucacauucau

SEQ ID NO: 3067649 - RNA, 19 nt, Artificial Sequence
  Description of Artificial Sequence: Synthetic oligonucleotide
cccucccauaacgcucgaa

SEQ ID NO: 3067650 - RNA, 19 nt, Artificial Sequence
  Description of Artificial Sequence: Synthetic oligonucleotide
ccccucccauaacgcucga

SEQ ID NO: 3067651 - RNA, 19 nt, Artificial Sequence
  Description of Artificial Sequence: Synthetic oligonucleotide
cgaugccauccccggaguu

SEQ ID NO: 3067652 - RNA, 19 nt, Artificial Sequence
  Description of Artificial Sequence: Synthetic oligonucleotide
ccagcgcuucgcccaccau

SEQ ID NO: 3067653 - RNA, 19 nt, Artificial Sequence
  Description of Artificial Sequence: Synthetic oligonucleotide
cgccaauguucucccucuu

SEQ ID NO: 3067654 - RNA, 19 nt, Artificial Sequence
  Description of Artificial Sequence: Synthetic oligonucleotide
  modified_base (1)..(1): a, c, u, g, unknown or other
nguggcgaccaggggaggg

SEQ ID NO: 3067655 - RNA, 19 nt, Artificial Sequence
  Description of Artificial Sequence: Synthetic oligonucleotide
aaugcuggccucuugggcc

SEQ ID NO: 3067656 - RNA, 19 nt, Artificial Sequence
  Description of Artificial Sequence: Synthetic oligonucleotide
aagucuccuagcuacaggc

SEQ ID NO: 3067657 - RNA, 19 nt, Artificial Sequence
  Description of Artificial Sequence: Synthetic oligonucleotide
aauaaaagagaaguucuuc

SEQ ID NO: 3067658 - RNA, 19 nt, Artificial Sequence
  Description of Artificial Sequence: Synthetic oligonucleotide
aagagaaguucuucuaugg

SEQ ID NO: 3067659 - RNA, 19 nt, Artificial Sequence
  Description of Artificial Sequence: Synthetic oligonucleotide
ugaauaucuagcuuggcca

SEQ ID NO: 3067660 - RNA, 19 nt, Artificial Sequence
  Description of Artificial Sequence: Synthetic oligonucleotide
uauugaaugggcacugggg

SEQ ID NO: 3067661 - RNA, 19 nt, Artificial Sequence
  Description of Artificial Sequence: Synthetic oligonucleotide
auggaagucuccuagcuac

SEQ ID NO: 3067662 - RNA, 19 nt, Artificial Sequence
  Description of Artificial Sequence: Synthetic oligonucleotide
aaagagaaguucuucuaug

SEQ ID NO: 3067663 - RNA, 19 nt, Artificial Sequence
  Description of Artificial Sequence: Synthetic oligonucleotide
uucgccaggagaaugcugg

SEQ ID NO: 3067664 - RNA, 19 nt, Artificial Sequence
  Description of Artificial Sequence: Synthetic oligonucleotide
uggaucccaaauaaaagag

SEQ ID NO: 3067665 - RNA, 19 nt, Artificial Sequence
  Description of Artificial Sequence: Synthetic oligonucleotide
auaaaagagaaguucuucu

SEQ ID NO: 3067666 - RNA, 19 nt, Artificial Sequence
  Description of Artificial Sequence: Synthetic oligonucleotide
ucccaaauaaaagagaagu

SEQ ID NO: 3067667 - RNA, 19 nt, Artificial Sequence
  Description of Artificial Sequence: Synthetic oligonucleotide
uuauugaaugggcacuggg

SEQ ID NO: 3067668 - RNA, 19 nt, Artificial Sequence
  Description of Artificial Sequence: Synthetic oligonucleotide
ucuuggaucccaaauaaaa

SEQ ID NO: 3067669 - RNA, 19 nt, Artificial Sequence
  Description of Artificial Sequence: Synthetic oligonucleotide
uugaucagggugaauaucu

SEQ ID NO: 3067670 - RNA, 19 nt, Artificial Sequence
  Description of Artificial Sequence: Synthetic oligonucleotide
uuggaucccaaauaaaaga

SEQ ID NO: 3067671 - RNA, 19 nt, Artificial Sequence
  Description of Artificial Sequence: Synthetic oligonucleotide
aaaagagaaguucuucuau

SEQ ID NO: 3067672 - RNA, 19 nt, Artificial Sequence
  Description of Artificial Sequence: Synthetic oligonucleotide
accaaggcgucuuggaucc

SEQ ID NO: 3067673 - RNA, 19 nt, Artificial Sequence
  Description of Artificial Sequence: Synthetic oligonucleotide
agggugaauaucuagcuug

SEQ ID NO: 3067674 - RNA, 19 nt, Artificial Sequence
  Description of Artificial Sequence: Synthetic oligonucleotide
uguucuagcacuuccuugu

SEQ ID NO: 3067675 - RNA, 19 nt, Artificial Sequence
  Description of Artificial Sequence: Synthetic oligonucleotide
uuaucuggucccauguuug

SEQ ID NO: 3067676 - RNA, 19 nt, Artificial Sequence
  Description of Artificial Sequence: Synthetic oligonucleotide
uuuuaaucccggaugccug

SEQ ID NO: 3067677 - RNA, 19 nt, Artificial Sequence
  Description of Artificial Sequence: Synthetic oligonucleotide
uaacacuuguucuagcacu

SEQ ID NO: 3067678 - RNA, 19 nt, Artificial Sequence
  Description of Artificial Sequence: Synthetic oligonucleotide
gagaaugcuggccucuugg

SEQ ID NO: 3067679 - RNA, 19 nt, Artificial Sequence
  Description of Artificial Sequence: Synthetic oligonucleotide
ucugugaggacuaccgagc

SEQ ID NO: 3067680 - RNA, 19 nt, Artificial Sequence
  Description of Artificial Sequence: Synthetic oligonucleotide
uggaggaagaucugugagg

SEQ ID NO: 3067681 - RNA, 19 nt, Artificial Sequence
  Description of Artificial Sequence: Synthetic oligonucleotide
gugaauaucuagcuuggcc

SEQ ID NO: 3067682 - RNA, 19 nt, Artificial Sequence
  Description of Artificial Sequence: Synthetic oligonucleotide
cacaguuuauugaaugggc

SEQ ID NO: 3067683 - RNA, 19 nt, Artificial Sequence
  Description of Artificial Sequence: Synthetic oligonucleotide
uguuugaucagggugaaua

SEQ ID NO: 3067684 - RNA, 19 nt, Artificial Sequence
  Description of Artificial Sequence: Synthetic oligonucleotide
aggccuagagccccgaugg

SEQ ID NO: 3067685 - RNA, 19 nt, Artificial Sequence
  Description of Artificial Sequence: Synthetic oligonucleotide
aagaucugugaggacuacc

SEQ ID NO: 3067686 - RNA, 19 nt, Artificial Sequence
  Description of Artificial Sequence: Synthetic oligonucleotide
aucugugaggacuaccgag

SEQ ID NO: 3067687 - RNA, 19 nt, Artificial Sequence
  Description of Artificial Sequence: Synthetic oligonucleotide
gaucagggugaauaucuag

SEQ ID NO: 3067688 - RNA, 19 nt, Artificial Sequence
  Description of Artificial Sequence: Synthetic oligonucleotide
ucuccuagcuacaggcagg

SEQ ID NO: 3067689 - RNA, 19 nt, Artificial Sequence
  Description of Artificial Sequence: Synthetic oligonucleotide
agaucugugaggacuaccg

SEQ ID NO: 3067690 - RNA, 19 nt, Artificial Sequence
  Description of Artificial Sequence: Synthetic oligonucleotide
ccugcugggauuuuaaucc

SEQ ID NO: 3067691 - RNA, 19 nt, Artificial Sequence
  Description of Artificial Sequence: Synthetic oligonucleotide
uaaaagagaaguucuucua

SEQ ID NO: 3067692 - RNA, 19 nt, Artificial Sequence
  Description of Artificial Sequence: Synthetic oligonucleotide
agugccuaacacuuguucu

SEQ ID NO: 3067693 - RNA, 19 nt, Artificial Sequence
  Description of Artificial Sequence: Synthetic oligonucleotide
ucagggugaauaucuagcu

SEQ ID NO: 3067694 - RNA, 19 nt, Artificial Sequence
  Description of Artificial Sequence: Synthetic oligonucleotide
caaauaaaagagaaguucu

SEQ ID NO: 3067695 - RNA, 19 nt, Artificial Sequence
  Description of Artificial Sequence: Synthetic oligonucleotide
gaauaucuagcuuggccac

SEQ ID NO: 3067696 - RNA, 19 nt, Artificial Sequence
  Description of Artificial Sequence: Synthetic oligonucleotide
agcacuuccuuguguuugc

SEQ ID NO: 3067697 - RNA, 19 nt, Artificial Sequence
  Description of Artificial Sequence: Synthetic oligonucleotide
gaucccaaauaaaagagaa

SEQ ID NO: 3067698 - RNA, 19 nt, Artificial Sequence
  Description of Artificial Sequence: Synthetic oligonucleotide
gaagucuccuagcuacagg

SEQ ID NO: 3067699 - RNA, 19 nt, Artificial Sequence
  Description of Artificial Sequence: Synthetic oligonucleotide
uuuaaucccggaugccugc

SEQ ID NO: 3067700 - RNA, 19 nt, Artificial Sequence
  Description of Artificial Sequence: Synthetic oligonucleotide
ggauuuuaaucccggaugc

SEQ ID NO: 3067701 - RNA, 19 nt, Artificial Sequence
  Description of Artificial Sequence: Synthetic oligonucleotide
uacaggcaggaauuugggg

SEQ ID NO: 3067702 - RNA, 19 nt, Artificial Sequence
  Description of Artificial Sequence: Synthetic oligonucleotide
caguuuauugaaugggcac

SEQ ID NO: 3067703 - RNA, 19 nt, Artificial Sequence
  Description of Artificial Sequence: Synthetic oligonucleotide
aggacuaccgagcccuucg

SEQ ID NO: 3067704 - RNA, 19 nt, Artificial Sequence
  Description of Artificial Sequence: Synthetic oligonucleotide
ugcugggauuuuaaucccg

SEQ ID NO: 3067705 - RNA, 19 nt, Artificial Sequence
  Description of Artificial Sequence: Synthetic oligonucleotide
auuuuaaucccggaugccu

SEQ ID NO: 3067706 - RNA, 19 nt, Artificial Sequence
  Description of Artificial Sequence: Synthetic oligonucleotide
uuuauugaaugggcacugg

SEQ ID NO: 3067707 - RNA, 19 nt, Artificial Sequence
  Description of Artificial Sequence: Synthetic oligonucleotide
gggauuuuaaucccggaug

SEQ ID NO: 3067708 - RNA, 19 nt, Artificial Sequence
  Description of Artificial Sequence: Synthetic oligonucleotide
agaaugcuggccucuuggg

SEQ ID NO: 3067709 - RNA, 19 nt, Artificial Sequence
  Description of Artificial Sequence: Synthetic oligonucleotide
ugggauuuuaaucccggau

SEQ ID NO: 3067710 - RNA, 19 nt, Artificial Sequence
  Description of Artificial Sequence: Synthetic oligonucleotide
aguuuauugaaugggcacu

SEQ ID NO: 3067711 - RNA, 19 nt, Artificial Sequence
  Description of Artificial Sequence: Synthetic oligonucleotide
uuguucuagcacuuccuug

SEQ ID NO: 3067712 - RNA, 19 nt, Artificial Sequence
  Description of Artificial Sequence: Synthetic oligonucleotide
cuaacacuuguucuagcac

SEQ ID NO: 3067713 - RNA, 19 nt, Artificial Sequence
  Description of Artificial Sequence: Synthetic oligonucleotide
aggaagaucugugaggacu

SEQ ID NO: 3067714 - RNA, 19 nt, Artificial Sequence
  Description of Artificial Sequence: Synthetic oligonucleotide
ugcuuaucuggucccaugu

SEQ ID NO: 3067715 - RNA, 19 nt, Artificial Sequence
  Description of Artificial Sequence: Synthetic oligonucleotide
cuacaggcaggaauuuggg

SEQ ID NO: 3067716 - RNA, 19 nt, Artificial Sequence
  Description of Artificial Sequence: Synthetic oligonucleotide
ugagcgaaccuggaggaag

SEQ ID NO: 3067717 - RNA, 19 nt, Artificial Sequence
  Description of Artificial Sequence: Synthetic oligonucleotide
aaauaaaagagaaguucuu

SEQ ID NO: 3067718 - RNA, 19 nt, Artificial Sequence
  Description of Artificial Sequence: Synthetic oligonucleotide
ucuagcacuuccuuguguu

SEQ ID NO: 3067719 - RNA, 19 nt, Artificial Sequence
  Description of Artificial Sequence: Synthetic oligonucleotide
guccgggaggccuagagcc

SEQ ID NO: 3067720 - RNA, 19 nt, Artificial Sequence
  Description of Artificial Sequence: Synthetic oligonucleotide
ucuagcuuggccacaguuu

SEQ ID NO: 3067721 - RNA, 19 nt, Artificial Sequence
  Description of Artificial Sequence: Synthetic oligonucleotide
gaaugcuggccucuugggc

SEQ ID NO: 3067722 - RNA, 19 nt, Artificial Sequence
  Description of Artificial Sequence: Synthetic oligonucleotide
ccaaauaaaagagaaguuc

SEQ ID NO: 3067723 - RNA, 19 nt, Artificial Sequence
  Description of Artificial Sequence: Synthetic oligonucleotide
cuggaggaagaucugugag

SEQ ID NO: 3067724 - RNA, 19 nt, Artificial Sequence
  Description of Artificial Sequence: Synthetic oligonucleotide
gucuccuagcuacaggcag

SEQ ID NO: 3067725 - RNA, 19 nt, Artificial Sequence
  Description of Artificial Sequence: Synthetic oligonucleotide
uccugcugggauuuuaauc

SEQ ID NO: 3067726 - RNA, 19 nt, Artificial Sequence
  Description of Artificial Sequence: Synthetic oligonucleotide
guuuauugaaugggcacug

SEQ ID NO: 3067727 - RNA, 19 nt, Artificial Sequence
  Description of Artificial Sequence: Synthetic oligonucleotide
gauuuuaaucccggaugcc

SEQ ID NO: 3067728 - RNA, 19 nt, Artificial Sequence
  Description of Artificial Sequence: Synthetic oligonucleotide
acuaccgagcccuucgcca

SEQ ID NO: 3067729 - RNA, 19 nt, Artificial Sequence
  Description of Artificial Sequence: Synthetic oligonucleotide
gguugcuggagacagugcc

SEQ ID NO: 3067730 - RNA, 19 nt, Artificial Sequence
  Description of Artificial Sequence: Synthetic oligonucleotide
uugaaugggcacuggggac

SEQ ID NO: 3067731 - RNA, 19 nt, Artificial Sequence
  Description of Artificial Sequence: Synthetic oligonucleotide
ucuggucccauguuugauc

SEQ ID NO: 3067732 - RNA, 19 nt, Artificial Sequence
  Description of Artificial Sequence: Synthetic oligonucleotide
gccacaguuuauugaaugg

SEQ ID NO: 3067733 - RNA, 19 nt, Artificial Sequence
  Description of Artificial Sequence: Synthetic oligonucleotide
ugugaggacuaccgagccc

SEQ ID NO: 3067734 - RNA, 19 nt, Artificial Sequence
  Description of Artificial Sequence: Synthetic oligonucleotide
gaccaaggcgucuuggauc

SEQ ID NO: 3067735 - RNA, 19 nt, Artificial Sequence
  Description of Artificial Sequence: Synthetic oligonucleotide
ggcacuggggaccaaggcg

SEQ ID NO: 3067736 - RNA, 19 nt, Artificial Sequence
  Description of Artificial Sequence: Synthetic oligonucleotide
acaguuuauugaaugggca

SEQ ID NO: 3067737 - RNA, 19 nt, Artificial Sequence
  Description of Artificial Sequence: Synthetic oligonucleotide
auaucuagcuuggccacag

SEQ ID NO: 3067738 - RNA, 19 nt, Artificial Sequence
  Description of Artificial Sequence: Synthetic oligonucleotide
uuugaucagggugaauauc

SEQ ID NO: 3067739 - RNA, 19 nt, Artificial Sequence
  Description of Artificial Sequence: Synthetic oligonucleotide
gcuacaggcaggaauuugg

SEQ ID NO: 3067740 - RNA, 19 nt, Artificial Sequence
  Description of Artificial Sequence: Synthetic oligonucleotide
uauccugcugggauuuuaa

SEQ ID NO: 3067741 - RNA, 19 nt, Artificial Sequence
  Description of Artificial Sequence: Synthetic oligonucleotide
ugccuaacacuuguucuag

SEQ ID NO: 3067742 - RNA, 19 nt, Artificial Sequence
  Description of Artificial Sequence: Synthetic oligonucleotide
uagcacuuccuuguguuug

SEQ ID NO: 3067743 - RNA, 19 nt, Artificial Sequence
  Description of Artificial Sequence: Synthetic oligonucleotide
aauaucuagcuuggccaca

SEQ ID NO: 3067744 - RNA, 19 nt, Artificial Sequence
  Description of Artificial Sequence: Synthetic oligonucleotide
uggagacagugccuaacac

SEQ ID NO: 3067745 - RNA, 19 nt, Artificial Sequence
  Description of Artificial Sequence: Synthetic oligonucleotide
uucuagcacuuccuugugu

SEQ ID NO: 3067746 - RNA, 19 nt, Artificial Sequence
  Description of Artificial Sequence: Synthetic oligonucleotide
uaucuggucccauguuuga

SEQ ID NO: 3067747 - RNA, 19 nt, Artificial Sequence
  Description of Artificial Sequence: Synthetic oligonucleotide
aaucccggaugccugcuua

SEQ ID NO: 3067748 - RNA, 19 nt, Artificial Sequence
  Description of Artificial Sequence: Synthetic oligonucleotide
cugugaggacuaccgagcc

SEQ ID NO: 3067749 - RNA, 19 nt, Artificial Sequence
  Description of Artificial Sequence: Synthetic oligonucleotide
gaggccuagagccccgaug

SEQ ID NO: 3067750 - RNA, 19 nt, Artificial Sequence
  Description of Artificial Sequence: Synthetic oligonucleotide
aucccaaauaaaagagaag

SEQ ID NO: 3067751 - RNA, 19 nt, Artificial Sequence
  Description of Artificial Sequence: Synthetic oligonucleotide
cugcugggauuuuaauccc

SEQ ID NO: 3067752 - RNA, 19 nt, Artificial Sequence
  Description of Artificial Sequence: Synthetic oligonucleotide
augcuggccucuugggccg

SEQ ID NO: 3067753 - RNA, 19 nt, Artificial Sequence
  Description of Artificial Sequence: Synthetic oligonucleotide
cuaccgagcccuucgccag

SEQ ID NO: 3067754 - RNA, 19 nt, Artificial Sequence
  Description of Artificial Sequence: Synthetic oligonucleotide
ggccacaguuuauugaaug

SEQ ID NO: 3067755 - RNA, 19 nt, Artificial Sequence
  Description of Artificial Sequence: Synthetic oligonucleotide
ugaucagggugaauaucua

SEQ ID NO: 3067756 - RNA, 19 nt, Artificial Sequence
  Description of Artificial Sequence: Synthetic oligonucleotide
gaugccugcuuaucugguc

SEQ ID NO: 3067757 - RNA, 19 nt, Artificial Sequence
  Description of Artificial Sequence: Synthetic oligonucleotide
uggaagucuccuagcuaca

SEQ ID NO: 3067758 - RNA, 19 nt, Artificial Sequence
  Description of Artificial Sequence: Synthetic oligonucleotide
ggucccauguuugaucagg

SEQ ID NO: 3067759 - RNA, 19 nt, Artificial Sequence
  Description of Artificial Sequence: Synthetic oligonucleotide
cccauguuugaucagggug

SEQ ID NO: 3067760 - RNA, 19 nt, Artificial Sequence
  Description of Artificial Sequence: Synthetic oligonucleotide
gauggaagucuccuagcua

SEQ ID NO: 3067761 - RNA, 19 nt, Artificial Sequence
  Description of Artificial Sequence: Synthetic oligonucleotide
gacagugccuaacacuugu

SEQ ID NO: 3067762 - RNA, 19 nt, Artificial Sequence
  Description of Artificial Sequence: Synthetic oligonucleotide
gacuaccgagcccuucgcc

SEQ ID NO: 3067763 - RNA, 19 nt, Artificial Sequence
  Description of Artificial Sequence: Synthetic oligonucleotide
gaucugugaggacuaccga

SEQ ID NO: 3067764 - RNA, 19 nt, Artificial Sequence
  Description of Artificial Sequence: Synthetic oligonucleotide
cuggucccauguuugauca

SEQ ID NO: 3067765 - RNA, 19 nt, Artificial Sequence
  Description of Artificial Sequence: Synthetic oligonucleotide
aacacuuguucuagcacuu

SEQ ID NO: 3067766 - RNA, 19 nt, Artificial Sequence
  Description of Artificial Sequence: Synthetic oligonucleotide
cacuuccuuguguuugccc

SEQ ID NO: 3067767 - RNA, 19 nt, Artificial Sequence
  Description of Artificial Sequence: Synthetic oligonucleotide
cagugccuaacacuuguuc

SEQ ID NO: 3067768 - RNA, 19 nt, Artificial Sequence
  Description of Artificial Sequence: Synthetic oligonucleotide
cuagcuuggccacaguuua

SEQ ID NO: 3067769 - RNA, 19 nt, Artificial Sequence
  Description of Artificial Sequence: Synthetic oligonucleotide
ccacaguuuauugaauggg

SEQ ID NO: 3067770 - RNA, 19 nt, Artificial Sequence
  Description of Artificial Sequence: Synthetic oligonucleotide
gucccauguuugaucaggg

SEQ ID NO: 3067771 - RNA, 19 nt, Artificial Sequence
  Description of Artificial Sequence: Synthetic oligonucleotide
ccauguuugaucaggguga

SEQ ID NO: 3067772 - RNA, 19 nt, Artificial Sequence
  Description of Artificial Sequence: Synthetic oligonucleotide
ucccauguuugaucagggu

SEQ ID NO: 3067773 - RNA, 19 nt, Artificial Sequence
  Description of Artificial Sequence: Synthetic oligonucleotide
gggugaauaucuagcuugg

SEQ ID NO: 3067774 - RNA, 19 nt, Artificial Sequence
  Description of Artificial Sequence: Synthetic oligonucleotide
gagacagugccuaacacuu

SEQ ID NO: 3067775 - RNA, 19 nt, Artificial Sequence
  Description of Artificial Sequence: Synthetic oligonucleotide
cuagcuacaggcaggaauu

SEQ ID NO: 3067776 - RNA, 19 nt, Artificial Sequence
  Description of Artificial Sequence: Synthetic oligonucleotide
ccuagagccccgauggaag

SEQ ID NO: 3067777 - RNA, 19 nt, Artificial Sequence
  Description of Artificial Sequence: Synthetic oligonucleotide
cugcuuaucuggucccaug

SEQ ID NO: 3067778 - RNA, 19 nt, Artificial Sequence
  Description of Artificial Sequence: Synthetic oligonucleotide
uaccgagcccuucgccagg

SEQ ID NO: 3067779 - RNA, 19 nt, Artificial Sequence
  Description of Artificial Sequence: Synthetic oligonucleotide
uccgggaggccuagagccc

SEQ ID NO: 3067780 - RNA, 19 nt, Artificial Sequence
  Description of Artificial Sequence: Synthetic oligonucleotide
cuggagacagugccuaaca

SEQ ID NO: 3067781 - RNA, 19 nt, Artificial Sequence
  Description of Artificial Sequence: Synthetic oligonucleotide
agcuacaggcaggaauuug

SEQ ID NO: 3067782 - RNA, 19 nt, Artificial Sequence
  Description of Artificial Sequence: Synthetic oligonucleotide
gugccuaacacuuguucua

SEQ ID NO: 3067783 - RNA, 19 nt, Artificial Sequence
  Description of Artificial Sequence: Synthetic oligonucleotide
gaggaagaucugugaggac

SEQ ID NO: 3067784 - RNA, 19 nt, Artificial Sequence
  Description of Artificial Sequence: Synthetic oligonucleotide
ucuugggccggguccggga

SEQ ID NO: 3067785 - RNA, 19 nt, Artificial Sequence
  Description of Artificial Sequence: Synthetic oligonucleotide
ccuaacacuuguucuagca

SEQ ID NO: 3067786 - RNA, 19 nt, Artificial Sequence
  Description of Artificial Sequence: Synthetic oligonucleotide
uuaaucccggaugccugcu

SEQ ID NO: 3067787 - RNA, 19 nt, Artificial Sequence
  Description of Artificial Sequence: Synthetic oligonucleotide
cccgauggaagucuccuag

SEQ ID NO: 3067788 - RNA, 19 nt, Artificial Sequence
  Description of Artificial Sequence: Synthetic oligonucleotide
agagccccgauggaagucu

SEQ ID NO: 3067789 - RNA, 19 nt, Artificial Sequence
  Description of Artificial Sequence: Synthetic oligonucleotide
uuauccugcugggauuuua

SEQ ID NO: 3067790 - RNA, 19 nt, Artificial Sequence
  Description of Artificial Sequence: Synthetic oligonucleotide
guuugaucagggugaauau

SEQ ID NO: 3067791 - RNA, 19 nt, Artificial Sequence
  Description of Artificial Sequence: Synthetic oligonucleotide
accuggaggaagaucugug

SEQ ID NO: 3067792 - RNA, 19 nt, Artificial Sequence
  Description of Artificial Sequence: Synthetic oligonucleotide
uugcuggagacagugccua

SEQ ID NO: 3067793 - RNA, 19 nt, Artificial Sequence
  Description of Artificial Sequence: Synthetic oligonucleotide
gaagaucugugaggacuac

SEQ ID NO: 3067794 - RNA, 19 nt, Artificial Sequence
  Description of Artificial Sequence: Synthetic oligonucleotide
uaucuagcuuggccacagu

SEQ ID NO: 3067795 - RNA, 19 nt, Artificial Sequence
  Description of Artificial Sequence: Synthetic oligonucleotide
gaaccuggaggaagaucug

SEQ ID NO: 3067796 - RNA, 19 nt, Artificial Sequence
  Description of Artificial Sequence: Synthetic oligonucleotide
gagcccuucgccaggagaa

SEQ ID NO: 3067797 - RNA, 19 nt, Artificial Sequence
  Description of Artificial Sequence: Synthetic oligonucleotide
gugaggacuaccgagcccu

SEQ ID NO: 3067798 - RNA, 19 nt, Artificial Sequence
  Description of Artificial Sequence: Synthetic oligonucleotide
cuugggccggguccgggag

SEQ ID NO: 3067799 - RNA, 19 nt, Artificial Sequence
  Description of Artificial Sequence: Synthetic oligonucleotide
ggaagucuccuagcuacag

SEQ ID NO: 3067800 - RNA, 19 nt, Artificial Sequence
  Description of Artificial Sequence: Synthetic oligonucleotide
uggucccauguuugaucag

SEQ ID NO: 3067801 - RNA, 19 nt, Artificial Sequence
  Description of Artificial Sequence: Synthetic oligonucleotide
uggccacaguuuauugaau

SEQ ID NO: 3067802 - RNA, 19 nt, Artificial Sequence
  Description of Artificial Sequence: Synthetic oligonucleotide
ggagacagugccuaacacu

SEQ ID NO: 3067803 - RNA, 19 nt, Artificial Sequence
  Description of Artificial Sequence: Synthetic oligonucleotide
ggaucccaaauaaaagaga

SEQ ID NO: 3067804 - RNA, 19 nt, Artificial Sequence
  Description of Artificial Sequence: Synthetic oligonucleotide
cuuaucuggucccauguuu

SEQ ID NO: 3067805 - RNA, 19 nt, Artificial Sequence
  Description of Artificial Sequence: Synthetic oligonucleotide
gggguugcuggagacagug

SEQ ID NO: 3067806 - RNA, 19 nt, Artificial Sequence
  Description of Artificial Sequence: Synthetic oligonucleotide
augggcacuggggaccaag

SEQ ID NO: 3067807 - RNA, 19 nt, Artificial Sequence
  Description of Artificial Sequence: Synthetic oligonucleotide
auccugcugggauuuuaau

SEQ ID NO: 3067808 - RNA, 19 nt, Artificial Sequence
  Description of Artificial Sequence: Synthetic oligonucleotide
gcuuggccacaguuuauug

SEQ ID NO: 3067809 - RNA, 19 nt, Artificial Sequence
  Description of Artificial Sequence: Synthetic oligonucleotide
uggggaccaaggcgucuug

SEQ ID NO: 3067810 - RNA, 19 nt, Artificial Sequence
  Description of Artificial Sequence: Synthetic oligonucleotide
uagcuuggccacaguuuau

SEQ ID NO: 3067811 - RNA, 19 nt, Artificial Sequence
  Description of Artificial Sequence: Synthetic oligonucleotide
cugggauuuuaaucccgga

SEQ ID NO: 3067812 - RNA, 19 nt, Artificial Sequence
  Description of Artificial Sequence: Synthetic oligonucleotide
gagcgaaccuggaggaaga

SEQ ID NO: 3067813 - RNA, 19 nt, Artificial Sequence
  Description of Artificial Sequence: Synthetic oligonucleotide
gaaugggcacuggggacca

SEQ ID NO: 3067814 - RNA, 19 nt, Artificial Sequence
  Description of Artificial Sequence: Synthetic oligonucleotide
uaaucccggaugccugcuu

SEQ ID NO: 3067815 - RNA, 19 nt, Artificial Sequence
  Description of Artificial Sequence: Synthetic oligonucleotide
agcuuggccacaguuuauu

SEQ ID NO: 3067816 - RNA, 19 nt, Artificial Sequence
  Description of Artificial Sequence: Synthetic oligonucleotide
cccuucgccaggagaaugc

SEQ ID NO: 3067817 - RNA, 19 nt, Artificial Sequence
  Description of Artificial Sequence: Synthetic oligonucleotide
agucuccuagcuacaggca

SEQ ID NO: 3067818 - RNA, 19 nt, Artificial Sequence
  Description of Artificial Sequence: Synthetic oligonucleotide
ggugaauaucuagcuuggc

SEQ ID NO: 3067819 - RNA, 19 nt, Artificial Sequence
  Description of Artificial Sequence: Synthetic oligonucleotide
gguccgggaggccuagagc

SEQ ID NO: 3067820 - RNA, 19 nt, Artificial Sequence
  Description of Artificial Sequence: Synthetic oligonucleotide
cgaaccuggaggaagaucu

SEQ ID NO: 3067821 - RNA, 19 nt, Artificial Sequence
  Description of Artificial Sequence: Synthetic oligonucleotide
ggccucuugggccgggucc

SEQ ID NO: 3067822 - RNA, 19 nt, Artificial Sequence
  Description of Artificial Sequence: Synthetic oligonucleotide
ggagaaugcuggccucuug

SEQ ID NO: 3067823 - RNA, 19 nt, Artificial Sequence
  Description of Artificial Sequence: Synthetic oligonucleotide
agccccgauggaagucucc

SEQ ID NO: 3067824 - RNA, 19 nt, Artificial Sequence
  Description of Artificial Sequence: Synthetic oligonucleotide
agacagugccuaacacuug

SEQ ID NO: 3067825 - RNA, 19 nt, Artificial Sequence
  Description of Artificial Sequence: Synthetic oligonucleotide
ugcuggagacagugccuaa

SEQ ID NO: 3067826 - RNA, 19 nt, Artificial Sequence
  Description of Artificial Sequence: Synthetic oligonucleotide
uagagccccgauggaaguc

SEQ ID NO: 3067827 - RNA, 19 nt, Artificial Sequence
  Description of Artificial Sequence: Synthetic oligonucleotide
cggaugccugcuuaucugg

SEQ ID NO: 3067828 - RNA, 19 nt, Artificial Sequence
  Description of Artificial Sequence: Synthetic oligonucleotide
ccgauggaagucuccuagc

SEQ ID NO: 3067829 - RNA, 19 nt, Artificial Sequence
  Description of Artificial Sequence: Synthetic oligonucleotide
ggguccgggaggccuagag

SEQ ID NO: 3067830 - RNA, 19 nt, Artificial Sequence
  Description of Artificial Sequence: Synthetic oligonucleotide
aucuggucccauguuugau

SEQ ID NO: 3067831 - RNA, 19 nt, Artificial Sequence
  Description of Artificial Sequence: Synthetic oligonucleotide
cauguuugaucagggugaa

SEQ ID NO: 3067832 - RNA, 19 nt, Artificial Sequence
  Description of Artificial Sequence: Synthetic oligonucleotide
cuuguucuagcacuuccuu

SEQ ID NO: 3067833 - RNA, 19 nt, Artificial Sequence
  Description of Artificial Sequence: Synthetic oligonucleotide
gucuuggaucccaaauaaa

SEQ ID NO: 3067834 - RNA, 19 nt, Artificial Sequence
  Description of Artificial Sequence: Synthetic oligonucleotide
aucccggaugccugcuuau

SEQ ID NO: 3067835 - RNA, 19 nt, Artificial Sequence
  Description of Artificial Sequence: Synthetic oligonucleotide
gccuaacacuuguucuagc

SEQ ID NO: 3067836 - RNA, 19 nt, Artificial Sequence
  Description of Artificial Sequence: Synthetic oligonucleotide
ccggaugccugcuuaucug

SEQ ID NO: 3067837 - RNA, 19 nt, Artificial Sequence
  Description of Artificial Sequence: Synthetic oligonucleotide
gggaccaaggcgucuugga

SEQ ID NO: 3067838 - RNA, 19 nt, Artificial Sequence
  Description of Artificial Sequence: Synthetic oligonucleotide
aaggcgucuuggaucccaa

SEQ ID NO: 3067839 - RNA, 19 nt, Artificial Sequence
  Description of Artificial Sequence: Synthetic oligonucleotide
ggacuaccgagcccuucgc

SEQ ID NO: 3067840 - RNA, 19 nt, Artificial Sequence
  Description of Artificial Sequence: Synthetic oligonucleotide
gcgucuuggaucccaaaua

SEQ ID NO: 3067841 - RNA, 19 nt, Artificial Sequence
  Description of Artificial Sequence: Synthetic oligonucleotide
cuccuagcuacaggcagga

SEQ ID NO: 3067842 - RNA, 19 nt, Artificial Sequence
  Description of Artificial Sequence: Synthetic oligonucleotide
gggcacuggggaccaaggc

SEQ ID NO: 3067843 - RNA, 19 nt, Artificial Sequence
  Description of Artificial Sequence: Synthetic oligonucleotide
caaggcgucuuggauccca

SEQ ID NO: 3067844 - RNA, 19 nt, Artificial Sequence
  Description of Artificial Sequence: Synthetic oligonucleotide
ggaagaucugugaggacua

SEQ ID NO: 3067845 - RNA, 19 nt, Artificial Sequence
  Description of Artificial Sequence: Synthetic oligonucleotide
uggccucuugggccggguc

SEQ ID NO: 3067846 - RNA, 19 nt, Artificial Sequence
  Description of Artificial Sequence: Synthetic oligonucleotide
gaggacuaccgagcccuuc

SEQ ID NO: 3067847 - RNA, 19 nt, Artificial Sequence
  Description of Artificial Sequence: Synthetic oligonucleotide
ugaggacuaccgagcccuu

SEQ ID NO: 3067848 - RNA, 19 nt, Artificial Sequence
  Description of Artificial Sequence: Synthetic oligonucleotide
guugcuggagacagugccu

SEQ ID NO: 3067849 - RNA, 19 nt, Artificial Sequence
  Description of Artificial Sequence: Synthetic oligonucleotide
acuggggaccaaggcgucu

SEQ ID NO: 3067850 - RNA, 19 nt, Artificial Sequence
  Description of Artificial Sequence: Synthetic oligonucleotide
cacuggggaccaaggcguc

SEQ ID NO: 3067851 - RNA, 19 nt, Artificial Sequence
  Description of Artificial Sequence: Synthetic oligonucleotide
gccucuugggccggguccg

SEQ ID NO: 3067852 - RNA, 19 nt, Artificial Sequence
  Description of Artificial Sequence: Synthetic oligonucleotide
ucccggaugccugcuuauc

SEQ ID NO: 3067853 - RNA, 19 nt, Artificial Sequence
  Description of Artificial Sequence: Synthetic oligonucleotide
cucuugggccggguccggg

SEQ ID NO: 3067854 - RNA, 19 nt, Artificial Sequence
  Description of Artificial Sequence: Synthetic oligonucleotide
cuuuauccugcugggauuu

SEQ ID NO: 3067855 - RNA, 19 nt, Artificial Sequence
  Description of Artificial Sequence: Synthetic oligonucleotide
cgucuuggaucccaaauaa

SEQ ID NO: 3067856 - RNA, 19 nt, Artificial Sequence
  Description of Artificial Sequence: Synthetic oligonucleotide
ccuagcuacaggcaggaau

SEQ ID NO: 3067857 - RNA, 19 nt, Artificial Sequence
  Description of Artificial Sequence: Synthetic oligonucleotide
ggcgucuuggaucccaaau

SEQ ID NO: 3067858 - RNA, 19 nt, Artificial Sequence
  Description of Artificial Sequence: Synthetic oligonucleotide
aggagaaugcuggccucuu

SEQ ID NO: 3067859 - RNA, 19 nt, Artificial Sequence
  Description of Artificial Sequence: Synthetic oligonucleotide
ugcuggccucuugggccgg

SEQ ID NO: 3067860 - RNA, 19 nt, Artificial Sequence
  Description of Artificial Sequence: Synthetic oligonucleotide
aggcgucuuggaucccaaa

SEQ ID NO: 3067861 - RNA, 19 nt, Artificial Sequence
  Description of Artificial Sequence: Synthetic oligonucleotide
agcgaaccuggaggaagau

SEQ ID NO: 3067862 - RNA, 19 nt, Artificial Sequence
  Description of Artificial Sequence: Synthetic oligonucleotide
acagugccuaacacuuguu

SEQ ID NO: 3067863 - RNA, 19 nt, Artificial Sequence
  Description of Artificial Sequence: Synthetic oligonucleotide
auguuugaucagggugaau

SEQ ID NO: 3067864 - RNA, 19 nt, Artificial Sequence
  Description of Artificial Sequence: Synthetic oligonucleotide
cccaaauaaaagagaaguu

SEQ ID NO: 3067865 - RNA, 19 nt, Artificial Sequence
  Description of Artificial Sequence: Synthetic oligonucleotide
accgagcccuucgccagga

SEQ ID NO: 3067866 - RNA, 19 nt, Artificial Sequence
  Description of Artificial Sequence: Synthetic oligonucleotide
uccuagcuacaggcaggaa

SEQ ID NO: 3067867 - RNA, 19 nt, Artificial Sequence
  Description of Artificial Sequence: Synthetic oligonucleotide
cagggugaauaucuagcuu

SEQ ID NO: 3067868 - RNA, 19 nt, Artificial Sequence
  Description of Artificial Sequence: Synthetic oligonucleotide
cuagcacuuccuuguguuu

SEQ ID NO: 3067869 - RNA, 19 nt, Artificial Sequence
  Description of Artificial Sequence: Synthetic oligonucleotide
ggaccaaggcgucuuggau

SEQ ID NO: 3067870 - RNA, 19 nt, Artificial Sequence
  Description of Artificial Sequence: Synthetic oligonucleotide
ggguugcuggagacagugc

SEQ ID NO: 3067871 - RNA, 19 nt, Artificial Sequence
  Description of Artificial Sequence: Synthetic oligonucleotide
gcacuuccuuguguuugcc

SEQ ID NO: 3067872 - RNA, 19 nt, Artificial Sequence
  Description of Artificial Sequence: Synthetic oligonucleotide
aaugggcacuggggaccaa

SEQ ID NO: 3067873 - RNA, 19 nt, Artificial Sequence
  Description of Artificial Sequence: Synthetic oligonucleotide
gagccccgauggaagucuc

SEQ ID NO: 3067874 - RNA, 19 nt, Artificial Sequence
  Description of Artificial Sequence: Synthetic oligonucleotide
gcccuucgccaggagaaug

SEQ ID NO: 3067875 - RNA, 19 nt, Artificial Sequence
  Description of Artificial Sequence: Synthetic oligonucleotide
agcccuucgccaggagaau

SEQ ID NO: 3067876 - RNA, 19 nt, Artificial Sequence
  Description of Artificial Sequence: Synthetic oligonucleotide
gcgaaccuggaggaagauc

SEQ ID NO: 3067877 - RNA, 19 nt, Artificial Sequence
  Description of Artificial Sequence: Synthetic oligonucleotide
gccuagagccccgauggaa

SEQ ID NO: 3067878 - RNA, 19 nt, Artificial Sequence
  Description of Artificial Sequence: Synthetic oligonucleotide
cccuuuauccugcugggau

SEQ ID NO: 3067879 - RNA, 19 nt, Artificial Sequence
  Description of Artificial Sequence: Synthetic oligonucleotide
ccgggaggccuagagcccc

SEQ ID NO: 3067880 - RNA, 19 nt, Artificial Sequence
  Description of Artificial Sequence: Synthetic oligonucleotide
caggagaaugcuggccucu

SEQ ID NO: 3067881 - RNA, 19 nt, Artificial Sequence
  Description of Artificial Sequence: Synthetic oligonucleotide
gcuuaucuggucccauguu

SEQ ID NO: 3067882 - RNA, 19 nt, Artificial Sequence
  Description of Artificial Sequence: Synthetic oligonucleotide
ggccuagagccccgaugga

SEQ ID NO: 3067883 - RNA, 19 nt, Artificial Sequence
  Description of Artificial Sequence: Synthetic oligonucleotide
cgauggaagucuccuagcu

SEQ ID NO: 3067884 - RNA, 19 nt, Artificial Sequence
  Description of Artificial Sequence: Synthetic oligonucleotide
ccuuuauccugcugggauu

SEQ ID NO: 3067885 - RNA, 19 nt, Artificial Sequence
  Description of Artificial Sequence: Synthetic oligonucleotide
cgagcccuucgccaggaga

SEQ ID NO: 3067886 - RNA, 19 nt, Artificial Sequence
  Description of Artificial Sequence: Synthetic oligonucleotide
cccggaugccugcuuaucu

SEQ ID NO: 3067887 - RNA, 19 nt, Artificial Sequence
  Description of Artificial Sequence: Synthetic oligonucleotide
gccugcuuaucugguccca

SEQ ID NO: 3067888 - RNA, 19 nt, Artificial Sequence
  Description of Artificial Sequence: Synthetic oligonucleotide
gcuggccucuugggccggg

SEQ ID NO: 3067889 - RNA, 19 nt, Artificial Sequence
  Description of Artificial Sequence: Synthetic oligonucleotide
gccccgauggaagucuccu

SEQ ID NO: 3067890 - RNA, 19 nt, Artificial Sequence
  Description of Artificial Sequence: Synthetic oligonucleotide
cuggggaccaaggcgucuu

SEQ ID NO: 3067891 - RNA, 19 nt, Artificial Sequence
  Description of Artificial Sequence: Synthetic oligonucleotide
cgggaggccuagagccccg

SEQ ID NO: 3067892 - RNA, 19 nt, Artificial Sequence
  Description of Artificial Sequence: Synthetic oligonucleotide
ccucuugggccggguccgg

SEQ ID NO: 3067893 - RNA, 19 nt, Artificial Sequence
  Description of Artificial Sequence: Synthetic oligonucleotide
ccaaggcgucuuggauccc

SEQ ID NO: 3067894 - RNA, 19 nt, Artificial Sequence
  Description of Artificial Sequence: Synthetic oligonucleotide
ccgagcccuucgccaggag

SEQ ID NO: 3067895 - RNA, 19 nt, Artificial Sequence
  Description of Artificial Sequence: Synthetic oligonucleotide
gggaggccuagagccccga

SEQ ID NO: 3067896 - RNA, 19 nt, Artificial Sequence
  Description of Artificial Sequence: Synthetic oligonucleotide
ccccgauggaagucuccua

SEQ ID NO: 3067897 - RNA, 19 nt, Artificial Sequence
  Description of Artificial Sequence: Synthetic oligonucleotide
ggaggccuagagccccgau

SEQ ID NO: 3067898 - RNA, 19 nt, Artificial Sequence
  Description of Artificial Sequence: Synthetic oligonucleotide
ccuucgccaggagaaugcu

SEQ ID NO: 3067899 - RNA, 19 nt, Artificial Sequence
  Description of Artificial Sequence: Synthetic oligonucleotide
ggccggguccgggaggccu

SEQ ID NO: 3067900 - RNA, 19 nt, Artificial Sequence
  Description of Artificial Sequence: Synthetic oligonucleotide
ccggguccgggaggccuag

SEQ ID NO: 3067901 - RNA, 19 nt, Artificial Sequence
  Description of Artificial Sequence: Synthetic oligonucleotide
ccugcuuaucuggucccau

SEQ ID NO: 3067902 - RNA, 19 nt, Artificial Sequence
  Description of Artificial Sequence: Synthetic oligonucleotide
cuggccucuugggccgggu

SEQ ID NO: 3067903 - RNA, 19 nt, Artificial Sequence
  Description of Artificial Sequence: Synthetic oligonucleotide
gggccggguccgggaggcc

SEQ ID NO: 3067904 - RNA, 19 nt, Artificial Sequence
  Description of Artificial Sequence: Synthetic oligonucleotide
gccggguccgggaggccua

SEQ ID NO: 3067905 - RNA, 19 nt, Artificial Sequence
  Description of Artificial Sequence: Synthetic oligonucleotide
cggguccgggaggccuaga

SEQ ID NO: 3067906 - RNA, 19 nt, Artificial Sequence
  Description of Artificial Sequence: Synthetic oligonucleotide
acuggaaugaaccuguaaa

SEQ ID NO: 3067907 - RNA, 19 nt, Artificial Sequence
  Description of Artificial Sequence: Synthetic oligonucleotide
uggaacuaacucuauagac

SEQ ID NO: 3067908 - RNA, 19 nt, Artificial Sequence
  Description of Artificial Sequence: Synthetic oligonucleotide
uaugcuucucaagugcugg

SEQ ID NO: 3067909 - RNA, 19 nt, Artificial Sequence
  Description of Artificial Sequence: Synthetic oligonucleotide
ugugccacuauuaacuuuu

SEQ ID NO: 3067910 - RNA, 19 nt, Artificial Sequence
  Description of Artificial Sequence: Synthetic oligonucleotide
ucugagacagaguuucucu

SEQ ID NO: 3067911 - RNA, 19 nt, Artificial Sequence
  Description of Artificial Sequence: Synthetic oligonucleotide
ugugucaccacuggaauga

SEQ ID NO: 3067912 - RNA, 19 nt, Artificial Sequence
  Description of Artificial Sequence: Synthetic oligonucleotide
acuaacucuauagaccaag

SEQ ID NO: 3067913 - RNA, 19 nt, Artificial Sequence
  Description of Artificial Sequence: Synthetic oligonucleotide
uaacucuauagaccaagcu

SEQ ID NO: 3067914 - RNA, 19 nt, Artificial Sequence
  Description of Artificial Sequence: Synthetic oligonucleotide
gucaccacuggaaugaacc

SEQ ID NO: 3067915 - RNA, 19 nt, Artificial Sequence
  Description of Artificial Sequence: Synthetic oligonucleotide
cuaacucuauagaccaagc

SEQ ID NO: 3067916 - RNA, 19 nt, Artificial Sequence
  Description of Artificial Sequence: Synthetic oligonucleotide
uggaaugaaccuguaaaac

SEQ ID NO: 3067917 - RNA, 19 nt, Artificial Sequence
  Description of Artificial Sequence: Synthetic oligonucleotide
ugagacagaguuucucugu

SEQ ID NO: 3067918 - RNA, 19 nt, Artificial Sequence
  Description of Artificial Sequence: Synthetic oligonucleotide
gaguuucucuguguaacag

SEQ ID NO: 3067919 - RNA, 19 nt, Artificial Sequence
  Description of Artificial Sequence: Synthetic oligonucleotide
ucuucucucuguagaccag

SEQ ID NO: 3067920 - RNA, 19 nt, Artificial Sequence
  Description of Artificial Sequence: Synthetic oligonucleotide
agaguuucucuguguaaca

SEQ ID NO: 3067921 - RNA, 19 nt, Artificial Sequence
  Description of Artificial Sequence: Synthetic oligonucleotide
gggagauagaguuucucug

SEQ ID NO: 3067922 - RNA, 19 nt, Artificial Sequence
  Description of Artificial Sequence: Synthetic oligonucleotide
ugccuaugcuucucaagug

SEQ ID NO: 3067923 - RNA, 19 nt, Artificial Sequence
  Description of Artificial Sequence: Synthetic oligonucleotide
ucucuucucucuguagacc

SEQ ID NO: 3067924 - RNA, 19 nt, Artificial Sequence
  Description of Artificial Sequence: Synthetic oligonucleotide
cucucuucucucuguagac

SEQ ID NO: 3067925 - RNA, 19 nt, Artificial Sequence
  Description of Artificial Sequence: Synthetic oligonucleotide
cuaugcuucucaagugcug

SEQ ID NO: 3067926 - RNA, 19 nt, Artificial Sequence
  Description of Artificial Sequence: Synthetic oligonucleotide
ucaccacuggaaugaaccu

SEQ ID NO: 3067927 - RNA, 19 nt, Artificial Sequence
  Description of Artificial Sequence: Synthetic oligonucleotide
cucuucucucuguagacca

SEQ ID NO: 3067928 - RNA, 19 nt, Artificial Sequence
  Description of Artificial Sequence: Synthetic oligonucleotide
cuggaaugaaccuguaaaa

SEQ ID NO: 3067929 - RNA, 19 nt, Artificial Sequence
  Description of Artificial Sequence: Synthetic oligonucleotide
cuucucucuguagaccagg

SEQ ID NO: 3067930 - RNA, 19 nt, Artificial Sequence
  Description of Artificial Sequence: Synthetic oligonucleotide
ucccggaccucucuucucu

SEQ ID NO: 3067931 - RNA, 19 nt, Artificial Sequence
  Description of Artificial Sequence: Synthetic oligonucleotide
accacuggaaugaaccugu

SEQ ID NO: 3067932 - RNA, 19 nt, Artificial Sequence
  Description of Artificial Sequence: Synthetic oligonucleotide
ugucccggaccucucuucu

SEQ ID NO: 3067933 - RNA, 19 nt, Artificial Sequence
  Description of Artificial Sequence: Synthetic oligonucleotide
accucucuucucucuguag

SEQ ID NO: 3067934 - RNA, 19 nt, Artificial Sequence
  Description of Artificial Sequence: Synthetic oligonucleotide
aggcgugugucaccacugg

SEQ ID NO: 3067935 - RNA, 19 nt, Artificial Sequence
  Description of Artificial Sequence: Synthetic oligonucleotide
ugucaccacuggaaugaac

SEQ ID NO: 3067936 - RNA, 19 nt, Artificial Sequence
  Description of Artificial Sequence: Synthetic oligonucleotide
gccuaugcuucucaagugc

SEQ ID NO: 3067937 - RNA, 19 nt, Artificial Sequence
  Description of Artificial Sequence: Synthetic oligonucleotide
aggcaugugccacuauuaa

SEQ ID NO: 3067938 - RNA, 19 nt, Artificial Sequence
  Description of Artificial Sequence: Synthetic oligonucleotide
ggcaugugccacuauuaac

SEQ ID NO: 3067939 - RNA, 19 nt, Artificial Sequence
  Description of Artificial Sequence: Synthetic oligonucleotide
caccacuggaaugaaccug

SEQ ID NO: 3067940 - RNA, 19 nt, Artificial Sequence
  Description of Artificial Sequence: Synthetic oligonucleotide
cugccuaugcuucucaagu

SEQ ID NO: 3067941 - RNA, 19 nt, Artificial Sequence
  Description of Artificial Sequence: Synthetic oligonucleotide
gcaugugccacuauuaacu

SEQ ID NO: 3067942 - RNA, 19 nt, Artificial Sequence
  Description of Artificial Sequence: Synthetic oligonucleotide
ggagauagaguuucucugu

SEQ ID NO: 3067943 - RNA, 19 nt, Artificial Sequence
  Description of Artificial Sequence: Synthetic oligonucleotide
augugccacuauuaacuuu

SEQ ID NO: 3067944 - RNA, 19 nt, Artificial Sequence
  Description of Artificial Sequence: Synthetic oligonucleotide
ccugccuaugcuucucaag

SEQ ID NO: 3067945 - RNA, 19 nt, Artificial Sequence
  Description of Artificial Sequence: Synthetic oligonucleotide
ggggagauagaguuucucu

SEQ ID NO: 3067946 - RNA, 19 nt, Artificial Sequence
  Description of Artificial Sequence: Synthetic oligonucleotide
cugucccggaccucucuuc

SEQ ID NO: 3067947 - RNA, 19 nt, Artificial Sequence
  Description of Artificial Sequence: Synthetic oligonucleotide
gaccucucuucucucugua

SEQ ID NO: 3067948 - RNA, 19 nt, Artificial Sequence
  Description of Artificial Sequence: Synthetic oligonucleotide
cacuggaaugaaccuguaa

SEQ ID NO: 3067949 - RNA, 19 nt, Artificial Sequence
  Description of Artificial Sequence: Synthetic oligonucleotide
ccucucuucucucuguaga

SEQ ID NO: 3067950 - RNA, 19 nt, Artificial Sequence
  Description of Artificial Sequence: Synthetic oligonucleotide
gauccgccugccuaugcuu

SEQ ID NO: 3067951 - RNA, 19 nt, Artificial Sequence
  Description of Artificial Sequence: Synthetic oligonucleotide
caugugccacuauuaacuu

SEQ ID NO: 3067952 - RNA, 19 nt, Artificial Sequence
  Description of Artificial Sequence: Synthetic oligonucleotide
ggcgugugucaccacugga

SEQ ID NO: 3067953 - RNA, 19 nt, Artificial Sequence
  Description of Artificial Sequence: Synthetic oligonucleotide
gcgugugucaccacuggaa

SEQ ID NO: 3067954 - RNA, 19 nt, Artificial Sequence
  Description of Artificial Sequence: Synthetic oligonucleotide
gucccggaccucucuucuc

SEQ ID NO: 3067955 - RNA, 19 nt, Artificial Sequence
  Description of Artificial Sequence: Synthetic oligonucleotide
ccuaugcuucucaagugcu

SEQ ID NO: 3067956 - RNA, 19 nt, Artificial Sequence
  Description of Artificial Sequence: Synthetic oligonucleotide
ggaccucucuucucucugu

SEQ ID NO: 3067957 - RNA, 19 nt, Artificial Sequence
  Description of Artificial Sequence: Synthetic oligonucleotide
gugucaccacuggaaugaa

SEQ ID NO: 3067958 - RNA, 19 nt, Artificial Sequence
  Description of Artificial Sequence: Synthetic oligonucleotide
cggaccucucuucucucug

SEQ ID NO: 3067959 - RNA, 19 nt, Artificial Sequence
  Description of Artificial Sequence: Synthetic oligonucleotide
gccugccuaugcuucucaa

SEQ ID NO: 3067960 - RNA, 19 nt, Artificial Sequence
  Description of Artificial Sequence: Synthetic oligonucleotide
cccggaccucucuucucuc

SEQ ID NO: 3067961 - RNA, 19 nt, Artificial Sequence
  Description of Artificial Sequence: Synthetic oligonucleotide
gcugucccggaccucucuu

SEQ ID NO: 3067962 - RNA, 19 nt, Artificial Sequence
  Description of Artificial Sequence: Synthetic oligonucleotide
ccacuggaaugaaccugua

SEQ ID NO: 3067963 - RNA, 19 nt, Artificial Sequence
  Description of Artificial Sequence: Synthetic oligonucleotide
ccggaccucucuucucucu

SEQ ID NO: 3067964 - RNA, 19 nt, Artificial Sequence
  Description of Artificial Sequence: Synthetic oligonucleotide
ccgccugccuaugcuucuc

SEQ ID NO: 3067965 - RNA, 19 nt, Artificial Sequence
  Description of Artificial Sequence: Synthetic oligonucleotide
cgccugccuaugcuucuca

SEQ ID NO: 3067966 - RNA, 19 nt, Artificial Sequence
  Description of Artificial Sequence: Synthetic oligonucleotide
uuuauugacacauagggcc

SEQ ID NO: 3067967 - RNA, 19 nt, Artificial Sequence
  Description of Artificial Sequence: Synthetic oligonucleotide
cauuuauugacacauaggg

SEQ ID NO: 3067968 - RNA, 19 nt, Artificial Sequence
  Description of Artificial Sequence: Synthetic oligonucleotide
uaaagaagcauuuauugac

SEQ ID NO: 3067969 - RNA, 19 nt, Artificial Sequence
  Description of Artificial Sequence: Synthetic oligonucleotide
gagacguggaaguagacgg

SEQ ID NO: 3067970 - RNA, 19 nt, Artificial Sequence
  Description of Artificial Sequence: Synthetic oligonucleotide
aagaagcauuuauugacac

SEQ ID NO: 3067971 - RNA, 19 nt, Artificial Sequence
  Description of Artificial Sequence: Synthetic oligonucleotide
aagaugcagagauugauga

SEQ ID NO: 3067972 - RNA, 19 nt, Artificial Sequence
  Description of Artificial Sequence: Synthetic oligonucleotide
agagagaagacaugacggc

SEQ ID NO: 3067973 - RNA, 19 nt, Artificial Sequence
  Description of Artificial Sequence: Synthetic oligonucleotide
gaugcagagauugaugagg

SEQ ID NO: 3067974 - RNA, 19 nt, Artificial Sequence
  Description of Artificial Sequence: Synthetic oligonucleotide
agcauuuauugacacauag

SEQ ID NO: 3067975 - RNA, 19 nt, Artificial Sequence
  Description of Artificial Sequence: Synthetic oligonucleotide
cagagagaagacaugacgg

SEQ ID NO: 3067976 - RNA, 19 nt, Artificial Sequence
  Description of Artificial Sequence: Synthetic oligonucleotide
auuuauugacacauagggc

SEQ ID NO: 3067977 - RNA, 19 nt, Artificial Sequence
  Description of Artificial Sequence: Synthetic oligonucleotide
cucuguaccagcccgaagg

SEQ ID NO: 3067978 - RNA, 19 nt, Artificial Sequence
  Description of Artificial Sequence: Synthetic oligonucleotide
gauugaugagggcacagcc

SEQ ID NO: 3067979 - RNA, 19 nt, Artificial Sequence
  Description of Artificial Sequence: Synthetic oligonucleotide
aguagagcaagcugacugg

SEQ ID NO: 3067980 - RNA, 19 nt, Artificial Sequence
  Description of Artificial Sequence: Synthetic oligonucleotide
uuauugacacauagggccc

SEQ ID NO: 3067981 - RNA, 19 nt, Artificial Sequence
  Description of Artificial Sequence: Synthetic oligonucleotide
auguuagaggcuccggagc

SEQ ID NO: 3067982 - RNA, 19 nt, Artificial Sequence
  Description of Artificial Sequence: Synthetic oligonucleotide
gagcccauugcucagcagg

SEQ ID NO: 3067983 - RNA, 19 nt, Artificial Sequence
  Description of Artificial Sequence: Synthetic oligonucleotide
uguuagaggcuccggagcc

SEQ ID NO: 3067984 - RNA, 19 nt, Artificial Sequence
  Description of Artificial Sequence: Synthetic oligonucleotide
auugaugguggccagugug

SEQ ID NO: 3067985 - RNA, 19 nt, Artificial Sequence
  Description of Artificial Sequence: Synthetic oligonucleotide
gaagacaugacggccgugg

SEQ ID NO: 3067986 - RNA, 19 nt, Artificial Sequence
  Description of Artificial Sequence: Synthetic oligonucleotide
aaguagacggggaagagcu

SEQ ID NO: 3067987 - RNA, 19 nt, Artificial Sequence
  Description of Artificial Sequence: Synthetic oligonucleotide
uguggagccaagaugcaga

SEQ ID NO: 3067988 - RNA, 19 nt, Artificial Sequence
  Description of Artificial Sequence: Synthetic oligonucleotide
ugacuggccucccagagug

SEQ ID NO: 3067989 - RNA, 19 nt, Artificial Sequence
  Description of Artificial Sequence: Synthetic oligonucleotide
cagagugagagguggaucc

SEQ ID NO: 3067990 - RNA, 19 nt, Artificial Sequence
  Description of Artificial Sequence: Synthetic oligonucleotide
uguaccagcccgaagguau

SEQ ID NO: 3067991 - RNA, 19 nt, Artificial Sequence
  Description of Artificial Sequence: Synthetic oligonucleotide
aaagaagcauuuauugaca

SEQ ID NO: 3067992 - RNA, 19 nt, Artificial Sequence
  Description of Artificial Sequence: Synthetic oligonucleotide
ccuaaagaagcauuuauug

SEQ ID NO: 3067993 - RNA, 19 nt, Artificial Sequence
  Description of Artificial Sequence: Synthetic oligonucleotide
cuugcucuguaccagcccg

SEQ ID NO: 3067994 - RNA, 19 nt, Artificial Sequence
  Description of Artificial Sequence: Synthetic oligonucleotide
agccaacgggcauugaugg

SEQ ID NO: 3067995 - RNA, 19 nt, Artificial Sequence
  Description of Artificial Sequence: Synthetic oligonucleotide
cuaaagaagcauuuauuga

SEQ ID NO: 3067996 - RNA, 19 nt, Artificial Sequence
  Description of Artificial Sequence: Synthetic oligonucleotide
gaagagcuugcucuguacc

SEQ ID NO: 3067997 - RNA, 19 nt, Artificial Sequence
  Description of Artificial Sequence: Synthetic oligonucleotide
cagugugaggcucaguagg

SEQ ID NO: 3067998 - RNA, 19 nt, Artificial Sequence
  Description of Artificial Sequence: Synthetic oligonucleotide
auugaugagggcacagccc

SEQ ID NO: 3067999 - RNA, 19 nt, Artificial Sequence
  Description of Artificial Sequence: Synthetic oligonucleotide
gacaugacggccguggugc

SEQ ID NO: 3068000 - RNA, 19 nt, Artificial Sequence
  Description of Artificial Sequence: Synthetic oligonucleotide
caguagagcaagcugacug

SEQ ID NO: 3068001 - RNA, 19 nt, Artificial Sequence
  Description of Artificial Sequence: Synthetic oligonucleotide
gcagagagaagacaugacg

SEQ ID NO: 3068002 - RNA, 19 nt, Artificial Sequence
  Description of Artificial Sequence: Synthetic oligonucleotide
uaggcaguagagcaagcug

SEQ ID NO: 3068003 - RNA, 19 nt, Artificial Sequence
  Description of Artificial Sequence: Synthetic oligonucleotide
cauguuagaggcuccggag

SEQ ID NO: 3068004 - RNA, 19 nt, Artificial Sequence
  Description of Artificial Sequence: Synthetic oligonucleotide
gagggcacagcccaaggag

SEQ ID NO: 3068005 - RNA, 19 nt, Artificial Sequence
  Description of Artificial Sequence: Synthetic oligonucleotide
gaagguaugccgagggagg

SEQ ID NO: 3068006 - RNA, 19 nt, Artificial Sequence
  Description of Artificial Sequence: Synthetic oligonucleotide
cucaguaggcaguagagca

SEQ ID NO: 3068007 - RNA, 19 nt, Artificial Sequence
  Description of Artificial Sequence: Synthetic oligonucleotide
cagagcaaggccagcaagg

SEQ ID NO: 3068008 - RNA, 19 nt, Artificial Sequence
  Description of Artificial Sequence: Synthetic oligonucleotide
uccuaaagaagcauuuauu

SEQ ID NO: 3068009 - RNA, 19 nt, Artificial Sequence
  Description of Artificial Sequence: Synthetic oligonucleotide
ugacacauagggcccaugu

SEQ ID NO: 3068010 - RNA, 19 nt, Artificial Sequence
  Description of Artificial Sequence: Synthetic oligonucleotide
caagaugcagagauugaug

SEQ ID NO: 3068011 - RNA, 19 nt, Artificial Sequence
  Description of Artificial Sequence: Synthetic oligonucleotide
agagaagacaugacggccg

SEQ ID NO: 3068012 - RNA, 19 nt, Artificial Sequence
  Description of Artificial Sequence: Synthetic oligonucleotide
auagggcccauguuagagg

SEQ ID NO: 3068013 - RNA, 19 nt, Artificial Sequence
  Description of Artificial Sequence: Synthetic oligonucleotide
agauugaugagggcacagc

SEQ ID NO: 3068014 - RNA, 19 nt, Artificial Sequence
  Description of Artificial Sequence: Synthetic oligonucleotide
gagagguggauccaggcuc

SEQ ID NO: 3068015 - RNA, 19 nt, Artificial Sequence
  Description of Artificial Sequence: Synthetic oligonucleotide
acggggaagagcuugcucu

SEQ ID NO: 3068016 - RNA, 19 nt, Artificial Sequence
  Description of Artificial Sequence: Synthetic oligonucleotide
agcaaggccagcaaggcag

SEQ ID NO: 3068017 - RNA, 19 nt, Artificial Sequence
  Description of Artificial Sequence: Synthetic oligonucleotide
cacauagggcccauguuag

SEQ ID NO: 3068018 - RNA, 19 nt, Artificial Sequence
  Description of Artificial Sequence: Synthetic oligonucleotide
agagcaagcugacuggccu

SEQ ID NO: 3068019 - RNA, 19 nt, Artificial Sequence
  Description of Artificial Sequence: Synthetic oligonucleotide
uugcagagagaagacauga

SEQ ID NO: 3068020 - RNA, 19 nt, Artificial Sequence
  Description of Artificial Sequence: Synthetic oligonucleotide
gagagaagacaugacggcc

SEQ ID NO: 3068021 - RNA, 19 nt, Artificial Sequence
  Description of Artificial Sequence: Synthetic oligonucleotide
gaagcauuuauugacacau

SEQ ID NO: 3068022 - RNA, 19 nt, Artificial Sequence
  Description of Artificial Sequence: Synthetic oligonucleotide
uagggcccauguuagaggc

SEQ ID NO: 3068023 - RNA, 19 nt, Artificial Sequence
  Description of Artificial Sequence: Synthetic oligonucleotide
ugagagguggauccaggcu

SEQ ID NO: 3068024 - RNA, 19 nt, Artificial Sequence
  Description of Artificial Sequence: Synthetic oligonucleotide
acacauagggcccauguua

SEQ ID NO: 3068025 - RNA, 19 nt, Artificial Sequence
  Description of Artificial Sequence: Synthetic oligonucleotide
agaugcagagauugaugag

SEQ ID NO: 3068026 - RNA, 19 nt, Artificial Sequence
  Description of Artificial Sequence: Synthetic oligonucleotide
cagagauugaugagggcac

SEQ ID NO: 3068027 - RNA, 19 nt, Artificial Sequence
  Description of Artificial Sequence: Synthetic oligonucleotide
aagcugacuggccucccag

SEQ ID NO: 3068028 - RNA, 19 nt, Artificial Sequence
  Description of Artificial Sequence: Synthetic oligonucleotide
agccaagaugcagagauug

SEQ ID NO: 3068029 - RNA, 19 nt, Artificial Sequence
  Description of Artificial Sequence: Synthetic oligonucleotide
agaagcauuuauugacaca

SEQ ID NO: 3068030 - RNA, 19 nt, Artificial Sequence
  Description of Artificial Sequence: Synthetic oligonucleotide
gaaguagacggggaagagc

SEQ ID NO: 3068031 - RNA, 19 nt, Artificial Sequence
  Description of Artificial Sequence: Synthetic oligonucleotide
aaggcagagcccauugcuc

SEQ ID NO: 3068032 - RNA, 19 nt, Artificial Sequence
  Description of Artificial Sequence: Synthetic oligonucleotide
gacguggaaguagacgggg

SEQ ID NO: 3068033 - RNA, 19 nt, Artificial Sequence
  Description of Artificial Sequence: Synthetic oligonucleotide
augcagagauugaugaggg

SEQ ID NO: 3068034 - RNA, 19 nt, Artificial Sequence
  Description of Artificial Sequence: Synthetic oligonucleotide
ucgcuguggagccaagaug

SEQ ID NO: 3068035 - RNA, 19 nt, Artificial Sequence
  Description of Artificial Sequence: Synthetic oligonucleotide
uggaaguagacggggaaga

SEQ ID NO: 3068036 - RNA, 19 nt, Artificial Sequence
  Description of Artificial Sequence: Synthetic oligonucleotide
cauagggcccauguuagag

SEQ ID NO: 3068037 - RNA, 19 nt, Artificial Sequence
  Description of Artificial Sequence: Synthetic oligonucleotide
ucaguaggcaguagagcaa

SEQ ID NO: 3068038 - RNA, 19 nt, Artificial Sequence
  Description of Artificial Sequence: Synthetic oligonucleotide
caacgggcauugauggugg

SEQ ID NO: 3068039 - RNA, 19 nt, Artificial Sequence
  Description of Artificial Sequence: Synthetic oligonucleotide
ugcagagagaagacaugac

SEQ ID NO: 3068040 - RNA, 19 nt, Artificial Sequence
  Description of Artificial Sequence: Synthetic oligonucleotide
aacgggcauugaugguggc

SEQ ID NO: 3068041 - RNA, 19 nt, Artificial Sequence
  Description of Artificial Sequence: Synthetic oligonucleotide
aaggagacguggaaguaga

SEQ ID NO: 3068042 - RNA, 19 nt, Artificial Sequence
  Description of Artificial Sequence: Synthetic oligonucleotide
agcaaggcagagcccauug

SEQ ID NO: 3068043 - RNA, 19 nt, Artificial Sequence
  Description of Artificial Sequence: Synthetic oligonucleotide
ugagggcacagcccaagga

SEQ ID NO: 3068044 - RNA, 19 nt, Artificial Sequence
  Description of Artificial Sequence: Synthetic oligonucleotide
uggccucccagagugagag

SEQ ID NO: 3068045 - RNA, 19 nt, Artificial Sequence
  Description of Artificial Sequence: Synthetic oligonucleotide
gcauuuauugacacauagg

SEQ ID NO: 3068046 - RNA, 19 nt, Artificial Sequence
  Description of Artificial Sequence: Synthetic oligonucleotide
caaggagacguggaaguag

SEQ ID NO: 3068047 - RNA, 19 nt, Artificial Sequence
  Description of Artificial Sequence: Synthetic oligonucleotide
aagacaugacggccguggu

SEQ ID NO: 3068048 - RNA, 19 nt, Artificial Sequence
  Description of Artificial Sequence: Synthetic oligonucleotide
guagacggggaagagcuug

SEQ ID NO: 3068049 - RNA, 19 nt, Artificial Sequence
  Description of Artificial Sequence: Synthetic oligonucleotide
uagacggggaagagcuugc

SEQ ID NO: 3068050 - RNA, 19 nt, Artificial Sequence
  Description of Artificial Sequence: Synthetic oligonucleotide
cagccaacgggcauugaug

SEQ ID NO: 3068051 - RNA, 19 nt, Artificial Sequence
  Description of Artificial Sequence: Synthetic oligonucleotide
augagggcacagcccaagg

SEQ ID NO: 3068052 - RNA, 19 nt, Artificial Sequence
  Description of Artificial Sequence: Synthetic oligonucleotide
ugaugguggccagugugag

SEQ ID NO: 3068053 - RNA, 19 nt, Artificial Sequence
  Description of Artificial Sequence: Synthetic oligonucleotide
aggcagagcccauugcuca

SEQ ID NO: 3068054 - RNA, 19 nt, Artificial Sequence
  Description of Artificial Sequence: Synthetic oligonucleotide
agcccauugcucagcaggc

SEQ ID NO: 3068055 - RNA, 19 nt, Artificial Sequence
  Description of Artificial Sequence: Synthetic oligonucleotide
ggagacguggaaguagacg

SEQ ID NO: 3068056 - RNA, 19 nt, Artificial Sequence
  Description of Artificial Sequence: Synthetic oligonucleotide
gaugagggcacagcccaag

SEQ ID NO: 3068057 - RNA, 19 nt, Artificial Sequence
  Description of Artificial Sequence: Synthetic oligonucleotide
gugagagguggauccaggc

SEQ ID NO: 3068058 - RNA, 19 nt, Artificial Sequence
  Description of Artificial Sequence: Synthetic oligonucleotide
uuagaggcuccggagcccc

SEQ ID NO: 3068059 - RNA, 19 nt, Artificial Sequence
  Description of Artificial Sequence: Synthetic oligonucleotide
cucccagagugagaggugg

SEQ ID NO: 3068060 - RNA, 19 nt, Artificial Sequence
  Description of Artificial Sequence: Synthetic oligonucleotide
agacaugacggccguggug

SEQ ID NO: 3068061 - RNA, 19 nt, Artificial Sequence
  Description of Artificial Sequence: Synthetic oligonucleotide
cauugcucagcaggcagcc

SEQ ID NO: 3068062 - RNA, 19 nt, Artificial Sequence
  Description of Artificial Sequence: Synthetic oligonucleotide
aggcaguagagcaagcuga

SEQ ID NO: 3068063 - RNA, 19 nt, Artificial Sequence
  Description of Artificial Sequence: Synthetic oligonucleotide
uauugacacauagggccca

SEQ ID NO: 3068064 - RNA, 19 nt, Artificial Sequence
  Description of Artificial Sequence: Synthetic oligonucleotide
guggagccaagaugcagag

SEQ ID NO: 3068065 - RNA, 19 nt, Artificial Sequence
  Description of Artificial Sequence: Synthetic oligonucleotide
cagguugcagagagaagac

SEQ ID NO: 3068066 - RNA, 19 nt, Artificial Sequence
  Description of Artificial Sequence: Synthetic oligonucleotide
agugagagguggauccagg

SEQ ID NO: 3068067 - RNA, 19 nt, Artificial Sequence
  Description of Artificial Sequence: Synthetic oligonucleotide
ugcagagauugaugagggc

SEQ ID NO: 3068068 - RNA, 19 nt, Artificial Sequence
  Description of Artificial Sequence: Synthetic oligonucleotide
acgggcauugaugguggcc

SEQ ID NO: 3068069 - RNA, 19 nt, Artificial Sequence
  Description of Artificial Sequence: Synthetic oligonucleotide
agagguggauccaggcucg

SEQ ID NO: 3068070 - RNA, 19 nt, Artificial Sequence
  Description of Artificial Sequence: Synthetic oligonucleotide
agcuugcucuguaccagcc

SEQ ID NO: 3068071 - RNA, 19 nt, Artificial Sequence
  Description of Artificial Sequence: Synthetic oligonucleotide
acagcccaaggagacgugg

SEQ ID NO: 3068072 - RNA, 19 nt, Artificial Sequence
  Description of Artificial Sequence: Synthetic oligonucleotide
cgcuguggagccaagaugc

SEQ ID NO: 3068073 - RNA, 19 nt, Artificial Sequence
  Description of Artificial Sequence: Synthetic oligonucleotide
caguaggcaguagagcaag

SEQ ID NO: 3068074 - RNA, 19 nt, Artificial Sequence
  Description of Artificial Sequence: Synthetic oligonucleotide
aggcucaguaggcaguaga

SEQ ID NO: 3068075 - RNA, 19 nt, Artificial Sequence
  Description of Artificial Sequence: Synthetic oligonucleotide
guggaaguagacggggaag

SEQ ID NO: 3068076 - RNA, 19 nt, Artificial Sequence
  Description of Artificial Sequence: Synthetic oligonucleotide
guugcagagagaagacaug

SEQ ID NO: 3068077 - RNA, 19 nt, Artificial Sequence
  Description of Artificial Sequence: Synthetic oligonucleotide
uccggagccccagagcaag

SEQ ID NO: 3068078 - RNA, 19 nt, Artificial Sequence
  Description of Artificial Sequence: Synthetic oligonucleotide
gguggauccaggcucgcug

SEQ ID NO: 3068079 - RNA, 19 nt, Artificial Sequence
  Description of Artificial Sequence: Synthetic oligonucleotide
guagagcaagcugacuggc

SEQ ID NO: 3068080 - RNA, 19 nt, Artificial Sequence
  Description of Artificial Sequence: Synthetic oligonucleotide
ggagccaagaugcagagau

SEQ ID NO: 3068081 - RNA, 19 nt, Artificial Sequence
  Description of Artificial Sequence: Synthetic oligonucleotide
gcagagauugaugagggca

SEQ ID NO: 3068082 - RNA, 19 nt, Artificial Sequence
  Description of Artificial Sequence: Synthetic oligonucleotide
augacggccguggugcggg

SEQ ID NO: 3068083 - RNA, 19 nt, Artificial Sequence
  Description of Artificial Sequence: Synthetic oligonucleotide
aguaggcaguagagcaagc

SEQ ID NO: 3068084 - RNA, 19 nt, Artificial Sequence
  Description of Artificial Sequence: Synthetic oligonucleotide
gagugagagguggauccag

SEQ ID NO: 3068085 - RNA, 19 nt, Artificial Sequence
  Description of Artificial Sequence: Synthetic oligonucleotide
gauccaggcucgcugugga

SEQ ID NO: 3068086 - RNA, 19 nt, Artificial Sequence
  Description of Artificial Sequence: Synthetic oligonucleotide
agacguggaaguagacggg

SEQ ID NO: 3068087 - RNA, 19 nt, Artificial Sequence
  Description of Artificial Sequence: Synthetic oligonucleotide
accagcccgaagguaugcc

SEQ ID NO: 3068088 - RNA, 19 nt, Artificial Sequence
  Description of Artificial Sequence: Synthetic oligonucleotide
agcccgaagguaugccgag

SEQ ID NO: 3068089 - RNA, 19 nt, Artificial Sequence
  Description of Artificial Sequence: Synthetic oligonucleotide
uugcucuguaccagcccga

SEQ ID NO: 3068090 - RNA, 19 nt, Artificial Sequence
  Description of Artificial Sequence: Synthetic oligonucleotide
cuguggagccaagaugcag

SEQ ID NO: 3068091 - RNA, 19 nt, Artificial Sequence
  Description of Artificial Sequence: Synthetic oligonucleotide
acaugacggccguggugcg

SEQ ID NO: 3068092 - RNA, 19 nt, Artificial Sequence
  Description of Artificial Sequence: Synthetic oligonucleotide
uggauccaggcucgcugug

SEQ ID NO: 3068093 - RNA, 19 nt, Artificial Sequence
  Description of Artificial Sequence: Synthetic oligonucleotide
agagauugaugagggcaca

SEQ ID NO: 3068094 - RNA, 19 nt, Artificial Sequence
  Description of Artificial Sequence: Synthetic oligonucleotide
ggcucaguaggcaguagag

SEQ ID NO: 3068095 - RNA, 19 nt, Artificial Sequence
  Description of Artificial Sequence: Synthetic oligonucleotide
gacggggaagagcuugcuc

SEQ ID NO: 3068096 - RNA, 19 nt, Artificial Sequence
  Description of Artificial Sequence: Synthetic oligonucleotide
acauagggcccauguuaga

SEQ ID NO: 3068097 - RNA, 19 nt, Artificial Sequence
  Description of Artificial Sequence: Synthetic oligonucleotide
ucccagagugagaggugga

SEQ ID NO: 3068098 - RNA, 19 nt, Artificial Sequence
  Description of Artificial Sequence: Synthetic oligonucleotide
gagcaaggccagcaaggca

SEQ ID NO: 3068099 - RNA, 19 nt, Artificial Sequence
  Description of Artificial Sequence: Synthetic oligonucleotide
agagcccauugcucagcag

SEQ ID NO: 3068100 - RNA, 19 nt, Artificial Sequence
  Description of Artificial Sequence: Synthetic oligonucleotide
guuagaggcuccggagccc

SEQ ID NO: 3068101 - RNA, 19 nt, Artificial Sequence
  Description of Artificial Sequence: Synthetic oligonucleotide
agguugcagagagaagaca

SEQ ID NO: 3068102 - RNA, 19 nt, Artificial Sequence
  Description of Artificial Sequence: Synthetic oligonucleotide
cccgaagguaugccgaggg

SEQ ID NO: 3068103 - RNA, 19 nt, Artificial Sequence
  Description of Artificial Sequence: Synthetic oligonucleotide
ugaggcucaguaggcagua

SEQ ID NO: 3068104 - RNA, 19 nt, Artificial Sequence
  Description of Artificial Sequence: Synthetic oligonucleotide
agcccaaggagacguggaa

SEQ ID NO: 3068105 - RNA, 19 nt, Artificial Sequence
  Description of Artificial Sequence: Synthetic oligonucleotide
ugaugagggcacagcccaa

SEQ ID NO: 3068106 - RNA, 19 nt, Artificial Sequence
  Description of Artificial Sequence: Synthetic oligonucleotide
aggagacguggaaguagac

SEQ ID NO: 3068107 - RNA, 19 nt, Artificial Sequence
  Description of Artificial Sequence: Synthetic oligonucleotide
caaggcagagcccauugcu

SEQ ID NO: 3068108 - RNA, 19 nt, Artificial Sequence
  Description of Artificial Sequence: Synthetic oligonucleotide
agcugacuggccucccaga

SEQ ID NO: 3068109 - RNA, 19 nt, Artificial Sequence
  Description of Artificial Sequence: Synthetic oligonucleotide
ccaacgggcauugauggug

SEQ ID NO: 3068110 - RNA, 19 nt, Artificial Sequence
  Description of Artificial Sequence: Synthetic oligonucleotide
gcuccggagccccagagca

SEQ ID NO: 3068111 - RNA, 19 nt, Artificial Sequence
  Description of Artificial Sequence: Synthetic oligonucleotide
gagaagacaugacggccgu

SEQ ID NO: 3068112 - RNA, 19 nt, Artificial Sequence
  Description of Artificial Sequence: Synthetic oligonucleotide
gcauugaugguggccagug

SEQ ID NO: 3068113 - RNA, 19 nt, Artificial Sequence
  Description of Artificial Sequence: Synthetic oligonucleotide
aagcauuuauugacacaua

SEQ ID NO: 3068114 - RNA, 19 nt, Artificial Sequence
  Description of Artificial Sequence: Synthetic oligonucleotide
ccagcccgaagguaugccg

SEQ ID NO: 3068115 - RNA, 19 nt, Artificial Sequence
  Description of Artificial Sequence: Synthetic oligonucleotide
aggcuccggagccccagag

SEQ ID NO: 3068116 - RNA, 19 nt, Artificial Sequence
  Description of Artificial Sequence: Synthetic oligonucleotide
agagugagagguggaucca

SEQ ID NO: 3068117 - RNA, 19 nt, Artificial Sequence
  Description of Artificial Sequence: Synthetic oligonucleotide
gccagugugaggcucagua

SEQ ID NO: 3068118 - RNA, 19 nt, Artificial Sequence
  Description of Artificial Sequence: Synthetic oligonucleotide
cccauugcucagcaggcag

SEQ ID NO: 3068119 - RNA, 19 nt, Artificial Sequence
  Description of Artificial Sequence: Synthetic oligonucleotide
uugacacauagggcccaug

SEQ ID NO: 3068120 - RNA, 19 nt, Artificial Sequence
  Description of Artificial Sequence: Synthetic oligonucleotide
agggcacagcccaaggaga

SEQ ID NO: 3068121 - RNA, 19 nt, Artificial Sequence
  Description of Artificial Sequence: Synthetic oligonucleotide
ggauccaggcucgcugugg

SEQ ID NO: 3068122 - RNA, 19 nt, Artificial Sequence
  Description of Artificial Sequence: Synthetic oligonucleotide
gcucaguaggcaguagagc

SEQ ID NO: 3068123 - RNA, 19 nt, Artificial Sequence
  Description of Artificial Sequence: Synthetic oligonucleotide
cgaagguaugccgagggag

SEQ ID NO: 3068124 - RNA, 19 nt, Artificial Sequence
  Description of Artificial Sequence: Synthetic oligonucleotide
cagcccgaagguaugccga

SEQ ID NO: 3068125 - RNA, 19 nt, Artificial Sequence
  Description of Artificial Sequence: Synthetic oligonucleotide
ggcagagcccauugcucag

SEQ ID NO: 3068126 - RNA, 19 nt, Artificial Sequence
  Description of Artificial Sequence: Synthetic oligonucleotide
caugacggccguggugcgg

SEQ ID NO: 3068127 - RNA, 19 nt, Artificial Sequence
  Description of Artificial Sequence: Synthetic oligonucleotide
uggugcgggccuccagcca

SEQ ID NO: 3068128 - RNA, 19 nt, Artificial Sequence
  Description of Artificial Sequence: Synthetic oligonucleotide
ugcucuguaccagcccgaa

SEQ ID NO: 3068129 - RNA, 19 nt, Artificial Sequence
  Description of Artificial Sequence: Synthetic oligonucleotide
gcuugcucuguaccagccc

SEQ ID NO: 3068130 - RNA, 19 nt, Artificial Sequence
  Description of Artificial Sequence: Synthetic oligonucleotide
gguugcagagagaagacau

SEQ ID NO: 3068131 - RNA, 19 nt, Artificial Sequence
  Description of Artificial Sequence: Synthetic oligonucleotide
guaggcaguagagcaagcu

SEQ ID NO: 3068132 - RNA, 19 nt, Artificial Sequence
  Description of Artificial Sequence: Synthetic oligonucleotide
guaccagcccgaagguaug

SEQ ID NO: 3068133 - RNA, 19 nt, Artificial Sequence
  Description of Artificial Sequence: Synthetic oligonucleotide
acggccguggugcgggccu

SEQ ID NO: 3068134 - RNA, 19 nt, Artificial Sequence
  Description of Artificial Sequence: Synthetic oligonucleotide
agaagacaugacggccgug

SEQ ID NO: 3068135 - RNA, 19 nt, Artificial Sequence
  Description of Artificial Sequence: Synthetic oligonucleotide
gacacauagggcccauguu

SEQ ID NO: 3068136 - RNA, 19 nt, Artificial Sequence
  Description of Artificial Sequence: Synthetic oligonucleotide
agccccagagcaaggccag

SEQ ID NO: 3068137 - RNA, 19 nt, Artificial Sequence
  Description of Artificial Sequence: Synthetic oligonucleotide
ggcaguagagcaagcugac

SEQ ID NO: 3068138 - RNA, 19 nt, Artificial Sequence
  Description of Artificial Sequence: Synthetic oligonucleotide
gccagcaaggcagagccca

SEQ ID NO: 3068139 - RNA, 19 nt, Artificial Sequence
  Description of Artificial Sequence: Synthetic oligonucleotide
auugacacauagggcccau

SEQ ID NO: 3068140 - RNA, 19 nt, Artificial Sequence
  Description of Artificial Sequence: Synthetic oligonucleotide
ugcgggccuccagccaacg

SEQ ID NO: 3068141 - RNA, 19 nt, Artificial Sequence
  Description of Artificial Sequence: Synthetic oligonucleotide
cacagcccaaggagacgug

SEQ ID NO: 3068142 - RNA, 19 nt, Artificial Sequence
  Description of Artificial Sequence: Synthetic oligonucleotide
ccauguuagaggcuccgga

SEQ ID NO: 3068143 - RNA, 19 nt, Artificial Sequence
  Description of Artificial Sequence: Synthetic oligonucleotide
cagcccaaggagacgugga

SEQ ID NO: 3068144 - RNA, 19 nt, Artificial Sequence
  Description of Artificial Sequence: Synthetic oligonucleotide
cgggccuccagccaacggg

SEQ ID NO: 3068145 - RNA, 19 nt, Artificial Sequence
  Description of Artificial Sequence: Synthetic oligonucleotide
acguggaaguagacgggga

SEQ ID NO: 3068146 - RNA, 19 nt, Artificial Sequence
  Description of Artificial Sequence: Synthetic oligonucleotide
uggccagugugaggcucag

SEQ ID NO: 3068147 - RNA, 19 nt, Artificial Sequence
  Description of Artificial Sequence: Synthetic oligonucleotide
caaggccagcaaggcagag

SEQ ID NO: 3068148 - RNA, 19 nt, Artificial Sequence
  Description of Artificial Sequence: Synthetic oligonucleotide
caagcugacuggccuccca

SEQ ID NO: 3068149 - RNA, 19 nt, Artificial Sequence
  Description of Artificial Sequence: Synthetic oligonucleotide
gggcccauguuagaggcuc

SEQ ID NO: 3068150 - RNA, 19 nt, Artificial Sequence
  Description of Artificial Sequence: Synthetic oligonucleotide
cuccagccaacgggcauug

SEQ ID NO: 3068151 - RNA, 19 nt, Artificial Sequence
  Description of Artificial Sequence: Synthetic oligonucleotide
gcccauguuagaggcuccg

SEQ ID NO: 3068152 - RNA, 19 nt, Artificial Sequence
  Description of Artificial Sequence: Synthetic oligonucleotide
agacggggaagagcuugcu

SEQ ID NO: 3068153 - RNA, 19 nt, Artificial Sequence
  Description of Artificial Sequence: Synthetic oligonucleotide
ugguggccagugugaggcu

SEQ ID NO: 3068154 - RNA, 19 nt, Artificial Sequence
  Description of Artificial Sequence: Synthetic oligonucleotide
ggugcgggccuccagccaa

SEQ ID NO: 3068155 - RNA, 19 nt, Artificial Sequence
  Description of Artificial Sequence: Synthetic oligonucleotide
cucgcuguggagccaagau

SEQ ID NO: 3068156 - RNA, 19 nt, Artificial Sequence
  Description of Artificial Sequence: Synthetic oligonucleotide
cguggugcgggccuccagc

SEQ ID NO: 3068157 - RNA, 19 nt, Artificial Sequence
  Description of Artificial Sequence: Synthetic oligonucleotide
gcucuguaccagcccgaag

SEQ ID NO: 3068158 - RNA, 19 nt, Artificial Sequence
  Description of Artificial Sequence: Synthetic oligonucleotide
ggcuccggagccccagagc

SEQ ID NO: 3068159 - RNA, 19 nt, Artificial Sequence
  Description of Artificial Sequence: Synthetic oligonucleotide
gggccuccagccaacgggc

SEQ ID NO: 3068160 - RNA, 19 nt, Artificial Sequence
  Description of Artificial Sequence: Synthetic oligonucleotide
gagguggauccaggcucgc

SEQ ID NO: 3068161 - RNA, 19 nt, Artificial Sequence
  Description of Artificial Sequence: Synthetic oligonucleotide
gggcacagcccaaggagac

SEQ ID NO: 3068162 - RNA, 19 nt, Artificial Sequence
  Description of Artificial Sequence: Synthetic oligonucleotide
agguggauccaggcucgcu

SEQ ID NO: 3068163 - RNA, 19 nt, Artificial Sequence
  Description of Artificial Sequence: Synthetic oligonucleotide
ccagagugagagguggauc

SEQ ID NO: 3068164 - RNA, 19 nt, Artificial Sequence
  Description of Artificial Sequence: Synthetic oligonucleotide
guggccagugugaggcuca

SEQ ID NO: 3068165 - RNA, 19 nt, Artificial Sequence
  Description of Artificial Sequence: Synthetic oligonucleotide
cccauguuagaggcuccgg

SEQ ID NO: 3068166 - RNA, 19 nt, Artificial Sequence
  Description of Artificial Sequence: Synthetic oligonucleotide
gggaagagcuugcucugua

SEQ ID NO: 3068167 - RNA, 19 nt, Artificial Sequence
  Description of Artificial Sequence: Synthetic oligonucleotide
gacggccguggugcgggcc

SEQ ID NO: 3068168 - RNA, 19 nt, Artificial Sequence
  Description of Artificial Sequence: Synthetic oligonucleotide
gcagagcccauugcucagc

SEQ ID NO: 3068169 - RNA, 19 nt, Artificial Sequence
  Description of Artificial Sequence: Synthetic oligonucleotide
ugacggccguggugcgggc

SEQ ID NO: 3068170 - RNA, 19 nt, Artificial Sequence
  Description of Artificial Sequence: Synthetic oligonucleotide
cuggccucccagagugaga

SEQ ID NO: 3068171 - RNA, 19 nt, Artificial Sequence
  Description of Artificial Sequence: Synthetic oligonucleotide
cauugaugguggccagugu

SEQ ID NO: 3068172 - RNA, 19 nt, Artificial Sequence
  Description of Artificial Sequence: Synthetic oligonucleotide
ccucccagagugagaggug

SEQ ID NO: 3068173 - RNA, 19 nt, Artificial Sequence
  Description of Artificial Sequence: Synthetic oligonucleotide
gguggccagugugaggcuc

SEQ ID NO: 3068174 - RNA, 19 nt, Artificial Sequence
  Description of Artificial Sequence: Synthetic oligonucleotide
gugaggcucaguaggcagu

SEQ ID NO: 3068175 - RNA, 19 nt, Artificial Sequence
  Description of Artificial Sequence: Synthetic oligonucleotide
aguagacggggaagagcuu

SEQ ID NO: 3068176 - RNA, 19 nt, Artificial Sequence
  Description of Artificial Sequence: Synthetic oligonucleotide
cucagcaggcagcccaggu

SEQ ID NO: 3068177 - RNA, 19 nt, Artificial Sequence
  Description of Artificial Sequence: Synthetic oligonucleotide
cugacuggccucccagagu

SEQ ID NO: 3068178 - RNA, 19 nt, Artificial Sequence
  Description of Artificial Sequence: Synthetic oligonucleotide
aggcucgcuguggagccaa

SEQ ID NO: 3068179 - RNA, 19 nt, Artificial Sequence
  Description of Artificial Sequence: Synthetic oligonucleotide
ggccucccagagugagagg

SEQ ID NO: 3068180 - RNA, 19 nt, Artificial Sequence
  Description of Artificial Sequence: Synthetic oligonucleotide
gcccgaagguaugccgagg

SEQ ID NO: 3068181 - RNA, 19 nt, Artificial Sequence
  Description of Artificial Sequence: Synthetic oligonucleotide
uccagccaacgggcauuga

SEQ ID NO: 3068182 - RNA, 19 nt, Artificial Sequence
  Description of Artificial Sequence: Synthetic oligonucleotide
gcgggccuccagccaacgg

SEQ ID NO: 3068183 - RNA, 19 nt, Artificial Sequence
  Description of Artificial Sequence: Synthetic oligonucleotide
agggcccauguuagaggcu

SEQ ID NO: 3068184 - RNA, 19 nt, Artificial Sequence
  Description of Artificial Sequence: Synthetic oligonucleotide
cggggaagagcuugcucug

SEQ ID NO: 3068185 - RNA, 19 nt, Artificial Sequence
  Description of Artificial Sequence: Synthetic oligonucleotide
gcacagcccaaggagacgu

SEQ ID NO: 3068186 - RNA, 19 nt, Artificial Sequence
  Description of Artificial Sequence: Synthetic oligonucleotide
gacuggccucccagaguga

SEQ ID NO: 3068187 - RNA, 19 nt, Artificial Sequence
  Description of Artificial Sequence: Synthetic oligonucleotide
cuccggagccccagagcaa

SEQ ID NO: 3068188 - RNA, 19 nt, Artificial Sequence
  Description of Artificial Sequence: Synthetic oligonucleotide
ggcccauguuagaggcucc

SEQ ID NO: 3068189 - RNA, 19 nt, Artificial Sequence
  Description of Artificial Sequence: Synthetic oligonucleotide
cguggaaguagacggggaa

SEQ ID NO: 3068190 - RNA, 19 nt, Artificial Sequence
  Description of Artificial Sequence: Synthetic oligonucleotide
ccaagaugcagagauugau

SEQ ID NO: 3068191 - RNA, 19 nt, Artificial Sequence
  Description of Artificial Sequence: Synthetic oligonucleotide
cuguaccagcccgaaggua

SEQ ID NO: 3068192 - RNA, 19 nt, Artificial Sequence
  Description of Artificial Sequence: Synthetic oligonucleotide
ccggagccccagagcaagg

SEQ ID NO: 3068193 - RNA, 19 nt, Artificial Sequence
  Description of Artificial Sequence: Synthetic oligonucleotide
gcuguggagccaagaugca

SEQ ID NO: 3068194 - RNA, 19 nt, Artificial Sequence
  Description of Artificial Sequence: Synthetic oligonucleotide
gcaagcugacuggccuccc

SEQ ID NO: 3068195 - RNA, 19 nt, Artificial Sequence
  Description of Artificial Sequence: Synthetic oligonucleotide
gcaaggccagcaaggcaga

SEQ ID NO: 3068196 - RNA, 19 nt, Artificial Sequence
  Description of Artificial Sequence: Synthetic oligonucleotide
ccgaagguaugccgaggga

SEQ ID NO: 3068197 - RNA, 19 nt, Artificial Sequence
  Description of Artificial Sequence: Synthetic oligonucleotide
gagccaagaugcagagauu

SEQ ID NO: 3068198 - RNA, 19 nt, Artificial Sequence
  Description of Artificial Sequence: Synthetic oligonucleotide
ccagccaacgggcauugau

SEQ ID NO: 3068199 - RNA, 19 nt, Artificial Sequence
  Description of Artificial Sequence: Synthetic oligonucleotide
gugcgggccuccagccaac

SEQ ID NO: 3068200 - RNA, 19 nt, Artificial Sequence
  Description of Artificial Sequence: Synthetic oligonucleotide
ggccagcaaggcagagccc

SEQ ID NO: 3068201 - RNA, 19 nt, Artificial Sequence
  Description of Artificial Sequence: Synthetic oligonucleotide
cggagccccagagcaaggc

SEQ ID NO: 3068202 - RNA, 19 nt, Artificial Sequence
  Description of Artificial Sequence: Synthetic oligonucleotide
gcccauugcucagcaggca

SEQ ID NO: 3068203 - RNA, 19 nt, Artificial Sequence
  Description of Artificial Sequence: Synthetic oligonucleotide
cccagagcaaggccagcaa

SEQ ID NO: 3068204 - RNA, 19 nt, Artificial Sequence
  Description of Artificial Sequence: Synthetic oligonucleotide
gcucgcuguggagccaaga

SEQ ID NO: 3068205 - RNA, 19 nt, Artificial Sequence
  Description of Artificial Sequence: Synthetic oligonucleotide
gcaguagagcaagcugacu

SEQ ID NO: 3068206 - RNA, 19 nt, Artificial Sequence
  Description of Artificial Sequence: Synthetic oligonucleotide
gccaacgggcauugauggu

SEQ ID NO: 3068207 - RNA, 19 nt, Artificial Sequence
  Description of Artificial Sequence: Synthetic oligonucleotide
ccaaggagacguggaagua

SEQ ID NO: 3068208 - RNA, 19 nt, Artificial Sequence
  Description of Artificial Sequence: Synthetic oligonucleotide
ggggaagagcuugcucugu

SEQ ID NO: 3068209 - RNA, 19 nt, Artificial Sequence
  Description of Artificial Sequence: Synthetic oligonucleotide
ggcucgcuguggagccaag

SEQ ID NO: 3068210 - RNA, 19 nt, Artificial Sequence
  Description of Artificial Sequence: Synthetic oligonucleotide
ccguggugcgggccuccag

SEQ ID NO: 3068211 - RNA, 19 nt, Artificial Sequence
  Description of Artificial Sequence: Synthetic oligonucleotide
ggccuccagccaacgggca

SEQ ID NO: 3068212 - RNA, 19 nt, Artificial Sequence
  Description of Artificial Sequence: Synthetic oligonucleotide
gccccagagcaaggccagc

SEQ ID NO: 3068213 - RNA, 19 nt, Artificial Sequence
  Description of Artificial Sequence: Synthetic oligonucleotide
ggccguggugcgggccucc

SEQ ID NO: 3068214 - RNA, 19 nt, Artificial Sequence
  Description of Artificial Sequence: Synthetic oligonucleotide
gccuccagccaacgggcau

SEQ ID NO: 3068215 - RNA, 19 nt, Artificial Sequence
  Description of Artificial Sequence: Synthetic oligonucleotide
cagcaaggcagagcccauu

SEQ ID NO: 3068216 - RNA, 19 nt, Artificial Sequence
  Description of Artificial Sequence: Synthetic oligonucleotide
cccagagugagagguggau

SEQ ID NO: 3068217 - RNA, 19 nt, Artificial Sequence
  Description of Artificial Sequence: Synthetic oligonucleotide
ccagcaaggcagagcccau

SEQ ID NO: 3068218 - RNA, 19 nt, Artificial Sequence
  Description of Artificial Sequence: Synthetic oligonucleotide
gccguggugcgggccucca

SEQ ID NO: 3068219 - RNA, 19 nt, Artificial Sequence
  Description of Artificial Sequence: Synthetic oligonucleotide
ccuccagccaacgggcauu

SEQ ID NO: 3068220 - RNA, 19 nt, Artificial Sequence
  Description of Artificial Sequence: Synthetic oligonucleotide
ggccagugugaggcucagu

SEQ ID NO: 3068221 - RNA, 19 nt, Artificial Sequence
  Description of Artificial Sequence: Synthetic oligonucleotide
cggccguggugcgggccuc

SEQ ID NO: 3068222 - RNA, 19 nt, Artificial Sequence
  Description of Artificial Sequence: Synthetic oligonucleotide
agaaagacaacuuggaugc

SEQ ID NO: 3068223 - RNA, 19 nt, Artificial Sequence
  Description of Artificial Sequence: Synthetic oligonucleotide
aagaaagacaacuuggaug

SEQ ID NO: 3068224 - RNA, 19 nt, Artificial Sequence
  Description of Artificial Sequence: Synthetic oligonucleotide
uuuucagggaaacugacag

SEQ ID NO: 3068225 - RNA, 19 nt, Artificial Sequence
  Description of Artificial Sequence: Synthetic oligonucleotide
gaaacugacagacaggaug

SEQ ID NO: 3068226 - RNA, 19 nt, Artificial Sequence
  Description of Artificial Sequence: Synthetic oligonucleotide
ucugguuaauguuaaagag

SEQ ID NO: 3068227 - RNA, 19 nt, Artificial Sequence
  Description of Artificial Sequence: Synthetic oligonucleotide
  modified_base (8)..(8): a, c, u, g, unknown or other
aaguuaancuuuugguuuc

SEQ ID NO: 3068228 - RNA, 19 nt, Artificial Sequence
  Description of Artificial Sequence: Synthetic oligonucleotide
agggagaggaguuaucugc

SEQ ID NO: 3068229 - RNA, 19 nt, Artificial Sequence
  Description of Artificial Sequence: Synthetic oligonucleotide
  modified_base (5)..(5): a, c, u, g, unknown or other
uuaancuuuugguuucugg

SEQ ID NO: 3068230 - RNA, 19 nt, Artificial Sequence
  Description of Artificial Sequence: Synthetic oligonucleotide
ugaaggaucccacggauag

SEQ ID NO: 3068231 - RNA, 19 nt, Artificial Sequence
  Description of Artificial Sequence: Synthetic oligonucleotide
ugucggaagggccauaggg

SEQ ID NO: 3068232 - RNA, 19 nt, Artificial Sequence
  Description of Artificial Sequence: Synthetic oligonucleotide
aauguuaaagagcgugaag

SEQ ID NO: 3068233 - RNA, 19 nt, Artificial Sequence
  Description of Artificial Sequence: Synthetic oligonucleotide
uguuggauaugccaucggg

SEQ ID NO: 3068234 - RNA, 19 nt, Artificial Sequence
  Description of Artificial Sequence: Synthetic oligonucleotide
  modified_base (4)..(4): a, c, u, g, unknown or other
uaancuuuugguuucuggu

SEQ ID NO: 3068235 - RNA, 19 nt, Artificial Sequence
  Description of Artificial Sequence: Synthetic oligonucleotide
uggaaagaaagacaacuug

SEQ ID NO: 3068236 - RNA, 19 nt, Artificial Sequence
  Description of Artificial Sequence: Synthetic oligonucleotide
aaggaucccacggauaggc

SEQ ID NO: 3068237 - RNA, 19 nt, Artificial Sequence
  Description of Artificial Sequence: Synthetic oligonucleotide
uuaaagagcgugaaggauc

SEQ ID NO: 3068238 - RNA, 19 nt, Artificial Sequence
  Description of Artificial Sequence: Synthetic oligonucleotide
guuaauguuaaagagcgug

SEQ ID NO: 3068239 - RNA, 19 nt, Artificial Sequence
  Description of Artificial Sequence: Synthetic oligonucleotide
aaugucaccaccaugugga

SEQ ID NO: 3068240 - RNA, 19 nt, Artificial Sequence
  Description of Artificial Sequence: Synthetic oligonucleotide
uuaauguuaaagagcguga

SEQ ID NO: 3068241 - RNA, 19 nt, Artificial Sequence
  Description of Artificial Sequence: Synthetic oligonucleotide
cugguuaauguuaaagagc

SEQ ID NO: 3068242 - RNA, 19 nt, Artificial Sequence
  Description of Artificial Sequence: Synthetic oligonucleotide
uaaagagcgugaaggaucc

SEQ ID NO: 3068243 - RNA, 19 nt, Artificial Sequence
  Description of Artificial Sequence: Synthetic oligonucleotide
uucugguuaauguuaaaga

SEQ ID NO: 3068244 - RNA, 19 nt, Artificial Sequence
  Description of Artificial Sequence: Synthetic oligonucleotide
uuucugguuaauguuaaag

SEQ ID NO: 3068245 - RNA, 19 nt, Artificial Sequence
  Description of Artificial Sequence: Synthetic oligonucleotide
aacuuggaugccuugccuc

SEQ ID NO: 3068246 - RNA, 19 nt, Artificial Sequence
  Description of Artificial Sequence: Synthetic oligonucleotide
acaggauggaaagaaagac

SEQ ID NO: 3068247 - RNA, 19 nt, Artificial Sequence
  Description of Artificial Sequence: Synthetic oligonucleotide
accauguggacccuguugg

SEQ ID NO: 3068248 - RNA, 19 nt, Artificial Sequence
  Description of Artificial Sequence: Synthetic oligonucleotide
acaacuuggaugccuugcc

SEQ ID NO: 3068249 - RNA, 19 nt, Artificial Sequence
  Description of Artificial Sequence: Synthetic oligonucleotide
aaagaaagacaacuuggau

SEQ ID NO: 3068250 - RNA, 19 nt, Artificial Sequence
  Description of Artificial Sequence: Synthetic oligonucleotide
  modified_base (12)..(12): a, c, u, g, unknown or other
aggcaaguuaancuuuugg

SEQ ID NO: 3068251 - RNA, 19 nt, Artificial Sequence
  Description of Artificial Sequence: Synthetic oligonucleotide
  modified_base (16)..(16): a, c, u, g, unknown or other
agugaggcaaguuaancuu

SEQ ID NO: 3068252 - RNA, 19 nt, Artificial Sequence
  Description of Artificial Sequence: Synthetic oligonucleotide
uguuaaagagcgugaagga

SEQ ID NO: 3068253 - RNA, 19 nt, Artificial Sequence
  Description of Artificial Sequence: Synthetic oligonucleotide
ugcauggggaaccacaggu

SEQ ID NO: 3068254 - RNA, 19 nt, Artificial Sequence
  Description of Artificial Sequence: Synthetic oligonucleotide
ggaaagaaagacaacuugg

SEQ ID NO: 3068255 - RNA, 19 nt, Artificial Sequence
  Description of Artificial Sequence: Synthetic oligonucleotide
  modified_base (3)..(3): a, c, u, g, unknown or other
aancuuuugguuucugguu

SEQ ID NO: 3068256 - RNA, 19 nt, Artificial Sequence
  Description of Artificial Sequence: Synthetic oligonucleotide
  modified_base (2)..(2): a, c, u, g, unknown or other
ancuuuugguuucugguua

SEQ ID NO: 3068257 - RNA, 19 nt, Artificial Sequence
  Description of Artificial Sequence: Synthetic oligonucleotide
uucagggaaacugacagac

SEQ ID NO: 3068258 - RNA, 19 nt, Artificial Sequence
  Description of Artificial Sequence: Synthetic oligonucleotide
cagggaaacugacagacag

SEQ ID NO: 3068259 - RNA, 19 nt, Artificial Sequence
  Description of Artificial Sequence: Synthetic oligonucleotide
gucaccaccauguggaccc

SEQ ID NO: 3068260 - RNA, 19 nt, Artificial Sequence
  Description of Artificial Sequence: Synthetic oligonucleotide
aucugcaagugucggaagg

SEQ ID NO: 3068261 - RNA, 19 nt, Artificial Sequence
  Description of Artificial Sequence: Synthetic oligonucleotide
agcgugaaggaucccacgg

SEQ ID NO: 3068262 - RNA, 19 nt, Artificial Sequence
  Description of Artificial Sequence: Synthetic oligonucleotide
agaggaguuaucugcaagu

SEQ ID NO: 3068263 - RNA, 19 nt, Artificial Sequence
  Description of Artificial Sequence: Synthetic oligonucleotide
ugugcgugugugcauuggg

SEQ ID NO: 3068264 - RNA, 19 nt, Artificial Sequence
  Description of Artificial Sequence: Synthetic oligonucleotide
  modified_base (18)..(18): a, c, u, g, unknown or other
agagugaggcaaguuaanc

SEQ ID NO: 3068265 - RNA, 19 nt, Artificial Sequence
  Description of Artificial Sequence: Synthetic oligonucleotide
aaagacaacuuggaugccu

SEQ ID NO: 3068266 - RNA, 19 nt, Artificial Sequence
  Description of Artificial Sequence: Synthetic oligonucleotide
gaaagaaagacaacuugga

SEQ ID NO: 3068267 - RNA, 19 nt, Artificial Sequence
  Description of Artificial Sequence: Synthetic oligonucleotide
uugcuuguuaauuacuuuu

SEQ ID NO: 3068268 - RNA, 19 nt, Artificial Sequence
  Description of Artificial Sequence: Synthetic oligonucleotide
guuggauaugccaucgggg

SEQ ID NO: 3068269 - RNA, 19 nt, Artificial Sequence
  Description of Artificial Sequence: Synthetic oligonucleotide
ucugcaagugucggaaggg

SEQ ID NO: 3068270 - RNA, 19 nt, Artificial Sequence
  Description of Artificial Sequence: Synthetic oligonucleotide
agggugggcagagugaggc

SEQ ID NO: 3068271 - RNA, 19 nt, Artificial Sequence
  Description of Artificial Sequence: Synthetic oligonucleotide
caggucauggcaaugucac

SEQ ID NO: 3068272 - RNA, 19 nt, Artificial Sequence
  Description of Artificial Sequence: Synthetic oligonucleotide
uuaucugcaagugucggaa

SEQ ID NO: 3068273 - RNA, 19 nt, Artificial Sequence
  Description of Artificial Sequence: Synthetic oligonucleotide
cuugcauggggaaccacag

SEQ ID NO: 3068274 - RNA, 19 nt, Artificial Sequence
  Description of Artificial Sequence: Synthetic oligonucleotide
agacaggauggaaagaaag

SEQ ID NO: 3068275 - RNA, 19 nt, Artificial Sequence
  Description of Artificial Sequence: Synthetic oligonucleotide
ugcaagugucggaagggcc

SEQ ID NO: 3068276 - RNA, 19 nt, Artificial Sequence
  Description of Artificial Sequence: Synthetic oligonucleotide
ucggaagggccauagggug

SEQ ID NO: 3068277 - RNA, 19 nt, Artificial Sequence
  Description of Artificial Sequence: Synthetic oligonucleotide
ugguuucugguuaauguua

SEQ ID NO: 3068278 - RNA, 19 nt, Artificial Sequence
  Description of Artificial Sequence: Synthetic oligonucleotide
aguuaucugcaagugucgg

SEQ ID NO: 3068279 - RNA, 19 nt, Artificial Sequence
  Description of Artificial Sequence: Synthetic oligonucleotide
  modified_base (14)..(14): a, c, u, g, unknown or other
ugaggcaaguuaancuuuu

SEQ ID NO: 3068280 - RNA, 19 nt, Artificial Sequence
  Description of Artificial Sequence: Synthetic oligonucleotide
aggauggaaagaaagacaa

SEQ ID NO: 3068281 - RNA, 19 nt, Artificial Sequence
  Description of Artificial Sequence: Synthetic oligonucleotide
gaguuaucugcaagugucg

SEQ ID NO: 3068282 - RNA, 19 nt, Artificial Sequence
  Description of Artificial Sequence: Synthetic oligonucleotide
uaauguuaaagagcgugaa

SEQ ID NO: 3068283 - RNA, 19 nt, Artificial Sequence
  Description of Artificial Sequence: Synthetic oligonucleotide
uuugcuuguuaauuacuuu

SEQ ID NO: 3068284 - RNA, 19 nt, Artificial Sequence
  Description of Artificial Sequence: Synthetic oligonucleotide
aagagcgugaaggauccca

SEQ ID NO: 3068285 - RNA, 19 nt, Artificial Sequence
  Description of Artificial Sequence: Synthetic oligonucleotide
uugguuucugguuaauguu

SEQ ID NO: 3068286 - RNA, 19 nt, Artificial Sequence
  Description of Artificial Sequence: Synthetic oligonucleotide
acagacaggauggaaagaa

SEQ ID NO: 3068287 - RNA, 19 nt, Artificial Sequence
  Description of Artificial Sequence: Synthetic oligonucleotide
gacaacuuggaugccuugc

SEQ ID NO: 3068288 - RNA, 19 nt, Artificial Sequence
  Description of Artificial Sequence: Synthetic oligonucleotide
ugccucauugcccuuugcu

SEQ ID NO: 3068289 - RNA, 19 nt, Artificial Sequence
  Description of Artificial Sequence: Synthetic oligonucleotide
uuucagggaaacugacaga

SEQ ID NO: 3068290 - RNA, 19 nt, Artificial Sequence
  Description of Artificial Sequence: Synthetic oligonucleotide
gacccuguuggauaugcca

SEQ ID NO: 3068291 - RNA, 19 nt, Artificial Sequence
  Description of Artificial Sequence: Synthetic oligonucleotide
auagggugggcagagugag

SEQ ID NO: 3068292 - RNA, 19 nt, Artificial Sequence
  Description of Artificial Sequence: Synthetic oligonucleotide
uugcauggggaaccacagg

SEQ ID NO: 3068293 - RNA, 19 nt, Artificial Sequence
  Description of Artificial Sequence: Synthetic oligonucleotide
aggaguuaucugcaagugu

SEQ ID NO: 3068294 - RNA, 19 nt, Artificial Sequence
  Description of Artificial Sequence: Synthetic oligonucleotide
aggucauggcaaugucacc

SEQ ID NO: 3068295 - RNA, 19 nt, Artificial Sequence
  Description of Artificial Sequence: Synthetic oligonucleotide
gacaggauggaaagaaaga

SEQ ID NO: 3068296 - RNA, 19 nt, Artificial Sequence
  Description of Artificial Sequence: Synthetic oligonucleotide
acuuggaugccuugccuca

SEQ ID NO: 3068297 - RNA, 19 nt, Artificial Sequence
  Description of Artificial Sequence: Synthetic oligonucleotide
ucauggcaaugucaccacc

SEQ ID NO: 3068298 - RNA, 19 nt, Artificial Sequence
  Description of Artificial Sequence: Synthetic oligonucleotide
gaggaguuaucugcaagug

SEQ ID NO: 3068299 - RNA, 19 nt, Artificial Sequence
  Description of Artificial Sequence: Synthetic oligonucleotide
ggaguuaucugcaaguguc

SEQ ID NO: 3068300 - RNA, 19 nt, Artificial Sequence
  Description of Artificial Sequence: Synthetic oligonucleotide
ggaaccacaggucauggca

SEQ ID NO: 3068301 - RNA, 19 nt, Artificial Sequence
  Description of Artificial Sequence: Synthetic oligonucleotide
caggauggaaagaaagaca

SEQ ID NO: 3068302 - RNA, 19 nt, Artificial Sequence
  Description of Artificial Sequence: Synthetic oligonucleotide
uggaugccuugccucauug

SEQ ID NO: 3068303 - RNA, 19 nt, Artificial Sequence
  Description of Artificial Sequence: Synthetic oligonucleotide
  modified_base (17)..(17): a, c, u, g, unknown or other
gagugaggcaaguuaancu

SEQ ID NO: 3068304 - RNA, 19 nt, Artificial Sequence
  Description of Artificial Sequence: Synthetic oligonucleotide
  modified_base (9)..(9): a, c, u, g, unknown or other
caaguuaancuuuugguuu

SEQ ID NO: 3068305 - RNA, 19 nt, Artificial Sequence
  Description of Artificial Sequence: Synthetic oligonucleotide
ucagggaaacugacagaca

SEQ ID NO: 3068306 - RNA, 19 nt, Artificial Sequence
  Description of Artificial Sequence: Synthetic oligonucleotide
gagggagaggaguuaucug

SEQ ID NO: 3068307 - RNA, 19 nt, Artificial Sequence
  Description of Artificial Sequence: Synthetic oligonucleotide
uaucugcaagugucggaag

SEQ ID NO: 3068308 - RNA, 19 nt, Artificial Sequence
  Description of Artificial Sequence: Synthetic oligonucleotide
gagcgugaaggaucccacg

SEQ ID NO: 3068309 - RNA, 19 nt, Artificial Sequence
  Description of Artificial Sequence: Synthetic oligonucleotide
cugacagacaggauggaaa

SEQ ID NO: 3068310 - RNA, 19 nt, Artificial Sequence
  Description of Artificial Sequence: Synthetic oligonucleotide
ugccuugccucauugcccu

SEQ ID NO: 3068311 - RNA, 19 nt, Artificial Sequence
  Description of Artificial Sequence: Synthetic oligonucleotide
agggccauagggugggcag

SEQ ID NO: 3068312 - RNA, 19 nt, Artificial Sequence
  Description of Artificial Sequence: Synthetic oligonucleotide
agagcgugaaggaucccac

SEQ ID NO: 3068313 - RNA, 19 nt, Artificial Sequence
  Description of Artificial Sequence: Synthetic oligonucleotide
cauggcaaugucaccacca

SEQ ID NO: 3068314 - RNA, 19 nt, Artificial Sequence
  Description of Artificial Sequence: Synthetic oligonucleotide
gauaggcacuggaauauga

SEQ ID NO: 3068315 - RNA, 19 nt, Artificial Sequence
  Description of Artificial Sequence: Synthetic oligonucleotide
auugcccuuugcuuguuaa

SEQ ID NO: 3068316 - RNA, 19 nt, Artificial Sequence
  Description of Artificial Sequence: Synthetic oligonucleotide
aaagagcgugaaggauccc

SEQ ID NO: 3068317 - RNA, 19 nt, Artificial Sequence
  Description of Artificial Sequence: Synthetic oligonucleotide
uaggcacuggaauaugauu

SEQ ID NO: 3068318 - RNA, 19 nt, Artificial Sequence
  Description of Artificial Sequence: Synthetic oligonucleotide
uguggacccuguuggauau

SEQ ID NO: 3068319 - RNA, 19 nt, Artificial Sequence
  Description of Artificial Sequence: Synthetic oligonucleotide
uggcaaugucaccaccaug

SEQ ID NO: 3068320 - RNA, 19 nt, Artificial Sequence
  Description of Artificial Sequence: Synthetic oligonucleotide
cauggggaaccacagguca

SEQ ID NO: 3068321 - RNA, 19 nt, Artificial Sequence
  Description of Artificial Sequence: Synthetic oligonucleotide
uggacccuguuggauaugc

SEQ ID NO: 3068322 - RNA, 19 nt, Artificial Sequence
  Description of Artificial Sequence: Synthetic oligonucleotide
  modified_base (7)..(7): a, c, u, g, unknown or other
aguuaancuuuugguuucu

SEQ ID NO: 3068323 - RNA, 19 nt, Artificial Sequence
  Description of Artificial Sequence: Synthetic oligonucleotide
guuaucugcaagugucgga

SEQ ID NO: 3068324 - RNA, 19 nt, Artificial Sequence
  Description of Artificial Sequence: Synthetic oligonucleotide
acggauaggcacuggaaua

SEQ ID NO: 3068325 - RNA, 19 nt, Artificial Sequence
  Description of Artificial Sequence: Synthetic oligonucleotide
agugucggaagggccauag

SEQ ID NO: 3068326 - RNA, 19 nt, Artificial Sequence
  Description of Artificial Sequence: Synthetic oligonucleotide
gaaggaucccacggauagg

SEQ ID NO: 3068327 - RNA, 19 nt, Artificial Sequence
  Description of Artificial Sequence: Synthetic oligonucleotide
aaccacaggucauggcaau

SEQ ID NO: 3068328 - RNA, 19 nt, Artificial Sequence
  Description of Artificial Sequence: Synthetic oligonucleotide
  modified_base (11)..(11): a, c, u, g, unknown or other
ggcaaguuaancuuuuggu

SEQ ID NO: 3068329 - RNA, 19 nt, Artificial Sequence
  Description of Artificial Sequence: Synthetic oligonucleotide
aggcacuggaauaugauuu

SEQ ID NO: 3068330 - RNA, 19 nt, Artificial Sequence
  Description of Artificial Sequence: Synthetic oligonucleotide
augucaccaccauguggac

SEQ ID NO: 3068331 - RNA, 19 nt, Artificial Sequence
  Description of Artificial Sequence: Synthetic oligonucleotide
caccauguggacccuguug

SEQ ID NO: 3068332 - RNA, 19 nt, Artificial Sequence
  Description of Artificial Sequence: Synthetic oligonucleotide
ugucaccaccauguggacc

SEQ ID NO: 3068333 - RNA, 19 nt, Artificial Sequence
  Description of Artificial Sequence: Synthetic oligonucleotide
agggaaacugacagacagg

SEQ ID NO: 3068334 - RNA, 19 nt, Artificial Sequence
  Description of Artificial Sequence: Synthetic oligonucleotide
aagacaacuuggaugccuu

SEQ ID NO: 3068335 - RNA, 19 nt, Artificial Sequence
  Description of Artificial Sequence: Synthetic oligonucleotide
gggaaacugacagacagga

SEQ ID NO: 3068336 - RNA, 19 nt, Artificial Sequence
  Description of Artificial Sequence: Synthetic oligonucleotide
  modified_base (6)..(6): a, c, u, g, unknown or other
guuaancuuuugguuucug

SEQ ID NO: 3068337 - RNA, 19 nt, Artificial Sequence
  Description of Artificial Sequence: Synthetic oligonucleotide
  modified_base (13)..(13): a, c, u, g, unknown or other
gaggcaaguuaancuuuug

SEQ ID NO: 3068338 - RNA, 19 nt, Artificial Sequence
  Description of Artificial Sequence: Synthetic oligonucleotide
gugcgugugugcauugggg

SEQ ID NO: 3068339 - RNA, 19 nt, Artificial Sequence
  Description of Artificial Sequence: Synthetic oligonucleotide
ccucauugcccuuugcuug

SEQ ID NO: 3068340 - RNA, 19 nt, Artificial Sequence
  Description of Artificial Sequence: Synthetic oligonucleotide
  modified_base (10)..(10): a, c, u, g, unknown or other
gcaaguuaancuuuugguu

SEQ ID NO: 3068341 - RNA, 19 nt, Artificial Sequence
  Description of Artificial Sequence: Synthetic oligonucleotide
ggucauggcaaugucacca

SEQ ID NO: 3068342 - RNA, 19 nt, Artificial Sequence
  Description of Artificial Sequence: Synthetic oligonucleotide
uggggaaccacaggucaug

SEQ ID NO: 3068343 - RNA, 19 nt, Artificial Sequence
  Description of Artificial Sequence: Synthetic oligonucleotide
cuguuggauaugccaucgg

SEQ ID NO: 3068344 - RNA, 19 nt, Artificial Sequence
  Description of Artificial Sequence: Synthetic oligonucleotide
auggaaagaaagacaacuu

SEQ ID NO: 3068345 - RNA, 19 nt, Artificial Sequence
  Description of Artificial Sequence: Synthetic oligonucleotide
cauagggugggcagaguga

SEQ ID NO: 3068346 - RNA, 19 nt, Artificial Sequence
  Description of Artificial Sequence: Synthetic oligonucleotide
gucauggcaaugucaccac

SEQ ID NO: 3068347 - RNA, 19 nt, Artificial Sequence
  Description of Artificial Sequence: Synthetic oligonucleotide
ugcccuuugcuuguuaauu

SEQ ID NO: 3068348 - RNA, 19 nt, Artificial Sequence
  Description of Artificial Sequence: Synthetic oligonucleotide
agacaacuuggaugccuug

SEQ ID NO: 3068349 - RNA, 19 nt, Artificial Sequence
  Description of Artificial Sequence: Synthetic oligonucleotide
auguggacccuguuggaua

SEQ ID NO: 3068350 - RNA, 19 nt, Artificial Sequence
  Description of Artificial Sequence: Synthetic oligonucleotide
acaggucauggcaauguca

SEQ ID NO: 3068351 - RNA, 19 nt, Artificial Sequence
  Description of Artificial Sequence: Synthetic oligonucleotide
gaaagacaacuuggaugcc

SEQ ID NO: 3068352 - RNA, 19 nt, Artificial Sequence
  Description of Artificial Sequence: Synthetic oligonucleotide
ggaucccacggauaggcac

SEQ ID NO: 3068353 - RNA, 19 nt, Artificial Sequence
  Description of Artificial Sequence: Synthetic oligonucleotide
ggcaaugucaccaccaugu

SEQ ID NO: 3068354 - RNA, 19 nt, Artificial Sequence
  Description of Artificial Sequence: Synthetic oligonucleotide
cuuugcuuguuaauuacuu

SEQ ID NO: 3068355 - RNA, 19 nt, Artificial Sequence
  Description of Artificial Sequence: Synthetic oligonucleotide
acuggcgugugcgugugug

SEQ ID NO: 3068356 - RNA, 19 nt, Artificial Sequence
  Description of Artificial Sequence: Synthetic oligonucleotide
accacuggcgugugcgugu

SEQ ID NO: 3068357 - RNA, 19 nt, Artificial Sequence
  Description of Artificial Sequence: Synthetic oligonucleotide
auaggcacuggaauaugau

SEQ ID NO: 3068358 - RNA, 19 nt, Artificial Sequence
  Description of Artificial Sequence: Synthetic oligonucleotide
aacugacagacaggaugga

SEQ ID NO: 3068359 - RNA, 19 nt, Artificial Sequence
  Description of Artificial Sequence: Synthetic oligonucleotide
gaaccacaggucauggcaa

SEQ ID NO: 3068360 - RNA, 19 nt, Artificial Sequence
  Description of Artificial Sequence: Synthetic oligonucleotide
acugacagacaggauggaa

SEQ ID NO: 3068361 - RNA, 19 nt, Artificial Sequence
  Description of Artificial Sequence: Synthetic oligonucleotide
uggcgugugcgugugugca

SEQ ID NO: 3068362 - RNA, 19 nt, Artificial Sequence
  Description of Artificial Sequence: Synthetic oligonucleotide
ccuguuggauaugccaucg

SEQ ID NO: 3068363 - RNA, 19 nt, Artificial Sequence
  Description of Artificial Sequence: Synthetic oligonucleotide
uugcccuuugcuuguuaau

SEQ ID NO: 3068364 - RNA, 19 nt, Artificial Sequence
  Description of Artificial Sequence: Synthetic oligonucleotide
aagggccauagggugggca

SEQ ID NO: 3068365 - RNA, 19 nt, Artificial Sequence
  Description of Artificial Sequence: Synthetic oligonucleotide
cacaggucauggcaauguc

SEQ ID NO: 3068366 - RNA, 19 nt, Artificial Sequence
  Description of Artificial Sequence: Synthetic oligonucleotide
gacggggcgggagggagag

SEQ ID NO: 3068367 - RNA, 19 nt, Artificial Sequence
  Description of Artificial Sequence: Synthetic oligonucleotide
ggcagagugaggcaaguua

SEQ ID NO: 3068368 - RNA, 19 nt, Artificial Sequence
  Description of Artificial Sequence: Synthetic oligonucleotide
guuaaagagcgugaaggau

SEQ ID NO: 3068369 - RNA, 19 nt, Artificial Sequence
  Description of Artificial Sequence: Synthetic oligonucleotide
gugucggaagggccauagg

SEQ ID NO: 3068370 - RNA, 19 nt, Artificial Sequence
  Description of Artificial Sequence: Synthetic oligonucleotide
cccuuugcuuguuaauuac

SEQ ID NO: 3068371 - RNA, 19 nt, Artificial Sequence
  Description of Artificial Sequence: Synthetic oligonucleotide
gacagacaggauggaaaga

SEQ ID NO: 3068372 - RNA, 19 nt, Artificial Sequence
  Description of Artificial Sequence: Synthetic oligonucleotide
cuggcgugugcgugugugc

SEQ ID NO: 3068373 - RNA, 19 nt, Artificial Sequence
  Description of Artificial Sequence: Synthetic oligonucleotide
uugccucauugcccuuugc

SEQ ID NO: 3068374 - RNA, 19 nt, Artificial Sequence
  Description of Artificial Sequence: Synthetic oligonucleotide
ccauagggugggcagagug

SEQ ID NO: 3068375 - RNA, 19 nt, Artificial Sequence
  Description of Artificial Sequence: Synthetic oligonucleotide
acccuguuggauaugccau

SEQ ID NO: 3068376 - RNA, 19 nt, Artificial Sequence
  Description of Artificial Sequence: Synthetic oligonucleotide
guuucugguuaauguuaaa

SEQ ID NO: 3068377 - RNA, 19 nt, Artificial Sequence
  Description of Artificial Sequence: Synthetic oligonucleotide
cagacaggauggaaagaaa

SEQ ID NO: 3068378 - RNA, 19 nt, Artificial Sequence
  Description of Artificial Sequence: Synthetic oligonucleotide
gugugcgugugugcauugg

SEQ ID NO: 3068379 - RNA, 19 nt, Artificial Sequence
  Description of Artificial Sequence: Synthetic oligonucleotide
gcaaugucaccaccaugug

SEQ ID NO: 3068380 - RNA, 19 nt, Artificial Sequence
  Description of Artificial Sequence: Synthetic oligonucleotide
uuggaugccuugccucauu

SEQ ID NO: 3068381 - RNA, 19 nt, Artificial Sequence
  Description of Artificial Sequence: Synthetic oligonucleotide
ggaugccuugccucauugc

SEQ ID NO: 3068382 - RNA, 19 nt, Artificial Sequence
  Description of Artificial Sequence: Synthetic oligonucleotide
  modified_base (19)..(19): a, c, u, g, unknown or other
cagagugaggcaaguuaan

SEQ ID NO: 3068383 - RNA, 19 nt, Artificial Sequence
  Description of Artificial Sequence: Synthetic oligonucleotide
accacaggucauggcaaug

SEQ ID NO: 3068384 - RNA, 19 nt, Artificial Sequence
  Description of Artificial Sequence: Synthetic oligonucleotide
gaucccacggauaggcacu

SEQ ID NO: 3068385 - RNA, 19 nt, Artificial Sequence
  Description of Artificial Sequence: Synthetic oligonucleotide
gguuucugguuaauguuaa

SEQ ID NO: 3068386 - RNA, 19 nt, Artificial Sequence
  Description of Artificial Sequence: Synthetic oligonucleotide
ugggcagagugaggcaagu

SEQ ID NO: 3068387 - RNA, 19 nt, Artificial Sequence
  Description of Artificial Sequence: Synthetic oligonucleotide
gcagagugaggcaaguuaa

SEQ ID NO: 3068388 - RNA, 19 nt, Artificial Sequence
  Description of Artificial Sequence: Synthetic oligonucleotide
ggggaaccacaggucaugg

SEQ ID NO: 3068389 - RNA, 19 nt, Artificial Sequence
  Description of Artificial Sequence: Synthetic oligonucleotide
cccaccacuggcgugugcg

SEQ ID NO: 3068390 - RNA, 19 nt, Artificial Sequence
  Description of Artificial Sequence: Synthetic oligonucleotide
ggauggaaagaaagacaac

SEQ ID NO: 3068391 - RNA, 19 nt, Artificial Sequence
  Description of Artificial Sequence: Synthetic oligonucleotide
gcaagugucggaagggcca

SEQ ID NO: 3068392 - RNA, 19 nt, Artificial Sequence
  Description of Artificial Sequence: Synthetic oligonucleotide
cacggauaggcacuggaau

SEQ ID NO: 3068393 - RNA, 19 nt, Artificial Sequence
  Description of Artificial Sequence: Synthetic oligonucleotide
cucauugcccuuugcuugu

SEQ ID NO: 3068394 - RNA, 19 nt, Artificial Sequence
  Description of Artificial Sequence: Synthetic oligonucleotide
gucggaagggccauagggu

SEQ ID NO: 3068395 - RNA, 19 nt, Artificial Sequence
  Description of Artificial Sequence: Synthetic oligonucleotide
accaccauguggacccugu

SEQ ID NO: 3068396 - RNA, 19 nt, Artificial Sequence
  Description of Artificial Sequence: Synthetic oligonucleotide
ggauaggcacuggaauaug

SEQ ID NO: 3068397 - RNA, 19 nt, Artificial Sequence
  Description of Artificial Sequence: Synthetic oligonucleotide
aucccacggauaggcacug

SEQ ID NO: 3068398 - RNA, 19 nt, Artificial Sequence
  Description of Artificial Sequence: Synthetic oligonucleotide
ggagggagaggaguuaucu

SEQ ID NO: 3068399 - RNA, 19 nt, Artificial Sequence
  Description of Artificial Sequence: Synthetic oligonucleotide
ggggagcccaccacuggcg

SEQ ID NO: 3068400 - RNA, 19 nt, Artificial Sequence
  Description of Artificial Sequence: Synthetic oligonucleotide
ucccacggauaggcacugg

SEQ ID NO: 3068401 - RNA, 19 nt, Artificial Sequence
  Description of Artificial Sequence: Synthetic oligonucleotide
caccacuggcgugugcgug

SEQ ID NO: 3068402 - RNA, 19 nt, Artificial Sequence
  Description of Artificial Sequence: Synthetic oligonucleotide
ggccauagggugggcagag

SEQ ID NO: 3068403 - RNA, 19 nt, Artificial Sequence
  Description of Artificial Sequence: Synthetic oligonucleotide
ggagaggaguuaucugcaa

SEQ ID NO: 3068404 - RNA, 19 nt, Artificial Sequence
  Description of Artificial Sequence: Synthetic oligonucleotide
caacuuggaugccuugccu

SEQ ID NO: 3068405 - RNA, 19 nt, Artificial Sequence
  Description of Artificial Sequence: Synthetic oligonucleotide
auggggaaccacaggucau

SEQ ID NO: 3068406 - RNA, 19 nt, Artificial Sequence
  Description of Artificial Sequence: Synthetic oligonucleotide
gcccuuugcuuguuaauua

SEQ ID NO: 3068407 - RNA, 19 nt, Artificial Sequence
  Description of Artificial Sequence: Synthetic oligonucleotide
gcgugaaggaucccacgga

SEQ ID NO: 3068408 - RNA, 19 nt, Artificial Sequence
  Description of Artificial Sequence: Synthetic oligonucleotide
ggugggcagagugaggcaa

SEQ ID NO: 3068409 - RNA, 19 nt, Artificial Sequence
  Description of Artificial Sequence: Synthetic oligonucleotide
gagcccaccacuggcgugu

SEQ ID NO: 3068410 - RNA, 19 nt, Artificial Sequence
  Description of Artificial Sequence: Synthetic oligonucleotide
gugaaggaucccacggaua

SEQ ID NO: 3068411 - RNA, 19 nt, Artificial Sequence
  Description of Artificial Sequence: Synthetic oligonucleotide
cccuguuggauaugccauc

SEQ ID NO: 3068412 - RNA, 19 nt, Artificial Sequence
  Description of Artificial Sequence: Synthetic oligonucleotide
ggagcccaccacuggcgug

SEQ ID NO: 3068413 - RNA, 19 nt, Artificial Sequence
  Description of Artificial Sequence: Synthetic oligonucleotide
aggaucccacggauaggca

SEQ ID NO: 3068414 - RNA, 19 nt, Artificial Sequence
  Description of Artificial Sequence: Synthetic oligonucleotide
ggcacuggaauaugauuuu

SEQ ID NO: 3068415 - RNA, 19 nt, Artificial Sequence
  Description of Artificial Sequence: Synthetic oligonucleotide
gcauggggaaccacagguc

SEQ ID NO: 3068416 - RNA, 19 nt, Artificial Sequence
  Description of Artificial Sequence: Synthetic oligonucleotide
ucauugcccuuugcuuguu

SEQ ID NO: 3068417 - RNA, 19 nt, Artificial Sequence
  Description of Artificial Sequence: Synthetic oligonucleotide
aagugucggaagggccaua

SEQ ID NO: 3068418 - RNA, 19 nt, Artificial Sequence
  Description of Artificial Sequence: Synthetic oligonucleotide
gggacggggcgggagggag

SEQ ID NO: 3068419 - RNA, 19 nt, Artificial Sequence
  Description of Artificial Sequence: Synthetic oligonucleotide
ggacccuguuggauaugcc

SEQ ID NO: 3068420 - RNA, 19 nt, Artificial Sequence
  Description of Artificial Sequence: Synthetic oligonucleotide
ucaccaccauguggacccu

SEQ ID NO: 3068421 - RNA, 19 nt, Artificial Sequence
  Description of Artificial Sequence: Synthetic oligonucleotide
ccuuugcuuguuaauuacu

SEQ ID NO: 3068422 - RNA, 19 nt, Artificial Sequence
  Description of Artificial Sequence: Synthetic oligonucleotide
  modified_base (15)..(15): a, c, u, g, unknown or other
gugaggcaaguuaancuuu

SEQ ID NO: 3068423 - RNA, 19 nt, Artificial Sequence
  Description of Artificial Sequence: Synthetic oligonucleotide
cauguggacccuguuggau

SEQ ID NO: 3068424 - RNA, 19 nt, Artificial Sequence
  Description of Artificial Sequence: Synthetic oligonucleotide
cauugcccuuugcuuguua

SEQ ID NO: 3068425 - RNA, 19 nt, Artificial Sequence
  Description of Artificial Sequence: Synthetic oligonucleotide
gccucauugcccuuugcuu

SEQ ID NO: 3068426 - RNA, 19 nt, Artificial Sequence
  Description of Artificial Sequence: Synthetic oligonucleotide
guggacccuguuggauaug

SEQ ID NO: 3068427 - RNA, 19 nt, Artificial Sequence
  Description of Artificial Sequence: Synthetic oligonucleotide
gguuaauguuaaagagcgu

SEQ ID NO: 3068428 - RNA, 19 nt, Artificial Sequence
  Description of Artificial Sequence: Synthetic oligonucleotide
caccaccauguggacccug

SEQ ID NO: 3068429 - RNA, 19 nt, Artificial Sequence
  Description of Artificial Sequence: Synthetic oligonucleotide
gggugggcagagugaggca

SEQ ID NO: 3068430 - RNA, 19 nt, Artificial Sequence
  Description of Artificial Sequence: Synthetic oligonucleotide
gggagggagaggaguuauc

SEQ ID NO: 3068431 - RNA, 19 nt, Artificial Sequence
  Description of Artificial Sequence: Synthetic oligonucleotide
cgugugcgugugugcauug

SEQ ID NO: 3068432 - RNA, 19 nt, Artificial Sequence
  Description of Artificial Sequence: Synthetic oligonucleotide
caagugucggaagggccau

SEQ ID NO: 3068433 - RNA, 19 nt, Artificial Sequence
  Description of Artificial Sequence: Synthetic oligonucleotide
gggccauagggugggcaga

SEQ ID NO: 3068434 - RNA, 19 nt, Artificial Sequence
  Description of Artificial Sequence: Synthetic oligonucleotide
acggggcgggagggagagg

SEQ ID NO: 3068435 - RNA, 19 nt, Artificial Sequence
  Description of Artificial Sequence: Synthetic oligonucleotide
ggaaacugacagacaggau

SEQ ID NO: 3068436 - RNA, 19 nt, Artificial Sequence
  Description of Artificial Sequence: Synthetic oligonucleotide
gggagcccaccacuggcgu

SEQ ID NO: 3068437 - RNA, 19 nt, Artificial Sequence
  Description of Artificial Sequence: Synthetic oligonucleotide
cuuggaugccuugccucau

SEQ ID NO: 3068438 - RNA, 19 nt, Artificial Sequence
  Description of Artificial Sequence: Synthetic oligonucleotide
ccacaggucauggcaaugu

SEQ ID NO: 3068439 - RNA, 19 nt, Artificial Sequence
  Description of Artificial Sequence: Synthetic oligonucleotide
cgugaaggaucccacggau

SEQ ID NO: 3068440 - RNA, 19 nt, Artificial Sequence
  Description of Artificial Sequence: Synthetic oligonucleotide
gggcgggagggagaggagu

SEQ ID NO: 3068441 - RNA, 19 nt, Artificial Sequence
  Description of Artificial Sequence: Synthetic oligonucleotide
cggggcgggagggagagga

SEQ ID NO: 3068442 - RNA, 19 nt, Artificial Sequence
  Description of Artificial Sequence: Synthetic oligonucleotide
gcccaccacuggcgugugc

SEQ ID NO: 3068443 - RNA, 19 nt, Artificial Sequence
  Description of Artificial Sequence: Synthetic oligonucleotide
ggacggggcgggagggaga

SEQ ID NO: 3068444 - RNA, 19 nt, Artificial Sequence
  Description of Artificial Sequence: Synthetic oligonucleotide
ggcgugugcgugugugcau

SEQ ID NO: 3068445 - RNA, 19 nt, Artificial Sequence
  Description of Artificial Sequence: Synthetic oligonucleotide
cggauaggcacuggaauau

SEQ ID NO: 3068446 - RNA, 19 nt, Artificial Sequence
  Description of Artificial Sequence: Synthetic oligonucleotide
ggcgggagggagaggaguu

SEQ ID NO: 3068447 - RNA, 19 nt, Artificial Sequence
  Description of Artificial Sequence: Synthetic oligonucleotide
gcgugugcgugugugcauu

SEQ ID NO: 3068448 - RNA, 19 nt, Artificial Sequence
  Description of Artificial Sequence: Synthetic oligonucleotide
cacuggcgugugcgugugu

SEQ ID NO: 3068449 - RNA, 19 nt, Artificial Sequence
  Description of Artificial Sequence: Synthetic oligonucleotide
ccaccacuggcgugugcgu

SEQ ID NO: 3068450 - RNA, 19 nt, Artificial Sequence
  Description of Artificial Sequence: Synthetic oligonucleotide
gggcagagugaggcaaguu

SEQ ID NO: 3068451 - RNA, 19 nt, Artificial Sequence
  Description of Artificial Sequence: Synthetic oligonucleotide
gccauagggugggcagagu

SEQ ID NO: 3068452 - RNA, 19 nt, Artificial Sequence
  Description of Artificial Sequence: Synthetic oligonucleotide
ccaccauguggacccuguu

SEQ ID NO: 3068453 - RNA, 19 nt, Artificial Sequence
  Description of Artificial Sequence: Synthetic oligonucleotide
cgggagggagaggaguuau

SEQ ID NO: 3068454 - RNA, 19 nt, Artificial Sequence
  Description of Artificial Sequence: Synthetic oligonucleotide
gccuugccucauugcccuu

SEQ ID NO: 3068455 - RNA, 19 nt, Artificial Sequence
  Description of Artificial Sequence: Synthetic oligonucleotide
  modified_base (1)..(1): a, c, u, g, unknown or other
ncuuuugguuucugguuaa

SEQ ID NO: 3068456 - RNA, 19 nt, Artificial Sequence
  Description of Artificial Sequence: Synthetic oligonucleotide
uguauagaaagucugaugg

SEQ ID NO: 3068457 - RNA, 19 nt, Artificial Sequence
  Description of Artificial Sequence: Synthetic oligonucleotide
aaauggaaggcuuugcuac

SEQ ID NO: 3068458 - RNA, 19 nt, Artificial Sequence
  Description of Artificial Sequence: Synthetic oligonucleotide
uauucuuguguauagaaag

SEQ ID NO: 3068459 - RNA, 19 nt, Artificial Sequence
  Description of Artificial Sequence: Synthetic oligonucleotide
aauaacugaaggccuugcc

SEQ ID NO: 3068460 - RNA, 19 nt, Artificial Sequence
  Description of Artificial Sequence: Synthetic oligonucleotide
ucugauggacgaaugaagg

SEQ ID NO: 3068461 - RNA, 19 nt, Artificial Sequence
  Description of Artificial Sequence: Synthetic oligonucleotide
uguauugcaaguagugacg

SEQ ID NO: 3068462 - RNA, 19 nt, Artificial Sequence
  Description of Artificial Sequence: Synthetic oligonucleotide
acauuucacauuucuaggc

SEQ ID NO: 3068463 - RNA, 19 nt, Artificial Sequence
  Description of Artificial Sequence: Synthetic oligonucleotide
acauuuaggguuucugucc

SEQ ID NO: 3068464 - RNA, 19 nt, Artificial Sequence
  Description of Artificial Sequence: Synthetic oligonucleotide
uuugcuacauacuucagac

SEQ ID NO: 3068465 - RNA, 19 nt, Artificial Sequence
  Description of Artificial Sequence: Synthetic oligonucleotide
ucuuucaacacauuucaca

SEQ ID NO: 3068466 - RNA, 19 nt, Artificial Sequence
  Description of Artificial Sequence: Synthetic oligonucleotide
cauacucacacuuguaggg

SEQ ID NO: 3068467 - RNA, 19 nt, Artificial Sequence
  Description of Artificial Sequence: Synthetic oligonucleotide
gaauuauucuuguguauag

SEQ ID NO: 3068468 - RNA, 19 nt, Artificial Sequence
  Description of Artificial Sequence: Synthetic oligonucleotide
ucugauggacgaacgaagg

SEQ ID NO: 3068469 - RNA, 19 nt, Artificial Sequence
  Description of Artificial Sequence: Synthetic oligonucleotide
aacgcuccuguguacagac

SEQ ID NO: 3068470 - RNA, 19 nt, Artificial Sequence
  Description of Artificial Sequence: Synthetic oligonucleotide
uccuaugugaauuucuugu

SEQ ID NO: 3068471 - RNA, 19 nt, Artificial Sequence
  Description of Artificial Sequence: Synthetic oligonucleotide
uggugaauaacugaaggcc

SEQ ID NO: 3068472 - RNA, 19 nt, Artificial Sequence
  Description of Artificial Sequence: Synthetic oligonucleotide
uucaacacauuucacauuu

SEQ ID NO: 3068473 - RNA, 19 nt, Artificial Sequence
  Description of Artificial Sequence: Synthetic oligonucleotide
acauacucacacuuguagg

SEQ ID NO: 3068474 - RNA, 19 nt, Artificial Sequence
  Description of Artificial Sequence: Synthetic oligonucleotide
auacuucagacuuguaggg

SEQ ID NO: 3068475 - RNA, 19 nt, Artificial Sequence
  Description of Artificial Sequence: Synthetic oligonucleotide
uuguguauugcaaguagug

SEQ ID NO: 3068476 - RNA, 19 nt, Artificial Sequence
  Description of Artificial Sequence: Synthetic oligonucleotide
cuuguguauagaaagucug

SEQ ID NO: 3068477 - RNA, 19 nt, Artificial Sequence
  Description of Artificial Sequence: Synthetic oligonucleotide
uguacagacaguccuggug

SEQ ID NO: 3068478 - RNA, 19 nt, Artificial Sequence
  Description of Artificial Sequence: Synthetic oligonucleotide
uguaugaacgcuccugugu

SEQ ID NO: 3068479 - RNA, 19 nt, Artificial Sequence
  Description of Artificial Sequence: Synthetic oligonucleotide
uauagaaagucugauggac

SEQ ID NO: 3068480 - RNA, 19 nt, Artificial Sequence
  Description of Artificial Sequence: Synthetic oligonucleotide
ugcuacauacuucagacuu

SEQ ID NO: 3068481 - RNA, 19 nt, Artificial Sequence
  Description of Artificial Sequence: Synthetic oligonucleotide
aaggccuggccacauacuc

SEQ ID NO: 3068482 - RNA, 19 nt, Artificial Sequence
  Description of Artificial Sequence: Synthetic oligonucleotide
cacauuucacauuucuagg

SEQ ID NO: 3068483 - RNA, 19 nt, Artificial Sequence
  Description of Artificial Sequence: Synthetic oligonucleotide
ugauggacgaaugaaggcc

SEQ ID NO: 3068484 - RNA, 19 nt, Artificial Sequence
  Description of Artificial Sequence: Synthetic oligonucleotide
gugaauuucuuguguauag

SEQ ID NO: 3068485 - RNA, 19 nt, Artificial Sequence
  Description of Artificial Sequence: Synthetic oligonucleotide
uagaaagucugauggacga

SEQ ID NO: 3068486 - RNA, 19 nt, Artificial Sequence
  Description of Artificial Sequence: Synthetic oligonucleotide
ugauggacgaacgaaggcc

SEQ ID NO: 3068487 - RNA, 19 nt, Artificial Sequence
  Description of Artificial Sequence: Synthetic oligonucleotide
uaacugaaggccuugccac

SEQ ID NO: 3068488 - RNA, 19 nt, Artificial Sequence
  Description of Artificial Sequence: Synthetic oligonucleotide
guguauugcaaguagugac

SEQ ID NO: 3068489 - RNA, 19 nt, Artificial Sequence
  Description of Artificial Sequence: Synthetic oligonucleotide
cacauacucacacuuguag

SEQ ID NO: 3068490 - RNA, 19 nt, Artificial Sequence
  Description of Artificial Sequence: Synthetic oligonucleotide
cuggugaauaacugaaggc

SEQ ID NO: 3068491 - RNA, 19 nt, Artificial Sequence
  Description of Artificial Sequence: Synthetic oligonucleotide
ugcaugacugcucuugugu

SEQ ID NO: 3068492 - RNA, 19 nt, Artificial Sequence
  Description of Artificial Sequence: Synthetic oligonucleotide
uuguguauagaaagucuga

SEQ ID NO: 3068493 - RNA, 19 nt, Artificial Sequence
  Description of Artificial Sequence: Synthetic oligonucleotide
ugcucuuguguauugcaag

SEQ ID NO: 3068494 - RNA, 19 nt, Artificial Sequence
  Description of Artificial Sequence: Synthetic oligonucleotide
aaagucugauggacgaacg

SEQ ID NO: 3068495 - RNA, 19 nt, Artificial Sequence
  Description of Artificial Sequence: Synthetic oligonucleotide
cauuucuaggcuucucucc

SEQ ID NO: 3068496 - RNA, 19 nt, Artificial Sequence
  Description of Artificial Sequence: Synthetic oligonucleotide
uguguacagacaguccugg

SEQ ID NO: 3068497 - RNA, 19 nt, Artificial Sequence
  Description of Artificial Sequence: Synthetic oligonucleotide
auagaaagucugauggacg

SEQ ID NO: 3068498 - RNA, 19 nt, Artificial Sequence
  Description of Artificial Sequence: Synthetic oligonucleotide
gaauuucuuguguauagaa

SEQ ID NO: 3068499 - RNA, 19 nt, Artificial Sequence
  Description of Artificial Sequence: Synthetic oligonucleotide
aauuauucuuguguauaga

SEQ ID NO: 3068500 - RNA, 19 nt, Artificial Sequence
  Description of Artificial Sequence: Synthetic oligonucleotide
ugaauuauucuuguguaua

SEQ ID NO: 3068501 - RNA, 19 nt, Artificial Sequence
  Description of Artificial Sequence: Synthetic oligonucleotide
uaugugaauuucuugugua

SEQ ID NO: 3068502 - RNA, 19 nt, Artificial Sequence
  Description of Artificial Sequence: Synthetic oligonucleotide
auuucuaggcuucucuccu

SEQ ID NO: 3068503 - RNA, 19 nt, Artificial Sequence
  Description of Artificial Sequence: Synthetic oligonucleotide
aauggaaggcuuugcuaca

SEQ ID NO: 3068504 - RNA, 19 nt, Artificial Sequence
  Description of Artificial Sequence: Synthetic oligonucleotide
aagucugauggacgaauga

SEQ ID NO: 3068505 - RNA, 19 nt, Artificial Sequence
  Description of Artificial Sequence: Synthetic oligonucleotide
acgaaugaaggccuggcca

SEQ ID NO: 3068506 - RNA, 19 nt, Artificial Sequence
  Description of Artificial Sequence: Synthetic oligonucleotide
uguguauugcaaguaguga

SEQ ID NO: 3068507 - RNA, 19 nt, Artificial Sequence
  Description of Artificial Sequence: Synthetic oligonucleotide
acacauuuaggguuucugu

SEQ ID NO: 3068508 - RNA, 19 nt, Artificial Sequence
  Description of Artificial Sequence: Synthetic oligonucleotide
uccugugugaauuauucuu

SEQ ID NO: 3068509 - RNA, 19 nt, Artificial Sequence
  Description of Artificial Sequence: Synthetic oligonucleotide
aauuucuuguguauagaaa

SEQ ID NO: 3068510 - RNA, 19 nt, Artificial Sequence
  Description of Artificial Sequence: Synthetic oligonucleotide
cacauuuaggguuucuguc

SEQ ID NO: 3068511 - RNA, 19 nt, Artificial Sequence
  Description of Artificial Sequence: Synthetic oligonucleotide
ugugugaauuauucuugug

SEQ ID NO: 3068512 - RNA, 19 nt, Artificial Sequence
  Description of Artificial Sequence: Synthetic oligonucleotide
guguauagaaagucugaug

SEQ ID NO: 3068513 - RNA, 19 nt, Artificial Sequence
  Description of Artificial Sequence: Synthetic oligonucleotide
cugauggacgaaugaaggc

SEQ ID NO: 3068514 - RNA, 19 nt, Artificial Sequence
  Description of Artificial Sequence: Synthetic oligonucleotide
gaaagucugauggacgaac

SEQ ID NO: 3068515 - RNA, 19 nt, Artificial Sequence
  Description of Artificial Sequence: Synthetic oligonucleotide
uugcaaguagugacgaaaa

SEQ ID NO: 3068516 - RNA, 19 nt, Artificial Sequence
  Description of Artificial Sequence: Synthetic oligonucleotide
guacagacaguccugguga

SEQ ID NO: 3068517 - RNA, 19 nt, Artificial Sequence
  Description of Artificial Sequence: Synthetic oligonucleotide
ucuccugcaugacugcucu

SEQ ID NO: 3068518 - RNA, 19 nt, Artificial Sequence
  Description of Artificial Sequence: Synthetic oligonucleotide
agacuuguaggguuucucu

SEQ ID NO: 3068519 - RNA, 19 nt, Artificial Sequence
  Description of Artificial Sequence: Synthetic oligonucleotide
aagucugauggacgaacga

SEQ ID NO: 3068520 - RNA, 19 nt, Artificial Sequence
  Description of Artificial Sequence: Synthetic oligonucleotide
uguguauagaaagucugau

SEQ ID NO: 3068521 - RNA, 19 nt, Artificial Sequence
  Description of Artificial Sequence: Synthetic oligonucleotide
uccuggugaauaacugaag

SEQ ID NO: 3068522 - RNA, 19 nt, Artificial Sequence
  Description of Artificial Sequence: Synthetic oligonucleotide
ugaauuucuuguguauaga

SEQ ID NO: 3068523 - RNA, 19 nt, Artificial Sequence
  Description of Artificial Sequence: Synthetic oligonucleotide
uucuaggcuucucuccugc

SEQ ID NO: 3068524 - RNA, 19 nt, Artificial Sequence
  Description of Artificial Sequence: Synthetic oligonucleotide
auugcaaguagugacgaaa

SEQ ID NO: 3068525 - RNA, 19 nt, Artificial Sequence
  Description of Artificial Sequence: Synthetic oligonucleotide
uguccuaugugaauuucuu

SEQ ID NO: 3068526 - RNA, 19 nt, Artificial Sequence
  Description of Artificial Sequence: Synthetic oligonucleotide
aguccuggugaauaacuga

SEQ ID NO: 3068527 - RNA, 19 nt, Artificial Sequence
  Description of Artificial Sequence: Synthetic oligonucleotide
ccuggugaauaacugaagg

SEQ ID NO: 3068528 - RNA, 19 nt, Artificial Sequence
  Description of Artificial Sequence: Synthetic oligonucleotide
aaagucugauggacgaaug

SEQ ID NO: 3068529 - RNA, 19 nt, Artificial Sequence
  Description of Artificial Sequence: Synthetic oligonucleotide
ugaauaacugaaggccuug

SEQ ID NO: 3068530 - RNA, 19 nt, Artificial Sequence
  Description of Artificial Sequence: Synthetic oligonucleotide
gacgaaugaaggccuggcc

SEQ ID NO: 3068531 - RNA, 19 nt, Artificial Sequence
  Description of Artificial Sequence: Synthetic oligonucleotide
ugugaauuucuuguguaua

SEQ ID NO: 3068532 - RNA, 19 nt, Artificial Sequence
  Description of Artificial Sequence: Synthetic oligonucleotide
acuucagacuuguaggguu

SEQ ID NO: 3068533 - RNA, 19 nt, Artificial Sequence
  Description of Artificial Sequence: Synthetic oligonucleotide
acgaacgaaggccuggcca

SEQ ID NO: 3068534 - RNA, 19 nt, Artificial Sequence
  Description of Artificial Sequence: Synthetic oligonucleotide
gucugauggacgaaugaag

SEQ ID NO: 3068535 - RNA, 19 nt, Artificial Sequence
  Description of Artificial Sequence: Synthetic oligonucleotide
acugcucuuguguauugca

SEQ ID NO: 3068536 - RNA, 19 nt, Artificial Sequence
  Description of Artificial Sequence: Synthetic oligonucleotide
cugauggacgaacgaaggc

SEQ ID NO: 3068537 - RNA, 19 nt, Artificial Sequence
  Description of Artificial Sequence: Synthetic oligonucleotide
cuuugcuacauacuucaga

SEQ ID NO: 3068538 - RNA, 19 nt, Artificial Sequence
  Description of Artificial Sequence: Synthetic oligonucleotide
guauagaaagucugaugga

SEQ ID NO: 3068539 - RNA, 19 nt, Artificial Sequence
  Description of Artificial Sequence: Synthetic oligonucleotide
ugaacgcuccuguguacag

SEQ ID NO: 3068540 - RNA, 19 nt, Artificial Sequence
  Description of Artificial Sequence: Synthetic oligonucleotide
gucugauggacgaacgaag

SEQ ID NO: 3068541 - RNA, 19 nt, Artificial Sequence
  Description of Artificial Sequence: Synthetic oligonucleotide
uuucuguccuaugugaauu

SEQ ID NO: 3068542 - RNA, 19 nt, Artificial Sequence
  Description of Artificial Sequence: Synthetic oligonucleotide
cuuucaacacauuucacau

SEQ ID NO: 3068543 - RNA, 19 nt, Artificial Sequence
  Description of Artificial Sequence: Synthetic oligonucleotide
gaauaacugaaggccuugc

SEQ ID NO: 3068544 - RNA, 19 nt, Artificial Sequence
  Description of Artificial Sequence: Synthetic oligonucleotide
augugaauuucuuguguau

SEQ ID NO: 3068545 - RNA, 19 nt, Artificial Sequence
  Description of Artificial Sequence: Synthetic oligonucleotide
aacacauuucacauuucua

SEQ ID NO: 3068546 - RNA, 19 nt, Artificial Sequence
  Description of Artificial Sequence: Synthetic oligonucleotide
uggacgaacgaaggccugg

SEQ ID NO: 3068547 - RNA, 19 nt, Artificial Sequence
  Description of Artificial Sequence: Synthetic oligonucleotide
ggcuuugcuacauacuuca

SEQ ID NO: 3068548 - RNA, 19 nt, Artificial Sequence
  Description of Artificial Sequence: Synthetic oligonucleotide
uuuaggguuucuguccuau

SEQ ID NO: 3068549 - RNA, 19 nt, Artificial Sequence
  Description of Artificial Sequence: Synthetic oligonucleotide
guccuaugugaauuucuug

SEQ ID NO: 3068550 - RNA, 19 nt, Artificial Sequence
  Description of Artificial Sequence: Synthetic oligonucleotide
uuucuaggcuucucuccug

SEQ ID NO: 3068551 - RNA, 19 nt, Artificial Sequence
  Description of Artificial Sequence: Synthetic oligonucleotide
uaugaacgcuccuguguac

SEQ ID NO: 3068552 - RNA, 19 nt, Artificial Sequence
  Description of Artificial Sequence: Synthetic oligonucleotide
uuucaacacauuucacauu

SEQ ID NO: 3068553 - RNA, 19 nt, Artificial Sequence
  Description of Artificial Sequence: Synthetic oligonucleotide
ggaaggcuuugcuacauac

SEQ ID NO: 3068554 - RNA, 19 nt, Artificial Sequence
  Description of Artificial Sequence: Synthetic oligonucleotide
uggacgaaugaaggccugg

SEQ ID NO: 3068555 - RNA, 19 nt, Artificial Sequence
  Description of Artificial Sequence: Synthetic oligonucleotide
uggccacauacucacacuu

SEQ ID NO: 3068556 - RNA, 19 nt, Artificial Sequence
  Description of Artificial Sequence: Synthetic oligonucleotide
caguccuggugaauaacug

SEQ ID NO: 3068557 - RNA, 19 nt, Artificial Sequence
  Description of Artificial Sequence: Synthetic oligonucleotide
cuguguacagacaguccug

SEQ ID NO: 3068558 - RNA, 19 nt, Artificial Sequence
  Description of Artificial Sequence: Synthetic oligonucleotide
ccugugugaauuauucuug

SEQ ID NO: 3068559 - RNA, 19 nt, Artificial Sequence
  Description of Artificial Sequence: Synthetic oligonucleotide
uugcuacauacuucagacu

SEQ ID NO: 3068560 - RNA, 19 nt, Artificial Sequence
  Description of Artificial Sequence: Synthetic oligonucleotide
agucugauggacgaaugaa

SEQ ID NO: 3068561 - RNA, 19 nt, Artificial Sequence
  Description of Artificial Sequence: Synthetic oligonucleotide
ucaacacauuucacauuuc

SEQ ID NO: 3068562 - RNA, 19 nt, Artificial Sequence
  Description of Artificial Sequence: Synthetic oligonucleotide
guaugaacgcuccugugua

SEQ ID NO: 3068563 - RNA, 19 nt, Artificial Sequence
  Description of Artificial Sequence: Synthetic oligonucleotide
uacuucagacuuguagggu

SEQ ID NO: 3068564 - RNA, 19 nt, Artificial Sequence
  Description of Artificial Sequence: Synthetic oligonucleotide
agucugauggacgaacgaa

SEQ ID NO: 3068565 - RNA, 19 nt, Artificial Sequence
  Description of Artificial Sequence: Synthetic oligonucleotide
uauugcaaguagugacgaa

SEQ ID NO: 3068566 - RNA, 19 nt, Artificial Sequence
  Description of Artificial Sequence: Synthetic oligonucleotide
ugacugcucuuguguauug

SEQ ID NO: 3068567 - RNA, 19 nt, Artificial Sequence
  Description of Artificial Sequence: Synthetic oligonucleotide
acaguccuggugaauaacu

SEQ ID NO: 3068568 - RNA, 19 nt, Artificial Sequence
  Description of Artificial Sequence: Synthetic oligonucleotide
auacucacacuuguagggu

SEQ ID NO: 3068569 - RNA, 19 nt, Artificial Sequence
  Description of Artificial Sequence: Synthetic oligonucleotide
ccuaugugaauuucuugug

SEQ ID NO: 3068570 - RNA, 19 nt, Artificial Sequence
  Description of Artificial Sequence: Synthetic oligonucleotide
uacucacacuuguaggguu

SEQ ID NO: 3068571 - RNA, 19 nt, Artificial Sequence
  Description of Artificial Sequence: Synthetic oligonucleotide
aggcuuugcuacauacuuc

SEQ ID NO: 3068572 - RNA, 19 nt, Artificial Sequence
  Description of Artificial Sequence: Synthetic oligonucleotide
cuccuguguacagacaguc

SEQ ID NO: 3068573 - RNA, 19 nt, Artificial Sequence
  Description of Artificial Sequence: Synthetic oligonucleotide
ucuguccuaugugaauuuc

SEQ ID NO: 3068574 - RNA, 19 nt, Artificial Sequence
  Description of Artificial Sequence: Synthetic oligonucleotide
cauuucacauuucuaggcu

SEQ ID NO: 3068575 - RNA, 19 nt, Artificial Sequence
  Description of Artificial Sequence: Synthetic oligonucleotide
ucuaggcuucucuccugca

SEQ ID NO: 3068576 - RNA, 19 nt, Artificial Sequence
  Description of Artificial Sequence: Synthetic oligonucleotide
gacgaacgaaggccuggcc

SEQ ID NO: 3068577 - RNA, 19 nt, Artificial Sequence
  Description of Artificial Sequence: Synthetic oligonucleotide
cuaugugaauuucuugugu

SEQ ID NO: 3068578 - RNA, 19 nt, Artificial Sequence
  Description of Artificial Sequence: Synthetic oligonucleotide
uucuguccuaugugaauuu

SEQ ID NO: 3068579 - RNA, 19 nt, Artificial Sequence
  Description of Artificial Sequence: Synthetic oligonucleotide
augaacgcuccuguguaca

SEQ ID NO: 3068580 - RNA, 19 nt, Artificial Sequence
  Description of Artificial Sequence: Synthetic oligonucleotide
gacugcucuuguguauugc

SEQ ID NO: 3068581 - RNA, 19 nt, Artificial Sequence
  Description of Artificial Sequence: Synthetic oligonucleotide
caacacauuucacauuucu

SEQ ID NO: 3068582 - RNA, 19 nt, Artificial Sequence
  Description of Artificial Sequence: Synthetic oligonucleotide
agacaguccuggugaauaa

SEQ ID NO: 3068583 - RNA, 19 nt, Artificial Sequence
  Description of Artificial Sequence: Synthetic oligonucleotide
gauggacgaaugaaggccu

SEQ ID NO: 3068584 - RNA, 19 nt, Artificial Sequence
  Description of Artificial Sequence: Synthetic oligonucleotide
gauggacgaacgaaggccu

SEQ ID NO: 3068585 - RNA, 19 nt, Artificial Sequence
  Description of Artificial Sequence: Synthetic oligonucleotide
gacaguccuggugaauaac

SEQ ID NO: 3068586 - RNA, 19 nt, Artificial Sequence
  Description of Artificial Sequence: Synthetic oligonucleotide
uacagacaguccuggugaa

SEQ ID NO: 3068587 - RNA, 19 nt, Artificial Sequence
  Description of Artificial Sequence: Synthetic oligonucleotide
gaaagucugauggacgaau

SEQ ID NO: 3068588 - RNA, 19 nt, Artificial Sequence
  Description of Artificial Sequence: Synthetic oligonucleotide
ggguuucuguccuauguga

SEQ ID NO: 3068589 - RNA, 19 nt, Artificial Sequence
  Description of Artificial Sequence: Synthetic oligonucleotide
ucagacuuguaggguuucu

SEQ ID NO: 3068590 - RNA, 19 nt, Artificial Sequence
  Description of Artificial Sequence: Synthetic oligonucleotide
cugcaugacugcucuugug

SEQ ID NO: 3068591 - RNA, 19 nt, Artificial Sequence
  Description of Artificial Sequence: Synthetic oligonucleotide
ucucuccuguaugaacgcu

SEQ ID NO: 3068592 - RNA, 19 nt, Artificial Sequence
  Description of Artificial Sequence: Synthetic oligonucleotide
cucuccugcaugacugcuc

SEQ ID NO: 3068593 - RNA, 19 nt, Artificial Sequence
  Description of Artificial Sequence: Synthetic oligonucleotide
cacauuucuaggcuucucu

SEQ ID NO: 3068594 - RNA, 19 nt, Artificial Sequence
  Description of Artificial Sequence: Synthetic oligonucleotide
guccuggugaauaacugaa

SEQ ID NO: 3068595 - RNA, 19 nt, Artificial Sequence
  Description of Artificial Sequence: Synthetic oligonucleotide
gugaauuauucuuguguau

SEQ ID NO: 3068596 - RNA, 19 nt, Artificial Sequence
  Description of Artificial Sequence: Synthetic oligonucleotide
cauuuaggguuucuguccu

SEQ ID NO: 3068597 - RNA, 19 nt, Artificial Sequence
  Description of Artificial Sequence: Synthetic oligonucleotide
ucucuccugcaugacugcu

SEQ ID NO: 3068598 - RNA, 19 nt, Artificial Sequence
  Description of Artificial Sequence: Synthetic oligonucleotide
ucacauuucuaggcuucuc

SEQ ID NO: 3068599 - RNA, 19 nt, Artificial Sequence
  Description of Artificial Sequence: Synthetic oligonucleotide
uucagacuuguaggguuuc

SEQ ID NO: 3068600 - RNA, 19 nt, Artificial Sequence
  Description of Artificial Sequence: Synthetic oligonucleotide
ucacacauuuaggguuucu

SEQ ID NO: 3068601 - RNA, 19 nt, Artificial Sequence
  Description of Artificial Sequence: Synthetic oligonucleotide
gcuacauacuucagacuug

SEQ ID NO: 3068602 - RNA, 19 nt, Artificial Sequence
  Description of Artificial Sequence: Synthetic oligonucleotide
augacugcucuuguguauu

SEQ ID NO: 3068603 - RNA, 19 nt, Artificial Sequence
  Description of Artificial Sequence: Synthetic oligonucleotide
agaaagucugauggacgaa

SEQ ID NO: 3068604 - RNA, 19 nt, Artificial Sequence
  Description of Artificial Sequence: Synthetic oligonucleotide
ccuggccacauacucacac

SEQ ID NO: 3068605 - RNA, 19 nt, Artificial Sequence
  Description of Artificial Sequence: Synthetic oligonucleotide
guuucuguccuaugugaau

SEQ ID NO: 3068606 - RNA, 19 nt, Artificial Sequence
  Description of Artificial Sequence: Synthetic oligonucleotide
ucucuccugugugaauuau

SEQ ID NO: 3068607 - RNA, 19 nt, Artificial Sequence
  Description of Artificial Sequence: Synthetic oligonucleotide
cugugugaauuauucuugu

SEQ ID NO: 3068608 - RNA, 19 nt, Artificial Sequence
  Description of Artificial Sequence: Synthetic oligonucleotide
cuacauacuucagacuugu

SEQ ID NO: 3068609 - RNA, 19 nt, Artificial Sequence
  Description of Artificial Sequence: Synthetic oligonucleotide
ggugaauaacugaaggccu

SEQ ID NO: 3068610 - RNA, 19 nt, Artificial Sequence
  Description of Artificial Sequence: Synthetic oligonucleotide
aacgaaggccuggccacau

SEQ ID NO: 3068611 - RNA, 19 nt, Artificial Sequence
  Description of Artificial Sequence: Synthetic oligonucleotide
auuuaggguuucuguccua

SEQ ID NO: 3068612 - RNA, 19 nt, Artificial Sequence
  Description of Artificial Sequence: Synthetic oligonucleotide
ggacgaaugaaggccuggc

SEQ ID NO: 3068613 - RNA, 19 nt, Artificial Sequence
  Description of Artificial Sequence: Synthetic oligonucleotide
cagacaguccuggugaaua

SEQ ID NO: 3068614 - RNA, 19 nt, Artificial Sequence
  Description of Artificial Sequence: Synthetic oligonucleotide
cuguccuaugugaauuucu

SEQ ID NO: 3068615 - RNA, 19 nt, Artificial Sequence
  Description of Artificial Sequence: Synthetic oligonucleotide
cgcuccuguguacagacag

SEQ ID NO: 3068616 - RNA, 19 nt, Artificial Sequence
  Description of Artificial Sequence: Synthetic oligonucleotide
gaacgcuccuguguacaga

SEQ ID NO: 3068617 - RNA, 19 nt, Artificial Sequence
  Description of Artificial Sequence: Synthetic oligonucleotide
uucacacauuuaggguuuc

SEQ ID NO: 3068618 - RNA, 19 nt, Artificial Sequence
  Description of Artificial Sequence: Synthetic oligonucleotide
cgaacgaaggccuggccac

SEQ ID NO: 3068619 - RNA, 19 nt, Artificial Sequence
  Description of Artificial Sequence: Synthetic oligonucleotide
cuucacacauuuaggguuu

SEQ ID NO: 3068620 - RNA, 19 nt, Artificial Sequence
  Description of Artificial Sequence: Synthetic oligonucleotide
auggacgaaugaaggccug

SEQ ID NO: 3068621 - RNA, 19 nt, Artificial Sequence
  Description of Artificial Sequence: Synthetic oligonucleotide
gccacauacucacacuugu

SEQ ID NO: 3068622 - RNA, 19 nt, Artificial Sequence
  Description of Artificial Sequence: Synthetic oligonucleotide
gguuucuguccuaugugaa

SEQ ID NO: 3068623 - RNA, 19 nt, Artificial Sequence
  Description of Artificial Sequence: Synthetic oligonucleotide
gcucuuguguauugcaagu

SEQ ID NO: 3068624 - RNA, 19 nt, Artificial Sequence
  Description of Artificial Sequence: Synthetic oligonucleotide
auggacgaacgaaggccug

SEQ ID NO: 3068625 - RNA, 19 nt, Artificial Sequence
  Description of Artificial Sequence: Synthetic oligonucleotide
gaacgaaggccuggccaca

SEQ ID NO: 3068626 - RNA, 19 nt, Artificial Sequence
  Description of Artificial Sequence: Synthetic oligonucleotide
caugacugcucuuguguau

SEQ ID NO: 3068627 - RNA, 19 nt, Artificial Sequence
  Description of Artificial Sequence: Synthetic oligonucleotide
ggacgaacgaaggccuggc

SEQ ID NO: 3068628 - RNA, 19 nt, Artificial Sequence
  Description of Artificial Sequence: Synthetic oligonucleotide
aggccuggccacauacuca

SEQ ID NO: 3068629 - RNA, 19 nt, Artificial Sequence
  Description of Artificial Sequence: Synthetic oligonucleotide
acagacaguccuggugaau

SEQ ID NO: 3068630 - RNA, 19 nt, Artificial Sequence
  Description of Artificial Sequence: Synthetic oligonucleotide
cuccugugugaauuauucu

SEQ ID NO: 3068631 - RNA, 19 nt, Artificial Sequence
  Description of Artificial Sequence: Synthetic oligonucleotide
cuucagacuuguaggguuu

SEQ ID NO: 3068632 - RNA, 19 nt, Artificial Sequence
  Description of Artificial Sequence: Synthetic oligonucleotide
gcaugacugcucuugugua

SEQ ID NO: 3068633 - RNA, 19 nt, Artificial Sequence
  Description of Artificial Sequence: Synthetic oligonucleotide
gugaauaacugaaggccuu

SEQ ID NO: 3068634 - RNA, 19 nt, Artificial Sequence
  Description of Artificial Sequence: Synthetic oligonucleotide
gcuuugcuacauacuucag

SEQ ID NO: 3068635 - RNA, 19 nt, Artificial Sequence
  Description of Artificial Sequence: Synthetic oligonucleotide
cuaggcuucucuccugcau

SEQ ID NO: 3068636 - RNA, 19 nt, Artificial Sequence
  Description of Artificial Sequence: Synthetic oligonucleotide
cuggccacauacucacacu

SEQ ID NO: 3068637 - RNA, 19 nt, Artificial Sequence
  Description of Artificial Sequence: Synthetic oligonucleotide
ccacauacuucacacauuu

SEQ ID NO: 3068638 - RNA, 19 nt, Artificial Sequence
  Description of Artificial Sequence: Synthetic oligonucleotide
gaaggccuggccacauacu

SEQ ID NO: 3068639 - RNA, 19 nt, Artificial Sequence
  Description of Artificial Sequence: Synthetic oligonucleotide
gcuucucuccugcaugacu

SEQ ID NO: 3068640 - RNA, 19 nt, Artificial Sequence
  Description of Artificial Sequence: Synthetic oligonucleotide
guguacagacaguccuggu

SEQ ID NO: 3068641 - RNA, 19 nt, Artificial Sequence
  Description of Artificial Sequence: Synthetic oligonucleotide
acgaaggccuggccacaua

SEQ ID NO: 3068642 - RNA, 19 nt, Artificial Sequence
  Description of Artificial Sequence: Synthetic oligonucleotide
ccacauacucacacuugua

SEQ ID NO: 3068643 - RNA, 19 nt, Artificial Sequence
  Description of Artificial Sequence: Synthetic oligonucleotide
acgcuccuguguacagaca

SEQ ID NO: 3068644 - RNA, 19 nt, Artificial Sequence
  Description of Artificial Sequence: Synthetic oligonucleotide
gccacauacuucacacauu

SEQ ID NO: 3068645 - RNA, 19 nt, Artificial Sequence
  Description of Artificial Sequence: Synthetic oligonucleotide
gccuggccacauacucaca

SEQ ID NO: 3068646 - RNA, 19 nt, Artificial Sequence
  Description of Artificial Sequence: Synthetic oligonucleotide
cuccugcaugacugcucuu

SEQ ID NO: 3068647 - RNA, 19 nt, Artificial Sequence
  Description of Artificial Sequence: Synthetic oligonucleotide
acagacauggcccaagggg

SEQ ID NO: 3068648 - RNA, 19 nt, Artificial Sequence
  Description of Artificial Sequence: Synthetic oligonucleotide
ucuuuuacagucucgguca

SEQ ID NO: 3068649 - RNA, 19 nt, Artificial Sequence
  Description of Artificial Sequence: Synthetic oligonucleotide
caggccaugacccugaccg

SEQ ID NO: 3068650 - RNA, 19 nt, Artificial Sequence
  Description of Artificial Sequence: Synthetic oligonucleotide
uggcccuugaggaaggugg

SEQ ID NO: 3068651 - RNA, 19 nt, Artificial Sequence
  Description of Artificial Sequence: Synthetic oligonucleotide
uacagucucggucagcugc

SEQ ID NO: 3068652 - RNA, 19 nt, Artificial Sequence
  Description of Artificial Sequence: Synthetic oligonucleotide
aggccgguggcucacaggc

SEQ ID NO: 3068653 - RNA, 19 nt, Artificial Sequence
  Description of Artificial Sequence: Synthetic oligonucleotide
ucuaccaacuggaccaggc

SEQ ID NO: 3068654 - RNA, 19 nt, Artificial Sequence
  Description of Artificial Sequence: Synthetic oligonucleotide
ucucguuccaggaucugag

SEQ ID NO: 3068655 - RNA, 19 nt, Artificial Sequence
  Description of Artificial Sequence: Synthetic oligonucleotide
uuuacagucucggucagcu

SEQ ID NO: 3068656 - RNA, 19 nt, Artificial Sequence
  Description of Artificial Sequence: Synthetic oligonucleotide
uaccaacuggaccaggccc

SEQ ID NO: 3068657 - RNA, 19 nt, Artificial Sequence
  Description of Artificial Sequence: Synthetic oligonucleotide
ucugagucagccucugcag

SEQ ID NO: 3068658 - RNA, 19 nt, Artificial Sequence
  Description of Artificial Sequence: Synthetic oligonucleotide
agccucuaccaacuggacc

SEQ ID NO: 3068659 - RNA, 19 nt, Artificial Sequence
  Description of Artificial Sequence: Synthetic oligonucleotide
guacuggggacagacaugg

SEQ ID NO: 3068660 - RNA, 19 nt, Artificial Sequence
  Description of Artificial Sequence: Synthetic oligonucleotide
cugccagucucuuuuacag

SEQ ID NO: 3068661 - RNA, 19 nt, Artificial Sequence
  Description of Artificial Sequence: Synthetic oligonucleotide
cucuuuuacagucucgguc

SEQ ID NO: 3068662 - RNA, 19 nt, Artificial Sequence
  Description of Artificial Sequence: Synthetic oligonucleotide
gucucuuuuacagucucgg

SEQ ID NO: 3068663 - RNA, 19 nt, Artificial Sequence
  Description of Artificial Sequence: Synthetic oligonucleotide
cuggggacagacauggccc

SEQ ID NO: 3068664 - RNA, 19 nt, Artificial Sequence
  Description of Artificial Sequence: Synthetic oligonucleotide
uccaggaucugagucagcc

SEQ ID NO: 3068665 - RNA, 19 nt, Artificial Sequence
  Description of Artificial Sequence: Synthetic oligonucleotide
uccuccgugguggugaagg

SEQ ID NO: 3068666 - RNA, 19 nt, Artificial Sequence
  Description of Artificial Sequence: Synthetic oligonucleotide
uggcucacaggccaugacc

SEQ ID NO: 3068667 - RNA, 19 nt, Artificial Sequence
  Description of Artificial Sequence: Synthetic oligonucleotide
gacuuggcguuccugccgg

SEQ ID NO: 3068668 - RNA, 19 nt, Artificial Sequence
  Description of Artificial Sequence: Synthetic oligonucleotide
ucugccagucucuuuuaca

SEQ ID NO: 3068669 - RNA, 19 nt, Artificial Sequence
  Description of Artificial Sequence: Synthetic oligonucleotide
gacagacauggcccaaggg

SEQ ID NO: 3068670 - RNA, 19 nt, Artificial Sequence
  Description of Artificial Sequence: Synthetic oligonucleotide
caggacuuggcguuccugc

SEQ ID NO: 3068671 - RNA, 19 nt, Artificial Sequence
  Description of Artificial Sequence: Synthetic oligonucleotide
ugagucagccucugcagcu

SEQ ID NO: 3068672 - RNA, 19 nt, Artificial Sequence
  Description of Artificial Sequence: Synthetic oligonucleotide
cagcuggucacccaccugc

SEQ ID NO: 3068673 - RNA, 19 nt, Artificial Sequence
  Description of Artificial Sequence: Synthetic oligonucleotide
ucguuccaggaucugaguc

SEQ ID NO: 3068674 - RNA, 19 nt, Artificial Sequence
  Description of Artificial Sequence: Synthetic oligonucleotide
caggaucugagucagccuc

SEQ ID NO: 3068675 - RNA, 19 nt, Artificial Sequence
  Description of Artificial Sequence: Synthetic oligonucleotide
ugugcuggggcccggcggc

SEQ ID NO: 3068676 - RNA, 19 nt, Artificial Sequence
  Description of Artificial Sequence: Synthetic oligonucleotide
ugggcagccucuaccaacu

SEQ ID NO: 3068677 - RNA, 19 nt, Artificial Sequence
  Description of Artificial Sequence: Synthetic oligonucleotide
acuggaccaggcccagccc

SEQ ID NO: 3068678 - RNA, 19 nt, Artificial Sequence
  Description of Artificial Sequence: Synthetic oligonucleotide
agccucugcagcuggucac

SEQ ID NO: 3068679 - RNA, 19 nt, Artificial Sequence
  Description of Artificial Sequence: Synthetic oligonucleotide
agucucggucagcugcccc

SEQ ID NO: 3068680 - RNA, 19 nt, Artificial Sequence
  Description of Artificial Sequence: Synthetic oligonucleotide
aaggccgguggcucacagg

SEQ ID NO: 3068681 - RNA, 19 nt, Artificial Sequence
  Description of Artificial Sequence: Synthetic oligonucleotide
ucucuuuuacagucucggu

SEQ ID NO: 3068682 - RNA, 19 nt, Artificial Sequence
  Description of Artificial Sequence: Synthetic oligonucleotide
cuaccaacuggaccaggcc

SEQ ID NO: 3068683 - RNA, 19 nt, Artificial Sequence
  Description of Artificial Sequence: Synthetic oligonucleotide
cucuccuccuccguggugg

SEQ ID NO: 3068684 - RNA, 19 nt, Artificial Sequence
  Description of Artificial Sequence: Synthetic oligonucleotide
cagacauggcccaagggga

SEQ ID NO: 3068685 - RNA, 19 nt, Artificial Sequence
  Description of Artificial Sequence: Synthetic oligonucleotide
gccucuaccaacuggacca

SEQ ID NO: 3068686 - RNA, 19 nt, Artificial Sequence
  Description of Artificial Sequence: Synthetic oligonucleotide
cugagucagccucugcagc

SEQ ID NO: 3068687 - RNA, 19 nt, Artificial Sequence
  Description of Artificial Sequence: Synthetic oligonucleotide
guuccugccggucucguuc

SEQ ID NO: 3068688 - RNA, 19 nt, Artificial Sequence
  Description of Artificial Sequence: Synthetic oligonucleotide
acaggccaugacccugacc

SEQ ID NO: 3068689 - RNA, 19 nt, Artificial Sequence
  Description of Artificial Sequence: Synthetic oligonucleotide
acagucucggucagcugcc

SEQ ID NO: 3068690 - RNA, 19 nt, Artificial Sequence
  Description of Artificial Sequence: Synthetic oligonucleotide
accuggguugugauuaggg

SEQ ID NO: 3068691 - RNA, 19 nt, Artificial Sequence
  Description of Artificial Sequence: Synthetic oligonucleotide
cuuuuacagucucggucag

SEQ ID NO: 3068692 - RNA, 19 nt, Artificial Sequence
  Description of Artificial Sequence: Synthetic oligonucleotide
uuggcguuccugccggucu

SEQ ID NO: 3068693 - RNA, 19 nt, Artificial Sequence
  Description of Artificial Sequence: Synthetic oligonucleotide
uucugccagucucuuuuac

SEQ ID NO: 3068694 - RNA, 19 nt, Artificial Sequence
  Description of Artificial Sequence: Synthetic oligonucleotide
cuggaccaggcccagcccc

SEQ ID NO: 3068695 - RNA, 19 nt, Artificial Sequence
  Description of Artificial Sequence: Synthetic oligonucleotide
agucucuuuuacagucucg

SEQ ID NO: 3068696 - RNA, 19 nt, Artificial Sequence
  Description of Artificial Sequence: Synthetic oligonucleotide
cugggcagccucuaccaac

SEQ ID NO: 3068697 - RNA, 19 nt, Artificial Sequence
  Description of Artificial Sequence: Synthetic oligonucleotide
ccuggguugugauuagggg

SEQ ID NO: 3068698 - RNA, 19 nt, Artificial Sequence
  Description of Artificial Sequence: Synthetic oligonucleotide
uuuuacagucucggucagc

SEQ ID NO: 3068699 - RNA, 19 nt, Artificial Sequence
  Description of Artificial Sequence: Synthetic oligonucleotide
agacauggcccaaggggac

SEQ ID NO: 3068700 - RNA, 19 nt, Artificial Sequence
  Description of Artificial Sequence: Synthetic oligonucleotide
uggucacccaccugccuca

SEQ ID NO: 3068701 - RNA, 19 nt, Artificial Sequence
  Description of Artificial Sequence: Synthetic oligonucleotide
uccuccuccguggugguga

SEQ ID NO: 3068702 - RNA, 19 nt, Artificial Sequence
  Description of Artificial Sequence: Synthetic oligonucleotide
cagucucuuuuacagucuc

SEQ ID NO: 3068703 - RNA, 19 nt, Artificial Sequence
  Description of Artificial Sequence: Synthetic oligonucleotide
ugccagucucuuuuacagu

SEQ ID NO: 3068704 - RNA, 19 nt, Artificial Sequence
  Description of Artificial Sequence: Synthetic oligonucleotide
ggacagacauggcccaagg

SEQ ID NO: 3068705 - RNA, 19 nt, Artificial Sequence
  Description of Artificial Sequence: Synthetic oligonucleotide
gaucugagucagccucugc

SEQ ID NO: 3068706 - RNA, 19 nt, Artificial Sequence
  Description of Artificial Sequence: Synthetic oligonucleotide
uuacagucucggucagcug

SEQ ID NO: 3068707 - RNA, 19 nt, Artificial Sequence
  Description of Artificial Sequence: Synthetic oligonucleotide
uuccugccggucucguucc

SEQ ID NO: 3068708 - RNA, 19 nt, Artificial Sequence
  Description of Artificial Sequence: Synthetic oligonucleotide
aaggggaccuggguuguga

SEQ ID NO: 3068709 - RNA, 19 nt, Artificial Sequence
  Description of Artificial Sequence: Synthetic oligonucleotide
ggacuuggcguuccugccg

SEQ ID NO: 3068710 - RNA, 19 nt, Artificial Sequence
  Description of Artificial Sequence: Synthetic oligonucleotide
cugccggucucguuccagg

SEQ ID NO: 3068711 - RNA, 19 nt, Artificial Sequence
  Description of Artificial Sequence: Synthetic oligonucleotide
cacagccgccaccagcucc

SEQ ID NO: 3068712 - RNA, 19 nt, Artificial Sequence
  Description of Artificial Sequence: Synthetic oligonucleotide
ugguggugaaggugggcac

SEQ ID NO: 3068713 - RNA, 19 nt, Artificial Sequence
  Description of Artificial Sequence: Synthetic oligonucleotide
ggcucacaggccaugaccc

SEQ ID NO: 3068714 - RNA, 19 nt, Artificial Sequence
  Description of Artificial Sequence: Synthetic oligonucleotide
gugugcuggggcccggcgg

SEQ ID NO: 3068715 - RNA, 19 nt, Artificial Sequence
  Description of Artificial Sequence: Synthetic oligonucleotide
uggaccaggcccagcccca

SEQ ID NO: 3068716 - RNA, 19 nt, Artificial Sequence
  Description of Artificial Sequence: Synthetic oligonucleotide
gacauggcccaaggggacc

SEQ ID NO: 3068717 - RNA, 19 nt, Artificial Sequence
  Description of Artificial Sequence: Synthetic oligonucleotide
ggucagcugccccaggccc

SEQ ID NO: 3068718 - RNA, 19 nt, Artificial Sequence
  Description of Artificial Sequence: Synthetic oligonucleotide
accaacuggaccaggccca

SEQ ID NO: 3068719 - RNA, 19 nt, Artificial Sequence
  Description of Artificial Sequence: Synthetic oligonucleotide
aggccaugacccugaccgg

SEQ ID NO: 3068720 - RNA, 19 nt, Artificial Sequence
  Description of Artificial Sequence: Synthetic oligonucleotide
gaccuggguugugauuagg

SEQ ID NO: 3068721 - RNA, 19 nt, Artificial Sequence
  Description of Artificial Sequence: Synthetic oligonucleotide
agcuggucacccaccugcc

SEQ ID NO: 3068722 - RNA, 19 nt, Artificial Sequence
  Description of Artificial Sequence: Synthetic oligonucleotide
cucacaggccaugacccug

SEQ ID NO: 3068723 - RNA, 19 nt, Artificial Sequence
  Description of Artificial Sequence: Synthetic oligonucleotide
guggugaaggugggcacag

SEQ ID NO: 3068724 - RNA, 19 nt, Artificial Sequence
  Description of Artificial Sequence: Synthetic oligonucleotide
cucacagccgccaccagcu

SEQ ID NO: 3068725 - RNA, 19 nt, Artificial Sequence
  Description of Artificial Sequence: Synthetic oligonucleotide
gucucggucagcugcccca

SEQ ID NO: 3068726 - RNA, 19 nt, Artificial Sequence
  Description of Artificial Sequence: Synthetic oligonucleotide
ugccggucucguuccagga

SEQ ID NO: 3068727 - RNA, 19 nt, Artificial Sequence
  Description of Artificial Sequence: Synthetic oligonucleotide
gccaccagcuccaccaagg

SEQ ID NO: 3068728 - RNA, 19 nt, Artificial Sequence
  Description of Artificial Sequence: Synthetic oligonucleotide
gagucagccucugcagcug

SEQ ID NO: 3068729 - RNA, 19 nt, Artificial Sequence
  Description of Artificial Sequence: Synthetic oligonucleotide
agccccaggacuuggcguu

SEQ ID NO: 3068730 - RNA, 19 nt, Artificial Sequence
  Description of Artificial Sequence: Synthetic oligonucleotide
uacuggggacagacauggc

SEQ ID NO: 3068731 - RNA, 19 nt, Artificial Sequence
  Description of Artificial Sequence: Synthetic oligonucleotide
accaaggccgguggcucac

SEQ ID NO: 3068732 - RNA, 19 nt, Artificial Sequence
  Description of Artificial Sequence: Synthetic oligonucleotide
agcuccaccaaggccggug

SEQ ID NO: 3068733 - RNA, 19 nt, Artificial Sequence
  Description of Artificial Sequence: Synthetic oligonucleotide
cccaaggggaccuggguug

SEQ ID NO: 3068734 - RNA, 19 nt, Artificial Sequence
  Description of Artificial Sequence: Synthetic oligonucleotide
uggugaaggugggcacagg

SEQ ID NO: 3068735 - RNA, 19 nt, Artificial Sequence
  Description of Artificial Sequence: Synthetic oligonucleotide
aggccucuccuccuccgug

SEQ ID NO: 3068736 - RNA, 19 nt, Artificial Sequence
  Description of Artificial Sequence: Synthetic oligonucleotide
ccaccugccucacagccgc

SEQ ID NO: 3068737 - RNA, 19 nt, Artificial Sequence
  Description of Artificial Sequence: Synthetic oligonucleotide
cacaggugugcuggggccc

SEQ ID NO: 3068738 - RNA, 19 nt, Artificial Sequence
  Description of Artificial Sequence: Synthetic oligonucleotide
cugcagcuggucacccacc

SEQ ID NO: 3068739 - RNA, 19 nt, Artificial Sequence
  Description of Artificial Sequence: Synthetic oligonucleotide
auggcccaaggggaccugg

SEQ ID NO: 3068740 - RNA, 19 nt, Artificial Sequence
  Description of Artificial Sequence: Synthetic oligonucleotide
ggccaugacccugaccggg

SEQ ID NO: 3068741 - RNA, 19 nt, Artificial Sequence
  Description of Artificial Sequence: Synthetic oligonucleotide
ggccucuccuccuccgugg

SEQ ID NO: 3068742 - RNA, 19 nt, Artificial Sequence
  Description of Artificial Sequence: Synthetic oligonucleotide
gccgccaccagcuccacca

SEQ ID NO: 3068743 - RNA, 19 nt, Artificial Sequence
  Description of Artificial Sequence: Synthetic oligonucleotide
uuccaggaucugagucagc

SEQ ID NO: 3068744 - RNA, 19 nt, Artificial Sequence
  Description of Artificial Sequence: Synthetic oligonucleotide
caaggccgguggcucacag

SEQ ID NO: 3068745 - RNA, 19 nt, Artificial Sequence
  Description of Artificial Sequence: Synthetic oligonucleotide
gguacuggggacagacaug

SEQ ID NO: 3068746 - RNA, 19 nt, Artificial Sequence
  Description of Artificial Sequence: Synthetic oligonucleotide
cucuaccaacuggaccagg

SEQ ID NO: 3068747 - RNA, 19 nt, Artificial Sequence
  Description of Artificial Sequence: Synthetic oligonucleotide
gcagccucuaccaacugga

SEQ ID NO: 3068748 - RNA, 19 nt, Artificial Sequence
  Description of Artificial Sequence: Synthetic oligonucleotide
cagccucuaccaacuggac

SEQ ID NO: 3068749 - RNA, 19 nt, Artificial Sequence
  Description of Artificial Sequence: Synthetic oligonucleotide
gucucguuccaggaucuga

SEQ ID NO: 3068750 - RNA, 19 nt, Artificial Sequence
  Description of Artificial Sequence: Synthetic oligonucleotide
acauggcccaaggggaccu

SEQ ID NO: 3068751 - RNA, 19 nt, Artificial Sequence
  Description of Artificial Sequence: Synthetic oligonucleotide
ggcggcuucugccagucuc

SEQ ID NO: 3068752 - RNA, 19 nt, Artificial Sequence
  Description of Artificial Sequence: Synthetic oligonucleotide
aggaucugagucagccucu

SEQ ID NO: 3068753 - RNA, 19 nt, Artificial Sequence
  Description of Artificial Sequence: Synthetic oligonucleotide
cuccgugguggugaaggug

SEQ ID NO: 3068754 - RNA, 19 nt, Artificial Sequence
  Description of Artificial Sequence: Synthetic oligonucleotide
gcacaggugugcuggggcc

SEQ ID NO: 3068755 - RNA, 19 nt, Artificial Sequence
  Description of Artificial Sequence: Synthetic oligonucleotide
acagccgccaccagcucca

SEQ ID NO: 3068756 - RNA, 19 nt, Artificial Sequence
  Description of Artificial Sequence: Synthetic oligonucleotide
uggcguuccugccggucuc

SEQ ID NO: 3068757 - RNA, 19 nt, Artificial Sequence
  Description of Artificial Sequence: Synthetic oligonucleotide
gggguggcccuugaggaag

SEQ ID NO: 3068758 - RNA, 19 nt, Artificial Sequence
  Description of Artificial Sequence: Synthetic oligonucleotide
ggugaaggugggcacaggu

SEQ ID NO: 3068759 - RNA, 19 nt, Artificial Sequence
  Description of Artificial Sequence: Synthetic oligonucleotide
gggaccuggguugugauua

SEQ ID NO: 3068760 - RNA, 19 nt, Artificial Sequence
  Description of Artificial Sequence: Synthetic oligonucleotide
ccucacagccgccaccagc

SEQ ID NO: 3068761 - RNA, 19 nt, Artificial Sequence
  Description of Artificial Sequence: Synthetic oligonucleotide
ggugugcuggggcccggcg

SEQ ID NO: 3068762 - RNA, 19 nt, Artificial Sequence
  Description of Artificial Sequence: Synthetic oligonucleotide
aggggaccuggguugugau

SEQ ID NO: 3068763 - RNA, 19 nt, Artificial Sequence
  Description of Artificial Sequence: Synthetic oligonucleotide
ggaccuggguugugauuag

SEQ ID NO: 3068764 - RNA, 19 nt, Artificial Sequence
  Description of Artificial Sequence: Synthetic oligonucleotide
ggguacuggggacagacau

SEQ ID NO: 3068765 - RNA, 19 nt, Artificial Sequence
  Description of Artificial Sequence: Synthetic oligonucleotide
gggacagacauggcccaag

SEQ ID NO: 3068766 - RNA, 19 nt, Artificial Sequence
  Description of Artificial Sequence: Synthetic oligonucleotide
cuuggcguuccugccgguc

SEQ ID NO: 3068767 - RNA, 19 nt, Artificial Sequence
  Description of Artificial Sequence: Synthetic oligonucleotide
ccagccccaggacuuggcg

SEQ ID NO: 3068768 - RNA, 19 nt, Artificial Sequence
  Description of Artificial Sequence: Synthetic oligonucleotide
ucacagccgccaccagcuc

SEQ ID NO: 3068769 - RNA, 19 nt, Artificial Sequence
  Description of Artificial Sequence: Synthetic oligonucleotide
gccgguggcucacaggcca

SEQ ID NO: 3068770 - RNA, 19 nt, Artificial Sequence
  Description of Artificial Sequence: Synthetic oligonucleotide
guggcccuugaggaaggug

SEQ ID NO: 3068771 - RNA, 19 nt, Artificial Sequence
  Description of Artificial Sequence: Synthetic oligonucleotide
ccggucucguuccaggauc

SEQ ID NO: 3068772 - RNA, 19 nt, Artificial Sequence
  Description of Artificial Sequence: Synthetic oligonucleotide
ggaucugagucagccucug

SEQ ID NO: 3068773 - RNA, 19 nt, Artificial Sequence
  Description of Artificial Sequence: Synthetic oligonucleotide
gccaugacccugaccgggg

SEQ ID NO: 3068774 - RNA, 19 nt, Artificial Sequence
  Description of Artificial Sequence: Synthetic oligonucleotide
ccagcuccaccaaggccgg

SEQ ID NO: 3068775 - RNA, 19 nt, Artificial Sequence
  Description of Artificial Sequence: Synthetic oligonucleotide
gguggugaaggugggcaca

SEQ ID NO: 3068776 - RNA, 19 nt, Artificial Sequence
  Description of Artificial Sequence: Synthetic oligonucleotide
aggugggcacaggugugcu

SEQ ID NO: 3068777 - RNA, 19 nt, Artificial Sequence
  Description of Artificial Sequence: Synthetic oligonucleotide
cugccccaggcccugggca

SEQ ID NO: 3068778 - RNA, 19 nt, Artificial Sequence
  Description of Artificial Sequence: Synthetic oligonucleotide
uccugccggucucguucca

SEQ ID NO: 3068779 - RNA, 19 nt, Artificial Sequence
  Description of Artificial Sequence: Synthetic oligonucleotide
cuucugccagucucuuuua

SEQ ID NO: 3068780 - RNA, 19 nt, Artificial Sequence
  Description of Artificial Sequence: Synthetic oligonucleotide
acuuggcguuccugccggu

SEQ ID NO: 3068781 - RNA, 19 nt, Artificial Sequence
  Description of Artificial Sequence: Synthetic oligonucleotide
cucugcagcuggucaccca

SEQ ID NO: 3068782 - RNA, 19 nt, Artificial Sequence
  Description of Artificial Sequence: Synthetic oligonucleotide
cagucucggucagcugccc

SEQ ID NO: 3068783 - RNA, 19 nt, Artificial Sequence
  Description of Artificial Sequence: Synthetic oligonucleotide
gggcccggcggcuucugcc

SEQ ID NO: 3068784 - RNA, 19 nt, Artificial Sequence
  Description of Artificial Sequence: Synthetic oligonucleotide
cucguuccaggaucugagu

SEQ ID NO: 3068785 - RNA, 19 nt, Artificial Sequence
  Description of Artificial Sequence: Synthetic oligonucleotide
gggcacaggugugcugggg

SEQ ID NO: 3068786 - RNA, 19 nt, Artificial Sequence
  Description of Artificial Sequence: Synthetic oligonucleotide
ggcguuccugccggucucg

SEQ ID NO: 3068787 - RNA, 19 nt, Artificial Sequence
  Description of Artificial Sequence: Synthetic oligonucleotide
gccucugcagcuggucacc

SEQ ID NO: 3068788 - RNA, 19 nt, Artificial Sequence
  Description of Artificial Sequence: Synthetic oligonucleotide
ggguggcccuugaggaagg

SEQ ID NO: 3068789 - RNA, 19 nt, Artificial Sequence
  Description of Artificial Sequence: Synthetic oligonucleotide
aggcccagccccaggacuu

SEQ ID NO: 3068790 - RNA, 19 nt, Artificial Sequence
  Description of Artificial Sequence: Synthetic oligonucleotide
caaggggaccuggguugug

SEQ ID NO: 3068791 - RNA, 19 nt, Artificial Sequence
  Description of Artificial Sequence: Synthetic oligonucleotide
caccugccucacagccgcc

SEQ ID NO: 3068792 - RNA, 19 nt, Artificial Sequence
  Description of Artificial Sequence: Synthetic oligonucleotide
cauggcccaaggggaccug

SEQ ID NO: 3068793 - RNA, 19 nt, Artificial Sequence
  Description of Artificial Sequence: Synthetic oligonucleotide
cagccccaggacuuggcgu

SEQ ID NO: 3068794 - RNA, 19 nt, Artificial Sequence
  Description of Artificial Sequence: Synthetic oligonucleotide
ccucuaccaacuggaccag

SEQ ID NO: 3068795 - RNA, 19 nt, Artificial Sequence
  Description of Artificial Sequence: Synthetic oligonucleotide
ggcccggcggcuucugcca

SEQ ID NO: 3068796 - RNA, 19 nt, Artificial Sequence
  Description of Artificial Sequence: Synthetic oligonucleotide
cccagccccaggacuuggc

SEQ ID NO: 3068797 - RNA, 19 nt, Artificial Sequence
  Description of Artificial Sequence: Synthetic oligonucleotide
ggucucguuccaggaucug

SEQ ID NO: 3068798 - RNA, 19 nt, Artificial Sequence
  Description of Artificial Sequence: Synthetic oligonucleotide
ccaccaaggccgguggcuc

SEQ ID NO: 3068799 - RNA, 19 nt, Artificial Sequence
  Description of Artificial Sequence: Synthetic oligonucleotide
ccucugcagcuggucaccc

SEQ ID NO: 3068800 - RNA, 19 nt, Artificial Sequence
  Description of Artificial Sequence: Synthetic oligonucleotide
ccagucucuuuuacagucu

SEQ ID NO: 3068801 - RNA, 19 nt, Artificial Sequence
  Description of Artificial Sequence: Synthetic oligonucleotide
ccugccggucucguuccag

SEQ ID NO: 3068802 - RNA, 19 nt, Artificial Sequence
  Description of Artificial Sequence: Synthetic oligonucleotide
cuccuccgugguggugaag

SEQ ID NO: 3068803 - RNA, 19 nt, Artificial Sequence
  Description of Artificial Sequence: Synthetic oligonucleotide
uggggcccggcggcuucug

SEQ ID NO: 3068804 - RNA, 19 nt, Artificial Sequence
  Description of Artificial Sequence: Synthetic oligonucleotide
gggguacuggggacagaca

SEQ ID NO: 3068805 - RNA, 19 nt, Artificial Sequence
  Description of Artificial Sequence: Synthetic oligonucleotide
gcucacaggccaugacccu

SEQ ID NO: 3068806 - RNA, 19 nt, Artificial Sequence
  Description of Artificial Sequence: Synthetic oligonucleotide
gccucacagccgccaccag

SEQ ID NO: 3068807 - RNA, 19 nt, Artificial Sequence
  Description of Artificial Sequence: Synthetic oligonucleotide
ggcccugggcagccucuac

SEQ ID NO: 3068808 - RNA, 19 nt, Artificial Sequence
  Description of Artificial Sequence: Synthetic oligonucleotide
ggccgguggcucacaggcc

SEQ ID NO: 3068809 - RNA, 19 nt, Artificial Sequence
  Description of Artificial Sequence: Synthetic oligonucleotide
ggcccaaggggaccugggu

SEQ ID NO: 3068810 - RNA, 19 nt, Artificial Sequence
  Description of Artificial Sequence: Synthetic oligonucleotide
gcccggcggcuucugccag

SEQ ID NO: 3068811 - RNA, 19 nt, Artificial Sequence
  Description of Artificial Sequence: Synthetic oligonucleotide
ugcuggggcccggcggcuu

SEQ ID NO: 3068812 - RNA, 19 nt, Artificial Sequence
  Description of Artificial Sequence: Synthetic oligonucleotide
gcccaaggggaccuggguu

SEQ ID NO: 3068813 - RNA, 19 nt, Artificial Sequence
  Description of Artificial Sequence: Synthetic oligonucleotide
gcccuugaggaaggugguc

SEQ ID NO: 3068814 - RNA, 19 nt, Artificial Sequence
  Description of Artificial Sequence: Synthetic oligonucleotide
ggggcccggcggcuucugc

SEQ ID NO: 3068815 - RNA, 19 nt, Artificial Sequence
  Description of Artificial Sequence: Synthetic oligonucleotide
gcuggggcccggcggcuuc

SEQ ID NO: 3068816 - RNA, 19 nt, Artificial Sequence
  Description of Artificial Sequence: Synthetic oligonucleotide
ggcccagccccaggacuug

SEQ ID NO: 3068817 - RNA, 19 nt, Artificial Sequence
  Description of Artificial Sequence: Synthetic oligonucleotide
ggucacccaccugccucac

SEQ ID NO: 3068818 - RNA, 19 nt, Artificial Sequence
  Description of Artificial Sequence: Synthetic oligonucleotide
aggcccugggcagccucua

SEQ ID NO: 3068819 - RNA, 19 nt, Artificial Sequence
  Description of Artificial Sequence: Synthetic oligonucleotide
cgccaccagcuccaccaag

SEQ ID NO: 3068820 - RNA, 19 nt, Artificial Sequence
  Description of Artificial Sequence: Synthetic oligonucleotide
gcggcuucugccagucucu

SEQ ID NO: 3068821 - RNA, 19 nt, Artificial Sequence
  Description of Artificial Sequence: Synthetic oligonucleotide
ggcccuugaggaagguggu

SEQ ID NO: 3068822 - RNA, 19 nt, Artificial Sequence
  Description of Artificial Sequence: Synthetic oligonucleotide
gccggucucguuccaggau

SEQ ID NO: 3068823 - RNA, 19 nt, Artificial Sequence
  Description of Artificial Sequence: Synthetic oligonucleotide
ccugggcagccucuaccaa

SEQ ID NO: 3068824 - RNA, 19 nt, Artificial Sequence
  Description of Artificial Sequence: Synthetic oligonucleotide
ccggcggcuucugccaguc

SEQ ID NO: 3068825 - RNA, 19 nt, Artificial Sequence
  Description of Artificial Sequence: Synthetic oligonucleotide
cagccgccaccagcuccac

SEQ ID NO: 3068826 - RNA, 19 nt, Artificial Sequence
  Description of Artificial Sequence: Synthetic oligonucleotide
ggggaccuggguugugauu

SEQ ID NO: 3068827 - RNA, 19 nt, Artificial Sequence
  Description of Artificial Sequence: Synthetic oligonucleotide
gccucuccuccuccguggu

SEQ ID NO: 3068828 - RNA, 19 nt, Artificial Sequence
  Description of Artificial Sequence: Synthetic oligonucleotide
ccuccgugguggugaaggu

SEQ ID NO: 3068829 - RNA, 19 nt, Artificial Sequence
  Description of Artificial Sequence: Synthetic oligonucleotide
cggucucguuccaggaucu

SEQ ID NO: 3068830 - RNA, 19 nt, Artificial Sequence
  Description of Artificial Sequence: Synthetic oligonucleotide
ccuccuccgugguggugaa

SEQ ID NO: 3068831 - RNA, 19 nt, Artificial Sequence
  Description of Artificial Sequence: Synthetic oligonucleotide
gguggcccuugaggaaggu

SEQ ID NO: 3068832 - RNA, 19 nt, Artificial Sequence
  Description of Artificial Sequence: Synthetic oligonucleotide
cgguggcucacaggccaug

SEQ ID NO: 3068833 - RNA, 19 nt, Artificial Sequence
  Description of Artificial Sequence: Synthetic oligonucleotide
ccaaggggaccuggguugu

SEQ ID NO: 3068834 - RNA, 19 nt, Artificial Sequence
  Description of Artificial Sequence: Synthetic oligonucleotide
gugcuggggcccggcggcu

SEQ ID NO: 3068835 - RNA, 19 nt, Artificial Sequence
  Description of Artificial Sequence: Synthetic oligonucleotide
ccaaggccgguggcucaca

SEQ ID NO: 3068836 - RNA, 19 nt, Artificial Sequence
  Description of Artificial Sequence: Synthetic oligonucleotide
ccgccaccagcuccaccaa

SEQ ID NO: 3068837 - RNA, 19 nt, Artificial Sequence
  Description of Artificial Sequence: Synthetic oligonucleotide
cuggggcccggcggcuucu

SEQ ID NO: 3068838 - RNA, 19 nt, Artificial Sequence
  Description of Artificial Sequence: Synthetic oligonucleotide
gcguuccugccggucucgu

SEQ ID NO: 3068839 - RNA, 19 nt, Artificial Sequence
  Description of Artificial Sequence: Synthetic oligonucleotide
ccgguggcucacaggccau

SEQ ID NO: 3068840 - RNA, 19 nt, Artificial Sequence
  Description of Artificial Sequence: Synthetic oligonucleotide
cccggcggcuucugccagu

SEQ ID NO: 3068841 - RNA, 19 nt, Artificial Sequence
  Description of Artificial Sequence: Synthetic oligonucleotide
cagcuccaccaaggccggu

SEQ ID NO: 3068842 - RNA, 19 nt, Artificial Sequence
  Description of Artificial Sequence: Synthetic oligonucleotide
cggcuucugccagucucuu

SEQ ID NO: 3068843 - RNA, 19 nt, Artificial Sequence
  Description of Artificial Sequence: Synthetic oligonucleotide
cggcggcuucugccagucu

SEQ ID NO: 3068844 - RNA, 19 nt, Artificial Sequence
  Description of Artificial Sequence: Synthetic oligonucleotide
acgaccgcgaccuuggccc

SEQ ID NO: 3068845 - RNA, 19 nt, Artificial Sequence
  Description of Artificial Sequence: Synthetic oligonucleotide
augacgagaaaacgcaaac

SEQ ID NO: 3068846 - RNA, 19 nt, Artificial Sequence
  Description of Artificial Sequence: Synthetic oligonucleotide
agacaugacgagaaaacgc

SEQ ID NO: 3068847 - RNA, 19 nt, Artificial Sequence
  Description of Artificial Sequence: Synthetic oligonucleotide
acggccgccauguacacgg

SEQ ID NO: 3068848 - RNA, 19 nt, Artificial Sequence
  Description of Artificial Sequence: Synthetic oligonucleotide
gauuucggccgucagguac

SEQ ID NO: 3068849 - RNA, 19 nt, Artificial Sequence
  Description of Artificial Sequence: Synthetic oligonucleotide
uugcccagcagcuuguuga

SEQ ID NO: 3068850 - RNA, 19 nt, Artificial Sequence
  Description of Artificial Sequence: Synthetic oligonucleotide
gacaugacgagaaaacgca

SEQ ID NO: 3068851 - RNA, 19 nt, Artificial Sequence
  Description of Artificial Sequence: Synthetic oligonucleotide
ugcgcgaucgucacuuugc

SEQ ID NO: 3068852 - RNA, 19 nt, Artificial Sequence
  Description of Artificial Sequence: Synthetic oligonucleotide
cagacaugacgagaaaacg

SEQ ID NO: 3068853 - RNA, 19 nt, Artificial Sequence
  Description of Artificial Sequence: Synthetic oligonucleotide
cuugccaccuugcuugccg

SEQ ID NO: 3068854 - RNA, 19 nt, Artificial Sequence
  Description of Artificial Sequence: Synthetic oligonucleotide
aggauuucggccgucaggu

SEQ ID NO: 3068855 - RNA, 19 nt, Artificial Sequence
  Description of Artificial Sequence: Synthetic oligonucleotide
ugacgagaaaacgcaaaca

SEQ ID NO: 3068856 - RNA, 19 nt, Artificial Sequence
  Description of Artificial Sequence: Synthetic oligonucleotide
gaccuuggccccuuggcgc

SEQ ID NO: 3068857 - RNA, 19 nt, Artificial Sequence
  Description of Artificial Sequence: Synthetic oligonucleotide
caggauuucggccgucagg

SEQ ID NO: 3068858 - RNA, 19 nt, Artificial Sequence
  Description of Artificial Sequence: Synthetic oligonucleotide
uuugcccagcagcuuguug

SEQ ID NO: 3068859 - RNA, 19 nt, Artificial Sequence
  Description of Artificial Sequence: Synthetic oligonucleotide
ggccuugccaccuugcuug

SEQ ID NO: 3068860 - RNA, 19 nt, Artificial Sequence
  Description of Artificial Sequence: Synthetic oligonucleotide
ccagacaugacgagaaaac

SEQ ID NO: 3068861 - RNA, 19 nt, Artificial Sequence
  Description of Artificial Sequence: Synthetic oligonucleotide
cacuuugcccagcagcuug

SEQ ID NO: 3068862 - RNA, 19 nt, Artificial Sequence
  Description of Artificial Sequence: Synthetic oligonucleotide
gcgaucgucacuuugccca

SEQ ID NO: 3068863 - RNA, 19 nt, Artificial Sequence
  Description of Artificial Sequence: Synthetic oligonucleotide
caugacgagaaaacgcaaa

SEQ ID NO: 3068864 - RNA, 19 nt, Artificial Sequence
  Description of Artificial Sequence: Synthetic oligonucleotide
accuuggccccuuggcgcg

SEQ ID NO: 3068865 - RNA, 19 nt, Artificial Sequence
  Description of Artificial Sequence: Synthetic oligonucleotide
auguacacgggcgcgccgg

SEQ ID NO: 3068866 - RNA, 19 nt, Artificial Sequence
  Description of Artificial Sequence: Synthetic oligonucleotide
gacgaccgcgaccuuggcc

SEQ ID NO: 3068867 - RNA, 19 nt, Artificial Sequence
  Description of Artificial Sequence: Synthetic oligonucleotide
uacacgggcgcgccggcgc

SEQ ID NO: 3068868 - RNA, 19 nt, Artificial Sequence
  Description of Artificial Sequence: Synthetic oligonucleotide
aucgucacuuugcccagca

SEQ ID NO: 3068869 - RNA, 19 nt, Artificial Sequence
  Description of Artificial Sequence: Synthetic oligonucleotide
ucgcgggccgcguugcccg

SEQ ID NO: 3068870 - RNA, 19 nt, Artificial Sequence
  Description of Artificial Sequence: Synthetic oligonucleotide
gccgcggccagacaugacg

SEQ ID NO: 3068871 - RNA, 19 nt, Artificial Sequence
  Description of Artificial Sequence: Synthetic oligonucleotide
aacugcagcccggcgcggg

SEQ ID NO: 3068872 - RNA, 19 nt, Artificial Sequence
  Description of Artificial Sequence: Synthetic oligonucleotide
ugccaccuugcuugccgcg

SEQ ID NO: 3068873 - RNA, 19 nt, Artificial Sequence
  Description of Artificial Sequence: Synthetic oligonucleotide
ucgucacuuugcccagcag

SEQ ID NO: 3068874 - RNA, 19 nt, Artificial Sequence
  Description of Artificial Sequence: Synthetic oligonucleotide
cuugccgcggccagacaug

SEQ ID NO: 3068875 - RNA, 19 nt, Artificial Sequence
  Description of Artificial Sequence: Synthetic oligonucleotide
ugcagcccggcgcgggacg

SEQ ID NO: 3068876 - RNA, 19 nt, Artificial Sequence
  Description of Artificial Sequence: Synthetic oligonucleotide
uugccaccuugcuugccgc

SEQ ID NO: 3068877 - RNA, 19 nt, Artificial Sequence
  Description of Artificial Sequence: Synthetic oligonucleotide
uguacacgggcgcgccggc

SEQ ID NO: 3068878 - RNA, 19 nt, Artificial Sequence
  Description of Artificial Sequence: Synthetic oligonucleotide
auuucggccgucagguacu

SEQ ID NO: 3068879 - RNA, 19 nt, Artificial Sequence
  Description of Artificial Sequence: Synthetic oligonucleotide
cauguacacgggcgcgccg

SEQ ID NO: 3068880 - RNA, 19 nt, Artificial Sequence
  Description of Artificial Sequence: Synthetic oligonucleotide
caccgggaacugcagcccg

SEQ ID NO: 3068881 - RNA, 19 nt, Artificial Sequence
  Description of Artificial Sequence: Synthetic oligonucleotide
acacgggcgcgccggcgcc

SEQ ID NO: 3068882 - RNA, 19 nt, Artificial Sequence
  Description of Artificial Sequence: Synthetic oligonucleotide
cccaccgggaacugcagcc

SEQ ID NO: 3068883 - RNA, 19 nt, Artificial Sequence
  Description of Artificial Sequence: Synthetic oligonucleotide
gucacuuugcccagcagcu

SEQ ID NO: 3068884 - RNA, 19 nt, Artificial Sequence
  Description of Artificial Sequence: Synthetic oligonucleotide
uugcuugccgcggccagac

SEQ ID NO: 3068885 - RNA, 19 nt, Artificial Sequence
  Description of Artificial Sequence: Synthetic oligonucleotide
gccgccauguacacgggcg

SEQ ID NO: 3068886 - RNA, 19 nt, Artificial Sequence
  Description of Artificial Sequence: Synthetic oligonucleotide
acaugacgagaaaacgcaa

SEQ ID NO: 3068887 - RNA, 19 nt, Artificial Sequence
  Description of Artificial Sequence: Synthetic oligonucleotide
gggacgaccgcgaccuugg

SEQ ID NO: 3068888 - RNA, 19 nt, Artificial Sequence
  Description of Artificial Sequence: Synthetic oligonucleotide
gaucgucacuuugcccagc

SEQ ID NO: 3068889 - RNA, 19 nt, Artificial Sequence
  Description of Artificial Sequence: Synthetic oligonucleotide
cugcgcgaucgucacuuug

SEQ ID NO: 3068890 - RNA, 19 nt, Artificial Sequence
  Description of Artificial Sequence: Synthetic oligonucleotide
uugccgcggccagacauga

SEQ ID NO: 3068891 - RNA, 19 nt, Artificial Sequence
  Description of Artificial Sequence: Synthetic oligonucleotide
gcgaccuuggccccuuggc

SEQ ID NO: 3068892 - RNA, 19 nt, Artificial Sequence
  Description of Artificial Sequence: Synthetic oligonucleotide
acuuugcccagcagcuugu

SEQ ID NO: 3068893 - RNA, 19 nt, Artificial Sequence
  Description of Artificial Sequence: Synthetic oligonucleotide
ugcacgcgccccaccggga

SEQ ID NO: 3068894 - RNA, 19 nt, Artificial Sequence
  Description of Artificial Sequence: Synthetic oligonucleotide
agcccggcgcgggacgacc

SEQ ID NO: 3068895 - RNA, 19 nt, Artificial Sequence
  Description of Artificial Sequence: Synthetic oligonucleotide
uugucgcgggccgcguugc

SEQ ID NO: 3068896 - RNA, 19 nt, Artificial Sequence
  Description of Artificial Sequence: Synthetic oligonucleotide
caccuugcuugccgcggcc

SEQ ID NO: 3068897 - RNA, 19 nt, Artificial Sequence
  Description of Artificial Sequence: Synthetic oligonucleotide
accgggaacugcagcccgg

SEQ ID NO: 3068898 - RNA, 19 nt, Artificial Sequence
  Description of Artificial Sequence: Synthetic oligonucleotide
cgaccuuggccccuuggcg

SEQ ID NO: 3068899 - RNA, 19 nt, Artificial Sequence
  Description of Artificial Sequence: Synthetic oligonucleotide
ugucgcgggccgcguugcc

SEQ ID NO: 3068900 - RNA, 19 nt, Artificial Sequence
  Description of Artificial Sequence: Synthetic oligonucleotide
gaacugcagcccggcgcgg

SEQ ID NO: 3068901 - RNA, 19 nt, Artificial Sequence
  Description of Artificial Sequence: Synthetic oligonucleotide
ucacuuugcccagcagcuu

SEQ ID NO: 3068902 - RNA, 19 nt, Artificial Sequence
  Description of Artificial Sequence: Synthetic oligonucleotide
gcgcgaucgucacuuugcc

SEQ ID NO: 3068903 - RNA, 19 nt, Artificial Sequence
  Description of Artificial Sequence: Synthetic oligonucleotide
guacacgggcgcgccggcg

SEQ ID NO: 3068904 - RNA, 19 nt, Artificial Sequence
  Description of Artificial Sequence: Synthetic oligonucleotide
gccaccuugcuugccgcgg

SEQ ID NO: 3068905 - RNA, 19 nt, Artificial Sequence
  Description of Artificial Sequence: Synthetic oligonucleotide
gccagacaugacgagaaaa

SEQ ID NO: 3068906 - RNA, 19 nt, Artificial Sequence
  Description of Artificial Sequence: Synthetic oligonucleotide
ugcuugccgcggccagaca

SEQ ID NO: 3068907 - RNA, 19 nt, Artificial Sequence
  Description of Artificial Sequence: Synthetic oligonucleotide
accuugcuugccgcggcca

SEQ ID NO: 3068908 - RNA, 19 nt, Artificial Sequence
  Description of Artificial Sequence: Synthetic oligonucleotide
cuuggccccuuggcgcggg

SEQ ID NO: 3068909 - RNA, 19 nt, Artificial Sequence
  Description of Artificial Sequence: Synthetic oligonucleotide
ccaggauuucggccgucag

SEQ ID NO: 3068910 - RNA, 19 nt, Artificial Sequence
  Description of Artificial Sequence: Synthetic oligonucleotide
uuucggccgucagguacuc

SEQ ID NO: 3068911 - RNA, 19 nt, Artificial Sequence
  Description of Artificial Sequence: Synthetic oligonucleotide
gucgcgggccgcguugccc

SEQ ID NO: 3068912 - RNA, 19 nt, Artificial Sequence
  Description of Artificial Sequence: Synthetic oligonucleotide
ccgccauguacacgggcgc

SEQ ID NO: 3068913 - RNA, 19 nt, Artificial Sequence
  Description of Artificial Sequence: Synthetic oligonucleotide
gccauguacacgggcgcgc

SEQ ID NO: 3068914 - RNA, 19 nt, Artificial Sequence
  Description of Artificial Sequence: Synthetic oligonucleotide
ccauguacacgggcgcgcc

SEQ ID NO: 3068915 - RNA, 19 nt, Artificial Sequence
  Description of Artificial Sequence: Synthetic oligonucleotide
uggccccuuggcgcgggcc

SEQ ID NO: 3068916 - RNA, 19 nt, Artificial Sequence
  Description of Artificial Sequence: Synthetic oligonucleotide
ccuugcuugccgcggccag

SEQ ID NO: 3068917 - RNA, 19 nt, Artificial Sequence
  Description of Artificial Sequence: Synthetic oligonucleotide
uuggccccuuggcgcgggc

SEQ ID NO: 3068918 - RNA, 19 nt, Artificial Sequence
  Description of Artificial Sequence: Synthetic oligonucleotide
cuugcuugccgcggccaga

SEQ ID NO: 3068919 - RNA, 19 nt, Artificial Sequence
  Description of Artificial Sequence: Synthetic oligonucleotide
cacgcgccccaccgggaac

SEQ ID NO: 3068920 - RNA, 19 nt, Artificial Sequence
  Description of Artificial Sequence: Synthetic oligonucleotide
cgaucgucacuuugcccag

SEQ ID NO: 3068921 - RNA, 19 nt, Artificial Sequence
  Description of Artificial Sequence: Synthetic oligonucleotide
ugccgcggccagacaugac

SEQ ID NO: 3068922 - RNA, 19 nt, Artificial Sequence
  Description of Artificial Sequence: Synthetic oligonucleotide
cgcgaucgucacuuugccc

SEQ ID NO: 3068923 - RNA, 19 nt, Artificial Sequence
  Description of Artificial Sequence: Synthetic oligonucleotide
ccaccgggaacugcagccc

SEQ ID NO: 3068924 - RNA, 19 nt, Artificial Sequence
  Description of Artificial Sequence: Synthetic oligonucleotide
cggugcacgcgccccaccg

SEQ ID NO: 3068925 - RNA, 19 nt, Artificial Sequence
  Description of Artificial Sequence: Synthetic oligonucleotide
gcggccagacaugacgaga

SEQ ID NO: 3068926 - RNA, 19 nt, Artificial Sequence
  Description of Artificial Sequence: Synthetic oligonucleotide
gcuugccgcggccagacau

SEQ ID NO: 3068927 - RNA, 19 nt, Artificial Sequence
  Description of Artificial Sequence: Synthetic oligonucleotide
cugcagcccggcgcgggac

SEQ ID NO: 3068928 - RNA, 19 nt, Artificial Sequence
  Description of Artificial Sequence: Synthetic oligonucleotide
ccccaccgggaacugcagc

SEQ ID NO: 3068929 - RNA, 19 nt, Artificial Sequence
  Description of Artificial Sequence: Synthetic oligonucleotide
ggccagacaugacgagaaa

SEQ ID NO: 3068930 - RNA, 19 nt, Artificial Sequence
  Description of Artificial Sequence: Synthetic oligonucleotide
ggacgaccgcgaccuuggc

SEQ ID NO: 3068931 - RNA, 19 nt, Artificial Sequence
  Description of Artificial Sequence: Synthetic oligonucleotide
ggcgcgccggcgcccacgc

SEQ ID NO: 3068932 - RNA, 19 nt, Artificial Sequence
  Description of Artificial Sequence: Synthetic oligonucleotide
cggccagacaugacgagaa

SEQ ID NO: 3068933 - RNA, 19 nt, Artificial Sequence
  Description of Artificial Sequence: Synthetic oligonucleotide
cgccauguacacgggcgcg

SEQ ID NO: 3068934 - RNA, 19 nt, Artificial Sequence
  Description of Artificial Sequence: Synthetic oligonucleotide
ccgggaacugcagcccggc

SEQ ID NO: 3068935 - RNA, 19 nt, Artificial Sequence
  Description of Artificial Sequence: Synthetic oligonucleotide
ggauuucggccgucaggua

SEQ ID NO: 3068936 - RNA, 19 nt, Artificial Sequence
  Description of Artificial Sequence: Synthetic oligonucleotide
ggcgcgggacgaccgcgac

SEQ ID NO: 3068937 - RNA, 19 nt, Artificial Sequence
  Description of Artificial Sequence: Synthetic oligonucleotide
gcgcgggacgaccgcgacc

SEQ ID NO: 3068938 - RNA, 19 nt, Artificial Sequence
  Description of Artificial Sequence: Synthetic oligonucleotide
cgcgaccuuggccccuugg

SEQ ID NO: 3068939 - RNA, 19 nt, Artificial Sequence
  Description of Artificial Sequence: Synthetic oligonucleotide
ccuugccaccuugcuugcc

SEQ ID NO: 3068940 - RNA, 19 nt, Artificial Sequence
  Description of Artificial Sequence: Synthetic oligonucleotide
cgcggccagacaugacgag

SEQ ID NO: 3068941 - RNA, 19 nt, Artificial Sequence
  Description of Artificial Sequence: Synthetic oligonucleotide
cacgggcgcgccggcgccc

SEQ ID NO: 3068942 - RNA, 19 nt, Artificial Sequence
  Description of Artificial Sequence: Synthetic oligonucleotide
gcgggccuugccaccuugc

SEQ ID NO: 3068943 - RNA, 19 nt, Artificial Sequence
  Description of Artificial Sequence: Synthetic oligonucleotide
accgcgaccuuggccccuu

SEQ ID NO: 3068944 - RNA, 19 nt, Artificial Sequence
  Description of Artificial Sequence: Synthetic oligonucleotide
gcacgcgccccaccgggaa

SEQ ID NO: 3068945 - RNA, 19 nt, Artificial Sequence
  Description of Artificial Sequence: Synthetic oligonucleotide
gccggcgcccacgcgcucc

SEQ ID NO: 3068946 - RNA, 19 nt, Artificial Sequence
  Description of Artificial Sequence: Synthetic oligonucleotide
ccggcgcgggacgaccgcg

SEQ ID NO: 3068947 - RNA, 19 nt, Artificial Sequence
  Description of Artificial Sequence: Synthetic oligonucleotide
acgggcgcgccggcgccca

SEQ ID NO: 3068948 - RNA, 19 nt, Artificial Sequence
  Description of Artificial Sequence: Synthetic oligonucleotide
gccccaccgggaacugcag

SEQ ID NO: 3068949 - RNA, 19 nt, Artificial Sequence
  Description of Artificial Sequence: Synthetic oligonucleotide
gcccggcgcgggacgaccg

SEQ ID NO: 3068950 - RNA, 19 nt, Artificial Sequence
  Description of Artificial Sequence: Synthetic oligonucleotide
cgggacgaccgcgaccuug

SEQ ID NO: 3068951 - RNA, 19 nt, Artificial Sequence
  Description of Artificial Sequence: Synthetic oligonucleotide
ggccccuuggcgcgggccu

SEQ ID NO: 3068952 - RNA, 19 nt, Artificial Sequence
  Description of Artificial Sequence: Synthetic oligonucleotide
gggccuugccaccuugcuu

SEQ ID NO: 3068953 - RNA, 19 nt, Artificial Sequence
  Description of Artificial Sequence: Synthetic oligonucleotide
ccuuggccccuuggcgcgg

SEQ ID NO: 3068954 - RNA, 19 nt, Artificial Sequence
  Description of Artificial Sequence: Synthetic oligonucleotide
cgaccgcgaccuuggcccc

SEQ ID NO: 3068955 - RNA, 19 nt, Artificial Sequence
  Description of Artificial Sequence: Synthetic oligonucleotide
cccggcgcgggacgaccgc

SEQ ID NO: 3068956 - RNA, 19 nt, Artificial Sequence
  Description of Artificial Sequence: Synthetic oligonucleotide
cagcccggcgcgggacgac

SEQ ID NO: 3068957 - RNA, 19 nt, Artificial Sequence
  Description of Artificial Sequence: Synthetic oligonucleotide
gggccgcguugcccgccag

SEQ ID NO: 3068958 - RNA, 19 nt, Artificial Sequence
  Description of Artificial Sequence: Synthetic oligonucleotide
gaccgcgaccuuggccccu

SEQ ID NO: 3068959 - RNA, 19 nt, Artificial Sequence
  Description of Artificial Sequence: Synthetic oligonucleotide
cgcgggacgaccgcgaccu

SEQ ID NO: 3068960 - RNA, 19 nt, Artificial Sequence
  Description of Artificial Sequence: Synthetic oligonucleotide
cuuugcccagcagcuuguu

SEQ ID NO: 3068961 - RNA, 19 nt, Artificial Sequence
  Description of Artificial Sequence: Synthetic oligonucleotide
cgcgggccuugccaccuug

SEQ ID NO: 3068962 - RNA, 19 nt, Artificial Sequence
  Description of Artificial Sequence: Synthetic oligonucleotide
gcagcccggcgcgggacga

SEQ ID NO: 3068963 - RNA, 19 nt, Artificial Sequence
  Description of Artificial Sequence: Synthetic oligonucleotide
gcgccccaccgggaacugc

SEQ ID NO: 3068964 - RNA, 19 nt, Artificial Sequence
  Description of Artificial Sequence: Synthetic oligonucleotide
cccugcgcgaucgucacuu

SEQ ID NO: 3068965 - RNA, 19 nt, Artificial Sequence
  Description of Artificial Sequence: Synthetic oligonucleotide
ccccuuggcgcgggccuug

SEQ ID NO: 3068966 - RNA, 19 nt, Artificial Sequence
  Description of Artificial Sequence: Synthetic oligonucleotide
gcgcgccggcgcccacgcg

SEQ ID NO: 3068967 - RNA, 19 nt, Artificial Sequence
  Description of Artificial Sequence: Synthetic oligonucleotide
gcgggccgcguugcccgcc

SEQ ID NO: 3068968 - RNA, 19 nt, Artificial Sequence
  Description of Artificial Sequence: Synthetic oligonucleotide
cgcgggccgcguugcccgc

SEQ ID NO: 3068969 - RNA, 19 nt, Artificial Sequence
  Description of Artificial Sequence: Synthetic oligonucleotide
cgggccuugccaccuugcu

SEQ ID NO: 3068970 - RNA, 19 nt, Artificial Sequence
  Description of Artificial Sequence: Synthetic oligonucleotide
ccgcgaccuuggccccuug

SEQ ID NO: 3068971 - RNA, 19 nt, Artificial Sequence
  Description of Artificial Sequence: Synthetic oligonucleotide
cggcgcgggacgaccgcga

SEQ ID NO: 3068972 - RNA, 19 nt, Artificial Sequence
  Description of Artificial Sequence: Synthetic oligonucleotide
gcgccggcgcccacgcgcu

SEQ ID NO: 3068973 - RNA, 19 nt, Artificial Sequence
  Description of Artificial Sequence: Synthetic oligonucleotide
cgcgccccaccgggaacug

SEQ ID NO: 3068974 - RNA, 19 nt, Artificial Sequence
  Description of Artificial Sequence: Synthetic oligonucleotide
cgggccgcguugcccgcca

SEQ ID NO: 3068975 - RNA, 19 nt, Artificial Sequence
  Description of Artificial Sequence: Synthetic oligonucleotide
ccugcgcgaucgucacuuu

SEQ ID NO: 3068976 - RNA, 19 nt, Artificial Sequence
  Description of Artificial Sequence: Synthetic oligonucleotide
gccccuuggcgcgggccuu

SEQ ID NO: 3068977 - RNA, 19 nt, Artificial Sequence
  Description of Artificial Sequence: Synthetic oligonucleotide
gcgcgggccuugccaccuu

SEQ ID NO: 3068978 - RNA, 19 nt, Artificial Sequence
  Description of Artificial Sequence: Synthetic oligonucleotide
cgccggcgcccacgcgcuc

SEQ ID NO: 3068979 - RNA, 19 nt, Artificial Sequence
  Description of Artificial Sequence: Synthetic oligonucleotide
gcgggacgaccgcgaccuu

SEQ ID NO: 3068980 - RNA, 19 nt, Artificial Sequence
  Description of Artificial Sequence: Synthetic oligonucleotide
cgggcgcgccggcgcccac

SEQ ID NO: 3068981 - RNA, 19 nt, Artificial Sequence
  Description of Artificial Sequence: Synthetic oligonucleotide
acucugucaauuuucagcc

SEQ ID NO: 3068982 - RNA, 19 nt, Artificial Sequence
  Description of Artificial Sequence: Synthetic oligonucleotide
ucaauuuucagccuguacu

SEQ ID NO: 3068983 - RNA, 19 nt, Artificial Sequence
  Description of Artificial Sequence: Synthetic oligonucleotide
ucugucaauuuucagccug

SEQ ID NO: 3068984 - RNA, 19 nt, Artificial Sequence
  Description of Artificial Sequence: Synthetic oligonucleotide
cacucugucaauuuucagc

SEQ ID NO: 3068985 - RNA, 19 nt, Artificial Sequence
  Description of Artificial Sequence: Synthetic oligonucleotide
acuuuugucauuuccuuga

SEQ ID NO: 3068986 - RNA, 19 nt, Artificial Sequence
  Description of Artificial Sequence: Synthetic oligonucleotide
uccuaggccaaucacucug

SEQ ID NO: 3068987 - RNA, 19 nt, Artificial Sequence
  Description of Artificial Sequence: Synthetic oligonucleotide
ugucuggguacuuuuguca

SEQ ID NO: 3068988 - RNA, 19 nt, Artificial Sequence
  Description of Artificial Sequence: Synthetic oligonucleotide
uacuuuugucauuuccuug

SEQ ID NO: 3068989 - RNA, 19 nt, Artificial Sequence
  Description of Artificial Sequence: Synthetic oligonucleotide
ugggcuguuucuccuaggc

SEQ ID NO: 3068990 - RNA, 19 nt, Artificial Sequence
  Description of Artificial Sequence: Synthetic oligonucleotide
uuucuccuaggccaaucac

SEQ ID NO: 3068991 - RNA, 19 nt, Artificial Sequence
  Description of Artificial Sequence: Synthetic oligonucleotide
auuuucagccuguacuuuu

SEQ ID NO: 3068992 - RNA, 19 nt, Artificial Sequence
  Description of Artificial Sequence: Synthetic oligonucleotide
cuuuugucauuuccuugag

SEQ ID NO: 3068993 - RNA, 19 nt, Artificial Sequence
  Description of Artificial Sequence: Synthetic oligonucleotide
uaggccaaucacucuguca

SEQ ID NO: 3068994 - RNA, 19 nt, Artificial Sequence
  Description of Artificial Sequence: Synthetic oligonucleotide
gucaauuuucagccuguac

SEQ ID NO: 3068995 - RNA, 19 nt, Artificial Sequence
  Description of Artificial Sequence: Synthetic oligonucleotide
uugucuggguacuuuuguc

SEQ ID NO: 3068996 - RNA, 19 nt, Artificial Sequence
  Description of Artificial Sequence: Synthetic oligonucleotide
aauuuucagccuguacuuu

SEQ ID NO: 3068997 - RNA, 19 nt, Artificial Sequence
  Description of Artificial Sequence: Synthetic oligonucleotide
ggguacuuuugucauuucc

SEQ ID NO: 3068998 - RNA, 19 nt, Artificial Sequence
  Description of Artificial Sequence: Synthetic oligonucleotide
guuucuccuaggccaauca

SEQ ID NO: 3068999 - RNA, 19 nt, Artificial Sequence
  Description of Artificial Sequence: Synthetic oligonucleotide
aucacucugucaauuuuca

SEQ ID NO: 3069000 - RNA, 19 nt, Artificial Sequence
  Description of Artificial Sequence: Synthetic oligonucleotide
uguuucuccuaggccaauc

SEQ ID NO: 3069001 - RNA, 19 nt, Artificial Sequence
  Description of Artificial Sequence: Synthetic oligonucleotide
caauuuucagccuguacuu

SEQ ID NO: 3069002 - RNA, 19 nt, Artificial Sequence
  Description of Artificial Sequence: Synthetic oligonucleotide
gguacuuuugucauuuccu

SEQ ID NO: 3069003 - RNA, 19 nt, Artificial Sequence
  Description of Artificial Sequence: Synthetic oligonucleotide
ucuggguacuuuugucauu

SEQ ID NO: 3069004 - RNA, 19 nt, Artificial Sequence
  Description of Artificial Sequence: Synthetic oligonucleotide
cugggcuguuucuccuagg

SEQ ID NO: 3069005 - RNA, 19 nt, Artificial Sequence
  Description of Artificial Sequence: Synthetic oligonucleotide
guacuuuugucauuuccuu

SEQ ID NO: 3069006 - RNA, 19 nt, Artificial Sequence
  Description of Artificial Sequence: Synthetic oligonucleotide
ugucaauuuucagccugua

SEQ ID NO: 3069007 - RNA, 19 nt, Artificial Sequence
  Description of Artificial Sequence: Synthetic oligonucleotide
cuaggccaaucacucuguc

SEQ ID NO: 3069008 - RNA, 19 nt, Artificial Sequence
  Description of Artificial Sequence: Synthetic oligonucleotide
gggcuguuucuccuaggcc

SEQ ID NO: 3069009 - RNA, 19 nt, Artificial Sequence
  Description of Artificial Sequence: Synthetic oligonucleotide
uggguacuuuugucauuuc

SEQ ID NO: 3069010 - RNA, 19 nt, Artificial Sequence
  Description of Artificial Sequence: Synthetic oligonucleotide
gucuggguacuuuugucau

SEQ ID NO: 3069011 - RNA, 19 nt, Artificial Sequence
  Description of Artificial Sequence: Synthetic oligonucleotide
cugucaauuuucagccugu

SEQ ID NO: 3069012 - RNA, 19 nt, Artificial Sequence
  Description of Artificial Sequence: Synthetic oligonucleotide
cuggguacuuuugucauuu

SEQ ID NO: 3069013 - RNA, 19 nt, Artificial Sequence
  Description of Artificial Sequence: Synthetic oligonucleotide
cucugucaauuuucagccu

SEQ ID NO: 3069014 - RNA, 19 nt, Artificial Sequence
  Description of Artificial Sequence: Synthetic oligonucleotide
cuccuaggccaaucacucu

SEQ ID NO: 3069015 - RNA, 19 nt, Artificial Sequence
  Description of Artificial Sequence: Synthetic oligonucleotide
ccuaggccaaucacucugu

SEQ ID NO: 3069016 - RNA, 19 nt, Artificial Sequence
  Description of Artificial Sequence: Synthetic oligonucleotide
cuguuucuccuaggccaau

SEQ ID NO: 3069017 - RNA, 19 nt, Artificial Sequence
  Description of Artificial Sequence: Synthetic oligonucleotide
agagaaauaaaacagauuc

SEQ ID NO: 3069018 - RNA, 19 nt, Artificial Sequence
  Description of Artificial Sequence: Synthetic oligonucleotide
auaauuguucauuagaaag

SEQ ID NO: 3069019 - RNA, 19 nt, Artificial Sequence
  Description of Artificial Sequence: Synthetic oligonucleotide
uaauuguucauuagaaagg

SEQ ID NO: 3069020 - RNA, 19 nt, Artificial Sequence
  Description of Artificial Sequence: Synthetic oligonucleotide
uuuuaguugggaaugauac

SEQ ID NO: 3069021 - RNA, 19 nt, Artificial Sequence
  Description of Artificial Sequence: Synthetic oligonucleotide
uguacauuguguauaauug

SEQ ID NO: 3069022 - RNA, 19 nt, Artificial Sequence
  Description of Artificial Sequence: Synthetic oligonucleotide
aaugaaacaaagaaauuag

SEQ ID NO: 3069023 - RNA, 19 nt, Artificial Sequence
  Description of Artificial Sequence: Synthetic oligonucleotide
uauucauauauuuauuuug

SEQ ID NO: 3069024 - RNA, 19 nt, Artificial Sequence
  Description of Artificial Sequence: Synthetic oligonucleotide
aacaugaaauuguacauug

SEQ ID NO: 3069025 - RNA, 19 nt, Artificial Sequence
  Description of Artificial Sequence: Synthetic oligonucleotide
cauggaaccauuuuggugc

SEQ ID NO: 3069026 - RNA, 19 nt, Artificial Sequence
  Description of Artificial Sequence: Synthetic oligonucleotide
agauucaggaaucagaucu

SEQ ID NO: 3069027 - RNA, 19 nt, Artificial Sequence
  Description of Artificial Sequence: Synthetic oligonucleotide
uguauaauuguucauuaga

SEQ ID NO: 3069028 - RNA, 19 nt, Artificial Sequence
  Description of Artificial Sequence: Synthetic oligonucleotide
ugaauauucauauauuuau

SEQ ID NO: 3069029 - RNA, 19 nt, Artificial Sequence
  Description of Artificial Sequence: Synthetic oligonucleotide
gauaaguuugcauggaacc

SEQ ID NO: 3069030 - RNA, 19 nt, Artificial Sequence
  Description of Artificial Sequence: Synthetic oligonucleotide
uuuggauaaguuugcaugg

SEQ ID NO: 3069031 - RNA, 19 nt, Artificial Sequence
  Description of Artificial Sequence: Synthetic oligonucleotide
uguucauuagaaaggacag

SEQ ID NO: 3069032 - RNA, 19 nt, Artificial Sequence
  Description of Artificial Sequence: Synthetic oligonucleotide
aauaaaacagauucaggaa

SEQ ID NO: 3069033 - RNA, 19 nt, Artificial Sequence
  Description of Artificial Sequence: Synthetic oligonucleotide
uuugcauggaaccauuuug

SEQ ID NO: 3069034 - RNA, 19 nt, Artificial Sequence
  Description of Artificial Sequence: Synthetic oligonucleotide
ugaaacaaagaaauuagau

SEQ ID NO: 3069035 - RNA, 19 nt, Artificial Sequence
  Description of Artificial Sequence: Synthetic oligonucleotide
aaaugaaacaaagaaauua

SEQ ID NO: 3069036 - RNA, 19 nt, Artificial Sequence
  Description of Artificial Sequence: Synthetic oligonucleotide
uuuuacaugaauauucaua

SEQ ID NO: 3069037 - RNA, 19 nt, Artificial Sequence
  Description of Artificial Sequence: Synthetic oligonucleotide
uacgcagagaaauaaaaca

SEQ ID NO: 3069038 - RNA, 19 nt, Artificial Sequence
  Description of Artificial Sequence: Synthetic oligonucleotide
cuuuggauaaguuugcaug

SEQ ID NO: 3069039 - RNA, 19 nt, Artificial Sequence
  Description of Artificial Sequence: Synthetic oligonucleotide
aaaagcagaaacugcucag

SEQ ID NO: 3069040 - RNA, 19 nt, Artificial Sequence
  Description of Artificial Sequence: Synthetic oligonucleotide
aaaggacaguuuuacauga

SEQ ID NO: 3069041 - RNA, 19 nt, Artificial Sequence
  Description of Artificial Sequence: Synthetic oligonucleotide
uugcauggaaccauuuugg

SEQ ID NO: 3069042 - RNA, 19 nt, Artificial Sequence
  Description of Artificial Sequence: Synthetic oligonucleotide
ugaaauuguacauugugua

SEQ ID NO: 3069043 - RNA, 19 nt, Artificial Sequence
  Description of Artificial Sequence: Synthetic oligonucleotide
uuuacgcagagaaauaaaa

SEQ ID NO: 3069044 - RNA, 19 nt, Artificial Sequence
  Description of Artificial Sequence: Synthetic oligonucleotide
gaaaggacaguuuuacaug

SEQ ID NO: 3069045 - RNA, 19 nt, Artificial Sequence
  Description of Artificial Sequence: Synthetic oligonucleotide
aaagaaauuagauguuuua

SEQ ID NO: 3069046 - RNA, 19 nt, Artificial Sequence
  Description of Artificial Sequence: Synthetic oligonucleotide
auaaaacagauucaggaau

SEQ ID NO: 3069047 - RNA, 19 nt, Artificial Sequence
  Description of Artificial Sequence: Synthetic oligonucleotide
agaaaggacaguuuuacau

SEQ ID NO: 3069048 - RNA, 19 nt, Artificial Sequence
  Description of Artificial Sequence: Synthetic oligonucleotide
aauuguucauuagaaagga

SEQ ID NO: 3069049 - RNA, 19 nt, Artificial Sequence
  Description of Artificial Sequence: Synthetic oligonucleotide
gaaauaaaacagauucagg

SEQ ID NO: 3069050 - RNA, 19 nt, Artificial Sequence
  Description of Artificial Sequence: Synthetic oligonucleotide
caguuuuacaugaauauuc

SEQ ID NO: 3069051 - RNA, 19 nt, Artificial Sequence
  Description of Artificial Sequence: Synthetic oligonucleotide
uuuauucuaccugugcagg

SEQ ID NO: 3069052 - RNA, 19 nt, Artificial Sequence
  Description of Artificial Sequence: Synthetic oligonucleotide
uauauuuauuuuguuuuag

SEQ ID NO: 3069053 - RNA, 19 nt, Artificial Sequence
  Description of Artificial Sequence: Synthetic oligonucleotide
aaucagaucugaaagaaau

SEQ ID NO: 3069054 - RNA, 19 nt, Artificial Sequence
  Description of Artificial Sequence: Synthetic oligonucleotide
gugaacaugaaauuguaca

SEQ ID NO: 3069055 - RNA, 19 nt, Artificial Sequence
  Description of Artificial Sequence: Synthetic oligonucleotide
caugaaauuguacauugug

SEQ ID NO: 3069056 - RNA, 19 nt, Artificial Sequence
  Description of Artificial Sequence: Synthetic oligonucleotide
aauuguacauuguguauaa

SEQ ID NO: 3069057 - RNA, 19 nt, Artificial Sequence
  Description of Artificial Sequence: Synthetic oligonucleotide
caggaaucagaucugaaag

SEQ ID NO: 3069058 - RNA, 19 nt, Artificial Sequence
  Description of Artificial Sequence: Synthetic oligonucleotide
uaaaacagauucaggaauc

SEQ ID NO: 3069059 - RNA, 19 nt, Artificial Sequence
  Description of Artificial Sequence: Synthetic oligonucleotide
gucacuuuggauaaguuug

SEQ ID NO: 3069060 - RNA, 19 nt, Artificial Sequence
  Description of Artificial Sequence: Synthetic oligonucleotide
uauaauuguucauuagaaa

SEQ ID NO: 3069061 - RNA, 19 nt, Artificial Sequence
  Description of Artificial Sequence: Synthetic oligonucleotide
uuagaaaggacaguuuuac

SEQ ID NO: 3069062 - RNA, 19 nt, Artificial Sequence
  Description of Artificial Sequence: Synthetic oligonucleotide
uuuguaagcccacccagug

SEQ ID NO: 3069063 - RNA, 19 nt, Artificial Sequence
  Description of Artificial Sequence: Synthetic oligonucleotide
aagcagaaacugcucaguc

SEQ ID NO: 3069064 - RNA, 19 nt, Artificial Sequence
  Description of Artificial Sequence: Synthetic oligonucleotide
ugaacaugaaauuguacau

SEQ ID NO: 3069065 - RNA, 19 nt, Artificial Sequence
  Description of Artificial Sequence: Synthetic oligonucleotide
ucagaucugaaagaaauaa

SEQ ID NO: 3069066 - RNA, 19 nt, Artificial Sequence
  Description of Artificial Sequence: Synthetic oligonucleotide
uuacgcagagaaauaaaac

SEQ ID NO: 3069067 - RNA, 19 nt, Artificial Sequence
  Description of Artificial Sequence: Synthetic oligonucleotide
uuaguugggaaugauacau

SEQ ID NO: 3069068 - RNA, 19 nt, Artificial Sequence
  Description of Artificial Sequence: Synthetic oligonucleotide
uguaagcccacccagugaa

SEQ ID NO: 3069069 - RNA, 19 nt, Artificial Sequence
  Description of Artificial Sequence: Synthetic oligonucleotide
uuauucuaccugugcaggg

SEQ ID NO: 3069070 - RNA, 19 nt, Artificial Sequence
  Description of Artificial Sequence: Synthetic oligonucleotide
agaaauuagauguuuuauu

SEQ ID NO: 3069071 - RNA, 19 nt, Artificial Sequence
  Description of Artificial Sequence: Synthetic oligonucleotide
ugugcaggguucuuuacgc

SEQ ID NO: 3069072 - RNA, 19 nt, Artificial Sequence
  Description of Artificial Sequence: Synthetic oligonucleotide
aaacugcucagucagguuu

SEQ ID NO: 3069073 - RNA, 19 nt, Artificial Sequence
  Description of Artificial Sequence: Synthetic oligonucleotide
ucaggaaucagaucugaaa

SEQ ID NO: 3069074 - RNA, 19 nt, Artificial Sequence
  Description of Artificial Sequence: Synthetic oligonucleotide
uguguauaauuguucauua

SEQ ID NO: 3069075 - RNA, 19 nt, Artificial Sequence
  Description of Artificial Sequence: Synthetic oligonucleotide
aacagauucaggaaucaga

SEQ ID NO: 3069076 - RNA, 19 nt, Artificial Sequence
  Description of Artificial Sequence: Synthetic oligonucleotide
auauucauauauuuauuuu

SEQ ID NO: 3069077 - RNA, 19 nt, Artificial Sequence
  Description of Artificial Sequence: Synthetic oligonucleotide
uuuucugugauuguacaaa

SEQ ID NO: 3069078 - RNA, 19 nt, Artificial Sequence
  Description of Artificial Sequence: Synthetic oligonucleotide
aaauuguacauuguguaua

SEQ ID NO: 3069079 - RNA, 19 nt, Artificial Sequence
  Description of Artificial Sequence: Synthetic oligonucleotide
uucauuagaaaggacaguu

SEQ ID NO: 3069080 - RNA, 19 nt, Artificial Sequence
  Description of Artificial Sequence: Synthetic oligonucleotide
gaaauuagauguuuuauuu

SEQ ID NO: 3069081 - RNA, 19 nt, Artificial Sequence
  Description of Artificial Sequence: Synthetic oligonucleotide
uacauuguguauaauuguu

SEQ ID NO: 3069082 - RNA, 19 nt, Artificial Sequence
  Description of Artificial Sequence: Synthetic oligonucleotide
uuuaguugggaaugauaca

SEQ ID NO: 3069083 - RNA, 19 nt, Artificial Sequence
  Description of Artificial Sequence: Synthetic oligonucleotide
uuuuggucacuuuggauaa

SEQ ID NO: 3069084 - RNA, 19 nt, Artificial Sequence
  Description of Artificial Sequence: Synthetic oligonucleotide
auucauauauuuauuuugu

SEQ ID NO: 3069085 - RNA, 19 nt, Artificial Sequence
  Description of Artificial Sequence: Synthetic oligonucleotide
agaucugaaagaaauaaaa

SEQ ID NO: 3069086 - RNA, 19 nt, Artificial Sequence
  Description of Artificial Sequence: Synthetic oligonucleotide
ucacuuuggauaaguuugc

SEQ ID NO: 3069087 - RNA, 19 nt, Artificial Sequence
  Description of Artificial Sequence: Synthetic oligonucleotide
cauuguguauaauuguuca

SEQ ID NO: 3069088 - RNA, 19 nt, Artificial Sequence
  Description of Artificial Sequence: Synthetic oligonucleotide
aaaacagauucaggaauca

SEQ ID NO: 3069089 - RNA, 19 nt, Artificial Sequence
  Description of Artificial Sequence: Synthetic oligonucleotide
uuuuguaagcccacccagu

SEQ ID NO: 3069090 - RNA, 19 nt, Artificial Sequence
  Description of Artificial Sequence: Synthetic oligonucleotide
acgcagagaaauaaaacag

SEQ ID NO: 3069091 - RNA, 19 nt, Artificial Sequence
  Description of Artificial Sequence: Synthetic oligonucleotide
ugcaggguucuuuacgcag

SEQ ID NO: 3069092 - RNA, 19 nt, Artificial Sequence
  Description of Artificial Sequence: Synthetic oligonucleotide
ucagguuucccucuguauu

SEQ ID NO: 3069093 - RNA, 19 nt, Artificial Sequence
  Description of Artificial Sequence: Synthetic oligonucleotide
aaacagauucaggaaucag

SEQ ID NO: 3069094 - RNA, 19 nt, Artificial Sequence
  Description of Artificial Sequence: Synthetic oligonucleotide
gcagaaacugcucagucag

SEQ ID NO: 3069095 - RNA, 19 nt, Artificial Sequence
  Description of Artificial Sequence: Synthetic oligonucleotide
acauuguguauaauuguuc

SEQ ID NO: 3069096 - RNA, 19 nt, Artificial Sequence
  Description of Artificial Sequence: Synthetic oligonucleotide
guguauaauuguucauuag

SEQ ID NO: 3069097 - RNA, 19 nt, Artificial Sequence
  Description of Artificial Sequence: Synthetic oligonucleotide
uuucugugauuguacaaaa

SEQ ID NO: 3069098 - RNA, 19 nt, Artificial Sequence
  Description of Artificial Sequence: Synthetic oligonucleotide
aaagcagaaacugcucagu

SEQ ID NO: 3069099 - RNA, 19 nt, Artificial Sequence
  Description of Artificial Sequence: Synthetic oligonucleotide
ucuuuacgcagagaaauaa

SEQ ID NO: 3069100 - RNA, 19 nt, Artificial Sequence
  Description of Artificial Sequence: Synthetic oligonucleotide
guauaauuguucauuagaa

SEQ ID NO: 3069101 - RNA, 19 nt, Artificial Sequence
  Description of Artificial Sequence: Synthetic oligonucleotide
augaaauuguacauugugu

SEQ ID NO: 3069102 - RNA, 19 nt, Artificial Sequence
  Description of Artificial Sequence: Synthetic oligonucleotide
gagaaauaaaacagauuca

SEQ ID NO: 3069103 - RNA, 19 nt, Artificial Sequence
  Description of Artificial Sequence: Synthetic oligonucleotide
uuguguauaauuguucauu

SEQ ID NO: 3069104 - RNA, 19 nt, Artificial Sequence
  Description of Artificial Sequence: Synthetic oligonucleotide
aguugggaaugauacauuu

SEQ ID NO: 3069105 - RNA, 19 nt, Artificial Sequence
  Description of Artificial Sequence: Synthetic oligonucleotide
agcagaaacugcucaguca

SEQ ID NO: 3069106 - RNA, 19 nt, Artificial Sequence
  Description of Artificial Sequence: Synthetic oligonucleotide
uggauaaguuugcauggaa

SEQ ID NO: 3069107 - RNA, 19 nt, Artificial Sequence
  Description of Artificial Sequence: Synthetic oligonucleotide
uagaaaggacaguuuuaca

SEQ ID NO: 3069108 - RNA, 19 nt, Artificial Sequence
  Description of Artificial Sequence: Synthetic oligonucleotide
acagauucaggaaucagau

SEQ ID NO: 3069109 - RNA, 19 nt, Artificial Sequence
  Description of Artificial Sequence: Synthetic oligonucleotide
cugugcaggguucuuuacg

SEQ ID NO: 3069110 - RNA, 19 nt, Artificial Sequence
  Description of Artificial Sequence: Synthetic oligonucleotide
auuguguauaauuguucau

SEQ ID NO: 3069111 - RNA, 19 nt, Artificial Sequence
  Description of Artificial Sequence: Synthetic oligonucleotide
auuguucauuagaaaggac

SEQ ID NO: 3069112 - RNA, 19 nt, Artificial Sequence
  Description of Artificial Sequence: Synthetic oligonucleotide
ucauuagaaaggacaguuu

SEQ ID NO: 3069113 - RNA, 19 nt, Artificial Sequence
  Description of Artificial Sequence: Synthetic oligonucleotide
aacugcucagucagguuuc

SEQ ID NO: 3069114 - RNA, 19 nt, Artificial Sequence
  Description of Artificial Sequence: Synthetic oligonucleotide
uaaguuugcauggaaccau

SEQ ID NO: 3069115 - RNA, 19 nt, Artificial Sequence
  Description of Artificial Sequence: Synthetic oligonucleotide
agaaacugcucagucaggu

SEQ ID NO: 3069116 - RNA, 19 nt, Artificial Sequence
  Description of Artificial Sequence: Synthetic oligonucleotide
acuuuggauaaguuugcau

SEQ ID NO: 3069117 - RNA, 19 nt, Artificial Sequence
  Description of Artificial Sequence: Synthetic oligonucleotide
acaaagaaauuagauguuu

SEQ ID NO: 3069118 - RNA, 19 nt, Artificial Sequence
  Description of Artificial Sequence: Synthetic oligonucleotide
gauucaggaaucagaucug

SEQ ID NO: 3069119 - RNA, 19 nt, Artificial Sequence
  Description of Artificial Sequence: Synthetic oligonucleotide
aacaaagaaauuagauguu

SEQ ID NO: 3069120 - RNA, 19 nt, Artificial Sequence
  Description of Artificial Sequence: Synthetic oligonucleotide
uucuuuacgcagagaaaua

SEQ ID NO: 3069121 - RNA, 19 nt, Artificial Sequence
  Description of Artificial Sequence: Synthetic oligonucleotide
augaauauucauauauuua

SEQ ID NO: 3069122 - RNA, 19 nt, Artificial Sequence
  Description of Artificial Sequence: Synthetic oligonucleotide
uuguaagcccacccaguga

SEQ ID NO: 3069123 - RNA, 19 nt, Artificial Sequence
  Description of Artificial Sequence: Synthetic oligonucleotide
uauucuaccugugcagggu

SEQ ID NO: 3069124 - RNA, 19 nt, Artificial Sequence
  Description of Artificial Sequence: Synthetic oligonucleotide
aggacaguuuuacaugaau

SEQ ID NO: 3069125 - RNA, 19 nt, Artificial Sequence
  Description of Artificial Sequence: Synthetic oligonucleotide
augaaacaaagaaauuaga

SEQ ID NO: 3069126 - RNA, 19 nt, Artificial Sequence
  Description of Artificial Sequence: Synthetic oligonucleotide
gaaauuguacauuguguau

SEQ ID NO: 3069127 - RNA, 19 nt, Artificial Sequence
  Description of Artificial Sequence: Synthetic oligonucleotide
ucagucagguuucccucug

SEQ ID NO: 3069128 - RNA, 19 nt, Artificial Sequence
  Description of Artificial Sequence: Synthetic oligonucleotide
caugaauauucauauauuu

SEQ ID NO: 3069129 - RNA, 19 nt, Artificial Sequence
  Description of Artificial Sequence: Synthetic oligonucleotide
uaagcccacccagugaaca

SEQ ID NO: 3069130 - RNA, 19 nt, Artificial Sequence
  Description of Artificial Sequence: Synthetic oligonucleotide
uuggauaaguuugcaugga

SEQ ID NO: 3069131 - RNA, 19 nt, Artificial Sequence
  Description of Artificial Sequence: Synthetic oligonucleotide
uuggucacuuuggauaagu

SEQ ID NO: 3069132 - RNA, 19 nt, Artificial Sequence
  Description of Artificial Sequence: Synthetic oligonucleotide
ggguucuuuacgcagagaa

SEQ ID NO: 3069133 - RNA, 19 nt, Artificial Sequence
  Description of Artificial Sequence: Synthetic oligonucleotide
acaguuuuacaugaauauu

SEQ ID NO: 3069134 - RNA, 19 nt, Artificial Sequence
  Description of Artificial Sequence: Synthetic oligonucleotide
guacauuguguauaauugu

SEQ ID NO: 3069135 - RNA, 19 nt, Artificial Sequence
  Description of Artificial Sequence: Synthetic oligonucleotide
guucuuuacgcagagaaau

SEQ ID NO: 3069136 - RNA, 19 nt, Artificial Sequence
  Description of Artificial Sequence: Synthetic oligonucleotide
gcauggaaccauuuuggug

SEQ ID NO: 3069137 - RNA, 19 nt, Artificial Sequence
  Description of Artificial Sequence: Synthetic oligonucleotide
auuagaaaggacaguuuua

SEQ ID NO: 3069138 - RNA, 19 nt, Artificial Sequence
  Description of Artificial Sequence: Synthetic oligonucleotide
cuuuacgcagagaaauaaa

SEQ ID NO: 3069139 - RNA, 19 nt, Artificial Sequence
  Description of Artificial Sequence: Synthetic oligonucleotide
cagaaacugcucagucagg

SEQ ID NO: 3069140 - RNA, 19 nt, Artificial Sequence
  Description of Artificial Sequence: Synthetic oligonucleotide
auucaggaaucagaucuga

SEQ ID NO: 3069141 - RNA, 19 nt, Artificial Sequence
  Description of Artificial Sequence: Synthetic oligonucleotide
ggauaaguuugcauggaac

SEQ ID NO: 3069142 - RNA, 19 nt, Artificial Sequence
  Description of Artificial Sequence: Synthetic oligonucleotide
acaugaauauucauauauu

SEQ ID NO: 3069143 - RNA, 19 nt, Artificial Sequence
  Description of Artificial Sequence: Synthetic oligonucleotide
cacccagugaacaugaaau

SEQ ID NO: 3069144 - RNA, 19 nt, Artificial Sequence
  Description of Artificial Sequence: Synthetic oligonucleotide
ucuaccugugcaggguucu

SEQ ID NO: 3069145 - RNA, 19 nt, Artificial Sequence
  Description of Artificial Sequence: Synthetic oligonucleotide
acugcucagucagguuucc

SEQ ID NO: 3069146 - RNA, 19 nt, Artificial Sequence
  Description of Artificial Sequence: Synthetic oligonucleotide
cauuagaaaggacaguuuu

SEQ ID NO: 3069147 - RNA, 19 nt, Artificial Sequence
  Description of Artificial Sequence: Synthetic oligonucleotide
uaguugggaaugauacauu

SEQ ID NO: 3069148 - RNA, 19 nt, Artificial Sequence
  Description of Artificial Sequence: Synthetic oligonucleotide
ggaaucagaucugaaagaa

SEQ ID NO: 3069149 - RNA, 19 nt, Artificial Sequence
  Description of Artificial Sequence: Synthetic oligonucleotide
uucuaccugugcaggguuc

SEQ ID NO: 3069150 - RNA, 19 nt, Artificial Sequence
  Description of Artificial Sequence: Synthetic oligonucleotide
aagcccacccagugaacau

SEQ ID NO: 3069151 - RNA, 19 nt, Artificial Sequence
  Description of Artificial Sequence: Synthetic oligonucleotide
cagauucaggaaucagauc

SEQ ID NO: 3069152 - RNA, 19 nt, Artificial Sequence
  Description of Artificial Sequence: Synthetic oligonucleotide
caggguucuuuacgcagag

SEQ ID NO: 3069153 - RNA, 19 nt, Artificial Sequence
  Description of Artificial Sequence: Synthetic oligonucleotide
uuuggucacuuuggauaag

SEQ ID NO: 3069154 - RNA, 19 nt, Artificial Sequence
  Description of Artificial Sequence: Synthetic oligonucleotide
auggaaccauuuuggugca

SEQ ID NO: 3069155 - RNA, 19 nt, Artificial Sequence
  Description of Artificial Sequence: Synthetic oligonucleotide
aaccauuuuggugcauuuu

SEQ ID NO: 3069156 - RNA, 19 nt, Artificial Sequence
  Description of Artificial Sequence: Synthetic oligonucleotide
acccagugaacaugaaauu

SEQ ID NO: 3069157 - RNA, 19 nt, Artificial Sequence
  Description of Artificial Sequence: Synthetic oligonucleotide
auucuaccugugcaggguu

SEQ ID NO: 3069158 - RNA, 19 nt, Artificial Sequence
  Description of Artificial Sequence: Synthetic oligonucleotide
uggucacuuuggauaaguu

SEQ ID NO: 3069159 - RNA, 19 nt, Artificial Sequence
  Description of Artificial Sequence: Synthetic oligonucleotide
agucagguuucccucugua

SEQ ID NO: 3069160 - RNA, 19 nt, Artificial Sequence
  Description of Artificial Sequence: Synthetic oligonucleotide
cccagugaacaugaaauug

SEQ ID NO: 3069161 - RNA, 19 nt, Artificial Sequence
  Description of Artificial Sequence: Synthetic oligonucleotide
gaacaugaaauuguacauu

SEQ ID NO: 3069162 - RNA, 19 nt, Artificial Sequence
  Description of Artificial Sequence: Synthetic oligonucleotide
aaggacaguuuuacaugaa

SEQ ID NO: 3069163 - RNA, 19 nt, Artificial Sequence
  Description of Artificial Sequence: Synthetic oligonucleotide
aucagaucugaaagaaaua

SEQ ID NO: 3069164 - RNA, 19 nt, Artificial Sequence
  Description of Artificial Sequence: Synthetic oligonucleotide
accugugcaggguucuuua

SEQ ID NO: 3069165 - RNA, 19 nt, Artificial Sequence
  Description of Artificial Sequence: Synthetic oligonucleotide
agcccacccagugaacaug

SEQ ID NO: 3069166 - RNA, 19 nt, Artificial Sequence
  Description of Artificial Sequence: Synthetic oligonucleotide
auuguacauuguguauaau

SEQ ID NO: 3069167 - RNA, 19 nt, Artificial Sequence
  Description of Artificial Sequence: Synthetic oligonucleotide
guuugcauggaaccauuuu

SEQ ID NO: 3069168 - RNA, 19 nt, Artificial Sequence
  Description of Artificial Sequence: Synthetic oligonucleotide
cagagaaauaaaacagauu

SEQ ID NO: 3069169 - RNA, 19 nt, Artificial Sequence
  Description of Artificial Sequence: Synthetic oligonucleotide
gaaccauuuuggugcauuu

SEQ ID NO: 3069170 - RNA, 19 nt, Artificial Sequence
  Description of Artificial Sequence: Synthetic oligonucleotide
gcucagucagguuucccuc

SEQ ID NO: 3069171 - RNA, 19 nt, Artificial Sequence
  Description of Artificial Sequence: Synthetic oligonucleotide
ccagugaacaugaaauugu

SEQ ID NO: 3069172 - RNA, 19 nt, Artificial Sequence
  Description of Artificial Sequence: Synthetic oligonucleotide
gcagagaaauaaaacagau

SEQ ID NO: 3069173 - RNA, 19 nt, Artificial Sequence
  Description of Artificial Sequence: Synthetic oligonucleotide
guucauuagaaaggacagu

SEQ ID NO: 3069174 - RNA, 19 nt, Artificial Sequence
  Description of Artificial Sequence: Synthetic oligonucleotide
cgcagagaaauaaaacaga

SEQ ID NO: 3069175 - RNA, 19 nt, Artificial Sequence
  Description of Artificial Sequence: Synthetic oligonucleotide
ggucacuuuggauaaguuu

SEQ ID NO: 3069176 - RNA, 19 nt, Artificial Sequence
  Description of Artificial Sequence: Synthetic oligonucleotide
gugcaggguucuuuacgca

SEQ ID NO: 3069177 - RNA, 19 nt, Artificial Sequence
  Description of Artificial Sequence: Synthetic oligonucleotide
cacuuuggauaaguuugca

SEQ ID NO: 3069178 - RNA, 19 nt, Artificial Sequence
  Description of Artificial Sequence: Synthetic oligonucleotide
aguuugcauggaaccauuu

SEQ ID NO: 3069179 - RNA, 19 nt, Artificial Sequence
  Description of Artificial Sequence: Synthetic oligonucleotide
uaccugugcaggguucuuu

SEQ ID NO: 3069180 - RNA, 19 nt, Artificial Sequence
  Description of Artificial Sequence: Synthetic oligonucleotide
gucagguuucccucuguau

SEQ ID NO: 3069181 - RNA, 19 nt, Artificial Sequence
  Description of Artificial Sequence: Synthetic oligonucleotide
gguucuuuacgcagagaaa

SEQ ID NO: 3069182 - RNA, 19 nt, Artificial Sequence
  Description of Artificial Sequence: Synthetic oligonucleotide
cucagucagguuucccucu

SEQ ID NO: 3069183 - RNA, 19 nt, Artificial Sequence
  Description of Artificial Sequence: Synthetic oligonucleotide
cugcucagucagguuuccc

SEQ ID NO: 3069184 - RNA, 19 nt, Artificial Sequence
  Description of Artificial Sequence: Synthetic oligonucleotide
guaagcccacccagugaac

SEQ ID NO: 3069185 - RNA, 19 nt, Artificial Sequence
  Description of Artificial Sequence: Synthetic oligonucleotide
agguuucccucuguauuuu

SEQ ID NO: 3069186 - RNA, 19 nt, Artificial Sequence
  Description of Artificial Sequence: Synthetic oligonucleotide
aggguucuuuacgcagaga

SEQ ID NO: 3069187 - RNA, 19 nt, Artificial Sequence
  Description of Artificial Sequence: Synthetic oligonucleotide
guugggaaugauacauuuu

SEQ ID NO: 3069188 - RNA, 19 nt, Artificial Sequence
  Description of Artificial Sequence: Synthetic oligonucleotide
ccugugcaggguucuuuac

SEQ ID NO: 3069189 - RNA, 19 nt, Artificial Sequence
  Description of Artificial Sequence: Synthetic oligonucleotide
uggaaccauuuuggugcau

SEQ ID NO: 3069190 - RNA, 19 nt, Artificial Sequence
  Description of Artificial Sequence: Synthetic oligonucleotide
ccacccagugaacaugaaa

SEQ ID NO: 3069191 - RNA, 19 nt, Artificial Sequence
  Description of Artificial Sequence: Synthetic oligonucleotide
ggaaccauuuuggugcauu

SEQ ID NO: 3069192 - RNA, 19 nt, Artificial Sequence
  Description of Artificial Sequence: Synthetic oligonucleotide
gcccacccagugaacauga

SEQ ID NO: 3069193 - RNA, 19 nt, Artificial Sequence
  Description of Artificial Sequence: Synthetic oligonucleotide
cagucagguuucccucugu

SEQ ID NO: 3069194 - RNA, 19 nt, Artificial Sequence
  Description of Artificial Sequence: Synthetic oligonucleotide
cuaccugugcaggguucuu

SEQ ID NO: 3069195 - RNA, 19 nt, Artificial Sequence
  Description of Artificial Sequence: Synthetic oligonucleotide
cccacccagugaacaugaa

SEQ ID NO: 3069196 - RNA, 19 nt, Artificial Sequence
  Description of Artificial Sequence: Synthetic oligonucleotide
uacuaugacacgaaaaugg

SEQ ID NO: 3069197 - RNA, 19 nt, Artificial Sequence
  Description of Artificial Sequence: Synthetic oligonucleotide
aauacuaugacacgaaaau

SEQ ID NO: 3069198 - RNA, 19 nt, Artificial Sequence
  Description of Artificial Sequence: Synthetic oligonucleotide
aacuguacuccguaagucc

SEQ ID NO: 3069199 - RNA, 19 nt, Artificial Sequence
  Description of Artificial Sequence: Synthetic oligonucleotide
uggauuuccgacaagagug

SEQ ID NO: 3069200 - RNA, 19 nt, Artificial Sequence
  Description of Artificial Sequence: Synthetic oligonucleotide
aaggucucagaacuguucc

SEQ ID NO: 3069201 - RNA, 19 nt, Artificial Sequence
  Description of Artificial Sequence: Synthetic oligonucleotide
auuacaccagaucagaguc

SEQ ID NO: 3069202 - RNA, 19 nt, Artificial Sequence
  Description of Artificial Sequence: Synthetic oligonucleotide
aaauggauaauaguggcag

SEQ ID NO: 3069203 - RNA, 19 nt, Artificial Sequence
  Description of Artificial Sequence: Synthetic oligonucleotide
gaaaauggauaauaguggc

SEQ ID NO: 3069204 - RNA, 19 nt, Artificial Sequence
  Description of Artificial Sequence: Synthetic oligonucleotide
ugggguaauacuaugacac

SEQ ID NO: 3069205 - RNA, 19 nt, Artificial Sequence
  Description of Artificial Sequence: Synthetic oligonucleotide
aggaccaugucuuccaugc

SEQ ID NO: 3069206 - RNA, 19 nt, Artificial Sequence
  Description of Artificial Sequence: Synthetic oligonucleotide
auugaugguucccaguucg

SEQ ID NO: 3069207 - RNA, 19 nt, Artificial Sequence
  Description of Artificial Sequence: Synthetic oligonucleotide
uaugacacgaaaauggaua

SEQ ID NO: 3069208 - RNA, 19 nt, Artificial Sequence
  Description of Artificial Sequence: Synthetic oligonucleotide
aaaacuguacuccguaagu

SEQ ID NO: 3069209 - RNA, 19 nt, Artificial Sequence
  Description of Artificial Sequence: Synthetic oligonucleotide
acaagaguggaccugcuuc

SEQ ID NO: 3069210 - RNA, 19 nt, Artificial Sequence
  Description of Artificial Sequence: Synthetic oligonucleotide
acaucaaggucucagaacu

SEQ ID NO: 3069211 - RNA, 19 nt, Artificial Sequence
  Description of Artificial Sequence: Synthetic oligonucleotide
acgaaaauggauaauagug

SEQ ID NO: 3069212 - RNA, 19 nt, Artificial Sequence
  Description of Artificial Sequence: Synthetic oligonucleotide
uuccccuuggacaucaagg

SEQ ID NO: 3069213 - RNA, 19 nt, Artificial Sequence
  Description of Artificial Sequence: Synthetic oligonucleotide
augcgaugcaccucuaucc

SEQ ID NO: 3069214 - RNA, 19 nt, Artificial Sequence
  Description of Artificial Sequence: Synthetic oligonucleotide
aauggauaauaguggcagg

SEQ ID NO: 3069215 - RNA, 19 nt, Artificial Sequence
  Description of Artificial Sequence: Synthetic oligonucleotide
ucucacacuuauuacacca

SEQ ID NO: 3069216 - RNA, 19 nt, Artificial Sequence
  Description of Artificial Sequence: Synthetic oligonucleotide
acacuuauuacaccagauc

SEQ ID NO: 3069217 - RNA, 19 nt, Artificial Sequence
  Description of Artificial Sequence: Synthetic oligonucleotide
ucauguaggguucuuuccc

SEQ ID NO: 3069218 - RNA, 19 nt, Artificial Sequence
  Description of Artificial Sequence: Synthetic oligonucleotide
uuugggguaauacuaugac

SEQ ID NO: 3069219 - RNA, 19 nt, Artificial Sequence
  Description of Artificial Sequence: Synthetic oligonucleotide
uaauacuaugacacgaaaa

SEQ ID NO: 3069220 - RNA, 19 nt, Artificial Sequence
  Description of Artificial Sequence: Synthetic oligonucleotide
aauccauggauuuccgaca

SEQ ID NO: 3069221 - RNA, 19 nt, Artificial Sequence
  Description of Artificial Sequence: Synthetic oligonucleotide
uauuacaccagaucagagu

SEQ ID NO: 3069222 - RNA, 19 nt, Artificial Sequence
  Description of Artificial Sequence: Synthetic oligonucleotide
aaacuguacuccguaaguc

SEQ ID NO: 3069223 - RNA, 19 nt, Artificial Sequence
  Description of Artificial Sequence: Synthetic oligonucleotide
uuauuacaccagaucagag

SEQ ID NO: 3069224 - RNA, 19 nt, Artificial Sequence
  Description of Artificial Sequence: Synthetic oligonucleotide
uuuccgacaagaguggacc

SEQ ID NO: 3069225 - RNA, 19 nt, Artificial Sequence
  Description of Artificial Sequence: Synthetic oligonucleotide
caauccauggauuuccgac

SEQ ID NO: 3069226 - RNA, 19 nt, Artificial Sequence
  Description of Artificial Sequence: Synthetic oligonucleotide
gauaauaguggcaggacca

SEQ ID NO: 3069227 - RNA, 19 nt, Artificial Sequence
  Description of Artificial Sequence: Synthetic oligonucleotide
cuucucacacuuauuacac

SEQ ID NO: 3069228 - RNA, 19 nt, Artificial Sequence
  Description of Artificial Sequence: Synthetic oligonucleotide
cacuuauuacaccagauca

SEQ ID NO: 3069229 - RNA, 19 nt, Artificial Sequence
  Description of Artificial Sequence: Synthetic oligonucleotide
augguucccaguucgcagc

SEQ ID NO: 3069230 - RNA, 19 nt, Artificial Sequence
  Description of Artificial Sequence: Synthetic oligonucleotide
uccucuggacccaccaucg

SEQ ID NO: 3069231 - RNA, 19 nt, Artificial Sequence
  Description of Artificial Sequence: Synthetic oligonucleotide
gaugguucccaguucgcag

SEQ ID NO: 3069232 - RNA, 19 nt, Artificial Sequence
  Description of Artificial Sequence: Synthetic oligonucleotide
ugcaccucuauccugcgcu

SEQ ID NO: 3069233 - RNA, 19 nt, Artificial Sequence
  Description of Artificial Sequence: Synthetic oligonucleotide
aauaguggcaggaccagca

SEQ ID NO: 3069234 - RNA, 19 nt, Artificial Sequence
  Description of Artificial Sequence: Synthetic oligonucleotide
acuguacuccguaaguccc

SEQ ID NO: 3069235 - RNA, 19 nt, Artificial Sequence
  Description of Artificial Sequence: Synthetic oligonucleotide
ucuggacccaccaucgucu

SEQ ID NO: 3069236 - RNA, 19 nt, Artificial Sequence
  Description of Artificial Sequence: Synthetic oligonucleotide
aguucgcagcgguaguugc

SEQ ID NO: 3069237 - RNA, 19 nt, Artificial Sequence
  Description of Artificial Sequence: Synthetic oligonucleotide
aaaauggauaauaguggca

SEQ ID NO: 3069238 - RNA, 19 nt, Artificial Sequence
  Description of Artificial Sequence: Synthetic oligonucleotide
agaagcgugaugccaacug

SEQ ID NO: 3069239 - RNA, 19 nt, Artificial Sequence
  Description of Artificial Sequence: Synthetic oligonucleotide
ucgucuuggucauguaggg

SEQ ID NO: 3069240 - RNA, 19 nt, Artificial Sequence
  Description of Artificial Sequence: Synthetic oligonucleotide
ucccucagaagcgugaugc

SEQ ID NO: 3069241 - RNA, 19 nt, Artificial Sequence
  Description of Artificial Sequence: Synthetic oligonucleotide
uuggacaucaaggucucag

SEQ ID NO: 3069242 - RNA, 19 nt, Artificial Sequence
  Description of Artificial Sequence: Synthetic oligonucleotide
gacaucaaggucucagaac

SEQ ID NO: 3069243 - RNA, 19 nt, Artificial Sequence
  Description of Artificial Sequence: Synthetic oligonucleotide
uuccaugcgaugcaccucu

SEQ ID NO: 3069244 - RNA, 19 nt, Artificial Sequence
  Description of Artificial Sequence: Synthetic oligonucleotide
cgaaaauggauaauagugg

SEQ ID NO: 3069245 - RNA, 19 nt, Artificial Sequence
  Description of Artificial Sequence: Synthetic oligonucleotide
aucgucuuggucauguagg

SEQ ID NO: 3069246 - RNA, 19 nt, Artificial Sequence
  Description of Artificial Sequence: Synthetic oligonucleotide
caugucuuccaugcgaugc

SEQ ID NO: 3069247 - RNA, 19 nt, Artificial Sequence
  Description of Artificial Sequence: Synthetic oligonucleotide
uugggguaauacuaugaca

SEQ ID NO: 3069248 - RNA, 19 nt, Artificial Sequence
  Description of Artificial Sequence: Synthetic oligonucleotide
acuuauuacaccagaucag

SEQ ID NO: 3069249 - RNA, 19 nt, Artificial Sequence
  Description of Artificial Sequence: Synthetic oligonucleotide
uacuccguaagucccucag

SEQ ID NO: 3069250 - RNA, 19 nt, Artificial Sequence
  Description of Artificial Sequence: Synthetic oligonucleotide
ucuuccaugcgaugcaccu

SEQ ID NO: 3069251 - RNA, 19 nt, Artificial Sequence
  Description of Artificial Sequence: Synthetic oligonucleotide
aggucucagaacuguuccc

SEQ ID NO: 3069252 - RNA, 19 nt, Artificial Sequence
  Description of Artificial Sequence: Synthetic oligonucleotide
cauggauuuccgacaagag

SEQ ID NO: 3069253 - RNA, 19 nt, Artificial Sequence
  Description of Artificial Sequence: Synthetic oligonucleotide
cauguaggguucuuucccc

SEQ ID NO: 3069254 - RNA, 19 nt, Artificial Sequence
  Description of Artificial Sequence: Synthetic oligonucleotide
auccucuggacccaccauc

SEQ ID NO: 3069255 - RNA, 19 nt, Artificial Sequence
  Description of Artificial Sequence: Synthetic oligonucleotide
gugaugccaacugagcugg

SEQ ID NO: 3069256 - RNA, 19 nt, Artificial Sequence
  Description of Artificial Sequence: Synthetic oligonucleotide
gguucuuuccccuuggaca

SEQ ID NO: 3069257 - RNA, 19 nt, Artificial Sequence
  Description of Artificial Sequence: Synthetic oligonucleotide
auacuaugacacgaaaaug

SEQ ID NO: 3069258 - RNA, 19 nt, Artificial Sequence
  Description of Artificial Sequence: Synthetic oligonucleotide
augacacgaaaauggauaa

SEQ ID NO: 3069259 - RNA, 19 nt, Artificial Sequence
  Description of Artificial Sequence: Synthetic oligonucleotide
uacaccagaucagagucug

SEQ ID NO: 3069260 - RNA, 19 nt, Artificial Sequence
  Description of Artificial Sequence: Synthetic oligonucleotide
ggauaauaguggcaggacc

SEQ ID NO: 3069261 - RNA, 19 nt, Artificial Sequence
  Description of Artificial Sequence: Synthetic oligonucleotide
uaggguucuuuccccuugg

SEQ ID NO: 3069262 - RNA, 19 nt, Artificial Sequence
  Description of Artificial Sequence: Synthetic oligonucleotide
uccccuuggacaucaaggu

SEQ ID NO: 3069263 - RNA, 19 nt, Artificial Sequence
  Description of Artificial Sequence: Synthetic oligonucleotide
gucauguaggguucuuucc

SEQ ID NO: 3069264 - RNA, 19 nt, Artificial Sequence
  Description of Artificial Sequence: Synthetic oligonucleotide
acacgaaaauggauaauag

SEQ ID NO: 3069265 - RNA, 19 nt, Artificial Sequence
  Description of Artificial Sequence: Synthetic oligonucleotide
gagcuggcaguccaggacc

SEQ ID NO: 3069266 - RNA, 19 nt, Artificial Sequence
  Description of Artificial Sequence: Synthetic oligonucleotide
gacacgaaaauggauaaua

SEQ ID NO: 3069267 - RNA, 19 nt, Artificial Sequence
  Description of Artificial Sequence: Synthetic oligonucleotide
accucuauccugcgcuccc

SEQ ID NO: 3069268 - RNA, 19 nt, Artificial Sequence
  Description of Artificial Sequence: Synthetic oligonucleotide
uucgcagcgguaguugccg

SEQ ID NO: 3069269 - RNA, 19 nt, Artificial Sequence
  Description of Artificial Sequence: Synthetic oligonucleotide
cuuauuacaccagaucaga

SEQ ID NO: 3069270 - RNA, 19 nt, Artificial Sequence
  Description of Artificial Sequence: Synthetic oligonucleotide
auggauaauaguggcagga

SEQ ID NO: 3069271 - RNA, 19 nt, Artificial Sequence
  Description of Artificial Sequence: Synthetic oligonucleotide
uucucacacuuauuacacc

SEQ ID NO: 3069272 - RNA, 19 nt, Artificial Sequence
  Description of Artificial Sequence: Synthetic oligonucleotide
caucgucuuggucauguag

SEQ ID NO: 3069273 - RNA, 19 nt, Artificial Sequence
  Description of Artificial Sequence: Synthetic oligonucleotide
ugcgaugcaccucuauccu

SEQ ID NO: 3069274 - RNA, 19 nt, Artificial Sequence
  Description of Artificial Sequence: Synthetic oligonucleotide
ugcuucucacacuuauuac

SEQ ID NO: 3069275 - RNA, 19 nt, Artificial Sequence
  Description of Artificial Sequence: Synthetic oligonucleotide
gaccaugucuuccaugcga

SEQ ID NO: 3069276 - RNA, 19 nt, Artificial Sequence
  Description of Artificial Sequence: Synthetic oligonucleotide
uggacaucaaggucucaga

SEQ ID NO: 3069277 - RNA, 19 nt, Artificial Sequence
  Description of Artificial Sequence: Synthetic oligonucleotide
auaauaguggcaggaccag

SEQ ID NO: 3069278 - RNA, 19 nt, Artificial Sequence
  Description of Artificial Sequence: Synthetic oligonucleotide
aagcgugaugccaacugag

SEQ ID NO: 3069279 - RNA, 19 nt, Artificial Sequence
  Description of Artificial Sequence: Synthetic oligonucleotide
uuacaccagaucagagucu

SEQ ID NO: 3069280 - RNA, 19 nt, Artificial Sequence
  Description of Artificial Sequence: Synthetic oligonucleotide
ccguaagucccucagaagc

SEQ ID NO: 3069281 - RNA, 19 nt, Artificial Sequence
  Description of Artificial Sequence: Synthetic oligonucleotide
cuuugggguaauacuauga

SEQ ID NO: 3069282 - RNA, 19 nt, Artificial Sequence
  Description of Artificial Sequence: Synthetic oligonucleotide
ugguucccaguucgcagcg

SEQ ID NO: 3069283 - RNA, 19 nt, Artificial Sequence
  Description of Artificial Sequence: Synthetic oligonucleotide
aguggcaggaccagcauug

SEQ ID NO: 3069284 - RNA, 19 nt, Artificial Sequence
  Description of Artificial Sequence: Synthetic oligonucleotide
auuuccgacaagaguggac

SEQ ID NO: 3069285 - RNA, 19 nt, Artificial Sequence
  Description of Artificial Sequence: Synthetic oligonucleotide
uccguaagucccucagaag

SEQ ID NO: 3069286 - RNA, 19 nt, Artificial Sequence
  Description of Artificial Sequence: Synthetic oligonucleotide
uccaggaccaugucuucca

SEQ ID NO: 3069287 - RNA, 19 nt, Artificial Sequence
  Description of Artificial Sequence: Synthetic oligonucleotide
ucuuggucauguaggguuc

SEQ ID NO: 3069288 - RNA, 19 nt, Artificial Sequence
  Description of Artificial Sequence: Synthetic oligonucleotide
acuaugacacgaaaaugga

SEQ ID NO: 3069289 - RNA, 19 nt, Artificial Sequence
  Description of Artificial Sequence: Synthetic oligonucleotide
caaggucucagaacuguuc

SEQ ID NO: 3069290 - RNA, 19 nt, Artificial Sequence
  Description of Artificial Sequence: Synthetic oligonucleotide
cacaauccauggauuuccg

SEQ ID NO: 3069291 - RNA, 19 nt, Artificial Sequence
  Description of Artificial Sequence: Synthetic oligonucleotide
accagcauugaugguuccc

SEQ ID NO: 3069292 - RNA, 19 nt, Artificial Sequence
  Description of Artificial Sequence: Synthetic oligonucleotide
caugcgaugcaccucuauc

SEQ ID NO: 3069293 - RNA, 19 nt, Artificial Sequence
  Description of Artificial Sequence: Synthetic oligonucleotide
gaugcaccucuauccugcg

SEQ ID NO: 3069294 - RNA, 19 nt, Artificial Sequence
  Description of Artificial Sequence: Synthetic oligonucleotide
gaagcgugaugccaacuga

SEQ ID NO: 3069295 - RNA, 19 nt, Artificial Sequence
  Description of Artificial Sequence: Synthetic oligonucleotide
agcgugaugccaacugagc

SEQ ID NO: 3069296 - RNA, 19 nt, Artificial Sequence
  Description of Artificial Sequence: Synthetic oligonucleotide
uaagucccucagaagcgug

SEQ ID NO: 3069297 - RNA, 19 nt, Artificial Sequence
  Description of Artificial Sequence: Synthetic oligonucleotide
uugaugguucccaguucgc

SEQ ID NO: 3069298 - RNA, 19 nt, Artificial Sequence
  Description of Artificial Sequence: Synthetic oligonucleotide
aucaaggucucagaacugu

SEQ ID NO: 3069299 - RNA, 19 nt, Artificial Sequence
  Description of Artificial Sequence: Synthetic oligonucleotide
uggauaauaguggcaggac

SEQ ID NO: 3069300 - RNA, 19 nt, Artificial Sequence
  Description of Artificial Sequence: Synthetic oligonucleotide
uggcaguccaggaccaugu

SEQ ID NO: 3069301 - RNA, 19 nt, Artificial Sequence
  Description of Artificial Sequence: Synthetic oligonucleotide
guaauacuaugacacgaaa

SEQ ID NO: 3069302 - RNA, 19 nt, Artificial Sequence
  Description of Artificial Sequence: Synthetic oligonucleotide
uauccugcgcuccccacaa

SEQ ID NO: 3069303 - RNA, 19 nt, Artificial Sequence
  Description of Artificial Sequence: Synthetic oligonucleotide
gaguggaccugcuucucac

SEQ ID NO: 3069304 - RNA, 19 nt, Artificial Sequence
  Description of Artificial Sequence: Synthetic oligonucleotide
ugaugguucccaguucgca

SEQ ID NO: 3069305 - RNA, 19 nt, Artificial Sequence
  Description of Artificial Sequence: Synthetic oligonucleotide
ucccaguucgcagcgguag

SEQ ID NO: 3069306 - RNA, 19 nt, Artificial Sequence
  Description of Artificial Sequence: Synthetic oligonucleotide
uaauaguggcaggaccagc

SEQ ID NO: 3069307 - RNA, 19 nt, Artificial Sequence
  Description of Artificial Sequence: Synthetic oligonucleotide
augucuuccaugcgaugca

SEQ ID NO: 3069308 - RNA, 19 nt, Artificial Sequence
  Description of Artificial Sequence: Synthetic oligonucleotide
ucuuuccccuuggacauca

SEQ ID NO: 3069309 - RNA, 19 nt, Artificial Sequence
  Description of Artificial Sequence: Synthetic oligonucleotide
guaggguucuuuccccuug

SEQ ID NO: 3069310 - RNA, 19 nt, Artificial Sequence
  Description of Artificial Sequence: Synthetic oligonucleotide
augcaccucuauccugcgc

SEQ ID NO: 3069311 - RNA, 19 nt, Artificial Sequence
  Description of Artificial Sequence: Synthetic oligonucleotide
acaauccauggauuuccga

SEQ ID NO: 3069312 - RNA, 19 nt, Artificial Sequence
  Description of Artificial Sequence: Synthetic oligonucleotide
ggacccaccaucgucuugg

SEQ ID NO: 3069313 - RNA, 19 nt, Artificial Sequence
  Description of Artificial Sequence: Synthetic oligonucleotide
accugcuucucacacuuau

SEQ ID NO: 3069314 - RNA, 19 nt, Artificial Sequence
  Description of Artificial Sequence: Synthetic oligonucleotide
uccugcgcuccccacaauc

SEQ ID NO: 3069315 - RNA, 19 nt, Artificial Sequence
  Description of Artificial Sequence: Synthetic oligonucleotide
uccauggauuuccgacaag

SEQ ID NO: 3069316 - RNA, 19 nt, Artificial Sequence
  Description of Artificial Sequence: Synthetic oligonucleotide
guugccggcauccucugga

SEQ ID NO: 3069317 - RNA, 19 nt, Artificial Sequence
  Description of Artificial Sequence: Synthetic oligonucleotide
aggaccagcauugaugguu

SEQ ID NO: 3069318 - RNA, 19 nt, Artificial Sequence
  Description of Artificial Sequence: Synthetic oligonucleotide
ucaaggucucagaacuguu

SEQ ID NO: 3069319 - RNA, 19 nt, Artificial Sequence
  Description of Artificial Sequence: Synthetic oligonucleotide
ucagaagcgugaugccaac

SEQ ID NO: 3069320 - RNA, 19 nt, Artificial Sequence
  Description of Artificial Sequence: Synthetic oligonucleotide
ggauuuccgacaagagugg

SEQ ID NO: 3069321 - RNA, 19 nt, Artificial Sequence
  Description of Artificial Sequence: Synthetic oligonucleotide
caucaaggucucagaacug

SEQ ID NO: 3069322 - RNA, 19 nt, Artificial Sequence
  Description of Artificial Sequence: Synthetic oligonucleotide
auguaggguucuuuccccu

SEQ ID NO: 3069323 - RNA, 19 nt, Artificial Sequence
  Description of Artificial Sequence: Synthetic oligonucleotide
cccaccaucgucuugguca

SEQ ID NO: 3069324 - RNA, 19 nt, Artificial Sequence
  Description of Artificial Sequence: Synthetic oligonucleotide
accaucgucuuggucaugu

SEQ ID NO: 3069325 - RNA, 19 nt, Artificial Sequence
  Description of Artificial Sequence: Synthetic oligonucleotide
agcgguaguugccggcauc

SEQ ID NO: 3069326 - RNA, 19 nt, Artificial Sequence
  Description of Artificial Sequence: Synthetic oligonucleotide
uccgacaagaguggaccug

SEQ ID NO: 3069327 - RNA, 19 nt, Artificial Sequence
  Description of Artificial Sequence: Synthetic oligonucleotide
cucagaagcgugaugccaa

SEQ ID NO: 3069328 - RNA, 19 nt, Artificial Sequence
  Description of Artificial Sequence: Synthetic oligonucleotide
ggucauguaggguucuuuc

SEQ ID NO: 3069329 - RNA, 19 nt, Artificial Sequence
  Description of Artificial Sequence: Synthetic oligonucleotide
cugcuucucacacuuauua

SEQ ID NO: 3069330 - RNA, 19 nt, Artificial Sequence
  Description of Artificial Sequence: Synthetic oligonucleotide
ggcaggaccagcauugaug

SEQ ID NO: 3069331 - RNA, 19 nt, Artificial Sequence
  Description of Artificial Sequence: Synthetic oligonucleotide
ugccaacugagcuggcagu

SEQ ID NO: 3069332 - RNA, 19 nt, Artificial Sequence
  Description of Artificial Sequence: Synthetic oligonucleotide
cacgaaaauggauaauagu

SEQ ID NO: 3069333 - RNA, 19 nt, Artificial Sequence
  Description of Artificial Sequence: Synthetic oligonucleotide
guggaccugcuucucacac

SEQ ID NO: 3069334 - RNA, 19 nt, Artificial Sequence
  Description of Artificial Sequence: Synthetic oligonucleotide
ggucucagaacuguucccc

SEQ ID NO: 3069335 - RNA, 19 nt, Artificial Sequence
  Description of Artificial Sequence: Synthetic oligonucleotide
cguaagucccucagaagcg

SEQ ID NO: 3069336 - RNA, 19 nt, Artificial Sequence
  Description of Artificial Sequence: Synthetic oligonucleotide
cucuggacccaccaucguc

SEQ ID NO: 3069337 - RNA, 19 nt, Artificial Sequence
  Description of Artificial Sequence: Synthetic oligonucleotide
cuccguaagucccucagaa

SEQ ID NO: 3069338 - RNA, 19 nt, Artificial Sequence
  Description of Artificial Sequence: Synthetic oligonucleotide
uuccgacaagaguggaccu

SEQ ID NO: 3069339 - RNA, 19 nt, Artificial Sequence
  Description of Artificial Sequence: Synthetic oligonucleotide
cagcauugaugguucccag

SEQ ID NO: 3069340 - RNA, 19 nt, Artificial Sequence
  Description of Artificial Sequence: Synthetic oligonucleotide
ucuauccugcgcuccccac

SEQ ID NO: 3069341 - RNA, 19 nt, Artificial Sequence
  Description of Artificial Sequence: Synthetic oligonucleotide
gucuuggucauguaggguu

SEQ ID NO: 3069342 - RNA, 19 nt, Artificial Sequence
  Description of Artificial Sequence: Synthetic oligonucleotide
uggaccugcuucucacacu

SEQ ID NO: 3069343 - RNA, 19 nt, Artificial Sequence
  Description of Artificial Sequence: Synthetic oligonucleotide
ggguaauacuaugacacga

SEQ ID NO: 3069344 - RNA, 19 nt, Artificial Sequence
  Description of Artificial Sequence: Synthetic oligonucleotide
guucuuuccccuuggacau

SEQ ID NO: 3069345 - RNA, 19 nt, Artificial Sequence
  Description of Artificial Sequence: Synthetic oligonucleotide
aagucccucagaagcguga

SEQ ID NO: 3069346 - RNA, 19 nt, Artificial Sequence
  Description of Artificial Sequence: Synthetic oligonucleotide
aguggaccugcuucucaca

SEQ ID NO: 3069347 - RNA, 19 nt, Artificial Sequence
  Description of Artificial Sequence: Synthetic oligonucleotide
auaguggcaggaccagcau

SEQ ID NO: 3069348 - RNA, 19 nt, Artificial Sequence
  Description of Artificial Sequence: Synthetic oligonucleotide
ccacaauccauggauuucc

SEQ ID NO: 3069349 - RNA, 19 nt, Artificial Sequence
  Description of Artificial Sequence: Synthetic oligonucleotide
acuccguaagucccucaga

SEQ ID NO: 3069350 - RNA, 19 nt, Artificial Sequence
  Description of Artificial Sequence: Synthetic oligonucleotide
uguaggguucuuuccccuu

SEQ ID NO: 3069351 - RNA, 19 nt, Artificial Sequence
  Description of Artificial Sequence: Synthetic oligonucleotide
ugucuuccaugcgaugcac

SEQ ID NO: 3069352 - RNA, 19 nt, Artificial Sequence
  Description of Artificial Sequence: Synthetic oligonucleotide
aacugagcuggcaguccag

SEQ ID NO: 3069353 - RNA, 19 nt, Artificial Sequence
  Description of Artificial Sequence: Synthetic oligonucleotide
aguugccggcauccucugg

SEQ ID NO: 3069354 - RNA, 19 nt, Artificial Sequence
  Description of Artificial Sequence: Synthetic oligonucleotide
uaguggcaggaccagcauu

SEQ ID NO: 3069355 - RNA, 19 nt, Artificial Sequence
  Description of Artificial Sequence: Synthetic oligonucleotide
gccggcauccucuggaccc

SEQ ID NO: 3069356 - RNA, 19 nt, Artificial Sequence
  Description of Artificial Sequence: Synthetic oligonucleotide
uguacuccguaagucccuc

SEQ ID NO: 3069357 - RNA, 19 nt, Artificial Sequence
  Description of Artificial Sequence: Synthetic oligonucleotide
ugcgcuccccacaauccau

SEQ ID NO: 3069358 - RNA, 19 nt, Artificial Sequence
  Description of Artificial Sequence: Synthetic oligonucleotide
gauuuccgacaagagugga

SEQ ID NO: 3069359 - RNA, 19 nt, Artificial Sequence
  Description of Artificial Sequence: Synthetic oligonucleotide
gguaauacuaugacacgaa

SEQ ID NO: 3069360 - RNA, 19 nt, Artificial Sequence
  Description of Artificial Sequence: Synthetic oligonucleotide
ugccggcauccucuggacc

SEQ ID NO: 3069361 - RNA, 19 nt, Artificial Sequence
  Description of Artificial Sequence: Synthetic oligonucleotide
uccccacaauccauggauu

SEQ ID NO: 3069362 - RNA, 19 nt, Artificial Sequence
  Description of Artificial Sequence: Synthetic oligonucleotide
ugacacgaaaauggauaau

SEQ ID NO: 3069363 - RNA, 19 nt, Artificial Sequence
  Description of Artificial Sequence: Synthetic oligonucleotide
caggaccaugucuuccaug

SEQ ID NO: 3069364 - RNA, 19 nt, Artificial Sequence
  Description of Artificial Sequence: Synthetic oligonucleotide
cgaugcaccucuauccugc

SEQ ID NO: 3069365 - RNA, 19 nt, Artificial Sequence
  Description of Artificial Sequence: Synthetic oligonucleotide
ucgcagcgguaguugccgg

SEQ ID NO: 3069366 - RNA, 19 nt, Artificial Sequence
  Description of Artificial Sequence: Synthetic oligonucleotide
uggacccaccaucgucuug

SEQ ID NO: 3069367 - RNA, 19 nt, Artificial Sequence
  Description of Artificial Sequence: Synthetic oligonucleotide
ggacaucaaggucucagaa

SEQ ID NO: 3069368 - RNA, 19 nt, Artificial Sequence
  Description of Artificial Sequence: Synthetic oligonucleotide
caacugagcuggcagucca

SEQ ID NO: 3069369 - RNA, 19 nt, Artificial Sequence
  Description of Artificial Sequence: Synthetic oligonucleotide
caagaguggaccugcuucu

SEQ ID NO: 3069370 - RNA, 19 nt, Artificial Sequence
  Description of Artificial Sequence: Synthetic oligonucleotide
uugccggcauccucuggac

SEQ ID NO: 3069371 - RNA, 19 nt, Artificial Sequence
  Description of Artificial Sequence: Synthetic oligonucleotide
ggguucuuuccccuuggac

SEQ ID NO: 3069372 - RNA, 19 nt, Artificial Sequence
  Description of Artificial Sequence: Synthetic oligonucleotide
ggaccaugucuuccaugcg

SEQ ID NO: 3069373 - RNA, 19 nt, Artificial Sequence
  Description of Artificial Sequence: Synthetic oligonucleotide
cuaugacacgaaaauggau

SEQ ID NO: 3069374 - RNA, 19 nt, Artificial Sequence
  Description of Artificial Sequence: Synthetic oligonucleotide
acccaccaucgucuugguc

SEQ ID NO: 3069375 - RNA, 19 nt, Artificial Sequence
  Description of Artificial Sequence: Synthetic oligonucleotide
guucgcagcgguaguugcc

SEQ ID NO: 3069376 - RNA, 19 nt, Artificial Sequence
  Description of Artificial Sequence: Synthetic oligonucleotide
cgugaugccaacugagcug

SEQ ID NO: 3069377 - RNA, 19 nt, Artificial Sequence
  Description of Artificial Sequence: Synthetic oligonucleotide
cuauccugcgcuccccaca

SEQ ID NO: 3069378 - RNA, 19 nt, Artificial Sequence
  Description of Artificial Sequence: Synthetic oligonucleotide
uggcaggaccagcauugau

SEQ ID NO: 3069379 - RNA, 19 nt, Artificial Sequence
  Description of Artificial Sequence: Synthetic oligonucleotide
guccaggaccaugucuucc

SEQ ID NO: 3069380 - RNA, 19 nt, Artificial Sequence
  Description of Artificial Sequence: Synthetic oligonucleotide
ccugcgcuccccacaaucc

SEQ ID NO: 3069381 - RNA, 19 nt, Artificial Sequence
  Description of Artificial Sequence: Synthetic oligonucleotide
cacacuuauuacaccagau

SEQ ID NO: 3069382 - RNA, 19 nt, Artificial Sequence
  Description of Artificial Sequence: Synthetic oligonucleotide
ugaugccaacugagcuggc

SEQ ID NO: 3069383 - RNA, 19 nt, Artificial Sequence
  Description of Artificial Sequence: Synthetic oligonucleotide
caguucgcagcgguaguug

SEQ ID NO: 3069384 - RNA, 19 nt, Artificial Sequence
  Description of Artificial Sequence: Synthetic oligonucleotide
gucuuccaugcgaugcacc

SEQ ID NO: 3069385 - RNA, 19 nt, Artificial Sequence
  Description of Artificial Sequence: Synthetic oligonucleotide
cuggcaguccaggaccaug

SEQ ID NO: 3069386 - RNA, 19 nt, Artificial Sequence
  Description of Artificial Sequence: Synthetic oligonucleotide
aggguucuuuccccuugga

SEQ ID NO: 3069387 - RNA, 19 nt, Artificial Sequence
  Description of Artificial Sequence: Synthetic oligonucleotide
uggucauguaggguucuuu

SEQ ID NO: 3069388 - RNA, 19 nt, Artificial Sequence
  Description of Artificial Sequence: Synthetic oligonucleotide
cuccccacaauccauggau

SEQ ID NO: 3069389 - RNA, 19 nt, Artificial Sequence
  Description of Artificial Sequence: Synthetic oligonucleotide
uucccaguucgcagcggua

SEQ ID NO: 3069390 - RNA, 19 nt, Artificial Sequence
  Description of Artificial Sequence: Synthetic oligonucleotide
caguccaggaccaugucuu

SEQ ID NO: 3069391 - RNA, 19 nt, Artificial Sequence
  Description of Artificial Sequence: Synthetic oligonucleotide
cuuccaugcgaugcaccuc

SEQ ID NO: 3069392 - RNA, 19 nt, Artificial Sequence
  Description of Artificial Sequence: Synthetic oligonucleotide
caccucuauccugcgcucc

SEQ ID NO: 3069393 - RNA, 19 nt, Artificial Sequence
  Description of Artificial Sequence: Synthetic oligonucleotide
ccgacaagaguggaccugc

SEQ ID NO: 3069394 - RNA, 19 nt, Artificial Sequence
  Description of Artificial Sequence: Synthetic oligonucleotide
gucccucagaagcgugaug

SEQ ID NO: 3069395 - RNA, 19 nt, Artificial Sequence
  Description of Artificial Sequence: Synthetic oligonucleotide
ccauggauuuccgacaaga

SEQ ID NO: 3069396 - RNA, 19 nt, Artificial Sequence
  Description of Artificial Sequence: Synthetic oligonucleotide
agucccucagaagcgugau

SEQ ID NO: 3069397 - RNA, 19 nt, Artificial Sequence
  Description of Artificial Sequence: Synthetic oligonucleotide
guucccaguucgcagcggu

SEQ ID NO: 3069398 - RNA, 19 nt, Artificial Sequence
  Description of Artificial Sequence: Synthetic oligonucleotide
ggaccagcauugaugguuc

SEQ ID NO: 3069399 - RNA, 19 nt, Artificial Sequence
  Description of Artificial Sequence: Synthetic oligonucleotide
guaagucccucagaagcgu

SEQ ID NO: 3069400 - RNA, 19 nt, Artificial Sequence
  Description of Artificial Sequence: Synthetic oligonucleotide
gcgguaguugccggcaucc

SEQ ID NO: 3069401 - RNA, 19 nt, Artificial Sequence
  Description of Artificial Sequence: Synthetic oligonucleotide
gcgaugcaccucuauccug

SEQ ID NO: 3069402 - RNA, 19 nt, Artificial Sequence
  Description of Artificial Sequence: Synthetic oligonucleotide
gcauccucuggacccacca

SEQ ID NO: 3069403 - RNA, 19 nt, Artificial Sequence
  Description of Artificial Sequence: Synthetic oligonucleotide
gcauugaugguucccaguu

SEQ ID NO: 3069404 - RNA, 19 nt, Artificial Sequence
  Description of Artificial Sequence: Synthetic oligonucleotide
cucuauccugcgcucccca

SEQ ID NO: 3069405 - RNA, 19 nt, Artificial Sequence
  Description of Artificial Sequence: Synthetic oligonucleotide
gacaagaguggaccugcuu

SEQ ID NO: 3069406 - RNA, 19 nt, Artificial Sequence
  Description of Artificial Sequence: Synthetic oligonucleotide
guacuccguaagucccuca

SEQ ID NO: 3069407 - RNA, 19 nt, Artificial Sequence
  Description of Artificial Sequence: Synthetic oligonucleotide
cugcgcuccccacaaucca

SEQ ID NO: 3069408 - RNA, 19 nt, Artificial Sequence
  Description of Artificial Sequence: Synthetic oligonucleotide
gcgugaugccaacugagcu

SEQ ID NO: 3069409 - RNA, 19 nt, Artificial Sequence
  Description of Artificial Sequence: Synthetic oligonucleotide
ccagcauugaugguuccca

SEQ ID NO: 3069410 - RNA, 19 nt, Artificial Sequence
  Description of Artificial Sequence: Synthetic oligonucleotide
cccucagaagcgugaugcc

SEQ ID NO: 3069411 - RNA, 19 nt, Artificial Sequence
  Description of Artificial Sequence: Synthetic oligonucleotide
ccaacugagcuggcagucc

SEQ ID NO: 3069412 - RNA, 19 nt, Artificial Sequence
  Description of Artificial Sequence: Synthetic oligonucleotide
uuggucauguaggguucuu

SEQ ID NO: 3069413 - RNA, 19 nt, Artificial Sequence
  Description of Artificial Sequence: Synthetic oligonucleotide
uucuuuccccuuggacauc

SEQ ID NO: 3069414 - RNA, 19 nt, Artificial Sequence
  Description of Artificial Sequence: Synthetic oligonucleotide
agcuggcaguccaggacca

SEQ ID NO: 3069415 - RNA, 19 nt, Artificial Sequence
  Description of Artificial Sequence: Synthetic oligonucleotide
uccaugcgaugcaccucua

SEQ ID NO: 3069416 - RNA, 19 nt, Artificial Sequence
  Description of Artificial Sequence: Synthetic oligonucleotide
ggaccugcuucucacacuu

SEQ ID NO: 3069417 - RNA, 19 nt, Artificial Sequence
  Description of Artificial Sequence: Synthetic oligonucleotide
cuguacuccguaagucccu

SEQ ID NO: 3069418 - RNA, 19 nt, Artificial Sequence
  Description of Artificial Sequence: Synthetic oligonucleotide
cccacaauccauggauuuc

SEQ ID NO: 3069419 - RNA, 19 nt, Artificial Sequence
  Description of Artificial Sequence: Synthetic oligonucleotide
gcaguccaggaccaugucu

SEQ ID NO: 3069420 - RNA, 19 nt, Artificial Sequence
  Description of Artificial Sequence: Synthetic oligonucleotide
gguucccaguucgcagcgg

SEQ ID NO: 3069421 - RNA, 19 nt, Artificial Sequence
  Description of Artificial Sequence: Synthetic oligonucleotide
gccaacugagcuggcaguc

SEQ ID NO: 3069422 - RNA, 19 nt, Artificial Sequence
  Description of Artificial Sequence: Synthetic oligonucleotide
ccaugucuuccaugcgaug

SEQ ID NO: 3069423 - RNA, 19 nt, Artificial Sequence
  Description of Artificial Sequence: Synthetic oligonucleotide
ccccuuggacaucaagguc

SEQ ID NO: 3069424 - RNA, 19 nt, Artificial Sequence
  Description of Artificial Sequence: Synthetic oligonucleotide
ccucagaagcgugaugcca

SEQ ID NO: 3069425 - RNA, 19 nt, Artificial Sequence
  Description of Artificial Sequence: Synthetic oligonucleotide
cgcuccccacaauccaugg

SEQ ID NO: 3069426 - RNA, 19 nt, Artificial Sequence
  Description of Artificial Sequence: Synthetic oligonucleotide
gcaccucuauccugcgcuc

SEQ ID NO: 3069427 - RNA, 19 nt, Artificial Sequence
  Description of Artificial Sequence: Synthetic oligonucleotide
guggcaggaccagcauuga

SEQ ID NO: 3069428 - RNA, 19 nt, Artificial Sequence
  Description of Artificial Sequence: Synthetic oligonucleotide
gcagcgguaguugccggca

SEQ ID NO: 3069429 - RNA, 19 nt, Artificial Sequence
  Description of Artificial Sequence: Synthetic oligonucleotide
gcuccccacaauccaugga

SEQ ID NO: 3069430 - RNA, 19 nt, Artificial Sequence
  Description of Artificial Sequence: Synthetic oligonucleotide
cuuggucauguaggguucu

SEQ ID NO: 3069431 - RNA, 19 nt, Artificial Sequence
  Description of Artificial Sequence: Synthetic oligonucleotide
cuuggacaucaaggucuca

SEQ ID NO: 3069432 - RNA, 19 nt, Artificial Sequence
  Description of Artificial Sequence: Synthetic oligonucleotide
ccucuauccugcgcucccc

SEQ ID NO: 3069433 - RNA, 19 nt, Artificial Sequence
  Description of Artificial Sequence: Synthetic oligonucleotide
cgcagcgguaguugccggc

SEQ ID NO: 3069434 - RNA, 19 nt, Artificial Sequence
  Description of Artificial Sequence: Synthetic oligonucleotide
gcgcuccccacaauccaug

SEQ ID NO: 3069435 - RNA, 19 nt, Artificial Sequence
  Description of Artificial Sequence: Synthetic oligonucleotide
cuuuccccuuggacaucaa

SEQ ID NO: 3069436 - RNA, 19 nt, Artificial Sequence
  Description of Artificial Sequence: Synthetic oligonucleotide
gacccaccaucgucuuggu

SEQ ID NO: 3069437 - RNA, 19 nt, Artificial Sequence
  Description of Artificial Sequence: Synthetic oligonucleotide
ggcauccucuggacccacc

SEQ ID NO: 3069438 - RNA, 19 nt, Artificial Sequence
  Description of Artificial Sequence: Synthetic oligonucleotide
cauccucuggacccaccau

SEQ ID NO: 3069439 - RNA, 19 nt, Artificial Sequence
  Description of Artificial Sequence: Synthetic oligonucleotide
cagaagcgugaugccaacu

SEQ ID NO: 3069440 - RNA, 19 nt, Artificial Sequence
  Description of Artificial Sequence: Synthetic oligonucleotide
gaccugcuucucacacuua

SEQ ID NO: 3069441 - RNA, 19 nt, Artificial Sequence
  Description of Artificial Sequence: Synthetic oligonucleotide
caccaucgucuuggucaug

SEQ ID NO: 3069442 - RNA, 19 nt, Artificial Sequence
  Description of Artificial Sequence: Synthetic oligonucleotide
caggaccagcauugauggu

SEQ ID NO: 3069443 - RNA, 19 nt, Artificial Sequence
  Description of Artificial Sequence: Synthetic oligonucleotide
ccccacaauccauggauuu

SEQ ID NO: 3069444 - RNA, 19 nt, Artificial Sequence
  Description of Artificial Sequence: Synthetic oligonucleotide
cuggacccaccaucgucuu

SEQ ID NO: 3069445 - RNA, 19 nt, Artificial Sequence
  Description of Artificial Sequence: Synthetic oligonucleotide
ccaccaucgucuuggucau

SEQ ID NO: 3069446 - RNA, 19 nt, Artificial Sequence
  Description of Artificial Sequence: Synthetic oligonucleotide
ccugcuucucacacuuauu

SEQ ID NO: 3069447 - RNA, 19 nt, Artificial Sequence
  Description of Artificial Sequence: Synthetic oligonucleotide
ccaucgucuuggucaugua

SEQ ID NO: 3069448 - RNA, 19 nt, Artificial Sequence
  Description of Artificial Sequence: Synthetic oligonucleotide
cagcgguaguugccggcau

SEQ ID NO: 3069449 - RNA, 19 nt, Artificial Sequence
  Description of Artificial Sequence: Synthetic oligonucleotide
cccaguucgcagcgguagu

SEQ ID NO: 3069450 - RNA, 19 nt, Artificial Sequence
  Description of Artificial Sequence: Synthetic oligonucleotide
ccggcauccucuggaccca

SEQ ID NO: 3069451 - RNA, 19 nt, Artificial Sequence
  Description of Artificial Sequence: Synthetic oligonucleotide
ccaugcgaugcaccucuau

SEQ ID NO: 3069452 - RNA, 19 nt, Artificial Sequence
  Description of Artificial Sequence: Synthetic oligonucleotide
ccaggaccaugucuuccau

SEQ ID NO: 3069453 - RNA, 19 nt, Artificial Sequence
  Description of Artificial Sequence: Synthetic oligonucleotide
ccaguucgcagcgguaguu

SEQ ID NO: 3069454 - RNA, 19 nt, Artificial Sequence
  Description of Artificial Sequence: Synthetic oligonucleotide
ccucuggacccaccaucgu

SEQ ID NO: 3069455 - RNA, 19 nt, Artificial Sequence
  Description of Artificial Sequence: Synthetic oligonucleotide
cgucuuggucauguagggu

SEQ ID NO: 3069456 - RNA, 19 nt, Artificial Sequence
  Description of Artificial Sequence: Synthetic oligonucleotide
cgacaagaguggaccugcu

SEQ ID NO: 3069457 - RNA, 19 nt, Artificial Sequence
  Description of Artificial Sequence: Synthetic oligonucleotide
cggcauccucuggacccac

SEQ ID NO: 3069458 - RNA, 19 nt, Artificial Sequence
  Description of Artificial Sequence: Synthetic oligonucleotide
gcuggcaguccaggaccau

SEQ ID NO: 3069459 - RNA, 19 nt, Artificial Sequence
  Description of Artificial Sequence: Synthetic oligonucleotide
cgguaguugccggcauccu

SEQ ID NO: 3069460 - RNA, 19 nt, Artificial Sequence
  Description of Artificial Sequence: Synthetic oligonucleotide
aaguacauggccuucacag

SEQ ID NO: 3069461 - RNA, 19 nt, Artificial Sequence
  Description of Artificial Sequence: Synthetic oligonucleotide
uagacaagcaguuucagag

SEQ ID NO: 3069462 - RNA, 19 nt, Artificial Sequence
  Description of Artificial Sequence: Synthetic oligonucleotide
uggcauaucucaaugagcc

SEQ ID NO: 3069463 - RNA, 19 nt, Artificial Sequence
  Description of Artificial Sequence: Synthetic oligonucleotide
agaggcuggaaguacaugg

SEQ ID NO: 3069464 - RNA, 19 nt, Artificial Sequence
  Description of Artificial Sequence: Synthetic oligonucleotide
aggagugugaccuccacac

SEQ ID NO: 3069465 - RNA, 19 nt, Artificial Sequence
  Description of Artificial Sequence: Synthetic oligonucleotide
cauggucugacucugaccc

SEQ ID NO: 3069466 - RNA, 19 nt, Artificial Sequence
  Description of Artificial Sequence: Synthetic oligonucleotide
uucaguguugccauggucu

SEQ ID NO: 3069467 - RNA, 19 nt, Artificial Sequence
  Description of Artificial Sequence: Synthetic oligonucleotide
uuuccuguagacaagcagu

SEQ ID NO: 3069468 - RNA, 19 nt, Artificial Sequence
  Description of Artificial Sequence: Synthetic oligonucleotide
ugcacuaggccuuucagug

SEQ ID NO: 3069469 - RNA, 19 nt, Artificial Sequence
  Description of Artificial Sequence: Synthetic oligonucleotide
acagagaaagugcuguagg

SEQ ID NO: 3069470 - RNA, 19 nt, Artificial Sequence
  Description of Artificial Sequence: Synthetic oligonucleotide
auggccuucacagagaaag

SEQ ID NO: 3069471 - RNA, 19 nt, Artificial Sequence
  Description of Artificial Sequence: Synthetic oligonucleotide
aucuucaaauuccuccagc

SEQ ID NO: 3069472 - RNA, 19 nt, Artificial Sequence
  Description of Artificial Sequence: Synthetic oligonucleotide
caaagggauccccagaucc

SEQ ID NO: 3069473 - RNA, 19 nt, Artificial Sequence
  Description of Artificial Sequence: Synthetic oligonucleotide
uccacuuucacucccuucu

SEQ ID NO: 3069474 - RNA, 19 nt, Artificial Sequence
  Description of Artificial Sequence: Synthetic oligonucleotide
ucuucaaauuccuccagca

SEQ ID NO: 3069475 - RNA, 19 nt, Artificial Sequence
  Description of Artificial Sequence: Synthetic oligonucleotide
aauuccuccagcauugucu

SEQ ID NO: 3069476 - RNA, 19 nt, Artificial Sequence
  Description of Artificial Sequence: Synthetic oligonucleotide
gacaagcaguuucagaggc

SEQ ID NO: 3069477 - RNA, 19 nt, Artificial Sequence
  Description of Artificial Sequence: Synthetic oligonucleotide
cuuggcauaucucaaugag

SEQ ID NO: 3069478 - RNA, 19 nt, Artificial Sequence
  Description of Artificial Sequence: Synthetic oligonucleotide
gagaaagugcuguagggac

SEQ ID NO: 3069479 - RNA, 19 nt, Artificial Sequence
  Description of Artificial Sequence: Synthetic oligonucleotide
uuccucaugcccaucacug

SEQ ID NO: 3069480 - RNA, 19 nt, Artificial Sequence
  Description of Artificial Sequence: Synthetic oligonucleotide
aaauuccuccagcauuguc

SEQ ID NO: 3069481 - RNA, 19 nt, Artificial Sequence
  Description of Artificial Sequence: Synthetic oligonucleotide
uucuugaggagugugaccu

SEQ ID NO: 3069482 - RNA, 19 nt, Artificial Sequence
  Description of Artificial Sequence: Synthetic oligonucleotide
ugacccuuggcauaucuca

SEQ ID NO: 3069483 - RNA, 19 nt, Artificial Sequence
  Description of Artificial Sequence: Synthetic oligonucleotide
uuggcauaucucaaugagc

SEQ ID NO: 3069484 - RNA, 19 nt, Artificial Sequence
  Description of Artificial Sequence: Synthetic oligonucleotide
guacauggccuucacagag

SEQ ID NO: 3069485 - RNA, 19 nt, Artificial Sequence
  Description of Artificial Sequence: Synthetic oligonucleotide
guuuccuguagacaagcag

SEQ ID NO: 3069486 - RNA, 19 nt, Artificial Sequence
  Description of Artificial Sequence: Synthetic oligonucleotide
auuccuccagcauugucuc

SEQ ID NO: 3069487 - RNA, 19 nt, Artificial Sequence
  Description of Artificial Sequence: Synthetic oligonucleotide
aguuucagaggcuggaagu

SEQ ID NO: 3069488 - RNA, 19 nt, Artificial Sequence
  Description of Artificial Sequence: Synthetic oligonucleotide
uucacagagaaagugcugu

SEQ ID NO: 3069489 - RNA, 19 nt, Artificial Sequence
  Description of Artificial Sequence: Synthetic oligonucleotide
agacaagcaguuucagagg

SEQ ID NO: 3069490 - RNA, 19 nt, Artificial Sequence
  Description of Artificial Sequence: Synthetic oligonucleotide
aggcuggaaguacauggcc

SEQ ID NO: 3069491 - RNA, 19 nt, Artificial Sequence
  Description of Artificial Sequence: Synthetic oligonucleotide
cauugucucacacugcuuc

SEQ ID NO: 3069492 - RNA, 19 nt, Artificial Sequence
  Description of Artificial Sequence: Synthetic oligonucleotide
gagugugaccuccacacug

SEQ ID NO: 3069493 - RNA, 19 nt, Artificial Sequence
  Description of Artificial Sequence: Synthetic oligonucleotide
uuucacucccuucugcacu

SEQ ID NO: 3069494 - RNA, 19 nt, Artificial Sequence
  Description of Artificial Sequence: Synthetic oligonucleotide
agcauugucucacacugcu

SEQ ID NO: 3069495 - RNA, 19 nt, Artificial Sequence
  Description of Artificial Sequence: Synthetic oligonucleotide
aguguugccauggucugac

SEQ ID NO: 3069496 - RNA, 19 nt, Artificial Sequence
  Description of Artificial Sequence: Synthetic oligonucleotide
ucucacacugcuucuugag

SEQ ID NO: 3069497 - RNA, 19 nt, Artificial Sequence
  Description of Artificial Sequence: Synthetic oligonucleotide
ucuucuccuucccagucca

SEQ ID NO: 3069498 - RNA, 19 nt, Artificial Sequence
  Description of Artificial Sequence: Synthetic oligonucleotide
aagggauccccagauccac

SEQ ID NO: 3069499 - RNA, 19 nt, Artificial Sequence
  Description of Artificial Sequence: Synthetic oligonucleotide
uccaaagggauccccagau

SEQ ID NO: 3069500 - RNA, 19 nt, Artificial Sequence
  Description of Artificial Sequence: Synthetic oligonucleotide
uucagaggcuggaaguaca

SEQ ID NO: 3069501 - RNA, 19 nt, Artificial Sequence
  Description of Artificial Sequence: Synthetic oligonucleotide
agguuuccuguagacaagc

SEQ ID NO: 3069502 - RNA, 19 nt, Artificial Sequence
  Description of Artificial Sequence: Synthetic oligonucleotide
guaccagucucccacaaca

SEQ ID NO: 3069503 - RNA, 19 nt, Artificial Sequence
  Description of Artificial Sequence: Synthetic oligonucleotide
ggaaguaccagucucccac

SEQ ID NO: 3069504 - RNA, 19 nt, Artificial Sequence
  Description of Artificial Sequence: Synthetic oligonucleotide
gaaagugcuguagggacug

SEQ ID NO: 3069505 - RNA, 19 nt, Artificial Sequence
  Description of Artificial Sequence: Synthetic oligonucleotide
aguaccagucucccacaac

SEQ ID NO: 3069506 - RNA, 19 nt, Artificial Sequence
  Description of Artificial Sequence: Synthetic oligonucleotide
acuuucacucccuucugca

SEQ ID NO: 3069507 - RNA, 19 nt, Artificial Sequence
  Description of Artificial Sequence: Synthetic oligonucleotide
cacagcuccaaagggaucc

SEQ ID NO: 3069508 - RNA, 19 nt, Artificial Sequence
  Description of Artificial Sequence: Synthetic oligonucleotide
ucugacucugacccuuggc

SEQ ID NO: 3069509 - RNA, 19 nt, Artificial Sequence
  Description of Artificial Sequence: Synthetic oligonucleotide
ucaguguugccauggucug

SEQ ID NO: 3069510 - RNA, 19 nt, Artificial Sequence
  Description of Artificial Sequence: Synthetic oligonucleotide
ugucucacacugcuucuug

SEQ ID NO: 3069511 - RNA, 19 nt, Artificial Sequence
  Description of Artificial Sequence: Synthetic oligonucleotide
uguugccauggucugacuc

SEQ ID NO: 3069512 - RNA, 19 nt, Artificial Sequence
  Description of Artificial Sequence: Synthetic oligonucleotide
uguagacaagcaguuucag

SEQ ID NO: 3069513 - RNA, 19 nt, Artificial Sequence
  Description of Artificial Sequence: Synthetic oligonucleotide
accagucucccacaacauc

SEQ ID NO: 3069514 - RNA, 19 nt, Artificial Sequence
  Description of Artificial Sequence: Synthetic oligonucleotide
ucccacagcuccaaaggga

SEQ ID NO: 3069515 - RNA, 19 nt, Artificial Sequence
  Description of Artificial Sequence: Synthetic oligonucleotide
acucccuucugcacuaggc

SEQ ID NO: 3069516 - RNA, 19 nt, Artificial Sequence
  Description of Artificial Sequence: Synthetic oligonucleotide
ugguggaaguaccagucuc

SEQ ID NO: 3069517 - RNA, 19 nt, Artificial Sequence
  Description of Artificial Sequence: Synthetic oligonucleotide
uucuccuucccaguccagg

SEQ ID NO: 3069518 - RNA, 19 nt, Artificial Sequence
  Description of Artificial Sequence: Synthetic oligonucleotide
ugcuuccucaugcccauca

SEQ ID NO: 3069519 - RNA, 19 nt, Artificial Sequence
  Description of Artificial Sequence: Synthetic oligonucleotide
ucugacccuuggcauaucu

SEQ ID NO: 3069520 - RNA, 19 nt, Artificial Sequence
  Description of Artificial Sequence: Synthetic oligonucleotide
ucucccacaacaucuucaa

SEQ ID NO: 3069521 - RNA, 19 nt, Artificial Sequence
  Description of Artificial Sequence: Synthetic oligonucleotide
agagaaagugcuguaggga

SEQ ID NO: 3069522 - RNA, 19 nt, Artificial Sequence
  Description of Artificial Sequence: Synthetic oligonucleotide
aguacauggccuucacaga

SEQ ID NO: 3069523 - RNA, 19 nt, Artificial Sequence
  Description of Artificial Sequence: Synthetic oligonucleotide
uccagcauugucucacacu

SEQ ID NO: 3069524 - RNA, 19 nt, Artificial Sequence
  Description of Artificial Sequence: Synthetic oligonucleotide
cuucuugaggagugugacc

SEQ ID NO: 3069525 - RNA, 19 nt, Artificial Sequence
  Description of Artificial Sequence: Synthetic oligonucleotide
ucgucccacagcuccaaag

SEQ ID NO: 3069526 - RNA, 19 nt, Artificial Sequence
  Description of Artificial Sequence: Synthetic oligonucleotide
caagcaguuucagaggcug

SEQ ID NO: 3069527 - RNA, 19 nt, Artificial Sequence
  Description of Artificial Sequence: Synthetic oligonucleotide
cuugaggagugugaccucc

SEQ ID NO: 3069528 - RNA, 19 nt, Artificial Sequence
  Description of Artificial Sequence: Synthetic oligonucleotide
acaacaucuucaaauuccu

SEQ ID NO: 3069529 - RNA, 19 nt, Artificial Sequence
  Description of Artificial Sequence: Synthetic oligonucleotide
auugucucacacugcuucu

SEQ ID NO: 3069530 - RNA, 19 nt, Artificial Sequence
  Description of Artificial Sequence: Synthetic oligonucleotide
agugugaccuccacacugg

SEQ ID NO: 3069531 - RNA, 19 nt, Artificial Sequence
  Description of Artificial Sequence: Synthetic oligonucleotide
cccagauccacuuucacuc

SEQ ID NO: 3069532 - RNA, 19 nt, Artificial Sequence
  Description of Artificial Sequence: Synthetic oligonucleotide
uccacacugggcucguccc

SEQ ID NO: 3069533 - RNA, 19 nt, Artificial Sequence
  Description of Artificial Sequence: Synthetic oligonucleotide
cucccuucugcacuaggcc

SEQ ID NO: 3069534 - RNA, 19 nt, Artificial Sequence
  Description of Artificial Sequence: Synthetic oligonucleotide
ugugaccuccacacugggc

SEQ ID NO: 3069535 - RNA, 19 nt, Artificial Sequence
  Description of Artificial Sequence: Synthetic oligonucleotide
ucccuucugcacuaggccu

SEQ ID NO: 3069536 - RNA, 19 nt, Artificial Sequence
  Description of Artificial Sequence: Synthetic oligonucleotide
gauccccagauccacuuuc

SEQ ID NO: 3069537 - RNA, 19 nt, Artificial Sequence
  Description of Artificial Sequence: Synthetic oligonucleotide
ccagcauugucucacacug

SEQ ID NO: 3069538 - RNA, 19 nt, Artificial Sequence
  Description of Artificial Sequence: Synthetic oligonucleotide
gucccacagcuccaaaggg

SEQ ID NO: 3069539 - RNA, 19 nt, Artificial Sequence
  Description of Artificial Sequence: Synthetic oligonucleotide
augcccaucacugcucuuc

SEQ ID NO: 3069540 - RNA, 19 nt, Artificial Sequence
  Description of Artificial Sequence: Synthetic oligonucleotide
uuccuguagacaagcaguu

SEQ ID NO: 3069541 - RNA, 19 nt, Artificial Sequence
  Description of Artificial Sequence: Synthetic oligonucleotide
cugacucugacccuuggca

SEQ ID NO: 3069542 - RNA, 19 nt, Artificial Sequence
  Description of Artificial Sequence: Synthetic oligonucleotide
cuuucacucccuucugcac

SEQ ID NO: 3069543 - RNA, 19 nt, Artificial Sequence
  Description of Artificial Sequence: Synthetic oligonucleotide
aaagugcuguagggacugc

SEQ ID NO: 3069544 - RNA, 19 nt, Artificial Sequence
  Description of Artificial Sequence: Synthetic oligonucleotide
auccacuuucacucccuuc

SEQ ID NO: 3069545 - RNA, 19 nt, Artificial Sequence
  Description of Artificial Sequence: Synthetic oligonucleotide
ucaugcccaucacugcucu

SEQ ID NO: 3069546 - RNA, 19 nt, Artificial Sequence
  Description of Artificial Sequence: Synthetic oligonucleotide
acugggcucgucccacagc

SEQ ID NO: 3069547 - RNA, 19 nt, Artificial Sequence
  Description of Artificial Sequence: Synthetic oligonucleotide
guagacaagcaguuucaga

SEQ ID NO: 3069548 - RNA, 19 nt, Artificial Sequence
  Description of Artificial Sequence: Synthetic oligonucleotide
cacagagaaagugcuguag

SEQ ID NO: 3069549 - RNA, 19 nt, Artificial Sequence
  Description of Artificial Sequence: Synthetic oligonucleotide
agucucccacaacaucuuc

SEQ ID NO: 3069550 - RNA, 19 nt, Artificial Sequence
  Description of Artificial Sequence: Synthetic oligonucleotide
ugacucugacccuuggcau

SEQ ID NO: 3069551 - RNA, 19 nt, Artificial Sequence
  Description of Artificial Sequence: Synthetic oligonucleotide
uuucagaggcuggaaguac

SEQ ID NO: 3069552 - RNA, 19 nt, Artificial Sequence
  Description of Artificial Sequence: Synthetic oligonucleotide
ucccaguccagguuuccug

SEQ ID NO: 3069553 - RNA, 19 nt, Artificial Sequence
  Description of Artificial Sequence: Synthetic oligonucleotide
uggugguggaaguaccagu

SEQ ID NO: 3069554 - RNA, 19 nt, Artificial Sequence
  Description of Artificial Sequence: Synthetic oligonucleotide
cugcucuucuccuucccag

SEQ ID NO: 3069555 - RNA, 19 nt, Artificial Sequence
  Description of Artificial Sequence: Synthetic oligonucleotide
cuucugcuuccucaugccc

SEQ ID NO: 3069556 - RNA, 19 nt, Artificial Sequence
  Description of Artificial Sequence: Synthetic oligonucleotide
uccucaugcccaucacugc

SEQ ID NO: 3069557 - RNA, 19 nt, Artificial Sequence
  Description of Artificial Sequence: Synthetic oligonucleotide
guagggacugcuccuggug

SEQ ID NO: 3069558 - RNA, 19 nt, Artificial Sequence
  Description of Artificial Sequence: Synthetic oligonucleotide
aggccuuucaguguugcca

SEQ ID NO: 3069559 - RNA, 19 nt, Artificial Sequence
  Description of Artificial Sequence: Synthetic oligonucleotide
cuguagacaagcaguuuca

SEQ ID NO: 3069560 - RNA, 19 nt, Artificial Sequence
  Description of Artificial Sequence: Synthetic oligonucleotide
cacugcuucuugaggagug

SEQ ID NO: 3069561 - RNA, 19 nt, Artificial Sequence
  Description of Artificial Sequence: Synthetic oligonucleotide
ucagaggcuggaaguacau

SEQ ID NO: 3069562 - RNA, 19 nt, Artificial Sequence
  Description of Artificial Sequence: Synthetic oligonucleotide
gaaguacauggccuucaca

SEQ ID NO: 3069563 - RNA, 19 nt, Artificial Sequence
  Description of Artificial Sequence: Synthetic oligonucleotide
gaggcuggaaguacauggc

SEQ ID NO: 3069564 - RNA, 19 nt, Artificial Sequence
  Description of Artificial Sequence: Synthetic oligonucleotide
agugcuguagggacugcuc

SEQ ID NO: 3069565 - RNA, 19 nt, Artificial Sequence
  Description of Artificial Sequence: Synthetic oligonucleotide
ccuguagacaagcaguuuc

SEQ ID NO: 3069566 - RNA, 19 nt, Artificial Sequence
  Description of Artificial Sequence: Synthetic oligonucleotide
uggaaguacauggccuuca

SEQ ID NO: 3069567 - RNA, 19 nt, Artificial Sequence
  Description of Artificial Sequence: Synthetic oligonucleotide
aaguaccagucucccacaa

SEQ ID NO: 3069568 - RNA, 19 nt, Artificial Sequence
  Description of Artificial Sequence: Synthetic oligonucleotide
acauggccuucacagagaa

SEQ ID NO: 3069569 - RNA, 19 nt, Artificial Sequence
  Description of Artificial Sequence: Synthetic oligonucleotide
aagcaguuucagaggcugg

SEQ ID NO: 3069570 - RNA, 19 nt, Artificial Sequence
  Description of Artificial Sequence: Synthetic oligonucleotide
ugaggagugugaccuccac

SEQ ID NO: 3069571 - RNA, 19 nt, Artificial Sequence
  Description of Artificial Sequence: Synthetic oligonucleotide
uguagggacugcuccuggu

SEQ ID NO: 3069572 - RNA, 19 nt, Artificial Sequence
  Description of Artificial Sequence: Synthetic oligonucleotide
aguccagguuuccuguaga

SEQ ID NO: 3069573 - RNA, 19 nt, Artificial Sequence
  Description of Artificial Sequence: Synthetic oligonucleotide
uccuucccaguccagguuu

SEQ ID NO: 3069574 - RNA, 19 nt, Artificial Sequence
  Description of Artificial Sequence: Synthetic oligonucleotide
cuccacacugggcucgucc

SEQ ID NO: 3069575 - RNA, 19 nt, Artificial Sequence
  Description of Artificial Sequence: Synthetic oligonucleotide
ucugcuuccucaugcccau

SEQ ID NO: 3069576 - RNA, 19 nt, Artificial Sequence
  Description of Artificial Sequence: Synthetic oligonucleotide
gaaguaccagucucccaca

SEQ ID NO: 3069577 - RNA, 19 nt, Artificial Sequence
  Description of Artificial Sequence: Synthetic oligonucleotide
uugaggagugugaccucca

SEQ ID NO: 3069578 - RNA, 19 nt, Artificial Sequence
  Description of Artificial Sequence: Synthetic oligonucleotide
cagguuuccuguagacaag

SEQ ID NO: 3069579 - RNA, 19 nt, Artificial Sequence
  Description of Artificial Sequence: Synthetic oligonucleotide
acagcuccaaagggauccc

SEQ ID NO: 3069580 - RNA, 19 nt, Artificial Sequence
  Description of Artificial Sequence: Synthetic oligonucleotide
uucacucccuucugcacua

SEQ ID NO: 3069581 - RNA, 19 nt, Artificial Sequence
  Description of Artificial Sequence: Synthetic oligonucleotide
ugcccaucacugcucuucu

SEQ ID NO: 3069582 - RNA, 19 nt, Artificial Sequence
  Description of Artificial Sequence: Synthetic oligonucleotide
agaaagugcuguagggacu

SEQ ID NO: 3069583 - RNA, 19 nt, Artificial Sequence
  Description of Artificial Sequence: Synthetic oligonucleotide
guggaaguaccagucuccc

SEQ ID NO: 3069584 - RNA, 19 nt, Artificial Sequence
  Description of Artificial Sequence: Synthetic oligonucleotide
ucacagagaaagugcugua

SEQ ID NO: 3069585 - RNA, 19 nt, Artificial Sequence
  Description of Artificial Sequence: Synthetic oligonucleotide
caguccagguuuccuguag

SEQ ID NO: 3069586 - RNA, 19 nt, Artificial Sequence
  Description of Artificial Sequence: Synthetic oligonucleotide
gaggagugugaccuccaca

SEQ ID NO: 3069587 - RNA, 19 nt, Artificial Sequence
  Description of Artificial Sequence: Synthetic oligonucleotide
uggccuucacagagaaagu

SEQ ID NO: 3069588 - RNA, 19 nt, Artificial Sequence
  Description of Artificial Sequence: Synthetic oligonucleotide
cuaggccuuucaguguugc

SEQ ID NO: 3069589 - RNA, 19 nt, Artificial Sequence
  Description of Artificial Sequence: Synthetic oligonucleotide
uugccauggucugacucug

SEQ ID NO: 3069590 - RNA, 19 nt, Artificial Sequence
  Description of Artificial Sequence: Synthetic oligonucleotide
gguggaaguaccagucucc

SEQ ID NO: 3069591 - RNA, 19 nt, Artificial Sequence
  Description of Artificial Sequence: Synthetic oligonucleotide
gaccuccacacugggcucg

SEQ ID NO: 3069592 - RNA, 19 nt, Artificial Sequence
  Description of Artificial Sequence: Synthetic oligonucleotide
cuguagggacugcuccugg

SEQ ID NO: 3069593 - RNA, 19 nt, Artificial Sequence
  Description of Artificial Sequence: Synthetic oligonucleotide
uaggccuuucaguguugcc

SEQ ID NO: 3069594 - RNA, 19 nt, Artificial Sequence
  Description of Artificial Sequence: Synthetic oligonucleotide
gugugaccuccacacuggg

SEQ ID NO: 3069595 - RNA, 19 nt, Artificial Sequence
  Description of Artificial Sequence: Synthetic oligonucleotide
cucaugcccaucacugcuc

SEQ ID NO: 3069596 - RNA, 19 nt, Artificial Sequence
  Description of Artificial Sequence: Synthetic oligonucleotide
cagcauugucucacacugc

SEQ ID NO: 3069597 - RNA, 19 nt, Artificial Sequence
  Description of Artificial Sequence: Synthetic oligonucleotide
uccccagauccacuuucac

SEQ ID NO: 3069598 - RNA, 19 nt, Artificial Sequence
  Description of Artificial Sequence: Synthetic oligonucleotide
gucugacucugacccuugg

SEQ ID NO: 3069599 - RNA, 19 nt, Artificial Sequence
  Description of Artificial Sequence: Synthetic oligonucleotide
ugcuccuggugguggaagu

SEQ ID NO: 3069600 - RNA, 19 nt, Artificial Sequence
  Description of Artificial Sequence: Synthetic oligonucleotide
cuggugguggaaguaccag

SEQ ID NO: 3069601 - RNA, 19 nt, Artificial Sequence
  Description of Artificial Sequence: Synthetic oligonucleotide
cugacccuuggcauaucuc

SEQ ID NO: 3069602 - RNA, 19 nt, Artificial Sequence
  Description of Artificial Sequence: Synthetic oligonucleotide
ggcauaucucaaugagccc

SEQ ID NO: 3069603 - RNA, 19 nt, Artificial Sequence
  Description of Artificial Sequence: Synthetic oligonucleotide
gacucugacccuuggcaua

SEQ ID NO: 3069604 - RNA, 19 nt, Artificial Sequence
  Description of Artificial Sequence: Synthetic oligonucleotide
ggugguggaaguaccaguc

SEQ ID NO: 3069605 - RNA, 19 nt, Artificial Sequence
  Description of Artificial Sequence: Synthetic oligonucleotide
ucuugaggagugugaccuc

SEQ ID NO: 3069606 - RNA, 19 nt, Artificial Sequence
  Description of Artificial Sequence: Synthetic oligonucleotide
acccuuggcauaucucaau

SEQ ID NO: 3069607 - RNA, 19 nt, Artificial Sequence
  Description of Artificial Sequence: Synthetic oligonucleotide
gggcucgucccacagcucc

SEQ ID NO: 3069608 - RNA, 19 nt, Artificial Sequence
  Description of Artificial Sequence: Synthetic oligonucleotide
ggccuucacagagaaagug

SEQ ID NO: 3069609 - RNA, 19 nt, Artificial Sequence
  Description of Artificial Sequence: Synthetic oligonucleotide
gucucacacugcuucuuga

SEQ ID NO: 3069610 - RNA, 19 nt, Artificial Sequence
  Description of Artificial Sequence: Synthetic oligonucleotide
ggaaguacauggccuucac

SEQ ID NO: 3069611 - RNA, 19 nt, Artificial Sequence
  Description of Artificial Sequence: Synthetic oligonucleotide
cacucccuucugcacuagg

SEQ ID NO: 3069612 - RNA, 19 nt, Artificial Sequence
  Description of Artificial Sequence: Synthetic oligonucleotide
gucucccacaacaucuuca

SEQ ID NO: 3069613 - RNA, 19 nt, Artificial Sequence
  Description of Artificial Sequence: Synthetic oligonucleotide
gcuucuugaggagugugac

SEQ ID NO: 3069614 - RNA, 19 nt, Artificial Sequence
  Description of Artificial Sequence: Synthetic oligonucleotide
guuucagaggcuggaagua

SEQ ID NO: 3069615 - RNA, 19 nt, Artificial Sequence
  Description of Artificial Sequence: Synthetic oligonucleotide
auaucucaaugagcccuug

SEQ ID NO: 3069616 - RNA, 19 nt, Artificial Sequence
  Description of Artificial Sequence: Synthetic oligonucleotide
cgucccacagcuccaaagg

SEQ ID NO: 3069617 - RNA, 19 nt, Artificial Sequence
  Description of Artificial Sequence: Synthetic oligonucleotide
uggucugacucugacccuu

SEQ ID NO: 3069618 - RNA, 19 nt, Artificial Sequence
  Description of Artificial Sequence: Synthetic oligonucleotide
cuccagcauugucucacac

SEQ ID NO: 3069619 - RNA, 19 nt, Artificial Sequence
  Description of Artificial Sequence: Synthetic oligonucleotide
acucugacccuuggcauau

SEQ ID NO: 3069620 - RNA, 19 nt, Artificial Sequence
  Description of Artificial Sequence: Synthetic oligonucleotide
acacugcuucuugaggagu

SEQ ID NO: 3069621 - RNA, 19 nt, Artificial Sequence
  Description of Artificial Sequence: Synthetic oligonucleotide
agcuccaaagggaucccca

SEQ ID NO: 3069622 - RNA, 19 nt, Artificial Sequence
  Description of Artificial Sequence: Synthetic oligonucleotide
agauccacuuucacucccu

SEQ ID NO: 3069623 - RNA, 19 nt, Artificial Sequence
  Description of Artificial Sequence: Synthetic oligonucleotide
acaagcaguuucagaggcu

SEQ ID NO: 3069624 - RNA, 19 nt, Artificial Sequence
  Description of Artificial Sequence: Synthetic oligonucleotide
uucccaguccagguuuccu

SEQ ID NO: 3069625 - RNA, 19 nt, Artificial Sequence
  Description of Artificial Sequence: Synthetic oligonucleotide
gcauaucucaaugagcccu

SEQ ID NO: 3069626 - RNA, 19 nt, Artificial Sequence
  Description of Artificial Sequence: Synthetic oligonucleotide
ccauggucugacucugacc

SEQ ID NO: 3069627 - RNA, 19 nt, Artificial Sequence
  Description of Artificial Sequence: Synthetic oligonucleotide
cugcuucuugaggagugug

SEQ ID NO: 3069628 - RNA, 19 nt, Artificial Sequence
  Description of Artificial Sequence: Synthetic oligonucleotide
ugccauggucugacucuga

SEQ ID NO: 3069629 - RNA, 19 nt, Artificial Sequence
  Description of Artificial Sequence: Synthetic oligonucleotide
ccagauccacuuucacucc

SEQ ID NO: 3069630 - RNA, 19 nt, Artificial Sequence
  Description of Artificial Sequence: Synthetic oligonucleotide
ccacaacaucuucaaauuc

SEQ ID NO: 3069631 - RNA, 19 nt, Artificial Sequence
  Description of Artificial Sequence: Synthetic oligonucleotide
cacugggcucgucccacag

SEQ ID NO: 3069632 - RNA, 19 nt, Artificial Sequence
  Description of Artificial Sequence: Synthetic oligonucleotide
uugucucacacugcuucuu

SEQ ID NO: 3069633 - RNA, 19 nt, Artificial Sequence
  Description of Artificial Sequence: Synthetic oligonucleotide
cuucccaguccagguuucc

SEQ ID NO: 3069634 - RNA, 19 nt, Artificial Sequence
  Description of Artificial Sequence: Synthetic oligonucleotide
cccuuggcauaucucaaug

SEQ ID NO: 3069635 - RNA, 19 nt, Artificial Sequence
  Description of Artificial Sequence: Synthetic oligonucleotide
cuccaaagggauccccaga

SEQ ID NO: 3069636 - RNA, 19 nt, Artificial Sequence
  Description of Artificial Sequence: Synthetic oligonucleotide
cacacugggcucgucccac

SEQ ID NO: 3069637 - RNA, 19 nt, Artificial Sequence
  Description of Artificial Sequence: Synthetic oligonucleotide
cuggaaguacauggccuuc

SEQ ID NO: 3069638 - RNA, 19 nt, Artificial Sequence
  Description of Artificial Sequence: Synthetic oligonucleotide
uccuguagacaagcaguuu

SEQ ID NO: 3069639 - RNA, 19 nt, Artificial Sequence
  Description of Artificial Sequence: Synthetic oligonucleotide
cuucaaauuccuccagcau

SEQ ID NO: 3069640 - RNA, 19 nt, Artificial Sequence
  Description of Artificial Sequence: Synthetic oligonucleotide
gacccuuggcauaucucaa

SEQ ID NO: 3069641 - RNA, 19 nt, Artificial Sequence
  Description of Artificial Sequence: Synthetic oligonucleotide
cagaggcuggaaguacaug

SEQ ID NO: 3069642 - RNA, 19 nt, Artificial Sequence
  Description of Artificial Sequence: Synthetic oligonucleotide
gccauggucugacucugac

SEQ ID NO: 3069643 - RNA, 19 nt, Artificial Sequence
  Description of Artificial Sequence: Synthetic oligonucleotide
cugggcucgucccacagcu

SEQ ID NO: 3069644 - RNA, 19 nt, Artificial Sequence
  Description of Artificial Sequence: Synthetic oligonucleotide
ccagucucccacaacaucu

SEQ ID NO: 3069645 - RNA, 19 nt, Artificial Sequence
  Description of Artificial Sequence: Synthetic oligonucleotide
cugcuccuggugguggaag

SEQ ID NO: 3069646 - RNA, 19 nt, Artificial Sequence
  Description of Artificial Sequence: Synthetic oligonucleotide
cugcacuaggccuuucagu

SEQ ID NO: 3069647 - RNA, 19 nt, Artificial Sequence
  Description of Artificial Sequence: Synthetic oligonucleotide
ggacugcuccugguggugg

SEQ ID NO: 3069648 - RNA, 19 nt, Artificial Sequence
  Description of Artificial Sequence: Synthetic oligonucleotide
auccccagauccacuuuca

SEQ ID NO: 3069649 - RNA, 19 nt, Artificial Sequence
  Description of Artificial Sequence: Synthetic oligonucleotide
ucacucccuucugcacuag

SEQ ID NO: 3069650 - RNA, 19 nt, Artificial Sequence
  Description of Artificial Sequence: Synthetic oligonucleotide
cagcuccaaagggaucccc

SEQ ID NO: 3069651 - RNA, 19 nt, Artificial Sequence
  Description of Artificial Sequence: Synthetic oligonucleotide
ccuuggcauaucucaauga

SEQ ID NO: 3069652 - RNA, 19 nt, Artificial Sequence
  Description of Artificial Sequence: Synthetic oligonucleotide
gcuguagggacugcuccug

SEQ ID NO: 3069653 - RNA, 19 nt, Artificial Sequence
  Description of Artificial Sequence: Synthetic oligonucleotide
acuaggccuuucaguguug

SEQ ID NO: 3069654 - RNA, 19 nt, Artificial Sequence
  Description of Artificial Sequence: Synthetic oligonucleotide
acacugggcucgucccaca

SEQ ID NO: 3069655 - RNA, 19 nt, Artificial Sequence
  Description of Artificial Sequence: Synthetic oligonucleotide
gugguggaaguaccagucu

SEQ ID NO: 3069656 - RNA, 19 nt, Artificial Sequence
  Description of Artificial Sequence: Synthetic oligonucleotide
cauaucucaaugagcccuu

SEQ ID NO: 3069657 - RNA, 19 nt, Artificial Sequence
  Description of Artificial Sequence: Synthetic oligonucleotide
cuuucaguguugccauggu

SEQ ID NO: 3069658 - RNA, 19 nt, Artificial Sequence
  Description of Artificial Sequence: Synthetic oligonucleotide
ugggcucgucccacagcuc

SEQ ID NO: 3069659 - RNA, 19 nt, Artificial Sequence
  Description of Artificial Sequence: Synthetic oligonucleotide
gcuuccucaugcccaucac

SEQ ID NO: 3069660 - RNA, 19 nt, Artificial Sequence
  Description of Artificial Sequence: Synthetic oligonucleotide
gguuuccuguagacaagca

SEQ ID NO: 3069661 - RNA, 19 nt, Artificial Sequence
  Description of Artificial Sequence: Synthetic oligonucleotide
cacuaggccuuucaguguu

SEQ ID NO: 3069662 - RNA, 19 nt, Artificial Sequence
  Description of Artificial Sequence: Synthetic oligonucleotide
gauccacuuucacucccuu

SEQ ID NO: 3069663 - RNA, 19 nt, Artificial Sequence
  Description of Artificial Sequence: Synthetic oligonucleotide
ccaaagggauccccagauc

SEQ ID NO: 3069664 - RNA, 19 nt, Artificial Sequence
  Description of Artificial Sequence: Synthetic oligonucleotide
ggcuggaaguacauggccu

SEQ ID NO: 3069665 - RNA, 19 nt, Artificial Sequence
  Description of Artificial Sequence: Synthetic oligonucleotide
ccuggugguggaaguacca

SEQ ID NO: 3069666 - RNA, 19 nt, Artificial Sequence
  Description of Artificial Sequence: Synthetic oligonucleotide
acugcuccuggugguggaa

SEQ ID NO: 3069667 - RNA, 19 nt, Artificial Sequence
  Description of Artificial Sequence: Synthetic oligonucleotide
cauggccuucacagagaaa

SEQ ID NO: 3069668 - RNA, 19 nt, Artificial Sequence
  Description of Artificial Sequence: Synthetic oligonucleotide
cucccacaacaucuucaaa

SEQ ID NO: 3069669 - RNA, 19 nt, Artificial Sequence
  Description of Artificial Sequence: Synthetic oligonucleotide
gcuggaaguacauggccuu

SEQ ID NO: 3069670 - RNA, 19 nt, Artificial Sequence
  Description of Artificial Sequence: Synthetic oligonucleotide
ggccuuucaguguugccau

SEQ ID NO: 3069671 - RNA, 19 nt, Artificial Sequence
  Description of Artificial Sequence: Synthetic oligonucleotide
ggucugacucugacccuug

SEQ ID NO: 3069672 - RNA, 19 nt, Artificial Sequence
  Description of Artificial Sequence: Synthetic oligonucleotide
gccuuucaguguugccaug

SEQ ID NO: 3069673 - RNA, 19 nt, Artificial Sequence
  Description of Artificial Sequence: Synthetic oligonucleotide
cccacaacaucuucaaauu

SEQ ID NO: 3069674 - RNA, 19 nt, Artificial Sequence
  Description of Artificial Sequence: Synthetic oligonucleotide
ccuucccaguccagguuuc

SEQ ID NO: 3069675 - RNA, 19 nt, Artificial Sequence
  Description of Artificial Sequence: Synthetic oligonucleotide
accuccacacugggcucgu

SEQ ID NO: 3069676 - RNA, 19 nt, Artificial Sequence
  Description of Artificial Sequence: Synthetic oligonucleotide
ggagugugaccuccacacu

SEQ ID NO: 3069677 - RNA, 19 nt, Artificial Sequence
  Description of Artificial Sequence: Synthetic oligonucleotide
ccucaugcccaucacugcu

SEQ ID NO: 3069678 - RNA, 19 nt, Artificial Sequence
  Description of Artificial Sequence: Synthetic oligonucleotide
caucacugcucuucuccuu

SEQ ID NO: 3069679 - RNA, 19 nt, Artificial Sequence
  Description of Artificial Sequence: Synthetic oligonucleotide
gcacuaggccuuucagugu

SEQ ID NO: 3069680 - RNA, 19 nt, Artificial Sequence
  Description of Artificial Sequence: Synthetic oligonucleotide
cccacagcuccaaagggau

SEQ ID NO: 3069681 - RNA, 19 nt, Artificial Sequence
  Description of Artificial Sequence: Synthetic oligonucleotide
gggauccccagauccacuu

SEQ ID NO: 3069682 - RNA, 19 nt, Artificial Sequence
  Description of Artificial Sequence: Synthetic oligonucleotide
ccaucacugcucuucuccu

SEQ ID NO: 3069683 - RNA, 19 nt, Artificial Sequence
  Description of Artificial Sequence: Synthetic oligonucleotide
cucgucccacagcuccaaa

SEQ ID NO: 3069684 - RNA, 19 nt, Artificial Sequence
  Description of Artificial Sequence: Synthetic oligonucleotide
cucugacccuuggcauauc

SEQ ID NO: 3069685 - RNA, 19 nt, Artificial Sequence
  Description of Artificial Sequence: Synthetic oligonucleotide
ccuccagcauugucucaca

SEQ ID NO: 3069686 - RNA, 19 nt, Artificial Sequence
  Description of Artificial Sequence: Synthetic oligonucleotide
guguugccauggucugacu

SEQ ID NO: 3069687 - RNA, 19 nt, Artificial Sequence
  Description of Artificial Sequence: Synthetic oligonucleotide
cugcuuccucaugcccauc

SEQ ID NO: 3069688 - RNA, 19 nt, Artificial Sequence
  Description of Artificial Sequence: Synthetic oligonucleotide
ggcucgucccacagcucca

SEQ ID NO: 3069689 - RNA, 19 nt, Artificial Sequence
  Description of Artificial Sequence: Synthetic oligonucleotide
ccacacugggcucguccca

SEQ ID NO: 3069690 - RNA, 19 nt, Artificial Sequence
  Description of Artificial Sequence: Synthetic oligonucleotide
gcuccuggugguggaagua

SEQ ID NO: 3069691 - RNA, 19 nt, Artificial Sequence
  Description of Artificial Sequence: Synthetic oligonucleotide
ggauccccagauccacuuu

SEQ ID NO: 3069692 - RNA, 19 nt, Artificial Sequence
  Description of Artificial Sequence: Synthetic oligonucleotide
ccaguccagguuuccugua

SEQ ID NO: 3069693 - RNA, 19 nt, Artificial Sequence
  Description of Artificial Sequence: Synthetic oligonucleotide
gcucgucccacagcuccaa

SEQ ID NO: 3069694 - RNA, 19 nt, Artificial Sequence
  Description of Artificial Sequence: Synthetic oligonucleotide
caugcccaucacugcucuu

SEQ ID NO: 3069695 - RNA, 19 nt, Artificial Sequence
  Description of Artificial Sequence: Synthetic oligonucleotide
gcauugucucacacugcuu

SEQ ID NO: 3069696 - RNA, 19 nt, Artificial Sequence
  Description of Artificial Sequence: Synthetic oligonucleotide
ccuccacacugggcucguc

SEQ ID NO: 3069697 - RNA, 19 nt, Artificial Sequence
  Description of Artificial Sequence: Synthetic oligonucleotide
uuuaaaaugucauugagcg

SEQ ID NO: 3069698 - RNA, 19 nt, Artificial Sequence
  Description of Artificial Sequence: Synthetic oligonucleotide
aaauagauccccuuuaaac

SEQ ID NO: 3069699 - RNA, 19 nt, Artificial Sequence
  Description of Artificial Sequence: Synthetic oligonucleotide
aaaucaguguuucacaauc

SEQ ID NO: 3069700 - RNA, 19 nt, Artificial Sequence
  Description of Artificial Sequence: Synthetic oligonucleotide
uuuauuuaaaaugucauug

SEQ ID NO: 3069701 - RNA, 19 nt, Artificial Sequence
  Description of Artificial Sequence: Synthetic oligonucleotide
aaugauccuugcuacaggc

SEQ ID NO: 3069702 - RNA, 19 nt, Artificial Sequence
  Description of Artificial Sequence: Synthetic oligonucleotide
aaugagagaggagagaugg

SEQ ID NO: 3069703 - RNA, 19 nt, Artificial Sequence
  Description of Artificial Sequence: Synthetic oligonucleotide
aauagauccccuuuaaaca

SEQ ID NO: 3069704 - RNA, 19 nt, Artificial Sequence
  Description of Artificial Sequence: Synthetic oligonucleotide
acaaucacagaacagaaag

SEQ ID NO: 3069705 - RNA, 19 nt, Artificial Sequence
  Description of Artificial Sequence: Synthetic oligonucleotide
agaacagaaagguucaugg

SEQ ID NO: 3069706 - RNA, 19 nt, Artificial Sequence
  Description of Artificial Sequence: Synthetic oligonucleotide
aucauucuuacaaugaucc

SEQ ID NO: 3069707 - RNA, 19 nt, Artificial Sequence
  Description of Artificial Sequence: Synthetic oligonucleotide
aaugucauugagcguauac

SEQ ID NO: 3069708 - RNA, 19 nt, Artificial Sequence
  Description of Artificial Sequence: Synthetic oligonucleotide
uaaacaguucuucauuugg

SEQ ID NO: 3069709 - RNA, 19 nt, Artificial Sequence
  Description of Artificial Sequence: Synthetic oligonucleotide
uaguacuuuauuuaaaaug

SEQ ID NO: 3069710 - RNA, 19 nt, Artificial Sequence
  Description of Artificial Sequence: Synthetic oligonucleotide
ucugaaaccauucccaggc

SEQ ID NO: 3069711 - RNA, 19 nt, Artificial Sequence
  Description of Artificial Sequence: Synthetic oligonucleotide
aagaaaaugagagaggaga

SEQ ID NO: 3069712 - RNA, 19 nt, Artificial Sequence
  Description of Artificial Sequence: Synthetic oligonucleotide
agguucaugguucugaaac

SEQ ID NO: 3069713 - RNA, 19 nt, Artificial Sequence
  Description of Artificial Sequence: Synthetic oligonucleotide
aacaguucuucauuugggg

SEQ ID NO: 3069714 - RNA, 19 nt, Artificial Sequence
  Description of Artificial Sequence: Synthetic oligonucleotide
auuuaaaaugucauugagc

SEQ ID NO: 3069715 - RNA, 19 nt, Artificial Sequence
  Description of Artificial Sequence: Synthetic oligonucleotide
uauaguacuuuauuuaaaa

SEQ ID NO: 3069716 - RNA, 19 nt, Artificial Sequence
  Description of Artificial Sequence: Synthetic oligonucleotide
ugucauugagcguauacag

SEQ ID NO: 3069717 - RNA, 19 nt, Artificial Sequence
  Description of Artificial Sequence: Synthetic oligonucleotide
aguuuuggaaacccagacc

SEQ ID NO: 3069718 - RNA, 19 nt, Artificial Sequence
  Description of Artificial Sequence: Synthetic oligonucleotide
uuauuuaaaaugucauuga

SEQ ID NO: 3069719 - RNA, 19 nt, Artificial Sequence
  Description of Artificial Sequence: Synthetic oligonucleotide
uuugggguuuacaaaauca

SEQ ID NO: 3069720 - RNA, 19 nt, Artificial Sequence
  Description of Artificial Sequence: Synthetic oligonucleotide
aguacuuuauuuaaaaugu

SEQ ID NO: 3069721 - RNA, 19 nt, Artificial Sequence
  Description of Artificial Sequence: Synthetic oligonucleotide
aaucacagaacagaaaggu

SEQ ID NO: 3069722 - RNA, 19 nt, Artificial Sequence
  Description of Artificial Sequence: Synthetic oligonucleotide
ucacagaacagaaagguuc

SEQ ID NO: 3069723 - RNA, 19 nt, Artificial Sequence
  Description of Artificial Sequence: Synthetic oligonucleotide
uuuccaagaaucaaagaaa

SEQ ID NO: 3069724 - RNA, 19 nt, Artificial Sequence
  Description of Artificial Sequence: Synthetic oligonucleotide
uaaaaugucauugagcgua

SEQ ID NO: 3069725 - RNA, 19 nt, Artificial Sequence
  Description of Artificial Sequence: Synthetic oligonucleotide
aaucaaagaaaaugagaga

SEQ ID NO: 3069726 - RNA, 19 nt, Artificial Sequence
  Description of Artificial Sequence: Synthetic oligonucleotide
guuuuggaaacccagacca

SEQ ID NO: 3069727 - RNA, 19 nt, Artificial Sequence
  Description of Artificial Sequence: Synthetic oligonucleotide
auagauccccuuuaaacag

SEQ ID NO: 3069728 - RNA, 19 nt, Artificial Sequence
  Description of Artificial Sequence: Synthetic oligonucleotide
uucacaaucacagaacaga

SEQ ID NO: 3069729 - RNA, 19 nt, Artificial Sequence
  Description of Artificial Sequence: Synthetic oligonucleotide
caagaaucaaagaaaauga

SEQ ID NO: 3069730 - RNA, 19 nt, Artificial Sequence
  Description of Artificial Sequence: Synthetic oligonucleotide
aaaaugagagaggagagau

SEQ ID NO: 3069731 - RNA, 19 nt, Artificial Sequence
  Description of Artificial Sequence: Synthetic oligonucleotide
aacagaaagguucaugguu

SEQ ID NO: 3069732 - RNA, 19 nt, Artificial Sequence
  Description of Artificial Sequence: Synthetic oligonucleotide
uugggguuuacaaaaucag

SEQ ID NO: 3069733 - RNA, 19 nt, Artificial Sequence
  Description of Artificial Sequence: Synthetic oligonucleotide
ucauuugggguuuacaaaa

SEQ ID NO: 3069734 - RNA, 19 nt, Artificial Sequence
  Description of Artificial Sequence: Synthetic oligonucleotide
guuuccaagaaucaaagaa

SEQ ID NO: 3069735 - RNA, 19 nt, Artificial Sequence
  Description of Artificial Sequence: Synthetic oligonucleotide
uacaucauucuuacaauga

SEQ ID NO: 3069736 - RNA, 19 nt, Artificial Sequence
  Description of Artificial Sequence: Synthetic oligonucleotide
uacaaaaucaguguuucac

SEQ ID NO: 3069737 - RNA, 19 nt, Artificial Sequence
  Description of Artificial Sequence: Synthetic oligonucleotide
acacacaaaauagaucccc

SEQ ID NO: 3069738 - RNA, 19 nt, Artificial Sequence
  Description of Artificial Sequence: Synthetic oligonucleotide
aagaaucaaagaaaaugag

SEQ ID NO: 3069739 - RNA, 19 nt, Artificial Sequence
  Description of Artificial Sequence: Synthetic oligonucleotide
aucaguguuucacaaucac

SEQ ID NO: 3069740 - RNA, 19 nt, Artificial Sequence
  Description of Artificial Sequence: Synthetic oligonucleotide
uuuacaaaaucaguguuuc

SEQ ID NO: 3069741 - RNA, 19 nt, Artificial Sequence
  Description of Artificial Sequence: Synthetic oligonucleotide
uguggaguaguuuuggaaa

SEQ ID NO: 3069742 - RNA, 19 nt, Artificial Sequence
  Description of Artificial Sequence: Synthetic oligonucleotide
uguuucacaaucacagaac

SEQ ID NO: 3069743 - RNA, 19 nt, Artificial Sequence
  Description of Artificial Sequence: Synthetic oligonucleotide
cagaccaugacguacauca

SEQ ID NO: 3069744 - RNA, 19 nt, Artificial Sequence
  Description of Artificial Sequence: Synthetic oligonucleotide
uuccaagaaucaaagaaaa

SEQ ID NO: 3069745 - RNA, 19 nt, Artificial Sequence
  Description of Artificial Sequence: Synthetic oligonucleotide
cuugagucacuguaugugg

SEQ ID NO: 3069746 - RNA, 19 nt, Artificial Sequence
  Description of Artificial Sequence: Synthetic oligonucleotide
acguacaucauucuuacaa

SEQ ID NO: 3069747 - RNA, 19 nt, Artificial Sequence
  Description of Artificial Sequence: Synthetic oligonucleotide
uugagcuucuuccagggga

SEQ ID NO: 3069748 - RNA, 19 nt, Artificial Sequence
  Description of Artificial Sequence: Synthetic oligonucleotide
aaacaguucuucauuuggg

SEQ ID NO: 3069749 - RNA, 19 nt, Artificial Sequence
  Description of Artificial Sequence: Synthetic oligonucleotide
augguucugaaaccauucc

SEQ ID NO: 3069750 - RNA, 19 nt, Artificial Sequence
  Description of Artificial Sequence: Synthetic oligonucleotide
uuacaaugauccuugcuac

SEQ ID NO: 3069751 - RNA, 19 nt, Artificial Sequence
  Description of Artificial Sequence: Synthetic oligonucleotide
uuaaacaguucuucauuug

SEQ ID NO: 3069752 - RNA, 19 nt, Artificial Sequence
  Description of Artificial Sequence: Synthetic oligonucleotide
ugaaaccauucccaggcag

SEQ ID NO: 3069753 - RNA, 19 nt, Artificial Sequence
  Description of Artificial Sequence: Synthetic oligonucleotide
ugauccuugcuacaggccu

SEQ ID NO: 3069754 - RNA, 19 nt, Artificial Sequence
  Description of Artificial Sequence: Synthetic oligonucleotide
uuuaaacaguucuucauuu

SEQ ID NO: 3069755 - RNA, 19 nt, Artificial Sequence
  Description of Artificial Sequence: Synthetic oligonucleotide
uuucacaaucacagaacag

SEQ ID NO: 3069756 - RNA, 19 nt, Artificial Sequence
  Description of Artificial Sequence: Synthetic oligonucleotide
aacacacaaaauagauccc

SEQ ID NO: 3069757 - RNA, 19 nt, Artificial Sequence
  Description of Artificial Sequence: Synthetic oligonucleotide
uguauguggaguaguuuug

SEQ ID NO: 3069758 - RNA, 19 nt, Artificial Sequence
  Description of Artificial Sequence: Synthetic oligonucleotide
uaguuuuggaaacccagac

SEQ ID NO: 3069759 - RNA, 19 nt, Artificial Sequence
  Description of Artificial Sequence: Synthetic oligonucleotide
aaaauagauccccuuuaaa

SEQ ID NO: 3069760 - RNA, 19 nt, Artificial Sequence
  Description of Artificial Sequence: Synthetic oligonucleotide
auuugggguuuacaaaauc

SEQ ID NO: 3069761 - RNA, 19 nt, Artificial Sequence
  Description of Artificial Sequence: Synthetic oligonucleotide
ugguucugaaaccauuccc

SEQ ID NO: 3069762 - RNA, 19 nt, Artificial Sequence
  Description of Artificial Sequence: Synthetic oligonucleotide
caaucacagaacagaaagg

SEQ ID NO: 3069763 - RNA, 19 nt, Artificial Sequence
  Description of Artificial Sequence: Synthetic oligonucleotide
ucuugagucacuguaugug

SEQ ID NO: 3069764 - RNA, 19 nt, Artificial Sequence
  Description of Artificial Sequence: Synthetic oligonucleotide
accauucccaggcagguuc

SEQ ID NO: 3069765 - RNA, 19 nt, Artificial Sequence
  Description of Artificial Sequence: Synthetic oligonucleotide
acaaaaucaguguuucaca

SEQ ID NO: 3069766 - RNA, 19 nt, Artificial Sequence
  Description of Artificial Sequence: Synthetic oligonucleotide
uucuugagcuucuuccagg

SEQ ID NO: 3069767 - RNA, 19 nt, Artificial Sequence
  Description of Artificial Sequence: Synthetic oligonucleotide
acagaaagguucaugguuc

SEQ ID NO: 3069768 - RNA, 19 nt, Artificial Sequence
  Description of Artificial Sequence: Synthetic oligonucleotide
ucaguguuucacaaucaca

SEQ ID NO: 3069769 - RNA, 19 nt, Artificial Sequence
  Description of Artificial Sequence: Synthetic oligonucleotide
uucugaaaccauucccagg

SEQ ID NO: 3069770 - RNA, 19 nt, Artificial Sequence
  Description of Artificial Sequence: Synthetic oligonucleotide
cuuacaaugauccuugcua

SEQ ID NO: 3069771 - RNA, 19 nt, Artificial Sequence
  Description of Artificial Sequence: Synthetic oligonucleotide
auccccuuuaaacaguucu

SEQ ID NO: 3069772 - RNA, 19 nt, Artificial Sequence
  Description of Artificial Sequence: Synthetic oligonucleotide
ucuuccaggggacauugca

SEQ ID NO: 3069773 - RNA, 19 nt, Artificial Sequence
  Description of Artificial Sequence: Synthetic oligonucleotide
agaaucaaagaaaaugaga

SEQ ID NO: 3069774 - RNA, 19 nt, Artificial Sequence
  Description of Artificial Sequence: Synthetic oligonucleotide
aguaguuuuggaaacccag

SEQ ID NO: 3069775 - RNA, 19 nt, Artificial Sequence
  Description of Artificial Sequence: Synthetic oligonucleotide
ucacaaucacagaacagaa

SEQ ID NO: 3069776 - RNA, 19 nt, Artificial Sequence
  Description of Artificial Sequence: Synthetic oligonucleotide
aaagaaaaugagagaggag

SEQ ID NO: 3069777 - RNA, 19 nt, Artificial Sequence
  Description of Artificial Sequence: Synthetic oligonucleotide
gaaaccauucccaggcagg

SEQ ID NO: 3069778 - RNA, 19 nt, Artificial Sequence
  Description of Artificial Sequence: Synthetic oligonucleotide
agcguauacaguucuugag

SEQ ID NO: 3069779 - RNA, 19 nt, Artificial Sequence
  Description of Artificial Sequence: Synthetic oligonucleotide
ugacguacaucauucuuac

SEQ ID NO: 3069780 - RNA, 19 nt, Artificial Sequence
  Description of Artificial Sequence: Synthetic oligonucleotide
uuggaaacccagaccauga

SEQ ID NO: 3069781 - RNA, 19 nt, Artificial Sequence
  Description of Artificial Sequence: Synthetic oligonucleotide
guacaucauucuuacaaug

SEQ ID NO: 3069782 - RNA, 19 nt, Artificial Sequence
  Description of Artificial Sequence: Synthetic oligonucleotide
uucauuugggguuuacaaa

SEQ ID NO: 3069783 - RNA, 19 nt, Artificial Sequence
  Description of Artificial Sequence: Synthetic oligonucleotide
ucuuacaaugauccuugcu

SEQ ID NO: 3069784 - RNA, 19 nt, Artificial Sequence
  Description of Artificial Sequence: Synthetic oligonucleotide
aacccagaccaugacguac

SEQ ID NO: 3069785 - RNA, 19 nt, Artificial Sequence
  Description of Artificial Sequence: Synthetic oligonucleotide
auucuuacaaugauccuug

SEQ ID NO: 3069786 - RNA, 19 nt, Artificial Sequence
  Description of Artificial Sequence: Synthetic oligonucleotide
ccaagaaucaaagaaaaug

SEQ ID NO: 3069787 - RNA, 19 nt, Artificial Sequence
  Description of Artificial Sequence: Synthetic oligonucleotide
accaugacguacaucauuc

SEQ ID NO: 3069788 - RNA, 19 nt, Artificial Sequence
  Description of Artificial Sequence: Synthetic oligonucleotide
guuucacaaucacagaaca

SEQ ID NO: 3069789 - RNA, 19 nt, Artificial Sequence
  Description of Artificial Sequence: Synthetic oligonucleotide
caaagaaaaugagagagga

SEQ ID NO: 3069790 - RNA, 19 nt, Artificial Sequence
  Description of Artificial Sequence: Synthetic oligonucleotide
uuuggaaacccagaccaug

SEQ ID NO: 3069791 - RNA, 19 nt, Artificial Sequence
  Description of Artificial Sequence: Synthetic oligonucleotide
agaaaaugagagaggagag

SEQ ID NO: 3069792 - RNA, 19 nt, Artificial Sequence
  Description of Artificial Sequence: Synthetic oligonucleotide
auaguacuuuauuuaaaau

SEQ ID NO: 3069793 - RNA, 19 nt, Artificial Sequence
  Description of Artificial Sequence: Synthetic oligonucleotide
acaaugauccuugcuacag

SEQ ID NO: 3069794 - RNA, 19 nt, Artificial Sequence
  Description of Artificial Sequence: Synthetic oligonucleotide
uuccaggggacauugcacc

SEQ ID NO: 3069795 - RNA, 19 nt, Artificial Sequence
  Description of Artificial Sequence: Synthetic oligonucleotide
gacauugcaccuaaguuuc

SEQ ID NO: 3069796 - RNA, 19 nt, Artificial Sequence
  Description of Artificial Sequence: Synthetic oligonucleotide
aaagguucaugguucugaa

SEQ ID NO: 3069797 - RNA, 19 nt, Artificial Sequence
  Description of Artificial Sequence: Synthetic oligonucleotide
ugagucacuguauguggag

SEQ ID NO: 3069798 - RNA, 19 nt, Artificial Sequence
  Description of Artificial Sequence: Synthetic oligonucleotide
ugggguuuacaaaaucagu

SEQ ID NO: 3069799 - RNA, 19 nt, Artificial Sequence
  Description of Artificial Sequence: Synthetic oligonucleotide
uuaaaaugucauugagcgu

SEQ ID NO: 3069800 - RNA, 19 nt, Artificial Sequence
  Description of Artificial Sequence: Synthetic oligonucleotide
acaucauucuuacaaugau

SEQ ID NO: 3069801 - RNA, 19 nt, Artificial Sequence
  Description of Artificial Sequence: Synthetic oligonucleotide
caucauucuuacaaugauc

SEQ ID NO: 3069802 - RNA, 19 nt, Artificial Sequence
  Description of Artificial Sequence: Synthetic oligonucleotide
caugguucugaaaccauuc

SEQ ID NO: 3069803 - RNA, 19 nt, Artificial Sequence
  Description of Artificial Sequence: Synthetic oligonucleotide
cuugcuacaggccucccug

SEQ ID NO: 3069804 - RNA, 19 nt, Artificial Sequence
  Description of Artificial Sequence: Synthetic oligonucleotide
guucugaaaccauucccag

SEQ ID NO: 3069805 - RNA, 19 nt, Artificial Sequence
  Description of Artificial Sequence: Synthetic oligonucleotide
uugcaccuaaguuucaaaa

SEQ ID NO: 3069806 - RNA, 19 nt, Artificial Sequence
  Description of Artificial Sequence: Synthetic oligonucleotide
uugagucacuguaugugga

SEQ ID NO: 3069807 - RNA, 19 nt, Artificial Sequence
  Description of Artificial Sequence: Synthetic oligonucleotide
acaguucuucauuuggggu

SEQ ID NO: 3069808 - RNA, 19 nt, Artificial Sequence
  Description of Artificial Sequence: Synthetic oligonucleotide
ugagcguauacaguucuug

SEQ ID NO: 3069809 - RNA, 19 nt, Artificial Sequence
  Description of Artificial Sequence: Synthetic oligonucleotide
uuccucuugagucacugua

SEQ ID NO: 3069810 - RNA, 19 nt, Artificial Sequence
  Description of Artificial Sequence: Synthetic oligonucleotide
cuucauuugggguuuacaa

SEQ ID NO: 3069811 - RNA, 19 nt, Artificial Sequence
  Description of Artificial Sequence: Synthetic oligonucleotide
gaaagguucaugguucuga

SEQ ID NO: 3069812 - RNA, 19 nt, Artificial Sequence
  Description of Artificial Sequence: Synthetic oligonucleotide
guauguggaguaguuuugg

SEQ ID NO: 3069813 - RNA, 19 nt, Artificial Sequence
  Description of Artificial Sequence: Synthetic oligonucleotide
gggguuuacaaaaucagug

SEQ ID NO: 3069814 - RNA, 19 nt, Artificial Sequence
  Description of Artificial Sequence: Synthetic oligonucleotide
ggaaacccagaccaugacg

SEQ ID NO: 3069815 - RNA, 19 nt, Artificial Sequence
  Description of Artificial Sequence: Synthetic oligonucleotide
uauguggaguaguuuugga

SEQ ID NO: 3069816 - RNA, 19 nt, Artificial Sequence
  Description of Artificial Sequence: Synthetic oligonucleotide
uuacaaaaucaguguuuca

SEQ ID NO: 3069817 - RNA, 19 nt, Artificial Sequence
  Description of Artificial Sequence: Synthetic oligonucleotide
caaugauccuugcuacagg

SEQ ID NO: 3069818 - RNA, 19 nt, Artificial Sequence
  Description of Artificial Sequence: Synthetic oligonucleotide
uacaaugauccuugcuaca

SEQ ID NO: 3069819 - RNA, 19 nt, Artificial Sequence
  Description of Artificial Sequence: Synthetic oligonucleotide
guucuugagcuucuuccag

SEQ ID NO: 3069820 - RNA, 19 nt, Artificial Sequence
  Description of Artificial Sequence: Synthetic oligonucleotide
uccaagaaucaaagaaaau

SEQ ID NO: 3069821 - RNA, 19 nt, Artificial Sequence
  Description of Artificial Sequence: Synthetic oligonucleotide
aaaugagagaggagagaug

SEQ ID NO: 3069822 - RNA, 19 nt, Artificial Sequence
  Description of Artificial Sequence: Synthetic oligonucleotide
aaaccauucccaggcaggu

SEQ ID NO: 3069823 - RNA, 19 nt, Artificial Sequence
  Description of Artificial Sequence: Synthetic oligonucleotide
auguggaguaguuuuggaa

SEQ ID NO: 3069824 - RNA, 19 nt, Artificial Sequence
  Description of Artificial Sequence: Synthetic oligonucleotide
aaucaguguuucacaauca

SEQ ID NO: 3069825 - RNA, 19 nt, Artificial Sequence
  Description of Artificial Sequence: Synthetic oligonucleotide
augucauugagcguauaca

SEQ ID NO: 3069826 - RNA, 19 nt, Artificial Sequence
  Description of Artificial Sequence: Synthetic oligonucleotide
gaaacccagaccaugacgu

SEQ ID NO: 3069827 - RNA, 19 nt, Artificial Sequence
  Description of Artificial Sequence: Synthetic oligonucleotide
ucauucuuacaaugauccu

SEQ ID NO: 3069828 - RNA, 19 nt, Artificial Sequence
  Description of Artificial Sequence: Synthetic oligonucleotide
guggaguaguuuuggaaac

SEQ ID NO: 3069829 - RNA, 19 nt, Artificial Sequence
  Description of Artificial Sequence: Synthetic oligonucleotide
ucuucauuugggguuuaca

SEQ ID NO: 3069830 - RNA, 19 nt, Artificial Sequence
  Description of Artificial Sequence: Synthetic oligonucleotide
ucaugguucugaaaccauu

SEQ ID NO: 3069831 - RNA, 19 nt, Artificial Sequence
  Description of Artificial Sequence: Synthetic oligonucleotide
gcguauacaguucuugagc

SEQ ID NO: 3069832 - RNA, 19 nt, Artificial Sequence
  Description of Artificial Sequence: Synthetic oligonucleotide
uggaguaguuuuggaaacc

SEQ ID NO: 3069833 - RNA, 19 nt, Artificial Sequence
  Description of Artificial Sequence: Synthetic oligonucleotide
gagcguauacaguucuuga

SEQ ID NO: 3069834 - RNA, 19 nt, Artificial Sequence
  Description of Artificial Sequence: Synthetic oligonucleotide
uagauccccuuuaaacagu

SEQ ID NO: 3069835 - RNA, 19 nt, Artificial Sequence
  Description of Artificial Sequence: Synthetic oligonucleotide
cacagaacagaaagguuca

SEQ ID NO: 3069836 - RNA, 19 nt, Artificial Sequence
  Description of Artificial Sequence: Synthetic oligonucleotide
augauccuugcuacaggcc

SEQ ID NO: 3069837 - RNA, 19 nt, Artificial Sequence
  Description of Artificial Sequence: Synthetic oligonucleotide
gguucaugguucugaaacc

SEQ ID NO: 3069838 - RNA, 19 nt, Artificial Sequence
  Description of Artificial Sequence: Synthetic oligonucleotide
uccucuugagucacuguau

SEQ ID NO: 3069839 - RNA, 19 nt, Artificial Sequence
  Description of Artificial Sequence: Synthetic oligonucleotide
uuuuggaaacccagaccau

SEQ ID NO: 3069840 - RNA, 19 nt, Artificial Sequence
  Description of Artificial Sequence: Synthetic oligonucleotide
ggcagguuccucuugaguc

SEQ ID NO: 3069841 - RNA, 19 nt, Artificial Sequence
  Description of Artificial Sequence: Synthetic oligonucleotide
uucaugguucugaaaccau

SEQ ID NO: 3069842 - RNA, 19 nt, Artificial Sequence
  Description of Artificial Sequence: Synthetic oligonucleotide
auugcaccuaaguuucaaa

SEQ ID NO: 3069843 - RNA, 19 nt, Artificial Sequence
  Description of Artificial Sequence: Synthetic oligonucleotide
auccuugcuacaggccucc

SEQ ID NO: 3069844 - RNA, 19 nt, Artificial Sequence
  Description of Artificial Sequence: Synthetic oligonucleotide
uggaaacccagaccaugac

SEQ ID NO: 3069845 - RNA, 19 nt, Artificial Sequence
  Description of Artificial Sequence: Synthetic oligonucleotide
uugcuacaggccucccugg

SEQ ID NO: 3069846 - RNA, 19 nt, Artificial Sequence
  Description of Artificial Sequence: Synthetic oligonucleotide
uucuuacaaugauccuugc

SEQ ID NO: 3069847 - RNA, 19 nt, Artificial Sequence
  Description of Artificial Sequence: Synthetic oligonucleotide
uucccaggcagguuccucu

SEQ ID NO: 3069848 - RNA, 19 nt, Artificial Sequence
  Description of Artificial Sequence: Synthetic oligonucleotide
acacaaaauagauccccuu

SEQ ID NO: 3069849 - RNA, 19 nt, Artificial Sequence
  Description of Artificial Sequence: Synthetic oligonucleotide
aagguucaugguucugaaa

SEQ ID NO: 3069850 - RNA, 19 nt, Artificial Sequence
  Description of Artificial Sequence: Synthetic oligonucleotide
auauaguacuuuauuuaaa

SEQ ID NO: 3069851 - RNA, 19 nt, Artificial Sequence
  Description of Artificial Sequence: Synthetic oligonucleotide
guucaugguucugaaacca

SEQ ID NO: 3069852 - RNA, 19 nt, Artificial Sequence
  Description of Artificial Sequence: Synthetic oligonucleotide
agucacuguauguggagua

SEQ ID NO: 3069853 - RNA, 19 nt, Artificial Sequence
  Description of Artificial Sequence: Synthetic oligonucleotide
cagaacagaaagguucaug

SEQ ID NO: 3069854 - RNA, 19 nt, Artificial Sequence
  Description of Artificial Sequence: Synthetic oligonucleotide
uccccuuuaaacaguucuu

SEQ ID NO: 3069855 - RNA, 19 nt, Artificial Sequence
  Description of Artificial Sequence: Synthetic oligonucleotide
cuugagcuucuuccagggg

SEQ ID NO: 3069856 - RNA, 19 nt, Artificial Sequence
  Description of Artificial Sequence: Synthetic oligonucleotide
aaaaugucauugagcguau

SEQ ID NO: 3069857 - RNA, 19 nt, Artificial Sequence
  Description of Artificial Sequence: Synthetic oligonucleotide
ggaguaguuuuggaaaccc

SEQ ID NO: 3069858 - RNA, 19 nt, Artificial Sequence
  Description of Artificial Sequence: Synthetic oligonucleotide
gguucugaaaccauuccca

SEQ ID NO: 3069859 - RNA, 19 nt, Artificial Sequence
  Description of Artificial Sequence: Synthetic oligonucleotide
augacguacaucauucuua

SEQ ID NO: 3069860 - RNA, 19 nt, Artificial Sequence
  Description of Artificial Sequence: Synthetic oligonucleotide
guaguuuuggaaacccaga

SEQ ID NO: 3069861 - RNA, 19 nt, Artificial Sequence
  Description of Artificial Sequence: Synthetic oligonucleotide
gucacuguauguggaguag

SEQ ID NO: 3069862 - RNA, 19 nt, Artificial Sequence
  Description of Artificial Sequence: Synthetic oligonucleotide
cuucuuccaggggacauug

SEQ ID NO: 3069863 - RNA, 19 nt, Artificial Sequence
  Description of Artificial Sequence: Synthetic oligonucleotide
ucacuguauguggaguagu

SEQ ID NO: 3069864 - RNA, 19 nt, Artificial Sequence
  Description of Artificial Sequence: Synthetic oligonucleotide
gaacagaaagguucauggu

SEQ ID NO: 3069865 - RNA, 19 nt, Artificial Sequence
  Description of Artificial Sequence: Synthetic oligonucleotide
aaacccagaccaugacgua

SEQ ID NO: 3069866 - RNA, 19 nt, Artificial Sequence
  Description of Artificial Sequence: Synthetic oligonucleotide
cuuuaaacaguucuucauu

SEQ ID NO: 3069867 - RNA, 19 nt, Artificial Sequence
  Description of Artificial Sequence: Synthetic oligonucleotide
uccaggggacauugcaccu

SEQ ID NO: 3069868 - RNA, 19 nt, Artificial Sequence
  Description of Artificial Sequence: Synthetic oligonucleotide
aguucuucauuugggguuu

SEQ ID NO: 3069869 - RNA, 19 nt, Artificial Sequence
  Description of Artificial Sequence: Synthetic oligonucleotide
uucuuccaggggacauugc

SEQ ID NO: 3069870 - RNA, 19 nt, Artificial Sequence
  Description of Artificial Sequence: Synthetic oligonucleotide
gaguaguuuuggaaaccca

SEQ ID NO: 3069871 - RNA, 19 nt, Artificial Sequence
  Description of Artificial Sequence: Synthetic oligonucleotide
ggguuuacaaaaucagugu

SEQ ID NO: 3069872 - RNA, 19 nt, Artificial Sequence
  Description of Artificial Sequence: Synthetic oligonucleotide
cuguauguggaguaguuuu

SEQ ID NO: 3069873 - RNA, 19 nt, Artificial Sequence
  Description of Artificial Sequence: Synthetic oligonucleotide
aggcagguuccucuugagu

SEQ ID NO: 3069874 - RNA, 19 nt, Artificial Sequence
  Description of Artificial Sequence: Synthetic oligonucleotide
cacaaucacagaacagaaa

SEQ ID NO: 3069875 - RNA, 19 nt, Artificial Sequence
  Description of Artificial Sequence: Synthetic oligonucleotide
agaaagguucaugguucug

SEQ ID NO: 3069876 - RNA, 19 nt, Artificial Sequence
  Description of Artificial Sequence: Synthetic oligonucleotide
uugagcguauacaguucuu

SEQ ID NO: 3069877 - RNA, 19 nt, Artificial Sequence
  Description of Artificial Sequence: Synthetic oligonucleotide
guuuacaaaaucaguguuu

SEQ ID NO: 3069878 - RNA, 19 nt, Artificial Sequence
  Description of Artificial Sequence: Synthetic oligonucleotide
acuguauguggaguaguuu

SEQ ID NO: 3069879 - RNA, 19 nt, Artificial Sequence
  Description of Artificial Sequence: Synthetic oligonucleotide
auucccaggcagguuccuc

SEQ ID NO: 3069880 - RNA, 19 nt, Artificial Sequence
  Description of Artificial Sequence: Synthetic oligonucleotide
gauccuugcuacaggccuc

SEQ ID NO: 3069881 - RNA, 19 nt, Artificial Sequence
  Description of Artificial Sequence: Synthetic oligonucleotide
cccuggguuuccaagaauc

SEQ ID NO: 3069882 - RNA, 19 nt, Artificial Sequence
  Description of Artificial Sequence: Synthetic oligonucleotide
cauucuuacaaugauccuu

SEQ ID NO: 3069883 - RNA, 19 nt, Artificial Sequence
  Description of Artificial Sequence: Synthetic oligonucleotide
aucacagaacagaaagguu

SEQ ID NO: 3069884 - RNA, 19 nt, Artificial Sequence
  Description of Artificial Sequence: Synthetic oligonucleotide
cacacaaaauagauccccu

SEQ ID NO: 3069885 - RNA, 19 nt, Artificial Sequence
  Description of Artificial Sequence: Synthetic oligonucleotide
gguuuacaaaaucaguguu

SEQ ID NO: 3069886 - RNA, 19 nt, Artificial Sequence
  Description of Artificial Sequence: Synthetic oligonucleotide
caggcagguuccucuugag

SEQ ID NO: 3069887 - RNA, 19 nt, Artificial Sequence
  Description of Artificial Sequence: Synthetic oligonucleotide
gacguacaucauucuuaca

SEQ ID NO: 3069888 - RNA, 19 nt, Artificial Sequence
  Description of Artificial Sequence: Synthetic oligonucleotide
uucuucauuugggguuuac

SEQ ID NO: 3069889 - RNA, 19 nt, Artificial Sequence
  Description of Artificial Sequence: Synthetic oligonucleotide
gguuccucuugagucacug

SEQ ID NO: 3069890 - RNA, 19 nt, Artificial Sequence
  Description of Artificial Sequence: Synthetic oligonucleotide
ccucuugagucacuguaug

SEQ ID NO: 3069891 - RNA, 19 nt, Artificial Sequence
  Description of Artificial Sequence: Synthetic oligonucleotide
ucccuggguuuccaagaau

SEQ ID NO: 3069892 - RNA, 19 nt, Artificial Sequence
  Description of Artificial Sequence: Synthetic oligonucleotide
gaccaugacguacaucauu

SEQ ID NO: 3069893 - RNA, 19 nt, Artificial Sequence
  Description of Artificial Sequence: Synthetic oligonucleotide
acccagaccaugacguaca

SEQ ID NO: 3069894 - RNA, 19 nt, Artificial Sequence
  Description of Artificial Sequence: Synthetic oligonucleotide
gcagguuccucuugaguca

SEQ ID NO: 3069895 - RNA, 19 nt, Artificial Sequence
  Description of Artificial Sequence: Synthetic oligonucleotide
aaaugucauugagcguaua

SEQ ID NO: 3069896 - RNA, 19 nt, Artificial Sequence
  Description of Artificial Sequence: Synthetic oligonucleotide
acaggccucccuggguuuc

SEQ ID NO: 3069897 - RNA, 19 nt, Artificial Sequence
  Description of Artificial Sequence: Synthetic oligonucleotide
agauccccuuuaaacaguu

SEQ ID NO: 3069898 - RNA, 19 nt, Artificial Sequence
  Description of Artificial Sequence: Synthetic oligonucleotide
cccuuuaaacaguucuuca

SEQ ID NO: 3069899 - RNA, 19 nt, Artificial Sequence
  Description of Artificial Sequence: Synthetic oligonucleotide
cauugcaccuaaguuucaa

SEQ ID NO: 3069900 - RNA, 19 nt, Artificial Sequence
  Description of Artificial Sequence: Synthetic oligonucleotide
cugaaaccauucccaggca

SEQ ID NO: 3069901 - RNA, 19 nt, Artificial Sequence
  Description of Artificial Sequence: Synthetic oligonucleotide
gagucacuguauguggagu

SEQ ID NO: 3069902 - RNA, 19 nt, Artificial Sequence
  Description of Artificial Sequence: Synthetic oligonucleotide
caugacguacaucauucuu

SEQ ID NO: 3069903 - RNA, 19 nt, Artificial Sequence
  Description of Artificial Sequence: Synthetic oligonucleotide
acagaacagaaagguucau

SEQ ID NO: 3069904 - RNA, 19 nt, Artificial Sequence
  Description of Artificial Sequence: Synthetic oligonucleotide
gggacauugcaccuaaguu

SEQ ID NO: 3069905 - RNA, 19 nt, Artificial Sequence
  Description of Artificial Sequence: Synthetic oligonucleotide
gauccccuuuaaacaguuc

SEQ ID NO: 3069906 - RNA, 19 nt, Artificial Sequence
  Description of Artificial Sequence: Synthetic oligonucleotide
augagagaggagagaugga

SEQ ID NO: 3069907 - RNA, 19 nt, Artificial Sequence
  Description of Artificial Sequence: Synthetic oligonucleotide
ggggacauugcaccuaagu

SEQ ID NO: 3069908 - RNA, 19 nt, Artificial Sequence
  Description of Artificial Sequence: Synthetic oligonucleotide
gccucccuggguuuccaag

SEQ ID NO: 3069909 - RNA, 19 nt, Artificial Sequence
  Description of Artificial Sequence: Synthetic oligonucleotide
cauuugggguuuacaaaau

SEQ ID NO: 3069910 - RNA, 19 nt, Artificial Sequence
  Description of Artificial Sequence: Synthetic oligonucleotide
aaccauucccaggcagguu

SEQ ID NO: 3069911 - RNA, 19 nt, Artificial Sequence
  Description of Artificial Sequence: Synthetic oligonucleotide
uacaggccucccuggguuu

SEQ ID NO: 3069912 - RNA, 19 nt, Artificial Sequence
  Description of Artificial Sequence: Synthetic oligonucleotide
ccccuuuaaacaguucuuc

SEQ ID NO: 3069913 - RNA, 19 nt, Artificial Sequence
  Description of Artificial Sequence: Synthetic oligonucleotide
uacaguucuugagcuucuu

SEQ ID NO: 3069914 - RNA, 19 nt, Artificial Sequence
  Description of Artificial Sequence: Synthetic oligonucleotide
ccauucccaggcagguucc

SEQ ID NO: 3069915 - RNA, 19 nt, Artificial Sequence
  Description of Artificial Sequence: Synthetic oligonucleotide
ccuggguuuccaagaauca

SEQ ID NO: 3069916 - RNA, 19 nt, Artificial Sequence
  Description of Artificial Sequence: Synthetic oligonucleotide
caggggacauugcaccuaa

SEQ ID NO: 3069917 - RNA, 19 nt, Artificial Sequence
  Description of Artificial Sequence: Synthetic oligonucleotide
guauacaguucuugagcuu

SEQ ID NO: 3069918 - RNA, 19 nt, Artificial Sequence
  Description of Artificial Sequence: Synthetic oligonucleotide
ccuuuaaacaguucuucau

SEQ ID NO: 3069919 - RNA, 19 nt, Artificial Sequence
  Description of Artificial Sequence: Synthetic oligonucleotide
cguauacaguucuugagcu

SEQ ID NO: 3069920 - RNA, 19 nt, Artificial Sequence
  Description of Artificial Sequence: Synthetic oligonucleotide
cucccuggguuuccaagaa

SEQ ID NO: 3069921 - RNA, 19 nt, Artificial Sequence
  Description of Artificial Sequence: Synthetic oligonucleotide
acauugcaccuaaguuuca

SEQ ID NO: 3069922 - RNA, 19 nt, Artificial Sequence
  Description of Artificial Sequence: Synthetic oligonucleotide
cacuguauguggaguaguu

SEQ ID NO: 3069923 - RNA, 19 nt, Artificial Sequence
  Description of Artificial Sequence: Synthetic oligonucleotide
guuccucuugagucacugu

SEQ ID NO: 3069924 - RNA, 19 nt, Artificial Sequence
  Description of Artificial Sequence: Synthetic oligonucleotide
agaccaugacguacaucau

SEQ ID NO: 3069925 - RNA, 19 nt, Artificial Sequence
  Description of Artificial Sequence: Synthetic oligonucleotide
gagcuucuuccaggggaca

SEQ ID NO: 3069926 - RNA, 19 nt, Artificial Sequence
  Description of Artificial Sequence: Synthetic oligonucleotide
uccuugcuacaggccuccc

SEQ ID NO: 3069927 - RNA, 19 nt, Artificial Sequence
  Description of Artificial Sequence: Synthetic oligonucleotide
ccucccuggguuuccaaga

SEQ ID NO: 3069928 - RNA, 19 nt, Artificial Sequence
  Description of Artificial Sequence: Synthetic oligonucleotide
cuacaggccucccuggguu

SEQ ID NO: 3069929 - RNA, 19 nt, Artificial Sequence
  Description of Artificial Sequence: Synthetic oligonucleotide
caggccucccuggguuucc

SEQ ID NO: 3069930 - RNA, 19 nt, Artificial Sequence
  Description of Artificial Sequence: Synthetic oligonucleotide
aggggacauugcaccuaag

SEQ ID NO: 3069931 - RNA, 19 nt, Artificial Sequence
  Description of Artificial Sequence: Synthetic oligonucleotide
cguacaucauucuuacaau

SEQ ID NO: 3069932 - RNA, 19 nt, Artificial Sequence
  Description of Artificial Sequence: Synthetic oligonucleotide
gcuacaggccucccugggu

SEQ ID NO: 3069933 - RNA, 19 nt, Artificial Sequence
  Description of Artificial Sequence: Synthetic oligonucleotide
agguuccucuugagucacu

SEQ ID NO: 3069934 - RNA, 19 nt, Artificial Sequence
  Description of Artificial Sequence: Synthetic oligonucleotide
cccaggcagguuccucuug

SEQ ID NO: 3069935 - RNA, 19 nt, Artificial Sequence
  Description of Artificial Sequence: Synthetic oligonucleotide
ccagaccaugacguacauc

SEQ ID NO: 3069936 - RNA, 19 nt, Artificial Sequence
  Description of Artificial Sequence: Synthetic oligonucleotide
ccaugacguacaucauucu

SEQ ID NO: 3069937 - RNA, 19 nt, Artificial Sequence
  Description of Artificial Sequence: Synthetic oligonucleotide
cauucccaggcagguuccu

SEQ ID NO: 3069938 - RNA, 19 nt, Artificial Sequence
  Description of Artificial Sequence: Synthetic oligonucleotide
ccuugcuacaggccucccu

SEQ ID NO: 3069939 - RNA, 19 nt, Artificial Sequence
  Description of Artificial Sequence: Synthetic oligonucleotide
gcuucuuccaggggacauu

SEQ ID NO: 3069940 - RNA, 19 nt, Artificial Sequence
  Description of Artificial Sequence: Synthetic oligonucleotide
ggccucccuggguuuccaa

SEQ ID NO: 3069941 - RNA, 19 nt, Artificial Sequence
  Description of Artificial Sequence: Synthetic oligonucleotide
ccaggggacauugcaccua

SEQ ID NO: 3069942 - RNA, 19 nt, Artificial Sequence
  Description of Artificial Sequence: Synthetic oligonucleotide
cccagaccaugacguacau

SEQ ID NO: 3069943 - RNA, 19 nt, Artificial Sequence
  Description of Artificial Sequence: Synthetic oligonucleotide
uuugcgaacaccuuugagg

SEQ ID NO: 3069944 - RNA, 19 nt, Artificial Sequence
  Description of Artificial Sequence: Synthetic oligonucleotide
uaugcaagcuccuugaccc

SEQ ID NO: 3069945 - RNA, 19 nt, Artificial Sequence
  Description of Artificial Sequence: Synthetic oligonucleotide
uugcgaacaccuuugaggg

SEQ ID NO: 3069946 - RNA, 19 nt, Artificial Sequence
  Description of Artificial Sequence: Synthetic oligonucleotide
uguuugguaugcaagcucc

SEQ ID NO: 3069947 - RNA, 19 nt, Artificial Sequence
  Description of Artificial Sequence: Synthetic oligonucleotide
uacuuugccagguuggugc

SEQ ID NO: 3069948 - RNA, 19 nt, Artificial Sequence
  Description of Artificial Sequence: Synthetic oligonucleotide
accuuugagggccucagcg

SEQ ID NO: 3069949 - RNA, 19 nt, Artificial Sequence
  Description of Artificial Sequence: Synthetic oligonucleotide
cucuguuugguaugcaagc

SEQ ID NO: 3069950 - RNA, 19 nt, Artificial Sequence
  Description of Artificial Sequence: Synthetic oligonucleotide
auagcucuugaccuugcuc

SEQ ID NO: 3069951 - RNA, 19 nt, Artificial Sequence
  Description of Artificial Sequence: Synthetic oligonucleotide
uugguaugcaagcuccuug

SEQ ID NO: 3069952 - RNA, 19 nt, Artificial Sequence
  Description of Artificial Sequence: Synthetic oligonucleotide
cucaaacuggcgcuuauag

SEQ ID NO: 3069953 - RNA, 19 nt, Artificial Sequence
  Description of Artificial Sequence: Synthetic oligonucleotide
augcgagccagguucuucc

SEQ ID NO: 3069954 - RNA, 19 nt, Artificial Sequence
  Description of Artificial Sequence: Synthetic oligonucleotide
ucaaacuggcgcuuauagc

SEQ ID NO: 3069955 - RNA, 19 nt, Artificial Sequence
  Description of Artificial Sequence: Synthetic oligonucleotide
ucgcuccucagcaucaucc

SEQ ID NO: 3069956 - RNA, 19 nt, Artificial Sequence
  Description of Artificial Sequence: Synthetic oligonucleotide
ucugccuccagcucgcgca

SEQ ID NO: 3069957 - RNA, 19 nt, Artificial Sequence
  Description of Artificial Sequence: Synthetic oligonucleotide
caaacuggcgcuuauagcu

SEQ ID NO: 3069958 - RNA, 19 nt, Artificial Sequence
  Description of Artificial Sequence: Synthetic oligonucleotide
guaugcaagcuccuugacc

SEQ ID NO: 3069959 - RNA, 19 nt, Artificial Sequence
  Description of Artificial Sequence: Synthetic oligonucleotide
ucucugccaugucugcucg

SEQ ID NO: 3069960 - RNA, 19 nt, Artificial Sequence
  Description of Artificial Sequence: Synthetic oligonucleotide
ugguaugcaagcuccuuga

SEQ ID NO: 3069961 - RNA, 19 nt, Artificial Sequence
  Description of Artificial Sequence: Synthetic oligonucleotide
agcgugcuucuucugcucc

SEQ ID NO: 3069962 - RNA, 19 nt, Artificial Sequence
  Description of Artificial Sequence: Synthetic oligonucleotide
uccaccagguccugcaugc

SEQ ID NO: 3069963 - RNA, 19 nt, Artificial Sequence
  Description of Artificial Sequence: Synthetic oligonucleotide
uugaccuugcucugcagcu

SEQ ID NO: 3069964 - RNA, 19 nt, Artificial Sequence
  Description of Artificial Sequence: Synthetic oligonucleotide
guuggugcuggccugcugc

SEQ ID NO: 3069965 - RNA, 19 nt, Artificial Sequence
  Description of Artificial Sequence: Synthetic oligonucleotide
ugggucucugccaugucug

SEQ ID NO: 3069966 - RNA, 19 nt, Artificial Sequence
  Description of Artificial Sequence: Synthetic oligonucleotide
cugcaugcgagccagguuc

SEQ ID NO: 3069967 - RNA, 19 nt, Artificial Sequence
  Description of Artificial Sequence: Synthetic oligonucleotide
cuccucagcaucauccagc

SEQ ID NO: 3069968 - RNA, 19 nt, Artificial Sequence
  Description of Artificial Sequence: Synthetic oligonucleotide
ucaugcugggccuugcggu

SEQ ID NO: 3069969 - RNA, 19 nt, Artificial Sequence
  Description of Artificial Sequence: Synthetic oligonucleotide
aaacuggcgcuuauagcuc

SEQ ID NO: 3069970 - RNA, 19 nt, Artificial Sequence
  Description of Artificial Sequence: Synthetic oligonucleotide
aacuggcgcuuauagcucu

SEQ ID NO: 3069971 - RNA, 19 nt, Artificial Sequence
  Description of Artificial Sequence: Synthetic oligonucleotide
ugccaugucugcucgcucc

SEQ ID NO: 3069972 - RNA, 19 nt, Artificial Sequence
  Description of Artificial Sequence: Synthetic oligonucleotide
cuuauagcucuugaccuug

SEQ ID NO: 3069973 - RNA, 19 nt, Artificial Sequence
  Description of Artificial Sequence: Synthetic oligonucleotide
cuugcucugcagcuugucc

SEQ ID NO: 3069974 - RNA, 19 nt, Artificial Sequence
  Description of Artificial Sequence: Synthetic oligonucleotide
ucuguuugguaugcaagcu

SEQ ID NO: 3069975 - RNA, 19 nt, Artificial Sequence
  Description of Artificial Sequence: Synthetic oligonucleotide
ucggccuccucaaacuggc

SEQ ID NO: 3069976 - RNA, 19 nt, Artificial Sequence
  Description of Artificial Sequence: Synthetic oligonucleotide
uuugagggccucagcgugc

SEQ ID NO: 3069977 - RNA, 19 nt, Artificial Sequence
  Description of Artificial Sequence: Synthetic oligonucleotide
cuugcgguacuuugccagg

SEQ ID NO: 3069978 - RNA, 19 nt, Artificial Sequence
  Description of Artificial Sequence: Synthetic oligonucleotide
caucauccagcucaugcug

SEQ ID NO: 3069979 - RNA, 19 nt, Artificial Sequence
  Description of Artificial Sequence: Synthetic oligonucleotide
guuugcgaacaccuuugag

SEQ ID NO: 3069980 - RNA, 19 nt, Artificial Sequence
  Description of Artificial Sequence: Synthetic oligonucleotide
uuauagcucuugaccuugc

SEQ ID NO: 3069981 - RNA, 19 nt, Artificial Sequence
  Description of Artificial Sequence: Synthetic oligonucleotide
cucagcgugcuucuucugc

SEQ ID NO: 3069982 - RNA, 19 nt, Artificial Sequence
  Description of Artificial Sequence: Synthetic oligonucleotide
guuagccugggucucugcc

SEQ ID NO: 3069983 - RNA, 19 nt, Artificial Sequence
  Description of Artificial Sequence: Synthetic oligonucleotide
uguuugcgaacaccuuuga

SEQ ID NO: 3069984 - RNA, 19 nt, Artificial Sequence
  Description of Artificial Sequence: Synthetic oligonucleotide
ucagcgugcuucuucugcu

SEQ ID NO: 3069985 - RNA, 19 nt, Artificial Sequence
  Description of Artificial Sequence: Synthetic oligonucleotide
ucugcuccgcaucaagcuc

SEQ ID NO: 3069986 - RNA, 19 nt, Artificial Sequence
  Description of Artificial Sequence: Synthetic oligonucleotide
cucaugcugggccuugcgg

SEQ ID NO: 3069987 - RNA, 19 nt, Artificial Sequence
  Description of Artificial Sequence: Synthetic oligonucleotide
gcgcuuauagcucuugacc

SEQ ID NO: 3069988 - RNA, 19 nt, Artificial Sequence
  Description of Artificial Sequence: Synthetic oligonucleotide
ugggccuugcgguacuuug

SEQ ID NO: 3069989 - RNA, 19 nt, Artificial Sequence
  Description of Artificial Sequence: Synthetic oligonucleotide
ugcaagcuccuugacccgg

SEQ ID NO: 3069990 - RNA, 19 nt, Artificial Sequence
  Description of Artificial Sequence: Synthetic oligonucleotide
uccuguccuccucuguuug

SEQ ID NO: 3069991 - RNA, 19 nt, Artificial Sequence
  Description of Artificial Sequence: Synthetic oligonucleotide
uugcccgcagcuguuagcc

SEQ ID NO: 3069992 - RNA, 19 nt, Artificial Sequence
  Description of Artificial Sequence: Synthetic oligonucleotide
uccucuguuugguaugcaa

SEQ ID NO: 3069993 - RNA, 19 nt, Artificial Sequence
  Description of Artificial Sequence: Synthetic oligonucleotide
gaccuugcucugcagcuug

SEQ ID NO: 3069994 - RNA, 19 nt, Artificial Sequence
  Description of Artificial Sequence: Synthetic oligonucleotide
cucggccuccucaaacugg

SEQ ID NO: 3069995 - RNA, 19 nt, Artificial Sequence
  Description of Artificial Sequence: Synthetic oligonucleotide
cuguuugguaugcaagcuc

SEQ ID NO: 3069996 - RNA, 19 nt, Artificial Sequence
  Description of Artificial Sequence: Synthetic oligonucleotide
uccuccucuguuugguaug

SEQ ID NO: 3069997 - RNA, 19 nt, Artificial Sequence
  Description of Artificial Sequence: Synthetic oligonucleotide
cucauguuugcgaacaccu

SEQ ID NO: 3069998 - RNA, 19 nt, Artificial Sequence
  Description of Artificial Sequence: Synthetic oligonucleotide
auguuugcgaacaccuuug

SEQ ID NO: 3069999 - RNA, 19 nt, Artificial Sequence
  Description of Artificial Sequence: Synthetic oligonucleotide
gcagcuguuagccuggguc

SEQ ID NO: 3070000 - RNA, 19 nt, Artificial Sequence
  Description of Artificial Sequence: Synthetic oligonucleotide
ggugcuggccugcugcucg

SEQ ID NO: 3070001 - RNA, 19 nt, Artificial Sequence
  Description of Artificial Sequence: Synthetic oligonucleotide
aucccuggaccuugcccgc

SEQ ID NO: 3070002 - RNA, 19 nt, Artificial Sequence
  Description of Artificial Sequence: Synthetic oligonucleotide
ugacccggcgcucauguuu

SEQ ID NO: 3070003 - RNA, 19 nt, Artificial Sequence
  Description of Artificial Sequence: Synthetic oligonucleotide
ucauguuugcgaacaccuu

SEQ ID NO: 3070004 - RNA, 19 nt, Artificial Sequence
  Description of Artificial Sequence: Synthetic oligonucleotide
ucagcaucauccagcucau

SEQ ID NO: 3070005 - RNA, 19 nt, Artificial Sequence
  Description of Artificial Sequence: Synthetic oligonucleotide
ucugccaugucugcucgcu

SEQ ID NO: 3070006 - RNA, 19 nt, Artificial Sequence
  Description of Artificial Sequence: Synthetic oligonucleotide
ucuuccuguccuccucugu

SEQ ID NO: 3070007 - RNA, 19 nt, Artificial Sequence
  Description of Artificial Sequence: Synthetic oligonucleotide
augcaagcuccuugacccg

SEQ ID NO: 3070008 - RNA, 19 nt, Artificial Sequence
  Description of Artificial Sequence: Synthetic oligonucleotide
uccagcucaugcugggccu

SEQ ID NO: 3070009 - RNA, 19 nt, Artificial Sequence
  Description of Artificial Sequence: Synthetic oligonucleotide
gcgaacaccuuugagggcc

SEQ ID NO: 3070010 - RNA, 19 nt, Artificial Sequence
  Description of Artificial Sequence: Synthetic oligonucleotide
ccucuguuugguaugcaag

SEQ ID NO: 3070011 - RNA, 19 nt, Artificial Sequence
  Description of Artificial Sequence: Synthetic oligonucleotide
ccuugcgguacuuugccag

SEQ ID NO: 3070012 - RNA, 19 nt, Artificial Sequence
  Description of Artificial Sequence: Synthetic oligonucleotide
ugcgaacaccuuugagggc

SEQ ID NO: 3070013 - RNA, 19 nt, Artificial Sequence
  Description of Artificial Sequence: Synthetic oligonucleotide
ugcaugcgagccagguucu

SEQ ID NO: 3070014 - RNA, 19 nt, Artificial Sequence
  Description of Artificial Sequence: Synthetic oligonucleotide
aacaccuuugagggccuca

SEQ ID NO: 3070015 - RNA, 19 nt, Artificial Sequence
  Description of Artificial Sequence: Synthetic oligonucleotide
acuuugccagguuggugcu

SEQ ID NO: 3070016 - RNA, 19 nt, Artificial Sequence
  Description of Artificial Sequence: Synthetic oligonucleotide
uuugguaugcaagcuccuu

SEQ ID NO: 3070017 - RNA, 19 nt, Artificial Sequence
  Description of Artificial Sequence: Synthetic oligonucleotide
cuugcccgcagcuguuagc

SEQ ID NO: 3070018 - RNA, 19 nt, Artificial Sequence
  Description of Artificial Sequence: Synthetic oligonucleotide
augucugcucgcuccucag

SEQ ID NO: 3070019 - RNA, 19 nt, Artificial Sequence
  Description of Artificial Sequence: Synthetic oligonucleotide
uagccugggucucugccau

SEQ ID NO: 3070020 - RNA, 19 nt, Artificial Sequence
  Description of Artificial Sequence: Synthetic oligonucleotide
gucucugccaugucugcuc

SEQ ID NO: 3070021 - RNA, 19 nt, Artificial Sequence
  Description of Artificial Sequence: Synthetic oligonucleotide
acaccuuugagggccucag

SEQ ID NO: 3070022 - RNA, 19 nt, Artificial Sequence
  Description of Artificial Sequence: Synthetic oligonucleotide
uucuuccuguccuccucug

SEQ ID NO: 3070023 - RNA, 19 nt, Artificial Sequence
  Description of Artificial Sequence: Synthetic oligonucleotide
uguuagccugggucucugc

SEQ ID NO: 3070024 - RNA, 19 nt, Artificial Sequence
  Description of Artificial Sequence: Synthetic oligonucleotide
ugcuucuucugcuccgcau

SEQ ID NO: 3070025 - RNA, 19 nt, Artificial Sequence
  Description of Artificial Sequence: Synthetic oligonucleotide
agcuguuagccugggucuc

SEQ ID NO: 3070026 - RNA, 19 nt, Artificial Sequence
  Description of Artificial Sequence: Synthetic oligonucleotide
agcucugccuccagcucgc

SEQ ID NO: 3070027 - RNA, 19 nt, Artificial Sequence
  Description of Artificial Sequence: Synthetic oligonucleotide
ggcgcuuauagcucuugac

SEQ ID NO: 3070028 - RNA, 19 nt, Artificial Sequence
  Description of Artificial Sequence: Synthetic oligonucleotide
caagcuccuugacccggcg

SEQ ID NO: 3070029 - RNA, 19 nt, Artificial Sequence
  Description of Artificial Sequence: Synthetic oligonucleotide
uccucaaacuggcgcuuau

SEQ ID NO: 3070030 - RNA, 19 nt, Artificial Sequence
  Description of Artificial Sequence: Synthetic oligonucleotide
gacccggcgcucauguuug

SEQ ID NO: 3070031 - RNA, 19 nt, Artificial Sequence
  Description of Artificial Sequence: Synthetic oligonucleotide
ugcuccgcaucaagcucug

SEQ ID NO: 3070032 - RNA, 19 nt, Artificial Sequence
  Description of Artificial Sequence: Synthetic oligonucleotide
guacuuugccagguuggug

SEQ ID NO: 3070033 - RNA, 19 nt, Artificial Sequence
  Description of Artificial Sequence: Synthetic oligonucleotide
cagguucuuccuguccucc

SEQ ID NO: 3070034 - RNA, 19 nt, Artificial Sequence
  Description of Artificial Sequence: Synthetic oligonucleotide
agguucuuccuguccuccu

SEQ ID NO: 3070035 - RNA, 19 nt, Artificial Sequence
  Description of Artificial Sequence: Synthetic oligonucleotide
cugcucggccuccucaaac

SEQ ID NO: 3070036 - RNA, 19 nt, Artificial Sequence
  Description of Artificial Sequence: Synthetic oligonucleotide
uuggugcuggccugcugcu

SEQ ID NO: 3070037 - RNA, 19 nt, Artificial Sequence
  Description of Artificial Sequence: Synthetic oligonucleotide
agcucaugcugggccuugc

SEQ ID NO: 3070038 - RNA, 19 nt, Artificial Sequence
  Description of Artificial Sequence: Synthetic oligonucleotide
caagcucugccuccagcuc

SEQ ID NO: 3070039 - RNA, 19 nt, Artificial Sequence
  Description of Artificial Sequence: Synthetic oligonucleotide
ucugcucgcuccucagcau

SEQ ID NO: 3070040 - RNA, 19 nt, Artificial Sequence
  Description of Artificial Sequence: Synthetic oligonucleotide
gagggccucagcgugcuuc

SEQ ID NO: 3070041 - RNA, 19 nt, Artificial Sequence
  Description of Artificial Sequence: Synthetic oligonucleotide
uuccuguccuccucuguuu

SEQ ID NO: 3070042 - RNA, 19 nt, Artificial Sequence
  Description of Artificial Sequence: Synthetic oligonucleotide
ggccuugcgguacuuugcc

SEQ ID NO: 3070043 - RNA, 19 nt, Artificial Sequence
  Description of Artificial Sequence: Synthetic oligonucleotide
caugucugcucgcuccuca

SEQ ID NO: 3070044 - RNA, 19 nt, Artificial Sequence
  Description of Artificial Sequence: Synthetic oligonucleotide
gcuucuucugcuccgcauc

SEQ ID NO: 3070045 - RNA, 19 nt, Artificial Sequence
  Description of Artificial Sequence: Synthetic oligonucleotide
cauguuugcgaacaccuuu

SEQ ID NO: 3070046 - RNA, 19 nt, Artificial Sequence
  Description of Artificial Sequence: Synthetic oligonucleotide
cagguccugcaugcgagcc

SEQ ID NO: 3070047 - RNA, 19 nt, Artificial Sequence
  Description of Artificial Sequence: Synthetic oligonucleotide
cucuugaccuugcucugca

SEQ ID NO: 3070048 - RNA, 19 nt, Artificial Sequence
  Description of Artificial Sequence: Synthetic oligonucleotide
agguccugcaugcgagcca

SEQ ID NO: 3070049 - RNA, 19 nt, Artificial Sequence
  Description of Artificial Sequence: Synthetic oligonucleotide
uugcgguacuuugccaggu

SEQ ID NO: 3070050 - RNA, 19 nt, Artificial Sequence
  Description of Artificial Sequence: Synthetic oligonucleotide
gcucauguuugcgaacacc

SEQ ID NO: 3070051 - RNA, 19 nt, Artificial Sequence
  Description of Artificial Sequence: Synthetic oligonucleotide
gguaugcaagcuccuugac

SEQ ID NO: 3070052 - RNA, 19 nt, Artificial Sequence
  Description of Artificial Sequence: Synthetic oligonucleotide
gcgguacuuugccagguug

SEQ ID NO: 3070053 - RNA, 19 nt, Artificial Sequence
  Description of Artificial Sequence: Synthetic oligonucleotide
ugcgagccagguucuuccu

SEQ ID NO: 3070054 - RNA, 19 nt, Artificial Sequence
  Description of Artificial Sequence: Synthetic oligonucleotide
ugcgguacuuugccagguu

SEQ ID NO: 3070055 - RNA, 19 nt, Artificial Sequence
  Description of Artificial Sequence: Synthetic oligonucleotide
ugccagguuggugcuggcc

SEQ ID NO: 3070056 - RNA, 19 nt, Artificial Sequence
  Description of Artificial Sequence: Synthetic oligonucleotide
caugcgagccagguucuuc

SEQ ID NO: 3070057 - RNA, 19 nt, Artificial Sequence
  Description of Artificial Sequence: Synthetic oligonucleotide
cgguacuuugccagguugg

SEQ ID NO: 3070058 - RNA, 19 nt, Artificial Sequence
  Description of Artificial Sequence: Synthetic oligonucleotide
gcuccucagcaucauccag

SEQ ID NO: 3070059 - RNA, 19 nt, Artificial Sequence
  Description of Artificial Sequence: Synthetic oligonucleotide
caccuuugagggccucagc

SEQ ID NO: 3070060 - RNA, 19 nt, Artificial Sequence
  Description of Artificial Sequence: Synthetic oligonucleotide
cauccagcucaugcugggc

SEQ ID NO: 3070061 - RNA, 19 nt, Artificial Sequence
  Description of Artificial Sequence: Synthetic oligonucleotide
gcgugcuucuucugcuccg

SEQ ID NO: 3070062 - RNA, 19 nt, Artificial Sequence
  Description of Artificial Sequence: Synthetic oligonucleotide
cuugacccggcgcucaugu

SEQ ID NO: 3070063 - RNA, 19 nt, Artificial Sequence
  Description of Artificial Sequence: Synthetic oligonucleotide
gcucaugcugggccuugcg

SEQ ID NO: 3070064 - RNA, 19 nt, Artificial Sequence
  Description of Artificial Sequence: Synthetic oligonucleotide
gagccagguucuuccuguc

SEQ ID NO: 3070065 - RNA, 19 nt, Artificial Sequence
  Description of Artificial Sequence: Synthetic oligonucleotide
cagcuguuagccugggucu

SEQ ID NO: 3070066 - RNA, 19 nt, Artificial Sequence
  Description of Artificial Sequence: Synthetic oligonucleotide
cucugccaugucugcucgc

SEQ ID NO: 3070067 - RNA, 19 nt, Artificial Sequence
  Description of Artificial Sequence: Synthetic oligonucleotide
cagguuggugcuggccugc

SEQ ID NO: 3070068 - RNA, 19 nt, Artificial Sequence
  Description of Artificial Sequence: Synthetic oligonucleotide
gugcuggccugcugcucgg

SEQ ID NO: 3070069 - RNA, 19 nt, Artificial Sequence
  Description of Artificial Sequence: Synthetic oligonucleotide
cagcgugcuucuucugcuc

SEQ ID NO: 3070070 - RNA, 19 nt, Artificial Sequence
  Description of Artificial Sequence: Synthetic oligonucleotide
gcccgcagcuguuagccug

SEQ ID NO: 3070071 - RNA, 19 nt, Artificial Sequence
  Description of Artificial Sequence: Synthetic oligonucleotide
ccuguccuccucuguuugg

SEQ ID NO: 3070072 - RNA, 19 nt, Artificial Sequence
  Description of Artificial Sequence: Synthetic oligonucleotide
ugaccuugcucugcagcuu

SEQ ID NO: 3070073 - RNA, 19 nt, Artificial Sequence
  Description of Artificial Sequence: Synthetic oligonucleotide
cuguuagccugggucucug

SEQ ID NO: 3070074 - RNA, 19 nt, Artificial Sequence
  Description of Artificial Sequence: Synthetic oligonucleotide
cugcuccgcaucaagcucu

SEQ ID NO: 3070075 - RNA, 19 nt, Artificial Sequence
  Description of Artificial Sequence: Synthetic oligonucleotide
caccagguccugcaugcga

SEQ ID NO: 3070076 - RNA, 19 nt, Artificial Sequence
  Description of Artificial Sequence: Synthetic oligonucleotide
cucgcuccucagcaucauc

SEQ ID NO: 3070077 - RNA, 19 nt, Artificial Sequence
  Description of Artificial Sequence: Synthetic oligonucleotide
gggucucugccaugucugc

SEQ ID NO: 3070078 - RNA, 19 nt, Artificial Sequence
  Description of Artificial Sequence: Synthetic oligonucleotide
cuggcgcuuauagcucuug

SEQ ID NO: 3070079 - RNA, 19 nt, Artificial Sequence
  Description of Artificial Sequence: Synthetic oligonucleotide
caugcugggccuugcggua

SEQ ID NO: 3070080 - RNA, 19 nt, Artificial Sequence
  Description of Artificial Sequence: Synthetic oligonucleotide
uugccagguuggugcuggc

SEQ ID NO: 3070081 - RNA, 19 nt, Artificial Sequence
  Description of Artificial Sequence: Synthetic oligonucleotide
uccuugacccggcgcucau

SEQ ID NO: 3070082 - RNA, 19 nt, Artificial Sequence
  Description of Artificial Sequence: Synthetic oligonucleotide
gcucggccuccucaaacug

SEQ ID NO: 3070083 - RNA, 19 nt, Artificial Sequence
  Description of Artificial Sequence: Synthetic oligonucleotide
cgcaucaagcucugccucc

SEQ ID NO: 3070084 - RNA, 19 nt, Artificial Sequence
  Description of Artificial Sequence: Synthetic oligonucleotide
ugcccgcagcuguuagccu

SEQ ID NO: 3070085 - RNA, 19 nt, Artificial Sequence
  Description of Artificial Sequence: Synthetic oligonucleotide
cugccaugucugcucgcuc

SEQ ID NO: 3070086 - RNA, 19 nt, Artificial Sequence
  Description of Artificial Sequence: Synthetic oligonucleotide
cugccuccagcucgcgcac

SEQ ID NO: 3070087 - RNA, 19 nt, Artificial Sequence
  Description of Artificial Sequence: Synthetic oligonucleotide
ccuccucuguuugguaugc

SEQ ID NO: 3070088 - RNA, 19 nt, Artificial Sequence
  Description of Artificial Sequence: Synthetic oligonucleotide
gcucuugaccuugcucugc

SEQ ID NO: 3070089 - RNA, 19 nt, Artificial Sequence
  Description of Artificial Sequence: Synthetic oligonucleotide
cugcugcucggccuccuca

SEQ ID NO: 3070090 - RNA, 19 nt, Artificial Sequence
  Description of Artificial Sequence: Synthetic oligonucleotide
cuuccuguccuccucuguu

SEQ ID NO: 3070091 - RNA, 19 nt, Artificial Sequence
  Description of Artificial Sequence: Synthetic oligonucleotide
ggaccuugcccgcagcugu

SEQ ID NO: 3070092 - RNA, 19 nt, Artificial Sequence
  Description of Artificial Sequence: Synthetic oligonucleotide
ggcgcucauguuugcgaac

SEQ ID NO: 3070093 - RNA, 19 nt, Artificial Sequence
  Description of Artificial Sequence: Synthetic oligonucleotide
gcgcucauguuugcgaaca

SEQ ID NO: 3070094 - RNA, 19 nt, Artificial Sequence
  Description of Artificial Sequence: Synthetic oligonucleotide
gggccuugcgguacuuugc

SEQ ID NO: 3070095 - RNA, 19 nt, Artificial Sequence
  Description of Artificial Sequence: Synthetic oligonucleotide
ggccucagcgugcuucuuc

SEQ ID NO: 3070096 - RNA, 19 nt, Artificial Sequence
  Description of Artificial Sequence: Synthetic oligonucleotide
gcgagccagguucuuccug

SEQ ID NO: 3070097 - RNA, 19 nt, Artificial Sequence
  Description of Artificial Sequence: Synthetic oligonucleotide
cgcuuauagcucuugaccu

SEQ ID NO: 3070098 - RNA, 19 nt, Artificial Sequence
  Description of Artificial Sequence: Synthetic oligonucleotide
guuugguaugcaagcuccu

SEQ ID NO: 3070099 - RNA, 19 nt, Artificial Sequence
  Description of Artificial Sequence: Synthetic oligonucleotide
gguuggugcuggccugcug

SEQ ID NO: 3070100 - RNA, 19 nt, Artificial Sequence
  Description of Artificial Sequence: Synthetic oligonucleotide
agccugggucucugccaug

SEQ ID NO: 3070101 - RNA, 19 nt, Artificial Sequence
  Description of Artificial Sequence: Synthetic oligonucleotide
gcuggccugcugcucggcc

SEQ ID NO: 3070102 - RNA, 19 nt, Artificial Sequence
  Description of Artificial Sequence: Synthetic oligonucleotide
ucccuggaccuugcccgca

SEQ ID NO: 3070103 - RNA, 19 nt, Artificial Sequence
  Description of Artificial Sequence: Synthetic oligonucleotide
uugacccggcgcucauguu

SEQ ID NO: 3070104 - RNA, 19 nt, Artificial Sequence
  Description of Artificial Sequence: Synthetic oligonucleotide
ccuugcccgcagcuguuag

SEQ ID NO: 3070105 - RNA, 19 nt, Artificial Sequence
  Description of Artificial Sequence: Synthetic oligonucleotide
ugcuggccugcugcucggc

SEQ ID NO: 3070106 - RNA, 19 nt, Artificial Sequence
  Description of Artificial Sequence: Synthetic oligonucleotide
uggugcuggccugcugcuc

SEQ ID NO: 3070107 - RNA, 19 nt, Artificial Sequence
  Description of Artificial Sequence: Synthetic oligonucleotide
gcuuauagcucuugaccuu

SEQ ID NO: 3070108 - RNA, 19 nt, Artificial Sequence
  Description of Artificial Sequence: Synthetic oligonucleotide
gcaagcuccuugacccggc

SEQ ID NO: 3070109 - RNA, 19 nt, Artificial Sequence
  Description of Artificial Sequence: Synthetic oligonucleotide
ugccuccagcucgcgcacc

SEQ ID NO: 3070110 - RNA, 19 nt, Artificial Sequence
  Description of Artificial Sequence: Synthetic oligonucleotide
ccagcucgcgcaccuuggc

SEQ ID NO: 3070111 - RNA, 19 nt, Artificial Sequence
  Description of Artificial Sequence: Synthetic oligonucleotide
agguuggugcuggccugcu

SEQ ID NO: 3070112 - RNA, 19 nt, Artificial Sequence
  Description of Artificial Sequence: Synthetic oligonucleotide
cucgcgcaccuuggccucc

SEQ ID NO: 3070113 - RNA, 19 nt, Artificial Sequence
  Description of Artificial Sequence: Synthetic oligonucleotide
cuggccugcugcucggccu

SEQ ID NO: 3070114 - RNA, 19 nt, Artificial Sequence
  Description of Artificial Sequence: Synthetic oligonucleotide
cuccuugacccggcgcuca

SEQ ID NO: 3070115 - RNA, 19 nt, Artificial Sequence
  Description of Artificial Sequence: Synthetic oligonucleotide
cuggaccuugcccgcagcu

SEQ ID NO: 3070116 - RNA, 19 nt, Artificial Sequence
  Description of Artificial Sequence: Synthetic oligonucleotide
gccucagcgugcuucuucu

SEQ ID NO: 3070117 - RNA, 19 nt, Artificial Sequence
  Description of Artificial Sequence: Synthetic oligonucleotide
accuugcucugcagcuugu

SEQ ID NO: 3070118 - RNA, 19 nt, Artificial Sequence
  Description of Artificial Sequence: Synthetic oligonucleotide
ucgcgcaccuuggccucca

SEQ ID NO: 3070119 - RNA, 19 nt, Artificial Sequence
  Description of Artificial Sequence: Synthetic oligonucleotide
guccugcaugcgagccagg

SEQ ID NO: 3070120 - RNA, 19 nt, Artificial Sequence
  Description of Artificial Sequence: Synthetic oligonucleotide
gccuugcgguacuuugcca

SEQ ID NO: 3070121 - RNA, 19 nt, Artificial Sequence
  Description of Artificial Sequence: Synthetic oligonucleotide
cgugcuucuucugcuccgc

SEQ ID NO: 3070122 - RNA, 19 nt, Artificial Sequence
  Description of Artificial Sequence: Synthetic oligonucleotide
gcgcaccuuggccuccagc

SEQ ID NO: 3070123 - RNA, 19 nt, Artificial Sequence
  Description of Artificial Sequence: Synthetic oligonucleotide
ccuuugagggccucagcgu

SEQ ID NO: 3070124 - RNA, 19 nt, Artificial Sequence
  Description of Artificial Sequence: Synthetic oligonucleotide
ccggcgcucauguuugcga

SEQ ID NO: 3070125 - RNA, 19 nt, Artificial Sequence
  Description of Artificial Sequence: Synthetic oligonucleotide
ccuggaccuugcccgcagc

SEQ ID NO: 3070126 - RNA, 19 nt, Artificial Sequence
  Description of Artificial Sequence: Synthetic oligonucleotide
cagcaucauccagcucaug

SEQ ID NO: 3070127 - RNA, 19 nt, Artificial Sequence
  Description of Artificial Sequence: Synthetic oligonucleotide
gcucgcgcaccuuggccuc

SEQ ID NO: 3070128 - RNA, 19 nt, Artificial Sequence
  Description of Artificial Sequence: Synthetic oligonucleotide
gcucugcagcuuguccacc

SEQ ID NO: 3070129 - RNA, 19 nt, Artificial Sequence
  Description of Artificial Sequence: Synthetic oligonucleotide
acuggcgcuuauagcucuu

SEQ ID NO: 3070130 - RNA, 19 nt, Artificial Sequence
  Description of Artificial Sequence: Synthetic oligonucleotide
ugagggccucagcgugcuu

SEQ ID NO: 3070131 - RNA, 19 nt, Artificial Sequence
  Description of Artificial Sequence: Synthetic oligonucleotide
cuccucuguuugguaugca

SEQ ID NO: 3070132 - RNA, 19 nt, Artificial Sequence
  Description of Artificial Sequence: Synthetic oligonucleotide
cccggcgcucauguuugcg

SEQ ID NO: 3070133 - RNA, 19 nt, Artificial Sequence
  Description of Artificial Sequence: Synthetic oligonucleotide
ccucagcgugcuucuucug

SEQ ID NO: 3070134 - RNA, 19 nt, Artificial Sequence
  Description of Artificial Sequence: Synthetic oligonucleotide
accuugcccgcagcuguua

SEQ ID NO: 3070135 - RNA, 19 nt, Artificial Sequence
  Description of Artificial Sequence: Synthetic oligonucleotide
cccuggaccuugcccgcag

SEQ ID NO: 3070136 - RNA, 19 nt, Artificial Sequence
  Description of Artificial Sequence: Synthetic oligonucleotide
cuccucaaacuggcgcuua

SEQ ID NO: 3070137 - RNA, 19 nt, Artificial Sequence
  Description of Artificial Sequence: Synthetic oligonucleotide
ccuugcucugcagcuuguc

SEQ ID NO: 3070138 - RNA, 19 nt, Artificial Sequence
  Description of Artificial Sequence: Synthetic oligonucleotide
ggucucugccaugucugcu

SEQ ID NO: 3070139 - RNA, 19 nt, Artificial Sequence
  Description of Artificial Sequence: Synthetic oligonucleotide
cgcucauguuugcgaacac

SEQ ID NO: 3070140 - RNA, 19 nt, Artificial Sequence
  Description of Artificial Sequence: Synthetic oligonucleotide
gccaugucugcucgcuccu

SEQ ID NO: 3070141 - RNA, 19 nt, Artificial Sequence
  Description of Artificial Sequence: Synthetic oligonucleotide
cgagccagguucuuccugu

SEQ ID NO: 3070142 - RNA, 19 nt, Artificial Sequence
  Description of Artificial Sequence: Synthetic oligonucleotide
cgcuccucagcaucaucca

SEQ ID NO: 3070143 - RNA, 19 nt, Artificial Sequence
  Description of Artificial Sequence: Synthetic oligonucleotide
gcugcucggccuccucaaa

SEQ ID NO: 3070144 - RNA, 19 nt, Artificial Sequence
  Description of Artificial Sequence: Synthetic oligonucleotide
gcuccuugacccggcgcuc

SEQ ID NO: 3070145 - RNA, 19 nt, Artificial Sequence
  Description of Artificial Sequence: Synthetic oligonucleotide
gccugggucucugccaugu

SEQ ID NO: 3070146 - RNA, 19 nt, Artificial Sequence
  Description of Artificial Sequence: Synthetic oligonucleotide
gcuguuagccugggucucu

SEQ ID NO: 3070147 - RNA, 19 nt, Artificial Sequence
  Description of Artificial Sequence: Synthetic oligonucleotide
ccuugacccggcgcucaug

SEQ ID NO: 3070148 - RNA, 19 nt, Artificial Sequence
  Description of Artificial Sequence: Synthetic oligonucleotide
ccaugucugcucgcuccuc

SEQ ID NO: 3070149 - RNA, 19 nt, Artificial Sequence
  Description of Artificial Sequence: Synthetic oligonucleotide
gaccuugcccgcagcuguu

SEQ ID NO: 3070150 - RNA, 19 nt, Artificial Sequence
  Description of Artificial Sequence: Synthetic oligonucleotide
ccucaaacuggcgcuuaua

SEQ ID NO: 3070151 - RNA, 19 nt, Artificial Sequence
  Description of Artificial Sequence: Synthetic oligonucleotide
ccugcaugcgagccagguu

SEQ ID NO: 3070152 - RNA, 19 nt, Artificial Sequence
  Description of Artificial Sequence: Synthetic oligonucleotide
cugggccuugcgguacuuu

SEQ ID NO: 3070153 - RNA, 19 nt, Artificial Sequence
  Description of Artificial Sequence: Synthetic oligonucleotide
cgcgcaccuuggccuccag

SEQ ID NO: 3070154 - RNA, 19 nt, Artificial Sequence
  Description of Artificial Sequence: Synthetic oligonucleotide
gcaugcgagccagguucuu

SEQ ID NO: 3070155 - RNA, 19 nt, Artificial Sequence
  Description of Artificial Sequence: Synthetic oligonucleotide
cgcagcuguuagccugggu

SEQ ID NO: 3070156 - RNA, 19 nt, Artificial Sequence
  Description of Artificial Sequence: Synthetic oligonucleotide
aaaaugaacacauauauaa

SEQ ID NO: 3070157 - RNA, 19 nt, Artificial Sequence
  Description of Artificial Sequence: Synthetic oligonucleotide
aacccaaauaaccacacac

SEQ ID NO: 3070158 - RNA, 19 nt, Artificial Sequence
  Description of Artificial Sequence: Synthetic oligonucleotide
ugaaaaugaacacauauau

SEQ ID NO: 3070159 - RNA, 19 nt, Artificial Sequence
  Description of Artificial Sequence: Synthetic oligonucleotide
uuuaauuccacaccugugc

SEQ ID NO: 3070160 - RNA, 19 nt, Artificial Sequence
  Description of Artificial Sequence: Synthetic oligonucleotide
auugcuuuaauuccacacc

SEQ ID NO: 3070161 - RNA, 19 nt, Artificial Sequence
  Description of Artificial Sequence: Synthetic oligonucleotide
agguaaaagacccuugggc

SEQ ID NO: 3070162 - RNA, 19 nt, Artificial Sequence
  Description of Artificial Sequence: Synthetic oligonucleotide
gauacuacguuuuaguuca

SEQ ID NO: 3070163 - RNA, 19 nt, Artificial Sequence
  Description of Artificial Sequence: Synthetic oligonucleotide
uuaguucacaguuacauga

SEQ ID NO: 3070164 - RNA, 19 nt, Artificial Sequence
  Description of Artificial Sequence: Synthetic oligonucleotide
aauuccacaccugugcucc

SEQ ID NO: 3070165 - RNA, 19 nt, Artificial Sequence
  Description of Artificial Sequence: Synthetic oligonucleotide
aguacuaggguccauaaug

SEQ ID NO: 3070166 - RNA, 19 nt, Artificial Sequence
  Description of Artificial Sequence: Synthetic oligonucleotide
uagaacagguaaaagaccc

SEQ ID NO: 3070167 - RNA, 19 nt, Artificial Sequence
  Description of Artificial Sequence: Synthetic oligonucleotide
uucuggugaauucucaggg

SEQ ID NO: 3070168 - RNA, 19 nt, Artificial Sequence
  Description of Artificial Sequence: Synthetic oligonucleotide
aguuacaugaaaaugaaca

SEQ ID NO: 3070169 - RNA, 19 nt, Artificial Sequence
  Description of Artificial Sequence: Synthetic oligonucleotide
agauacuacguuuuaguuc

SEQ ID NO: 3070170 - RNA, 19 nt, Artificial Sequence
  Description of Artificial Sequence: Synthetic oligonucleotide
uuuucagagggccagacaa

SEQ ID NO: 3070171 - RNA, 19 nt, Artificial Sequence
  Description of Artificial Sequence: Synthetic oligonucleotide
uuuccauugcuuuaauucc

SEQ ID NO: 3070172 - RNA, 19 nt, Artificial Sequence
  Description of Artificial Sequence: Synthetic oligonucleotide
uacaugaaaaugaacacau

SEQ ID NO: 3070173 - RNA, 19 nt, Artificial Sequence
  Description of Artificial Sequence: Synthetic oligonucleotide
aggaguaccaaguaccagg

SEQ ID NO: 3070174 - RNA, 19 nt, Artificial Sequence
  Description of Artificial Sequence: Synthetic oligonucleotide
aaauccauguacuucuggu

SEQ ID NO: 3070175 - RNA, 19 nt, Artificial Sequence
  Description of Artificial Sequence: Synthetic oligonucleotide
agacaagcaagguucacac

SEQ ID NO: 3070176 - RNA, 19 nt, Artificial Sequence
  Description of Artificial Sequence: Synthetic oligonucleotide
aaaauccauguacuucugg

SEQ ID NO: 3070177 - RNA, 19 nt, Artificial Sequence
  Description of Artificial Sequence: Synthetic oligonucleotide
uuuucagccuccaagggac

SEQ ID NO: 3070178 - RNA, 19 nt, Artificial Sequence
  Description of Artificial Sequence: Synthetic oligonucleotide
aguaccaaguaccaggugu

SEQ ID NO: 3070179 - RNA, 19 nt, Artificial Sequence
  Description of Artificial Sequence: Synthetic oligonucleotide
uacguuuuaguucacaguu

SEQ ID NO: 3070180 - RNA, 19 nt, Artificial Sequence
  Description of Artificial Sequence: Synthetic oligonucleotide
acagguaaaagacccuugg

SEQ ID NO: 3070181 - RNA, 19 nt, Artificial Sequence
  Description of Artificial Sequence: Synthetic oligonucleotide
aauccauguacuucuggug

SEQ ID NO: 3070182 - RNA, 19 nt, Artificial Sequence
  Description of Artificial Sequence: Synthetic oligonucleotide
ugugcuccauuucugaagc

SEQ ID NO: 3070183 - RNA, 19 nt, Artificial Sequence
  Description of Artificial Sequence: Synthetic oligonucleotide
aagcaucucuccucagucc

SEQ ID NO: 3070184 - RNA, 19 nt, Artificial Sequence
  Description of Artificial Sequence: Synthetic oligonucleotide
acuacguuuuaguucacag

SEQ ID NO: 3070185 - RNA, 19 nt, Artificial Sequence
  Description of Artificial Sequence: Synthetic oligonucleotide
guuacaugaaaaugaacac

SEQ ID NO: 3070186 - RNA, 19 nt, Artificial Sequence
  Description of Artificial Sequence: Synthetic oligonucleotide
accuagaacagguaaaaga

SEQ ID NO: 3070187 - RNA, 19 nt, Artificial Sequence
  Description of Artificial Sequence: Synthetic oligonucleotide
cacaguuacaugaaaauga

SEQ ID NO: 3070188 - RNA, 19 nt, Artificial Sequence
  Description of Artificial Sequence: Synthetic oligonucleotide
uuuaguucacaguuacaug

SEQ ID NO: 3070189 - RNA, 19 nt, Artificial Sequence
  Description of Artificial Sequence: Synthetic oligonucleotide
uuacaugaaaaugaacaca

SEQ ID NO: 3070190 - RNA, 19 nt, Artificial Sequence
  Description of Artificial Sequence: Synthetic oligonucleotide
cauugcuuuaauuccacac

SEQ ID NO: 3070191 - RNA, 19 nt, Artificial Sequence
  Description of Artificial Sequence: Synthetic oligonucleotide
uugcuuuaauuccacaccu

SEQ ID NO: 3070192 - RNA, 19 nt, Artificial Sequence
  Description of Artificial Sequence: Synthetic oligonucleotide
cuagaacagguaaaagacc

SEQ ID NO: 3070193 - RNA, 19 nt, Artificial Sequence
  Description of Artificial Sequence: Synthetic oligonucleotide
ucugaagcaucucuccuca

SEQ ID NO: 3070194 - RNA, 19 nt, Artificial Sequence
  Description of Artificial Sequence: Synthetic oligonucleotide
aauucucaggguccaaagu

SEQ ID NO: 3070195 - RNA, 19 nt, Artificial Sequence
  Description of Artificial Sequence: Synthetic oligonucleotide
uuaauuccacaccugugcu

SEQ ID NO: 3070196 - RNA, 19 nt, Artificial Sequence
  Description of Artificial Sequence: Synthetic oligonucleotide
uucacaguuacaugaaaau

SEQ ID NO: 3070197 - RNA, 19 nt, Artificial Sequence
  Description of Artificial Sequence: Synthetic oligonucleotide
caaauaaccacacacauau

SEQ ID NO: 3070198 - RNA, 19 nt, Artificial Sequence
  Description of Artificial Sequence: Synthetic oligonucleotide
aguaccaggugucagaaua

SEQ ID NO: 3070199 - RNA, 19 nt, Artificial Sequence
  Description of Artificial Sequence: Synthetic oligonucleotide
gcuaccaggagauacuacg

SEQ ID NO: 3070200 - RNA, 19 nt, Artificial Sequence
  Description of Artificial Sequence: Synthetic oligonucleotide
cucaguccuuuucagaggg

SEQ ID NO: 3070201 - RNA, 19 nt, Artificial Sequence
  Description of Artificial Sequence: Synthetic oligonucleotide
gaauucucaggguccaaag

SEQ ID NO: 3070202 - RNA, 19 nt, Artificial Sequence
  Description of Artificial Sequence: Synthetic oligonucleotide
acaagcaagguucacacuu

SEQ ID NO: 3070203 - RNA, 19 nt, Artificial Sequence
  Description of Artificial Sequence: Synthetic oligonucleotide
aauguucccugacauggga

SEQ ID NO: 3070204 - RNA, 19 nt, Artificial Sequence
  Description of Artificial Sequence: Synthetic oligonucleotide
agacccuugggcuaccagg

SEQ ID NO: 3070205 - RNA, 19 nt, Artificial Sequence
  Description of Artificial Sequence: Synthetic oligonucleotide
uccauaauguucccugaca

SEQ ID NO: 3070206 - RNA, 19 nt, Artificial Sequence
  Description of Artificial Sequence: Synthetic oligonucleotide
uguacuucuggugaauucu

SEQ ID NO: 3070207 - RNA, 19 nt, Artificial Sequence
  Description of Artificial Sequence: Synthetic oligonucleotide
ucacaguuacaugaaaaug

SEQ ID NO: 3070208 - RNA, 19 nt, Artificial Sequence
  Description of Artificial Sequence: Synthetic oligonucleotide
ccuagaacagguaaaagac

SEQ ID NO: 3070209 - RNA, 19 nt, Artificial Sequence
  Description of Artificial Sequence: Synthetic oligonucleotide
aaaguacuaggguccauaa

SEQ ID NO: 3070210 - RNA, 19 nt, Artificial Sequence
  Description of Artificial Sequence: Synthetic oligonucleotide
gacaugggagaauggaggc

SEQ ID NO: 3070211 - RNA, 19 nt, Artificial Sequence
  Description of Artificial Sequence: Synthetic oligonucleotide
uaauguucccugacauggg

SEQ ID NO: 3070212 - RNA, 19 nt, Artificial Sequence
  Description of Artificial Sequence: Synthetic oligonucleotide
uuccauugcuuuaauucca

SEQ ID NO: 3070213 - RNA, 19 nt, Artificial Sequence
  Description of Artificial Sequence: Synthetic oligonucleotide
cuccaagggaccuagaaca

SEQ ID NO: 3070214 - RNA, 19 nt, Artificial Sequence
  Description of Artificial Sequence: Synthetic oligonucleotide
acuaggguccauaauguuc

SEQ ID NO: 3070215 - RNA, 19 nt, Artificial Sequence
  Description of Artificial Sequence: Synthetic oligonucleotide
uggugaauucucagggucc

SEQ ID NO: 3070216 - RNA, 19 nt, Artificial Sequence
  Description of Artificial Sequence: Synthetic oligonucleotide
auccauguacuucugguga

SEQ ID NO: 3070217 - RNA, 19 nt, Artificial Sequence
  Description of Artificial Sequence: Synthetic oligonucleotide
auguacuucuggugaauuc

SEQ ID NO: 3070218 - RNA, 19 nt, Artificial Sequence
  Description of Artificial Sequence: Synthetic oligonucleotide
acuucuggugaauucucag

SEQ ID NO: 3070219 - RNA, 19 nt, Artificial Sequence
  Description of Artificial Sequence: Synthetic oligonucleotide
cuuuaauuccacaccugug

SEQ ID NO: 3070220 - RNA, 19 nt, Artificial Sequence
  Description of Artificial Sequence: Synthetic oligonucleotide
uuucugaagcaucucuccu

SEQ ID NO: 3070221 - RNA, 19 nt, Artificial Sequence
  Description of Artificial Sequence: Synthetic oligonucleotide
cugacaugggagaauggag

SEQ ID NO: 3070222 - RNA, 19 nt, Artificial Sequence
  Description of Artificial Sequence: Synthetic oligonucleotide
gaagcaucucuccucaguc

SEQ ID NO: 3070223 - RNA, 19 nt, Artificial Sequence
  Description of Artificial Sequence: Synthetic oligonucleotide
ugaagcaucucuccucagu

SEQ ID NO: 3070224 - RNA, 19 nt, Artificial Sequence
  Description of Artificial Sequence: Synthetic oligonucleotide
aaaugaacacauauauaaa

SEQ ID NO: 3070225 - RNA, 19 nt, Artificial Sequence
  Description of Artificial Sequence: Synthetic oligonucleotide
ucaggguccaaaguacuag

SEQ ID NO: 3070226 - RNA, 19 nt, Artificial Sequence
  Description of Artificial Sequence: Synthetic oligonucleotide
uuucagagggccagacaag

SEQ ID NO: 3070227 - RNA, 19 nt, Artificial Sequence
  Description of Artificial Sequence: Synthetic oligonucleotide
cauuucugaagcaucucuc

SEQ ID NO: 3070228 - RNA, 19 nt, Artificial Sequence
  Description of Artificial Sequence: Synthetic oligonucleotide
uguucccugacaugggaga

SEQ ID NO: 3070229 - RNA, 19 nt, Artificial Sequence
  Description of Artificial Sequence: Synthetic oligonucleotide
cauaauguucccugacaug

SEQ ID NO: 3070230 - RNA, 19 nt, Artificial Sequence
  Description of Artificial Sequence: Synthetic oligonucleotide
uccaagggaccuagaacag

SEQ ID NO: 3070231 - RNA, 19 nt, Artificial Sequence
  Description of Artificial Sequence: Synthetic oligonucleotide
ugcuuuaauuccacaccug

SEQ ID NO: 3070232 - RNA, 19 nt, Artificial Sequence
  Description of Artificial Sequence: Synthetic oligonucleotide
caugggagaauggaggcag

SEQ ID NO: 3070233 - RNA, 19 nt, Artificial Sequence
  Description of Artificial Sequence: Synthetic oligonucleotide
uucagagggccagacaagc

SEQ ID NO: 3070234 - RNA, 19 nt, Artificial Sequence
  Description of Artificial Sequence: Synthetic oligonucleotide
cagguaaaagacccuuggg

SEQ ID NO: 3070235 - RNA, 19 nt, Artificial Sequence
  Description of Artificial Sequence: Synthetic oligonucleotide
uccauugcuuuaauuccac

SEQ ID NO: 3070236 - RNA, 19 nt, Artificial Sequence
  Description of Artificial Sequence: Synthetic oligonucleotide
acaccugugcuccauuucu

SEQ ID NO: 3070237 - RNA, 19 nt, Artificial Sequence
  Description of Artificial Sequence: Synthetic oligonucleotide
caugaaaaugaacacauau

SEQ ID NO: 3070238 - RNA, 19 nt, Artificial Sequence
  Description of Artificial Sequence: Synthetic oligonucleotide
uaaaagacccuugggcuac

SEQ ID NO: 3070239 - RNA, 19 nt, Artificial Sequence
  Description of Artificial Sequence: Synthetic oligonucleotide
agcaucucuccucaguccu

SEQ ID NO: 3070240 - RNA, 19 nt, Artificial Sequence
  Description of Artificial Sequence: Synthetic oligonucleotide
cugugcuccauuucugaag

SEQ ID NO: 3070241 - RNA, 19 nt, Artificial Sequence
  Description of Artificial Sequence: Synthetic oligonucleotide
uucugaagcaucucuccuc

SEQ ID NO: 3070242 - RNA, 19 nt, Artificial Sequence
  Description of Artificial Sequence: Synthetic oligonucleotide
uacuucuggugaauucuca

SEQ ID NO: 3070243 - RNA, 19 nt, Artificial Sequence
  Description of Artificial Sequence: Synthetic oligonucleotide
cuggugaauucucaggguc

SEQ ID NO: 3070244 - RNA, 19 nt, Artificial Sequence
  Description of Artificial Sequence: Synthetic oligonucleotide
caggguccaaaguacuagg

SEQ ID NO: 3070245 - RNA, 19 nt, Artificial Sequence
  Description of Artificial Sequence: Synthetic oligonucleotide
aacagguaaaagacccuug

SEQ ID NO: 3070246 - RNA, 19 nt, Artificial Sequence
  Description of Artificial Sequence: Synthetic oligonucleotide
ucugcuuuccauugcuuua

SEQ ID NO: 3070247 - RNA, 19 nt, Artificial Sequence
  Description of Artificial Sequence: Synthetic oligonucleotide
ucucaggguccaaaguacu

SEQ ID NO: 3070248 - RNA, 19 nt, Artificial Sequence
  Description of Artificial Sequence: Synthetic oligonucleotide
ucuggugaauucucagggu

SEQ ID NO: 3070249 - RNA, 19 nt, Artificial Sequence
  Description of Artificial Sequence: Synthetic oligonucleotide
gguccaaaguacuaggguc

SEQ ID NO: 3070250 - RNA, 19 nt, Artificial Sequence
  Description of Artificial Sequence: Synthetic oligonucleotide
uaguucacaguuacaugaa

SEQ ID NO: 3070251 - RNA, 19 nt, Artificial Sequence
  Description of Artificial Sequence: Synthetic oligonucleotide
aauggaggcaggaguacca

SEQ ID NO: 3070252 - RNA, 19 nt, Artificial Sequence
  Description of Artificial Sequence: Synthetic oligonucleotide
agaauggaggcaggaguac

SEQ ID NO: 3070253 - RNA, 19 nt, Artificial Sequence
  Description of Artificial Sequence: Synthetic oligonucleotide
aagacccuugggcuaccag

SEQ ID NO: 3070254 - RNA, 19 nt, Artificial Sequence
  Description of Artificial Sequence: Synthetic oligonucleotide
gaaaaugaacacauauaua

SEQ ID NO: 3070255 - RNA, 19 nt, Artificial Sequence
  Description of Artificial Sequence: Synthetic oligonucleotide
uugggcuaccaggagauac

SEQ ID NO: 3070256 - RNA, 19 nt, Artificial Sequence
  Description of Artificial Sequence: Synthetic oligonucleotide
aaguacuaggguccauaau

SEQ ID NO: 3070257 - RNA, 19 nt, Artificial Sequence
  Description of Artificial Sequence: Synthetic oligonucleotide
gaauggaggcaggaguacc

SEQ ID NO: 3070258 - RNA, 19 nt, Artificial Sequence
  Description of Artificial Sequence: Synthetic oligonucleotide
aggagauacuacguuuuag

SEQ ID NO: 3070259 - RNA, 19 nt, Artificial Sequence
  Description of Artificial Sequence: Synthetic oligonucleotide
aaaagacccuugggcuacc

SEQ ID NO: 3070260 - RNA, 19 nt, Artificial Sequence
  Description of Artificial Sequence: Synthetic oligonucleotide
ugggcuaccaggagauacu

SEQ ID NO: 3070261 - RNA, 19 nt, Artificial Sequence
  Description of Artificial Sequence: Synthetic oligonucleotide
gguaaaagacccuugggcu

SEQ ID NO: 3070262 - RNA, 19 nt, Artificial Sequence
  Description of Artificial Sequence: Synthetic oligonucleotide
caguuacaugaaaaugaac

SEQ ID NO: 3070263 - RNA, 19 nt, Artificial Sequence
  Description of Artificial Sequence: Synthetic oligonucleotide
agggaccuagaacagguaa

SEQ ID NO: 3070264 - RNA, 19 nt, Artificial Sequence
  Description of Artificial Sequence: Synthetic oligonucleotide
uaauuccacaccugugcuc

SEQ ID NO: 3070265 - RNA, 19 nt, Artificial Sequence
  Description of Artificial Sequence: Synthetic oligonucleotide
ugaauucucaggguccaaa

SEQ ID NO: 3070266 - RNA, 19 nt, Artificial Sequence
  Description of Artificial Sequence: Synthetic oligonucleotide
ggcaggaguaccaaguacc

SEQ ID NO: 3070267 - RNA, 19 nt, Artificial Sequence
  Description of Artificial Sequence: Synthetic oligonucleotide
acaguuacaugaaaaugaa

SEQ ID NO: 3070268 - RNA, 19 nt, Artificial Sequence
  Description of Artificial Sequence: Synthetic oligonucleotide
accaggagauacuacguuu

SEQ ID NO: 3070269 - RNA, 19 nt, Artificial Sequence
  Description of Artificial Sequence: Synthetic oligonucleotide
ucccugacaugggagaaug

SEQ ID NO: 3070270 - RNA, 19 nt, Artificial Sequence
  Description of Artificial Sequence: Synthetic oligonucleotide
aguucacaguuacaugaaa

SEQ ID NO: 3070271 - RNA, 19 nt, Artificial Sequence
  Description of Artificial Sequence: Synthetic oligonucleotide
auaaccacacacauauaaa

SEQ ID NO: 3070272 - RNA, 19 nt, Artificial Sequence
  Description of Artificial Sequence: Synthetic oligonucleotide
ggguccauaauguucccug

SEQ ID NO: 3070273 - RNA, 19 nt, Artificial Sequence
  Description of Artificial Sequence: Synthetic oligonucleotide
gaccuagaacagguaaaag

SEQ ID NO: 3070274 - RNA, 19 nt, Artificial Sequence
  Description of Artificial Sequence: Synthetic oligonucleotide
aucugcuuuccauugcuuu

SEQ ID NO: 3070275 - RNA, 19 nt, Artificial Sequence
  Description of Artificial Sequence: Synthetic oligonucleotide
uccauguacuucuggugaa

SEQ ID NO: 3070276 - RNA, 19 nt, Artificial Sequence
  Description of Artificial Sequence: Synthetic oligonucleotide
guaaaagacccuugggcua

SEQ ID NO: 3070277 - RNA, 19 nt, Artificial Sequence
  Description of Artificial Sequence: Synthetic oligonucleotide
aagcaagguucacacuuuu

SEQ ID NO: 3070278 - RNA, 19 nt, Artificial Sequence
  Description of Artificial Sequence: Synthetic oligonucleotide
acccaaauaaccacacaca

SEQ ID NO: 3070279 - RNA, 19 nt, Artificial Sequence
  Description of Artificial Sequence: Synthetic oligonucleotide
guucacaguuacaugaaaa

SEQ ID NO: 3070280 - RNA, 19 nt, Artificial Sequence
  Description of Artificial Sequence: Synthetic oligonucleotide
ucucuccucaguccuuuuc

SEQ ID NO: 3070281 - RNA, 19 nt, Artificial Sequence
  Description of Artificial Sequence: Synthetic oligonucleotide
gagggccagacaagcaagg

SEQ ID NO: 3070282 - RNA, 19 nt, Artificial Sequence
  Description of Artificial Sequence: Synthetic oligonucleotide
aggguccaaaguacuaggg

SEQ ID NO: 3070283 - RNA, 19 nt, Artificial Sequence
  Description of Artificial Sequence: Synthetic oligonucleotide
uaccaggagauacuacguu

SEQ ID NO: 3070284 - RNA, 19 nt, Artificial Sequence
  Description of Artificial Sequence: Synthetic oligonucleotide
uccaaaguacuagggucca

SEQ ID NO: 3070285 - RNA, 19 nt, Artificial Sequence
  Description of Artificial Sequence: Synthetic oligonucleotide
uuucagccuccaagggacc

SEQ ID NO: 3070286 - RNA, 19 nt, Artificial Sequence
  Description of Artificial Sequence: Synthetic oligonucleotide
ucaguccuuuucagagggc

SEQ ID NO: 3070287 - RNA, 19 nt, Artificial Sequence
  Description of Artificial Sequence: Synthetic oligonucleotide
accaggugucagaauaguc

SEQ ID NO: 3070288 - RNA, 19 nt, Artificial Sequence
  Description of Artificial Sequence: Synthetic oligonucleotide
guccauaauguucccugac

SEQ ID NO: 3070289 - RNA, 19 nt, Artificial Sequence
  Description of Artificial Sequence: Synthetic oligonucleotide
uacuacguuuuaguucaca

SEQ ID NO: 3070290 - RNA, 19 nt, Artificial Sequence
  Description of Artificial Sequence: Synthetic oligonucleotide
accugugcuccauuucuga

SEQ ID NO: 3070291 - RNA, 19 nt, Artificial Sequence
  Description of Artificial Sequence: Synthetic oligonucleotide
guaccaggugucagaauag

SEQ ID NO: 3070292 - RNA, 19 nt, Artificial Sequence
  Description of Artificial Sequence: Synthetic oligonucleotide
guccuuuucagagggccag

SEQ ID NO: 3070293 - RNA, 19 nt, Artificial Sequence
  Description of Artificial Sequence: Synthetic oligonucleotide
ggagauacuacguuuuagu

SEQ ID NO: 3070294 - RNA, 19 nt, Artificial Sequence
  Description of Artificial Sequence: Synthetic oligonucleotide
agagggccagacaagcaag

SEQ ID NO: 3070295 - RNA, 19 nt, Artificial Sequence
  Description of Artificial Sequence: Synthetic oligonucleotide
cguuuuaguucacaguuac

SEQ ID NO: 3070296 - RNA, 19 nt, Artificial Sequence
  Description of Artificial Sequence: Synthetic oligonucleotide
gagauacuacguuuuaguu

SEQ ID NO: 3070297 - RNA, 19 nt, Artificial Sequence
  Description of Artificial Sequence: Synthetic oligonucleotide
gagaauggaggcaggagua

SEQ ID NO: 3070298 - RNA, 19 nt, Artificial Sequence
  Description of Artificial Sequence: Synthetic oligonucleotide
ggccagacaagcaagguuc

SEQ ID NO: 3070299 - RNA, 19 nt, Artificial Sequence
  Description of Artificial Sequence: Synthetic oligonucleotide
cucuccucaguccuuuuca

SEQ ID NO: 3070300 - RNA, 19 nt, Artificial Sequence
  Description of Artificial Sequence: Synthetic oligonucleotide
gaguaccaaguaccaggug

SEQ ID NO: 3070301 - RNA, 19 nt, Artificial Sequence
  Description of Artificial Sequence: Synthetic oligonucleotide
guaccaaguaccagguguc

SEQ ID NO: 3070302 - RNA, 19 nt, Artificial Sequence
  Description of Artificial Sequence: Synthetic oligonucleotide
agaacagguaaaagacccu

SEQ ID NO: 3070303 - RNA, 19 nt, Artificial Sequence
  Description of Artificial Sequence: Synthetic oligonucleotide
caagggaccuagaacaggu

SEQ ID NO: 3070304 - RNA, 19 nt, Artificial Sequence
  Description of Artificial Sequence: Synthetic oligonucleotide
uacuaggguccauaauguu

SEQ ID NO: 3070305 - RNA, 19 nt, Artificial Sequence
  Description of Artificial Sequence: Synthetic oligonucleotide
uaccaggugucagaauagu

SEQ ID NO: 3070306 - RNA, 19 nt, Artificial Sequence
  Description of Artificial Sequence: Synthetic oligonucleotide
aaguaccaggugucagaau

SEQ ID NO: 3070307 - RNA, 19 nt, Artificial Sequence
  Description of Artificial Sequence: Synthetic oligonucleotide
auguucccugacaugggag

SEQ ID NO: 3070308 - RNA, 19 nt, Artificial Sequence
  Description of Artificial Sequence: Synthetic oligonucleotide
gacccuugggcuaccagga

SEQ ID NO: 3070309 - RNA, 19 nt, Artificial Sequence
  Description of Artificial Sequence: Synthetic oligonucleotide
uaccaaguaccagguguca

SEQ ID NO: 3070310 - RNA, 19 nt, Artificial Sequence
  Description of Artificial Sequence: Synthetic oligonucleotide
ggagaauggaggcaggagu

SEQ ID NO: 3070311 - RNA, 19 nt, Artificial Sequence
  Description of Artificial Sequence: Synthetic oligonucleotide
cagacaagcaagguucaca

SEQ ID NO: 3070312 - RNA, 19 nt, Artificial Sequence
  Description of Artificial Sequence: Synthetic oligonucleotide
uaggguccauaauguuccc

SEQ ID NO: 3070313 - RNA, 19 nt, Artificial Sequence
  Description of Artificial Sequence: Synthetic oligonucleotide
cuacguuuuaguucacagu

SEQ ID NO: 3070314 - RNA, 19 nt, Artificial Sequence
  Description of Artificial Sequence: Synthetic oligonucleotide
gcuuuaauuccacaccugu

SEQ ID NO: 3070315 - RNA, 19 nt, Artificial Sequence
  Description of Artificial Sequence: Synthetic oligonucleotide
acaugggagaauggaggca

SEQ ID NO: 3070316 - RNA, 19 nt, Artificial Sequence
  Description of Artificial Sequence: Synthetic oligonucleotide
cuuuucagagggccagaca

SEQ ID NO: 3070317 - RNA, 19 nt, Artificial Sequence
  Description of Artificial Sequence: Synthetic oligonucleotide
caccugugcuccauuucug

SEQ ID NO: 3070318 - RNA, 19 nt, Artificial Sequence
  Description of Artificial Sequence: Synthetic oligonucleotide
guuuuaguucacaguuaca

SEQ ID NO: 3070319 - RNA, 19 nt, Artificial Sequence
  Description of Artificial Sequence: Synthetic oligonucleotide
ugcuuuccauugcuuuaau

SEQ ID NO: 3070320 - RNA, 19 nt, Artificial Sequence
  Description of Artificial Sequence: Synthetic oligonucleotide
cagagggccagacaagcaa

SEQ ID NO: 3070321 - RNA, 19 nt, Artificial Sequence
  Description of Artificial Sequence: Synthetic oligonucleotide
guacuucuggugaauucuc

SEQ ID NO: 3070322 - RNA, 19 nt, Artificial Sequence
  Description of Artificial Sequence: Synthetic oligonucleotide
caggaguaccaaguaccag

SEQ ID NO: 3070323 - RNA, 19 nt, Artificial Sequence
  Description of Artificial Sequence: Synthetic oligonucleotide
ccucaguccuuuucagagg

SEQ ID NO: 3070324 - RNA, 19 nt, Artificial Sequence
  Description of Artificial Sequence: Synthetic oligonucleotide
guacuaggguccauaaugu

SEQ ID NO: 3070325 - RNA, 19 nt, Artificial Sequence
  Description of Artificial Sequence: Synthetic oligonucleotide
caaaguacuaggguccaua

SEQ ID NO: 3070326 - RNA, 19 nt, Artificial Sequence
  Description of Artificial Sequence: Synthetic oligonucleotide
aaagacccuugggcuacca

SEQ ID NO: 3070327 - RNA, 19 nt, Artificial Sequence
  Description of Artificial Sequence: Synthetic oligonucleotide
cugaagcaucucuccucag

SEQ ID NO: 3070328 - RNA, 19 nt, Artificial Sequence
  Description of Artificial Sequence: Synthetic oligonucleotide
ccuccaagggaccuagaac

SEQ ID NO: 3070329 - RNA, 19 nt, Artificial Sequence
  Description of Artificial Sequence: Synthetic oligonucleotide
gaacagguaaaagacccuu

SEQ ID NO: 3070330 - RNA, 19 nt, Artificial Sequence
  Description of Artificial Sequence: Synthetic oligonucleotide
cuaccaggagauacuacgu

SEQ ID NO: 3070331 - RNA, 19 nt, Artificial Sequence
  Description of Artificial Sequence: Synthetic oligonucleotide
uccuuuucagagggccaga

SEQ ID NO: 3070332 - RNA, 19 nt, Artificial Sequence
  Description of Artificial Sequence: Synthetic oligonucleotide
gggagaauggaggcaggag

SEQ ID NO: 3070333 - RNA, 19 nt, Artificial Sequence
  Description of Artificial Sequence: Synthetic oligonucleotide
caaguaccaggugucagaa

SEQ ID NO: 3070334 - RNA, 19 nt, Artificial Sequence
  Description of Artificial Sequence: Synthetic oligonucleotide
gguccauaauguucccuga

SEQ ID NO: 3070335 - RNA, 19 nt, Artificial Sequence
  Description of Artificial Sequence: Synthetic oligonucleotide
ggugaauucucagggucca

SEQ ID NO: 3070336 - RNA, 19 nt, Artificial Sequence
  Description of Artificial Sequence: Synthetic oligonucleotide
gacaagcaagguucacacu

SEQ ID NO: 3070337 - RNA, 19 nt, Artificial Sequence
  Description of Artificial Sequence: Synthetic oligonucleotide
ggaccuagaacagguaaaa

SEQ ID NO: 3070338 - RNA, 19 nt, Artificial Sequence
  Description of Artificial Sequence: Synthetic oligonucleotide
auacuacguuuuaguucac

SEQ ID NO: 3070339 - RNA, 19 nt, Artificial Sequence
  Description of Artificial Sequence: Synthetic oligonucleotide
acaugaaaaugaacacaua

SEQ ID NO: 3070340 - RNA, 19 nt, Artificial Sequence
  Description of Artificial Sequence: Synthetic oligonucleotide
cucaggguccaaaguacua

SEQ ID NO: 3070341 - RNA, 19 nt, Artificial Sequence
  Description of Artificial Sequence: Synthetic oligonucleotide
cagccuccaagggaccuag

SEQ ID NO: 3070342 - RNA, 19 nt, Artificial Sequence
  Description of Artificial Sequence: Synthetic oligonucleotide
agggccagacaagcaaggu

SEQ ID NO: 3070343 - RNA, 19 nt, Artificial Sequence
  Description of Artificial Sequence: Synthetic oligonucleotide
ccaaguaccaggugucaga

SEQ ID NO: 3070344 - RNA, 19 nt, Artificial Sequence
  Description of Artificial Sequence: Synthetic oligonucleotide
ccaagggaccuagaacagg

SEQ ID NO: 3070345 - RNA, 19 nt, Artificial Sequence
  Description of Artificial Sequence: Synthetic oligonucleotide
uucccugacaugggagaau

SEQ ID NO: 3070346 - RNA, 19 nt, Artificial Sequence
  Description of Artificial Sequence: Synthetic oligonucleotide
acguuuuaguucacaguua

SEQ ID NO: 3070347 - RNA, 19 nt, Artificial Sequence
  Description of Artificial Sequence: Synthetic oligonucleotide
auuccacaccugugcucca

SEQ ID NO: 3070348 - RNA, 19 nt, Artificial Sequence
  Description of Artificial Sequence: Synthetic oligonucleotide
cugcuuuccauugcuuuaa

SEQ ID NO: 3070349 - RNA, 19 nt, Artificial Sequence
  Description of Artificial Sequence: Synthetic oligonucleotide
ccaaauaaccacacacaua

SEQ ID NO: 3070350 - RNA, 19 nt, Artificial Sequence
  Description of Artificial Sequence: Synthetic oligonucleotide
ccugacaugggagaaugga

SEQ ID NO: 3070351 - RNA, 19 nt, Artificial Sequence
  Description of Artificial Sequence: Synthetic oligonucleotide
ucagccuccaagggaccua

SEQ ID NO: 3070352 - RNA, 19 nt, Artificial Sequence
  Description of Artificial Sequence: Synthetic oligonucleotide
aagggaccuagaacaggua

SEQ ID NO: 3070353 - RNA, 19 nt, Artificial Sequence
  Description of Artificial Sequence: Synthetic oligonucleotide
ggguccaaaguacuagggu

SEQ ID NO: 3070354 - RNA, 19 nt, Artificial Sequence
  Description of Artificial Sequence: Synthetic oligonucleotide
guucccugacaugggagaa

SEQ ID NO: 3070355 - RNA, 19 nt, Artificial Sequence
  Description of Artificial Sequence: Synthetic oligonucleotide
caggagauacuacguuuua

SEQ ID NO: 3070356 - RNA, 19 nt, Artificial Sequence
  Description of Artificial Sequence: Synthetic oligonucleotide
gggaccuagaacagguaaa

SEQ ID NO: 3070357 - RNA, 19 nt, Artificial Sequence
  Description of Artificial Sequence: Synthetic oligonucleotide
cccaaauaaccacacacau

SEQ ID NO: 3070358 - RNA, 19 nt, Artificial Sequence
  Description of Artificial Sequence: Synthetic oligonucleotide
gccuccaagggaccuagaa

SEQ ID NO: 3070359 - RNA, 19 nt, Artificial Sequence
  Description of Artificial Sequence: Synthetic oligonucleotide
caagcaagguucacacuuu

SEQ ID NO: 3070360 - RNA, 19 nt, Artificial Sequence
  Description of Artificial Sequence: Synthetic oligonucleotide
ccuuuucagagggccagac

SEQ ID NO: 3070361 - RNA, 19 nt, Artificial Sequence
  Description of Artificial Sequence: Synthetic oligonucleotide
ccauuucugaagcaucucu

SEQ ID NO: 3070362 - RNA, 19 nt, Artificial Sequence
  Description of Artificial Sequence: Synthetic oligonucleotide
ggaguaccaaguaccaggu

SEQ ID NO: 3070363 - RNA, 19 nt, Artificial Sequence
  Description of Artificial Sequence: Synthetic oligonucleotide
cccugacaugggagaaugg

SEQ ID NO: 3070364 - RNA, 19 nt, Artificial Sequence
  Description of Artificial Sequence: Synthetic oligonucleotide
ccauaauguucccugacau

SEQ ID NO: 3070365 - RNA, 19 nt, Artificial Sequence
  Description of Artificial Sequence: Synthetic oligonucleotide
aucucuccucaguccuuuu

SEQ ID NO: 3070366 - RNA, 19 nt, Artificial Sequence
  Description of Artificial Sequence: Synthetic oligonucleotide
ccauugcuuuaauuccaca

SEQ ID NO: 3070367 - RNA, 19 nt, Artificial Sequence
  Description of Artificial Sequence: Synthetic oligonucleotide
ggcuaccaggagauacuac

SEQ ID NO: 3070368 - RNA, 19 nt, Artificial Sequence
  Description of Artificial Sequence: Synthetic oligonucleotide
cauguacuucuggugaauu

SEQ ID NO: 3070369 - RNA, 19 nt, Artificial Sequence
  Description of Artificial Sequence: Synthetic oligonucleotide
cccuugggcuaccaggaga

SEQ ID NO: 3070370 - RNA, 19 nt, Artificial Sequence
  Description of Artificial Sequence: Synthetic oligonucleotide
gugaauucucaggguccaa

SEQ ID NO: 3070371 - RNA, 19 nt, Artificial Sequence
  Description of Artificial Sequence: Synthetic oligonucleotide
gccagacaagcaagguuca

SEQ ID NO: 3070372 - RNA, 19 nt, Artificial Sequence
  Description of Artificial Sequence: Synthetic oligonucleotide
ccugugcuccauuucugaa

SEQ ID NO: 3070373 - RNA, 19 nt, Artificial Sequence
  Description of Artificial Sequence: Synthetic oligonucleotide
ccagacaagcaagguucac

SEQ ID NO: 3070374 - RNA, 19 nt, Artificial Sequence
  Description of Artificial Sequence: Synthetic oligonucleotide
ccuugggcuaccaggagau

SEQ ID NO: 3070375 - RNA, 19 nt, Artificial Sequence
  Description of Artificial Sequence: Synthetic oligonucleotide
ccaggagauacuacguuuu

SEQ ID NO: 3070376 - RNA, 19 nt, Artificial Sequence
  Description of Artificial Sequence: Synthetic oligonucleotide
gggccagacaagcaagguu

SEQ ID NO: 3070377 - RNA, 19 nt, Artificial Sequence
  Description of Artificial Sequence: Synthetic oligonucleotide
caucucuccucaguccuuu

SEQ ID NO: 3070378 - RNA, 19 nt, Artificial Sequence
  Description of Artificial Sequence: Synthetic oligonucleotide
gggcuaccaggagauacua

SEQ ID NO: 3070379 - RNA, 19 nt, Artificial Sequence
  Description of Artificial Sequence: Synthetic oligonucleotide
cuugggcuaccaggagaua

SEQ ID NO: 3070380 - RNA, 19 nt, Artificial Sequence
  Description of Artificial Sequence: Synthetic oligonucleotide
agccuccaagggaccuaga

SEQ ID NO: 3070381 - RNA, 19 nt, Artificial Sequence
  Description of Artificial Sequence: Synthetic oligonucleotide
ccauguacuucuggugaau

SEQ ID NO: 3070382 - RNA, 19 nt, Artificial Sequence
  Description of Artificial Sequence: Synthetic oligonucleotide
gcaucucuccucaguccuu

SEQ ID NO: 3070383 - RNA, 19 nt, Artificial Sequence
  Description of Artificial Sequence: Synthetic oligonucleotide
ccaaaguacuaggguccau

SEQ ID NO: 3070384 - RNA, 19 nt, Artificial Sequence
  Description of Artificial Sequence: Synthetic oligonucleotide
uuaguuuuauuucuagagg

SEQ ID NO: 3070385 - RNA, 19 nt, Artificial Sequence
  Description of Artificial Sequence: Synthetic oligonucleotide
cuuaguuuuauuucuagag

SEQ ID NO: 3070386 - RNA, 19 nt, Artificial Sequence
  Description of Artificial Sequence: Synthetic oligonucleotide
ucgaacaggaggaagagcc

SEQ ID NO: 3070387 - RNA, 19 nt, Artificial Sequence
  Description of Artificial Sequence: Synthetic oligonucleotide
uacacgaagaugaacaaca

SEQ ID NO: 3070388 - RNA, 19 nt, Artificial Sequence
  Description of Artificial Sequence: Synthetic oligonucleotide
aacaacaccaggucgaaca

SEQ ID NO: 3070389 - RNA, 19 nt, Artificial Sequence
  Description of Artificial Sequence: Synthetic oligonucleotide
gaugaacaacaccaggucg

SEQ ID NO: 3070390 - RNA, 19 nt, Artificial Sequence
  Description of Artificial Sequence: Synthetic oligonucleotide
aagagccagagauccagcc

SEQ ID NO: 3070391 - RNA, 19 nt, Artificial Sequence
  Description of Artificial Sequence: Synthetic oligonucleotide
auuucuagaggucugaaau

SEQ ID NO: 3070392 - RNA, 19 nt, Artificial Sequence
  Description of Artificial Sequence: Synthetic oligonucleotide
uaguuuuauuucuagaggu

SEQ ID NO: 3070393 - RNA, 19 nt, Artificial Sequence
  Description of Artificial Sequence: Synthetic oligonucleotide
aagagguacacgaagauga

SEQ ID NO: 3070394 - RNA, 19 nt, Artificial Sequence
  Description of Artificial Sequence: Synthetic oligonucleotide
gaagaugaacaacaccagg

SEQ ID NO: 3070395 - RNA, 19 nt, Artificial Sequence
  Description of Artificial Sequence: Synthetic oligonucleotide
auccucuucauucaguaag

SEQ ID NO: 3070396 - RNA, 19 nt, Artificial Sequence
  Description of Artificial Sequence: Synthetic oligonucleotide
aguaagucuguauucagga

SEQ ID NO: 3070397 - RNA, 19 nt, Artificial Sequence
  Description of Artificial Sequence: Synthetic oligonucleotide
ucuguauucaggauucacu

SEQ ID NO: 3070398 - RNA, 19 nt, Artificial Sequence
  Description of Artificial Sequence: Synthetic oligonucleotide
auucaguaagucuguauuc

SEQ ID NO: 3070399 - RNA, 19 nt, Artificial Sequence
  Description of Artificial Sequence: Synthetic oligonucleotide
agaugaacaacaccagguc

SEQ ID NO: 3070400 - RNA, 19 nt, Artificial Sequence
  Description of Artificial Sequence: Synthetic oligonucleotide
acauucuugaugucucggc

SEQ ID NO: 3070401 - RNA, 19 nt, Artificial Sequence
  Description of Artificial Sequence: Synthetic oligonucleotide
cagagauccagccaguagg

SEQ ID NO: 3070402 - RNA, 19 nt, Artificial Sequence
  Description of Artificial Sequence: Synthetic oligonucleotide
aagucuguauucaggauuc

SEQ ID NO: 3070403 - RNA, 19 nt, Artificial Sequence
  Description of Artificial Sequence: Synthetic oligonucleotide
acgaagaugaacaacacca

SEQ ID NO: 3070404 - RNA, 19 nt, Artificial Sequence
  Description of Artificial Sequence: Synthetic oligonucleotide
aggaggaagagccagagau

SEQ ID NO: 3070405 - RNA, 19 nt, Artificial Sequence
  Description of Artificial Sequence: Synthetic oligonucleotide
uguuucgggagcccguucg

SEQ ID NO: 3070406 - RNA, 19 nt, Artificial Sequence
  Description of Artificial Sequence: Synthetic oligonucleotide
aagaugaacaacaccaggu

SEQ ID NO: 3070407 - RNA, 19 nt, Artificial Sequence
  Description of Artificial Sequence: Synthetic oligonucleotide
ugaugucucggcaaagcag

SEQ ID NO: 3070408 - RNA, 19 nt, Artificial Sequence
  Description of Artificial Sequence: Synthetic oligonucleotide
aaagcagucagggcaagag

SEQ ID NO: 3070409 - RNA, 19 nt, Artificial Sequence
  Description of Artificial Sequence: Synthetic oligonucleotide
uucuuaguuuuauuucuag

SEQ ID NO: 3070410 - RNA, 19 nt, Artificial Sequence
  Description of Artificial Sequence: Synthetic oligonucleotide
aaauucagcugcuggaaau

SEQ ID NO: 3070411 - RNA, 19 nt, Artificial Sequence
  Description of Artificial Sequence: Synthetic oligonucleotide
uaagucuguauucaggauu

SEQ ID NO: 3070412 - RNA, 19 nt, Artificial Sequence
  Description of Artificial Sequence: Synthetic oligonucleotide
aaauccucuucauucagua

SEQ ID NO: 3070413 - RNA, 19 nt, Artificial Sequence
  Description of Artificial Sequence: Synthetic oligonucleotide
ucuuaguuuuauuucuaga

SEQ ID NO: 3070414 - RNA, 19 nt, Artificial Sequence
  Description of Artificial Sequence: Synthetic oligonucleotide
aguaggaguguuucgggag

SEQ ID NO: 3070415 - RNA, 19 nt, Artificial Sequence
  Description of Artificial Sequence: Synthetic oligonucleotide
uguauucaggauucacucc

SEQ ID NO: 3070416 - RNA, 19 nt, Artificial Sequence
  Description of Artificial Sequence: Synthetic oligonucleotide
gaggaagagccagagaucc

SEQ ID NO: 3070417 - RNA, 19 nt, Artificial Sequence
  Description of Artificial Sequence: Synthetic oligonucleotide
aagcagucagggcaagagg

SEQ ID NO: 3070418 - RNA, 19 nt, Artificial Sequence
  Description of Artificial Sequence: Synthetic oligonucleotide
cuguauucaggauucacuc

SEQ ID NO: 3070419 - RNA, 19 nt, Artificial Sequence
  Description of Artificial Sequence: Synthetic oligonucleotide
ucaguaagucuguauucag

SEQ ID NO: 3070420 - RNA, 19 nt, Artificial Sequence
  Description of Artificial Sequence: Synthetic oligonucleotide
cagaaaagcacauucuuga

SEQ ID NO: 3070421 - RNA, 19 nt, Artificial Sequence
  Description of Artificial Sequence: Synthetic oligonucleotide
uucaguaagucuguauuca

SEQ ID NO: 3070422 - RNA, 19 nt, Artificial Sequence
  Description of Artificial Sequence: Synthetic oligonucleotide
cuagaggucugaaauucag

SEQ ID NO: 3070423 - RNA, 19 nt, Artificial Sequence
  Description of Artificial Sequence: Synthetic oligonucleotide
caguaagucuguauucagg

SEQ ID NO: 3070424 - RNA, 19 nt, Artificial Sequence
  Description of Artificial Sequence: Synthetic oligonucleotide
guauucaggauucacucca

SEQ ID NO: 3070425 - RNA, 19 nt, Artificial Sequence
  Description of Artificial Sequence: Synthetic oligonucleotide
uugaugucucggcaaagca

SEQ ID NO: 3070426 - RNA, 19 nt, Artificial Sequence
  Description of Artificial Sequence: Synthetic oligonucleotide
uuuauuucuagaggucuga

SEQ ID NO: 3070427 - RNA, 19 nt, Artificial Sequence
  Description of Artificial Sequence: Synthetic oligonucleotide
aguuuuauuucuagagguc

SEQ ID NO: 3070428 - RNA, 19 nt, Artificial Sequence
  Description of Artificial Sequence: Synthetic oligonucleotide
aaagcacauucuugauguc

SEQ ID NO: 3070429 - RNA, 19 nt, Artificial Sequence
  Description of Artificial Sequence: Synthetic oligonucleotide
gauccagccaguaggagug

SEQ ID NO: 3070430 - RNA, 19 nt, Artificial Sequence
  Description of Artificial Sequence: Synthetic oligonucleotide
uccagaaaagcacauucuu

SEQ ID NO: 3070431 - RNA, 19 nt, Artificial Sequence
  Description of Artificial Sequence: Synthetic oligonucleotide
ucuagaggucugaaauuca

SEQ ID NO: 3070432 - RNA, 19 nt, Artificial Sequence
  Description of Artificial Sequence: Synthetic oligonucleotide
uucuagaggucugaaauuc

SEQ ID NO: 3070433 - RNA, 19 nt, Artificial Sequence
  Description of Artificial Sequence: Synthetic oligonucleotide
agguacacgaagaugaaca

SEQ ID NO: 3070434 - RNA, 19 nt, Artificial Sequence
  Description of Artificial Sequence: Synthetic oligonucleotide
caccaggucgaacaggagg

SEQ ID NO: 3070435 - RNA, 19 nt, Artificial Sequence
  Description of Artificial Sequence: Synthetic oligonucleotide
aacaccaggucgaacagga

SEQ ID NO: 3070436 - RNA, 19 nt, Artificial Sequence
  Description of Artificial Sequence: Synthetic oligonucleotide
agauccagccaguaggagu

SEQ ID NO: 3070437 - RNA, 19 nt, Artificial Sequence
  Description of Artificial Sequence: Synthetic oligonucleotide
uuucuuaguuuuauuucua

SEQ ID NO: 3070438 - RNA, 19 nt, Artificial Sequence
  Description of Artificial Sequence: Synthetic oligonucleotide
uucaggauucacuccagaa

SEQ ID NO: 3070439 - RNA, 19 nt, Artificial Sequence
  Description of Artificial Sequence: Synthetic oligonucleotide
aagcacauucuugaugucu

SEQ ID NO: 3070440 - RNA, 19 nt, Artificial Sequence
  Description of Artificial Sequence: Synthetic oligonucleotide
uauuucuagaggucugaaa

SEQ ID NO: 3070441 - RNA, 19 nt, Artificial Sequence
  Description of Artificial Sequence: Synthetic oligonucleotide
cucggcaaagcagucaggg

SEQ ID NO: 3070442 - RNA, 19 nt, Artificial Sequence
  Description of Artificial Sequence: Synthetic oligonucleotide
guucgucccgcacugaggc

SEQ ID NO: 3070443 - RNA, 19 nt, Artificial Sequence
  Description of Artificial Sequence: Synthetic oligonucleotide
cacgaagaugaacaacacc

SEQ ID NO: 3070444 - RNA, 19 nt, Artificial Sequence
  Description of Artificial Sequence: Synthetic oligonucleotide
uccucuucauucaguaagu

SEQ ID NO: 3070445 - RNA, 19 nt, Artificial Sequence
  Description of Artificial Sequence: Synthetic oligonucleotide
agcacauucuugaugucuc

SEQ ID NO: 3070446 - RNA, 19 nt, Artificial Sequence
  Description of Artificial Sequence: Synthetic oligonucleotide
acaacaccaggucgaacag

SEQ ID NO: 3070447 - RNA, 19 nt, Artificial Sequence
  Description of Artificial Sequence: Synthetic oligonucleotide
gucucggcaaagcagucag

SEQ ID NO: 3070448 - RNA, 19 nt, Artificial Sequence
  Description of Artificial Sequence: Synthetic oligonucleotide
cuugaugucucggcaaagc

SEQ ID NO: 3070449 - RNA, 19 nt, Artificial Sequence
  Description of Artificial Sequence: Synthetic oligonucleotide
uucuugaugucucggcaaa

SEQ ID NO: 3070450 - RNA, 19 nt, Artificial Sequence
  Description of Artificial Sequence: Synthetic oligonucleotide
ucauucaguaagucuguau

SEQ ID NO: 3070451 - RNA, 19 nt, Artificial Sequence
  Description of Artificial Sequence: Synthetic oligonucleotide
aauccucuucauucaguaa

SEQ ID NO: 3070452 - RNA, 19 nt, Artificial Sequence
  Description of Artificial Sequence: Synthetic oligonucleotide
uuucuagaggucugaaauu

SEQ ID NO: 3070453 - RNA, 19 nt, Artificial Sequence
  Description of Artificial Sequence: Synthetic oligonucleotide
agaaaagcacauucuugau

SEQ ID NO: 3070454 - RNA, 19 nt, Artificial Sequence
  Description of Artificial Sequence: Synthetic oligonucleotide
guaggaguguuucgggagc

SEQ ID NO: 3070455 - RNA, 19 nt, Artificial Sequence
  Description of Artificial Sequence: Synthetic oligonucleotide
cuccucucgguucugcucc

SEQ ID NO: 3070456 - RNA, 19 nt, Artificial Sequence
  Description of Artificial Sequence: Synthetic oligonucleotide
augaacaacaccaggucga

SEQ ID NO: 3070457 - RNA, 19 nt, Artificial Sequence
  Description of Artificial Sequence: Synthetic oligonucleotide
uucgggagcccguucgucc

SEQ ID NO: 3070458 - RNA, 19 nt, Artificial Sequence
  Description of Artificial Sequence: Synthetic oligonucleotide
ucgucccgcacugaggccg

SEQ ID NO: 3070459 - RNA, 19 nt, Artificial Sequence
  Description of Artificial Sequence: Synthetic oligonucleotide
cagggcaagagguacacga

SEQ ID NO: 3070460 - RNA, 19 nt, Artificial Sequence
  Description of Artificial Sequence: Synthetic oligonucleotide
agcagucagggcaagaggu

SEQ ID NO: 3070461 - RNA, 19 nt, Artificial Sequence
  Description of Artificial Sequence: Synthetic oligonucleotide
gacgccgucggucccacug

SEQ ID NO: 3070462 - RNA, 19 nt, Artificial Sequence
  Description of Artificial Sequence: Synthetic oligonucleotide
acacgaagaugaacaacac

SEQ ID NO: 3070463 - RNA, 19 nt, Artificial Sequence
  Description of Artificial Sequence: Synthetic oligonucleotide
caagagguacacgaagaug

SEQ ID NO: 3070464 - RNA, 19 nt, Artificial Sequence
  Description of Artificial Sequence: Synthetic oligonucleotide
cacauucuugaugucucgg

SEQ ID NO: 3070465 - RNA, 19 nt, Artificial Sequence
  Description of Artificial Sequence: Synthetic oligonucleotide
ucucgguucugcucccucc

SEQ ID NO: 3070466 - RNA, 19 nt, Artificial Sequence
  Description of Artificial Sequence: Synthetic oligonucleotide
ggauucacuccagaaaagc

SEQ ID NO: 3070467 - RNA, 19 nt, Artificial Sequence
  Description of Artificial Sequence: Synthetic oligonucleotide
cauucuugaugucucggca

SEQ ID NO: 3070468 - RNA, 19 nt, Artificial Sequence
  Description of Artificial Sequence: Synthetic oligonucleotide
ucucggcaaagcagucagg

SEQ ID NO: 3070469 - RNA, 19 nt, Artificial Sequence
  Description of Artificial Sequence: Synthetic oligonucleotide
uucugcucccucccgccag

SEQ ID NO: 3070470 - RNA, 19 nt, Artificial Sequence
  Description of Artificial Sequence: Synthetic oligonucleotide
ggaagagccagagauccag

SEQ ID NO: 3070471 - RNA, 19 nt, Artificial Sequence
  Description of Artificial Sequence: Synthetic oligonucleotide
ucggcaaagcagucagggc

SEQ ID NO: 3070472 - RNA, 19 nt, Artificial Sequence
  Description of Artificial Sequence: Synthetic oligonucleotide
gaugucucggcaaagcagu

SEQ ID NO: 3070473 - RNA, 19 nt, Artificial Sequence
  Description of Artificial Sequence: Synthetic oligonucleotide
ucuugaugucucggcaaag

SEQ ID NO: 3070474 - RNA, 19 nt, Artificial Sequence
  Description of Artificial Sequence: Synthetic oligonucleotide
uuauuucuagaggucugaa

SEQ ID NO: 3070475 - RNA, 19 nt, Artificial Sequence
  Description of Artificial Sequence: Synthetic oligonucleotide
ucgguucugcucccucccg

SEQ ID NO: 3070476 - RNA, 19 nt, Artificial Sequence
  Description of Artificial Sequence: Synthetic oligonucleotide
accaggucgaacaggagga

SEQ ID NO: 3070477 - RNA, 19 nt, Artificial Sequence
  Description of Artificial Sequence: Synthetic oligonucleotide
gccaguaggaguguuucgg

SEQ ID NO: 3070478 - RNA, 19 nt, Artificial Sequence
  Description of Artificial Sequence: Synthetic oligonucleotide
ucacuccagaaaagcacau

SEQ ID NO: 3070479 - RNA, 19 nt, Artificial Sequence
  Description of Artificial Sequence: Synthetic oligonucleotide
uaggaguguuucgggagcc

SEQ ID NO: 3070480 - RNA, 19 nt, Artificial Sequence
  Description of Artificial Sequence: Synthetic oligonucleotide
cauucaguaagucuguauu

SEQ ID NO: 3070481 - RNA, 19 nt, Artificial Sequence
  Description of Artificial Sequence: Synthetic oligonucleotide
guacacgaagaugaacaac

SEQ ID NO: 3070482 - RNA, 19 nt, Artificial Sequence
  Description of Artificial Sequence: Synthetic oligonucleotide
aggucgaacaggaggaaga

SEQ ID NO: 3070483 - RNA, 19 nt, Artificial Sequence
  Description of Artificial Sequence: Synthetic oligonucleotide
ugaacaacaccaggucgaa

SEQ ID NO: 3070484 - RNA, 19 nt, Artificial Sequence
  Description of Artificial Sequence: Synthetic oligonucleotide
cucgguucugcucccuccc

SEQ ID NO: 3070485 - RNA, 19 nt, Artificial Sequence
  Description of Artificial Sequence: Synthetic oligonucleotide
gagguacacgaagaugaac

SEQ ID NO: 3070486 - RNA, 19 nt, Artificial Sequence
  Description of Artificial Sequence: Synthetic oligonucleotide
ugucucggcaaagcaguca

SEQ ID NO: 3070487 - RNA, 19 nt, Artificial Sequence
  Description of Artificial Sequence: Synthetic oligonucleotide
aggauucacuccagaaaag

SEQ ID NO: 3070488 - RNA, 19 nt, Artificial Sequence
  Description of Artificial Sequence: Synthetic oligonucleotide
aggaguguuucgggagccc

SEQ ID NO: 3070489 - RNA, 19 nt, Artificial Sequence
  Description of Artificial Sequence: Synthetic oligonucleotide
agagauccagccaguagga

SEQ ID NO: 3070490 - RNA, 19 nt, Artificial Sequence
  Description of Artificial Sequence: Synthetic oligonucleotide
ucagggcaagagguacacg

SEQ ID NO: 3070491 - RNA, 19 nt, Artificial Sequence
  Description of Artificial Sequence: Synthetic oligonucleotide
cucuucauucaguaagucu

SEQ ID NO: 3070492 - RNA, 19 nt, Artificial Sequence
  Description of Artificial Sequence: Synthetic oligonucleotide
gucuguauucaggauucac

SEQ ID NO: 3070493 - RNA, 19 nt, Artificial Sequence
  Description of Artificial Sequence: Synthetic oligonucleotide
cagucagggcaagagguac

SEQ ID NO: 3070494 - RNA, 19 nt, Artificial Sequence
  Description of Artificial Sequence: Synthetic oligonucleotide
ucugcucccucccgccagc

SEQ ID NO: 3070495 - RNA, 19 nt, Artificial Sequence
  Description of Artificial Sequence: Synthetic oligonucleotide
ugcuggaaauccucuucau

SEQ ID NO: 3070496 - RNA, 19 nt, Artificial Sequence
  Description of Artificial Sequence: Synthetic oligonucleotide
caacaccaggucgaacagg

SEQ ID NO: 3070497 - RNA, 19 nt, Artificial Sequence
  Description of Artificial Sequence: Synthetic oligonucleotide
gagauccagccaguaggag

SEQ ID NO: 3070498 - RNA, 19 nt, Artificial Sequence
  Description of Artificial Sequence: Synthetic oligonucleotide
gcacauucuugaugucucg

SEQ ID NO: 3070499 - RNA, 19 nt, Artificial Sequence
  Description of Artificial Sequence: Synthetic oligonucleotide
ccaguaggaguguuucggg

SEQ ID NO: 3070500 - RNA, 19 nt, Artificial Sequence
  Description of Artificial Sequence: Synthetic oligonucleotide
acggccuccccgcucgcgg

SEQ ID NO: 3070501 - RNA, 19 nt, Artificial Sequence
  Description of Artificial Sequence: Synthetic oligonucleotide
ggaguguuucgggagcccg

SEQ ID NO: 3070502 - RNA, 19 nt, Artificial Sequence
  Description of Artificial Sequence: Synthetic oligonucleotide
ucgcggacgccgucggucc

SEQ ID NO: 3070503 - RNA, 19 nt, Artificial Sequence
  Description of Artificial Sequence: Synthetic oligonucleotide
caguaggaguguuucggga

SEQ ID NO: 3070504 - RNA, 19 nt, Artificial Sequence
  Description of Artificial Sequence: Synthetic oligonucleotide
acgccgucggucccacugg

SEQ ID NO: 3070505 - RNA, 19 nt, Artificial Sequence
  Description of Artificial Sequence: Synthetic oligonucleotide
caggucgaacaggaggaag

SEQ ID NO: 3070506 - RNA, 19 nt, Artificial Sequence
  Description of Artificial Sequence: Synthetic oligonucleotide
cgaagaugaacaacaccag

SEQ ID NO: 3070507 - RNA, 19 nt, Artificial Sequence
  Description of Artificial Sequence: Synthetic oligonucleotide
uucauucaguaagucugua

SEQ ID NO: 3070508 - RNA, 19 nt, Artificial Sequence
  Description of Artificial Sequence: Synthetic oligonucleotide
ucccgccagcuccggacgg

SEQ ID NO: 3070509 - RNA, 19 nt, Artificial Sequence
  Description of Artificial Sequence: Synthetic oligonucleotide
ggucgaacaggaggaagag

SEQ ID NO: 3070510 - RNA, 19 nt, Artificial Sequence
  Description of Artificial Sequence: Synthetic oligonucleotide
gguacacgaagaugaacaa

SEQ ID NO: 3070511 - RNA, 19 nt, Artificial Sequence
  Description of Artificial Sequence: Synthetic oligonucleotide
gucgaacaggaggaagagc

SEQ ID NO: 3070512 - RNA, 19 nt, Artificial Sequence
  Description of Artificial Sequence: Synthetic oligonucleotide
cagccaguaggaguguuuc

SEQ ID NO: 3070513 - RNA, 19 nt, Artificial Sequence
  Description of Artificial Sequence: Synthetic oligonucleotide
gaaauccucuucauucagu

SEQ ID NO: 3070514 - RNA, 19 nt, Artificial Sequence
  Description of Artificial Sequence: Synthetic oligonucleotide
cuucauucaguaagucugu

SEQ ID NO: 3070515 - RNA, 19 nt, Artificial Sequence
  Description of Artificial Sequence: Synthetic oligonucleotide
gucagggcaagagguacac

SEQ ID NO: 3070516 - RNA, 19 nt, Artificial Sequence
  Description of Artificial Sequence: Synthetic oligonucleotide
gguucugcucccucccgcc

SEQ ID NO: 3070517 - RNA, 19 nt, Artificial Sequence
  Description of Artificial Sequence: Synthetic oligonucleotide
cuccggacggccuccccgc

SEQ ID NO: 3070518 - RNA, 19 nt, Artificial Sequence
  Description of Artificial Sequence: Synthetic oligonucleotide
gucugaaauucagcugcug

SEQ ID NO: 3070519 - RNA, 19 nt, Artificial Sequence
  Description of Artificial Sequence: Synthetic oligonucleotide
uucgucccgcacugaggcc

SEQ ID NO: 3070520 - RNA, 19 nt, Artificial Sequence
  Description of Artificial Sequence: Synthetic oligonucleotide
cucccgccagcuccggacg

SEQ ID NO: 3070521 - RNA, 19 nt, Artificial Sequence
  Description of Artificial Sequence: Synthetic oligonucleotide
ccagagauccagccaguag

SEQ ID NO: 3070522 - RNA, 19 nt, Artificial Sequence
  Description of Artificial Sequence: Synthetic oligonucleotide
gaacaacaccaggucgaac

SEQ ID NO: 3070523 - RNA, 19 nt, Artificial Sequence
  Description of Artificial Sequence: Synthetic oligonucleotide
guaagucuguauucaggau

SEQ ID NO: 3070524 - RNA, 19 nt, Artificial Sequence
  Description of Artificial Sequence: Synthetic oligonucleotide
augucucggcaaagcaguc

SEQ ID NO: 3070525 - RNA, 19 nt, Artificial Sequence
  Description of Artificial Sequence: Synthetic oligonucleotide
uccccgcucgcggacgccg

SEQ ID NO: 3070526 - RNA, 19 nt, Artificial Sequence
  Description of Artificial Sequence: Synthetic oligonucleotide
agcuccggacggccucccc

SEQ ID NO: 3070527 - RNA, 19 nt, Artificial Sequence
  Description of Artificial Sequence: Synthetic oligonucleotide
cucccucccgccagcuccg

SEQ ID NO: 3070528 - RNA, 19 nt, Artificial Sequence
  Description of Artificial Sequence: Synthetic oligonucleotide
uuucgggagcccguucguc

SEQ ID NO: 3070529 - RNA, 19 nt, Artificial Sequence
  Description of Artificial Sequence: Synthetic oligonucleotide
ccgucggucccacuggccg

SEQ ID NO: 3070530 - RNA, 19 nt, Artificial Sequence
  Description of Artificial Sequence: Synthetic oligonucleotide
gcuccggacggccuccccg

SEQ ID NO: 3070531 - RNA, 19 nt, Artificial Sequence
  Description of Artificial Sequence: Synthetic oligonucleotide
agagguacacgaagaugaa

SEQ ID NO: 3070532 - RNA, 19 nt, Artificial Sequence
  Description of Artificial Sequence: Synthetic oligonucleotide
aguguuucgggagcccguu

SEQ ID NO: 3070533 - RNA, 19 nt, Artificial Sequence
  Description of Artificial Sequence: Synthetic oligonucleotide
agucuguauucaggauuca

SEQ ID NO: 3070534 - RNA, 19 nt, Artificial Sequence
  Description of Artificial Sequence: Synthetic oligonucleotide
cucgcggacgccgucgguc

SEQ ID NO: 3070535 - RNA, 19 nt, Artificial Sequence
  Description of Artificial Sequence: Synthetic oligonucleotide
ggucccacuggccgccggg

SEQ ID NO: 3070536 - RNA, 19 nt, Artificial Sequence
  Description of Artificial Sequence: Synthetic oligonucleotide
ggaggaagagccagagauc

SEQ ID NO: 3070537 - RNA, 19 nt, Artificial Sequence
  Description of Artificial Sequence: Synthetic oligonucleotide
ugaggccgcuccucucggu

SEQ ID NO: 3070538 - RNA, 19 nt, Artificial Sequence
  Description of Artificial Sequence: Synthetic oligonucleotide
cggcaaagcagucagggca

SEQ ID NO: 3070539 - RNA, 19 nt, Artificial Sequence
  Description of Artificial Sequence: Synthetic oligonucleotide
agggcaagagguacacgaa

SEQ ID NO: 3070540 - RNA, 19 nt, Artificial Sequence
  Description of Artificial Sequence: Synthetic oligonucleotide
acuggccgccggguucgcc

SEQ ID NO: 3070541 - RNA, 19 nt, Artificial Sequence
  Description of Artificial Sequence: Synthetic oligonucleotide
guucugcucccucccgcca

SEQ ID NO: 3070542 - RNA, 19 nt, Artificial Sequence
  Description of Artificial Sequence: Synthetic oligonucleotide
gagcccguucgucccgcac

SEQ ID NO: 3070543 - RNA, 19 nt, Artificial Sequence
  Description of Artificial Sequence: Synthetic oligonucleotide
gacggccuccccgcucgcg

SEQ ID NO: 3070544 - RNA, 19 nt, Artificial Sequence
  Description of Artificial Sequence: Synthetic oligonucleotide
gucggucccacuggccgcc

SEQ ID NO: 3070545 - RNA, 19 nt, Artificial Sequence
  Description of Artificial Sequence: Synthetic oligonucleotide
acaccaggucgaacaggag

SEQ ID NO: 3070546 - RNA, 19 nt, Artificial Sequence
  Description of Artificial Sequence: Synthetic oligonucleotide
cacugaggccgcuccucuc

SEQ ID NO: 3070547 - RNA, 19 nt, Artificial Sequence
  Description of Artificial Sequence: Synthetic oligonucleotide
cguucgucccgcacugagg

SEQ ID NO: 3070548 - RNA, 19 nt, Artificial Sequence
  Description of Artificial Sequence: Synthetic oligonucleotide
caaagcagucagggcaaga

SEQ ID NO: 3070549 - RNA, 19 nt, Artificial Sequence
  Description of Artificial Sequence: Synthetic oligonucleotide
ggcaaagcagucagggcaa

SEQ ID NO: 3070550 - RNA, 19 nt, Artificial Sequence
  Description of Artificial Sequence: Synthetic oligonucleotide
guguuucgggagcccguuc

SEQ ID NO: 3070551 - RNA, 19 nt, Artificial Sequence
  Description of Artificial Sequence: Synthetic oligonucleotide
gcaagagguacacgaagau

SEQ ID NO: 3070552 - RNA, 19 nt, Artificial Sequence
  Description of Artificial Sequence: Synthetic oligonucleotide
gccggguucgccuccaucu

SEQ ID NO: 3070553 - RNA, 19 nt, Artificial Sequence
  Description of Artificial Sequence: Synthetic oligonucleotide
uccagccaguaggaguguu

SEQ ID NO: 3070554 - RNA, 19 nt, Artificial Sequence
  Description of Artificial Sequence: Synthetic oligonucleotide
ugcucccucccgccagcuc

SEQ ID NO: 3070555 - RNA, 19 nt, Artificial Sequence
  Description of Artificial Sequence: Synthetic oligonucleotide
ccucccgccagcuccggac

SEQ ID NO: 3070556 - RNA, 19 nt, Artificial Sequence
  Description of Artificial Sequence: Synthetic oligonucleotide
uccggacggccuccccgcu

SEQ ID NO: 3070557 - RNA, 19 nt, Artificial Sequence
  Description of Artificial Sequence: Synthetic oligonucleotide
ccguucgucccgcacugag

SEQ ID NO: 3070558 - RNA, 19 nt, Artificial Sequence
  Description of Artificial Sequence: Synthetic oligonucleotide
ucccacuggccgccggguu

SEQ ID NO: 3070559 - RNA, 19 nt, Artificial Sequence
  Description of Artificial Sequence: Synthetic oligonucleotide
guuucgggagcccguucgu

SEQ ID NO: 3070560 - RNA, 19 nt, Artificial Sequence
  Description of Artificial Sequence: Synthetic oligonucleotide
cccgcacugaggccgcucc

SEQ ID NO: 3070561 - RNA, 19 nt, Artificial Sequence
  Description of Artificial Sequence: Synthetic oligonucleotide
gcccguucgucccgcacug

SEQ ID NO: 3070562 - RNA, 19 nt, Artificial Sequence
  Description of Artificial Sequence: Synthetic oligonucleotide
gcaaagcagucagggcaag

SEQ ID NO: 3070563 - RNA, 19 nt, Artificial Sequence
  Description of Artificial Sequence: Synthetic oligonucleotide
gaguguuucgggagcccgu

SEQ ID NO: 3070564 - RNA, 19 nt, Artificial Sequence
  Description of Artificial Sequence: Synthetic oligonucleotide
agccagagauccagccagu

SEQ ID NO: 3070565 - RNA, 19 nt, Artificial Sequence
  Description of Artificial Sequence: Synthetic oligonucleotide
ccucuucauucaguaaguc

SEQ ID NO: 3070566 - RNA, 19 nt, Artificial Sequence
  Description of Artificial Sequence: Synthetic oligonucleotide
ucggucccacuggccgccg

SEQ ID NO: 3070567 - RNA, 19 nt, Artificial Sequence
  Description of Artificial Sequence: Synthetic oligonucleotide
uggccgccggguucgccuc

SEQ ID NO: 3070568 - RNA, 19 nt, Artificial Sequence
  Description of Artificial Sequence: Synthetic oligonucleotide
cagcugcuggaaauccucu

SEQ ID NO: 3070569 - RNA, 19 nt, Artificial Sequence
  Description of Artificial Sequence: Synthetic oligonucleotide
auccagccaguaggagugu

SEQ ID NO: 3070570 - RNA, 19 nt, Artificial Sequence
  Description of Artificial Sequence: Synthetic oligonucleotide
ccacuggccgccggguucg

SEQ ID NO: 3070571 - RNA, 19 nt, Artificial Sequence
  Description of Artificial Sequence: Synthetic oligonucleotide
cggacggccuccccgcucg

SEQ ID NO: 3070572 - RNA, 19 nt, Artificial Sequence
  Description of Artificial Sequence: Synthetic oligonucleotide
gaggccgcuccucucgguu

SEQ ID NO: 3070573 - RNA, 19 nt, Artificial Sequence
  Description of Artificial Sequence: Synthetic oligonucleotide
ucccucccgccagcuccgg

SEQ ID NO: 3070574 - RNA, 19 nt, Artificial Sequence
  Description of Artificial Sequence: Synthetic oligonucleotide
cuggccgccggguucgccu

SEQ ID NO: 3070575 - RNA, 19 nt, Artificial Sequence
  Description of Artificial Sequence: Synthetic oligonucleotide
cggguucgccuccaucucc

SEQ ID NO: 3070576 - RNA, 19 nt, Artificial Sequence
  Description of Artificial Sequence: Synthetic oligonucleotide
gccagcuccggacggccuc

SEQ ID NO: 3070577 - RNA, 19 nt, Artificial Sequence
  Description of Artificial Sequence: Synthetic oligonucleotide
ucccgcacugaggccgcuc

SEQ ID NO: 3070578 - RNA, 19 nt, Artificial Sequence
  Description of Artificial Sequence: Synthetic oligonucleotide
cgguucugcucccucccgc

SEQ ID NO: 3070579 - RNA, 19 nt, Artificial Sequence
  Description of Artificial Sequence: Synthetic oligonucleotide
cgucggucccacuggccgc

SEQ ID NO: 3070580 - RNA, 19 nt, Artificial Sequence
  Description of Artificial Sequence: Synthetic oligonucleotide
ggucugaaauucagcugcu

SEQ ID NO: 3070581 - RNA, 19 nt, Artificial Sequence
  Description of Artificial Sequence: Synthetic oligonucleotide
gcagucagggcaagaggua

SEQ ID NO: 3070582 - RNA, 19 nt, Artificial Sequence
  Description of Artificial Sequence: Synthetic oligonucleotide
ccggguucgccuccaucuc

SEQ ID NO: 3070583 - RNA, 19 nt, Artificial Sequence
  Description of Artificial Sequence: Synthetic oligonucleotide
gcacugaggccgcuccucu

SEQ ID NO: 3070584 - RNA, 19 nt, Artificial Sequence
  Description of Artificial Sequence: Synthetic oligonucleotide
cacuccagaaaagcacauu

SEQ ID NO: 3070585 - RNA, 19 nt, Artificial Sequence
  Description of Artificial Sequence: Synthetic oligonucleotide
cuccccgcucgcggacgcc

SEQ ID NO: 3070586 - RNA, 19 nt, Artificial Sequence
  Description of Artificial Sequence: Synthetic oligonucleotide
gccuccccgcucgcggacg

SEQ ID NO: 3070587 - RNA, 19 nt, Artificial Sequence
  Description of Artificial Sequence: Synthetic oligonucleotide
ccuccccgcucgcggacgc

SEQ ID NO: 3070588 - RNA, 19 nt, Artificial Sequence
  Description of Artificial Sequence: Synthetic oligonucleotide
gccgucggucccacuggcc

SEQ ID NO: 3070589 - RNA, 19 nt, Artificial Sequence
  Description of Artificial Sequence: Synthetic oligonucleotide
ccgcucgcggacgccgucg

SEQ ID NO: 3070590 - RNA, 19 nt, Artificial Sequence
  Description of Artificial Sequence: Synthetic oligonucleotide
ggccuccccgcucgcggac

SEQ ID NO: 3070591 - RNA, 19 nt, Artificial Sequence
  Description of Artificial Sequence: Synthetic oligonucleotide
ggccgcuccucucgguucu

SEQ ID NO: 3070592 - RNA, 19 nt, Artificial Sequence
  Description of Artificial Sequence: Synthetic oligonucleotide
cgucccgcacugaggccgc

SEQ ID NO: 3070593 - RNA, 19 nt, Artificial Sequence
  Description of Artificial Sequence: Synthetic oligonucleotide
ccgccagcuccggacggcc

SEQ ID NO: 3070594 - RNA, 19 nt, Artificial Sequence
  Description of Artificial Sequence: Synthetic oligonucleotide
cgcucgcggacgccgucgg

SEQ ID NO: 3070595 - RNA, 19 nt, Artificial Sequence
  Description of Artificial Sequence: Synthetic oligonucleotide
ggagcccguucgucccgca

SEQ ID NO: 3070596 - RNA, 19 nt, Artificial Sequence
  Description of Artificial Sequence: Synthetic oligonucleotide
ggccgccggguucgccucc

SEQ ID NO: 3070597 - RNA, 19 nt, Artificial Sequence
  Description of Artificial Sequence: Synthetic oligonucleotide
cgcacugaggccgcuccuc

SEQ ID NO: 3070598 - RNA, 19 nt, Artificial Sequence
  Description of Artificial Sequence: Synthetic oligonucleotide
cgggagcccguucgucccg

SEQ ID NO: 3070599 - RNA, 19 nt, Artificial Sequence
  Description of Artificial Sequence: Synthetic oligonucleotide
cgccgucggucccacuggc

SEQ ID NO: 3070600 - RNA, 19 nt, Artificial Sequence
  Description of Artificial Sequence: Synthetic oligonucleotide
cccgccagcuccggacggc

SEQ ID NO: 3070601 - RNA, 19 nt, Artificial Sequence
  Description of Artificial Sequence: Synthetic oligonucleotide
cacuggccgccggguucgc

SEQ ID NO: 3070602 - RNA, 19 nt, Artificial Sequence
  Description of Artificial Sequence: Synthetic oligonucleotide
gucccacuggccgccgggu

SEQ ID NO: 3070603 - RNA, 19 nt, Artificial Sequence
  Description of Artificial Sequence: Synthetic oligonucleotide
ggacggccuccccgcucgc

SEQ ID NO: 3070604 - RNA, 19 nt, Artificial Sequence
  Description of Artificial Sequence: Synthetic oligonucleotide
ccgcuccucucgguucugc

SEQ ID NO: 3070605 - RNA, 19 nt, Artificial Sequence
  Description of Artificial Sequence: Synthetic oligonucleotide
ccagccaguaggaguguuu

SEQ ID NO: 3070606 - RNA, 19 nt, Artificial Sequence
  Description of Artificial Sequence: Synthetic oligonucleotide
ccaggucgaacaggaggaa

SEQ ID NO: 3070607 - RNA, 19 nt, Artificial Sequence
  Description of Artificial Sequence: Synthetic oligonucleotide
ccggacggccuccccgcuc

SEQ ID NO: 3070608 - RNA, 19 nt, Artificial Sequence
  Description of Artificial Sequence: Synthetic oligonucleotide
gcggacgccgucgguccca

SEQ ID NO: 3070609 - RNA, 19 nt, Artificial Sequence
  Description of Artificial Sequence: Synthetic oligonucleotide
cggucccacuggccgccgg

SEQ ID NO: 3070610 - RNA, 19 nt, Artificial Sequence
  Description of Artificial Sequence: Synthetic oligonucleotide
cgcggacgccgucgguccc

SEQ ID NO: 3070611 - RNA, 19 nt, Artificial Sequence
  Description of Artificial Sequence: Synthetic oligonucleotide
cccgcucgcggacgccguc

SEQ ID NO: 3070612 - RNA, 19 nt, Artificial Sequence
  Description of Artificial Sequence: Synthetic oligonucleotide
cgccggguucgccuccauc

SEQ ID NO: 3070613 - RNA, 19 nt, Artificial Sequence
  Description of Artificial Sequence: Synthetic oligonucleotide
cugcucccucccgccagcu

SEQ ID NO: 3070614 - RNA, 19 nt, Artificial Sequence
  Description of Artificial Sequence: Synthetic oligonucleotide
gccgccggguucgccucca

SEQ ID NO: 3070615 - RNA, 19 nt, Artificial Sequence
  Description of Artificial Sequence: Synthetic oligonucleotide
cgcuccucucgguucugcu

SEQ ID NO: 3070616 - RNA, 19 nt, Artificial Sequence
  Description of Artificial Sequence: Synthetic oligonucleotide
cccucccgccagcuccgga

SEQ ID NO: 3070617 - RNA, 19 nt, Artificial Sequence
  Description of Artificial Sequence: Synthetic oligonucleotide
cggacgccgucggucccac

SEQ ID NO: 3070618 - RNA, 19 nt, Artificial Sequence
  Description of Artificial Sequence: Synthetic oligonucleotide
cccguucgucccgcacuga

SEQ ID NO: 3070619 - RNA, 19 nt, Artificial Sequence
  Description of Artificial Sequence: Synthetic oligonucleotide
cggccuccccgcucgcgga

SEQ ID NO: 3070620 - RNA, 19 nt, Artificial Sequence
  Description of Artificial Sequence: Synthetic oligonucleotide
gucccgcacugaggccgcu

SEQ ID NO: 3070621 - RNA, 19 nt, Artificial Sequence
  Description of Artificial Sequence: Synthetic oligonucleotide
ccgcacugaggccgcuccu

SEQ ID NO: 3070622 - RNA, 19 nt, Artificial Sequence
  Description of Artificial Sequence: Synthetic oligonucleotide
ggacgccgucggucccacu

SEQ ID NO: 3070623 - RNA, 19 nt, Artificial Sequence
  Description of Artificial Sequence: Synthetic oligonucleotide
cgccagcuccggacggccu

SEQ ID NO: 3070624 - RNA, 19 nt, Artificial Sequence
  Description of Artificial Sequence: Synthetic oligonucleotide
ccgccggguucgccuccau

SEQ ID NO: 3070625 - RNA, 19 nt, Artificial Sequence
  Description of Artificial Sequence: Synthetic oligonucleotide
aaugaagcuuuauucaucc

SEQ ID NO: 3070626 - RNA, 19 nt, Artificial Sequence
  Description of Artificial Sequence: Synthetic oligonucleotide
aacuguagcguuuagcgcc

SEQ ID NO: 3070627 - RNA, 19 nt, Artificial Sequence
  Description of Artificial Sequence: Synthetic oligonucleotide
guaacuguagcguuuagcg

SEQ ID NO: 3070628 - RNA, 19 nt, Artificial Sequence
  Description of Artificial Sequence: Synthetic oligonucleotide
acacaaugaagcuuuauuc

SEQ ID NO: 3070629 - RNA, 19 nt, Artificial Sequence
  Description of Artificial Sequence: Synthetic oligonucleotide
uauggugucaccuucugcc

SEQ ID NO: 3070630 - RNA, 19 nt, Artificial Sequence
  Description of Artificial Sequence: Synthetic oligonucleotide
gcuuuauucauccucagcg

SEQ ID NO: 3070631 - RNA, 19 nt, Artificial Sequence
  Description of Artificial Sequence: Synthetic oligonucleotide
uuuauucauccucagcggc

SEQ ID NO: 3070632 - RNA, 19 nt, Artificial Sequence
  Description of Artificial Sequence: Synthetic oligonucleotide
aggacaggcaagcucaugg

SEQ ID NO: 3070633 - RNA, 19 nt, Artificial Sequence
  Description of Artificial Sequence: Synthetic oligonucleotide
ugaagcuuuauucauccuc

SEQ ID NO: 3070634 - RNA, 19 nt, Artificial Sequence
  Description of Artificial Sequence: Synthetic oligonucleotide
uccgcuucagcucaucuag

SEQ ID NO: 3070635 - RNA, 19 nt, Artificial Sequence
  Description of Artificial Sequence: Synthetic oligonucleotide
cuuuauucauccucagcgg

SEQ ID NO: 3070636 - RNA, 19 nt, Artificial Sequence
  Description of Artificial Sequence: Synthetic oligonucleotide
uuucacacaaugaagcuuu

SEQ ID NO: 3070637 - RNA, 19 nt, Artificial Sequence
  Description of Artificial Sequence: Synthetic oligonucleotide
uuuuagguaacuguagcgu

SEQ ID NO: 3070638 - RNA, 19 nt, Artificial Sequence
  Description of Artificial Sequence: Synthetic oligonucleotide
agcuuuauucauccucagc

SEQ ID NO: 3070639 - RNA, 19 nt, Artificial Sequence
  Description of Artificial Sequence: Synthetic oligonucleotide
uaucggccgagcuugauca

SEQ ID NO: 3070640 - RNA, 19 nt, Artificial Sequence
  Description of Artificial Sequence: Synthetic oligonucleotide
agcggagagaccugaaccg

SEQ ID NO: 3070641 - RNA, 19 nt, Artificial Sequence
  Description of Artificial Sequence: Synthetic oligonucleotide
aucacuugaguaugguguc

SEQ ID NO: 3070642 - RNA, 19 nt, Artificial Sequence
  Description of Artificial Sequence: Synthetic oligonucleotide
ugaguaucggccgagcuug

SEQ ID NO: 3070643 - RNA, 19 nt, Artificial Sequence
  Description of Artificial Sequence: Synthetic oligonucleotide
cuaaggacaggcaagcuca

SEQ ID NO: 3070644 - RNA, 19 nt, Artificial Sequence
  Description of Artificial Sequence: Synthetic oligonucleotide
uugaucagcggagagaccu

SEQ ID NO: 3070645 - RNA, 19 nt, Artificial Sequence
  Description of Artificial Sequence: Synthetic oligonucleotide
auccucagcggcuaaggac

SEQ ID NO: 3070646 - RNA, 19 nt, Artificial Sequence
  Description of Artificial Sequence: Synthetic oligonucleotide
uuauucauccucagcggcu

SEQ ID NO: 3070647 - RNA, 19 nt, Artificial Sequence
  Description of Artificial Sequence: Synthetic oligonucleotide
agcguuuagcgccguaggc

SEQ ID NO: 3070648 - RNA, 19 nt, Artificial Sequence
  Description of Artificial Sequence: Synthetic oligonucleotide
cacaaugaagcuuuauuca

SEQ ID NO: 3070649 - RNA, 19 nt, Artificial Sequence
  Description of Artificial Sequence: Synthetic oligonucleotide
gaagcuuuauucauccuca

SEQ ID NO: 3070650 - RNA, 19 nt, Artificial Sequence
  Description of Artificial Sequence: Synthetic oligonucleotide
agucucuucuuuuccuccg

SEQ ID NO: 3070651 - RNA, 19 nt, Artificial Sequence
  Description of Artificial Sequence: Synthetic oligonucleotide
uaacuguagcguuuagcgc

SEQ ID NO: 3070652 - RNA, 19 nt, Artificial Sequence
  Description of Artificial Sequence: Synthetic oligonucleotide
uagcguuuagcgccguagg

SEQ ID NO: 3070653 - RNA, 19 nt, Artificial Sequence
  Description of Artificial Sequence: Synthetic oligonucleotide
acuugaguauggugucacc

SEQ ID NO: 3070654 - RNA, 19 nt, Artificial Sequence
  Description of Artificial Sequence: Synthetic oligonucleotide
ugaguauggugucaccuuc

SEQ ID NO: 3070655 - RNA, 19 nt, Artificial Sequence
  Description of Artificial Sequence: Synthetic oligonucleotide
uuuagguaacuguagcguu

SEQ ID NO: 3070656 - RNA, 19 nt, Artificial Sequence
  Description of Artificial Sequence: Synthetic oligonucleotide
agcgccguaggccaugccg

SEQ ID NO: 3070657 - RNA, 19 nt, Artificial Sequence
  Description of Artificial Sequence: Synthetic oligonucleotide
aagcuuuauucauccucag

SEQ ID NO: 3070658 - RNA, 19 nt, Artificial Sequence
  Description of Artificial Sequence: Synthetic oligonucleotide
uccgcugccacccuccucu

SEQ ID NO: 3070659 - RNA, 19 nt, Artificial Sequence
  Description of Artificial Sequence: Synthetic oligonucleotide
uuuuccuccgcugccaccc

SEQ ID NO: 3070660 - RNA, 19 nt, Artificial Sequence
  Description of Artificial Sequence: Synthetic oligonucleotide
gguuuuagguaacuguagc

SEQ ID NO: 3070661 - RNA, 19 nt, Artificial Sequence
  Description of Artificial Sequence: Synthetic oligonucleotide
accagggcugaguaucggc

SEQ ID NO: 3070662 - RNA, 19 nt, Artificial Sequence
  Description of Artificial Sequence: Synthetic oligonucleotide
caaugaagcuuuauucauc

SEQ ID NO: 3070663 - RNA, 19 nt, Artificial Sequence
  Description of Artificial Sequence: Synthetic oligonucleotide
aggaccagggcugaguauc

SEQ ID NO: 3070664 - RNA, 19 nt, Artificial Sequence
  Description of Artificial Sequence: Synthetic oligonucleotide
gacaggcaagcucaugggc

SEQ ID NO: 3070665 - RNA, 19 nt, Artificial Sequence
  Description of Artificial Sequence: Synthetic oligonucleotide
uuagguaacuguagcguuu

SEQ ID NO: 3070666 - RNA, 19 nt, Artificial Sequence
  Description of Artificial Sequence: Synthetic oligonucleotide
uaggccaugccgaggacca

SEQ ID NO: 3070667 - RNA, 19 nt, Artificial Sequence
  Description of Artificial Sequence: Synthetic oligonucleotide
cagcggagagaccugaacc

SEQ ID NO: 3070668 - RNA, 19 nt, Artificial Sequence
  Description of Artificial Sequence: Synthetic oligonucleotide
ucugccaguucucucucga

SEQ ID NO: 3070669 - RNA, 19 nt, Artificial Sequence
  Description of Artificial Sequence: Synthetic oligonucleotide
uccucuccucuucugcccg

SEQ ID NO: 3070670 - RNA, 19 nt, Artificial Sequence
  Description of Artificial Sequence: Synthetic oligonucleotide
caucacuugaguauggugu

SEQ ID NO: 3070671 - RNA, 19 nt, Artificial Sequence
  Description of Artificial Sequence: Synthetic oligonucleotide
ucucucucgauccgcuuca

SEQ ID NO: 3070672 - RNA, 19 nt, Artificial Sequence
  Description of Artificial Sequence: Synthetic oligonucleotide
uuuucacacaaugaagcuu

SEQ ID NO: 3070673 - RNA, 19 nt, Artificial Sequence
  Description of Artificial Sequence: Synthetic oligonucleotide
aguauggugucaccuucug

SEQ ID NO: 3070674 - RNA, 19 nt, Artificial Sequence
  Description of Artificial Sequence: Synthetic oligonucleotide
ugggcucugcaucacuuga

SEQ ID NO: 3070675 - RNA, 19 nt, Artificial Sequence
  Description of Artificial Sequence: Synthetic oligonucleotide
uucucucucgauccgcuuc

SEQ ID NO: 3070676 - RNA, 19 nt, Artificial Sequence
  Description of Artificial Sequence: Synthetic oligonucleotide
ucagcggagagaccugaac

SEQ ID NO: 3070677 - RNA, 19 nt, Artificial Sequence
  Description of Artificial Sequence: Synthetic oligonucleotide
aagcucaugggcucugcau

SEQ ID NO: 3070678 - RNA, 19 nt, Artificial Sequence
  Description of Artificial Sequence: Synthetic oligonucleotide
uggugucaccuucugccag

SEQ ID NO: 3070679 - RNA, 19 nt, Artificial Sequence
  Description of Artificial Sequence: Synthetic oligonucleotide
ucugcccgggguuuuaggu

SEQ ID NO: 3070680 - RNA, 19 nt, Artificial Sequence
  Description of Artificial Sequence: Synthetic oligonucleotide
caucuagucucuucuuuuc

SEQ ID NO: 3070681 - RNA, 19 nt, Artificial Sequence
  Description of Artificial Sequence: Synthetic oligonucleotide
ugccaguucucucucgauc

SEQ ID NO: 3070682 - RNA, 19 nt, Artificial Sequence
  Description of Artificial Sequence: Synthetic oligonucleotide
uugaguauggugucaccuu

SEQ ID NO: 3070683 - RNA, 19 nt, Artificial Sequence
  Description of Artificial Sequence: Synthetic oligonucleotide
guagcguuuagcgccguag

SEQ ID NO: 3070684 - RNA, 19 nt, Artificial Sequence
  Description of Artificial Sequence: Synthetic oligonucleotide
ucucgauccgcuucagcuc

SEQ ID NO: 3070685 - RNA, 19 nt, Artificial Sequence
  Description of Artificial Sequence: Synthetic oligonucleotide
gccaguucucucucgaucc

SEQ ID NO: 3070686 - RNA, 19 nt, Artificial Sequence
  Description of Artificial Sequence: Synthetic oligonucleotide
cagggcugaguaucggccg

SEQ ID NO: 3070687 - RNA, 19 nt, Artificial Sequence
  Description of Artificial Sequence: Synthetic oligonucleotide
ugaucagcggagagaccug

SEQ ID NO: 3070688 - RNA, 19 nt, Artificial Sequence
  Description of Artificial Sequence: Synthetic oligonucleotide
gagcuugaucagcggagag

SEQ ID NO: 3070689 - RNA, 19 nt, Artificial Sequence
  Description of Artificial Sequence: Synthetic oligonucleotide
guauggugucaccuucugc

SEQ ID NO: 3070690 - RNA, 19 nt, Artificial Sequence
  Description of Artificial Sequence: Synthetic oligonucleotide
agcggcuaaggacaggcaa

SEQ ID NO: 3070691 - RNA, 19 nt, Artificial Sequence
  Description of Artificial Sequence: Synthetic oligonucleotide
uucugccaguucucucucg

SEQ ID NO: 3070692 - RNA, 19 nt, Artificial Sequence
  Description of Artificial Sequence: Synthetic oligonucleotide
acaggcaagcucaugggcu

SEQ ID NO: 3070693 - RNA, 19 nt, Artificial Sequence
  Description of Artificial Sequence: Synthetic oligonucleotide
cugcaucacuugaguaugg

SEQ ID NO: 3070694 - RNA, 19 nt, Artificial Sequence
  Description of Artificial Sequence: Synthetic oligonucleotide
uucugcccgggguuuuagg

SEQ ID NO: 3070695 - RNA, 19 nt, Artificial Sequence
  Description of Artificial Sequence: Synthetic oligonucleotide
gguaacuguagcguuuagc

SEQ ID NO: 3070696 - RNA, 19 nt, Artificial Sequence
  Description of Artificial Sequence: Synthetic oligonucleotide
acuguagcguuuagcgccg

SEQ ID NO: 3070697 - RNA, 19 nt, Artificial Sequence
  Description of Artificial Sequence: Synthetic oligonucleotide
ugcccgggguuuuagguaa

SEQ ID NO: 3070698 - RNA, 19 nt, Artificial Sequence
  Description of Artificial Sequence: Synthetic oligonucleotide
accuucugccaguucucuc

SEQ ID NO: 3070699 - RNA, 19 nt, Artificial Sequence
  Description of Artificial Sequence: Synthetic oligonucleotide
ggacaggcaagcucauggg

SEQ ID NO: 3070700 - RNA, 19 nt, Artificial Sequence
  Description of Artificial Sequence: Synthetic oligonucleotide
uauucauccucagcggcua

SEQ ID NO: 3070701 - RNA, 19 nt, Artificial Sequence
  Description of Artificial Sequence: Synthetic oligonucleotide
gcuugaucagcggagagac

SEQ ID NO: 3070702 - RNA, 19 nt, Artificial Sequence
  Description of Artificial Sequence: Synthetic oligonucleotide
ucucucgauccgcuucagc

SEQ ID NO: 3070703 - RNA, 19 nt, Artificial Sequence
  Description of Artificial Sequence: Synthetic oligonucleotide
auggugucaccuucugcca

SEQ ID NO: 3070704 - RNA, 19 nt, Artificial Sequence
  Description of Artificial Sequence: Synthetic oligonucleotide
ucuccucuucugcccgggg

SEQ ID NO: 3070705 - RNA, 19 nt, Artificial Sequence
  Description of Artificial Sequence: Synthetic oligonucleotide
uucauccucagcggcuaag

SEQ ID NO: 3070706 - RNA, 19 nt, Artificial Sequence
  Description of Artificial Sequence: Synthetic oligonucleotide
ucaugggcucugcaucacu

SEQ ID NO: 3070707 - RNA, 19 nt, Artificial Sequence
  Description of Artificial Sequence: Synthetic oligonucleotide
gcuaaggacaggcaagcuc

SEQ ID NO: 3070708 - RNA, 19 nt, Artificial Sequence
  Description of Artificial Sequence: Synthetic oligonucleotide
cuugaucagcggagagacc

SEQ ID NO: 3070709 - RNA, 19 nt, Artificial Sequence
  Description of Artificial Sequence: Synthetic oligonucleotide
augggcucugcaucacuug

SEQ ID NO: 3070710 - RNA, 19 nt, Artificial Sequence
  Description of Artificial Sequence: Synthetic oligonucleotide
cucucgauccgcuucagcu

SEQ ID NO: 3070711 - RNA, 19 nt, Artificial Sequence
  Description of Artificial Sequence: Synthetic oligonucleotide
ucacuugaguaugguguca

SEQ ID NO: 3070712 - RNA, 19 nt, Artificial Sequence
  Description of Artificial Sequence: Synthetic oligonucleotide
gguaccaucuuguccguga

SEQ ID NO: 3070713 - RNA, 19 nt, Artificial Sequence
  Description of Artificial Sequence: Synthetic oligonucleotide
augaagcuuuauucauccu

SEQ ID NO: 3070714 - RNA, 19 nt, Artificial Sequence
  Description of Artificial Sequence: Synthetic oligonucleotide
ugcaucacuugaguauggu

SEQ ID NO: 3070715 - RNA, 19 nt, Artificial Sequence
  Description of Artificial Sequence: Synthetic oligonucleotide
cacuugaguauggugucac

SEQ ID NO: 3070716 - RNA, 19 nt, Artificial Sequence
  Description of Artificial Sequence: Synthetic oligonucleotide
uuuagcgccguaggccaug

SEQ ID NO: 3070717 - RNA, 19 nt, Artificial Sequence
  Description of Artificial Sequence: Synthetic oligonucleotide
agcuugaucagcggagaga

SEQ ID NO: 3070718 - RNA, 19 nt, Artificial Sequence
  Description of Artificial Sequence: Synthetic oligonucleotide
cuuuuccuccgcugccacc

SEQ ID NO: 3070719 - RNA, 19 nt, Artificial Sequence
  Description of Artificial Sequence: Synthetic oligonucleotide
uagguaacuguagcguuua

SEQ ID NO: 3070720 - RNA, 19 nt, Artificial Sequence
  Description of Artificial Sequence: Synthetic oligonucleotide
caggcaagcucaugggcuc

SEQ ID NO: 3070721 - RNA, 19 nt, Artificial Sequence
  Description of Artificial Sequence: Synthetic oligonucleotide
guaggccaugccgaggacc

SEQ ID NO: 3070722 - RNA, 19 nt, Artificial Sequence
  Description of Artificial Sequence: Synthetic oligonucleotide
ggguuuuagguaacuguag

SEQ ID NO: 3070723 - RNA, 19 nt, Artificial Sequence
  Description of Artificial Sequence: Synthetic oligonucleotide
gcaucacuugaguauggug

SEQ ID NO: 3070724 - RNA, 19 nt, Artificial Sequence
  Description of Artificial Sequence: Synthetic oligonucleotide
cucgauccgcuucagcuca

SEQ ID NO: 3070725 - RNA, 19 nt, Artificial Sequence
  Description of Artificial Sequence: Synthetic oligonucleotide
agguaacuguagcguuuag

SEQ ID NO: 3070726 - RNA, 19 nt, Artificial Sequence
  Description of Artificial Sequence: Synthetic oligonucleotide
uaaggacaggcaagcucau

SEQ ID NO: 3070727 - RNA, 19 nt, Artificial Sequence
  Description of Artificial Sequence: Synthetic oligonucleotide
ggagagaccugaaccgggg

SEQ ID NO: 3070728 - RNA, 19 nt, Artificial Sequence
  Description of Artificial Sequence: Synthetic oligonucleotide
caugccgaggaccagggcu

SEQ ID NO: 3070729 - RNA, 19 nt, Artificial Sequence
  Description of Artificial Sequence: Synthetic oligonucleotide
ccagggcugaguaucggcc

SEQ ID NO: 3070730 - RNA, 19 nt, Artificial Sequence
  Description of Artificial Sequence: Synthetic oligonucleotide
cucugcaucacuugaguau

SEQ ID NO: 3070731 - RNA, 19 nt, Artificial Sequence
  Description of Artificial Sequence: Synthetic oligonucleotide
ucacacaaugaagcuuuau

SEQ ID NO: 3070732 - RNA, 19 nt, Artificial Sequence
  Description of Artificial Sequence: Synthetic oligonucleotide
uucacacaaugaagcuuua

SEQ ID NO: 3070733 - RNA, 19 nt, Artificial Sequence
  Description of Artificial Sequence: Synthetic oligonucleotide
ucggccgagcuugaucagc

SEQ ID NO: 3070734 - RNA, 19 nt, Artificial Sequence
  Description of Artificial Sequence: Synthetic oligonucleotide
agggcugaguaucggccga

SEQ ID NO: 3070735 - RNA, 19 nt, Artificial Sequence
  Description of Artificial Sequence: Synthetic oligonucleotide
aguucucucucgauccgcu

SEQ ID NO: 3070736 - RNA, 19 nt, Artificial Sequence
  Description of Artificial Sequence: Synthetic oligonucleotide
cacacaaugaagcuuuauu

SEQ ID NO: 3070737 - RNA, 19 nt, Artificial Sequence
  Description of Artificial Sequence: Synthetic oligonucleotide
cuugaguauggugucaccu

SEQ ID NO: 3070738 - RNA, 19 nt, Artificial Sequence
  Description of Artificial Sequence: Synthetic oligonucleotide
auccgcuucagcucaucua

SEQ ID NO: 3070739 - RNA, 19 nt, Artificial Sequence
  Description of Artificial Sequence: Synthetic oligonucleotide
gaucagcggagagaccuga

SEQ ID NO: 3070740 - RNA, 19 nt, Artificial Sequence
  Description of Artificial Sequence: Synthetic oligonucleotide
uuagcgccguaggccaugc

SEQ ID NO: 3070741 - RNA, 19 nt, Artificial Sequence
  Description of Artificial Sequence: Synthetic oligonucleotide
caguucucucucgauccgc

SEQ ID NO: 3070742 - RNA, 19 nt, Artificial Sequence
  Description of Artificial Sequence: Synthetic oligonucleotide
augccgaggaccagggcug

SEQ ID NO: 3070743 - RNA, 19 nt, Artificial Sequence
  Description of Artificial Sequence: Synthetic oligonucleotide
ccgagcuugaucagcggag

SEQ ID NO: 3070744 - RNA, 19 nt, Artificial Sequence
  Description of Artificial Sequence: Synthetic oligonucleotide
gcguuuagcgccguaggcc

SEQ ID NO: 3070745 - RNA, 19 nt, Artificial Sequence
  Description of Artificial Sequence: Synthetic oligonucleotide
gaccagggcugaguaucgg

SEQ ID NO: 3070746 - RNA, 19 nt, Artificial Sequence
  Description of Artificial Sequence: Synthetic oligonucleotide
uguagcguuuagcgccgua

SEQ ID NO: 3070747 - RNA, 19 nt, Artificial Sequence
  Description of Artificial Sequence: Synthetic oligonucleotide
aucggccgagcuugaucag

SEQ ID NO: 3070748 - RNA, 19 nt, Artificial Sequence
  Description of Artificial Sequence: Synthetic oligonucleotide
gauccgcuucagcucaucu

SEQ ID NO: 3070749 - RNA, 19 nt, Artificial Sequence
  Description of Artificial Sequence: Synthetic oligonucleotide
ccuccucuccucuucugcc

SEQ ID NO: 3070750 - RNA, 19 nt, Artificial Sequence
  Description of Artificial Sequence: Synthetic oligonucleotide
gcggcuaaggacaggcaag

SEQ ID NO: 3070751 - RNA, 19 nt, Artificial Sequence
  Description of Artificial Sequence: Synthetic oligonucleotide
gggguuuuagguaacugua

SEQ ID NO: 3070752 - RNA, 19 nt, Artificial Sequence
  Description of Artificial Sequence: Synthetic oligonucleotide
uuuccuccgcugccacccu

SEQ ID NO: 3070753 - RNA, 19 nt, Artificial Sequence
  Description of Artificial Sequence: Synthetic oligonucleotide
cauccucagcggcuaagga

SEQ ID NO: 3070754 - RNA, 19 nt, Artificial Sequence
  Description of Artificial Sequence: Synthetic oligonucleotide
gcggagagaccugaaccgg

SEQ ID NO: 3070755 - RNA, 19 nt, Artificial Sequence
  Description of Artificial Sequence: Synthetic oligonucleotide
gcucaugggcucugcauca

SEQ ID NO: 3070756 - RNA, 19 nt, Artificial Sequence
  Description of Artificial Sequence: Synthetic oligonucleotide
ccaguucucucucgauccg

SEQ ID NO: 3070757 - RNA, 19 nt, Artificial Sequence
  Description of Artificial Sequence: Synthetic oligonucleotide
ggaccagggcugaguaucg

SEQ ID NO: 3070758 - RNA, 19 nt, Artificial Sequence
  Description of Artificial Sequence: Synthetic oligonucleotide
caagcucaugggcucugca

SEQ ID NO: 3070759 - RNA, 19 nt, Artificial Sequence
  Description of Artificial Sequence: Synthetic oligonucleotide
cuucugcccgggguuuuag

SEQ ID NO: 3070760 - RNA, 19 nt, Artificial Sequence
  Description of Artificial Sequence: Synthetic oligonucleotide
gaguauggugucaccuucu

SEQ ID NO: 3070761 - RNA, 19 nt, Artificial Sequence
  Description of Artificial Sequence: Synthetic oligonucleotide
acccuccucuccucuucug

SEQ ID NO: 3070762 - RNA, 19 nt, Artificial Sequence
  Description of Artificial Sequence: Synthetic oligonucleotide
cucaugggcucugcaucac

SEQ ID NO: 3070763 - RNA, 19 nt, Artificial Sequence
  Description of Artificial Sequence: Synthetic oligonucleotide
gcuucagcucaucuagucu

SEQ ID NO: 3070764 - RNA, 19 nt, Artificial Sequence
  Description of Artificial Sequence: Synthetic oligonucleotide
cggagagaccugaaccggg

SEQ ID NO: 3070765 - RNA, 19 nt, Artificial Sequence
  Description of Artificial Sequence: Synthetic oligonucleotide
gccgagcuugaucagcgga

SEQ ID NO: 3070766 - RNA, 19 nt, Artificial Sequence
  Description of Artificial Sequence: Synthetic oligonucleotide
gccaugccgaggaccaggg

SEQ ID NO: 3070767 - RNA, 19 nt, Artificial Sequence
  Description of Artificial Sequence: Synthetic oligonucleotide
cguuuagcgccguaggcca

SEQ ID NO: 3070768 - RNA, 19 nt, Artificial Sequence
  Description of Artificial Sequence: Synthetic oligonucleotide
cccuccucuccucuucugc

SEQ ID NO: 3070769 - RNA, 19 nt, Artificial Sequence
  Description of Artificial Sequence: Synthetic oligonucleotide
ucuucugcccgggguuuua

SEQ ID NO: 3070770 - RNA, 19 nt, Artificial Sequence
  Description of Artificial Sequence: Synthetic oligonucleotide
gggcucugcaucacuugag

SEQ ID NO: 3070771 - RNA, 19 nt, Artificial Sequence
  Description of Artificial Sequence: Synthetic oligonucleotide
ggccgagcuugaucagcgg

SEQ ID NO: 3070772 - RNA, 19 nt, Artificial Sequence
  Description of Artificial Sequence: Synthetic oligonucleotide
cugaguaucggccgagcuu

SEQ ID NO: 3070773 - RNA, 19 nt, Artificial Sequence
  Description of Artificial Sequence: Synthetic oligonucleotide
aguaucggccgagcuugau

SEQ ID NO: 3070774 - RNA, 19 nt, Artificial Sequence
  Description of Artificial Sequence: Synthetic oligonucleotide
uagcgccguaggccaugcc

SEQ ID NO: 3070775 - RNA, 19 nt, Artificial Sequence
  Description of Artificial Sequence: Synthetic oligonucleotide
ucgauccgcuucagcucau

SEQ ID NO: 3070776 - RNA, 19 nt, Artificial Sequence
  Description of Artificial Sequence: Synthetic oligonucleotide
ccuucugccaguucucucu

SEQ ID NO: 3070777 - RNA, 19 nt, Artificial Sequence
  Description of Artificial Sequence: Synthetic oligonucleotide
aggcaagcucaugggcucu

SEQ ID NO: 3070778 - RNA, 19 nt, Artificial Sequence
  Description of Artificial Sequence: Synthetic oligonucleotide
cucucucgauccgcuucag

SEQ ID NO: 3070779 - RNA, 19 nt, Artificial Sequence
  Description of Artificial Sequence: Synthetic oligonucleotide
ggcucugcaucacuugagu

SEQ ID NO: 3070780 - RNA, 19 nt, Artificial Sequence
  Description of Artificial Sequence: Synthetic oligonucleotide
cugcccgggguuuuaggua

SEQ ID NO: 3070781 - RNA, 19 nt, Artificial Sequence
  Description of Artificial Sequence: Synthetic oligonucleotide
caugggcucugcaucacuu

SEQ ID NO: 3070782 - RNA, 19 nt, Artificial Sequence
  Description of Artificial Sequence: Synthetic oligonucleotide
cgcuucagcucaucuaguc

SEQ ID NO: 3070783 - RNA, 19 nt, Artificial Sequence
  Description of Artificial Sequence: Synthetic oligonucleotide
gcucugcaucacuugagua

SEQ ID NO: 3070784 - RNA, 19 nt, Artificial Sequence
  Description of Artificial Sequence: Synthetic oligonucleotide
ugccgaggaccagggcuga

SEQ ID NO: 3070785 - RNA, 19 nt, Artificial Sequence
  Description of Artificial Sequence: Synthetic oligonucleotide
ccguaggccaugccgagga

SEQ ID NO: 3070786 - RNA, 19 nt, Artificial Sequence
  Description of Artificial Sequence: Synthetic oligonucleotide
gaggaccagggcugaguau

SEQ ID NO: 3070787 - RNA, 19 nt, Artificial Sequence
  Description of Artificial Sequence: Synthetic oligonucleotide
gcugaguaucggccgagcu

SEQ ID NO: 3070788 - RNA, 19 nt, Artificial Sequence
  Description of Artificial Sequence: Synthetic oligonucleotide
cggcuaaggacaggcaagc

SEQ ID NO: 3070789 - RNA, 19 nt, Artificial Sequence
  Description of Artificial Sequence: Synthetic oligonucleotide
aucagcggagagaccugaa

SEQ ID NO: 3070790 - RNA, 19 nt, Artificial Sequence
  Description of Artificial Sequence: Synthetic oligonucleotide
cagcggcuaaggacaggca

SEQ ID NO: 3070791 - RNA, 19 nt, Artificial Sequence
  Description of Artificial Sequence: Synthetic oligonucleotide
ccucuccucuucugcccgg

SEQ ID NO: 3070792 - RNA, 19 nt, Artificial Sequence
  Description of Artificial Sequence: Synthetic oligonucleotide
ggcugaguaucggccgagc

SEQ ID NO: 3070793 - RNA, 19 nt, Artificial Sequence
  Description of Artificial Sequence: Synthetic oligonucleotide
gcaagcucaugggcucugc

SEQ ID NO: 3070794 - RNA, 19 nt, Artificial Sequence
  Description of Artificial Sequence: Synthetic oligonucleotide
gccguaggccaugccgagg

SEQ ID NO: 3070795 - RNA, 19 nt, Artificial Sequence
  Description of Artificial Sequence: Synthetic oligonucleotide
gggcugaguaucggccgag

SEQ ID NO: 3070796 - RNA, 19 nt, Artificial Sequence
  Description of Artificial Sequence: Synthetic oligonucleotide
aggccaugccgaggaccag

SEQ ID NO: 3070797 - RNA, 19 nt, Artificial Sequence
  Description of Artificial Sequence: Synthetic oligonucleotide
ccgggguuuuagguaacug

SEQ ID NO: 3070798 - RNA, 19 nt, Artificial Sequence
  Description of Artificial Sequence: Synthetic oligonucleotide
cuccgcugccacccuccuc

SEQ ID NO: 3070799 - RNA, 19 nt, Artificial Sequence
  Description of Artificial Sequence: Synthetic oligonucleotide
cgggguuuuagguaacugu

SEQ ID NO: 3070800 - RNA, 19 nt, Artificial Sequence
  Description of Artificial Sequence: Synthetic oligonucleotide
ccacccuccucuccucuuc

SEQ ID NO: 3070801 - RNA, 19 nt, Artificial Sequence
  Description of Artificial Sequence: Synthetic oligonucleotide
gcgccguaggccaugccga

SEQ ID NO: 3070802 - RNA, 19 nt, Artificial Sequence
  Description of Artificial Sequence: Synthetic oligonucleotide
guucucucucgauccgcuu

SEQ ID NO: 3070803 - RNA, 19 nt, Artificial Sequence
  Description of Artificial Sequence: Synthetic oligonucleotide
ggguaccaucuuguccgug

SEQ ID NO: 3070804 - RNA, 19 nt, Artificial Sequence
  Description of Artificial Sequence: Synthetic oligonucleotide
ccaugccgaggaccagggc

SEQ ID NO: 3070805 - RNA, 19 nt, Artificial Sequence
  Description of Artificial Sequence: Synthetic oligonucleotide
cugccaguucucucucgau

SEQ ID NO: 3070806 - RNA, 19 nt, Artificial Sequence
  Description of Artificial Sequence: Synthetic oligonucleotide
gcucaucuagucucuucuu

SEQ ID NO: 3070807 - RNA, 19 nt, Artificial Sequence
  Description of Artificial Sequence: Synthetic oligonucleotide
cacccuccucuccucuucu

SEQ ID NO: 3070808 - RNA, 19 nt, Artificial Sequence
  Description of Artificial Sequence: Synthetic oligonucleotide
cgccguaggccaugccgag

SEQ ID NO: 3070809 - RNA, 19 nt, Artificial Sequence
  Description of Artificial Sequence: Synthetic oligonucleotide
cgagcuugaucagcggaga

SEQ ID NO: 3070810 - RNA, 19 nt, Artificial Sequence
  Description of Artificial Sequence: Synthetic oligonucleotide
ggcuaaggacaggcaagcu

SEQ ID NO: 3070811 - RNA, 19 nt, Artificial Sequence
  Description of Artificial Sequence: Synthetic oligonucleotide
guuuagcgccguaggccau

SEQ ID NO: 3070812 - RNA, 19 nt, Artificial Sequence
  Description of Artificial Sequence: Synthetic oligonucleotide
cgaggaccagggcugagua

SEQ ID NO: 3070813 - RNA, 19 nt, Artificial Sequence
  Description of Artificial Sequence: Synthetic oligonucleotide
gggguaccaucuuguccgu

SEQ ID NO: 3070814 - RNA, 19 nt, Artificial Sequence
  Description of Artificial Sequence: Synthetic oligonucleotide
cguaggccaugccgaggac

SEQ ID NO: 3070815 - RNA, 19 nt, Artificial Sequence
  Description of Artificial Sequence: Synthetic oligonucleotide
gccgaggaccagggcugag

SEQ ID NO: 3070816 - RNA, 19 nt, Artificial Sequence
  Description of Artificial Sequence: Synthetic oligonucleotide
gcccgggguuuuagguaac

SEQ ID NO: 3070817 - RNA, 19 nt, Artificial Sequence
  Description of Artificial Sequence: Synthetic oligonucleotide
cucuucugcccgggguuuu

SEQ ID NO: 3070818 - RNA, 19 nt, Artificial Sequence
  Description of Artificial Sequence: Synthetic oligonucleotide
cgauccgcuucagcucauc

SEQ ID NO: 3070819 - RNA, 19 nt, Artificial Sequence
  Description of Artificial Sequence: Synthetic oligonucleotide
ccgcuucagcucaucuagu

SEQ ID NO: 3070820 - RNA, 19 nt, Artificial Sequence
  Description of Artificial Sequence: Synthetic oligonucleotide
cuguagcguuuagcgccgu

SEQ ID NO: 3070821 - RNA, 19 nt, Artificial Sequence
  Description of Artificial Sequence: Synthetic oligonucleotide
ccgaggaccagggcugagu

SEQ ID NO: 3070822 - RNA, 19 nt, Artificial Sequence
  Description of Artificial Sequence: Synthetic oligonucleotide
ccgcugccacccuccucuc

SEQ ID NO: 3070823 - RNA, 19 nt, Artificial Sequence
  Description of Artificial Sequence: Synthetic oligonucleotide
gccacccuccucuccucuu

SEQ ID NO: 3070824 - RNA, 19 nt, Artificial Sequence
  Description of Artificial Sequence: Synthetic oligonucleotide
cccgggguuuuagguaacu

SEQ ID NO: 3070825 - RNA, 19 nt, Artificial Sequence
  Description of Artificial Sequence: Synthetic oligonucleotide
ccucuucugcccgggguuu

SEQ ID NO: 3070826 - RNA, 19 nt, Artificial Sequence
  Description of Artificial Sequence: Synthetic oligonucleotide
ccuccgcugccacccuccu

SEQ ID NO: 3070827 - RNA, 19 nt, Artificial Sequence
  Description of Artificial Sequence: Synthetic oligonucleotide
aaagaucugauggauuucc

SEQ ID NO: 3070828 - RNA, 19 nt, Artificial Sequence
  Description of Artificial Sequence: Synthetic oligonucleotide
ugcuaauuucuuaucaagg

SEQ ID NO: 3070829 - RNA, 19 nt, Artificial Sequence
  Description of Artificial Sequence: Synthetic oligonucleotide
aaauggagggcucgguucc

SEQ ID NO: 3070830 - RNA, 19 nt, Artificial Sequence
  Description of Artificial Sequence: Synthetic oligonucleotide
ucaagguccucaaagaucu

SEQ ID NO: 3070831 - RNA, 19 nt, Artificial Sequence
  Description of Artificial Sequence: Synthetic oligonucleotide
aacaguaacacuuccucca

SEQ ID NO: 3070832 - RNA, 19 nt, Artificial Sequence
  Description of Artificial Sequence: Synthetic oligonucleotide
agaaccuagagcucacugc

SEQ ID NO: 3070833 - RNA, 19 nt, Artificial Sequence
  Description of Artificial Sequence: Synthetic oligonucleotide
ucugugaacaguaacacuu

SEQ ID NO: 3070834 - RNA, 19 nt, Artificial Sequence
  Description of Artificial Sequence: Synthetic oligonucleotide
guccucaaagaucugaugg

SEQ ID NO: 3070835 - RNA, 19 nt, Artificial Sequence
  Description of Artificial Sequence: Synthetic oligonucleotide
gaucugauggauuuccuug

SEQ ID NO: 3070836 - RNA, 19 nt, Artificial Sequence
  Description of Artificial Sequence: Synthetic oligonucleotide
ugaacaguaacacuuccuc

SEQ ID NO: 3070837 - RNA, 19 nt, Artificial Sequence
  Description of Artificial Sequence: Synthetic oligonucleotide
uccgggaugaagaaccuag

SEQ ID NO: 3070838 - RNA, 19 nt, Artificial Sequence
  Description of Artificial Sequence: Synthetic oligonucleotide
uuucuuaucaagguccuca

SEQ ID NO: 3070839 - RNA, 19 nt, Artificial Sequence
  Description of Artificial Sequence: Synthetic oligonucleotide
uuaucaagguccucaaaga

SEQ ID NO: 3070840 - RNA, 19 nt, Artificial Sequence
  Description of Artificial Sequence: Synthetic oligonucleotide
ugcucugugaacaguaaca

SEQ ID NO: 3070841 - RNA, 19 nt, Artificial Sequence
  Description of Artificial Sequence: Synthetic oligonucleotide
cuugucuccucccagggcg

SEQ ID NO: 3070842 - RNA, 19 nt, Artificial Sequence
  Description of Artificial Sequence: Synthetic oligonucleotide
cagagugucucugaaaugg

SEQ ID NO: 3070843 - RNA, 19 nt, Artificial Sequence
  Description of Artificial Sequence: Synthetic oligonucleotide
gugucucugaaauggaggg

SEQ ID NO: 3070844 - RNA, 19 nt, Artificial Sequence
  Description of Artificial Sequence: Synthetic oligonucleotide
aguaacacuuccuccacug

SEQ ID NO: 3070845 - RNA, 19 nt, Artificial Sequence
  Description of Artificial Sequence: Synthetic oligonucleotide
aagaaccuagagcucacug

SEQ ID NO: 3070846 - RNA, 19 nt, Artificial Sequence
  Description of Artificial Sequence: Synthetic oligonucleotide
caccguaucccuuagcacc

SEQ ID NO: 3070847 - RNA, 19 nt, Artificial Sequence
  Description of Artificial Sequence: Synthetic oligonucleotide
cuaauuucuuaucaagguc

SEQ ID NO: 3070848 - RNA, 19 nt, Artificial Sequence
  Description of Artificial Sequence: Synthetic oligonucleotide
aacacuuccuccacugugg

SEQ ID NO: 3070849 - RNA, 19 nt, Artificial Sequence
  Description of Artificial Sequence: Synthetic oligonucleotide
cugcuaauuucuuaucaag

SEQ ID NO: 3070850 - RNA, 19 nt, Artificial Sequence
  Description of Artificial Sequence: Synthetic oligonucleotide
uagaucgcggcacacaauc

SEQ ID NO: 3070851 - RNA, 19 nt, Artificial Sequence
  Description of Artificial Sequence: Synthetic oligonucleotide
gauggauuuccuugucucc

SEQ ID NO: 3070852 - RNA, 19 nt, Artificial Sequence
  Description of Artificial Sequence: Synthetic oligonucleotide
acaguaacacuuccuccac

SEQ ID NO: 3070853 - RNA, 19 nt, Artificial Sequence
  Description of Artificial Sequence: Synthetic oligonucleotide
acuuccuccacuguggcag

SEQ ID NO: 3070854 - RNA, 19 nt, Artificial Sequence
  Description of Artificial Sequence: Synthetic oligonucleotide
ucuagaucgcggcacacaa

SEQ ID NO: 3070855 - RNA, 19 nt, Artificial Sequence
  Description of Artificial Sequence: Synthetic oligonucleotide
acacuuugcuccuuggucu

SEQ ID NO: 3070856 - RNA, 19 nt, Artificial Sequence
  Description of Artificial Sequence: Synthetic oligonucleotide
ggaugaagaaccuagagcu

SEQ ID NO: 3070857 - RNA, 19 nt, Artificial Sequence
  Description of Artificial Sequence: Synthetic oligonucleotide
ugauggauuuccuugucuc

SEQ ID NO: 3070858 - RNA, 19 nt, Artificial Sequence
  Description of Artificial Sequence: Synthetic oligonucleotide
uaucaagguccucaaagau

SEQ ID NO: 3070859 - RNA, 19 nt, Artificial Sequence
  Description of Artificial Sequence: Synthetic oligonucleotide
agugucucugaaauggagg

SEQ ID NO: 3070860 - RNA, 19 nt, Artificial Sequence
  Description of Artificial Sequence: Synthetic oligonucleotide
aagggcuaccaccauuuca

SEQ ID NO: 3070861 - RNA, 19 nt, Artificial Sequence
  Description of Artificial Sequence: Synthetic oligonucleotide
gaaauggagggcucgguuc

SEQ ID NO: 3070862 - RNA, 19 nt, Artificial Sequence
  Description of Artificial Sequence: Synthetic oligonucleotide
ugugcagggcgucaagggc

SEQ ID NO: 3070863 - RNA, 19 nt, Artificial Sequence
  Description of Artificial Sequence: Synthetic oligonucleotide
cuuagcaccugaguguggg

SEQ ID NO: 3070864 - RNA, 19 nt, Artificial Sequence
  Description of Artificial Sequence: Synthetic oligonucleotide
aucaagguccucaaagauc

SEQ ID NO: 3070865 - RNA, 19 nt, Artificial Sequence
  Description of Artificial Sequence: Synthetic oligonucleotide
gaucgcggcacacaauccc

SEQ ID NO: 3070866 - RNA, 19 nt, Artificial Sequence
  Description of Artificial Sequence: Synthetic oligonucleotide
uuuccuugucuccucccag

SEQ ID NO: 3070867 - RNA, 19 nt, Artificial Sequence
  Description of Artificial Sequence: Synthetic oligonucleotide
ucugaaauggagggcucgg

SEQ ID NO: 3070868 - RNA, 19 nt, Artificial Sequence
  Description of Artificial Sequence: Synthetic oligonucleotide
agcugcccaucucugaacg

SEQ ID NO: 3070869 - RNA, 19 nt, Artificial Sequence
  Description of Artificial Sequence: Synthetic oligonucleotide
acugcuaauuucuuaucaa

SEQ ID NO: 3070870 - RNA, 19 nt, Artificial Sequence
  Description of Artificial Sequence: Synthetic oligonucleotide
ucaagggcuaccaccauuu

SEQ ID NO: 3070871 - RNA, 19 nt, Artificial Sequence
  Description of Artificial Sequence: Synthetic oligonucleotide
agggcuaccaccauuucag

SEQ ID NO: 3070872 - RNA, 19 nt, Artificial Sequence
  Description of Artificial Sequence: Synthetic oligonucleotide
uuccuugucuccucccagg

SEQ ID NO: 3070873 - RNA, 19 nt, Artificial Sequence
  Description of Artificial Sequence: Synthetic oligonucleotide
gggaugaagaaccuagagc

SEQ ID NO: 3070874 - RNA, 19 nt, Artificial Sequence
  Description of Artificial Sequence: Synthetic oligonucleotide
aauccccucucugugcagg

SEQ ID NO: 3070875 - RNA, 19 nt, Artificial Sequence
  Description of Artificial Sequence: Synthetic oligonucleotide
uuccucuuuggccugcucu

SEQ ID NO: 3070876 - RNA, 19 nt, Artificial Sequence
  Description of Artificial Sequence: Synthetic oligonucleotide
ucugaacgcagcccuccgg

SEQ ID NO: 3070877 - RNA, 19 nt, Artificial Sequence
  Description of Artificial Sequence: Synthetic oligonucleotide
augaagaaccuagagcuca

SEQ ID NO: 3070878 - RNA, 19 nt, Artificial Sequence
  Description of Artificial Sequence: Synthetic oligonucleotide
uugcuccuuggucucagag

SEQ ID NO: 3070879 - RNA, 19 nt, Artificial Sequence
  Description of Artificial Sequence: Synthetic oligonucleotide
aucugauggauuuccuugu

SEQ ID NO: 3070880 - RNA, 19 nt, Artificial Sequence
  Description of Artificial Sequence: Synthetic oligonucleotide
cugucugugcaccguaucc

SEQ ID NO: 3070881 - RNA, 19 nt, Artificial Sequence
  Description of Artificial Sequence: Synthetic oligonucleotide
ucugugcagggcgucaagg

SEQ ID NO: 3070882 - RNA, 19 nt, Artificial Sequence
  Description of Artificial Sequence: Synthetic oligonucleotide
aagguccucaaagaucuga

SEQ ID NO: 3070883 - RNA, 19 nt, Artificial Sequence
  Description of Artificial Sequence: Synthetic oligonucleotide
ucagagugucucugaaaug

SEQ ID NO: 3070884 - RNA, 19 nt, Artificial Sequence
  Description of Artificial Sequence: Synthetic oligonucleotide
acacaauccccucucugug

SEQ ID NO: 3070885 - RNA, 19 nt, Artificial Sequence
  Description of Artificial Sequence: Synthetic oligonucleotide
cuaccaccauuucagcugc

SEQ ID NO: 3070886 - RNA, 19 nt, Artificial Sequence
  Description of Artificial Sequence: Synthetic oligonucleotide
cacacuuugcuccuugguc

SEQ ID NO: 3070887 - RNA, 19 nt, Artificial Sequence
  Description of Artificial Sequence: Synthetic oligonucleotide
uccucuuuggccugcucug

SEQ ID NO: 3070888 - RNA, 19 nt, Artificial Sequence
  Description of Artificial Sequence: Synthetic oligonucleotide
gcuaccaccauuucagcug

SEQ ID NO: 3070889 - RNA, 19 nt, Artificial Sequence
  Description of Artificial Sequence: Synthetic oligonucleotide
ugaaauggagggcucgguu

SEQ ID NO: 3070890 - RNA, 19 nt, Artificial Sequence
  Description of Artificial Sequence: Synthetic oligonucleotide
uuggccugcucugugaaca

SEQ ID NO: 3070891 - RNA, 19 nt, Artificial Sequence
  Description of Artificial Sequence: Synthetic oligonucleotide
ucagcugcccaucucugaa

SEQ ID NO: 3070892 - RNA, 19 nt, Artificial Sequence
  Description of Artificial Sequence: Synthetic oligonucleotide
ugaagaaccuagagcucac

SEQ ID NO: 3070893 - RNA, 19 nt, Artificial Sequence
  Description of Artificial Sequence: Synthetic oligonucleotide
auuuccuugucuccuccca

SEQ ID NO: 3070894 - RNA, 19 nt, Artificial Sequence
  Description of Artificial Sequence: Synthetic oligonucleotide
agugucugucugugcaccg

SEQ ID NO: 3070895 - RNA, 19 nt, Artificial Sequence
  Description of Artificial Sequence: Synthetic oligonucleotide
gaaccuagagcucacugcu

SEQ ID NO: 3070896 - RNA, 19 nt, Artificial Sequence
  Description of Artificial Sequence: Synthetic oligonucleotide
ugucugugcaccguauccc

SEQ ID NO: 3070897 - RNA, 19 nt, Artificial Sequence
  Description of Artificial Sequence: Synthetic oligonucleotide
uuucagcugcccaucucug

SEQ ID NO: 3070898 - RNA, 19 nt, Artificial Sequence
  Description of Artificial Sequence: Synthetic oligonucleotide
gcuccuuggucucagagug

SEQ ID NO: 3070899 - RNA, 19 nt, Artificial Sequence
  Description of Artificial Sequence: Synthetic oligonucleotide
agggcgagcacacuuugcu

SEQ ID NO: 3070900 - RNA, 19 nt, Artificial Sequence
  Description of Artificial Sequence: Synthetic oligonucleotide
accaccauuucagcugccc

SEQ ID NO: 3070901 - RNA, 19 nt, Artificial Sequence
  Description of Artificial Sequence: Synthetic oligonucleotide
acaauccccucucugugca

SEQ ID NO: 3070902 - RNA, 19 nt, Artificial Sequence
  Description of Artificial Sequence: Synthetic oligonucleotide
uucuuaucaagguccucaa

SEQ ID NO: 3070903 - RNA, 19 nt, Artificial Sequence
  Description of Artificial Sequence: Synthetic oligonucleotide
gagugucucugaaauggag

SEQ ID NO: 3070904 - RNA, 19 nt, Artificial Sequence
  Description of Artificial Sequence: Synthetic oligonucleotide
ucugauggauuuccuuguc

SEQ ID NO: 3070905 - RNA, 19 nt, Artificial Sequence
  Description of Artificial Sequence: Synthetic oligonucleotide
uagagcucacugcuaauuu

SEQ ID NO: 3070906 - RNA, 19 nt, Artificial Sequence
  Description of Artificial Sequence: Synthetic oligonucleotide
ugugcaccguaucccuuag

SEQ ID NO: 3070907 - RNA, 19 nt, Artificial Sequence
  Description of Artificial Sequence: Synthetic oligonucleotide
ugagugugggcugcaagug

SEQ ID NO: 3070908 - RNA, 19 nt, Artificial Sequence
  Description of Artificial Sequence: Synthetic oligonucleotide
ucuuuggccugcucuguga

SEQ ID NO: 3070909 - RNA, 19 nt, Artificial Sequence
  Description of Artificial Sequence: Synthetic oligonucleotide
ucuuaucaagguccucaaa

SEQ ID NO: 3070910 - RNA, 19 nt, Artificial Sequence
  Description of Artificial Sequence: Synthetic oligonucleotide
agcacacuuugcuccuugg

SEQ ID NO: 3070911 - RNA, 19 nt, Artificial Sequence
  Description of Artificial Sequence: Synthetic oligonucleotide
ugcccaucucugaacgcag

SEQ ID NO: 3070912 - RNA, 19 nt, Artificial Sequence
  Description of Artificial Sequence: Synthetic oligonucleotide
aucgcggcacacaaucccc

SEQ ID NO: 3070913 - RNA, 19 nt, Artificial Sequence
  Description of Artificial Sequence: Synthetic oligonucleotide
ggcgagcacacuuugcucc

SEQ ID NO: 3070914 - RNA, 19 nt, Artificial Sequence
  Description of Artificial Sequence: Synthetic oligonucleotide
cacugcuaauuucuuauca

SEQ ID NO: 3070915 - RNA, 19 nt, Artificial Sequence
  Description of Artificial Sequence: Synthetic oligonucleotide
cacaauccccucucugugc

SEQ ID NO: 3070916 - RNA, 19 nt, Artificial Sequence
  Description of Artificial Sequence: Synthetic oligonucleotide
cugugaacaguaacacuuc

SEQ ID NO: 3070917 - RNA, 19 nt, Artificial Sequence
  Description of Artificial Sequence: Synthetic oligonucleotide
agaucugauggauuuccuu

SEQ ID NO: 3070918 - RNA, 19 nt, Artificial Sequence
  Description of Artificial Sequence: Synthetic oligonucleotide
accuagagcucacugcuaa

SEQ ID NO: 3070919 - RNA, 19 nt, Artificial Sequence
  Description of Artificial Sequence: Synthetic oligonucleotide
accauuucagcugcccauc

SEQ ID NO: 3070920 - RNA, 19 nt, Artificial Sequence
  Description of Artificial Sequence: Synthetic oligonucleotide
ugugggcugcaaguguggg

SEQ ID NO: 3070921 - RNA, 19 nt, Artificial Sequence
  Description of Artificial Sequence: Synthetic oligonucleotide
cuuggucucagagugucuc

SEQ ID NO: 3070922 - RNA, 19 nt, Artificial Sequence
  Description of Artificial Sequence: Synthetic oligonucleotide
auggauuuccuugucuccu

SEQ ID NO: 3070923 - RNA, 19 nt, Artificial Sequence
  Description of Artificial Sequence: Synthetic oligonucleotide
ucugucugugcaccguauc

SEQ ID NO: 3070924 - RNA, 19 nt, Artificial Sequence
  Description of Artificial Sequence: Synthetic oligonucleotide
ugucucugaaauggagggc

SEQ ID NO: 3070925 - RNA, 19 nt, Artificial Sequence
  Description of Artificial Sequence: Synthetic oligonucleotide
ucucugaacgcagcccucc

SEQ ID NO: 3070926 - RNA, 19 nt, Artificial Sequence
  Description of Artificial Sequence: Synthetic oligonucleotide
cucugaaauggagggcucg

SEQ ID NO: 3070927 - RNA, 19 nt, Artificial Sequence
  Description of Artificial Sequence: Synthetic oligonucleotide
gcuaauuucuuaucaaggu

SEQ ID NO: 3070928 - RNA, 19 nt, Artificial Sequence
  Description of Artificial Sequence: Synthetic oligonucleotide
ggcgucaagggcuaccacc

SEQ ID NO: 3070929 - RNA, 19 nt, Artificial Sequence
  Description of Artificial Sequence: Synthetic oligonucleotide
ucacugcuaauuucuuauc

SEQ ID NO: 3070930 - RNA, 19 nt, Artificial Sequence
  Description of Artificial Sequence: Synthetic oligonucleotide
acuguggcagugucugucu

SEQ ID NO: 3070931 - RNA, 19 nt, Artificial Sequence
  Description of Artificial Sequence: Synthetic oligonucleotide
gaugaagaaccuagagcuc

SEQ ID NO: 3070932 - RNA, 19 nt, Artificial Sequence
  Description of Artificial Sequence: Synthetic oligonucleotide
uucagcugcccaucucuga

SEQ ID NO: 3070933 - RNA, 19 nt, Artificial Sequence
  Description of Artificial Sequence: Synthetic oligonucleotide
agaucgcggcacacaaucc

SEQ ID NO: 3070934 - RNA, 19 nt, Artificial Sequence
  Description of Artificial Sequence: Synthetic oligonucleotide
uucuagaucgcggcacaca

SEQ ID NO: 3070935 - RNA, 19 nt, Artificial Sequence
  Description of Artificial Sequence: Synthetic oligonucleotide
ucucugaaauggagggcuc

SEQ ID NO: 3070936 - RNA, 19 nt, Artificial Sequence
  Description of Artificial Sequence: Synthetic oligonucleotide
aagaucugauggauuuccu

SEQ ID NO: 3070937 - RNA, 19 nt, Artificial Sequence
  Description of Artificial Sequence: Synthetic oligonucleotide
uuagcaccugagugugggc

SEQ ID NO: 3070938 - RNA, 19 nt, Artificial Sequence
  Description of Artificial Sequence: Synthetic oligonucleotide
uccuuggucucagaguguc

SEQ ID NO: 3070939 - RNA, 19 nt, Artificial Sequence
  Description of Artificial Sequence: Synthetic oligonucleotide
agugugggcugcaagugug

SEQ ID NO: 3070940 - RNA, 19 nt, Artificial Sequence
  Description of Artificial Sequence: Synthetic oligonucleotide
uagcaccugagugugggcu

SEQ ID NO: 3070941 - RNA, 19 nt, Artificial Sequence
  Description of Artificial Sequence: Synthetic oligonucleotide
gagcacacuuugcuccuug

SEQ ID NO: 3070942 - RNA, 19 nt, Artificial Sequence
  Description of Artificial Sequence: Synthetic oligonucleotide
uuggucucagagugucucu

SEQ ID NO: 3070943 - RNA, 19 nt, Artificial Sequence
  Description of Artificial Sequence: Synthetic oligonucleotide
uggucucagagugucucug

SEQ ID NO: 3070944 - RNA, 19 nt, Artificial Sequence
  Description of Artificial Sequence: Synthetic oligonucleotide
cucacugcuaauuucuuau

SEQ ID NO: 3070945 - RNA, 19 nt, Artificial Sequence
  Description of Artificial Sequence: Synthetic oligonucleotide
aagugugggucaggcuuuc

SEQ ID NO: 3070946 - RNA, 19 nt, Artificial Sequence
  Description of Artificial Sequence: Synthetic oligonucleotide
ugucugucugugcaccgua

SEQ ID NO: 3070947 - RNA, 19 nt, Artificial Sequence
  Description of Artificial Sequence: Synthetic oligonucleotide
ucuccucccagggcgagca

SEQ ID NO: 3070948 - RNA, 19 nt, Artificial Sequence
  Description of Artificial Sequence: Synthetic oligonucleotide
auccccucucugugcaggg

SEQ ID NO: 3070949 - RNA, 19 nt, Artificial Sequence
  Description of Artificial Sequence: Synthetic oligonucleotide
ugcaagugugggucaggcu

SEQ ID NO: 3070950 - RNA, 19 nt, Artificial Sequence
  Description of Artificial Sequence: Synthetic oligonucleotide
cugcaagugugggucaggc

SEQ ID NO: 3070951 - RNA, 19 nt, Artificial Sequence
  Description of Artificial Sequence: Synthetic oligonucleotide
uuuggccugcucugugaac

SEQ ID NO: 3070952 - RNA, 19 nt, Artificial Sequence
  Description of Artificial Sequence: Synthetic oligonucleotide
cagugucugucugugcacc

SEQ ID NO: 3070953 - RNA, 19 nt, Artificial Sequence
  Description of Artificial Sequence: Synthetic oligonucleotide
cucugaacgcagcccuccg

SEQ ID NO: 3070954 - RNA, 19 nt, Artificial Sequence
  Description of Artificial Sequence: Synthetic oligonucleotide
cucgguuccucuuuggccu

SEQ ID NO: 3070955 - RNA, 19 nt, Artificial Sequence
  Description of Artificial Sequence: Synthetic oligonucleotide
gcucgguuccucuuuggcc

SEQ ID NO: 3070956 - RNA, 19 nt, Artificial Sequence
  Description of Artificial Sequence: Synthetic oligonucleotide
guaucccuuagcaccugag

SEQ ID NO: 3070957 - RNA, 19 nt, Artificial Sequence
  Description of Artificial Sequence: Synthetic oligonucleotide
uugucuccucccagggcga

SEQ ID NO: 3070958 - RNA, 19 nt, Artificial Sequence
  Description of Artificial Sequence: Synthetic oligonucleotide
ggauuuccuugucuccucc

SEQ ID NO: 3070959 - RNA, 19 nt, Artificial Sequence
  Description of Artificial Sequence: Synthetic oligonucleotide
gucucugaaauggagggcu

SEQ ID NO: 3070960 - RNA, 19 nt, Artificial Sequence
  Description of Artificial Sequence: Synthetic oligonucleotide
cacuuugcuccuuggucuc

SEQ ID NO: 3070961 - RNA, 19 nt, Artificial Sequence
  Description of Artificial Sequence: Synthetic oligonucleotide
gguccucaaagaucugaug

SEQ ID NO: 3070962 - RNA, 19 nt, Artificial Sequence
  Description of Artificial Sequence: Synthetic oligonucleotide
cauuucagcugcccaucuc

SEQ ID NO: 3070963 - RNA, 19 nt, Artificial Sequence
  Description of Artificial Sequence: Synthetic oligonucleotide
cuuugcuccuuggucucag

SEQ ID NO: 3070964 - RNA, 19 nt, Artificial Sequence
  Description of Artificial Sequence: Synthetic oligonucleotide
uuugcuccuuggucucaga

SEQ ID NO: 3070965 - RNA, 19 nt, Artificial Sequence
  Description of Artificial Sequence: Synthetic oligonucleotide
ucccagggcgagcacacuu

SEQ ID NO: 3070966 - RNA, 19 nt, Artificial Sequence
  Description of Artificial Sequence: Synthetic oligonucleotide
cucuuuggccugcucugug

SEQ ID NO: 3070967 - RNA, 19 nt, Artificial Sequence
  Description of Artificial Sequence: Synthetic oligonucleotide
ucgcggcacacaauccccu

SEQ ID NO: 3070968 - RNA, 19 nt, Artificial Sequence
  Description of Artificial Sequence: Synthetic oligonucleotide
cagcccuccgggaugaaga

SEQ ID NO: 3070969 - RNA, 19 nt, Artificial Sequence
  Description of Artificial Sequence: Synthetic oligonucleotide
agggcucgguuccucuuug

SEQ ID NO: 3070970 - RNA, 19 nt, Artificial Sequence
  Description of Artificial Sequence: Synthetic oligonucleotide
aauggagggcucgguuccu

SEQ ID NO: 3070971 - RNA, 19 nt, Artificial Sequence
  Description of Artificial Sequence: Synthetic oligonucleotide
cacuguggcagugucuguc

SEQ ID NO: 3070972 - RNA, 19 nt, Artificial Sequence
  Description of Artificial Sequence: Synthetic oligonucleotide
agagugucucugaaaugga

SEQ ID NO: 3070973 - RNA, 19 nt, Artificial Sequence
  Description of Artificial Sequence: Synthetic oligonucleotide
cugagugugggcugcaagu

SEQ ID NO: 3070974 - RNA, 19 nt, Artificial Sequence
  Description of Artificial Sequence: Synthetic oligonucleotide
ucugugcaccguaucccuu

SEQ ID NO: 3070975 - RNA, 19 nt, Artificial Sequence
  Description of Artificial Sequence: Synthetic oligonucleotide
ucgguuccucuuuggccug

SEQ ID NO: 3070976 - RNA, 19 nt, Artificial Sequence
  Description of Artificial Sequence: Synthetic oligonucleotide
accguaucccuuagcaccu

SEQ ID NO: 3070977 - RNA, 19 nt, Artificial Sequence
  Description of Artificial Sequence: Synthetic oligonucleotide
cagggcgagcacacuuugc

SEQ ID NO: 3070978 - RNA, 19 nt, Artificial Sequence
  Description of Artificial Sequence: Synthetic oligonucleotide
uggagggcucgguuccucu

SEQ ID NO: 3070979 - RNA, 19 nt, Artificial Sequence
  Description of Artificial Sequence: Synthetic oligonucleotide
caucucugaacgcagcccu

SEQ ID NO: 3070980 - RNA, 19 nt, Artificial Sequence
  Description of Artificial Sequence: Synthetic oligonucleotide
ugcagggcgucaagggcua

SEQ ID NO: 3070981 - RNA, 19 nt, Artificial Sequence
  Description of Artificial Sequence: Synthetic oligonucleotide
uccucccagggcgagcaca

SEQ ID NO: 3070982 - RNA, 19 nt, Artificial Sequence
  Description of Artificial Sequence: Synthetic oligonucleotide
gucucagagugucucugaa

SEQ ID NO: 3070983 - RNA, 19 nt, Artificial Sequence
  Description of Artificial Sequence: Synthetic oligonucleotide
gugugggcugcaagugugg

SEQ ID NO: 3070984 - RNA, 19 nt, Artificial Sequence
  Description of Artificial Sequence: Synthetic oligonucleotide
aucucugaacgcagcccuc

SEQ ID NO: 3070985 - RNA, 19 nt, Artificial Sequence
  Description of Artificial Sequence: Synthetic oligonucleotide
agguccucaaagaucugau

SEQ ID NO: 3070986 - RNA, 19 nt, Artificial Sequence
  Description of Artificial Sequence: Synthetic oligonucleotide
ggcucgguuccucuuuggc

SEQ ID NO: 3070987 - RNA, 19 nt, Artificial Sequence
  Description of Artificial Sequence: Synthetic oligonucleotide
gcacacaauccccucucug

SEQ ID NO: 3070988 - RNA, 19 nt, Artificial Sequence
  Description of Artificial Sequence: Synthetic oligonucleotide
agggcgucaagggcuacca

SEQ ID NO: 3070989 - RNA, 19 nt, Artificial Sequence
  Description of Artificial Sequence: Synthetic oligonucleotide
cucugugcagggcgucaag

SEQ ID NO: 3070990 - RNA, 19 nt, Artificial Sequence
  Description of Artificial Sequence: Synthetic oligonucleotide
caauccccucucugugcag

SEQ ID NO: 3070991 - RNA, 19 nt, Artificial Sequence
  Description of Artificial Sequence: Synthetic oligonucleotide
cagcugcccaucucugaac

SEQ ID NO: 3070992 - RNA, 19 nt, Artificial Sequence
  Description of Artificial Sequence: Synthetic oligonucleotide
cugcccaucucugaacgca

SEQ ID NO: 3070993 - RNA, 19 nt, Artificial Sequence
  Description of Artificial Sequence: Synthetic oligonucleotide
uaccaccauuucagcugcc

SEQ ID NO: 3070994 - RNA, 19 nt, Artificial Sequence
  Description of Artificial Sequence: Synthetic oligonucleotide
gcaagugugggucaggcuu

SEQ ID NO: 3070995 - RNA, 19 nt, Artificial Sequence
  Description of Artificial Sequence: Synthetic oligonucleotide
cccaucucugaacgcagcc

SEQ ID NO: 3070996 - RNA, 19 nt, Artificial Sequence
  Description of Artificial Sequence: Synthetic oligonucleotide
cuuuggccugcucugugaa

SEQ ID NO: 3070997 - RNA, 19 nt, Artificial Sequence
  Description of Artificial Sequence: Synthetic oligonucleotide
gagugugggcugcaagugu

SEQ ID NO: 3070998 - RNA, 19 nt, Artificial Sequence
  Description of Artificial Sequence: Synthetic oligonucleotide
ucucugugcagggcgucaa

SEQ ID NO: 3070999 - RNA, 19 nt, Artificial Sequence
  Description of Artificial Sequence: Synthetic oligonucleotide
uccuccacuguggcagugu

SEQ ID NO: 3071000 - RNA, 19 nt, Artificial Sequence
  Description of Artificial Sequence: Synthetic oligonucleotide
cucugugaacaguaacacu

SEQ ID NO: 3071001 - RNA, 19 nt, Artificial Sequence
  Description of Artificial Sequence: Synthetic oligonucleotide
caagguccucaaagaucug

SEQ ID NO: 3071002 - RNA, 19 nt, Artificial Sequence
  Description of Artificial Sequence: Synthetic oligonucleotide
auggagggcucgguuccuc

SEQ ID NO: 3071003 - RNA, 19 nt, Artificial Sequence
  Description of Artificial Sequence: Synthetic oligonucleotide
cgggaugaagaaccuagag

SEQ ID NO: 3071004 - RNA, 19 nt, Artificial Sequence
  Description of Artificial Sequence: Synthetic oligonucleotide
cugauggauuuccuugucu

SEQ ID NO: 3071005 - RNA, 19 nt, Artificial Sequence
  Description of Artificial Sequence: Synthetic oligonucleotide
guaacacuuccuccacugu

SEQ ID NO: 3071006 - RNA, 19 nt, Artificial Sequence
  Description of Artificial Sequence: Synthetic oligonucleotide
guucuagaucgcggcacac

SEQ ID NO: 3071007 - RNA, 19 nt, Artificial Sequence
  Description of Artificial Sequence: Synthetic oligonucleotide
gucugugcaccguaucccu

SEQ ID NO: 3071008 - RNA, 19 nt, Artificial Sequence
  Description of Artificial Sequence: Synthetic oligonucleotide
gcaccguaucccuuagcac

SEQ ID NO: 3071009 - RNA, 19 nt, Artificial Sequence
  Description of Artificial Sequence: Synthetic oligonucleotide
ccugagugugggcugcaag

SEQ ID NO: 3071010 - RNA, 19 nt, Artificial Sequence
  Description of Artificial Sequence: Synthetic oligonucleotide
agcccuccgggaugaagaa

SEQ ID NO: 3071011 - RNA, 19 nt, Artificial Sequence
  Description of Artificial Sequence: Synthetic oligonucleotide
ccaucucugaacgcagccc

SEQ ID NO: 3071012 - RNA, 19 nt, Artificial Sequence
  Description of Artificial Sequence: Synthetic oligonucleotide
ccccucucugugcagggcg

SEQ ID NO: 3071013 - RNA, 19 nt, Artificial Sequence
  Description of Artificial Sequence: Synthetic oligonucleotide
aaccuagagcucacugcua

SEQ ID NO: 3071014 - RNA, 19 nt, Artificial Sequence
  Description of Artificial Sequence: Synthetic oligonucleotide
cugugcaccguaucccuua

SEQ ID NO: 3071015 - RNA, 19 nt, Artificial Sequence
  Description of Artificial Sequence: Synthetic oligonucleotide
ggucucagagugucucuga

SEQ ID NO: 3071016 - RNA, 19 nt, Artificial Sequence
  Description of Artificial Sequence: Synthetic oligonucleotide
cagggcgucaagggcuacc

SEQ ID NO: 3071017 - RNA, 19 nt, Artificial Sequence
  Description of Artificial Sequence: Synthetic oligonucleotide
acuuugcuccuuggucuca

SEQ ID NO: 3071018 - RNA, 19 nt, Artificial Sequence
  Description of Artificial Sequence: Synthetic oligonucleotide
uccccucucugugcagggc

SEQ ID NO: 3071019 - RNA, 19 nt, Artificial Sequence
  Description of Artificial Sequence: Synthetic oligonucleotide
gugcaccguaucccuuagc

SEQ ID NO: 3071020 - RNA, 19 nt, Artificial Sequence
  Description of Artificial Sequence: Synthetic oligonucleotide
gcgucaagggcuaccacca

SEQ ID NO: 3071021 - RNA, 19 nt, Artificial Sequence
  Description of Artificial Sequence: Synthetic oligonucleotide
caccauuucagcugcccau

SEQ ID NO: 3071022 - RNA, 19 nt, Artificial Sequence
  Description of Artificial Sequence: Synthetic oligonucleotide
gaagaaccuagagcucacu

SEQ ID NO: 3071023 - RNA, 19 nt, Artificial Sequence
  Description of Artificial Sequence: Synthetic oligonucleotide
cccuuagcaccugagugug

SEQ ID NO: 3071024 - RNA, 19 nt, Artificial Sequence
  Description of Artificial Sequence: Synthetic oligonucleotide
gggcuaccaccauuucagc

SEQ ID NO: 3071025 - RNA, 19 nt, Artificial Sequence
  Description of Artificial Sequence: Synthetic oligonucleotide
ccuugucuccucccagggc

SEQ ID NO: 3071026 - RNA, 19 nt, Artificial Sequence
  Description of Artificial Sequence: Synthetic oligonucleotide
gcugcccaucucugaacgc

SEQ ID NO: 3071027 - RNA, 19 nt, Artificial Sequence
  Description of Artificial Sequence: Synthetic oligonucleotide
ggcuaccaccauuucagcu

SEQ ID NO: 3071028 - RNA, 19 nt, Artificial Sequence
  Description of Artificial Sequence: Synthetic oligonucleotide
ccuuagcaccugagugugg

SEQ ID NO: 3071029 - RNA, 19 nt, Artificial Sequence
  Description of Artificial Sequence: Synthetic oligonucleotide
gcugcaagugugggucagg

SEQ ID NO: 3071030 - RNA, 19 nt, Artificial Sequence
  Description of Artificial Sequence: Synthetic oligonucleotide
gggcucgguuccucuuugg

SEQ ID NO: 3071031 - RNA, 19 nt, Artificial Sequence
  Description of Artificial Sequence: Synthetic oligonucleotide
cuagagcucacugcuaauu

SEQ ID NO: 3071032 - RNA, 19 nt, Artificial Sequence
  Description of Artificial Sequence: Synthetic oligonucleotide
gcucacugcuaauuucuua

SEQ ID NO: 3071033 - RNA, 19 nt, Artificial Sequence
  Description of Artificial Sequence: Synthetic oligonucleotide
gucaagggcuaccaccauu

SEQ ID NO: 3071034 - RNA, 19 nt, Artificial Sequence
  Description of Artificial Sequence: Synthetic oligonucleotide
gggcgagcacacuuugcuc

SEQ ID NO: 3071035 - RNA, 19 nt, Artificial Sequence
  Description of Artificial Sequence: Synthetic oligonucleotide
ccucccagggcgagcacac

SEQ ID NO: 3071036 - RNA, 19 nt, Artificial Sequence
  Description of Artificial Sequence: Synthetic oligonucleotide
ggcugcaagugugggucag

SEQ ID NO: 3071037 - RNA, 19 nt, Artificial Sequence
  Description of Artificial Sequence: Synthetic oligonucleotide
agcucacugcuaauuucuu

SEQ ID NO: 3071038 - RNA, 19 nt, Artificial Sequence
  Description of Artificial Sequence: Synthetic oligonucleotide
caagugugggucaggcuuu

SEQ ID NO: 3071039 - RNA, 19 nt, Artificial Sequence
  Description of Artificial Sequence: Synthetic oligonucleotide
agugugggucaggcuuucu

SEQ ID NO: 3071040 - RNA, 19 nt, Artificial Sequence
  Description of Artificial Sequence: Synthetic oligonucleotide
ccagggcgagcacacuuug

SEQ ID NO: 3071041 - RNA, 19 nt, Artificial Sequence
  Description of Artificial Sequence: Synthetic oligonucleotide
cucucugugcagggcguca

SEQ ID NO: 3071042 - RNA, 19 nt, Artificial Sequence
  Description of Artificial Sequence: Synthetic oligonucleotide
caguaacacuuccuccacu

SEQ ID NO: 3071043 - RNA, 19 nt, Artificial Sequence
  Description of Artificial Sequence: Synthetic oligonucleotide
gugggcugcaagugugggu

SEQ ID NO: 3071044 - RNA, 19 nt, Artificial Sequence
  Description of Artificial Sequence: Synthetic oligonucleotide
gcaccugagugugggcugc

SEQ ID NO: 3071045 - RNA, 19 nt, Artificial Sequence
  Description of Artificial Sequence: Synthetic oligonucleotide
gagggcucgguuccucuuu

SEQ ID NO: 3071046 - RNA, 19 nt, Artificial Sequence
  Description of Artificial Sequence: Synthetic oligonucleotide
ccaccauuucagcugccca

SEQ ID NO: 3071047 - RNA, 19 nt, Artificial Sequence
  Description of Artificial Sequence: Synthetic oligonucleotide
ccuccacuguggcaguguc

SEQ ID NO: 3071048 - RNA, 19 nt, Artificial Sequence
  Description of Artificial Sequence: Synthetic oligonucleotide
cuagaucgcggcacacaau

SEQ ID NO: 3071049 - RNA, 19 nt, Artificial Sequence
  Description of Artificial Sequence: Synthetic oligonucleotide
gcagcccuccgggaugaag

SEQ ID NO: 3071050 - RNA, 19 nt, Artificial Sequence
  Description of Artificial Sequence: Synthetic oligonucleotide
cugaaauggagggcucggu

SEQ ID NO: 3071051 - RNA, 19 nt, Artificial Sequence
  Description of Artificial Sequence: Synthetic oligonucleotide
gcacacuuugcuccuuggu

SEQ ID NO: 3071052 - RNA, 19 nt, Artificial Sequence
  Description of Artificial Sequence: Synthetic oligonucleotide
ccgggaugaagaaccuaga

SEQ ID NO: 3071053 - RNA, 19 nt, Artificial Sequence
  Description of Artificial Sequence: Synthetic oligonucleotide
accugagugugggcugcaa

SEQ ID NO: 3071054 - RNA, 19 nt, Artificial Sequence
  Description of Artificial Sequence: Synthetic oligonucleotide
ccugcucugugaacaguaa

SEQ ID NO: 3071055 - RNA, 19 nt, Artificial Sequence
  Description of Artificial Sequence: Synthetic oligonucleotide
gugucugucugugcaccgu

SEQ ID NO: 3071056 - RNA, 19 nt, Artificial Sequence
  Description of Artificial Sequence: Synthetic oligonucleotide
gccugcucugugaacagua

SEQ ID NO: 3071057 - RNA, 19 nt, Artificial Sequence
  Description of Artificial Sequence: Synthetic oligonucleotide
cuccuuggucucagagugu

SEQ ID NO: 3071058 - RNA, 19 nt, Artificial Sequence
  Description of Artificial Sequence: Synthetic oligonucleotide
cuuccuccacuguggcagu

SEQ ID NO: 3071059 - RNA, 19 nt, Artificial Sequence
  Description of Artificial Sequence: Synthetic oligonucleotide
gggcugcaaguguggguca

SEQ ID NO: 3071060 - RNA, 19 nt, Artificial Sequence
  Description of Artificial Sequence: Synthetic oligonucleotide
gggcgucaagggcuaccac

SEQ ID NO: 3071061 - RNA, 19 nt, Artificial Sequence
  Description of Artificial Sequence: Synthetic oligonucleotide
cuccucccagggcgagcac

SEQ ID NO: 3071062 - RNA, 19 nt, Artificial Sequence
  Description of Artificial Sequence: Synthetic oligonucleotide
cggcacacaauccccucuc

SEQ ID NO: 3071063 - RNA, 19 nt, Artificial Sequence
  Description of Artificial Sequence: Synthetic oligonucleotide
ccucaaagaucugauggau

SEQ ID NO: 3071064 - RNA, 19 nt, Artificial Sequence
  Description of Artificial Sequence: Synthetic oligonucleotide
gcgagcacacuuugcuccu

SEQ ID NO: 3071065 - RNA, 19 nt, Artificial Sequence
  Description of Artificial Sequence: Synthetic oligonucleotide
cuccgggaugaagaaccua

SEQ ID NO: 3071066 - RNA, 19 nt, Artificial Sequence
  Description of Artificial Sequence: Synthetic oligonucleotide
gcggcacacaauccccucu

SEQ ID NO: 3071067 - RNA, 19 nt, Artificial Sequence
  Description of Artificial Sequence: Synthetic oligonucleotide
gucugucugugcaccguau

SEQ ID NO: 3071068 - RNA, 19 nt, Artificial Sequence
  Description of Artificial Sequence: Synthetic oligonucleotide
cguaucccuuagcaccuga

SEQ ID NO: 3071069 - RNA, 19 nt, Artificial Sequence
  Description of Artificial Sequence: Synthetic oligonucleotide
cgcggcacacaauccccuc

SEQ ID NO: 3071070 - RNA, 19 nt, Artificial Sequence
  Description of Artificial Sequence: Synthetic oligonucleotide
caccugagugugggcugca

SEQ ID NO: 3071071 - RNA, 19 nt, Artificial Sequence
  Description of Artificial Sequence: Synthetic oligonucleotide
ggagggcucgguuccucuu

SEQ ID NO: 3071072 - RNA, 19 nt, Artificial Sequence
  Description of Artificial Sequence: Synthetic oligonucleotide
ccguaucccuuagcaccug

SEQ ID NO: 3071073 - RNA, 19 nt, Artificial Sequence
  Description of Artificial Sequence: Synthetic oligonucleotide
ccuuggucucagagugucu

SEQ ID NO: 3071074 - RNA, 19 nt, Artificial Sequence
  Description of Artificial Sequence: Synthetic oligonucleotide
gguuccucuuuggccugcu

SEQ ID NO: 3071075 - RNA, 19 nt, Artificial Sequence
  Description of Artificial Sequence: Synthetic oligonucleotide
ccuccgggaugaagaaccu

SEQ ID NO: 3071076 - RNA, 19 nt, Artificial Sequence
  Description of Artificial Sequence: Synthetic oligonucleotide
ggccugcucugugaacagu

SEQ ID NO: 3071077 - RNA, 19 nt, Artificial Sequence
  Description of Artificial Sequence: Synthetic oligonucleotide
cccucucugugcagggcgu

SEQ ID NO: 3071078 - RNA, 19 nt, Artificial Sequence
  Description of Artificial Sequence: Synthetic oligonucleotide
cgguuccucuuuggccugc

SEQ ID NO: 3071079 - RNA, 19 nt, Artificial Sequence
  Description of Artificial Sequence: Synthetic oligonucleotide
gcagggcgucaagggcuac

SEQ ID NO: 3071080 - RNA, 19 nt, Artificial Sequence
  Description of Artificial Sequence: Synthetic oligonucleotide
cccagggcgagcacacuuu

SEQ ID NO: 3071081 - RNA, 19 nt, Artificial Sequence
  Description of Artificial Sequence: Synthetic oligonucleotide
ccucuuuggccugcucugu

SEQ ID NO: 3071082 - RNA, 19 nt, Artificial Sequence
  Description of Artificial Sequence: Synthetic oligonucleotide
cucccagggcgagcacacu

SEQ ID NO: 3071083 - RNA, 19 nt, Artificial Sequence
  Description of Artificial Sequence: Synthetic oligonucleotide
cgucaagggcuaccaccau

SEQ ID NO: 3071084 - RNA, 19 nt, Artificial Sequence
  Description of Artificial Sequence: Synthetic oligonucleotide
cgagcacacuuugcuccuu

SEQ ID NO: 3071085 - RNA, 19 nt, Artificial Sequence
  Description of Artificial Sequence: Synthetic oligonucleotide
cgcagcccuccgggaugaa

SEQ ID NO: 3071086 - RNA, 19 nt, Artificial Sequence
  Description of Artificial Sequence: Synthetic oligonucleotide
ugcacagugaagcagacac

SEQ ID NO: 3071087 - RNA, 19 nt, Artificial Sequence
  Description of Artificial Sequence: Synthetic oligonucleotide
gacaccuccuaacacaagg

SEQ ID NO: 3071088 - RNA, 19 nt, Artificial Sequence
  Description of Artificial Sequence: Synthetic oligonucleotide
uugagcaggcugcacagug

SEQ ID NO: 3071089 - RNA, 19 nt, Artificial Sequence
  Description of Artificial Sequence: Synthetic oligonucleotide
agcagacaccuccuaacac

SEQ ID NO: 3071090 - RNA, 19 nt, Artificial Sequence
  Description of Artificial Sequence: Synthetic oligonucleotide
  modified_base (9)..(9): a, c, u, g, unknown or other
cugcauagnggcccgaggc

SEQ ID NO: 3071091 - RNA, 19 nt, Artificial Sequence
  Description of Artificial Sequence: Synthetic oligonucleotide
ugaagcagacaccuccuaa

SEQ ID NO: 3071092 - RNA, 19 nt, Artificial Sequence
  Description of Artificial Sequence: Synthetic oligonucleotide
  modified_base (3)..(3): a, c, u, g, unknown or other
agnggcccgaggcuggagg

SEQ ID NO: 3071093 - RNA, 19 nt, Artificial Sequence
  Description of Artificial Sequence: Synthetic oligonucleotide
  modified_base (8)..(8): a, c, u, g, unknown or other
ugcauagnggcccgaggcu

SEQ ID NO: 3071094 - RNA, 19 nt, Artificial Sequence
  Description of Artificial Sequence: Synthetic oligonucleotide
  modified_base (6)..(6): a, c, u, g, unknown or other
cauagnggcccgaggcugg

SEQ ID NO: 3071095 - RNA, 19 nt, Artificial Sequence
  Description of Artificial Sequence: Synthetic oligonucleotide
ugagcaggcugcacaguga

SEQ ID NO: 3071096 - RNA, 19 nt, Artificial Sequence
  Description of Artificial Sequence: Synthetic oligonucleotide
gaggaggcugggcuugagc

SEQ ID NO: 3071097 - RNA, 19 nt, Artificial Sequence
  Description of Artificial Sequence: Synthetic oligonucleotide
gcagacaccuccuaacaca

SEQ ID NO: 3071098 - RNA, 19 nt, Artificial Sequence
  Description of Artificial Sequence: Synthetic oligonucleotide
gagcaggcugcacagugaa

SEQ ID NO: 3071099 - RNA, 19 nt, Artificial Sequence
  Description of Artificial Sequence: Synthetic oligonucleotide
cagacaccuccuaacacaa

SEQ ID NO: 3071100 - RNA, 19 nt, Artificial Sequence
  Description of Artificial Sequence: Synthetic oligonucleotide
caccuccuaacacaaggca

SEQ ID NO: 3071101 - RNA, 19 nt, Artificial Sequence
  Description of Artificial Sequence: Synthetic oligonucleotide
  modified_base (7)..(7): a, c, u, g, unknown or other
gcauagnggcccgaggcug

SEQ ID NO: 3071102 - RNA, 19 nt, Artificial Sequence
  Description of Artificial Sequence: Synthetic oligonucleotide
aggcugcacagugaagcag

SEQ ID NO: 3071103 - RNA, 19 nt, Artificial Sequence
  Description of Artificial Sequence: Synthetic oligonucleotide
gaggcuggaggaggcuggg

SEQ ID NO: 3071104 - RNA, 19 nt, Artificial Sequence
  Description of Artificial Sequence: Synthetic oligonucleotide
  modified_base (2)..(2): a, c, u, g, unknown or other
gnggcccgaggcuggagga

SEQ ID NO: 3071105 - RNA, 19 nt, Artificial Sequence
  Description of Artificial Sequence: Synthetic oligonucleotide
ugggcuugagcaggcugca

SEQ ID NO: 3071106 - RNA, 19 nt, Artificial Sequence
  Description of Artificial Sequence: Synthetic oligonucleotide
caggcugcacagugaagca

SEQ ID NO: 3071107 - RNA, 19 nt, Artificial Sequence
  Description of Artificial Sequence: Synthetic oligonucleotide
cuggaggaggcugggcuug

SEQ ID NO: 3071108 - RNA, 19 nt, Artificial Sequence
  Description of Artificial Sequence: Synthetic oligonucleotide
gcugggcuugagcaggcug

SEQ ID NO: 3071109 - RNA, 19 nt, Artificial Sequence
  Description of Artificial Sequence: Synthetic oligonucleotide
aggcuggaggaggcugggc

SEQ ID NO: 3071110 - RNA, 19 nt, Artificial Sequence
  Description of Artificial Sequence: Synthetic oligonucleotide
aggcugggcuugagcaggc

SEQ ID NO: 3071111 - RNA, 19 nt, Artificial Sequence
  Description of Artificial Sequence: Synthetic oligonucleotide
  modified_base (4)..(4): a, c, u, g, unknown or other
uagnggcccgaggcuggag

SEQ ID NO: 3071112 - RNA, 19 nt, Artificial Sequence
  Description of Artificial Sequence: Synthetic oligonucleotide
ggcugcacagugaagcaga

SEQ ID NO: 3071113 - RNA, 19 nt, Artificial Sequence
  Description of Artificial Sequence: Synthetic oligonucleotide
agacaccuccuaacacaag

SEQ ID NO: 3071114 - RNA, 19 nt, Artificial Sequence
  Description of Artificial Sequence: Synthetic oligonucleotide
  modified_base (5)..(5): a, c, u, g, unknown or other
auagnggcccgaggcugga

SEQ ID NO: 3071115 - RNA, 19 nt, Artificial Sequence
  Description of Artificial Sequence: Synthetic oligonucleotide
gugaagcagacaccuccua

SEQ ID NO: 3071116 - RNA, 19 nt, Artificial Sequence
  Description of Artificial Sequence: Synthetic oligonucleotide
agcaggcugcacagugaag

SEQ ID NO: 3071117 - RNA, 19 nt, Artificial Sequence
  Description of Artificial Sequence: Synthetic oligonucleotide
gcacagugaagcagacacc

SEQ ID NO: 3071118 - RNA, 19 nt, Artificial Sequence
  Description of Artificial Sequence: Synthetic oligonucleotide
ggcccgaggcuggaggagg

SEQ ID NO: 3071119 - RNA, 19 nt, Artificial Sequence
  Description of Artificial Sequence: Synthetic oligonucleotide
uggaggaggcugggcuuga

SEQ ID NO: 3071120 - RNA, 19 nt, Artificial Sequence
  Description of Artificial Sequence: Synthetic oligonucleotide
ggaggaggcugggcuugag

SEQ ID NO: 3071121 - RNA, 19 nt, Artificial Sequence
  Description of Artificial Sequence: Synthetic oligonucleotide
ccgaggcuggaggaggcug

SEQ ID NO: 3071122 - RNA, 19 nt, Artificial Sequence
  Description of Artificial Sequence: Synthetic oligonucleotide
gcccgaggcuggaggaggc

SEQ ID NO: 3071123 - RNA, 19 nt, Artificial Sequence
  Description of Artificial Sequence: Synthetic oligonucleotide
gcuggaggaggcugggcuu

SEQ ID NO: 3071124 - RNA, 19 nt, Artificial Sequence
  Description of Artificial Sequence: Synthetic oligonucleotide
ggcugggcuugagcaggcu

SEQ ID NO: 3071125 - RNA, 19 nt, Artificial Sequence
  Description of Artificial Sequence: Synthetic oligonucleotide
cccgaggcuggaggaggcu

SEQ ID NO: 3071126 - RNA, 19 nt, Artificial Sequence
  Description of Artificial Sequence: Synthetic oligonucleotide
  modified_base (1)..(1): a, c, u, g, unknown or other
nggcccgaggcuggaggag

SEQ ID NO: 3071127 - RNA, 19 nt, Artificial Sequence
  Description of Artificial Sequence: Synthetic oligonucleotide
aaugauacggcuucucacc

SEQ ID NO: 3071128 - RNA, 19 nt, Artificial Sequence
  Description of Artificial Sequence: Synthetic oligonucleotide
auaaauagcagucaguuug

SEQ ID NO: 3071129 - RNA, 19 nt, Artificial Sequence
  Description of Artificial Sequence: Synthetic oligonucleotide
ugugcuugcgguaauggcg

SEQ ID NO: 3071130 - RNA, 19 nt, Artificial Sequence
  Description of Artificial Sequence: Synthetic oligonucleotide
uccaauaaauagcagucag

SEQ ID NO: 3071131 - RNA, 19 nt, Artificial Sequence
  Description of Artificial Sequence: Synthetic oligonucleotide
guaauggcggguuagcucg

SEQ ID NO: 3071132 - RNA, 19 nt, Artificial Sequence
  Description of Artificial Sequence: Synthetic oligonucleotide
cauaugucgcuucauaugc

SEQ ID NO: 3071133 - RNA, 19 nt, Artificial Sequence
  Description of Artificial Sequence: Synthetic oligonucleotide
uuugcaaaggaaccgugcc

SEQ ID NO: 3071134 - RNA, 19 nt, Artificial Sequence
  Description of Artificial Sequence: Synthetic oligonucleotide
uccaggguccaauaaauag

SEQ ID NO: 3071135 - RNA, 19 nt, Artificial Sequence
  Description of Artificial Sequence: Synthetic oligonucleotide
ugucgcuucauaugcaggg

SEQ ID NO: 3071136 - RNA, 19 nt, Artificial Sequence
  Description of Artificial Sequence: Synthetic oligonucleotide
agagucaauguccuguggg

SEQ ID NO: 3071137 - RNA, 19 nt, Artificial Sequence
  Description of Artificial Sequence: Synthetic oligonucleotide
aaaggaaccgugcccggcg

SEQ ID NO: 3071138 - RNA, 19 nt, Artificial Sequence
  Description of Artificial Sequence: Synthetic oligonucleotide
uguccugugggccacacug

SEQ ID NO: 3071139 - RNA, 19 nt, Artificial Sequence
  Description of Artificial Sequence: Synthetic oligonucleotide
agaacuggccggcagaguc

SEQ ID NO: 3071140 - RNA, 19 nt, Artificial Sequence
  Description of Artificial Sequence: Synthetic oligonucleotide
auagcagucaguuugcaaa

SEQ ID NO: 3071141 - RNA, 19 nt, Artificial Sequence
  Description of Artificial Sequence: Synthetic oligonucleotide
uaaauagcagucaguuugc

SEQ ID NO: 3071142 - RNA, 19 nt, Artificial Sequence
  Description of Artificial Sequence: Synthetic oligonucleotide
ucaguuugcaaaggaaccg

SEQ ID NO: 3071143 - RNA, 19 nt, Artificial Sequence
  Description of Artificial Sequence: Synthetic oligonucleotide
ugcaaaggaaccgugcccg

SEQ ID NO: 3071144 - RNA, 19 nt, Artificial Sequence
  Description of Artificial Sequence: Synthetic oligonucleotide
agucaguuugcaaaggaac

SEQ ID NO: 3071145 - RNA, 19 nt, Artificial Sequence
  Description of Artificial Sequence: Synthetic oligonucleotide
uaugucgcuucauaugcag

SEQ ID NO: 3071146 - RNA, 19 nt, Artificial Sequence
  Description of Artificial Sequence: Synthetic oligonucleotide
aauaaauagcagucaguuu

SEQ ID NO: 3071147 - RNA, 19 nt, Artificial Sequence
  Description of Artificial Sequence: Synthetic oligonucleotide
cauaugcagggccaggugg

SEQ ID NO: 3071148 - RNA, 19 nt, Artificial Sequence
  Description of Artificial Sequence: Synthetic oligonucleotide
acauaugucgcuucauaug

SEQ ID NO: 3071149 - RNA, 19 nt, Artificial Sequence
  Description of Artificial Sequence: Synthetic oligonucleotide
guugcaaugauacggcuuc

SEQ ID NO: 3071150 - RNA, 19 nt, Artificial Sequence
  Description of Artificial Sequence: Synthetic oligonucleotide
acaaguggcacuggaaggg

SEQ ID NO: 3071151 - RNA, 19 nt, Artificial Sequence
  Description of Artificial Sequence: Synthetic oligonucleotide
agucaauguccugugggcc

SEQ ID NO: 3071152 - RNA, 19 nt, Artificial Sequence
  Description of Artificial Sequence: Synthetic oligonucleotide
aauagcagucaguuugcaa

SEQ ID NO: 3071153 - RNA, 19 nt, Artificial Sequence
  Description of Artificial Sequence: Synthetic oligonucleotide
uacauaugucgcuucauau

SEQ ID NO: 3071154 - RNA, 19 nt, Artificial Sequence
  Description of Artificial Sequence: Synthetic oligonucleotide
gagucaauguccugugggc

SEQ ID NO: 3071155 - RNA, 19 nt, Artificial Sequence
  Description of Artificial Sequence: Synthetic oligonucleotide
cacaaguggcacuggaagg

SEQ ID NO: 3071156 - RNA, 19 nt, Artificial Sequence
  Description of Artificial Sequence: Synthetic oligonucleotide
uugcaaaggaaccgugccc

SEQ ID NO: 3071157 - RNA, 19 nt, Artificial Sequence
  Description of Artificial Sequence: Synthetic oligonucleotide
aaggaaccgugcccggcgc

SEQ ID NO: 3071158 - RNA, 19 nt, Artificial Sequence
  Description of Artificial Sequence: Synthetic oligonucleotide
caaugauacggcuucucac

SEQ ID NO: 3071159 - RNA, 19 nt, Artificial Sequence
  Description of Artificial Sequence: Synthetic oligonucleotide
guuagcucguccgagcgcg

SEQ ID NO: 3071160 - RNA, 19 nt, Artificial Sequence
  Description of Artificial Sequence: Synthetic oligonucleotide
agcgcgcgaacuuccagcc

SEQ ID NO: 3071161 - RNA, 19 nt, Artificial Sequence
  Description of Artificial Sequence: Synthetic oligonucleotide
gguaguugggucuacccag

SEQ ID NO: 3071162 - RNA, 19 nt, Artificial Sequence
  Description of Artificial Sequence: Synthetic oligonucleotide
ugugugcuugcgguaaugg

SEQ ID NO: 3071163 - RNA, 19 nt, Artificial Sequence
  Description of Artificial Sequence: Synthetic oligonucleotide
uagcagucaguuugcaaag

SEQ ID NO: 3071164 - RNA, 19 nt, Artificial Sequence
  Description of Artificial Sequence: Synthetic oligonucleotide
gucaguuugcaaaggaacc

SEQ ID NO: 3071165 - RNA, 19 nt, Artificial Sequence
  Description of Artificial Sequence: Synthetic oligonucleotide
ggcacggucgcacaagugg

SEQ ID NO: 3071166 - RNA, 19 nt, Artificial Sequence
  Description of Artificial Sequence: Synthetic oligonucleotide
ucauaugcagggccaggug

SEQ ID NO: 3071167 - RNA, 19 nt, Artificial Sequence
  Description of Artificial Sequence: Synthetic oligonucleotide
cugugggccacacuggccc

SEQ ID NO: 3071168 - RNA, 19 nt, Artificial Sequence
  Description of Artificial Sequence: Synthetic oligonucleotide
uggucggaccuggagaagg

SEQ ID NO: 3071169 - RNA, 19 nt, Artificial Sequence
  Description of Artificial Sequence: Synthetic oligonucleotide
aaguggcacuggaagggcc

SEQ ID NO: 3071170 - RNA, 19 nt, Artificial Sequence
  Description of Artificial Sequence: Synthetic oligonucleotide
gucccaguugcaaugauac

SEQ ID NO: 3071171 - RNA, 19 nt, Artificial Sequence
  Description of Artificial Sequence: Synthetic oligonucleotide
ucuacccaggcuacauaug

SEQ ID NO: 3071172 - RNA, 19 nt, Artificial Sequence
  Description of Artificial Sequence: Synthetic oligonucleotide
caggguccaauaaauagca

SEQ ID NO: 3071173 - RNA, 19 nt, Artificial Sequence
  Description of Artificial Sequence: Synthetic oligonucleotide
cacuggaagggccuguggc

SEQ ID NO: 3071174 - RNA, 19 nt, Artificial Sequence
  Description of Artificial Sequence: Synthetic oligonucleotide
cccaguugcaaugauacgg

SEQ ID NO: 3071175 - RNA, 19 nt, Artificial Sequence
  Description of Artificial Sequence: Synthetic oligonucleotide
uucauaugcagggccaggu

SEQ ID NO: 3071176 - RNA, 19 nt, Artificial Sequence
  Description of Artificial Sequence: Synthetic oligonucleotide
gcacaaguggcacuggaag

SEQ ID NO: 3071177 - RNA, 19 nt, Artificial Sequence
  Description of Artificial Sequence: Synthetic oligonucleotide
aauguccugugggccacac

SEQ ID NO: 3071178 - RNA, 19 nt, Artificial Sequence
  Description of Artificial Sequence: Synthetic oligonucleotide
uggcggguuagcucguccg

SEQ ID NO: 3071179 - RNA, 19 nt, Artificial Sequence
  Description of Artificial Sequence: Synthetic oligonucleotide
guuugcaaaggaaccgugc

SEQ ID NO: 3071180 - RNA, 19 nt, Artificial Sequence
  Description of Artificial Sequence: Synthetic oligonucleotide
aaggcacggucgcacaagu

SEQ ID NO: 3071181 - RNA, 19 nt, Artificial Sequence
  Description of Artificial Sequence: Synthetic oligonucleotide
augauacggcuucucaccu

SEQ ID NO: 3071182 - RNA, 19 nt, Artificial Sequence
  Description of Artificial Sequence: Synthetic oligonucleotide
ccaggguccaauaaauagc

SEQ ID NO: 3071183 - RNA, 19 nt, Artificial Sequence
  Description of Artificial Sequence: Synthetic oligonucleotide
ucccaguugcaaugauacg

SEQ ID NO: 3071184 - RNA, 19 nt, Artificial Sequence
  Description of Artificial Sequence: Synthetic oligonucleotide
gugcuugcgguaauggcgg

SEQ ID NO: 3071185 - RNA, 19 nt, Artificial Sequence
  Description of Artificial Sequence: Synthetic oligonucleotide
auggcggguuagcucgucc

SEQ ID NO: 3071186 - RNA, 19 nt, Artificial Sequence
  Description of Artificial Sequence: Synthetic oligonucleotide
guugggucuacccaggcua

SEQ ID NO: 3071187 - RNA, 19 nt, Artificial Sequence
  Description of Artificial Sequence: Synthetic oligonucleotide
uccugugggccacacuggc

SEQ ID NO: 3071188 - RNA, 19 nt, Artificial Sequence
  Description of Artificial Sequence: Synthetic oligonucleotide
ucggaccuggagaaggcac

SEQ ID NO: 3071189 - RNA, 19 nt, Artificial Sequence
  Description of Artificial Sequence: Synthetic oligonucleotide
gguccaauaaauagcaguc

SEQ ID NO: 3071190 - RNA, 19 nt, Artificial Sequence
  Description of Artificial Sequence: Synthetic oligonucleotide
aaauagcagucaguuugca

SEQ ID NO: 3071191 - RNA, 19 nt, Artificial Sequence
  Description of Artificial Sequence: Synthetic oligonucleotide
gagcgcgcgaacuuccagc

SEQ ID NO: 3071192 - RNA, 19 nt, Artificial Sequence
  Description of Artificial Sequence: Synthetic oligonucleotide
uggccugugugcuugcggu

SEQ ID NO: 3071193 - RNA, 19 nt, Artificial Sequence
  Description of Artificial Sequence: Synthetic oligonucleotide
ugcgguaauggcggguuag

SEQ ID NO: 3071194 - RNA, 19 nt, Artificial Sequence
  Description of Artificial Sequence: Synthetic oligonucleotide
ccaguugcaaugauacggc

SEQ ID NO: 3071195 - RNA, 19 nt, Artificial Sequence
  Description of Artificial Sequence: Synthetic oligonucleotide
ugauacggcuucucaccug

SEQ ID NO: 3071196 - RNA, 19 nt, Artificial Sequence
  Description of Artificial Sequence: Synthetic oligonucleotide
aacuuccagccgcagccgu

SEQ ID NO: 3071197 - RNA, 19 nt, Artificial Sequence
  Description of Artificial Sequence: Synthetic oligonucleotide
guaguugggucuacccagg

SEQ ID NO: 3071198 - RNA, 19 nt, Artificial Sequence
  Description of Artificial Sequence: Synthetic oligonucleotide
gucaauguccugugggcca

SEQ ID NO: 3071199 - RNA, 19 nt, Artificial Sequence
  Description of Artificial Sequence: Synthetic oligonucleotide
uaguugggucuacccaggc

SEQ ID NO: 3071200 - RNA, 19 nt, Artificial Sequence
  Description of Artificial Sequence: Synthetic oligonucleotide
aguugggucuacccaggcu

SEQ ID NO: 3071201 - RNA, 19 nt, Artificial Sequence
  Description of Artificial Sequence: Synthetic oligonucleotide
gugugcuugcgguaauggc

SEQ ID NO: 3071202 - RNA, 19 nt, Artificial Sequence
  Description of Artificial Sequence: Synthetic oligonucleotide
agcagucaguuugcaaagg

SEQ ID NO: 3071203 - RNA, 19 nt, Artificial Sequence
  Description of Artificial Sequence: Synthetic oligonucleotide
aggcuacauaugucgcuuc

SEQ ID NO: 3071204 - RNA, 19 nt, Artificial Sequence
  Description of Artificial Sequence: Synthetic oligonucleotide
gaaggcacggucgcacaag

SEQ ID NO: 3071205 - RNA, 19 nt, Artificial Sequence
  Description of Artificial Sequence: Synthetic oligonucleotide
uugggucuacccaggcuac

SEQ ID NO: 3071206 - RNA, 19 nt, Artificial Sequence
  Description of Artificial Sequence: Synthetic oligonucleotide
uccgagcgcgcgaacuucc

SEQ ID NO: 3071207 - RNA, 19 nt, Artificial Sequence
  Description of Artificial Sequence: Synthetic oligonucleotide
cagagucaauguccugugg

SEQ ID NO: 3071208 - RNA, 19 nt, Artificial Sequence
  Description of Artificial Sequence: Synthetic oligonucleotide
ucgcacaaguggcacugga

SEQ ID NO: 3071209 - RNA, 19 nt, Artificial Sequence
  Description of Artificial Sequence: Synthetic oligonucleotide
cuucauaugcagggccagg

SEQ ID NO: 3071210 - RNA, 19 nt, Artificial Sequence
  Description of Artificial Sequence: Synthetic oligonucleotide
gguaauggcggguuagcuc

SEQ ID NO: 3071211 - RNA, 19 nt, Artificial Sequence
  Description of Artificial Sequence: Synthetic oligonucleotide
acuggccccggcccacucc

SEQ ID NO: 3071212 - RNA, 19 nt, Artificial Sequence
  Description of Artificial Sequence: Synthetic oligonucleotide
gaacuuccagccgcagccg

SEQ ID NO: 3071213 - RNA, 19 nt, Artificial Sequence
  Description of Artificial Sequence: Synthetic oligonucleotide
ggguuagcucguccgagcg

SEQ ID NO: 3071214 - RNA, 19 nt, Artificial Sequence
  Description of Artificial Sequence: Synthetic oligonucleotide
cgaacuuccagccgcagcc

SEQ ID NO: 3071215 - RNA, 19 nt, Artificial Sequence
  Description of Artificial Sequence: Synthetic oligonucleotide
aguuugcaaaggaaccgug

SEQ ID NO: 3071216 - RNA, 19 nt, Artificial Sequence
  Description of Artificial Sequence: Synthetic oligonucleotide
aaccgugcccggcgcgugg

SEQ ID NO: 3071217 - RNA, 19 nt, Artificial Sequence
  Description of Artificial Sequence: Synthetic oligonucleotide
agccgucccaguugcaaug

SEQ ID NO: 3071218 - RNA, 19 nt, Artificial Sequence
  Description of Artificial Sequence: Synthetic oligonucleotide
aauggcggguuagcucguc

SEQ ID NO: 3071219 - RNA, 19 nt, Artificial Sequence
  Description of Artificial Sequence: Synthetic oligonucleotide
augucgcuucauaugcagg

SEQ ID NO: 3071220 - RNA, 19 nt, Artificial Sequence
  Description of Artificial Sequence: Synthetic oligonucleotide
uacccaggcuacauauguc

SEQ ID NO: 3071221 - RNA, 19 nt, Artificial Sequence
  Description of Artificial Sequence: Synthetic oligonucleotide
acggucgcacaaguggcac

SEQ ID NO: 3071222 - RNA, 19 nt, Artificial Sequence
  Description of Artificial Sequence: Synthetic oligonucleotide
guggccugugugcuugcgg

SEQ ID NO: 3071223 - RNA, 19 nt, Artificial Sequence
  Description of Artificial Sequence: Synthetic oligonucleotide
cuacauaugucgcuucaua

SEQ ID NO: 3071224 - RNA, 19 nt, Artificial Sequence
  Description of Artificial Sequence: Synthetic oligonucleotide
guccaauaaauagcaguca

SEQ ID NO: 3071225 - RNA, 19 nt, Artificial Sequence
  Description of Artificial Sequence: Synthetic oligonucleotide
cuggccggcagagucaaug

SEQ ID NO: 3071226 - RNA, 19 nt, Artificial Sequence
  Description of Artificial Sequence: Synthetic oligonucleotide
ugcaaugauacggcuucuc

SEQ ID NO: 3071227 - RNA, 19 nt, Artificial Sequence
  Description of Artificial Sequence: Synthetic oligonucleotide
ggguccaauaaauagcagu

SEQ ID NO: 3071228 - RNA, 19 nt, Artificial Sequence
  Description of Artificial Sequence: Synthetic oligonucleotide
caaguggcacuggaagggc

SEQ ID NO: 3071229 - RNA, 19 nt, Artificial Sequence
  Description of Artificial Sequence: Synthetic oligonucleotide
cuuccagccgcagccgucc

SEQ ID NO: 3071230 - RNA, 19 nt, Artificial Sequence
  Description of Artificial Sequence: Synthetic oligonucleotide
caaaggaaccgugcccggc

SEQ ID NO: 3071231 - RNA, 19 nt, Artificial Sequence
  Description of Artificial Sequence: Synthetic oligonucleotide
gcaaugauacggcuucuca

SEQ ID NO: 3071232 - RNA, 19 nt, Artificial Sequence
  Description of Artificial Sequence: Synthetic oligonucleotide
auaugcagggccagguggu

SEQ ID NO: 3071233 - RNA, 19 nt, Artificial Sequence
  Description of Artificial Sequence: Synthetic oligonucleotide
ugcuugcgguaauggcggg

SEQ ID NO: 3071234 - RNA, 19 nt, Artificial Sequence
  Description of Artificial Sequence: Synthetic oligonucleotide
aggaaccgugcccggcgcg

SEQ ID NO: 3071235 - RNA, 19 nt, Artificial Sequence
  Description of Artificial Sequence: Synthetic oligonucleotide
gggguaguugggucuaccc

SEQ ID NO: 3071236 - RNA, 19 nt, Artificial Sequence
  Description of Artificial Sequence: Synthetic oligonucleotide
uggccggcagagucaaugu

SEQ ID NO: 3071237 - RNA, 19 nt, Artificial Sequence
  Description of Artificial Sequence: Synthetic oligonucleotide
aguugcaaugauacggcuu

SEQ ID NO: 3071238 - RNA, 19 nt, Artificial Sequence
  Description of Artificial Sequence: Synthetic oligonucleotide
cuacccaggcuacauaugu

SEQ ID NO: 3071239 - RNA, 19 nt, Artificial Sequence
  Description of Artificial Sequence: Synthetic oligonucleotide
ccgcgcaugggguaguugg

SEQ ID NO: 3071240 - RNA, 19 nt, Artificial Sequence
  Description of Artificial Sequence: Synthetic oligonucleotide
gcagagucaauguccugug

SEQ ID NO: 3071241 - RNA, 19 nt, Artificial Sequence
  Description of Artificial Sequence: Synthetic oligonucleotide
agaaggcacggucgcacaa

SEQ ID NO: 3071242 - RNA, 19 nt, Artificial Sequence
  Description of Artificial Sequence: Synthetic oligonucleotide
uguggccugugugcuugcg

SEQ ID NO: 3071243 - RNA, 19 nt, Artificial Sequence
  Description of Artificial Sequence: Synthetic oligonucleotide
gucgcuucauaugcagggc

SEQ ID NO: 3071244 - RNA, 19 nt, Artificial Sequence
  Description of Artificial Sequence: Synthetic oligonucleotide
gagaaggcacggucgcaca

SEQ ID NO: 3071245 - RNA, 19 nt, Artificial Sequence
  Description of Artificial Sequence: Synthetic oligonucleotide
ugugggccacacuggcccc

SEQ ID NO: 3071246 - RNA, 19 nt, Artificial Sequence
  Description of Artificial Sequence: Synthetic oligonucleotide
auaugucgcuucauaugca

SEQ ID NO: 3071247 - RNA, 19 nt, Artificial Sequence
  Description of Artificial Sequence: Synthetic oligonucleotide
uuagcucguccgagcgcgc

SEQ ID NO: 3071248 - RNA, 19 nt, Artificial Sequence
  Description of Artificial Sequence: Synthetic oligonucleotide
gcagucaguuugcaaagga

SEQ ID NO: 3071249 - RNA, 19 nt, Artificial Sequence
  Description of Artificial Sequence: Synthetic oligonucleotide
uagcucguccgagcgcgcg

SEQ ID NO: 3071250 - RNA, 19 nt, Artificial Sequence
  Description of Artificial Sequence: Synthetic oligonucleotide
aacuggccggcagagucaa

SEQ ID NO: 3071251 - RNA, 19 nt, Artificial Sequence
  Description of Artificial Sequence: Synthetic oligonucleotide
gccacggccgcgcaugggg

SEQ ID NO: 3071252 - RNA, 19 nt, Artificial Sequence
  Description of Artificial Sequence: Synthetic oligonucleotide
uggaagggccuguggccug

SEQ ID NO: 3071253 - RNA, 19 nt, Artificial Sequence
  Description of Artificial Sequence: Synthetic oligonucleotide
ugggguaguugggucuacc

SEQ ID NO: 3071254 - RNA, 19 nt, Artificial Sequence
  Description of Artificial Sequence: Synthetic oligonucleotide
uaauggcggguuagcucgu

SEQ ID NO: 3071255 - RNA, 19 nt, Artificial Sequence
  Description of Artificial Sequence: Synthetic oligonucleotide
gucuacccaggcuacauau

SEQ ID NO: 3071256 - RNA, 19 nt, Artificial Sequence
  Description of Artificial Sequence: Synthetic oligonucleotide
gccggcagagucaaugucc

SEQ ID NO: 3071257 - RNA, 19 nt, Artificial Sequence
  Description of Artificial Sequence: Synthetic oligonucleotide
ggguaguugggucuaccca

SEQ ID NO: 3071258 - RNA, 19 nt, Artificial Sequence
  Description of Artificial Sequence: Synthetic oligonucleotide
ggucgcacaaguggcacug

SEQ ID NO: 3071259 - RNA, 19 nt, Artificial Sequence
  Description of Artificial Sequence: Synthetic oligonucleotide
gcaaaggaaccgugcccgg

SEQ ID NO: 3071260 - RNA, 19 nt, Artificial Sequence
  Description of Artificial Sequence: Synthetic oligonucleotide
gugggacccgccacggccg

SEQ ID NO: 3071261 - RNA, 19 nt, Artificial Sequence
  Description of Artificial Sequence: Synthetic oligonucleotide
aagggccuguggccugugu

SEQ ID NO: 3071262 - RNA, 19 nt, Artificial Sequence
  Description of Artificial Sequence: Synthetic oligonucleotide
ggagaaggcacggucgcac

SEQ ID NO: 3071263 - RNA, 19 nt, Artificial Sequence
  Description of Artificial Sequence: Synthetic oligonucleotide
uggagaaggcacggucgca

SEQ ID NO: 3071264 - RNA, 19 nt, Artificial Sequence
  Description of Artificial Sequence: Synthetic oligonucleotide
aggguccaauaaauagcag

SEQ ID NO: 3071265 - RNA, 19 nt, Artificial Sequence
  Description of Artificial Sequence: Synthetic oligonucleotide
acuuccagccgcagccguc

SEQ ID NO: 3071266 - RNA, 19 nt, Artificial Sequence
  Description of Artificial Sequence: Synthetic oligonucleotide
gguuagcucguccgagcgc

SEQ ID NO: 3071267 - RNA, 19 nt, Artificial Sequence
  Description of Artificial Sequence: Synthetic oligonucleotide
ucguccgagcgcgcgaacu

SEQ ID NO: 3071268 - RNA, 19 nt, Artificial Sequence
  Description of Artificial Sequence: Synthetic oligonucleotide
uugcaaugauacggcuucu

SEQ ID NO: 3071269 - RNA, 19 nt, Artificial Sequence
  Description of Artificial Sequence: Synthetic oligonucleotide
gaacuggccggcagaguca

SEQ ID NO: 3071270 - RNA, 19 nt, Artificial Sequence
  Description of Artificial Sequence: Synthetic oligonucleotide
ggcuacauaugucgcuuca

SEQ ID NO: 3071271 - RNA, 19 nt, Artificial Sequence
  Description of Artificial Sequence: Synthetic oligonucleotide
gcuucauaugcagggccag

SEQ ID NO: 3071272 - RNA, 19 nt, Artificial Sequence
  Description of Artificial Sequence: Synthetic oligonucleotide
cccaggcuacauaugucgc

SEQ ID NO: 3071273 - RNA, 19 nt, Artificial Sequence
  Description of Artificial Sequence: Synthetic oligonucleotide
uccagccgcagccguccca

SEQ ID NO: 3071274 - RNA, 19 nt, Artificial Sequence
  Description of Artificial Sequence: Synthetic oligonucleotide
acuccuccaggguccaaua

SEQ ID NO: 3071275 - RNA, 19 nt, Artificial Sequence
  Description of Artificial Sequence: Synthetic oligonucleotide
uaugcagggccaggugguc

SEQ ID NO: 3071276 - RNA, 19 nt, Artificial Sequence
  Description of Artificial Sequence: Synthetic oligonucleotide
augggguaguugggucuac

SEQ ID NO: 3071277 - RNA, 19 nt, Artificial Sequence
  Description of Artificial Sequence: Synthetic oligonucleotide
gccacacuggccccggccc

SEQ ID NO: 3071278 - RNA, 19 nt, Artificial Sequence
  Description of Artificial Sequence: Synthetic oligonucleotide
gcgaacuuccagccgcagc

SEQ ID NO: 3071279 - RNA, 19 nt, Artificial Sequence
  Description of Artificial Sequence: Synthetic oligonucleotide
ugggccacacuggccccgg

SEQ ID NO: 3071280 - RNA, 19 nt, Artificial Sequence
  Description of Artificial Sequence: Synthetic oligonucleotide
cugugugcuugcgguaaug

SEQ ID NO: 3071281 - RNA, 19 nt, Artificial Sequence
  Description of Artificial Sequence: Synthetic oligonucleotide
uugcgguaauggcggguua

SEQ ID NO: 3071282 - RNA, 19 nt, Artificial Sequence
  Description of Artificial Sequence: Synthetic oligonucleotide
ggcagagucaauguccugu

SEQ ID NO: 3071283 - RNA, 19 nt, Artificial Sequence
  Description of Artificial Sequence: Synthetic oligonucleotide
gcacuggaagggccugugg

SEQ ID NO: 3071284 - RNA, 19 nt, Artificial Sequence
  Description of Artificial Sequence: Synthetic oligonucleotide
uuccagccgcagccguccc

SEQ ID NO: 3071285 - RNA, 19 nt, Artificial Sequence
  Description of Artificial Sequence: Synthetic oligonucleotide
agcucguccgagcgcgcga

SEQ ID NO: 3071286 - RNA, 19 nt, Artificial Sequence
  Description of Artificial Sequence: Synthetic oligonucleotide
gucgcacaaguggcacugg

SEQ ID NO: 3071287 - RNA, 19 nt, Artificial Sequence
  Description of Artificial Sequence: Synthetic oligonucleotide
gcacggucgcacaaguggc

SEQ ID NO: 3071288 - RNA, 19 nt, Artificial Sequence
  Description of Artificial Sequence: Synthetic oligonucleotide
cacggucgcacaaguggca

SEQ ID NO: 3071289 - RNA, 19 nt, Artificial Sequence
  Description of Artificial Sequence: Synthetic oligonucleotide
ugggacccgccacggccgc

SEQ ID NO: 3071290 - RNA, 19 nt, Artificial Sequence
  Description of Artificial Sequence: Synthetic oligonucleotide
auguccugugggccacacu

SEQ ID NO: 3071291 - RNA, 19 nt, Artificial Sequence
  Description of Artificial Sequence: Synthetic oligonucleotide
ugggucuacccaggcuaca

SEQ ID NO: 3071292 - RNA, 19 nt, Artificial Sequence
  Description of Artificial Sequence: Synthetic oligonucleotide
cgcgcgaacuuccagccgc

SEQ ID NO: 3071293 - RNA, 19 nt, Artificial Sequence
  Description of Artificial Sequence: Synthetic oligonucleotide
ccaauaaauagcagucagu

SEQ ID NO: 3071294 - RNA, 19 nt, Artificial Sequence
  Description of Artificial Sequence: Synthetic oligonucleotide
ggccagaacuggccggcag

SEQ ID NO: 3071295 - RNA, 19 nt, Artificial Sequence
  Description of Artificial Sequence: Synthetic oligonucleotide
ugcccggcgcgugggaccc

SEQ ID NO: 3071296 - RNA, 19 nt, Artificial Sequence
  Description of Artificial Sequence: Synthetic oligonucleotide
cgugggacccgccacggcc

SEQ ID NO: 3071297 - RNA, 19 nt, Artificial Sequence
  Description of Artificial Sequence: Synthetic oligonucleotide
gugcccggcgcgugggacc

SEQ ID NO: 3071298 - RNA, 19 nt, Artificial Sequence
  Description of Artificial Sequence: Synthetic oligonucleotide
acggccgcgcaugggguag

SEQ ID NO: 3071299 - RNA, 19 nt, Artificial Sequence
  Description of Artificial Sequence: Synthetic oligonucleotide
caguuugcaaaggaaccgu

SEQ ID NO: 3071300 - RNA, 19 nt, Artificial Sequence
  Description of Artificial Sequence: Synthetic oligonucleotide
gccgcagccgucccaguug

SEQ ID NO: 3071301 - RNA, 19 nt, Artificial Sequence
  Description of Artificial Sequence: Synthetic oligonucleotide
ccugugggccacacuggcc

SEQ ID NO: 3071302 - RNA, 19 nt, Artificial Sequence
  Description of Artificial Sequence: Synthetic oligonucleotide
gaaccgugcccggcgcgug

SEQ ID NO: 3071303 - RNA, 19 nt, Artificial Sequence
  Description of Artificial Sequence: Synthetic oligonucleotide
cuguggccugugugcuugc

SEQ ID NO: 3071304 - RNA, 19 nt, Artificial Sequence
  Description of Artificial Sequence: Synthetic oligonucleotide
agccgcagccgucccaguu

SEQ ID NO: 3071305 - RNA, 19 nt, Artificial Sequence
  Description of Artificial Sequence: Synthetic oligonucleotide
ggccacacuggccccggcc

SEQ ID NO: 3071306 - RNA, 19 nt, Artificial Sequence
  Description of Artificial Sequence: Synthetic oligonucleotide
guggcacuggaagggccug

SEQ ID NO: 3071307 - RNA, 19 nt, Artificial Sequence
  Description of Artificial Sequence: Synthetic oligonucleotide
ggucggaccuggagaaggc

SEQ ID NO: 3071308 - RNA, 19 nt, Artificial Sequence
  Description of Artificial Sequence: Synthetic oligonucleotide
ccuguggccugugugcuug

SEQ ID NO: 3071309 - RNA, 19 nt, Artificial Sequence
  Description of Artificial Sequence: Synthetic oligonucleotide
gccagaacuggccggcaga

SEQ ID NO: 3071310 - RNA, 19 nt, Artificial Sequence
  Description of Artificial Sequence: Synthetic oligonucleotide
caguugcaaugauacggcu

SEQ ID NO: 3071311 - RNA, 19 nt, Artificial Sequence
  Description of Artificial Sequence: Synthetic oligonucleotide
uggcacuggaagggccugu

SEQ ID NO: 3071312 - RNA, 19 nt, Artificial Sequence
  Description of Artificial Sequence: Synthetic oligonucleotide
accgugcccggcgcguggg

SEQ ID NO: 3071313 - RNA, 19 nt, Artificial Sequence
  Description of Artificial Sequence: Synthetic oligonucleotide
gucggaccuggagaaggca

SEQ ID NO: 3071314 - RNA, 19 nt, Artificial Sequence
  Description of Artificial Sequence: Synthetic oligonucleotide
gcggguuagcucguccgag

SEQ ID NO: 3071315 - RNA, 19 nt, Artificial Sequence
  Description of Artificial Sequence: Synthetic oligonucleotide
ggggccagaacuggccggc

SEQ ID NO: 3071316 - RNA, 19 nt, Artificial Sequence
  Description of Artificial Sequence: Synthetic oligonucleotide
gcgcgugggacccgccacg

SEQ ID NO: 3071317 - RNA, 19 nt, Artificial Sequence
  Description of Artificial Sequence: Synthetic oligonucleotide
gcgguaauggcggguuagc

SEQ ID NO: 3071318 - RNA, 19 nt, Artificial Sequence
  Description of Artificial Sequence: Synthetic oligonucleotide
caugggguaguugggucua

SEQ ID NO: 3071319 - RNA, 19 nt, Artificial Sequence
  Description of Artificial Sequence: Synthetic oligonucleotide
cuccuccaggguccaauaa

SEQ ID NO: 3071320 - RNA, 19 nt, Artificial Sequence
  Description of Artificial Sequence: Synthetic oligonucleotide
gcaugggguaguugggucu

SEQ ID NO: 3071321 - RNA, 19 nt, Artificial Sequence
  Description of Artificial Sequence: Synthetic oligonucleotide
ggcggguuagcucguccga

SEQ ID NO: 3071322 - RNA, 19 nt, Artificial Sequence
  Description of Artificial Sequence: Synthetic oligonucleotide
cacacuggccccggcccac

SEQ ID NO: 3071323 - RNA, 19 nt, Artificial Sequence
  Description of Artificial Sequence: Synthetic oligonucleotide
guccgagcgcgcgaacuuc

SEQ ID NO: 3071324 - RNA, 19 nt, Artificial Sequence
  Description of Artificial Sequence: Synthetic oligonucleotide
aggcacggucgcacaagug

SEQ ID NO: 3071325 - RNA, 19 nt, Artificial Sequence
  Description of Artificial Sequence: Synthetic oligonucleotide
ggccggcagagucaauguc

SEQ ID NO: 3071326 - RNA, 19 nt, Artificial Sequence
  Description of Artificial Sequence: Synthetic oligonucleotide
cggguuagcucguccgagc

SEQ ID NO: 3071327 - RNA, 19 nt, Artificial Sequence
  Description of Artificial Sequence: Synthetic oligonucleotide
gcccacuccuccagggucc

SEQ ID NO: 3071328 - RNA, 19 nt, Artificial Sequence
  Description of Artificial Sequence: Synthetic oligonucleotide
cgcgcaugggguaguuggg

SEQ ID NO: 3071329 - RNA, 19 nt, Artificial Sequence
  Description of Artificial Sequence: Synthetic oligonucleotide
ggcgcgugggacccgccac

SEQ ID NO: 3071330 - RNA, 19 nt, Artificial Sequence
  Description of Artificial Sequence: Synthetic oligonucleotide
gaagggccuguggccugug

SEQ ID NO: 3071331 - RNA, 19 nt, Artificial Sequence
  Description of Artificial Sequence: Synthetic oligonucleotide
cuugcgguaauggcggguu

SEQ ID NO: 3071332 - RNA, 19 nt, Artificial Sequence
  Description of Artificial Sequence: Synthetic oligonucleotide
ccgcagccgucccaguugc

SEQ ID NO: 3071333 - RNA, 19 nt, Artificial Sequence
  Description of Artificial Sequence: Synthetic oligonucleotide
ggccccggcccacuccucc

SEQ ID NO: 3071334 - RNA, 19 nt, Artificial Sequence
  Description of Artificial Sequence: Synthetic oligonucleotide
ggucuacccaggcuacaua

SEQ ID NO: 3071335 - RNA, 19 nt, Artificial Sequence
  Description of Artificial Sequence: Synthetic oligonucleotide
ccagccgcagccgucccag

SEQ ID NO: 3071336 - RNA, 19 nt, Artificial Sequence
  Description of Artificial Sequence: Synthetic oligonucleotide
gcgcgcgaacuuccagccg

SEQ ID NO: 3071337 - RNA, 19 nt, Artificial Sequence
  Description of Artificial Sequence: Synthetic oligonucleotide
cucguccgagcgcgcgaac

SEQ ID NO: 3071338 - RNA, 19 nt, Artificial Sequence
  Description of Artificial Sequence: Synthetic oligonucleotide
caggcuacauaugucgcuu

SEQ ID NO: 3071339 - RNA, 19 nt, Artificial Sequence
  Description of Artificial Sequence: Synthetic oligonucleotide
cgcaugggguaguuggguc

SEQ ID NO: 3071340 - RNA, 19 nt, Artificial Sequence
  Description of Artificial Sequence: Synthetic oligonucleotide
cgcuucauaugcagggcca

SEQ ID NO: 3071341 - RNA, 19 nt, Artificial Sequence
  Description of Artificial Sequence: Synthetic oligonucleotide
ccuccaggguccaauaaau

SEQ ID NO: 3071342 - RNA, 19 nt, Artificial Sequence
  Description of Artificial Sequence: Synthetic oligonucleotide
ggacccgccacggccgcgc

SEQ ID NO: 3071343 - RNA, 19 nt, Artificial Sequence
  Description of Artificial Sequence: Synthetic oligonucleotide
gccugugugcuugcgguaa

SEQ ID NO: 3071344 - RNA, 19 nt, Artificial Sequence
  Description of Artificial Sequence: Synthetic oligonucleotide
ccaggcuacauaugucgcu

SEQ ID NO: 3071345 - RNA, 19 nt, Artificial Sequence
  Description of Artificial Sequence: Synthetic oligonucleotide
gaccuggagaaggcacggu

SEQ ID NO: 3071346 - RNA, 19 nt, Artificial Sequence
  Description of Artificial Sequence: Synthetic oligonucleotide
cacuggccccggcccacuc

SEQ ID NO: 3071347 - RNA, 19 nt, Artificial Sequence
  Description of Artificial Sequence: Synthetic oligonucleotide
acacuggccccggcccacu

SEQ ID NO: 3071348 - RNA, 19 nt, Artificial Sequence
  Description of Artificial Sequence: Synthetic oligonucleotide
cuggccccggcccacuccu

SEQ ID NO: 3071349 - RNA, 19 nt, Artificial Sequence
  Description of Artificial Sequence: Synthetic oligonucleotide
ccggcagagucaauguccu

SEQ ID NO: 3071350 - RNA, 19 nt, Artificial Sequence
  Description of Artificial Sequence: Synthetic oligonucleotide
cagccgucccaguugcaau

SEQ ID NO: 3071351 - RNA, 19 nt, Artificial Sequence
  Description of Artificial Sequence: Synthetic oligonucleotide
cgagcgcgcgaacuuccag

SEQ ID NO: 3071352 - RNA, 19 nt, Artificial Sequence
  Description of Artificial Sequence: Synthetic oligonucleotide
gcuacauaugucgcuucau

SEQ ID NO: 3071353 - RNA, 19 nt, Artificial Sequence
  Description of Artificial Sequence: Synthetic oligonucleotide
gccgucccaguugcaauga

SEQ ID NO: 3071354 - RNA, 19 nt, Artificial Sequence
  Description of Artificial Sequence: Synthetic oligonucleotide
uggccccggcccacuccuc

SEQ ID NO: 3071355 - RNA, 19 nt, Artificial Sequence
  Description of Artificial Sequence: Synthetic oligonucleotide
caauguccugugggccaca

SEQ ID NO: 3071356 - RNA, 19 nt, Artificial Sequence
  Description of Artificial Sequence: Synthetic oligonucleotide
cccgccacggccgcgcaug

SEQ ID NO: 3071357 - RNA, 19 nt, Artificial Sequence
  Description of Artificial Sequence: Synthetic oligonucleotide
gacccgccacggccgcgca

SEQ ID NO: 3071358 - RNA, 19 nt, Artificial Sequence
  Description of Artificial Sequence: Synthetic oligonucleotide
cacuccuccaggguccaau

SEQ ID NO: 3071359 - RNA, 19 nt, Artificial Sequence
  Description of Artificial Sequence: Synthetic oligonucleotide
cacggccgcgcauggggua

SEQ ID NO: 3071360 - RNA, 19 nt, Artificial Sequence
  Description of Artificial Sequence: Synthetic oligonucleotide
cgucccaguugcaaugaua

SEQ ID NO: 3071361 - RNA, 19 nt, Artificial Sequence
  Description of Artificial Sequence: Synthetic oligonucleotide
ggccugugugcuugcggua

SEQ ID NO: 3071362 - RNA, 19 nt, Artificial Sequence
  Description of Artificial Sequence: Synthetic oligonucleotide
acccgccacggccgcgcau

SEQ ID NO: 3071363 - RNA, 19 nt, Artificial Sequence
  Description of Artificial Sequence: Synthetic oligonucleotide
gcgugggacccgccacggc

SEQ ID NO: 3071364 - RNA, 19 nt, Artificial Sequence
  Description of Artificial Sequence: Synthetic oligonucleotide
gggucuacccaggcuacau

SEQ ID NO: 3071365 - RNA, 19 nt, Artificial Sequence
  Description of Artificial Sequence: Synthetic oligonucleotide
ggaaccgugcccggcgcgu

SEQ ID NO: 3071366 - RNA, 19 nt, Artificial Sequence
  Description of Artificial Sequence: Synthetic oligonucleotide
gccgcgcaugggguaguug

SEQ ID NO: 3071367 - RNA, 19 nt, Artificial Sequence
  Description of Artificial Sequence: Synthetic oligonucleotide
ccccggcccacuccuccag

SEQ ID NO: 3071368 - RNA, 19 nt, Artificial Sequence
  Description of Artificial Sequence: Synthetic oligonucleotide
cagaacuggccggcagagu

SEQ ID NO: 3071369 - RNA, 19 nt, Artificial Sequence
  Description of Artificial Sequence: Synthetic oligonucleotide
cgcgugggacccgccacgg

SEQ ID NO: 3071370 - RNA, 19 nt, Artificial Sequence
  Description of Artificial Sequence: Synthetic oligonucleotide
gcucguccgagcgcgcgaa

SEQ ID NO: 3071371 - RNA, 19 nt, Artificial Sequence
  Description of Artificial Sequence: Synthetic oligonucleotide
ccgccacggccgcgcaugg

SEQ ID NO: 3071372 - RNA, 19 nt, Artificial Sequence
  Description of Artificial Sequence: Synthetic oligonucleotide
gcgcaugggguaguugggu

SEQ ID NO: 3071373 - RNA, 19 nt, Artificial Sequence
  Description of Artificial Sequence: Synthetic oligonucleotide
gcuugcgguaauggcgggu

SEQ ID NO: 3071374 - RNA, 19 nt, Artificial Sequence
  Description of Artificial Sequence: Synthetic oligonucleotide
gcgcgaacuuccagccgca

SEQ ID NO: 3071375 - RNA, 19 nt, Artificial Sequence
  Description of Artificial Sequence: Synthetic oligonucleotide
gggccacacuggccccggc

SEQ ID NO: 3071376 - RNA, 19 nt, Artificial Sequence
  Description of Artificial Sequence: Synthetic oligonucleotide
cggcagagucaauguccug

SEQ ID NO: 3071377 - RNA, 19 nt, Artificial Sequence
  Description of Artificial Sequence: Synthetic oligonucleotide
ggaagggccuguggccugu

SEQ ID NO: 3071378 - RNA, 19 nt, Artificial Sequence
  Description of Artificial Sequence: Synthetic oligonucleotide
gccccggcccacuccucca

SEQ ID NO: 3071379 - RNA, 19 nt, Artificial Sequence
  Description of Artificial Sequence: Synthetic oligonucleotide
ccgagcgcgcgaacuucca

SEQ ID NO: 3071380 - RNA, 19 nt, Artificial Sequence
  Description of Artificial Sequence: Synthetic oligonucleotide
acuggccggcagagucaau

SEQ ID NO: 3071381 - RNA, 19 nt, Artificial Sequence
  Description of Artificial Sequence: Synthetic oligonucleotide
cgcgaacuuccagccgcag

SEQ ID NO: 3071382 - RNA, 19 nt, Artificial Sequence
  Description of Artificial Sequence: Synthetic oligonucleotide
gggccagaacuggccggca

SEQ ID NO: 3071383 - RNA, 19 nt, Artificial Sequence
  Description of Artificial Sequence: Synthetic oligonucleotide
cccggcgcgugggacccgc

SEQ ID NO: 3071384 - RNA, 19 nt, Artificial Sequence
  Description of Artificial Sequence: Synthetic oligonucleotide
cgugcccggcgcgugggac

SEQ ID NO: 3071385 - RNA, 19 nt, Artificial Sequence
  Description of Artificial Sequence: Synthetic oligonucleotide
ccggcgcgugggacccgcc

SEQ ID NO: 3071386 - RNA, 19 nt, Artificial Sequence
  Description of Artificial Sequence: Synthetic oligonucleotide
cgguaauggcggguuagcu

SEQ ID NO: 3071387 - RNA, 19 nt, Artificial Sequence
  Description of Artificial Sequence: Synthetic oligonucleotide
cccacuccuccagggucca

SEQ ID NO: 3071388 - RNA, 19 nt, Artificial Sequence
  Description of Artificial Sequence: Synthetic oligonucleotide
ccugugugcuugcgguaau

SEQ ID NO: 3071389 - RNA, 19 nt, Artificial Sequence
  Description of Artificial Sequence: Synthetic oligonucleotide
ccacggccgcgcauggggu

SEQ ID NO: 3071390 - RNA, 19 nt, Artificial Sequence
  Description of Artificial Sequence: Synthetic oligonucleotide
cagccgcagccgucccagu

SEQ ID NO: 3071391 - RNA, 19 nt, Artificial Sequence
  Description of Artificial Sequence: Synthetic oligonucleotide
gccuguggccugugugcuu

SEQ ID NO: 3071392 - RNA, 19 nt, Artificial Sequence
  Description of Artificial Sequence: Synthetic oligonucleotide
cggucgcacaaguggcacu

SEQ ID NO: 3071393 - RNA, 19 nt, Artificial Sequence
  Description of Artificial Sequence: Synthetic oligonucleotide
cggcgcgugggacccgcca

SEQ ID NO: 3071394 - RNA, 19 nt, Artificial Sequence
  Description of Artificial Sequence: Synthetic oligonucleotide
gcccggcgcgugggacccg

SEQ ID NO: 3071395 - RNA, 19 nt, Artificial Sequence
  Description of Artificial Sequence: Synthetic oligonucleotide
cguccgagcgcgcgaacuu

SEQ ID NO: 3071396 - RNA, 19 nt, Artificial Sequence
  Description of Artificial Sequence: Synthetic oligonucleotide
ccgucccaguugcaaugau

SEQ ID NO: 3071397 - RNA, 19 nt, Artificial Sequence
  Description of Artificial Sequence: Synthetic oligonucleotide
cgcagccgucccaguugca

SEQ ID NO: 3071398 - RNA, 19 nt, Artificial Sequence
  Description of Artificial Sequence: Synthetic oligonucleotide
ccgugcccggcgcguggga

SEQ ID NO: 3071399 - RNA, 19 nt, Artificial Sequence
  Description of Artificial Sequence: Synthetic oligonucleotide
ggccgcgcaugggguaguu

SEQ ID NO: 3071400 - RNA, 19 nt, Artificial Sequence
  Description of Artificial Sequence: Synthetic oligonucleotide
ccacuccuccaggguccaa

SEQ ID NO: 3071401 - RNA, 19 nt, Artificial Sequence
  Description of Artificial Sequence: Synthetic oligonucleotide
cggccgcgcaugggguagu

SEQ ID NO: 3071402 - RNA, 19 nt, Artificial Sequence
  Description of Artificial Sequence: Synthetic oligonucleotide
uugcguuugauguugcugg

SEQ ID NO: 3071403 - RNA, 19 nt, Artificial Sequence
  Description of Artificial Sequence: Synthetic oligonucleotide
aaaauuccgggcuagggaa

SEQ ID NO: 3071404 - RNA, 19 nt, Artificial Sequence
  Description of Artificial Sequence: Synthetic oligonucleotide
aauugggccgccgaucugc

SEQ ID NO: 3071405 - RNA, 19 nt, Artificial Sequence
  Description of Artificial Sequence: Synthetic oligonucleotide
uuugauguugcugggcugg

SEQ ID NO: 3071406 - RNA, 19 nt, Artificial Sequence
  Description of Artificial Sequence: Synthetic oligonucleotide
aauuccaucggcguccgag

SEQ ID NO: 3071407 - RNA, 19 nt, Artificial Sequence
  Description of Artificial Sequence: Synthetic oligonucleotide
uugugcuugcguuugaugu

SEQ ID NO: 3071408 - RNA, 19 nt, Artificial Sequence
  Description of Artificial Sequence: Synthetic oligonucleotide
aauuccgggcuagggaagc

SEQ ID NO: 3071409 - RNA, 19 nt, Artificial Sequence
  Description of Artificial Sequence: Synthetic oligonucleotide
gauguugcugggcugguac

SEQ ID NO: 3071410 - RNA, 19 nt, Artificial Sequence
  Description of Artificial Sequence: Synthetic oligonucleotide
ucgggcaauuccaucggcg

SEQ ID NO: 3071411 - RNA, 19 nt, Artificial Sequence
  Description of Artificial Sequence: Synthetic oligonucleotide
gaggaugaccugcacgccg

SEQ ID NO: 3071412 - RNA, 19 nt, Artificial Sequence
  Description of Artificial Sequence: Synthetic oligonucleotide
uccgagucuauuccccgcg

SEQ ID NO: 3071413 - RNA, 19 nt, Artificial Sequence
  Description of Artificial Sequence: Synthetic oligonucleotide
agucuauuccccgcgggcc

SEQ ID NO: 3071414 - RNA, 19 nt, Artificial Sequence
  Description of Artificial Sequence: Synthetic oligonucleotide
ugggccgccgaucugcagg

SEQ ID NO: 3071415 - RNA, 19 nt, Artificial Sequence
  Description of Artificial Sequence: Synthetic oligonucleotide
augaccugcacgccggccg

SEQ ID NO: 3071416 - RNA, 19 nt, Artificial Sequence
  Description of Artificial Sequence: Synthetic oligonucleotide
cuggguugcagccaccugc

SEQ ID NO: 3071417 - RNA, 19 nt, Artificial Sequence
  Description of Artificial Sequence: Synthetic oligonucleotide
gauccagccgugcuugugc

SEQ ID NO: 3071418 - RNA, 19 nt, Artificial Sequence
  Description of Artificial Sequence: Synthetic oligonucleotide
ugguacucguucccgcgcg

SEQ ID NO: 3071419 - RNA, 19 nt, Artificial Sequence
  Description of Artificial Sequence: Synthetic oligonucleotide
guugcagccaccugccacc

SEQ ID NO: 3071420 - RNA, 19 nt, Artificial Sequence
  Description of Artificial Sequence: Synthetic oligonucleotide
ccaccugccaccuaauugg

SEQ ID NO: 3071421 - RNA, 19 nt, Artificial Sequence
  Description of Artificial Sequence: Synthetic oligonucleotide
ugcguuugauguugcuggg

SEQ ID NO: 3071422 - RNA, 19 nt, Artificial Sequence
  Description of Artificial Sequence: Synthetic oligonucleotide
uggcucagggacuugcggc

SEQ ID NO: 3071423 - RNA, 19 nt, Artificial Sequence
  Description of Artificial Sequence: Synthetic oligonucleotide
gagucuauuccccgcgggc

SEQ ID NO: 3071424 - RNA, 19 nt, Artificial Sequence
  Description of Artificial Sequence: Synthetic oligonucleotide
caaaauuccgggcuaggga

SEQ ID NO: 3071425 - RNA, 19 nt, Artificial Sequence
  Description of Artificial Sequence: Synthetic oligonucleotide
ucagccggcggauccagcc

SEQ ID NO: 3071426 - RNA, 19 nt, Artificial Sequence
  Description of Artificial Sequence: Synthetic oligonucleotide
cuugcguuugauguugcug

SEQ ID NO: 3071427 - RNA, 19 nt, Artificial Sequence
  Description of Artificial Sequence: Synthetic oligonucleotide
aaauuccgggcuagggaag

SEQ ID NO: 3071428 - RNA, 19 nt, Artificial Sequence
  Description of Artificial Sequence: Synthetic oligonucleotide
cuugugcuugcguuugaug

SEQ ID NO: 3071429 - RNA, 19 nt, Artificial Sequence
  Description of Artificial Sequence: Synthetic oligonucleotide
ccugccaccuaauugggcc

SEQ ID NO: 3071430 - RNA, 19 nt, Artificial Sequence
  Description of Artificial Sequence: Synthetic oligonucleotide
ugggcugguacucguuccc

SEQ ID NO: 3071431 - RNA, 19 nt, Artificial Sequence
  Description of Artificial Sequence: Synthetic oligonucleotide
ugaccugcacgccggccgg

SEQ ID NO: 3071432 - RNA, 19 nt, Artificial Sequence
  Description of Artificial Sequence: Synthetic oligonucleotide
gucgaggcuccucaguggc

SEQ ID NO: 3071433 - RNA, 19 nt, Artificial Sequence
  Description of Artificial Sequence: Synthetic oligonucleotide
guuugauguugcugggcug

SEQ ID NO: 3071434 - RNA, 19 nt, Artificial Sequence
  Description of Artificial Sequence: Synthetic oligonucleotide
ugugcuugcguuugauguu

SEQ ID NO: 3071435 - RNA, 19 nt, Artificial Sequence
  Description of Artificial Sequence: Synthetic oligonucleotide
auuccaucggcguccgagu

SEQ ID NO: 3071436 - RNA, 19 nt, Artificial Sequence
  Description of Artificial Sequence: Synthetic oligonucleotide
guggcucagggacuugcgg

SEQ ID NO: 3071437 - RNA, 19 nt, Artificial Sequence
  Description of Artificial Sequence: Synthetic oligonucleotide
cugccaccuaauugggccg

SEQ ID NO: 3071438 - RNA, 19 nt, Artificial Sequence
  Description of Artificial Sequence: Synthetic oligonucleotide
uacucguucccgcgcgugc

SEQ ID NO: 3071439 - RNA, 19 nt, Artificial Sequence
  Description of Artificial Sequence: Synthetic oligonucleotide
uccgcgagccccauccaga

SEQ ID NO: 3071440 - RNA, 19 nt, Artificial Sequence
  Description of Artificial Sequence: Synthetic oligonucleotide
guacccaaaauuccgggcu

SEQ ID NO: 3071441 - RNA, 19 nt, Artificial Sequence
  Description of Artificial Sequence: Synthetic oligonucleotide
ucuauuccccgcgggcccg

SEQ ID NO: 3071442 - RNA, 19 nt, Artificial Sequence
  Description of Artificial Sequence: Synthetic oligonucleotide
uacccaaaauuccgggcua

SEQ ID NO: 3071443 - RNA, 19 nt, Artificial Sequence
  Description of Artificial Sequence: Synthetic oligonucleotide
cuggcugaagggaggggag

SEQ ID NO: 3071444 - RNA, 19 nt, Artificial Sequence
  Description of Artificial Sequence: Synthetic oligonucleotide
cugggcugguacucguucc

SEQ ID NO: 3071445 - RNA, 19 nt, Artificial Sequence
  Description of Artificial Sequence: Synthetic oligonucleotide
uccaucggcguccgagucu

SEQ ID NO: 3071446 - RNA, 19 nt, Artificial Sequence
  Description of Artificial Sequence: Synthetic oligonucleotide
aggaugaccugcacgccgg

SEQ ID NO: 3071447 - RNA, 19 nt, Artificial Sequence
  Description of Artificial Sequence: Synthetic oligonucleotide
ucggcguccgagucuauuc

SEQ ID NO: 3071448 - RNA, 19 nt, Artificial Sequence
  Description of Artificial Sequence: Synthetic oligonucleotide
gucuauuccccgcgggccc

SEQ ID NO: 3071449 - RNA, 19 nt, Artificial Sequence
  Description of Artificial Sequence: Synthetic oligonucleotide
ggcaauuccaucggcgucc

SEQ ID NO: 3071450 - RNA, 19 nt, Artificial Sequence
  Description of Artificial Sequence: Synthetic oligonucleotide
cccucgggcaauuccaucg

SEQ ID NO: 3071451 - RNA, 19 nt, Artificial Sequence
  Description of Artificial Sequence: Synthetic oligonucleotide
caugcggcggaggaugacc

SEQ ID NO: 3071452 - RNA, 19 nt, Artificial Sequence
  Description of Artificial Sequence: Synthetic oligonucleotide
ugcuugcguuugauguugc

SEQ ID NO: 3071453 - RNA, 19 nt, Artificial Sequence
  Description of Artificial Sequence: Synthetic oligonucleotide
uaauugggccgccgaucug

SEQ ID NO: 3071454 - RNA, 19 nt, Artificial Sequence
  Description of Artificial Sequence: Synthetic oligonucleotide
gcugguacucguucccgcg

SEQ ID NO: 3071455 - RNA, 19 nt, Artificial Sequence
  Description of Artificial Sequence: Synthetic oligonucleotide
caccugccaccuaauuggg

SEQ ID NO: 3071456 - RNA, 19 nt, Artificial Sequence
  Description of Artificial Sequence: Synthetic oligonucleotide
auuccgggcuagggaagcc

SEQ ID NO: 3071457 - RNA, 19 nt, Artificial Sequence
  Description of Artificial Sequence: Synthetic oligonucleotide
cugguacucguucccgcgc

SEQ ID NO: 3071458 - RNA, 19 nt, Artificial Sequence
  Description of Artificial Sequence: Synthetic oligonucleotide
gugcuugcguuugauguug

SEQ ID NO: 3071459 - RNA, 19 nt, Artificial Sequence
  Description of Artificial Sequence: Synthetic oligonucleotide
cggaggaugaccugcacgc

SEQ ID NO: 3071460 - RNA, 19 nt, Artificial Sequence
  Description of Artificial Sequence: Synthetic oligonucleotide
gccaccugccaccuaauug

SEQ ID NO: 3071461 - RNA, 19 nt, Artificial Sequence
  Description of Artificial Sequence: Synthetic oligonucleotide
uguugcugggcugguacuc

SEQ ID NO: 3071462 - RNA, 19 nt, Artificial Sequence
  Description of Artificial Sequence: Synthetic oligonucleotide
gacccuggguugcagccac

SEQ ID NO: 3071463 - RNA, 19 nt, Artificial Sequence
  Description of Artificial Sequence: Synthetic oligonucleotide
uuccaucggcguccgaguc

SEQ ID NO: 3071464 - RNA, 19 nt, Artificial Sequence
  Description of Artificial Sequence: Synthetic oligonucleotide
ccaaaauuccgggcuaggg

SEQ ID NO: 3071465 - RNA, 19 nt, Artificial Sequence
  Description of Artificial Sequence: Synthetic oligonucleotide
acucguucccgcgcgugcg

SEQ ID NO: 3071466 - RNA, 19 nt, Artificial Sequence
  Description of Artificial Sequence: Synthetic oligonucleotide
gcggaggaugaccugcacg

SEQ ID NO: 3071467 - RNA, 19 nt, Artificial Sequence
  Description of Artificial Sequence: Synthetic oligonucleotide
aucugcaggcgggguaccc

SEQ ID NO: 3071468 - RNA, 19 nt, Artificial Sequence
  Description of Artificial Sequence: Synthetic oligonucleotide
auguugcugggcugguacu

SEQ ID NO: 3071469 - RNA, 19 nt, Artificial Sequence
  Description of Artificial Sequence: Synthetic oligonucleotide
cuaauugggccgccgaucu

SEQ ID NO: 3071470 - RNA, 19 nt, Artificial Sequence
  Description of Artificial Sequence: Synthetic oligonucleotide
aggcgggguacccaaaauu

SEQ ID NO: 3071471 - RNA, 19 nt, Artificial Sequence
  Description of Artificial Sequence: Synthetic oligonucleotide
accuaauugggccgccgau

SEQ ID NO: 3071472 - RNA, 19 nt, Artificial Sequence
  Description of Artificial Sequence: Synthetic oligonucleotide
ggcccuucagcaugcggcg

SEQ ID NO: 3071473 - RNA, 19 nt, Artificial Sequence
  Description of Artificial Sequence: Synthetic oligonucleotide
cauccagacccuggguugc

SEQ ID NO: 3071474 - RNA, 19 nt, Artificial Sequence
  Description of Artificial Sequence: Synthetic oligonucleotide
acccaaaauuccgggcuag

SEQ ID NO: 3071475 - RNA, 19 nt, Artificial Sequence
  Description of Artificial Sequence: Synthetic oligonucleotide
ggcucagggacuugcggcc

SEQ ID NO: 3071476 - RNA, 19 nt, Artificial Sequence
  Description of Artificial Sequence: Synthetic oligonucleotide
guccgagucuauuccccgc

SEQ ID NO: 3071477 - RNA, 19 nt, Artificial Sequence
  Description of Artificial Sequence: Synthetic oligonucleotide
gccacgggcuggcugaagg

SEQ ID NO: 3071478 - RNA, 19 nt, Artificial Sequence
  Description of Artificial Sequence: Synthetic oligonucleotide
accugccaccuaauugggc

SEQ ID NO: 3071479 - RNA, 19 nt, Artificial Sequence
  Description of Artificial Sequence: Synthetic oligonucleotide
cagcaugcggcggaggaug

SEQ ID NO: 3071480 - RNA, 19 nt, Artificial Sequence
  Description of Artificial Sequence: Synthetic oligonucleotide
ucugcaggcgggguaccca

SEQ ID NO: 3071481 - RNA, 19 nt, Artificial Sequence
  Description of Artificial Sequence: Synthetic oligonucleotide
gggguacccaaaauuccgg

SEQ ID NO: 3071482 - RNA, 19 nt, Artificial Sequence
  Description of Artificial Sequence: Synthetic oligonucleotide
cucgggcaauuccaucggc

SEQ ID NO: 3071483 - RNA, 19 nt, Artificial Sequence
  Description of Artificial Sequence: Synthetic oligonucleotide
gaugaccugcacgccggcc

SEQ ID NO: 3071484 - RNA, 19 nt, Artificial Sequence
  Description of Artificial Sequence: Synthetic oligonucleotide
uugcggcccuucagcaugc

SEQ ID NO: 3071485 - RNA, 19 nt, Artificial Sequence
  Description of Artificial Sequence: Synthetic oligonucleotide
ggaggggaggccccaggcg

SEQ ID NO: 3071486 - RNA, 19 nt, Artificial Sequence
  Description of Artificial Sequence: Synthetic oligonucleotide
gugcucagccggcggaucc

SEQ ID NO: 3071487 - RNA, 19 nt, Artificial Sequence
  Description of Artificial Sequence: Synthetic oligonucleotide
auccagccgugcuugugcu

SEQ ID NO: 3071488 - RNA, 19 nt, Artificial Sequence
  Description of Artificial Sequence: Synthetic oligonucleotide
uccgggcuagggaagccau

SEQ ID NO: 3071489 - RNA, 19 nt, Artificial Sequence
  Description of Artificial Sequence: Synthetic oligonucleotide
cgggguacccaaaauuccg

SEQ ID NO: 3071490 - RNA, 19 nt, Artificial Sequence
  Description of Artificial Sequence: Synthetic oligonucleotide
ugcggccacgggcuggcug

SEQ ID NO: 3071491 - RNA, 19 nt, Artificial Sequence
  Description of Artificial Sequence: Synthetic oligonucleotide
ugcuugugcuugcguuuga

SEQ ID NO: 3071492 - RNA, 19 nt, Artificial Sequence
  Description of Artificial Sequence: Synthetic oligonucleotide
ugccaccuaauugggccgc

SEQ ID NO: 3071493 - RNA, 19 nt, Artificial Sequence
  Description of Artificial Sequence: Synthetic oligonucleotide
gugcuugugcuugcguuug

SEQ ID NO: 3071494 - RNA, 19 nt, Artificial Sequence
  Description of Artificial Sequence: Synthetic oligonucleotide
gcuccucaguggcucaggg

SEQ ID NO: 3071495 - RNA, 19 nt, Artificial Sequence
  Description of Artificial Sequence: Synthetic oligonucleotide
guccgcgagccccauccag

SEQ ID NO: 3071496 - RNA, 19 nt, Artificial Sequence
  Description of Artificial Sequence: Synthetic oligonucleotide
ggcgggguacccaaaauuc

SEQ ID NO: 3071497 - RNA, 19 nt, Artificial Sequence
  Description of Artificial Sequence: Synthetic oligonucleotide
ucgaggcuccucaguggcu

SEQ ID NO: 3071498 - RNA, 19 nt, Artificial Sequence
  Description of Artificial Sequence: Synthetic oligonucleotide
gaggggaggccccaggcgu

SEQ ID NO: 3071499 - RNA, 19 nt, Artificial Sequence
  Description of Artificial Sequence: Synthetic oligonucleotide
uuccgggcuagggaagcca

SEQ ID NO: 3071500 - RNA, 19 nt, Artificial Sequence
  Description of Artificial Sequence: Synthetic oligonucleotide
agggacuugcggcccuuca

SEQ ID NO: 3071501 - RNA, 19 nt, Artificial Sequence
  Description of Artificial Sequence: Synthetic oligonucleotide
ccauccagacccuggguug

SEQ ID NO: 3071502 - RNA, 19 nt, Artificial Sequence
  Description of Artificial Sequence: Synthetic oligonucleotide
gcguccgcgagccccaucc

SEQ ID NO: 3071503 - RNA, 19 nt, Artificial Sequence
  Description of Artificial Sequence: Synthetic oligonucleotide
cucguucccgcgcgugcgg

SEQ ID NO: 3071504 - RNA, 19 nt, Artificial Sequence
  Description of Artificial Sequence: Synthetic oligonucleotide
uccagacccuggguugcag

SEQ ID NO: 3071505 - RNA, 19 nt, Artificial Sequence
  Description of Artificial Sequence: Synthetic oligonucleotide
cagccggcggauccagccg

SEQ ID NO: 3071506 - RNA, 19 nt, Artificial Sequence
  Description of Artificial Sequence: Synthetic oligonucleotide
acgggcuggcugaagggag

SEQ ID NO: 3071507 - RNA, 19 nt, Artificial Sequence
  Description of Artificial Sequence: Synthetic oligonucleotide
agccggcggauccagccgu

SEQ ID NO: 3071508 - RNA, 19 nt, Artificial Sequence
  Description of Artificial Sequence: Synthetic oligonucleotide
gaggccccaggcguccgcg

SEQ ID NO: 3071509 - RNA, 19 nt, Artificial Sequence
  Description of Artificial Sequence: Synthetic oligonucleotide
ggcguccgagucuauuccc

SEQ ID NO: 3071510 - RNA, 19 nt, Artificial Sequence
  Description of Artificial Sequence: Synthetic oligonucleotide
uugauguugcugggcuggu

SEQ ID NO: 3071511 - RNA, 19 nt, Artificial Sequence
  Description of Artificial Sequence: Synthetic oligonucleotide
ucagcaugcggcggaggau

SEQ ID NO: 3071512 - RNA, 19 nt, Artificial Sequence
  Description of Artificial Sequence: Synthetic oligonucleotide
agccccauccagacccugg

SEQ ID NO: 3071513 - RNA, 19 nt, Artificial Sequence
  Description of Artificial Sequence: Synthetic oligonucleotide
gccccauccagacccuggg

SEQ ID NO: 3071514 - RNA, 19 nt, Artificial Sequence
  Description of Artificial Sequence: Synthetic oligonucleotide
ugcacgccggccggggugc

SEQ ID NO: 3071515 - RNA, 19 nt, Artificial Sequence
  Description of Artificial Sequence: Synthetic oligonucleotide
ugcggcggaggaugaccug

SEQ ID NO: 3071516 - RNA, 19 nt, Artificial Sequence
  Description of Artificial Sequence: Synthetic oligonucleotide
cggcccuucagcaugcggc

SEQ ID NO: 3071517 - RNA, 19 nt, Artificial Sequence
  Description of Artificial Sequence: Synthetic oligonucleotide
ggccggggugcucagccgg

SEQ ID NO: 3071518 - RNA, 19 nt, Artificial Sequence
  Description of Artificial Sequence: Synthetic oligonucleotide
ggcugguacucguucccgc

SEQ ID NO: 3071519 - RNA, 19 nt, Artificial Sequence
  Description of Artificial Sequence: Synthetic oligonucleotide
gccgccgaucugcaggcgg

SEQ ID NO: 3071520 - RNA, 19 nt, Artificial Sequence
  Description of Artificial Sequence: Synthetic oligonucleotide
uugggccgccgaucugcag

SEQ ID NO: 3071521 - RNA, 19 nt, Artificial Sequence
  Description of Artificial Sequence: Synthetic oligonucleotide
ugcucagccggcggaucca

SEQ ID NO: 3071522 - RNA, 19 nt, Artificial Sequence
  Description of Artificial Sequence: Synthetic oligonucleotide
guacucguucccgcgcgug

SEQ ID NO: 3071523 - RNA, 19 nt, Artificial Sequence
  Description of Artificial Sequence: Synthetic oligonucleotide
caccuaauugggccgccga

SEQ ID NO: 3071524 - RNA, 19 nt, Artificial Sequence
  Description of Artificial Sequence: Synthetic oligonucleotide
gcgggguacccaaaauucc

SEQ ID NO: 3071525 - RNA, 19 nt, Artificial Sequence
  Description of Artificial Sequence: Synthetic oligonucleotide
ccucgggcaauuccaucgg

SEQ ID NO: 3071526 - RNA, 19 nt, Artificial Sequence
  Description of Artificial Sequence: Synthetic oligonucleotide
gaucugcaggcgggguacc

SEQ ID NO: 3071527 - RNA, 19 nt, Artificial Sequence
  Description of Artificial Sequence: Synthetic oligonucleotide
gcagccaccugccaccuaa

SEQ ID NO: 3071528 - RNA, 19 nt, Artificial Sequence
  Description of Artificial Sequence: Synthetic oligonucleotide
gcaauuccaucggcguccg

SEQ ID NO: 3071529 - RNA, 19 nt, Artificial Sequence
  Description of Artificial Sequence: Synthetic oligonucleotide
gggaggggaggccccaggc

SEQ ID NO: 3071530 - RNA, 19 nt, Artificial Sequence
  Description of Artificial Sequence: Synthetic oligonucleotide
gaggcuccucaguggcuca

SEQ ID NO: 3071531 - RNA, 19 nt, Artificial Sequence
  Description of Artificial Sequence: Synthetic oligonucleotide
cuccucaguggcucaggga

SEQ ID NO: 3071532 - RNA, 19 nt, Artificial Sequence
  Description of Artificial Sequence: Synthetic oligonucleotide
cugcacgccggccggggug

SEQ ID NO: 3071533 - RNA, 19 nt, Artificial Sequence
  Description of Artificial Sequence: Synthetic oligonucleotide
augcggcggaggaugaccu

SEQ ID NO: 3071534 - RNA, 19 nt, Artificial Sequence
  Description of Artificial Sequence: Synthetic oligonucleotide
ugauguugcugggcuggua

SEQ ID NO: 3071535 - RNA, 19 nt, Artificial Sequence
  Description of Artificial Sequence: Synthetic oligonucleotide
agacccuggguugcagcca

SEQ ID NO: 3071536 - RNA, 19 nt, Artificial Sequence
  Description of Artificial Sequence: Synthetic oligonucleotide
cucagccggcggauccagc

SEQ ID NO: 3071537 - RNA, 19 nt, Artificial Sequence
  Description of Artificial Sequence: Synthetic oligonucleotide
agccgugcuugugcuugcg

SEQ ID NO: 3071538 - RNA, 19 nt, Artificial Sequence
  Description of Artificial Sequence: Synthetic oligonucleotide
ccgucgaggcuccucagug

SEQ ID NO: 3071539 - RNA, 19 nt, Artificial Sequence
  Description of Artificial Sequence: Synthetic oligonucleotide
ugcugggcugguacucguu

SEQ ID NO: 3071540 - RNA, 19 nt, Artificial Sequence
  Description of Artificial Sequence: Synthetic oligonucleotide
gcuggcugaagggagggga

SEQ ID NO: 3071541 - RNA, 19 nt, Artificial Sequence
  Description of Artificial Sequence: Synthetic oligonucleotide
gcugggcugguacucguuc

SEQ ID NO: 3071542 - RNA, 19 nt, Artificial Sequence
  Description of Artificial Sequence: Synthetic oligonucleotide
ccuaauugggccgccgauc

SEQ ID NO: 3071543 - RNA, 19 nt, Artificial Sequence
  Description of Artificial Sequence: Synthetic oligonucleotide
ugcaggcgggguacccaaa

SEQ ID NO: 3071544 - RNA, 19 nt, Artificial Sequence
  Description of Artificial Sequence: Synthetic oligonucleotide
cagccgugcuugugcuugc

SEQ ID NO: 3071545 - RNA, 19 nt, Artificial Sequence
  Description of Artificial Sequence: Synthetic oligonucleotide
gggcaauuccaucggcguc

SEQ ID NO: 3071546 - RNA, 19 nt, Artificial Sequence
  Description of Artificial Sequence: Synthetic oligonucleotide
gaagggaggggaggcccca

SEQ ID NO: 3071547 - RNA, 19 nt, Artificial Sequence
  Description of Artificial Sequence: Synthetic oligonucleotide
ccacgggcuggcugaaggg

SEQ ID NO: 3071548 - RNA, 19 nt, Artificial Sequence
  Description of Artificial Sequence: Synthetic oligonucleotide
accugcacgccggccgggg

SEQ ID NO: 3071549 - RNA, 19 nt, Artificial Sequence
  Description of Artificial Sequence: Synthetic oligonucleotide
cguccgagucuauuccccg

SEQ ID NO: 3071550 - RNA, 19 nt, Artificial Sequence
  Description of Artificial Sequence: Synthetic oligonucleotide
ccagccgugcuugugcuug

SEQ ID NO: 3071551 - RNA, 19 nt, Artificial Sequence
  Description of Artificial Sequence: Synthetic oligonucleotide
uugcagccaccugccaccu

SEQ ID NO: 3071552 - RNA, 19 nt, Artificial Sequence
  Description of Artificial Sequence: Synthetic oligonucleotide
aggggaggccccaggcguc

SEQ ID NO: 3071553 - RNA, 19 nt, Artificial Sequence
  Description of Artificial Sequence: Synthetic oligonucleotide
cgagucuauuccccgcggg

SEQ ID NO: 3071554 - RNA, 19 nt, Artificial Sequence
  Description of Artificial Sequence: Synthetic oligonucleotide
ggaggaugaccugcacgcc

SEQ ID NO: 3071555 - RNA, 19 nt, Artificial Sequence
  Description of Artificial Sequence: Synthetic oligonucleotide
agccaccugccaccuaauu

SEQ ID NO: 3071556 - RNA, 19 nt, Artificial Sequence
  Description of Artificial Sequence: Synthetic oligonucleotide
gcggauccagccgugcuug

SEQ ID NO: 3071557 - RNA, 19 nt, Artificial Sequence
  Description of Artificial Sequence: Synthetic oligonucleotide
gggcugguacucguucccg

SEQ ID NO: 3071558 - RNA, 19 nt, Artificial Sequence
  Description of Artificial Sequence: Synthetic oligonucleotide
cccaaaauuccgggcuagg

SEQ ID NO: 3071559 - RNA, 19 nt, Artificial Sequence
  Description of Artificial Sequence: Synthetic oligonucleotide
gggcuggcugaagggaggg

SEQ ID NO: 3071560 - RNA, 19 nt, Artificial Sequence
  Description of Artificial Sequence: Synthetic oligonucleotide
ccgagucuauuccccgcgg

SEQ ID NO: 3071561 - RNA, 19 nt, Artificial Sequence
  Description of Artificial Sequence: Synthetic oligonucleotide
gcguuugauguugcugggc

SEQ ID NO: 3071562 - RNA, 19 nt, Artificial Sequence
  Description of Artificial Sequence: Synthetic oligonucleotide
ccgccgaucugcaggcggg

SEQ ID NO: 3071563 - RNA, 19 nt, Artificial Sequence
  Description of Artificial Sequence: Synthetic oligonucleotide
gggccgccgaucugcaggc

SEQ ID NO: 3071564 - RNA, 19 nt, Artificial Sequence
  Description of Artificial Sequence: Synthetic oligonucleotide
ccaggcguccgcgagcccc

SEQ ID NO: 3071565 - RNA, 19 nt, Artificial Sequence
  Description of Artificial Sequence: Synthetic oligonucleotide
gcugaagggaggggaggcc

SEQ ID NO: 3071566 - RNA, 19 nt, Artificial Sequence
  Description of Artificial Sequence: Synthetic oligonucleotide
cgucgaggcuccucagugg

SEQ ID NO: 3071567 - RNA, 19 nt, Artificial Sequence
  Description of Artificial Sequence: Synthetic oligonucleotide
gcggcggaggaugaccugc

SEQ ID NO: 3071568 - RNA, 19 nt, Artificial Sequence
  Description of Artificial Sequence: Synthetic oligonucleotide
aggcuccucaguggcucag

SEQ ID NO: 3071569 - RNA, 19 nt, Artificial Sequence
  Description of Artificial Sequence: Synthetic oligonucleotide
auugggccgccgaucugca

SEQ ID NO: 3071570 - RNA, 19 nt, Artificial Sequence
  Description of Artificial Sequence: Synthetic oligonucleotide
cacgggcuggcugaaggga

SEQ ID NO: 3071571 - RNA, 19 nt, Artificial Sequence
  Description of Artificial Sequence: Synthetic oligonucleotide
gcguccgagucuauucccc

SEQ ID NO: 3071572 - RNA, 19 nt, Artificial Sequence
  Description of Artificial Sequence: Synthetic oligonucleotide
gaccugcacgccggccggg

SEQ ID NO: 3071573 - RNA, 19 nt, Artificial Sequence
  Description of Artificial Sequence: Synthetic oligonucleotide
ggauccagccgugcuugug

SEQ ID NO: 3071574 - RNA, 19 nt, Artificial Sequence
  Description of Artificial Sequence: Synthetic oligonucleotide
ggaugaccugcacgccggc

SEQ ID NO: 3071575 - RNA, 19 nt, Artificial Sequence
  Description of Artificial Sequence: Synthetic oligonucleotide
uccagccgugcuugugcuu

SEQ ID NO: 3071576 - RNA, 19 nt, Artificial Sequence
  Description of Artificial Sequence: Synthetic oligonucleotide
cugcaggcgggguacccaa

SEQ ID NO: 3071577 - RNA, 19 nt, Artificial Sequence
  Description of Artificial Sequence: Synthetic oligonucleotide
gcggcccuucagcaugcgg

SEQ ID NO: 3071578 - RNA, 19 nt, Artificial Sequence
  Description of Artificial Sequence: Synthetic oligonucleotide
ggcccgucgaggcuccuca

SEQ ID NO: 3071579 - RNA, 19 nt, Artificial Sequence
  Description of Artificial Sequence: Synthetic oligonucleotide
agcaugcggcggaggauga

SEQ ID NO: 3071580 - RNA, 19 nt, Artificial Sequence
  Description of Artificial Sequence: Synthetic oligonucleotide
aucggcguccgagucuauu

SEQ ID NO: 3071581 - RNA, 19 nt, Artificial Sequence
  Description of Artificial Sequence: Synthetic oligonucleotide
ccggccggggugcucagcc

SEQ ID NO: 3071582 - RNA, 19 nt, Artificial Sequence
  Description of Artificial Sequence: Synthetic oligonucleotide
ggcuccucaguggcucagg

SEQ ID NO: 3071583 - RNA, 19 nt, Artificial Sequence
  Description of Artificial Sequence: Synthetic oligonucleotide
acccuggguugcagccacc

SEQ ID NO: 3071584 - RNA, 19 nt, Artificial Sequence
  Description of Artificial Sequence: Synthetic oligonucleotide
gagccccauccagacccug

SEQ ID NO: 3071585 - RNA, 19 nt, Artificial Sequence
  Description of Artificial Sequence: Synthetic oligonucleotide
auccagacccuggguugca

SEQ ID NO: 3071586 - RNA, 19 nt, Artificial Sequence
  Description of Artificial Sequence: Synthetic oligonucleotide
ggccccaggcguccgcgag

SEQ ID NO: 3071587 - RNA, 19 nt, Artificial Sequence
  Description of Artificial Sequence: Synthetic oligonucleotide
gcggccacgggcuggcuga

SEQ ID NO: 3071588 - RNA, 19 nt, Artificial Sequence
  Description of Artificial Sequence: Synthetic oligonucleotide
acgccggccggggugcuca

SEQ ID NO: 3071589 - RNA, 19 nt, Artificial Sequence
  Description of Artificial Sequence: Synthetic oligonucleotide
cccgcgggcccgucgaggc

SEQ ID NO: 3071590 - RNA, 19 nt, Artificial Sequence
  Description of Artificial Sequence: Synthetic oligonucleotide
ccaccuaauugggccgccg

SEQ ID NO: 3071591 - RNA, 19 nt, Artificial Sequence
  Description of Artificial Sequence: Synthetic oligonucleotide
caggcguccgcgagcccca

SEQ ID NO: 3071592 - RNA, 19 nt, Artificial Sequence
  Description of Artificial Sequence: Synthetic oligonucleotide
ucagggacuugcggcccuu

SEQ ID NO: 3071593 - RNA, 19 nt, Artificial Sequence
  Description of Artificial Sequence: Synthetic oligonucleotide
cggcguccgagucuauucc

SEQ ID NO: 3071594 - RNA, 19 nt, Artificial Sequence
  Description of Artificial Sequence: Synthetic oligonucleotide
ggcuggcugaagggagggg

SEQ ID NO: 3071595 - RNA, 19 nt, Artificial Sequence
  Description of Artificial Sequence: Synthetic oligonucleotide
ucccgcgcgugcggccacg

SEQ ID NO: 3071596 - RNA, 19 nt, Artificial Sequence
  Description of Artificial Sequence: Synthetic oligonucleotide
cguuugauguugcugggcu

SEQ ID NO: 3071597 - RNA, 19 nt, Artificial Sequence
  Description of Artificial Sequence: Synthetic oligonucleotide
gcucagggacuugcggccc

SEQ ID NO: 3071598 - RNA, 19 nt, Artificial Sequence
  Description of Artificial Sequence: Synthetic oligonucleotide
gcaggcgggguacccaaaa

SEQ ID NO: 3071599 - RNA, 19 nt, Artificial Sequence
  Description of Artificial Sequence: Synthetic oligonucleotide
ggggugcucagccggcgga

SEQ ID NO: 3071600 - RNA, 19 nt, Artificial Sequence
  Description of Artificial Sequence: Synthetic oligonucleotide
cgaucugcaggcgggguac

SEQ ID NO: 3071601 - RNA, 19 nt, Artificial Sequence
  Description of Artificial Sequence: Synthetic oligonucleotide
ggcggaggaugaccugcac

SEQ ID NO: 3071602 - RNA, 19 nt, Artificial Sequence
  Description of Artificial Sequence: Synthetic oligonucleotide
ccgcgagccccauccagac

SEQ ID NO: 3071603 - RNA, 19 nt, Artificial Sequence
  Description of Artificial Sequence: Synthetic oligonucleotide
cgcgcgugcggccacgggc

SEQ ID NO: 3071604 - RNA, 19 nt, Artificial Sequence
  Description of Artificial Sequence: Synthetic oligonucleotide
aggccccaggcguccgcga

SEQ ID NO: 3071605 - RNA, 19 nt, Artificial Sequence
  Description of Artificial Sequence: Synthetic oligonucleotide
ccuggguugcagccaccug

SEQ ID NO: 3071606 - RNA, 19 nt, Artificial Sequence
  Description of Artificial Sequence: Synthetic oligonucleotide
ggaggccccaggcguccgc

SEQ ID NO: 3071607 - RNA, 19 nt, Artificial Sequence
  Description of Artificial Sequence: Synthetic oligonucleotide
gcucagccggcggauccag

SEQ ID NO: 3071608 - RNA, 19 nt, Artificial Sequence
  Description of Artificial Sequence: Synthetic oligonucleotide
ccccaggcguccgcgagcc

SEQ ID NO: 3071609 - RNA, 19 nt, Artificial Sequence
  Description of Artificial Sequence: Synthetic oligonucleotide
cgaggcuccucaguggcuc

SEQ ID NO: 3071610 - RNA, 19 nt, Artificial Sequence
  Description of Artificial Sequence: Synthetic oligonucleotide
gccccaggcguccgcgagc

SEQ ID NO: 3071611 - RNA, 19 nt, Artificial Sequence
  Description of Artificial Sequence: Synthetic oligonucleotide
ggggaggccccaggcgucc

SEQ ID NO: 3071612 - RNA, 19 nt, Artificial Sequence
  Description of Artificial Sequence: Synthetic oligonucleotide
cagggacuugcggcccuuc

SEQ ID NO: 3071613 - RNA, 19 nt, Artificial Sequence
  Description of Artificial Sequence: Synthetic oligonucleotide
gcuugcguuugauguugcu

SEQ ID NO: 3071614 - RNA, 19 nt, Artificial Sequence
  Description of Artificial Sequence: Synthetic oligonucleotide
ggugcucagccggcggauc

SEQ ID NO: 3071615 - RNA, 19 nt, Artificial Sequence
  Description of Artificial Sequence: Synthetic oligonucleotide
gccaccuaauugggccgcc

SEQ ID NO: 3071616 - RNA, 19 nt, Artificial Sequence
  Description of Artificial Sequence: Synthetic oligonucleotide
gcccucgggcaauuccauc

SEQ ID NO: 3071617 - RNA, 19 nt, Artificial Sequence
  Description of Artificial Sequence: Synthetic oligonucleotide
cucagggacuugcggcccu

SEQ ID NO: 3071618 - RNA, 19 nt, Artificial Sequence
  Description of Artificial Sequence: Synthetic oligonucleotide
gcccgucgaggcuccucag

SEQ ID NO: 3071619 - RNA, 19 nt, Artificial Sequence
  Description of Artificial Sequence: Synthetic oligonucleotide
caauuccaucggcguccga

SEQ ID NO: 3071620 - RNA, 19 nt, Artificial Sequence
  Description of Artificial Sequence: Synthetic oligonucleotide
gguacucguucccgcgcgu

SEQ ID NO: 3071621 - RNA, 19 nt, Artificial Sequence
  Description of Artificial Sequence: Synthetic oligonucleotide
caggcgggguacccaaaau

SEQ ID NO: 3071622 - RNA, 19 nt, Artificial Sequence
  Description of Artificial Sequence: Synthetic oligonucleotide
gcgugcggccacgggcugg

SEQ ID NO: 3071623 - RNA, 19 nt, Artificial Sequence
  Description of Artificial Sequence: Synthetic oligonucleotide
ggcggauccagccgugcuu

SEQ ID NO: 3071624 - RNA, 19 nt, Artificial Sequence
  Description of Artificial Sequence: Synthetic oligonucleotide
cggggugcucagccggcgg

SEQ ID NO: 3071625 - RNA, 19 nt, Artificial Sequence
  Description of Artificial Sequence: Synthetic oligonucleotide
ccaucggcguccgagucua

SEQ ID NO: 3071626 - RNA, 19 nt, Artificial Sequence
  Description of Artificial Sequence: Synthetic oligonucleotide
cccauccagacccuggguu

SEQ ID NO: 3071627 - RNA, 19 nt, Artificial Sequence
  Description of Artificial Sequence: Synthetic oligonucleotide
cgggcaauuccaucggcgu

SEQ ID NO: 3071628 - RNA, 19 nt, Artificial Sequence
  Description of Artificial Sequence: Synthetic oligonucleotide
gcaugcggcggaggaugac

SEQ ID NO: 3071629 - RNA, 19 nt, Artificial Sequence
  Description of Artificial Sequence: Synthetic oligonucleotide
ccggggugcucagccggcg

SEQ ID NO: 3071630 - RNA, 19 nt, Artificial Sequence
  Description of Artificial Sequence: Synthetic oligonucleotide
gcuugugcuugcguuugau

SEQ ID NO: 3071631 - RNA, 19 nt, Artificial Sequence
  Description of Artificial Sequence: Synthetic oligonucleotide
ccgaucugcaggcggggua

SEQ ID NO: 3071632 - RNA, 19 nt, Artificial Sequence
  Description of Artificial Sequence: Synthetic oligonucleotide
cgugcggccacgggcuggc

SEQ ID NO: 3071633 - RNA, 19 nt, Artificial Sequence
  Description of Artificial Sequence: Synthetic oligonucleotide
ggccgccgaucugcaggcg

SEQ ID NO: 3071634 - RNA, 19 nt, Artificial Sequence
  Description of Artificial Sequence: Synthetic oligonucleotide
cgcgagccccauccagacc

SEQ ID NO: 3071635 - RNA, 19 nt, Artificial Sequence
  Description of Artificial Sequence: Synthetic oligonucleotide
ccucaguggcucagggacu

SEQ ID NO: 3071636 - RNA, 19 nt, Artificial Sequence
  Description of Artificial Sequence: Synthetic oligonucleotide
ccggcggauccagccgugc

SEQ ID NO: 3071637 - RNA, 19 nt, Artificial Sequence
  Description of Artificial Sequence: Synthetic oligonucleotide
ccgugcuugugcuugcguu

SEQ ID NO: 3071638 - RNA, 19 nt, Artificial Sequence
  Description of Artificial Sequence: Synthetic oligonucleotide
gccgugcuugugcuugcgu

SEQ ID NO: 3071639 - RNA, 19 nt, Artificial Sequence
  Description of Artificial Sequence: Synthetic oligonucleotide
ggccacgggcuggcugaag

SEQ ID NO: 3071640 - RNA, 19 nt, Artificial Sequence
  Description of Artificial Sequence: Synthetic oligonucleotide
cggccggggugcucagccg

SEQ ID NO: 3071641 - RNA, 19 nt, Artificial Sequence
  Description of Artificial Sequence: Synthetic oligonucleotide
cgugcuugugcuugcguuu

SEQ ID NO: 3071642 - RNA, 19 nt, Artificial Sequence
  Description of Artificial Sequence: Synthetic oligonucleotide
cgccgaucugcaggcgggg

SEQ ID NO: 3071643 - RNA, 19 nt, Artificial Sequence
  Description of Artificial Sequence: Synthetic oligonucleotide
gccggcggauccagccgug

SEQ ID NO: 3071644 - RNA, 19 nt, Artificial Sequence
  Description of Artificial Sequence: Synthetic oligonucleotide
cagccaccugccaccuaau

SEQ ID NO: 3071645 - RNA, 19 nt, Artificial Sequence
  Description of Artificial Sequence: Synthetic oligonucleotide
cacgccggccggggugcuc

SEQ ID NO: 3071646 - RNA, 19 nt, Artificial Sequence
  Description of Artificial Sequence: Synthetic oligonucleotide
ggcguccgcgagccccauc

SEQ ID NO: 3071647 - RNA, 19 nt, Artificial Sequence
  Description of Artificial Sequence: Synthetic oligonucleotide
gcgcgugcggccacgggcu

SEQ ID NO: 3071648 - RNA, 19 nt, Artificial Sequence
  Description of Artificial Sequence: Synthetic oligonucleotide
ccgcgcgugcggccacggg

SEQ ID NO: 3071649 - RNA, 19 nt, Artificial Sequence
  Description of Artificial Sequence: Synthetic oligonucleotide
cggcggaggaugaccugca

SEQ ID NO: 3071650 - RNA, 19 nt, Artificial Sequence
  Description of Artificial Sequence: Synthetic oligonucleotide
gggcccgucgaggcuccuc

SEQ ID NO: 3071651 - RNA, 19 nt, Artificial Sequence
  Description of Artificial Sequence: Synthetic oligonucleotide
gcgggcccgucgaggcucc

SEQ ID NO: 3071652 - RNA, 19 nt, Artificial Sequence
  Description of Artificial Sequence: Synthetic oligonucleotide
cgcgggcccgucgaggcuc

SEQ ID NO: 3071653 - RNA, 19 nt, Artificial Sequence
  Description of Artificial Sequence: Synthetic oligonucleotide
cccgcgcgugcggccacgg

SEQ ID NO: 3071654 - RNA, 19 nt, Artificial Sequence
  Description of Artificial Sequence: Synthetic oligonucleotide
aggcguccgcgagccccau

SEQ ID NO: 3071655 - RNA, 19 nt, Artificial Sequence
  Description of Artificial Sequence: Synthetic oligonucleotide
cccgucgaggcuccucagu

SEQ ID NO: 3071656 - RNA, 19 nt, Artificial Sequence
  Description of Artificial Sequence: Synthetic oligonucleotide
cccaggcguccgcgagccc

SEQ ID NO: 3071657 - RNA, 19 nt, Artificial Sequence
  Description of Artificial Sequence: Synthetic oligonucleotide
gccgaucugcaggcggggu

SEQ ID NO: 3071658 - RNA, 19 nt, Artificial Sequence
  Description of Artificial Sequence: Synthetic oligonucleotide
cccuggguugcagccaccu

SEQ ID NO: 3071659 - RNA, 19 nt, Artificial Sequence
  Description of Artificial Sequence: Synthetic oligonucleotide
gggugcucagccggcggau

SEQ ID NO: 3071660 - RNA, 19 nt, Artificial Sequence
  Description of Artificial Sequence: Synthetic oligonucleotide
gccggccggggugcucagc

SEQ ID NO: 3071661 - RNA, 19 nt, Artificial Sequence
  Description of Artificial Sequence: Synthetic oligonucleotide
ccccauccagacccugggu

SEQ ID NO: 3071662 - RNA, 19 nt, Artificial Sequence
  Description of Artificial Sequence: Synthetic oligonucleotide
caucggcguccgagucuau

SEQ ID NO: 3071663 - RNA, 19 nt, Artificial Sequence
  Description of Artificial Sequence: Synthetic oligonucleotide
cgcgugcggccacgggcug

SEQ ID NO: 3071664 - RNA, 19 nt, Artificial Sequence
  Description of Artificial Sequence: Synthetic oligonucleotide
cguccgcgagccccaucca

SEQ ID NO: 3071665 - RNA, 19 nt, Artificial Sequence
  Description of Artificial Sequence: Synthetic oligonucleotide
ccugcacgccggccggggu

SEQ ID NO: 3071666 - RNA, 19 nt, Artificial Sequence
  Description of Artificial Sequence: Synthetic oligonucleotide
cggcggauccagccgugcu

SEQ ID NO: 3071667 - RNA, 19 nt, Artificial Sequence
  Description of Artificial Sequence: Synthetic oligonucleotide
cgagccccauccagacccu

SEQ ID NO: 3071668 - RNA, 19 nt, Artificial Sequence
  Description of Artificial Sequence: Synthetic oligonucleotide
cgccggccggggugcucag

SEQ ID NO: 3071669 - RNA, 19 nt, Artificial Sequence
  Description of Artificial Sequence: Synthetic oligonucleotide
gugcggccacgggcuggcu

SEQ ID NO: 3071670 - RNA, 19 nt, Artificial Sequence
  Description of Artificial Sequence: Synthetic oligonucleotide
cggauccagccgugcuugu

SEQ ID NO: 3071671 - RNA, 19 nt, Artificial Sequence
  Description of Artificial Sequence: Synthetic oligonucleotide
ccgcgggcccgucgaggcu

SEQ ID NO: 3071672 - RNA, 19 nt, Artificial Sequence
  Description of Artificial Sequence: Synthetic oligonucleotide
gcacgccggccggggugcu

SEQ ID NO: 3071673 - RNA, 19 nt, Artificial Sequence
  Description of Artificial Sequence: Synthetic oligonucleotide
cggccacgggcuggcugaa

SEQ ID NO: 3071674 - RNA, 19 nt, Artificial Sequence
  Description of Artificial Sequence: Synthetic oligonucleotide
cgggcccgucgaggcuccu

SEQ ID NO: 3071675 - RNA, 19 nt, Artificial Sequence
  Description of Artificial Sequence: Synthetic oligonucleotide
aaauuguucaugcacagcc

SEQ ID NO: 3071676 - RNA, 19 nt, Artificial Sequence
  Description of Artificial Sequence: Synthetic oligonucleotide
uuauuuugaagaaagacug

SEQ ID NO: 3071677 - RNA, 19 nt, Artificial Sequence
  Description of Artificial Sequence: Synthetic oligonucleotide
uuugaagaaagacugauga

SEQ ID NO: 3071678 - RNA, 19 nt, Artificial Sequence
  Description of Artificial Sequence: Synthetic oligonucleotide
agauguuugucauuaaagc

SEQ ID NO: 3071679 - RNA, 19 nt, Artificial Sequence
  Description of Artificial Sequence: Synthetic oligonucleotide
agugcuaucacauuguuug

SEQ ID NO: 3071680 - RNA, 19 nt, Artificial Sequence
  Description of Artificial Sequence: Synthetic oligonucleotide
uaaagcuaaacuuugaaaa

SEQ ID NO: 3071681 - RNA, 19 nt, Artificial Sequence
  Description of Artificial Sequence: Synthetic oligonucleotide
auuguauugaagaagcacc

SEQ ID NO: 3071682 - RNA, 19 nt, Artificial Sequence
  Description of Artificial Sequence: Synthetic oligonucleotide
uuugaaauuguucaugcac

SEQ ID NO: 3071683 - RNA, 19 nt, Artificial Sequence
  Description of Artificial Sequence: Synthetic oligonucleotide
agugguaguguucaggagc

SEQ ID NO: 3071684 - RNA, 19 nt, Artificial Sequence
  Description of Artificial Sequence: Synthetic oligonucleotide
ugaagugggaaaauaaggc

SEQ ID NO: 3071685 - RNA, 19 nt, Artificial Sequence
  Description of Artificial Sequence: Synthetic oligonucleotide
ugcauuguauugaagaagc

SEQ ID NO: 3071686 - RNA, 19 nt, Artificial Sequence
  Description of Artificial Sequence: Synthetic oligonucleotide
aaaguuguucaugagcuac

SEQ ID NO: 3071687 - RNA, 19 nt, Artificial Sequence
  Description of Artificial Sequence: Synthetic oligonucleotide
uauugaagaagcaccgugg

SEQ ID NO: 3071688 - RNA, 19 nt, Artificial Sequence
  Description of Artificial Sequence: Synthetic oligonucleotide
uuguauugaagaagcaccg

SEQ ID NO: 3071689 - RNA, 19 nt, Artificial Sequence
  Description of Artificial Sequence: Synthetic oligonucleotide
ugaagaaagacugaugaug

SEQ ID NO: 3071690 - RNA, 19 nt, Artificial Sequence
  Description of Artificial Sequence: Synthetic oligonucleotide
agccauuuuauuuugaaga

SEQ ID NO: 3071691 - RNA, 19 nt, Artificial Sequence
  Description of Artificial Sequence: Synthetic oligonucleotide
uauugaaugcauuguauug

SEQ ID NO: 3071692 - RNA, 19 nt, Artificial Sequence
  Description of Artificial Sequence: Synthetic oligonucleotide
uugucauuaaagcuaaacu

SEQ ID NO: 3071693 - RNA, 19 nt, Artificial Sequence
  Description of Artificial Sequence: Synthetic oligonucleotide
uccuguuugaaauuguuca

SEQ ID NO: 3071694 - RNA, 19 nt, Artificial Sequence
  Description of Artificial Sequence: Synthetic oligonucleotide
uguuugaaauuguucaugc

SEQ ID NO: 3071695 - RNA, 19 nt, Artificial Sequence
  Description of Artificial Sequence: Synthetic oligonucleotide
gaaugcauuguauugaaga

SEQ ID NO: 3071696 - RNA, 19 nt, Artificial Sequence
  Description of Artificial Sequence: Synthetic oligonucleotide
ucauuaaagcuaaacuuug

SEQ ID NO: 3071697 - RNA, 19 nt, Artificial Sequence
  Description of Artificial Sequence: Synthetic oligonucleotide
aaaauaaggccuaagaguu

SEQ ID NO: 3071698 - RNA, 19 nt, Artificial Sequence
  Description of Artificial Sequence: Synthetic oligonucleotide
uaguauauugaaugcauug

SEQ ID NO: 3071699 - RNA, 19 nt, Artificial Sequence
  Description of Artificial Sequence: Synthetic oligonucleotide
ucuuugcagacuuugaaga

SEQ ID NO: 3071700 - RNA, 19 nt, Artificial Sequence
  Description of Artificial Sequence: Synthetic oligonucleotide
cugaagugggaaaauaagg

SEQ ID NO: 3071701 - RNA, 19 nt, Artificial Sequence
  Description of Artificial Sequence: Synthetic oligonucleotide
uucucaauuuaaauuaccu

SEQ ID NO: 3071702 - RNA, 19 nt, Artificial Sequence
  Description of Artificial Sequence: Synthetic oligonucleotide
ugucauuaaagcuaaacuu

SEQ ID NO: 3071703 - RNA, 19 nt, Artificial Sequence
  Description of Artificial Sequence: Synthetic oligonucleotide
gaagugggaaaauaaggcc

SEQ ID NO: 3071704 - RNA, 19 nt, Artificial Sequence
  Description of Artificial Sequence: Synthetic oligonucleotide
agacugaugauguaaaaga

SEQ ID NO: 3071705 - RNA, 19 nt, Artificial Sequence
  Description of Artificial Sequence: Synthetic oligonucleotide
aagauguuugucauuaaag

SEQ ID NO: 3071706 - RNA, 19 nt, Artificial Sequence
  Description of Artificial Sequence: Synthetic oligonucleotide
gaaaauaaggccuaagagu

SEQ ID NO: 3071707 - RNA, 19 nt, Artificial Sequence
  Description of Artificial Sequence: Synthetic oligonucleotide
aaugcauuguauugaagaa

SEQ ID NO: 3071708 - RNA, 19 nt, Artificial Sequence
  Description of Artificial Sequence: Synthetic oligonucleotide
auguaaaagauguuuguca

SEQ ID NO: 3071709 - RNA, 19 nt, Artificial Sequence
  Description of Artificial Sequence: Synthetic oligonucleotide
aagacugaugauguaaaag

SEQ ID NO: 3071710 - RNA, 19 nt, Artificial Sequence
  Description of Artificial Sequence: Synthetic oligonucleotide
agacuuacauuacugcuuc

SEQ ID NO: 3071711 - RNA, 19 nt, Artificial Sequence
  Description of Artificial Sequence: Synthetic oligonucleotide
uuacagacuuacauuacug

SEQ ID NO: 3071712 - RNA, 19 nt, Artificial Sequence
  Description of Artificial Sequence: Synthetic oligonucleotide
ugaagaagcaccgugguac

SEQ ID NO: 3071713 - RNA, 19 nt, Artificial Sequence
  Description of Artificial Sequence: Synthetic oligonucleotide
uuaaagcuaaacuuugaaa

SEQ ID NO: 3071714 - RNA, 19 nt, Artificial Sequence
  Description of Artificial Sequence: Synthetic oligonucleotide
uauauugaaugcauuguau

SEQ ID NO: 3071715 - RNA, 19 nt, Artificial Sequence
  Description of Artificial Sequence: Synthetic oligonucleotide
uucuuugcagacuuugaag

SEQ ID NO: 3071716 - RNA, 19 nt, Artificial Sequence
  Description of Artificial Sequence: Synthetic oligonucleotide
aaagauguuugucauuaaa

SEQ ID NO: 3071717 - RNA, 19 nt, Artificial Sequence
  Description of Artificial Sequence: Synthetic oligonucleotide
ggaaaauaaggccuaagag

SEQ ID NO: 3071718 - RNA, 19 nt, Artificial Sequence
  Description of Artificial Sequence: Synthetic oligonucleotide
uuuugaagaaagacugaug

SEQ ID NO: 3071719 - RNA, 19 nt, Artificial Sequence
  Description of Artificial Sequence: Synthetic oligonucleotide
ucaguggccauccccaggg

SEQ ID NO: 3071720 - RNA, 19 nt, Artificial Sequence
  Description of Artificial Sequence: Synthetic oligonucleotide
aguguucaggagcaguggc

SEQ ID NO: 3071721 - RNA, 19 nt, Artificial Sequence
  Description of Artificial Sequence: Synthetic oligonucleotide
uuaaauuaccuuuucuuuu

SEQ ID NO: 3071722 - RNA, 19 nt, Artificial Sequence
  Description of Artificial Sequence: Synthetic oligonucleotide
aauaaggccuaagaguucu

SEQ ID NO: 3071723 - RNA, 19 nt, Artificial Sequence
  Description of Artificial Sequence: Synthetic oligonucleotide
uaaaagauguuugucauua

SEQ ID NO: 3071724 - RNA, 19 nt, Artificial Sequence
  Description of Artificial Sequence: Synthetic oligonucleotide
ucaauuuaaauuaccuuuu

SEQ ID NO: 3071725 - RNA, 19 nt, Artificial Sequence
  Description of Artificial Sequence: Synthetic oligonucleotide
uucagcguguacaucagug

SEQ ID NO: 3071726 - RNA, 19 nt, Artificial Sequence
  Description of Artificial Sequence: Synthetic oligonucleotide
uuugucauuaaagcuaaac

SEQ ID NO: 3071727 - RNA, 19 nt, Artificial Sequence
  Description of Artificial Sequence: Synthetic oligonucleotide
ucaugagcuaccuuuguac

SEQ ID NO: 3071728 - RNA, 19 nt, Artificial Sequence
  Description of Artificial Sequence: Synthetic oligonucleotide
uaccuuuguacugaagugg

SEQ ID NO: 3071729 - RNA, 19 nt, Artificial Sequence
  Description of Artificial Sequence: Synthetic oligonucleotide
uguuugucauuaaagcuaa

SEQ ID NO: 3071730 - RNA, 19 nt, Artificial Sequence
  Description of Artificial Sequence: Synthetic oligonucleotide
ugauguaaaagauguuugu

SEQ ID NO: 3071731 - RNA, 19 nt, Artificial Sequence
  Description of Artificial Sequence: Synthetic oligonucleotide
auuaaagcuaaacuuugaa

SEQ ID NO: 3071732 - RNA, 19 nt, Artificial Sequence
  Description of Artificial Sequence: Synthetic oligonucleotide
ggaccuaguauauugaaug

SEQ ID NO: 3071733 - RNA, 19 nt, Artificial Sequence
  Description of Artificial Sequence: Synthetic oligonucleotide
ugcuucagcguguacauca

SEQ ID NO: 3071734 - RNA, 19 nt, Artificial Sequence
  Description of Artificial Sequence: Synthetic oligonucleotide
ucagcguguacaucagugg

SEQ ID NO: 3071735 - RNA, 19 nt, Artificial Sequence
  Description of Artificial Sequence: Synthetic oligonucleotide
uugcagacuuugaagagug

SEQ ID NO: 3071736 - RNA, 19 nt, Artificial Sequence
  Description of Artificial Sequence: Synthetic oligonucleotide
uauuuugaagaaagacuga

SEQ ID NO: 3071737 - RNA, 19 nt, Artificial Sequence
  Description of Artificial Sequence: Synthetic oligonucleotide
uuguucaugagcuaccuuu

SEQ ID NO: 3071738 - RNA, 19 nt, Artificial Sequence
  Description of Artificial Sequence: Synthetic oligonucleotide
guauugaagaagcaccgug

SEQ ID NO: 3071739 - RNA, 19 nt, Artificial Sequence
  Description of Artificial Sequence: Synthetic oligonucleotide
ugaagagugguaguguuca

SEQ ID NO: 3071740 - RNA, 19 nt, Artificial Sequence
  Description of Artificial Sequence: Synthetic oligonucleotide
uuucuuugcagacuuugaa

SEQ ID NO: 3071741 - RNA, 19 nt, Artificial Sequence
  Description of Artificial Sequence: Synthetic oligonucleotide
acagacuuacauuacugcu

SEQ ID NO: 3071742 - RNA, 19 nt, Artificial Sequence
  Description of Artificial Sequence: Synthetic oligonucleotide
aagagugguaguguucagg

SEQ ID NO: 3071743 - RNA, 19 nt, Artificial Sequence
  Description of Artificial Sequence: Synthetic oligonucleotide
aagugggaaaauaaggccu

SEQ ID NO: 3071744 - RNA, 19 nt, Artificial Sequence
  Description of Artificial Sequence: Synthetic oligonucleotide
cuuacauuacugcuucagc

SEQ ID NO: 3071745 - RNA, 19 nt, Artificial Sequence
  Description of Artificial Sequence: Synthetic oligonucleotide
aaguuguucaugagcuacc

SEQ ID NO: 3071746 - RNA, 19 nt, Artificial Sequence
  Description of Artificial Sequence: Synthetic oligonucleotide
uguucaugagcuaccuuug

SEQ ID NO: 3071747 - RNA, 19 nt, Artificial Sequence
  Description of Artificial Sequence: Synthetic oligonucleotide
uacauuacugcuucagcgu

SEQ ID NO: 3071748 - RNA, 19 nt, Artificial Sequence
  Description of Artificial Sequence: Synthetic oligonucleotide
uacugaagugggaaaauaa

SEQ ID NO: 3071749 - RNA, 19 nt, Artificial Sequence
  Description of Artificial Sequence: Synthetic oligonucleotide
uacaucaguggccaucccc

SEQ ID NO: 3071750 - RNA, 19 nt, Artificial Sequence
  Description of Artificial Sequence: Synthetic oligonucleotide
gauguuugucauuaaagcu

SEQ ID NO: 3071751 - RNA, 19 nt, Artificial Sequence
  Description of Artificial Sequence: Synthetic oligonucleotide
aaggccuaagaguucucag

SEQ ID NO: 3071752 - RNA, 19 nt, Artificial Sequence
  Description of Artificial Sequence: Synthetic oligonucleotide
agacuuugaagagugguag

SEQ ID NO: 3071753 - RNA, 19 nt, Artificial Sequence
  Description of Artificial Sequence: Synthetic oligonucleotide
aguauauugaaugcauugu

SEQ ID NO: 3071754 - RNA, 19 nt, Artificial Sequence
  Description of Artificial Sequence: Synthetic oligonucleotide
gaccuaguauauugaaugc

SEQ ID NO: 3071755 - RNA, 19 nt, Artificial Sequence
  Description of Artificial Sequence: Synthetic oligonucleotide
agagugguaguguucagga

SEQ ID NO: 3071756 - RNA, 19 nt, Artificial Sequence
  Description of Artificial Sequence: Synthetic oligonucleotide
auauugaaugcauuguauu

SEQ ID NO: 3071757 - RNA, 19 nt, Artificial Sequence
  Description of Artificial Sequence: Synthetic oligonucleotide
cauuguauugaagaagcac

SEQ ID NO: 3071758 - RNA, 19 nt, Artificial Sequence
  Description of Artificial Sequence: Synthetic oligonucleotide
uguacaucaguggccaucc

SEQ ID NO: 3071759 - RNA, 19 nt, Artificial Sequence
  Description of Artificial Sequence: Synthetic oligonucleotide
ucucaauuuaaauuaccuu

SEQ ID NO: 3071760 - RNA, 19 nt, Artificial Sequence
  Description of Artificial Sequence: Synthetic oligonucleotide
gauguaaaagauguuuguc

SEQ ID NO: 3071761 - RNA, 19 nt, Artificial Sequence
  Description of Artificial Sequence: Synthetic oligonucleotide
ucaugcacagccauuuuau

SEQ ID NO: 3071762 - RNA, 19 nt, Artificial Sequence
  Description of Artificial Sequence: Synthetic oligonucleotide
ugaaugcauuguauugaag

SEQ ID NO: 3071763 - RNA, 19 nt, Artificial Sequence
  Description of Artificial Sequence: Synthetic oligonucleotide
aaagacugaugauguaaaa

SEQ ID NO: 3071764 - RNA, 19 nt, Artificial Sequence
  Description of Artificial Sequence: Synthetic oligonucleotide
auugaagaagcaccguggu

SEQ ID NO: 3071765 - RNA, 19 nt, Artificial Sequence
  Description of Artificial Sequence: Synthetic oligonucleotide
cuuugcagacuuugaagag

SEQ ID NO: 3071766 - RNA, 19 nt, Artificial Sequence
  Description of Artificial Sequence: Synthetic oligonucleotide
acugaagugggaaaauaag

SEQ ID NO: 3071767 - RNA, 19 nt, Artificial Sequence
  Description of Artificial Sequence: Synthetic oligonucleotide
ugcacagccauuuuauuuu

SEQ ID NO: 3071768 - RNA, 19 nt, Artificial Sequence
  Description of Artificial Sequence: Synthetic oligonucleotide
augauguaaaagauguuug

SEQ ID NO: 3071769 - RNA, 19 nt, Artificial Sequence
  Description of Artificial Sequence: Synthetic oligonucleotide
cuaccuuuguacugaagug

SEQ ID NO: 3071770 - RNA, 19 nt, Artificial Sequence
  Description of Artificial Sequence: Synthetic oligonucleotide
acuuacauuacugcuucag

SEQ ID NO: 3071771 - RNA, 19 nt, Artificial Sequence
  Description of Artificial Sequence: Synthetic oligonucleotide
acauuacugcuucagcgug

SEQ ID NO: 3071772 - RNA, 19 nt, Artificial Sequence
  Description of Artificial Sequence: Synthetic oligonucleotide
auuuugaagaaagacugau

SEQ ID NO: 3071773 - RNA, 19 nt, Artificial Sequence
  Description of Artificial Sequence: Synthetic oligonucleotide
uugaaugcauuguauugaa

SEQ ID NO: 3071774 - RNA, 19 nt, Artificial Sequence
  Description of Artificial Sequence: Synthetic oligonucleotide
aaauaaggccuaagaguuc

SEQ ID NO: 3071775 - RNA, 19 nt, Artificial Sequence
  Description of Artificial Sequence: Synthetic oligonucleotide
ugagcuaccuuuguacuga

SEQ ID NO: 3071776 - RNA, 19 nt, Artificial Sequence
  Description of Artificial Sequence: Synthetic oligonucleotide
uuugaagagugguaguguu

SEQ ID NO: 3071777 - RNA, 19 nt, Artificial Sequence
  Description of Artificial Sequence: Synthetic oligonucleotide
uuugcagacuuugaagagu

SEQ ID NO: 3071778 - RNA, 19 nt, Artificial Sequence
  Description of Artificial Sequence: Synthetic oligonucleotide
cucaauuuaaauuaccuuu

SEQ ID NO: 3071779 - RNA, 19 nt, Artificial Sequence
  Description of Artificial Sequence: Synthetic oligonucleotide
acuuugaagagugguagug

SEQ ID NO: 3071780 - RNA, 19 nt, Artificial Sequence
  Description of Artificial Sequence: Synthetic oligonucleotide
agaaagacugaugauguaa

SEQ ID NO: 3071781 - RNA, 19 nt, Artificial Sequence
  Description of Artificial Sequence: Synthetic oligonucleotide
aagaguucucagugcuauc

SEQ ID NO: 3071782 - RNA, 19 nt, Artificial Sequence
  Description of Artificial Sequence: Synthetic oligonucleotide
uacugcuucagcguguaca

SEQ ID NO: 3071783 - RNA, 19 nt, Artificial Sequence
  Description of Artificial Sequence: Synthetic oligonucleotide
augcauuguauugaagaag

SEQ ID NO: 3071784 - RNA, 19 nt, Artificial Sequence
  Description of Artificial Sequence: Synthetic oligonucleotide
uaagaguucucagugcuau

SEQ ID NO: 3071785 - RNA, 19 nt, Artificial Sequence
  Description of Artificial Sequence: Synthetic oligonucleotide
gaagaagcaccgugguacc

SEQ ID NO: 3071786 - RNA, 19 nt, Artificial Sequence
  Description of Artificial Sequence: Synthetic oligonucleotide
gaagaaagacugaugaugu

SEQ ID NO: 3071787 - RNA, 19 nt, Artificial Sequence
  Description of Artificial Sequence: Synthetic oligonucleotide
uucaugcacagccauuuua

SEQ ID NO: 3071788 - RNA, 19 nt, Artificial Sequence
  Description of Artificial Sequence: Synthetic oligonucleotide
aaaagauguuugucauuaa

SEQ ID NO: 3071789 - RNA, 19 nt, Artificial Sequence
  Description of Artificial Sequence: Synthetic oligonucleotide
aaaaguuguucaugagcua

SEQ ID NO: 3071790 - RNA, 19 nt, Artificial Sequence
  Description of Artificial Sequence: Synthetic oligonucleotide
auuguucaugcacagccau

SEQ ID NO: 3071791 - RNA, 19 nt, Artificial Sequence
  Description of Artificial Sequence: Synthetic oligonucleotide
accuuuguacugaaguggg

SEQ ID NO: 3071792 - RNA, 19 nt, Artificial Sequence
  Description of Artificial Sequence: Synthetic oligonucleotide
aguggccauccccagggac

SEQ ID NO: 3071793 - RNA, 19 nt, Artificial Sequence
  Description of Artificial Sequence: Synthetic oligonucleotide
cagccauuuuauuuugaag

SEQ ID NO: 3071794 - RNA, 19 nt, Artificial Sequence
  Description of Artificial Sequence: Synthetic oligonucleotide
uugaagaaagacugaugau

SEQ ID NO: 3071795 - RNA, 19 nt, Artificial Sequence
  Description of Artificial Sequence: Synthetic oligonucleotide
agaguucucagugcuauca

SEQ ID NO: 3071796 - RNA, 19 nt, Artificial Sequence
  Description of Artificial Sequence: Synthetic oligonucleotide
augagcuaccuuuguacug

SEQ ID NO: 3071797 - RNA, 19 nt, Artificial Sequence
  Description of Artificial Sequence: Synthetic oligonucleotide
gaaauuguucaugcacagc

SEQ ID NO: 3071798 - RNA, 19 nt, Artificial Sequence
  Description of Artificial Sequence: Synthetic oligonucleotide
guauauugaaugcauugua

SEQ ID NO: 3071799 - RNA, 19 nt, Artificial Sequence
  Description of Artificial Sequence: Synthetic oligonucleotide
auguuugucauuaaagcua

SEQ ID NO: 3071800 - RNA, 19 nt, Artificial Sequence
  Description of Artificial Sequence: Synthetic oligonucleotide
aauuguucaugcacagcca

SEQ ID NO: 3071801 - RNA, 19 nt, Artificial Sequence
  Description of Artificial Sequence: Synthetic oligonucleotide
agcguguacaucaguggcc

SEQ ID NO: 3071802 - RNA, 19 nt, Artificial Sequence
  Description of Artificial Sequence: Synthetic oligonucleotide
acagccauuuuauuuugaa

SEQ ID NO: 3071803 - RNA, 19 nt, Artificial Sequence
  Description of Artificial Sequence: Synthetic oligonucleotide
agcaguggcuuacagacuu

SEQ ID NO: 3071804 - RNA, 19 nt, Artificial Sequence
  Description of Artificial Sequence: Synthetic oligonucleotide
uucaugagcuaccuuugua

SEQ ID NO: 3071805 - RNA, 19 nt, Artificial Sequence
  Description of Artificial Sequence: Synthetic oligonucleotide
uugaagagugguaguguuc

SEQ ID NO: 3071806 - RNA, 19 nt, Artificial Sequence
  Description of Artificial Sequence: Synthetic oligonucleotide
guucucaauuuaaauuacc

SEQ ID NO: 3071807 - RNA, 19 nt, Artificial Sequence
  Description of Artificial Sequence: Synthetic oligonucleotide
uaguguucaggagcagugg

SEQ ID NO: 3071808 - RNA, 19 nt, Artificial Sequence
  Description of Artificial Sequence: Synthetic oligonucleotide
cuguuugaaauuguucaug

SEQ ID NO: 3071809 - RNA, 19 nt, Artificial Sequence
  Description of Artificial Sequence: Synthetic oligonucleotide
cagcguguacaucaguggc

SEQ ID NO: 3071810 - RNA, 19 nt, Artificial Sequence
  Description of Artificial Sequence: Synthetic oligonucleotide
uguucaugcacagccauuu

SEQ ID NO: 3071811 - RNA, 19 nt, Artificial Sequence
  Description of Artificial Sequence: Synthetic oligonucleotide
gggaaaauaaggccuaaga

SEQ ID NO: 3071812 - RNA, 19 nt, Artificial Sequence
  Description of Artificial Sequence: Synthetic oligonucleotide
ugcagacuuugaagagugg

SEQ ID NO: 3071813 - RNA, 19 nt, Artificial Sequence
  Description of Artificial Sequence: Synthetic oligonucleotide
auuuuauuuugaagaaaga

SEQ ID NO: 3071814 - RNA, 19 nt, Artificial Sequence
  Description of Artificial Sequence: Synthetic oligonucleotide
guaguguucaggagcagug

SEQ ID NO: 3071815 - RNA, 19 nt, Artificial Sequence
  Description of Artificial Sequence: Synthetic oligonucleotide
gaagcaccgugguaccucc

SEQ ID NO: 3071816 - RNA, 19 nt, Artificial Sequence
  Description of Artificial Sequence: Synthetic oligonucleotide
gaaagacugaugauguaaa

SEQ ID NO: 3071817 - RNA, 19 nt, Artificial Sequence
  Description of Artificial Sequence: Synthetic oligonucleotide
acugcuucagcguguacau

SEQ ID NO: 3071818 - RNA, 19 nt, Artificial Sequence
  Description of Artificial Sequence: Synthetic oligonucleotide
cauuaaagcuaaacuuuga

SEQ ID NO: 3071819 - RNA, 19 nt, Artificial Sequence
  Description of Artificial Sequence: Synthetic oligonucleotide
uguauugaagaagcaccgu

SEQ ID NO: 3071820 - RNA, 19 nt, Artificial Sequence
  Description of Artificial Sequence: Synthetic oligonucleotide
aggccuaagaguucucagu

SEQ ID NO: 3071821 - RNA, 19 nt, Artificial Sequence
  Description of Artificial Sequence: Synthetic oligonucleotide
cuccuguuugaaauuguuc

SEQ ID NO: 3071822 - RNA, 19 nt, Artificial Sequence
  Description of Artificial Sequence: Synthetic oligonucleotide
uccccagggaccuaguaua

SEQ ID NO: 3071823 - RNA, 19 nt, Artificial Sequence
  Description of Artificial Sequence: Synthetic oligonucleotide
agaagcaccgugguaccuc

SEQ ID NO: 3071824 - RNA, 19 nt, Artificial Sequence
  Description of Artificial Sequence: Synthetic oligonucleotide
accuaguauauugaaugca

SEQ ID NO: 3071825 - RNA, 19 nt, Artificial Sequence
  Description of Artificial Sequence: Synthetic oligonucleotide
guuugaaauuguucaugca

SEQ ID NO: 3071826 - RNA, 19 nt, Artificial Sequence
  Description of Artificial Sequence: Synthetic oligonucleotide
ugggaaaauaaggccuaag

SEQ ID NO: 3071827 - RNA, 19 nt, Artificial Sequence
  Description of Artificial Sequence: Synthetic oligonucleotide
aucaguggccauccccagg

SEQ ID NO: 3071828 - RNA, 19 nt, Artificial Sequence
  Description of Artificial Sequence: Synthetic oligonucleotide
gagugguaguguucaggag

SEQ ID NO: 3071829 - RNA, 19 nt, Artificial Sequence
  Description of Artificial Sequence: Synthetic oligonucleotide
uggcuuacagacuuacauu

SEQ ID NO: 3071830 - RNA, 19 nt, Artificial Sequence
  Description of Artificial Sequence: Synthetic oligonucleotide
ggccuaagaguucucagug

SEQ ID NO: 3071831 - RNA, 19 nt, Artificial Sequence
  Description of Artificial Sequence: Synthetic oligonucleotide
uaccuccuguuugaaauug

SEQ ID NO: 3071832 - RNA, 19 nt, Artificial Sequence
  Description of Artificial Sequence: Synthetic oligonucleotide
gaagagugguaguguucag

SEQ ID NO: 3071833 - RNA, 19 nt, Artificial Sequence
  Description of Artificial Sequence: Synthetic oligonucleotide
uguacugaagugggaaaau

SEQ ID NO: 3071834 - RNA, 19 nt, Artificial Sequence
  Description of Artificial Sequence: Synthetic oligonucleotide
ugaugauguaaaagauguu

SEQ ID NO: 3071835 - RNA, 19 nt, Artificial Sequence
  Description of Artificial Sequence: Synthetic oligonucleotide
uugaagaagcaccguggua

SEQ ID NO: 3071836 - RNA, 19 nt, Artificial Sequence
  Description of Artificial Sequence: Synthetic oligonucleotide
acaucaguggccaucccca

SEQ ID NO: 3071837 - RNA, 19 nt, Artificial Sequence
  Description of Artificial Sequence: Synthetic oligonucleotide
aguuguucaugagcuaccu

SEQ ID NO: 3071838 - RNA, 19 nt, Artificial Sequence
  Description of Artificial Sequence: Synthetic oligonucleotide
ccagggaccuaguauauug

SEQ ID NO: 3071839 - RNA, 19 nt, Artificial Sequence
  Description of Artificial Sequence: Synthetic oligonucleotide
ucagugcuaucacauuguu

SEQ ID NO: 3071840 - RNA, 19 nt, Artificial Sequence
  Description of Artificial Sequence: Synthetic oligonucleotide
guggcuuacagacuuacau

SEQ ID NO: 3071841 - RNA, 19 nt, Artificial Sequence
  Description of Artificial Sequence: Synthetic oligonucleotide
gucauuaaagcuaaacuuu

SEQ ID NO: 3071842 - RNA, 19 nt, Artificial Sequence
  Description of Artificial Sequence: Synthetic oligonucleotide
uguucaggagcaguggcuu

SEQ ID NO: 3071843 - RNA, 19 nt, Artificial Sequence
  Description of Artificial Sequence: Synthetic oligonucleotide
cuuacagacuuacauuacu

SEQ ID NO: 3071844 - RNA, 19 nt, Artificial Sequence
  Description of Artificial Sequence: Synthetic oligonucleotide
agggaccuaguauauugaa

SEQ ID NO: 3071845 - RNA, 19 nt, Artificial Sequence
  Description of Artificial Sequence: Synthetic oligonucleotide
gcuaccuuuguacugaagu

SEQ ID NO: 3071846 - RNA, 19 nt, Artificial Sequence
  Description of Artificial Sequence: Synthetic oligonucleotide
auccccagggaccuaguau

SEQ ID NO: 3071847 - RNA, 19 nt, Artificial Sequence
  Description of Artificial Sequence: Synthetic oligonucleotide
agcaccgugguaccuccug

SEQ ID NO: 3071848 - RNA, 19 nt, Artificial Sequence
  Description of Artificial Sequence: Synthetic oligonucleotide
gccauuuuauuuugaagaa

SEQ ID NO: 3071849 - RNA, 19 nt, Artificial Sequence
  Description of Artificial Sequence: Synthetic oligonucleotide
uuguucaugcacagccauu

SEQ ID NO: 3071850 - RNA, 19 nt, Artificial Sequence
  Description of Artificial Sequence: Synthetic oligonucleotide
gugguaguguucaggagca

SEQ ID NO: 3071851 - RNA, 19 nt, Artificial Sequence
  Description of Artificial Sequence: Synthetic oligonucleotide
cagacuuugaagaguggua

SEQ ID NO: 3071852 - RNA, 19 nt, Artificial Sequence
  Description of Artificial Sequence: Synthetic oligonucleotide
uucucagugcuaucacauu

SEQ ID NO: 3071853 - RNA, 19 nt, Artificial Sequence
  Description of Artificial Sequence: Synthetic oligonucleotide
aagaagcaccgugguaccu

SEQ ID NO: 3071854 - RNA, 19 nt, Artificial Sequence
  Description of Artificial Sequence: Synthetic oligonucleotide
agugggaaaauaaggccua

SEQ ID NO: 3071855 - RNA, 19 nt, Artificial Sequence
  Description of Artificial Sequence: Synthetic oligonucleotide
caugagcuaccuuuguacu

SEQ ID NO: 3071856 - RNA, 19 nt, Artificial Sequence
  Description of Artificial Sequence: Synthetic oligonucleotide
gacuuugaagagugguagu

SEQ ID NO: 3071857 - RNA, 19 nt, Artificial Sequence
  Description of Artificial Sequence: Synthetic oligonucleotide
ugguaccuccuguuugaaa

SEQ ID NO: 3071858 - RNA, 19 nt, Artificial Sequence
  Description of Artificial Sequence: Synthetic oligonucleotide
auuacugcuucagcgugua

SEQ ID NO: 3071859 - RNA, 19 nt, Artificial Sequence
  Description of Artificial Sequence: Synthetic oligonucleotide
guguacaucaguggccauc

SEQ ID NO: 3071860 - RNA, 19 nt, Artificial Sequence
  Description of Artificial Sequence: Synthetic oligonucleotide
caguggcuuacagacuuac

SEQ ID NO: 3071861 - RNA, 19 nt, Artificial Sequence
  Description of Artificial Sequence: Synthetic oligonucleotide
gccuaagaguucucagugc

SEQ ID NO: 3071862 - RNA, 19 nt, Artificial Sequence
  Description of Artificial Sequence: Synthetic oligonucleotide
gacuuacauuacugcuuca

SEQ ID NO: 3071863 - RNA, 19 nt, Artificial Sequence
  Description of Artificial Sequence: Synthetic oligonucleotide
cagggaccuaguauauuga

SEQ ID NO: 3071864 - RNA, 19 nt, Artificial Sequence
  Description of Artificial Sequence: Synthetic oligonucleotide
cagacuuacauuacugcuu

SEQ ID NO: 3071865 - RNA, 19 nt, Artificial Sequence
  Description of Artificial Sequence: Synthetic oligonucleotide
cuaguauauugaaugcauu

SEQ ID NO: 3071866 - RNA, 19 nt, Artificial Sequence
  Description of Artificial Sequence: Synthetic oligonucleotide
cuaagaguucucagugcua

SEQ ID NO: 3071867 - RNA, 19 nt, Artificial Sequence
  Description of Artificial Sequence: Synthetic oligonucleotide
gcacagccauuuuauuuug

SEQ ID NO: 3071868 - RNA, 19 nt, Artificial Sequence
  Description of Artificial Sequence: Synthetic oligonucleotide
uuacugcuucagcguguac

SEQ ID NO: 3071869 - RNA, 19 nt, Artificial Sequence
  Description of Artificial Sequence: Synthetic oligonucleotide
guaaaagauguuugucauu

SEQ ID NO: 3071870 - RNA, 19 nt, Artificial Sequence
  Description of Artificial Sequence: Synthetic oligonucleotide
guucucagugcuaucacau

SEQ ID NO: 3071871 - RNA, 19 nt, Artificial Sequence
  Description of Artificial Sequence: Synthetic oligonucleotide
uggccauccccagggaccu

SEQ ID NO: 3071872 - RNA, 19 nt, Artificial Sequence
  Description of Artificial Sequence: Synthetic oligonucleotide
guacugaagugggaaaaua

SEQ ID NO: 3071873 - RNA, 19 nt, Artificial Sequence
  Description of Artificial Sequence: Synthetic oligonucleotide
cuuugaagagugguagugu

SEQ ID NO: 3071874 - RNA, 19 nt, Artificial Sequence
  Description of Artificial Sequence: Synthetic oligonucleotide
accgugguaccuccuguuu

SEQ ID NO: 3071875 - RNA, 19 nt, Artificial Sequence
  Description of Artificial Sequence: Synthetic oligonucleotide
cacagccauuuuauuuuga

SEQ ID NO: 3071876 - RNA, 19 nt, Artificial Sequence
  Description of Artificial Sequence: Synthetic oligonucleotide
aguggcuuacagacuuaca

SEQ ID NO: 3071877 - RNA, 19 nt, Artificial Sequence
  Description of Artificial Sequence: Synthetic oligonucleotide
guacaucaguggccauccc

SEQ ID NO: 3071878 - RNA, 19 nt, Artificial Sequence
  Description of Artificial Sequence: Synthetic oligonucleotide
gcuuacagacuuacauuac

SEQ ID NO: 3071879 - RNA, 19 nt, Artificial Sequence
  Description of Artificial Sequence: Synthetic oligonucleotide
ccuaguauauugaaugcau

SEQ ID NO: 3071880 - RNA, 19 nt, Artificial Sequence
  Description of Artificial Sequence: Synthetic oligonucleotide
guucaugagcuaccuuugu

SEQ ID NO: 3071881 - RNA, 19 nt, Artificial Sequence
  Description of Artificial Sequence: Synthetic oligonucleotide
cauuacugcuucagcgugu

SEQ ID NO: 3071882 - RNA, 19 nt, Artificial Sequence
  Description of Artificial Sequence: Synthetic oligonucleotide
agcuaccuuuguacugaag

SEQ ID NO: 3071883 - RNA, 19 nt, Artificial Sequence
  Description of Artificial Sequence: Synthetic oligonucleotide
ccuaagaguucucagugcu

SEQ ID NO: 3071884 - RNA, 19 nt, Artificial Sequence
  Description of Artificial Sequence: Synthetic oligonucleotide
accuccuguuugaaauugu

SEQ ID NO: 3071885 - RNA, 19 nt, Artificial Sequence
  Description of Artificial Sequence: Synthetic oligonucleotide
gcguguacaucaguggcca

SEQ ID NO: 3071886 - RNA, 19 nt, Artificial Sequence
  Description of Artificial Sequence: Synthetic oligonucleotide
gcuucagcguguacaucag

SEQ ID NO: 3071887 - RNA, 19 nt, Artificial Sequence
  Description of Artificial Sequence: Synthetic oligonucleotide
gagcuaccuuuguacugaa

SEQ ID NO: 3071888 - RNA, 19 nt, Artificial Sequence
  Description of Artificial Sequence: Synthetic oligonucleotide
gcagacuuugaagaguggu

SEQ ID NO: 3071889 - RNA, 19 nt, Artificial Sequence
  Description of Artificial Sequence: Synthetic oligonucleotide
ccgugguaccuccuguuug

SEQ ID NO: 3071890 - RNA, 19 nt, Artificial Sequence
  Description of Artificial Sequence: Synthetic oligonucleotide
gguaguguucaggagcagu

SEQ ID NO: 3071891 - RNA, 19 nt, Artificial Sequence
  Description of Artificial Sequence: Synthetic oligonucleotide
gcauuguauugaagaagca

SEQ ID NO: 3071892 - RNA, 19 nt, Artificial Sequence
  Description of Artificial Sequence: Synthetic oligonucleotide
ccauuuuauuuugaagaaa

SEQ ID NO: 3071893 - RNA, 19 nt, Artificial Sequence
  Description of Artificial Sequence: Synthetic oligonucleotide
guguucaggagcaguggcu

SEQ ID NO: 3071894 - RNA, 19 nt, Artificial Sequence
  Description of Artificial Sequence: Synthetic oligonucleotide
guuguucaugagcuaccuu

SEQ ID NO: 3071895 - RNA, 19 nt, Artificial Sequence
  Description of Artificial Sequence: Synthetic oligonucleotide
caugcacagccauuuuauu

SEQ ID NO: 3071896 - RNA, 19 nt, Artificial Sequence
  Description of Artificial Sequence: Synthetic oligonucleotide
cgugguaccuccuguuuga

SEQ ID NO: 3071897 - RNA, 19 nt, Artificial Sequence
  Description of Artificial Sequence: Synthetic oligonucleotide
ccuuuguacugaaguggga

SEQ ID NO: 3071898 - RNA, 19 nt, Artificial Sequence
  Description of Artificial Sequence: Synthetic oligonucleotide
aagcaccgugguaccuccu

SEQ ID NO: 3071899 - RNA, 19 nt, Artificial Sequence
  Description of Artificial Sequence: Synthetic oligonucleotide
guuugucauuaaagcuaaa

SEQ ID NO: 3071900 - RNA, 19 nt, Artificial Sequence
  Description of Artificial Sequence: Synthetic oligonucleotide
cugcuucagcguguacauc

SEQ ID NO: 3071901 - RNA, 19 nt, Artificial Sequence
  Description of Artificial Sequence: Synthetic oligonucleotide
cagugcuaucacauuguuu

SEQ ID NO: 3071902 - RNA, 19 nt, Artificial Sequence
  Description of Artificial Sequence: Synthetic oligonucleotide
ccuguuugaaauuguucau

SEQ ID NO: 3071903 - RNA, 19 nt, Artificial Sequence
  Description of Artificial Sequence: Synthetic oligonucleotide
cuucagcguguacaucagu

SEQ ID NO: 3071904 - RNA, 19 nt, Artificial Sequence
  Description of Artificial Sequence: Synthetic oligonucleotide
guucaugcacagccauuuu

SEQ ID NO: 3071905 - RNA, 19 nt, Artificial Sequence
  Description of Artificial Sequence: Synthetic oligonucleotide
cauccccagggaccuagua

SEQ ID NO: 3071906 - RNA, 19 nt, Artificial Sequence
  Description of Artificial Sequence: Synthetic oligonucleotide
gggaccuaguauauugaau

SEQ ID NO: 3071907 - RNA, 19 nt, Artificial Sequence
  Description of Artificial Sequence: Synthetic oligonucleotide
gagcaguggcuuacagacu

SEQ ID NO: 3071908 - RNA, 19 nt, Artificial Sequence
  Description of Artificial Sequence: Synthetic oligonucleotide
gugguaccuccuguuugaa

SEQ ID NO: 3071909 - RNA, 19 nt, Artificial Sequence
  Description of Artificial Sequence: Synthetic oligonucleotide
caguggccauccccaggga

SEQ ID NO: 3071910 - RNA, 19 nt, Artificial Sequence
  Description of Artificial Sequence: Synthetic oligonucleotide
gcaccgugguaccuccugu

SEQ ID NO: 3071911 - RNA, 19 nt, Artificial Sequence
  Description of Artificial Sequence: Synthetic oligonucleotide
caccgugguaccuccuguu

SEQ ID NO: 3071912 - RNA, 19 nt, Artificial Sequence
  Description of Artificial Sequence: Synthetic oligonucleotide
ccuccuguuugaaauuguu

SEQ ID NO: 3071913 - RNA, 19 nt, Artificial Sequence
  Description of Artificial Sequence: Synthetic oligonucleotide
gcaguggcuuacagacuua

SEQ ID NO: 3071914 - RNA, 19 nt, Artificial Sequence
  Description of Artificial Sequence: Synthetic oligonucleotide
ccccagggaccuaguauau

SEQ ID NO: 3071915 - RNA, 19 nt, Artificial Sequence
  Description of Artificial Sequence: Synthetic oligonucleotide
ccauccccagggaccuagu

SEQ ID NO: 3071916 - RNA, 19 nt, Artificial Sequence
  Description of Artificial Sequence: Synthetic oligonucleotide
cccagggaccuaguauauu

SEQ ID NO: 3071917 - RNA, 19 nt, Artificial Sequence
  Description of Artificial Sequence: Synthetic oligonucleotide
aaaagagccaaguauagug

SEQ ID NO: 3071918 - RNA, 19 nt, Artificial Sequence
  Description of Artificial Sequence: Synthetic oligonucleotide
guuaucuucaguuacacag

SEQ ID NO: 3071919 - RNA, 19 nt, Artificial Sequence
  Description of Artificial Sequence: Synthetic oligonucleotide
aaugccaugaguucagaac

SEQ ID NO: 3071920 - RNA, 19 nt, Artificial Sequence
  Description of Artificial Sequence: Synthetic oligonucleotide
agaaagaucugucucaaac

SEQ ID NO: 3071921 - RNA, 19 nt, Artificial Sequence
  Description of Artificial Sequence: Synthetic oligonucleotide
ucuucaguuacacagggag

SEQ ID NO: 3071922 - RNA, 19 nt, Artificial Sequence
  Description of Artificial Sequence: Synthetic oligonucleotide
aauucuuaguugcugcugg

SEQ ID NO: 3071923 - RNA, 19 nt, Artificial Sequence
  Description of Artificial Sequence: Synthetic oligonucleotide
cuugaaaauucuuaguugc

SEQ ID NO: 3071924 - RNA, 19 nt, Artificial Sequence
  Description of Artificial Sequence: Synthetic oligonucleotide
guguguuaaacacacaucg

SEQ ID NO: 3071925 - RNA, 19 nt, Artificial Sequence
  Description of Artificial Sequence: Synthetic oligonucleotide
ugaacuugaaaauucuuag

SEQ ID NO: 3071926 - RNA, 19 nt, Artificial Sequence
  Description of Artificial Sequence: Synthetic oligonucleotide
aagagccaaguauaguggc

SEQ ID NO: 3071927 - RNA, 19 nt, Artificial Sequence
  Description of Artificial Sequence: Synthetic oligonucleotide
aagucuguaaucccagcac

SEQ ID NO: 3071928 - RNA, 19 nt, Artificial Sequence
  Description of Artificial Sequence: Synthetic oligonucleotide
uucaaggccagucugaacu

SEQ ID NO: 3071929 - RNA, 19 nt, Artificial Sequence
  Description of Artificial Sequence: Synthetic oligonucleotide
aacuugaaaauucuuaguu

SEQ ID NO: 3071930 - RNA, 19 nt, Artificial Sequence
  Description of Artificial Sequence: Synthetic oligonucleotide
gaaaauucuuaguugcugc

SEQ ID NO: 3071931 - RNA, 19 nt, Artificial Sequence
  Description of Artificial Sequence: Synthetic oligonucleotide
acauagaaagaucugucuc

SEQ ID NO: 3071932 - RNA, 19 nt, Artificial Sequence
  Description of Artificial Sequence: Synthetic oligonucleotide
uuaucuucaguuacacagg

SEQ ID NO: 3071933 - RNA, 19 nt, Artificial Sequence
  Description of Artificial Sequence: Synthetic oligonucleotide
aguauaguggcccaagucu

SEQ ID NO: 3071934 - RNA, 19 nt, Artificial Sequence
  Description of Artificial Sequence: Synthetic oligonucleotide
aaguauaguggcccaaguc

SEQ ID NO: 3071935 - RNA, 19 nt, Artificial Sequence
  Description of Artificial Sequence: Synthetic oligonucleotide
uguuaaacacacaucggug

SEQ ID NO: 3071936 - RNA, 19 nt, Artificial Sequence
  Description of Artificial Sequence: Synthetic oligonucleotide
uuacacagggaguucaagg

SEQ ID NO: 3071937 - RNA, 19 nt, Artificial Sequence
  Description of Artificial Sequence: Synthetic oligonucleotide
aaacacacaucggugauuc

SEQ ID NO: 3071938 - RNA, 19 nt, Artificial Sequence
  Description of Artificial Sequence: Synthetic oligonucleotide
uguguuaaacacacaucgg

SEQ ID NO: 3071939 - RNA, 19 nt, Artificial Sequence
  Description of Artificial Sequence: Synthetic oligonucleotide
aaaauucuuaguugcugcu

SEQ ID NO: 3071940 - RNA, 19 nt, Artificial Sequence
  Description of Artificial Sequence: Synthetic oligonucleotide
augaguucagaacagccag

SEQ ID NO: 3071941 - RNA, 19 nt, Artificial Sequence
  Description of Artificial Sequence: Synthetic oligonucleotide
aaagagccaaguauagugg

SEQ ID NO: 3071942 - RNA, 19 nt, Artificial Sequence
  Description of Artificial Sequence: Synthetic oligonucleotide
guacuugagaugcugaggc

SEQ ID NO: 3071943 - RNA, 19 nt, Artificial Sequence
  Description of Artificial Sequence: Synthetic oligonucleotide
aguugaagcaggaagauca

SEQ ID NO: 3071944 - RNA, 19 nt, Artificial Sequence
  Description of Artificial Sequence: Synthetic oligonucleotide
cuuaguugcugcuggaacc

SEQ ID NO: 3071945 - RNA, 19 nt, Artificial Sequence
  Description of Artificial Sequence: Synthetic oligonucleotide
acaucggugauuccaguac

SEQ ID NO: 3071946 - RNA, 19 nt, Artificial Sequence
  Description of Artificial Sequence: Synthetic oligonucleotide
uucaagguuaucuucaguu

SEQ ID NO: 3071947 - RNA, 19 nt, Artificial Sequence
  Description of Artificial Sequence: Synthetic oligonucleotide
uacacagggaguucaaggc

SEQ ID NO: 3071948 - RNA, 19 nt, Artificial Sequence
  Description of Artificial Sequence: Synthetic oligonucleotide
ugaaaauucuuaguugcug

SEQ ID NO: 3071949 - RNA, 19 nt, Artificial Sequence
  Description of Artificial Sequence: Synthetic oligonucleotide
acacagggaguucaaggcc

SEQ ID NO: 3071950 - RNA, 19 nt, Artificial Sequence
  Description of Artificial Sequence: Synthetic oligonucleotide
uacauagaaagaucugucu

SEQ ID NO: 3071951 - RNA, 19 nt, Artificial Sequence
  Description of Artificial Sequence: Synthetic oligonucleotide
gaaagaucugucucaaaca

SEQ ID NO: 3071952 - RNA, 19 nt, Artificial Sequence
  Description of Artificial Sequence: Synthetic oligonucleotide
aagcaggaagaucaggagu

SEQ ID NO: 3071953 - RNA, 19 nt, Artificial Sequence
  Description of Artificial Sequence: Synthetic oligonucleotide
gauuccaguacuugagaug

SEQ ID NO: 3071954 - RNA, 19 nt, Artificial Sequence
  Description of Artificial Sequence: Synthetic oligonucleotide
augccaugaguucagaaca

SEQ ID NO: 3071955 - RNA, 19 nt, Artificial Sequence
  Description of Artificial Sequence: Synthetic oligonucleotide
guuaaacacacaucgguga

SEQ ID NO: 3071956 - RNA, 19 nt, Artificial Sequence
  Description of Artificial Sequence: Synthetic oligonucleotide
ucuuaguugcugcuggaac

SEQ ID NO: 3071957 - RNA, 19 nt, Artificial Sequence
  Description of Artificial Sequence: Synthetic oligonucleotide
uguguguuaaacacacauc

SEQ ID NO: 3071958 - RNA, 19 nt, Artificial Sequence
  Description of Artificial Sequence: Synthetic oligonucleotide
uguguguguguguuaaaca

SEQ ID NO: 3071959 - RNA, 19 nt, Artificial Sequence
  Description of Artificial Sequence: Synthetic oligonucleotide
ugcuggaacccacagugcc

SEQ ID NO: 3071960 - RNA, 19 nt, Artificial Sequence
  Description of Artificial Sequence: Synthetic oligonucleotide
caagguuaucuucaguuac

SEQ ID NO: 3071961 - RNA, 19 nt, Artificial Sequence
  Description of Artificial Sequence: Synthetic oligonucleotide
aaauucuuaguugcugcug

SEQ ID NO: 3071962 - RNA, 19 nt, Artificial Sequence
  Description of Artificial Sequence: Synthetic oligonucleotide
agucugaacuugaaaauuc

SEQ ID NO: 3071963 - RNA, 19 nt, Artificial Sequence
  Description of Artificial Sequence: Synthetic oligonucleotide
cuacauagaaagaucuguc

SEQ ID NO: 3071964 - RNA, 19 nt, Artificial Sequence
  Description of Artificial Sequence: Synthetic oligonucleotide
gggaaguugaagcaggaag

SEQ ID NO: 3071965 - RNA, 19 nt, Artificial Sequence
  Description of Artificial Sequence: Synthetic oligonucleotide
gaguucagaacagccaggg

SEQ ID NO: 3071966 - RNA, 19 nt, Artificial Sequence
  Description of Artificial Sequence: Synthetic oligonucleotide
cauagaaagaucugucuca

SEQ ID NO: 3071967 - RNA, 19 nt, Artificial Sequence
  Description of Artificial Sequence: Synthetic oligonucleotide
uuaaacacacaucggugau

SEQ ID NO: 3071968 - RNA, 19 nt, Artificial Sequence
  Description of Artificial Sequence: Synthetic oligonucleotide
guguguguguguuaaacac

SEQ ID NO: 3071969 - RNA, 19 nt, Artificial Sequence
  Description of Artificial Sequence: Synthetic oligonucleotide
aguacuugagaugcugagg

SEQ ID NO: 3071970 - RNA, 19 nt, Artificial Sequence
  Description of Artificial Sequence: Synthetic oligonucleotide
cuugagaugcugaggcagg

SEQ ID NO: 3071971 - RNA, 19 nt, Artificial Sequence
  Description of Artificial Sequence: Synthetic oligonucleotide
aaguugaagcaggaagauc

SEQ ID NO: 3071972 - RNA, 19 nt, Artificial Sequence
  Description of Artificial Sequence: Synthetic oligonucleotide
aguucagaacagccagggc

SEQ ID NO: 3071973 - RNA, 19 nt, Artificial Sequence
  Description of Artificial Sequence: Synthetic oligonucleotide
aacacacaucggugauucc

SEQ ID NO: 3071974 - RNA, 19 nt, Artificial Sequence
  Description of Artificial Sequence: Synthetic oligonucleotide
acuugagaugcugaggcag

SEQ ID NO: 3071975 - RNA, 19 nt, Artificial Sequence
  Description of Artificial Sequence: Synthetic oligonucleotide
agucuguaaucccagcacu

SEQ ID NO: 3071976 - RNA, 19 nt, Artificial Sequence
  Description of Artificial Sequence: Synthetic oligonucleotide
gcugcuggaacccacagug

SEQ ID NO: 3071977 - RNA, 19 nt, Artificial Sequence
  Description of Artificial Sequence: Synthetic oligonucleotide
uucagaacagccagggcua

SEQ ID NO: 3071978 - RNA, 19 nt, Artificial Sequence
  Description of Artificial Sequence: Synthetic oligonucleotide
agaucugucucaaacaaaa

SEQ ID NO: 3071979 - RNA, 19 nt, Artificial Sequence
  Description of Artificial Sequence: Synthetic oligonucleotide
ugauuccaguacuugagau

SEQ ID NO: 3071980 - RNA, 19 nt, Artificial Sequence
  Description of Artificial Sequence: Synthetic oligonucleotide
uucaguuacacagggaguu

SEQ ID NO: 3071981 - RNA, 19 nt, Artificial Sequence
  Description of Artificial Sequence: Synthetic oligonucleotide
ucaagguuaucuucaguua

SEQ ID NO: 3071982 - RNA, 19 nt, Artificial Sequence
  Description of Artificial Sequence: Synthetic oligonucleotide
ugccaugaguucagaacag

SEQ ID NO: 3071983 - RNA, 19 nt, Artificial Sequence
  Description of Artificial Sequence: Synthetic oligonucleotide
agagccaaguauaguggcc

SEQ ID NO: 3071984 - RNA, 19 nt, Artificial Sequence
  Description of Artificial Sequence: Synthetic oligonucleotide
uugaagcaggaagaucagg

SEQ ID NO: 3071985 - RNA, 19 nt, Artificial Sequence
  Description of Artificial Sequence: Synthetic oligonucleotide
gagccaaguauaguggccc

SEQ ID NO: 3071986 - RNA, 19 nt, Artificial Sequence
  Description of Artificial Sequence: Synthetic oligonucleotide
aaucccgugugugugugug

SEQ ID NO: 3071987 - RNA, 19 nt, Artificial Sequence
  Description of Artificial Sequence: Synthetic oligonucleotide
caugaguucagaacagcca

SEQ ID NO: 3071988 - RNA, 19 nt, Artificial Sequence
  Description of Artificial Sequence: Synthetic oligonucleotide
cugaacuugaaaauucuua

SEQ ID NO: 3071989 - RNA, 19 nt, Artificial Sequence
  Description of Artificial Sequence: Synthetic oligonucleotide
cacacaucggugauuccag

SEQ ID NO: 3071990 - RNA, 19 nt, Artificial Sequence
  Description of Artificial Sequence: Synthetic oligonucleotide
uauaguggcccaagucugu

SEQ ID NO: 3071991 - RNA, 19 nt, Artificial Sequence
  Description of Artificial Sequence: Synthetic oligonucleotide
aagguuaucuucaguuaca

SEQ ID NO: 3071992 - RNA, 19 nt, Artificial Sequence
  Description of Artificial Sequence: Synthetic oligonucleotide
uggcccaagucuguaaucc

SEQ ID NO: 3071993 - RNA, 19 nt, Artificial Sequence
  Description of Artificial Sequence: Synthetic oligonucleotide
caguacuugagaugcugag

SEQ ID NO: 3071994 - RNA, 19 nt, Artificial Sequence
  Description of Artificial Sequence: Synthetic oligonucleotide
uccaguacuugagaugcug

SEQ ID NO: 3071995 - RNA, 19 nt, Artificial Sequence
  Description of Artificial Sequence: Synthetic oligonucleotide
guguuaaacacacaucggu

SEQ ID NO: 3071996 - RNA, 19 nt, Artificial Sequence
  Description of Artificial Sequence: Synthetic oligonucleotide
agggcuacauagaaagauc

SEQ ID NO: 3071997 - RNA, 19 nt, Artificial Sequence
  Description of Artificial Sequence: Synthetic oligonucleotide
agcacuugggaaguugaag

SEQ ID NO: 3071998 - RNA, 19 nt, Artificial Sequence
  Description of Artificial Sequence: Synthetic oligonucleotide
guauaguggcccaagucug

SEQ ID NO: 3071999 - RNA, 19 nt, Artificial Sequence
  Description of Artificial Sequence: Synthetic oligonucleotide
agggaguucaaggccaguc

SEQ ID NO: 3072000 - RNA, 19 nt, Artificial Sequence
  Description of Artificial Sequence: Synthetic oligonucleotide
gaacuugaaaauucuuagu

SEQ ID NO: 3072001 - RNA, 19 nt, Artificial Sequence
  Description of Artificial Sequence: Synthetic oligonucleotide
ggugauuccaguacuugag

SEQ ID NO: 3072002 - RNA, 19 nt, Artificial Sequence
  Description of Artificial Sequence: Synthetic oligonucleotide
acacacaucggugauucca

SEQ ID NO: 3072003 - RNA, 19 nt, Artificial Sequence
  Description of Artificial Sequence: Synthetic oligonucleotide
gaggaaugccaugaguuca

SEQ ID NO: 3072004 - RNA, 19 nt, Artificial Sequence
  Description of Artificial Sequence: Synthetic oligonucleotide
auagaaagaucugucucaa

SEQ ID NO: 3072005 - RNA, 19 nt, Artificial Sequence
  Description of Artificial Sequence: Synthetic oligonucleotide
ccaugaguucagaacagcc

SEQ ID NO: 3072006 - RNA, 19 nt, Artificial Sequence
  Description of Artificial Sequence: Synthetic oligonucleotide
uacuugagaugcugaggca

SEQ ID NO: 3072007 - RNA, 19 nt, Artificial Sequence
  Description of Artificial Sequence: Synthetic oligonucleotide
ggaaguugaagcaggaaga

SEQ ID NO: 3072008 - RNA, 19 nt, Artificial Sequence
  Description of Artificial Sequence: Synthetic oligonucleotide
aggaggaaugccaugaguu

SEQ ID NO: 3072009 - RNA, 19 nt, Artificial Sequence
  Description of Artificial Sequence: Synthetic oligonucleotide
aguggcccaagucuguaau

SEQ ID NO: 3072010 - RNA, 19 nt, Artificial Sequence
  Description of Artificial Sequence: Synthetic oligonucleotide
guuacacagggaguucaag

SEQ ID NO: 3072011 - RNA, 19 nt, Artificial Sequence
  Description of Artificial Sequence: Synthetic oligonucleotide
ucggugauuccaguacuug

SEQ ID NO: 3072012 - RNA, 19 nt, Artificial Sequence
  Description of Artificial Sequence: Synthetic oligonucleotide
auucuuaguugcugcugga

SEQ ID NO: 3072013 - RNA, 19 nt, Artificial Sequence
  Description of Artificial Sequence: Synthetic oligonucleotide
guguguguguguguuaaac

SEQ ID NO: 3072014 - RNA, 19 nt, Artificial Sequence
  Description of Artificial Sequence: Synthetic oligonucleotide
agcaggaagaucaggaguu

SEQ ID NO: 3072015 - RNA, 19 nt, Artificial Sequence
  Description of Artificial Sequence: Synthetic oligonucleotide
cacagggaguucaaggcca

SEQ ID NO: 3072016 - RNA, 19 nt, Artificial Sequence
  Description of Artificial Sequence: Synthetic oligonucleotide
aagaucugucucaaacaaa

SEQ ID NO: 3072017 - RNA, 19 nt, Artificial Sequence
  Description of Artificial Sequence: Synthetic oligonucleotide
ugugugugugugugugugu

SEQ ID NO: 3072018 - RNA, 19 nt, Artificial Sequence
  Description of Artificial Sequence: Synthetic oligonucleotide
gaaugccaugaguucagaa

SEQ ID NO: 3072019 - RNA, 19 nt, Artificial Sequence
  Description of Artificial Sequence: Synthetic oligonucleotide
gugauuccaguacuugaga

SEQ ID NO: 3072020 - RNA, 19 nt, Artificial Sequence
  Description of Artificial Sequence: Synthetic oligonucleotide
aggaaugccaugaguucag

SEQ ID NO: 3072021 - RNA, 19 nt, Artificial Sequence
  Description of Artificial Sequence: Synthetic oligonucleotide
cacuugggaaguugaagca

SEQ ID NO: 3072022 - RNA, 19 nt, Artificial Sequence
  Description of Artificial Sequence: Synthetic oligonucleotide
uucuuaguugcugcuggaa

SEQ ID NO: 3072023 - RNA, 19 nt, Artificial Sequence
  Description of Artificial Sequence: Synthetic oligonucleotide
aguugcugcuggaacccac

SEQ ID NO: 3072024 - RNA, 19 nt, Artificial Sequence
  Description of Artificial Sequence: Synthetic oligonucleotide
gugugugugugugugugug

SEQ ID NO: 3072025 - RNA, 19 nt, Artificial Sequence
  Description of Artificial Sequence: Synthetic oligonucleotide
ugcugcuggaacccacagu

SEQ ID NO: 3072026 - RNA, 19 nt, Artificial Sequence
  Description of Artificial Sequence: Synthetic oligonucleotide
aaggccagucugaacuuga

SEQ ID NO: 3072027 - RNA, 19 nt, Artificial Sequence
  Description of Artificial Sequence: Synthetic oligonucleotide
ucccgugugugugugugug

SEQ ID NO: 3072028 - RNA, 19 nt, Artificial Sequence
  Description of Artificial Sequence: Synthetic oligonucleotide
uagaaagaucugucucaaa

SEQ ID NO: 3072029 - RNA, 19 nt, Artificial Sequence
  Description of Artificial Sequence: Synthetic oligonucleotide
ggaggaaugccaugaguuc

SEQ ID NO: 3072030 - RNA, 19 nt, Artificial Sequence
  Description of Artificial Sequence: Synthetic oligonucleotide
ucaguuacacagggaguuc

SEQ ID NO: 3072031 - RNA, 19 nt, Artificial Sequence
  Description of Artificial Sequence: Synthetic oligonucleotide
uaaacacacaucggugauu

SEQ ID NO: 3072032 - RNA, 19 nt, Artificial Sequence
  Description of Artificial Sequence: Synthetic oligonucleotide
ucaaggccagucugaacuu

SEQ ID NO: 3072033 - RNA, 19 nt, Artificial Sequence
  Description of Artificial Sequence: Synthetic oligonucleotide
aguucaaggccagucugaa

SEQ ID NO: 3072034 - RNA, 19 nt, Artificial Sequence
  Description of Artificial Sequence: Synthetic oligonucleotide
cugcuggaacccacagugc

SEQ ID NO: 3072035 - RNA, 19 nt, Artificial Sequence
  Description of Artificial Sequence: Synthetic oligonucleotide
agccaaguauaguggccca

SEQ ID NO: 3072036 - RNA, 19 nt, Artificial Sequence
  Description of Artificial Sequence: Synthetic oligonucleotide
uguguguguguguguguua

SEQ ID NO: 3072037 - RNA, 19 nt, Artificial Sequence
  Description of Artificial Sequence: Synthetic oligonucleotide
uguguguguguguguuaaa

SEQ ID NO: 3072038 - RNA, 19 nt, Artificial Sequence
  Description of Artificial Sequence: Synthetic oligonucleotide
gcuacauagaaagaucugu

SEQ ID NO: 3072039 - RNA, 19 nt, Artificial Sequence
  Description of Artificial Sequence: Synthetic oligonucleotide
acacaucggugauuccagu

SEQ ID NO: 3072040 - RNA, 19 nt, Artificial Sequence
  Description of Artificial Sequence: Synthetic oligonucleotide
guucaaggccagucugaac

SEQ ID NO: 3072041 - RNA, 19 nt, Artificial Sequence
  Description of Artificial Sequence: Synthetic oligonucleotide
gaaguugaagcaggaagau

SEQ ID NO: 3072042 - RNA, 19 nt, Artificial Sequence
  Description of Artificial Sequence: Synthetic oligonucleotide
ugggaaguugaagcaggaa

SEQ ID NO: 3072043 - RNA, 19 nt, Artificial Sequence
  Description of Artificial Sequence: Synthetic oligonucleotide
gaugcugaggcaggaggaa

SEQ ID NO: 3072044 - RNA, 19 nt, Artificial Sequence
  Description of Artificial Sequence: Synthetic oligonucleotide
cccaagucuguaaucccag

SEQ ID NO: 3072045 - RNA, 19 nt, Artificial Sequence
  Description of Artificial Sequence: Synthetic oligonucleotide
uaguggcccaagucuguaa

SEQ ID NO: 3072046 - RNA, 19 nt, Artificial Sequence
  Description of Artificial Sequence: Synthetic oligonucleotide
gguuaucuucaguuacaca

SEQ ID NO: 3072047 - RNA, 19 nt, Artificial Sequence
  Description of Artificial Sequence: Synthetic oligonucleotide
guguguguguguguguuaa

SEQ ID NO: 3072048 - RNA, 19 nt, Artificial Sequence
  Description of Artificial Sequence: Synthetic oligonucleotide
caguuacacagggaguuca

SEQ ID NO: 3072049 - RNA, 19 nt, Artificial Sequence
  Description of Artificial Sequence: Synthetic oligonucleotide
ggcuacauagaaagaucug

SEQ ID NO: 3072050 - RNA, 19 nt, Artificial Sequence
  Description of Artificial Sequence: Synthetic oligonucleotide
caaggccagucugaacuug

SEQ ID NO: 3072051 - RNA, 19 nt, Artificial Sequence
  Description of Artificial Sequence: Synthetic oligonucleotide
cuucaguuacacagggagu

SEQ ID NO: 3072052 - RNA, 19 nt, Artificial Sequence
  Description of Artificial Sequence: Synthetic oligonucleotide
ggcaggaggaaugccauga

SEQ ID NO: 3072053 - RNA, 19 nt, Artificial Sequence
  Description of Artificial Sequence: Synthetic oligonucleotide
acagggaguucaaggccag

SEQ ID NO: 3072054 - RNA, 19 nt, Artificial Sequence
  Description of Artificial Sequence: Synthetic oligonucleotide
gucugaacuugaaaauucu

SEQ ID NO: 3072055 - RNA, 19 nt, Artificial Sequence
  Description of Artificial Sequence: Synthetic oligonucleotide
ggcccaagucuguaauccc

SEQ ID NO: 3072056 - RNA, 19 nt, Artificial Sequence
  Description of Artificial Sequence: Synthetic oligonucleotide
cacaucggugauuccagua

SEQ ID NO: 3072057 - RNA, 19 nt, Artificial Sequence
  Description of Artificial Sequence: Synthetic oligonucleotide
ccaaguauaguggcccaag

SEQ ID NO: 3072058 - RNA, 19 nt, Artificial Sequence
  Description of Artificial Sequence: Synthetic oligonucleotide
ccaagucuguaaucccagc

SEQ ID NO: 3072059 - RNA, 19 nt, Artificial Sequence
  Description of Artificial Sequence: Synthetic oligonucleotide
guggcccaagucuguaauc

SEQ ID NO: 3072060 - RNA, 19 nt, Artificial Sequence
  Description of Artificial Sequence: Synthetic oligonucleotide
gcaggaggaaugccaugag

SEQ ID NO: 3072061 - RNA, 19 nt, Artificial Sequence
  Description of Artificial Sequence: Synthetic oligonucleotide
guugcugcuggaacccaca

SEQ ID NO: 3072062 - RNA, 19 nt, Artificial Sequence
  Description of Artificial Sequence: Synthetic oligonucleotide
aguuacacagggaguucaa

SEQ ID NO: 3072063 - RNA, 19 nt, Artificial Sequence
  Description of Artificial Sequence: Synthetic oligonucleotide
uaguugcugcuggaaccca

SEQ ID NO: 3072064 - RNA, 19 nt, Artificial Sequence
  Description of Artificial Sequence: Synthetic oligonucleotide
aucccgugugugugugugu

SEQ ID NO: 3072065 - RNA, 19 nt, Artificial Sequence
  Description of Artificial Sequence: Synthetic oligonucleotide
auaguggcccaagucugua

SEQ ID NO: 3072066 - RNA, 19 nt, Artificial Sequence
  Description of Artificial Sequence: Synthetic oligonucleotide
gccaugaguucagaacagc

SEQ ID NO: 3072067 - RNA, 19 nt, Artificial Sequence
  Description of Artificial Sequence: Synthetic oligonucleotide
gcuggaacccacagugccc

SEQ ID NO: 3072068 - RNA, 19 nt, Artificial Sequence
  Description of Artificial Sequence: Synthetic oligonucleotide
caucggugauuccaguacu

SEQ ID NO: 3072069 - RNA, 19 nt, Artificial Sequence
  Description of Artificial Sequence: Synthetic oligonucleotide
ccaguacuugagaugcuga

SEQ ID NO: 3072070 - RNA, 19 nt, Artificial Sequence
  Description of Artificial Sequence: Synthetic oligonucleotide
aucggugauuccaguacuu

SEQ ID NO: 3072071 - RNA, 19 nt, Artificial Sequence
  Description of Artificial Sequence: Synthetic oligonucleotide
ccagcacuugggaaguuga

SEQ ID NO: 3072072 - RNA, 19 nt, Artificial Sequence
  Description of Artificial Sequence: Synthetic oligonucleotide
caggaggaaugccaugagu

SEQ ID NO: 3072073 - RNA, 19 nt, Artificial Sequence
  Description of Artificial Sequence: Synthetic oligonucleotide
gaacagccagggcuacaua

SEQ ID NO: 3072074 - RNA, 19 nt, Artificial Sequence
  Description of Artificial Sequence: Synthetic oligonucleotide
cagucugaacuugaaaauu

SEQ ID NO: 3072075 - RNA, 19 nt, Artificial Sequence
  Description of Artificial Sequence: Synthetic oligonucleotide
cagcacuugggaaguugaa

SEQ ID NO: 3072076 - RNA, 19 nt, Artificial Sequence
  Description of Artificial Sequence: Synthetic oligonucleotide
gcccaagucuguaauccca

SEQ ID NO: 3072077 - RNA, 19 nt, Artificial Sequence
  Description of Artificial Sequence: Synthetic oligonucleotide
ccgugugugugugugugug

SEQ ID NO: 3072078 - RNA, 19 nt, Artificial Sequence
  Description of Artificial Sequence: Synthetic oligonucleotide
ccagucugaacuugaaaau

SEQ ID NO: 3072079 - RNA, 19 nt, Artificial Sequence
  Description of Artificial Sequence: Synthetic oligonucleotide
gucuguaaucccagcacuu

SEQ ID NO: 3072080 - RNA, 19 nt, Artificial Sequence
  Description of Artificial Sequence: Synthetic oligonucleotide
guguguguguguguguguu

SEQ ID NO: 3072081 - RNA, 19 nt, Artificial Sequence
  Description of Artificial Sequence: Synthetic oligonucleotide
cggugauuccaguacuuga

SEQ ID NO: 3072082 - RNA, 19 nt, Artificial Sequence
  Description of Artificial Sequence: Synthetic oligonucleotide
aggccagucugaacuugaa

SEQ ID NO: 3072083 - RNA, 19 nt, Artificial Sequence
  Description of Artificial Sequence: Synthetic oligonucleotide
ggaaugccaugaguucaga

SEQ ID NO: 3072084 - RNA, 19 nt, Artificial Sequence
  Description of Artificial Sequence: Synthetic oligonucleotide
ccagggcuacauagaaaga

SEQ ID NO: 3072085 - RNA, 19 nt, Artificial Sequence
  Description of Artificial Sequence: Synthetic oligonucleotide
cagaacagccagggcuaca

SEQ ID NO: 3072086 - RNA, 19 nt, Artificial Sequence
  Description of Artificial Sequence: Synthetic oligonucleotide
gccaaguauaguggcccaa

SEQ ID NO: 3072087 - RNA, 19 nt, Artificial Sequence
  Description of Artificial Sequence: Synthetic oligonucleotide
cagggaguucaaggccagu

SEQ ID NO: 3072088 - RNA, 19 nt, Artificial Sequence
  Description of Artificial Sequence: Synthetic oligonucleotide
cgugugugugugugugugu

SEQ ID NO: 3072089 - RNA, 19 nt, Artificial Sequence
  Description of Artificial Sequence: Synthetic oligonucleotide
cccgugugugugugugugu

SEQ ID NO: 3072090 - RNA, 19 nt, Artificial Sequence
  Description of Artificial Sequence: Synthetic oligonucleotide
acucuuuucaccucugugc

SEQ ID NO: 3072091 - RNA, 19 nt, Artificial Sequence
  Description of Artificial Sequence: Synthetic oligonucleotide
aaaaccagaguccuugucu

SEQ ID NO: 3072092 - RNA, 19 nt, Artificial Sequence
  Description of Artificial Sequence: Synthetic oligonucleotide
gaaucuggaucacaaauag

SEQ ID NO: 3072093 - RNA, 19 nt, Artificial Sequence
  Description of Artificial Sequence: Synthetic oligonucleotide
ugagucaggagccaccacg

SEQ ID NO: 3072094 - RNA, 19 nt, Artificial Sequence
  Description of Artificial Sequence: Synthetic oligonucleotide
aucuggaucacaaauaguc

SEQ ID NO: 3072095 - RNA, 19 nt, Artificial Sequence
  Description of Artificial Sequence: Synthetic oligonucleotide
agcucaagcauucugagcu

SEQ ID NO: 3072096 - RNA, 19 nt, Artificial Sequence
  Description of Artificial Sequence: Synthetic oligonucleotide
aaauagucuuugcguaugg

SEQ ID NO: 3072097 - RNA, 19 nt, Artificial Sequence
  Description of Artificial Sequence: Synthetic oligonucleotide
uagucuuugcguaugguug

SEQ ID NO: 3072098 - RNA, 19 nt, Artificial Sequence
  Description of Artificial Sequence: Synthetic oligonucleotide
ucacaaauagucuuugcgu

SEQ ID NO: 3072099 - RNA, 19 nt, Artificial Sequence
  Description of Artificial Sequence: Synthetic oligonucleotide
ugcucuacggccagggucg

SEQ ID NO: 3072100 - RNA, 19 nt, Artificial Sequence
  Description of Artificial Sequence: Synthetic oligonucleotide
ugcaccaccaccaccaagc

SEQ ID NO: 3072101 - RNA, 19 nt, Artificial Sequence
  Description of Artificial Sequence: Synthetic oligonucleotide
agucuuugcguaugguugc

SEQ ID NO: 3072102 - RNA, 19 nt, Artificial Sequence
  Description of Artificial Sequence: Synthetic oligonucleotide
aaaccagaguccuugucug

SEQ ID NO: 3072103 - RNA, 19 nt, Artificial Sequence
  Description of Artificial Sequence: Synthetic oligonucleotide
ucugagcucccauaaaacc

SEQ ID NO: 3072104 - RNA, 19 nt, Artificial Sequence
  Description of Artificial Sequence: Synthetic oligonucleotide
ugagcucccauaaaaccag

SEQ ID NO: 3072105 - RNA, 19 nt, Artificial Sequence
  Description of Artificial Sequence: Synthetic oligonucleotide
cucuccauguuucaguggg

SEQ ID NO: 3072106 - RNA, 19 nt, Artificial Sequence
  Description of Artificial Sequence: Synthetic oligonucleotide
cucccauaaaaccagaguc

SEQ ID NO: 3072107 - RNA, 19 nt, Artificial Sequence
  Description of Artificial Sequence: Synthetic oligonucleotide
uggaaucuggaucacaaau

SEQ ID NO: 3072108 - RNA, 19 nt, Artificial Sequence
  Description of Artificial Sequence: Synthetic oligonucleotide
ucagcaaguccucugacuc

SEQ ID NO: 3072109 - RNA, 19 nt, Artificial Sequence
  Description of Artificial Sequence: Synthetic oligonucleotide
uuggcagagagucuucgag

SEQ ID NO: 3072110 - RNA, 19 nt, Artificial Sequence
  Description of Artificial Sequence: Synthetic oligonucleotide
cuugucugagucaggagcc

SEQ ID NO: 3072111 - RNA, 19 nt, Artificial Sequence
  Description of Artificial Sequence: Synthetic oligonucleotide
ucuggaucacaaauagucu

SEQ ID NO: 3072112 - RNA, 19 nt, Artificial Sequence
  Description of Artificial Sequence: Synthetic oligonucleotide
ugggcuggaaucuggauca

SEQ ID NO: 3072113 - RNA, 19 nt, Artificial Sequence
  Description of Artificial Sequence: Synthetic oligonucleotide
aaguccucugacuccaucu

SEQ ID NO: 3072114 - RNA, 19 nt, Artificial Sequence
  Description of Artificial Sequence: Synthetic oligonucleotide
uaugguugcucuacggcca

SEQ ID NO: 3072115 - RNA, 19 nt, Artificial Sequence
  Description of Artificial Sequence: Synthetic oligonucleotide
guaugguugcucuacggcc

SEQ ID NO: 3072116 - RNA, 19 nt, Artificial Sequence
  Description of Artificial Sequence: Synthetic oligonucleotide
cucuuuucaccucugugcc

SEQ ID NO: 3072117 - RNA, 19 nt, Artificial Sequence
  Description of Artificial Sequence: Synthetic oligonucleotide
uacucuuuucaccucugug

SEQ ID NO: 3072118 - RNA, 19 nt, Artificial Sequence
  Description of Artificial Sequence: Synthetic oligonucleotide
uggcagagagucuucgagg

SEQ ID NO: 3072119 - RNA, 19 nt, Artificial Sequence
  Description of Artificial Sequence: Synthetic oligonucleotide
gacuccaucugcucugcgg

SEQ ID NO: 3072120 - RNA, 19 nt, Artificial Sequence
  Description of Artificial Sequence: Synthetic oligonucleotide
ugcucugcggagcucaagc

SEQ ID NO: 3072121 - RNA, 19 nt, Artificial Sequence
  Description of Artificial Sequence: Synthetic oligonucleotide
auucugagcucccauaaaa

SEQ ID NO: 3072122 - RNA, 19 nt, Artificial Sequence
  Description of Artificial Sequence: Synthetic oligonucleotide
guuucagugggcuggaauc

SEQ ID NO: 3072123 - RNA, 19 nt, Artificial Sequence
  Description of Artificial Sequence: Synthetic oligonucleotide
uucugagcucccauaaaac

SEQ ID NO: 3072124 - RNA, 19 nt, Artificial Sequence
  Description of Artificial Sequence: Synthetic oligonucleotide
ucugacuccaucugcucug

SEQ ID NO: 3072125 - RNA, 19 nt, Artificial Sequence
  Description of Artificial Sequence: Synthetic oligonucleotide
ucagugggcuggaaucugg

SEQ ID NO: 3072126 - RNA, 19 nt, Artificial Sequence
  Description of Artificial Sequence: Synthetic oligonucleotide
ucgagcuacucuuuucacc

SEQ ID NO: 3072127 - RNA, 19 nt, Artificial Sequence
  Description of Artificial Sequence: Synthetic oligonucleotide
gaucacaaauagucuuugc

SEQ ID NO: 3072128 - RNA, 19 nt, Artificial Sequence
  Description of Artificial Sequence: Synthetic oligonucleotide
ggagccaccacgccgagcg

SEQ ID NO: 3072129 - RNA, 19 nt, Artificial Sequence
  Description of Artificial Sequence: Synthetic oligonucleotide
uggauguuuccucuccaug

SEQ ID NO: 3072130 - RNA, 19 nt, Artificial Sequence
  Description of Artificial Sequence: Synthetic oligonucleotide
ucuacggccagggucgccg

SEQ ID NO: 3072131 - RNA, 19 nt, Artificial Sequence
  Description of Artificial Sequence: Synthetic oligonucleotide
gaguccuugucugagucag

SEQ ID NO: 3072132 - RNA, 19 nt, Artificial Sequence
  Description of Artificial Sequence: Synthetic oligonucleotide
ugcguaugguugcucuacg

SEQ ID NO: 3072133 - RNA, 19 nt, Artificial Sequence
  Description of Artificial Sequence: Synthetic oligonucleotide
auagucuuugcguaugguu

SEQ ID NO: 3072134 - RNA, 19 nt, Artificial Sequence
  Description of Artificial Sequence: Synthetic oligonucleotide
gucaggagccaccacgccg

SEQ ID NO: 3072135 - RNA, 19 nt, Artificial Sequence
  Description of Artificial Sequence: Synthetic oligonucleotide
ggcagagagucuucgaggg

SEQ ID NO: 3072136 - RNA, 19 nt, Artificial Sequence
  Description of Artificial Sequence: Synthetic oligonucleotide
acaaauagucuuugcguau

SEQ ID NO: 3072137 - RNA, 19 nt, Artificial Sequence
  Description of Artificial Sequence: Synthetic oligonucleotide
ugugccucggccuggcuug

SEQ ID NO: 3072138 - RNA, 19 nt, Artificial Sequence
  Description of Artificial Sequence: Synthetic oligonucleotide
uggaucacaaauagucuuu

SEQ ID NO: 3072139 - RNA, 19 nt, Artificial Sequence
  Description of Artificial Sequence: Synthetic oligonucleotide
uguuucagugggcuggaau

SEQ ID NO: 3072140 - RNA, 19 nt, Artificial Sequence
  Description of Artificial Sequence: Synthetic oligonucleotide
uaaaaccagaguccuuguc

SEQ ID NO: 3072141 - RNA, 19 nt, Artificial Sequence
  Description of Artificial Sequence: Synthetic oligonucleotide
uccucugacuccaucugcu

SEQ ID NO: 3072142 - RNA, 19 nt, Artificial Sequence
  Description of Artificial Sequence: Synthetic oligonucleotide
accaccaccaagccccgcg

SEQ ID NO: 3072143 - RNA, 19 nt, Artificial Sequence
  Description of Artificial Sequence: Synthetic oligonucleotide
uugcucuacggccaggguc

SEQ ID NO: 3072144 - RNA, 19 nt, Artificial Sequence
  Description of Artificial Sequence: Synthetic oligonucleotide
ucuggauguuuccucucca

SEQ ID NO: 3072145 - RNA, 19 nt, Artificial Sequence
  Description of Artificial Sequence: Synthetic oligonucleotide
acuccaucugcucugcgga

SEQ ID NO: 3072146 - RNA, 19 nt, Artificial Sequence
  Description of Artificial Sequence: Synthetic oligonucleotide
cugagcucccauaaaacca

SEQ ID NO: 3072147 - RNA, 19 nt, Artificial Sequence
  Description of Artificial Sequence: Synthetic oligonucleotide
aauagucuuugcguauggu

SEQ ID NO: 3072148 - RNA, 19 nt, Artificial Sequence
  Description of Artificial Sequence: Synthetic oligonucleotide
ucaagcauucugagcuccc

SEQ ID NO: 3072149 - RNA, 19 nt, Artificial Sequence
  Description of Artificial Sequence: Synthetic oligonucleotide
acucagcaaguccucugac

SEQ ID NO: 3072150 - RNA, 19 nt, Artificial Sequence
  Description of Artificial Sequence: Synthetic oligonucleotide
ccuugucugagucaggagc

SEQ ID NO: 3072151 - RNA, 19 nt, Artificial Sequence
  Description of Artificial Sequence: Synthetic oligonucleotide
agucaggagccaccacgcc

SEQ ID NO: 3072152 - RNA, 19 nt, Artificial Sequence
  Description of Artificial Sequence: Synthetic oligonucleotide
caaauagucuuugcguaug

SEQ ID NO: 3072153 - RNA, 19 nt, Artificial Sequence
  Description of Artificial Sequence: Synthetic oligonucleotide
agcuacucuuuucaccucu

SEQ ID NO: 3072154 - RNA, 19 nt, Artificial Sequence
  Description of Artificial Sequence: Synthetic oligonucleotide
uuccucuccauguuucagu

SEQ ID NO: 3072155 - RNA, 19 nt, Artificial Sequence
  Description of Artificial Sequence: Synthetic oligonucleotide
ucaccucugugccucggcc

SEQ ID NO: 3072156 - RNA, 19 nt, Artificial Sequence
  Description of Artificial Sequence: Synthetic oligonucleotide
uuuccucuccauguuucag

SEQ ID NO: 3072157 - RNA, 19 nt, Artificial Sequence
  Description of Artificial Sequence: Synthetic oligonucleotide
ucugcggagcucaagcauu

SEQ ID NO: 3072158 - RNA, 19 nt, Artificial Sequence
  Description of Artificial Sequence: Synthetic oligonucleotide
uuucagugggcuggaaucu

SEQ ID NO: 3072159 - RNA, 19 nt, Artificial Sequence
  Description of Artificial Sequence: Synthetic oligonucleotide
cacaaauagucuuugcgua

SEQ ID NO: 3072160 - RNA, 19 nt, Artificial Sequence
  Description of Artificial Sequence: Synthetic oligonucleotide
ucugagucaggagccacca

SEQ ID NO: 3072161 - RNA, 19 nt, Artificial Sequence
  Description of Artificial Sequence: Synthetic oligonucleotide
gagcucaagcauucugagc

SEQ ID NO: 3072162 - RNA, 19 nt, Artificial Sequence
  Description of Artificial Sequence: Synthetic oligonucleotide
aaucuggaucacaaauagu

SEQ ID NO: 3072163 - RNA, 19 nt, Artificial Sequence
  Description of Artificial Sequence: Synthetic oligonucleotide
uccauguuucagugggcug

SEQ ID NO: 3072164 - RNA, 19 nt, Artificial Sequence
  Description of Artificial Sequence: Synthetic oligonucleotide
ucucucuggauguuuccuc

SEQ ID NO: 3072165 - RNA, 19 nt, Artificial Sequence
  Description of Artificial Sequence: Synthetic oligonucleotide
aagcauucugagcucccau

SEQ ID NO: 3072166 - RNA, 19 nt, Artificial Sequence
  Description of Artificial Sequence: Synthetic oligonucleotide
agccccgcgggucagcagg

SEQ ID NO: 3072167 - RNA, 19 nt, Artificial Sequence
  Description of Artificial Sequence: Synthetic oligonucleotide
gucagcaggcgcaugcgcg

SEQ ID NO: 3072168 - RNA, 19 nt, Artificial Sequence
  Description of Artificial Sequence: Synthetic oligonucleotide
ucuccauguuucagugggc

SEQ ID NO: 3072169 - RNA, 19 nt, Artificial Sequence
  Description of Artificial Sequence: Synthetic oligonucleotide
cucaagcauucugagcucc

SEQ ID NO: 3072170 - RNA, 19 nt, Artificial Sequence
  Description of Artificial Sequence: Synthetic oligonucleotide
aaccagaguccuugucuga

SEQ ID NO: 3072171 - RNA, 19 nt, Artificial Sequence
  Description of Artificial Sequence: Synthetic oligonucleotide
ggagcucaagcauucugag

SEQ ID NO: 3072172 - RNA, 19 nt, Artificial Sequence
  Description of Artificial Sequence: Synthetic oligonucleotide
gugggcuggaaucuggauc

SEQ ID NO: 3072173 - RNA, 19 nt, Artificial Sequence
  Description of Artificial Sequence: Synthetic oligonucleotide
gagucaggagccaccacgc

SEQ ID NO: 3072174 - RNA, 19 nt, Artificial Sequence
  Description of Artificial Sequence: Synthetic oligonucleotide
uccuugucugagucaggag

SEQ ID NO: 3072175 - RNA, 19 nt, Artificial Sequence
  Description of Artificial Sequence: Synthetic oligonucleotide
ucuuuucaccucugugccu

SEQ ID NO: 3072176 - RNA, 19 nt, Artificial Sequence
  Description of Artificial Sequence: Synthetic oligonucleotide
uucaccucugugccucggc

SEQ ID NO: 3072177 - RNA, 19 nt, Artificial Sequence
  Description of Artificial Sequence: Synthetic oligonucleotide
caagcacucagcaaguccu

SEQ ID NO: 3072178 - RNA, 19 nt, Artificial Sequence
  Description of Artificial Sequence: Synthetic oligonucleotide
ucagcaggcgcaugcgcga

SEQ ID NO: 3072179 - RNA, 19 nt, Artificial Sequence
  Description of Artificial Sequence: Synthetic oligonucleotide
accagaguccuugucugag

SEQ ID NO: 3072180 - RNA, 19 nt, Artificial Sequence
  Description of Artificial Sequence: Synthetic oligonucleotide
uugcguaugguugcucuac

SEQ ID NO: 3072181 - RNA, 19 nt, Artificial Sequence
  Description of Artificial Sequence: Synthetic oligonucleotide
cuucgagggcucucucugg

SEQ ID NO: 3072182 - RNA, 19 nt, Artificial Sequence
  Description of Artificial Sequence: Synthetic oligonucleotide
cagaguccuugucugaguc

SEQ ID NO: 3072183 - RNA, 19 nt, Artificial Sequence
  Description of Artificial Sequence: Synthetic oligonucleotide
cagcaaguccucugacucc

SEQ ID NO: 3072184 - RNA, 19 nt, Artificial Sequence
  Description of Artificial Sequence: Synthetic oligonucleotide
ccauguuucagugggcugg

SEQ ID NO: 3072185 - RNA, 19 nt, Artificial Sequence
  Description of Artificial Sequence: Synthetic oligonucleotide
aagcacucagcaaguccuc

SEQ ID NO: 3072186 - RNA, 19 nt, Artificial Sequence
  Description of Artificial Sequence: Synthetic oligonucleotide
uccaucugcucugcggagc

SEQ ID NO: 3072187 - RNA, 19 nt, Artificial Sequence
  Description of Artificial Sequence: Synthetic oligonucleotide
uuugcguaugguugcucua

SEQ ID NO: 3072188 - RNA, 19 nt, Artificial Sequence
  Description of Artificial Sequence: Synthetic oligonucleotide
ugacuccaucugcucugcg

SEQ ID NO: 3072189 - RNA, 19 nt, Artificial Sequence
  Description of Artificial Sequence: Synthetic oligonucleotide
accucugugccucggccug

SEQ ID NO: 3072190 - RNA, 19 nt, Artificial Sequence
  Description of Artificial Sequence: Synthetic oligonucleotide
agucuucgagggcucucuc

SEQ ID NO: 3072191 - RNA, 19 nt, Artificial Sequence
  Description of Artificial Sequence: Synthetic oligonucleotide
augguugcucuacggccag

SEQ ID NO: 3072192 - RNA, 19 nt, Artificial Sequence
  Description of Artificial Sequence: Synthetic oligonucleotide
agcauucugagcucccaua

SEQ ID NO: 3072193 - RNA, 19 nt, Artificial Sequence
  Description of Artificial Sequence: Synthetic oligonucleotide
guccucugacuccaucugc

SEQ ID NO: 3072194 - RNA, 19 nt, Artificial Sequence
  Description of Artificial Sequence: Synthetic oligonucleotide
uucagugggcuggaaucug

SEQ ID NO: 3072195 - RNA, 19 nt, Artificial Sequence
  Description of Artificial Sequence: Synthetic oligonucleotide
ggucgagcuacucuuuuca

SEQ ID NO: 3072196 - RNA, 19 nt, Artificial Sequence
  Description of Artificial Sequence: Synthetic oligonucleotide
agcaggcgcaugcgcgagc

SEQ ID NO: 3072197 - RNA, 19 nt, Artificial Sequence
  Description of Artificial Sequence: Synthetic oligonucleotide
aggcgcaugcgcgagccgg

SEQ ID NO: 3072198 - RNA, 19 nt, Artificial Sequence
  Description of Artificial Sequence: Synthetic oligonucleotide
uuucaccucugugccucgg

SEQ ID NO: 3072199 - RNA, 19 nt, Artificial Sequence
  Description of Artificial Sequence: Synthetic oligonucleotide
guccccacgacuccaugac

SEQ ID NO: 3072200 - RNA, 19 nt, Artificial Sequence
  Description of Artificial Sequence: Synthetic oligonucleotide
ggaucacaaauagucuuug

SEQ ID NO: 3072201 - RNA, 19 nt, Artificial Sequence
  Description of Artificial Sequence: Synthetic oligonucleotide
guuuccucuccauguuuca

SEQ ID NO: 3072202 - RNA, 19 nt, Artificial Sequence
  Description of Artificial Sequence: Synthetic oligonucleotide
gguugcucuacggccaggg

SEQ ID NO: 3072203 - RNA, 19 nt, Artificial Sequence
  Description of Artificial Sequence: Synthetic oligonucleotide
ucucuggauguuuccucuc

SEQ ID NO: 3072204 - RNA, 19 nt, Artificial Sequence
  Description of Artificial Sequence: Synthetic oligonucleotide
gucgagcuacucuuuucac

SEQ ID NO: 3072205 - RNA, 19 nt, Artificial Sequence
  Description of Artificial Sequence: Synthetic oligonucleotide
agccgguccccacgacucc

SEQ ID NO: 3072206 - RNA, 19 nt, Artificial Sequence
  Description of Artificial Sequence: Synthetic oligonucleotide
ccuggcuuggcagagaguc

SEQ ID NO: 3072207 - RNA, 19 nt, Artificial Sequence
  Description of Artificial Sequence: Synthetic oligonucleotide
agagucuucgagggcucuc

SEQ ID NO: 3072208 - RNA, 19 nt, Artificial Sequence
  Description of Artificial Sequence: Synthetic oligonucleotide
agcucccauaaaaccagag

SEQ ID NO: 3072209 - RNA, 19 nt, Artificial Sequence
  Description of Artificial Sequence: Synthetic oligonucleotide
gcguaugguugcucuacgg

SEQ ID NO: 3072210 - RNA, 19 nt, Artificial Sequence
  Description of Artificial Sequence: Synthetic oligonucleotide
uccccacgacuccaugaca

SEQ ID NO: 3072211 - RNA, 19 nt, Artificial Sequence
  Description of Artificial Sequence: Synthetic oligonucleotide
cuuugcguaugguugcucu

SEQ ID NO: 3072212 - RNA, 19 nt, Artificial Sequence
  Description of Artificial Sequence: Synthetic oligonucleotide
cguaugguugcucuacggc

SEQ ID NO: 3072213 - RNA, 19 nt, Artificial Sequence
  Description of Artificial Sequence: Synthetic oligonucleotide
uugucugagucaggagcca

SEQ ID NO: 3072214 - RNA, 19 nt, Artificial Sequence
  Description of Artificial Sequence: Synthetic oligonucleotide
guccuugucugagucagga

SEQ ID NO: 3072215 - RNA, 19 nt, Artificial Sequence
  Description of Artificial Sequence: Synthetic oligonucleotide
agugggcuggaaucuggau

SEQ ID NO: 3072216 - RNA, 19 nt, Artificial Sequence
  Description of Artificial Sequence: Synthetic oligonucleotide
cacucagcaaguccucuga

SEQ ID NO: 3072217 - RNA, 19 nt, Artificial Sequence
  Description of Artificial Sequence: Synthetic oligonucleotide
uggcuuggcagagagucuu

SEQ ID NO: 3072218 - RNA, 19 nt, Artificial Sequence
  Description of Artificial Sequence: Synthetic oligonucleotide
cuccaucugcucugcggag

SEQ ID NO: 3072219 - RNA, 19 nt, Artificial Sequence
  Description of Artificial Sequence: Synthetic oligonucleotide
cuggaucacaaauagucuu

SEQ ID NO: 3072220 - RNA, 19 nt, Artificial Sequence
  Description of Artificial Sequence: Synthetic oligonucleotide
ucgccgcugcaccaccacc

SEQ ID NO: 3072221 - RNA, 19 nt, Artificial Sequence
  Description of Artificial Sequence: Synthetic oligonucleotide
cuuggcagagagucuucga

SEQ ID NO: 3072222 - RNA, 19 nt, Artificial Sequence
  Description of Artificial Sequence: Synthetic oligonucleotide
cugcggagcucaagcauuc

SEQ ID NO: 3072223 - RNA, 19 nt, Artificial Sequence
  Description of Artificial Sequence: Synthetic oligonucleotide
gucugagucaggagccacc

SEQ ID NO: 3072224 - RNA, 19 nt, Artificial Sequence
  Description of Artificial Sequence: Synthetic oligonucleotide
caaguccucugacuccauc

SEQ ID NO: 3072225 - RNA, 19 nt, Artificial Sequence
  Description of Artificial Sequence: Synthetic oligonucleotide
ggaaucuggaucacaaaua

SEQ ID NO: 3072226 - RNA, 19 nt, Artificial Sequence
  Description of Artificial Sequence: Synthetic oligonucleotide
cugacuccaucugcucugc

SEQ ID NO: 3072227 - RNA, 19 nt, Artificial Sequence
  Description of Artificial Sequence: Synthetic oligonucleotide
ucggccuggcuuggcagag

SEQ ID NO: 3072228 - RNA, 19 nt, Artificial Sequence
  Description of Artificial Sequence: Synthetic oligonucleotide
gcuuggcagagagucuucg

SEQ ID NO: 3072229 - RNA, 19 nt, Artificial Sequence
  Description of Artificial Sequence: Synthetic oligonucleotide
gagcuacucuuuucaccuc

SEQ ID NO: 3072230 - RNA, 19 nt, Artificial Sequence
  Description of Artificial Sequence: Synthetic oligonucleotide
ucuuugcguaugguugcuc

SEQ ID NO: 3072231 - RNA, 19 nt, Artificial Sequence
  Description of Artificial Sequence: Synthetic oligonucleotide
ggccuggcuuggcagagag

SEQ ID NO: 3072232 - RNA, 19 nt, Artificial Sequence
  Description of Artificial Sequence: Synthetic oligonucleotide
gagccgguccccacgacuc

SEQ ID NO: 3072233 - RNA, 19 nt, Artificial Sequence
  Description of Artificial Sequence: Synthetic oligonucleotide
agcacucagcaaguccucu

SEQ ID NO: 3072234 - RNA, 19 nt, Artificial Sequence
  Description of Artificial Sequence: Synthetic oligonucleotide
caccaccaagccccgcggg

SEQ ID NO: 3072235 - RNA, 19 nt, Artificial Sequence
  Description of Artificial Sequence: Synthetic oligonucleotide
agggucgccgcugcaccac

SEQ ID NO: 3072236 - RNA, 19 nt, Artificial Sequence
  Description of Artificial Sequence: Synthetic oligonucleotide
ucugcucugcggagcucaa

SEQ ID NO: 3072237 - RNA, 19 nt, Artificial Sequence
  Description of Artificial Sequence: Synthetic oligonucleotide
cucucuggauguuuccucu

SEQ ID NO: 3072238 - RNA, 19 nt, Artificial Sequence
  Description of Artificial Sequence: Synthetic oligonucleotide
cauucugagcucccauaaa

SEQ ID NO: 3072239 - RNA, 19 nt, Artificial Sequence
  Description of Artificial Sequence: Synthetic oligonucleotide
cagagagucuucgagggcu

SEQ ID NO: 3072240 - RNA, 19 nt, Artificial Sequence
  Description of Artificial Sequence: Synthetic oligonucleotide
cucagcaaguccucugacu

SEQ ID NO: 3072241 - RNA, 19 nt, Artificial Sequence
  Description of Artificial Sequence: Synthetic oligonucleotide
cuggaaucuggaucacaaa

SEQ ID NO: 3072242 - RNA, 19 nt, Artificial Sequence
  Description of Artificial Sequence: Synthetic oligonucleotide
aagccccgcgggucagcag

SEQ ID NO: 3072243 - RNA, 19 nt, Artificial Sequence
  Description of Artificial Sequence: Synthetic oligonucleotide
ggucagcaggcgcaugcgc

SEQ ID NO: 3072244 - RNA, 19 nt, Artificial Sequence
  Description of Artificial Sequence: Synthetic oligonucleotide
aguccuugucugagucagg

SEQ ID NO: 3072245 - RNA, 19 nt, Artificial Sequence
  Description of Artificial Sequence: Synthetic oligonucleotide
gcggagcucaagcauucug

SEQ ID NO: 3072246 - RNA, 19 nt, Artificial Sequence
  Description of Artificial Sequence: Synthetic oligonucleotide
ugguugcucuacggccagg

SEQ ID NO: 3072247 - RNA, 19 nt, Artificial Sequence
  Description of Artificial Sequence: Synthetic oligonucleotide
gcucucucuggauguuucc

SEQ ID NO: 3072248 - RNA, 19 nt, Artificial Sequence
  Description of Artificial Sequence: Synthetic oligonucleotide
aggagccaccacgccgagc

SEQ ID NO: 3072249 - RNA, 19 nt, Artificial Sequence
  Description of Artificial Sequence: Synthetic oligonucleotide
gcaugcgcgagccgguccc

SEQ ID NO: 3072250 - RNA, 19 nt, Artificial Sequence
  Description of Artificial Sequence: Synthetic oligonucleotide
gcagagagucuucgagggc

SEQ ID NO: 3072251 - RNA, 19 nt, Artificial Sequence
  Description of Artificial Sequence: Synthetic oligonucleotide
caagcauucugagcuccca

SEQ ID NO: 3072252 - RNA, 19 nt, Artificial Sequence
  Description of Artificial Sequence: Synthetic oligonucleotide
ccacgacuccaugacaacc

SEQ ID NO: 3072253 - RNA, 19 nt, Artificial Sequence
  Description of Artificial Sequence: Synthetic oligonucleotide
cugagucaggagccaccac

SEQ ID NO: 3072254 - RNA, 19 nt, Artificial Sequence
  Description of Artificial Sequence: Synthetic oligonucleotide
gagccaccacgccgagcgg

SEQ ID NO: 3072255 - RNA, 19 nt, Artificial Sequence
  Description of Artificial Sequence: Synthetic oligonucleotide
cuacggccagggucgccgc

SEQ ID NO: 3072256 - RNA, 19 nt, Artificial Sequence
  Description of Artificial Sequence: Synthetic oligonucleotide
gcucccauaaaaccagagu

SEQ ID NO: 3072257 - RNA, 19 nt, Artificial Sequence
  Description of Artificial Sequence: Synthetic oligonucleotide
gagcggucgagcuacucuu

SEQ ID NO: 3072258 - RNA, 19 nt, Artificial Sequence
  Description of Artificial Sequence: Synthetic oligonucleotide
gguccccacgacuccauga

SEQ ID NO: 3072259 - RNA, 19 nt, Artificial Sequence
  Description of Artificial Sequence: Synthetic oligonucleotide
cauguuucagugggcugga

SEQ ID NO: 3072260 - RNA, 19 nt, Artificial Sequence
  Description of Artificial Sequence: Synthetic oligonucleotide
cagugggcuggaaucugga

SEQ ID NO: 3072261 - RNA, 19 nt, Artificial Sequence
  Description of Artificial Sequence: Synthetic oligonucleotide
agccaccacgccgagcggu

SEQ ID NO: 3072262 - RNA, 19 nt, Artificial Sequence
  Description of Artificial Sequence: Synthetic oligonucleotide
gagucuucgagggcucucu

SEQ ID NO: 3072263 - RNA, 19 nt, Artificial Sequence
  Description of Artificial Sequence: Synthetic oligonucleotide
ugcggagcucaagcauucu

SEQ ID NO: 3072264 - RNA, 19 nt, Artificial Sequence
  Description of Artificial Sequence: Synthetic oligonucleotide
uacggccagggucgccgcu

SEQ ID NO: 3072265 - RNA, 19 nt, Artificial Sequence
  Description of Artificial Sequence: Synthetic oligonucleotide
ugcgcgagccgguccccac

SEQ ID NO: 3072266 - RNA, 19 nt, Artificial Sequence
  Description of Artificial Sequence: Synthetic oligonucleotide
cuccauguuucagugggcu

SEQ ID NO: 3072267 - RNA, 19 nt, Artificial Sequence
  Description of Artificial Sequence: Synthetic oligonucleotide
cucggccuggcuuggcaga

SEQ ID NO: 3072268 - RNA, 19 nt, Artificial Sequence
  Description of Artificial Sequence: Synthetic oligonucleotide
gcaccaccaccaccaagcc

SEQ ID NO: 3072269 - RNA, 19 nt, Artificial Sequence
  Description of Artificial Sequence: Synthetic oligonucleotide
gcuacucuuuucaccucug

SEQ ID NO: 3072270 - RNA, 19 nt, Artificial Sequence
  Description of Artificial Sequence: Synthetic oligonucleotide
ccagggucgccgcugcacc

SEQ ID NO: 3072271 - RNA, 19 nt, Artificial Sequence
  Description of Artificial Sequence: Synthetic oligonucleotide
gagcucccauaaaaccaga

SEQ ID NO: 3072272 - RNA, 19 nt, Artificial Sequence
  Description of Artificial Sequence: Synthetic oligonucleotide
gucgccgcugcaccaccac

SEQ ID NO: 3072273 - RNA, 19 nt, Artificial Sequence
  Description of Artificial Sequence: Synthetic oligonucleotide
cgagcuacucuuuucaccu

SEQ ID NO: 3072274 - RNA, 19 nt, Artificial Sequence
  Description of Artificial Sequence: Synthetic oligonucleotide
cuacucuuuucaccucugu

SEQ ID NO: 3072275 - RNA, 19 nt, Artificial Sequence
  Description of Artificial Sequence: Synthetic oligonucleotide
gcucugcggagcucaagca

SEQ ID NO: 3072276 - RNA, 19 nt, Artificial Sequence
  Description of Artificial Sequence: Synthetic oligonucleotide
acggccagggucgccgcug

SEQ ID NO: 3072277 - RNA, 19 nt, Artificial Sequence
  Description of Artificial Sequence: Synthetic oligonucleotide
gcaggcgcaugcgcgagcc

SEQ ID NO: 3072278 - RNA, 19 nt, Artificial Sequence
  Description of Artificial Sequence: Synthetic oligonucleotide
accacgccgagcggucgag

SEQ ID NO: 3072279 - RNA, 19 nt, Artificial Sequence
  Description of Artificial Sequence: Synthetic oligonucleotide
cggagcucaagcauucuga

SEQ ID NO: 3072280 - RNA, 19 nt, Artificial Sequence
  Description of Artificial Sequence: Synthetic oligonucleotide
ggcucucucuggauguuuc

SEQ ID NO: 3072281 - RNA, 19 nt, Artificial Sequence
  Description of Artificial Sequence: Synthetic oligonucleotide
cuggauguuuccucuccau

SEQ ID NO: 3072282 - RNA, 19 nt, Artificial Sequence
  Description of Artificial Sequence: Synthetic oligonucleotide
caggcgcaugcgcgagccg

SEQ ID NO: 3072283 - RNA, 19 nt, Artificial Sequence
  Description of Artificial Sequence: Synthetic oligonucleotide
caccaagccccgcggguca

SEQ ID NO: 3072284 - RNA, 19 nt, Artificial Sequence
  Description of Artificial Sequence: Synthetic oligonucleotide
cugcucugcggagcucaag

SEQ ID NO: 3072285 - RNA, 19 nt, Artificial Sequence
  Description of Artificial Sequence: Synthetic oligonucleotide
cucugcggagcucaagcau

SEQ ID NO: 3072286 - RNA, 19 nt, Artificial Sequence
  Description of Artificial Sequence: Synthetic oligonucleotide
cagcaggcgcaugcgcgag

SEQ ID NO: 3072287 - RNA, 19 nt, Artificial Sequence
  Description of Artificial Sequence: Synthetic oligonucleotide
cucucucuggauguuuccu

SEQ ID NO: 3072288 - RNA, 19 nt, Artificial Sequence
  Description of Artificial Sequence: Synthetic oligonucleotide
caugcgcgagccggucccc

SEQ ID NO: 3072289 - RNA, 19 nt, Artificial Sequence
  Description of Artificial Sequence: Synthetic oligonucleotide
ccccacgacuccaugacaa

SEQ ID NO: 3072290 - RNA, 19 nt, Artificial Sequence
  Description of Artificial Sequence: Synthetic oligonucleotide
cccacgacuccaugacaac

SEQ ID NO: 3072291 - RNA, 19 nt, Artificial Sequence
  Description of Artificial Sequence: Synthetic oligonucleotide
guugcucuacggccagggu

SEQ ID NO: 3072292 - RNA, 19 nt, Artificial Sequence
  Description of Artificial Sequence: Synthetic oligonucleotide
accaagccccgcgggucag

SEQ ID NO: 3072293 - RNA, 19 nt, Artificial Sequence
  Description of Artificial Sequence: Synthetic oligonucleotide
caggagccaccacgccgag

SEQ ID NO: 3072294 - RNA, 19 nt, Artificial Sequence
  Description of Artificial Sequence: Synthetic oligonucleotide
cccauaaaaccagaguccu

SEQ ID NO: 3072295 - RNA, 19 nt, Artificial Sequence
  Description of Artificial Sequence: Synthetic oligonucleotide
acgccgagcggucgagcua

SEQ ID NO: 3072296 - RNA, 19 nt, Artificial Sequence
  Description of Artificial Sequence: Synthetic oligonucleotide
cagggucgccgcugcacca

SEQ ID NO: 3072297 - RNA, 19 nt, Artificial Sequence
  Description of Artificial Sequence: Synthetic oligonucleotide
cucuacggccagggucgcc

SEQ ID NO: 3072298 - RNA, 19 nt, Artificial Sequence
  Description of Artificial Sequence: Synthetic oligonucleotide
gcgcgagccgguccccacg

SEQ ID NO: 3072299 - RNA, 19 nt, Artificial Sequence
  Description of Artificial Sequence: Synthetic oligonucleotide
cacgccgagcggucgagcu

SEQ ID NO: 3072300 - RNA, 19 nt, Artificial Sequence
  Description of Artificial Sequence: Synthetic oligonucleotide
cuggcuuggcagagagucu

SEQ ID NO: 3072301 - RNA, 19 nt, Artificial Sequence
  Description of Artificial Sequence: Synthetic oligonucleotide
caccucugugccucggccu

SEQ ID NO: 3072302 - RNA, 19 nt, Artificial Sequence
  Description of Artificial Sequence: Synthetic oligonucleotide
gagagucuucgagggcucu

SEQ ID NO: 3072303 - RNA, 19 nt, Artificial Sequence
  Description of Artificial Sequence: Synthetic oligonucleotide
gugccucggccuggcuugg

SEQ ID NO: 3072304 - RNA, 19 nt, Artificial Sequence
  Description of Artificial Sequence: Synthetic oligonucleotide
caagccccgcgggucagca

SEQ ID NO: 3072305 - RNA, 19 nt, Artificial Sequence
  Description of Artificial Sequence: Synthetic oligonucleotide
ggcuggaaucuggaucaca

SEQ ID NO: 3072306 - RNA, 19 nt, Artificial Sequence
  Description of Artificial Sequence: Synthetic oligonucleotide
gucuuugcguaugguugcu

SEQ ID NO: 3072307 - RNA, 19 nt, Artificial Sequence
  Description of Artificial Sequence: Synthetic oligonucleotide
auguuucagugggcuggaa

SEQ ID NO: 3072308 - RNA, 19 nt, Artificial Sequence
  Description of Artificial Sequence: Synthetic oligonucleotide
gccgcugcaccaccaccac

SEQ ID NO: 3072309 - RNA, 19 nt, Artificial Sequence
  Description of Artificial Sequence: Synthetic oligonucleotide
caucugcucugcggagcuc

SEQ ID NO: 3072310 - RNA, 19 nt, Artificial Sequence
  Description of Artificial Sequence: Synthetic oligonucleotide
agcggucgagcuacucuuu

SEQ ID NO: 3072311 - RNA, 19 nt, Artificial Sequence
  Description of Artificial Sequence: Synthetic oligonucleotide
gggucgccgcugcaccacc

SEQ ID NO: 3072312 - RNA, 19 nt, Artificial Sequence
  Description of Artificial Sequence: Synthetic oligonucleotide
ccaccaccaccaagccccg

SEQ ID NO: 3072313 - RNA, 19 nt, Artificial Sequence
  Description of Artificial Sequence: Synthetic oligonucleotide
cccgcgggucagcaggcgc

SEQ ID NO: 3072314 - RNA, 19 nt, Artificial Sequence
  Description of Artificial Sequence: Synthetic oligonucleotide
caccacgccgagcggucga

SEQ ID NO: 3072315 - RNA, 19 nt, Artificial Sequence
  Description of Artificial Sequence: Synthetic oligonucleotide
agggcucucucuggauguu

SEQ ID NO: 3072316 - RNA, 19 nt, Artificial Sequence
  Description of Artificial Sequence: Synthetic oligonucleotide
ugccucggccuggcuuggc

SEQ ID NO: 3072317 - RNA, 19 nt, Artificial Sequence
  Description of Artificial Sequence: Synthetic oligonucleotide
augcgcgagccggucccca

SEQ ID NO: 3072318 - RNA, 19 nt, Artificial Sequence
  Description of Artificial Sequence: Synthetic oligonucleotide
cggucgagcuacucuuuuc

SEQ ID NO: 3072319 - RNA, 19 nt, Artificial Sequence
  Description of Artificial Sequence: Synthetic oligonucleotide
gccucggccuggcuuggca

SEQ ID NO: 3072320 - RNA, 19 nt, Artificial Sequence
  Description of Artificial Sequence: Synthetic oligonucleotide
ccaccaagccccgcggguc

SEQ ID NO: 3072321 - RNA, 19 nt, Artificial Sequence
  Description of Artificial Sequence: Synthetic oligonucleotide
cugugccucggccuggcuu

SEQ ID NO: 3072322 - RNA, 19 nt, Artificial Sequence
  Description of Artificial Sequence: Synthetic oligonucleotide
ccgcugcaccaccaccacc

SEQ ID NO: 3072323 - RNA, 19 nt, Artificial Sequence
  Description of Artificial Sequence: Synthetic oligonucleotide
ggcuuggcagagagucuuc

SEQ ID NO: 3072324 - RNA, 19 nt, Artificial Sequence
  Description of Artificial Sequence: Synthetic oligonucleotide
cgccgagcggucgagcuac

SEQ ID NO: 3072325 - RNA, 19 nt, Artificial Sequence
  Description of Artificial Sequence: Synthetic oligonucleotide
cgcaugcgcgagccggucc

SEQ ID NO: 3072326 - RNA, 19 nt, Artificial Sequence
  Description of Artificial Sequence: Synthetic oligonucleotide
ccaccacgccgagcggucg

SEQ ID NO: 3072327 - RNA, 19 nt, Artificial Sequence
  Description of Artificial Sequence: Synthetic oligonucleotide
cgccgcugcaccaccacca

SEQ ID NO: 3072328 - RNA, 19 nt, Artificial Sequence
  Description of Artificial Sequence: Synthetic oligonucleotide
ccgcgggucagcaggcgca

SEQ ID NO: 3072329 - RNA, 19 nt, Artificial Sequence
  Description of Artificial Sequence: Synthetic oligonucleotide
ccaucugcucugcggagcu

SEQ ID NO: 3072330 - RNA, 19 nt, Artificial Sequence
  Description of Artificial Sequence: Synthetic oligonucleotide
gcugcaccaccaccaccaa

SEQ ID NO: 3072331 - RNA, 19 nt, Artificial Sequence
  Description of Artificial Sequence: Synthetic oligonucleotide
ccagaguccuugucugagu

SEQ ID NO: 3072332 - RNA, 19 nt, Artificial Sequence
  Description of Artificial Sequence: Synthetic oligonucleotide
gccaccacgccgagcgguc

SEQ ID NO: 3072333 - RNA, 19 nt, Artificial Sequence
  Description of Artificial Sequence: Synthetic oligonucleotide
gggcuggaaucuggaucac

SEQ ID NO: 3072334 - RNA, 19 nt, Artificial Sequence
  Description of Artificial Sequence: Synthetic oligonucleotide
gcucuacggccagggucgc

SEQ ID NO: 3072335 - RNA, 19 nt, Artificial Sequence
  Description of Artificial Sequence: Synthetic oligonucleotide
ccauaaaaccagaguccuu

SEQ ID NO: 3072336 - RNA, 19 nt, Artificial Sequence
  Description of Artificial Sequence: Synthetic oligonucleotide
gccgguccccacgacucca

SEQ ID NO: 3072337 - RNA, 19 nt, Artificial Sequence
  Description of Artificial Sequence: Synthetic oligonucleotide
ggucgccgcugcaccacca

SEQ ID NO: 3072338 - RNA, 19 nt, Artificial Sequence
  Description of Artificial Sequence: Synthetic oligonucleotide
cgagcggucgagcuacucu

SEQ ID NO: 3072339 - RNA, 19 nt, Artificial Sequence
  Description of Artificial Sequence: Synthetic oligonucleotide
ccaagccccgcgggucagc

SEQ ID NO: 3072340 - RNA, 19 nt, Artificial Sequence
  Description of Artificial Sequence: Synthetic oligonucleotide
gcggucgagcuacucuuuu

SEQ ID NO: 3072341 - RNA, 19 nt, Artificial Sequence
  Description of Artificial Sequence: Synthetic oligonucleotide
gcgagccgguccccacgac

SEQ ID NO: 3072342 - RNA, 19 nt, Artificial Sequence
  Description of Artificial Sequence: Synthetic oligonucleotide
ccacgccgagcggucgagc

SEQ ID NO: 3072343 - RNA, 19 nt, Artificial Sequence
  Description of Artificial Sequence: Synthetic oligonucleotide
gccccgcgggucagcaggc

SEQ ID NO: 3072344 - RNA, 19 nt, Artificial Sequence
  Description of Artificial Sequence: Synthetic oligonucleotide
cggccagggucgccgcugc

SEQ ID NO: 3072345 - RNA, 19 nt, Artificial Sequence
  Description of Artificial Sequence: Synthetic oligonucleotide
ccgagcggucgagcuacuc

SEQ ID NO: 3072346 - RNA, 19 nt, Artificial Sequence
  Description of Artificial Sequence: Synthetic oligonucleotide
gcgcaugcgcgagccgguc

SEQ ID NO: 3072347 - RNA, 19 nt, Artificial Sequence
  Description of Artificial Sequence: Synthetic oligonucleotide
ccccgcgggucagcaggcg

SEQ ID NO: 3072348 - RNA, 19 nt, Artificial Sequence
  Description of Artificial Sequence: Synthetic oligonucleotide
cgguccccacgacuccaug

SEQ ID NO: 3072349 - RNA, 19 nt, Artificial Sequence
  Description of Artificial Sequence: Synthetic oligonucleotide
ggcgcaugcgcgagccggu

SEQ ID NO: 3072350 - RNA, 19 nt, Artificial Sequence
  Description of Artificial Sequence: Synthetic oligonucleotide
cgcgagccgguccccacga

SEQ ID NO: 3072351 - RNA, 19 nt, Artificial Sequence
  Description of Artificial Sequence: Synthetic oligonucleotide
cgagccgguccccacgacu

SEQ ID NO: 3072352 - RNA, 19 nt, Artificial Sequence
  Description of Artificial Sequence: Synthetic oligonucleotide
gggcucucucuggauguuu

SEQ ID NO: 3072353 - RNA, 19 nt, Artificial Sequence
  Description of Artificial Sequence: Synthetic oligonucleotide
gccuggcuuggcagagagu

SEQ ID NO: 3072354 - RNA, 19 nt, Artificial Sequence
  Description of Artificial Sequence: Synthetic oligonucleotide
ccgguccccacgacuccau

SEQ ID NO: 3072355 - RNA, 19 nt, Artificial Sequence
  Description of Artificial Sequence: Synthetic oligonucleotide
gccgagcggucgagcuacu

SEQ ID NO: 3072356 - RNA, 19 nt, Artificial Sequence
  Description of Artificial Sequence: Synthetic oligonucleotide
cuuuuaucuucuuuugucg

SEQ ID NO: 3072357 - RNA, 19 nt, Artificial Sequence
  Description of Artificial Sequence: Synthetic oligonucleotide
gauagcgugauguuggccc

SEQ ID NO: 3072358 - RNA, 19 nt, Artificial Sequence
  Description of Artificial Sequence: Synthetic oligonucleotide
uucuuucugggcaaggcgg

SEQ ID NO: 3072359 - RNA, 19 nt, Artificial Sequence
  Description of Artificial Sequence: Synthetic oligonucleotide
uuucuuucugggcaaggcg

SEQ ID NO: 3072360 - RNA, 19 nt, Artificial Sequence
  Description of Artificial Sequence: Synthetic oligonucleotide
ugaucuuuccgcucggcgg

SEQ ID NO: 3072361 - RNA, 19 nt, Artificial Sequence
  Description of Artificial Sequence: Synthetic oligonucleotide
ucuuuugucguuugggcug

SEQ ID NO: 3072362 - RNA, 19 nt, Artificial Sequence
  Description of Artificial Sequence: Synthetic oligonucleotide
ucuucuuuugucguuuggg

SEQ ID NO: 3072363 - RNA, 19 nt, Artificial Sequence
  Description of Artificial Sequence: Synthetic oligonucleotide
ucuaucacggcgccgacca

SEQ ID NO: 3072364 - RNA, 19 nt, Artificial Sequence
  Description of Artificial Sequence: Synthetic oligonucleotide
gaugcuuuucuuucugggc

SEQ ID NO: 3072365 - RNA, 19 nt, Artificial Sequence
  Description of Artificial Sequence: Synthetic oligonucleotide
uuuuaucuucuuuugucgu

SEQ ID NO: 3072366 - RNA, 19 nt, Artificial Sequence
  Description of Artificial Sequence: Synthetic oligonucleotide
uugaucuuuccgcucggcg

SEQ ID NO: 3072367 - RNA, 19 nt, Artificial Sequence
  Description of Artificial Sequence: Synthetic oligonucleotide
uuuccugcgcuucuucccg

SEQ ID NO: 3072368 - RNA, 19 nt, Artificial Sequence
  Description of Artificial Sequence: Synthetic oligonucleotide
cuucuuuugucguuugggc

SEQ ID NO: 3072369 - RNA, 19 nt, Artificial Sequence
  Description of Artificial Sequence: Synthetic oligonucleotide
aguuuccugcgcuucuucc

SEQ ID NO: 3072370 - RNA, 19 nt, Artificial Sequence
  Description of Artificial Sequence: Synthetic oligonucleotide
gaucuuuccgcucggcggg

SEQ ID NO: 3072371 - RNA, 19 nt, Artificial Sequence
  Description of Artificial Sequence: Synthetic oligonucleotide
ugcgcuucuucccggauag

SEQ ID NO: 3072372 - RNA, 19 nt, Artificial Sequence
  Description of Artificial Sequence: Synthetic oligonucleotide
ggggcuuccacuuccaugg

SEQ ID NO: 3072373 - RNA, 19 nt, Artificial Sequence
  Description of Artificial Sequence: Synthetic oligonucleotide
ugcugcaggaguuuccugc

SEQ ID NO: 3072374 - RNA, 19 nt, Artificial Sequence
  Description of Artificial Sequence: Synthetic oligonucleotide
augcuuuucuuucugggca

SEQ ID NO: 3072375 - RNA, 19 nt, Artificial Sequence
  Description of Artificial Sequence: Synthetic oligonucleotide
uucuuuugucguuugggcu

SEQ ID NO: 3072376 - RNA, 19 nt, Artificial Sequence
  Description of Artificial Sequence: Synthetic oligonucleotide
uuuucuuucugggcaaggc

SEQ ID NO: 3072377 - RNA, 19 nt, Artificial Sequence
  Description of Artificial Sequence: Synthetic oligonucleotide
ugggcuguggcucacuagu

SEQ ID NO: 3072378 - RNA, 19 nt, Artificial Sequence
  Description of Artificial Sequence: Synthetic oligonucleotide
aaggcggauuugcugcagg

SEQ ID NO: 3072379 - RNA, 19 nt, Artificial Sequence
  Description of Artificial Sequence: Synthetic oligonucleotide
cagcccuucgucuaucacg

SEQ ID NO: 3072380 - RNA, 19 nt, Artificial Sequence
  Description of Artificial Sequence: Synthetic oligonucleotide
uugucguuugggcuguggc

SEQ ID NO: 3072381 - RNA, 19 nt, Artificial Sequence
  Description of Artificial Sequence: Synthetic oligonucleotide
uugagguggugccucguag

SEQ ID NO: 3072382 - RNA, 19 nt, Artificial Sequence
  Description of Artificial Sequence: Synthetic oligonucleotide
auagcgugauguuggcccg

SEQ ID NO: 3072383 - RNA, 19 nt, Artificial Sequence
  Description of Artificial Sequence: Synthetic oligonucleotide
gggacgauugaucuuuccg

SEQ ID NO: 3072384 - RNA, 19 nt, Artificial Sequence
  Description of Artificial Sequence: Synthetic oligonucleotide
gauugaucuuuccgcucgg

SEQ ID NO: 3072385 - RNA, 19 nt, Artificial Sequence
  Description of Artificial Sequence: Synthetic oligonucleotide
cuuccacuuccauggaugc

SEQ ID NO: 3072386 - RNA, 19 nt, Artificial Sequence
  Description of Artificial Sequence: Synthetic oligonucleotide
aguccugguugucuugagg

SEQ ID NO: 3072387 - RNA, 19 nt, Artificial Sequence
  Description of Artificial Sequence: Synthetic oligonucleotide
ggacgauugaucuuuccgc

SEQ ID NO: 3072388 - RNA, 19 nt, Artificial Sequence
  Description of Artificial Sequence: Synthetic oligonucleotide
uccugguugucuugagggg

SEQ ID NO: 3072389 - RNA, 19 nt, Artificial Sequence
  Description of Artificial Sequence: Synthetic oligonucleotide
uuuaucuucuuuugucguu

SEQ ID NO: 3072390 - RNA, 19 nt, Artificial Sequence
  Description of Artificial Sequence: Synthetic oligonucleotide
agcuuuuaucuucuuuugu

SEQ ID NO: 3072391 - RNA, 19 nt, Artificial Sequence
  Description of Artificial Sequence: Synthetic oligonucleotide
cuucuucccggauagcgug

SEQ ID NO: 3072392 - RNA, 19 nt, Artificial Sequence
  Description of Artificial Sequence: Synthetic oligonucleotide
aucuucuuuugucguuugg

SEQ ID NO: 3072393 - RNA, 19 nt, Artificial Sequence
  Description of Artificial Sequence: Synthetic oligonucleotide
ucuuucugggcaaggcgga

SEQ ID NO: 3072394 - RNA, 19 nt, Artificial Sequence
  Description of Artificial Sequence: Synthetic oligonucleotide
acgauugaucuuuccgcuc

SEQ ID NO: 3072395 - RNA, 19 nt, Artificial Sequence
  Description of Artificial Sequence: Synthetic oligonucleotide
auuugcugcaggaguuucc

SEQ ID NO: 3072396 - RNA, 19 nt, Artificial Sequence
  Description of Artificial Sequence: Synthetic oligonucleotide
gauguuggcccgugcacug

SEQ ID NO: 3072397 - RNA, 19 nt, Artificial Sequence
  Description of Artificial Sequence: Synthetic oligonucleotide
uuggcccgugcacuggacg

SEQ ID NO: 3072398 - RNA, 19 nt, Artificial Sequence
  Description of Artificial Sequence: Synthetic oligonucleotide
uguggcucacuaguccugg

SEQ ID NO: 3072399 - RNA, 19 nt, Artificial Sequence
  Description of Artificial Sequence: Synthetic oligonucleotide
agcccuucgucuaucacgg

SEQ ID NO: 3072400 - RNA, 19 nt, Artificial Sequence
  Description of Artificial Sequence: Synthetic oligonucleotide
ugucguuugggcuguggcu

SEQ ID NO: 3072401 - RNA, 19 nt, Artificial Sequence
  Description of Artificial Sequence: Synthetic oligonucleotide
auggaugcuuuucuuucug

SEQ ID NO: 3072402 - RNA, 19 nt, Artificial Sequence
  Description of Artificial Sequence: Synthetic oligonucleotide
uuugcugcaggaguuuccu

SEQ ID NO: 3072403 - RNA, 19 nt, Artificial Sequence
  Description of Artificial Sequence: Synthetic oligonucleotide
ugcaggaguuuccugcgcu

SEQ ID NO: 3072404 - RNA, 19 nt, Artificial Sequence
  Description of Artificial Sequence: Synthetic oligonucleotide
auugaucuuuccgcucggc

SEQ ID NO: 3072405 - RNA, 19 nt, Artificial Sequence
  Description of Artificial Sequence: Synthetic oligonucleotide
uucccggauagcgugaugu

SEQ ID NO: 3072406 - RNA, 19 nt, Artificial Sequence
  Description of Artificial Sequence: Synthetic oligonucleotide
ggcaaggcggauuugcugc

SEQ ID NO: 3072407 - RNA, 19 nt, Artificial Sequence
  Description of Artificial Sequence: Synthetic oligonucleotide
ucgucuaucacggcgccga

SEQ ID NO: 3072408 - RNA, 19 nt, Artificial Sequence
  Description of Artificial Sequence: Synthetic oligonucleotide
ugcucagcacucugcggcg

SEQ ID NO: 3072409 - RNA, 19 nt, Artificial Sequence
  Description of Artificial Sequence: Synthetic oligonucleotide
uucuugagguggugccucg

SEQ ID NO: 3072410 - RNA, 19 nt, Artificial Sequence
  Description of Artificial Sequence: Synthetic oligonucleotide
ucguagucagcccuucguc

SEQ ID NO: 3072411 - RNA, 19 nt, Artificial Sequence
  Description of Artificial Sequence: Synthetic oligonucleotide
cuugaacaacuucuucuuc

SEQ ID NO: 3072412 - RNA, 19 nt, Artificial Sequence
  Description of Artificial Sequence: Synthetic oligonucleotide
gguggugccucguagucag

SEQ ID NO: 3072413 - RNA, 19 nt, Artificial Sequence
  Description of Artificial Sequence: Synthetic oligonucleotide
ucggcgggcccauagcugc

SEQ ID NO: 3072414 - RNA, 19 nt, Artificial Sequence
  Description of Artificial Sequence: Synthetic oligonucleotide
ugagguggugccucguagu

SEQ ID NO: 3072415 - RNA, 19 nt, Artificial Sequence
  Description of Artificial Sequence: Synthetic oligonucleotide
uccauggaugcuuuucuuu

SEQ ID NO: 3072416 - RNA, 19 nt, Artificial Sequence
  Description of Artificial Sequence: Synthetic oligonucleotide
uuugucguuugggcugugg

SEQ ID NO: 3072417 - RNA, 19 nt, Artificial Sequence
  Description of Artificial Sequence: Synthetic oligonucleotide
ugauguuggcccgugcacu

SEQ ID NO: 3072418 - RNA, 19 nt, Artificial Sequence
  Description of Artificial Sequence: Synthetic oligonucleotide
uccacuuccauggaugcuu

SEQ ID NO: 3072419 - RNA, 19 nt, Artificial Sequence
  Description of Artificial Sequence: Synthetic oligonucleotide
uaucacggcgccgaccacc

SEQ ID NO: 3072420 - RNA, 19 nt, Artificial Sequence
  Description of Artificial Sequence: Synthetic oligonucleotide
ccggauagcgugauguugg

SEQ ID NO: 3072421 - RNA, 19 nt, Artificial Sequence
  Description of Artificial Sequence: Synthetic oligonucleotide
cuuuucuuucugggcaagg

SEQ ID NO: 3072422 - RNA, 19 nt, Artificial Sequence
  Description of Artificial Sequence: Synthetic oligonucleotide
ugcuuuucuuucugggcaa

SEQ ID NO: 3072423 - RNA, 19 nt, Artificial Sequence
  Description of Artificial Sequence: Synthetic oligonucleotide
accaccuggcgcuuccguc

SEQ ID NO: 3072424 - RNA, 19 nt, Artificial Sequence
  Description of Artificial Sequence: Synthetic oligonucleotide
gacgauugaucuuuccgcu

SEQ ID NO: 3072425 - RNA, 19 nt, Artificial Sequence
  Description of Artificial Sequence: Synthetic oligonucleotide
acuaguccugguugucuug

SEQ ID NO: 3072426 - RNA, 19 nt, Artificial Sequence
  Description of Artificial Sequence: Synthetic oligonucleotide
uucugggcaaggcggauuu

SEQ ID NO: 3072427 - RNA, 19 nt, Artificial Sequence
  Description of Artificial Sequence: Synthetic oligonucleotide
cacggcgccgaccaccugg

SEQ ID NO: 3072428 - RNA, 19 nt, Artificial Sequence
  Description of Artificial Sequence: Synthetic oligonucleotide
ucacuaguccugguugucu

SEQ ID NO: 3072429 - RNA, 19 nt, Artificial Sequence
  Description of Artificial Sequence: Synthetic oligonucleotide
ugggcaaggcggauuugcu

SEQ ID NO: 3072430 - RNA, 19 nt, Artificial Sequence
  Description of Artificial Sequence: Synthetic oligonucleotide
uggcccgugcacuggacgc

SEQ ID NO: 3072431 - RNA, 19 nt, Artificial Sequence
  Description of Artificial Sequence: Synthetic oligonucleotide
uugggcuguggcucacuag

SEQ ID NO: 3072432 - RNA, 19 nt, Artificial Sequence
  Description of Artificial Sequence: Synthetic oligonucleotide
ggcucacuaguccugguug

SEQ ID NO: 3072433 - RNA, 19 nt, Artificial Sequence
  Description of Artificial Sequence: Synthetic oligonucleotide
uguuggcccgugcacugga

SEQ ID NO: 3072434 - RNA, 19 nt, Artificial Sequence
  Description of Artificial Sequence: Synthetic oligonucleotide
uggugccucguagucagcc

SEQ ID NO: 3072435 - RNA, 19 nt, Artificial Sequence
  Description of Artificial Sequence: Synthetic oligonucleotide
gugauguuggcccgugcac

SEQ ID NO: 3072436 - RNA, 19 nt, Artificial Sequence
  Description of Artificial Sequence: Synthetic oligonucleotide
acucugcggcgcuugaaca

SEQ ID NO: 3072437 - RNA, 19 nt, Artificial Sequence
  Description of Artificial Sequence: Synthetic oligonucleotide
uuugggcuguggcucacua

SEQ ID NO: 3072438 - RNA, 19 nt, Artificial Sequence
  Description of Artificial Sequence: Synthetic oligonucleotide
uggacgcccgcuucuugag

SEQ ID NO: 3072439 - RNA, 19 nt, Artificial Sequence
  Description of Artificial Sequence: Synthetic oligonucleotide
cacucugcggcgcuugaac

SEQ ID NO: 3072440 - RNA, 19 nt, Artificial Sequence
  Description of Artificial Sequence: Synthetic oligonucleotide
uucuucccggauagcguga

SEQ ID NO: 3072441 - RNA, 19 nt, Artificial Sequence
  Description of Artificial Sequence: Synthetic oligonucleotide
ucagcuccguccggggacg

SEQ ID NO: 3072442 - RNA, 19 nt, Artificial Sequence
  Description of Artificial Sequence: Synthetic oligonucleotide
ccuucgucuaucacggcgc

SEQ ID NO: 3072443 - RNA, 19 nt, Artificial Sequence
  Description of Artificial Sequence: Synthetic oligonucleotide
gauuugcugcaggaguuuc

SEQ ID NO: 3072444 - RNA, 19 nt, Artificial Sequence
  Description of Artificial Sequence: Synthetic oligonucleotide
cuucgucuaucacggcgcc

SEQ ID NO: 3072445 - RNA, 19 nt, Artificial Sequence
  Description of Artificial Sequence: Synthetic oligonucleotide
gagguggugccucguaguc

SEQ ID NO: 3072446 - RNA, 19 nt, Artificial Sequence
  Description of Artificial Sequence: Synthetic oligonucleotide
ugcacuggacgcccgcuuc

SEQ ID NO: 3072447 - RNA, 19 nt, Artificial Sequence
  Description of Artificial Sequence: Synthetic oligonucleotide
ucagcccuucgucuaucac

SEQ ID NO: 3072448 - RNA, 19 nt, Artificial Sequence
  Description of Artificial Sequence: Synthetic oligonucleotide
cgauugaucuuuccgcucg

SEQ ID NO: 3072449 - RNA, 19 nt, Artificial Sequence
  Description of Artificial Sequence: Synthetic oligonucleotide
aggaguuuccugcgcuucu

SEQ ID NO: 3072450 - RNA, 19 nt, Artificial Sequence
  Description of Artificial Sequence: Synthetic oligonucleotide
gucguuugggcuguggcuc

SEQ ID NO: 3072451 - RNA, 19 nt, Artificial Sequence
  Description of Artificial Sequence: Synthetic oligonucleotide
uaguccugguugucuugag

SEQ ID NO: 3072452 - RNA, 19 nt, Artificial Sequence
  Description of Artificial Sequence: Synthetic oligonucleotide
ucugcggcgcuugaacaac

SEQ ID NO: 3072453 - RNA, 19 nt, Artificial Sequence
  Description of Artificial Sequence: Synthetic oligonucleotide
uucgucuaucacggcgccg

SEQ ID NO: 3072454 - RNA, 19 nt, Artificial Sequence
  Description of Artificial Sequence: Synthetic oligonucleotide
ccauggaugcuuuucuuuc

SEQ ID NO: 3072455 - RNA, 19 nt, Artificial Sequence
  Description of Artificial Sequence: Synthetic oligonucleotide
cccuucgucuaucacggcg

SEQ ID NO: 3072456 - RNA, 19 nt, Artificial Sequence
  Description of Artificial Sequence: Synthetic oligonucleotide
uuccauggaugcuuuucuu

SEQ ID NO: 3072457 - RNA, 19 nt, Artificial Sequence
  Description of Artificial Sequence: Synthetic oligonucleotide
ucguuugggcuguggcuca

SEQ ID NO: 3072458 - RNA, 19 nt, Artificial Sequence
  Description of Artificial Sequence: Synthetic oligonucleotide
cuucuugagguggugccuc

SEQ ID NO: 3072459 - RNA, 19 nt, Artificial Sequence
  Description of Artificial Sequence: Synthetic oligonucleotide
uccgucgccgaucccugcu

SEQ ID NO: 3072460 - RNA, 19 nt, Artificial Sequence
  Description of Artificial Sequence: Synthetic oligonucleotide
gaguuuccugcgcuucuuc

SEQ ID NO: 3072461 - RNA, 19 nt, Artificial Sequence
  Description of Artificial Sequence: Synthetic oligonucleotide
ggcuguggcucacuagucc

SEQ ID NO: 3072462 - RNA, 19 nt, Artificial Sequence
  Description of Artificial Sequence: Synthetic oligonucleotide
aggcggauuugcugcagga

SEQ ID NO: 3072463 - RNA, 19 nt, Artificial Sequence
  Description of Artificial Sequence: Synthetic oligonucleotide
uggcucacuaguccugguu

SEQ ID NO: 3072464 - RNA, 19 nt, Artificial Sequence
  Description of Artificial Sequence: Synthetic oligonucleotide
uagucagcccuucgucuau

SEQ ID NO: 3072465 - RNA, 19 nt, Artificial Sequence
  Description of Artificial Sequence: Synthetic oligonucleotide
cuuccgucgccgaucccug

SEQ ID NO: 3072466 - RNA, 19 nt, Artificial Sequence
  Description of Artificial Sequence: Synthetic oligonucleotide
guagucagcccuucgucua

SEQ ID NO: 3072467 - RNA, 19 nt, Artificial Sequence
  Description of Artificial Sequence: Synthetic oligonucleotide
cuguggcucacuaguccug

SEQ ID NO: 3072468 - RNA, 19 nt, Artificial Sequence
  Description of Artificial Sequence: Synthetic oligonucleotide
uugcugcaggaguuuccug

SEQ ID NO: 3072469 - RNA, 19 nt, Artificial Sequence
  Description of Artificial Sequence: Synthetic oligonucleotide
cuuccauggaugcuuuucu

SEQ ID NO: 3072470 - RNA, 19 nt, Artificial Sequence
  Description of Artificial Sequence: Synthetic oligonucleotide
acuggacgcccgcuucuug

SEQ ID NO: 3072471 - RNA, 19 nt, Artificial Sequence
  Description of Artificial Sequence: Synthetic oligonucleotide
ccaccuggcgcuuccgucg

SEQ ID NO: 3072472 - RNA, 19 nt, Artificial Sequence
  Description of Artificial Sequence: Synthetic oligonucleotide
aucuuuccgcucggcgggc

SEQ ID NO: 3072473 - RNA, 19 nt, Artificial Sequence
  Description of Artificial Sequence: Synthetic oligonucleotide
cuccguccggggacgauug

SEQ ID NO: 3072474 - RNA, 19 nt, Artificial Sequence
  Description of Artificial Sequence: Synthetic oligonucleotide
gacgcccgcuucuugaggu

SEQ ID NO: 3072475 - RNA, 19 nt, Artificial Sequence
  Description of Artificial Sequence: Synthetic oligonucleotide
cugcaggaguuuccugcgc

SEQ ID NO: 3072476 - RNA, 19 nt, Artificial Sequence
  Description of Artificial Sequence: Synthetic oligonucleotide
cucggcgggcccauagcug

SEQ ID NO: 3072477 - RNA, 19 nt, Artificial Sequence
  Description of Artificial Sequence: Synthetic oligonucleotide
auguuggcccgugcacugg

SEQ ID NO: 3072478 - RNA, 19 nt, Artificial Sequence
  Description of Artificial Sequence: Synthetic oligonucleotide
cuuuccgcucggcgggccc

SEQ ID NO: 3072479 - RNA, 19 nt, Artificial Sequence
  Description of Artificial Sequence: Synthetic oligonucleotide
uuccacuuccauggaugcu

SEQ ID NO: 3072480 - RNA, 19 nt, Artificial Sequence
  Description of Artificial Sequence: Synthetic oligonucleotide
agucagcccuucgucuauc

SEQ ID NO: 3072481 - RNA, 19 nt, Artificial Sequence
  Description of Artificial Sequence: Synthetic oligonucleotide
cuggacgcccgcuucuuga

SEQ ID NO: 3072482 - RNA, 19 nt, Artificial Sequence
  Description of Artificial Sequence: Synthetic oligonucleotide
cauggaugcuuuucuuucu

SEQ ID NO: 3072483 - RNA, 19 nt, Artificial Sequence
  Description of Artificial Sequence: Synthetic oligonucleotide
uccugcgcuucuucccgga

SEQ ID NO: 3072484 - RNA, 19 nt, Artificial Sequence
  Description of Artificial Sequence: Synthetic oligonucleotide
ggugccucguagucagccc

SEQ ID NO: 3072485 - RNA, 19 nt, Artificial Sequence
  Description of Artificial Sequence: Synthetic oligonucleotide
gggcaaggcggauuugcug

SEQ ID NO: 3072486 - RNA, 19 nt, Artificial Sequence
  Description of Artificial Sequence: Synthetic oligonucleotide
uuucugggcaaggcggauu

SEQ ID NO: 3072487 - RNA, 19 nt, Artificial Sequence
  Description of Artificial Sequence: Synthetic oligonucleotide
ucgccgaucccugcucagc

SEQ ID NO: 3072488 - RNA, 19 nt, Artificial Sequence
  Description of Artificial Sequence: Synthetic oligonucleotide
cucacuaguccugguuguc

SEQ ID NO: 3072489 - RNA, 19 nt, Artificial Sequence
  Description of Artificial Sequence: Synthetic oligonucleotide
ucuugagguggugccucgu

SEQ ID NO: 3072490 - RNA, 19 nt, Artificial Sequence
  Description of Artificial Sequence: Synthetic oligonucleotide
acggcgccgaccaccuggc

SEQ ID NO: 3072491 - RNA, 19 nt, Artificial Sequence
  Description of Artificial Sequence: Synthetic oligonucleotide
caggaguuuccugcgcuuc

SEQ ID NO: 3072492 - RNA, 19 nt, Artificial Sequence
  Description of Artificial Sequence: Synthetic oligonucleotide
ggcgccgaccaccuggcgc

SEQ ID NO: 3072493 - RNA, 19 nt, Artificial Sequence
  Description of Artificial Sequence: Synthetic oligonucleotide
gucuaucacggcgccgacc

SEQ ID NO: 3072494 - RNA, 19 nt, Artificial Sequence
  Description of Artificial Sequence: Synthetic oligonucleotide
ucuucccggauagcgugau

SEQ ID NO: 3072495 - RNA, 19 nt, Artificial Sequence
  Description of Artificial Sequence: Synthetic oligonucleotide
ggcggauuugcugcaggag

SEQ ID NO: 3072496 - RNA, 19 nt, Artificial Sequence
  Description of Artificial Sequence: Synthetic oligonucleotide
agguggugccucguaguca

SEQ ID NO: 3072497 - RNA, 19 nt, Artificial Sequence
  Description of Artificial Sequence: Synthetic oligonucleotide
guccggggacgauugaucu

SEQ ID NO: 3072498 - RNA, 19 nt, Artificial Sequence
  Description of Artificial Sequence: Synthetic oligonucleotide
accuggcgcuuccgucgcc

SEQ ID NO: 3072499 - RNA, 19 nt, Artificial Sequence
  Description of Artificial Sequence: Synthetic oligonucleotide
ugcggcgcuugaacaacuu

SEQ ID NO: 3072500 - RNA, 19 nt, Artificial Sequence
  Description of Artificial Sequence: Synthetic oligonucleotide
cucugcggcgcuugaacaa

SEQ ID NO: 3072501 - RNA, 19 nt, Artificial Sequence
  Description of Artificial Sequence: Synthetic oligonucleotide
caaggcggauuugcugcag

SEQ ID NO: 3072502 - RNA, 19 nt, Artificial Sequence
  Description of Artificial Sequence: Synthetic oligonucleotide
ucugggcaaggcggauuug

SEQ ID NO: 3072503 - RNA, 19 nt, Artificial Sequence
  Description of Artificial Sequence: Synthetic oligonucleotide
ggggacgauugaucuuucc

SEQ ID NO: 3072504 - RNA, 19 nt, Artificial Sequence
  Description of Artificial Sequence: Synthetic oligonucleotide
ucccggauagcgugauguu

SEQ ID NO: 3072505 - RNA, 19 nt, Artificial Sequence
  Description of Artificial Sequence: Synthetic oligonucleotide
uuuccgcucggcgggccca

SEQ ID NO: 3072506 - RNA, 19 nt, Artificial Sequence
  Description of Artificial Sequence: Synthetic oligonucleotide
uuccgucgccgaucccugc

SEQ ID NO: 3072507 - RNA, 19 nt, Artificial Sequence
  Description of Artificial Sequence: Synthetic oligonucleotide
cgcuucuucccggauagcg

SEQ ID NO: 3072508 - RNA, 19 nt, Artificial Sequence
  Description of Artificial Sequence: Synthetic oligonucleotide
caccuggcgcuuccgucgc

SEQ ID NO: 3072509 - RNA, 19 nt, Artificial Sequence
  Description of Artificial Sequence: Synthetic oligonucleotide
gcuugaacaacuucuucuu

SEQ ID NO: 3072510 - RNA, 19 nt, Artificial Sequence
  Description of Artificial Sequence: Synthetic oligonucleotide
agcacucugcggcgcuuga

SEQ ID NO: 3072511 - RNA, 19 nt, Artificial Sequence
  Description of Artificial Sequence: Synthetic oligonucleotide
ggauagcgugauguuggcc

SEQ ID NO: 3072512 - RNA, 19 nt, Artificial Sequence
  Description of Artificial Sequence: Synthetic oligonucleotide
ggacgcccgcuucuugagg

SEQ ID NO: 3072513 - RNA, 19 nt, Artificial Sequence
  Description of Artificial Sequence: Synthetic oligonucleotide
aucacggcgccgaccaccu

SEQ ID NO: 3072514 - RNA, 19 nt, Artificial Sequence
  Description of Artificial Sequence: Synthetic oligonucleotide
cucguagucagcccuucgu

SEQ ID NO: 3072515 - RNA, 19 nt, Artificial Sequence
  Description of Artificial Sequence: Synthetic oligonucleotide
ugccucguagucagcccuu

SEQ ID NO: 3072516 - RNA, 19 nt, Artificial Sequence
  Description of Artificial Sequence: Synthetic oligonucleotide
uccggggacgauugaucuu

SEQ ID NO: 3072517 - RNA, 19 nt, Artificial Sequence
  Description of Artificial Sequence: Synthetic oligonucleotide
cgcuucuugagguggugcc

SEQ ID NO: 3072518 - RNA, 19 nt, Artificial Sequence
  Description of Artificial Sequence: Synthetic oligonucleotide
agcgugauguuggcccgug

SEQ ID NO: 3072519 - RNA, 19 nt, Artificial Sequence
  Description of Artificial Sequence: Synthetic oligonucleotide
cuucagcuccguccgggga

SEQ ID NO: 3072520 - RNA, 19 nt, Artificial Sequence
  Description of Artificial Sequence: Synthetic oligonucleotide
gcuuuucuuucugggcaag

SEQ ID NO: 3072521 - RNA, 19 nt, Artificial Sequence
  Description of Artificial Sequence: Synthetic oligonucleotide
gcggauuugcugcaggagu

SEQ ID NO: 3072522 - RNA, 19 nt, Artificial Sequence
  Description of Artificial Sequence: Synthetic oligonucleotide
acgcccgcuucuugaggug

SEQ ID NO: 3072523 - RNA, 19 nt, Artificial Sequence
  Description of Artificial Sequence: Synthetic oligonucleotide
uccguccggggacgauuga

SEQ ID NO: 3072524 - RNA, 19 nt, Artificial Sequence
  Description of Artificial Sequence: Synthetic oligonucleotide
cuugagguggugccucgua

SEQ ID NO: 3072525 - RNA, 19 nt, Artificial Sequence
  Description of Artificial Sequence: Synthetic oligonucleotide
cuucccggauagcgugaug

SEQ ID NO: 3072526 - RNA, 19 nt, Artificial Sequence
  Description of Artificial Sequence: Synthetic oligonucleotide
uuuugucguuugggcugug

SEQ ID NO: 3072527 - RNA, 19 nt, Artificial Sequence
  Description of Artificial Sequence: Synthetic oligonucleotide
gugccucguagucagcccu

SEQ ID NO: 3072528 - RNA, 19 nt, Artificial Sequence
  Description of Artificial Sequence: Synthetic oligonucleotide
gcuguggcucacuaguccu

SEQ ID NO: 3072529 - RNA, 19 nt, Artificial Sequence
  Description of Artificial Sequence: Synthetic oligonucleotide
cuaucacggcgccgaccac

SEQ ID NO: 3072530 - RNA, 19 nt, Artificial Sequence
  Description of Artificial Sequence: Synthetic oligonucleotide
uagcgugauguuggcccgu

SEQ ID NO: 3072531 - RNA, 19 nt, Artificial Sequence
  Description of Artificial Sequence: Synthetic oligonucleotide
gcgcuugaacaacuucuuc

SEQ ID NO: 3072532 - RNA, 19 nt, Artificial Sequence
  Description of Artificial Sequence: Synthetic oligonucleotide
ccucguagucagcccuucg

SEQ ID NO: 3072533 - RNA, 19 nt, Artificial Sequence
  Description of Artificial Sequence: Synthetic oligonucleotide
uggcgcuuccgucgccgau

SEQ ID NO: 3072534 - RNA, 19 nt, Artificial Sequence
  Description of Artificial Sequence: Synthetic oligonucleotide
cccggauagcgugauguug

SEQ ID NO: 3072535 - RNA, 19 nt, Artificial Sequence
  Description of Artificial Sequence: Synthetic oligonucleotide
cuuuugucguuugggcugu

SEQ ID NO: 3072536 - RNA, 19 nt, Artificial Sequence
  Description of Artificial Sequence: Synthetic oligonucleotide
cgcuugaacaacuucuucu

SEQ ID NO: 3072537 - RNA, 19 nt, Artificial Sequence
  Description of Artificial Sequence: Synthetic oligonucleotide
gcaaggcggauuugcugca

SEQ ID NO: 3072538 - RNA, 19 nt, Artificial Sequence
  Description of Artificial Sequence: Synthetic oligonucleotide
gcgcuuccgucgccgaucc

SEQ ID NO: 3072539 - RNA, 19 nt, Artificial Sequence
  Description of Artificial Sequence: Synthetic oligonucleotide
cagcacucugcggcgcuug

SEQ ID NO: 3072540 - RNA, 19 nt, Artificial Sequence
  Description of Artificial Sequence: Synthetic oligonucleotide
ucacggcgccgaccaccug

SEQ ID NO: 3072541 - RNA, 19 nt, Artificial Sequence
  Description of Artificial Sequence: Synthetic oligonucleotide
guuggcccgugcacuggac

SEQ ID NO: 3072542 - RNA, 19 nt, Artificial Sequence
  Description of Artificial Sequence: Synthetic oligonucleotide
ucagcacucugcggcgcuu

SEQ ID NO: 3072543 - RNA, 19 nt, Artificial Sequence
  Description of Artificial Sequence: Synthetic oligonucleotide
gcucacuaguccugguugu

SEQ ID NO: 3072544 - RNA, 19 nt, Artificial Sequence
  Description of Artificial Sequence: Synthetic oligonucleotide
gcggcgcuugaacaacuuc

SEQ ID NO: 3072545 - RNA, 19 nt, Artificial Sequence
  Description of Artificial Sequence: Synthetic oligonucleotide
ccuggcgcuuccgucgccg

SEQ ID NO: 3072546 - RNA, 19 nt, Artificial Sequence
  Description of Artificial Sequence: Synthetic oligonucleotide
cugcgcuucuucccggaua

SEQ ID NO: 3072547 - RNA, 19 nt, Artificial Sequence
  Description of Artificial Sequence: Synthetic oligonucleotide
gaccaccuggcgcuuccgu

SEQ ID NO: 3072548 - RNA, 19 nt, Artificial Sequence
  Description of Artificial Sequence: Synthetic oligonucleotide
cacuaguccugguugucuu

SEQ ID NO: 3072549 - RNA, 19 nt, Artificial Sequence
  Description of Artificial Sequence: Synthetic oligonucleotide
gaucccugcucagcacucu

SEQ ID NO: 3072550 - RNA, 19 nt, Artificial Sequence
  Description of Artificial Sequence: Synthetic oligonucleotide
cggauagcgugauguuggc

SEQ ID NO: 3072551 - RNA, 19 nt, Artificial Sequence
  Description of Artificial Sequence: Synthetic oligonucleotide
gcuuccgucgccgaucccu

SEQ ID NO: 3072552 - RNA, 19 nt, Artificial Sequence
  Description of Artificial Sequence: Synthetic oligonucleotide
cguccggggacgauugauc

SEQ ID NO: 3072553 - RNA, 19 nt, Artificial Sequence
  Description of Artificial Sequence: Synthetic oligonucleotide
ccgcuucuugagguggugc

SEQ ID NO: 3072554 - RNA, 19 nt, Artificial Sequence
  Description of Artificial Sequence: Synthetic oligonucleotide
ccgaccaccuggcgcuucc

SEQ ID NO: 3072555 - RNA, 19 nt, Artificial Sequence
  Description of Artificial Sequence: Synthetic oligonucleotide
ggcgcuuccgucgccgauc

SEQ ID NO: 3072556 - RNA, 19 nt, Artificial Sequence
  Description of Artificial Sequence: Synthetic oligonucleotide
gccgaucccugcucagcac

SEQ ID NO: 3072557 - RNA, 19 nt, Artificial Sequence
  Description of Artificial Sequence: Synthetic oligonucleotide
gcgugauguuggcccgugc

SEQ ID NO: 3072558 - RNA, 19 nt, Artificial Sequence
  Description of Artificial Sequence: Synthetic oligonucleotide
ggcccgugcacuggacgcc

SEQ ID NO: 3072559 - RNA, 19 nt, Artificial Sequence
  Description of Artificial Sequence: Synthetic oligonucleotide
gcucagcacucugcggcgc

SEQ ID NO: 3072560 - RNA, 19 nt, Artificial Sequence
  Description of Artificial Sequence: Synthetic oligonucleotide
cuggcgcuuccgucgccga

SEQ ID NO: 3072561 - RNA, 19 nt, Artificial Sequence
  Description of Artificial Sequence: Synthetic oligonucleotide
cucagcacucugcggcgcu

SEQ ID NO: 3072562 - RNA, 19 nt, Artificial Sequence
  Description of Artificial Sequence: Synthetic oligonucleotide
gcgccgaccaccuggcgcu

SEQ ID NO: 3072563 - RNA, 19 nt, Artificial Sequence
  Description of Artificial Sequence: Synthetic oligonucleotide
gcucggcgggcccauagcu

SEQ ID NO: 3072564 - RNA, 19 nt, Artificial Sequence
  Description of Artificial Sequence: Synthetic oligonucleotide
cguagucagcccuucgucu

SEQ ID NO: 3072565 - RNA, 19 nt, Artificial Sequence
  Description of Artificial Sequence: Synthetic oligonucleotide
guggugccucguagucagc

SEQ ID NO: 3072566 - RNA, 19 nt, Artificial Sequence
  Description of Artificial Sequence: Synthetic oligonucleotide
guggcucacuaguccuggu

SEQ ID NO: 3072567 - RNA, 19 nt, Artificial Sequence
  Description of Artificial Sequence: Synthetic oligonucleotide
cgaucccugcucagcacuc

SEQ ID NO: 3072568 - RNA, 19 nt, Artificial Sequence
  Description of Artificial Sequence: Synthetic oligonucleotide
cugcggcgcuugaacaacu

SEQ ID NO: 3072569 - RNA, 19 nt, Artificial Sequence
  Description of Artificial Sequence: Synthetic oligonucleotide
gggcuguggcucacuaguc

SEQ ID NO: 3072570 - RNA, 19 nt, Artificial Sequence
  Description of Artificial Sequence: Synthetic oligonucleotide
gcccgugcacuggacgccc

SEQ ID NO: 3072571 - RNA, 19 nt, Artificial Sequence
  Description of Artificial Sequence: Synthetic oligonucleotide
gcuucuugagguggugccu

SEQ ID NO: 3072572 - RNA, 19 nt, Artificial Sequence
  Description of Artificial Sequence: Synthetic oligonucleotide
ggcuuccacuuccauggau

SEQ ID NO: 3072573 - RNA, 19 nt, Artificial Sequence
  Description of Artificial Sequence: Synthetic oligonucleotide
cccgugcacuggacgcccg

SEQ ID NO: 3072574 - RNA, 19 nt, Artificial Sequence
  Description of Artificial Sequence: Synthetic oligonucleotide
ccgugcacuggacgcccgc

SEQ ID NO: 3072575 - RNA, 19 nt, Artificial Sequence
  Description of Artificial Sequence: Synthetic oligonucleotide
cgcccgcuucuugaggugg

SEQ ID NO: 3072576 - RNA, 19 nt, Artificial Sequence
  Description of Artificial Sequence: Synthetic oligonucleotide
uuccgcucggcgggcccau

SEQ ID NO: 3072577 - RNA, 19 nt, Artificial Sequence
  Description of Artificial Sequence: Synthetic oligonucleotide
ccgcucggcgggcccauag

SEQ ID NO: 3072578 - RNA, 19 nt, Artificial Sequence
  Description of Artificial Sequence: Synthetic oligonucleotide
ggcgcuugaacaacuucuu

SEQ ID NO: 3072579 - RNA, 19 nt, Artificial Sequence
  Description of Artificial Sequence: Synthetic oligonucleotide
guuugggcuguggcucacu

SEQ ID NO: 3072580 - RNA, 19 nt, Artificial Sequence
  Description of Artificial Sequence: Synthetic oligonucleotide
gcccuucgucuaucacggc

SEQ ID NO: 3072581 - RNA, 19 nt, Artificial Sequence
  Description of Artificial Sequence: Synthetic oligonucleotide
cuuucugggcaaggcggau

SEQ ID NO: 3072582 - RNA, 19 nt, Artificial Sequence
  Description of Artificial Sequence: Synthetic oligonucleotide
gugcacuggacgcccgcuu

SEQ ID NO: 3072583 - RNA, 19 nt, Artificial Sequence
  Description of Artificial Sequence: Synthetic oligonucleotide
agcuccguccggggacgau

SEQ ID NO: 3072584 - RNA, 19 nt, Artificial Sequence
  Description of Artificial Sequence: Synthetic oligonucleotide
gcacuggacgcccgcuucu

SEQ ID NO: 3072585 - RNA, 19 nt, Artificial Sequence
  Description of Artificial Sequence: Synthetic oligonucleotide
ggcgggcccauagcugcac

SEQ ID NO: 3072586 - RNA, 19 nt, Artificial Sequence
  Description of Artificial Sequence: Synthetic oligonucleotide
gccucguagucagcccuuc

SEQ ID NO: 3072587 - RNA, 19 nt, Artificial Sequence
  Description of Artificial Sequence: Synthetic oligonucleotide
gcaggaguuuccugcgcuu

SEQ ID NO: 3072588 - RNA, 19 nt, Artificial Sequence
  Description of Artificial Sequence: Synthetic oligonucleotide
ccgaucccugcucagcacu

SEQ ID NO: 3072589 - RNA, 19 nt, Artificial Sequence
  Description of Artificial Sequence: Synthetic oligonucleotide
ccgucgccgaucccugcuc

SEQ ID NO: 3072590 - RNA, 19 nt, Artificial Sequence
  Description of Artificial Sequence: Synthetic oligonucleotide
cccgcuucuugagguggug

SEQ ID NO: 3072591 - RNA, 19 nt, Artificial Sequence
  Description of Artificial Sequence: Synthetic oligonucleotide
cgcucggcgggcccauagc

SEQ ID NO: 3072592 - RNA, 19 nt, Artificial Sequence
  Description of Artificial Sequence: Synthetic oligonucleotide
cgccgaucccugcucagca

SEQ ID NO: 3072593 - RNA, 19 nt, Artificial Sequence
  Description of Artificial Sequence: Synthetic oligonucleotide
cgucuaucacggcgccgac

SEQ ID NO: 3072594 - RNA, 19 nt, Artificial Sequence
  Description of Artificial Sequence: Synthetic oligonucleotide
ggaguuuccugcgcuucuu

SEQ ID NO: 3072595 - RNA, 19 nt, Artificial Sequence
  Description of Artificial Sequence: Synthetic oligonucleotide
cggauuugcugcaggaguu

SEQ ID NO: 3072596 - RNA, 19 nt, Artificial Sequence
  Description of Artificial Sequence: Synthetic oligonucleotide
ccggggacgauugaucuuu

SEQ ID NO: 3072597 - RNA, 19 nt, Artificial Sequence
  Description of Artificial Sequence: Synthetic oligonucleotide
cggggacgauugaucuuuc

SEQ ID NO: 3072598 - RNA, 19 nt, Artificial Sequence
  Description of Artificial Sequence: Synthetic oligonucleotide
gcgcuucuucccggauagc

SEQ ID NO: 3072599 - RNA, 19 nt, Artificial Sequence
  Description of Artificial Sequence: Synthetic oligonucleotide
gcacucugcggcgcuugaa

SEQ ID NO: 3072600 - RNA, 19 nt, Artificial Sequence
  Description of Artificial Sequence: Synthetic oligonucleotide
uccgcucggcgggcccaua

SEQ ID NO: 3072601 - RNA, 19 nt, Artificial Sequence
  Description of Artificial Sequence: Synthetic oligonucleotide
cgucgccgaucccugcuca

SEQ ID NO: 3072602 - RNA, 19 nt, Artificial Sequence
  Description of Artificial Sequence: Synthetic oligonucleotide
cgaccaccuggcgcuuccg

SEQ ID NO: 3072603 - RNA, 19 nt, Artificial Sequence
  Description of Artificial Sequence: Synthetic oligonucleotide
ccacuuccauggaugcuuu

SEQ ID NO: 3072604 - RNA, 19 nt, Artificial Sequence
  Description of Artificial Sequence: Synthetic oligonucleotide
cacuggacgcccgcuucuu

SEQ ID NO: 3072605 - RNA, 19 nt, Artificial Sequence
  Description of Artificial Sequence: Synthetic oligonucleotide
cagcuccguccggggacga

SEQ ID NO: 3072606 - RNA, 19 nt, Artificial Sequence
  Description of Artificial Sequence: Synthetic oligonucleotide
gcuccguccggggacgauu

SEQ ID NO: 3072607 - RNA, 19 nt, Artificial Sequence
  Description of Artificial Sequence: Synthetic oligonucleotide
gccgaccaccuggcgcuuc

SEQ ID NO: 3072608 - RNA, 19 nt, Artificial Sequence
  Description of Artificial Sequence: Synthetic oligonucleotide
gcccgcuucuugagguggu

SEQ ID NO: 3072609 - RNA, 19 nt, Artificial Sequence
  Description of Artificial Sequence: Synthetic oligonucleotide
cggcgccgaccaccuggcg

SEQ ID NO: 3072610 - RNA, 19 nt, Artificial Sequence
  Description of Artificial Sequence: Synthetic oligonucleotide
cgcuuccgucgccgauccc

SEQ ID NO: 3072611 - RNA, 19 nt, Artificial Sequence
  Description of Artificial Sequence: Synthetic oligonucleotide
ccugcgcuucuucccggau

SEQ ID NO: 3072612 - RNA, 19 nt, Artificial Sequence
  Description of Artificial Sequence: Synthetic oligonucleotide
ccguccggggacgauugau

SEQ ID NO: 3072613 - RNA, 19 nt, Artificial Sequence
  Description of Artificial Sequence: Synthetic oligonucleotide
cgugcacuggacgcccgcu

SEQ ID NO: 3072614 - RNA, 19 nt, Artificial Sequence
  Description of Artificial Sequence: Synthetic oligonucleotide
cgccgaccaccuggcgcuu

SEQ ID NO: 3072615 - RNA, 19 nt, Artificial Sequence
  Description of Artificial Sequence: Synthetic oligonucleotide
aaguauagcaccuuguucg

SEQ ID NO: 3072616 - RNA, 19 nt, Artificial Sequence
  Description of Artificial Sequence: Synthetic oligonucleotide
uuauaugcagaaaacauag

SEQ ID NO: 3072617 - RNA, 19 nt, Artificial Sequence
  Description of Artificial Sequence: Synthetic oligonucleotide
aaauaaauauaucuuaaau

SEQ ID NO: 3072618 - RNA, 19 nt, Artificial Sequence
  Description of Artificial Sequence: Synthetic oligonucleotide
auaugcagaaaacauaggg

SEQ ID NO: 3072619 - RNA, 19 nt, Artificial Sequence
  Description of Artificial Sequence: Synthetic oligonucleotide
caugauuugaaacugaaug

SEQ ID NO: 3072620 - RNA, 19 nt, Artificial Sequence
  Description of Artificial Sequence: Synthetic oligonucleotide
ucaggauaaauucuauugg

SEQ ID NO: 3072621 - RNA, 19 nt, Artificial Sequence
  Description of Artificial Sequence: Synthetic oligonucleotide
aaaacauagggauguuucg

SEQ ID NO: 3072622 - RNA, 19 nt, Artificial Sequence
  Description of Artificial Sequence: Synthetic oligonucleotide
uucaggauaaauucuauug

SEQ ID NO: 3072623 - RNA, 19 nt, Artificial Sequence
  Description of Artificial Sequence: Synthetic oligonucleotide
uuugaaacugaaugggugg

SEQ ID NO: 3072624 - RNA, 19 nt, Artificial Sequence
  Description of Artificial Sequence: Synthetic oligonucleotide
augauuugaaacugaaugg

SEQ ID NO: 3072625 - RNA, 19 nt, Artificial Sequence
  Description of Artificial Sequence: Synthetic oligonucleotide
aaagccuguccccucaugc

SEQ ID NO: 3072626 - RNA, 19 nt, Artificial Sequence
  Description of Artificial Sequence: Synthetic oligonucleotide
aauaaugagauaaggucuc

SEQ ID NO: 3072627 - RNA, 19 nt, Artificial Sequence
  Description of Artificial Sequence: Synthetic oligonucleotide
ugauuugaaacugaauggg

SEQ ID NO: 3072628 - RNA, 19 nt, Artificial Sequence
  Description of Artificial Sequence: Synthetic oligonucleotide
uugggaaaggugaugaaag

SEQ ID NO: 3072629 - RNA, 19 nt, Artificial Sequence
  Description of Artificial Sequence: Synthetic oligonucleotide
uaugcagaaaacauaggga

SEQ ID NO: 3072630 - RNA, 19 nt, Artificial Sequence
  Description of Artificial Sequence: Synthetic oligonucleotide
ucaucuucaggauaaauuc

SEQ ID NO: 3072631 - RNA, 19 nt, Artificial Sequence
  Description of Artificial Sequence: Synthetic oligonucleotide
aaauuuauugggaaaggug

SEQ ID NO: 3072632 - RNA, 19 nt, Artificial Sequence
  Description of Artificial Sequence: Synthetic oligonucleotide
aaggucucuuucuuucacc

SEQ ID NO: 3072633 - RNA, 19 nt, Artificial Sequence
  Description of Artificial Sequence: Synthetic oligonucleotide
aaacauagggauguuucgg

SEQ ID NO: 3072634 - RNA, 19 nt, Artificial Sequence
  Description of Artificial Sequence: Synthetic oligonucleotide
aaaauuuauugggaaaggu

SEQ ID NO: 3072635 - RNA, 19 nt, Artificial Sequence
  Description of Artificial Sequence: Synthetic oligonucleotide
agguucuucaaguauagca

SEQ ID NO: 3072636 - RNA, 19 nt, Artificial Sequence
  Description of Artificial Sequence: Synthetic oligonucleotide
ugacaaacgguuucucugg

SEQ ID NO: 3072637 - RNA, 19 nt, Artificial Sequence
  Description of Artificial Sequence: Synthetic oligonucleotide
uauaugcagaaaacauagg

SEQ ID NO: 3072638 - RNA, 19 nt, Artificial Sequence
  Description of Artificial Sequence: Synthetic oligonucleotide
aggucucuuucuuucaccc

SEQ ID NO: 3072639 - RNA, 19 nt, Artificial Sequence
  Description of Artificial Sequence: Synthetic oligonucleotide
uaagguucuucaaguauag

SEQ ID NO: 3072640 - RNA, 19 nt, Artificial Sequence
  Description of Artificial Sequence: Synthetic oligonucleotide
cugaguucaaaauaaauaa

SEQ ID NO: 3072641 - RNA, 19 nt, Artificial Sequence
  Description of Artificial Sequence: Synthetic oligonucleotide
aggacuaagguucuucaag

SEQ ID NO: 3072642 - RNA, 19 nt, Artificial Sequence
  Description of Artificial Sequence: Synthetic oligonucleotide
augagauaaggucucuuuc

SEQ ID NO: 3072643 - RNA, 19 nt, Artificial Sequence
  Description of Artificial Sequence: Synthetic oligonucleotide
aaugagauaaggucucuuu

SEQ ID NO: 3072644 - RNA, 19 nt, Artificial Sequence
  Description of Artificial Sequence: Synthetic oligonucleotide
uuucuccuggaaccgagcg

SEQ ID NO: 3072645 - RNA, 19 nt, Artificial Sequence
  Description of Artificial Sequence: Synthetic oligonucleotide
ugagauaaggucucuuucu

SEQ ID NO: 3072646 - RNA, 19 nt, Artificial Sequence
  Description of Artificial Sequence: Synthetic oligonucleotide
ugaguucaaaauaaauaaa

SEQ ID NO: 3072647 - RNA, 19 nt, Artificial Sequence
  Description of Artificial Sequence: Synthetic oligonucleotide
aacauagggauguuucgga

SEQ ID NO: 3072648 - RNA, 19 nt, Artificial Sequence
  Description of Artificial Sequence: Synthetic oligonucleotide
gaaaacauagggauguuuc

SEQ ID NO: 3072649 - RNA, 19 nt, Artificial Sequence
  Description of Artificial Sequence: Synthetic oligonucleotide
ggauaaauucuauugguug

SEQ ID NO: 3072650 - RNA, 19 nt, Artificial Sequence
  Description of Artificial Sequence: Synthetic oligonucleotide
uuauugggaaaggugauga

SEQ ID NO: 3072651 - RNA, 19 nt, Artificial Sequence
  Description of Artificial Sequence: Synthetic oligonucleotide
uccacucaugauuugaaac

SEQ ID NO: 3072652 - RNA, 19 nt, Artificial Sequence
  Description of Artificial Sequence: Synthetic oligonucleotide
auagggauguuucggaucu

SEQ ID NO: 3072653 - RNA, 19 nt, Artificial Sequence
  Description of Artificial Sequence: Synthetic oligonucleotide
aaacgguuucucuggaucu

SEQ ID NO: 3072654 - RNA, 19 nt, Artificial Sequence
  Description of Artificial Sequence: Synthetic oligonucleotide
gaaccgagcgaauaaugag

SEQ ID NO: 3072655 - RNA, 19 nt, Artificial Sequence
  Description of Artificial Sequence: Synthetic oligonucleotide
ucuuucuuucacccgagga

SEQ ID NO: 3072656 - RNA, 19 nt, Artificial Sequence
  Description of Artificial Sequence: Synthetic oligonucleotide
cuuucuuucacccgaggac

SEQ ID NO: 3072657 - RNA, 19 nt, Artificial Sequence
  Description of Artificial Sequence: Synthetic oligonucleotide
agcgaauaaugagauaagg

SEQ ID NO: 3072658 - RNA, 19 nt, Artificial Sequence
  Description of Artificial Sequence: Synthetic oligonucleotide
ugcagaaaacauagggaug

SEQ ID NO: 3072659 - RNA, 19 nt, Artificial Sequence
  Description of Artificial Sequence: Synthetic oligonucleotide
aguauagcaccuuguucgg

SEQ ID NO: 3072660 - RNA, 19 nt, Artificial Sequence
  Description of Artificial Sequence: Synthetic oligonucleotide
uggguuauaugcagaaaac

SEQ ID NO: 3072661 - RNA, 19 nt, Artificial Sequence
  Description of Artificial Sequence: Synthetic oligonucleotide
cugacaaacgguuucucug

SEQ ID NO: 3072662 - RNA, 19 nt, Artificial Sequence
  Description of Artificial Sequence: Synthetic oligonucleotide
guucuucaaguauagcacc

SEQ ID NO: 3072663 - RNA, 19 nt, Artificial Sequence
  Description of Artificial Sequence: Synthetic oligonucleotide
gaaacugaauggguggucc

SEQ ID NO: 3072664 - RNA, 19 nt, Artificial Sequence
  Description of Artificial Sequence: Synthetic oligonucleotide
ggugaugaaagccuguccc

SEQ ID NO: 3072665 - RNA, 19 nt, Artificial Sequence
  Description of Artificial Sequence: Synthetic oligonucleotide
aaggugaugaaagccuguc

SEQ ID NO: 3072666 - RNA, 19 nt, Artificial Sequence
  Description of Artificial Sequence: Synthetic oligonucleotide
gaauaaugagauaaggucu

SEQ ID NO: 3072667 - RNA, 19 nt, Artificial Sequence
  Description of Artificial Sequence: Synthetic oligonucleotide
aggugaugaaagccugucc

SEQ ID NO: 3072668 - RNA, 19 nt, Artificial Sequence
  Description of Artificial Sequence: Synthetic oligonucleotide
auuugaaacugaaugggug

SEQ ID NO: 3072669 - RNA, 19 nt, Artificial Sequence
  Description of Artificial Sequence: Synthetic oligonucleotide
aagccuguccccucaugcg

SEQ ID NO: 3072670 - RNA, 19 nt, Artificial Sequence
  Description of Artificial Sequence: Synthetic oligonucleotide
guuccccuggguuauaugc

SEQ ID NO: 3072671 - RNA, 19 nt, Artificial Sequence
  Description of Artificial Sequence: Synthetic oligonucleotide
uucaaguauagcaccuugu

SEQ ID NO: 3072672 - RNA, 19 nt, Artificial Sequence
  Description of Artificial Sequence: Synthetic oligonucleotide
ucaaguauagcaccuuguu

SEQ ID NO: 3072673 - RNA, 19 nt, Artificial Sequence
  Description of Artificial Sequence: Synthetic oligonucleotide
uuucacccgaggacuaagg

SEQ ID NO: 3072674 - RNA, 19 nt, Artificial Sequence
  Description of Artificial Sequence: Synthetic oligonucleotide
uuucuuucacccgaggacu

SEQ ID NO: 3072675 - RNA, 19 nt, Artificial Sequence
  Description of Artificial Sequence: Synthetic oligonucleotide
aucuccuccucugacaaac

SEQ ID NO: 3072676 - RNA, 19 nt, Artificial Sequence
  Description of Artificial Sequence: Synthetic oligonucleotide
acuaagguucuucaaguau

SEQ ID NO: 3072677 - RNA, 19 nt, Artificial Sequence
  Description of Artificial Sequence: Synthetic oligonucleotide
uucuucaaguauagcaccu

SEQ ID NO: 3072678 - RNA, 19 nt, Artificial Sequence
  Description of Artificial Sequence: Synthetic oligonucleotide
uuuauugggaaaggugaug

SEQ ID NO: 3072679 - RNA, 19 nt, Artificial Sequence
  Description of Artificial Sequence: Synthetic oligonucleotide
ucugacaaacgguuucucu

SEQ ID NO: 3072680 - RNA, 19 nt, Artificial Sequence
  Description of Artificial Sequence: Synthetic oligonucleotide
aagguucuucaaguauagc

SEQ ID NO: 3072681 - RNA, 19 nt, Artificial Sequence
  Description of Artificial Sequence: Synthetic oligonucleotide
uccugaguucaaaauaaau

SEQ ID NO: 3072682 - RNA, 19 nt, Artificial Sequence
  Description of Artificial Sequence: Synthetic oligonucleotide
cacccgaggacuaagguuc

SEQ ID NO: 3072683 - RNA, 19 nt, Artificial Sequence
  Description of Artificial Sequence: Synthetic oligonucleotide
uggaaccgagcgaauaaug

SEQ ID NO: 3072684 - RNA, 19 nt, Artificial Sequence
  Description of Artificial Sequence: Synthetic oligonucleotide
cgaauaaugagauaagguc

SEQ ID NO: 3072685 - RNA, 19 nt, Artificial Sequence
  Description of Artificial Sequence: Synthetic oligonucleotide
uucucuggaucucaucuuc

SEQ ID NO: 3072686 - RNA, 19 nt, Artificial Sequence
  Description of Artificial Sequence: Synthetic oligonucleotide
gaaaggugaugaaagccug

SEQ ID NO: 3072687 - RNA, 19 nt, Artificial Sequence
  Description of Artificial Sequence: Synthetic oligonucleotide
uaaggucucuuucuuucac

SEQ ID NO: 3072688 - RNA, 19 nt, Artificial Sequence
  Description of Artificial Sequence: Synthetic oligonucleotide
ugggaaaggugaugaaagc

SEQ ID NO: 3072689 - RNA, 19 nt, Artificial Sequence
  Description of Artificial Sequence: Synthetic oligonucleotide
agggauguuucggaucucc

SEQ ID NO: 3072690 - RNA, 19 nt, Artificial Sequence
  Description of Artificial Sequence: Synthetic oligonucleotide
caaacgguuucucuggauc

SEQ ID NO: 3072691 - RNA, 19 nt, Artificial Sequence
  Description of Artificial Sequence: Synthetic oligonucleotide
aaccgagcgaauaaugaga

SEQ ID NO: 3072692 - RNA, 19 nt, Artificial Sequence
  Description of Artificial Sequence: Synthetic oligonucleotide
ucaugauuugaaacugaau

SEQ ID NO: 3072693 - RNA, 19 nt, Artificial Sequence
  Description of Artificial Sequence: Synthetic oligonucleotide
caaguauagcaccuuguuc

SEQ ID NO: 3072694 - RNA, 19 nt, Artificial Sequence
  Description of Artificial Sequence: Synthetic oligonucleotide
aguucaaaauaaauaaaua

SEQ ID NO: 3072695 - RNA, 19 nt, Artificial Sequence
  Description of Artificial Sequence: Synthetic oligonucleotide
uccucugacaaacgguuuc

SEQ ID NO: 3072696 - RNA, 19 nt, Artificial Sequence
  Description of Artificial Sequence: Synthetic oligonucleotide
ucuucaggauaaauucuau

SEQ ID NO: 3072697 - RNA, 19 nt, Artificial Sequence
  Description of Artificial Sequence: Synthetic oligonucleotide
uuucggaucuccuccucug

SEQ ID NO: 3072698 - RNA, 19 nt, Artificial Sequence
  Description of Artificial Sequence: Synthetic oligonucleotide
ucucuuucuuucacccgag

SEQ ID NO: 3072699 - RNA, 19 nt, Artificial Sequence
  Description of Artificial Sequence: Synthetic oligonucleotide
gaguucaaaauaaauaaau

SEQ ID NO: 3072700 - RNA, 19 nt, Artificial Sequence
  Description of Artificial Sequence: Synthetic oligonucleotide
uauagcaccuuguucgguu

SEQ ID NO: 3072701 - RNA, 19 nt, Artificial Sequence
  Description of Artificial Sequence: Synthetic oligonucleotide
uuuucuccuggaaccgagc

SEQ ID NO: 3072702 - RNA, 19 nt, Artificial Sequence
  Description of Artificial Sequence: Synthetic oligonucleotide
aacgguuucucuggaucuc

SEQ ID NO: 3072703 - RNA, 19 nt, Artificial Sequence
  Description of Artificial Sequence: Synthetic oligonucleotide
cuggguuauaugcagaaaa

SEQ ID NO: 3072704 - RNA, 19 nt, Artificial Sequence
  Description of Artificial Sequence: Synthetic oligonucleotide
cuaagguucuucaaguaua

SEQ ID NO: 3072705 - RNA, 19 nt, Artificial Sequence
  Description of Artificial Sequence: Synthetic oligonucleotide
guuucucuggaucucaucu

SEQ ID NO: 3072706 - RNA, 19 nt, Artificial Sequence
  Description of Artificial Sequence: Synthetic oligonucleotide
gaucucaucuucaggauaa

SEQ ID NO: 3072707 - RNA, 19 nt, Artificial Sequence
  Description of Artificial Sequence: Synthetic oligonucleotide
cauagggauguuucggauc

SEQ ID NO: 3072708 - RNA, 19 nt, Artificial Sequence
  Description of Artificial Sequence: Synthetic oligonucleotide
gguucuucaaguauagcac

SEQ ID NO: 3072709 - RNA, 19 nt, Artificial Sequence
  Description of Artificial Sequence: Synthetic oligonucleotide
ucuccuggaaccgagcgaa

SEQ ID NO: 3072710 - RNA, 19 nt, Artificial Sequence
  Description of Artificial Sequence: Synthetic oligonucleotide
guuauaugcagaaaacaua

SEQ ID NO: 3072711 - RNA, 19 nt, Artificial Sequence
  Description of Artificial Sequence: Synthetic oligonucleotide
uccccuggguuauaugcag

SEQ ID NO: 3072712 - RNA, 19 nt, Artificial Sequence
  Description of Artificial Sequence: Synthetic oligonucleotide
uucacccgaggacuaaggu

SEQ ID NO: 3072713 - RNA, 19 nt, Artificial Sequence
  Description of Artificial Sequence: Synthetic oligonucleotide
ucucuggaucucaucuuca

SEQ ID NO: 3072714 - RNA, 19 nt, Artificial Sequence
  Description of Artificial Sequence: Synthetic oligonucleotide
gucucuuucuuucacccga

SEQ ID NO: 3072715 - RNA, 19 nt, Artificial Sequence
  Description of Artificial Sequence: Synthetic oligonucleotide
ugaugaaagccuguccccu

SEQ ID NO: 3072716 - RNA, 19 nt, Artificial Sequence
  Description of Artificial Sequence: Synthetic oligonucleotide
auugggaaaggugaugaaa

SEQ ID NO: 3072717 - RNA, 19 nt, Artificial Sequence
  Description of Artificial Sequence: Synthetic oligonucleotide
ucuccuccucugacaaacg

SEQ ID NO: 3072718 - RNA, 19 nt, Artificial Sequence
  Description of Artificial Sequence: Synthetic oligonucleotide
uugaaacugaauggguggu

SEQ ID NO: 3072719 - RNA, 19 nt, Artificial Sequence
  Description of Artificial Sequence: Synthetic oligonucleotide
uuccccuggguuauaugca

SEQ ID NO: 3072720 - RNA, 19 nt, Artificial Sequence
  Description of Artificial Sequence: Synthetic oligonucleotide
cacucaugauuugaaacug

SEQ ID NO: 3072721 - RNA, 19 nt, Artificial Sequence
  Description of Artificial Sequence: Synthetic oligonucleotide
agguccugaguucaaaaua

SEQ ID NO: 3072722 - RNA, 19 nt, Artificial Sequence
  Description of Artificial Sequence: Synthetic oligonucleotide
uucuccuggaaccgagcga

SEQ ID NO: 3072723 - RNA, 19 nt, Artificial Sequence
  Description of Artificial Sequence: Synthetic oligonucleotide
gagcgaauaaugagauaag

SEQ ID NO: 3072724 - RNA, 19 nt, Artificial Sequence
  Description of Artificial Sequence: Synthetic oligonucleotide
aaaggugaugaaagccugu

SEQ ID NO: 3072725 - RNA, 19 nt, Artificial Sequence
  Description of Artificial Sequence: Synthetic oligonucleotide
cucaugauuugaaacugaa

SEQ ID NO: 3072726 - RNA, 19 nt, Artificial Sequence
  Description of Artificial Sequence: Synthetic oligonucleotide
gggaaaggugaugaaagcc

SEQ ID NO: 3072727 - RNA, 19 nt, Artificial Sequence
  Description of Artificial Sequence: Synthetic oligonucleotide
gaugaaagccuguccccuc

SEQ ID NO: 3072728 - RNA, 19 nt, Artificial Sequence
  Description of Artificial Sequence: Synthetic oligonucleotide
augaaagccuguccccuca

SEQ ID NO: 3072729 - RNA, 19 nt, Artificial Sequence
  Description of Artificial Sequence: Synthetic oligonucleotide
uauugggaaaggugaugaa

SEQ ID NO: 3072730 - RNA, 19 nt, Artificial Sequence
  Description of Artificial Sequence: Synthetic oligonucleotide
acauagggauguuucggau

SEQ ID NO: 3072731 - RNA, 19 nt, Artificial Sequence
  Description of Artificial Sequence: Synthetic oligonucleotide
ucggaucuccuccucugac

SEQ ID NO: 3072732 - RNA, 19 nt, Artificial Sequence
  Description of Artificial Sequence: Synthetic oligonucleotide
uucggaucuccuccucuga

SEQ ID NO: 3072733 - RNA, 19 nt, Artificial Sequence
  Description of Artificial Sequence: Synthetic oligonucleotide
ucacccgaggacuaagguu

SEQ ID NO: 3072734 - RNA, 19 nt, Artificial Sequence
  Description of Artificial Sequence: Synthetic oligonucleotide
accuuguucgguuccccug

SEQ ID NO: 3072735 - RNA, 19 nt, Artificial Sequence
  Description of Artificial Sequence: Synthetic oligonucleotide
agcaccuuguucgguuccc

SEQ ID NO: 3072736 - RNA, 19 nt, Artificial Sequence
  Description of Artificial Sequence: Synthetic oligonucleotide
uggaucucaucuucaggau

SEQ ID NO: 3072737 - RNA, 19 nt, Artificial Sequence
  Description of Artificial Sequence: Synthetic oligonucleotide
auuuauugggaaaggugau

SEQ ID NO: 3072738 - RNA, 19 nt, Artificial Sequence
  Description of Artificial Sequence: Synthetic oligonucleotide
caggauaaauucuauuggu

SEQ ID NO: 3072739 - RNA, 19 nt, Artificial Sequence
  Description of Artificial Sequence: Synthetic oligonucleotide
uuucucuggaucucaucuu

SEQ ID NO: 3072740 - RNA, 19 nt, Artificial Sequence
  Description of Artificial Sequence: Synthetic oligonucleotide
ccugaguucaaaauaaaua

SEQ ID NO: 3072741 - RNA, 19 nt, Artificial Sequence
  Description of Artificial Sequence: Synthetic oligonucleotide
uagcaccuuguucgguucc

SEQ ID NO: 3072742 - RNA, 19 nt, Artificial Sequence
  Description of Artificial Sequence: Synthetic oligonucleotide
cucuuucuuucacccgagg

SEQ ID NO: 3072743 - RNA, 19 nt, Artificial Sequence
  Description of Artificial Sequence: Synthetic oligonucleotide
auaaugagauaaggucucu

SEQ ID NO: 3072744 - RNA, 19 nt, Artificial Sequence
  Description of Artificial Sequence: Synthetic oligonucleotide
aggauaaauucuauugguu

SEQ ID NO: 3072745 - RNA, 19 nt, Artificial Sequence
  Description of Artificial Sequence: Synthetic oligonucleotide
aucuucaggauaaauucua

SEQ ID NO: 3072746 - RNA, 19 nt, Artificial Sequence
  Description of Artificial Sequence: Synthetic oligonucleotide
ugaaacugaaugggugguc

SEQ ID NO: 3072747 - RNA, 19 nt, Artificial Sequence
  Description of Artificial Sequence: Synthetic oligonucleotide
agaaaacauagggauguuu

SEQ ID NO: 3072748 - RNA, 19 nt, Artificial Sequence
  Description of Artificial Sequence: Synthetic oligonucleotide
gacuaagguucuucaagua

SEQ ID NO: 3072749 - RNA, 19 nt, Artificial Sequence
  Description of Artificial Sequence: Synthetic oligonucleotide
ggucucuuucuuucacccg

SEQ ID NO: 3072750 - RNA, 19 nt, Artificial Sequence
  Description of Artificial Sequence: Synthetic oligonucleotide
uucuuucacccgaggacua

SEQ ID NO: 3072751 - RNA, 19 nt, Artificial Sequence
  Description of Artificial Sequence: Synthetic oligonucleotide
ucucaucuucaggauaaau

SEQ ID NO: 3072752 - RNA, 19 nt, Artificial Sequence
  Description of Artificial Sequence: Synthetic oligonucleotide
uguuucggaucuccuccuc

SEQ ID NO: 3072753 - RNA, 19 nt, Artificial Sequence
  Description of Artificial Sequence: Synthetic oligonucleotide
cuuguucgguuccccuggg

SEQ ID NO: 3072754 - RNA, 19 nt, Artificial Sequence
  Description of Artificial Sequence: Synthetic oligonucleotide
uaaugagauaaggucucuu

SEQ ID NO: 3072755 - RNA, 19 nt, Artificial Sequence
  Description of Artificial Sequence: Synthetic oligonucleotide
cuuucacccgaggacuaag

SEQ ID NO: 3072756 - RNA, 19 nt, Artificial Sequence
  Description of Artificial Sequence: Synthetic oligonucleotide
agccuguccccucaugcgu

SEQ ID NO: 3072757 - RNA, 19 nt, Artificial Sequence
  Description of Artificial Sequence: Synthetic oligonucleotide
ucaugcguccacucaugau

SEQ ID NO: 3072758 - RNA, 19 nt, Artificial Sequence
  Description of Artificial Sequence: Synthetic oligonucleotide
acaaacgguuucucuggau

SEQ ID NO: 3072759 - RNA, 19 nt, Artificial Sequence
  Description of Artificial Sequence: Synthetic oligonucleotide
gaggacuaagguucuucaa

SEQ ID NO: 3072760 - RNA, 19 nt, Artificial Sequence
  Description of Artificial Sequence: Synthetic oligonucleotide
gguuauaugcagaaaacau

SEQ ID NO: 3072761 - RNA, 19 nt, Artificial Sequence
  Description of Artificial Sequence: Synthetic oligonucleotide
acucaugauuugaaacuga

SEQ ID NO: 3072762 - RNA, 19 nt, Artificial Sequence
  Description of Artificial Sequence: Synthetic oligonucleotide
ggguuauaugcagaaaaca

SEQ ID NO: 3072763 - RNA, 19 nt, Artificial Sequence
  Description of Artificial Sequence: Synthetic oligonucleotide
aacugaaugggugguccuu

SEQ ID NO: 3072764 - RNA, 19 nt, Artificial Sequence
  Description of Artificial Sequence: Synthetic oligonucleotide
ggauguuucggaucuccuc

SEQ ID NO: 3072765 - RNA, 19 nt, Artificial Sequence
  Description of Artificial Sequence: Synthetic oligonucleotide
caucuucaggauaaauucu

SEQ ID NO: 3072766 - RNA, 19 nt, Artificial Sequence
  Description of Artificial Sequence: Synthetic oligonucleotide
accgagcgaauaaugagau

SEQ ID NO: 3072767 - RNA, 19 nt, Artificial Sequence
  Description of Artificial Sequence: Synthetic oligonucleotide
ccuuguucgguuccccugg

SEQ ID NO: 3072768 - RNA, 19 nt, Artificial Sequence
  Description of Artificial Sequence: Synthetic oligonucleotide
gcagaaaacauagggaugu

SEQ ID NO: 3072769 - RNA, 19 nt, Artificial Sequence
  Description of Artificial Sequence: Synthetic oligonucleotide
ggaaccgagcgaauaauga

SEQ ID NO: 3072770 - RNA, 19 nt, Artificial Sequence
  Description of Artificial Sequence: Synthetic oligonucleotide
ggaaaggugaugaaagccu

SEQ ID NO: 3072771 - RNA, 19 nt, Artificial Sequence
  Description of Artificial Sequence: Synthetic oligonucleotide
ggacuaagguucuucaagu

SEQ ID NO: 3072772 - RNA, 19 nt, Artificial Sequence
  Description of Artificial Sequence: Synthetic oligonucleotide
caugcguccacucaugauu

SEQ ID NO: 3072773 - RNA, 19 nt, Artificial Sequence
  Description of Artificial Sequence: Synthetic oligonucleotide
uuguucgguuccccugggu

SEQ ID NO: 3072774 - RNA, 19 nt, Artificial Sequence
  Description of Artificial Sequence: Synthetic oligonucleotide
gagguccugaguucaaaau

SEQ ID NO: 3072775 - RNA, 19 nt, Artificial Sequence
  Description of Artificial Sequence: Synthetic oligonucleotide
uucgguuccccuggguuau

SEQ ID NO: 3072776 - RNA, 19 nt, Artificial Sequence
  Description of Artificial Sequence: Synthetic oligonucleotide
ucuuucacccgaggacuaa

SEQ ID NO: 3072777 - RNA, 19 nt, Artificial Sequence
  Description of Artificial Sequence: Synthetic oligonucleotide
ugcguccacucaugauuug

SEQ ID NO: 3072778 - RNA, 19 nt, Artificial Sequence
  Description of Artificial Sequence: Synthetic oligonucleotide
uguccccucaugcguccac

SEQ ID NO: 3072779 - RNA, 19 nt, Artificial Sequence
  Description of Artificial Sequence: Synthetic oligonucleotide
uccuggaaccgagcgaaua

SEQ ID NO: 3072780 - RNA, 19 nt, Artificial Sequence
  Description of Artificial Sequence: Synthetic oligonucleotide
guccacucaugauuugaaa

SEQ ID NO: 3072781 - RNA, 19 nt, Artificial Sequence
  Description of Artificial Sequence: Synthetic oligonucleotide
cgagcgaauaaugagauaa

SEQ ID NO: 3072782 - RNA, 19 nt, Artificial Sequence
  Description of Artificial Sequence: Synthetic oligonucleotide
guucgguuccccuggguua

SEQ ID NO: 3072783 - RNA, 19 nt, Artificial Sequence
  Description of Artificial Sequence: Synthetic oligonucleotide
acgguuucucuggaucuca

SEQ ID NO: 3072784 - RNA, 19 nt, Artificial Sequence
  Description of Artificial Sequence: Synthetic oligonucleotide
acugaaugggugguccuuu

SEQ ID NO: 3072785 - RNA, 19 nt, Artificial Sequence
  Description of Artificial Sequence: Synthetic oligonucleotide
cucaugcguccacucauga

SEQ ID NO: 3072786 - RNA, 19 nt, Artificial Sequence
  Description of Artificial Sequence: Synthetic oligonucleotide
gcgaauaaugagauaaggu

SEQ ID NO: 3072787 - RNA, 19 nt, Artificial Sequence
  Description of Artificial Sequence: Synthetic oligonucleotide
cuucaggauaaauucuauu

SEQ ID NO: 3072788 - RNA, 19 nt, Artificial Sequence
  Description of Artificial Sequence: Synthetic oligonucleotide
gguuucucuggaucucauc

SEQ ID NO: 3072789 - RNA, 19 nt, Artificial Sequence
  Description of Artificial Sequence: Synthetic oligonucleotide
ggaucucaucuucaggaua

SEQ ID NO: 3072790 - RNA, 19 nt, Artificial Sequence
  Description of Artificial Sequence: Synthetic oligonucleotide
cucugacaaacgguuucuc

SEQ ID NO: 3072791 - RNA, 19 nt, Artificial Sequence
  Description of Artificial Sequence: Synthetic oligonucleotide
ccacucaugauuugaaacu

SEQ ID NO: 3072792 - RNA, 19 nt, Artificial Sequence
  Description of Artificial Sequence: Synthetic oligonucleotide
augcguccacucaugauuu

SEQ ID NO: 3072793 - RNA, 19 nt, Artificial Sequence
  Description of Artificial Sequence: Synthetic oligonucleotide
gguuccccuggguuauaug

SEQ ID NO: 3072794 - RNA, 19 nt, Artificial Sequence
  Description of Artificial Sequence: Synthetic oligonucleotide
ccucaugcguccacucaug

SEQ ID NO: 3072795 - RNA, 19 nt, Artificial Sequence
  Description of Artificial Sequence: Synthetic oligonucleotide
aucucaucuucaggauaaa

SEQ ID NO: 3072796 - RNA, 19 nt, Artificial Sequence
  Description of Artificial Sequence: Synthetic oligonucleotide
ccuggaaccgagcgaauaa

SEQ ID NO: 3072797 - RNA, 19 nt, Artificial Sequence
  Description of Artificial Sequence: Synthetic oligonucleotide
ccuguccccucaugcgucc

SEQ ID NO: 3072798 - RNA, 19 nt, Artificial Sequence
  Description of Artificial Sequence: Synthetic oligonucleotide
uagggauguuucggaucuc

SEQ ID NO: 3072799 - RNA, 19 nt, Artificial Sequence
  Description of Artificial Sequence: Synthetic oligonucleotide
cgaggacuaagguucuuca

SEQ ID NO: 3072800 - RNA, 19 nt, Artificial Sequence
  Description of Artificial Sequence: Synthetic oligonucleotide
ccgaggacuaagguucuuc

SEQ ID NO: 3072801 - RNA, 19 nt, Artificial Sequence
  Description of Artificial Sequence: Synthetic oligonucleotide
gcguccacucaugauuuga

SEQ ID NO: 3072802 - RNA, 19 nt, Artificial Sequence
  Description of Artificial Sequence: Synthetic oligonucleotide
guauagcaccuuguucggu

SEQ ID NO: 3072803 - RNA, 19 nt, Artificial Sequence
  Description of Artificial Sequence: Synthetic oligonucleotide
cccuggguuauaugcagaa

SEQ ID NO: 3072804 - RNA, 19 nt, Artificial Sequence
  Description of Artificial Sequence: Synthetic oligonucleotide
acccgaggacuaagguucu

SEQ ID NO: 3072805 - RNA, 19 nt, Artificial Sequence
  Description of Artificial Sequence: Synthetic oligonucleotide
gcaccuuguucgguucccc

SEQ ID NO: 3072806 - RNA, 19 nt, Artificial Sequence
  Description of Artificial Sequence: Synthetic oligonucleotide
caccuuguucgguuccccu

SEQ ID NO: 3072807 - RNA, 19 nt, Artificial Sequence
  Description of Artificial Sequence: Synthetic oligonucleotide
cuggaaccgagcgaauaau

SEQ ID NO: 3072808 - RNA, 19 nt, Artificial Sequence
  Description of Artificial Sequence: Synthetic oligonucleotide
ccuccucugacaaacgguu

SEQ ID NO: 3072809 - RNA, 19 nt, Artificial Sequence
  Description of Artificial Sequence: Synthetic oligonucleotide
cuccucugacaaacgguuu

SEQ ID NO: 3072810 - RNA, 19 nt, Artificial Sequence
  Description of Artificial Sequence: Synthetic oligonucleotide
cguccacucaugauuugaa

SEQ ID NO: 3072811 - RNA, 19 nt, Artificial Sequence
  Description of Artificial Sequence: Synthetic oligonucleotide
gccuguccccucaugcguc

SEQ ID NO: 3072812 - RNA, 19 nt, Artificial Sequence
  Description of Artificial Sequence: Synthetic oligonucleotide
gggauguuucggaucuccu

SEQ ID NO: 3072813 - RNA, 19 nt, Artificial Sequence
  Description of Artificial Sequence: Synthetic oligonucleotide
ccuggguuauaugcagaaa

SEQ ID NO: 3072814 - RNA, 19 nt, Artificial Sequence
  Description of Artificial Sequence: Synthetic oligonucleotide
guccccucaugcguccacu

SEQ ID NO: 3072815 - RNA, 19 nt, Artificial Sequence
  Description of Artificial Sequence: Synthetic oligonucleotide
ccccucaugcguccacuca

SEQ ID NO: 3072816 - RNA, 19 nt, Artificial Sequence
  Description of Artificial Sequence: Synthetic oligonucleotide
cagaaaacauagggauguu

SEQ ID NO: 3072817 - RNA, 19 nt, Artificial Sequence
  Description of Artificial Sequence: Synthetic oligonucleotide
ucgguuccccuggguuaua

SEQ ID NO: 3072818 - RNA, 19 nt, Artificial Sequence
  Description of Artificial Sequence: Synthetic oligonucleotide
cuguccccucaugcgucca

SEQ ID NO: 3072819 - RNA, 19 nt, Artificial Sequence
  Description of Artificial Sequence: Synthetic oligonucleotide
ccucugacaaacgguuucu

SEQ ID NO: 3072820 - RNA, 19 nt, Artificial Sequence
  Description of Artificial Sequence: Synthetic oligonucleotide
cccucaugcguccacucau

SEQ ID NO: 3072821 - RNA, 19 nt, Artificial Sequence
  Description of Artificial Sequence: Synthetic oligonucleotide
ccgagcgaauaaugagaua

SEQ ID NO: 3072822 - RNA, 19 nt, Artificial Sequence
  Description of Artificial Sequence: Synthetic oligonucleotide
cuccuggaaccgagcgaau

SEQ ID NO: 3072823 - RNA, 19 nt, Artificial Sequence
  Description of Artificial Sequence: Synthetic oligonucleotide
cgguuucucuggaucucau

SEQ ID NO: 3072824 - RNA, 19 nt, Artificial Sequence
  Description of Artificial Sequence: Synthetic oligonucleotide
cgguuccccuggguuauau

SEQ ID NO: 3072825 - RNA, 19 nt, Artificial Sequence
  Description of Artificial Sequence: Synthetic oligonucleotide
cccgaggacuaagguucuu

SEQ ID NO: 3072826 - RNA, 19 nt, Artificial Sequence
  Description of Artificial Sequence: Synthetic oligonucleotide
aacaccuuagacuugaggg

SEQ ID NO: 3072827 - RNA, 19 nt, Artificial Sequence
  Description of Artificial Sequence: Synthetic oligonucleotide
aaaguagacaucaacacag

SEQ ID NO: 3072828 - RNA, 19 nt, Artificial Sequence
  Description of Artificial Sequence: Synthetic oligonucleotide
gagaucauucuccagaccg

SEQ ID NO: 3072829 - RNA, 19 nt, Artificial Sequence
  Description of Artificial Sequence: Synthetic oligonucleotide
uuaaugucugucuugaagc

SEQ ID NO: 3072830 - RNA, 19 nt, Artificial Sequence
  Description of Artificial Sequence: Synthetic oligonucleotide
acgaacuucacacagaaug

SEQ ID NO: 3072831 - RNA, 19 nt, Artificial Sequence
  Description of Artificial Sequence: Synthetic oligonucleotide
uuaaaguagacaucaacac

SEQ ID NO: 3072832 - RNA, 19 nt, Artificial Sequence
  Description of Artificial Sequence: Synthetic oligonucleotide
uagacaucaacacagccug

SEQ ID NO: 3072833 - RNA, 19 nt, Artificial Sequence
  Description of Artificial Sequence: Synthetic oligonucleotide
cuuauagagcauuugcucc

SEQ ID NO: 3072834 - RNA, 19 nt, Artificial Sequence
  Description of Artificial Sequence: Synthetic oligonucleotide
ugucgaagaaccuuaaugu

SEQ ID NO: 3072835 - RNA, 19 nt, Artificial Sequence
  Description of Artificial Sequence: Synthetic oligonucleotide
ugaacgugaacuuaaagua

SEQ ID NO: 3072836 - RNA, 19 nt, Artificial Sequence
  Description of Artificial Sequence: Synthetic oligonucleotide
ucuacuuccagcaugcguc

SEQ ID NO: 3072837 - RNA, 19 nt, Artificial Sequence
  Description of Artificial Sequence: Synthetic oligonucleotide
uaaaguagacaucaacaca

SEQ ID NO: 3072838 - RNA, 19 nt, Artificial Sequence
  Description of Artificial Sequence: Synthetic oligonucleotide
aguagacaucaacacagcc

SEQ ID NO: 3072839 - RNA, 19 nt, Artificial Sequence
  Description of Artificial Sequence: Synthetic oligonucleotide
ucacuguugccuuauagag

SEQ ID NO: 3072840 - RNA, 19 nt, Artificial Sequence
  Description of Artificial Sequence: Synthetic oligonucleotide
uuugucauugucuguaagc

SEQ ID NO: 3072841 - RNA, 19 nt, Artificial Sequence
  Description of Artificial Sequence: Synthetic oligonucleotide
acuguugccuuauagagca

SEQ ID NO: 3072842 - RNA, 19 nt, Artificial Sequence
  Description of Artificial Sequence: Synthetic oligonucleotide
uugucauugucuguaagcg

SEQ ID NO: 3072843 - RNA, 19 nt, Artificial Sequence
  Description of Artificial Sequence: Synthetic oligonucleotide
acaccuuagacuugagggc

SEQ ID NO: 3072844 - RNA, 19 nt, Artificial Sequence
  Description of Artificial Sequence: Synthetic oligonucleotide
cuuaaugucugucuugaag

SEQ ID NO: 3072845 - RNA, 19 nt, Artificial Sequence
  Description of Artificial Sequence: Synthetic oligonucleotide
ucauucuccagaccgaaca

SEQ ID NO: 3072846 - RNA, 19 nt, Artificial Sequence
  Description of Artificial Sequence: Synthetic oligonucleotide
caccauauagccaagggug

SEQ ID NO: 3072847 - RNA, 19 nt, Artificial Sequence
  Description of Artificial Sequence: Synthetic oligonucleotide
cuugaagccuucuacuucc

SEQ ID NO: 3072848 - RNA, 19 nt, Artificial Sequence
  Description of Artificial Sequence: Synthetic oligonucleotide
ucgaagaaccuuaaugucu

SEQ ID NO: 3072849 - RNA, 19 nt, Artificial Sequence
  Description of Artificial Sequence: Synthetic oligonucleotide
aauggcaagguccugguuu

SEQ ID NO: 3072850 - RNA, 19 nt, Artificial Sequence
  Description of Artificial Sequence: Synthetic oligonucleotide
acacagaauggcaaggucc

SEQ ID NO: 3072851 - RNA, 19 nt, Artificial Sequence
  Description of Artificial Sequence: Synthetic oligonucleotide
gaacuuaaaguagacauca

SEQ ID NO: 3072852 - RNA, 19 nt, Artificial Sequence
  Description of Artificial Sequence: Synthetic oligonucleotide
aagccuucuacuuccagca

SEQ ID NO: 3072853 - RNA, 19 nt, Artificial Sequence
  Description of Artificial Sequence: Synthetic oligonucleotide
ugccuuauagagcauuugc

SEQ ID NO: 3072854 - RNA, 19 nt, Artificial Sequence
  Description of Artificial Sequence: Synthetic oligonucleotide
uucacuguugccuuauaga

SEQ ID NO: 3072855 - RNA, 19 nt, Artificial Sequence
  Description of Artificial Sequence: Synthetic oligonucleotide
uuauagagcauuugcucca

SEQ ID NO: 3072856 - RNA, 19 nt, Artificial Sequence
  Description of Artificial Sequence: Synthetic oligonucleotide
auagcguuuugucauuguc

SEQ ID NO: 3072857 - RNA, 19 nt, Artificial Sequence
  Description of Artificial Sequence: Synthetic oligonucleotide
cugucgaagaaccuuaaug

SEQ ID NO: 3072858 - RNA, 19 nt, Artificial Sequence
  Description of Artificial Sequence: Synthetic oligonucleotide
agaaccuuaaugucugucu

SEQ ID NO: 3072859 - RNA, 19 nt, Artificial Sequence
  Description of Artificial Sequence: Synthetic oligonucleotide
aucaacacagccugagauc

SEQ ID NO: 3072860 - RNA, 19 nt, Artificial Sequence
  Description of Artificial Sequence: Synthetic oligonucleotide
agaccgaacaccuuagacu

SEQ ID NO: 3072861 - RNA, 19 nt, Artificial Sequence
  Description of Artificial Sequence: Synthetic oligonucleotide
ucaccauauagccaagggu

SEQ ID NO: 3072862 - RNA, 19 nt, Artificial Sequence
  Description of Artificial Sequence: Synthetic oligonucleotide
gaagccuucuacuuccagc

SEQ ID NO: 3072863 - RNA, 19 nt, Artificial Sequence
  Description of Artificial Sequence: Synthetic oligonucleotide
agcguuuugucauugucug

SEQ ID NO: 3072864 - RNA, 19 nt, Artificial Sequence
  Description of Artificial Sequence: Synthetic oligonucleotide
uuuugucauugucuguaag

SEQ ID NO: 3072865 - RNA, 19 nt, Artificial Sequence
  Description of Artificial Sequence: Synthetic oligonucleotide
agagcauuugcuccagguc

SEQ ID NO: 3072866 - RNA, 19 nt, Artificial Sequence
  Description of Artificial Sequence: Synthetic oligonucleotide
uuaugugcucgucuauugc

SEQ ID NO: 3072867 - RNA, 19 nt, Artificial Sequence
  Description of Artificial Sequence: Synthetic oligonucleotide
gaacaccuuagacuugagg

SEQ ID NO: 3072868 - RNA, 19 nt, Artificial Sequence
  Description of Artificial Sequence: Synthetic oligonucleotide
auauagccaagggugaacg

SEQ ID NO: 3072869 - RNA, 19 nt, Artificial Sequence
  Description of Artificial Sequence: Synthetic oligonucleotide
aagaaccuuaaugucuguc

SEQ ID NO: 3072870 - RNA, 19 nt, Artificial Sequence
  Description of Artificial Sequence: Synthetic oligonucleotide
auucacuguugccuuauag

SEQ ID NO: 3072871 - RNA, 19 nt, Artificial Sequence
  Description of Artificial Sequence: Synthetic oligonucleotide
auugcugucacgaacuuca

SEQ ID NO: 3072872 - RNA, 19 nt, Artificial Sequence
  Description of Artificial Sequence: Synthetic oligonucleotide
auugucuguaagcgcuugc

SEQ ID NO: 3072873 - RNA, 19 nt, Artificial Sequence
  Description of Artificial Sequence: Synthetic oligonucleotide
ucgucuauugcugucacga

SEQ ID NO: 3072874 - RNA, 19 nt, Artificial Sequence
  Description of Artificial Sequence: Synthetic oligonucleotide
aaguagacaucaacacagc

SEQ ID NO: 3072875 - RNA, 19 nt, Artificial Sequence
  Description of Artificial Sequence: Synthetic oligonucleotide
ucacgaacuucacacagaa

SEQ ID NO: 3072876 - RNA, 19 nt, Artificial Sequence
  Description of Artificial Sequence: Synthetic oligonucleotide
gaacgugaacuuaaaguag

SEQ ID NO: 3072877 - RNA, 19 nt, Artificial Sequence
  Description of Artificial Sequence: Synthetic oligonucleotide
acagccugagaucauucuc

SEQ ID NO: 3072878 - RNA, 19 nt, Artificial Sequence
  Description of Artificial Sequence: Synthetic oligonucleotide
ugucuugaagccuucuacu

SEQ ID NO: 3072879 - RNA, 19 nt, Artificial Sequence
  Description of Artificial Sequence: Synthetic oligonucleotide
uaugugcucgucuauugcu

SEQ ID NO: 3072880 - RNA, 19 nt, Artificial Sequence
  Description of Artificial Sequence: Synthetic oligonucleotide
uagcguuuugucauugucu

SEQ ID NO: 3072881 - RNA, 19 nt, Artificial Sequence
  Description of Artificial Sequence: Synthetic oligonucleotide
cucaccauauagccaaggg

SEQ ID NO: 3072882 - RNA, 19 nt, Artificial Sequence
  Description of Artificial Sequence: Synthetic oligonucleotide
gugaacuuaaaguagacau

SEQ ID NO: 3072883 - RNA, 19 nt, Artificial Sequence
  Description of Artificial Sequence: Synthetic oligonucleotide
aacgugaacuuaaaguaga

SEQ ID NO: 3072884 - RNA, 19 nt, Artificial Sequence
  Description of Artificial Sequence: Synthetic oligonucleotide
aggucucucagcuucuguc

SEQ ID NO: 3072885 - RNA, 19 nt, Artificial Sequence
  Description of Artificial Sequence: Synthetic oligonucleotide
uucacacagaauggcaagg

SEQ ID NO: 3072886 - RNA, 19 nt, Artificial Sequence
  Description of Artificial Sequence: Synthetic oligonucleotide
uuuucccggguauucacug

SEQ ID NO: 3072887 - RNA, 19 nt, Artificial Sequence
  Description of Artificial Sequence: Synthetic oligonucleotide
ucuugaagccuucuacuuc

SEQ ID NO: 3072888 - RNA, 19 nt, Artificial Sequence
  Description of Artificial Sequence: Synthetic oligonucleotide
cuuaugugcucgucuauug

SEQ ID NO: 3072889 - RNA, 19 nt, Artificial Sequence
  Description of Artificial Sequence: Synthetic oligonucleotide
ugucuguaagcgcuugccc

SEQ ID NO: 3072890 - RNA, 19 nt, Artificial Sequence
  Description of Artificial Sequence: Synthetic oligonucleotide
gcugucacgaacuucacac

SEQ ID NO: 3072891 - RNA, 19 nt, Artificial Sequence
  Description of Artificial Sequence: Synthetic oligonucleotide
cagccugagaucauucucc

SEQ ID NO: 3072892 - RNA, 19 nt, Artificial Sequence
  Description of Artificial Sequence: Synthetic oligonucleotide
ugucauugucuguaagcgc

SEQ ID NO: 3072893 - RNA, 19 nt, Artificial Sequence
  Description of Artificial Sequence: Synthetic oligonucleotide
gugaacgugaacuuaaagu

SEQ ID NO: 3072894 - RNA, 19 nt, Artificial Sequence
  Description of Artificial Sequence: Synthetic oligonucleotide
uucuacuuccagcaugcgu

SEQ ID NO: 3072895 - RNA, 19 nt, Artificial Sequence
  Description of Artificial Sequence: Synthetic oligonucleotide
gacaucaacacagccugag

SEQ ID NO: 3072896 - RNA, 19 nt, Artificial Sequence
  Description of Artificial Sequence: Synthetic oligonucleotide
cagcuucugucgaagaacc

SEQ ID NO: 3072897 - RNA, 19 nt, Artificial Sequence
  Description of Artificial Sequence: Synthetic oligonucleotide
uaucuuaugugcucgucua

SEQ ID NO: 3072898 - RNA, 19 nt, Artificial Sequence
  Description of Artificial Sequence: Synthetic oligonucleotide
uagagcauuugcuccaggu

SEQ ID NO: 3072899 - RNA, 19 nt, Artificial Sequence
  Description of Artificial Sequence: Synthetic oligonucleotide
caugcgucgaugcuccagg

SEQ ID NO: 3072900 - RNA, 19 nt, Artificial Sequence
  Description of Artificial Sequence: Synthetic oligonucleotide
cugucuugaagccuucuac

SEQ ID NO: 3072901 - RNA, 19 nt, Artificial Sequence
  Description of Artificial Sequence: Synthetic oligonucleotide
gaacuucacacagaauggc

SEQ ID NO: 3072902 - RNA, 19 nt, Artificial Sequence
  Description of Artificial Sequence: Synthetic oligonucleotide
uagccaagggugaacguga

SEQ ID NO: 3072903 - RNA, 19 nt, Artificial Sequence
  Description of Artificial Sequence: Synthetic oligonucleotide
cugagaucauucuccagac

SEQ ID NO: 3072904 - RNA, 19 nt, Artificial Sequence
  Description of Artificial Sequence: Synthetic oligonucleotide
ucagcuucugucgaagaac

SEQ ID NO: 3072905 - RNA, 19 nt, Artificial Sequence
  Description of Artificial Sequence: Synthetic oligonucleotide
aaugucugucuugaagccu

SEQ ID NO: 3072906 - RNA, 19 nt, Artificial Sequence
  Description of Artificial Sequence: Synthetic oligonucleotide
cacuguugccuuauagagc

SEQ ID NO: 3072907 - RNA, 19 nt, Artificial Sequence
  Description of Artificial Sequence: Synthetic oligonucleotide
uccagaccgaacaccuuag

SEQ ID NO: 3072908 - RNA, 19 nt, Artificial Sequence
  Description of Artificial Sequence: Synthetic oligonucleotide
ugagaucauucuccagacc

SEQ ID NO: 3072909 - RNA, 19 nt, Artificial Sequence
  Description of Artificial Sequence: Synthetic oligonucleotide
aacuucacacagaauggca

SEQ ID NO: 3072910 - RNA, 19 nt, Artificial Sequence
  Description of Artificial Sequence: Synthetic oligonucleotide
auagccaagggugaacgug

SEQ ID NO: 3072911 - RNA, 19 nt, Artificial Sequence
  Description of Artificial Sequence: Synthetic oligonucleotide
uugucuguaagcgcuugcc

SEQ ID NO: 3072912 - RNA, 19 nt, Artificial Sequence
  Description of Artificial Sequence: Synthetic oligonucleotide
auuugcuccaggucucuca

SEQ ID NO: 3072913 - RNA, 19 nt, Artificial Sequence
  Description of Artificial Sequence: Synthetic oligonucleotide
cagaauggcaagguccugg

SEQ ID NO: 3072914 - RNA, 19 nt, Artificial Sequence
  Description of Artificial Sequence: Synthetic oligonucleotide
caagguccugguuuucccg

SEQ ID NO: 3072915 - RNA, 19 nt, Artificial Sequence
  Description of Artificial Sequence: Synthetic oligonucleotide
ugaagccuucuacuuccag

SEQ ID NO: 3072916 - RNA, 19 nt, Artificial Sequence
  Description of Artificial Sequence: Synthetic oligonucleotide
uagacuugagggccuucag

SEQ ID NO: 3072917 - RNA, 19 nt, Artificial Sequence
  Description of Artificial Sequence: Synthetic oligonucleotide
gagcauuugcuccaggucu

SEQ ID NO: 3072918 - RNA, 19 nt, Artificial Sequence
  Description of Artificial Sequence: Synthetic oligonucleotide
cuacuuccagcaugcgucg

SEQ ID NO: 3072919 - RNA, 19 nt, Artificial Sequence
  Description of Artificial Sequence: Synthetic oligonucleotide
gucgaagaaccuuaauguc

SEQ ID NO: 3072920 - RNA, 19 nt, Artificial Sequence
  Description of Artificial Sequence: Synthetic oligonucleotide
uauagagcauuugcuccag

SEQ ID NO: 3072921 - RNA, 19 nt, Artificial Sequence
  Description of Artificial Sequence: Synthetic oligonucleotide
caccuuagacuugagggcc

SEQ ID NO: 3072922 - RNA, 19 nt, Artificial Sequence
  Description of Artificial Sequence: Synthetic oligonucleotide
augcuccagggcuucauag

SEQ ID NO: 3072923 - RNA, 19 nt, Artificial Sequence
  Description of Artificial Sequence: Synthetic oligonucleotide
ggucucucagcuucugucg

SEQ ID NO: 3072924 - RNA, 19 nt, Artificial Sequence
  Description of Artificial Sequence: Synthetic oligonucleotide
cagaccgaacaccuuagac

SEQ ID NO: 3072925 - RNA, 19 nt, Artificial Sequence
  Description of Artificial Sequence: Synthetic oligonucleotide
ucuguaagcgcuugcccau

SEQ ID NO: 3072926 - RNA, 19 nt, Artificial Sequence
  Description of Artificial Sequence: Synthetic oligonucleotide
ucugucuugaagccuucua

SEQ ID NO: 3072927 - RNA, 19 nt, Artificial Sequence
  Description of Artificial Sequence: Synthetic oligonucleotide
ccuuauagagcauuugcuc

SEQ ID NO: 3072928 - RNA, 19 nt, Artificial Sequence
  Description of Artificial Sequence: Synthetic oligonucleotide
gucuguaagcgcuugccca

SEQ ID NO: 3072929 - RNA, 19 nt, Artificial Sequence
  Description of Artificial Sequence: Synthetic oligonucleotide
ugugcucgucuauugcugu

SEQ ID NO: 3072930 - RNA, 19 nt, Artificial Sequence
  Description of Artificial Sequence: Synthetic oligonucleotide
agaauggcaagguccuggu

SEQ ID NO: 3072931 - RNA, 19 nt, Artificial Sequence
  Description of Artificial Sequence: Synthetic oligonucleotide
cagcaugcgucgaugcucc

SEQ ID NO: 3072932 - RNA, 19 nt, Artificial Sequence
  Description of Artificial Sequence: Synthetic oligonucleotide
ggugaacgugaacuuaaag

SEQ ID NO: 3072933 - RNA, 19 nt, Artificial Sequence
  Description of Artificial Sequence: Synthetic oligonucleotide
gcuccagggcuucauagcg

SEQ ID NO: 3072934 - RNA, 19 nt, Artificial Sequence
  Description of Artificial Sequence: Synthetic oligonucleotide
ugcugucacgaacuucaca

SEQ ID NO: 3072935 - RNA, 19 nt, Artificial Sequence
  Description of Artificial Sequence: Synthetic oligonucleotide
ccuucuacuuccagcaugc

SEQ ID NO: 3072936 - RNA, 19 nt, Artificial Sequence
  Description of Artificial Sequence: Synthetic oligonucleotide
ucgcccuguaucuuaugug

SEQ ID NO: 3072937 - RNA, 19 nt, Artificial Sequence
  Description of Artificial Sequence: Synthetic oligonucleotide
uguaagcgcuugcccaucu

SEQ ID NO: 3072938 - RNA, 19 nt, Artificial Sequence
  Description of Artificial Sequence: Synthetic oligonucleotide
auagagcauuugcuccagg

SEQ ID NO: 3072939 - RNA, 19 nt, Artificial Sequence
  Description of Artificial Sequence: Synthetic oligonucleotide
ucacacagaauggcaaggu

SEQ ID NO: 3072940 - RNA, 19 nt, Artificial Sequence
  Description of Artificial Sequence: Synthetic oligonucleotide
acgugaacuuaaaguagac

SEQ ID NO: 3072941 - RNA, 19 nt, Artificial Sequence
  Description of Artificial Sequence: Synthetic oligonucleotide
gaccgaacaccuuagacuu

SEQ ID NO: 3072942 - RNA, 19 nt, Artificial Sequence
  Description of Artificial Sequence: Synthetic oligonucleotide
uuccagcaugcgucgaugc

SEQ ID NO: 3072943 - RNA, 19 nt, Artificial Sequence
  Description of Artificial Sequence: Synthetic oligonucleotide
cgaacuucacacagaaugg

SEQ ID NO: 3072944 - RNA, 19 nt, Artificial Sequence
  Description of Artificial Sequence: Synthetic oligonucleotide
ucauagcguuuugucauug

SEQ ID NO: 3072945 - RNA, 19 nt, Artificial Sequence
  Description of Artificial Sequence: Synthetic oligonucleotide
uauagccaagggugaacgu

SEQ ID NO: 3072946 - RNA, 19 nt, Artificial Sequence
  Description of Artificial Sequence: Synthetic oligonucleotide
acaucaacacagccugaga

SEQ ID NO: 3072947 - RNA, 19 nt, Artificial Sequence
  Description of Artificial Sequence: Synthetic oligonucleotide
cuucauagcguuuugucau

SEQ ID NO: 3072948 - RNA, 19 nt, Artificial Sequence
  Description of Artificial Sequence: Synthetic oligonucleotide
ucugucgaagaaccuuaau

SEQ ID NO: 3072949 - RNA, 19 nt, Artificial Sequence
  Description of Artificial Sequence: Synthetic oligonucleotide
ugcgucgaugcuccagggc

SEQ ID NO: 3072950 - RNA, 19 nt, Artificial Sequence
  Description of Artificial Sequence: Synthetic oligonucleotide
uccagcaugcgucgaugcu

SEQ ID NO: 3072951 - RNA, 19 nt, Artificial Sequence
  Description of Artificial Sequence: Synthetic oligonucleotide
ucuuaugugcucgucuauu

SEQ ID NO: 3072952 - RNA, 19 nt, Artificial Sequence
  Description of Artificial Sequence: Synthetic oligonucleotide
cuucagcucgcccuguauc

SEQ ID NO: 3072953 - RNA, 19 nt, Artificial Sequence
  Description of Artificial Sequence: Synthetic oligonucleotide
uguaucuuaugugcucguc

SEQ ID NO: 3072954 - RNA, 19 nt, Artificial Sequence
  Description of Artificial Sequence: Synthetic oligonucleotide
agcauuugcuccaggucuc

SEQ ID NO: 3072955 - RNA, 19 nt, Artificial Sequence
  Description of Artificial Sequence: Synthetic oligonucleotide
acucaccauauagccaagg

SEQ ID NO: 3072956 - RNA, 19 nt, Artificial Sequence
  Description of Artificial Sequence: Synthetic oligonucleotide
guagacaucaacacagccu

SEQ ID NO: 3072957 - RNA, 19 nt, Artificial Sequence
  Description of Artificial Sequence: Synthetic oligonucleotide
uugccuuauagagcauuug

SEQ ID NO: 3072958 - RNA, 19 nt, Artificial Sequence
  Description of Artificial Sequence: Synthetic oligonucleotide
acuucacacagaauggcaa

SEQ ID NO: 3072959 - RNA, 19 nt, Artificial Sequence
  Description of Artificial Sequence: Synthetic oligonucleotide
ucucagcuucugucgaaga

SEQ ID NO: 3072960 - RNA, 19 nt, Artificial Sequence
  Description of Artificial Sequence: Synthetic oligonucleotide
gcuucauagcguuuuguca

SEQ ID NO: 3072961 - RNA, 19 nt, Artificial Sequence
  Description of Artificial Sequence: Synthetic oligonucleotide
guaucuuaugugcucgucu

SEQ ID NO: 3072962 - RNA, 19 nt, Artificial Sequence
  Description of Artificial Sequence: Synthetic oligonucleotide
ugcucgucuauugcuguca

SEQ ID NO: 3072963 - RNA, 19 nt, Artificial Sequence
  Description of Artificial Sequence: Synthetic oligonucleotide
cacacagaauggcaagguc

SEQ ID NO: 3072964 - RNA, 19 nt, Artificial Sequence
  Description of Artificial Sequence: Synthetic oligonucleotide
gucauugucuguaagcgcu

SEQ ID NO: 3072965 - RNA, 19 nt, Artificial Sequence
  Description of Artificial Sequence: Synthetic oligonucleotide
agguccugguuuucccggg

SEQ ID NO: 3072966 - RNA, 19 nt, Artificial Sequence
  Description of Artificial Sequence: Synthetic oligonucleotide
cucgucuauugcugucacg

SEQ ID NO: 3072967 - RNA, 19 nt, Artificial Sequence
  Description of Artificial Sequence: Synthetic oligonucleotide
aacacagccugagaucauu

SEQ ID NO: 3072968 - RNA, 19 nt, Artificial Sequence
  Description of Artificial Sequence: Synthetic oligonucleotide
uguugccuuauagagcauu

SEQ ID NO: 3072969 - RNA, 19 nt, Artificial Sequence
  Description of Artificial Sequence: Synthetic oligonucleotide
cuucugucgaagaaccuua

SEQ ID NO: 3072970 - RNA, 19 nt, Artificial Sequence
  Description of Artificial Sequence: Synthetic oligonucleotide
ccuguaucuuaugugcucg

SEQ ID NO: 3072971 - RNA, 19 nt, Artificial Sequence
  Description of Artificial Sequence: Synthetic oligonucleotide
uauugcugucacgaacuuc

SEQ ID NO: 3072972 - RNA, 19 nt, Artificial Sequence
  Description of Artificial Sequence: Synthetic oligonucleotide
aagggugaacgugaacuua

SEQ ID NO: 3072973 - RNA, 19 nt, Artificial Sequence
  Description of Artificial Sequence: Synthetic oligonucleotide
uccagggcuucauagcguu

SEQ ID NO: 3072974 - RNA, 19 nt, Artificial Sequence
  Description of Artificial Sequence: Synthetic oligonucleotide
ccugagaucauucuccaga

SEQ ID NO: 3072975 - RNA, 19 nt, Artificial Sequence
  Description of Artificial Sequence: Synthetic oligonucleotide
uugaagccuucuacuucca

SEQ ID NO: 3072976 - RNA, 19 nt, Artificial Sequence
  Description of Artificial Sequence: Synthetic oligonucleotide
uugagggccuucagcucgc

SEQ ID NO: 3072977 - RNA, 19 nt, Artificial Sequence
  Description of Artificial Sequence: Synthetic oligonucleotide
ucccggguauucacuguug

SEQ ID NO: 3072978 - RNA, 19 nt, Artificial Sequence
  Description of Artificial Sequence: Synthetic oligonucleotide
uuucccggguauucacugu

SEQ ID NO: 3072979 - RNA, 19 nt, Artificial Sequence
  Description of Artificial Sequence: Synthetic oligonucleotide
uucauagcguuuugucauu

SEQ ID NO: 3072980 - RNA, 19 nt, Artificial Sequence
  Description of Artificial Sequence: Synthetic oligonucleotide
uccugguuuucccggguau

SEQ ID NO: 3072981 - RNA, 19 nt, Artificial Sequence
  Description of Artificial Sequence: Synthetic oligonucleotide
augcgucgaugcuccaggg

SEQ ID NO: 3072982 - RNA, 19 nt, Artificial Sequence
  Description of Artificial Sequence: Synthetic oligonucleotide
ggcuucauagcguuuuguc

SEQ ID NO: 3072983 - RNA, 19 nt, Artificial Sequence
  Description of Artificial Sequence: Synthetic oligonucleotide
uucccggguauucacuguu

SEQ ID NO: 3072984 - RNA, 19 nt, Artificial Sequence
  Description of Artificial Sequence: Synthetic oligonucleotide
auggcaagguccugguuuu

SEQ ID NO: 3072985 - RNA, 19 nt, Artificial Sequence
  Description of Artificial Sequence: Synthetic oligonucleotide
ucauugucuguaagcgcuu

SEQ ID NO: 3072986 - RNA, 19 nt, Artificial Sequence
  Description of Artificial Sequence: Synthetic oligonucleotide
ugguuuucccggguauuca

SEQ ID NO: 3072987 - RNA, 19 nt, Artificial Sequence
  Description of Artificial Sequence: Synthetic oligonucleotide
aucuuaugugcucgucuau

SEQ ID NO: 3072988 - RNA, 19 nt, Artificial Sequence
  Description of Artificial Sequence: Synthetic oligonucleotide
gaucauucuccagaccgaa

SEQ ID NO: 3072989 - RNA, 19 nt, Artificial Sequence
  Description of Artificial Sequence: Synthetic oligonucleotide
acacagccugagaucauuc

SEQ ID NO: 3072990 - RNA, 19 nt, Artificial Sequence
  Description of Artificial Sequence: Synthetic oligonucleotide
cucucagcuucugucgaag

SEQ ID NO: 3072991 - RNA, 19 nt, Artificial Sequence
  Description of Artificial Sequence: Synthetic oligonucleotide
acuuccagcaugcgucgau

SEQ ID NO: 3072992 - RNA, 19 nt, Artificial Sequence
  Description of Artificial Sequence: Synthetic oligonucleotide
guuuugucauugucuguaa

SEQ ID NO: 3072993 - RNA, 19 nt, Artificial Sequence
  Description of Artificial Sequence: Synthetic oligonucleotide
gaaccuuaaugucugucuu

SEQ ID NO: 3072994 - RNA, 19 nt, Artificial Sequence
  Description of Artificial Sequence: Synthetic oligonucleotide
agaucauucuccagaccga

SEQ ID NO: 3072995 - RNA, 19 nt, Artificial Sequence
  Description of Artificial Sequence: Synthetic oligonucleotide
augugcucgucuauugcug

SEQ ID NO: 3072996 - RNA, 19 nt, Artificial Sequence
  Description of Artificial Sequence: Synthetic oligonucleotide
caucaacacagccugagau

SEQ ID NO: 3072997 - RNA, 19 nt, Artificial Sequence
  Description of Artificial Sequence: Synthetic oligonucleotide
ucucucagcuucugucgaa

SEQ ID NO: 3072998 - RNA, 19 nt, Artificial Sequence
  Description of Artificial Sequence: Synthetic oligonucleotide
cacagaauggcaagguccu

SEQ ID NO: 3072999 - RNA, 19 nt, Artificial Sequence
  Description of Artificial Sequence: Synthetic oligonucleotide
gccuucuacuuccagcaug

SEQ ID NO: 3073000 - RNA, 19 nt, Artificial Sequence
  Description of Artificial Sequence: Synthetic oligonucleotide
gguuuucccggguauucac

SEQ ID NO: 3073001 - RNA, 19 nt, Artificial Sequence
  Description of Artificial Sequence: Synthetic oligonucleotide
uauucacuguugccuuaua

SEQ ID NO: 3073002 - RNA, 19 nt, Artificial Sequence
  Description of Artificial Sequence: Synthetic oligonucleotide
cauugucuguaagcgcuug

SEQ ID NO: 3073003 - RNA, 19 nt, Artificial Sequence
  Description of Artificial Sequence: Synthetic oligonucleotide
cugguuuucccggguauuc

SEQ ID NO: 3073004 - RNA, 19 nt, Artificial Sequence
  Description of Artificial Sequence: Synthetic oligonucleotide
agggugaacgugaacuuaa

SEQ ID NO: 3073005 - RNA, 19 nt, Artificial Sequence
  Description of Artificial Sequence: Synthetic oligonucleotide
cgcccuguaucuuaugugc

SEQ ID NO: 3073006 - RNA, 19 nt, Artificial Sequence
  Description of Artificial Sequence: Synthetic oligonucleotide
cuuccagcaugcgucgaug

SEQ ID NO: 3073007 - RNA, 19 nt, Artificial Sequence
  Description of Artificial Sequence: Synthetic oligonucleotide
gucucucagcuucugucga

SEQ ID NO: 3073008 - RNA, 19 nt, Artificial Sequence
  Description of Artificial Sequence: Synthetic oligonucleotide
gcaagguccugguuuuccc

SEQ ID NO: 3073009 - RNA, 19 nt, Artificial Sequence
  Description of Artificial Sequence: Synthetic oligonucleotide
uugcugucacgaacuucac

SEQ ID NO: 3073010 - RNA, 19 nt, Artificial Sequence
  Description of Artificial Sequence: Synthetic oligonucleotide
cucagcuucugucgaagaa

SEQ ID NO: 3073011 - RNA, 19 nt, Artificial Sequence
  Description of Artificial Sequence: Synthetic oligonucleotide
cugucacgaacuucacaca

SEQ ID NO: 3073012 - RNA, 19 nt, Artificial Sequence
  Description of Artificial Sequence: Synthetic oligonucleotide
cuccagaccgaacaccuua

SEQ ID NO: 3073013 - RNA, 19 nt, Artificial Sequence
  Description of Artificial Sequence: Synthetic oligonucleotide
ucuccagaccgaacaccuu

SEQ ID NO: 3073014 - RNA, 19 nt, Artificial Sequence
  Description of Artificial Sequence: Synthetic oligonucleotide
gagggccuucagcucgccc

SEQ ID NO: 3073015 - RNA, 19 nt, Artificial Sequence
  Description of Artificial Sequence: Synthetic oligonucleotide
acagaauggcaagguccug

SEQ ID NO: 3073016 - RNA, 19 nt, Artificial Sequence
  Description of Artificial Sequence: Synthetic oligonucleotide
gucuugaagccuucuacuu

SEQ ID NO: 3073017 - RNA, 19 nt, Artificial Sequence
  Description of Artificial Sequence: Synthetic oligonucleotide
ggcaagguccugguuuucc

SEQ ID NO: 3073018 - RNA, 19 nt, Artificial Sequence
  Description of Artificial Sequence: Synthetic oligonucleotide
ccggguauucacuguugcc

SEQ ID NO: 3073019 - RNA, 19 nt, Artificial Sequence
  Description of Artificial Sequence: Synthetic oligonucleotide
cccggguauucacuguugc

SEQ ID NO: 3073020 - RNA, 19 nt, Artificial Sequence
  Description of Artificial Sequence: Synthetic oligonucleotide
cccuguaucuuaugugcuc

SEQ ID NO: 3073021 - RNA, 19 nt, Artificial Sequence
  Description of Artificial Sequence: Synthetic oligonucleotide
ccaagggugaacgugaacu

SEQ ID NO: 3073022 - RNA, 19 nt, Artificial Sequence
  Description of Artificial Sequence: Synthetic oligonucleotide
cucgcccuguaucuuaugu

SEQ ID NO: 3073023 - RNA, 19 nt, Artificial Sequence
  Description of Artificial Sequence: Synthetic oligonucleotide
uacuuccagcaugcgucga

SEQ ID NO: 3073024 - RNA, 19 nt, Artificial Sequence
  Description of Artificial Sequence: Synthetic oligonucleotide
cuuagacuugagggccuuc

SEQ ID NO: 3073025 - RNA, 19 nt, Artificial Sequence
  Description of Artificial Sequence: Synthetic oligonucleotide
accuuagacuugagggccu

SEQ ID NO: 3073026 - RNA, 19 nt, Artificial Sequence
  Description of Artificial Sequence: Synthetic oligonucleotide
gugcucgucuauugcuguc

SEQ ID NO: 3073027 - RNA, 19 nt, Artificial Sequence
  Description of Artificial Sequence: Synthetic oligonucleotide
cauagcguuuugucauugu

SEQ ID NO: 3073028 - RNA, 19 nt, Artificial Sequence
  Description of Artificial Sequence: Synthetic oligonucleotide
gcgucgaugcuccagggcu

SEQ ID NO: 3073029 - RNA, 19 nt, Artificial Sequence
  Description of Artificial Sequence: Synthetic oligonucleotide
ucagcucgcccuguaucuu

SEQ ID NO: 3073030 - RNA, 19 nt, Artificial Sequence
  Description of Artificial Sequence: Synthetic oligonucleotide
agcuucugucgaagaaccu

SEQ ID NO: 3073031 - RNA, 19 nt, Artificial Sequence
  Description of Artificial Sequence: Synthetic oligonucleotide
cauuugcuccaggucucuc

SEQ ID NO: 3073032 - RNA, 19 nt, Artificial Sequence
  Description of Artificial Sequence: Synthetic oligonucleotide
gccugagaucauucuccag

SEQ ID NO: 3073033 - RNA, 19 nt, Artificial Sequence
  Description of Artificial Sequence: Synthetic oligonucleotide
gcucgucuauugcugucac

SEQ ID NO: 3073034 - RNA, 19 nt, Artificial Sequence
  Description of Artificial Sequence: Synthetic oligonucleotide
agacaucaacacagccuga

SEQ ID NO: 3073035 - RNA, 19 nt, Artificial Sequence
  Description of Artificial Sequence: Synthetic oligonucleotide
cacagccugagaucauucu

SEQ ID NO: 3073036 - RNA, 19 nt, Artificial Sequence
  Description of Artificial Sequence: Synthetic oligonucleotide
ccagcaugcgucgaugcuc

SEQ ID NO: 3073037 - RNA, 19 nt, Artificial Sequence
  Description of Artificial Sequence: Synthetic oligonucleotide
gguauucacuguugccuua

SEQ ID NO: 3073038 - RNA, 19 nt, Artificial Sequence
  Description of Artificial Sequence: Synthetic oligonucleotide
accgaacaccuuagacuug

SEQ ID NO: 3073039 - RNA, 19 nt, Artificial Sequence
  Description of Artificial Sequence: Synthetic oligonucleotide
gccuuauagagcauuugcu

SEQ ID NO: 3073040 - RNA, 19 nt, Artificial Sequence
  Description of Artificial Sequence: Synthetic oligonucleotide
caagggugaacgugaacuu

SEQ ID NO: 3073041 - RNA, 19 nt, Artificial Sequence
  Description of Artificial Sequence: Synthetic oligonucleotide
cuguaagcgcuugcccauc

SEQ ID NO: 3073042 - RNA, 19 nt, Artificial Sequence
  Description of Artificial Sequence: Synthetic oligonucleotide
gucgaugcuccagggcuuc

SEQ ID NO: 3073043 - RNA, 19 nt, Artificial Sequence
  Description of Artificial Sequence: Synthetic oligonucleotide
guuuucccggguauucacu

SEQ ID NO: 3073044 - RNA, 19 nt, Artificial Sequence
  Description of Artificial Sequence: Synthetic oligonucleotide
gcaugcgucgaugcuccag

SEQ ID NO: 3073045 - RNA, 19 nt, Artificial Sequence
  Description of Artificial Sequence: Synthetic oligonucleotide
guugccuuauagagcauuu

SEQ ID NO: 3073046 - RNA, 19 nt, Artificial Sequence
  Description of Artificial Sequence: Synthetic oligonucleotide
guauucacuguugccuuau

SEQ ID NO: 3073047 - RNA, 19 nt, Artificial Sequence
  Description of Artificial Sequence: Synthetic oligonucleotide
cuguaucuuaugugcucgu

SEQ ID NO: 3073048 - RNA, 19 nt, Artificial Sequence
  Description of Artificial Sequence: Synthetic oligonucleotide
ugagggccuucagcucgcc

SEQ ID NO: 3073049 - RNA, 19 nt, Artificial Sequence
  Description of Artificial Sequence: Synthetic oligonucleotide
ucgaugcuccagggcuuca

SEQ ID NO: 3073050 - RNA, 19 nt, Artificial Sequence
  Description of Artificial Sequence: Synthetic oligonucleotide
ccgaacaccuuagacuuga

SEQ ID NO: 3073051 - RNA, 19 nt, Artificial Sequence
  Description of Artificial Sequence: Synthetic oligonucleotide
agcaugcgucgaugcucca

SEQ ID NO: 3073052 - RNA, 19 nt, Artificial Sequence
  Description of Artificial Sequence: Synthetic oligonucleotide
guccugguuuucccgggua

SEQ ID NO: 3073053 - RNA, 19 nt, Artificial Sequence
  Description of Artificial Sequence: Synthetic oligonucleotide
cguuuugucauugucugua

SEQ ID NO: 3073054 - RNA, 19 nt, Artificial Sequence
  Description of Artificial Sequence: Synthetic oligonucleotide
gaauggcaagguccugguu

SEQ ID NO: 3073055 - RNA, 19 nt, Artificial Sequence
  Description of Artificial Sequence: Synthetic oligonucleotide
gccaagggugaacgugaac

SEQ ID NO: 3073056 - RNA, 19 nt, Artificial Sequence
  Description of Artificial Sequence: Synthetic oligonucleotide
cgugaacuuaaaguagaca

SEQ ID NO: 3073057 - RNA, 19 nt, Artificial Sequence
  Description of Artificial Sequence: Synthetic oligonucleotide
ggguauucacuguugccuu

SEQ ID NO: 3073058 - RNA, 19 nt, Artificial Sequence
  Description of Artificial Sequence: Synthetic oligonucleotide
agcucgcccuguaucuuau

SEQ ID NO: 3073059 - RNA, 19 nt, Artificial Sequence
  Description of Artificial Sequence: Synthetic oligonucleotide
cuccagggcuucauagcgu

SEQ ID NO: 3073060 - RNA, 19 nt, Artificial Sequence
  Description of Artificial Sequence: Synthetic oligonucleotide
uggcaagguccugguuuuc

SEQ ID NO: 3073061 - RNA, 19 nt, Artificial Sequence
  Description of Artificial Sequence: Synthetic oligonucleotide
cagcucgcccuguaucuua

SEQ ID NO: 3073062 - RNA, 19 nt, Artificial Sequence
  Description of Artificial Sequence: Synthetic oligonucleotide
agccaagggugaacgugaa

SEQ ID NO: 3073063 - RNA, 19 nt, Artificial Sequence
  Description of Artificial Sequence: Synthetic oligonucleotide
gcuucugucgaagaaccuu

SEQ ID NO: 3073064 - RNA, 19 nt, Artificial Sequence
  Description of Artificial Sequence: Synthetic oligonucleotide
cuauugcugucacgaacuu

SEQ ID NO: 3073065 - RNA, 19 nt, Artificial Sequence
  Description of Artificial Sequence: Synthetic oligonucleotide
cagggcuucauagcguuuu

SEQ ID NO: 3073066 - RNA, 19 nt, Artificial Sequence
  Description of Artificial Sequence: Synthetic oligonucleotide
cgaacaccuuagacuugag

SEQ ID NO: 3073067 - RNA, 19 nt, Artificial Sequence
  Description of Artificial Sequence: Synthetic oligonucleotide
caggucucucagcuucugu

SEQ ID NO: 3073068 - RNA, 19 nt, Artificial Sequence
  Description of Artificial Sequence: Synthetic oligonucleotide
cacgaacuucacacagaau

SEQ ID NO: 3073069 - RNA, 19 nt, Artificial Sequence
  Description of Artificial Sequence: Synthetic oligonucleotide
gcucgcccuguaucuuaug

SEQ ID NO: 3073070 - RNA, 19 nt, Artificial Sequence
  Description of Artificial Sequence: Synthetic oligonucleotide
gggugaacgugaacuuaaa

SEQ ID NO: 3073071 - RNA, 19 nt, Artificial Sequence
  Description of Artificial Sequence: Synthetic oligonucleotide
ccuuaaugucugucuugaa

SEQ ID NO: 3073072 - RNA, 19 nt, Artificial Sequence
  Description of Artificial Sequence: Synthetic oligonucleotide
guaagcgcuugcccaucuu

SEQ ID NO: 3073073 - RNA, 19 nt, Artificial Sequence
  Description of Artificial Sequence: Synthetic oligonucleotide
ccagaccgaacaccuuaga

SEQ ID NO: 3073074 - RNA, 19 nt, Artificial Sequence
  Description of Artificial Sequence: Synthetic oligonucleotide
cggguauucacuguugccu

SEQ ID NO: 3073075 - RNA, 19 nt, Artificial Sequence
  Description of Artificial Sequence: Synthetic oligonucleotide
gcguuuugucauugucugu

SEQ ID NO: 3073076 - RNA, 19 nt, Artificial Sequence
  Description of Artificial Sequence: Synthetic oligonucleotide
gguccugguuuucccgggu

SEQ ID NO: 3073077 - RNA, 19 nt, Artificial Sequence
  Description of Artificial Sequence: Synthetic oligonucleotide
caacacagccugagaucau

SEQ ID NO: 3073078 - RNA, 19 nt, Artificial Sequence
  Description of Artificial Sequence: Synthetic oligonucleotide
ccaggucucucagcuucug

SEQ ID NO: 3073079 - RNA, 19 nt, Artificial Sequence
  Description of Artificial Sequence: Synthetic oligonucleotide
gcccuguaucuuaugugcu

SEQ ID NO: 3073080 - RNA, 19 nt, Artificial Sequence
  Description of Artificial Sequence: Synthetic oligonucleotide
gggcuucauagcguuuugu

SEQ ID NO: 3073081 - RNA, 19 nt, Artificial Sequence
  Description of Artificial Sequence: Synthetic oligonucleotide
cgucuauugcugucacgaa

SEQ ID NO: 3073082 - RNA, 19 nt, Artificial Sequence
  Description of Artificial Sequence: Synthetic oligonucleotide
gcauuugcuccaggucucu

SEQ ID NO: 3073083 - RNA, 19 nt, Artificial Sequence
  Description of Artificial Sequence: Synthetic oligonucleotide
cuguugccuuauagagcau

SEQ ID NO: 3073084 - RNA, 19 nt, Artificial Sequence
  Description of Artificial Sequence: Synthetic oligonucleotide
ccuucagcucgcccuguau

SEQ ID NO: 3073085 - RNA, 19 nt, Artificial Sequence
  Description of Artificial Sequence: Synthetic oligonucleotide
ccugguuuucccggguauu

SEQ ID NO: 3073086 - RNA, 19 nt, Artificial Sequence
  Description of Artificial Sequence: Synthetic oligonucleotide
ccuuagacuugagggccuu

SEQ ID NO: 3073087 - RNA, 19 nt, Artificial Sequence
  Description of Artificial Sequence: Synthetic oligonucleotide
cgucgaugcuccagggcuu

SEQ ID NO: 3073088 - RNA, 19 nt, Artificial Sequence
  Description of Artificial Sequence: Synthetic oligonucleotide
ccagggcuucauagcguuu

SEQ ID NO: 3073089 - RNA, 19 nt, Artificial Sequence
  Description of Artificial Sequence: Synthetic oligonucleotide
cgaugcuccagggcuucau

SEQ ID NO: 3073090 - RNA, 19 nt, Artificial Sequence
  Description of Artificial Sequence: Synthetic oligonucleotide
aaauacaccuccuugucgc

SEQ ID NO: 3073091 - RNA, 19 nt, Artificial Sequence
  Description of Artificial Sequence: Synthetic oligonucleotide
uuucucacacuuuaggcag

SEQ ID NO: 3073092 - RNA, 19 nt, Artificial Sequence
  Description of Artificial Sequence: Synthetic oligonucleotide
aacauggcugaguagcagg

SEQ ID NO: 3073093 - RNA, 19 nt, Artificial Sequence
  Description of Artificial Sequence: Synthetic oligonucleotide
gaugucuaggguuaaggcc

SEQ ID NO: 3073094 - RNA, 19 nt, Artificial Sequence
  Description of Artificial Sequence: Synthetic oligonucleotide
aaagccuuugggcccaaac

SEQ ID NO: 3073095 - RNA, 19 nt, Artificial Sequence
  Description of Artificial Sequence: Synthetic oligonucleotide
cauuucucacacuuuaggc

SEQ ID NO: 3073096 - RNA, 19 nt, Artificial Sequence
  Description of Artificial Sequence: Synthetic oligonucleotide
auuucucacacuuuaggca

SEQ ID NO: 3073097 - RNA, 19 nt, Artificial Sequence
  Description of Artificial Sequence: Synthetic oligonucleotide
agugaugucacccgcucgg

SEQ ID NO: 3073098 - RNA, 19 nt, Artificial Sequence
  Description of Artificial Sequence: Synthetic oligonucleotide
aguuuccacaaccuggguc

SEQ ID NO: 3073099 - RNA, 19 nt, Artificial Sequence
  Description of Artificial Sequence: Synthetic oligonucleotide
uaggguuaaggccuggcag

SEQ ID NO: 3073100 - RNA, 19 nt, Artificial Sequence
  Description of Artificial Sequence: Synthetic oligonucleotide
aaguguggcucucggcucc

SEQ ID NO: 3073101 - RNA, 19 nt, Artificial Sequence
  Description of Artificial Sequence: Synthetic oligonucleotide
cacacuuuaggcagggacg

SEQ ID NO: 3073102 - RNA, 19 nt, Artificial Sequence
  Description of Artificial Sequence: Synthetic oligonucleotide
aaaguguggcucucggcuc

SEQ ID NO: 3073103 - RNA, 19 nt, Artificial Sequence
  Description of Artificial Sequence: Synthetic oligonucleotide
ugaguagcagggaugguug

SEQ ID NO: 3073104 - RNA, 19 nt, Artificial Sequence
  Description of Artificial Sequence: Synthetic oligonucleotide
ucacacuuuaggcagggac

SEQ ID NO: 3073105 - RNA, 19 nt, Artificial Sequence
  Description of Artificial Sequence: Synthetic oligonucleotide
uugaaaguguggcucucgg

SEQ ID NO: 3073106 - RNA, 19 nt, Artificial Sequence
  Description of Artificial Sequence: Synthetic oligonucleotide
ugaugucuaggguuaaggc

SEQ ID NO: 3073107 - RNA, 19 nt, Artificial Sequence
  Description of Artificial Sequence: Synthetic oligonucleotide
accugggucuacuugaaag

SEQ ID NO: 3073108 - RNA, 19 nt, Artificial Sequence
  Description of Artificial Sequence: Synthetic oligonucleotide
cuuuaggcagggacgaugc

SEQ ID NO: 3073109 - RNA, 19 nt, Artificial Sequence
  Description of Artificial Sequence: Synthetic oligonucleotide
aggguuaaggccuggcagg

SEQ ID NO: 3073110 - RNA, 19 nt, Artificial Sequence
  Description of Artificial Sequence: Synthetic oligonucleotide
ucuacuugaaaguguggcu

SEQ ID NO: 3073111 - RNA, 19 nt, Artificial Sequence
  Description of Artificial Sequence: Synthetic oligonucleotide
aagccuuugggcccaaaca

SEQ ID NO: 3073112 - RNA, 19 nt, Artificial Sequence
  Description of Artificial Sequence: Synthetic oligonucleotide
uaggggaguuuccacaacc

SEQ ID NO: 3073113 - RNA, 19 nt, Artificial Sequence
  Description of Artificial Sequence: Synthetic oligonucleotide
ugucuucccacauuucuca

SEQ ID NO: 3073114 - RNA, 19 nt, Artificial Sequence
  Description of Artificial Sequence: Synthetic oligonucleotide
guuaaggccuggcaggugc

SEQ ID NO: 3073115 - RNA, 19 nt, Artificial Sequence
  Description of Artificial Sequence: Synthetic oligonucleotide
agagcccugaugucuaggg

SEQ ID NO: 3073116 - RNA, 19 nt, Artificial Sequence
  Description of Artificial Sequence: Synthetic oligonucleotide
acaaccugggucuacuuga

SEQ ID NO: 3073117 - RNA, 19 nt, Artificial Sequence
  Description of Artificial Sequence: Synthetic oligonucleotide
uuugggcccaaacauggcu

SEQ ID NO: 3073118 - RNA, 19 nt, Artificial Sequence
  Description of Artificial Sequence: Synthetic oligonucleotide
uaggcagggacgaugccag

SEQ ID NO: 3073119 - RNA, 19 nt, Artificial Sequence
  Description of Artificial Sequence: Synthetic oligonucleotide
ucgcacuuggggcacuucg

SEQ ID NO: 3073120 - RNA, 19 nt, Artificial Sequence
  Description of Artificial Sequence: Synthetic oligonucleotide
ucagugucuucccacauuu

SEQ ID NO: 3073121 - RNA, 19 nt, Artificial Sequence
  Description of Artificial Sequence: Synthetic oligonucleotide
guagggcuugccuucaugc

SEQ ID NO: 3073122 - RNA, 19 nt, Artificial Sequence
  Description of Artificial Sequence: Synthetic oligonucleotide
gucuacuugaaaguguggc

SEQ ID NO: 3073123 - RNA, 19 nt, Artificial Sequence
  Description of Artificial Sequence: Synthetic oligonucleotide
cuccuugucgcacuugggg

SEQ ID NO: 3073124 - RNA, 19 nt, Artificial Sequence
  Description of Artificial Sequence: Synthetic oligonucleotide
gacgaugccaguccuugcc

SEQ ID NO: 3073125 - RNA, 19 nt, Artificial Sequence
  Description of Artificial Sequence: Synthetic oligonucleotide
gaaaguguggcucucggcu

SEQ ID NO: 3073126 - RNA, 19 nt, Artificial Sequence
  Description of Artificial Sequence: Synthetic oligonucleotide
uccuugucgcacuuggggc

SEQ ID NO: 3073127 - RNA, 19 nt, Artificial Sequence
  Description of Artificial Sequence: Synthetic oligonucleotide
augucuaggguuaaggccu

SEQ ID NO: 3073128 - RNA, 19 nt, Artificial Sequence
  Description of Artificial Sequence: Synthetic oligonucleotide
cucggcgaaauacaccucc

SEQ ID NO: 3073129 - RNA, 19 nt, Artificial Sequence
  Description of Artificial Sequence: Synthetic oligonucleotide
cugaugucuaggguuaagg

SEQ ID NO: 3073130 - RNA, 19 nt, Artificial Sequence
  Description of Artificial Sequence: Synthetic oligonucleotide
aacuugguccugcacgagu

SEQ ID NO: 3073131 - RNA, 19 nt, Artificial Sequence
  Description of Artificial Sequence: Synthetic oligonucleotide
uugccuagugaugucaccc

SEQ ID NO: 3073132 - RNA, 19 nt, Artificial Sequence
  Description of Artificial Sequence: Synthetic oligonucleotide
ugaugucacccgcucggcg

SEQ ID NO: 3073133 - RNA, 19 nt, Artificial Sequence
  Description of Artificial Sequence: Synthetic oligonucleotide
uagugaugucacccgcucg

SEQ ID NO: 3073134 - RNA, 19 nt, Artificial Sequence
  Description of Artificial Sequence: Synthetic oligonucleotide
uugggcccaaacauggcug

SEQ ID NO: 3073135 - RNA, 19 nt, Artificial Sequence
  Description of Artificial Sequence: Synthetic oligonucleotide
aaacauggcugaguagcag

SEQ ID NO: 3073136 - RNA, 19 nt, Artificial Sequence
  Description of Artificial Sequence: Synthetic oligonucleotide
ucgcccaaagccuuugggc

SEQ ID NO: 3073137 - RNA, 19 nt, Artificial Sequence
  Description of Artificial Sequence: Synthetic oligonucleotide
ugccuagugaugucacccg

SEQ ID NO: 3073138 - RNA, 19 nt, Artificial Sequence
  Description of Artificial Sequence: Synthetic oligonucleotide
uucucacacuuuaggcagg

SEQ ID NO: 3073139 - RNA, 19 nt, Artificial Sequence
  Description of Artificial Sequence: Synthetic oligonucleotide
uccaccucgcccaaagccu

SEQ ID NO: 3073140 - RNA, 19 nt, Artificial Sequence
  Description of Artificial Sequence: Synthetic oligonucleotide
ucggcauggcggaacuugg

SEQ ID NO: 3073141 - RNA, 19 nt, Artificial Sequence
  Description of Artificial Sequence: Synthetic oligonucleotide
ccaaacauggcugaguagc

SEQ ID NO: 3073142 - RNA, 19 nt, Artificial Sequence
  Description of Artificial Sequence: Synthetic oligonucleotide
cuacuugaaaguguggcuc

SEQ ID NO: 3073143 - RNA, 19 nt, Artificial Sequence
  Description of Artificial Sequence: Synthetic oligonucleotide
uacuugaaaguguggcucu

SEQ ID NO: 3073144 - RNA, 19 nt, Artificial Sequence
  Description of Artificial Sequence: Synthetic oligonucleotide
gaugccaguccuugccuag

SEQ ID NO: 3073145 - RNA, 19 nt, Artificial Sequence
  Description of Artificial Sequence: Synthetic oligonucleotide
ugggucuacuugaaagugu

SEQ ID NO: 3073146 - RNA, 19 nt, Artificial Sequence
  Description of Artificial Sequence: Synthetic oligonucleotide
guuuccacaaccugggucu

SEQ ID NO: 3073147 - RNA, 19 nt, Artificial Sequence
  Description of Artificial Sequence: Synthetic oligonucleotide
cuccaccucgcccaaagcc

SEQ ID NO: 3073148 - RNA, 19 nt, Artificial Sequence
  Description of Artificial Sequence: Synthetic oligonucleotide
ucaugcucggcauggcccc

SEQ ID NO: 3073149 - RNA, 19 nt, Artificial Sequence
  Description of Artificial Sequence: Synthetic oligonucleotide
ucucacacuuuaggcaggg

SEQ ID NO: 3073150 - RNA, 19 nt, Artificial Sequence
  Description of Artificial Sequence: Synthetic oligonucleotide
cuugccuucaugcucggca

SEQ ID NO: 3073151 - RNA, 19 nt, Artificial Sequence
  Description of Artificial Sequence: Synthetic oligonucleotide
aguccuugccuagugaugu

SEQ ID NO: 3073152 - RNA, 19 nt, Artificial Sequence
  Description of Artificial Sequence: Synthetic oligonucleotide
agccuuugggcccaaacau

SEQ ID NO: 3073153 - RNA, 19 nt, Artificial Sequence
  Description of Artificial Sequence: Synthetic oligonucleotide
gggaguuuccacaaccugg

SEQ ID NO: 3073154 - RNA, 19 nt, Artificial Sequence
  Description of Artificial Sequence: Synthetic oligonucleotide
uucggcauggcggaacuug

SEQ ID NO: 3073155 - RNA, 19 nt, Artificial Sequence
  Description of Artificial Sequence: Synthetic oligonucleotide
gaugucacccgcucggcga

SEQ ID NO: 3073156 - RNA, 19 nt, Artificial Sequence
  Description of Artificial Sequence: Synthetic oligonucleotide
ggaguuuccacaaccuggg

SEQ ID NO: 3073157 - RNA, 19 nt, Artificial Sequence
  Description of Artificial Sequence: Synthetic oligonucleotide
ccuuugggcccaaacaugg

SEQ ID NO: 3073158 - RNA, 19 nt, Artificial Sequence
  Description of Artificial Sequence: Synthetic oligonucleotide
cuucaugcucggcauggcc

SEQ ID NO: 3073159 - RNA, 19 nt, Artificial Sequence
  Description of Artificial Sequence: Synthetic oligonucleotide
cuugaaaguguggcucucg

SEQ ID NO: 3073160 - RNA, 19 nt, Artificial Sequence
  Description of Artificial Sequence: Synthetic oligonucleotide
gaggucagugucuucccac

SEQ ID NO: 3073161 - RNA, 19 nt, Artificial Sequence
  Description of Artificial Sequence: Synthetic oligonucleotide
acuuuaggcagggacgaug

SEQ ID NO: 3073162 - RNA, 19 nt, Artificial Sequence
  Description of Artificial Sequence: Synthetic oligonucleotide
ggcgaaauacaccuccuug

SEQ ID NO: 3073163 - RNA, 19 nt, Artificial Sequence
  Description of Artificial Sequence: Synthetic oligonucleotide
uuaaggccuggcaggugcc

SEQ ID NO: 3073164 - RNA, 19 nt, Artificial Sequence
  Description of Artificial Sequence: Synthetic oligonucleotide
cuugccuagugaugucacc

SEQ ID NO: 3073165 - RNA, 19 nt, Artificial Sequence
  Description of Artificial Sequence: Synthetic oligonucleotide
acuuggggcacuucggcau

SEQ ID NO: 3073166 - RNA, 19 nt, Artificial Sequence
  Description of Artificial Sequence: Synthetic oligonucleotide
uggcugaguagcagggaug

SEQ ID NO: 3073167 - RNA, 19 nt, Artificial Sequence
  Description of Artificial Sequence: Synthetic oligonucleotide
uuuaggcagggacgaugcc

SEQ ID NO: 3073168 - RNA, 19 nt, Artificial Sequence
  Description of Artificial Sequence: Synthetic oligonucleotide
cagggaugguugcaguagg

SEQ ID NO: 3073169 - RNA, 19 nt, Artificial Sequence
  Description of Artificial Sequence: Synthetic oligonucleotide
acauggcugaguagcaggg

SEQ ID NO: 3073170 - RNA, 19 nt, Artificial Sequence
  Description of Artificial Sequence: Synthetic oligonucleotide
auggcugaguagcagggau

SEQ ID NO: 3073171 - RNA, 19 nt, Artificial Sequence
  Description of Artificial Sequence: Synthetic oligonucleotide
cuagugaugucacccgcuc

SEQ ID NO: 3073172 - RNA, 19 nt, Artificial Sequence
  Description of Artificial Sequence: Synthetic oligonucleotide
cucgcccaaagccuuuggg

SEQ ID NO: 3073173 - RNA, 19 nt, Artificial Sequence
  Description of Artificial Sequence: Synthetic oligonucleotide
ugucuaggguuaaggccug

SEQ ID NO: 3073174 - RNA, 19 nt, Artificial Sequence
  Description of Artificial Sequence: Synthetic oligonucleotide
acacuuuaggcagggacga

SEQ ID NO: 3073175 - RNA, 19 nt, Artificial Sequence
  Description of Artificial Sequence: Synthetic oligonucleotide
agcccugaugucuaggguu

SEQ ID NO: 3073176 - RNA, 19 nt, Artificial Sequence
  Description of Artificial Sequence: Synthetic oligonucleotide
cacaaccugggucuacuug

SEQ ID NO: 3073177 - RNA, 19 nt, Artificial Sequence
  Description of Artificial Sequence: Synthetic oligonucleotide
uacaccuccuugucgcacu

SEQ ID NO: 3073178 - RNA, 19 nt, Artificial Sequence
  Description of Artificial Sequence: Synthetic oligonucleotide
cuugguccugcacgagugg

SEQ ID NO: 3073179 - RNA, 19 nt, Artificial Sequence
  Description of Artificial Sequence: Synthetic oligonucleotide
ggcugaguagcagggaugg

SEQ ID NO: 3073180 - RNA, 19 nt, Artificial Sequence
  Description of Artificial Sequence: Synthetic oligonucleotide
gaguagcagggaugguugc

SEQ ID NO: 3073181 - RNA, 19 nt, Artificial Sequence
  Description of Artificial Sequence: Synthetic oligonucleotide
cuuugggcccaaacauggc

SEQ ID NO: 3073182 - RNA, 19 nt, Artificial Sequence
  Description of Artificial Sequence: Synthetic oligonucleotide
cugggucuacuugaaagug

SEQ ID NO: 3073183 - RNA, 19 nt, Artificial Sequence
  Description of Artificial Sequence: Synthetic oligonucleotide
uguggcucucggcuccacc

SEQ ID NO: 3073184 - RNA, 19 nt, Artificial Sequence
  Description of Artificial Sequence: Synthetic oligonucleotide
acuugguccugcacgagug

SEQ ID NO: 3073185 - RNA, 19 nt, Artificial Sequence
  Description of Artificial Sequence: Synthetic oligonucleotide
aggucagugucuucccaca

SEQ ID NO: 3073186 - RNA, 19 nt, Artificial Sequence
  Description of Artificial Sequence: Synthetic oligonucleotide
ucggcgaaauacaccuccu

SEQ ID NO: 3073187 - RNA, 19 nt, Artificial Sequence
  Description of Artificial Sequence: Synthetic oligonucleotide
uugcaguagggcuugccuu

SEQ ID NO: 3073188 - RNA, 19 nt, Artificial Sequence
  Description of Artificial Sequence: Synthetic oligonucleotide
caaacauggcugaguagca

SEQ ID NO: 3073189 - RNA, 19 nt, Artificial Sequence
  Description of Artificial Sequence: Synthetic oligonucleotide
acuugaaaguguggcucuc

SEQ ID NO: 3073190 - RNA, 19 nt, Artificial Sequence
  Description of Artificial Sequence: Synthetic oligonucleotide
gcauggcggaacuuggucc

SEQ ID NO: 3073191 - RNA, 19 nt, Artificial Sequence
  Description of Artificial Sequence: Synthetic oligonucleotide
ugggcccaaacauggcuga

SEQ ID NO: 3073192 - RNA, 19 nt, Artificial Sequence
  Description of Artificial Sequence: Synthetic oligonucleotide
ucucggcuccaccucgccc

SEQ ID NO: 3073193 - RNA, 19 nt, Artificial Sequence
  Description of Artificial Sequence: Synthetic oligonucleotide
ugccaguccuugccuagug

SEQ ID NO: 3073194 - RNA, 19 nt, Artificial Sequence
  Description of Artificial Sequence: Synthetic oligonucleotide
cagaggucagugucuuccc

SEQ ID NO: 3073195 - RNA, 19 nt, Artificial Sequence
  Description of Artificial Sequence: Synthetic oligonucleotide
agaggucagugucuuccca

SEQ ID NO: 3073196 - RNA, 19 nt, Artificial Sequence
  Description of Artificial Sequence: Synthetic oligonucleotide
ggaacuugguccugcacga

SEQ ID NO: 3073197 - RNA, 19 nt, Artificial Sequence
  Description of Artificial Sequence: Synthetic oligonucleotide
ugguccugcacgaguggcu

SEQ ID NO: 3073198 - RNA, 19 nt, Artificial Sequence
  Description of Artificial Sequence: Synthetic oligonucleotide
uugccuucaugcucggcau

SEQ ID NO: 3073199 - RNA, 19 nt, Artificial Sequence
  Description of Artificial Sequence: Synthetic oligonucleotide
uccacaaccugggucuacu

SEQ ID NO: 3073200 - RNA, 19 nt, Artificial Sequence
  Description of Artificial Sequence: Synthetic oligonucleotide
gggucuacuugaaagugug

SEQ ID NO: 3073201 - RNA, 19 nt, Artificial Sequence
  Description of Artificial Sequence: Synthetic oligonucleotide
caguccuugccuagugaug

SEQ ID NO: 3073202 - RNA, 19 nt, Artificial Sequence
  Description of Artificial Sequence: Synthetic oligonucleotide
cuaggguuaaggccuggca

SEQ ID NO: 3073203 - RNA, 19 nt, Artificial Sequence
  Description of Artificial Sequence: Synthetic oligonucleotide
cggaacuugguccugcacg

SEQ ID NO: 3073204 - RNA, 19 nt, Artificial Sequence
  Description of Artificial Sequence: Synthetic oligonucleotide
gggcacuucggcauggcgg

SEQ ID NO: 3073205 - RNA, 19 nt, Artificial Sequence
  Description of Artificial Sequence: Synthetic oligonucleotide
acgaugccaguccuugccu

SEQ ID NO: 3073206 - RNA, 19 nt, Artificial Sequence
  Description of Artificial Sequence: Synthetic oligonucleotide
agggaugguugcaguaggg

SEQ ID NO: 3073207 - RNA, 19 nt, Artificial Sequence
  Description of Artificial Sequence: Synthetic oligonucleotide
augguugcaguagggcuug

SEQ ID NO: 3073208 - RNA, 19 nt, Artificial Sequence
  Description of Artificial Sequence: Synthetic oligonucleotide
guugcaguagggcuugccu

SEQ ID NO: 3073209 - RNA, 19 nt, Artificial Sequence
  Description of Artificial Sequence: Synthetic oligonucleotide
aaccugggucuacuugaaa

SEQ ID NO: 3073210 - RNA, 19 nt, Artificial Sequence
  Description of Artificial Sequence: Synthetic oligonucleotide
gggcuugccuucaugcucg

SEQ ID NO: 3073211 - RNA, 19 nt, Artificial Sequence
  Description of Artificial Sequence: Synthetic oligonucleotide
ugccuucaugcucggcaug

SEQ ID NO: 3073212 - RNA, 19 nt, Artificial Sequence
  Description of Artificial Sequence: Synthetic oligonucleotide
cucggcuccaccucgccca

SEQ ID NO: 3073213 - RNA, 19 nt, Artificial Sequence
  Description of Artificial Sequence: Synthetic oligonucleotide
gcagggacgaugccagucc

SEQ ID NO: 3073214 - RNA, 19 nt, Artificial Sequence
  Description of Artificial Sequence: Synthetic oligonucleotide
ugggcgguaggggaguuuc

SEQ ID NO: 3073215 - RNA, 19 nt, Artificial Sequence
  Description of Artificial Sequence: Synthetic oligonucleotide
uuggggcacuucggcaugg

SEQ ID NO: 3073216 - RNA, 19 nt, Artificial Sequence
  Description of Artificial Sequence: Synthetic oligonucleotide
aaggccuggcaggugccug

SEQ ID NO: 3073217 - RNA, 19 nt, Artificial Sequence
  Description of Artificial Sequence: Synthetic oligonucleotide
cuuggggcacuucggcaug

SEQ ID NO: 3073218 - RNA, 19 nt, Artificial Sequence
  Description of Artificial Sequence: Synthetic oligonucleotide
uccugcacgaguggcugca

SEQ ID NO: 3073219 - RNA, 19 nt, Artificial Sequence
  Description of Artificial Sequence: Synthetic oligonucleotide
agcagggaugguugcagua

SEQ ID NO: 3073220 - RNA, 19 nt, Artificial Sequence
  Description of Artificial Sequence: Synthetic oligonucleotide
gugucuucccacauuucuc

SEQ ID NO: 3073221 - RNA, 19 nt, Artificial Sequence
  Description of Artificial Sequence: Synthetic oligonucleotide
ggggaguuuccacaaccug

SEQ ID NO: 3073222 - RNA, 19 nt, Artificial Sequence
  Description of Artificial Sequence: Synthetic oligonucleotide
gaacuugguccugcacgag

SEQ ID NO: 3073223 - RNA, 19 nt, Artificial Sequence
  Description of Artificial Sequence: Synthetic oligonucleotide
gcagggaugguugcaguag

SEQ ID NO: 3073224 - RNA, 19 nt, Artificial Sequence
  Description of Artificial Sequence: Synthetic oligonucleotide
guaggggaguuuccacaac

SEQ ID NO: 3073225 - RNA, 19 nt, Artificial Sequence
  Description of Artificial Sequence: Synthetic oligonucleotide
gguaggggaguuuccacaa

SEQ ID NO: 3073226 - RNA, 19 nt, Artificial Sequence
  Description of Artificial Sequence: Synthetic oligonucleotide
gccuucaugcucggcaugg

SEQ ID NO: 3073227 - RNA, 19 nt, Artificial Sequence
  Description of Artificial Sequence: Synthetic oligonucleotide
ggcacuucggcauggcgga

SEQ ID NO: 3073228 - RNA, 19 nt, Artificial Sequence
  Description of Artificial Sequence: Synthetic oligonucleotide
cacccgcucggcgaaauac

SEQ ID NO: 3073229 - RNA, 19 nt, Artificial Sequence
  Description of Artificial Sequence: Synthetic oligonucleotide
cgcccaaagccuuugggcc

SEQ ID NO: 3073230 - RNA, 19 nt, Artificial Sequence
  Description of Artificial Sequence: Synthetic oligonucleotide
cuugucgcacuuggggcac

SEQ ID NO: 3073231 - RNA, 19 nt, Artificial Sequence
  Description of Artificial Sequence: Synthetic oligonucleotide
aggggaguuuccacaaccu

SEQ ID NO: 3073232 - RNA, 19 nt, Artificial Sequence
  Description of Artificial Sequence: Synthetic oligonucleotide
gaugguugcaguagggcuu

SEQ ID NO: 3073233 - RNA, 19 nt, Artificial Sequence
  Description of Artificial Sequence: Synthetic oligonucleotide
ggucuacuugaaagugugg

SEQ ID NO: 3073234 - RNA, 19 nt, Artificial Sequence
  Description of Artificial Sequence: Synthetic oligonucleotide
ggcucucggcuccaccucg

SEQ ID NO: 3073235 - RNA, 19 nt, Artificial Sequence
  Description of Artificial Sequence: Synthetic oligonucleotide
ggaugguugcaguagggcu

SEQ ID NO: 3073236 - RNA, 19 nt, Artificial Sequence
  Description of Artificial Sequence: Synthetic oligonucleotide
ggcuccaccucgcccaaag

SEQ ID NO: 3073237 - RNA, 19 nt, Artificial Sequence
  Description of Artificial Sequence: Synthetic oligonucleotide
gcacuuggggcacuucggc

SEQ ID NO: 3073238 - RNA, 19 nt, Artificial Sequence
  Description of Artificial Sequence: Synthetic oligonucleotide
gcgaaauacaccuccuugu

SEQ ID NO: 3073239 - RNA, 19 nt, Artificial Sequence
  Description of Artificial Sequence: Synthetic oligonucleotide
gggacgaugccaguccuug

SEQ ID NO: 3073240 - RNA, 19 nt, Artificial Sequence
  Description of Artificial Sequence: Synthetic oligonucleotide
ggcauggcggaacuugguc

SEQ ID NO: 3073241 - RNA, 19 nt, Artificial Sequence
  Description of Artificial Sequence: Synthetic oligonucleotide
ggugccugggcgguagggg

SEQ ID NO: 3073242 - RNA, 19 nt, Artificial Sequence
  Description of Artificial Sequence: Synthetic oligonucleotide
uggcggaacuugguccugc

SEQ ID NO: 3073243 - RNA, 19 nt, Artificial Sequence
  Description of Artificial Sequence: Synthetic oligonucleotide
cacuuggggcacuucggca

SEQ ID NO: 3073244 - RNA, 19 nt, Artificial Sequence
  Description of Artificial Sequence: Synthetic oligonucleotide
gcccaaagccuuugggccc

SEQ ID NO: 3073245 - RNA, 19 nt, Artificial Sequence
  Description of Artificial Sequence: Synthetic oligonucleotide
cauggcggaacuugguccu

SEQ ID NO: 3073246 - RNA, 19 nt, Artificial Sequence
  Description of Artificial Sequence: Synthetic oligonucleotide
uggcucucggcuccaccuc

SEQ ID NO: 3073247 - RNA, 19 nt, Artificial Sequence
  Description of Artificial Sequence: Synthetic oligonucleotide
gccuagugaugucacccgc

SEQ ID NO: 3073248 - RNA, 19 nt, Artificial Sequence
  Description of Artificial Sequence: Synthetic oligonucleotide
augucacccgcucggcgaa

SEQ ID NO: 3073249 - RNA, 19 nt, Artificial Sequence
  Description of Artificial Sequence: Synthetic oligonucleotide
gugccugggcgguagggga

SEQ ID NO: 3073250 - RNA, 19 nt, Artificial Sequence
  Description of Artificial Sequence: Synthetic oligonucleotide
aggugccugggcgguaggg

SEQ ID NO: 3073251 - RNA, 19 nt, Artificial Sequence
  Description of Artificial Sequence: Synthetic oligonucleotide
gugaugucacccgcucggc

SEQ ID NO: 3073252 - RNA, 19 nt, Artificial Sequence
  Description of Artificial Sequence: Synthetic oligonucleotide
ggggcacuucggcauggcg

SEQ ID NO: 3073253 - RNA, 19 nt, Artificial Sequence
  Description of Artificial Sequence: Synthetic oligonucleotide
uaaggccuggcaggugccu

SEQ ID NO: 3073254 - RNA, 19 nt, Artificial Sequence
  Description of Artificial Sequence: Synthetic oligonucleotide
cacuucggcauggcggaac

SEQ ID NO: 3073255 - RNA, 19 nt, Artificial Sequence
  Description of Artificial Sequence: Synthetic oligonucleotide
cucucggcuccaccucgcc

SEQ ID NO: 3073256 - RNA, 19 nt, Artificial Sequence
  Description of Artificial Sequence: Synthetic oligonucleotide
gguccugcacgaguggcug

SEQ ID NO: 3073257 - RNA, 19 nt, Artificial Sequence
  Description of Artificial Sequence: Synthetic oligonucleotide
guggcucucggcuccaccu

SEQ ID NO: 3073258 - RNA, 19 nt, Artificial Sequence
  Description of Artificial Sequence: Synthetic oligonucleotide
uuccacaaccugggucuac

SEQ ID NO: 3073259 - RNA, 19 nt, Artificial Sequence
  Description of Artificial Sequence: Synthetic oligonucleotide
ccacauuucucacacuuua

SEQ ID NO: 3073260 - RNA, 19 nt, Artificial Sequence
  Description of Artificial Sequence: Synthetic oligonucleotide
cccaaacauggcugaguag

SEQ ID NO: 3073261 - RNA, 19 nt, Artificial Sequence
  Description of Artificial Sequence: Synthetic oligonucleotide
guccugcacgaguggcugc

SEQ ID NO: 3073262 - RNA, 19 nt, Artificial Sequence
  Description of Artificial Sequence: Synthetic oligonucleotide
caaccugggucuacuugaa

SEQ ID NO: 3073263 - RNA, 19 nt, Artificial Sequence
  Description of Artificial Sequence: Synthetic oligonucleotide
ggacgaugccaguccuugc

SEQ ID NO: 3073264 - RNA, 19 nt, Artificial Sequence
  Description of Artificial Sequence: Synthetic oligonucleotide
gguugcaguagggcuugcc

SEQ ID NO: 3073265 - RNA, 19 nt, Artificial Sequence
  Description of Artificial Sequence: Synthetic oligonucleotide
ccuugucgcacuuggggca

SEQ ID NO: 3073266 - RNA, 19 nt, Artificial Sequence
  Description of Artificial Sequence: Synthetic oligonucleotide
gagcccugaugucuagggu

SEQ ID NO: 3073267 - RNA, 19 nt, Artificial Sequence
  Description of Artificial Sequence: Synthetic oligonucleotide
acccgcucggcgaaauaca

SEQ ID NO: 3073268 - RNA, 19 nt, Artificial Sequence
  Description of Artificial Sequence: Synthetic oligonucleotide
ucacccgcucggcgaaaua

SEQ ID NO: 3073269 - RNA, 19 nt, Artificial Sequence
  Description of Artificial Sequence: Synthetic oligonucleotide
accucgcccaaagccuuug

SEQ ID NO: 3073270 - RNA, 19 nt, Artificial Sequence
  Description of Artificial Sequence: Synthetic oligonucleotide
cugaguagcagggaugguu

SEQ ID NO: 3073271 - RNA, 19 nt, Artificial Sequence
  Description of Artificial Sequence: Synthetic oligonucleotide
guccuugccuagugauguc

SEQ ID NO: 3073272 - RNA, 19 nt, Artificial Sequence
  Description of Artificial Sequence: Synthetic oligonucleotide
cccgcucggcgaaauacac

SEQ ID NO: 3073273 - RNA, 19 nt, Artificial Sequence
  Description of Artificial Sequence: Synthetic oligonucleotide
uggggcacuucggcauggc

SEQ ID NO: 3073274 - RNA, 19 nt, Artificial Sequence
  Description of Artificial Sequence: Synthetic oligonucleotide
cauggcugaguagcaggga

SEQ ID NO: 3073275 - RNA, 19 nt, Artificial Sequence
  Description of Artificial Sequence: Synthetic oligonucleotide
gaguuuccacaaccugggu

SEQ ID NO: 3073276 - RNA, 19 nt, Artificial Sequence
  Description of Artificial Sequence: Synthetic oligonucleotide
ucggcuccaccucgcccaa

SEQ ID NO: 3073277 - RNA, 19 nt, Artificial Sequence
  Description of Artificial Sequence: Synthetic oligonucleotide
acaccuccuugucgcacuu

SEQ ID NO: 3073278 - RNA, 19 nt, Artificial Sequence
  Description of Artificial Sequence: Synthetic oligonucleotide
uggcaggugccugggcggu

SEQ ID NO: 3073279 - RNA, 19 nt, Artificial Sequence
  Description of Artificial Sequence: Synthetic oligonucleotide
gcgguaggggaguuuccac

SEQ ID NO: 3073280 - RNA, 19 nt, Artificial Sequence
  Description of Artificial Sequence: Synthetic oligonucleotide
auggcggaacuugguccug

SEQ ID NO: 3073281 - RNA, 19 nt, Artificial Sequence
  Description of Artificial Sequence: Synthetic oligonucleotide
ggcagggacgaugccaguc

SEQ ID NO: 3073282 - RNA, 19 nt, Artificial Sequence
  Description of Artificial Sequence: Synthetic oligonucleotide
ccgcucggcgaaauacacc

SEQ ID NO: 3073283 - RNA, 19 nt, Artificial Sequence
  Description of Artificial Sequence: Synthetic oligonucleotide
caggugccugggcgguagg

SEQ ID NO: 3073284 - RNA, 19 nt, Artificial Sequence
  Description of Artificial Sequence: Synthetic oligonucleotide
ccugggucuacuugaaagu

SEQ ID NO: 3073285 - RNA, 19 nt, Artificial Sequence
  Description of Artificial Sequence: Synthetic oligonucleotide
gucagugucuucccacauu

SEQ ID NO: 3073286 - RNA, 19 nt, Artificial Sequence
  Description of Artificial Sequence: Synthetic oligonucleotide
ggcgguaggggaguuucca

SEQ ID NO: 3073287 - RNA, 19 nt, Artificial Sequence
  Description of Artificial Sequence: Synthetic oligonucleotide
gguuaaggccuggcaggug

SEQ ID NO: 3073288 - RNA, 19 nt, Artificial Sequence
  Description of Artificial Sequence: Synthetic oligonucleotide
gcaggugccugggcgguag

SEQ ID NO: 3073289 - RNA, 19 nt, Artificial Sequence
  Description of Artificial Sequence: Synthetic oligonucleotide
aguguggcucucggcucca

SEQ ID NO: 3073290 - RNA, 19 nt, Artificial Sequence
  Description of Artificial Sequence: Synthetic oligonucleotide
ggcuugccuucaugcucgg

SEQ ID NO: 3073291 - RNA, 19 nt, Artificial Sequence
  Description of Artificial Sequence: Synthetic oligonucleotide
aggcagggacgaugccagu

SEQ ID NO: 3073292 - RNA, 19 nt, Artificial Sequence
  Description of Artificial Sequence: Synthetic oligonucleotide
gcuccaccucgcccaaagc

SEQ ID NO: 3073293 - RNA, 19 nt, Artificial Sequence
  Description of Artificial Sequence: Synthetic oligonucleotide
ugucgcacuuggggcacuu

SEQ ID NO: 3073294 - RNA, 19 nt, Artificial Sequence
  Description of Artificial Sequence: Synthetic oligonucleotide
gcggaacuugguccugcac

SEQ ID NO: 3073295 - RNA, 19 nt, Artificial Sequence
  Description of Artificial Sequence: Synthetic oligonucleotide
uugucgcacuuggggcacu

SEQ ID NO: 3073296 - RNA, 19 nt, Artificial Sequence
  Description of Artificial Sequence: Synthetic oligonucleotide
ccucgcccaaagccuuugg

SEQ ID NO: 3073297 - RNA, 19 nt, Artificial Sequence
  Description of Artificial Sequence: Synthetic oligonucleotide
cgcucggcgaaauacaccu

SEQ ID NO: 3073298 - RNA, 19 nt, Artificial Sequence
  Description of Artificial Sequence: Synthetic oligonucleotide
ggcggaacuugguccugca

SEQ ID NO: 3073299 - RNA, 19 nt, Artificial Sequence
  Description of Artificial Sequence: Synthetic oligonucleotide
cucacacuuuaggcaggga

SEQ ID NO: 3073300 - RNA, 19 nt, Artificial Sequence
  Description of Artificial Sequence: Synthetic oligonucleotide
caccuccuugucgcacuug

SEQ ID NO: 3073301 - RNA, 19 nt, Artificial Sequence
  Description of Artificial Sequence: Synthetic oligonucleotide
cgguaggggaguuuccaca

SEQ ID NO: 3073302 - RNA, 19 nt, Artificial Sequence
  Description of Artificial Sequence: Synthetic oligonucleotide
ugucacccgcucggcgaaa

SEQ ID NO: 3073303 - RNA, 19 nt, Artificial Sequence
  Description of Artificial Sequence: Synthetic oligonucleotide
ccuagugaugucacccgcu

SEQ ID NO: 3073304 - RNA, 19 nt, Artificial Sequence
  Description of Artificial Sequence: Synthetic oligonucleotide
ggccuggcaggugccuggg

SEQ ID NO: 3073305 - RNA, 19 nt, Artificial Sequence
  Description of Artificial Sequence: Synthetic oligonucleotide
cagggacgaugccaguccu

SEQ ID NO: 3073306 - RNA, 19 nt, Artificial Sequence
  Description of Artificial Sequence: Synthetic oligonucleotide
ccaguccuugccuagugau

SEQ ID NO: 3073307 - RNA, 19 nt, Artificial Sequence
  Description of Artificial Sequence: Synthetic oligonucleotide
agggacgaugccaguccuu

SEQ ID NO: 3073308 - RNA, 19 nt, Artificial Sequence
  Description of Artificial Sequence: Synthetic oligonucleotide
gcccugaugucuaggguua

SEQ ID NO: 3073309 - RNA, 19 nt, Artificial Sequence
  Description of Artificial Sequence: Synthetic oligonucleotide
ggucagugucuucccacau

SEQ ID NO: 3073310 - RNA, 19 nt, Artificial Sequence
  Description of Artificial Sequence: Synthetic oligonucleotide
ggguuaaggccuggcaggu

SEQ ID NO: 3073311 - RNA, 19 nt, Artificial Sequence
  Description of Artificial Sequence: Synthetic oligonucleotide
gcucucggcuccaccucgc

SEQ ID NO: 3073312 - RNA, 19 nt, Artificial Sequence
  Description of Artificial Sequence: Synthetic oligonucleotide
gcuugccuucaugcucggc

SEQ ID NO: 3073313 - RNA, 19 nt, Artificial Sequence
  Description of Artificial Sequence: Synthetic oligonucleotide
ggcccaaacauggcugagu

SEQ ID NO: 3073314 - RNA, 19 nt, Artificial Sequence
  Description of Artificial Sequence: Synthetic oligonucleotide
gggcgguaggggaguuucc

SEQ ID NO: 3073315 - RNA, 19 nt, Artificial Sequence
  Description of Artificial Sequence: Synthetic oligonucleotide
cccaaagccuuugggccca

SEQ ID NO: 3073316 - RNA, 19 nt, Artificial Sequence
  Description of Artificial Sequence: Synthetic oligonucleotide
cccagaggucagugucuuc

SEQ ID NO: 3073317 - RNA, 19 nt, Artificial Sequence
  Description of Artificial Sequence: Synthetic oligonucleotide
gccuggcaggugccugggc

SEQ ID NO: 3073318 - RNA, 19 nt, Artificial Sequence
  Description of Artificial Sequence: Synthetic oligonucleotide
guguggcucucggcuccac

SEQ ID NO: 3073319 - RNA, 19 nt, Artificial Sequence
  Description of Artificial Sequence: Synthetic oligonucleotide
gcucggcgaaauacaccuc

SEQ ID NO: 3073320 - RNA, 19 nt, Artificial Sequence
  Description of Artificial Sequence: Synthetic oligonucleotide
caaagccuuugggcccaaa

SEQ ID NO: 3073321 - RNA, 19 nt, Artificial Sequence
  Description of Artificial Sequence: Synthetic oligonucleotide
gucacccgcucggcgaaau

SEQ ID NO: 3073322 - RNA, 19 nt, Artificial Sequence
  Description of Artificial Sequence: Synthetic oligonucleotide
cgaugccaguccuugccua

SEQ ID NO: 3073323 - RNA, 19 nt, Artificial Sequence
  Description of Artificial Sequence: Synthetic oligonucleotide
cacuuuaggcagggacgau

SEQ ID NO: 3073324 - RNA, 19 nt, Artificial Sequence
  Description of Artificial Sequence: Synthetic oligonucleotide
caccucgcccaaagccuuu

SEQ ID NO: 3073325 - RNA, 19 nt, Artificial Sequence
  Description of Artificial Sequence: Synthetic oligonucleotide
gcugaguagcagggauggu

SEQ ID NO: 3073326 - RNA, 19 nt, Artificial Sequence
  Description of Artificial Sequence: Synthetic oligonucleotide
ccaccucgcccaaagccuu

SEQ ID NO: 3073327 - RNA, 19 nt, Artificial Sequence
  Description of Artificial Sequence: Synthetic oligonucleotide
cccugaugucuaggguuaa

SEQ ID NO: 3073328 - RNA, 19 nt, Artificial Sequence
  Description of Artificial Sequence: Synthetic oligonucleotide
cuucggcauggcggaacuu

SEQ ID NO: 3073329 - RNA, 19 nt, Artificial Sequence
  Description of Artificial Sequence: Synthetic oligonucleotide
gcacuucggcauggcggaa

SEQ ID NO: 3073330 - RNA, 19 nt, Artificial Sequence
  Description of Artificial Sequence: Synthetic oligonucleotide
gccugggcgguaggggagu

SEQ ID NO: 3073331 - RNA, 19 nt, Artificial Sequence
  Description of Artificial Sequence: Synthetic oligonucleotide
ccacaaccugggucuacuu

SEQ ID NO: 3073332 - RNA, 19 nt, Artificial Sequence
  Description of Artificial Sequence: Synthetic oligonucleotide
ggcaggugccugggcggua

SEQ ID NO: 3073333 - RNA, 19 nt, Artificial Sequence
  Description of Artificial Sequence: Synthetic oligonucleotide
cugggcgguaggggaguuu

SEQ ID NO: 3073334 - RNA, 19 nt, Artificial Sequence
  Description of Artificial Sequence: Synthetic oligonucleotide
cggcauggcggaacuuggu

SEQ ID NO: 3073335 - RNA, 19 nt, Artificial Sequence
  Description of Artificial Sequence: Synthetic oligonucleotide
cggcgaaauacaccuccuu

SEQ ID NO: 3073336 - RNA, 19 nt, Artificial Sequence
  Description of Artificial Sequence: Synthetic oligonucleotide
ccccagaggucagugucuu

SEQ ID NO: 3073337 - RNA, 19 nt, Artificial Sequence
  Description of Artificial Sequence: Synthetic oligonucleotide
ccaaagccuuugggcccaa

SEQ ID NO: 3073338 - RNA, 19 nt, Artificial Sequence
  Description of Artificial Sequence: Synthetic oligonucleotide
ccugggcgguaggggaguu

SEQ ID NO: 3073339 - RNA, 19 nt, Artificial Sequence
  Description of Artificial Sequence: Synthetic oligonucleotide
cggcuccaccucgcccaaa

SEQ ID NO: 3073340 - RNA, 19 nt, Artificial Sequence
  Description of Artificial Sequence: Synthetic oligonucleotide
aaaauauuauaauuagucc

SEQ ID NO: 3073341 - RNA, 19 nt, Artificial Sequence
  Description of Artificial Sequence: Synthetic oligonucleotide
aaauaaaacauucucaggu

SEQ ID NO: 3073342 - RNA, 19 nt, Artificial Sequence
  Description of Artificial Sequence: Synthetic oligonucleotide
uaaaauauuauaauuaguc

SEQ ID NO: 3073343 - RNA, 19 nt, Artificial Sequence
  Description of Artificial Sequence: Synthetic oligonucleotide
aaauauuauaauuagucca

SEQ ID NO: 3073344 - RNA, 19 nt, Artificial Sequence
  Description of Artificial Sequence: Synthetic oligonucleotide
uuauaauuaguccauuucc

SEQ ID NO: 3073345 - RNA, 19 nt, Artificial Sequence
  Description of Artificial Sequence: Synthetic oligonucleotide
uguaaaauaaaacauucuc

SEQ ID NO: 3073346 - RNA, 19 nt, Artificial Sequence
  Description of Artificial Sequence: Synthetic oligonucleotide
accacuaucaccuuggcuc

SEQ ID NO: 3073347 - RNA, 19 nt, Artificial Sequence
  Description of Artificial Sequence: Synthetic oligonucleotide
uuaaacucuauuaucagga

SEQ ID NO: 3073348 - RNA, 19 nt, Artificial Sequence
  Description of Artificial Sequence: Synthetic oligonucleotide
ugacauguagaaaaggagg

SEQ ID NO: 3073349 - RNA, 19 nt, Artificial Sequence
  Description of Artificial Sequence: Synthetic oligonucleotide
cauaaaauauuauaauuag

SEQ ID NO: 3073350 - RNA, 19 nt, Artificial Sequence
  Description of Artificial Sequence: Synthetic oligonucleotide
aauaaauggaccuacugau

SEQ ID NO: 3073351 - RNA, 19 nt, Artificial Sequence
  Description of Artificial Sequence: Synthetic oligonucleotide
auuauaauuaguccauuuc

SEQ ID NO: 3073352 - RNA, 19 nt, Artificial Sequence
  Description of Artificial Sequence: Synthetic oligonucleotide
uuuaaacucuauuaucagg

SEQ ID NO: 3073353 - RNA, 19 nt, Artificial Sequence
  Description of Artificial Sequence: Synthetic oligonucleotide
uuuccuuuucuucagagca

SEQ ID NO: 3073354 - RNA, 19 nt, Artificial Sequence
  Description of Artificial Sequence: Synthetic oligonucleotide
uuuauuaccaggcugcccu

SEQ ID NO: 3073355 - RNA, 19 nt, Artificial Sequence
  Description of Artificial Sequence: Synthetic oligonucleotide
uaauaaauggaccuacuga

SEQ ID NO: 3073356 - RNA, 19 nt, Artificial Sequence
  Description of Artificial Sequence: Synthetic oligonucleotide
uuuguuaaugacauguaga

SEQ ID NO: 3073357 - RNA, 19 nt, Artificial Sequence
  Description of Artificial Sequence: Synthetic oligonucleotide
gacagcacuuaauaaaugg

SEQ ID NO: 3073358 - RNA, 19 nt, Artificial Sequence
  Description of Artificial Sequence: Synthetic oligonucleotide
uucacuacauguaaaauaa

SEQ ID NO: 3073359 - RNA, 19 nt, Artificial Sequence
  Description of Artificial Sequence: Synthetic oligonucleotide
uacauguaaaauaaaacau

SEQ ID NO: 3073360 - RNA, 19 nt, Artificial Sequence
  Description of Artificial Sequence: Synthetic oligonucleotide
guuaaugacauguagaaaa

SEQ ID NO: 3073361 - RNA, 19 nt, Artificial Sequence
  Description of Artificial Sequence: Synthetic oligonucleotide
aacauucucagguaaugag

SEQ ID NO: 3073362 - RNA, 19 nt, Artificial Sequence
  Description of Artificial Sequence: Synthetic oligonucleotide
aaagguguguaccacuauc

SEQ ID NO: 3073363 - RNA, 19 nt, Artificial Sequence
  Description of Artificial Sequence: Synthetic oligonucleotide
aacucuauuaucaggacag

SEQ ID NO: 3073364 - RNA, 19 nt, Artificial Sequence
  Description of Artificial Sequence: Synthetic oligonucleotide
uuaauaaauggaccuacug

SEQ ID NO: 3073365 - RNA, 19 nt, Artificial Sequence
  Description of Artificial Sequence: Synthetic oligonucleotide
ugucucugaauucugauga

SEQ ID NO: 3073366 - RNA, 19 nt, Artificial Sequence
  Description of Artificial Sequence: Synthetic oligonucleotide
gauacauaaaauauuauaa

SEQ ID NO: 3073367 - RNA, 19 nt, Artificial Sequence
  Description of Artificial Sequence: Synthetic oligonucleotide
uguaccacuaucaccuugg

SEQ ID NO: 3073368 - RNA, 19 nt, Artificial Sequence
  Description of Artificial Sequence: Synthetic oligonucleotide
cauguaaaauaaaacauuc

SEQ ID NO: 3073369 - RNA, 19 nt, Artificial Sequence
  Description of Artificial Sequence: Synthetic oligonucleotide
uauaauuaguccauuuccu

SEQ ID NO: 3073370 - RNA, 19 nt, Artificial Sequence
  Description of Artificial Sequence: Synthetic oligonucleotide
uuaaugacauguagaaaag

SEQ ID NO: 3073371 - RNA, 19 nt, Artificial Sequence
  Description of Artificial Sequence: Synthetic oligonucleotide
uaaauggaccuacugauac

SEQ ID NO: 3073372 - RNA, 19 nt, Artificial Sequence
  Description of Artificial Sequence: Synthetic oligonucleotide
cuacauguaaaauaaaaca

SEQ ID NO: 3073373 - RNA, 19 nt, Artificial Sequence
  Description of Artificial Sequence: Synthetic oligonucleotide
ugauacauaaaauauuaua

SEQ ID NO: 3073374 - RNA, 19 nt, Artificial Sequence
  Description of Artificial Sequence: Synthetic oligonucleotide
uuuuaaacucuauuaucag

SEQ ID NO: 3073375 - RNA, 19 nt, Artificial Sequence
  Description of Artificial Sequence: Synthetic oligonucleotide
ucuauuaucaggacagcac

SEQ ID NO: 3073376 - RNA, 19 nt, Artificial Sequence
  Description of Artificial Sequence: Synthetic oligonucleotide
uacauaaaauauuauaauu

SEQ ID NO: 3073377 - RNA, 19 nt, Artificial Sequence
  Description of Artificial Sequence: Synthetic oligonucleotide
aauauuauaauuaguccau

SEQ ID NO: 3073378 - RNA, 19 nt, Artificial Sequence
  Description of Artificial Sequence: Synthetic oligonucleotide
aauaaaacauucucaggua

SEQ ID NO: 3073379 - RNA, 19 nt, Artificial Sequence
  Description of Artificial Sequence: Synthetic oligonucleotide
acuuaauaaauggaccuac

SEQ ID NO: 3073380 - RNA, 19 nt, Artificial Sequence
  Description of Artificial Sequence: Synthetic oligonucleotide
aaaaggaggcaacacauua

SEQ ID NO: 3073381 - RNA, 19 nt, Artificial Sequence
  Description of Artificial Sequence: Synthetic oligonucleotide
auacauaaaauauuauaau

SEQ ID NO: 3073382 - RNA, 19 nt, Artificial Sequence
  Description of Artificial Sequence: Synthetic oligonucleotide
cauucucagguaaugaggc

SEQ ID NO: 3073383 - RNA, 19 nt, Artificial Sequence
  Description of Artificial Sequence: Synthetic oligonucleotide
agcacuuaauaaauggacc

SEQ ID NO: 3073384 - RNA, 19 nt, Artificial Sequence
  Description of Artificial Sequence: Synthetic oligonucleotide
aaacucuauuaucaggaca

SEQ ID NO: 3073385 - RNA, 19 nt, Artificial Sequence
  Description of Artificial Sequence: Synthetic oligonucleotide
uagaaaaggaggcaacaca

SEQ ID NO: 3073386 - RNA, 19 nt, Artificial Sequence
  Description of Artificial Sequence: Synthetic oligonucleotide
uuucacuacauguaaaaua

SEQ ID NO: 3073387 - RNA, 19 nt, Artificial Sequence
  Description of Artificial Sequence: Synthetic oligonucleotide
aaaacauucucagguaaug

SEQ ID NO: 3073388 - RNA, 19 nt, Artificial Sequence
  Description of Artificial Sequence: Synthetic oligonucleotide
aaugaggccauuugucucu

SEQ ID NO: 3073389 - RNA, 19 nt, Artificial Sequence
  Description of Artificial Sequence: Synthetic oligonucleotide
guuuguuaaugacauguag

SEQ ID NO: 3073390 - RNA, 19 nt, Artificial Sequence
  Description of Artificial Sequence: Synthetic oligonucleotide
ggaggcaacacauuaaaag

SEQ ID NO: 3073391 - RNA, 19 nt, Artificial Sequence
  Description of Artificial Sequence: Synthetic oligonucleotide
ugcccuugaacucagagau

SEQ ID NO: 3073392 - RNA, 19 nt, Artificial Sequence
  Description of Artificial Sequence: Synthetic oligonucleotide
aauuaguccauuuccuuuu

SEQ ID NO: 3073393 - RNA, 19 nt, Artificial Sequence
  Description of Artificial Sequence: Synthetic oligonucleotide
guaaaauaaaacauucuca

SEQ ID NO: 3073394 - RNA, 19 nt, Artificial Sequence
  Description of Artificial Sequence: Synthetic oligonucleotide
acauaaaauauuauaauua

SEQ ID NO: 3073395 - RNA, 19 nt, Artificial Sequence
  Description of Artificial Sequence: Synthetic oligonucleotide
aauucugaugaguuuguua

SEQ ID NO: 3073396 - RNA, 19 nt, Artificial Sequence
  Description of Artificial Sequence: Synthetic oligonucleotide
uaaugacauguagaaaagg

SEQ ID NO: 3073397 - RNA, 19 nt, Artificial Sequence
  Description of Artificial Sequence: Synthetic oligonucleotide
ucugaugaguuuguuaaug

SEQ ID NO: 3073398 - RNA, 19 nt, Artificial Sequence
  Description of Artificial Sequence: Synthetic oligonucleotide
auaaaacauucucagguaa

SEQ ID NO: 3073399 - RNA, 19 nt, Artificial Sequence
  Description of Artificial Sequence: Synthetic oligonucleotide
uauuauaauuaguccauuu

SEQ ID NO: 3073400 - RNA, 19 nt, Artificial Sequence
  Description of Artificial Sequence: Synthetic oligonucleotide
gaugaguuuguuaaugaca

SEQ ID NO: 3073401 - RNA, 19 nt, Artificial Sequence
  Description of Artificial Sequence: Synthetic oligonucleotide
aaggaggcaacacauuaaa

SEQ ID NO: 3073402 - RNA, 19 nt, Artificial Sequence
  Description of Artificial Sequence: Synthetic oligonucleotide
auucucagguaaugaggcc

SEQ ID NO: 3073403 - RNA, 19 nt, Artificial Sequence
  Description of Artificial Sequence: Synthetic oligonucleotide
cagcacuuaauaaauggac

SEQ ID NO: 3073404 - RNA, 19 nt, Artificial Sequence
  Description of Artificial Sequence: Synthetic oligonucleotide
uggaccuacugauacauaa

SEQ ID NO: 3073405 - RNA, 19 nt, Artificial Sequence
  Description of Artificial Sequence: Synthetic oligonucleotide
uacugauacauaaaauauu

SEQ ID NO: 3073406 - RNA, 19 nt, Artificial Sequence
  Description of Artificial Sequence: Synthetic oligonucleotide
ucucuuuucacuacaugua

SEQ ID NO: 3073407 - RNA, 19 nt, Artificial Sequence
  Description of Artificial Sequence: Synthetic oligonucleotide
aaaacuucuuugguugucu

SEQ ID NO: 3073408 - RNA, 19 nt, Artificial Sequence
  Description of Artificial Sequence: Synthetic oligonucleotide
ugaugaguuuguuaaugac

SEQ ID NO: 3073409 - RNA, 19 nt, Artificial Sequence
  Description of Artificial Sequence: Synthetic oligonucleotide
uugguugucucuuuucacu

SEQ ID NO: 3073410 - RNA, 19 nt, Artificial Sequence
  Description of Artificial Sequence: Synthetic oligonucleotide
acugauacauaaaauauua

SEQ ID NO: 3073411 - RNA, 19 nt, Artificial Sequence
  Description of Artificial Sequence: Synthetic oligonucleotide
acauucucagguaaugagg

SEQ ID NO: 3073412 - RNA, 19 nt, Artificial Sequence
  Description of Artificial Sequence: Synthetic oligonucleotide
auaaaauauuauaauuagu

SEQ ID NO: 3073413 - RNA, 19 nt, Artificial Sequence
  Description of Artificial Sequence: Synthetic oligonucleotide
cugaauucugaugaguuug

SEQ ID NO: 3073414 - RNA, 19 nt, Artificial Sequence
  Description of Artificial Sequence: Synthetic oligonucleotide
aauggaccuacugauacau

SEQ ID NO: 3073415 - RNA, 19 nt, Artificial Sequence
  Description of Artificial Sequence: Synthetic oligonucleotide
uccauuuccuuuucuucag

SEQ ID NO: 3073416 - RNA, 19 nt, Artificial Sequence
  Description of Artificial Sequence: Synthetic oligonucleotide
cauuuccuuuucuucagag

SEQ ID NO: 3073417 - RNA, 19 nt, Artificial Sequence
  Description of Artificial Sequence: Synthetic oligonucleotide
uaauuaguccauuuccuuu

SEQ ID NO: 3073418 - RNA, 19 nt, Artificial Sequence
  Description of Artificial Sequence: Synthetic oligonucleotide
aaauggaccuacugauaca

SEQ ID NO: 3073419 - RNA, 19 nt, Artificial Sequence
  Description of Artificial Sequence: Synthetic oligonucleotide
aucaccuuggcucagcuuu

SEQ ID NO: 3073420 - RNA, 19 nt, Artificial Sequence
  Description of Artificial Sequence: Synthetic oligonucleotide
uugucucugaauucugaug

SEQ ID NO: 3073421 - RNA, 19 nt, Artificial Sequence
  Description of Artificial Sequence: Synthetic oligonucleotide
aaacauucucagguaauga

SEQ ID NO: 3073422 - RNA, 19 nt, Artificial Sequence
  Description of Artificial Sequence: Synthetic oligonucleotide
augacauguagaaaaggag

SEQ ID NO: 3073423 - RNA, 19 nt, Artificial Sequence
  Description of Artificial Sequence: Synthetic oligonucleotide
ugaauucugaugaguuugu

SEQ ID NO: 3073424 - RNA, 19 nt, Artificial Sequence
  Description of Artificial Sequence: Synthetic oligonucleotide
aacuucuuugguugucucu

SEQ ID NO: 3073425 - RNA, 19 nt, Artificial Sequence
  Description of Artificial Sequence: Synthetic oligonucleotide
uucucagguaaugaggcca

SEQ ID NO: 3073426 - RNA, 19 nt, Artificial Sequence
  Description of Artificial Sequence: Synthetic oligonucleotide
uaaacucuauuaucaggac

SEQ ID NO: 3073427 - RNA, 19 nt, Artificial Sequence
  Description of Artificial Sequence: Synthetic oligonucleotide
agguguguaccacuaucac

SEQ ID NO: 3073428 - RNA, 19 nt, Artificial Sequence
  Description of Artificial Sequence: Synthetic oligonucleotide
ucuuuucacuacauguaaa

SEQ ID NO: 3073429 - RNA, 19 nt, Artificial Sequence
  Description of Artificial Sequence: Synthetic oligonucleotide
auuaguccauuuccuuuuc

SEQ ID NO: 3073430 - RNA, 19 nt, Artificial Sequence
  Description of Artificial Sequence: Synthetic oligonucleotide
auaauuaguccauuuccuu

SEQ ID NO: 3073431 - RNA, 19 nt, Artificial Sequence
  Description of Artificial Sequence: Synthetic oligonucleotide
aucaggacagcacuuaaua

SEQ ID NO: 3073432 - RNA, 19 nt, Artificial Sequence
  Description of Artificial Sequence: Synthetic oligonucleotide
uuugguugucucuuuucac

SEQ ID NO: 3073433 - RNA, 19 nt, Artificial Sequence
  Description of Artificial Sequence: Synthetic oligonucleotide
gaguuuguuaaugacaugu

SEQ ID NO: 3073434 - RNA, 19 nt, Artificial Sequence
  Description of Artificial Sequence: Synthetic oligonucleotide
augaguuuguuaaugacau

SEQ ID NO: 3073435 - RNA, 19 nt, Artificial Sequence
  Description of Artificial Sequence: Synthetic oligonucleotide
uaaugaggccauuugucuc

SEQ ID NO: 3073436 - RNA, 19 nt, Artificial Sequence
  Description of Artificial Sequence: Synthetic oligonucleotide
aagguguguaccacuauca

SEQ ID NO: 3073437 - RNA, 19 nt, Artificial Sequence
  Description of Artificial Sequence: Synthetic oligonucleotide
agguaaugaggccauuugu

SEQ ID NO: 3073438 - RNA, 19 nt, Artificial Sequence
  Description of Artificial Sequence: Synthetic oligonucleotide
agaaaaggaggcaacacau

SEQ ID NO: 3073439 - RNA, 19 nt, Artificial Sequence
  Description of Artificial Sequence: Synthetic oligonucleotide
acauguaaaauaaaacauu

SEQ ID NO: 3073440 - RNA, 19 nt, Artificial Sequence
  Description of Artificial Sequence: Synthetic oligonucleotide
gaccuacugauacauaaaa

SEQ ID NO: 3073441 - RNA, 19 nt, Artificial Sequence
  Description of Artificial Sequence: Synthetic oligonucleotide
ucaggacagcacuuaauaa

SEQ ID NO: 3073442 - RNA, 19 nt, Artificial Sequence
  Description of Artificial Sequence: Synthetic oligonucleotide
uuaucaggacagcacuuaa

SEQ ID NO: 3073443 - RNA, 19 nt, Artificial Sequence
  Description of Artificial Sequence: Synthetic oligonucleotide
uuuuauuaccaggcugccc

SEQ ID NO: 3073444 - RNA, 19 nt, Artificial Sequence
  Description of Artificial Sequence: Synthetic oligonucleotide
gucucuuuucacuacaugu

SEQ ID NO: 3073445 - RNA, 19 nt, Artificial Sequence
  Description of Artificial Sequence: Synthetic oligonucleotide
uauuaucaggacagcacuu

SEQ ID NO: 3073446 - RNA, 19 nt, Artificial Sequence
  Description of Artificial Sequence: Synthetic oligonucleotide
auguaaaauaaaacauucu

SEQ ID NO: 3073447 - RNA, 19 nt, Artificial Sequence
  Description of Artificial Sequence: Synthetic oligonucleotide
ucugaauucugaugaguuu

SEQ ID NO: 3073448 - RNA, 19 nt, Artificial Sequence
  Description of Artificial Sequence: Synthetic oligonucleotide
uguuaaugacauguagaaa

SEQ ID NO: 3073449 - RNA, 19 nt, Artificial Sequence
  Description of Artificial Sequence: Synthetic oligonucleotide
ucuuugguugucucuuuuc

SEQ ID NO: 3073450 - RNA, 19 nt, Artificial Sequence
  Description of Artificial Sequence: Synthetic oligonucleotide
cguguguugggauuaaagg

SEQ ID NO: 3073451 - RNA, 19 nt, Artificial Sequence
  Description of Artificial Sequence: Synthetic oligonucleotide
cuacugauacauaaaauau

SEQ ID NO: 3073452 - RNA, 19 nt, Artificial Sequence
  Description of Artificial Sequence: Synthetic oligonucleotide
gguguguaccacuaucacc

SEQ ID NO: 3073453 - RNA, 19 nt, Artificial Sequence
  Description of Artificial Sequence: Synthetic oligonucleotide
acucuauuaucaggacagc

SEQ ID NO: 3073454 - RNA, 19 nt, Artificial Sequence
  Description of Artificial Sequence: Synthetic oligonucleotide
ugaguuuguuaaugacaug

SEQ ID NO: 3073455 - RNA, 19 nt, Artificial Sequence
  Description of Artificial Sequence: Synthetic oligonucleotide
uuaguccauuuccuuuucu

SEQ ID NO: 3073456 - RNA, 19 nt, Artificial Sequence
  Description of Artificial Sequence: Synthetic oligonucleotide
cuuugguugucucuuuuca

SEQ ID NO: 3073457 - RNA, 19 nt, Artificial Sequence
  Description of Artificial Sequence: Synthetic oligonucleotide
acuaucaccuuggcucagc

SEQ ID NO: 3073458 - RNA, 19 nt, Artificial Sequence
  Description of Artificial Sequence: Synthetic oligonucleotide
caggacagcacuuaauaaa

SEQ ID NO: 3073459 - RNA, 19 nt, Artificial Sequence
  Description of Artificial Sequence: Synthetic oligonucleotide
uaucaggacagcacuuaau

SEQ ID NO: 3073460 - RNA, 19 nt, Artificial Sequence
  Description of Artificial Sequence: Synthetic oligonucleotide
cagguaaugaggccauuug

SEQ ID NO: 3073461 - RNA, 19 nt, Artificial Sequence
  Description of Artificial Sequence: Synthetic oligonucleotide
ucucugaauucugaugagu

SEQ ID NO: 3073462 - RNA, 19 nt, Artificial Sequence
  Description of Artificial Sequence: Synthetic oligonucleotide
guguguaccacuaucaccu

SEQ ID NO: 3073463 - RNA, 19 nt, Artificial Sequence
  Description of Artificial Sequence: Synthetic oligonucleotide
cugaugaguuuguuaauga

SEQ ID NO: 3073464 - RNA, 19 nt, Artificial Sequence
  Description of Artificial Sequence: Synthetic oligonucleotide
aaaggaggcaacacauuaa

SEQ ID NO: 3073465 - RNA, 19 nt, Artificial Sequence
  Description of Artificial Sequence: Synthetic oligonucleotide
guguguugggauuaaaggu

SEQ ID NO: 3073466 - RNA, 19 nt, Artificial Sequence
  Description of Artificial Sequence: Synthetic oligonucleotide
guaaugaggccauuugucu

SEQ ID NO: 3073467 - RNA, 19 nt, Artificial Sequence
  Description of Artificial Sequence: Synthetic oligonucleotide
acagcacuuaauaaaugga

SEQ ID NO: 3073468 - RNA, 19 nt, Artificial Sequence
  Description of Artificial Sequence: Synthetic oligonucleotide
ccuacugauacauaaaaua

SEQ ID NO: 3073469 - RNA, 19 nt, Artificial Sequence
  Description of Artificial Sequence: Synthetic oligonucleotide
uuccuuuucuucagagcaa

SEQ ID NO: 3073470 - RNA, 19 nt, Artificial Sequence
  Description of Artificial Sequence: Synthetic oligonucleotide
ucucagguaaugaggccau

SEQ ID NO: 3073471 - RNA, 19 nt, Artificial Sequence
  Description of Artificial Sequence: Synthetic oligonucleotide
uaguccauuuccuuuucuu

SEQ ID NO: 3073472 - RNA, 19 nt, Artificial Sequence
  Description of Artificial Sequence: Synthetic oligonucleotide
ugguugucucuuuucacua

SEQ ID NO: 3073473 - RNA, 19 nt, Artificial Sequence
  Description of Artificial Sequence: Synthetic oligonucleotide
acauguagaaaaggaggca

SEQ ID NO: 3073474 - RNA, 19 nt, Artificial Sequence
  Description of Artificial Sequence: Synthetic oligonucleotide
cuauuaucaggacagcacu

SEQ ID NO: 3073475 - RNA, 19 nt, Artificial Sequence
  Description of Artificial Sequence: Synthetic oligonucleotide
aggacagcacuuaauaaau

SEQ ID NO: 3073476 - RNA, 19 nt, Artificial Sequence
  Description of Artificial Sequence: Synthetic oligonucleotide
uccuuuucuucagagcaaa

SEQ ID NO: 3073477 - RNA, 19 nt, Artificial Sequence
  Description of Artificial Sequence: Synthetic oligonucleotide
cauguagaaaaggaggcaa

SEQ ID NO: 3073478 - RNA, 19 nt, Artificial Sequence
  Description of Artificial Sequence: Synthetic oligonucleotide
uugucucuuuucacuacau

SEQ ID NO: 3073479 - RNA, 19 nt, Artificial Sequence
  Description of Artificial Sequence: Synthetic oligonucleotide
gguaaugaggccauuuguc

SEQ ID NO: 3073480 - RNA, 19 nt, Artificial Sequence
  Description of Artificial Sequence: Synthetic oligonucleotide
auuaucaggacagcacuua

SEQ ID NO: 3073481 - RNA, 19 nt, Artificial Sequence
  Description of Artificial Sequence: Synthetic oligonucleotide
cucuuuucacuacauguaa

SEQ ID NO: 3073482 - RNA, 19 nt, Artificial Sequence
  Description of Artificial Sequence: Synthetic oligonucleotide
auuaccaggcugcccuuga

SEQ ID NO: 3073483 - RNA, 19 nt, Artificial Sequence
  Description of Artificial Sequence: Synthetic oligonucleotide
uucugaugaguuuguuaau

SEQ ID NO: 3073484 - RNA, 19 nt, Artificial Sequence
  Description of Artificial Sequence: Synthetic oligonucleotide
uggguugagaaugccaauu

SEQ ID NO: 3073485 - RNA, 19 nt, Artificial Sequence
  Description of Artificial Sequence: Synthetic oligonucleotide
ucagguaaugaggccauuu

SEQ ID NO: 3073486 - RNA, 19 nt, Artificial Sequence
  Description of Artificial Sequence: Synthetic oligonucleotide
cuuaauaaauggaccuacu

SEQ ID NO: 3073487 - RNA, 19 nt, Artificial Sequence
  Description of Artificial Sequence: Synthetic oligonucleotide
guguaccacuaucaccuug

SEQ ID NO: 3073488 - RNA, 19 nt, Artificial Sequence
  Description of Artificial Sequence: Synthetic oligonucleotide
auauuauaauuaguccauu

SEQ ID NO: 3073489 - RNA, 19 nt, Artificial Sequence
  Description of Artificial Sequence: Synthetic oligonucleotide
cucuauuaucaggacagca

SEQ ID NO: 3073490 - RNA, 19 nt, Artificial Sequence
  Description of Artificial Sequence: Synthetic oligonucleotide
uauuaccaggcugcccuug

SEQ ID NO: 3073491 - RNA, 19 nt, Artificial Sequence
  Description of Artificial Sequence: Synthetic oligonucleotide
gcacuuaauaaauggaccu

SEQ ID NO: 3073492 - RNA, 19 nt, Artificial Sequence
  Description of Artificial Sequence: Synthetic oligonucleotide
gaggccauuugucucugaa

SEQ ID NO: 3073493 - RNA, 19 nt, Artificial Sequence
  Description of Artificial Sequence: Synthetic oligonucleotide
gcugcccuugaacucagag

SEQ ID NO: 3073494 - RNA, 19 nt, Artificial Sequence
  Description of Artificial Sequence: Synthetic oligonucleotide
auaaauggaccuacugaua

SEQ ID NO: 3073495 - RNA, 19 nt, Artificial Sequence
  Description of Artificial Sequence: Synthetic oligonucleotide
accuacugauacauaaaau

SEQ ID NO: 3073496 - RNA, 19 nt, Artificial Sequence
  Description of Artificial Sequence: Synthetic oligonucleotide
cugcccuugaacucagaga

SEQ ID NO: 3073497 - RNA, 19 nt, Artificial Sequence
  Description of Artificial Sequence: Synthetic oligonucleotide
aggccauuugucucugaau

SEQ ID NO: 3073498 - RNA, 19 nt, Artificial Sequence
  Description of Artificial Sequence: Synthetic oligonucleotide
aguuuguuaaugacaugua

SEQ ID NO: 3073499 - RNA, 19 nt, Artificial Sequence
  Description of Artificial Sequence: Synthetic oligonucleotide
ccguguguugggauuaaag

SEQ ID NO: 3073500 - RNA, 19 nt, Artificial Sequence
  Description of Artificial Sequence: Synthetic oligonucleotide
guaccacuaucaccuuggc

SEQ ID NO: 3073501 - RNA, 19 nt, Artificial Sequence
  Description of Artificial Sequence: Synthetic oligonucleotide
gguugucucuuuucacuac

SEQ ID NO: 3073502 - RNA, 19 nt, Artificial Sequence
  Description of Artificial Sequence: Synthetic oligonucleotide
cucugaauucugaugaguu

SEQ ID NO: 3073503 - RNA, 19 nt, Artificial Sequence
  Description of Artificial Sequence: Synthetic oligonucleotide
uuauuaccaggcugcccuu

SEQ ID NO: 3073504 - RNA, 19 nt, Artificial Sequence
  Description of Artificial Sequence: Synthetic oligonucleotide
ucaccuuggcucagcuuuu

SEQ ID NO: 3073505 - RNA, 19 nt, Artificial Sequence
  Description of Artificial Sequence: Synthetic oligonucleotide
uaucaccuuggcucagcuu

SEQ ID NO: 3073506 - RNA, 19 nt, Artificial Sequence
  Description of Artificial Sequence: Synthetic oligonucleotide
cacuuaauaaauggaccua

SEQ ID NO: 3073507 - RNA, 19 nt, Artificial Sequence
  Description of Artificial Sequence: Synthetic oligonucleotide
ggacagcacuuaauaaaug

SEQ ID NO: 3073508 - RNA, 19 nt, Artificial Sequence
  Description of Artificial Sequence: Synthetic oligonucleotide
uguguaccacuaucaccuu

SEQ ID NO: 3073509 - RNA, 19 nt, Artificial Sequence
  Description of Artificial Sequence: Synthetic oligonucleotide
ggccauuugucucugaauu

SEQ ID NO: 3073510 - RNA, 19 nt, Artificial Sequence
  Description of Artificial Sequence: Synthetic oligonucleotide
ugaggccauuugucucuga

SEQ ID NO: 3073511 - RNA, 19 nt, Artificial Sequence
  Description of Artificial Sequence: Synthetic oligonucleotide
aggaggcaacacauuaaaa

SEQ ID NO: 3073512 - RNA, 19 nt, Artificial Sequence
  Description of Artificial Sequence: Synthetic oligonucleotide
caggcugcccuugaacuca

SEQ ID NO: 3073513 - RNA, 19 nt, Artificial Sequence
  Description of Artificial Sequence: Synthetic oligonucleotide
gaaaaggaggcaacacauu

SEQ ID NO: 3073514 - RNA, 19 nt, Artificial Sequence
  Description of Artificial Sequence: Synthetic oligonucleotide
cacuaucaccuuggcucag

SEQ ID NO: 3073515 - RNA, 19 nt, Artificial Sequence
  Description of Artificial Sequence: Synthetic oligonucleotide
cuaucaccuuggcucagcu

SEQ ID NO: 3073516 - RNA, 19 nt, Artificial Sequence
  Description of Artificial Sequence: Synthetic oligonucleotide
gguugagaaugccaauuuu

SEQ ID NO: 3073517 - RNA, 19 nt, Artificial Sequence
  Description of Artificial Sequence: Synthetic oligonucleotide
ccacuaucaccuuggcuca

SEQ ID NO: 3073518 - RNA, 19 nt, Artificial Sequence
  Description of Artificial Sequence: Synthetic oligonucleotide
ggaccuacugauacauaaa

SEQ ID NO: 3073519 - RNA, 19 nt, Artificial Sequence
  Description of Artificial Sequence: Synthetic oligonucleotide
gaauucugaugaguuuguu

SEQ ID NO: 3073520 - RNA, 19 nt, Artificial Sequence
  Description of Artificial Sequence: Synthetic oligonucleotide
ggguugagaaugccaauuu

SEQ ID NO: 3073521 - RNA, 19 nt, Artificial Sequence
  Description of Artificial Sequence: Synthetic oligonucleotide
ucccguguguugggauuaa

SEQ ID NO: 3073522 - RNA, 19 nt, Artificial Sequence
  Description of Artificial Sequence: Synthetic oligonucleotide
aggcugcccuugaacucag

SEQ ID NO: 3073523 - RNA, 19 nt, Artificial Sequence
  Description of Artificial Sequence: Synthetic oligonucleotide
auggaccuacugauacaua

SEQ ID NO: 3073524 - RNA, 19 nt, Artificial Sequence
  Description of Artificial Sequence: Synthetic oligonucleotide
ccauuuccuuuucuucaga

SEQ ID NO: 3073525 - RNA, 19 nt, Artificial Sequence
  Description of Artificial Sequence: Synthetic oligonucleotide
cuggguugagaaugccaau

SEQ ID NO: 3073526 - RNA, 19 nt, Artificial Sequence
  Description of Artificial Sequence: Synthetic oligonucleotide
cucccguguguugggauua

SEQ ID NO: 3073527 - RNA, 19 nt, Artificial Sequence
  Description of Artificial Sequence: Synthetic oligonucleotide
ccuuuucuucagagcaaaa

SEQ ID NO: 3073528 - RNA, 19 nt, Artificial Sequence
  Description of Artificial Sequence: Synthetic oligonucleotide
gcccuugaacucagagauc

SEQ ID NO: 3073529 - RNA, 19 nt, Artificial Sequence
  Description of Artificial Sequence: Synthetic oligonucleotide
cucagguaaugaggccauu

SEQ ID NO: 3073530 - RNA, 19 nt, Artificial Sequence
  Description of Artificial Sequence: Synthetic oligonucleotide
gccucccguguguugggau

SEQ ID NO: 3073531 - RNA, 19 nt, Artificial Sequence
  Description of Artificial Sequence: Synthetic oligonucleotide
cccguguguugggauuaaa

SEQ ID NO: 3073532 - RNA, 19 nt, Artificial Sequence
  Description of Artificial Sequence: Synthetic oligonucleotide
uuagcaauccuaaacaagg

SEQ ID NO: 3073533 - RNA, 19 nt, Artificial Sequence
  Description of Artificial Sequence: Synthetic oligonucleotide
agcaauaggagccauaggc

SEQ ID NO: 3073534 - RNA, 19 nt, Artificial Sequence
  Description of Artificial Sequence: Synthetic oligonucleotide
aaggcauagcaauaggagc

SEQ ID NO: 3073535 - RNA, 19 nt, Artificial Sequence
  Description of Artificial Sequence: Synthetic oligonucleotide
uugaccauuauucacacug

SEQ ID NO: 3073536 - RNA, 19 nt, Artificial Sequence
  Description of Artificial Sequence: Synthetic oligonucleotide
aucuguugagcacagacac

SEQ ID NO: 3073537 - RNA, 19 nt, Artificial Sequence
  Description of Artificial Sequence: Synthetic oligonucleotide
ugauuuagcaauccuaaac

SEQ ID NO: 3073538 - RNA, 19 nt, Artificial Sequence
  Description of Artificial Sequence: Synthetic oligonucleotide
ugcuuuuaauucauggagg

SEQ ID NO: 3073539 - RNA, 19 nt, Artificial Sequence
  Description of Artificial Sequence: Synthetic oligonucleotide
uccuaaacaaggcauagca

SEQ ID NO: 3073540 - RNA, 19 nt, Artificial Sequence
  Description of Artificial Sequence: Synthetic oligonucleotide
aauccacacagauugacca

SEQ ID NO: 3073541 - RNA, 19 nt, Artificial Sequence
  Description of Artificial Sequence: Synthetic oligonucleotide
uucauggaggauacgaagg

SEQ ID NO: 3073542 - RNA, 19 nt, Artificial Sequence
  Description of Artificial Sequence: Synthetic oligonucleotide
agaucuguugagcacagac

SEQ ID NO: 3073543 - RNA, 19 nt, Artificial Sequence
  Description of Artificial Sequence: Synthetic oligonucleotide
gauuuagcaauccuaaaca

SEQ ID NO: 3073544 - RNA, 19 nt, Artificial Sequence
  Description of Artificial Sequence: Synthetic oligonucleotide
cacaucuugaccuuguacc

SEQ ID NO: 3073545 - RNA, 19 nt, Artificial Sequence
  Description of Artificial Sequence: Synthetic oligonucleotide
cacagauugaccauuauuc

SEQ ID NO: 3073546 - RNA, 19 nt, Artificial Sequence
  Description of Artificial Sequence: Synthetic oligonucleotide
auuacuccacuccccaucc

SEQ ID NO: 3073547 - RNA, 19 nt, Artificial Sequence
  Description of Artificial Sequence: Synthetic oligonucleotide
ucuugaagagggcacaucu

SEQ ID NO: 3073548 - RNA, 19 nt, Artificial Sequence
  Description of Artificial Sequence: Synthetic oligonucleotide
aagaccucagaucuguuga

SEQ ID NO: 3073549 - RNA, 19 nt, Artificial Sequence
  Description of Artificial Sequence: Synthetic oligonucleotide
guugagcacagacacaagg

SEQ ID NO: 3073550 - RNA, 19 nt, Artificial Sequence
  Description of Artificial Sequence: Synthetic oligonucleotide
aacaaggcauagcaauagg

SEQ ID NO: 3073551 - RNA, 19 nt, Artificial Sequence
  Description of Artificial Sequence: Synthetic oligonucleotide
uuuuaauucauggaggaua

SEQ ID NO: 3073552 - RNA, 19 nt, Artificial Sequence
  Description of Artificial Sequence: Synthetic oligonucleotide
uuucuggcaggccaaauca

SEQ ID NO: 3073553 - RNA, 19 nt, Artificial Sequence
  Description of Artificial Sequence: Synthetic oligonucleotide
ucagccauuacuccacucc

SEQ ID NO: 3073554 - RNA, 19 nt, Artificial Sequence
  Description of Artificial Sequence: Synthetic oligonucleotide
cugcuuuuaauucauggag

SEQ ID NO: 3073555 - RNA, 19 nt, Artificial Sequence
  Description of Artificial Sequence: Synthetic oligonucleotide
caucaaaccaugauuuagc

SEQ ID NO: 3073556 - RNA, 19 nt, Artificial Sequence
  Description of Artificial Sequence: Synthetic oligonucleotide
aggcauagcaauaggagcc

SEQ ID NO: 3073557 - RNA, 19 nt, Artificial Sequence
  Description of Artificial Sequence: Synthetic oligonucleotide
uaauucauggaggauacga

SEQ ID NO: 3073558 - RNA, 19 nt, Artificial Sequence
  Description of Artificial Sequence: Synthetic oligonucleotide
aaacaaggcauagcaauag

SEQ ID NO: 3073559 - RNA, 19 nt, Artificial Sequence
  Description of Artificial Sequence: Synthetic oligonucleotide
acacaagguguccugaggg

SEQ ID NO: 3073560 - RNA, 19 nt, Artificial Sequence
  Description of Artificial Sequence: Synthetic oligonucleotide
caaggcauagcaauaggag

SEQ ID NO: 3073561 - RNA, 19 nt, Artificial Sequence
  Description of Artificial Sequence: Synthetic oligonucleotide
auucauggaggauacgaag

SEQ ID NO: 3073562 - RNA, 19 nt, Artificial Sequence
  Description of Artificial Sequence: Synthetic oligonucleotide
uugaccuuguaccugagau

SEQ ID NO: 3073563 - RNA, 19 nt, Artificial Sequence
  Description of Artificial Sequence: Synthetic oligonucleotide
agagggcacaucuuccucc

SEQ ID NO: 3073564 - RNA, 19 nt, Artificial Sequence
  Description of Artificial Sequence: Synthetic oligonucleotide
aucacaucagccauuacuc

SEQ ID NO: 3073565 - RNA, 19 nt, Artificial Sequence
  Description of Artificial Sequence: Synthetic oligonucleotide
aauccuaaacaaggcauag

SEQ ID NO: 3073566 - RNA, 19 nt, Artificial Sequence
  Description of Artificial Sequence: Synthetic oligonucleotide
ugagcacagacacaaggug

SEQ ID NO: 3073567 - RNA, 19 nt, Artificial Sequence
  Description of Artificial Sequence: Synthetic oligonucleotide
aauaggagccauaggcucg

SEQ ID NO: 3073568 - RNA, 19 nt, Artificial Sequence
  Description of Artificial Sequence: Synthetic oligonucleotide
cacugcuuuuaauucaugg

SEQ ID NO: 3073569 - RNA, 19 nt, Artificial Sequence
  Description of Artificial Sequence: Synthetic oligonucleotide
auagcaauaggagccauag

SEQ ID NO: 3073570 - RNA, 19 nt, Artificial Sequence
  Description of Artificial Sequence: Synthetic oligonucleotide
ucagcaucaaaccaugauu

SEQ ID NO: 3073571 - RNA, 19 nt, Artificial Sequence
  Description of Artificial Sequence: Synthetic oligonucleotide
aaccaugauuuagcaaucc

SEQ ID NO: 3073572 - RNA, 19 nt, Artificial Sequence
  Description of Artificial Sequence: Synthetic oligonucleotide
gaaggaagaccucagaucu

SEQ ID NO: 3073573 - RNA, 19 nt, Artificial Sequence
  Description of Artificial Sequence: Synthetic oligonucleotide
uuguaccugagauaagagc

SEQ ID NO: 3073574 - RNA, 19 nt, Artificial Sequence
  Description of Artificial Sequence: Synthetic oligonucleotide
acugcuuuuaauucaugga

SEQ ID NO: 3073575 - RNA, 19 nt, Artificial Sequence
  Description of Artificial Sequence: Synthetic oligonucleotide
uggagcccaauccacacag

SEQ ID NO: 3073576 - RNA, 19 nt, Artificial Sequence
  Description of Artificial Sequence: Synthetic oligonucleotide
gaggauacgaaggaagacc

SEQ ID NO: 3073577 - RNA, 19 nt, Artificial Sequence
  Description of Artificial Sequence: Synthetic oligonucleotide
agcugauucuugaagaggg

SEQ ID NO: 3073578 - RNA, 19 nt, Artificial Sequence
  Description of Artificial Sequence: Synthetic oligonucleotide
uugaagagggcacaucuuc

SEQ ID NO: 3073579 - RNA, 19 nt, Artificial Sequence
  Description of Artificial Sequence: Synthetic oligonucleotide
uucacacugcuuuuaauuc

SEQ ID NO: 3073580 - RNA, 19 nt, Artificial Sequence
  Description of Artificial Sequence: Synthetic oligonucleotide
ugauucuugaagagggcac

SEQ ID NO: 3073581 - RNA, 19 nt, Artificial Sequence
  Description of Artificial Sequence: Synthetic oligonucleotide
ugaagagggcacaucuucc

SEQ ID NO: 3073582 - RNA, 19 nt, Artificial Sequence
  Description of Artificial Sequence: Synthetic oligonucleotide
uugagcacagacacaaggu

SEQ ID NO: 3073583 - RNA, 19 nt, Artificial Sequence
  Description of Artificial Sequence: Synthetic oligonucleotide
ucauggaggauacgaagga

SEQ ID NO: 3073584 - RNA, 19 nt, Artificial Sequence
  Description of Artificial Sequence: Synthetic oligonucleotide
uuggguucuugucccagcg

SEQ ID NO: 3073585 - RNA, 19 nt, Artificial Sequence
  Description of Artificial Sequence: Synthetic oligonucleotide
auucacacugcuuuuaauu

SEQ ID NO: 3073586 - RNA, 19 nt, Artificial Sequence
  Description of Artificial Sequence: Synthetic oligonucleotide
uccauuggguucuuguccc

SEQ ID NO: 3073587 - RNA, 19 nt, Artificial Sequence
  Description of Artificial Sequence: Synthetic oligonucleotide
acagauugaccauuauuca

SEQ ID NO: 3073588 - RNA, 19 nt, Artificial Sequence
  Description of Artificial Sequence: Synthetic oligonucleotide
aaaucagcaucaaaccaug

SEQ ID NO: 3073589 - RNA, 19 nt, Artificial Sequence
  Description of Artificial Sequence: Synthetic oligonucleotide
uaaacaaggcauagcaaua

SEQ ID NO: 3073590 - RNA, 19 nt, Artificial Sequence
  Description of Artificial Sequence: Synthetic oligonucleotide
uccccauccaccuccauug

SEQ ID NO: 3073591 - RNA, 19 nt, Artificial Sequence
  Description of Artificial Sequence: Synthetic oligonucleotide
acaagguguccugagggcc

SEQ ID NO: 3073592 - RNA, 19 nt, Artificial Sequence
  Description of Artificial Sequence: Synthetic oligonucleotide
uggaggauacgaaggaaga

SEQ ID NO: 3073593 - RNA, 19 nt, Artificial Sequence
  Description of Artificial Sequence: Synthetic oligonucleotide
gaagaccucagaucuguug

SEQ ID NO: 3073594 - RNA, 19 nt, Artificial Sequence
  Description of Artificial Sequence: Synthetic oligonucleotide
gauugaccauuauucacac

SEQ ID NO: 3073595 - RNA, 19 nt, Artificial Sequence
  Description of Artificial Sequence: Synthetic oligonucleotide
auuggguucuugucccagc

SEQ ID NO: 3073596 - RNA, 19 nt, Artificial Sequence
  Description of Artificial Sequence: Synthetic oligonucleotide
gauacgaaggaagaccuca

SEQ ID NO: 3073597 - RNA, 19 nt, Artificial Sequence
  Description of Artificial Sequence: Synthetic oligonucleotide
gacacaagguguccugagg

SEQ ID NO: 3073598 - RNA, 19 nt, Artificial Sequence
  Description of Artificial Sequence: Synthetic oligonucleotide
caaaccaugauuuagcaau

SEQ ID NO: 3073599 - RNA, 19 nt, Artificial Sequence
  Description of Artificial Sequence: Synthetic oligonucleotide
uuccuccacaucuugaccu

SEQ ID NO: 3073600 - RNA, 19 nt, Artificial Sequence
  Description of Artificial Sequence: Synthetic oligonucleotide
aucaaaccaugauuuagca

SEQ ID NO: 3073601 - RNA, 19 nt, Artificial Sequence
  Description of Artificial Sequence: Synthetic oligonucleotide
ucuggcaggccaaaucagc

SEQ ID NO: 3073602 - RNA, 19 nt, Artificial Sequence
  Description of Artificial Sequence: Synthetic oligonucleotide
ucacacugcuuuuaauuca

SEQ ID NO: 3073603 - RNA, 19 nt, Artificial Sequence
  Description of Artificial Sequence: Synthetic oligonucleotide
agcaauccuaaacaaggca

SEQ ID NO: 3073604 - RNA, 19 nt, Artificial Sequence
  Description of Artificial Sequence: Synthetic oligonucleotide
cagauugaccauuauucac

SEQ ID NO: 3073605 - RNA, 19 nt, Artificial Sequence
  Description of Artificial Sequence: Synthetic oligonucleotide
ugaccauuauucacacugc

SEQ ID NO: 3073606 - RNA, 19 nt, Artificial Sequence
  Description of Artificial Sequence: Synthetic oligonucleotide
uagcaauccuaaacaaggc

SEQ ID NO: 3073607 - RNA, 19 nt, Artificial Sequence
  Description of Artificial Sequence: Synthetic oligonucleotide
aaaccaugauuuagcaauc

SEQ ID NO: 3073608 - RNA, 19 nt, Artificial Sequence
  Description of Artificial Sequence: Synthetic oligonucleotide
cuuguaccugagauaagag

SEQ ID NO: 3073609 - RNA, 19 nt, Artificial Sequence
  Description of Artificial Sequence: Synthetic oligonucleotide
caauccacacagauugacc

SEQ ID NO: 3073610 - RNA, 19 nt, Artificial Sequence
  Description of Artificial Sequence: Synthetic oligonucleotide
gcccaauccacacagauug

SEQ ID NO: 3073611 - RNA, 19 nt, Artificial Sequence
  Description of Artificial Sequence: Synthetic oligonucleotide
uuauucacacugcuuuuaa

SEQ ID NO: 3073612 - RNA, 19 nt, Artificial Sequence
  Description of Artificial Sequence: Synthetic oligonucleotide
agauugaccauuauucaca

SEQ ID NO: 3073613 - RNA, 19 nt, Artificial Sequence
  Description of Artificial Sequence: Synthetic oligonucleotide
ucagaucuguugagcacag

SEQ ID NO: 3073614 - RNA, 19 nt, Artificial Sequence
  Description of Artificial Sequence: Synthetic oligonucleotide
acaucuugaccuuguaccu

SEQ ID NO: 3073615 - RNA, 19 nt, Artificial Sequence
  Description of Artificial Sequence: Synthetic oligonucleotide
agccauaggcucgggaucc

SEQ ID NO: 3073616 - RNA, 19 nt, Artificial Sequence
  Description of Artificial Sequence: Synthetic oligonucleotide
ucacaucagccauuacucc

SEQ ID NO: 3073617 - RNA, 19 nt, Artificial Sequence
  Description of Artificial Sequence: Synthetic oligonucleotide
gauggagcccaauccacac

SEQ ID NO: 3073618 - RNA, 19 nt, Artificial Sequence
  Description of Artificial Sequence: Synthetic oligonucleotide
ucaaaccaugauuuagcaa

SEQ ID NO: 3073619 - RNA, 19 nt, Artificial Sequence
  Description of Artificial Sequence: Synthetic oligonucleotide
aauucauggaggauacgaa

SEQ ID NO: 3073620 - RNA, 19 nt, Artificial Sequence
  Description of Artificial Sequence: Synthetic oligonucleotide
cuaaacaaggcauagcaau

SEQ ID NO: 3073621 - RNA, 19 nt, Artificial Sequence
  Description of Artificial Sequence: Synthetic oligonucleotide
aucagcaucaaaccaugau

SEQ ID NO: 3073622 - RNA, 19 nt, Artificial Sequence
  Description of Artificial Sequence: Synthetic oligonucleotide
auccuaaacaaggcauagc

SEQ ID NO: 3073623 - RNA, 19 nt, Artificial Sequence
  Description of Artificial Sequence: Synthetic oligonucleotide
uagcaauaggagccauagg

SEQ ID NO: 3073624 - RNA, 19 nt, Artificial Sequence
  Description of Artificial Sequence: Synthetic oligonucleotide
acaucagccauuacuccac

SEQ ID NO: 3073625 - RNA, 19 nt, Artificial Sequence
  Description of Artificial Sequence: Synthetic oligonucleotide
auggaggauacgaaggaag

SEQ ID NO: 3073626 - RNA, 19 nt, Artificial Sequence
  Description of Artificial Sequence: Synthetic oligonucleotide
acgaaggaagaccucagau

SEQ ID NO: 3073627 - RNA, 19 nt, Artificial Sequence
  Description of Artificial Sequence: Synthetic oligonucleotide
gaccuuguaccugagauaa

SEQ ID NO: 3073628 - RNA, 19 nt, Artificial Sequence
  Description of Artificial Sequence: Synthetic oligonucleotide
uucuggcaggccaaaucag

SEQ ID NO: 3073629 - RNA, 19 nt, Artificial Sequence
  Description of Artificial Sequence: Synthetic oligonucleotide
gccaaaucagcaucaaacc

SEQ ID NO: 3073630 - RNA, 19 nt, Artificial Sequence
  Description of Artificial Sequence: Synthetic oligonucleotide
gaucccuuggggcagcuga

SEQ ID NO: 3073631 - RNA, 19 nt, Artificial Sequence
  Description of Artificial Sequence: Synthetic oligonucleotide
accucagaucuguugagca

SEQ ID NO: 3073632 - RNA, 19 nt, Artificial Sequence
  Description of Artificial Sequence: Synthetic oligonucleotide
accaugauuuagcaauccu

SEQ ID NO: 3073633 - RNA, 19 nt, Artificial Sequence
  Description of Artificial Sequence: Synthetic oligonucleotide
caagguguccugagggccg

SEQ ID NO: 3073634 - RNA, 19 nt, Artificial Sequence
  Description of Artificial Sequence: Synthetic oligonucleotide
uuaauucauggaggauacg

SEQ ID NO: 3073635 - RNA, 19 nt, Artificial Sequence
  Description of Artificial Sequence: Synthetic oligonucleotide
ucuguugagcacagacaca

SEQ ID NO: 3073636 - RNA, 19 nt, Artificial Sequence
  Description of Artificial Sequence: Synthetic oligonucleotide
ggccaaaucagcaucaaac

SEQ ID NO: 3073637 - RNA, 19 nt, Artificial Sequence
  Description of Artificial Sequence: Synthetic oligonucleotide
acagacacaagguguccug

SEQ ID NO: 3073638 - RNA, 19 nt, Artificial Sequence
  Description of Artificial Sequence: Synthetic oligonucleotide
uacgaaggaagaccucaga

SEQ ID NO: 3073639 - RNA, 19 nt, Artificial Sequence
  Description of Artificial Sequence: Synthetic oligonucleotide
uacuccacuccccauccac

SEQ ID NO: 3073640 - RNA, 19 nt, Artificial Sequence
  Description of Artificial Sequence: Synthetic oligonucleotide
ugagggccguuucuggcag

SEQ ID NO: 3073641 - RNA, 19 nt, Artificial Sequence
  Description of Artificial Sequence: Synthetic oligonucleotide
ucgauggagcccaauccac

SEQ ID NO: 3073642 - RNA, 19 nt, Artificial Sequence
  Description of Artificial Sequence: Synthetic oligonucleotide
cauuacuccacuccccauc

SEQ ID NO: 3073643 - RNA, 19 nt, Artificial Sequence
  Description of Artificial Sequence: Synthetic oligonucleotide
acacagauugaccauuauu

SEQ ID NO: 3073644 - RNA, 19 nt, Artificial Sequence
  Description of Artificial Sequence: Synthetic oligonucleotide
agacacaagguguccugag

SEQ ID NO: 3073645 - RNA, 19 nt, Artificial Sequence
  Description of Artificial Sequence: Synthetic oligonucleotide
guucuugucccagcguugg

SEQ ID NO: 3073646 - RNA, 19 nt, Artificial Sequence
  Description of Artificial Sequence: Synthetic oligonucleotide
uguugagcacagacacaag

SEQ ID NO: 3073647 - RNA, 19 nt, Artificial Sequence
  Description of Artificial Sequence: Synthetic oligonucleotide
gcuuuuaauucauggagga

SEQ ID NO: 3073648 - RNA, 19 nt, Artificial Sequence
  Description of Artificial Sequence: Synthetic oligonucleotide
acaaggcauagcaauagga

SEQ ID NO: 3073649 - RNA, 19 nt, Artificial Sequence
  Description of Artificial Sequence: Synthetic oligonucleotide
guuucuggcaggccaaauc

SEQ ID NO: 3073650 - RNA, 19 nt, Artificial Sequence
  Description of Artificial Sequence: Synthetic oligonucleotide
agcguugggucgauggagc

SEQ ID NO: 3073651 - RNA, 19 nt, Artificial Sequence
  Description of Artificial Sequence: Synthetic oligonucleotide
uccugagggccguuucugg

SEQ ID NO: 3073652 - RNA, 19 nt, Artificial Sequence
  Description of Artificial Sequence: Synthetic oligonucleotide
cacaagguguccugagggc

SEQ ID NO: 3073653 - RNA, 19 nt, Artificial Sequence
  Description of Artificial Sequence: Synthetic oligonucleotide
aggauacgaaggaagaccu

SEQ ID NO: 3073654 - RNA, 19 nt, Artificial Sequence
  Description of Artificial Sequence: Synthetic oligonucleotide
agaccucagaucuguugag

SEQ ID NO: 3073655 - RNA, 19 nt, Artificial Sequence
  Description of Artificial Sequence: Synthetic oligonucleotide
gauucuugaagagggcaca

SEQ ID NO: 3073656 - RNA, 19 nt, Artificial Sequence
  Description of Artificial Sequence: Synthetic oligonucleotide
cagccauuacuccacuccc

SEQ ID NO: 3073657 - RNA, 19 nt, Artificial Sequence
  Description of Artificial Sequence: Synthetic oligonucleotide
uauucacacugcuuuuaau

SEQ ID NO: 3073658 - RNA, 19 nt, Artificial Sequence
  Description of Artificial Sequence: Synthetic oligonucleotide
gaucuguugagcacagaca

SEQ ID NO: 3073659 - RNA, 19 nt, Artificial Sequence
  Description of Artificial Sequence: Synthetic oligonucleotide
cuuccuccacaucuugacc

SEQ ID NO: 3073660 - RNA, 19 nt, Artificial Sequence
  Description of Artificial Sequence: Synthetic oligonucleotide
uaggcucgggaucccuugg

SEQ ID NO: 3073661 - RNA, 19 nt, Artificial Sequence
  Description of Artificial Sequence: Synthetic oligonucleotide
auaggcucgggaucccuug

SEQ ID NO: 3073662 - RNA, 19 nt, Artificial Sequence
  Description of Artificial Sequence: Synthetic oligonucleotide
accuccauuggguucuugu

SEQ ID NO: 3073663 - RNA, 19 nt, Artificial Sequence
  Description of Artificial Sequence: Synthetic oligonucleotide
augauuuagcaauccuaaa

SEQ ID NO: 3073664 - RNA, 19 nt, Artificial Sequence
  Description of Artificial Sequence: Synthetic oligonucleotide
caaaucagcaucaaaccau

SEQ ID NO: 3073665 - RNA, 19 nt, Artificial Sequence
  Description of Artificial Sequence: Synthetic oligonucleotide
caucacaucagccauuacu

SEQ ID NO: 3073666 - RNA, 19 nt, Artificial Sequence
  Description of Artificial Sequence: Synthetic oligonucleotide
auaggagccauaggcucgg

SEQ ID NO: 3073667 - RNA, 19 nt, Artificial Sequence
  Description of Artificial Sequence: Synthetic oligonucleotide
gcaucaaaccaugauuuag

SEQ ID NO: 3073668 - RNA, 19 nt, Artificial Sequence
  Description of Artificial Sequence: Synthetic oligonucleotide
aucagccauuacuccacuc

SEQ ID NO: 3073669 - RNA, 19 nt, Artificial Sequence
  Description of Artificial Sequence: Synthetic oligonucleotide
uucaucacaucagccauua

SEQ ID NO: 3073670 - RNA, 19 nt, Artificial Sequence
  Description of Artificial Sequence: Synthetic oligonucleotide
cacaucagccauuacucca

SEQ ID NO: 3073671 - RNA, 19 nt, Artificial Sequence
  Description of Artificial Sequence: Synthetic oligonucleotide
uccaccuccauuggguucu

SEQ ID NO: 3073672 - RNA, 19 nt, Artificial Sequence
  Description of Artificial Sequence: Synthetic oligonucleotide
ggucgauggagcccaaucc

SEQ ID NO: 3073673 - RNA, 19 nt, Artificial Sequence
  Description of Artificial Sequence: Synthetic oligonucleotide
aggaagaccucagaucugu

SEQ ID NO: 3073674 - RNA, 19 nt, Artificial Sequence
  Description of Artificial Sequence: Synthetic oligonucleotide
uucuugucccagcguuggg

SEQ ID NO: 3073675 - RNA, 19 nt, Artificial Sequence
  Description of Artificial Sequence: Synthetic oligonucleotide
cagcugauucuugaagagg

SEQ ID NO: 3073676 - RNA, 19 nt, Artificial Sequence
  Description of Artificial Sequence: Synthetic oligonucleotide
uguccugagggccguuucu

SEQ ID NO: 3073677 - RNA, 19 nt, Artificial Sequence
  Description of Artificial Sequence: Synthetic oligonucleotide
auccaccuccauuggguuc

SEQ ID NO: 3073678 - RNA, 19 nt, Artificial Sequence
  Description of Artificial Sequence: Synthetic oligonucleotide
ucuugucccagcguugggu

SEQ ID NO: 3073679 - RNA, 19 nt, Artificial Sequence
  Description of Artificial Sequence: Synthetic oligonucleotide
gucgauggagcccaaucca

SEQ ID NO: 3073680 - RNA, 19 nt, Artificial Sequence
  Description of Artificial Sequence: Synthetic oligonucleotide
agccauuacuccacucccc

SEQ ID NO: 3073681 - RNA, 19 nt, Artificial Sequence
  Description of Artificial Sequence: Synthetic oligonucleotide
cuugucccagcguuggguc

SEQ ID NO: 3073682 - RNA, 19 nt, Artificial Sequence
  Description of Artificial Sequence: Synthetic oligonucleotide
ugaccuuguaccugagaua

SEQ ID NO: 3073683 - RNA, 19 nt, Artificial Sequence
  Description of Artificial Sequence: Synthetic oligonucleotide
acuccacuccccauccacc

SEQ ID NO: 3073684 - RNA, 19 nt, Artificial Sequence
  Description of Artificial Sequence: Synthetic oligonucleotide
uggggcagcugauucuuga

SEQ ID NO: 3073685 - RNA, 19 nt, Artificial Sequence
  Description of Artificial Sequence: Synthetic oligonucleotide
auuauucacacugcuuuua

SEQ ID NO: 3073686 - RNA, 19 nt, Artificial Sequence
  Description of Artificial Sequence: Synthetic oligonucleotide
gcagcugauucuugaagag

SEQ ID NO: 3073687 - RNA, 19 nt, Artificial Sequence
  Description of Artificial Sequence: Synthetic oligonucleotide
ucuugaccuuguaccugag

SEQ ID NO: 3073688 - RNA, 19 nt, Artificial Sequence
  Description of Artificial Sequence: Synthetic oligonucleotide
cuguugagcacagacacaa

SEQ ID NO: 3073689 - RNA, 19 nt, Artificial Sequence
  Description of Artificial Sequence: Synthetic oligonucleotide
ggcagcugauucuugaaga

SEQ ID NO: 3073690 - RNA, 19 nt, Artificial Sequence
  Description of Artificial Sequence: Synthetic oligonucleotide
gaccucagaucuguugagc

SEQ ID NO: 3073691 - RNA, 19 nt, Artificial Sequence
  Description of Artificial Sequence: Synthetic oligonucleotide
cucagaucuguugagcaca

SEQ ID NO: 3073692 - RNA, 19 nt, Artificial Sequence
  Description of Artificial Sequence: Synthetic oligonucleotide
cugauucuugaagagggca

SEQ ID NO: 3073693 - RNA, 19 nt, Artificial Sequence
  Description of Artificial Sequence: Synthetic oligonucleotide
auacgaaggaagaccucag

SEQ ID NO: 3073694 - RNA, 19 nt, Artificial Sequence
  Description of Artificial Sequence: Synthetic oligonucleotide
auugaccauuauucacacu

SEQ ID NO: 3073695 - RNA, 19 nt, Artificial Sequence
  Description of Artificial Sequence: Synthetic oligonucleotide
agggccguuucuggcaggc

SEQ ID NO: 3073696 - RNA, 19 nt, Artificial Sequence
  Description of Artificial Sequence: Synthetic oligonucleotide
agcaucaaaccaugauuua

SEQ ID NO: 3073697 - RNA, 19 nt, Artificial Sequence
  Description of Artificial Sequence: Synthetic oligonucleotide
gaagagggcacaucuuccu

SEQ ID NO: 3073698 - RNA, 19 nt, Artificial Sequence
  Description of Artificial Sequence: Synthetic oligonucleotide
gagccauaggcucgggauc

SEQ ID NO: 3073699 - RNA, 19 nt, Artificial Sequence
  Description of Artificial Sequence: Synthetic oligonucleotide
aaucagcaucaaaccauga

SEQ ID NO: 3073700 - RNA, 19 nt, Artificial Sequence
  Description of Artificial Sequence: Synthetic oligonucleotide
caauccuaaacaaggcaua

SEQ ID NO: 3073701 - RNA, 19 nt, Artificial Sequence
  Description of Artificial Sequence: Synthetic oligonucleotide
guugggucgauggagccca

SEQ ID NO: 3073702 - RNA, 19 nt, Artificial Sequence
  Description of Artificial Sequence: Synthetic oligonucleotide
cuggcaggccaaaucagca

SEQ ID NO: 3073703 - RNA, 19 nt, Artificial Sequence
  Description of Artificial Sequence: Synthetic oligonucleotide
aaggaagaccucagaucug

SEQ ID NO: 3073704 - RNA, 19 nt, Artificial Sequence
  Description of Artificial Sequence: Synthetic oligonucleotide
gaccauuauucacacugcu

SEQ ID NO: 3073705 - RNA, 19 nt, Artificial Sequence
  Description of Artificial Sequence: Synthetic oligonucleotide
aggcucgggaucccuuggg

SEQ ID NO: 3073706 - RNA, 19 nt, Artificial Sequence
  Description of Artificial Sequence: Synthetic oligonucleotide
gagggcacaucuuccucca

SEQ ID NO: 3073707 - RNA, 19 nt, Artificial Sequence
  Description of Artificial Sequence: Synthetic oligonucleotide
caucuugaccuuguaccug

SEQ ID NO: 3073708 - RNA, 19 nt, Artificial Sequence
  Description of Artificial Sequence: Synthetic oligonucleotide
uccacacagauugaccauu

SEQ ID NO: 3073709 - RNA, 19 nt, Artificial Sequence
  Description of Artificial Sequence: Synthetic oligonucleotide
uggguucuugucccagcgu

SEQ ID NO: 3073710 - RNA, 19 nt, Artificial Sequence
  Description of Artificial Sequence: Synthetic oligonucleotide
cucgggaucccuuggggca

SEQ ID NO: 3073711 - RNA, 19 nt, Artificial Sequence
  Description of Artificial Sequence: Synthetic oligonucleotide
auccacacagauugaccau

SEQ ID NO: 3073712 - RNA, 19 nt, Artificial Sequence
  Description of Artificial Sequence: Synthetic oligonucleotide
cauuggguucuugucccag

SEQ ID NO: 3073713 - RNA, 19 nt, Artificial Sequence
  Description of Artificial Sequence: Synthetic oligonucleotide
auggagcccaauccacaca

SEQ ID NO: 3073714 - RNA, 19 nt, Artificial Sequence
  Description of Artificial Sequence: Synthetic oligonucleotide
ccaaaucagcaucaaacca

SEQ ID NO: 3073715 - RNA, 19 nt, Artificial Sequence
  Description of Artificial Sequence: Synthetic oligonucleotide
cagcaucaaaccaugauuu

SEQ ID NO: 3073716 - RNA, 19 nt, Artificial Sequence
  Description of Artificial Sequence: Synthetic oligonucleotide
uuacuccacuccccaucca

SEQ ID NO: 3073717 - RNA, 19 nt, Artificial Sequence
  Description of Artificial Sequence: Synthetic oligonucleotide
gggcagcugauucuugaag

SEQ ID NO: 3073718 - RNA, 19 nt, Artificial Sequence
  Description of Artificial Sequence: Synthetic oligonucleotide
cccagcguugggucgaugg

SEQ ID NO: 3073719 - RNA, 19 nt, Artificial Sequence
  Description of Artificial Sequence: Synthetic oligonucleotide
uggcaggccaaaucagcau

SEQ ID NO: 3073720 - RNA, 19 nt, Artificial Sequence
  Description of Artificial Sequence: Synthetic oligonucleotide
uucuugaagagggcacauc

SEQ ID NO: 3073721 - RNA, 19 nt, Artificial Sequence
  Description of Artificial Sequence: Synthetic oligonucleotide
uccacaucuugaccuugua

SEQ ID NO: 3073722 - RNA, 19 nt, Artificial Sequence
  Description of Artificial Sequence: Synthetic oligonucleotide
cagcguugggucgauggag

SEQ ID NO: 3073723 - RNA, 19 nt, Artificial Sequence
  Description of Artificial Sequence: Synthetic oligonucleotide
gagcacagacacaaggugu

SEQ ID NO: 3073724 - RNA, 19 nt, Artificial Sequence
  Description of Artificial Sequence: Synthetic oligonucleotide
ucaucacaucagccauuac

SEQ ID NO: 3073725 - RNA, 19 nt, Artificial Sequence
  Description of Artificial Sequence: Synthetic oligonucleotide
ugucccagcguugggucga

SEQ ID NO: 3073726 - RNA, 19 nt, Artificial Sequence
  Description of Artificial Sequence: Synthetic oligonucleotide
uuggggcagcugauucuug

SEQ ID NO: 3073727 - RNA, 19 nt, Artificial Sequence
  Description of Artificial Sequence: Synthetic oligonucleotide
ucgggaucccuuggggcag

SEQ ID NO: 3073728 - RNA, 19 nt, Artificial Sequence
  Description of Artificial Sequence: Synthetic oligonucleotide
ggcaggccaaaucagcauc

SEQ ID NO: 3073729 - RNA, 19 nt, Artificial Sequence
  Description of Artificial Sequence: Synthetic oligonucleotide
aggccaaaucagcaucaaa

SEQ ID NO: 3073730 - RNA, 19 nt, Artificial Sequence
  Description of Artificial Sequence: Synthetic oligonucleotide
auucuugaagagggcacau

SEQ ID NO: 3073731 - RNA, 19 nt, Artificial Sequence
  Description of Artificial Sequence: Synthetic oligonucleotide
cgaaggaagaccucagauc

SEQ ID NO: 3073732 - RNA, 19 nt, Artificial Sequence
  Description of Artificial Sequence: Synthetic oligonucleotide
accauuauucacacugcuu

SEQ ID NO: 3073733 - RNA, 19 nt, Artificial Sequence
  Description of Artificial Sequence: Synthetic oligonucleotide
agggcacaucuuccuccac

SEQ ID NO: 3073734 - RNA, 19 nt, Artificial Sequence
  Description of Artificial Sequence: Synthetic oligonucleotide
gagcccaauccacacagau

SEQ ID NO: 3073735 - RNA, 19 nt, Artificial Sequence
  Description of Artificial Sequence: Synthetic oligonucleotide
cugagggccguuucuggca

SEQ ID NO: 3073736 - RNA, 19 nt, Artificial Sequence
  Description of Artificial Sequence: Synthetic oligonucleotide
ggcucgggaucccuugggg

SEQ ID NO: 3073737 - RNA, 19 nt, Artificial Sequence
  Description of Artificial Sequence: Synthetic oligonucleotide
ggaggauacgaaggaagac

SEQ ID NO: 3073738 - RNA, 19 nt, Artificial Sequence
  Description of Artificial Sequence: Synthetic oligonucleotide
aggagccauaggcucggga

SEQ ID NO: 3073739 - RNA, 19 nt, Artificial Sequence
  Description of Artificial Sequence: Synthetic oligonucleotide
uccuccacaucuugaccuu

SEQ ID NO: 3073740 - RNA, 19 nt, Artificial Sequence
  Description of Artificial Sequence: Synthetic oligonucleotide
cauagcaauaggagccaua

SEQ ID NO: 3073741 - RNA, 19 nt, Artificial Sequence
  Description of Artificial Sequence: Synthetic oligonucleotide
ccuuguaccugagauaaga

SEQ ID NO: 3073742 - RNA, 19 nt, Artificial Sequence
  Description of Artificial Sequence: Synthetic oligonucleotide
cuugaccuuguaccugaga

SEQ ID NO: 3073743 - RNA, 19 nt, Artificial Sequence
  Description of Artificial Sequence: Synthetic oligonucleotide
ccacaucuugaccuuguac

SEQ ID NO: 3073744 - RNA, 19 nt, Artificial Sequence
  Description of Artificial Sequence: Synthetic oligonucleotide
aagguguccugagggccgu

SEQ ID NO: 3073745 - RNA, 19 nt, Artificial Sequence
  Description of Artificial Sequence: Synthetic oligonucleotide
aucuuccuccacaucuuga

SEQ ID NO: 3073746 - RNA, 19 nt, Artificial Sequence
  Description of Artificial Sequence: Synthetic oligonucleotide
gccauuacuccacucccca

SEQ ID NO: 3073747 - RNA, 19 nt, Artificial Sequence
  Description of Artificial Sequence: Synthetic oligonucleotide
gagggccguuucuggcagg

SEQ ID NO: 3073748 - RNA, 19 nt, Artificial Sequence
  Description of Artificial Sequence: Synthetic oligonucleotide
ccucagaucuguugagcac

SEQ ID NO: 3073749 - RNA, 19 nt, Artificial Sequence
  Description of Artificial Sequence: Synthetic oligonucleotide
ccaauccacacagauugac

SEQ ID NO: 3073750 - RNA, 19 nt, Artificial Sequence
  Description of Artificial Sequence: Synthetic oligonucleotide
gggucgauggagcccaauc

SEQ ID NO: 3073751 - RNA, 19 nt, Artificial Sequence
  Description of Artificial Sequence: Synthetic oligonucleotide
guccugagggccguuucug

SEQ ID NO: 3073752 - RNA, 19 nt, Artificial Sequence
  Description of Artificial Sequence: Synthetic oligonucleotide
ccugagggccguuucuggc

SEQ ID NO: 3073753 - RNA, 19 nt, Artificial Sequence
  Description of Artificial Sequence: Synthetic oligonucleotide
ccauuauucacacugcuuu

SEQ ID NO: 3073754 - RNA, 19 nt, Artificial Sequence
  Description of Artificial Sequence: Synthetic oligonucleotide
cauggaggauacgaaggaa

SEQ ID NO: 3073755 - RNA, 19 nt, Artificial Sequence
  Description of Artificial Sequence: Synthetic oligonucleotide
ggccguuucuggcaggcca

SEQ ID NO: 3073756 - RNA, 19 nt, Artificial Sequence
  Description of Artificial Sequence: Synthetic oligonucleotide
gguucuugucccagcguug

SEQ ID NO: 3073757 - RNA, 19 nt, Artificial Sequence
  Description of Artificial Sequence: Synthetic oligonucleotide
gggcacaucuuccuccaca

SEQ ID NO: 3073758 - RNA, 19 nt, Artificial Sequence
  Description of Artificial Sequence: Synthetic oligonucleotide
gcugauucuugaagagggc

SEQ ID NO: 3073759 - RNA, 19 nt, Artificial Sequence
  Description of Artificial Sequence: Synthetic oligonucleotide
ccuccauuggguucuuguc

SEQ ID NO: 3073760 - RNA, 19 nt, Artificial Sequence
  Description of Artificial Sequence: Synthetic oligonucleotide
gcaauccuaaacaaggcau

SEQ ID NO: 3073761 - RNA, 19 nt, Artificial Sequence
  Description of Artificial Sequence: Synthetic oligonucleotide
cauuauucacacugcuuuu

SEQ ID NO: 3073762 - RNA, 19 nt, Artificial Sequence
  Description of Artificial Sequence: Synthetic oligonucleotide
acacugcuuuuaauucaug

SEQ ID NO: 3073763 - RNA, 19 nt, Artificial Sequence
  Description of Artificial Sequence: Synthetic oligonucleotide
ccuaaacaaggcauagcaa

SEQ ID NO: 3073764 - RNA, 19 nt, Artificial Sequence
  Description of Artificial Sequence: Synthetic oligonucleotide
guguccugagggccguuuc

SEQ ID NO: 3073765 - RNA, 19 nt, Artificial Sequence
  Description of Artificial Sequence: Synthetic oligonucleotide
cagacacaagguguccuga

SEQ ID NO: 3073766 - RNA, 19 nt, Artificial Sequence
  Description of Artificial Sequence: Synthetic oligonucleotide
gcaauaggagccauaggcu

SEQ ID NO: 3073767 - RNA, 19 nt, Artificial Sequence
  Description of Artificial Sequence: Synthetic oligonucleotide
ggcauagcaauaggagcca

SEQ ID NO: 3073768 - RNA, 19 nt, Artificial Sequence
  Description of Artificial Sequence: Synthetic oligonucleotide
uaggagccauaggcucggg

SEQ ID NO: 3073769 - RNA, 19 nt, Artificial Sequence
  Description of Artificial Sequence: Synthetic oligonucleotide
cuuuuaauucauggaggau

SEQ ID NO: 3073770 - RNA, 19 nt, Artificial Sequence
  Description of Artificial Sequence: Synthetic oligonucleotide
accuuguaccugagauaag

SEQ ID NO: 3073771 - RNA, 19 nt, Artificial Sequence
  Description of Artificial Sequence: Synthetic oligonucleotide
agcccaauccacacagauu

SEQ ID NO: 3073772 - RNA, 19 nt, Artificial Sequence
  Description of Artificial Sequence: Synthetic oligonucleotide
cuugaagagggcacaucuu

SEQ ID NO: 3073773 - RNA, 19 nt, Artificial Sequence
  Description of Artificial Sequence: Synthetic oligonucleotide
gcguugggucgauggagcc

SEQ ID NO: 3073774 - RNA, 19 nt, Artificial Sequence
  Description of Artificial Sequence: Synthetic oligonucleotide
gcaggccaaaucagcauca

SEQ ID NO: 3073775 - RNA, 19 nt, Artificial Sequence
  Description of Artificial Sequence: Synthetic oligonucleotide
gcacagacacaaggugucc

SEQ ID NO: 3073776 - RNA, 19 nt, Artificial Sequence
  Description of Artificial Sequence: Synthetic oligonucleotide
cuccacuccccauccaccu

SEQ ID NO: 3073777 - RNA, 19 nt, Artificial Sequence
  Description of Artificial Sequence: Synthetic oligonucleotide
ggcacaucuuccuccacau

SEQ ID NO: 3073778 - RNA, 19 nt, Artificial Sequence
  Description of Artificial Sequence: Synthetic oligonucleotide
cccuuggggcagcugauuc

SEQ ID NO: 3073779 - RNA, 19 nt, Artificial Sequence
  Description of Artificial Sequence: Synthetic oligonucleotide
ggauacgaaggaagaccuc

SEQ ID NO: 3073780 - RNA, 19 nt, Artificial Sequence
  Description of Artificial Sequence: Synthetic oligonucleotide
cacagacacaagguguccu

SEQ ID NO: 3073781 - RNA, 19 nt, Artificial Sequence
  Description of Artificial Sequence: Synthetic oligonucleotide
ggguucuugucccagcguu

SEQ ID NO: 3073782 - RNA, 19 nt, Artificial Sequence
  Description of Artificial Sequence: Synthetic oligonucleotide
ucccuuggggcagcugauu

SEQ ID NO: 3073783 - RNA, 19 nt, Artificial Sequence
  Description of Artificial Sequence: Synthetic oligonucleotide
uugggucgauggagcccaa

SEQ ID NO: 3073784 - RNA, 19 nt, Artificial Sequence
  Description of Artificial Sequence: Synthetic oligonucleotide
ggggcagcugauucuugaa

SEQ ID NO: 3073785 - RNA, 19 nt, Artificial Sequence
  Description of Artificial Sequence: Synthetic oligonucleotide
aucccuuggggcagcugau

SEQ ID NO: 3073786 - RNA, 19 nt, Artificial Sequence
  Description of Artificial Sequence: Synthetic oligonucleotide
ugggucgauggagcccaau

SEQ ID NO: 3073787 - RNA, 19 nt, Artificial Sequence
  Description of Artificial Sequence: Synthetic oligonucleotide
cuuggggcagcugauucuu

SEQ ID NO: 3073788 - RNA, 19 nt, Artificial Sequence
  Description of Artificial Sequence: Synthetic oligonucleotide
cacuccccauccaccucca

SEQ ID NO: 3073789 - RNA, 19 nt, Artificial Sequence
  Description of Artificial Sequence: Synthetic oligonucleotide
caucagccauuacuccacu

SEQ ID NO: 3073790 - RNA, 19 nt, Artificial Sequence
  Description of Artificial Sequence: Synthetic oligonucleotide
cauaggcucgggaucccuu

SEQ ID NO: 3073791 - RNA, 19 nt, Artificial Sequence
  Description of Artificial Sequence: Synthetic oligonucleotide
cgauggagcccaauccaca

SEQ ID NO: 3073792 - RNA, 19 nt, Artificial Sequence
  Description of Artificial Sequence: Synthetic oligonucleotide
caggccaaaucagcaucaa

SEQ ID NO: 3073793 - RNA, 19 nt, Artificial Sequence
  Description of Artificial Sequence: Synthetic oligonucleotide
cacacagauugaccauuau

SEQ ID NO: 3073794 - RNA, 19 nt, Artificial Sequence
  Description of Artificial Sequence: Synthetic oligonucleotide
cguugggucgauggagccc

SEQ ID NO: 3073795 - RNA, 19 nt, Artificial Sequence
  Description of Artificial Sequence: Synthetic oligonucleotide
ccagcguugggucgaugga

SEQ ID NO: 3073796 - RNA, 19 nt, Artificial Sequence
  Description of Artificial Sequence: Synthetic oligonucleotide
cagaucuguugagcacaga

SEQ ID NO: 3073797 - RNA, 19 nt, Artificial Sequence
  Description of Artificial Sequence: Synthetic oligonucleotide
ccuccacaucuugaccuug

SEQ ID NO: 3073798 - RNA, 19 nt, Artificial Sequence
  Description of Artificial Sequence: Synthetic oligonucleotide
cccaauccacacagauuga

SEQ ID NO: 3073799 - RNA, 19 nt, Artificial Sequence
  Description of Artificial Sequence: Synthetic oligonucleotide
ucccagcguugggucgaug

SEQ ID NO: 3073800 - RNA, 19 nt, Artificial Sequence
  Description of Artificial Sequence: Synthetic oligonucleotide
caccuccauuggguucuug

SEQ ID NO: 3073801 - RNA, 19 nt, Artificial Sequence
  Description of Artificial Sequence: Synthetic oligonucleotide
ccauuggguucuuguccca

SEQ ID NO: 3073802 - RNA, 19 nt, Artificial Sequence
  Description of Artificial Sequence: Synthetic oligonucleotide
ggaucccuuggggcagcug

SEQ ID NO: 3073803 - RNA, 19 nt, Artificial Sequence
  Description of Artificial Sequence: Synthetic oligonucleotide
ggagcccaauccacacaga

SEQ ID NO: 3073804 - RNA, 19 nt, Artificial Sequence
  Description of Artificial Sequence: Synthetic oligonucleotide
gccauaggcucgggauccc

SEQ ID NO: 3073805 - RNA, 19 nt, Artificial Sequence
  Description of Artificial Sequence: Synthetic oligonucleotide
gccguuucuggcaggccaa

SEQ ID NO: 3073806 - RNA, 19 nt, Artificial Sequence
  Description of Artificial Sequence: Synthetic oligonucleotide
ccuuggggcagcugauucu

SEQ ID NO: 3073807 - RNA, 19 nt, Artificial Sequence
  Description of Artificial Sequence: Synthetic oligonucleotide
gggccguuucuggcaggcc

SEQ ID NO: 3073808 - RNA, 19 nt, Artificial Sequence
  Description of Artificial Sequence: Synthetic oligonucleotide
gcauagcaauaggagccau

SEQ ID NO: 3073809 - RNA, 19 nt, Artificial Sequence
  Description of Artificial Sequence: Synthetic oligonucleotide
ccauuacuccacuccccau

SEQ ID NO: 3073810 - RNA, 19 nt, Artificial Sequence
  Description of Artificial Sequence: Synthetic oligonucleotide
ggaagaccucagaucuguu

SEQ ID NO: 3073811 - RNA, 19 nt, Artificial Sequence
  Description of Artificial Sequence: Synthetic oligonucleotide
ccguuucuggcaggccaaa

SEQ ID NO: 3073812 - RNA, 19 nt, Artificial Sequence
  Description of Artificial Sequence: Synthetic oligonucleotide
ccauaggcucgggaucccu

SEQ ID NO: 3073813 - RNA, 19 nt, Artificial Sequence
  Description of Artificial Sequence: Synthetic oligonucleotide
gggaucccuuggggcagcu

SEQ ID NO: 3073814 - RNA, 19 nt, Artificial Sequence
  Description of Artificial Sequence: Synthetic oligonucleotide
cguuucuggcaggccaaau

SEQ ID NO: 3073815 - RNA, 19 nt, Artificial Sequence
  Description of Artificial Sequence: Synthetic oligonucleotide
ccaccuccauuggguucuu

SEQ ID NO: 3073816 - RNA, 19 nt, Artificial Sequence
  Description of Artificial Sequence: Synthetic oligonucleotide
aacuuuggugaucuuaucc

SEQ ID NO: 3073817 - RNA, 19 nt, Artificial Sequence
  Description of Artificial Sequence: Synthetic oligonucleotide
guuaaauccacagagauug

SEQ ID NO: 3073818 - RNA, 19 nt, Artificial Sequence
  Description of Artificial Sequence: Synthetic oligonucleotide
uuggguuaaauccacagag

SEQ ID NO: 3073819 - RNA, 19 nt, Artificial Sequence
  Description of Artificial Sequence: Synthetic oligonucleotide
uucaguuuugcagagaggg

SEQ ID NO: 3073820 - RNA, 19 nt, Artificial Sequence
  Description of Artificial Sequence: Synthetic oligonucleotide
uucucuaucuucuucacug

SEQ ID NO: 3073821 - RNA, 19 nt, Artificial Sequence
  Description of Artificial Sequence: Synthetic oligonucleotide
guugaguucaguuuugcag

SEQ ID NO: 3073822 - RNA, 19 nt, Artificial Sequence
  Description of Artificial Sequence: Synthetic oligonucleotide
acuuuggugaucuuauccg

SEQ ID NO: 3073823 - RNA, 19 nt, Artificial Sequence
  Description of Artificial Sequence: Synthetic oligonucleotide
uuucagacucagcaggugg

SEQ ID NO: 3073824 - RNA, 19 nt, Artificial Sequence
  Description of Artificial Sequence: Synthetic oligonucleotide
gaucuuauccggcuugugg

SEQ ID NO: 3073825 - RNA, 19 nt, Artificial Sequence
  Description of Artificial Sequence: Synthetic oligonucleotide
acucugagcuuucagcugc

SEQ ID NO: 3073826 - RNA, 19 nt, Artificial Sequence
  Description of Artificial Sequence: Synthetic oligonucleotide
uucgccucaacuuugguga

SEQ ID NO: 3073827 - RNA, 19 nt, Artificial Sequence
  Description of Artificial Sequence: Synthetic oligonucleotide
aucuuauccggcuuguggg

SEQ ID NO: 3073828 - RNA, 19 nt, Artificial Sequence
  Description of Artificial Sequence: Synthetic oligonucleotide
uugaguucaguuuugcaga

SEQ ID NO: 3073829 - RNA, 19 nt, Artificial Sequence
  Description of Artificial Sequence: Synthetic oligonucleotide
aaauccacagagauugcac

SEQ ID NO: 3073830 - RNA, 19 nt, Artificial Sequence
  Description of Artificial Sequence: Synthetic oligonucleotide
uguuggguuaaauccacag

SEQ ID NO: 3073831 - RNA, 19 nt, Artificial Sequence
  Description of Artificial Sequence: Synthetic oligonucleotide
agagauugcacacuugacu

SEQ ID NO: 3073832 - RNA, 19 nt, Artificial Sequence
  Description of Artificial Sequence: Synthetic oligonucleotide
gagauugcacacuugacuc

SEQ ID NO: 3073833 - RNA, 19 nt, Artificial Sequence
  Description of Artificial Sequence: Synthetic oligonucleotide
ucaacuuuggugaucuuau

SEQ ID NO: 3073834 - RNA, 19 nt, Artificial Sequence
  Description of Artificial Sequence: Synthetic oligonucleotide
uugcagagagggcaguucg

SEQ ID NO: 3073835 - RNA, 19 nt, Artificial Sequence
  Description of Artificial Sequence: Synthetic oligonucleotide
acagagauugcacacuuga

SEQ ID NO: 3073836 - RNA, 19 nt, Artificial Sequence
  Description of Artificial Sequence: Synthetic oligonucleotide
cacuuucagacucagcagg

SEQ ID NO: 3073837 - RNA, 19 nt, Artificial Sequence
  Description of Artificial Sequence: Synthetic oligonucleotide
uuugcugaccuuaccaggu

SEQ ID NO: 3073838 - RNA, 19 nt, Artificial Sequence
  Description of Artificial Sequence: Synthetic oligonucleotide
ucagguuuggacucugagc

SEQ ID NO: 3073839 - RNA, 19 nt, Artificial Sequence
  Description of Artificial Sequence: Synthetic oligonucleotide
cuuuggugaucuuauccgg

SEQ ID NO: 3073840 - RNA, 19 nt, Artificial Sequence
  Description of Artificial Sequence: Synthetic oligonucleotide
uuuggugaucuuauccggc

SEQ ID NO: 3073841 - RNA, 19 nt, Artificial Sequence
  Description of Artificial Sequence: Synthetic oligonucleotide
gacucuugcauucugugca

SEQ ID NO: 3073842 - RNA, 19 nt, Artificial Sequence
  Description of Artificial Sequence: Synthetic oligonucleotide
ucuucuucacugcuagagc

SEQ ID NO: 3073843 - RNA, 19 nt, Artificial Sequence
  Description of Artificial Sequence: Synthetic oligonucleotide
acacuugacucuugcauuc

SEQ ID NO: 3073844 - RNA, 19 nt, Artificial Sequence
  Description of Artificial Sequence: Synthetic oligonucleotide
auccacagagauugcacac

SEQ ID NO: 3073845 - RNA, 19 nt, Artificial Sequence
  Description of Artificial Sequence: Synthetic oligonucleotide
guuugcugaccuuaccagg

SEQ ID NO: 3073846 - RNA, 19 nt, Artificial Sequence
  Description of Artificial Sequence: Synthetic oligonucleotide
uauguugaguucaguuuug

SEQ ID NO: 3073847 - RNA, 19 nt, Artificial Sequence
  Description of Artificial Sequence: Synthetic oligonucleotide
uugcauucugugcaggugu

SEQ ID NO: 3073848 - RNA, 19 nt, Artificial Sequence
  Description of Artificial Sequence: Synthetic oligonucleotide
gggguguuggguuaaaucc

SEQ ID NO: 3073849 - RNA, 19 nt, Artificial Sequence
  Description of Artificial Sequence: Synthetic oligonucleotide
ugugugugugcucagucaa

SEQ ID NO: 3073850 - RNA, 19 nt, Artificial Sequence
  Description of Artificial Sequence: Synthetic oligonucleotide
ugcugaccuuaccaggugg

SEQ ID NO: 3073851 - RNA, 19 nt, Artificial Sequence
  Description of Artificial Sequence: Synthetic oligonucleotide
uugacucuugcauucugug

SEQ ID NO: 3073852 - RNA, 19 nt, Artificial Sequence
  Description of Artificial Sequence: Synthetic oligonucleotide
ugaguucaguuuugcagag

SEQ ID NO: 3073853 - RNA, 19 nt, Artificial Sequence
  Description of Artificial Sequence: Synthetic oligonucleotide
uggguuaaauccacagaga

SEQ ID NO: 3073854 - RNA, 19 nt, Artificial Sequence
  Description of Artificial Sequence: Synthetic oligonucleotide
ucaguuuugcagagagggc

SEQ ID NO: 3073855 - RNA, 19 nt, Artificial Sequence
  Description of Artificial Sequence: Synthetic oligonucleotide
ugcucagucaaguggggug

SEQ ID NO: 3073856 - RNA, 19 nt, Artificial Sequence
  Description of Artificial Sequence: Synthetic oligonucleotide
ucugugcagguguugaagu

SEQ ID NO: 3073857 - RNA, 19 nt, Artificial Sequence
  Description of Artificial Sequence: Synthetic oligonucleotide
uaaauccacagagauugca

SEQ ID NO: 3073858 - RNA, 19 nt, Artificial Sequence
  Description of Artificial Sequence: Synthetic oligonucleotide
agguuugcugaccuuacca

SEQ ID NO: 3073859 - RNA, 19 nt, Artificial Sequence
  Description of Artificial Sequence: Synthetic oligonucleotide
ugacucuugcauucugugc

SEQ ID NO: 3073860 - RNA, 19 nt, Artificial Sequence
  Description of Artificial Sequence: Synthetic oligonucleotide
uucagacucagcaggugga

SEQ ID NO: 3073861 - RNA, 19 nt, Artificial Sequence
  Description of Artificial Sequence: Synthetic oligonucleotide
uuaaauccacagagauugc

SEQ ID NO: 3073862 - RNA, 19 nt, Artificial Sequence
  Description of Artificial Sequence: Synthetic oligonucleotide
uguugaguucaguuuugca

SEQ ID NO: 3073863 - RNA, 19 nt, Artificial Sequence
  Description of Artificial Sequence: Synthetic oligonucleotide
ugugcagguguugaaguug

SEQ ID NO: 3073864 - RNA, 19 nt, Artificial Sequence
  Description of Artificial Sequence: Synthetic oligonucleotide
ugugcucagucaagugggg

SEQ ID NO: 3073865 - RNA, 19 nt, Artificial Sequence
  Description of Artificial Sequence: Synthetic oligonucleotide
ucuaucuucuucacugcua

SEQ ID NO: 3073866 - RNA, 19 nt, Artificial Sequence
  Description of Artificial Sequence: Synthetic oligonucleotide
guccugagagccuauguug

SEQ ID NO: 3073867 - RNA, 19 nt, Artificial Sequence
  Description of Artificial Sequence: Synthetic oligonucleotide
ucucuaucuucuucacugc

SEQ ID NO: 3073868 - RNA, 19 nt, Artificial Sequence
  Description of Artificial Sequence: Synthetic oligonucleotide
uuucucuaucuucuucacu

SEQ ID NO: 3073869 - RNA, 19 nt, Artificial Sequence
  Description of Artificial Sequence: Synthetic oligonucleotide
uuggacucugagcuuucag

SEQ ID NO: 3073870 - RNA, 19 nt, Artificial Sequence
  Description of Artificial Sequence: Synthetic oligonucleotide
ugugugugugugcucaguc

SEQ ID NO: 3073871 - RNA, 19 nt, Artificial Sequence
  Description of Artificial Sequence: Synthetic oligonucleotide
auguugaguucaguuuugc

SEQ ID NO: 3073872 - RNA, 19 nt, Artificial Sequence
  Description of Artificial Sequence: Synthetic oligonucleotide
uucugugcagguguugaag

SEQ ID NO: 3073873 - RNA, 19 nt, Artificial Sequence
  Description of Artificial Sequence: Synthetic oligonucleotide
uuggugaucuuauccggcu

SEQ ID NO: 3073874 - RNA, 19 nt, Artificial Sequence
  Description of Artificial Sequence: Synthetic oligonucleotide
agcuggcucagguuuggac

SEQ ID NO: 3073875 - RNA, 19 nt, Artificial Sequence
  Description of Artificial Sequence: Synthetic oligonucleotide
ugagagccuauguugaguu

SEQ ID NO: 3073876 - RNA, 19 nt, Artificial Sequence
  Description of Artificial Sequence: Synthetic oligonucleotide
agagccuauguugaguuca

SEQ ID NO: 3073877 - RNA, 19 nt, Artificial Sequence
  Description of Artificial Sequence: Synthetic oligonucleotide
gugagcagagcacuuucag

SEQ ID NO: 3073878 - RNA, 19 nt, Artificial Sequence
  Description of Artificial Sequence: Synthetic oligonucleotide
uugcacacuugacucuugc

SEQ ID NO: 3073879 - RNA, 19 nt, Artificial Sequence
  Description of Artificial Sequence: Synthetic oligonucleotide
guucgccucaacuuuggug

SEQ ID NO: 3073880 - RNA, 19 nt, Artificial Sequence
  Description of Artificial Sequence: Synthetic oligonucleotide
ucaagugggguguuggguu

SEQ ID NO: 3073881 - RNA, 19 nt, Artificial Sequence
  Description of Artificial Sequence: Synthetic oligonucleotide
ucuugcauucugugcaggu

SEQ ID NO: 3073882 - RNA, 19 nt, Artificial Sequence
  Description of Artificial Sequence: Synthetic oligonucleotide
ugcuagagcuggcucaggu

SEQ ID NO: 3073883 - RNA, 19 nt, Artificial Sequence
  Description of Artificial Sequence: Synthetic oligonucleotide
ugggguguuggguuaaauc

SEQ ID NO: 3073884 - RNA, 19 nt, Artificial Sequence
  Description of Artificial Sequence: Synthetic oligonucleotide
gguuugcugaccuuaccag

SEQ ID NO: 3073885 - RNA, 19 nt, Artificial Sequence
  Description of Artificial Sequence: Synthetic oligonucleotide
guuggguuaaauccacaga

SEQ ID NO: 3073886 - RNA, 19 nt, Artificial Sequence
  Description of Artificial Sequence: Synthetic oligonucleotide
cucagguuuggacucugag

SEQ ID NO: 3073887 - RNA, 19 nt, Artificial Sequence
  Description of Artificial Sequence: Synthetic oligonucleotide
agcagguggagguuugcug

SEQ ID NO: 3073888 - RNA, 19 nt, Artificial Sequence
  Description of Artificial Sequence: Synthetic oligonucleotide
ucuuauccggcuugugggu

SEQ ID NO: 3073889 - RNA, 19 nt, Artificial Sequence
  Description of Artificial Sequence: Synthetic oligonucleotide
gacucugagcuuucagcug

SEQ ID NO: 3073890 - RNA, 19 nt, Artificial Sequence
  Description of Artificial Sequence: Synthetic oligonucleotide
agauugcacacuugacucu

SEQ ID NO: 3073891 - RNA, 19 nt, Artificial Sequence
  Description of Artificial Sequence: Synthetic oligonucleotide
cagguuuggacucugagcu

SEQ ID NO: 3073892 - RNA, 19 nt, Artificial Sequence
  Description of Artificial Sequence: Synthetic oligonucleotide
ugugggugagcagagcacu

SEQ ID NO: 3073893 - RNA, 19 nt, Artificial Sequence
  Description of Artificial Sequence: Synthetic oligonucleotide
acucuugcauucugugcag

SEQ ID NO: 3073894 - RNA, 19 nt, Artificial Sequence
  Description of Artificial Sequence: Synthetic oligonucleotide
cuugugggugagcagagca

SEQ ID NO: 3073895 - RNA, 19 nt, Artificial Sequence
  Description of Artificial Sequence: Synthetic oligonucleotide
agggcaguucgccucaacu

SEQ ID NO: 3073896 - RNA, 19 nt, Artificial Sequence
  Description of Artificial Sequence: Synthetic oligonucleotide
ugugugugugugugugugc

SEQ ID NO: 3073897 - RNA, 19 nt, Artificial Sequence
  Description of Artificial Sequence: Synthetic oligonucleotide
uugugggugagcagagcac

SEQ ID NO: 3073898 - RNA, 19 nt, Artificial Sequence
  Description of Artificial Sequence: Synthetic oligonucleotide
uagagcuggcucagguuug

SEQ ID NO: 3073899 - RNA, 19 nt, Artificial Sequence
  Description of Artificial Sequence: Synthetic oligonucleotide
acuugacucuugcauucug

SEQ ID NO: 3073900 - RNA, 19 nt, Artificial Sequence
  Description of Artificial Sequence: Synthetic oligonucleotide
ugcagagagggcaguucgc

SEQ ID NO: 3073901 - RNA, 19 nt, Artificial Sequence
  Description of Artificial Sequence: Synthetic oligonucleotide
cagagauugcacacuugac

SEQ ID NO: 3073902 - RNA, 19 nt, Artificial Sequence
  Description of Artificial Sequence: Synthetic oligonucleotide
gugcagguguugaaguugg

SEQ ID NO: 3073903 - RNA, 19 nt, Artificial Sequence
  Description of Artificial Sequence: Synthetic oligonucleotide
aguuuugcagagagggcag

SEQ ID NO: 3073904 - RNA, 19 nt, Artificial Sequence
  Description of Artificial Sequence: Synthetic oligonucleotide
uuauccggcuuguggguga

SEQ ID NO: 3073905 - RNA, 19 nt, Artificial Sequence
  Description of Artificial Sequence: Synthetic oligonucleotide
ugcacacuugacucuugca

SEQ ID NO: 3073906 - RNA, 19 nt, Artificial Sequence
  Description of Artificial Sequence: Synthetic oligonucleotide
caguuuugcagagagggca

SEQ ID NO: 3073907 - RNA, 19 nt, Artificial Sequence
  Description of Artificial Sequence: Synthetic oligonucleotide
uucacugcuagagcuggcu

SEQ ID NO: 3073908 - RNA, 19 nt, Artificial Sequence
  Description of Artificial Sequence: Synthetic oligonucleotide
ggugaucuuauccggcuug

SEQ ID NO: 3073909 - RNA, 19 nt, Artificial Sequence
  Description of Artificial Sequence: Synthetic oligonucleotide
gagguuugcugaccuuacc

SEQ ID NO: 3073910 - RNA, 19 nt, Artificial Sequence
  Description of Artificial Sequence: Synthetic oligonucleotide
uugcugaccuuaccaggug

SEQ ID NO: 3073911 - RNA, 19 nt, Artificial Sequence
  Description of Artificial Sequence: Synthetic oligonucleotide
agcagagcacuuucagacu

SEQ ID NO: 3073912 - RNA, 19 nt, Artificial Sequence
  Description of Artificial Sequence: Synthetic oligonucleotide
cagucaagugggguguugg

SEQ ID NO: 3073913 - RNA, 19 nt, Artificial Sequence
  Description of Artificial Sequence: Synthetic oligonucleotide
cuucuucacugcuagagcu

SEQ ID NO: 3073914 - RNA, 19 nt, Artificial Sequence
  Description of Artificial Sequence: Synthetic oligonucleotide
ugcagguguugaaguuggg

SEQ ID NO: 3073915 - RNA, 19 nt, Artificial Sequence
  Description of Artificial Sequence: Synthetic oligonucleotide
uuugcagagagggcaguuc

SEQ ID NO: 3073916 - RNA, 19 nt, Artificial Sequence
  Description of Artificial Sequence: Synthetic oligonucleotide
acugcuagagcuggcucag

SEQ ID NO: 3073917 - RNA, 19 nt, Artificial Sequence
  Description of Artificial Sequence: Synthetic oligonucleotide
cuugcauucugugcaggug

SEQ ID NO: 3073918 - RNA, 19 nt, Artificial Sequence
  Description of Artificial Sequence: Synthetic oligonucleotide
caguucgccucaacuuugg

SEQ ID NO: 3073919 - RNA, 19 nt, Artificial Sequence
  Description of Artificial Sequence: Synthetic oligonucleotide
ugugugugugugugcucag

SEQ ID NO: 3073920 - RNA, 19 nt, Artificial Sequence
  Description of Artificial Sequence: Synthetic oligonucleotide
cuggcucagguuuggacuc

SEQ ID NO: 3073921 - RNA, 19 nt, Artificial Sequence
  Description of Artificial Sequence: Synthetic oligonucleotide
uccggcuugugggugagca

SEQ ID NO: 3073922 - RNA, 19 nt, Artificial Sequence
  Description of Artificial Sequence: Synthetic oligonucleotide
guucaguuuugcagagagg

SEQ ID NO: 3073923 - RNA, 19 nt, Artificial Sequence
  Description of Artificial Sequence: Synthetic oligonucleotide
ucacugcuagagcuggcuc

SEQ ID NO: 3073924 - RNA, 19 nt, Artificial Sequence
  Description of Artificial Sequence: Synthetic oligonucleotide
ugugugugugugugugugu

SEQ ID NO: 3073925 - RNA, 19 nt, Artificial Sequence
  Description of Artificial Sequence: Synthetic oligonucleotide
uggagguuugcugaccuua

SEQ ID NO: 3073926 - RNA, 19 nt, Artificial Sequence
  Description of Artificial Sequence: Synthetic oligonucleotide
agagcacuuucagacucag

SEQ ID NO: 3073927 - RNA, 19 nt, Artificial Sequence
  Description of Artificial Sequence: Synthetic oligonucleotide
gugugugugugugugugug

SEQ ID NO: 3073928 - RNA, 19 nt, Artificial Sequence
  Description of Artificial Sequence: Synthetic oligonucleotide
gcacuuucagacucagcag

SEQ ID NO: 3073929 - RNA, 19 nt, Artificial Sequence
  Description of Artificial Sequence: Synthetic oligonucleotide
gcagguguugaaguugggg

SEQ ID NO: 3073930 - RNA, 19 nt, Artificial Sequence
  Description of Artificial Sequence: Synthetic oligonucleotide
cuauguugaguucaguuuu

SEQ ID NO: 3073931 - RNA, 19 nt, Artificial Sequence
  Description of Artificial Sequence: Synthetic oligonucleotide
agagcuggcucagguuugg

SEQ ID NO: 3073932 - RNA, 19 nt, Artificial Sequence
  Description of Artificial Sequence: Synthetic oligonucleotide
acuuucagacucagcaggu

SEQ ID NO: 3073933 - RNA, 19 nt, Artificial Sequence
  Description of Artificial Sequence: Synthetic oligonucleotide
cugaccuuaccaggugggg

SEQ ID NO: 3073934 - RNA, 19 nt, Artificial Sequence
  Description of Artificial Sequence: Synthetic oligonucleotide
cuuucagacucagcaggug

SEQ ID NO: 3073935 - RNA, 19 nt, Artificial Sequence
  Description of Artificial Sequence: Synthetic oligonucleotide
cacagagauugcacacuug

SEQ ID NO: 3073936 - RNA, 19 nt, Artificial Sequence
  Description of Artificial Sequence: Synthetic oligonucleotide
cauucugugcagguguuga

SEQ ID NO: 3073937 - RNA, 19 nt, Artificial Sequence
  Description of Artificial Sequence: Synthetic oligonucleotide
cacugcuagagcuggcuca

SEQ ID NO: 3073938 - RNA, 19 nt, Artificial Sequence
  Description of Artificial Sequence: Synthetic oligonucleotide
cuuauccggcuugugggug

SEQ ID NO: 3073939 - RNA, 19 nt, Artificial Sequence
  Description of Artificial Sequence: Synthetic oligonucleotide
gagccuauguugaguucag

SEQ ID NO: 3073940 - RNA, 19 nt, Artificial Sequence
  Description of Artificial Sequence: Synthetic oligonucleotide
ugaucuuauccggcuugug

SEQ ID NO: 3073941 - RNA, 19 nt, Artificial Sequence
  Description of Artificial Sequence: Synthetic oligonucleotide
uuuggacucugagcuuuca

SEQ ID NO: 3073942 - RNA, 19 nt, Artificial Sequence
  Description of Artificial Sequence: Synthetic oligonucleotide
caacuuuggugaucuuauc

SEQ ID NO: 3073943 - RNA, 19 nt, Artificial Sequence
  Description of Artificial Sequence: Synthetic oligonucleotide
gcagagcacuuucagacuc

SEQ ID NO: 3073944 - RNA, 19 nt, Artificial Sequence
  Description of Artificial Sequence: Synthetic oligonucleotide
ucagucaagugggguguug

SEQ ID NO: 3073945 - RNA, 19 nt, Artificial Sequence
  Description of Artificial Sequence: Synthetic oligonucleotide
ugcauucugugcagguguu

SEQ ID NO: 3073946 - RNA, 19 nt, Artificial Sequence
  Description of Artificial Sequence: Synthetic oligonucleotide
gcagguggagguuugcuga

SEQ ID NO: 3073947 - RNA, 19 nt, Artificial Sequence
  Description of Artificial Sequence: Synthetic oligonucleotide
gugugugugugugugcuca

SEQ ID NO: 3073948 - RNA, 19 nt, Artificial Sequence
  Description of Artificial Sequence: Synthetic oligonucleotide
cucagcagguggagguuug

SEQ ID NO: 3073949 - RNA, 19 nt, Artificial Sequence
  Description of Artificial Sequence: Synthetic oligonucleotide
uggugaucuuauccggcuu

SEQ ID NO: 3073950 - RNA, 19 nt, Artificial Sequence
  Description of Artificial Sequence: Synthetic oligonucleotide
auucugugcagguguugaa

SEQ ID NO: 3073951 - RNA, 19 nt, Artificial Sequence
  Description of Artificial Sequence: Synthetic oligonucleotide
gagagccuauguugaguuc

SEQ ID NO: 3073952 - RNA, 19 nt, Artificial Sequence
  Description of Artificial Sequence: Synthetic oligonucleotide
ggguuaaauccacagagau

SEQ ID NO: 3073953 - RNA, 19 nt, Artificial Sequence
  Description of Artificial Sequence: Synthetic oligonucleotide
ugugugugugugugugcuc

SEQ ID NO: 3073954 - RNA, 19 nt, Artificial Sequence
  Description of Artificial Sequence: Synthetic oligonucleotide
cucuugcauucugugcagg

SEQ ID NO: 3073955 - RNA, 19 nt, Artificial Sequence
  Description of Artificial Sequence: Synthetic oligonucleotide
uuuugcagagagggcaguu

SEQ ID NO: 3073956 - RNA, 19 nt, Artificial Sequence
  Description of Artificial Sequence: Synthetic oligonucleotide
gagagggcaguucgccuca

SEQ ID NO: 3073957 - RNA, 19 nt, Artificial Sequence
  Description of Artificial Sequence: Synthetic oligonucleotide
aguucgccucaacuuuggu

SEQ ID NO: 3073958 - RNA, 19 nt, Artificial Sequence
  Description of Artificial Sequence: Synthetic oligonucleotide
cagguggagguuugcugac

SEQ ID NO: 3073959 - RNA, 19 nt, Artificial Sequence
  Description of Artificial Sequence: Synthetic oligonucleotide
gguguuggguuaaauccac

SEQ ID NO: 3073960 - RNA, 19 nt, Artificial Sequence
  Description of Artificial Sequence: Synthetic oligonucleotide
cuugacucuugcauucugu

SEQ ID NO: 3073961 - RNA, 19 nt, Artificial Sequence
  Description of Artificial Sequence: Synthetic oligonucleotide
gcugaccuuaccagguggg

SEQ ID NO: 3073962 - RNA, 19 nt, Artificial Sequence
  Description of Artificial Sequence: Synthetic oligonucleotide
ggacucugagcuuucagcu

SEQ ID NO: 3073963 - RNA, 19 nt, Artificial Sequence
  Description of Artificial Sequence: Synthetic oligonucleotide
ucagcagguggagguuugc

SEQ ID NO: 3073964 - RNA, 19 nt, Artificial Sequence
  Description of Artificial Sequence: Synthetic oligonucleotide
cuagagcuggcucagguuu

SEQ ID NO: 3073965 - RNA, 19 nt, Artificial Sequence
  Description of Artificial Sequence: Synthetic oligonucleotide
uauccggcuugugggugag

SEQ ID NO: 3073966 - RNA, 19 nt, Artificial Sequence
  Description of Artificial Sequence: Synthetic oligonucleotide
gcagagagggcaguucgcc

SEQ ID NO: 3073967 - RNA, 19 nt, Artificial Sequence
  Description of Artificial Sequence: Synthetic oligonucleotide
cagagcacuuucagacuca

SEQ ID NO: 3073968 - RNA, 19 nt, Artificial Sequence
  Description of Artificial Sequence: Synthetic oligonucleotide
ggguguuggguuaaaucca

SEQ ID NO: 3073969 - RNA, 19 nt, Artificial Sequence
  Description of Artificial Sequence: Synthetic oligonucleotide
ccugagagccuauguugag

SEQ ID NO: 3073970 - RNA, 19 nt, Artificial Sequence
  Description of Artificial Sequence: Synthetic oligonucleotide
aagugggguguuggguuaa

SEQ ID NO: 3073971 - RNA, 19 nt, Artificial Sequence
  Description of Artificial Sequence: Synthetic oligonucleotide
gauugcacacuugacucuu

SEQ ID NO: 3073972 - RNA, 19 nt, Artificial Sequence
  Description of Artificial Sequence: Synthetic oligonucleotide
cacacuugacucuugcauu

SEQ ID NO: 3073973 - RNA, 19 nt, Artificial Sequence
  Description of Artificial Sequence: Synthetic oligonucleotide
gaguucaguuuugcagaga

SEQ ID NO: 3073974 - RNA, 19 nt, Artificial Sequence
  Description of Artificial Sequence: Synthetic oligonucleotide
agguuuggacucugagcuu

SEQ ID NO: 3073975 - RNA, 19 nt, Artificial Sequence
  Description of Artificial Sequence: Synthetic oligonucleotide
ugggugagcagagcacuuu

SEQ ID NO: 3073976 - RNA, 19 nt, Artificial Sequence
  Description of Artificial Sequence: Synthetic oligonucleotide
gcacacuugacucuugcau

SEQ ID NO: 3073977 - RNA, 19 nt, Artificial Sequence
  Description of Artificial Sequence: Synthetic oligonucleotide
gggugagcagagcacuuuc

SEQ ID NO: 3073978 - RNA, 19 nt, Artificial Sequence
  Description of Artificial Sequence: Synthetic oligonucleotide
ggagguuugcugaccuuac

SEQ ID NO: 3073979 - RNA, 19 nt, Artificial Sequence
  Description of Artificial Sequence: Synthetic oligonucleotide
ucgccucaacuuuggugau

SEQ ID NO: 3073980 - RNA, 19 nt, Artificial Sequence
  Description of Artificial Sequence: Synthetic oligonucleotide
gagggcaguucgccucaac

SEQ ID NO: 3073981 - RNA, 19 nt, Artificial Sequence
  Description of Artificial Sequence: Synthetic oligonucleotide
caagugggguguuggguua

SEQ ID NO: 3073982 - RNA, 19 nt, Artificial Sequence
  Description of Artificial Sequence: Synthetic oligonucleotide
gcaguucgccucaacuuug

SEQ ID NO: 3073983 - RNA, 19 nt, Artificial Sequence
  Description of Artificial Sequence: Synthetic oligonucleotide
gugugugugugugugugcu

SEQ ID NO: 3073984 - RNA, 19 nt, Artificial Sequence
  Description of Artificial Sequence: Synthetic oligonucleotide
ggggcuucuugucuuucuc

SEQ ID NO: 3073985 - RNA, 19 nt, Artificial Sequence
  Description of Artificial Sequence: Synthetic oligonucleotide
acucagcagguggagguuu

SEQ ID NO: 3073986 - RNA, 19 nt, Artificial Sequence
  Description of Artificial Sequence: Synthetic oligonucleotide
gucaagugggguguugggu

SEQ ID NO: 3073987 - RNA, 19 nt, Artificial Sequence
  Description of Artificial Sequence: Synthetic oligonucleotide
gguggagguuugcugaccu

SEQ ID NO: 3073988 - RNA, 19 nt, Artificial Sequence
  Description of Artificial Sequence: Synthetic oligonucleotide
ccuauguugaguucaguuu

SEQ ID NO: 3073989 - RNA, 19 nt, Artificial Sequence
  Description of Artificial Sequence: Synthetic oligonucleotide
ggcuugugggugagcagag

SEQ ID NO: 3073990 - RNA, 19 nt, Artificial Sequence
  Description of Artificial Sequence: Synthetic oligonucleotide
uggcucagguuuggacucu

SEQ ID NO: 3073991 - RNA, 19 nt, Artificial Sequence
  Description of Artificial Sequence: Synthetic oligonucleotide
ggugagcagagcacuuuca

SEQ ID NO: 3073992 - RNA, 19 nt, Artificial Sequence
  Description of Artificial Sequence: Synthetic oligonucleotide
gccuauguugaguucaguu

SEQ ID NO: 3073993 - RNA, 19 nt, Artificial Sequence
  Description of Artificial Sequence: Synthetic oligonucleotide
agccuauguugaguucagu

SEQ ID NO: 3073994 - RNA, 19 nt, Artificial Sequence
  Description of Artificial Sequence: Synthetic oligonucleotide
guguuggguuaaauccaca

SEQ ID NO: 3073995 - RNA, 19 nt, Artificial Sequence
  Description of Artificial Sequence: Synthetic oligonucleotide
cugcuagagcuggcucagg

SEQ ID NO: 3073996 - RNA, 19 nt, Artificial Sequence
  Description of Artificial Sequence: Synthetic oligonucleotide
auccggcuugugggugagc

SEQ ID NO: 3073997 - RNA, 19 nt, Artificial Sequence
  Description of Artificial Sequence: Synthetic oligonucleotide
ggcaguucgccucaacuuu

SEQ ID NO: 3073998 - RNA, 19 nt, Artificial Sequence
  Description of Artificial Sequence: Synthetic oligonucleotide
cugagagccuauguugagu

SEQ ID NO: 3073999 - RNA, 19 nt, Artificial Sequence
  Description of Artificial Sequence: Synthetic oligonucleotide
gguuaaauccacagagauu

SEQ ID NO: 3074000 - RNA, 19 nt, Artificial Sequence
  Description of Artificial Sequence: Synthetic oligonucleotide
gcauucugugcagguguug

SEQ ID NO: 3074001 - RNA, 19 nt, Artificial Sequence
  Description of Artificial Sequence: Synthetic oligonucleotide
gugaucuuauccggcuugu

SEQ ID NO: 3074002 - RNA, 19 nt, Artificial Sequence
  Description of Artificial Sequence: Synthetic oligonucleotide
gguuuggacucugagcuuu

SEQ ID NO: 3074003 - RNA, 19 nt, Artificial Sequence
  Description of Artificial Sequence: Synthetic oligonucleotide
guuuugcagagagggcagu

SEQ ID NO: 3074004 - RNA, 19 nt, Artificial Sequence
  Description of Artificial Sequence: Synthetic oligonucleotide
gcuugugggugagcagagc

SEQ ID NO: 3074005 - RNA, 19 nt, Artificial Sequence
  Description of Artificial Sequence: Synthetic oligonucleotide
agugggguguuggguuaaa

SEQ ID NO: 3074006 - RNA, 19 nt, Artificial Sequence
  Description of Artificial Sequence: Synthetic oligonucleotide
cugugcagguguugaaguu

SEQ ID NO: 3074007 - RNA, 19 nt, Artificial Sequence
  Description of Artificial Sequence: Synthetic oligonucleotide
gggcaguucgccucaacuu

SEQ ID NO: 3074008 - RNA, 19 nt, Artificial Sequence
  Description of Artificial Sequence: Synthetic oligonucleotide
ggcucagguuuggacucug

SEQ ID NO: 3074009 - RNA, 19 nt, Artificial Sequence
  Description of Artificial Sequence: Synthetic oligonucleotide
gcucagucaaguggggugu

SEQ ID NO: 3074010 - RNA, 19 nt, Artificial Sequence
  Description of Artificial Sequence: Synthetic oligonucleotide
gugcucagucaaguggggu

SEQ ID NO: 3074011 - RNA, 19 nt, Artificial Sequence
  Description of Artificial Sequence: Synthetic oligonucleotide
gagcuggcucagguuugga

SEQ ID NO: 3074012 - RNA, 19 nt, Artificial Sequence
  Description of Artificial Sequence: Synthetic oligonucleotide
ccggcuugugggugagcag

SEQ ID NO: 3074013 - RNA, 19 nt, Artificial Sequence
  Description of Artificial Sequence: Synthetic oligonucleotide
cucugagcuuucagcugcu

SEQ ID NO: 3074014 - RNA, 19 nt, Artificial Sequence
  Description of Artificial Sequence: Synthetic oligonucleotide
ggcguccugagagccuaug

SEQ ID NO: 3074015 - RNA, 19 nt, Artificial Sequence
  Description of Artificial Sequence: Synthetic oligonucleotide
gugugugugugugcucagu

SEQ ID NO: 3074016 - RNA, 19 nt, Artificial Sequence
  Description of Artificial Sequence: Synthetic oligonucleotide
gacucagcagguggagguu

SEQ ID NO: 3074017 - RNA, 19 nt, Artificial Sequence
  Description of Artificial Sequence: Synthetic oligonucleotide
gcuagagcuggcucagguu

SEQ ID NO: 3074018 - RNA, 19 nt, Artificial Sequence
  Description of Artificial Sequence: Synthetic oligonucleotide
gcguccugagagccuaugu

SEQ ID NO: 3074019 - RNA, 19 nt, Artificial Sequence
  Description of Artificial Sequence: Synthetic oligonucleotide
agagggcaguucgccucaa

SEQ ID NO: 3074020 - RNA, 19 nt, Artificial Sequence
  Description of Artificial Sequence: Synthetic oligonucleotide
guggagguuugcugaccuu

SEQ ID NO: 3074021 - RNA, 19 nt, Artificial Sequence
  Description of Artificial Sequence: Synthetic oligonucleotide
cagcagguggagguuugcu

SEQ ID NO: 3074022 - RNA, 19 nt, Artificial Sequence
  Description of Artificial Sequence: Synthetic oligonucleotide
cggcuugugggugagcaga

SEQ ID NO: 3074023 - RNA, 19 nt, Artificial Sequence
  Description of Artificial Sequence: Synthetic oligonucleotide
ggggcguccugagagccua

SEQ ID NO: 3074024 - RNA, 19 nt, Artificial Sequence
  Description of Artificial Sequence: Synthetic oligonucleotide
gcucagguuuggacucuga

SEQ ID NO: 3074025 - RNA, 19 nt, Artificial Sequence
  Description of Artificial Sequence: Synthetic oligonucleotide
ccacagagauugcacacuu

SEQ ID NO: 3074026 - RNA, 19 nt, Artificial Sequence
  Description of Artificial Sequence: Synthetic oligonucleotide
gugggguguuggguuaaau

SEQ ID NO: 3074027 - RNA, 19 nt, Artificial Sequence
  Description of Artificial Sequence: Synthetic oligonucleotide
cguccugagagccuauguu

SEQ ID NO: 3074028 - RNA, 19 nt, Artificial Sequence
  Description of Artificial Sequence: Synthetic oligonucleotide
cucagucaagugggguguu

SEQ ID NO: 3074029 - RNA, 19 nt, Artificial Sequence
  Description of Artificial Sequence: Synthetic oligonucleotide
cgccucaacuuuggugauc

SEQ ID NO: 3074030 - RNA, 19 nt, Artificial Sequence
  Description of Artificial Sequence: Synthetic oligonucleotide
gggcguccugagagccuau

SEQ ID NO: 3074031 - RNA, 19 nt, Artificial Sequence
  Description of Artificial Sequence: Synthetic oligonucleotide
aaauauucccuguacagcc

SEQ ID NO: 3074032 - RNA, 19 nt, Artificial Sequence
  Description of Artificial Sequence: Synthetic oligonucleotide
aacaauauacuuuacaugu

SEQ ID NO: 3074033 - RNA, 19 nt, Artificial Sequence
  Description of Artificial Sequence: Synthetic oligonucleotide
aauaacuuagaaucacccc

SEQ ID NO: 3074034 - RNA, 19 nt, Artificial Sequence
  Description of Artificial Sequence: Synthetic oligonucleotide
uuuggcaacaauaacuuag

SEQ ID NO: 3074035 - RNA, 19 nt, Artificial Sequence
  Description of Artificial Sequence: Synthetic oligonucleotide
aaaauauucccuguacagc

SEQ ID NO: 3074036 - RNA, 19 nt, Artificial Sequence
  Description of Artificial Sequence: Synthetic oligonucleotide
caaguuacaaaauauuccc

SEQ ID NO: 3074037 - RNA, 19 nt, Artificial Sequence
  Description of Artificial Sequence: Synthetic oligonucleotide
uuugcuaugcagcaggacc

SEQ ID NO: 3074038 - RNA, 19 nt, Artificial Sequence
  Description of Artificial Sequence: Synthetic oligonucleotide
gcaacaauaacuuagaauc

SEQ ID NO: 3074039 - RNA, 19 nt, Artificial Sequence
  Description of Artificial Sequence: Synthetic oligonucleotide
aacaauaacuuagaaucac

SEQ ID NO: 3074040 - RNA, 19 nt, Artificial Sequence
  Description of Artificial Sequence: Synthetic oligonucleotide
auaacuuagaaucacccca

SEQ ID NO: 3074041 - RNA, 19 nt, Artificial Sequence
  Description of Artificial Sequence: Synthetic oligonucleotide
acuacuacccuguagagga

SEQ ID NO: 3074042 - RNA, 19 nt, Artificial Sequence
  Description of Artificial Sequence: Synthetic oligonucleotide
uuagaaucaccccauuucc

SEQ ID NO: 3074043 - RNA, 19 nt, Artificial Sequence
  Description of Artificial Sequence: Synthetic oligonucleotide
aaucaccccauuuccauuc

SEQ ID NO: 3074044 - RNA, 19 nt, Artificial Sequence
  Description of Artificial Sequence: Synthetic oligonucleotide
caaaauauucccuguacag

SEQ ID NO: 3074045 - RNA, 19 nt, Artificial Sequence
  Description of Artificial Sequence: Synthetic oligonucleotide
aguuacaaaauauucccug

SEQ ID NO: 3074046 - RNA, 19 nt, Artificial Sequence
  Description of Artificial Sequence: Synthetic oligonucleotide
aacgcaacaauauacuuua

SEQ ID NO: 3074047 - RNA, 19 nt, Artificial Sequence
  Description of Artificial Sequence: Synthetic oligonucleotide
caauaacuuagaaucaccc

SEQ ID NO: 3074048 - RNA, 19 nt, Artificial Sequence
  Description of Artificial Sequence: Synthetic oligonucleotide
gaacaacccagacagaccc

SEQ ID NO: 3074049 - RNA, 19 nt, Artificial Sequence
  Description of Artificial Sequence: Synthetic oligonucleotide
auucacuccagcaaguuac

SEQ ID NO: 3074050 - RNA, 19 nt, Artificial Sequence
  Description of Artificial Sequence: Synthetic oligonucleotide
auacuuuacaugucuuugg

SEQ ID NO: 3074051 - RNA, 19 nt, Artificial Sequence
  Description of Artificial Sequence: Synthetic oligonucleotide
ucuggcugcagucuggaag

SEQ ID NO: 3074052 - RNA, 19 nt, Artificial Sequence
  Description of Artificial Sequence: Synthetic oligonucleotide
uauacuuuacaugucuuug

SEQ ID NO: 3074053 - RNA, 19 nt, Artificial Sequence
  Description of Artificial Sequence: Synthetic oligonucleotide
uacaaaauauucccuguac

SEQ ID NO: 3074054 - RNA, 19 nt, Artificial Sequence
  Description of Artificial Sequence: Synthetic oligonucleotide
agcaaguuacaaaauauuc

SEQ ID NO: 3074055 - RNA, 19 nt, Artificial Sequence
  Description of Artificial Sequence: Synthetic oligonucleotide
cuuagaaucaccccauuuc

SEQ ID NO: 3074056 - RNA, 19 nt, Artificial Sequence
  Description of Artificial Sequence: Synthetic oligonucleotide
uagaggacagcucugggca

SEQ ID NO: 3074057 - RNA, 19 nt, Artificial Sequence
  Description of Artificial Sequence: Synthetic oligonucleotide
gccagaacaacccagacag

SEQ ID NO: 3074058 - RNA, 19 nt, Artificial Sequence
  Description of Artificial Sequence: Synthetic oligonucleotide
uacuuuacaugucuuuggc

SEQ ID NO: 3074059 - RNA, 19 nt, Artificial Sequence
  Description of Artificial Sequence: Synthetic oligonucleotide
acaauaacuuagaaucacc

SEQ ID NO: 3074060 - RNA, 19 nt, Artificial Sequence
  Description of Artificial Sequence: Synthetic oligonucleotide
uuccauucacuccagcaag

SEQ ID NO: 3074061 - RNA, 19 nt, Artificial Sequence
  Description of Artificial Sequence: Synthetic oligonucleotide
agaguacacucucuucucc

SEQ ID NO: 3074062 - RNA, 19 nt, Artificial Sequence
  Description of Artificial Sequence: Synthetic oligonucleotide
acaaaauauucccuguaca

SEQ ID NO: 3074063 - RNA, 19 nt, Artificial Sequence
  Description of Artificial Sequence: Synthetic oligonucleotide
aauauucccuguacagccc

SEQ ID NO: 3074064 - RNA, 19 nt, Artificial Sequence
  Description of Artificial Sequence: Synthetic oligonucleotide
acagaguacacucucuucu

SEQ ID NO: 3074065 - RNA, 19 nt, Artificial Sequence
  Description of Artificial Sequence: Synthetic oligonucleotide
caacaauauacuuuacaug

SEQ ID NO: 3074066 - RNA, 19 nt, Artificial Sequence
  Description of Artificial Sequence: Synthetic oligonucleotide
uaugcagcaggaccuaagc

SEQ ID NO: 3074067 - RNA, 19 nt, Artificial Sequence
  Description of Artificial Sequence: Synthetic oligonucleotide
uuuccauucacuccagcaa

SEQ ID NO: 3074068 - RNA, 19 nt, Artificial Sequence
  Description of Artificial Sequence: Synthetic oligonucleotide
auuuccauucacuccagca

SEQ ID NO: 3074069 - RNA, 19 nt, Artificial Sequence
  Description of Artificial Sequence: Synthetic oligonucleotide
uuggcaacaauaacuuaga

SEQ ID NO: 3074070 - RNA, 19 nt, Artificial Sequence
  Description of Artificial Sequence: Synthetic oligonucleotide
gaagccuuugcuaugcagc

SEQ ID NO: 3074071 - RNA, 19 nt, Artificial Sequence
  Description of Artificial Sequence: Synthetic oligonucleotide
aagccagaacaacccagac

SEQ ID NO: 3074072 - RNA, 19 nt, Artificial Sequence
  Description of Artificial Sequence: Synthetic oligonucleotide
cuuuacaugucuuuggcaa

SEQ ID NO: 3074073 - RNA, 19 nt, Artificial Sequence
  Description of Artificial Sequence: Synthetic oligonucleotide
uguagaggacagcucuggg

SEQ ID NO: 3074074 - RNA, 19 nt, Artificial Sequence
  Description of Artificial Sequence: Synthetic oligonucleotide
accuaagccagaacaaccc

SEQ ID NO: 3074075 - RNA, 19 nt, Artificial Sequence
  Description of Artificial Sequence: Synthetic oligonucleotide
uccagcaaguuacaaaaua

SEQ ID NO: 3074076 - RNA, 19 nt, Artificial Sequence
  Description of Artificial Sequence: Synthetic oligonucleotide
cuaagccagaacaacccag

SEQ ID NO: 3074077 - RNA, 19 nt, Artificial Sequence
  Description of Artificial Sequence: Synthetic oligonucleotide
uuacaaaauauucccugua

SEQ ID NO: 3074078 - RNA, 19 nt, Artificial Sequence
  Description of Artificial Sequence: Synthetic oligonucleotide
accccauuuccauucacuc

SEQ ID NO: 3074079 - RNA, 19 nt, Artificial Sequence
  Description of Artificial Sequence: Synthetic oligonucleotide
uugcuaugcagcaggaccu

SEQ ID NO: 3074080 - RNA, 19 nt, Artificial Sequence
  Description of Artificial Sequence: Synthetic oligonucleotide
guggcuacagaguacacuc

SEQ ID NO: 3074081 - RNA, 19 nt, Artificial Sequence
  Description of Artificial Sequence: Synthetic oligonucleotide
uuuacaugucuuuggcaac

SEQ ID NO: 3074082 - RNA, 19 nt, Artificial Sequence
  Description of Artificial Sequence: Synthetic oligonucleotide
agaacaacccagacagacc

SEQ ID NO: 3074083 - RNA, 19 nt, Artificial Sequence
  Description of Artificial Sequence: Synthetic oligonucleotide
aguacacucucuucuccuc

SEQ ID NO: 3074084 - RNA, 19 nt, Artificial Sequence
  Description of Artificial Sequence: Synthetic oligonucleotide
cacacuacuacccuguaga

SEQ ID NO: 3074085 - RNA, 19 nt, Artificial Sequence
  Description of Artificial Sequence: Synthetic oligonucleotide
uaacuuagaaucaccccau

SEQ ID NO: 3074086 - RNA, 19 nt, Artificial Sequence
  Description of Artificial Sequence: Synthetic oligonucleotide
cuggcugcagucuggaagc

SEQ ID NO: 3074087 - RNA, 19 nt, Artificial Sequence
  Description of Artificial Sequence: Synthetic oligonucleotide
gcaaguuacaaaauauucc

SEQ ID NO: 3074088 - RNA, 19 nt, Artificial Sequence
  Description of Artificial Sequence: Synthetic oligonucleotide
ugucuuuggcaacaauaac

SEQ ID NO: 3074089 - RNA, 19 nt, Artificial Sequence
  Description of Artificial Sequence: Synthetic oligonucleotide
uucccuguacagcccaccg

SEQ ID NO: 3074090 - RNA, 19 nt, Artificial Sequence
  Description of Artificial Sequence: Synthetic oligonucleotide
aaacgcaacaauauacuuu

SEQ ID NO: 3074091 - RNA, 19 nt, Artificial Sequence
  Description of Artificial Sequence: Synthetic oligonucleotide
uagaaucaccccauuucca

SEQ ID NO: 3074092 - RNA, 19 nt, Artificial Sequence
  Description of Artificial Sequence: Synthetic oligonucleotide
ugcucugcgagggagagcu

SEQ ID NO: 3074093 - RNA, 19 nt, Artificial Sequence
  Description of Artificial Sequence: Synthetic oligonucleotide
guagaggacagcucugggc

SEQ ID NO: 3074094 - RNA, 19 nt, Artificial Sequence
  Description of Artificial Sequence: Synthetic oligonucleotide
auauacuuuacaugucuuu

SEQ ID NO: 3074095 - RNA, 19 nt, Artificial Sequence
  Description of Artificial Sequence: Synthetic oligonucleotide
agaaucaccccauuuccau

SEQ ID NO: 3074096 - RNA, 19 nt, Artificial Sequence
  Description of Artificial Sequence: Synthetic oligonucleotide
aaguuacaaaauauucccu

SEQ ID NO: 3074097 - RNA, 19 nt, Artificial Sequence
  Description of Artificial Sequence: Synthetic oligonucleotide
cagaacaacccagacagac

SEQ ID NO: 3074098 - RNA, 19 nt, Artificial Sequence
  Description of Artificial Sequence: Synthetic oligonucleotide
ucuggccaggguauggggc

SEQ ID NO: 3074099 - RNA, 19 nt, Artificial Sequence
  Description of Artificial Sequence: Synthetic oligonucleotide
uuacaugucuuuggcaaca

SEQ ID NO: 3074100 - RNA, 19 nt, Artificial Sequence
  Description of Artificial Sequence: Synthetic oligonucleotide
acaauauacuuuacauguc

SEQ ID NO: 3074101 - RNA, 19 nt, Artificial Sequence
  Description of Artificial Sequence: Synthetic oligonucleotide
acuuuacaugucuuuggca

SEQ ID NO: 3074102 - RNA, 19 nt, Artificial Sequence
  Description of Artificial Sequence: Synthetic oligonucleotide
gaccuaagccagaacaacc

SEQ ID NO: 3074103 - RNA, 19 nt, Artificial Sequence
  Description of Artificial Sequence: Synthetic oligonucleotide
aauauacuuuacaugucuu

SEQ ID NO: 3074104 - RNA, 19 nt, Artificial Sequence
  Description of Artificial Sequence: Synthetic oligonucleotide
aacccagacagacccugug

SEQ ID NO: 3074105 - RNA, 19 nt, Artificial Sequence
  Description of Artificial Sequence: Synthetic oligonucleotide
caugucuuuggcaacaaua

SEQ ID NO: 3074106 - RNA, 19 nt, Artificial Sequence
  Description of Artificial Sequence: Synthetic oligonucleotide
caggaccuaagccagaaca

SEQ ID NO: 3074107 - RNA, 19 nt, Artificial Sequence
  Description of Artificial Sequence: Synthetic oligonucleotide
caacaauaacuuagaauca

SEQ ID NO: 3074108 - RNA, 19 nt, Artificial Sequence
  Description of Artificial Sequence: Synthetic oligonucleotide
uucuccucuggccagggua

SEQ ID NO: 3074109 - RNA, 19 nt, Artificial Sequence
  Description of Artificial Sequence: Synthetic oligonucleotide
uacccuguagaggacagcu

SEQ ID NO: 3074110 - RNA, 19 nt, Artificial Sequence
  Description of Artificial Sequence: Synthetic oligonucleotide
agcugcccacacuacuacc

SEQ ID NO: 3074111 - RNA, 19 nt, Artificial Sequence
  Description of Artificial Sequence: Synthetic oligonucleotide
acacuacuacccuguagag

SEQ ID NO: 3074112 - RNA, 19 nt, Artificial Sequence
  Description of Artificial Sequence: Synthetic oligonucleotide
uggggcagggcacugcucu

SEQ ID NO: 3074113 - RNA, 19 nt, Artificial Sequence
  Description of Artificial Sequence: Synthetic oligonucleotide
ucccuguacagcccaccgg

SEQ ID NO: 3074114 - RNA, 19 nt, Artificial Sequence
  Description of Artificial Sequence: Synthetic oligonucleotide
uguacagcccaccggcccu

SEQ ID NO: 3074115 - RNA, 19 nt, Artificial Sequence
  Description of Artificial Sequence: Synthetic oligonucleotide
acagacccuguggagaagg

SEQ ID NO: 3074116 - RNA, 19 nt, Artificial Sequence
  Description of Artificial Sequence: Synthetic oligonucleotide
cuaugcagcaggaccuaag

SEQ ID NO: 3074117 - RNA, 19 nt, Artificial Sequence
  Description of Artificial Sequence: Synthetic oligonucleotide
acuuagaaucaccccauuu

SEQ ID NO: 3074118 - RNA, 19 nt, Artificial Sequence
  Description of Artificial Sequence: Synthetic oligonucleotide
uacagaguacacucucuuc

SEQ ID NO: 3074119 - RNA, 19 nt, Artificial Sequence
  Description of Artificial Sequence: Synthetic oligonucleotide
uccauucacuccagcaagu

SEQ ID NO: 3074120 - RNA, 19 nt, Artificial Sequence
  Description of Artificial Sequence: Synthetic oligonucleotide
caauauacuuuacaugucu

SEQ ID NO: 3074121 - RNA, 19 nt, Artificial Sequence
  Description of Artificial Sequence: Synthetic oligonucleotide
uauggggcagggcacugcu

SEQ ID NO: 3074122 - RNA, 19 nt, Artificial Sequence
  Description of Artificial Sequence: Synthetic oligonucleotide
cugccugcaggcaggagcc

SEQ ID NO: 3074123 - RNA, 19 nt, Artificial Sequence
  Description of Artificial Sequence: Synthetic oligonucleotide
acaguggcuacagaguaca

SEQ ID NO: 3074124 - RNA, 19 nt, Artificial Sequence
  Description of Artificial Sequence: Synthetic oligonucleotide
augucuuuggcaacaauaa

SEQ ID NO: 3074125 - RNA, 19 nt, Artificial Sequence
  Description of Artificial Sequence: Synthetic oligonucleotide
uucacuccagcaaguuaca

SEQ ID NO: 3074126 - RNA, 19 nt, Artificial Sequence
  Description of Artificial Sequence: Synthetic oligonucleotide
gucuuuggcaacaauaacu

SEQ ID NO: 3074127 - RNA, 19 nt, Artificial Sequence
  Description of Artificial Sequence: Synthetic oligonucleotide
auucccuguacagcccacc

SEQ ID NO: 3074128 - RNA, 19 nt, Artificial Sequence
  Description of Artificial Sequence: Synthetic oligonucleotide
cacuacuacccuguagagg

SEQ ID NO: 3074129 - RNA, 19 nt, Artificial Sequence
  Description of Artificial Sequence: Synthetic oligonucleotide
cuguagaggacagcucugg

SEQ ID NO: 3074130 - RNA, 19 nt, Artificial Sequence
  Description of Artificial Sequence: Synthetic oligonucleotide
ucugcgagggagagcugcc

SEQ ID NO: 3074131 - RNA, 19 nt, Artificial Sequence
  Description of Artificial Sequence: Synthetic oligonucleotide
aggcaggagccccacagug

SEQ ID NO: 3074132 - RNA, 19 nt, Artificial Sequence
  Description of Artificial Sequence: Synthetic oligonucleotide
uggcaacaauaacuuagaa

SEQ ID NO: 3074133 - RNA, 19 nt, Artificial Sequence
  Description of Artificial Sequence: Synthetic oligonucleotide
caggguauggggcagggca

SEQ ID NO: 3074134 - RNA, 19 nt, Artificial Sequence
  Description of Artificial Sequence: Synthetic oligonucleotide
gcaacaauauacuuuacau

SEQ ID NO: 3074135 - RNA, 19 nt, Artificial Sequence
  Description of Artificial Sequence: Synthetic oligonucleotide
ucuccucuggccaggguau

SEQ ID NO: 3074136 - RNA, 19 nt, Artificial Sequence
  Description of Artificial Sequence: Synthetic oligonucleotide
aguggcuacagaguacacu

SEQ ID NO: 3074137 - RNA, 19 nt, Artificial Sequence
  Description of Artificial Sequence: Synthetic oligonucleotide
ugggcagucuggcugcagu

SEQ ID NO: 3074138 - RNA, 19 nt, Artificial Sequence
  Description of Artificial Sequence: Synthetic oligonucleotide
agcccaccggcccuguuuc

SEQ ID NO: 3074139 - RNA, 19 nt, Artificial Sequence
  Description of Artificial Sequence: Synthetic oligonucleotide
cagaguacacucucuucuc

SEQ ID NO: 3074140 - RNA, 19 nt, Artificial Sequence
  Description of Artificial Sequence: Synthetic oligonucleotide
cuguacagcccaccggccc

SEQ ID NO: 3074141 - RNA, 19 nt, Artificial Sequence
  Description of Artificial Sequence: Synthetic oligonucleotide
aacuuagaaucaccccauu

SEQ ID NO: 3074142 - RNA, 19 nt, Artificial Sequence
  Description of Artificial Sequence: Synthetic oligonucleotide
agucuggaagccuuugcua

SEQ ID NO: 3074143 - RNA, 19 nt, Artificial Sequence
  Description of Artificial Sequence: Synthetic oligonucleotide
ugcgagggagagcugccca

SEQ ID NO: 3074144 - RNA, 19 nt, Artificial Sequence
  Description of Artificial Sequence: Synthetic oligonucleotide
acaacccagacagacccug

SEQ ID NO: 3074145 - RNA, 19 nt, Artificial Sequence
  Description of Artificial Sequence: Synthetic oligonucleotide
uacuacccuguagaggaca

SEQ ID NO: 3074146 - RNA, 19 nt, Artificial Sequence
  Description of Artificial Sequence: Synthetic oligonucleotide
agaggacagcucugggcag

SEQ ID NO: 3074147 - RNA, 19 nt, Artificial Sequence
  Description of Artificial Sequence: Synthetic oligonucleotide
cauuuccauucacuccagc

SEQ ID NO: 3074148 - RNA, 19 nt, Artificial Sequence
  Description of Artificial Sequence: Synthetic oligonucleotide
cucugcgagggagagcugc

SEQ ID NO: 3074149 - RNA, 19 nt, Artificial Sequence
  Description of Artificial Sequence: Synthetic oligonucleotide
cacaguggcuacagaguac

SEQ ID NO: 3074150 - RNA, 19 nt, Artificial Sequence
  Description of Artificial Sequence: Synthetic oligonucleotide
uggcuacagaguacacucu

SEQ ID NO: 3074151 - RNA, 19 nt, Artificial Sequence
  Description of Artificial Sequence: Synthetic oligonucleotide
uccucuggccaggguaugg

SEQ ID NO: 3074152 - RNA, 19 nt, Artificial Sequence
  Description of Artificial Sequence: Synthetic oligonucleotide
acuacccuguagaggacag

SEQ ID NO: 3074153 - RNA, 19 nt, Artificial Sequence
  Description of Artificial Sequence: Synthetic oligonucleotide
gagcugcccacacuacuac

SEQ ID NO: 3074154 - RNA, 19 nt, Artificial Sequence
  Description of Artificial Sequence: Synthetic oligonucleotide
ugcccacacuacuacccug

SEQ ID NO: 3074155 - RNA, 19 nt, Artificial Sequence
  Description of Artificial Sequence: Synthetic oligonucleotide
cagucuggcugcagucugg

SEQ ID NO: 3074156 - RNA, 19 nt, Artificial Sequence
  Description of Artificial Sequence: Synthetic oligonucleotide
cacucucuucuccucuggc

SEQ ID NO: 3074157 - RNA, 19 nt, Artificial Sequence
  Description of Artificial Sequence: Synthetic oligonucleotide
aggguauggggcagggcac

SEQ ID NO: 3074158 - RNA, 19 nt, Artificial Sequence
  Description of Artificial Sequence: Synthetic oligonucleotide
cagacccuguggagaaggg

SEQ ID NO: 3074159 - RNA, 19 nt, Artificial Sequence
  Description of Artificial Sequence: Synthetic oligonucleotide
cccauuuccauucacucca

SEQ ID NO: 3074160 - RNA, 19 nt, Artificial Sequence
  Description of Artificial Sequence: Synthetic oligonucleotide
acagcucugggcagucugg

SEQ ID NO: 3074161 - RNA, 19 nt, Artificial Sequence
  Description of Artificial Sequence: Synthetic oligonucleotide
ggcaacaauaacuuagaau

SEQ ID NO: 3074162 - RNA, 19 nt, Artificial Sequence
  Description of Artificial Sequence: Synthetic oligonucleotide
gaguacacucucuucuccu

SEQ ID NO: 3074163 - RNA, 19 nt, Artificial Sequence
  Description of Artificial Sequence: Synthetic oligonucleotide
gcaggagccccacaguggc

SEQ ID NO: 3074164 - RNA, 19 nt, Artificial Sequence
  Description of Artificial Sequence: Synthetic oligonucleotide
ucaccccauuuccauucac

SEQ ID NO: 3074165 - RNA, 19 nt, Artificial Sequence
  Description of Artificial Sequence: Synthetic oligonucleotide
cccuguacagcccaccggc

SEQ ID NO: 3074166 - RNA, 19 nt, Artificial Sequence
  Description of Artificial Sequence: Synthetic oligonucleotide
cacuccagcaaguuacaaa

SEQ ID NO: 3074167 - RNA, 19 nt, Artificial Sequence
  Description of Artificial Sequence: Synthetic oligonucleotide
cuuugcuaugcagcaggac

SEQ ID NO: 3074168 - RNA, 19 nt, Artificial Sequence
  Description of Artificial Sequence: Synthetic oligonucleotide
gcucugggcagucuggcug

SEQ ID NO: 3074169 - RNA, 19 nt, Artificial Sequence
  Description of Artificial Sequence: Synthetic oligonucleotide
gcagcaggaccuaagccag

SEQ ID NO: 3074170 - RNA, 19 nt, Artificial Sequence
  Description of Artificial Sequence: Synthetic oligonucleotide
ggcuacagaguacacucuc

SEQ ID NO: 3074171 - RNA, 19 nt, Artificial Sequence
  Description of Artificial Sequence: Synthetic oligonucleotide
aucaccccauuuccauuca

SEQ ID NO: 3074172 - RNA, 19 nt, Artificial Sequence
  Description of Artificial Sequence: Synthetic oligonucleotide
acaugucuuuggcaacaau

SEQ ID NO: 3074173 - RNA, 19 nt, Artificial Sequence
  Description of Artificial Sequence: Synthetic oligonucleotide
aggaccuaagccagaacaa

SEQ ID NO: 3074174 - RNA, 19 nt, Artificial Sequence
  Description of Artificial Sequence: Synthetic oligonucleotide
cagacagacccuguggaga

SEQ ID NO: 3074175 - RNA, 19 nt, Artificial Sequence
  Description of Artificial Sequence: Synthetic oligonucleotide
aacaacccagacagacccu

SEQ ID NO: 3074176 - RNA, 19 nt, Artificial Sequence
  Description of Artificial Sequence: Synthetic oligonucleotide
ccccauuuccauucacucc

SEQ ID NO: 3074177 - RNA, 19 nt, Artificial Sequence
  Description of Artificial Sequence: Synthetic oligonucleotide
uacaugucuuuggcaacaa

SEQ ID NO: 3074178 - RNA, 19 nt, Artificial Sequence
  Description of Artificial Sequence: Synthetic oligonucleotide
ggcccuguuucucccagcc

SEQ ID NO: 3074179 - RNA, 19 nt, Artificial Sequence
  Description of Artificial Sequence: Synthetic oligonucleotide
cuacuacccuguagaggac

SEQ ID NO: 3074180 - RNA, 19 nt, Artificial Sequence
  Description of Artificial Sequence: Synthetic oligonucleotide
ggaccuaagccagaacaac

SEQ ID NO: 3074181 - RNA, 19 nt, Artificial Sequence
  Description of Artificial Sequence: Synthetic oligonucleotide
gagagcugcccacacuacu

SEQ ID NO: 3074182 - RNA, 19 nt, Artificial Sequence
  Description of Artificial Sequence: Synthetic oligonucleotide
uucucccagcccugccugc

SEQ ID NO: 3074183 - RNA, 19 nt, Artificial Sequence
  Description of Artificial Sequence: Synthetic oligonucleotide
cuuuggcaacaauaacuua

SEQ ID NO: 3074184 - RNA, 19 nt, Artificial Sequence
  Description of Artificial Sequence: Synthetic oligonucleotide
cauucacuccagcaaguua

SEQ ID NO: 3074185 - RNA, 19 nt, Artificial Sequence
  Description of Artificial Sequence: Synthetic oligonucleotide
acgcaacaauauacuuuac

SEQ ID NO: 3074186 - RNA, 19 nt, Artificial Sequence
  Description of Artificial Sequence: Synthetic oligonucleotide
agcaggaccuaagccagaa

SEQ ID NO: 3074187 - RNA, 19 nt, Artificial Sequence
  Description of Artificial Sequence: Synthetic oligonucleotide
gcagucuggaagccuuugc

SEQ ID NO: 3074188 - RNA, 19 nt, Artificial Sequence
  Description of Artificial Sequence: Synthetic oligonucleotide
cagcccugccugcaggcag

SEQ ID NO: 3074189 - RNA, 19 nt, Artificial Sequence
  Description of Artificial Sequence: Synthetic oligonucleotide
agccccacaguggcuacag

SEQ ID NO: 3074190 - RNA, 19 nt, Artificial Sequence
  Description of Artificial Sequence: Synthetic oligonucleotide
ucacuccagcaaguuacaa

SEQ ID NO: 3074191 - RNA, 19 nt, Artificial Sequence
  Description of Artificial Sequence: Synthetic oligonucleotide
agagcugcccacacuacua

SEQ ID NO: 3074192 - RNA, 19 nt, Artificial Sequence
  Description of Artificial Sequence: Synthetic oligonucleotide
aggacagcucugggcaguc

SEQ ID NO: 3074193 - RNA, 19 nt, Artificial Sequence
  Description of Artificial Sequence: Synthetic oligonucleotide
ggcaggagccccacagugg

SEQ ID NO: 3074194 - RNA, 19 nt, Artificial Sequence
  Description of Artificial Sequence: Synthetic oligonucleotide
gggagagcugcccacacua

SEQ ID NO: 3074195 - RNA, 19 nt, Artificial Sequence
  Description of Artificial Sequence: Synthetic oligonucleotide
ccagacagacccuguggag

SEQ ID NO: 3074196 - RNA, 19 nt, Artificial Sequence
  Description of Artificial Sequence: Synthetic oligonucleotide
guuucucccagcccugccu

SEQ ID NO: 3074197 - RNA, 19 nt, Artificial Sequence
  Description of Artificial Sequence: Synthetic oligonucleotide
gcagucuggcugcagucug

SEQ ID NO: 3074198 - RNA, 19 nt, Artificial Sequence
  Description of Artificial Sequence: Synthetic oligonucleotide
acccuguagaggacagcuc

SEQ ID NO: 3074199 - RNA, 19 nt, Artificial Sequence
  Description of Artificial Sequence: Synthetic oligonucleotide
guacacucucuucuccucu

SEQ ID NO: 3074200 - RNA, 19 nt, Artificial Sequence
  Description of Artificial Sequence: Synthetic oligonucleotide
ggcagggcacugcucugcg

SEQ ID NO: 3074201 - RNA, 19 nt, Artificial Sequence
  Description of Artificial Sequence: Synthetic oligonucleotide
cuguuucucccagcccugc

SEQ ID NO: 3074202 - RNA, 19 nt, Artificial Sequence
  Description of Artificial Sequence: Synthetic oligonucleotide
cuacccuguagaggacagc

SEQ ID NO: 3074203 - RNA, 19 nt, Artificial Sequence
  Description of Artificial Sequence: Synthetic oligonucleotide
gaaucaccccauuuccauu

SEQ ID NO: 3074204 - RNA, 19 nt, Artificial Sequence
  Description of Artificial Sequence: Synthetic oligonucleotide
guauggggcagggcacugc

SEQ ID NO: 3074205 - RNA, 19 nt, Artificial Sequence
  Description of Artificial Sequence: Synthetic oligonucleotide
gggcacugcucugcgaggg

SEQ ID NO: 3074206 - RNA, 19 nt, Artificial Sequence
  Description of Artificial Sequence: Synthetic oligonucleotide
caguggcuacagaguacac

SEQ ID NO: 3074207 - RNA, 19 nt, Artificial Sequence
  Description of Artificial Sequence: Synthetic oligonucleotide
ugcaggcaggagccccaca

SEQ ID NO: 3074208 - RNA, 19 nt, Artificial Sequence
  Description of Artificial Sequence: Synthetic oligonucleotide
cgcaacaauauacuuuaca

SEQ ID NO: 3074209 - RNA, 19 nt, Artificial Sequence
  Description of Artificial Sequence: Synthetic oligonucleotide
ccuguagaggacagcucug

SEQ ID NO: 3074210 - RNA, 19 nt, Artificial Sequence
  Description of Artificial Sequence: Synthetic oligonucleotide
ccagcaaguuacaaaauau

SEQ ID NO: 3074211 - RNA, 19 nt, Artificial Sequence
  Description of Artificial Sequence: Synthetic oligonucleotide
agcccugccugcaggcagg

SEQ ID NO: 3074212 - RNA, 19 nt, Artificial Sequence
  Description of Artificial Sequence: Synthetic oligonucleotide
ccacacuacuacccuguag

SEQ ID NO: 3074213 - RNA, 19 nt, Artificial Sequence
  Description of Artificial Sequence: Synthetic oligonucleotide
caccggcccuguuucuccc

SEQ ID NO: 3074214 - RNA, 19 nt, Artificial Sequence
  Description of Artificial Sequence: Synthetic oligonucleotide
cuacagaguacacucucuu

SEQ ID NO: 3074215 - RNA, 19 nt, Artificial Sequence
  Description of Artificial Sequence: Synthetic oligonucleotide
cugcgagggagagcugccc

SEQ ID NO: 3074216 - RNA, 19 nt, Artificial Sequence
  Description of Artificial Sequence: Synthetic oligonucleotide
caccccauuuccauucacu

SEQ ID NO: 3074217 - RNA, 19 nt, Artificial Sequence
  Description of Artificial Sequence: Synthetic oligonucleotide
ccauuuccauucacuccag

SEQ ID NO: 3074218 - RNA, 19 nt, Artificial Sequence
  Description of Artificial Sequence: Synthetic oligonucleotide
uggcugcagucuggaagcc

SEQ ID NO: 3074219 - RNA, 19 nt, Artificial Sequence
  Description of Artificial Sequence: Synthetic oligonucleotide
ccuguacagcccaccggcc

SEQ ID NO: 3074220 - RNA, 19 nt, Artificial Sequence
  Description of Artificial Sequence: Synthetic oligonucleotide
ccuguuucucccagcccug

SEQ ID NO: 3074221 - RNA, 19 nt, Artificial Sequence
  Description of Artificial Sequence: Synthetic oligonucleotide
cucccagcccugccugcag

SEQ ID NO: 3074222 - RNA, 19 nt, Artificial Sequence
  Description of Artificial Sequence: Synthetic oligonucleotide
gcacugcucugcgagggag

SEQ ID NO: 3074223 - RNA, 19 nt, Artificial Sequence
  Description of Artificial Sequence: Synthetic oligonucleotide
cccagacagacccugugga

SEQ ID NO: 3074224 - RNA, 19 nt, Artificial Sequence
  Description of Artificial Sequence: Synthetic oligonucleotide
ucugggcagucuggcugca

SEQ ID NO: 3074225 - RNA, 19 nt, Artificial Sequence
  Description of Artificial Sequence: Synthetic oligonucleotide
ccaccggcccuguuucucc

SEQ ID NO: 3074226 - RNA, 19 nt, Artificial Sequence
  Description of Artificial Sequence: Synthetic oligonucleotide
accggcccuguuucuccca

SEQ ID NO: 3074227 - RNA, 19 nt, Artificial Sequence
  Description of Artificial Sequence: Synthetic oligonucleotide
ccucuggccaggguauggg

SEQ ID NO: 3074228 - RNA, 19 nt, Artificial Sequence
  Description of Artificial Sequence: Synthetic oligonucleotide
guacagcccaccggcccug

SEQ ID NO: 3074229 - RNA, 19 nt, Artificial Sequence
  Description of Artificial Sequence: Synthetic oligonucleotide
gggcagucuggcugcaguc

SEQ ID NO: 3074230 - RNA, 19 nt, Artificial Sequence
  Description of Artificial Sequence: Synthetic oligonucleotide
ccacaguggcuacagagua

SEQ ID NO: 3074231 - RNA, 19 nt, Artificial Sequence
  Description of Artificial Sequence: Synthetic oligonucleotide
gaggacagcucugggcagu

SEQ ID NO: 3074232 - RNA, 19 nt, Artificial Sequence
  Description of Artificial Sequence: Synthetic oligonucleotide
gcgagggagagcugcccac

SEQ ID NO: 3074233 - RNA, 19 nt, Artificial Sequence
  Description of Artificial Sequence: Synthetic oligonucleotide
cccuguagaggacagcucu

SEQ ID NO: 3074234 - RNA, 19 nt, Artificial Sequence
  Description of Artificial Sequence: Synthetic oligonucleotide
gguauggggcagggcacug

SEQ ID NO: 3074235 - RNA, 19 nt, Artificial Sequence
  Description of Artificial Sequence: Synthetic oligonucleotide
gccaggguauggggcaggg

SEQ ID NO: 3074236 - RNA, 19 nt, Artificial Sequence
  Description of Artificial Sequence: Synthetic oligonucleotide
gcaggaccuaagccagaac

SEQ ID NO: 3074237 - RNA, 19 nt, Artificial Sequence
  Description of Artificial Sequence: Synthetic oligonucleotide
ggagagcugcccacacuac

SEQ ID NO: 3074238 - RNA, 19 nt, Artificial Sequence
  Description of Artificial Sequence: Synthetic oligonucleotide
cugcucugcgagggagagc

SEQ ID NO: 3074239 - RNA, 19 nt, Artificial Sequence
  Description of Artificial Sequence: Synthetic oligonucleotide
gcccuguuucucccagccc

SEQ ID NO: 3074240 - RNA, 19 nt, Artificial Sequence
  Description of Artificial Sequence: Synthetic oligonucleotide
cccuguuucucccagcccu

SEQ ID NO: 3074241 - RNA, 19 nt, Artificial Sequence
  Description of Artificial Sequence: Synthetic oligonucleotide
ccuuugcuaugcagcagga

SEQ ID NO: 3074242 - RNA, 19 nt, Artificial Sequence
  Description of Artificial Sequence: Synthetic oligonucleotide
gcuacagaguacacucucu

SEQ ID NO: 3074243 - RNA, 19 nt, Artificial Sequence
  Description of Artificial Sequence: Synthetic oligonucleotide
cuccucuggccaggguaug

SEQ ID NO: 3074244 - RNA, 19 nt, Artificial Sequence
  Description of Artificial Sequence: Synthetic oligonucleotide
gggcagggcacugcucugc

SEQ ID NO: 3074245 - RNA, 19 nt, Artificial Sequence
  Description of Artificial Sequence: Synthetic oligonucleotide
cugcccacacuacuacccu

SEQ ID NO: 3074246 - RNA, 19 nt, Artificial Sequence
  Description of Artificial Sequence: Synthetic oligonucleotide
cugggcagucuggcugcag

SEQ ID NO: 3074247 - RNA, 19 nt, Artificial Sequence
  Description of Artificial Sequence: Synthetic oligonucleotide
ggagccccacaguggcuac

SEQ ID NO: 3074248 - RNA, 19 nt, Artificial Sequence
  Description of Artificial Sequence: Synthetic oligonucleotide
cugcaggcaggagccccac

SEQ ID NO: 3074249 - RNA, 19 nt, Artificial Sequence
  Description of Artificial Sequence: Synthetic oligonucleotide
gagccccacaguggcuaca

SEQ ID NO: 3074250 - RNA, 19 nt, Artificial Sequence
  Description of Artificial Sequence: Synthetic oligonucleotide
caacccagacagacccugu

SEQ ID NO: 3074251 - RNA, 19 nt, Artificial Sequence
  Description of Artificial Sequence: Synthetic oligonucleotide
gucuggcugcagucuggaa

SEQ ID NO: 3074252 - RNA, 19 nt, Artificial Sequence
  Description of Artificial Sequence: Synthetic oligonucleotide
ggccaggguauggggcagg

SEQ ID NO: 3074253 - RNA, 19 nt, Artificial Sequence
  Description of Artificial Sequence: Synthetic oligonucleotide
ggcacugcucugcgaggga

SEQ ID NO: 3074254 - RNA, 19 nt, Artificial Sequence
  Description of Artificial Sequence: Synthetic oligonucleotide
ccggcccuguuucucccag

SEQ ID NO: 3074255 - RNA, 19 nt, Artificial Sequence
  Description of Artificial Sequence: Synthetic oligonucleotide
ccagaacaacccagacaga

SEQ ID NO: 3074256 - RNA, 19 nt, Artificial Sequence
  Description of Artificial Sequence: Synthetic oligonucleotide
ggcagucuggcugcagucu

SEQ ID NO: 3074257 - RNA, 19 nt, Artificial Sequence
  Description of Artificial Sequence: Synthetic oligonucleotide
acagcccaccggcccuguu

SEQ ID NO: 3074258 - RNA, 19 nt, Artificial Sequence
  Description of Artificial Sequence: Synthetic oligonucleotide
ccaggguauggggcagggc

SEQ ID NO: 3074259 - RNA, 19 nt, Artificial Sequence
  Description of Artificial Sequence: Synthetic oligonucleotide
gcccacacuacuacccugu

SEQ ID NO: 3074260 - RNA, 19 nt, Artificial Sequence
  Description of Artificial Sequence: Synthetic oligonucleotide
cccaccggcccuguuucuc

SEQ ID NO: 3074261 - RNA, 19 nt, Artificial Sequence
  Description of Artificial Sequence: Synthetic oligonucleotide
ggguauggggcagggcacu

SEQ ID NO: 3074262 - RNA, 19 nt, Artificial Sequence
  Description of Artificial Sequence: Synthetic oligonucleotide
caggagccccacaguggcu

SEQ ID NO: 3074263 - RNA, 19 nt, Artificial Sequence
  Description of Artificial Sequence: Synthetic oligonucleotide
cagcccaccggcccuguuu

SEQ ID NO: 3074264 - RNA, 19 nt, Artificial Sequence
  Description of Artificial Sequence: Synthetic oligonucleotide
cugcagucuggaagccuuu

SEQ ID NO: 3074265 - RNA, 19 nt, Artificial Sequence
  Description of Artificial Sequence: Synthetic oligonucleotide
ggcugcagucuggaagccu

SEQ ID NO: 3074266 - RNA, 19 nt, Artificial Sequence
  Description of Artificial Sequence: Synthetic oligonucleotide
cggcccuguuucucccagc

SEQ ID NO: 3074267 - RNA, 19 nt, Artificial Sequence
  Description of Artificial Sequence: Synthetic oligonucleotide
cgagggagagcugcccaca

SEQ ID NO: 3074268 - RNA, 19 nt, Artificial Sequence
  Description of Artificial Sequence: Synthetic oligonucleotide
cccacacuacuacccugua

SEQ ID NO: 3074269 - RNA, 19 nt, Artificial Sequence
  Description of Artificial Sequence: Synthetic oligonucleotide
gcccugccugcaggcagga

SEQ ID NO: 3074270 - RNA, 19 nt, Artificial Sequence
  Description of Artificial Sequence: Synthetic oligonucleotide
gcccaccggcccuguuucu

SEQ ID NO: 3074271 - RNA, 19 nt, Artificial Sequence
  Description of Artificial Sequence: Synthetic oligonucleotide
uuuaauuaaguccacaugc

SEQ ID NO: 3074272 - RNA, 19 nt, Artificial Sequence
  Description of Artificial Sequence: Synthetic oligonucleotide
aauuuaauuaaguccacau

SEQ ID NO: 3074273 - RNA, 19 nt, Artificial Sequence
  Description of Artificial Sequence: Synthetic oligonucleotide
acuguaauaguuccuugcc

SEQ ID NO: 3074274 - RNA, 19 nt, Artificial Sequence
  Description of Artificial Sequence: Synthetic oligonucleotide
aauaguuccuugcccaauc

SEQ ID NO: 3074275 - RNA, 19 nt, Artificial Sequence
  Description of Artificial Sequence: Synthetic oligonucleotide
auaucuaggagccucuggg

SEQ ID NO: 3074276 - RNA, 19 nt, Artificial Sequence
  Description of Artificial Sequence: Synthetic oligonucleotide
uuaauuaaguccacaugcc

SEQ ID NO: 3074277 - RNA, 19 nt, Artificial Sequence
  Description of Artificial Sequence: Synthetic oligonucleotide
uguaauaguuccuugccca

SEQ ID NO: 3074278 - RNA, 19 nt, Artificial Sequence
  Description of Artificial Sequence: Synthetic oligonucleotide
acaugccauaucuaggagc

SEQ ID NO: 3074279 - RNA, 19 nt, Artificial Sequence
  Description of Artificial Sequence: Synthetic oligonucleotide
aaguccacaugccauaucu

SEQ ID NO: 3074280 - RNA, 19 nt, Artificial Sequence
  Description of Artificial Sequence: Synthetic oligonucleotide
auuuaauuaaguccacaug

SEQ ID NO: 3074281 - RNA, 19 nt, Artificial Sequence
  Description of Artificial Sequence: Synthetic oligonucleotide
caugccauaucuaggagcc

SEQ ID NO: 3074282 - RNA, 19 nt, Artificial Sequence
  Description of Artificial Sequence: Synthetic oligonucleotide
uccuucaggucccagauug

SEQ ID NO: 3074283 - RNA, 19 nt, Artificial Sequence
  Description of Artificial Sequence: Synthetic oligonucleotide
ugcccaauccuucaggucc

SEQ ID NO: 3074284 - RNA, 19 nt, Artificial Sequence
  Description of Artificial Sequence: Synthetic oligonucleotide
aaaauuuaauuaaguccac

SEQ ID NO: 3074285 - RNA, 19 nt, Artificial Sequence
  Description of Artificial Sequence: Synthetic oligonucleotide
auccugaggaucuccaagc

SEQ ID NO: 3074286 - RNA, 19 nt, Artificial Sequence
  Description of Artificial Sequence: Synthetic oligonucleotide
ucccagauugcccagagcu

SEQ ID NO: 3074287 - RNA, 19 nt, Artificial Sequence
  Description of Artificial Sequence: Synthetic oligonucleotide
caagggaccagccugguag

SEQ ID NO: 3074288 - RNA, 19 nt, Artificial Sequence
  Description of Artificial Sequence: Synthetic oligonucleotide
uccacaugccauaucuagg

SEQ ID NO: 3074289 - RNA, 19 nt, Artificial Sequence
  Description of Artificial Sequence: Synthetic oligonucleotide
auaguuccuugcccaaucc

SEQ ID NO: 3074290 - RNA, 19 nt, Artificial Sequence
  Description of Artificial Sequence: Synthetic oligonucleotide
ucauacugggcacugcagc

SEQ ID NO: 3074291 - RNA, 19 nt, Artificial Sequence
  Description of Artificial Sequence: Synthetic oligonucleotide
aaauuuaauuaaguccaca

SEQ ID NO: 3074292 - RNA, 19 nt, Artificial Sequence
  Description of Artificial Sequence: Synthetic oligonucleotide
guacuuggcacuguaauag

SEQ ID NO: 3074293 - RNA, 19 nt, Artificial Sequence
  Description of Artificial Sequence: Synthetic oligonucleotide
uuggcacuguaauaguucc

SEQ ID NO: 3074294 - RNA, 19 nt, Artificial Sequence
  Description of Artificial Sequence: Synthetic oligonucleotide
ucuccaagcagcuggguca

SEQ ID NO: 3074295 - RNA, 19 nt, Artificial Sequence
  Description of Artificial Sequence: Synthetic oligonucleotide
aauuaaguccacaugccau

SEQ ID NO: 3074296 - RNA, 19 nt, Artificial Sequence
  Description of Artificial Sequence: Synthetic oligonucleotide
uaucuaggagccucugggg

SEQ ID NO: 3074297 - RNA, 19 nt, Artificial Sequence
  Description of Artificial Sequence: Synthetic oligonucleotide
cacuguaauaguuccuugc

SEQ ID NO: 3074298 - RNA, 19 nt, Artificial Sequence
  Description of Artificial Sequence: Synthetic oligonucleotide
aagcagcugggucauacug

SEQ ID NO: 3074299 - RNA, 19 nt, Artificial Sequence
  Description of Artificial Sequence: Synthetic oligonucleotide
ugcauugcccacagcaaag

SEQ ID NO: 3074300 - RNA, 19 nt, Artificial Sequence
  Description of Artificial Sequence: Synthetic oligonucleotide
gauugcccagagcugaugc

SEQ ID NO: 3074301 - RNA, 19 nt, Artificial Sequence
  Description of Artificial Sequence: Synthetic oligonucleotide
guccacaugccauaucuag

SEQ ID NO: 3074302 - RNA, 19 nt, Artificial Sequence
  Description of Artificial Sequence: Synthetic oligonucleotide
ucaggucccagauugccca

SEQ ID NO: 3074303 - RNA, 19 nt, Artificial Sequence
  Description of Artificial Sequence: Synthetic oligonucleotide
ugaugcagcauugcgccgg

SEQ ID NO: 3074304 - RNA, 19 nt, Artificial Sequence
  Description of Artificial Sequence: Synthetic oligonucleotide
cuguaauaguuccuugccc

SEQ ID NO: 3074305 - RNA, 19 nt, Artificial Sequence
  Description of Artificial Sequence: Synthetic oligonucleotide
cuuggcacuguaauaguuc

SEQ ID NO: 3074306 - RNA, 19 nt, Artificial Sequence
  Description of Artificial Sequence: Synthetic oligonucleotide
aucuccaagcagcuggguc

SEQ ID NO: 3074307 - RNA, 19 nt, Artificial Sequence
  Description of Artificial Sequence: Synthetic oligonucleotide
agcugaugcagcauugcgc

SEQ ID NO: 3074308 - RNA, 19 nt, Artificial Sequence
  Description of Artificial Sequence: Synthetic oligonucleotide
gagcugaugcagcauugcg

SEQ ID NO: 3074309 - RNA, 19 nt, Artificial Sequence
  Description of Artificial Sequence: Synthetic oligonucleotide
agcugggucauacugggca

SEQ ID NO: 3074310 - RNA, 19 nt, Artificial Sequence
  Description of Artificial Sequence: Synthetic oligonucleotide
aagggaccagccugguagg

SEQ ID NO: 3074311 - RNA, 19 nt, Artificial Sequence
  Description of Artificial Sequence: Synthetic oligonucleotide
cauaucuaggagccucugg

SEQ ID NO: 3074312 - RNA, 19 nt, Artificial Sequence
  Description of Artificial Sequence: Synthetic oligonucleotide
auuaaguccacaugccaua

SEQ ID NO: 3074313 - RNA, 19 nt, Artificial Sequence
  Description of Artificial Sequence: Synthetic oligonucleotide
auugcgccggauaccaucc

SEQ ID NO: 3074314 - RNA, 19 nt, Artificial Sequence
  Description of Artificial Sequence: Synthetic oligonucleotide
gcugaugcagcauugcgcc

SEQ ID NO: 3074315 - RNA, 19 nt, Artificial Sequence
  Description of Artificial Sequence: Synthetic oligonucleotide
agagcugaugcagcauugc

SEQ ID NO: 3074316 - RNA, 19 nt, Artificial Sequence
  Description of Artificial Sequence: Synthetic oligonucleotide
cauccugaggaucuccaag

SEQ ID NO: 3074317 - RNA, 19 nt, Artificial Sequence
  Description of Artificial Sequence: Synthetic oligonucleotide
gagccucugggguacuugg

SEQ ID NO: 3074318 - RNA, 19 nt, Artificial Sequence
  Description of Artificial Sequence: Synthetic oligonucleotide
ugaggaucuccaagcagcu

SEQ ID NO: 3074319 - RNA, 19 nt, Artificial Sequence
  Description of Artificial Sequence: Synthetic oligonucleotide
aucuaggagccucuggggu

SEQ ID NO: 3074320 - RNA, 19 nt, Artificial Sequence
  Description of Artificial Sequence: Synthetic oligonucleotide
uaggcugcauugcccacag

SEQ ID NO: 3074321 - RNA, 19 nt, Artificial Sequence
  Description of Artificial Sequence: Synthetic oligonucleotide
ugguaggcugcauugccca

SEQ ID NO: 3074322 - RNA, 19 nt, Artificial Sequence
  Description of Artificial Sequence: Synthetic oligonucleotide
gauaccauccugaggaucu

SEQ ID NO: 3074323 - RNA, 19 nt, Artificial Sequence
  Description of Artificial Sequence: Synthetic oligonucleotide
uccugaggaucuccaagca

SEQ ID NO: 3074324 - RNA, 19 nt, Artificial Sequence
  Description of Artificial Sequence: Synthetic oligonucleotide
uaguuccuugcccaauccu

SEQ ID NO: 3074325 - RNA, 19 nt, Artificial Sequence
  Description of Artificial Sequence: Synthetic oligonucleotide
acagcaaagcuggcacugc

SEQ ID NO: 3074326 - RNA, 19 nt, Artificial Sequence
  Description of Artificial Sequence: Synthetic oligonucleotide
cugguaggcugcauugccc

SEQ ID NO: 3074327 - RNA, 19 nt, Artificial Sequence
  Description of Artificial Sequence: Synthetic oligonucleotide
auugcccacagcaaagcug

SEQ ID NO: 3074328 - RNA, 19 nt, Artificial Sequence
  Description of Artificial Sequence: Synthetic oligonucleotide
cuucaggucccagauugcc

SEQ ID NO: 3074329 - RNA, 19 nt, Artificial Sequence
  Description of Artificial Sequence: Synthetic oligonucleotide
cauugcgccggauaccauc

SEQ ID NO: 3074330 - RNA, 19 nt, Artificial Sequence
  Description of Artificial Sequence: Synthetic oligonucleotide
agcagcugggucauacugg

SEQ ID NO: 3074331 - RNA, 19 nt, Artificial Sequence
  Description of Artificial Sequence: Synthetic oligonucleotide
gcagcugggucauacuggg

SEQ ID NO: 3074332 - RNA, 19 nt, Artificial Sequence
  Description of Artificial Sequence: Synthetic oligonucleotide
agccugguaggcugcauug

SEQ ID NO: 3074333 - RNA, 19 nt, Artificial Sequence
  Description of Artificial Sequence: Synthetic oligonucleotide
ucuaggagccucuggggua

SEQ ID NO: 3074334 - RNA, 19 nt, Artificial Sequence
  Description of Artificial Sequence: Synthetic oligonucleotide
uccuugcccaauccuucag

SEQ ID NO: 3074335 - RNA, 19 nt, Artificial Sequence
  Description of Artificial Sequence: Synthetic oligonucleotide
ccggauaccauccugagga

SEQ ID NO: 3074336 - RNA, 19 nt, Artificial Sequence
  Description of Artificial Sequence: Synthetic oligonucleotide
ugccauaucuaggagccuc

SEQ ID NO: 3074337 - RNA, 19 nt, Artificial Sequence
  Description of Artificial Sequence: Synthetic oligonucleotide
uacuuggcacuguaauagu

SEQ ID NO: 3074338 - RNA, 19 nt, Artificial Sequence
  Description of Artificial Sequence: Synthetic oligonucleotide
ggcugcauugcccacagca

SEQ ID NO: 3074339 - RNA, 19 nt, Artificial Sequence
  Description of Artificial Sequence: Synthetic oligonucleotide
agcauugcgccggauacca

SEQ ID NO: 3074340 - RNA, 19 nt, Artificial Sequence
  Description of Artificial Sequence: Synthetic oligonucleotide
ugcagcauugcgccggaua

SEQ ID NO: 3074341 - RNA, 19 nt, Artificial Sequence
  Description of Artificial Sequence: Synthetic oligonucleotide
agggcaggucccaagggac

SEQ ID NO: 3074342 - RNA, 19 nt, Artificial Sequence
  Description of Artificial Sequence: Synthetic oligonucleotide
uuaaguccacaugccauau

SEQ ID NO: 3074343 - RNA, 19 nt, Artificial Sequence
  Description of Artificial Sequence: Synthetic oligonucleotide
uuccuugcccaauccuuca

SEQ ID NO: 3074344 - RNA, 19 nt, Artificial Sequence
  Description of Artificial Sequence: Synthetic oligonucleotide
ugcgccggauaccauccug

SEQ ID NO: 3074345 - RNA, 19 nt, Artificial Sequence
  Description of Artificial Sequence: Synthetic oligonucleotide
cacaugccauaucuaggag

SEQ ID NO: 3074346 - RNA, 19 nt, Artificial Sequence
  Description of Artificial Sequence: Synthetic oligonucleotide
auugcccagagcugaugca

SEQ ID NO: 3074347 - RNA, 19 nt, Artificial Sequence
  Description of Artificial Sequence: Synthetic oligonucleotide
ucugggguacuuggcacug

SEQ ID NO: 3074348 - RNA, 19 nt, Artificial Sequence
  Description of Artificial Sequence: Synthetic oligonucleotide
uaaguccacaugccauauc

SEQ ID NO: 3074349 - RNA, 19 nt, Artificial Sequence
  Description of Artificial Sequence: Synthetic oligonucleotide
guaauaguuccuugcccaa

SEQ ID NO: 3074350 - RNA, 19 nt, Artificial Sequence
  Description of Artificial Sequence: Synthetic oligonucleotide
gcagcauugcgccggauac

SEQ ID NO: 3074351 - RNA, 19 nt, Artificial Sequence
  Description of Artificial Sequence: Synthetic oligonucleotide
uggcacuguaauaguuccu

SEQ ID NO: 3074352 - RNA, 19 nt, Artificial Sequence
  Description of Artificial Sequence: Synthetic oligonucleotide
cugaugcagcauugcgccg

SEQ ID NO: 3074353 - RNA, 19 nt, Artificial Sequence
  Description of Artificial Sequence: Synthetic oligonucleotide
cuaggagccucugggguac

SEQ ID NO: 3074354 - RNA, 19 nt, Artificial Sequence
  Description of Artificial Sequence: Synthetic oligonucleotide
ggucauacugggcacugca

SEQ ID NO: 3074355 - RNA, 19 nt, Artificial Sequence
  Description of Artificial Sequence: Synthetic oligonucleotide
ugggucauacugggcacug

SEQ ID NO: 3074356 - RNA, 19 nt, Artificial Sequence
  Description of Artificial Sequence: Synthetic oligonucleotide
aguuccuugcccaauccuu

SEQ ID NO: 3074357 - RNA, 19 nt, Artificial Sequence
  Description of Artificial Sequence: Synthetic oligonucleotide
uaccauccugaggaucucc

SEQ ID NO: 3074358 - RNA, 19 nt, Artificial Sequence
  Description of Artificial Sequence: Synthetic oligonucleotide
guuccuugcccaauccuuc

SEQ ID NO: 3074359 - RNA, 19 nt, Artificial Sequence
  Description of Artificial Sequence: Synthetic oligonucleotide
auacugggcacugcagcug

SEQ ID NO: 3074360 - RNA, 19 nt, Artificial Sequence
  Description of Artificial Sequence: Synthetic oligonucleotide
agggaccagccugguaggc

SEQ ID NO: 3074361 - RNA, 19 nt, Artificial Sequence
  Description of Artificial Sequence: Synthetic oligonucleotide
gguacuuggcacuguaaua

SEQ ID NO: 3074362 - RNA, 19 nt, Artificial Sequence
  Description of Artificial Sequence: Synthetic oligonucleotide
ccacaugccauaucuagga

SEQ ID NO: 3074363 - RNA, 19 nt, Artificial Sequence
  Description of Artificial Sequence: Synthetic oligonucleotide
cauacugggcacugcagcu

SEQ ID NO: 3074364 - RNA, 19 nt, Artificial Sequence
  Description of Artificial Sequence: Synthetic oligonucleotide
ugccagggcaggucccaag

SEQ ID NO: 3074365 - RNA, 19 nt, Artificial Sequence
  Description of Artificial Sequence: Synthetic oligonucleotide
ccugguaggcugcauugcc

SEQ ID NO: 3074366 - RNA, 19 nt, Artificial Sequence
  Description of Artificial Sequence: Synthetic oligonucleotide
auaccauccugaggaucuc

SEQ ID NO: 3074367 - RNA, 19 nt, Artificial Sequence
  Description of Artificial Sequence: Synthetic oligonucleotide
ggaucuccaagcagcuggg

SEQ ID NO: 3074368 - RNA, 19 nt, Artificial Sequence
  Description of Artificial Sequence: Synthetic oligonucleotide
cugcauugcccacagcaaa

SEQ ID NO: 3074369 - RNA, 19 nt, Artificial Sequence
  Description of Artificial Sequence: Synthetic oligonucleotide
gaugcagcauugcgccgga

SEQ ID NO: 3074370 - RNA, 19 nt, Artificial Sequence
  Description of Artificial Sequence: Synthetic oligonucleotide
ggucccagauugcccagag

SEQ ID NO: 3074371 - RNA, 19 nt, Artificial Sequence
  Description of Artificial Sequence: Synthetic oligonucleotide
ccuugcccaauccuucagg

SEQ ID NO: 3074372 - RNA, 19 nt, Artificial Sequence
  Description of Artificial Sequence: Synthetic oligonucleotide
gcacuguaauaguuccuug

SEQ ID NO: 3074373 - RNA, 19 nt, Artificial Sequence
  Description of Artificial Sequence: Synthetic oligonucleotide
agauugcccagagcugaug

SEQ ID NO: 3074374 - RNA, 19 nt, Artificial Sequence
  Description of Artificial Sequence: Synthetic oligonucleotide
acuuggcacuguaauaguu

SEQ ID NO: 3074375 - RNA, 19 nt, Artificial Sequence
  Description of Artificial Sequence: Synthetic oligonucleotide
gaggaucuccaagcagcug

SEQ ID NO: 3074376 - RNA, 19 nt, Artificial Sequence
  Description of Artificial Sequence: Synthetic oligonucleotide
gccggauaccauccugagg

SEQ ID NO: 3074377 - RNA, 19 nt, Artificial Sequence
  Description of Artificial Sequence: Synthetic oligonucleotide
agcaaagcuggcacugcgu

SEQ ID NO: 3074378 - RNA, 19 nt, Artificial Sequence
  Description of Artificial Sequence: Synthetic oligonucleotide
guaggcugcauugcccaca

SEQ ID NO: 3074379 - RNA, 19 nt, Artificial Sequence
  Description of Artificial Sequence: Synthetic oligonucleotide
cagcauugcgccggauacc

SEQ ID NO: 3074380 - RNA, 19 nt, Artificial Sequence
  Description of Artificial Sequence: Synthetic oligonucleotide
gucccagauugcccagagc

SEQ ID NO: 3074381 - RNA, 19 nt, Artificial Sequence
  Description of Artificial Sequence: Synthetic oligonucleotide
acugggcacugcagcugcc

SEQ ID NO: 3074382 - RNA, 19 nt, Artificial Sequence
  Description of Artificial Sequence: Synthetic oligonucleotide
gcugggucauacugggcac

SEQ ID NO: 3074383 - RNA, 19 nt, Artificial Sequence
  Description of Artificial Sequence: Synthetic oligonucleotide
gcauugcccacagcaaagc

SEQ ID NO: 3074384 - RNA, 19 nt, Artificial Sequence
  Description of Artificial Sequence: Synthetic oligonucleotide
aggcugcauugcccacagc

SEQ ID NO: 3074385 - RNA, 19 nt, Artificial Sequence
  Description of Artificial Sequence: Synthetic oligonucleotide
ccaagcagcugggucauac

SEQ ID NO: 3074386 - RNA, 19 nt, Artificial Sequence
  Description of Artificial Sequence: Synthetic oligonucleotide
ccucugggguacuuggcac

SEQ ID NO: 3074387 - RNA, 19 nt, Artificial Sequence
  Description of Artificial Sequence: Synthetic oligonucleotide
uugcgccggauaccauccu

SEQ ID NO: 3074388 - RNA, 19 nt, Artificial Sequence
  Description of Artificial Sequence: Synthetic oligonucleotide
ggguacuuggcacuguaau

SEQ ID NO: 3074389 - RNA, 19 nt, Artificial Sequence
  Description of Artificial Sequence: Synthetic oligonucleotide
cccagauugcccagagcug

SEQ ID NO: 3074390 - RNA, 19 nt, Artificial Sequence
  Description of Artificial Sequence: Synthetic oligonucleotide
ggauaccauccugaggauc

SEQ ID NO: 3074391 - RNA, 19 nt, Artificial Sequence
  Description of Artificial Sequence: Synthetic oligonucleotide
ccuucaggucccagauugc

SEQ ID NO: 3074392 - RNA, 19 nt, Artificial Sequence
  Description of Artificial Sequence: Synthetic oligonucleotide
gccucugggguacuuggca

SEQ ID NO: 3074393 - RNA, 19 nt, Artificial Sequence
  Description of Artificial Sequence: Synthetic oligonucleotide
gaccagccugguaggcugc

SEQ ID NO: 3074394 - RNA, 19 nt, Artificial Sequence
  Description of Artificial Sequence: Synthetic oligonucleotide
ccagauugcccagagcuga

SEQ ID NO: 3074395 - RNA, 19 nt, Artificial Sequence
  Description of Artificial Sequence: Synthetic oligonucleotide
cauugcccacagcaaagcu

SEQ ID NO: 3074396 - RNA, 19 nt, Artificial Sequence
  Description of Artificial Sequence: Synthetic oligonucleotide
gguaggcugcauugcccac

SEQ ID NO: 3074397 - RNA, 19 nt, Artificial Sequence
  Description of Artificial Sequence: Synthetic oligonucleotide
ggagccucugggguacuug

SEQ ID NO: 3074398 - RNA, 19 nt, Artificial Sequence
  Description of Artificial Sequence: Synthetic oligonucleotide
aguccacaugccauaucua

SEQ ID NO: 3074399 - RNA, 19 nt, Artificial Sequence
  Description of Artificial Sequence: Synthetic oligonucleotide
cucugggguacuuggcacu

SEQ ID NO: 3074400 - RNA, 19 nt, Artificial Sequence
  Description of Artificial Sequence: Synthetic oligonucleotide
augccauaucuaggagccu

SEQ ID NO: 3074401 - RNA, 19 nt, Artificial Sequence
  Description of Artificial Sequence: Synthetic oligonucleotide
aggucccagauugcccaga

SEQ ID NO: 3074402 - RNA, 19 nt, Artificial Sequence
  Description of Artificial Sequence: Synthetic oligonucleotide
ggcacuguaauaguuccuu

SEQ ID NO: 3074403 - RNA, 19 nt, Artificial Sequence
  Description of Artificial Sequence: Synthetic oligonucleotide
caagcagcugggucauacu

SEQ ID NO: 3074404 - RNA, 19 nt, Artificial Sequence
  Description of Artificial Sequence: Synthetic oligonucleotide
gcugcauugcccacagcaa

SEQ ID NO: 3074405 - RNA, 19 nt, Artificial Sequence
  Description of Artificial Sequence: Synthetic oligonucleotide
gcccaauccuucagguccc

SEQ ID NO: 3074406 - RNA, 19 nt, Artificial Sequence
  Description of Artificial Sequence: Synthetic oligonucleotide
gggcaggucccaagggacc

SEQ ID NO: 3074407 - RNA, 19 nt, Artificial Sequence
  Description of Artificial Sequence: Synthetic oligonucleotide
gcccagagcugaugcagca

SEQ ID NO: 3074408 - RNA, 19 nt, Artificial Sequence
  Description of Artificial Sequence: Synthetic oligonucleotide
ggcaggucccaagggacca

SEQ ID NO: 3074409 - RNA, 19 nt, Artificial Sequence
  Description of Artificial Sequence: Synthetic oligonucleotide
gccugguaggcugcauugc

SEQ ID NO: 3074410 - RNA, 19 nt, Artificial Sequence
  Description of Artificial Sequence: Synthetic oligonucleotide
ccauaucuaggagccucug

SEQ ID NO: 3074411 - RNA, 19 nt, Artificial Sequence
  Description of Artificial Sequence: Synthetic oligonucleotide
accagccugguaggcugca

SEQ ID NO: 3074412 - RNA, 19 nt, Artificial Sequence
  Description of Artificial Sequence: Synthetic oligonucleotide
gggucauacugggcacugc

SEQ ID NO: 3074413 - RNA, 19 nt, Artificial Sequence
  Description of Artificial Sequence: Synthetic oligonucleotide
ggucccaagggaccagccu

SEQ ID NO: 3074414 - RNA, 19 nt, Artificial Sequence
  Description of Artificial Sequence: Synthetic oligonucleotide
gaucuccaagcagcugggu

SEQ ID NO: 3074415 - RNA, 19 nt, Artificial Sequence
  Description of Artificial Sequence: Synthetic oligonucleotide
gcgccggauaccauccuga

SEQ ID NO: 3074416 - RNA, 19 nt, Artificial Sequence
  Description of Artificial Sequence: Synthetic oligonucleotide
cgccggauaccauccugag

SEQ ID NO: 3074417 - RNA, 19 nt, Artificial Sequence
  Description of Artificial Sequence: Synthetic oligonucleotide
uaggagccucugggguacu

SEQ ID NO: 3074418 - RNA, 19 nt, Artificial Sequence
  Description of Artificial Sequence: Synthetic oligonucleotide
gcaggucccaagggaccag

SEQ ID NO: 3074419 - RNA, 19 nt, Artificial Sequence
  Description of Artificial Sequence: Synthetic oligonucleotide
cagauugcccagagcugau

SEQ ID NO: 3074420 - RNA, 19 nt, Artificial Sequence
  Description of Artificial Sequence: Synthetic oligonucleotide
cugggucauacugggcacu

SEQ ID NO: 3074421 - RNA, 19 nt, Artificial Sequence
  Description of Artificial Sequence: Synthetic oligonucleotide
gccauaucuaggagccucu

SEQ ID NO: 3074422 - RNA, 19 nt, Artificial Sequence
  Description of Artificial Sequence: Synthetic oligonucleotide
aggagccucugggguacuu

SEQ ID NO: 3074423 - RNA, 19 nt, Artificial Sequence
  Description of Artificial Sequence: Synthetic oligonucleotide
cagccugguaggcugcauu

SEQ ID NO: 3074424 - RNA, 19 nt, Artificial Sequence
  Description of Artificial Sequence: Synthetic oligonucleotide
ccagagcugaugcagcauu

SEQ ID NO: 3074425 - RNA, 19 nt, Artificial Sequence
  Description of Artificial Sequence: Synthetic oligonucleotide
cuccaagcagcugggucau

SEQ ID NO: 3074426 - RNA, 19 nt, Artificial Sequence
  Description of Artificial Sequence: Synthetic oligonucleotide
gggaccagccugguaggcu

SEQ ID NO: 3074427 - RNA, 19 nt, Artificial Sequence
  Description of Artificial Sequence: Synthetic oligonucleotide
augcagcauugcgccggau

SEQ ID NO: 3074428 - RNA, 19 nt, Artificial Sequence
  Description of Artificial Sequence: Synthetic oligonucleotide
ccacagcaaagcuggcacu

SEQ ID NO: 3074429 - RNA, 19 nt, Artificial Sequence
  Description of Artificial Sequence: Synthetic oligonucleotide
cugccagggcaggucccaa

SEQ ID NO: 3074430 - RNA, 19 nt, Artificial Sequence
  Description of Artificial Sequence: Synthetic oligonucleotide
ccaagggaccagccuggua

SEQ ID NO: 3074431 - RNA, 19 nt, Artificial Sequence
  Description of Artificial Sequence: Synthetic oligonucleotide
cccaauccuucagguccca

SEQ ID NO: 3074432 - RNA, 19 nt, Artificial Sequence
  Description of Artificial Sequence: Synthetic oligonucleotide
cccagagcugaugcagcau

SEQ ID NO: 3074433 - RNA, 19 nt, Artificial Sequence
  Description of Artificial Sequence: Synthetic oligonucleotide
gcauugcgccggauaccau

SEQ ID NO: 3074434 - RNA, 19 nt, Artificial Sequence
  Description of Artificial Sequence: Synthetic oligonucleotide
cccaagggaccagccuggu

SEQ ID NO: 3074435 - RNA, 19 nt, Artificial Sequence
  Description of Artificial Sequence: Synthetic oligonucleotide
ccagccugguaggcugcau

SEQ ID NO: 3074436 - RNA, 19 nt, Artificial Sequence
  Description of Artificial Sequence: Synthetic oligonucleotide
uucaaaaucacaaugaaga

SEQ ID NO: 3074437 - RNA, 19 nt, Artificial Sequence
  Description of Artificial Sequence: Synthetic oligonucleotide
aaaauucaaaaucacaaug

SEQ ID NO: 3074438 - RNA, 19 nt, Artificial Sequence
  Description of Artificial Sequence: Synthetic oligonucleotide
ucuuguguacacaacaaag

SEQ ID NO: 3074439 - RNA, 19 nt, Artificial Sequence
  Description of Artificial Sequence: Synthetic oligonucleotide
cuuauucuaaguuucguag

SEQ ID NO: 3074440 - RNA, 19 nt, Artificial Sequence
  Description of Artificial Sequence: Synthetic oligonucleotide
ucuccaaaauucaaaauca

SEQ ID NO: 3074441 - RNA, 19 nt, Artificial Sequence
  Description of Artificial Sequence: Synthetic oligonucleotide
aauggcuugugugucaacc

SEQ ID NO: 3074442 - RNA, 19 nt, Artificial Sequence
  Description of Artificial Sequence: Synthetic oligonucleotide
uucuccaaaauucaaaauc

SEQ ID NO: 3074443 - RNA, 19 nt, Artificial Sequence
  Description of Artificial Sequence: Synthetic oligonucleotide
ugaugauucuccaaaauuc

SEQ ID NO: 3074444 - RNA, 19 nt, Artificial Sequence
  Description of Artificial Sequence: Synthetic oligonucleotide
augaagacuuuaucuaugc

SEQ ID NO: 3074445 - RNA, 19 nt, Artificial Sequence
  Description of Artificial Sequence: Synthetic oligonucleotide
aaaaucacaaugaagacuu

SEQ ID NO: 3074446 - RNA, 19 nt, Artificial Sequence
  Description of Artificial Sequence: Synthetic oligonucleotide
uugugugucaaccucacug

SEQ ID NO: 3074447 - RNA, 19 nt, Artificial Sequence
  Description of Artificial Sequence: Synthetic oligonucleotide
uuauucuaaguuucguagg

SEQ ID NO: 3074448 - RNA, 19 nt, Artificial Sequence
  Description of Artificial Sequence: Synthetic oligonucleotide
uuaguacuuaaucuuauuc

SEQ ID NO: 3074449 - RNA, 19 nt, Artificial Sequence
  Description of Artificial Sequence: Synthetic oligonucleotide
uuuccuguagauuuagcag

SEQ ID NO: 3074450 - RNA, 19 nt, Artificial Sequence
  Description of Artificial Sequence: Synthetic oligonucleotide
aauucaaaaucacaaugaa

SEQ ID NO: 3074451 - RNA, 19 nt, Artificial Sequence
  Description of Artificial Sequence: Synthetic oligonucleotide
aaauucaaaaucacaauga

SEQ ID NO: 3074452 - RNA, 19 nt, Artificial Sequence
  Description of Artificial Sequence: Synthetic oligonucleotide
aagaccugagaugauuucc

SEQ ID NO: 3074453 - RNA, 19 nt, Artificial Sequence
  Description of Artificial Sequence: Synthetic oligonucleotide
uaaucuuauucuaaguuuc

SEQ ID NO: 3074454 - RNA, 19 nt, Artificial Sequence
  Description of Artificial Sequence: Synthetic oligonucleotide
gaagacuuuaucuaugcca

SEQ ID NO: 3074455 - RNA, 19 nt, Artificial Sequence
  Description of Artificial Sequence: Synthetic oligonucleotide
gauuuagcagaguugauga

SEQ ID NO: 3074456 - RNA, 19 nt, Artificial Sequence
  Description of Artificial Sequence: Synthetic oligonucleotide
uuaucuaugccauccagcu

SEQ ID NO: 3074457 - RNA, 19 nt, Artificial Sequence
  Description of Artificial Sequence: Synthetic oligonucleotide
uuuaucuaugccauccagc

SEQ ID NO: 3074458 - RNA, 19 nt, Artificial Sequence
  Description of Artificial Sequence: Synthetic oligonucleotide
aagcaucugucucugagag

SEQ ID NO: 3074459 - RNA, 19 nt, Artificial Sequence
  Description of Artificial Sequence: Synthetic oligonucleotide
ugcuggaauagcaugcacg

SEQ ID NO: 3074460 - RNA, 19 nt, Artificial Sequence
  Description of Artificial Sequence: Synthetic oligonucleotide
uacuuaaucuuauucuaag

SEQ ID NO: 3074461 - RNA, 19 nt, Artificial Sequence
  Description of Artificial Sequence: Synthetic oligonucleotide
uauucuaaguuucguagga

SEQ ID NO: 3074462 - RNA, 19 nt, Artificial Sequence
  Description of Artificial Sequence: Synthetic oligonucleotide
uccaaaauucaaaaucaca

SEQ ID NO: 3074463 - RNA, 19 nt, Artificial Sequence
  Description of Artificial Sequence: Synthetic oligonucleotide
uaguacuuaaucuuauucu

SEQ ID NO: 3074464 - RNA, 19 nt, Artificial Sequence
  Description of Artificial Sequence: Synthetic oligonucleotide
uucuaaguuucguaggaag

SEQ ID NO: 3074465 - RNA, 19 nt, Artificial Sequence
  Description of Artificial Sequence: Synthetic oligonucleotide
aucuaugccauccagcucu

SEQ ID NO: 3074466 - RNA, 19 nt, Artificial Sequence
  Description of Artificial Sequence: Synthetic oligonucleotide
uuaaucuuauucuaaguuu

SEQ ID NO: 3074467 - RNA, 19 nt, Artificial Sequence
  Description of Artificial Sequence: Synthetic oligonucleotide
ucuaaguuucguaggaaga

SEQ ID NO: 3074468 - RNA, 19 nt, Artificial Sequence
  Description of Artificial Sequence: Synthetic oligonucleotide
uuagcagaguugaugauuc

SEQ ID NO: 3074469 - RNA, 19 nt, Artificial Sequence
  Description of Artificial Sequence: Synthetic oligonucleotide
agagaaauggcuugugugu

SEQ ID NO: 3074470 - RNA, 19 nt, Artificial Sequence
  Description of Artificial Sequence: Synthetic oligonucleotide
uaacacaggguauacagaa

SEQ ID NO: 3074471 - RNA, 19 nt, Artificial Sequence
  Description of Artificial Sequence: Synthetic oligonucleotide
aaccucacugccuuuggag

SEQ ID NO: 3074472 - RNA, 19 nt, Artificial Sequence
  Description of Artificial Sequence: Synthetic oligonucleotide
uuccuguagauuuagcaga

SEQ ID NO: 3074473 - RNA, 19 nt, Artificial Sequence
  Description of Artificial Sequence: Synthetic oligonucleotide
uacagaauguccagugugc

SEQ ID NO: 3074474 - RNA, 19 nt, Artificial Sequence
  Description of Artificial Sequence: Synthetic oligonucleotide
aaucuuauucuaaguuucg

SEQ ID NO: 3074475 - RNA, 19 nt, Artificial Sequence
  Description of Artificial Sequence: Synthetic oligonucleotide
auacagaauguccagugug

SEQ ID NO: 3074476 - RNA, 19 nt, Artificial Sequence
  Description of Artificial Sequence: Synthetic oligonucleotide
aauagcaugcacgauugga

SEQ ID NO: 3074477 - RNA, 19 nt, Artificial Sequence
  Description of Artificial Sequence: Synthetic oligonucleotide
uuggagacaaagcaucugu

SEQ ID NO: 3074478 - RNA, 19 nt, Artificial Sequence
  Description of Artificial Sequence: Synthetic oligonucleotide
ugcacgauuggagacaaag

SEQ ID NO: 3074479 - RNA, 19 nt, Artificial Sequence
  Description of Artificial Sequence: Synthetic oligonucleotide
gauucuccaaaauucaaaa

SEQ ID NO: 3074480 - RNA, 19 nt, Artificial Sequence
  Description of Artificial Sequence: Synthetic oligonucleotide
acaaugaagacuuuaucua

SEQ ID NO: 3074481 - RNA, 19 nt, Artificial Sequence
  Description of Artificial Sequence: Synthetic oligonucleotide
acacaggguauacagaaug

SEQ ID NO: 3074482 - RNA, 19 nt, Artificial Sequence
  Description of Artificial Sequence: Synthetic oligonucleotide
cuguguuccaagaugaguc

SEQ ID NO: 3074483 - RNA, 19 nt, Artificial Sequence
  Description of Artificial Sequence: Synthetic oligonucleotide
uugaugauucuccaaaauu

SEQ ID NO: 3074484 - RNA, 19 nt, Artificial Sequence
  Description of Artificial Sequence: Synthetic oligonucleotide
uguguacacaacaaaguua

SEQ ID NO: 3074485 - RNA, 19 nt, Artificial Sequence
  Description of Artificial Sequence: Synthetic oligonucleotide
ugugugucaaccucacugc

SEQ ID NO: 3074486 - RNA, 19 nt, Artificial Sequence
  Description of Artificial Sequence: Synthetic oligonucleotide
guauacagaauguccagug

SEQ ID NO: 3074487 - RNA, 19 nt, Artificial Sequence
  Description of Artificial Sequence: Synthetic oligonucleotide
ugagaugauuuccuguaga

SEQ ID NO: 3074488 - RNA, 19 nt, Artificial Sequence
  Description of Artificial Sequence: Synthetic oligonucleotide
ugauucuccaaaauucaaa

SEQ ID NO: 3074489 - RNA, 19 nt, Artificial Sequence
  Description of Artificial Sequence: Synthetic oligonucleotide
aguacuuaaucuuauucua

SEQ ID NO: 3074490 - RNA, 19 nt, Artificial Sequence
  Description of Artificial Sequence: Synthetic oligonucleotide
uggagagucgucaugcugu

SEQ ID NO: 3074491 - RNA, 19 nt, Artificial Sequence
  Description of Artificial Sequence: Synthetic oligonucleotide
aaagcaucugucucugaga

SEQ ID NO: 3074492 - RNA, 19 nt, Artificial Sequence
  Description of Artificial Sequence: Synthetic oligonucleotide
gaugauuuccuguagauuu

SEQ ID NO: 3074493 - RNA, 19 nt, Artificial Sequence
  Description of Artificial Sequence: Synthetic oligonucleotide
aaugaagacuuuaucuaug

SEQ ID NO: 3074494 - RNA, 19 nt, Artificial Sequence
  Description of Artificial Sequence: Synthetic oligonucleotide
caggguauacagaaugucc

SEQ ID NO: 3074495 - RNA, 19 nt, Artificial Sequence
  Description of Artificial Sequence: Synthetic oligonucleotide
caagaugaguccuucuccc

SEQ ID NO: 3074496 - RNA, 19 nt, Artificial Sequence
  Description of Artificial Sequence: Synthetic oligonucleotide
guagauuuagcagaguuga

SEQ ID NO: 3074497 - RNA, 19 nt, Artificial Sequence
  Description of Artificial Sequence: Synthetic oligonucleotide
guguacacaacaaaguuac

SEQ ID NO: 3074498 - RNA, 19 nt, Artificial Sequence
  Description of Artificial Sequence: Synthetic oligonucleotide
uuucguaggaagaccugag

SEQ ID NO: 3074499 - RNA, 19 nt, Artificial Sequence
  Description of Artificial Sequence: Synthetic oligonucleotide
uuguguacacaacaaaguu

SEQ ID NO: 3074500 - RNA, 19 nt, Artificial Sequence
  Description of Artificial Sequence: Synthetic oligonucleotide
uggaauagcaugcacgauu

SEQ ID NO: 3074501 - RNA, 19 nt, Artificial Sequence
  Description of Artificial Sequence: Synthetic oligonucleotide
uauacagaauguccagugu

SEQ ID NO: 3074502 - RNA, 19 nt, Artificial Sequence
  Description of Artificial Sequence: Synthetic oligonucleotide
ucuuauucuaaguuucgua

SEQ ID NO: 3074503 - RNA, 19 nt, Artificial Sequence
  Description of Artificial Sequence: Synthetic oligonucleotide
ugaagacuuuaucuaugcc

SEQ ID NO: 3074504 - RNA, 19 nt, Artificial Sequence
  Description of Artificial Sequence: Synthetic oligonucleotide
agcaugcacgauuggagac

SEQ ID NO: 3074505 - RNA, 19 nt, Artificial Sequence
  Description of Artificial Sequence: Synthetic oligonucleotide
agauuuagcagaguugaug

SEQ ID NO: 3074506 - RNA, 19 nt, Artificial Sequence
  Description of Artificial Sequence: Synthetic oligonucleotide
caaagcaucugucucugag

SEQ ID NO: 3074507 - RNA, 19 nt, Artificial Sequence
  Description of Artificial Sequence: Synthetic oligonucleotide
auucaaaaucacaaugaag

SEQ ID NO: 3074508 - RNA, 19 nt, Artificial Sequence
  Description of Artificial Sequence: Synthetic oligonucleotide
cagagaaauggcuugugug

SEQ ID NO: 3074509 - RNA, 19 nt, Artificial Sequence
  Description of Artificial Sequence: Synthetic oligonucleotide
gagacaaagcaucugucuc

SEQ ID NO: 3074510 - RNA, 19 nt, Artificial Sequence
  Description of Artificial Sequence: Synthetic oligonucleotide
uguguuccaagaugagucc

SEQ ID NO: 3074511 - RNA, 19 nt, Artificial Sequence
  Description of Artificial Sequence: Synthetic oligonucleotide
agugugcuggaauagcaug

SEQ ID NO: 3074512 - RNA, 19 nt, Artificial Sequence
  Description of Artificial Sequence: Synthetic oligonucleotide
ucuccagagaaauggcuug

SEQ ID NO: 3074513 - RNA, 19 nt, Artificial Sequence
  Description of Artificial Sequence: Synthetic oligonucleotide
ucguaggaagaccugagau

SEQ ID NO: 3074514 - RNA, 19 nt, Artificial Sequence
  Description of Artificial Sequence: Synthetic oligonucleotide
uccaagaugaguccuucuc

SEQ ID NO: 3074515 - RNA, 19 nt, Artificial Sequence
  Description of Artificial Sequence: Synthetic oligonucleotide
uaaguuucguaggaagacc

SEQ ID NO: 3074516 - RNA, 19 nt, Artificial Sequence
  Description of Artificial Sequence: Synthetic oligonucleotide
gaugauucuccaaaauuca

SEQ ID NO: 3074517 - RNA, 19 nt, Artificial Sequence
  Description of Artificial Sequence: Synthetic oligonucleotide
ucacaaugaagacuuuauc

SEQ ID NO: 3074518 - RNA, 19 nt, Artificial Sequence
  Description of Artificial Sequence: Synthetic oligonucleotide
cuuuaucuaugccauccag

SEQ ID NO: 3074519 - RNA, 19 nt, Artificial Sequence
  Description of Artificial Sequence: Synthetic oligonucleotide
accucacugccuuuggagg

SEQ ID NO: 3074520 - RNA, 19 nt, Artificial Sequence
  Description of Artificial Sequence: Synthetic oligonucleotide
ccuaacacaggguauacag

SEQ ID NO: 3074521 - RNA, 19 nt, Artificial Sequence
  Description of Artificial Sequence: Synthetic oligonucleotide
agacaaagcaucugucucu

SEQ ID NO: 3074522 - RNA, 19 nt, Artificial Sequence
  Description of Artificial Sequence: Synthetic oligonucleotide
cuaaguuucguaggaagac

SEQ ID NO: 3074523 - RNA, 19 nt, Artificial Sequence
  Description of Artificial Sequence: Synthetic oligonucleotide
guaggaagaccugagauga

SEQ ID NO: 3074524 - RNA, 19 nt, Artificial Sequence
  Description of Artificial Sequence: Synthetic oligonucleotide
cacgauuggagacaaagca

SEQ ID NO: 3074525 - RNA, 19 nt, Artificial Sequence
  Description of Artificial Sequence: Synthetic oligonucleotide
auagcaugcacgauuggag

SEQ ID NO: 3074526 - RNA, 19 nt, Artificial Sequence
  Description of Artificial Sequence: Synthetic oligonucleotide
gaguccuucucccuucucc

SEQ ID NO: 3074527 - RNA, 19 nt, Artificial Sequence
  Description of Artificial Sequence: Synthetic oligonucleotide
ucucuuguguacacaacaa

SEQ ID NO: 3074528 - RNA, 19 nt, Artificial Sequence
  Description of Artificial Sequence: Synthetic oligonucleotide
gaguugaugauucuccaaa

SEQ ID NO: 3074529 - RNA, 19 nt, Artificial Sequence
  Description of Artificial Sequence: Synthetic oligonucleotide
aaguuucguaggaagaccu

SEQ ID NO: 3074530 - RNA, 19 nt, Artificial Sequence
  Description of Artificial Sequence: Synthetic oligonucleotide
cacaaugaagacuuuaucu

SEQ ID NO: 3074531 - RNA, 19 nt, Artificial Sequence
  Description of Artificial Sequence: Synthetic oligonucleotide
ugucucugagagcugcuug

SEQ ID NO: 3074532 - RNA, 19 nt, Artificial Sequence
  Description of Artificial Sequence: Synthetic oligonucleotide
aucugucucugagagcugc

SEQ ID NO: 3074533 - RNA, 19 nt, Artificial Sequence
  Description of Artificial Sequence: Synthetic oligonucleotide
ccaaaauucaaaaucacaa

SEQ ID NO: 3074534 - RNA, 19 nt, Artificial Sequence
  Description of Artificial Sequence: Synthetic oligonucleotide
acaggguauacagaauguc

SEQ ID NO: 3074535 - RNA, 19 nt, Artificial Sequence
  Description of Artificial Sequence: Synthetic oligonucleotide
aaauggcuugugugucaac

SEQ ID NO: 3074536 - RNA, 19 nt, Artificial Sequence
  Description of Artificial Sequence: Synthetic oligonucleotide
ugugucaaccucacugccu

SEQ ID NO: 3074537 - RNA, 19 nt, Artificial Sequence
  Description of Artificial Sequence: Synthetic oligonucleotide
agucgucaugcuguguucc

SEQ ID NO: 3074538 - RNA, 19 nt, Artificial Sequence
  Description of Artificial Sequence: Synthetic oligonucleotide
uucuccagagaaauggcuu

SEQ ID NO: 3074539 - RNA, 19 nt, Artificial Sequence
  Description of Artificial Sequence: Synthetic oligonucleotide
uuuagcagaguugaugauu

SEQ ID NO: 3074540 - RNA, 19 nt, Artificial Sequence
  Description of Artificial Sequence: Synthetic oligonucleotide
ugauuuccuguagauuuag

SEQ ID NO: 3074541 - RNA, 19 nt, Artificial Sequence
  Description of Artificial Sequence: Synthetic oligonucleotide
aagaugaguccuucucccu

SEQ ID NO: 3074542 - RNA, 19 nt, Artificial Sequence
  Description of Artificial Sequence: Synthetic oligonucleotide
aaucacaaugaagacuuua

SEQ ID NO: 3074543 - RNA, 19 nt, Artificial Sequence
  Description of Artificial Sequence: Synthetic oligonucleotide
uagcaugcacgauuggaga

SEQ ID NO: 3074544 - RNA, 19 nt, Artificial Sequence
  Description of Artificial Sequence: Synthetic oligonucleotide
uggaggccgaguuaguacu

SEQ ID NO: 3074545 - RNA, 19 nt, Artificial Sequence
  Description of Artificial Sequence: Synthetic oligonucleotide
uucguaggaagaccugaga

SEQ ID NO: 3074546 - RNA, 19 nt, Artificial Sequence
  Description of Artificial Sequence: Synthetic oligonucleotide
ugguggagagucgucaugc

SEQ ID NO: 3074547 - RNA, 19 nt, Artificial Sequence
  Description of Artificial Sequence: Synthetic oligonucleotide
agcaucugucucugagagc

SEQ ID NO: 3074548 - RNA, 19 nt, Artificial Sequence
  Description of Artificial Sequence: Synthetic oligonucleotide
aguugaugauucuccaaaa

SEQ ID NO: 3074549 - RNA, 19 nt, Artificial Sequence
  Description of Artificial Sequence: Synthetic oligonucleotide
agagucgucaugcuguguu

SEQ ID NO: 3074550 - RNA, 19 nt, Artificial Sequence
  Description of Artificial Sequence: Synthetic oligonucleotide
agaaauggcuuguguguca

SEQ ID NO: 3074551 - RNA, 19 nt, Artificial Sequence
  Description of Artificial Sequence: Synthetic oligonucleotide
uuggaggccgaguuaguac

SEQ ID NO: 3074552 - RNA, 19 nt, Artificial Sequence
  Description of Artificial Sequence: Synthetic oligonucleotide
cucucuuguguacacaaca

SEQ ID NO: 3074553 - RNA, 19 nt, Artificial Sequence
  Description of Artificial Sequence: Synthetic oligonucleotide
aggguauacagaaugucca

SEQ ID NO: 3074554 - RNA, 19 nt, Artificial Sequence
  Description of Artificial Sequence: Synthetic oligonucleotide
uggagacaaagcaucuguc

SEQ ID NO: 3074555 - RNA, 19 nt, Artificial Sequence
  Description of Artificial Sequence: Synthetic oligonucleotide
gaugaguccuucucccuuc

SEQ ID NO: 3074556 - RNA, 19 nt, Artificial Sequence
  Description of Artificial Sequence: Synthetic oligonucleotide
agacuuuaucuaugccauc

SEQ ID NO: 3074557 - RNA, 19 nt, Artificial Sequence
  Description of Artificial Sequence: Synthetic oligonucleotide
agcugcuuggugguggugg

SEQ ID NO: 3074558 - RNA, 19 nt, Artificial Sequence
  Description of Artificial Sequence: Synthetic oligonucleotide
gaagaccugagaugauuuc

SEQ ID NO: 3074559 - RNA, 19 nt, Artificial Sequence
  Description of Artificial Sequence: Synthetic oligonucleotide
uguccagugugcuggaaua

SEQ ID NO: 3074560 - RNA, 19 nt, Artificial Sequence
  Description of Artificial Sequence: Synthetic oligonucleotide
cuuguguacacaacaaagu

SEQ ID NO: 3074561 - RNA, 19 nt, Artificial Sequence
  Description of Artificial Sequence: Synthetic oligonucleotide
uaugccauccagcucucuu

SEQ ID NO: 3074562 - RNA, 19 nt, Artificial Sequence
  Description of Artificial Sequence: Synthetic oligonucleotide
accugagaugauuuccugu

SEQ ID NO: 3074563 - RNA, 19 nt, Artificial Sequence
  Description of Artificial Sequence: Synthetic oligonucleotide
cugagaugauuuccuguag

SEQ ID NO: 3074564 - RNA, 19 nt, Artificial Sequence
  Description of Artificial Sequence: Synthetic oligonucleotide
ggaauagcaugcacgauug

SEQ ID NO: 3074565 - RNA, 19 nt, Artificial Sequence
  Description of Artificial Sequence: Synthetic oligonucleotide
aucacaaugaagacuuuau

SEQ ID NO: 3074566 - RNA, 19 nt, Artificial Sequence
  Description of Artificial Sequence: Synthetic oligonucleotide
ugcuguguuccaagaugag

SEQ ID NO: 3074567 - RNA, 19 nt, Artificial Sequence
  Description of Artificial Sequence: Synthetic oligonucleotide
agcucucuuguguacacaa

SEQ ID NO: 3074568 - RNA, 19 nt, Artificial Sequence
  Description of Artificial Sequence: Synthetic oligonucleotide
ugugcuggaauagcaugca

SEQ ID NO: 3074569 - RNA, 19 nt, Artificial Sequence
  Description of Artificial Sequence: Synthetic oligonucleotide
uguacacaacaaaguuacu

SEQ ID NO: 3074570 - RNA, 19 nt, Artificial Sequence
  Description of Artificial Sequence: Synthetic oligonucleotide
uccuucucccuucuccaga

SEQ ID NO: 3074571 - RNA, 19 nt, Artificial Sequence
  Description of Artificial Sequence: Synthetic oligonucleotide
auccagcucucuuguguac

SEQ ID NO: 3074572 - RNA, 19 nt, Artificial Sequence
  Description of Artificial Sequence: Synthetic oligonucleotide
agaguugaugauucuccaa

SEQ ID NO: 3074573 - RNA, 19 nt, Artificial Sequence
  Description of Artificial Sequence: Synthetic oligonucleotide
auuggagacaaagcaucug

SEQ ID NO: 3074574 - RNA, 19 nt, Artificial Sequence
  Description of Artificial Sequence: Synthetic oligonucleotide
gagaaauggcuuguguguc

SEQ ID NO: 3074575 - RNA, 19 nt, Artificial Sequence
  Description of Artificial Sequence: Synthetic oligonucleotide
auggcuugugugucaaccu

SEQ ID NO: 3074576 - RNA, 19 nt, Artificial Sequence
  Description of Artificial Sequence: Synthetic oligonucleotide
uguuccaagaugaguccuu

SEQ ID NO: 3074577 - RNA, 19 nt, Artificial Sequence
  Description of Artificial Sequence: Synthetic oligonucleotide
gaccugagaugauuuccug

SEQ ID NO: 3074578 - RNA, 19 nt, Artificial Sequence
  Description of Artificial Sequence: Synthetic oligonucleotide
uaucuaugccauccagcuc

SEQ ID NO: 3074579 - RNA, 19 nt, Artificial Sequence
  Description of Artificial Sequence: Synthetic oligonucleotide
cuaacacaggguauacaga

SEQ ID NO: 3074580 - RNA, 19 nt, Artificial Sequence
  Description of Artificial Sequence: Synthetic oligonucleotide
uccagugugcuggaauagc

SEQ ID NO: 3074581 - RNA, 19 nt, Artificial Sequence
  Description of Artificial Sequence: Synthetic oligonucleotide
uggcuugugugucaaccuc

SEQ ID NO: 3074582 - RNA, 19 nt, Artificial Sequence
  Description of Artificial Sequence: Synthetic oligonucleotide
aucuuauucuaaguuucgu

SEQ ID NO: 3074583 - RNA, 19 nt, Artificial Sequence
  Description of Artificial Sequence: Synthetic oligonucleotide
caaaauucaaaaucacaau

SEQ ID NO: 3074584 - RNA, 19 nt, Artificial Sequence
  Description of Artificial Sequence: Synthetic oligonucleotide
ugccauccagcucucuugu

SEQ ID NO: 3074585 - RNA, 19 nt, Artificial Sequence
  Description of Artificial Sequence: Synthetic oligonucleotide
gcagaguugaugauucucc

SEQ ID NO: 3074586 - RNA, 19 nt, Artificial Sequence
  Description of Artificial Sequence: Synthetic oligonucleotide
gugugcuggaauagcaugc

SEQ ID NO: 3074587 - RNA, 19 nt, Artificial Sequence
  Description of Artificial Sequence: Synthetic oligonucleotide
auuuagcagaguugaugau

SEQ ID NO: 3074588 - RNA, 19 nt, Artificial Sequence
  Description of Artificial Sequence: Synthetic oligonucleotide
gcuggaauagcaugcacga

SEQ ID NO: 3074589 - RNA, 19 nt, Artificial Sequence
  Description of Artificial Sequence: Synthetic oligonucleotide
ggguauacagaauguccag

SEQ ID NO: 3074590 - RNA, 19 nt, Artificial Sequence
  Description of Artificial Sequence: Synthetic oligonucleotide
cccuucuccagagaaaugg

SEQ ID NO: 3074591 - RNA, 19 nt, Artificial Sequence
  Description of Artificial Sequence: Synthetic oligonucleotide
ccaagaugaguccuucucc

SEQ ID NO: 3074592 - RNA, 19 nt, Artificial Sequence
  Description of Artificial Sequence: Synthetic oligonucleotide
guggagagucgucaugcug

SEQ ID NO: 3074593 - RNA, 19 nt, Artificial Sequence
  Description of Artificial Sequence: Synthetic oligonucleotide
augcuguguuccaagauga

SEQ ID NO: 3074594 - RNA, 19 nt, Artificial Sequence
  Description of Artificial Sequence: Synthetic oligonucleotide
ucucccuucuccagagaaa

SEQ ID NO: 3074595 - RNA, 19 nt, Artificial Sequence
  Description of Artificial Sequence: Synthetic oligonucleotide
guuucguaggaagaccuga

SEQ ID NO: 3074596 - RNA, 19 nt, Artificial Sequence
  Description of Artificial Sequence: Synthetic oligonucleotide
aguuaguacuuaaucuuau

SEQ ID NO: 3074597 - RNA, 19 nt, Artificial Sequence
  Description of Artificial Sequence: Synthetic oligonucleotide
gaguuaguacuuaaucuua

SEQ ID NO: 3074598 - RNA, 19 nt, Artificial Sequence
  Description of Artificial Sequence: Synthetic oligonucleotide
caaaaucacaaugaagacu

SEQ ID NO: 3074599 - RNA, 19 nt, Artificial Sequence
  Description of Artificial Sequence: Synthetic oligonucleotide
ugccuuuggaggccgaguu

SEQ ID NO: 3074600 - RNA, 19 nt, Artificial Sequence
  Description of Artificial Sequence: Synthetic oligonucleotide
gagaugauuuccuguagau

SEQ ID NO: 3074601 - RNA, 19 nt, Artificial Sequence
  Description of Artificial Sequence: Synthetic oligonucleotide
gugugucaaccucacugcc

SEQ ID NO: 3074602 - RNA, 19 nt, Artificial Sequence
  Description of Artificial Sequence: Synthetic oligonucleotide
agaugaguccuucucccuu

SEQ ID NO: 3074603 - RNA, 19 nt, Artificial Sequence
  Description of Artificial Sequence: Synthetic oligonucleotide
acagaauguccagugugcu

SEQ ID NO: 3074604 - RNA, 19 nt, Artificial Sequence
  Description of Artificial Sequence: Synthetic oligonucleotide
uuuggaggccgaguuagua

SEQ ID NO: 3074605 - RNA, 19 nt, Artificial Sequence
  Description of Artificial Sequence: Synthetic oligonucleotide
auguccagugugcuggaau

SEQ ID NO: 3074606 - RNA, 19 nt, Artificial Sequence
  Description of Artificial Sequence: Synthetic oligonucleotide
ucugucucugagagcugcu

SEQ ID NO: 3074607 - RNA, 19 nt, Artificial Sequence
  Description of Artificial Sequence: Synthetic oligonucleotide
agaccugagaugauuuccu

SEQ ID NO: 3074608 - RNA, 19 nt, Artificial Sequence
  Description of Artificial Sequence: Synthetic oligonucleotide
uggugguggagagucguca

SEQ ID NO: 3074609 - RNA, 19 nt, Artificial Sequence
  Description of Artificial Sequence: Synthetic oligonucleotide
uuccaagaugaguccuucu

SEQ ID NO: 3074610 - RNA, 19 nt, Artificial Sequence
  Description of Artificial Sequence: Synthetic oligonucleotide
gccgaguuaguacuuaauc

SEQ ID NO: 3074611 - RNA, 19 nt, Artificial Sequence
  Description of Artificial Sequence: Synthetic oligonucleotide
uccagagaaauggcuugug

SEQ ID NO: 3074612 - RNA, 19 nt, Artificial Sequence
  Description of Artificial Sequence: Synthetic oligonucleotide
uccagcucucuuguguaca

SEQ ID NO: 3074613 - RNA, 19 nt, Artificial Sequence
  Description of Artificial Sequence: Synthetic oligonucleotide
acgauuggagacaaagcau

SEQ ID NO: 3074614 - RNA, 19 nt, Artificial Sequence
  Description of Artificial Sequence: Synthetic oligonucleotide
ugguggugguggagagucg

SEQ ID NO: 3074615 - RNA, 19 nt, Artificial Sequence
  Description of Artificial Sequence: Synthetic oligonucleotide
cagaguugaugauucucca

SEQ ID NO: 3074616 - RNA, 19 nt, Artificial Sequence
  Description of Artificial Sequence: Synthetic oligonucleotide
caaugaagacuuuaucuau

SEQ ID NO: 3074617 - RNA, 19 nt, Artificial Sequence
  Description of Artificial Sequence: Synthetic oligonucleotide
ucccuucuccagagaaaug

SEQ ID NO: 3074618 - RNA, 19 nt, Artificial Sequence
  Description of Artificial Sequence: Synthetic oligonucleotide
auucuaaguuucguaggaa

SEQ ID NO: 3074619 - RNA, 19 nt, Artificial Sequence
  Description of Artificial Sequence: Synthetic oligonucleotide
aacacaggguauacagaau

SEQ ID NO: 3074620 - RNA, 19 nt, Artificial Sequence
  Description of Artificial Sequence: Synthetic oligonucleotide
gucaaccucacugccuuug

SEQ ID NO: 3074621 - RNA, 19 nt, Artificial Sequence
  Description of Artificial Sequence: Synthetic oligonucleotide
agaugauuuccuguagauu

SEQ ID NO: 3074622 - RNA, 19 nt, Artificial Sequence
  Description of Artificial Sequence: Synthetic oligonucleotide
guugaugauucuccaaaau

SEQ ID NO: 3074623 - RNA, 19 nt, Artificial Sequence
  Description of Artificial Sequence: Synthetic oligonucleotide
cgauuggagacaaagcauc

SEQ ID NO: 3074624 - RNA, 19 nt, Artificial Sequence
  Description of Artificial Sequence: Synthetic oligonucleotide
gucaugcuguguuccaaga

SEQ ID NO: 3074625 - RNA, 19 nt, Artificial Sequence
  Description of Artificial Sequence: Synthetic oligonucleotide
ucacugccuuuggaggccg

SEQ ID NO: 3074626 - RNA, 19 nt, Artificial Sequence
  Description of Artificial Sequence: Synthetic oligonucleotide
cucacugccuuuggaggcc

SEQ ID NO: 3074627 - RNA, 19 nt, Artificial Sequence
  Description of Artificial Sequence: Synthetic oligonucleotide
gagucgucaugcuguguuc

SEQ ID NO: 3074628 - RNA, 19 nt, Artificial Sequence
  Description of Artificial Sequence: Synthetic oligonucleotide
cucuuguguacacaacaaa

SEQ ID NO: 3074629 - RNA, 19 nt, Artificial Sequence
  Description of Artificial Sequence: Synthetic oligonucleotide
gauuggagacaaagcaucu

SEQ ID NO: 3074630 - RNA, 19 nt, Artificial Sequence
  Description of Artificial Sequence: Synthetic oligonucleotide
aguuucguaggaagaccug

SEQ ID NO: 3074631 - RNA, 19 nt, Artificial Sequence
  Description of Artificial Sequence: Synthetic oligonucleotide
ucucugagagcugcuuggu

SEQ ID NO: 3074632 - RNA, 19 nt, Artificial Sequence
  Description of Artificial Sequence: Synthetic oligonucleotide
ucuaugccauccagcucuc

SEQ ID NO: 3074633 - RNA, 19 nt, Artificial Sequence
  Description of Artificial Sequence: Synthetic oligonucleotide
cguaggaagaccugagaug

SEQ ID NO: 3074634 - RNA, 19 nt, Artificial Sequence
  Description of Artificial Sequence: Synthetic oligonucleotide
ccuuuggaggccgaguuag

SEQ ID NO: 3074635 - RNA, 19 nt, Artificial Sequence
  Description of Artificial Sequence: Synthetic oligonucleotide
gcaucugucucugagagcu

SEQ ID NO: 3074636 - RNA, 19 nt, Artificial Sequence
  Description of Artificial Sequence: Synthetic oligonucleotide
ggagacaaagcaucugucu

SEQ ID NO: 3074637 - RNA, 19 nt, Artificial Sequence
  Description of Artificial Sequence: Synthetic oligonucleotide
gugguggagagucgucaug

SEQ ID NO: 3074638 - RNA, 19 nt, Artificial Sequence
  Description of Artificial Sequence: Synthetic oligonucleotide
aggaagaccugagaugauu

SEQ ID NO: 3074639 - RNA, 19 nt, Artificial Sequence
  Description of Artificial Sequence: Synthetic oligonucleotide
augaguccuucucccuucu

SEQ ID NO: 3074640 - RNA, 19 nt, Artificial Sequence
  Description of Artificial Sequence: Synthetic oligonucleotide
uagcagaguugaugauucu

SEQ ID NO: 3074641 - RNA, 19 nt, Artificial Sequence
  Description of Artificial Sequence: Synthetic oligonucleotide
cuguagauuuagcagaguu

SEQ ID NO: 3074642 - RNA, 19 nt, Artificial Sequence
  Description of Artificial Sequence: Synthetic oligonucleotide
ccucacugccuuuggaggc

SEQ ID NO: 3074643 - RNA, 19 nt, Artificial Sequence
  Description of Artificial Sequence: Synthetic oligonucleotide
guuccaagaugaguccuuc

SEQ ID NO: 3074644 - RNA, 19 nt, Artificial Sequence
  Description of Artificial Sequence: Synthetic oligonucleotide
gaauguccagugugcugga

SEQ ID NO: 3074645 - RNA, 19 nt, Artificial Sequence
  Description of Artificial Sequence: Synthetic oligonucleotide
guccagugugcuggaauag

SEQ ID NO: 3074646 - RNA, 19 nt, Artificial Sequence
  Description of Artificial Sequence: Synthetic oligonucleotide
cuucuccagagaaauggcu

SEQ ID NO: 3074647 - RNA, 19 nt, Artificial Sequence
  Description of Artificial Sequence: Synthetic oligonucleotide
uaggaagaccugagaugau

SEQ ID NO: 3074648 - RNA, 19 nt, Artificial Sequence
  Description of Artificial Sequence: Synthetic oligonucleotide
guuaguacuuaaucuuauu

SEQ ID NO: 3074649 - RNA, 19 nt, Artificial Sequence
  Description of Artificial Sequence: Synthetic oligonucleotide
acugccuuuggaggccgag

SEQ ID NO: 3074650 - RNA, 19 nt, Artificial Sequence
  Description of Artificial Sequence: Synthetic oligonucleotide
ggagagucgucaugcugug

SEQ ID NO: 3074651 - RNA, 19 nt, Artificial Sequence
  Description of Artificial Sequence: Synthetic oligonucleotide
gugcuggaauagcaugcac

SEQ ID NO: 3074652 - RNA, 19 nt, Artificial Sequence
  Description of Artificial Sequence: Synthetic oligonucleotide
ugagagcugcuugguggug

SEQ ID NO: 3074653 - RNA, 19 nt, Artificial Sequence
  Description of Artificial Sequence: Synthetic oligonucleotide
aggccgaguuaguacuuaa

SEQ ID NO: 3074654 - RNA, 19 nt, Artificial Sequence
  Description of Artificial Sequence: Synthetic oligonucleotide
gcacgauuggagacaaagc

SEQ ID NO: 3074655 - RNA, 19 nt, Artificial Sequence
  Description of Artificial Sequence: Synthetic oligonucleotide
aauguccagugugcuggaa

SEQ ID NO: 3074656 - RNA, 19 nt, Artificial Sequence
  Description of Artificial Sequence: Synthetic oligonucleotide
ugaguccuucucccuucuc

SEQ ID NO: 3074657 - RNA, 19 nt, Artificial Sequence
  Description of Artificial Sequence: Synthetic oligonucleotide
cauccagcucucuugugua

SEQ ID NO: 3074658 - RNA, 19 nt, Artificial Sequence
  Description of Artificial Sequence: Synthetic oligonucleotide
aaaucacaaugaagacuuu

SEQ ID NO: 3074659 - RNA, 19 nt, Artificial Sequence
  Description of Artificial Sequence: Synthetic oligonucleotide
ucgucaugcuguguuccaa

SEQ ID NO: 3074660 - RNA, 19 nt, Artificial Sequence
  Description of Artificial Sequence: Synthetic oligonucleotide
cacaggguauacagaaugu

SEQ ID NO: 3074661 - RNA, 19 nt, Artificial Sequence
  Description of Artificial Sequence: Synthetic oligonucleotide
gucgucaugcuguguucca

SEQ ID NO: 3074662 - RNA, 19 nt, Artificial Sequence
  Description of Artificial Sequence: Synthetic oligonucleotide
ccgaguuaguacuuaaucu

SEQ ID NO: 3074663 - RNA, 19 nt, Artificial Sequence
  Description of Artificial Sequence: Synthetic oligonucleotide
caucugucucugagagcug

SEQ ID NO: 3074664 - RNA, 19 nt, Artificial Sequence
  Description of Artificial Sequence: Synthetic oligonucleotide
caugcacgauuggagacaa

SEQ ID NO: 3074665 - RNA, 19 nt, Artificial Sequence
  Description of Artificial Sequence: Synthetic oligonucleotide
ccagugugcuggaauagca

SEQ ID NO: 3074666 - RNA, 19 nt, Artificial Sequence
  Description of Artificial Sequence: Synthetic oligonucleotide
caaccucacugccuuugga

SEQ ID NO: 3074667 - RNA, 19 nt, Artificial Sequence
  Description of Artificial Sequence: Synthetic oligonucleotide
gguauacagaauguccagu

SEQ ID NO: 3074668 - RNA, 19 nt, Artificial Sequence
  Description of Artificial Sequence: Synthetic oligonucleotide
cugagagcugcuugguggu

SEQ ID NO: 3074669 - RNA, 19 nt, Artificial Sequence
  Description of Artificial Sequence: Synthetic oligonucleotide
ccagcucucuuguguacac

SEQ ID NO: 3074670 - RNA, 19 nt, Artificial Sequence
  Description of Artificial Sequence: Synthetic oligonucleotide
cgucaugcuguguuccaag

SEQ ID NO: 3074671 - RNA, 19 nt, Artificial Sequence
  Description of Artificial Sequence: Synthetic oligonucleotide
ggcuugugugucaaccuca

SEQ ID NO: 3074672 - RNA, 19 nt, Artificial Sequence
  Description of Artificial Sequence: Synthetic oligonucleotide
ugucaaccucacugccuuu

SEQ ID NO: 3074673 - RNA, 19 nt, Artificial Sequence
  Description of Artificial Sequence: Synthetic oligonucleotide
gcuugugugucaaccucac

SEQ ID NO: 3074674 - RNA, 19 nt, Artificial Sequence
  Description of Artificial Sequence: Synthetic oligonucleotide
gcaugcacgauuggagaca

SEQ ID NO: 3074675 - RNA, 19 nt, Artificial Sequence
  Description of Artificial Sequence: Synthetic oligonucleotide
cucccuucuccagagaaau

SEQ ID NO: 3074676 - RNA, 19 nt, Artificial Sequence
  Description of Artificial Sequence: Synthetic oligonucleotide
cugcuugguggugguggag

SEQ ID NO: 3074677 - RNA, 19 nt, Artificial Sequence
  Description of Artificial Sequence: Synthetic oligonucleotide
guguuccaagaugaguccu

SEQ ID NO: 3074678 - RNA, 19 nt, Artificial Sequence
  Description of Artificial Sequence: Synthetic oligonucleotide
gaggccgaguuaguacuua

SEQ ID NO: 3074679 - RNA, 19 nt, Artificial Sequence
  Description of Artificial Sequence: Synthetic oligonucleotide
cagugugcuggaauagcau

SEQ ID NO: 3074680 - RNA, 19 nt, Artificial Sequence
  Description of Artificial Sequence: Synthetic oligonucleotide
cgaguuaguacuuaaucuu

SEQ ID NO: 3074681 - RNA, 19 nt, Artificial Sequence
  Description of Artificial Sequence: Synthetic oligonucleotide
gcugcuuggugguggugga

SEQ ID NO: 3074682 - RNA, 19 nt, Artificial Sequence
  Description of Artificial Sequence: Synthetic oligonucleotide
gcuguguuccaagaugagu

SEQ ID NO: 3074683 - RNA, 19 nt, Artificial Sequence
  Description of Artificial Sequence: Synthetic oligonucleotide
gcucucuuguguacacaac

SEQ ID NO: 3074684 - RNA, 19 nt, Artificial Sequence
  Description of Artificial Sequence: Synthetic oligonucleotide
ggaagaccugagaugauuu

SEQ ID NO: 3074685 - RNA, 19 nt, Artificial Sequence
  Description of Artificial Sequence: Synthetic oligonucleotide
guggugguggagagucguc

SEQ ID NO: 3074686 - RNA, 19 nt, Artificial Sequence
  Description of Artificial Sequence: Synthetic oligonucleotide
cuuuggaggccgaguuagu

SEQ ID NO: 3074687 - RNA, 19 nt, Artificial Sequence
  Description of Artificial Sequence: Synthetic oligonucleotide
cuugugugucaaccucacu

SEQ ID NO: 3074688 - RNA, 19 nt, Artificial Sequence
  Description of Artificial Sequence: Synthetic oligonucleotide
gccauccagcucucuugug

SEQ ID NO: 3074689 - RNA, 19 nt, Artificial Sequence
  Description of Artificial Sequence: Synthetic oligonucleotide
gguggugguggagagucgu

SEQ ID NO: 3074690 - RNA, 19 nt, Artificial Sequence
  Description of Artificial Sequence: Synthetic oligonucleotide
ccagagaaauggcuugugu

SEQ ID NO: 3074691 - RNA, 19 nt, Artificial Sequence
  Description of Artificial Sequence: Synthetic oligonucleotide
gguggagagucgucaugcu

SEQ ID NO: 3074692 - RNA, 19 nt, Artificial Sequence
  Description of Artificial Sequence: Synthetic oligonucleotide
cagcucucuuguguacaca

SEQ ID NO: 3074693 - RNA, 19 nt, Artificial Sequence
  Description of Artificial Sequence: Synthetic oligonucleotide
ggugguggagagucgucau

SEQ ID NO: 3074694 - RNA, 19 nt, Artificial Sequence
  Description of Artificial Sequence: Synthetic oligonucleotide
gagagucgucaugcugugu

SEQ ID NO: 3074695 - RNA, 19 nt, Artificial Sequence
  Description of Artificial Sequence: Synthetic oligonucleotide
cuugguggugguggagagu

SEQ ID NO: 3074696 - RNA, 19 nt, Artificial Sequence
  Description of Artificial Sequence: Synthetic oligonucleotide
gccuuuggaggccgaguua

SEQ ID NO: 3074697 - RNA, 19 nt, Artificial Sequence
  Description of Artificial Sequence: Synthetic oligonucleotide
cuggaauagcaugcacgau

SEQ ID NO: 3074698 - RNA, 19 nt, Artificial Sequence
  Description of Artificial Sequence: Synthetic oligonucleotide
cacugccuuuggaggccga

SEQ ID NO: 3074699 - RNA, 19 nt, Artificial Sequence
  Description of Artificial Sequence: Synthetic oligonucleotide
cugccuuuggaggccgagu

SEQ ID NO: 3074700 - RNA, 19 nt, Artificial Sequence
  Description of Artificial Sequence: Synthetic oligonucleotide
cugucucugagagcugcuu

SEQ ID NO: 3074701 - RNA, 19 nt, Artificial Sequence
  Description of Artificial Sequence: Synthetic oligonucleotide
augcacgauuggagacaaa

SEQ ID NO: 3074702 - RNA, 19 nt, Artificial Sequence
  Description of Artificial Sequence: Synthetic oligonucleotide
ggccgaguuaguacuuaau

SEQ ID NO: 3074703 - RNA, 19 nt, Artificial Sequence
  Description of Artificial Sequence: Synthetic oligonucleotide
cuaugccauccagcucucu

SEQ ID NO: 3074704 - RNA, 19 nt, Artificial Sequence
  Description of Artificial Sequence: Synthetic oligonucleotide
ccuguagauuuagcagagu

SEQ ID NO: 3074705 - RNA, 19 nt, Artificial Sequence
  Description of Artificial Sequence: Synthetic oligonucleotide
ggaggccgaguuaguacuu

SEQ ID NO: 3074706 - RNA, 19 nt, Artificial Sequence
  Description of Artificial Sequence: Synthetic oligonucleotide
ucuuguagcggcaggacgg

SEQ ID NO: 3074707 - RNA, 19 nt, Artificial Sequence
  Description of Artificial Sequence: Synthetic oligonucleotide
aggaucuucuuguagcggc

SEQ ID NO: 3074708 - RNA, 19 nt, Artificial Sequence
  Description of Artificial Sequence: Synthetic oligonucleotide
agucucgucguccagcgcc

SEQ ID NO: 3074709 - RNA, 19 nt, Artificial Sequence
  Description of Artificial Sequence: Synthetic oligonucleotide
cuucuugagagucucgucg

SEQ ID NO: 3074710 - RNA, 19 nt, Artificial Sequence
  Description of Artificial Sequence: Synthetic oligonucleotide
agcaucaccgcuugaagcg

SEQ ID NO: 3074711 - RNA, 19 nt, Artificial Sequence
  Description of Artificial Sequence: Synthetic oligonucleotide
uuuucgggagccacgauga

SEQ ID NO: 3074712 - RNA, 19 nt, Artificial Sequence
  Description of Artificial Sequence: Synthetic oligonucleotide
agcgccaggaagcagcggc

SEQ ID NO: 3074713 - RNA, 19 nt, Artificial Sequence
  Description of Artificial Sequence: Synthetic oligonucleotide
cuucuugagagccugcacc

SEQ ID NO: 3074714 - RNA, 19 nt, Artificial Sequence
  Description of Artificial Sequence: Synthetic oligonucleotide
ucgggagccacgaugagca

SEQ ID NO: 3074715 - RNA, 19 nt, Artificial Sequence
  Description of Artificial Sequence: Synthetic oligonucleotide
guaggugaugggcagaagc

SEQ ID NO: 3074716 - RNA, 19 nt, Artificial Sequence
  Description of Artificial Sequence: Synthetic oligonucleotide
cuugcucuucuugagagcc

SEQ ID NO: 3074717 - RNA, 19 nt, Artificial Sequence
  Description of Artificial Sequence: Synthetic oligonucleotide
uaggugaugggcagaagca

SEQ ID NO: 3074718 - RNA, 19 nt, Artificial Sequence
  Description of Artificial Sequence: Synthetic oligonucleotide
aaaggcccgggacaugcuc

SEQ ID NO: 3074719 - RNA, 19 nt, Artificial Sequence
  Description of Artificial Sequence: Synthetic oligonucleotide
ugagcuucuggaaggugcc

SEQ ID NO: 3074720 - RNA, 19 nt, Artificial Sequence
  Description of Artificial Sequence: Synthetic oligonucleotide
agagucucgucguccagcg

SEQ ID NO: 3074721 - RNA, 19 nt, Artificial Sequence
  Description of Artificial Sequence: Synthetic oligonucleotide
ucguccagcgccaggaagc

SEQ ID NO: 3074722 - RNA, 19 nt, Artificial Sequence
  Description of Artificial Sequence: Synthetic oligonucleotide
uguagcggcaggacggacc

SEQ ID NO: 3074723 - RNA, 19 nt, Artificial Sequence
  Description of Artificial Sequence: Synthetic oligonucleotide
cuuuucgggagccacgaug

SEQ ID NO: 3074724 - RNA, 19 nt, Artificial Sequence
  Description of Artificial Sequence: Synthetic oligonucleotide
uucuugagagccugcaccu

SEQ ID NO: 3074725 - RNA, 19 nt, Artificial Sequence
  Description of Artificial Sequence: Synthetic oligonucleotide
cacgguggugcucaaaggc

SEQ ID NO: 3074726 - RNA, 19 nt, Artificial Sequence
  Description of Artificial Sequence: Synthetic oligonucleotide
ucaaaggcccgggacaugc

SEQ ID NO: 3074727 - RNA, 19 nt, Artificial Sequence
  Description of Artificial Sequence: Synthetic oligonucleotide
cacacgguggugcucaaag

SEQ ID NO: 3074728 - RNA, 19 nt, Artificial Sequence
  Description of Artificial Sequence: Synthetic oligonucleotide
augcucuugagcuucugga

SEQ ID NO: 3074729 - RNA, 19 nt, Artificial Sequence
  Description of Artificial Sequence: Synthetic oligonucleotide
uucuugagagucucgucgu

SEQ ID NO: 3074730 - RNA, 19 nt, Artificial Sequence
  Description of Artificial Sequence: Synthetic oligonucleotide
cagcaucaccgcuugaagc

SEQ ID NO: 3074731 - RNA, 19 nt, Artificial Sequence
  Description of Artificial Sequence: Synthetic oligonucleotide
  modified_base (15)..(15): a, c, u, g, unknown or other
aggacggaccccgunagcg

SEQ ID NO: 3074732 - RNA, 19 nt, Artificial Sequence
  Description of Artificial Sequence: Synthetic oligonucleotide
uguuccgguccacacggug

SEQ ID NO: 3074733 - RNA, 19 nt, Artificial Sequence
  Description of Artificial Sequence: Synthetic oligonucleotide
uccgccagcuuuucgggag

SEQ ID NO: 3074734 - RNA, 19 nt, Artificial Sequence
  Description of Artificial Sequence: Synthetic oligonucleotide
uugagagucucgucgucca

SEQ ID NO: 3074735 - RNA, 19 nt, Artificial Sequence
  Description of Artificial Sequence: Synthetic oligonucleotide
ucuucuugagagccugcac

SEQ ID NO: 3074736 - RNA, 19 nt, Artificial Sequence
  Description of Artificial Sequence: Synthetic oligonucleotide
uccgcgaugggcgugguca

SEQ ID NO: 3074737 - RNA, 19 nt, Artificial Sequence
  Description of Artificial Sequence: Synthetic oligonucleotide
ugaagcgguaggugauggg

SEQ ID NO: 3074738 - RNA, 19 nt, Artificial Sequence
  Description of Artificial Sequence: Synthetic oligonucleotide
acgguggugcucaaaggcc

SEQ ID NO: 3074739 - RNA, 19 nt, Artificial Sequence
  Description of Artificial Sequence: Synthetic oligonucleotide
agaagcagcuugcucuucu

SEQ ID NO: 3074740 - RNA, 19 nt, Artificial Sequence
  Description of Artificial Sequence: Synthetic oligonucleotide
accguguuccgguccacac

SEQ ID NO: 3074741 - RNA, 19 nt, Artificial Sequence
  Description of Artificial Sequence: Synthetic oligonucleotide
aucuucuuguagcggcagg

SEQ ID NO: 3074742 - RNA, 19 nt, Artificial Sequence
  Description of Artificial Sequence: Synthetic oligonucleotide
cuugagagucucgucgucc

SEQ ID NO: 3074743 - RNA, 19 nt, Artificial Sequence
  Description of Artificial Sequence: Synthetic oligonucleotide
agcaggcgcuccuuggacg

SEQ ID NO: 3074744 - RNA, 19 nt, Artificial Sequence
  Description of Artificial Sequence: Synthetic oligonucleotide
gucagcgccaccguguucc

SEQ ID NO: 3074745 - RNA, 19 nt, Artificial Sequence
  Description of Artificial Sequence: Synthetic oligonucleotide
gccugcaccuucuugagag

SEQ ID NO: 3074746 - RNA, 19 nt, Artificial Sequence
  Description of Artificial Sequence: Synthetic oligonucleotide
agcagcuccgcgaugggcg

SEQ ID NO: 3074747 - RNA, 19 nt, Artificial Sequence
  Description of Artificial Sequence: Synthetic oligonucleotide
ugcucuugagcuucuggaa

SEQ ID NO: 3074748 - RNA, 19 nt, Artificial Sequence
  Description of Artificial Sequence: Synthetic oligonucleotide
guagcggcaggacggaccc

SEQ ID NO: 3074749 - RNA, 19 nt, Artificial Sequence
  Description of Artificial Sequence: Synthetic oligonucleotide
acacgguggugcucaaagg

SEQ ID NO: 3074750 - RNA, 19 nt, Artificial Sequence
  Description of Artificial Sequence: Synthetic oligonucleotide
uccuuggacgggucgaacu

SEQ ID NO: 3074751 - RNA, 19 nt, Artificial Sequence
  Description of Artificial Sequence: Synthetic oligonucleotide
uuggacgggucgaacuccc

SEQ ID NO: 3074752 - RNA, 19 nt, Artificial Sequence
  Description of Artificial Sequence: Synthetic oligonucleotide
gaugggcguggucagcgcc

SEQ ID NO: 3074753 - RNA, 19 nt, Artificial Sequence
  Description of Artificial Sequence: Synthetic oligonucleotide
ugcaccuucuugagagucu

SEQ ID NO: 3074754 - RNA, 19 nt, Artificial Sequence
  Description of Artificial Sequence: Synthetic oligonucleotide
agcgguaggugaugggcag

SEQ ID NO: 3074755 - RNA, 19 nt, Artificial Sequence
  Description of Artificial Sequence: Synthetic oligonucleotide
cuugagagccugcaccuuc

SEQ ID NO: 3074756 - RNA, 19 nt, Artificial Sequence
  Description of Artificial Sequence: Synthetic oligonucleotide
uugagagccugcaccuucu

SEQ ID NO: 3074757 - RNA, 19 nt, Artificial Sequence
  Description of Artificial Sequence: Synthetic oligonucleotide
ugagagucucgucguccag

SEQ ID NO: 3074758 - RNA, 19 nt, Artificial Sequence
  Description of Artificial Sequence: Synthetic oligonucleotide
guuccgguccacacggugg

SEQ ID NO: 3074759 - RNA, 19 nt, Artificial Sequence
  Description of Artificial Sequence: Synthetic oligonucleotide
cacgaugagcagcuccgcg

SEQ ID NO: 3074760 - RNA, 19 nt, Artificial Sequence
  Description of Artificial Sequence: Synthetic oligonucleotide
gcucuugagcuucuggaag

SEQ ID NO: 3074761 - RNA, 19 nt, Artificial Sequence
  Description of Artificial Sequence: Synthetic oligonucleotide
uucgggagccacgaugagc

SEQ ID NO: 3074762 - RNA, 19 nt, Artificial Sequence
  Description of Artificial Sequence: Synthetic oligonucleotide
ugagcagcuccgcgauggg

SEQ ID NO: 3074763 - RNA, 19 nt, Artificial Sequence
  Description of Artificial Sequence: Synthetic oligonucleotide
gagccugcaccuucuugag

SEQ ID NO: 3074764 - RNA, 19 nt, Artificial Sequence
  Description of Artificial Sequence: Synthetic oligonucleotide
gagagucucgucguccagc

SEQ ID NO: 3074765 - RNA, 19 nt, Artificial Sequence
  Description of Artificial Sequence: Synthetic oligonucleotide
aggugaugggcagaagcag

SEQ ID NO: 3074766 - RNA, 19 nt, Artificial Sequence
  Description of Artificial Sequence: Synthetic oligonucleotide
uuccgguccacacgguggu

SEQ ID NO: 3074767 - RNA, 19 nt, Artificial Sequence
  Description of Artificial Sequence: Synthetic oligonucleotide
ucuggaaggugcccaggau

SEQ ID NO: 3074768 - RNA, 19 nt, Artificial Sequence
  Description of Artificial Sequence: Synthetic oligonucleotide
ucuugagagucucgucguc

SEQ ID NO: 3074769 - RNA, 19 nt, Artificial Sequence
  Description of Artificial Sequence: Synthetic oligonucleotide
ccaggaucuucuuguagcg

SEQ ID NO: 3074770 - RNA, 19 nt, Artificial Sequence
  Description of Artificial Sequence: Synthetic oligonucleotide
uuucgggagccacgaugag

SEQ ID NO: 3074771 - RNA, 19 nt, Artificial Sequence
  Description of Artificial Sequence: Synthetic oligonucleotide
cagcuuuucgggagccacg

SEQ ID NO: 3074772 - RNA, 19 nt, Artificial Sequence
  Description of Artificial Sequence: Synthetic oligonucleotide
agcggcaggacggaccccg

SEQ ID NO: 3074773 - RNA, 19 nt, Artificial Sequence
  Description of Artificial Sequence: Synthetic oligonucleotide
cuuggacgggucgaacucc

SEQ ID NO: 3074774 - RNA, 19 nt, Artificial Sequence
  Description of Artificial Sequence: Synthetic oligonucleotide
ggcagaagcagcuugcucu

SEQ ID NO: 3074775 - RNA, 19 nt, Artificial Sequence
  Description of Artificial Sequence: Synthetic oligonucleotide
aagcgguaggugaugggca

SEQ ID NO: 3074776 - RNA, 19 nt, Artificial Sequence
  Description of Artificial Sequence: Synthetic oligonucleotide
gcgggaguacuccagcagg

SEQ ID NO: 3074777 - RNA, 19 nt, Artificial Sequence
  Description of Artificial Sequence: Synthetic oligonucleotide
agcgccaccguguuccggu

SEQ ID NO: 3074778 - RNA, 19 nt, Artificial Sequence
  Description of Artificial Sequence: Synthetic oligonucleotide
caccgcuugaagcgguagg

SEQ ID NO: 3074779 - RNA, 19 nt, Artificial Sequence
  Description of Artificial Sequence: Synthetic oligonucleotide
ggaguacuccagcaggcgc

SEQ ID NO: 3074780 - RNA, 19 nt, Artificial Sequence
  Description of Artificial Sequence: Synthetic oligonucleotide
ucgucguccagcgccagga

SEQ ID NO: 3074781 - RNA, 19 nt, Artificial Sequence
  Description of Artificial Sequence: Synthetic oligonucleotide
aguacuccagcaggcgcuc

SEQ ID NO: 3074782 - RNA, 19 nt, Artificial Sequence
  Description of Artificial Sequence: Synthetic oligonucleotide
uacuccagcaggcgcuccu

SEQ ID NO: 3074783 - RNA, 19 nt, Artificial Sequence
  Description of Artificial Sequence: Synthetic oligonucleotide
caggaucuucuuguagcgg

SEQ ID NO: 3074784 - RNA, 19 nt, Artificial Sequence
  Description of Artificial Sequence: Synthetic oligonucleotide
gaaggugcccaggaucuuc

SEQ ID NO: 3074785 - RNA, 19 nt, Artificial Sequence
  Description of Artificial Sequence: Synthetic oligonucleotide
aaggugcccaggaucuucu

SEQ ID NO: 3074786 - RNA, 19 nt, Artificial Sequence
  Description of Artificial Sequence: Synthetic oligonucleotide
ggugaugggcagaagcagc

SEQ ID NO: 3074787 - RNA, 19 nt, Artificial Sequence
  Description of Artificial Sequence: Synthetic oligonucleotide
accgcuugaagcgguaggu

SEQ ID NO: 3074788 - RNA, 19 nt, Artificial Sequence
  Description of Artificial Sequence: Synthetic oligonucleotide
agcuuuucgggagccacga

SEQ ID NO: 3074789 - RNA, 19 nt, Artificial Sequence
  Description of Artificial Sequence: Synthetic oligonucleotide
uugcucuucuugagagccu

SEQ ID NO: 3074790 - RNA, 19 nt, Artificial Sequence
  Description of Artificial Sequence: Synthetic oligonucleotide
gugcucaaaggcccgggac

SEQ ID NO: 3074791 - RNA, 19 nt, Artificial Sequence
  Description of Artificial Sequence: Synthetic oligonucleotide
gcagcaucaccgcuugaag

SEQ ID NO: 3074792 - RNA, 19 nt, Artificial Sequence
  Description of Artificial Sequence: Synthetic oligonucleotide
cguguuccgguccacacgg

SEQ ID NO: 3074793 - RNA, 19 nt, Artificial Sequence
  Description of Artificial Sequence: Synthetic oligonucleotide
  modified_base (9)..(9): a, c, u, g, unknown or other
gaccccgunagcguccuuc

SEQ ID NO: 3074794 - RNA, 19 nt, Artificial Sequence
  Description of Artificial Sequence: Synthetic oligonucleotide
  modified_base (16)..(16): a, c, u, g, unknown or other
caggacggaccccgunagc

SEQ ID NO: 3074795 - RNA, 19 nt, Artificial Sequence
  Description of Artificial Sequence: Synthetic oligonucleotide
gaugagcagcuccgcgaug

SEQ ID NO: 3074796 - RNA, 19 nt, Artificial Sequence
  Description of Artificial Sequence: Synthetic oligonucleotide
ucaccgcuugaagcgguag

SEQ ID NO: 3074797 - RNA, 19 nt, Artificial Sequence
  Description of Artificial Sequence: Synthetic oligonucleotide
gcaggcgcuccuuggacgg

SEQ ID NO: 3074798 - RNA, 19 nt, Artificial Sequence
  Description of Artificial Sequence: Synthetic oligonucleotide
ggcguggucagcgccaccg

SEQ ID NO: 3074799 - RNA, 19 nt, Artificial Sequence
  Description of Artificial Sequence: Synthetic oligonucleotide
ucagcgccaccguguuccg

SEQ ID NO: 3074800 - RNA, 19 nt, Artificial Sequence
  Description of Artificial Sequence: Synthetic oligonucleotide
ggugcccaggaucuucuug

SEQ ID NO: 3074801 - RNA, 19 nt, Artificial Sequence
  Description of Artificial Sequence: Synthetic oligonucleotide
gaagcagcggcgggaguac

SEQ ID NO: 3074802 - RNA, 19 nt, Artificial Sequence
  Description of Artificial Sequence: Synthetic oligonucleotide
  modified_base (12)..(12): a, c, u, g, unknown or other
acggaccccgunagcgucc

SEQ ID NO: 3074803 - RNA, 19 nt, Artificial Sequence
  Description of Artificial Sequence: Synthetic oligonucleotide
cuugagcuucuggaaggug

SEQ ID NO: 3074804 - RNA, 19 nt, Artificial Sequence
  Description of Artificial Sequence: Synthetic oligonucleotide
cugcaccuucuugagaguc

SEQ ID NO: 3074805 - RNA, 19 nt, Artificial Sequence
  Description of Artificial Sequence: Synthetic oligonucleotide
gugcccaggaucuucuugu

SEQ ID NO: 3074806 - RNA, 19 nt, Artificial Sequence
  Description of Artificial Sequence: Synthetic oligonucleotide
ggcgggaguacuccagcag

SEQ ID NO: 3074807 - RNA, 19 nt, Artificial Sequence
  Description of Artificial Sequence: Synthetic oligonucleotide
  modified_base (8)..(8): a, c, u, g, unknown or other
accccgunagcguccuuca

SEQ ID NO: 3074808 - RNA, 19 nt, Artificial Sequence
  Description of Artificial Sequence: Synthetic oligonucleotide
uggacgggucgaacucccc

SEQ ID NO: 3074809 - RNA, 19 nt, Artificial Sequence
  Description of Artificial Sequence: Synthetic oligonucleotide
  modified_base (13)..(13): a, c, u, g, unknown or other
gacggaccccgunagcguc

SEQ ID NO: 3074810 - RNA, 19 nt, Artificial Sequence
  Description of Artificial Sequence: Synthetic oligonucleotide
caggaagcagcggcgggag

SEQ ID NO: 3074811 - RNA, 19 nt, Artificial Sequence
  Description of Artificial Sequence: Synthetic oligonucleotide
gggaguacuccagcaggcg

SEQ ID NO: 3074812 - RNA, 19 nt, Artificial Sequence
  Description of Artificial Sequence: Synthetic oligonucleotide
agcuccgcgaugggcgugg

SEQ ID NO: 3074813 - RNA, 19 nt, Artificial Sequence
  Description of Artificial Sequence: Synthetic oligonucleotide
  modified_base (17)..(17): a, c, u, g, unknown or other
gcaggacggaccccgunag

SEQ ID NO: 3074814 - RNA, 19 nt, Artificial Sequence
  Description of Artificial Sequence: Synthetic oligonucleotide
uggucagcgccaccguguu

SEQ ID NO: 3074815 - RNA, 19 nt, Artificial Sequence
  Description of Artificial Sequence: Synthetic oligonucleotide
gcuugcucuucuugagagc

SEQ ID NO: 3074816 - RNA, 19 nt, Artificial Sequence
  Description of Artificial Sequence: Synthetic oligonucleotide
gguggugcucaaaggcccg

SEQ ID NO: 3074817 - RNA, 19 nt, Artificial Sequence
  Description of Artificial Sequence: Synthetic oligonucleotide
gaguacuccagcaggcgcu

SEQ ID NO: 3074818 - RNA, 19 nt, Artificial Sequence
  Description of Artificial Sequence: Synthetic oligonucleotide
ggacaugcucuugagcuuc

SEQ ID NO: 3074819 - RNA, 19 nt, Artificial Sequence
  Description of Artificial Sequence: Synthetic oligonucleotide
cucuucuugagagccugca

SEQ ID NO: 3074820 - RNA, 19 nt, Artificial Sequence
  Description of Artificial Sequence: Synthetic oligonucleotide
cucgucguccagcgccagg

SEQ ID NO: 3074821 - RNA, 19 nt, Artificial Sequence
  Description of Artificial Sequence: Synthetic oligonucleotide
guccacacgguggugcuca

SEQ ID NO: 3074822 - RNA, 19 nt, Artificial Sequence
  Description of Artificial Sequence: Synthetic oligonucleotide
gagcuucuggaaggugccc

SEQ ID NO: 3074823 - RNA, 19 nt, Artificial Sequence
  Description of Artificial Sequence: Synthetic oligonucleotide
gcaucaccgcuugaagcgg

SEQ ID NO: 3074824 - RNA, 19 nt, Artificial Sequence
  Description of Artificial Sequence: Synthetic oligonucleotide
cagcaggcgcuccuuggac

SEQ ID NO: 3074825 - RNA, 19 nt, Artificial Sequence
  Description of Artificial Sequence: Synthetic oligonucleotide
gagucucgucguccagcgc

SEQ ID NO: 3074826 - RNA, 19 nt, Artificial Sequence
  Description of Artificial Sequence: Synthetic oligonucleotide
gcgaugggcguggucagcg

SEQ ID NO: 3074827 - RNA, 19 nt, Artificial Sequence
  Description of Artificial Sequence: Synthetic oligonucleotide
agccugcaccuucuugaga

SEQ ID NO: 3074828 - RNA, 19 nt, Artificial Sequence
  Description of Artificial Sequence: Synthetic oligonucleotide
agcagcggcgggaguacuc

SEQ ID NO: 3074829 - RNA, 19 nt, Artificial Sequence
  Description of Artificial Sequence: Synthetic oligonucleotide
cggggcggcagcaucaccg

SEQ ID NO: 3074830 - RNA, 19 nt, Artificial Sequence
  Description of Artificial Sequence: Synthetic oligonucleotide
cagcuugcucuucuugaga

SEQ ID NO: 3074831 - RNA, 19 nt, Artificial Sequence
  Description of Artificial Sequence: Synthetic oligonucleotide
ugagagccugcaccuucuu

SEQ ID NO: 3074832 - RNA, 19 nt, Artificial Sequence
  Description of Artificial Sequence: Synthetic oligonucleotide
gcccaggaucuucuuguag

SEQ ID NO: 3074833 - RNA, 19 nt, Artificial Sequence
  Description of Artificial Sequence: Synthetic oligonucleotide
ugcccaggaucuucuugua

SEQ ID NO: 3074834 - RNA, 19 nt, Artificial Sequence
  Description of Artificial Sequence: Synthetic oligonucleotide
ccuuggacgggucgaacuc

SEQ ID NO: 3074835 - RNA, 19 nt, Artificial Sequence
  Description of Artificial Sequence: Synthetic oligonucleotide
ucuugagagccugcaccuu

SEQ ID NO: 3074836 - RNA, 19 nt, Artificial Sequence
  Description of Artificial Sequence: Synthetic oligonucleotide
gggagccacgaugagcagc

SEQ ID NO: 3074837 - RNA, 19 nt, Artificial Sequence
  Description of Artificial Sequence: Synthetic oligonucleotide
cgguggugcucaaaggccc

SEQ ID NO: 3074838 - RNA, 19 nt, Artificial Sequence
  Description of Artificial Sequence: Synthetic oligonucleotide
agcggcgggaguacuccag

SEQ ID NO: 3074839 - RNA, 19 nt, Artificial Sequence
  Description of Artificial Sequence: Synthetic oligonucleotide
ccguguuccgguccacacg

SEQ ID NO: 3074840 - RNA, 19 nt, Artificial Sequence
  Description of Artificial Sequence: Synthetic oligonucleotide
ugaugggcagaagcagcuu

SEQ ID NO: 3074841 - RNA, 19 nt, Artificial Sequence
  Description of Artificial Sequence: Synthetic oligonucleotide
cuuguagcggcaggacgga

SEQ ID NO: 3074842 - RNA, 19 nt, Artificial Sequence
  Description of Artificial Sequence: Synthetic oligonucleotide
caccuccgccagcuuuucg

SEQ ID NO: 3074843 - RNA, 19 nt, Artificial Sequence
  Description of Artificial Sequence: Synthetic oligonucleotide
  modified_base (18)..(18): a, c, u, g, unknown or other
ggcaggacggaccccguna

SEQ ID NO: 3074844 - RNA, 19 nt, Artificial Sequence
  Description of Artificial Sequence: Synthetic oligonucleotide
uuguagcggcaggacggac

SEQ ID NO: 3074845 - RNA, 19 nt, Artificial Sequence
  Description of Artificial Sequence: Synthetic oligonucleotide
ccagcuuuucgggagccac

SEQ ID NO: 3074846 - RNA, 19 nt, Artificial Sequence
  Description of Artificial Sequence: Synthetic oligonucleotide
ggcagcaucaccgcuugaa

SEQ ID NO: 3074847 - RNA, 19 nt, Artificial Sequence
  Description of Artificial Sequence: Synthetic oligonucleotide
ggugcucaaaggcccggga

SEQ ID NO: 3074848 - RNA, 19 nt, Artificial Sequence
  Description of Artificial Sequence: Synthetic oligonucleotide
ucucgucguccagcgccag

SEQ ID NO: 3074849 - RNA, 19 nt, Artificial Sequence
  Description of Artificial Sequence: Synthetic oligonucleotide
aagcagcggcgggaguacu

SEQ ID NO: 3074850 - RNA, 19 nt, Artificial Sequence
  Description of Artificial Sequence: Synthetic oligonucleotide
augggcguggucagcgcca

SEQ ID NO: 3074851 - RNA, 19 nt, Artificial Sequence
  Description of Artificial Sequence: Synthetic oligonucleotide
ggaucuucuuguagcggca

SEQ ID NO: 3074852 - RNA, 19 nt, Artificial Sequence
  Description of Artificial Sequence: Synthetic oligonucleotide
aggaagcagcggcgggagu

SEQ ID NO: 3074853 - RNA, 19 nt, Artificial Sequence
  Description of Artificial Sequence: Synthetic oligonucleotide
gcggcagcaucaccgcuug

SEQ ID NO: 3074854 - RNA, 19 nt, Artificial Sequence
  Description of Artificial Sequence: Synthetic oligonucleotide
gcagcggcgggaguacucc

SEQ ID NO: 3074855 - RNA, 19 nt, Artificial Sequence
  Description of Artificial Sequence: Synthetic oligonucleotide
ggagccacgaugagcagcu

SEQ ID NO: 3074856 - RNA, 19 nt, Artificial Sequence
  Description of Artificial Sequence: Synthetic oligonucleotide
cucaaaggcccgggacaug

SEQ ID NO: 3074857 - RNA, 19 nt, Artificial Sequence
  Description of Artificial Sequence: Synthetic oligonucleotide
gguaggugaugggcagaag

SEQ ID NO: 3074858 - RNA, 19 nt, Artificial Sequence
  Description of Artificial Sequence: Synthetic oligonucleotide
cgggacaugcucuugagcu

SEQ ID NO: 3074859 - RNA, 19 nt, Artificial Sequence
  Description of Artificial Sequence: Synthetic oligonucleotide
cuccuuggacgggucgaac

SEQ ID NO: 3074860 - RNA, 19 nt, Artificial Sequence
  Description of Artificial Sequence: Synthetic oligonucleotide
ggaagcagcggcgggagua

SEQ ID NO: 3074861 - RNA, 19 nt, Artificial Sequence
  Description of Artificial Sequence: Synthetic oligonucleotide
ccgggacaugcucuugagc

SEQ ID NO: 3074862 - RNA, 19 nt, Artificial Sequence
  Description of Artificial Sequence: Synthetic oligonucleotide
gggcagaagcagcuugcuc

SEQ ID NO: 3074863 - RNA, 19 nt, Artificial Sequence
  Description of Artificial Sequence: Synthetic oligonucleotide
cgcuugaagcgguagguga

SEQ ID NO: 3074864 - RNA, 19 nt, Artificial Sequence
  Description of Artificial Sequence: Synthetic oligonucleotide
  modified_base (14)..(14): a, c, u, g, unknown or other
ggacggaccccgunagcgu

SEQ ID NO: 3074865 - RNA, 19 nt, Artificial Sequence
  Description of Artificial Sequence: Synthetic oligonucleotide
uccgguccacacgguggug

SEQ ID NO: 3074866 - RNA, 19 nt, Artificial Sequence
  Description of Artificial Sequence: Synthetic oligonucleotide
gcggcgggaguacuccagc

SEQ ID NO: 3074867 - RNA, 19 nt, Artificial Sequence
  Description of Artificial Sequence: Synthetic oligonucleotide
cccgggacaugcucuugag

SEQ ID NO: 3074868 - RNA, 19 nt, Artificial Sequence
  Description of Artificial Sequence: Synthetic oligonucleotide
gucucgucguccagcgcca

SEQ ID NO: 3074869 - RNA, 19 nt, Artificial Sequence
  Description of Artificial Sequence: Synthetic oligonucleotide
guggucagcgccaccgugu

SEQ ID NO: 3074870 - RNA, 19 nt, Artificial Sequence
  Description of Artificial Sequence: Synthetic oligonucleotide
cagaagcagcuugcucuuc

SEQ ID NO: 3074871 - RNA, 19 nt, Artificial Sequence
  Description of Artificial Sequence: Synthetic oligonucleotide
uccacacgguggugcucaa

SEQ ID NO: 3074872 - RNA, 19 nt, Artificial Sequence
  Description of Artificial Sequence: Synthetic oligonucleotide
aggcccgggacaugcucuu

SEQ ID NO: 3074873 - RNA, 19 nt, Artificial Sequence
  Description of Artificial Sequence: Synthetic oligonucleotide
gcgcuccuuggacgggucg

SEQ ID NO: 3074874 - RNA, 19 nt, Artificial Sequence
  Description of Artificial Sequence: Synthetic oligonucleotide
guacuccagcaggcgcucc

SEQ ID NO: 3074875 - RNA, 19 nt, Artificial Sequence
  Description of Artificial Sequence: Synthetic oligonucleotide
aggcgcuccuuggacgggu

SEQ ID NO: 3074876 - RNA, 19 nt, Artificial Sequence
  Description of Artificial Sequence: Synthetic oligonucleotide
ccgguccacacgguggugc

SEQ ID NO: 3074877 - RNA, 19 nt, Artificial Sequence
  Description of Artificial Sequence: Synthetic oligonucleotide
gcgccaggaagcagcggcg

SEQ ID NO: 3074878 - RNA, 19 nt, Artificial Sequence
  Description of Artificial Sequence: Synthetic oligonucleotide
caucaccgcuugaagcggu

SEQ ID NO: 3074879 - RNA, 19 nt, Artificial Sequence
  Description of Artificial Sequence: Synthetic oligonucleotide
gccaccguguuccggucca

SEQ ID NO: 3074880 - RNA, 19 nt, Artificial Sequence
  Description of Artificial Sequence: Synthetic oligonucleotide
caggcgcuccuuggacggg

SEQ ID NO: 3074881 - RNA, 19 nt, Artificial Sequence
  Description of Artificial Sequence: Synthetic oligonucleotide
guccagcgccaggaagcag

SEQ ID NO: 3074882 - RNA, 19 nt, Artificial Sequence
  Description of Artificial Sequence: Synthetic oligonucleotide
aggugcccaggaucuucuu

SEQ ID NO: 3074883 - RNA, 19 nt, Artificial Sequence
  Description of Artificial Sequence: Synthetic oligonucleotide
gacaugcucuugagcuucu

SEQ ID NO: 3074884 - RNA, 19 nt, Artificial Sequence
  Description of Artificial Sequence: Synthetic oligonucleotide
gcccgggacaugcucuuga

SEQ ID NO: 3074885 - RNA, 19 nt, Artificial Sequence
  Description of Artificial Sequence: Synthetic oligonucleotide
gcucuucuugagagccugc

SEQ ID NO: 3074886 - RNA, 19 nt, Artificial Sequence
  Description of Artificial Sequence: Synthetic oligonucleotide
cagcgccaccguguuccgg

SEQ ID NO: 3074887 - RNA, 19 nt, Artificial Sequence
  Description of Artificial Sequence: Synthetic oligonucleotide
  modified_base (7)..(7): a, c, u, g, unknown or other
ccccgunagcguccuucac

SEQ ID NO: 3074888 - RNA, 19 nt, Artificial Sequence
  Description of Artificial Sequence: Synthetic oligonucleotide
cagcgccaggaagcagcgg

SEQ ID NO: 3074889 - RNA, 19 nt, Artificial Sequence
  Description of Artificial Sequence: Synthetic oligonucleotide
aucaccgcuugaagcggua

SEQ ID NO: 3074890 - RNA, 19 nt, Artificial Sequence
  Description of Artificial Sequence: Synthetic oligonucleotide
uagcggcaggacggacccc

SEQ ID NO: 3074891 - RNA, 19 nt, Artificial Sequence
  Description of Artificial Sequence: Synthetic oligonucleotide
caccguguuccgguccaca

SEQ ID NO: 3074892 - RNA, 19 nt, Artificial Sequence
  Description of Artificial Sequence: Synthetic oligonucleotide
ccgccagcuuuucgggagc

SEQ ID NO: 3074893 - RNA, 19 nt, Artificial Sequence
  Description of Artificial Sequence: Synthetic oligonucleotide
ccgcuugaagcgguaggug

SEQ ID NO: 3074894 - RNA, 19 nt, Artificial Sequence
  Description of Artificial Sequence: Synthetic oligonucleotide
ccagcaggcgcuccuugga

SEQ ID NO: 3074895 - RNA, 19 nt, Artificial Sequence
  Description of Artificial Sequence: Synthetic oligonucleotide
ccacgaugagcagcuccgc

SEQ ID NO: 3074896 - RNA, 19 nt, Artificial Sequence
  Description of Artificial Sequence: Synthetic oligonucleotide
cguggucagcgccaccgug

SEQ ID NO: 3074897 - RNA, 19 nt, Artificial Sequence
  Description of Artificial Sequence: Synthetic oligonucleotide
gcagaagcagcuugcucuu

SEQ ID NO: 3074898 - RNA, 19 nt, Artificial Sequence
  Description of Artificial Sequence: Synthetic oligonucleotide
gcuugaagcgguaggugau

SEQ ID NO: 3074899 - RNA, 19 nt, Artificial Sequence
  Description of Artificial Sequence: Synthetic oligonucleotide
cagcggcgggaguacucca

SEQ ID NO: 3074900 - RNA, 19 nt, Artificial Sequence
  Description of Artificial Sequence: Synthetic oligonucleotide
caaaggcccgggacaugcu

SEQ ID NO: 3074901 - RNA, 19 nt, Artificial Sequence
  Description of Artificial Sequence: Synthetic oligonucleotide
ccgcgaugggcguggucag

SEQ ID NO: 3074902 - RNA, 19 nt, Artificial Sequence
  Description of Artificial Sequence: Synthetic oligonucleotide
cuccgcgaugggcgugguc

SEQ ID NO: 3074903 - RNA, 19 nt, Artificial Sequence
  Description of Artificial Sequence: Synthetic oligonucleotide
gggacaugcucuugagcuu

SEQ ID NO: 3074904 - RNA, 19 nt, Artificial Sequence
  Description of Artificial Sequence: Synthetic oligonucleotide
ggucagcgccaccguguuc

SEQ ID NO: 3074905 - RNA, 19 nt, Artificial Sequence
  Description of Artificial Sequence: Synthetic oligonucleotide
cgaugggcguggucagcgc

SEQ ID NO: 3074906 - RNA, 19 nt, Artificial Sequence
  Description of Artificial Sequence: Synthetic oligonucleotide
gagccacgaugagcagcuc

SEQ ID NO: 3074907 - RNA, 19 nt, Artificial Sequence
  Description of Artificial Sequence: Synthetic oligonucleotide
cagcuccgcgaugggcgug

SEQ ID NO: 3074908 - RNA, 19 nt, Artificial Sequence
  Description of Artificial Sequence: Synthetic oligonucleotide
gguccacacgguggugcuc

SEQ ID NO: 3074909 - RNA, 19 nt, Artificial Sequence
  Description of Artificial Sequence: Synthetic oligonucleotide
gcuccuuggacgggucgaa

SEQ ID NO: 3074910 - RNA, 19 nt, Artificial Sequence
  Description of Artificial Sequence: Synthetic oligonucleotide
gcgguaggugaugggcaga

SEQ ID NO: 3074911 - RNA, 19 nt, Artificial Sequence
  Description of Artificial Sequence: Synthetic oligonucleotide
gcggggcggcagcaucacc

SEQ ID NO: 3074912 - RNA, 19 nt, Artificial Sequence
  Description of Artificial Sequence: Synthetic oligonucleotide
gcagcuccgcgaugggcgu

SEQ ID NO: 3074913 - RNA, 19 nt, Artificial Sequence
  Description of Artificial Sequence: Synthetic oligonucleotide
cgccaccguguuccggucc

SEQ ID NO: 3074914 - RNA, 19 nt, Artificial Sequence
  Description of Artificial Sequence: Synthetic oligonucleotide
gccagcuuuucgggagcca

SEQ ID NO: 3074915 - RNA, 19 nt, Artificial Sequence
  Description of Artificial Sequence: Synthetic oligonucleotide
ggcccgggacaugcucuug

SEQ ID NO: 3074916 - RNA, 19 nt, Artificial Sequence
  Description of Artificial Sequence: Synthetic oligonucleotide
gggcguggucagcgccacc

SEQ ID NO: 3074917 - RNA, 19 nt, Artificial Sequence
  Description of Artificial Sequence: Synthetic oligonucleotide
cgccagcuuuucgggagcc

SEQ ID NO: 3074918 - RNA, 19 nt, Artificial Sequence
  Description of Artificial Sequence: Synthetic oligonucleotide
ggcgcuccuuggacggguc

SEQ ID NO: 3074919 - RNA, 19 nt, Artificial Sequence
  Description of Artificial Sequence: Synthetic oligonucleotide
gcgccaccguguuccgguc

SEQ ID NO: 3074920 - RNA, 19 nt, Artificial Sequence
  Description of Artificial Sequence: Synthetic oligonucleotide
ggcggcagcaucaccgcuu

SEQ ID NO: 3074921 - RNA, 19 nt, Artificial Sequence
  Description of Artificial Sequence: Synthetic oligonucleotide
ccugcaccuucuugagagu

SEQ ID NO: 3074922 - RNA, 19 nt, Artificial Sequence
  Description of Artificial Sequence: Synthetic oligonucleotide
cgggagccacgaugagcag

SEQ ID NO: 3074923 - RNA, 19 nt, Artificial Sequence
  Description of Artificial Sequence: Synthetic oligonucleotide
gcuuuucgggagccacgau

SEQ ID NO: 3074924 - RNA, 19 nt, Artificial Sequence
  Description of Artificial Sequence: Synthetic oligonucleotide
cggcgggaguacuccagca

SEQ ID NO: 3074925 - RNA, 19 nt, Artificial Sequence
  Description of Artificial Sequence: Synthetic oligonucleotide
guguuccgguccacacggu

SEQ ID NO: 3074926 - RNA, 19 nt, Artificial Sequence
  Description of Artificial Sequence: Synthetic oligonucleotide
cgguaggugaugggcagaa

SEQ ID NO: 3074927 - RNA, 19 nt, Artificial Sequence
  Description of Artificial Sequence: Synthetic oligonucleotide
cgaugagcagcuccgcgau

SEQ ID NO: 3074928 - RNA, 19 nt, Artificial Sequence
  Description of Artificial Sequence: Synthetic oligonucleotide
ccaccuccgccagcuuuuc

SEQ ID NO: 3074929 - RNA, 19 nt, Artificial Sequence
  Description of Artificial Sequence: Synthetic oligonucleotide
cgcgaugggcguggucagc

SEQ ID NO: 3074930 - RNA, 19 nt, Artificial Sequence
  Description of Artificial Sequence: Synthetic oligonucleotide
cguccagcgccaggaagca

SEQ ID NO: 3074931 - RNA, 19 nt, Artificial Sequence
  Description of Artificial Sequence: Synthetic oligonucleotide
gggcggcagcaucaccgcu

SEQ ID NO: 3074932 - RNA, 19 nt, Artificial Sequence
  Description of Artificial Sequence: Synthetic oligonucleotide
cgcuccuuggacgggucga

SEQ ID NO: 3074933 - RNA, 19 nt, Artificial Sequence
  Description of Artificial Sequence: Synthetic oligonucleotide
cccaccuccgccagcuuuu

SEQ ID NO: 3074934 - RNA, 19 nt, Artificial Sequence
  Description of Artificial Sequence: Synthetic oligonucleotide
ccaccguguuccgguccac

SEQ ID NO: 3074935 - RNA, 19 nt, Artificial Sequence
  Description of Artificial Sequence: Synthetic oligonucleotide
gcguggucagcgccaccgu

SEQ ID NO: 3074936 - RNA, 19 nt, Artificial Sequence
  Description of Artificial Sequence: Synthetic oligonucleotide
ccacacgguggugcucaaa

SEQ ID NO: 3074937 - RNA, 19 nt, Artificial Sequence
  Description of Artificial Sequence: Synthetic oligonucleotide
cgguccacacgguggugcu

SEQ ID NO: 3074938 - RNA, 19 nt, Artificial Sequence
  Description of Artificial Sequence: Synthetic oligonucleotide
cgucguccagcgccaggaa

SEQ ID NO: 3074939 - RNA, 19 nt, Artificial Sequence
  Description of Artificial Sequence: Synthetic oligonucleotide
ccccaccuccgccagcuuu

SEQ ID NO: 3074940 - RNA, 19 nt, Artificial Sequence
  Description of Artificial Sequence: Synthetic oligonucleotide
  modified_base (10)..(10): a, c, u, g, unknown or other
ggaccccgunagcguccuu

SEQ ID NO: 3074941 - RNA, 19 nt, Artificial Sequence
  Description of Artificial Sequence: Synthetic oligonucleotide
  modified_base (19)..(19): a, c, u, g, unknown or other
cggcaggacggaccccgun

SEQ ID NO: 3074942 - RNA, 19 nt, Artificial Sequence
  Description of Artificial Sequence: Synthetic oligonucleotide
gcggcaggacggaccccgu

SEQ ID NO: 3074943 - RNA, 19 nt, Artificial Sequence
  Description of Artificial Sequence: Synthetic oligonucleotide
cggcagcaucaccgcuuga

SEQ ID NO: 3074944 - RNA, 19 nt, Artificial Sequence
  Description of Artificial Sequence: Synthetic oligonucleotide
gcuccgcgaugggcguggu

SEQ ID NO: 3074945 - RNA, 19 nt, Artificial Sequence
  Description of Artificial Sequence: Synthetic oligonucleotide
  modified_base (11)..(11): a, c, u, g, unknown or other
cggaccccgunagcguccu

SEQ ID NO: 3074946 - RNA, 19 nt, Artificial Sequence
  Description of Artificial Sequence: Synthetic oligonucleotide
acugugaguagccuggugc

SEQ ID NO: 3074947 - RNA, 19 nt, Artificial Sequence
  Description of Artificial Sequence: Synthetic oligonucleotide
aacaacaagaacauagcuc

SEQ ID NO: 3074948 - RNA, 19 nt, Artificial Sequence
  Description of Artificial Sequence: Synthetic oligonucleotide
aagucgagcacucaggcug

SEQ ID NO: 3074949 - RNA, 19 nt, Artificial Sequence
  Description of Artificial Sequence: Synthetic oligonucleotide
auaagucgagcacucaggc

SEQ ID NO: 3074950 - RNA, 19 nt, Artificial Sequence
  Description of Artificial Sequence: Synthetic oligonucleotide
cuaaucaggacuuacaaga

SEQ ID NO: 3074951 - RNA, 19 nt, Artificial Sequence
  Description of Artificial Sequence: Synthetic oligonucleotide
uagaacugcuaauaaaugc

SEQ ID NO: 3074952 - RNA, 19 nt, Artificial Sequence
  Description of Artificial Sequence: Synthetic oligonucleotide
acugguugcacuuguaagg

SEQ ID NO: 3074953 - RNA, 19 nt, Artificial Sequence
  Description of Artificial Sequence: Synthetic oligonucleotide
ugaacaacaagaacauagc

SEQ ID NO: 3074954 - RNA, 19 nt, Artificial Sequence
  Description of Artificial Sequence: Synthetic oligonucleotide
gugaacaacaagaacauag

SEQ ID NO: 3074955 - RNA, 19 nt, Artificial Sequence
  Description of Artificial Sequence: Synthetic oligonucleotide
acuuacaagacucaucacu

SEQ ID NO: 3074956 - RNA, 19 nt, Artificial Sequence
  Description of Artificial Sequence: Synthetic oligonucleotide
cuaauaaaugcuuucccac

SEQ ID NO: 3074957 - RNA, 19 nt, Artificial Sequence
  Description of Artificial Sequence: Synthetic oligonucleotide
cuuacaagacucaucacug

SEQ ID NO: 3074958 - RNA, 19 nt, Artificial Sequence
  Description of Artificial Sequence: Synthetic oligonucleotide
uuagaacugcuaauaaaug

SEQ ID NO: 3074959 - RNA, 19 nt, Artificial Sequence
  Description of Artificial Sequence: Synthetic oligonucleotide
ucagacucugaacuaauca

SEQ ID NO: 3074960 - RNA, 19 nt, Artificial Sequence
  Description of Artificial Sequence: Synthetic oligonucleotide
cuggugaacaacaagaaca

SEQ ID NO: 3074961 - RNA, 19 nt, Artificial Sequence
  Description of Artificial Sequence: Synthetic oligonucleotide
aacuaaucaggacuuacaa

SEQ ID NO: 3074962 - RNA, 19 nt, Artificial Sequence
  Description of Artificial Sequence: Synthetic oligonucleotide
ugcugagugaagcaggagc

SEQ ID NO: 3074963 - RNA, 19 nt, Artificial Sequence
  Description of Artificial Sequence: Synthetic oligonucleotide
ugaugcugagugaagcagg

SEQ ID NO: 3074964 - RNA, 19 nt, Artificial Sequence
  Description of Artificial Sequence: Synthetic oligonucleotide
acuaaucaggacuuacaag

SEQ ID NO: 3074965 - RNA, 19 nt, Artificial Sequence
  Description of Artificial Sequence: Synthetic oligonucleotide
gauaagucgagcacucagg

SEQ ID NO: 3074966 - RNA, 19 nt, Artificial Sequence
  Description of Artificial Sequence: Synthetic oligonucleotide
uacaagacucaucacugug

SEQ ID NO: 3074967 - RNA, 19 nt, Artificial Sequence
  Description of Artificial Sequence: Synthetic oligonucleotide
uguccucuggugaacaaca

SEQ ID NO: 3074968 - RNA, 19 nt, Artificial Sequence
  Description of Artificial Sequence: Synthetic oligonucleotide
ucugaacuaaucaggacuu

SEQ ID NO: 3074969 - RNA, 19 nt, Artificial Sequence
  Description of Artificial Sequence: Synthetic oligonucleotide
cugguuacacucauagggc

SEQ ID NO: 3074970 - RNA, 19 nt, Artificial Sequence
  Description of Artificial Sequence: Synthetic oligonucleotide
gaagcaggagcucugccug

SEQ ID NO: 3074971 - RNA, 19 nt, Artificial Sequence
  Description of Artificial Sequence: Synthetic oligonucleotide
uaaucaggacuuacaagac

SEQ ID NO: 3074972 - RNA, 19 nt, Artificial Sequence
  Description of Artificial Sequence: Synthetic oligonucleotide
acucugaacuaaucaggac

SEQ ID NO: 3074973 - RNA, 19 nt, Artificial Sequence
  Description of Artificial Sequence: Synthetic oligonucleotide
uggacgauaagucgagcac

SEQ ID NO: 3074974 - RNA, 19 nt, Artificial Sequence
  Description of Artificial Sequence: Synthetic oligonucleotide
agacucaucacugugagua

SEQ ID NO: 3074975 - RNA, 19 nt, Artificial Sequence
  Description of Artificial Sequence: Synthetic oligonucleotide
uggugaacaacaagaacau

SEQ ID NO: 3074976 - RNA, 19 nt, Artificial Sequence
  Description of Artificial Sequence: Synthetic oligonucleotide
ggacuuacaagacucauca

SEQ ID NO: 3074977 - RNA, 19 nt, Artificial Sequence
  Description of Artificial Sequence: Synthetic oligonucleotide
agacucugaacuaaucagg

SEQ ID NO: 3074978 - RNA, 19 nt, Artificial Sequence
  Description of Artificial Sequence: Synthetic oligonucleotide
cuuagaacugcuaauaaau

SEQ ID NO: 3074979 - RNA, 19 nt, Artificial Sequence
  Description of Artificial Sequence: Synthetic oligonucleotide
ucugaugcugagugaagca

SEQ ID NO: 3074980 - RNA, 19 nt, Artificial Sequence
  Description of Artificial Sequence: Synthetic oligonucleotide
ugaagcaggagcucugccu

SEQ ID NO: 3074981 - RNA, 19 nt, Artificial Sequence
  Description of Artificial Sequence: Synthetic oligonucleotide
uagccuggugccuacugcg

SEQ ID NO: 3074982 - RNA, 19 nt, Artificial Sequence
  Description of Artificial Sequence: Synthetic oligonucleotide
uccucuggugaacaacaag

SEQ ID NO: 3074983 - RNA, 19 nt, Artificial Sequence
  Description of Artificial Sequence: Synthetic oligonucleotide
ugaacuaaucaggacuuac

SEQ ID NO: 3074984 - RNA, 19 nt, Artificial Sequence
  Description of Artificial Sequence: Synthetic oligonucleotide
ucaggcugaagguuuuccc

SEQ ID NO: 3074985 - RNA, 19 nt, Artificial Sequence
  Description of Artificial Sequence: Synthetic oligonucleotide
acucaucacugugaguagc

SEQ ID NO: 3074986 - RNA, 19 nt, Artificial Sequence
  Description of Artificial Sequence: Synthetic oligonucleotide
cugcuaauaaaugcuuucc

SEQ ID NO: 3074987 - RNA, 19 nt, Artificial Sequence
  Description of Artificial Sequence: Synthetic oligonucleotide
ugguuacacucauagggcu

SEQ ID NO: 3074988 - RNA, 19 nt, Artificial Sequence
  Description of Artificial Sequence: Synthetic oligonucleotide
uagggcuuuucuccuagug

SEQ ID NO: 3074989 - RNA, 19 nt, Artificial Sequence
  Description of Artificial Sequence: Synthetic oligonucleotide
cacugguugcacuuguaag

SEQ ID NO: 3074990 - RNA, 19 nt, Artificial Sequence
  Description of Artificial Sequence: Synthetic oligonucleotide
agugaagcaggagcucugc

SEQ ID NO: 3074991 - RNA, 19 nt, Artificial Sequence
  Description of Artificial Sequence: Synthetic oligonucleotide
ugguggacgauaagucgag

SEQ ID NO: 3074992 - RNA, 19 nt, Artificial Sequence
  Description of Artificial Sequence: Synthetic oligonucleotide
cugugaguagccuggugcc

SEQ ID NO: 3074993 - RNA, 19 nt, Artificial Sequence
  Description of Artificial Sequence: Synthetic oligonucleotide
uuacaagacucaucacugu

SEQ ID NO: 3074994 - RNA, 19 nt, Artificial Sequence
  Description of Artificial Sequence: Synthetic oligonucleotide
gcuaauaaaugcuuuccca

SEQ ID NO: 3074995 - RNA, 19 nt, Artificial Sequence
  Description of Artificial Sequence: Synthetic oligonucleotide
gaacaacaagaacauagcu

SEQ ID NO: 3074996 - RNA, 19 nt, Artificial Sequence
  Description of Artificial Sequence: Synthetic oligonucleotide
agggcuuuucuccuagugu

SEQ ID NO: 3074997 - RNA, 19 nt, Artificial Sequence
  Description of Artificial Sequence: Synthetic oligonucleotide
uuuucuccuaguguguguc

SEQ ID NO: 3074998 - RNA, 19 nt, Artificial Sequence
  Description of Artificial Sequence: Synthetic oligonucleotide
uaugaguucgcugguggac

SEQ ID NO: 3074999 - RNA, 19 nt, Artificial Sequence
  Description of Artificial Sequence: Synthetic oligonucleotide
gaaggucuugccacacugg

SEQ ID NO: 3075000 - RNA, 19 nt, Artificial Sequence
  Description of Artificial Sequence: Synthetic oligonucleotide
gguccucugaugcugagug

SEQ ID NO: 3075001 - RNA, 19 nt, Artificial Sequence
  Description of Artificial Sequence: Synthetic oligonucleotide
gaacuaaucaggacuuaca

SEQ ID NO: 3075002 - RNA, 19 nt, Artificial Sequence
  Description of Artificial Sequence: Synthetic oligonucleotide
gacucugaacuaaucagga

SEQ ID NO: 3075003 - RNA, 19 nt, Artificial Sequence
  Description of Artificial Sequence: Synthetic oligonucleotide
gcugguggacgauaagucg

SEQ ID NO: 3075004 - RNA, 19 nt, Artificial Sequence
  Description of Artificial Sequence: Synthetic oligonucleotide
gacucaucacugugaguag

SEQ ID NO: 3075005 - RNA, 19 nt, Artificial Sequence
  Description of Artificial Sequence: Synthetic oligonucleotide
cucugaugcugagugaagc

SEQ ID NO: 3075006 - RNA, 19 nt, Artificial Sequence
  Description of Artificial Sequence: Synthetic oligonucleotide
uguggguccucugaugcug

SEQ ID NO: 3075007 - RNA, 19 nt, Artificial Sequence
  Description of Artificial Sequence: Synthetic oligonucleotide
acacuggcugcacucguag

SEQ ID NO: 3075008 - RNA, 19 nt, Artificial Sequence
  Description of Artificial Sequence: Synthetic oligonucleotide
cucugaacuaaucaggacu

SEQ ID NO: 3075009 - RNA, 19 nt, Artificial Sequence
  Description of Artificial Sequence: Synthetic oligonucleotide
gggcuuuucuccuagugug

SEQ ID NO: 3075010 - RNA, 19 nt, Artificial Sequence
  Description of Artificial Sequence: Synthetic oligonucleotide
aggacuuacaagacucauc

SEQ ID NO: 3075011 - RNA, 19 nt, Artificial Sequence
  Description of Artificial Sequence: Synthetic oligonucleotide
cugaugcugagugaagcag

SEQ ID NO: 3075012 - RNA, 19 nt, Artificial Sequence
  Description of Artificial Sequence: Synthetic oligonucleotide
uaagucgagcacucaggcu

SEQ ID NO: 3075013 - RNA, 19 nt, Artificial Sequence
  Description of Artificial Sequence: Synthetic oligonucleotide
uuucuccuagugugugucc

SEQ ID NO: 3075014 - RNA, 19 nt, Artificial Sequence
  Description of Artificial Sequence: Synthetic oligonucleotide
ugcgcuuagaacugcuaau

SEQ ID NO: 3075015 - RNA, 19 nt, Artificial Sequence
  Description of Artificial Sequence: Synthetic oligonucleotide
aagacucaucacugugagu

SEQ ID NO: 3075016 - RNA, 19 nt, Artificial Sequence
  Description of Artificial Sequence: Synthetic oligonucleotide
guggacgauaagucgagca

SEQ ID NO: 3075017 - RNA, 19 nt, Artificial Sequence
  Description of Artificial Sequence: Synthetic oligonucleotide
uccucugaugcugagugaa

SEQ ID NO: 3075018 - RNA, 19 nt, Artificial Sequence
  Description of Artificial Sequence: Synthetic oligonucleotide
cugguggacgauaagucga

SEQ ID NO: 3075019 - RNA, 19 nt, Artificial Sequence
  Description of Artificial Sequence: Synthetic oligonucleotide
acaagacucaucacuguga

SEQ ID NO: 3075020 - RNA, 19 nt, Artificial Sequence
  Description of Artificial Sequence: Synthetic oligonucleotide
acacugguugcacuuguaa

SEQ ID NO: 3075021 - RNA, 19 nt, Artificial Sequence
  Description of Artificial Sequence: Synthetic oligonucleotide
guagccuggugccuacugc

SEQ ID NO: 3075022 - RNA, 19 nt, Artificial Sequence
  Description of Artificial Sequence: Synthetic oligonucleotide
ucgcugguggacgauaagu

SEQ ID NO: 3075023 - RNA, 19 nt, Artificial Sequence
  Description of Artificial Sequence: Synthetic oligonucleotide
gaugcugagugaagcagga

SEQ ID NO: 3075024 - RNA, 19 nt, Artificial Sequence
  Description of Artificial Sequence: Synthetic oligonucleotide
gacgauaagucgagcacuc

SEQ ID NO: 3075025 - RNA, 19 nt, Artificial Sequence
  Description of Artificial Sequence: Synthetic oligonucleotide
uucgcugguggacgauaag

SEQ ID NO: 3075026 - RNA, 19 nt, Artificial Sequence
  Description of Artificial Sequence: Synthetic oligonucleotide
ucacgcucagacucugaac

SEQ ID NO: 3075027 - RNA, 19 nt, Artificial Sequence
  Description of Artificial Sequence: Synthetic oligonucleotide
gacuuacaagacucaucac

SEQ ID NO: 3075028 - RNA, 19 nt, Artificial Sequence
  Description of Artificial Sequence: Synthetic oligonucleotide
uucuccuaguguguguccu

SEQ ID NO: 3075029 - RNA, 19 nt, Artificial Sequence
  Description of Artificial Sequence: Synthetic oligonucleotide
cucagacucugaacuaauc

SEQ ID NO: 3075030 - RNA, 19 nt, Artificial Sequence
  Description of Artificial Sequence: Synthetic oligonucleotide
ccucuggugaacaacaaga

SEQ ID NO: 3075031 - RNA, 19 nt, Artificial Sequence
  Description of Artificial Sequence: Synthetic oligonucleotide
uacugcgcuuagaacugcu

SEQ ID NO: 3075032 - RNA, 19 nt, Artificial Sequence
  Description of Artificial Sequence: Synthetic oligonucleotide
caggcugaagguuuuccca

SEQ ID NO: 3075033 - RNA, 19 nt, Artificial Sequence
  Description of Artificial Sequence: Synthetic oligonucleotide
cgagcacucaggcugaagg

SEQ ID NO: 3075034 - RNA, 19 nt, Artificial Sequence
  Description of Artificial Sequence: Synthetic oligonucleotide
cacgcucagacucugaacu

SEQ ID NO: 3075035 - RNA, 19 nt, Artificial Sequence
  Description of Artificial Sequence: Synthetic oligonucleotide
gcuuagaacugcuaauaaa

SEQ ID NO: 3075036 - RNA, 19 nt, Artificial Sequence
  Description of Artificial Sequence: Synthetic oligonucleotide
aagcaggagcucugccuga

SEQ ID NO: 3075037 - RNA, 19 nt, Artificial Sequence
  Description of Artificial Sequence: Synthetic oligonucleotide
ccuaguguguguccucugg

SEQ ID NO: 3075038 - RNA, 19 nt, Artificial Sequence
  Description of Artificial Sequence: Synthetic oligonucleotide
ugaguagccuggugccuac

SEQ ID NO: 3075039 - RNA, 19 nt, Artificial Sequence
  Description of Artificial Sequence: Synthetic oligonucleotide
gugccuacugcgcuuagaa

SEQ ID NO: 3075040 - RNA, 19 nt, Artificial Sequence
  Description of Artificial Sequence: Synthetic oligonucleotide
ugccuacugcgcuuagaac

SEQ ID NO: 3075041 - RNA, 19 nt, Artificial Sequence
  Description of Artificial Sequence: Synthetic oligonucleotide
gugaagcaggagcucugcc

SEQ ID NO: 3075042 - RNA, 19 nt, Artificial Sequence
  Description of Artificial Sequence: Synthetic oligonucleotide
ugugaguagccuggugccu

SEQ ID NO: 3075043 - RNA, 19 nt, Artificial Sequence
  Description of Artificial Sequence: Synthetic oligonucleotide
gccuacugcgcuuagaacu

SEQ ID NO: 3075044 - RNA, 19 nt, Artificial Sequence
  Description of Artificial Sequence: Synthetic oligonucleotide
ccuacugcgcuuagaacug

SEQ ID NO: 3075045 - RNA, 19 nt, Artificial Sequence
  Description of Artificial Sequence: Synthetic oligonucleotide
uguguguccucuggugaac

SEQ ID NO: 3075046 - RNA, 19 nt, Artificial Sequence
  Description of Artificial Sequence: Synthetic oligonucleotide
cuggcugcacucguagggc

SEQ ID NO: 3075047 - RNA, 19 nt, Artificial Sequence
  Description of Artificial Sequence: Synthetic oligonucleotide
cacuggcugcacucguagg

SEQ ID NO: 3075048 - RNA, 19 nt, Artificial Sequence
  Description of Artificial Sequence: Synthetic oligonucleotide
ucuccuaguguguguccuc

SEQ ID NO: 3075049 - RNA, 19 nt, Artificial Sequence
  Description of Artificial Sequence: Synthetic oligonucleotide
uggcugcacucguagggcu

SEQ ID NO: 3075050 - RNA, 19 nt, Artificial Sequence
  Description of Artificial Sequence: Synthetic oligonucleotide
agccuggugccuacugcgc

SEQ ID NO: 3075051 - RNA, 19 nt, Artificial Sequence
  Description of Artificial Sequence: Synthetic oligonucleotide
cgauaagucgagcacucag

SEQ ID NO: 3075052 - RNA, 19 nt, Artificial Sequence
  Description of Artificial Sequence: Synthetic oligonucleotide
cugcgcuuagaacugcuaa

SEQ ID NO: 3075053 - RNA, 19 nt, Artificial Sequence
  Description of Artificial Sequence: Synthetic oligonucleotide
agcacucaggcugaagguu

SEQ ID NO: 3075054 - RNA, 19 nt, Artificial Sequence
  Description of Artificial Sequence: Synthetic oligonucleotide
uggguccucugaugcugag

SEQ ID NO: 3075055 - RNA, 19 nt, Artificial Sequence
  Description of Artificial Sequence: Synthetic oligonucleotide
uccccaguaugaguucgcu

SEQ ID NO: 3075056 - RNA, 19 nt, Artificial Sequence
  Description of Artificial Sequence: Synthetic oligonucleotide
acucaggcugaagguuuuc

SEQ ID NO: 3075057 - RNA, 19 nt, Artificial Sequence
  Description of Artificial Sequence: Synthetic oligonucleotide
gagcacucaggcugaaggu

SEQ ID NO: 3075058 - RNA, 19 nt, Artificial Sequence
  Description of Artificial Sequence: Synthetic oligonucleotide
guguccucuggugaacaac

SEQ ID NO: 3075059 - RNA, 19 nt, Artificial Sequence
  Description of Artificial Sequence: Synthetic oligonucleotide
gcuuuucuccuagugugug

SEQ ID NO: 3075060 - RNA, 19 nt, Artificial Sequence
  Description of Artificial Sequence: Synthetic oligonucleotide
cuacugcgcuuagaacugc

SEQ ID NO: 3075061 - RNA, 19 nt, Artificial Sequence
  Description of Artificial Sequence: Synthetic oligonucleotide
cugagugaagcaggagcuc

SEQ ID NO: 3075062 - RNA, 19 nt, Artificial Sequence
  Description of Artificial Sequence: Synthetic oligonucleotide
ugguugcacuuguaagguu

SEQ ID NO: 3075063 - RNA, 19 nt, Artificial Sequence
  Description of Artificial Sequence: Synthetic oligonucleotide
cacugugaguagccuggug

SEQ ID NO: 3075064 - RNA, 19 nt, Artificial Sequence
  Description of Artificial Sequence: Synthetic oligonucleotide
augcugagugaagcaggag

SEQ ID NO: 3075065 - RNA, 19 nt, Artificial Sequence
  Description of Artificial Sequence: Synthetic oligonucleotide
acgauaagucgagcacuca

SEQ ID NO: 3075066 - RNA, 19 nt, Artificial Sequence
  Description of Artificial Sequence: Synthetic oligonucleotide
uggugccuacugcgcuuag

SEQ ID NO: 3075067 - RNA, 19 nt, Artificial Sequence
  Description of Artificial Sequence: Synthetic oligonucleotide
ucacugugaguagccuggu

SEQ ID NO: 3075068 - RNA, 19 nt, Artificial Sequence
  Description of Artificial Sequence: Synthetic oligonucleotide
aggucuugccacacuggcu

SEQ ID NO: 3075069 - RNA, 19 nt, Artificial Sequence
  Description of Artificial Sequence: Synthetic oligonucleotide
acgcucagacucugaacua

SEQ ID NO: 3075070 - RNA, 19 nt, Artificial Sequence
  Description of Artificial Sequence: Synthetic oligonucleotide
cuuuucuccuagugugugu

SEQ ID NO: 3075071 - RNA, 19 nt, Artificial Sequence
  Description of Artificial Sequence: Synthetic oligonucleotide
agucgagcacucaggcuga

SEQ ID NO: 3075072 - RNA, 19 nt, Artificial Sequence
  Description of Artificial Sequence: Synthetic oligonucleotide
ggagcucugccugaagguc

SEQ ID NO: 3075073 - RNA, 19 nt, Artificial Sequence
  Description of Artificial Sequence: Synthetic oligonucleotide
cuaguguguguccucuggu

SEQ ID NO: 3075074 - RNA, 19 nt, Artificial Sequence
  Description of Artificial Sequence: Synthetic oligonucleotide
cugguugcacuuguaaggu

SEQ ID NO: 3075075 - RNA, 19 nt, Artificial Sequence
  Description of Artificial Sequence: Synthetic oligonucleotide
ccucugaugcugagugaag

SEQ ID NO: 3075076 - RNA, 19 nt, Artificial Sequence
  Description of Artificial Sequence: Synthetic oligonucleotide
gcugagugaagcaggagcu

SEQ ID NO: 3075077 - RNA, 19 nt, Artificial Sequence
  Description of Artificial Sequence: Synthetic oligonucleotide
gagcucugccugaaggucu

SEQ ID NO: 3075078 - RNA, 19 nt, Artificial Sequence
  Description of Artificial Sequence: Synthetic oligonucleotide
guccucugaugcugaguga

SEQ ID NO: 3075079 - RNA, 19 nt, Artificial Sequence
  Description of Artificial Sequence: Synthetic oligonucleotide
guguguccucuggugaaca

SEQ ID NO: 3075080 - RNA, 19 nt, Artificial Sequence
  Description of Artificial Sequence: Synthetic oligonucleotide
ggacgauaagucgagcacu

SEQ ID NO: 3075081 - RNA, 19 nt, Artificial Sequence
  Description of Artificial Sequence: Synthetic oligonucleotide
cgcugguggacgauaaguc

SEQ ID NO: 3075082 - RNA, 19 nt, Artificial Sequence
  Description of Artificial Sequence: Synthetic oligonucleotide
gugaguagccuggugccua

SEQ ID NO: 3075083 - RNA, 19 nt, Artificial Sequence
  Description of Artificial Sequence: Synthetic oligonucleotide
gguggacgauaagucgagc

SEQ ID NO: 3075084 - RNA, 19 nt, Artificial Sequence
  Description of Artificial Sequence: Synthetic oligonucleotide
acugcgcuuagaacugcua

SEQ ID NO: 3075085 - RNA, 19 nt, Artificial Sequence
  Description of Artificial Sequence: Synthetic oligonucleotide
cacacuggcugcacucgua

SEQ ID NO: 3075086 - RNA, 19 nt, Artificial Sequence
  Description of Artificial Sequence: Synthetic oligonucleotide
ccccaguaugaguucgcug

SEQ ID NO: 3075087 - RNA, 19 nt, Artificial Sequence
  Description of Artificial Sequence: Synthetic oligonucleotide
gcgcuuagaacugcuaaua

SEQ ID NO: 3075088 - RNA, 19 nt, Artificial Sequence
  Description of Artificial Sequence: Synthetic oligonucleotide
cacacugguugcacuugua

SEQ ID NO: 3075089 - RNA, 19 nt, Artificial Sequence
  Description of Artificial Sequence: Synthetic oligonucleotide
cugaacuaaucaggacuua

SEQ ID NO: 3075090 - RNA, 19 nt, Artificial Sequence
  Description of Artificial Sequence: Synthetic oligonucleotide
guggguccucugaugcuga

SEQ ID NO: 3075091 - RNA, 19 nt, Artificial Sequence
  Description of Artificial Sequence: Synthetic oligonucleotide
agcucugccugaaggucuu

SEQ ID NO: 3075092 - RNA, 19 nt, Artificial Sequence
  Description of Artificial Sequence: Synthetic oligonucleotide
ggugaacaacaagaacaua

SEQ ID NO: 3075093 - RNA, 19 nt, Artificial Sequence
  Description of Artificial Sequence: Synthetic oligonucleotide
guccucuggugaacaacaa

SEQ ID NO: 3075094 - RNA, 19 nt, Artificial Sequence
  Description of Artificial Sequence: Synthetic oligonucleotide
caggacuuacaagacucau

SEQ ID NO: 3075095 - RNA, 19 nt, Artificial Sequence
  Description of Artificial Sequence: Synthetic oligonucleotide
ggugccuacugcgcuuaga

SEQ ID NO: 3075096 - RNA, 19 nt, Artificial Sequence
  Description of Artificial Sequence: Synthetic oligonucleotide
cgcuuagaacugcuaauaa

SEQ ID NO: 3075097 - RNA, 19 nt, Artificial Sequence
  Description of Artificial Sequence: Synthetic oligonucleotide
ggcuuuucuccuagugugu

SEQ ID NO: 3075098 - RNA, 19 nt, Artificial Sequence
  Description of Artificial Sequence: Synthetic oligonucleotide
cuggugccuacugcgcuua

SEQ ID NO: 3075099 - RNA, 19 nt, Artificial Sequence
  Description of Artificial Sequence: Synthetic oligonucleotide
cacucaggcugaagguuuu

SEQ ID NO: 3075100 - RNA, 19 nt, Artificial Sequence
  Description of Artificial Sequence: Synthetic oligonucleotide
gccuggugccuacugcgcu

SEQ ID NO: 3075101 - RNA, 19 nt, Artificial Sequence
  Description of Artificial Sequence: Synthetic oligonucleotide
gaguagccuggugccuacu

SEQ ID NO: 3075102 - RNA, 19 nt, Artificial Sequence
  Description of Artificial Sequence: Synthetic oligonucleotide
gcucagacucugaacuaau

SEQ ID NO: 3075103 - RNA, 19 nt, Artificial Sequence
  Description of Artificial Sequence: Synthetic oligonucleotide
gucgagcacucaggcugaa

SEQ ID NO: 3075104 - RNA, 19 nt, Artificial Sequence
  Description of Artificial Sequence: Synthetic oligonucleotide
ggguccucugaugcugagu

SEQ ID NO: 3075105 - RNA, 19 nt, Artificial Sequence
  Description of Artificial Sequence: Synthetic oligonucleotide
ccacacugguuacacucau

SEQ ID NO: 3075106 - RNA, 19 nt, Artificial Sequence
  Description of Artificial Sequence: Synthetic oligonucleotide
ccacacuggcugcacucgu

SEQ ID NO: 3075107 - RNA, 19 nt, Artificial Sequence
  Description of Artificial Sequence: Synthetic oligonucleotide
ccuggugccuacugcgcuu

SEQ ID NO: 3075108 - RNA, 19 nt, Artificial Sequence
  Description of Artificial Sequence: Synthetic oligonucleotide
uguaguaggacucugaggc

SEQ ID NO: 3075109 - RNA, 19 nt, Artificial Sequence
  Description of Artificial Sequence: Synthetic oligonucleotide
ugaggaagaauucaggugc

SEQ ID NO: 3075110 - RNA, 19 nt, Artificial Sequence
  Description of Artificial Sequence: Synthetic oligonucleotide
ugcaaagauguucugaggg

SEQ ID NO: 3075111 - RNA, 19 nt, Artificial Sequence
  Description of Artificial Sequence: Synthetic oligonucleotide
aaugacaaugaagagugac

SEQ ID NO: 3075112 - RNA, 19 nt, Artificial Sequence
  Description of Artificial Sequence: Synthetic oligonucleotide
auguuguuaaucuuccagc

SEQ ID NO: 3075113 - RNA, 19 nt, Artificial Sequence
  Description of Artificial Sequence: Synthetic oligonucleotide
uguuguuaaucuuccagcg

SEQ ID NO: 3075114 - RNA, 19 nt, Artificial Sequence
  Description of Artificial Sequence: Synthetic oligonucleotide
aagagugaccgcuugccgc

SEQ ID NO: 3075115 - RNA, 19 nt, Artificial Sequence
  Description of Artificial Sequence: Synthetic oligonucleotide
gacacaaugacaaugaaga

SEQ ID NO: 3075116 - RNA, 19 nt, Artificial Sequence
  Description of Artificial Sequence: Synthetic oligonucleotide
gauguuguuaaucuuccag

SEQ ID NO: 3075117 - RNA, 19 nt, Artificial Sequence
  Description of Artificial Sequence: Synthetic oligonucleotide
gaagaauucaggugcaaag

SEQ ID NO: 3075118 - RNA, 19 nt, Artificial Sequence
  Description of Artificial Sequence: Synthetic oligonucleotide
ugacaaugaagagugaccg

SEQ ID NO: 3075119 - RNA, 19 nt, Artificial Sequence
  Description of Artificial Sequence: Synthetic oligonucleotide
gauguagaagaccaccagg

SEQ ID NO: 3075120 - RNA, 19 nt, Artificial Sequence
  Description of Artificial Sequence: Synthetic oligonucleotide
ugcagcacaaagaugagcu

SEQ ID NO: 3075121 - RNA, 19 nt, Artificial Sequence
  Description of Artificial Sequence: Synthetic oligonucleotide
acaaugacaaugaagagug

SEQ ID NO: 3075122 - RNA, 19 nt, Artificial Sequence
  Description of Artificial Sequence: Synthetic oligonucleotide
aauucaggugcaaagaugu

SEQ ID NO: 3075123 - RNA, 19 nt, Artificial Sequence
  Description of Artificial Sequence: Synthetic oligonucleotide
aggaacaggauguagaaga

SEQ ID NO: 3075124 - RNA, 19 nt, Artificial Sequence
  Description of Artificial Sequence: Synthetic oligonucleotide
uuaaucuuccagcgcagcg

SEQ ID NO: 3075125 - RNA, 19 nt, Artificial Sequence
  Description of Artificial Sequence: Synthetic oligonucleotide
uguguaguaggacucugag

SEQ ID NO: 3075126 - RNA, 19 nt, Artificial Sequence
  Description of Artificial Sequence: Synthetic oligonucleotide
auguagaagaccaccaggc

SEQ ID NO: 3075127 - RNA, 19 nt, Artificial Sequence
  Description of Artificial Sequence: Synthetic oligonucleotide
gaaacugaaggcuggguug

SEQ ID NO: 3075128 - RNA, 19 nt, Artificial Sequence
  Description of Artificial Sequence: Synthetic oligonucleotide
ucaggugcaaagauguucu

SEQ ID NO: 3075129 - RNA, 19 nt, Artificial Sequence
  Description of Artificial Sequence: Synthetic oligonucleotide
acaaagaugagcugguagu

SEQ ID NO: 3075130 - RNA, 19 nt, Artificial Sequence
  Description of Artificial Sequence: Synthetic oligonucleotide
gagacuggaaacugaaggc

SEQ ID NO: 3075131 - RNA, 19 nt, Artificial Sequence
  Description of Artificial Sequence: Synthetic oligonucleotide
uugaggaagaauucaggug

SEQ ID NO: 3075132 - RNA, 19 nt, Artificial Sequence
  Description of Artificial Sequence: Synthetic oligonucleotide
augacaaugaagagugacc

SEQ ID NO: 3075133 - RNA, 19 nt, Artificial Sequence
  Description of Artificial Sequence: Synthetic oligonucleotide
aaucuuccagcgcagcgag

SEQ ID NO: 3075134 - RNA, 19 nt, Artificial Sequence
  Description of Artificial Sequence: Synthetic oligonucleotide
cucaccagcaacuugagga

SEQ ID NO: 3075135 - RNA, 19 nt, Artificial Sequence
  Description of Artificial Sequence: Synthetic oligonucleotide
agcgcagcgagauccaggc

SEQ ID NO: 3075136 - RNA, 19 nt, Artificial Sequence
  Description of Artificial Sequence: Synthetic oligonucleotide
ucugaggccaugauguugu

SEQ ID NO: 3075137 - RNA, 19 nt, Artificial Sequence
  Description of Artificial Sequence: Synthetic oligonucleotide
guagcguauguguaguagg

SEQ ID NO: 3075138 - RNA, 19 nt, Artificial Sequence
  Description of Artificial Sequence: Synthetic oligonucleotide
gauguggggccacaggagg

SEQ ID NO: 3075139 - RNA, 19 nt, Artificial Sequence
  Description of Artificial Sequence: Synthetic oligonucleotide
ugagcugguagucacagua

SEQ ID NO: 3075140 - RNA, 19 nt, Artificial Sequence
  Description of Artificial Sequence: Synthetic oligonucleotide
gauggacacaaugacaaug

SEQ ID NO: 3075141 - RNA, 19 nt, Artificial Sequence
  Description of Artificial Sequence: Synthetic oligonucleotide
guagaagaccaccaggccc

SEQ ID NO: 3075142 - RNA, 19 nt, Artificial Sequence
  Description of Artificial Sequence: Synthetic oligonucleotide
aaacugaaggcuggguugg

SEQ ID NO: 3075143 - RNA, 19 nt, Artificial Sequence
  Description of Artificial Sequence: Synthetic oligonucleotide
augugcagcacaaagauga

SEQ ID NO: 3075144 - RNA, 19 nt, Artificial Sequence
  Description of Artificial Sequence: Synthetic oligonucleotide
aagaauucaggugcaaaga

SEQ ID NO: 3075145 - RNA, 19 nt, Artificial Sequence
  Description of Artificial Sequence: Synthetic oligonucleotide
uccucuguugcucaccagc

SEQ ID NO: 3075146 - RNA, 19 nt, Artificial Sequence
  Description of Artificial Sequence: Synthetic oligonucleotide
ugcaugugcagcacaaaga

SEQ ID NO: 3075147 - RNA, 19 nt, Artificial Sequence
  Description of Artificial Sequence: Synthetic oligonucleotide
ucuguugcucaccagcaac

SEQ ID NO: 3075148 - RNA, 19 nt, Artificial Sequence
  Description of Artificial Sequence: Synthetic oligonucleotide
augaagagugaccgcuugc

SEQ ID NO: 3075149 - RNA, 19 nt, Artificial Sequence
  Description of Artificial Sequence: Synthetic oligonucleotide
uguuaaucuuccagcgcag

SEQ ID NO: 3075150 - RNA, 19 nt, Artificial Sequence
  Description of Artificial Sequence: Synthetic oligonucleotide
ggugcaaagauguucugag

SEQ ID NO: 3075151 - RNA, 19 nt, Artificial Sequence
  Description of Artificial Sequence: Synthetic oligonucleotide
uuggagguagcguaugugu

SEQ ID NO: 3075152 - RNA, 19 nt, Artificial Sequence
  Description of Artificial Sequence: Synthetic oligonucleotide
acaaugaagagugaccgcu

SEQ ID NO: 3075153 - RNA, 19 nt, Artificial Sequence
  Description of Artificial Sequence: Synthetic oligonucleotide
gaagagugaccgcuugccg

SEQ ID NO: 3075154 - RNA, 19 nt, Artificial Sequence
  Description of Artificial Sequence: Synthetic oligonucleotide
cacaaagaugagcugguag

SEQ ID NO: 3075155 - RNA, 19 nt, Artificial Sequence
  Description of Artificial Sequence: Synthetic oligonucleotide
gaggccaugauguuguuaa

SEQ ID NO: 3075156 - RNA, 19 nt, Artificial Sequence
  Description of Artificial Sequence: Synthetic oligonucleotide
agaauucaggugcaaagau

SEQ ID NO: 3075157 - RNA, 19 nt, Artificial Sequence
  Description of Artificial Sequence: Synthetic oligonucleotide
cugauggacacaaugacaa

SEQ ID NO: 3075158 - RNA, 19 nt, Artificial Sequence
  Description of Artificial Sequence: Synthetic oligonucleotide
gaccgcuugccgcugagcg

SEQ ID NO: 3075159 - RNA, 19 nt, Artificial Sequence
  Description of Artificial Sequence: Synthetic oligonucleotide
ugaagagugaccgcuugcc

SEQ ID NO: 3075160 - RNA, 19 nt, Artificial Sequence
  Description of Artificial Sequence: Synthetic oligonucleotide
gaauucaggugcaaagaug

SEQ ID NO: 3075161 - RNA, 19 nt, Artificial Sequence
  Description of Artificial Sequence: Synthetic oligonucleotide
aaagaugagcugguaguca

SEQ ID NO: 3075162 - RNA, 19 nt, Artificial Sequence
  Description of Artificial Sequence: Synthetic oligonucleotide
ugguagucacaguaugugc

SEQ ID NO: 3075163 - RNA, 19 nt, Artificial Sequence
  Description of Artificial Sequence: Synthetic oligonucleotide
gaugagcugguagucacag

SEQ ID NO: 3075164 - RNA, 19 nt, Artificial Sequence
  Description of Artificial Sequence: Synthetic oligonucleotide
uagcguauguguaguagga

SEQ ID NO: 3075165 - RNA, 19 nt, Artificial Sequence
  Description of Artificial Sequence: Synthetic oligonucleotide
guuguuaaucuuccagcgc

SEQ ID NO: 3075166 - RNA, 19 nt, Artificial Sequence
  Description of Artificial Sequence: Synthetic oligonucleotide
ugagcgguaguccaugcau

SEQ ID NO: 3075167 - RNA, 19 nt, Artificial Sequence
  Description of Artificial Sequence: Synthetic oligonucleotide
acacaaugacaaugaagag

SEQ ID NO: 3075168 - RNA, 19 nt, Artificial Sequence
  Description of Artificial Sequence: Synthetic oligonucleotide
cagcacaaagaugagcugg

SEQ ID NO: 3075169 - RNA, 19 nt, Artificial Sequence
  Description of Artificial Sequence: Synthetic oligonucleotide
agcaacuugaggaagaauu

SEQ ID NO: 3075170 - RNA, 19 nt, Artificial Sequence
  Description of Artificial Sequence: Synthetic oligonucleotide
gacaaugaagagugaccgc

SEQ ID NO: 3075171 - RNA, 19 nt, Artificial Sequence
  Description of Artificial Sequence: Synthetic oligonucleotide
aaggcuggguuggagguag

SEQ ID NO: 3075172 - RNA, 19 nt, Artificial Sequence
  Description of Artificial Sequence: Synthetic oligonucleotide
uaaucuuccagcgcagcga

SEQ ID NO: 3075173 - RNA, 19 nt, Artificial Sequence
  Description of Artificial Sequence: Synthetic oligonucleotide
uucaggugcaaagauguuc

SEQ ID NO: 3075174 - RNA, 19 nt, Artificial Sequence
  Description of Artificial Sequence: Synthetic oligonucleotide
uaguccaugcaugugcagc

SEQ ID NO: 3075175 - RNA, 19 nt, Artificial Sequence
  Description of Artificial Sequence: Synthetic oligonucleotide
aaagauguucugaggggug

SEQ ID NO: 3075176 - RNA, 19 nt, Artificial Sequence
  Description of Artificial Sequence: Synthetic oligonucleotide
aguaugugcucgugucgac

SEQ ID NO: 3075177 - RNA, 19 nt, Artificial Sequence
  Description of Artificial Sequence: Synthetic oligonucleotide
uuccagcgcagcgagaucc

SEQ ID NO: 3075178 - RNA, 19 nt, Artificial Sequence
  Description of Artificial Sequence: Synthetic oligonucleotide
ugugcagcacaaagaugag

SEQ ID NO: 3075179 - RNA, 19 nt, Artificial Sequence
  Description of Artificial Sequence: Synthetic oligonucleotide
acgauguggggccacagga

SEQ ID NO: 3075180 - RNA, 19 nt, Artificial Sequence
  Description of Artificial Sequence: Synthetic oligonucleotide
aguccaugcaugugcagca

SEQ ID NO: 3075181 - RNA, 19 nt, Artificial Sequence
  Description of Artificial Sequence: Synthetic oligonucleotide
uagucacaguaugugcucg

SEQ ID NO: 3075182 - RNA, 19 nt, Artificial Sequence
  Description of Artificial Sequence: Synthetic oligonucleotide
caggauguagaagaccacc

SEQ ID NO: 3075183 - RNA, 19 nt, Artificial Sequence
  Description of Artificial Sequence: Synthetic oligonucleotide
caggcugauggacacaaug

SEQ ID NO: 3075184 - RNA, 19 nt, Artificial Sequence
  Description of Artificial Sequence: Synthetic oligonucleotide
agcugguagucacaguaug

SEQ ID NO: 3075185 - RNA, 19 nt, Artificial Sequence
  Description of Artificial Sequence: Synthetic oligonucleotide
cacaggaggaggaacagga

SEQ ID NO: 3075186 - RNA, 19 nt, Artificial Sequence
  Description of Artificial Sequence: Synthetic oligonucleotide
uaguaggacucugaggcca

SEQ ID NO: 3075187 - RNA, 19 nt, Artificial Sequence
  Description of Artificial Sequence: Synthetic oligonucleotide
uaugugcucgugucgacuc

SEQ ID NO: 3075188 - RNA, 19 nt, Artificial Sequence
  Description of Artificial Sequence: Synthetic oligonucleotide
ucacaguaugugcucgugu

SEQ ID NO: 3075189 - RNA, 19 nt, Artificial Sequence
  Description of Artificial Sequence: Synthetic oligonucleotide
gugcaaagauguucugagg

SEQ ID NO: 3075190 - RNA, 19 nt, Artificial Sequence
  Description of Artificial Sequence: Synthetic oligonucleotide
gugucgacuccucuguugc

SEQ ID NO: 3075191 - RNA, 19 nt, Artificial Sequence
  Description of Artificial Sequence: Synthetic oligonucleotide
gacuggaaacugaaggcug

SEQ ID NO: 3075192 - RNA, 19 nt, Artificial Sequence
  Description of Artificial Sequence: Synthetic oligonucleotide
aagauguucugagggguga

SEQ ID NO: 3075193 - RNA, 19 nt, Artificial Sequence
  Description of Artificial Sequence: Synthetic oligonucleotide
agacuggaaacugaaggcu

SEQ ID NO: 3075194 - RNA, 19 nt, Artificial Sequence
  Description of Artificial Sequence: Synthetic oligonucleotide
cccacgagcaggcugaugg

SEQ ID NO: 3075195 - RNA, 19 nt, Artificial Sequence
  Description of Artificial Sequence: Synthetic oligonucleotide
ucaccagcaacuugaggaa

SEQ ID NO: 3075196 - RNA, 19 nt, Artificial Sequence
  Description of Artificial Sequence: Synthetic oligonucleotide
auggacacaaugacaauga

SEQ ID NO: 3075197 - RNA, 19 nt, Artificial Sequence
  Description of Artificial Sequence: Synthetic oligonucleotide
cugguagucacaguaugug

SEQ ID NO: 3075198 - RNA, 19 nt, Artificial Sequence
  Description of Artificial Sequence: Synthetic oligonucleotide
ugauguuguuaaucuucca

SEQ ID NO: 3075199 - RNA, 19 nt, Artificial Sequence
  Description of Artificial Sequence: Synthetic oligonucleotide
agagugaccgcuugccgcu

SEQ ID NO: 3075200 - RNA, 19 nt, Artificial Sequence
  Description of Artificial Sequence: Synthetic oligonucleotide
cuugaggaagaauucaggu

SEQ ID NO: 3075201 - RNA, 19 nt, Artificial Sequence
  Description of Artificial Sequence: Synthetic oligonucleotide
augugcucgugucgacucc

SEQ ID NO: 3075202 - RNA, 19 nt, Artificial Sequence
  Description of Artificial Sequence: Synthetic oligonucleotide
uauguguaguaggacucug

SEQ ID NO: 3075203 - RNA, 19 nt, Artificial Sequence
  Description of Artificial Sequence: Synthetic oligonucleotide
aggaggaggaacaggaugu

SEQ ID NO: 3075204 - RNA, 19 nt, Artificial Sequence
  Description of Artificial Sequence: Synthetic oligonucleotide
ggagguagcguauguguag

SEQ ID NO: 3075205 - RNA, 19 nt, Artificial Sequence
  Description of Artificial Sequence: Synthetic oligonucleotide
agcguauguguaguaggac

SEQ ID NO: 3075206 - RNA, 19 nt, Artificial Sequence
  Description of Artificial Sequence: Synthetic oligonucleotide
ucuuccagcgcagcgagau

SEQ ID NO: 3075207 - RNA, 19 nt, Artificial Sequence
  Description of Artificial Sequence: Synthetic oligonucleotide
ggauguagaagaccaccag

SEQ ID NO: 3075208 - RNA, 19 nt, Artificial Sequence
  Description of Artificial Sequence: Synthetic oligonucleotide
ggacacaaugacaaugaag

SEQ ID NO: 3075209 - RNA, 19 nt, Artificial Sequence
  Description of Artificial Sequence: Synthetic oligonucleotide
caugugcagcacaaagaug

SEQ ID NO: 3075210 - RNA, 19 nt, Artificial Sequence
  Description of Artificial Sequence: Synthetic oligonucleotide
uccaugcaugugcagcaca

SEQ ID NO: 3075211 - RNA, 19 nt, Artificial Sequence
  Description of Artificial Sequence: Synthetic oligonucleotide
gagauccaggcccucacga

SEQ ID NO: 3075212 - RNA, 19 nt, Artificial Sequence
  Description of Artificial Sequence: Synthetic oligonucleotide
gaggaacaggauguagaag

SEQ ID NO: 3075213 - RNA, 19 nt, Artificial Sequence
  Description of Artificial Sequence: Synthetic oligonucleotide
guagucacaguaugugcuc

SEQ ID NO: 3075214 - RNA, 19 nt, Artificial Sequence
  Description of Artificial Sequence: Synthetic oligonucleotide
uggagguagcguaugugua

SEQ ID NO: 3075215 - RNA, 19 nt, Artificial Sequence
  Description of Artificial Sequence: Synthetic oligonucleotide
guaguaggacucugaggcc

SEQ ID NO: 3075216 - RNA, 19 nt, Artificial Sequence
  Description of Artificial Sequence: Synthetic oligonucleotide
agcgguaguccaugcaugu

SEQ ID NO: 3075217 - RNA, 19 nt, Artificial Sequence
  Description of Artificial Sequence: Synthetic oligonucleotide
caaagaugagcugguaguc

SEQ ID NO: 3075218 - RNA, 19 nt, Artificial Sequence
  Description of Artificial Sequence: Synthetic oligonucleotide
guugcucaccagcaacuug

SEQ ID NO: 3075219 - RNA, 19 nt, Artificial Sequence
  Description of Artificial Sequence: Synthetic oligonucleotide
uggacacaaugacaaugaa

SEQ ID NO: 3075220 - RNA, 19 nt, Artificial Sequence
  Description of Artificial Sequence: Synthetic oligonucleotide
acuccucuguugcucacca

SEQ ID NO: 3075221 - RNA, 19 nt, Artificial Sequence
  Description of Artificial Sequence: Synthetic oligonucleotide
gaggaggaacaggauguag

SEQ ID NO: 3075222 - RNA, 19 nt, Artificial Sequence
  Description of Artificial Sequence: Synthetic oligonucleotide
ucgacuccucuguugcuca

SEQ ID NO: 3075223 - RNA, 19 nt, Artificial Sequence
  Description of Artificial Sequence: Synthetic oligonucleotide
aggauguagaagaccacca

SEQ ID NO: 3075224 - RNA, 19 nt, Artificial Sequence
  Description of Artificial Sequence: Synthetic oligonucleotide
guuaaucuuccagcgcagc

SEQ ID NO: 3075225 - RNA, 19 nt, Artificial Sequence
  Description of Artificial Sequence: Synthetic oligonucleotide
gguagcguauguguaguag

SEQ ID NO: 3075226 - RNA, 19 nt, Artificial Sequence
  Description of Artificial Sequence: Synthetic oligonucleotide
uguggggccacaggaggag

SEQ ID NO: 3075227 - RNA, 19 nt, Artificial Sequence
  Description of Artificial Sequence: Synthetic oligonucleotide
ggcugauggacacaaugac

SEQ ID NO: 3075228 - RNA, 19 nt, Artificial Sequence
  Description of Artificial Sequence: Synthetic oligonucleotide
cacaaugacaaugaagagu

SEQ ID NO: 3075229 - RNA, 19 nt, Artificial Sequence
  Description of Artificial Sequence: Synthetic oligonucleotide
cacgauguggggccacagg

SEQ ID NO: 3075230 - RNA, 19 nt, Artificial Sequence
  Description of Artificial Sequence: Synthetic oligonucleotide
guuggagguagcguaugug

SEQ ID NO: 3075231 - RNA, 19 nt, Artificial Sequence
  Description of Artificial Sequence: Synthetic oligonucleotide
agucacaguaugugcucgu

SEQ ID NO: 3075232 - RNA, 19 nt, Artificial Sequence
  Description of Artificial Sequence: Synthetic oligonucleotide
aggugcaaagauguucuga

SEQ ID NO: 3075233 - RNA, 19 nt, Artificial Sequence
  Description of Artificial Sequence: Synthetic oligonucleotide
accgcuugccgcugagcgg

SEQ ID NO: 3075234 - RNA, 19 nt, Artificial Sequence
  Description of Artificial Sequence: Synthetic oligonucleotide
aggcugauggacacaauga

SEQ ID NO: 3075235 - RNA, 19 nt, Artificial Sequence
  Description of Artificial Sequence: Synthetic oligonucleotide
ugauggacacaaugacaau

SEQ ID NO: 3075236 - RNA, 19 nt, Artificial Sequence
  Description of Artificial Sequence: Synthetic oligonucleotide
cuggaaacugaaggcuggg

SEQ ID NO: 3075237 - RNA, 19 nt, Artificial Sequence
  Description of Artificial Sequence: Synthetic oligonucleotide
guaguccaugcaugugcag

SEQ ID NO: 3075238 - RNA, 19 nt, Artificial Sequence
  Description of Artificial Sequence: Synthetic oligonucleotide
uggguuggagguagcguau

SEQ ID NO: 3075239 - RNA, 19 nt, Artificial Sequence
  Description of Artificial Sequence: Synthetic oligonucleotide
cagcgcagcgagauccagg

SEQ ID NO: 3075240 - RNA, 19 nt, Artificial Sequence
  Description of Artificial Sequence: Synthetic oligonucleotide
ggaggaacaggauguagaa

SEQ ID NO: 3075241 - RNA, 19 nt, Artificial Sequence
  Description of Artificial Sequence: Synthetic oligonucleotide
gagcgguaguccaugcaug

SEQ ID NO: 3075242 - RNA, 19 nt, Artificial Sequence
  Description of Artificial Sequence: Synthetic oligonucleotide
uggaaacugaaggcugggu

SEQ ID NO: 3075243 - RNA, 19 nt, Artificial Sequence
  Description of Artificial Sequence: Synthetic oligonucleotide
cucugaggccaugauguug

SEQ ID NO: 3075244 - RNA, 19 nt, Artificial Sequence
  Description of Artificial Sequence: Synthetic oligonucleotide
ggacucugaggccaugaug

SEQ ID NO: 3075245 - RNA, 19 nt, Artificial Sequence
  Description of Artificial Sequence: Synthetic oligonucleotide
ugcucgugucgacuccucu

SEQ ID NO: 3075246 - RNA, 19 nt, Artificial Sequence
  Description of Artificial Sequence: Synthetic oligonucleotide
accaccaggcccacgagca

SEQ ID NO: 3075247 - RNA, 19 nt, Artificial Sequence
  Description of Artificial Sequence: Synthetic oligonucleotide
gaggaagaauucaggugca

SEQ ID NO: 3075248 - RNA, 19 nt, Artificial Sequence
  Description of Artificial Sequence: Synthetic oligonucleotide
cuggguuggagguagcgua

SEQ ID NO: 3075249 - RNA, 19 nt, Artificial Sequence
  Description of Artificial Sequence: Synthetic oligonucleotide
agauccaggcccucacgau

SEQ ID NO: 3075250 - RNA, 19 nt, Artificial Sequence
  Description of Artificial Sequence: Synthetic oligonucleotide
ugugcucgugucgacuccu

SEQ ID NO: 3075251 - RNA, 19 nt, Artificial Sequence
  Description of Artificial Sequence: Synthetic oligonucleotide
gccaugauguuguuaaucu

SEQ ID NO: 3075252 - RNA, 19 nt, Artificial Sequence
  Description of Artificial Sequence: Synthetic oligonucleotide
accagcaacuugaggaaga

SEQ ID NO: 3075253 - RNA, 19 nt, Artificial Sequence
  Description of Artificial Sequence: Synthetic oligonucleotide
gugcagcacaaagaugagc

SEQ ID NO: 3075254 - RNA, 19 nt, Artificial Sequence
  Description of Artificial Sequence: Synthetic oligonucleotide
cguauguguaguaggacuc

SEQ ID NO: 3075255 - RNA, 19 nt, Artificial Sequence
  Description of Artificial Sequence: Synthetic oligonucleotide
uccagcgcagcgagaucca

SEQ ID NO: 3075256 - RNA, 19 nt, Artificial Sequence
  Description of Artificial Sequence: Synthetic oligonucleotide
gcaacuugaggaagaauuc

SEQ ID NO: 3075257 - RNA, 19 nt, Artificial Sequence
  Description of Artificial Sequence: Synthetic oligonucleotide
gacuccucuguugcucacc

SEQ ID NO: 3075258 - RNA, 19 nt, Artificial Sequence
  Description of Artificial Sequence: Synthetic oligonucleotide
gucacaguaugugcucgug

SEQ ID NO: 3075259 - RNA, 19 nt, Artificial Sequence
  Description of Artificial Sequence: Synthetic oligonucleotide
ucacgauguggggccacag

SEQ ID NO: 3075260 - RNA, 19 nt, Artificial Sequence
  Description of Artificial Sequence: Synthetic oligonucleotide
aggcccucacgaugugggg

SEQ ID NO: 3075261 - RNA, 19 nt, Artificial Sequence
  Description of Artificial Sequence: Synthetic oligonucleotide
caccaggcccacgagcagg

SEQ ID NO: 3075262 - RNA, 19 nt, Artificial Sequence
  Description of Artificial Sequence: Synthetic oligonucleotide
cgcagcgagauccaggccc

SEQ ID NO: 3075263 - RNA, 19 nt, Artificial Sequence
  Description of Artificial Sequence: Synthetic oligonucleotide
ugucgacuccucuguugcu

SEQ ID NO: 3075264 - RNA, 19 nt, Artificial Sequence
  Description of Artificial Sequence: Synthetic oligonucleotide
auguguaguaggacucuga

SEQ ID NO: 3075265 - RNA, 19 nt, Artificial Sequence
  Description of Artificial Sequence: Synthetic oligonucleotide
caguaugugcucgugucga

SEQ ID NO: 3075266 - RNA, 19 nt, Artificial Sequence
  Description of Artificial Sequence: Synthetic oligonucleotide
uguugcucaccagcaacuu

SEQ ID NO: 3075267 - RNA, 19 nt, Artificial Sequence
  Description of Artificial Sequence: Synthetic oligonucleotide
gguagucacaguaugugcu

SEQ ID NO: 3075268 - RNA, 19 nt, Artificial Sequence
  Description of Artificial Sequence: Synthetic oligonucleotide
cgguaguccaugcaugugc

SEQ ID NO: 3075269 - RNA, 19 nt, Artificial Sequence
  Description of Artificial Sequence: Synthetic oligonucleotide
gcugauggacacaaugaca

SEQ ID NO: 3075270 - RNA, 19 nt, Artificial Sequence
  Description of Artificial Sequence: Synthetic oligonucleotide
cacgagcaggcugauggac

SEQ ID NO: 3075271 - RNA, 19 nt, Artificial Sequence
  Description of Artificial Sequence: Synthetic oligonucleotide
caccagcaacuugaggaag

SEQ ID NO: 3075272 - RNA, 19 nt, Artificial Sequence
  Description of Artificial Sequence: Synthetic oligonucleotide
augagcugguagucacagu

SEQ ID NO: 3075273 - RNA, 19 nt, Artificial Sequence
  Description of Artificial Sequence: Synthetic oligonucleotide
acgagcaggcugauggaca

SEQ ID NO: 3075274 - RNA, 19 nt, Artificial Sequence
  Description of Artificial Sequence: Synthetic oligonucleotide
gcaugugcagcacaaagau

SEQ ID NO: 3075275 - RNA, 19 nt, Artificial Sequence
  Description of Artificial Sequence: Synthetic oligonucleotide
caggugcaaagauguucug

SEQ ID NO: 3075276 - RNA, 19 nt, Artificial Sequence
  Description of Artificial Sequence: Synthetic oligonucleotide
ugccgcugagcgguagucc

SEQ ID NO: 3075277 - RNA, 19 nt, Artificial Sequence
  Description of Artificial Sequence: Synthetic oligonucleotide
caggcccacgagcaggcug

SEQ ID NO: 3075278 - RNA, 19 nt, Artificial Sequence
  Description of Artificial Sequence: Synthetic oligonucleotide
agaagaccaccaggcccac

SEQ ID NO: 3075279 - RNA, 19 nt, Artificial Sequence
  Description of Artificial Sequence: Synthetic oligonucleotide
gcagcacaaagaugagcug

SEQ ID NO: 3075280 - RNA, 19 nt, Artificial Sequence
  Description of Artificial Sequence: Synthetic oligonucleotide
gcucgugucgacuccucug

SEQ ID NO: 3075281 - RNA, 19 nt, Artificial Sequence
  Description of Artificial Sequence: Synthetic oligonucleotide
gucgacuccucuguugcuc

SEQ ID NO: 3075282 - RNA, 19 nt, Artificial Sequence
  Description of Artificial Sequence: Synthetic oligonucleotide
ugaggccaugauguuguua

SEQ ID NO: 3075283 - RNA, 19 nt, Artificial Sequence
  Description of Artificial Sequence: Synthetic oligonucleotide
gaagaccaccaggcccacg

SEQ ID NO: 3075284 - RNA, 19 nt, Artificial Sequence
  Description of Artificial Sequence: Synthetic oligonucleotide
aacugaaggcuggguugga

SEQ ID NO: 3075285 - RNA, 19 nt, Artificial Sequence
  Description of Artificial Sequence: Synthetic oligonucleotide
gcguauguguaguaggacu

SEQ ID NO: 3075286 - RNA, 19 nt, Artificial Sequence
  Description of Artificial Sequence: Synthetic oligonucleotide
gcucaccagcaacuugagg

SEQ ID NO: 3075287 - RNA, 19 nt, Artificial Sequence
  Description of Artificial Sequence: Synthetic oligonucleotide
caaugacaaugaagaguga

SEQ ID NO: 3075288 - RNA, 19 nt, Artificial Sequence
  Description of Artificial Sequence: Synthetic oligonucleotide
gguaguccaugcaugugca

SEQ ID NO: 3075289 - RNA, 19 nt, Artificial Sequence
  Description of Artificial Sequence: Synthetic oligonucleotide
ggccaugauguuguuaauc

SEQ ID NO: 3075290 - RNA, 19 nt, Artificial Sequence
  Description of Artificial Sequence: Synthetic oligonucleotide
cuguugcucaccagcaacu

SEQ ID NO: 3075291 - RNA, 19 nt, Artificial Sequence
  Description of Artificial Sequence: Synthetic oligonucleotide
gcccucacgauguggggcc

SEQ ID NO: 3075292 - RNA, 19 nt, Artificial Sequence
  Description of Artificial Sequence: Synthetic oligonucleotide
agaugagcugguagucaca

SEQ ID NO: 3075293 - RNA, 19 nt, Artificial Sequence
  Description of Artificial Sequence: Synthetic oligonucleotide
gagguagcguauguguagu

SEQ ID NO: 3075294 - RNA, 19 nt, Artificial Sequence
  Description of Artificial Sequence: Synthetic oligonucleotide
agugaccgcuugccgcuga

SEQ ID NO: 3075295 - RNA, 19 nt, Artificial Sequence
  Description of Artificial Sequence: Synthetic oligonucleotide
ggaaacugaaggcuggguu

SEQ ID NO: 3075296 - RNA, 19 nt, Artificial Sequence
  Description of Artificial Sequence: Synthetic oligonucleotide
acucugaggccaugauguu

SEQ ID NO: 3075297 - RNA, 19 nt, Artificial Sequence
  Description of Artificial Sequence: Synthetic oligonucleotide
aggcccacgagcaggcuga

SEQ ID NO: 3075298 - RNA, 19 nt, Artificial Sequence
  Description of Artificial Sequence: Synthetic oligonucleotide
cuccucuguugcucaccag

SEQ ID NO: 3075299 - RNA, 19 nt, Artificial Sequence
  Description of Artificial Sequence: Synthetic oligonucleotide
aggaagaauucaggugcaa

SEQ ID NO: 3075300 - RNA, 19 nt, Artificial Sequence
  Description of Artificial Sequence: Synthetic oligonucleotide
gugaccgcuugccgcugag

SEQ ID NO: 3075301 - RNA, 19 nt, Artificial Sequence
  Description of Artificial Sequence: Synthetic oligonucleotide
agcgagauccaggcccuca

SEQ ID NO: 3075302 - RNA, 19 nt, Artificial Sequence
  Description of Artificial Sequence: Synthetic oligonucleotide
guauguguaguaggacucu

SEQ ID NO: 3075303 - RNA, 19 nt, Artificial Sequence
  Description of Artificial Sequence: Synthetic oligonucleotide
ugaccgcuugccgcugagc

SEQ ID NO: 3075304 - RNA, 19 nt, Artificial Sequence
  Description of Artificial Sequence: Synthetic oligonucleotide
cugagcgguaguccaugca

SEQ ID NO: 3075305 - RNA, 19 nt, Artificial Sequence
  Description of Artificial Sequence: Synthetic oligonucleotide
guggggccacaggaggagg

SEQ ID NO: 3075306 - RNA, 19 nt, Artificial Sequence
  Description of Artificial Sequence: Synthetic oligonucleotide
ggcuggguuggagguagcg

SEQ ID NO: 3075307 - RNA, 19 nt, Artificial Sequence
  Description of Artificial Sequence: Synthetic oligonucleotide
auguggggccacaggagga

SEQ ID NO: 3075308 - RNA, 19 nt, Artificial Sequence
  Description of Artificial Sequence: Synthetic oligonucleotide
uugccgcugagcgguaguc

SEQ ID NO: 3075309 - RNA, 19 nt, Artificial Sequence
  Description of Artificial Sequence: Synthetic oligonucleotide
ucgugucgacuccucuguu

SEQ ID NO: 3075310 - RNA, 19 nt, Artificial Sequence
  Description of Artificial Sequence: Synthetic oligonucleotide
cucgugucgacuccucugu

SEQ ID NO: 3075311 - RNA, 19 nt, Artificial Sequence
  Description of Artificial Sequence: Synthetic oligonucleotide
aggccaugauguuguuaau

SEQ ID NO: 3075312 - RNA, 19 nt, Artificial Sequence
  Description of Artificial Sequence: Synthetic oligonucleotide
gcugagcgguaguccaugc

SEQ ID NO: 3075313 - RNA, 19 nt, Artificial Sequence
  Description of Artificial Sequence: Synthetic oligonucleotide
aguaggacucugaggccau

SEQ ID NO: 3075314 - RNA, 19 nt, Artificial Sequence
  Description of Artificial Sequence: Synthetic oligonucleotide
cuuccagcgcagcgagauc

SEQ ID NO: 3075315 - RNA, 19 nt, Artificial Sequence
  Description of Artificial Sequence: Synthetic oligonucleotide
gccgcugagcgguagucca

SEQ ID NO: 3075316 - RNA, 19 nt, Artificial Sequence
  Description of Artificial Sequence: Synthetic oligonucleotide
ggcccucacgauguggggc

SEQ ID NO: 3075317 - RNA, 19 nt, Artificial Sequence
  Description of Artificial Sequence: Synthetic oligonucleotide
guccaugcaugugcagcac

SEQ ID NO: 3075318 - RNA, 19 nt, Artificial Sequence
  Description of Artificial Sequence: Synthetic oligonucleotide
guaugugcucgugucgacu

SEQ ID NO: 3075319 - RNA, 19 nt, Artificial Sequence
  Description of Artificial Sequence: Synthetic oligonucleotide
gccacaggaggaggaacag

SEQ ID NO: 3075320 - RNA, 19 nt, Artificial Sequence
  Description of Artificial Sequence: Synthetic oligonucleotide
cgagcaggcugauggacac

SEQ ID NO: 3075321 - RNA, 19 nt, Artificial Sequence
  Description of Artificial Sequence: Synthetic oligonucleotide
ggccacaggaggaggaaca

SEQ ID NO: 3075322 - RNA, 19 nt, Artificial Sequence
  Description of Artificial Sequence: Synthetic oligonucleotide
cgugucgacuccucuguug

SEQ ID NO: 3075323 - RNA, 19 nt, Artificial Sequence
  Description of Artificial Sequence: Synthetic oligonucleotide
auucaggugcaaagauguu

SEQ ID NO: 3075324 - RNA, 19 nt, Artificial Sequence
  Description of Artificial Sequence: Synthetic oligonucleotide
gcgagauccaggcccucac

SEQ ID NO: 3075325 - RNA, 19 nt, Artificial Sequence
  Description of Artificial Sequence: Synthetic oligonucleotide
gaaggcuggguuggaggua

SEQ ID NO: 3075326 - RNA, 19 nt, Artificial Sequence
  Description of Artificial Sequence: Synthetic oligonucleotide
guaggacucugaggccaug

SEQ ID NO: 3075327 - RNA, 19 nt, Artificial Sequence
  Description of Artificial Sequence: Synthetic oligonucleotide
ccaugcaugugcagcacaa

SEQ ID NO: 3075328 - RNA, 19 nt, Artificial Sequence
  Description of Artificial Sequence: Synthetic oligonucleotide
gagugaccgcuugccgcug

SEQ ID NO: 3075329 - RNA, 19 nt, Artificial Sequence
  Description of Artificial Sequence: Synthetic oligonucleotide
caugcaugugcagcacaaa

SEQ ID NO: 3075330 - RNA, 19 nt, Artificial Sequence
  Description of Artificial Sequence: Synthetic oligonucleotide
caaugaagagugaccgcuu

SEQ ID NO: 3075331 - RNA, 19 nt, Artificial Sequence
  Description of Artificial Sequence: Synthetic oligonucleotide
gguuggagguagcguaugu

SEQ ID NO: 3075332 - RNA, 19 nt, Artificial Sequence
  Description of Artificial Sequence: Synthetic oligonucleotide
cgagauccaggcccucacg

SEQ ID NO: 3075333 - RNA, 19 nt, Artificial Sequence
  Description of Artificial Sequence: Synthetic oligonucleotide
gagcugguagucacaguau

SEQ ID NO: 3075334 - RNA, 19 nt, Artificial Sequence
  Description of Artificial Sequence: Synthetic oligonucleotide
ggguuggagguagcguaug

SEQ ID NO: 3075335 - RNA, 19 nt, Artificial Sequence
  Description of Artificial Sequence: Synthetic oligonucleotide
cucacgauguggggccaca

SEQ ID NO: 3075336 - RNA, 19 nt, Artificial Sequence
  Description of Artificial Sequence: Synthetic oligonucleotide
gcugguagucacaguaugu

SEQ ID NO: 3075337 - RNA, 19 nt, Artificial Sequence
  Description of Artificial Sequence: Synthetic oligonucleotide
gagcaggcugauggacaca

SEQ ID NO: 3075338 - RNA, 19 nt, Artificial Sequence
  Description of Artificial Sequence: Synthetic oligonucleotide
ccaggcccucacgaugugg

SEQ ID NO: 3075339 - RNA, 19 nt, Artificial Sequence
  Description of Artificial Sequence: Synthetic oligonucleotide
gcgguaguccaugcaugug

SEQ ID NO: 3075340 - RNA, 19 nt, Artificial Sequence
  Description of Artificial Sequence: Synthetic oligonucleotide
cuugccgcugagcgguagu

SEQ ID NO: 3075341 - RNA, 19 nt, Artificial Sequence
  Description of Artificial Sequence: Synthetic oligonucleotide
ggaggaggaacaggaugua

SEQ ID NO: 3075342 - RNA, 19 nt, Artificial Sequence
  Description of Artificial Sequence: Synthetic oligonucleotide
gcuugccgcugagcgguag

SEQ ID NO: 3075343 - RNA, 19 nt, Artificial Sequence
  Description of Artificial Sequence: Synthetic oligonucleotide
ccaccaggcccacgagcag

SEQ ID NO: 3075344 - RNA, 19 nt, Artificial Sequence
  Description of Artificial Sequence: Synthetic oligonucleotide
gugcucgugucgacuccuc

SEQ ID NO: 3075345 - RNA, 19 nt, Artificial Sequence
  Description of Artificial Sequence: Synthetic oligonucleotide
gcuggguuggagguagcgu

SEQ ID NO: 3075346 - RNA, 19 nt, Artificial Sequence
  Description of Artificial Sequence: Synthetic oligonucleotide
gcgcagcgagauccaggcc

SEQ ID NO: 3075347 - RNA, 19 nt, Artificial Sequence
  Description of Artificial Sequence: Synthetic oligonucleotide
ccagcgcagcgagauccag

SEQ ID NO: 3075348 - RNA, 19 nt, Artificial Sequence
  Description of Artificial Sequence: Synthetic oligonucleotide
ccacgagcaggcugaugga

SEQ ID NO: 3075349 - RNA, 19 nt, Artificial Sequence
  Description of Artificial Sequence: Synthetic oligonucleotide
ccaugauguuguuaaucuu

SEQ ID NO: 3075350 - RNA, 19 nt, Artificial Sequence
  Description of Artificial Sequence: Synthetic oligonucleotide
gcacaaagaugagcuggua

SEQ ID NO: 3075351 - RNA, 19 nt, Artificial Sequence
  Description of Artificial Sequence: Synthetic oligonucleotide
gcagcgagauccaggcccu

SEQ ID NO: 3075352 - RNA, 19 nt, Artificial Sequence
  Description of Artificial Sequence: Synthetic oligonucleotide
cgcugagcgguaguccaug

SEQ ID NO: 3075353 - RNA, 19 nt, Artificial Sequence
  Description of Artificial Sequence: Synthetic oligonucleotide
cagcaacuugaggaagaau

SEQ ID NO: 3075354 - RNA, 19 nt, Artificial Sequence
  Description of Artificial Sequence: Synthetic oligonucleotide
ggggccacaggaggaggaa

SEQ ID NO: 3075355 - RNA, 19 nt, Artificial Sequence
  Description of Artificial Sequence: Synthetic oligonucleotide
cagcgagauccaggcccuc

SEQ ID NO: 3075356 - RNA, 19 nt, Artificial Sequence
  Description of Artificial Sequence: Synthetic oligonucleotide
cgacuccucuguugcucac

SEQ ID NO: 3075357 - RNA, 19 nt, Artificial Sequence
  Description of Artificial Sequence: Synthetic oligonucleotide
ccucacgauguggggccac

SEQ ID NO: 3075358 - RNA, 19 nt, Artificial Sequence
  Description of Artificial Sequence: Synthetic oligonucleotide
ccgcuugccgcugagcggu

SEQ ID NO: 3075359 - RNA, 19 nt, Artificial Sequence
  Description of Artificial Sequence: Synthetic oligonucleotide
cugaggccaugauguuguu

SEQ ID NO: 3075360 - RNA, 19 nt, Artificial Sequence
  Description of Artificial Sequence: Synthetic oligonucleotide
gcccacgagcaggcugaug

SEQ ID NO: 3075361 - RNA, 19 nt, Artificial Sequence
  Description of Artificial Sequence: Synthetic oligonucleotide
cccucacgauguggggcca

SEQ ID NO: 3075362 - RNA, 19 nt, Artificial Sequence
  Description of Artificial Sequence: Synthetic oligonucleotide
gcaggcugauggacacaau

SEQ ID NO: 3075363 - RNA, 19 nt, Artificial Sequence
  Description of Artificial Sequence: Synthetic oligonucleotide
ccgcugagcgguaguccau

SEQ ID NO: 3075364 - RNA, 19 nt, Artificial Sequence
  Description of Artificial Sequence: Synthetic oligonucleotide
ggcccacgagcaggcugau

SEQ ID NO: 3075365 - RNA, 19 nt, Artificial Sequence
  Description of Artificial Sequence: Synthetic oligonucleotide
ccaggcccacgagcaggcu

SEQ ID NO: 3075366 - RNA, 19 nt, Artificial Sequence
  Description of Artificial Sequence: Synthetic oligonucleotide
cgcuugccgcugagcggua

SEQ ID NO: 3075367 - RNA, 19 nt, Artificial Sequence
  Description of Artificial Sequence: Synthetic oligonucleotide
ucaguuauuauucacaauc

SEQ ID NO: 3075368 - RNA, 19 nt, Artificial Sequence
  Description of Artificial Sequence: Synthetic oligonucleotide
uucacaauccaccaggagg

SEQ ID NO: 3075369 - RNA, 19 nt, Artificial Sequence
  Description of Artificial Sequence: Synthetic oligonucleotide
uuauucacaauccaccagg

SEQ ID NO: 3075370 - RNA, 19 nt, Artificial Sequence
  Description of Artificial Sequence: Synthetic oligonucleotide
uuauuauucacaauccacc

SEQ ID NO: 3075371 - RNA, 19 nt, Artificial Sequence
  Description of Artificial Sequence: Synthetic oligonucleotide
ugccaaaacucauagaggg

SEQ ID NO: 3075372 - RNA, 19 nt, Artificial Sequence
  Description of Artificial Sequence: Synthetic oligonucleotide
aagaacacaguggugaggg

SEQ ID NO: 3075373 - RNA, 19 nt, Artificial Sequence
  Description of Artificial Sequence: Synthetic oligonucleotide
aacucauagagggugaagg

SEQ ID NO: 3075374 - RNA, 19 nt, Artificial Sequence
  Description of Artificial Sequence: Synthetic oligonucleotide
ucauagagggugaagguag

SEQ ID NO: 3075375 - RNA, 19 nt, Artificial Sequence
  Description of Artificial Sequence: Synthetic oligonucleotide
aaugaggguacgcuggaag

SEQ ID NO: 3075376 - RNA, 19 nt, Artificial Sequence
  Description of Artificial Sequence: Synthetic oligonucleotide
agagucaccagcuuaagca

SEQ ID NO: 3075377 - RNA, 19 nt, Artificial Sequence
  Description of Artificial Sequence: Synthetic oligonucleotide
ugcaggugaucaaugaggg

SEQ ID NO: 3075378 - RNA, 19 nt, Artificial Sequence
  Description of Artificial Sequence: Synthetic oligonucleotide
cuucucagcagacacaugc

SEQ ID NO: 3075379 - RNA, 19 nt, Artificial Sequence
  Description of Artificial Sequence: Synthetic oligonucleotide
gucaaguucauguagcagc

SEQ ID NO: 3075380 - RNA, 19 nt, Artificial Sequence
  Description of Artificial Sequence: Synthetic oligonucleotide
cagacaauggcucugggcc

SEQ ID NO: 3075381 - RNA, 19 nt, Artificial Sequence
  Description of Artificial Sequence: Synthetic oligonucleotide
uauuauucacaauccacca

SEQ ID NO: 3075382 - RNA, 19 nt, Artificial Sequence
  Description of Artificial Sequence: Synthetic oligonucleotide
ucuagaaugauaggcgggg

SEQ ID NO: 3075383 - RNA, 19 nt, Artificial Sequence
  Description of Artificial Sequence: Synthetic oligonucleotide
acugcuggugccuuucucc

SEQ ID NO: 3075384 - RNA, 19 nt, Artificial Sequence
  Description of Artificial Sequence: Synthetic oligonucleotide
uggucuagcaucuucucag

SEQ ID NO: 3075385 - RNA, 19 nt, Artificial Sequence
  Description of Artificial Sequence: Synthetic oligonucleotide
gacacaugcagacaauggc

SEQ ID NO: 3075386 - RNA, 19 nt, Artificial Sequence
  Description of Artificial Sequence: Synthetic oligonucleotide
ugcaggaggcucuagaaug

SEQ ID NO: 3075387 - RNA, 19 nt, Artificial Sequence
  Description of Artificial Sequence: Synthetic oligonucleotide
aaguucauguagcagcaca

SEQ ID NO: 3075388 - RNA, 19 nt, Artificial Sequence
  Description of Artificial Sequence: Synthetic oligonucleotide
ucauguagcagcacagggc

SEQ ID NO: 3075389 - RNA, 19 nt, Artificial Sequence
  Description of Artificial Sequence: Synthetic oligonucleotide
ucuagcaucuucucagcag

SEQ ID NO: 3075390 - RNA, 19 nt, Artificial Sequence
  Description of Artificial Sequence: Synthetic oligonucleotide
aggcucuagaaugauaggc

SEQ ID NO: 3075391 - RNA, 19 nt, Artificial Sequence
  Description of Artificial Sequence: Synthetic oligonucleotide
caguuauuauucacaaucc

SEQ ID NO: 3075392 - RNA, 19 nt, Artificial Sequence
  Description of Artificial Sequence: Synthetic oligonucleotide
auuauucacaauccaccag

SEQ ID NO: 3075393 - RNA, 19 nt, Artificial Sequence
  Description of Artificial Sequence: Synthetic oligonucleotide
ucaaguucauguagcagca

SEQ ID NO: 3075394 - RNA, 19 nt, Artificial Sequence
  Description of Artificial Sequence: Synthetic oligonucleotide
ucuccaggaggcuucaucc

SEQ ID NO: 3075395 - RNA, 19 nt, Artificial Sequence
  Description of Artificial Sequence: Synthetic oligonucleotide
cugcaggugaucaaugagg

SEQ ID NO: 3075396 - RNA, 19 nt, Artificial Sequence
  Description of Artificial Sequence: Synthetic oligonucleotide
aguuauuauucacaaucca

SEQ ID NO: 3075397 - RNA, 19 nt, Artificial Sequence
  Description of Artificial Sequence: Synthetic oligonucleotide
guuauuauucacaauccac

SEQ ID NO: 3075398 - RNA, 19 nt, Artificial Sequence
  Description of Artificial Sequence: Synthetic oligonucleotide
ucagcagacacaugcagac

SEQ ID NO: 3075399 - RNA, 19 nt, Artificial Sequence
  Description of Artificial Sequence: Synthetic oligonucleotide
ucucagcagacacaugcag

SEQ ID NO: 3075400 - RNA, 19 nt, Artificial Sequence
  Description of Artificial Sequence: Synthetic oligonucleotide
ccugccaaaacucauagag

SEQ ID NO: 3075401 - RNA, 19 nt, Artificial Sequence
  Description of Artificial Sequence: Synthetic oligonucleotide
uguagcagcacagggcacg

SEQ ID NO: 3075402 - RNA, 19 nt, Artificial Sequence
  Description of Artificial Sequence: Synthetic oligonucleotide
cagggcacggugaaaaucc

SEQ ID NO: 3075403 - RNA, 19 nt, Artificial Sequence
  Description of Artificial Sequence: Synthetic oligonucleotide
augaggguacgcuggaagg

SEQ ID NO: 3075404 - RNA, 19 nt, Artificial Sequence
  Description of Artificial Sequence: Synthetic oligonucleotide
gaucaaugaggguacgcug

SEQ ID NO: 3075405 - RNA, 19 nt, Artificial Sequence
  Description of Artificial Sequence: Synthetic oligonucleotide
agacaauggcucugggccc

SEQ ID NO: 3075406 - RNA, 19 nt, Artificial Sequence
  Description of Artificial Sequence: Synthetic oligonucleotide
caauccaccaggaggcugg

SEQ ID NO: 3075407 - RNA, 19 nt, Artificial Sequence
  Description of Artificial Sequence: Synthetic oligonucleotide
gaggcugggaagaacacag

SEQ ID NO: 3075408 - RNA, 19 nt, Artificial Sequence
  Description of Artificial Sequence: Synthetic oligonucleotide
gagucaccagcuuaagcag

SEQ ID NO: 3075409 - RNA, 19 nt, Artificial Sequence
  Description of Artificial Sequence: Synthetic oligonucleotide
agagggugaagguagcaug

SEQ ID NO: 3075410 - RNA, 19 nt, Artificial Sequence
  Description of Artificial Sequence: Synthetic oligonucleotide
uauucacaauccaccagga

SEQ ID NO: 3075411 - RNA, 19 nt, Artificial Sequence
  Description of Artificial Sequence: Synthetic oligonucleotide
cucuagaaugauaggcggg

SEQ ID NO: 3075412 - RNA, 19 nt, Artificial Sequence
  Description of Artificial Sequence: Synthetic oligonucleotide
ugaucaaugaggguacgcu

SEQ ID NO: 3075413 - RNA, 19 nt, Artificial Sequence
  Description of Artificial Sequence: Synthetic oligonucleotide
cugccaaaacucauagagg

SEQ ID NO: 3075414 - RNA, 19 nt, Artificial Sequence
  Description of Artificial Sequence: Synthetic oligonucleotide
aucaaugaggguacgcugg

SEQ ID NO: 3075415 - RNA, 19 nt, Artificial Sequence
  Description of Artificial Sequence: Synthetic oligonucleotide
uuaagcagacccgacucag

SEQ ID NO: 3075416 - RNA, 19 nt, Artificial Sequence
  Description of Artificial Sequence: Synthetic oligonucleotide
gguagcauggucuagcauc

SEQ ID NO: 3075417 - RNA, 19 nt, Artificial Sequence
  Description of Artificial Sequence: Synthetic oligonucleotide
uucauccugccaaaacuca

SEQ ID NO: 3075418 - RNA, 19 nt, Artificial Sequence
  Description of Artificial Sequence: Synthetic oligonucleotide
uagaaugauaggcggggcu

SEQ ID NO: 3075419 - RNA, 19 nt, Artificial Sequence
  Description of Artificial Sequence: Synthetic oligonucleotide
gaagguagcauggucuagc

SEQ ID NO: 3075420 - RNA, 19 nt, Artificial Sequence
  Description of Artificial Sequence: Synthetic oligonucleotide
auccugccaaaacucauag

SEQ ID NO: 3075421 - RNA, 19 nt, Artificial Sequence
  Description of Artificial Sequence: Synthetic oligonucleotide
ggugccuuucuccaggagg

SEQ ID NO: 3075422 - RNA, 19 nt, Artificial Sequence
  Description of Artificial Sequence: Synthetic oligonucleotide
agcagacacaugcagacaa

SEQ ID NO: 3075423 - RNA, 19 nt, Artificial Sequence
  Description of Artificial Sequence: Synthetic oligonucleotide
ggaggcucuagaaugauag

SEQ ID NO: 3075424 - RNA, 19 nt, Artificial Sequence
  Description of Artificial Sequence: Synthetic oligonucleotide
cauguagcagcacagggca

SEQ ID NO: 3075425 - RNA, 19 nt, Artificial Sequence
  Description of Artificial Sequence: Synthetic oligonucleotide
aagguagcauggucuagca

SEQ ID NO: 3075426 - RNA, 19 nt, Artificial Sequence
  Description of Artificial Sequence: Synthetic oligonucleotide
ugauaggcggggcuggaga

SEQ ID NO: 3075427 - RNA, 19 nt, Artificial Sequence
  Description of Artificial Sequence: Synthetic oligonucleotide
uggagagucaccagcuuaa

SEQ ID NO: 3075428 - RNA, 19 nt, Artificial Sequence
  Description of Artificial Sequence: Synthetic oligonucleotide
gauaggcggggcuggagag

SEQ ID NO: 3075429 - RNA, 19 nt, Artificial Sequence
  Description of Artificial Sequence: Synthetic oligonucleotide
gaacacaguggugagggug

SEQ ID NO: 3075430 - RNA, 19 nt, Artificial Sequence
  Description of Artificial Sequence: Synthetic oligonucleotide
acaguggugaggguguccg

SEQ ID NO: 3075431 - RNA, 19 nt, Artificial Sequence
  Description of Artificial Sequence: Synthetic oligonucleotide
aaacucauagagggugaag

SEQ ID NO: 3075432 - RNA, 19 nt, Artificial Sequence
  Description of Artificial Sequence: Synthetic oligonucleotide
cacggugaaaauccggcag

SEQ ID NO: 3075433 - RNA, 19 nt, Artificial Sequence
  Description of Artificial Sequence: Synthetic oligonucleotide
gacucaguuauuauucaca

SEQ ID NO: 3075434 - RNA, 19 nt, Artificial Sequence
  Description of Artificial Sequence: Synthetic oligonucleotide
gaagaacacaguggugagg

SEQ ID NO: 3075435 - RNA, 19 nt, Artificial Sequence
  Description of Artificial Sequence: Synthetic oligonucleotide
caccagcuuaagcagaccc

SEQ ID NO: 3075436 - RNA, 19 nt, Artificial Sequence
  Description of Artificial Sequence: Synthetic oligonucleotide
agacacaugcagacaaugg

SEQ ID NO: 3075437 - RNA, 19 nt, Artificial Sequence
  Description of Artificial Sequence: Synthetic oligonucleotide
auucacaauccaccaggag

SEQ ID NO: 3075438 - RNA, 19 nt, Artificial Sequence
  Description of Artificial Sequence: Synthetic oligonucleotide
gcucuagaaugauaggcgg

SEQ ID NO: 3075439 - RNA, 19 nt, Artificial Sequence
  Description of Artificial Sequence: Synthetic oligonucleotide
ucaaugaggguacgcugga

SEQ ID NO: 3075440 - RNA, 19 nt, Artificial Sequence
  Description of Artificial Sequence: Synthetic oligonucleotide
gaggcucuagaaugauagg

SEQ ID NO: 3075441 - RNA, 19 nt, Artificial Sequence
  Description of Artificial Sequence: Synthetic oligonucleotide
acucauagagggugaaggu

SEQ ID NO: 3075442 - RNA, 19 nt, Artificial Sequence
  Description of Artificial Sequence: Synthetic oligonucleotide
gaaugauaggcggggcugg

SEQ ID NO: 3075443 - RNA, 19 nt, Artificial Sequence
  Description of Artificial Sequence: Synthetic oligonucleotide
aguucauguagcagcacag

SEQ ID NO: 3075444 - RNA, 19 nt, Artificial Sequence
  Description of Artificial Sequence: Synthetic oligonucleotide
uucucagcagacacaugca

SEQ ID NO: 3075445 - RNA, 19 nt, Artificial Sequence
  Description of Artificial Sequence: Synthetic oligonucleotide
agaaugauaggcggggcug

SEQ ID NO: 3075446 - RNA, 19 nt, Artificial Sequence
  Description of Artificial Sequence: Synthetic oligonucleotide
cacaugcagacaauggcuc

SEQ ID NO: 3075447 - RNA, 19 nt, Artificial Sequence
  Description of Artificial Sequence: Synthetic oligonucleotide
  modified_base (9)..(9): a, c, u, g, unknown or other
ugggccccngucaaguuca

SEQ ID NO: 3075448 - RNA, 19 nt, Artificial Sequence
  Description of Artificial Sequence: Synthetic oligonucleotide
aacacaguggugagggugu

SEQ ID NO: 3075449 - RNA, 19 nt, Artificial Sequence
  Description of Artificial Sequence: Synthetic oligonucleotide
ggcucuagaaugauaggcg

SEQ ID NO: 3075450 - RNA, 19 nt, Artificial Sequence
  Description of Artificial Sequence: Synthetic oligonucleotide
agcuuaagcagacccgacu

SEQ ID NO: 3075451 - RNA, 19 nt, Artificial Sequence
  Description of Artificial Sequence: Synthetic oligonucleotide
aagcagacccgacucaguu

SEQ ID NO: 3075452 - RNA, 19 nt, Artificial Sequence
  Description of Artificial Sequence: Synthetic oligonucleotide
aggugaucaaugaggguac

SEQ ID NO: 3075453 - RNA, 19 nt, Artificial Sequence
  Description of Artificial Sequence: Synthetic oligonucleotide
cuagcaucuucucagcaga

SEQ ID NO: 3075454 - RNA, 19 nt, Artificial Sequence
  Description of Artificial Sequence: Synthetic oligonucleotide
guucauguagcagcacagg

SEQ ID NO: 3075455 - RNA, 19 nt, Artificial Sequence
  Description of Artificial Sequence: Synthetic oligonucleotide
cauagagggugaagguagc

SEQ ID NO: 3075456 - RNA, 19 nt, Artificial Sequence
  Description of Artificial Sequence: Synthetic oligonucleotide
uucuccaggaggcuucauc

SEQ ID NO: 3075457 - RNA, 19 nt, Artificial Sequence
  Description of Artificial Sequence: Synthetic oligonucleotide
ugaggguacgcuggaaggc

SEQ ID NO: 3075458 - RNA, 19 nt, Artificial Sequence
  Description of Artificial Sequence: Synthetic oligonucleotide
acacaugcagacaauggcu

SEQ ID NO: 3075459 - RNA, 19 nt, Artificial Sequence
  Description of Artificial Sequence: Synthetic oligonucleotide
  modified_base (3)..(3): a, c, u, g, unknown or other
ccngucaaguucauguagc

SEQ ID NO: 3075460 - RNA, 19 nt, Artificial Sequence
  Description of Artificial Sequence: Synthetic oligonucleotide
ugcagacaauggcucuggg

SEQ ID NO: 3075461 - RNA, 19 nt, Artificial Sequence
  Description of Artificial Sequence: Synthetic oligonucleotide
aaaacucauagagggugaa

SEQ ID NO: 3075462 - RNA, 19 nt, Artificial Sequence
  Description of Artificial Sequence: Synthetic oligonucleotide
acagggcacggugaaaauc

SEQ ID NO: 3075463 - RNA, 19 nt, Artificial Sequence
  Description of Artificial Sequence: Synthetic oligonucleotide
acaugcagacaauggcucu

SEQ ID NO: 3075464 - RNA, 19 nt, Artificial Sequence
  Description of Artificial Sequence: Synthetic oligonucleotide
gggaagaacacagugguga

SEQ ID NO: 3075465 - RNA, 19 nt, Artificial Sequence
  Description of Artificial Sequence: Synthetic oligonucleotide
ggaagaacacaguggugag

SEQ ID NO: 3075466 - RNA, 19 nt, Artificial Sequence
  Description of Artificial Sequence: Synthetic oligonucleotide
accagcuuaagcagacccg

SEQ ID NO: 3075467 - RNA, 19 nt, Artificial Sequence
  Description of Artificial Sequence: Synthetic oligonucleotide
ccaaaacucauagagggug

SEQ ID NO: 3075468 - RNA, 19 nt, Artificial Sequence
  Description of Artificial Sequence: Synthetic oligonucleotide
gugccuuucuccaggaggc

SEQ ID NO: 3075469 - RNA, 19 nt, Artificial Sequence
  Description of Artificial Sequence: Synthetic oligonucleotide
caaaacucauagaggguga

SEQ ID NO: 3075470 - RNA, 19 nt, Artificial Sequence
  Description of Artificial Sequence: Synthetic oligonucleotide
ugaagguagcauggucuag

SEQ ID NO: 3075471 - RNA, 19 nt, Artificial Sequence
  Description of Artificial Sequence: Synthetic oligonucleotide
gaggguacgcuggaaggcc

SEQ ID NO: 3075472 - RNA, 19 nt, Artificial Sequence
  Description of Artificial Sequence: Synthetic oligonucleotide
uaagcagacccgacucagu

SEQ ID NO: 3075473 - RNA, 19 nt, Artificial Sequence
  Description of Artificial Sequence: Synthetic oligonucleotide
  modified_base (17)..(17): a, c, u, g, unknown or other
aauggcucugggccccngu

SEQ ID NO: 3075474 - RNA, 19 nt, Artificial Sequence
  Description of Artificial Sequence: Synthetic oligonucleotide
caggugaucaaugagggua

SEQ ID NO: 3075475 - RNA, 19 nt, Artificial Sequence
  Description of Artificial Sequence: Synthetic oligonucleotide
cuagaaugauaggcggggc

SEQ ID NO: 3075476 - RNA, 19 nt, Artificial Sequence
  Description of Artificial Sequence: Synthetic oligonucleotide
accugcaggugaucaauga

SEQ ID NO: 3075477 - RNA, 19 nt, Artificial Sequence
  Description of Artificial Sequence: Synthetic oligonucleotide
cagacacaugcagacaaug

SEQ ID NO: 3075478 - RNA, 19 nt, Artificial Sequence
  Description of Artificial Sequence: Synthetic oligonucleotide
uacgcuggaaggccuugcu

SEQ ID NO: 3075479 - RNA, 19 nt, Artificial Sequence
  Description of Artificial Sequence: Synthetic oligonucleotide
cauggucuagcaucuucuc

SEQ ID NO: 3075480 - RNA, 19 nt, Artificial Sequence
  Description of Artificial Sequence: Synthetic oligonucleotide
gacaauggcucugggcccc

SEQ ID NO: 3075481 - RNA, 19 nt, Artificial Sequence
  Description of Artificial Sequence: Synthetic oligonucleotide
gcuuaagcagacccgacuc

SEQ ID NO: 3075482 - RNA, 19 nt, Artificial Sequence
  Description of Artificial Sequence: Synthetic oligonucleotide
cuugcugcagggcgacugc

SEQ ID NO: 3075483 - RNA, 19 nt, Artificial Sequence
  Description of Artificial Sequence: Synthetic oligonucleotide
cugggaagaacacaguggu

SEQ ID NO: 3075484 - RNA, 19 nt, Artificial Sequence
  Description of Artificial Sequence: Synthetic oligonucleotide
gcuggugccuuucuccagg

SEQ ID NO: 3075485 - RNA, 19 nt, Artificial Sequence
  Description of Artificial Sequence: Synthetic oligonucleotide
cccgacucaguuauuauuc

SEQ ID NO: 3075486 - RNA, 19 nt, Artificial Sequence
  Description of Artificial Sequence: Synthetic oligonucleotide
aaugauaggcggggcugga

SEQ ID NO: 3075487 - RNA, 19 nt, Artificial Sequence
  Description of Artificial Sequence: Synthetic oligonucleotide
  modified_base (2)..(2): a, c, u, g, unknown or other
cngucaaguucauguagca

SEQ ID NO: 3075488 - RNA, 19 nt, Artificial Sequence
  Description of Artificial Sequence: Synthetic oligonucleotide
uagagggugaagguagcau

SEQ ID NO: 3075489 - RNA, 19 nt, Artificial Sequence
  Description of Artificial Sequence: Synthetic oligonucleotide
caugcagacaauggcucug

SEQ ID NO: 3075490 - RNA, 19 nt, Artificial Sequence
  Description of Artificial Sequence: Synthetic oligonucleotide
ggaggcuucauccugccaa

SEQ ID NO: 3075491 - RNA, 19 nt, Artificial Sequence
  Description of Artificial Sequence: Synthetic oligonucleotide
cuuaagcagacccgacuca

SEQ ID NO: 3075492 - RNA, 19 nt, Artificial Sequence
  Description of Artificial Sequence: Synthetic oligonucleotide
augcaggaggcucuagaau

SEQ ID NO: 3075493 - RNA, 19 nt, Artificial Sequence
  Description of Artificial Sequence: Synthetic oligonucleotide
aauccaccaggaggcuggg

SEQ ID NO: 3075494 - RNA, 19 nt, Artificial Sequence
  Description of Artificial Sequence: Synthetic oligonucleotide
ggcacggugaaaauccggc

SEQ ID NO: 3075495 - RNA, 19 nt, Artificial Sequence
  Description of Artificial Sequence: Synthetic oligonucleotide
uccugccaaaacucauaga

SEQ ID NO: 3075496 - RNA, 19 nt, Artificial Sequence
  Description of Artificial Sequence: Synthetic oligonucleotide
ugcagggcgacugcuggug

SEQ ID NO: 3075497 - RNA, 19 nt, Artificial Sequence
  Description of Artificial Sequence: Synthetic oligonucleotide
gugaucaaugaggguacgc

SEQ ID NO: 3075498 - RNA, 19 nt, Artificial Sequence
  Description of Artificial Sequence: Synthetic oligonucleotide
  modified_base (10)..(10): a, c, u, g, unknown or other
cugggccccngucaaguuc

SEQ ID NO: 3075499 - RNA, 19 nt, Artificial Sequence
  Description of Artificial Sequence: Synthetic oligonucleotide
gcagacaauggcucugggc

SEQ ID NO: 3075500 - RNA, 19 nt, Artificial Sequence
  Description of Artificial Sequence: Synthetic oligonucleotide
  modified_base (15)..(15): a, c, u, g, unknown or other
uggcucugggccccnguca

SEQ ID NO: 3075501 - RNA, 19 nt, Artificial Sequence
  Description of Artificial Sequence: Synthetic oligonucleotide
ugcuggugccuuucuccag

SEQ ID NO: 3075502 - RNA, 19 nt, Artificial Sequence
  Description of Artificial Sequence: Synthetic oligonucleotide
  modified_base (4)..(4): a, c, u, g, unknown or other
cccngucaaguucauguag

SEQ ID NO: 3075503 - RNA, 19 nt, Artificial Sequence
  Description of Artificial Sequence: Synthetic oligonucleotide
acccgacucaguuauuauu

SEQ ID NO: 3075504 - RNA, 19 nt, Artificial Sequence
  Description of Artificial Sequence: Synthetic oligonucleotide
caaugcaggaggcucuaga

SEQ ID NO: 3075505 - RNA, 19 nt, Artificial Sequence
  Description of Artificial Sequence: Synthetic oligonucleotide
guagcagcacagggcacgg

SEQ ID NO: 3075506 - RNA, 19 nt, Artificial Sequence
  Description of Artificial Sequence: Synthetic oligonucleotide
gucaccagcuuaagcagac

SEQ ID NO: 3075507 - RNA, 19 nt, Artificial Sequence
  Description of Artificial Sequence: Synthetic oligonucleotide
acaauccaccaggaggcug

SEQ ID NO: 3075508 - RNA, 19 nt, Artificial Sequence
  Description of Artificial Sequence: Synthetic oligonucleotide
gguguccgggaccugcagg

SEQ ID NO: 3075509 - RNA, 19 nt, Artificial Sequence
  Description of Artificial Sequence: Synthetic oligonucleotide
auagagggugaagguagca

SEQ ID NO: 3075510 - RNA, 19 nt, Artificial Sequence
  Description of Artificial Sequence: Synthetic oligonucleotide
gucuagcaucuucucagca

SEQ ID NO: 3075511 - RNA, 19 nt, Artificial Sequence
  Description of Artificial Sequence: Synthetic oligonucleotide
acgcuggaaggccuugcug

SEQ ID NO: 3075512 - RNA, 19 nt, Artificial Sequence
  Description of Artificial Sequence: Synthetic oligonucleotide
gugaagguagcauggucua

SEQ ID NO: 3075513 - RNA, 19 nt, Artificial Sequence
  Description of Artificial Sequence: Synthetic oligonucleotide
ggucuagcaucuucucagc

SEQ ID NO: 3075514 - RNA, 19 nt, Artificial Sequence
  Description of Artificial Sequence: Synthetic oligonucleotide
gcuucauccugccaaaacu

SEQ ID NO: 3075515 - RNA, 19 nt, Artificial Sequence
  Description of Artificial Sequence: Synthetic oligonucleotide
ccugcaggugaucaaugag

SEQ ID NO: 3075516 - RNA, 19 nt, Artificial Sequence
  Description of Artificial Sequence: Synthetic oligonucleotide
agaacacaguggugagggu

SEQ ID NO: 3075517 - RNA, 19 nt, Artificial Sequence
  Description of Artificial Sequence: Synthetic oligonucleotide
caggaggcuucauccugcc

SEQ ID NO: 3075518 - RNA, 19 nt, Artificial Sequence
  Description of Artificial Sequence: Synthetic oligonucleotide
gaccugcaggugaucaaug

SEQ ID NO: 3075519 - RNA, 19 nt, Artificial Sequence
  Description of Artificial Sequence: Synthetic oligonucleotide
gaggcuucauccugccaaa

SEQ ID NO: 3075520 - RNA, 19 nt, Artificial Sequence
  Description of Artificial Sequence: Synthetic oligonucleotide
cgcuggaaggccuugcugc

SEQ ID NO: 3075521 - RNA, 19 nt, Artificial Sequence
  Description of Artificial Sequence: Synthetic oligonucleotide
ggcuucauccugccaaaac

SEQ ID NO: 3075522 - RNA, 19 nt, Artificial Sequence
  Description of Artificial Sequence: Synthetic oligonucleotide
ucaccagcuuaagcagacc

SEQ ID NO: 3075523 - RNA, 19 nt, Artificial Sequence
  Description of Artificial Sequence: Synthetic oligonucleotide
ggugaagguagcauggucu

SEQ ID NO: 3075524 - RNA, 19 nt, Artificial Sequence
  Description of Artificial Sequence: Synthetic oligonucleotide
gaaggccuugcugcagggc

SEQ ID NO: 3075525 - RNA, 19 nt, Artificial Sequence
  Description of Artificial Sequence: Synthetic oligonucleotide
agucaccagcuuaagcaga

SEQ ID NO: 3075526 - RNA, 19 nt, Artificial Sequence
  Description of Artificial Sequence: Synthetic oligonucleotide
gacugcuggugccuuucuc

SEQ ID NO: 3075527 - RNA, 19 nt, Artificial Sequence
  Description of Artificial Sequence: Synthetic oligonucleotide
cagcuuaagcagacccgac

SEQ ID NO: 3075528 - RNA, 19 nt, Artificial Sequence
  Description of Artificial Sequence: Synthetic oligonucleotide
gggcuggagagucaccagc

SEQ ID NO: 3075529 - RNA, 19 nt, Artificial Sequence
  Description of Artificial Sequence: Synthetic oligonucleotide
agacccgacucaguuauua

SEQ ID NO: 3075530 - RNA, 19 nt, Artificial Sequence
  Description of Artificial Sequence: Synthetic oligonucleotide
cauccugccaaaacucaua

SEQ ID NO: 3075531 - RNA, 19 nt, Artificial Sequence
  Description of Artificial Sequence: Synthetic oligonucleotide
uccgggaccugcaggugau

SEQ ID NO: 3075532 - RNA, 19 nt, Artificial Sequence
  Description of Artificial Sequence: Synthetic oligonucleotide
cagggcgacugcuggugcc

SEQ ID NO: 3075533 - RNA, 19 nt, Artificial Sequence
  Description of Artificial Sequence: Synthetic oligonucleotide
cucauagagggugaaggua

SEQ ID NO: 3075534 - RNA, 19 nt, Artificial Sequence
  Description of Artificial Sequence: Synthetic oligonucleotide
uaggcggggcuggagaguc

SEQ ID NO: 3075535 - RNA, 19 nt, Artificial Sequence
  Description of Artificial Sequence: Synthetic oligonucleotide
augauaggcggggcuggag

SEQ ID NO: 3075536 - RNA, 19 nt, Artificial Sequence
  Description of Artificial Sequence: Synthetic oligonucleotide
guagcauggucuagcaucu

SEQ ID NO: 3075537 - RNA, 19 nt, Artificial Sequence
  Description of Artificial Sequence: Synthetic oligonucleotide
auguagcagcacagggcac

SEQ ID NO: 3075538 - RNA, 19 nt, Artificial Sequence
  Description of Artificial Sequence: Synthetic oligonucleotide
agcagacccgacucaguua

SEQ ID NO: 3075539 - RNA, 19 nt, Artificial Sequence
  Description of Artificial Sequence: Synthetic oligonucleotide
ggugaggguguccgggacc

SEQ ID NO: 3075540 - RNA, 19 nt, Artificial Sequence
  Description of Artificial Sequence: Synthetic oligonucleotide
ccaggaggcuucauccugc

SEQ ID NO: 3075541 - RNA, 19 nt, Artificial Sequence
  Description of Artificial Sequence: Synthetic oligonucleotide
cuggagagucaccagcuua

SEQ ID NO: 3075542 - RNA, 19 nt, Artificial Sequence
  Description of Artificial Sequence: Synthetic oligonucleotide
ggugaucaaugaggguacg

SEQ ID NO: 3075543 - RNA, 19 nt, Artificial Sequence
  Description of Artificial Sequence: Synthetic oligonucleotide
agggcacggugaaaauccg

SEQ ID NO: 3075544 - RNA, 19 nt, Artificial Sequence
  Description of Artificial Sequence: Synthetic oligonucleotide
cugcuggugccuuucucca

SEQ ID NO: 3075545 - RNA, 19 nt, Artificial Sequence
  Description of Artificial Sequence: Synthetic oligonucleotide
agguagcauggucuagcau

SEQ ID NO: 3075546 - RNA, 19 nt, Artificial Sequence
  Description of Artificial Sequence: Synthetic oligonucleotide
  modified_base (6)..(6): a, c, u, g, unknown or other
gccccngucaaguucaugu

SEQ ID NO: 3075547 - RNA, 19 nt, Artificial Sequence
  Description of Artificial Sequence: Synthetic oligonucleotide
caaguucauguagcagcac

SEQ ID NO: 3075548 - RNA, 19 nt, Artificial Sequence
  Description of Artificial Sequence: Synthetic oligonucleotide
ccuuucuccaggaggcuuc

SEQ ID NO: 3075549 - RNA, 19 nt, Artificial Sequence
  Description of Artificial Sequence: Synthetic oligonucleotide
acacaguggugaggguguc

SEQ ID NO: 3075550 - RNA, 19 nt, Artificial Sequence
  Description of Artificial Sequence: Synthetic oligonucleotide
cacaguggugagggugucc

SEQ ID NO: 3075551 - RNA, 19 nt, Artificial Sequence
  Description of Artificial Sequence: Synthetic oligonucleotide
gggugaagguagcaugguc

SEQ ID NO: 3075552 - RNA, 19 nt, Artificial Sequence
  Description of Artificial Sequence: Synthetic oligonucleotide
cuggaaggccuugcugcag

SEQ ID NO: 3075553 - RNA, 19 nt, Artificial Sequence
  Description of Artificial Sequence: Synthetic oligonucleotide
guccgggaccugcagguga

SEQ ID NO: 3075554 - RNA, 19 nt, Artificial Sequence
  Description of Artificial Sequence: Synthetic oligonucleotide
aggaggcuucauccugcca

SEQ ID NO: 3075555 - RNA, 19 nt, Artificial Sequence
  Description of Artificial Sequence: Synthetic oligonucleotide
guacgcuggaaggccuugc

SEQ ID NO: 3075556 - RNA, 19 nt, Artificial Sequence
  Description of Artificial Sequence: Synthetic oligonucleotide
  modified_base (11)..(11): a, c, u, g, unknown or other
ucugggccccngucaaguu

SEQ ID NO: 3075557 - RNA, 19 nt, Artificial Sequence
  Description of Artificial Sequence: Synthetic oligonucleotide
guguccgggaccugcaggu

SEQ ID NO: 3075558 - RNA, 19 nt, Artificial Sequence
  Description of Artificial Sequence: Synthetic oligonucleotide
uguccgggaccugcaggug

SEQ ID NO: 3075559 - RNA, 19 nt, Artificial Sequence
  Description of Artificial Sequence: Synthetic oligonucleotide
ggagagucaccagcuuaag

SEQ ID NO: 3075560 - RNA, 19 nt, Artificial Sequence
  Description of Artificial Sequence: Synthetic oligonucleotide
cgacucaguuauuauucac

SEQ ID NO: 3075561 - RNA, 19 nt, Artificial Sequence
  Description of Artificial Sequence: Synthetic oligonucleotide
auaggcggggcuggagagu

SEQ ID NO: 3075562 - RNA, 19 nt, Artificial Sequence
  Description of Artificial Sequence: Synthetic oligonucleotide
gggcacggugaaaauccgg

SEQ ID NO: 3075563 - RNA, 19 nt, Artificial Sequence
  Description of Artificial Sequence: Synthetic oligonucleotide
cucaguuauuauucacaau

SEQ ID NO: 3075564 - RNA, 19 nt, Artificial Sequence
  Description of Artificial Sequence: Synthetic oligonucleotide
  modified_base (14)..(14): a, c, u, g, unknown or other
ggcucugggccccngucaa

SEQ ID NO: 3075565 - RNA, 19 nt, Artificial Sequence
  Description of Artificial Sequence: Synthetic oligonucleotide
ugccuuucuccaggaggcu

SEQ ID NO: 3075566 - RNA, 19 nt, Artificial Sequence
  Description of Artificial Sequence: Synthetic oligonucleotide
gcagacccgacucaguuau

SEQ ID NO: 3075567 - RNA, 19 nt, Artificial Sequence
  Description of Artificial Sequence: Synthetic oligonucleotide
gcacggugaaaauccggca

SEQ ID NO: 3075568 - RNA, 19 nt, Artificial Sequence
  Description of Artificial Sequence: Synthetic oligonucleotide
ggggcuggagagucaccag

SEQ ID NO: 3075569 - RNA, 19 nt, Artificial Sequence
  Description of Artificial Sequence: Synthetic oligonucleotide
agggcgacugcuggugccu

SEQ ID NO: 3075570 - RNA, 19 nt, Artificial Sequence
  Description of Artificial Sequence: Synthetic oligonucleotide
aggguacgcuggaaggccu

SEQ ID NO: 3075571 - RNA, 19 nt, Artificial Sequence
  Description of Artificial Sequence: Synthetic oligonucleotide
gacccgacucaguuauuau

SEQ ID NO: 3075572 - RNA, 19 nt, Artificial Sequence
  Description of Artificial Sequence: Synthetic oligonucleotide
ccagcuuaagcagacccga

SEQ ID NO: 3075573 - RNA, 19 nt, Artificial Sequence
  Description of Artificial Sequence: Synthetic oligonucleotide
cuuucuccaggaggcuuca

SEQ ID NO: 3075574 - RNA, 19 nt, Artificial Sequence
  Description of Artificial Sequence: Synthetic oligonucleotide
gcacagggcacggugaaaa

SEQ ID NO: 3075575 - RNA, 19 nt, Artificial Sequence
  Description of Artificial Sequence: Synthetic oligonucleotide
ccuugcugcagggcgacug

SEQ ID NO: 3075576 - RNA, 19 nt, Artificial Sequence
  Description of Artificial Sequence: Synthetic oligonucleotide
ccgacucaguuauuauuca

SEQ ID NO: 3075577 - RNA, 19 nt, Artificial Sequence
  Description of Artificial Sequence: Synthetic oligonucleotide
gguacgcuggaaggccuug

SEQ ID NO: 3075578 - RNA, 19 nt, Artificial Sequence
  Description of Artificial Sequence: Synthetic oligonucleotide
gugaggguguccgggaccu

SEQ ID NO: 3075579 - RNA, 19 nt, Artificial Sequence
  Description of Artificial Sequence: Synthetic oligonucleotide
gcauggucuagcaucuucu

SEQ ID NO: 3075580 - RNA, 19 nt, Artificial Sequence
  Description of Artificial Sequence: Synthetic oligonucleotide
gcagggcgacugcuggugc

SEQ ID NO: 3075581 - RNA, 19 nt, Artificial Sequence
  Description of Artificial Sequence: Synthetic oligonucleotide
aggccuugcugcagggcga

SEQ ID NO: 3075582 - RNA, 19 nt, Artificial Sequence
  Description of Artificial Sequence: Synthetic oligonucleotide
  modified_base (19)..(19): a, c, u, g, unknown or other
acaauggcucugggccccn

SEQ ID NO: 3075583 - RNA, 19 nt, Artificial Sequence
  Description of Artificial Sequence: Synthetic oligonucleotide
cuccaggaggcuucauccu

SEQ ID NO: 3075584 - RNA, 19 nt, Artificial Sequence
  Description of Artificial Sequence: Synthetic oligonucleotide
agcacagggcacggugaaa

SEQ ID NO: 3075585 - RNA, 19 nt, Artificial Sequence
  Description of Artificial Sequence: Synthetic oligonucleotide
ugaggguguccgggaccug

SEQ ID NO: 3075586 - RNA, 19 nt, Artificial Sequence
  Description of Artificial Sequence: Synthetic oligonucleotide
uuucuccaggaggcuucau

SEQ ID NO: 3075587 - RNA, 19 nt, Artificial Sequence
  Description of Artificial Sequence: Synthetic oligonucleotide
aggguguccgggaccugca

SEQ ID NO: 3075588 - RNA, 19 nt, Artificial Sequence
  Description of Artificial Sequence: Synthetic oligonucleotide
  modified_base (18)..(18): a, c, u, g, unknown or other
caauggcucugggccccng

SEQ ID NO: 3075589 - RNA, 19 nt, Artificial Sequence
  Description of Artificial Sequence: Synthetic oligonucleotide
uagcagcacagggcacggu

SEQ ID NO: 3075590 - RNA, 19 nt, Artificial Sequence
  Description of Artificial Sequence: Synthetic oligonucleotide
caaugaggguacgcuggaa

SEQ ID NO: 3075591 - RNA, 19 nt, Artificial Sequence
  Description of Artificial Sequence: Synthetic oligonucleotide
aggcuucauccugccaaaa

SEQ ID NO: 3075592 - RNA, 19 nt, Artificial Sequence
  Description of Artificial Sequence: Synthetic oligonucleotide
gggaccugcaggugaucaa

SEQ ID NO: 3075593 - RNA, 19 nt, Artificial Sequence
  Description of Artificial Sequence: Synthetic oligonucleotide
  modified_base (12)..(12): a, c, u, g, unknown or other
cucugggccccngucaagu

SEQ ID NO: 3075594 - RNA, 19 nt, Artificial Sequence
  Description of Artificial Sequence: Synthetic oligonucleotide
ggcggggcuggagagucac

SEQ ID NO: 3075595 - RNA, 19 nt, Artificial Sequence
  Description of Artificial Sequence: Synthetic oligonucleotide
uagcauggucuagcaucuu

SEQ ID NO: 3075596 - RNA, 19 nt, Artificial Sequence
  Description of Artificial Sequence: Synthetic oligonucleotide
  modified_base (7)..(7): a, c, u, g, unknown or other
ggccccngucaaguucaug

SEQ ID NO: 3075597 - RNA, 19 nt, Artificial Sequence
  Description of Artificial Sequence: Synthetic oligonucleotide
gccaaaacucauagagggu

SEQ ID NO: 3075598 - RNA, 19 nt, Artificial Sequence
  Description of Artificial Sequence: Synthetic oligonucleotide
gcaggugaucaaugagggu

SEQ ID NO: 3075599 - RNA, 19 nt, Artificial Sequence
  Description of Artificial Sequence: Synthetic oligonucleotide
ggaccugcaggugaucaau

SEQ ID NO: 3075600 - RNA, 19 nt, Artificial Sequence
  Description of Artificial Sequence: Synthetic oligonucleotide
  modified_base (13)..(13): a, c, u, g, unknown or other
gcucugggccccngucaag

SEQ ID NO: 3075601 - RNA, 19 nt, Artificial Sequence
  Description of Artificial Sequence: Synthetic oligonucleotide
gcgacugcuggugccuuuc

SEQ ID NO: 3075602 - RNA, 19 nt, Artificial Sequence
  Description of Artificial Sequence: Synthetic oligonucleotide
cacagggcacggugaaaau

SEQ ID NO: 3075603 - RNA, 19 nt, Artificial Sequence
  Description of Artificial Sequence: Synthetic oligonucleotide
ggccuugcugcagggcgac

SEQ ID NO: 3075604 - RNA, 19 nt, Artificial Sequence
  Description of Artificial Sequence: Synthetic oligonucleotide
  modified_base (5)..(5): a, c, u, g, unknown or other
ccccngucaaguucaugua

SEQ ID NO: 3075605 - RNA, 19 nt, Artificial Sequence
  Description of Artificial Sequence: Synthetic oligonucleotide
cacaauccaccaggaggcu

SEQ ID NO: 3075606 - RNA, 19 nt, Artificial Sequence
  Description of Artificial Sequence: Synthetic oligonucleotide
cugcagggcgacugcuggu

SEQ ID NO: 3075607 - RNA, 19 nt, Artificial Sequence
  Description of Artificial Sequence: Synthetic oligonucleotide
caggaggcucuagaaugau

SEQ ID NO: 3075608 - RNA, 19 nt, Artificial Sequence
  Description of Artificial Sequence: Synthetic oligonucleotide
gcuggagagucaccagcuu

SEQ ID NO: 3075609 - RNA, 19 nt, Artificial Sequence
  Description of Artificial Sequence: Synthetic oligonucleotide
gcagacacaugcagacaau

SEQ ID NO: 3075610 - RNA, 19 nt, Artificial Sequence
  Description of Artificial Sequence: Synthetic oligonucleotide
aggcggggcuggagaguca

SEQ ID NO: 3075611 - RNA, 19 nt, Artificial Sequence
  Description of Artificial Sequence: Synthetic oligonucleotide
cgggaccugcaggugauca

SEQ ID NO: 3075612 - RNA, 19 nt, Artificial Sequence
  Description of Artificial Sequence: Synthetic oligonucleotide
gcggggcuggagagucacc

SEQ ID NO: 3075613 - RNA, 19 nt, Artificial Sequence
  Description of Artificial Sequence: Synthetic oligonucleotide
gccuuucuccaggaggcuu

SEQ ID NO: 3075614 - RNA, 19 nt, Artificial Sequence
  Description of Artificial Sequence: Synthetic oligonucleotide
cagacccgacucaguuauu

SEQ ID NO: 3075615 - RNA, 19 nt, Artificial Sequence
  Description of Artificial Sequence: Synthetic oligonucleotide
ggcgacugcuggugccuuu

SEQ ID NO: 3075616 - RNA, 19 nt, Artificial Sequence
  Description of Artificial Sequence: Synthetic oligonucleotide
ggguacgcuggaaggccuu

SEQ ID NO: 3075617 - RNA, 19 nt, Artificial Sequence
  Description of Artificial Sequence: Synthetic oligonucleotide
ccgggaccugcaggugauc

SEQ ID NO: 3075618 - RNA, 19 nt, Artificial Sequence
  Description of Artificial Sequence: Synthetic oligonucleotide
cgacugcuggugccuuucu

SEQ ID NO: 3075619 - RNA, 19 nt, Artificial Sequence
  Description of Artificial Sequence: Synthetic oligonucleotide
gggcgacugcuggugccuu

SEQ ID NO: 3075620 - RNA, 19 nt, Artificial Sequence
  Description of Artificial Sequence: Synthetic oligonucleotide
gccuugcugcagggcgacu

SEQ ID NO: 3075621 - RNA, 19 nt, Artificial Sequence
  Description of Artificial Sequence: Synthetic oligonucleotide
  modified_base (8)..(8): a, c, u, g, unknown or other
gggccccngucaaguucau

SEQ ID NO: 3075622 - RNA, 19 nt, Artificial Sequence
  Description of Artificial Sequence: Synthetic oligonucleotide
  modified_base (1)..(1): a, c, u, g, unknown or other
ngucaaguucauguagcag

SEQ ID NO: 3075623 - RNA, 19 nt, Artificial Sequence
  Description of Artificial Sequence: Synthetic oligonucleotide
ucuauuucagccaugucag

SEQ ID NO: 3075624 - RNA, 19 nt, Artificial Sequence
  Description of Artificial Sequence: Synthetic oligonucleotide
aucuauuucagccauguca

SEQ ID NO: 3075625 - RNA, 19 nt, Artificial Sequence
  Description of Artificial Sequence: Synthetic oligonucleotide
ucuugcaaagccuucaggc

SEQ ID NO: 3075626 - RNA, 19 nt, Artificial Sequence
  Description of Artificial Sequence: Synthetic oligonucleotide
guagacuucaucuugcgcc

SEQ ID NO: 3075627 - RNA, 19 nt, Artificial Sequence
  Description of Artificial Sequence: Synthetic oligonucleotide
uccaggagcaccuagaggu

SEQ ID NO: 3075628 - RNA, 19 nt, Artificial Sequence
  Description of Artificial Sequence: Synthetic oligonucleotide
uugcaaagccuucaggcgg

SEQ ID NO: 3075629 - RNA, 19 nt, Artificial Sequence
  Description of Artificial Sequence: Synthetic oligonucleotide
cucuccagggucaugaccg

SEQ ID NO: 3075630 - RNA, 19 nt, Artificial Sequence
  Description of Artificial Sequence: Synthetic oligonucleotide
aaugggaaaucaggguacc

SEQ ID NO: 3075631 - RNA, 19 nt, Artificial Sequence
  Description of Artificial Sequence: Synthetic oligonucleotide
cuugcaaagccuucaggcg

SEQ ID NO: 3075632 - RNA, 19 nt, Artificial Sequence
  Description of Artificial Sequence: Synthetic oligonucleotide
aaaucaggguaccaccucu

SEQ ID NO: 3075633 - RNA, 19 nt, Artificial Sequence
  Description of Artificial Sequence: Synthetic oligonucleotide
uguucauguauucuugcaa

SEQ ID NO: 3075634 - RNA, 19 nt, Artificial Sequence
  Description of Artificial Sequence: Synthetic oligonucleotide
uugacggggacccagcccc

SEQ ID NO: 3075635 - RNA, 19 nt, Artificial Sequence
  Description of Artificial Sequence: Synthetic oligonucleotide
agugguagacuucaucuug

SEQ ID NO: 3075636 - RNA, 19 nt, Artificial Sequence
  Description of Artificial Sequence: Synthetic oligonucleotide
auuucagccaugucagcuc

SEQ ID NO: 3075637 - RNA, 19 nt, Artificial Sequence
  Description of Artificial Sequence: Synthetic oligonucleotide
uucauguauucuugcaaag

SEQ ID NO: 3075638 - RNA, 19 nt, Artificial Sequence
  Description of Artificial Sequence: Synthetic oligonucleotide
agagguguggagcauggag

SEQ ID NO: 3075639 - RNA, 19 nt, Artificial Sequence
  Description of Artificial Sequence: Synthetic oligonucleotide
agaaugggaaaucagggua

SEQ ID NO: 3075640 - RNA, 19 nt, Artificial Sequence
  Description of Artificial Sequence: Synthetic oligonucleotide
uucuugcaaagccuucagg

SEQ ID NO: 3075641 - RNA, 19 nt, Artificial Sequence
  Description of Artificial Sequence: Synthetic oligonucleotide
ugcaaagccuucaggcggg

SEQ ID NO: 3075642 - RNA, 19 nt, Artificial Sequence
  Description of Artificial Sequence: Synthetic oligonucleotide
gagguguggagcauggagg

SEQ ID NO: 3075643 - RNA, 19 nt, Artificial Sequence
  Description of Artificial Sequence: Synthetic oligonucleotide
guugcugcguucucgagug

SEQ ID NO: 3075644 - RNA, 19 nt, Artificial Sequence
  Description of Artificial Sequence: Synthetic oligonucleotide
agccaugucagcucccugg

SEQ ID NO: 3075645 - RNA, 19 nt, Artificial Sequence
  Description of Artificial Sequence: Synthetic oligonucleotide
uauuucagccaugucagcu

SEQ ID NO: 3075646 - RNA, 19 nt, Artificial Sequence
  Description of Artificial Sequence: Synthetic oligonucleotide
agguguggagcauggaggg

SEQ ID NO: 3075647 - RNA, 19 nt, Artificial Sequence
  Description of Artificial Sequence: Synthetic oligonucleotide
uuucagccaugucagcucc

SEQ ID NO: 3075648 - RNA, 19 nt, Artificial Sequence
  Description of Artificial Sequence: Synthetic oligonucleotide
caugucagcucccugguac

SEQ ID NO: 3075649 - RNA, 19 nt, Artificial Sequence
  Description of Artificial Sequence: Synthetic oligonucleotide
aucaggguaccaccucucc

SEQ ID NO: 3075650 - RNA, 19 nt, Artificial Sequence
  Description of Artificial Sequence: Synthetic oligonucleotide
uagacuucaucuugcgccc

SEQ ID NO: 3075651 - RNA, 19 nt, Artificial Sequence
  Description of Artificial Sequence: Synthetic oligonucleotide
acaccagacccacggaugg

SEQ ID NO: 3075652 - RNA, 19 nt, Artificial Sequence
  Description of Artificial Sequence: Synthetic oligonucleotide
aaagccuucaggcgggcau

SEQ ID NO: 3075653 - RNA, 19 nt, Artificial Sequence
  Description of Artificial Sequence: Synthetic oligonucleotide
uugccuccacaccagaccc

SEQ ID NO: 3075654 - RNA, 19 nt, Artificial Sequence
  Description of Artificial Sequence: Synthetic oligonucleotide
ugagacuccaggagcaccu

SEQ ID NO: 3075655 - RNA, 19 nt, Artificial Sequence
  Description of Artificial Sequence: Synthetic oligonucleotide
cuagagguguggagcaugg

SEQ ID NO: 3075656 - RNA, 19 nt, Artificial Sequence
  Description of Artificial Sequence: Synthetic oligonucleotide
ugguagacuucaucuugcg

SEQ ID NO: 3075657 - RNA, 19 nt, Artificial Sequence
  Description of Artificial Sequence: Synthetic oligonucleotide
uguggagcauggaggggcg

SEQ ID NO: 3075658 - RNA, 19 nt, Artificial Sequence
  Description of Artificial Sequence: Synthetic oligonucleotide
guugccuccacaccagacc

SEQ ID NO: 3075659 - RNA, 19 nt, Artificial Sequence
  Description of Artificial Sequence: Synthetic oligonucleotide
ucuugcgcccgcuccaggg

SEQ ID NO: 3075660 - RNA, 19 nt, Artificial Sequence
  Description of Artificial Sequence: Synthetic oligonucleotide
cuccacaccagacccacgg

SEQ ID NO: 3075661 - RNA, 19 nt, Artificial Sequence
  Description of Artificial Sequence: Synthetic oligonucleotide
uuugacggggacccagccc

SEQ ID NO: 3075662 - RNA, 19 nt, Artificial Sequence
  Description of Artificial Sequence: Synthetic oligonucleotide
gaaugggaaaucaggguac

SEQ ID NO: 3075663 - RNA, 19 nt, Artificial Sequence
  Description of Artificial Sequence: Synthetic oligonucleotide
ggcagaaugggaaaucagg

SEQ ID NO: 3075664 - RNA, 19 nt, Artificial Sequence
  Description of Artificial Sequence: Synthetic oligonucleotide
caggguaccaccucuccag

SEQ ID NO: 3075665 - RNA, 19 nt, Artificial Sequence
  Description of Artificial Sequence: Synthetic oligonucleotide
guucauguauucuugcaaa

SEQ ID NO: 3075666 - RNA, 19 nt, Artificial Sequence
  Description of Artificial Sequence: Synthetic oligonucleotide
gggcuguacucuuugacgg

SEQ ID NO: 3075667 - RNA, 19 nt, Artificial Sequence
  Description of Artificial Sequence: Synthetic oligonucleotide
gcagaaugggaaaucaggg

SEQ ID NO: 3075668 - RNA, 19 nt, Artificial Sequence
  Description of Artificial Sequence: Synthetic oligonucleotide
uggcagaaugggaaaucag

SEQ ID NO: 3075669 - RNA, 19 nt, Artificial Sequence
  Description of Artificial Sequence: Synthetic oligonucleotide
aggggcguugccuccacac

SEQ ID NO: 3075670 - RNA, 19 nt, Artificial Sequence
  Description of Artificial Sequence: Synthetic oligonucleotide
acuccaggagcaccuagag

SEQ ID NO: 3075671 - RNA, 19 nt, Artificial Sequence
  Description of Artificial Sequence: Synthetic oligonucleotide
ugggaaaucaggguaccac

SEQ ID NO: 3075672 - RNA, 19 nt, Artificial Sequence
  Description of Artificial Sequence: Synthetic oligonucleotide
ucucgagugguagacuuca

SEQ ID NO: 3075673 - RNA, 19 nt, Artificial Sequence
  Description of Artificial Sequence: Synthetic oligonucleotide
agggucaugaccgcguguc

SEQ ID NO: 3075674 - RNA, 19 nt, Artificial Sequence
  Description of Artificial Sequence: Synthetic oligonucleotide
uguacucuuugacggggac

SEQ ID NO: 3075675 - RNA, 19 nt, Artificial Sequence
  Description of Artificial Sequence: Synthetic oligonucleotide
ucuuugacggggacccagc

SEQ ID NO: 3075676 - RNA, 19 nt, Artificial Sequence
  Description of Artificial Sequence: Synthetic oligonucleotide
ucaggguaccaccucucca

SEQ ID NO: 3075677 - RNA, 19 nt, Artificial Sequence
  Description of Artificial Sequence: Synthetic oligonucleotide
ggggcuguacucuuugacg

SEQ ID NO: 3075678 - RNA, 19 nt, Artificial Sequence
  Description of Artificial Sequence: Synthetic oligonucleotide
aaucaggguaccaccucuc

SEQ ID NO: 3075679 - RNA, 19 nt, Artificial Sequence
  Description of Artificial Sequence: Synthetic oligonucleotide
agcaccuagagguguggag

SEQ ID NO: 3075680 - RNA, 19 nt, Artificial Sequence
  Description of Artificial Sequence: Synthetic oligonucleotide
gaaaucaggguaccaccuc

SEQ ID NO: 3075681 - RNA, 19 nt, Artificial Sequence
  Description of Artificial Sequence: Synthetic oligonucleotide
agaauuggccaggugucuc

SEQ ID NO: 3075682 - RNA, 19 nt, Artificial Sequence
  Description of Artificial Sequence: Synthetic oligonucleotide
ucgagugguagacuucauc

SEQ ID NO: 3075683 - RNA, 19 nt, Artificial Sequence
  Description of Artificial Sequence: Synthetic oligonucleotide
gggaaaucaggguaccacc

SEQ ID NO: 3075684 - RNA, 19 nt, Artificial Sequence
  Description of Artificial Sequence: Synthetic oligonucleotide
gcgggcaucuauuucagcc

SEQ ID NO: 3075685 - RNA, 19 nt, Artificial Sequence
  Description of Artificial Sequence: Synthetic oligonucleotide
ugguacucggggcuguacu

SEQ ID NO: 3075686 - RNA, 19 nt, Artificial Sequence
  Description of Artificial Sequence: Synthetic oligonucleotide
agcucccugguacucgggg

SEQ ID NO: 3075687 - RNA, 19 nt, Artificial Sequence
  Description of Artificial Sequence: Synthetic oligonucleotide
aggugucucuggugguugc

SEQ ID NO: 3075688 - RNA, 19 nt, Artificial Sequence
  Description of Artificial Sequence: Synthetic oligonucleotide
uccagggucaugaccgcgu

SEQ ID NO: 3075689 - RNA, 19 nt, Artificial Sequence
  Description of Artificial Sequence: Synthetic oligonucleotide
agcauggaggggcguugcc

SEQ ID NO: 3075690 - RNA, 19 nt, Artificial Sequence
  Description of Artificial Sequence: Synthetic oligonucleotide
auguauucuugcaaagccu

SEQ ID NO: 3075691 - RNA, 19 nt, Artificial Sequence
  Description of Artificial Sequence: Synthetic oligonucleotide
auggaggggcguugccucc

SEQ ID NO: 3075692 - RNA, 19 nt, Artificial Sequence
  Description of Artificial Sequence: Synthetic oligonucleotide
cacaccagacccacggaug

SEQ ID NO: 3075693 - RNA, 19 nt, Artificial Sequence
  Description of Artificial Sequence: Synthetic oligonucleotide
guguggagcauggaggggc

SEQ ID NO: 3075694 - RNA, 19 nt, Artificial Sequence
  Description of Artificial Sequence: Synthetic oligonucleotide
cuauuucagccaugucagc

SEQ ID NO: 3075695 - RNA, 19 nt, Artificial Sequence
  Description of Artificial Sequence: Synthetic oligonucleotide
aagccuucaggcgggcauc

SEQ ID NO: 3075696 - RNA, 19 nt, Artificial Sequence
  Description of Artificial Sequence: Synthetic oligonucleotide
gucaugaccgcguguccag

SEQ ID NO: 3075697 - RNA, 19 nt, Artificial Sequence
  Description of Artificial Sequence: Synthetic oligonucleotide
auggcagaaugggaaauca

SEQ ID NO: 3075698 - RNA, 19 nt, Artificial Sequence
  Description of Artificial Sequence: Synthetic oligonucleotide
agccuguucauguauucuu

SEQ ID NO: 3075699 - RNA, 19 nt, Artificial Sequence
  Description of Artificial Sequence: Synthetic oligonucleotide
aggguaccaccucuccagg

SEQ ID NO: 3075700 - RNA, 19 nt, Artificial Sequence
  Description of Artificial Sequence: Synthetic oligonucleotide
aauuggccaggugucucug

SEQ ID NO: 3075701 - RNA, 19 nt, Artificial Sequence
  Description of Artificial Sequence: Synthetic oligonucleotide
ggugguuucccgcggacgc

SEQ ID NO: 3075702 - RNA, 19 nt, Artificial Sequence
  Description of Artificial Sequence: Synthetic oligonucleotide
cauggaggggcguugccuc

SEQ ID NO: 3075703 - RNA, 19 nt, Artificial Sequence
  Description of Artificial Sequence: Synthetic oligonucleotide
cuuugacggggacccagcc

SEQ ID NO: 3075704 - RNA, 19 nt, Artificial Sequence
  Description of Artificial Sequence: Synthetic oligonucleotide
caugaccgcguguccagcc

SEQ ID NO: 3075705 - RNA, 19 nt, Artificial Sequence
  Description of Artificial Sequence: Synthetic oligonucleotide
gugguagacuucaucuugc

SEQ ID NO: 3075706 - RNA, 19 nt, Artificial Sequence
  Description of Artificial Sequence: Synthetic oligonucleotide
caggcgggcaucuauuuca

SEQ ID NO: 3075707 - RNA, 19 nt, Artificial Sequence
  Description of Artificial Sequence: Synthetic oligonucleotide
acccacggauggcagaaug

SEQ ID NO: 3075708 - RNA, 19 nt, Artificial Sequence
  Description of Artificial Sequence: Synthetic oligonucleotide
agacuccaggagcaccuag

SEQ ID NO: 3075709 - RNA, 19 nt, Artificial Sequence
  Description of Artificial Sequence: Synthetic oligonucleotide
gguagacuucaucuugcgc

SEQ ID NO: 3075710 - RNA, 19 nt, Artificial Sequence
  Description of Artificial Sequence: Synthetic oligonucleotide
ucaggcgggcaucuauuuc

SEQ ID NO: 3075711 - RNA, 19 nt, Artificial Sequence
  Description of Artificial Sequence: Synthetic oligonucleotide
gacuucaucuugcgcccgc

SEQ ID NO: 3075712 - RNA, 19 nt, Artificial Sequence
  Description of Artificial Sequence: Synthetic oligonucleotide
ugguuucccgcggacgcgg

SEQ ID NO: 3075713 - RNA, 19 nt, Artificial Sequence
  Description of Artificial Sequence: Synthetic oligonucleotide
caggguguggggcugggug

SEQ ID NO: 3075714 - RNA, 19 nt, Artificial Sequence
  Description of Artificial Sequence: Synthetic oligonucleotide
uaccaccucuccaggguca

SEQ ID NO: 3075715 - RNA, 19 nt, Artificial Sequence
  Description of Artificial Sequence: Synthetic oligonucleotide
ugcguucucgagugguaga

SEQ ID NO: 3075716 - RNA, 19 nt, Artificial Sequence
  Description of Artificial Sequence: Synthetic oligonucleotide
uuucccgcggacgcggcag

SEQ ID NO: 3075717 - RNA, 19 nt, Artificial Sequence
  Description of Artificial Sequence: Synthetic oligonucleotide
ugaccgcguguccagccug

SEQ ID NO: 3075718 - RNA, 19 nt, Artificial Sequence
  Description of Artificial Sequence: Synthetic oligonucleotide
acggauggcagaaugggaa

SEQ ID NO: 3075719 - RNA, 19 nt, Artificial Sequence
  Description of Artificial Sequence: Synthetic oligonucleotide
guacucuuugacggggacc

SEQ ID NO: 3075720 - RNA, 19 nt, Artificial Sequence
  Description of Artificial Sequence: Synthetic oligonucleotide
ccuguucauguauucuugc

SEQ ID NO: 3075721 - RNA, 19 nt, Artificial Sequence
  Description of Artificial Sequence: Synthetic oligonucleotide
uccacaccagacccacgga

SEQ ID NO: 3075722 - RNA, 19 nt, Artificial Sequence
  Description of Artificial Sequence: Synthetic oligonucleotide
ggugguugcugcguucucg

SEQ ID NO: 3075723 - RNA, 19 nt, Artificial Sequence
  Description of Artificial Sequence: Synthetic oligonucleotide
ucagccaugucagcucccu

SEQ ID NO: 3075724 - RNA, 19 nt, Artificial Sequence
  Description of Artificial Sequence: Synthetic oligonucleotide
cucuuugacggggacccag

SEQ ID NO: 3075725 - RNA, 19 nt, Artificial Sequence
  Description of Artificial Sequence: Synthetic oligonucleotide
gcuguacucuuugacgggg

SEQ ID NO: 3075726 - RNA, 19 nt, Artificial Sequence
  Description of Artificial Sequence: Synthetic oligonucleotide
augucagcucccugguacu

SEQ ID NO: 3075727 - RNA, 19 nt, Artificial Sequence
  Description of Artificial Sequence: Synthetic oligonucleotide
uccagccuguucauguauu

SEQ ID NO: 3075728 - RNA, 19 nt, Artificial Sequence
  Description of Artificial Sequence: Synthetic oligonucleotide
uucagccaugucagcuccc

SEQ ID NO: 3075729 - RNA, 19 nt, Artificial Sequence
  Description of Artificial Sequence: Synthetic oligonucleotide
cugagacuccaggagcacc

SEQ ID NO: 3075730 - RNA, 19 nt, Artificial Sequence
  Description of Artificial Sequence: Synthetic oligonucleotide
ucuccagggucaugaccgc

SEQ ID NO: 3075731 - RNA, 19 nt, Artificial Sequence
  Description of Artificial Sequence: Synthetic oligonucleotide
gucagcucccugguacucg

SEQ ID NO: 3075732 - RNA, 19 nt, Artificial Sequence
  Description of Artificial Sequence: Synthetic oligonucleotide
ggcuguacucuuugacggg

SEQ ID NO: 3075733 - RNA, 19 nt, Artificial Sequence
  Description of Artificial Sequence: Synthetic oligonucleotide
ccagaauuggccagguguc

SEQ ID NO: 3075734 - RNA, 19 nt, Artificial Sequence
  Description of Artificial Sequence: Synthetic oligonucleotide
ucuggugguugcugcguuc

SEQ ID NO: 3075735 - RNA, 19 nt, Artificial Sequence
  Description of Artificial Sequence: Synthetic oligonucleotide
uucaggcgggcaucuauuu

SEQ ID NO: 3075736 - RNA, 19 nt, Artificial Sequence
  Description of Artificial Sequence: Synthetic oligonucleotide
uugcgcccgcuccagggug

SEQ ID NO: 3075737 - RNA, 19 nt, Artificial Sequence
  Description of Artificial Sequence: Synthetic oligonucleotide
ugcugcguucucgaguggu

SEQ ID NO: 3075738 - RNA, 19 nt, Artificial Sequence
  Description of Artificial Sequence: Synthetic oligonucleotide
gcaccuagagguguggagc

SEQ ID NO: 3075739 - RNA, 19 nt, Artificial Sequence
  Description of Artificial Sequence: Synthetic oligonucleotide
gaauuggccaggugucucu

SEQ ID NO: 3075740 - RNA, 19 nt, Artificial Sequence
  Description of Artificial Sequence: Synthetic oligonucleotide
ugguugcugcguucucgag

SEQ ID NO: 3075741 - RNA, 19 nt, Artificial Sequence
  Description of Artificial Sequence: Synthetic oligonucleotide
cagaaugggaaaucagggu

SEQ ID NO: 3075742 - RNA, 19 nt, Artificial Sequence
  Description of Artificial Sequence: Synthetic oligonucleotide
cugcguucucgagugguag

SEQ ID NO: 3075743 - RNA, 19 nt, Artificial Sequence
  Description of Artificial Sequence: Synthetic oligonucleotide
cucggggcuguacucuuug

SEQ ID NO: 3075744 - RNA, 19 nt, Artificial Sequence
  Description of Artificial Sequence: Synthetic oligonucleotide
ggcugggugguuucccgcg

SEQ ID NO: 3075745 - RNA, 19 nt, Artificial Sequence
  Description of Artificial Sequence: Synthetic oligonucleotide
gacuccaggagcaccuaga

SEQ ID NO: 3075746 - RNA, 19 nt, Artificial Sequence
  Description of Artificial Sequence: Synthetic oligonucleotide
gugguugcugcguucucga

SEQ ID NO: 3075747 - RNA, 19 nt, Artificial Sequence
  Description of Artificial Sequence: Synthetic oligonucleotide
augaccgcguguccagccu

SEQ ID NO: 3075748 - RNA, 19 nt, Artificial Sequence
  Description of Artificial Sequence: Synthetic oligonucleotide
uguccagccuguucaugua

SEQ ID NO: 3075749 - RNA, 19 nt, Artificial Sequence
  Description of Artificial Sequence: Synthetic oligonucleotide
guaccaccucuccaggguc

SEQ ID NO: 3075750 - RNA, 19 nt, Artificial Sequence
  Description of Artificial Sequence: Synthetic oligonucleotide
uggccaggugucucuggug

SEQ ID NO: 3075751 - RNA, 19 nt, Artificial Sequence
  Description of Artificial Sequence: Synthetic oligonucleotide
uugcugcguucucgagugg

SEQ ID NO: 3075752 - RNA, 19 nt, Artificial Sequence
  Description of Artificial Sequence: Synthetic oligonucleotide
caucuauuucagccauguc

SEQ ID NO: 3075753 - RNA, 19 nt, Artificial Sequence
  Description of Artificial Sequence: Synthetic oligonucleotide
ugggugguuucccgcggac

SEQ ID NO: 3075754 - RNA, 19 nt, Artificial Sequence
  Description of Artificial Sequence: Synthetic oligonucleotide
agacuucaucuugcgcccg

SEQ ID NO: 3075755 - RNA, 19 nt, Artificial Sequence
  Description of Artificial Sequence: Synthetic oligonucleotide
guguccagccuguucaugu

SEQ ID NO: 3075756 - RNA, 19 nt, Artificial Sequence
  Description of Artificial Sequence: Synthetic oligonucleotide
cccacggauggcagaaugg

SEQ ID NO: 3075757 - RNA, 19 nt, Artificial Sequence
  Description of Artificial Sequence: Synthetic oligonucleotide
aucuugcgcccgcuccagg

SEQ ID NO: 3075758 - RNA, 19 nt, Artificial Sequence
  Description of Artificial Sequence: Synthetic oligonucleotide
ucaugaccgcguguccagc

SEQ ID NO: 3075759 - RNA, 19 nt, Artificial Sequence
  Description of Artificial Sequence: Synthetic oligonucleotide
ggguaccaccucuccaggg

SEQ ID NO: 3075760 - RNA, 19 nt, Artificial Sequence
  Description of Artificial Sequence: Synthetic oligonucleotide
ugccuccacaccagaccca

SEQ ID NO: 3075761 - RNA, 19 nt, Artificial Sequence
  Description of Artificial Sequence: Synthetic oligonucleotide
ccacggauggcagaauggg

SEQ ID NO: 3075762 - RNA, 19 nt, Artificial Sequence
  Description of Artificial Sequence: Synthetic oligonucleotide
cacggauggcagaauggga

SEQ ID NO: 3075763 - RNA, 19 nt, Artificial Sequence
  Description of Artificial Sequence: Synthetic oligonucleotide
gguacucggggcuguacuc

SEQ ID NO: 3075764 - RNA, 19 nt, Artificial Sequence
  Description of Artificial Sequence: Synthetic oligonucleotide
agacccacggauggcagaa

SEQ ID NO: 3075765 - RNA, 19 nt, Artificial Sequence
  Description of Artificial Sequence: Synthetic oligonucleotide
gagcauggaggggcguugc

SEQ ID NO: 3075766 - RNA, 19 nt, Artificial Sequence
  Description of Artificial Sequence: Synthetic oligonucleotide
cuucaucuugcgcccgcuc

SEQ ID NO: 3075767 - RNA, 19 nt, Artificial Sequence
  Description of Artificial Sequence: Synthetic oligonucleotide
ucggggcuguacucuuuga

SEQ ID NO: 3075768 - RNA, 19 nt, Artificial Sequence
  Description of Artificial Sequence: Synthetic oligonucleotide
gugguuucccgcggacgcg

SEQ ID NO: 3075769 - RNA, 19 nt, Artificial Sequence
  Description of Artificial Sequence: Synthetic oligonucleotide
augggaaaucaggguacca

SEQ ID NO: 3075770 - RNA, 19 nt, Artificial Sequence
  Description of Artificial Sequence: Synthetic oligonucleotide
cuccagggucaugaccgcg

SEQ ID NO: 3075771 - RNA, 19 nt, Artificial Sequence
  Description of Artificial Sequence: Synthetic oligonucleotide
gugucucuggugguugcug

SEQ ID NO: 3075772 - RNA, 19 nt, Artificial Sequence
  Description of Artificial Sequence: Synthetic oligonucleotide
caccucuccagggucauga

SEQ ID NO: 3075773 - RNA, 19 nt, Artificial Sequence
  Description of Artificial Sequence: Synthetic oligonucleotide
ggggcugggugguuucccg

SEQ ID NO: 3075774 - RNA, 19 nt, Artificial Sequence
  Description of Artificial Sequence: Synthetic oligonucleotide
cuguacucuuugacgggga

SEQ ID NO: 3075775 - RNA, 19 nt, Artificial Sequence
  Description of Artificial Sequence: Synthetic oligonucleotide
gagugguagacuucaucuu

SEQ ID NO: 3075776 - RNA, 19 nt, Artificial Sequence
  Description of Artificial Sequence: Synthetic oligonucleotide
gccuguucauguauucuug

SEQ ID NO: 3075777 - RNA, 19 nt, Artificial Sequence
  Description of Artificial Sequence: Synthetic oligonucleotide
caggugucucuggugguug

SEQ ID NO: 3075778 - RNA, 19 nt, Artificial Sequence
  Description of Artificial Sequence: Synthetic oligonucleotide
ugucagcucccugguacuc

SEQ ID NO: 3075779 - RNA, 19 nt, Artificial Sequence
  Description of Artificial Sequence: Synthetic oligonucleotide
uacucggggcuguacucuu

SEQ ID NO: 3075780 - RNA, 19 nt, Artificial Sequence
  Description of Artificial Sequence: Synthetic oligonucleotide
uggggcugggugguuuccc

SEQ ID NO: 3075781 - RNA, 19 nt, Artificial Sequence
  Description of Artificial Sequence: Synthetic oligonucleotide
caucuugcgcccgcuccag

SEQ ID NO: 3075782 - RNA, 19 nt, Artificial Sequence
  Description of Artificial Sequence: Synthetic oligonucleotide
gggcguugccuccacacca

SEQ ID NO: 3075783 - RNA, 19 nt, Artificial Sequence
  Description of Artificial Sequence: Synthetic oligonucleotide
ggagcaccuagaggugugg

SEQ ID NO: 3075784 - RNA, 19 nt, Artificial Sequence
  Description of Artificial Sequence: Synthetic oligonucleotide
gcugggugguuucccgcgg

SEQ ID NO: 3075785 - RNA, 19 nt, Artificial Sequence
  Description of Artificial Sequence: Synthetic oligonucleotide
ugcgcccgcuccagggugu

SEQ ID NO: 3075786 - RNA, 19 nt, Artificial Sequence
  Description of Artificial Sequence: Synthetic oligonucleotide
uucccgcggacgcggcagc

SEQ ID NO: 3075787 - RNA, 19 nt, Artificial Sequence
  Description of Artificial Sequence: Synthetic oligonucleotide
cccagaauuggccaggugu

SEQ ID NO: 3075788 - RNA, 19 nt, Artificial Sequence
  Description of Artificial Sequence: Synthetic oligonucleotide
gguguggagcauggagggg

SEQ ID NO: 3075789 - RNA, 19 nt, Artificial Sequence
  Description of Artificial Sequence: Synthetic oligonucleotide
gcucccugguacucggggc

SEQ ID NO: 3075790 - RNA, 19 nt, Artificial Sequence
  Description of Artificial Sequence: Synthetic oligonucleotide
ucccugguacucggggcug

SEQ ID NO: 3075791 - RNA, 19 nt, Artificial Sequence
  Description of Artificial Sequence: Synthetic oligonucleotide
uggagcauggaggggcguu

SEQ ID NO: 3075792 - RNA, 19 nt, Artificial Sequence
  Description of Artificial Sequence: Synthetic oligonucleotide
gguaccaccucuccagggu

SEQ ID NO: 3075793 - RNA, 19 nt, Artificial Sequence
  Description of Artificial Sequence: Synthetic oligonucleotide
uggugguugcugcguucuc

SEQ ID NO: 3075794 - RNA, 19 nt, Artificial Sequence
  Description of Artificial Sequence: Synthetic oligonucleotide
gcaucuauuucagccaugu

SEQ ID NO: 3075795 - RNA, 19 nt, Artificial Sequence
  Description of Artificial Sequence: Synthetic oligonucleotide
uggaggggcguugccucca

SEQ ID NO: 3075796 - RNA, 19 nt, Artificial Sequence
  Description of Artificial Sequence: Synthetic oligonucleotide
ggucaugaccgcgugucca

SEQ ID NO: 3075797 - RNA, 19 nt, Artificial Sequence
  Description of Artificial Sequence: Synthetic oligonucleotide
gggugguuucccgcggacg

SEQ ID NO: 3075798 - RNA, 19 nt, Artificial Sequence
  Description of Artificial Sequence: Synthetic oligonucleotide
gagcaccuagaggugugga

SEQ ID NO: 3075799 - RNA, 19 nt, Artificial Sequence
  Description of Artificial Sequence: Synthetic oligonucleotide
ggaaaucaggguaccaccu

SEQ ID NO: 3075800 - RNA, 19 nt, Artificial Sequence
  Description of Artificial Sequence: Synthetic oligonucleotide
ggggcguugccuccacacc

SEQ ID NO: 3075801 - RNA, 19 nt, Artificial Sequence
  Description of Artificial Sequence: Synthetic oligonucleotide
cgagugguagacuucaucu

SEQ ID NO: 3075802 - RNA, 19 nt, Artificial Sequence
  Description of Artificial Sequence: Synthetic oligonucleotide
gguugcugcguucucgagu

SEQ ID NO: 3075803 - RNA, 19 nt, Artificial Sequence
  Description of Artificial Sequence: Synthetic oligonucleotide
ccuagagguguggagcaug

SEQ ID NO: 3075804 - RNA, 19 nt, Artificial Sequence
  Description of Artificial Sequence: Synthetic oligonucleotide
ggagcauggaggggcguug

SEQ ID NO: 3075805 - RNA, 19 nt, Artificial Sequence
  Description of Artificial Sequence: Synthetic oligonucleotide
gggucaugaccgcgugucc

SEQ ID NO: 3075806 - RNA, 19 nt, Artificial Sequence
  Description of Artificial Sequence: Synthetic oligonucleotide
caccagacccacggauggc

SEQ ID NO: 3075807 - RNA, 19 nt, Artificial Sequence
  Description of Artificial Sequence: Synthetic oligonucleotide
cugguacucggggcuguac

SEQ ID NO: 3075808 - RNA, 19 nt, Artificial Sequence
  Description of Artificial Sequence: Synthetic oligonucleotide
gcguucucgagugguagac

SEQ ID NO: 3075809 - RNA, 19 nt, Artificial Sequence
  Description of Artificial Sequence: Synthetic oligonucleotide
ucccgcggacgcggcagcg

SEQ ID NO: 3075810 - RNA, 19 nt, Artificial Sequence
  Description of Artificial Sequence: Synthetic oligonucleotide
cagacccacggauggcaga

SEQ ID NO: 3075811 - RNA, 19 nt, Artificial Sequence
  Description of Artificial Sequence: Synthetic oligonucleotide
ggcguugccuccacaccag

SEQ ID NO: 3075812 - RNA, 19 nt, Artificial Sequence
  Description of Artificial Sequence: Synthetic oligonucleotide
ccagacccacggauggcag

SEQ ID NO: 3075813 - RNA, 19 nt, Artificial Sequence
  Description of Artificial Sequence: Synthetic oligonucleotide
cagccaugucagcucccug

SEQ ID NO: 3075814 - RNA, 19 nt, Artificial Sequence
  Description of Artificial Sequence: Synthetic oligonucleotide
agccuucaggcgggcaucu

SEQ ID NO: 3075815 - RNA, 19 nt, Artificial Sequence
  Description of Artificial Sequence: Synthetic oligonucleotide
guuucccgcggacgcggca

SEQ ID NO: 3075816 - RNA, 19 nt, Artificial Sequence
  Description of Artificial Sequence: Synthetic oligonucleotide
gggcugggugguuucccgc

SEQ ID NO: 3075817 - RNA, 19 nt, Artificial Sequence
  Description of Artificial Sequence: Synthetic oligonucleotide
cuccaggguguggggcugg

SEQ ID NO: 3075818 - RNA, 19 nt, Artificial Sequence
  Description of Artificial Sequence: Synthetic oligonucleotide
cucccugguacucggggcu

SEQ ID NO: 3075819 - RNA, 19 nt, Artificial Sequence
  Description of Artificial Sequence: Synthetic oligonucleotide
guacucggggcuguacucu

SEQ ID NO: 3075820 - RNA, 19 nt, Artificial Sequence
  Description of Artificial Sequence: Synthetic oligonucleotide
cugggugguuucccgcgga

SEQ ID NO: 3075821 - RNA, 19 nt, Artificial Sequence
  Description of Artificial Sequence: Synthetic oligonucleotide
cuucaggcgggcaucuauu

SEQ ID NO: 3075822 - RNA, 19 nt, Artificial Sequence
  Description of Artificial Sequence: Synthetic oligonucleotide
acucuuugacggggaccca

SEQ ID NO: 3075823 - RNA, 19 nt, Artificial Sequence
  Description of Artificial Sequence: Synthetic oligonucleotide
gccuccacaccagacccac

SEQ ID NO: 3075824 - RNA, 19 nt, Artificial Sequence
  Description of Artificial Sequence: Synthetic oligonucleotide
guccagccuguucauguau

SEQ ID NO: 3075825 - RNA, 19 nt, Artificial Sequence
  Description of Artificial Sequence: Synthetic oligonucleotide
cguugccuccacaccagac

SEQ ID NO: 3075826 - RNA, 19 nt, Artificial Sequence
  Description of Artificial Sequence: Synthetic oligonucleotide
accaccucuccagggucau

SEQ ID NO: 3075827 - RNA, 19 nt, Artificial Sequence
  Description of Artificial Sequence: Synthetic oligonucleotide
gaggggcguugccuccaca

SEQ ID NO: 3075828 - RNA, 19 nt, Artificial Sequence
  Description of Artificial Sequence: Synthetic oligonucleotide
ccagggucaugaccgcgug

SEQ ID NO: 3075829 - RNA, 19 nt, Artificial Sequence
  Description of Artificial Sequence: Synthetic oligonucleotide
cagaauuggccaggugucu

SEQ ID NO: 3075830 - RNA, 19 nt, Artificial Sequence
  Description of Artificial Sequence: Synthetic oligonucleotide
cggggcuguacucuuugac

SEQ ID NO: 3075831 - RNA, 19 nt, Artificial Sequence
  Description of Artificial Sequence: Synthetic oligonucleotide
cuggugguugcugcguucu

SEQ ID NO: 3075832 - RNA, 19 nt, Artificial Sequence
  Description of Artificial Sequence: Synthetic oligonucleotide
gggcaucuauuucagccau

SEQ ID NO: 3075833 - RNA, 19 nt, Artificial Sequence
  Description of Artificial Sequence: Synthetic oligonucleotide
caaagccuucaggcgggca

SEQ ID NO: 3075834 - RNA, 19 nt, Artificial Sequence
  Description of Artificial Sequence: Synthetic oligonucleotide
gagacuccaggagcaccua

SEQ ID NO: 3075835 - RNA, 19 nt, Artificial Sequence
  Description of Artificial Sequence: Synthetic oligonucleotide
cagccuguucauguauucu

SEQ ID NO: 3075836 - RNA, 19 nt, Artificial Sequence
  Description of Artificial Sequence: Synthetic oligonucleotide
ccuccacaccagacccacg

SEQ ID NO: 3075837 - RNA, 19 nt, Artificial Sequence
  Description of Artificial Sequence: Synthetic oligonucleotide
caggagcaccuagaggugu

SEQ ID NO: 3075838 - RNA, 19 nt, Artificial Sequence
  Description of Artificial Sequence: Synthetic oligonucleotide
gccaugucagcucccuggu

SEQ ID NO: 3075839 - RNA, 19 nt, Artificial Sequence
  Description of Artificial Sequence: Synthetic oligonucleotide
ggaggggcguugccuccac

SEQ ID NO: 3075840 - RNA, 19 nt, Artificial Sequence
  Description of Artificial Sequence: Synthetic oligonucleotide
gcaaagccuucaggcgggc

SEQ ID NO: 3075841 - RNA, 19 nt, Artificial Sequence
  Description of Artificial Sequence: Synthetic oligonucleotide
gguuucccgcggacgcggc

SEQ ID NO: 3075842 - RNA, 19 nt, Artificial Sequence
  Description of Artificial Sequence: Synthetic oligonucleotide
gcuccaggguguggggcug

SEQ ID NO: 3075843 - RNA, 19 nt, Artificial Sequence
  Description of Artificial Sequence: Synthetic oligonucleotide
acucggggcuguacucuuu

SEQ ID NO: 3075844 - RNA, 19 nt, Artificial Sequence
  Description of Artificial Sequence: Synthetic oligonucleotide
gcauggaggggcguugccu

SEQ ID NO: 3075845 - RNA, 19 nt, Artificial Sequence
  Description of Artificial Sequence: Synthetic oligonucleotide
gaccgcguguccagccugu

SEQ ID NO: 3075846 - RNA, 19 nt, Artificial Sequence
  Description of Artificial Sequence: Synthetic oligonucleotide
cggauggcagaaugggaaa

SEQ ID NO: 3075847 - RNA, 19 nt, Artificial Sequence
  Description of Artificial Sequence: Synthetic oligonucleotide
gcguugccuccacaccaga

SEQ ID NO: 3075848 - RNA, 19 nt, Artificial Sequence
  Description of Artificial Sequence: Synthetic oligonucleotide
cagggucaugaccgcgugu

SEQ ID NO: 3075849 - RNA, 19 nt, Artificial Sequence
  Description of Artificial Sequence: Synthetic oligonucleotide
cucuggugguugcugcguu

SEQ ID NO: 3075850 - RNA, 19 nt, Artificial Sequence
  Description of Artificial Sequence: Synthetic oligonucleotide
ccccagaauuggccaggug

SEQ ID NO: 3075851 - RNA, 19 nt, Artificial Sequence
  Description of Artificial Sequence: Synthetic oligonucleotide
gcugcguucucgaguggua

SEQ ID NO: 3075852 - RNA, 19 nt, Artificial Sequence
  Description of Artificial Sequence: Synthetic oligonucleotide
ccuucaggcgggcaucuau

SEQ ID NO: 3075853 - RNA, 19 nt, Artificial Sequence
  Description of Artificial Sequence: Synthetic oligonucleotide
ccgcguguccagccuguuc

SEQ ID NO: 3075854 - RNA, 19 nt, Artificial Sequence
  Description of Artificial Sequence: Synthetic oligonucleotide
ccacaccagacccacggau

SEQ ID NO: 3075855 - RNA, 19 nt, Artificial Sequence
  Description of Artificial Sequence: Synthetic oligonucleotide
cguguccagccuguucaug

SEQ ID NO: 3075856 - RNA, 19 nt, Artificial Sequence
  Description of Artificial Sequence: Synthetic oligonucleotide
gccaggugucucugguggu

SEQ ID NO: 3075857 - RNA, 19 nt, Artificial Sequence
  Description of Artificial Sequence: Synthetic oligonucleotide
accgcguguccagccuguu

SEQ ID NO: 3075858 - RNA, 19 nt, Artificial Sequence
  Description of Artificial Sequence: Synthetic oligonucleotide
gacccacggauggcagaau

SEQ ID NO: 3075859 - RNA, 19 nt, Artificial Sequence
  Description of Artificial Sequence: Synthetic oligonucleotide
guggagcauggaggggcgu

SEQ ID NO: 3075860 - RNA, 19 nt, Artificial Sequence
  Description of Artificial Sequence: Synthetic oligonucleotide
guguggggcugggugguuu

SEQ ID NO: 3075861 - RNA, 19 nt, Artificial Sequence
  Description of Artificial Sequence: Synthetic oligonucleotide
ccaugucagcucccuggua

SEQ ID NO: 3075862 - RNA, 19 nt, Artificial Sequence
  Description of Artificial Sequence: Synthetic oligonucleotide
gcguguccagccuguucau

SEQ ID NO: 3075863 - RNA, 19 nt, Artificial Sequence
  Description of Artificial Sequence: Synthetic oligonucleotide
ccaccucuccagggucaug

SEQ ID NO: 3075864 - RNA, 19 nt, Artificial Sequence
  Description of Artificial Sequence: Synthetic oligonucleotide
cguucucgagugguagacu

SEQ ID NO: 3075865 - RNA, 19 nt, Artificial Sequence
  Description of Artificial Sequence: Synthetic oligonucleotide
ccugguacucggggcugua

SEQ ID NO: 3075866 - RNA, 19 nt, Artificial Sequence
  Description of Artificial Sequence: Synthetic oligonucleotide
gccuucaggcgggcaucua

SEQ ID NO: 3075867 - RNA, 19 nt, Artificial Sequence
  Description of Artificial Sequence: Synthetic oligonucleotide
cgcccgcuccagggugugg

SEQ ID NO: 3075868 - RNA, 19 nt, Artificial Sequence
  Description of Artificial Sequence: Synthetic oligonucleotide
gguguggggcugggugguu

SEQ ID NO: 3075869 - RNA, 19 nt, Artificial Sequence
  Description of Artificial Sequence: Synthetic oligonucleotide
ccaggguguggggcugggu

SEQ ID NO: 3075870 - RNA, 19 nt, Artificial Sequence
  Description of Artificial Sequence: Synthetic oligonucleotide
ucuuacagaaggcacagag

SEQ ID NO: 3075871 - RNA, 19 nt, Artificial Sequence
  Description of Artificial Sequence: Synthetic oligonucleotide
uuacagaaggcacagagaa

SEQ ID NO: 3075872 - RNA, 19 nt, Artificial Sequence
  Description of Artificial Sequence: Synthetic oligonucleotide
acagaaggcacagagaauc

SEQ ID NO: 3075873 - RNA, 19 nt, Artificial Sequence
  Description of Artificial Sequence: Synthetic oligonucleotide
uucacugggguccaagggg

SEQ ID NO: 3075874 - RNA, 19 nt, Artificial Sequence
  Description of Artificial Sequence: Synthetic oligonucleotide
aguacagucaggcucagca

SEQ ID NO: 3075875 - RNA, 19 nt, Artificial Sequence
  Description of Artificial Sequence: Synthetic oligonucleotide
cugaguagcacccacacug

SEQ ID NO: 3075876 - RNA, 19 nt, Artificial Sequence
  Description of Artificial Sequence: Synthetic oligonucleotide
aagcuuggugaguuggugg

SEQ ID NO: 3075877 - RNA, 19 nt, Artificial Sequence
  Description of Artificial Sequence: Synthetic oligonucleotide
cagagaaucaggucuagag

SEQ ID NO: 3075878 - RNA, 19 nt, Artificial Sequence
  Description of Artificial Sequence: Synthetic oligonucleotide
cuagaguacagucaggcuc

SEQ ID NO: 3075879 - RNA, 19 nt, Artificial Sequence
  Description of Artificial Sequence: Synthetic oligonucleotide
aggucuagaguacagucag

SEQ ID NO: 3075880 - RNA, 19 nt, Artificial Sequence
  Description of Artificial Sequence: Synthetic oligonucleotide
uagaguacagucaggcuca

SEQ ID NO: 3075881 - RNA, 19 nt, Artificial Sequence
  Description of Artificial Sequence: Synthetic oligonucleotide
uugcaggaaacgaagcuug

SEQ ID NO: 3075882 - RNA, 19 nt, Artificial Sequence
  Description of Artificial Sequence: Synthetic oligonucleotide
ugacgucgaacugugaggg

SEQ ID NO: 3075883 - RNA, 19 nt, Artificial Sequence
  Description of Artificial Sequence: Synthetic oligonucleotide
cuagguauggagcccaggc

SEQ ID NO: 3075884 - RNA, 19 nt, Artificial Sequence
  Description of Artificial Sequence: Synthetic oligonucleotide
ucaguuugcaggaaacgaa

SEQ ID NO: 3075885 - RNA, 19 nt, Artificial Sequence
  Description of Artificial Sequence: Synthetic oligonucleotide
guagcacccacacugcagg

SEQ ID NO: 3075886 - RNA, 19 nt, Artificial Sequence
  Description of Artificial Sequence: Synthetic oligonucleotide
agagaaucaggucuagagu

SEQ ID NO: 3075887 - RNA, 19 nt, Artificial Sequence
  Description of Artificial Sequence: Synthetic oligonucleotide
gagaaucaggucuagagua

SEQ ID NO: 3075888 - RNA, 19 nt, Artificial Sequence
  Description of Artificial Sequence: Synthetic oligonucleotide
auucacugggguccaaggg

SEQ ID NO: 3075889 - RNA, 19 nt, Artificial Sequence
  Description of Artificial Sequence: Synthetic oligonucleotide
accacagcuagguauggag

SEQ ID NO: 3075890 - RNA, 19 nt, Artificial Sequence
  Description of Artificial Sequence: Synthetic oligonucleotide
aggaaacgaagcuugguga

SEQ ID NO: 3075891 - RNA, 19 nt, Artificial Sequence
  Description of Artificial Sequence: Synthetic oligonucleotide
cacagcuagguauggagcc

SEQ ID NO: 3075892 - RNA, 19 nt, Artificial Sequence
  Description of Artificial Sequence: Synthetic oligonucleotide
ugucuggugagguugggac

SEQ ID NO: 3075893 - RNA, 19 nt, Artificial Sequence
  Description of Artificial Sequence: Synthetic oligonucleotide
ucaggucuagaguacaguc

SEQ ID NO: 3075894 - RNA, 19 nt, Artificial Sequence
  Description of Artificial Sequence: Synthetic oligonucleotide
caguuugcaggaaacgaag

SEQ ID NO: 3075895 - RNA, 19 nt, Artificial Sequence
  Description of Artificial Sequence: Synthetic oligonucleotide
ugucccgagcccuucuucg

SEQ ID NO: 3075896 - RNA, 19 nt, Artificial Sequence
  Description of Artificial Sequence: Synthetic oligonucleotide
aguuugcaggaaacgaagc

SEQ ID NO: 3075897 - RNA, 19 nt, Artificial Sequence
  Description of Artificial Sequence: Synthetic oligonucleotide
gugacgucgaacugugagg

SEQ ID NO: 3075898 - RNA, 19 nt, Artificial Sequence
  Description of Artificial Sequence: Synthetic oligonucleotide
agguauggagcccaggccu

SEQ ID NO: 3075899 - RNA, 19 nt, Artificial Sequence
  Description of Artificial Sequence: Synthetic oligonucleotide
uagguauggagcccaggcc

SEQ ID NO: 3075900 - RNA, 19 nt, Artificial Sequence
  Description of Artificial Sequence: Synthetic oligonucleotide
ugcaggaaacgaagcuugg

SEQ ID NO: 3075901 - RNA, 19 nt, Artificial Sequence
  Description of Artificial Sequence: Synthetic oligonucleotide
ucuggugagguugggaccc

SEQ ID NO: 3075902 - RNA, 19 nt, Artificial Sequence
  Description of Artificial Sequence: Synthetic oligonucleotide
caggaaacgaagcuuggug

SEQ ID NO: 3075903 - RNA, 19 nt, Artificial Sequence
  Description of Artificial Sequence: Synthetic oligonucleotide
gucuagaguacagucaggc

SEQ ID NO: 3075904 - RNA, 19 nt, Artificial Sequence
  Description of Artificial Sequence: Synthetic oligonucleotide
cauucacugggguccaagg

SEQ ID NO: 3075905 - RNA, 19 nt, Artificial Sequence
  Description of Artificial Sequence: Synthetic oligonucleotide
agaaucaggucuagaguac

SEQ ID NO: 3075906 - RNA, 19 nt, Artificial Sequence
  Description of Artificial Sequence: Synthetic oligonucleotide
ugaguagcacccacacugc

SEQ ID NO: 3075907 - RNA, 19 nt, Artificial Sequence
  Description of Artificial Sequence: Synthetic oligonucleotide
gguagccacauucacuggg

SEQ ID NO: 3075908 - RNA, 19 nt, Artificial Sequence
  Description of Artificial Sequence: Synthetic oligonucleotide
gacugaguagcacccacac

SEQ ID NO: 3075909 - RNA, 19 nt, Artificial Sequence
  Description of Artificial Sequence: Synthetic oligonucleotide
aaggcacagagaaucaggu

SEQ ID NO: 3075910 - RNA, 19 nt, Artificial Sequence
  Description of Artificial Sequence: Synthetic oligonucleotide
ucugggaccacagcuaggu

SEQ ID NO: 3075911 - RNA, 19 nt, Artificial Sequence
  Description of Artificial Sequence: Synthetic oligonucleotide
ucuagaguacagucaggcu

SEQ ID NO: 3075912 - RNA, 19 nt, Artificial Sequence
  Description of Artificial Sequence: Synthetic oligonucleotide
gcuguccucaguuugcagg

SEQ ID NO: 3075913 - RNA, 19 nt, Artificial Sequence
  Description of Artificial Sequence: Synthetic oligonucleotide
uccucaguuugcaggaaac

SEQ ID NO: 3075914 - RNA, 19 nt, Artificial Sequence
  Description of Artificial Sequence: Synthetic oligonucleotide
ugggaccacagcuagguau

SEQ ID NO: 3075915 - RNA, 19 nt, Artificial Sequence
  Description of Artificial Sequence: Synthetic oligonucleotide
cuucuuacagaaggcacag

SEQ ID NO: 3075916 - RNA, 19 nt, Artificial Sequence
  Description of Artificial Sequence: Synthetic oligonucleotide
aaucaggucuagaguacag

SEQ ID NO: 3075917 - RNA, 19 nt, Artificial Sequence
  Description of Artificial Sequence: Synthetic oligonucleotide
ugagguugggacccagcug

SEQ ID NO: 3075918 - RNA, 19 nt, Artificial Sequence
  Description of Artificial Sequence: Synthetic oligonucleotide
ggaaacgaagcuuggugag

SEQ ID NO: 3075919 - RNA, 19 nt, Artificial Sequence
  Description of Artificial Sequence: Synthetic oligonucleotide
uuugcaggaaacgaagcuu

SEQ ID NO: 3075920 - RNA, 19 nt, Artificial Sequence
  Description of Artificial Sequence: Synthetic oligonucleotide
acagcuagguauggagccc

SEQ ID NO: 3075921 - RNA, 19 nt, Artificial Sequence
  Description of Artificial Sequence: Synthetic oligonucleotide
guugguggaggccugggac

SEQ ID NO: 3075922 - RNA, 19 nt, Artificial Sequence
  Description of Artificial Sequence: Synthetic oligonucleotide
aggcacgugacgucgaacu

SEQ ID NO: 3075923 - RNA, 19 nt, Artificial Sequence
  Description of Artificial Sequence: Synthetic oligonucleotide
uucaggaccgggugucccg

SEQ ID NO: 3075924 - RNA, 19 nt, Artificial Sequence
  Description of Artificial Sequence: Synthetic oligonucleotide
aaggggucccgacugagua

SEQ ID NO: 3075925 - RNA, 19 nt, Artificial Sequence
  Description of Artificial Sequence: Synthetic oligonucleotide
cuuggugaguugguggagg

SEQ ID NO: 3075926 - RNA, 19 nt, Artificial Sequence
  Description of Artificial Sequence: Synthetic oligonucleotide
cagcaggucuucaggaccg

SEQ ID NO: 3075927 - RNA, 19 nt, Artificial Sequence
  Description of Artificial Sequence: Synthetic oligonucleotide
agccacauucacugggguc

SEQ ID NO: 3075928 - RNA, 19 nt, Artificial Sequence
  Description of Artificial Sequence: Synthetic oligonucleotide
acgaagcuuggugaguugg

SEQ ID NO: 3075929 - RNA, 19 nt, Artificial Sequence
  Description of Artificial Sequence: Synthetic oligonucleotide
acugcaggcacgugacguc

SEQ ID NO: 3075930 - RNA, 19 nt, Artificial Sequence
  Description of Artificial Sequence: Synthetic oligonucleotide
aaacgaagcuuggugaguu

SEQ ID NO: 3075931 - RNA, 19 nt, Artificial Sequence
  Description of Artificial Sequence: Synthetic oligonucleotide
agcuuggugaguuggugga

SEQ ID NO: 3075932 - RNA, 19 nt, Artificial Sequence
  Description of Artificial Sequence: Synthetic oligonucleotide
aacgaagcuuggugaguug

SEQ ID NO: 3075933 - RNA, 19 nt, Artificial Sequence
  Description of Artificial Sequence: Synthetic oligonucleotide
gagguugggacccagcugu

SEQ ID NO: 3075934 - RNA, 19 nt, Artificial Sequence
  Description of Artificial Sequence: Synthetic oligonucleotide
acaagcccuucuuacagaa

SEQ ID NO: 3075935 - RNA, 19 nt, Artificial Sequence
  Description of Artificial Sequence: Synthetic oligonucleotide
guagccacauucacugggg

SEQ ID NO: 3075936 - RNA, 19 nt, Artificial Sequence
  Description of Artificial Sequence: Synthetic oligonucleotide
uucuucggggucugggacc

SEQ ID NO: 3075937 - RNA, 19 nt, Artificial Sequence
  Description of Artificial Sequence: Synthetic oligonucleotide
cuuacagaaggcacagaga

SEQ ID NO: 3075938 - RNA, 19 nt, Artificial Sequence
  Description of Artificial Sequence: Synthetic oligonucleotide
uuggugaguugguggaggc

SEQ ID NO: 3075939 - RNA, 19 nt, Artificial Sequence
  Description of Artificial Sequence: Synthetic oligonucleotide
aggucuucaggaccgggug

SEQ ID NO: 3075940 - RNA, 19 nt, Artificial Sequence
  Description of Artificial Sequence: Synthetic oligonucleotide
gaagcuuggugaguuggug

SEQ ID NO: 3075941 - RNA, 19 nt, Artificial Sequence
  Description of Artificial Sequence: Synthetic oligonucleotide
aggcacagagaaucagguc

SEQ ID NO: 3075942 - RNA, 19 nt, Artificial Sequence
  Description of Artificial Sequence: Synthetic oligonucleotide
ucccgacugaguagcaccc

SEQ ID NO: 3075943 - RNA, 19 nt, Artificial Sequence
  Description of Artificial Sequence: Synthetic oligonucleotide
cacacugcaggcacgugac

SEQ ID NO: 3075944 - RNA, 19 nt, Artificial Sequence
  Description of Artificial Sequence: Synthetic oligonucleotide
acugggguccaaggggucc

SEQ ID NO: 3075945 - RNA, 19 nt, Artificial Sequence
  Description of Artificial Sequence: Synthetic oligonucleotide
agaaggcacagagaaucag

SEQ ID NO: 3075946 - RNA, 19 nt, Artificial Sequence
  Description of Artificial Sequence: Synthetic oligonucleotide
ucccgagcccuucuucggg

SEQ ID NO: 3075947 - RNA, 19 nt, Artificial Sequence
  Description of Artificial Sequence: Synthetic oligonucleotide
gucccgacugaguagcacc

SEQ ID NO: 3075948 - RNA, 19 nt, Artificial Sequence
  Description of Artificial Sequence: Synthetic oligonucleotide
agucaggcucagcaggucu

SEQ ID NO: 3075949 - RNA, 19 nt, Artificial Sequence
  Description of Artificial Sequence: Synthetic oligonucleotide
ggcacagagaaucaggucu

SEQ ID NO: 3075950 - RNA, 19 nt, Artificial Sequence
  Description of Artificial Sequence: Synthetic oligonucleotide
cuucuucggggucugggac

SEQ ID NO: 3075951 - RNA, 19 nt, Artificial Sequence
  Description of Artificial Sequence: Synthetic oligonucleotide
uacagaaggcacagagaau

SEQ ID NO: 3075952 - RNA, 19 nt, Artificial Sequence
  Description of Artificial Sequence: Synthetic oligonucleotide
cugugucuggugagguugg

SEQ ID NO: 3075953 - RNA, 19 nt, Artificial Sequence
  Description of Artificial Sequence: Synthetic oligonucleotide
cacgugacgucgaacugug

SEQ ID NO: 3075954 - RNA, 19 nt, Artificial Sequence
  Description of Artificial Sequence: Synthetic oligonucleotide
ugguagccacauucacugg

SEQ ID NO: 3075955 - RNA, 19 nt, Artificial Sequence
  Description of Artificial Sequence: Synthetic oligonucleotide
gaaucaggucuagaguaca

SEQ ID NO: 3075956 - RNA, 19 nt, Artificial Sequence
  Description of Artificial Sequence: Synthetic oligonucleotide
gggguugguagccacauuc

SEQ ID NO: 3075957 - RNA, 19 nt, Artificial Sequence
  Description of Artificial Sequence: Synthetic oligonucleotide
gccacauucacuggggucc

SEQ ID NO: 3075958 - RNA, 19 nt, Artificial Sequence
  Description of Artificial Sequence: Synthetic oligonucleotide
gacgucgaacugugagggg

SEQ ID NO: 3075959 - RNA, 19 nt, Artificial Sequence
  Description of Artificial Sequence: Synthetic oligonucleotide
aggaccgggugucccgagc

SEQ ID NO: 3075960 - RNA, 19 nt, Artificial Sequence
  Description of Artificial Sequence: Synthetic oligonucleotide
cucaguuugcaggaaacga

SEQ ID NO: 3075961 - RNA, 19 nt, Artificial Sequence
  Description of Artificial Sequence: Synthetic oligonucleotide
guuugcaggaaacgaagcu

SEQ ID NO: 3075962 - RNA, 19 nt, Artificial Sequence
  Description of Artificial Sequence: Synthetic oligonucleotide
ugaguugguggaggccugg

SEQ ID NO: 3075963 - RNA, 19 nt, Artificial Sequence
  Description of Artificial Sequence: Synthetic oligonucleotide
guccaaggggucccgacug

SEQ ID NO: 3075964 - RNA, 19 nt, Artificial Sequence
  Description of Artificial Sequence: Synthetic oligonucleotide
caggucuagaguacaguca

SEQ ID NO: 3075965 - RNA, 19 nt, Artificial Sequence
  Description of Artificial Sequence: Synthetic oligonucleotide
gucuggugagguugggacc

SEQ ID NO: 3075966 - RNA, 19 nt, Artificial Sequence
  Description of Artificial Sequence: Synthetic oligonucleotide
ggcucagcaggucuucagg

SEQ ID NO: 3075967 - RNA, 19 nt, Artificial Sequence
  Description of Artificial Sequence: Synthetic oligonucleotide
acugaguagcacccacacu

SEQ ID NO: 3075968 - RNA, 19 nt, Artificial Sequence
  Description of Artificial Sequence: Synthetic oligonucleotide
ucuucggggucugggacca

SEQ ID NO: 3075969 - RNA, 19 nt, Artificial Sequence
  Description of Artificial Sequence: Synthetic oligonucleotide
ucggggucugggaccacag

SEQ ID NO: 3075970 - RNA, 19 nt, Artificial Sequence
  Description of Artificial Sequence: Synthetic oligonucleotide
acauucacugggguccaag

SEQ ID NO: 3075971 - RNA, 19 nt, Artificial Sequence
  Description of Artificial Sequence: Synthetic oligonucleotide
uagccacauucacuggggu

SEQ ID NO: 3075972 - RNA, 19 nt, Artificial Sequence
  Description of Artificial Sequence: Synthetic oligonucleotide
aucaggucuagaguacagu

SEQ ID NO: 3075973 - RNA, 19 nt, Artificial Sequence
  Description of Artificial Sequence: Synthetic oligonucleotide
cuguccucaguuugcagga

SEQ ID NO: 3075974 - RNA, 19 nt, Artificial Sequence
  Description of Artificial Sequence: Synthetic oligonucleotide
ggucugggaccacagcuag

SEQ ID NO: 3075975 - RNA, 19 nt, Artificial Sequence
  Description of Artificial Sequence: Synthetic oligonucleotide
aguugguggaggccuggga

SEQ ID NO: 3075976 - RNA, 19 nt, Artificial Sequence
  Description of Artificial Sequence: Synthetic oligonucleotide
aggcucagcaggucuucag

SEQ ID NO: 3075977 - RNA, 19 nt, Artificial Sequence
  Description of Artificial Sequence: Synthetic oligonucleotide
ugugucuggugagguuggg

SEQ ID NO: 3075978 - RNA, 19 nt, Artificial Sequence
  Description of Artificial Sequence: Synthetic oligonucleotide
caagcccuucuuacagaag

SEQ ID NO: 3075979 - RNA, 19 nt, Artificial Sequence
  Description of Artificial Sequence: Synthetic oligonucleotide
aggggucccgacugaguag

SEQ ID NO: 3075980 - RNA, 19 nt, Artificial Sequence
  Description of Artificial Sequence: Synthetic oligonucleotide
uauggagcccaggccuggg

SEQ ID NO: 3075981 - RNA, 19 nt, Artificial Sequence
  Description of Artificial Sequence: Synthetic oligonucleotide
ucuaggccugugucuggug

SEQ ID NO: 3075982 - RNA, 19 nt, Artificial Sequence
  Description of Artificial Sequence: Synthetic oligonucleotide
acacugcaggcacgugacg

SEQ ID NO: 3075983 - RNA, 19 nt, Artificial Sequence
  Description of Artificial Sequence: Synthetic oligonucleotide
uccaaggggucccgacuga

SEQ ID NO: 3075984 - RNA, 19 nt, Artificial Sequence
  Description of Artificial Sequence: Synthetic oligonucleotide
gguugguagccacauucac

SEQ ID NO: 3075985 - RNA, 19 nt, Artificial Sequence
  Description of Artificial Sequence: Synthetic oligonucleotide
cugcaggcacgugacgucg

SEQ ID NO: 3075986 - RNA, 19 nt, Artificial Sequence
  Description of Artificial Sequence: Synthetic oligonucleotide
gucccgagcccuucuucgg

SEQ ID NO: 3075987 - RNA, 19 nt, Artificial Sequence
  Description of Artificial Sequence: Synthetic oligonucleotide
agcuguccucaguuugcag

SEQ ID NO: 3075988 - RNA, 19 nt, Artificial Sequence
  Description of Artificial Sequence: Synthetic oligonucleotide
cuaggccugugucugguga

SEQ ID NO: 3075989 - RNA, 19 nt, Artificial Sequence
  Description of Artificial Sequence: Synthetic oligonucleotide
ccacagcuagguauggagc

SEQ ID NO: 3075990 - RNA, 19 nt, Artificial Sequence
  Description of Artificial Sequence: Synthetic oligonucleotide
gaguugguggaggccuggg

SEQ ID NO: 3075991 - RNA, 19 nt, Artificial Sequence
  Description of Artificial Sequence: Synthetic oligonucleotide
cgugacgucgaacugugag

SEQ ID NO: 3075992 - RNA, 19 nt, Artificial Sequence
  Description of Artificial Sequence: Synthetic oligonucleotide
ucuucaggaccgggugucc

SEQ ID NO: 3075993 - RNA, 19 nt, Artificial Sequence
  Description of Artificial Sequence: Synthetic oligonucleotide
uggugaguugguggaggcc

SEQ ID NO: 3075994 - RNA, 19 nt, Artificial Sequence
  Description of Artificial Sequence: Synthetic oligonucleotide
uagcacccacacugcaggc

SEQ ID NO: 3075995 - RNA, 19 nt, Artificial Sequence
  Description of Artificial Sequence: Synthetic oligonucleotide
cagaaggcacagagaauca

SEQ ID NO: 3075996 - RNA, 19 nt, Artificial Sequence
  Description of Artificial Sequence: Synthetic oligonucleotide
cccuucuuacagaaggcac

SEQ ID NO: 3075997 - RNA, 19 nt, Artificial Sequence
  Description of Artificial Sequence: Synthetic oligonucleotide
ccuucuuacagaaggcaca

SEQ ID NO: 3075998 - RNA, 19 nt, Artificial Sequence
  Description of Artificial Sequence: Synthetic oligonucleotide
acagagaaucaggucuaga

SEQ ID NO: 3075999 - RNA, 19 nt, Artificial Sequence
  Description of Artificial Sequence: Synthetic oligonucleotide
ugcaggcacgugacgucga

SEQ ID NO: 3076000 - RNA, 19 nt, Artificial Sequence
  Description of Artificial Sequence: Synthetic oligonucleotide
uucuuacagaaggcacaga

SEQ ID NO: 3076001 - RNA, 19 nt, Artificial Sequence
  Description of Artificial Sequence: Synthetic oligonucleotide
ccagcuguccucaguuugc

SEQ ID NO: 3076002 - RNA, 19 nt, Artificial Sequence
  Description of Artificial Sequence: Synthetic oligonucleotide
guugguagccacauucacu

SEQ ID NO: 3076003 - RNA, 19 nt, Artificial Sequence
  Description of Artificial Sequence: Synthetic oligonucleotide
cacagagaaucaggucuag

SEQ ID NO: 3076004 - RNA, 19 nt, Artificial Sequence
  Description of Artificial Sequence: Synthetic oligonucleotide
ugggacccagcuguccuca

SEQ ID NO: 3076005 - RNA, 19 nt, Artificial Sequence
  Description of Artificial Sequence: Synthetic oligonucleotide
gggaccacagcuagguaug

SEQ ID NO: 3076006 - RNA, 19 nt, Artificial Sequence
  Description of Artificial Sequence: Synthetic oligonucleotide
gugagguugggacccagcu

SEQ ID NO: 3076007 - RNA, 19 nt, Artificial Sequence
  Description of Artificial Sequence: Synthetic oligonucleotide
uucggggucugggaccaca

SEQ ID NO: 3076008 - RNA, 19 nt, Artificial Sequence
  Description of Artificial Sequence: Synthetic oligonucleotide
gucuucaggaccggguguc

SEQ ID NO: 3076009 - RNA, 19 nt, Artificial Sequence
  Description of Artificial Sequence: Synthetic oligonucleotide
ccucaguuugcaggaaacg

SEQ ID NO: 3076010 - RNA, 19 nt, Artificial Sequence
  Description of Artificial Sequence: Synthetic oligonucleotide
guugggacccagcuguccu

SEQ ID NO: 3076011 - RNA, 19 nt, Artificial Sequence
  Description of Artificial Sequence: Synthetic oligonucleotide
gaaacgaagcuuggugagu

SEQ ID NO: 3076012 - RNA, 19 nt, Artificial Sequence
  Description of Artificial Sequence: Synthetic oligonucleotide
cacaagcccuucuuacaga

SEQ ID NO: 3076013 - RNA, 19 nt, Artificial Sequence
  Description of Artificial Sequence: Synthetic oligonucleotide
ucaggaccgggugucccga

SEQ ID NO: 3076014 - RNA, 19 nt, Artificial Sequence
  Description of Artificial Sequence: Synthetic oligonucleotide
gaccgggugucccgagccc

SEQ ID NO: 3076015 - RNA, 19 nt, Artificial Sequence
  Description of Artificial Sequence: Synthetic oligonucleotide
gggucuaggccugugucug

SEQ ID NO: 3076016 - RNA, 19 nt, Artificial Sequence
  Description of Artificial Sequence: Synthetic oligonucleotide
ggaccgggugucccgagcc

SEQ ID NO: 3076017 - RNA, 19 nt, Artificial Sequence
  Description of Artificial Sequence: Synthetic oligonucleotide
cacccacacugcaggcacg

SEQ ID NO: 3076018 - RNA, 19 nt, Artificial Sequence
  Description of Artificial Sequence: Synthetic oligonucleotide
agcacccacacugcaggca

SEQ ID NO: 3076019 - RNA, 19 nt, Artificial Sequence
  Description of Artificial Sequence: Synthetic oligonucleotide
ggucuagaguacagucagg

SEQ ID NO: 3076020 - RNA, 19 nt, Artificial Sequence
  Description of Artificial Sequence: Synthetic oligonucleotide
gcucagcaggucuucagga

SEQ ID NO: 3076021 - RNA, 19 nt, Artificial Sequence
  Description of Artificial Sequence: Synthetic oligonucleotide
gcacccacacugcaggcac

SEQ ID NO: 3076022 - RNA, 19 nt, Artificial Sequence
  Description of Artificial Sequence: Synthetic oligonucleotide
guccucaguuugcaggaaa

SEQ ID NO: 3076023 - RNA, 19 nt, Artificial Sequence
  Description of Artificial Sequence: Synthetic oligonucleotide
ggucuaggccugugucugg

SEQ ID NO: 3076024 - RNA, 19 nt, Artificial Sequence
  Description of Artificial Sequence: Synthetic oligonucleotide
ggcacgugacgucgaacug

SEQ ID NO: 3076025 - RNA, 19 nt, Artificial Sequence
  Description of Artificial Sequence: Synthetic oligonucleotide
ggggucccgacugaguagc

SEQ ID NO: 3076026 - RNA, 19 nt, Artificial Sequence
  Description of Artificial Sequence: Synthetic oligonucleotide
agcaggucuucaggaccgg

SEQ ID NO: 3076027 - RNA, 19 nt, Artificial Sequence
  Description of Artificial Sequence: Synthetic oligonucleotide
agaguacagucaggcucag

SEQ ID NO: 3076028 - RNA, 19 nt, Artificial Sequence
  Description of Artificial Sequence: Synthetic oligonucleotide
gucugggaccacagcuagg

SEQ ID NO: 3076029 - RNA, 19 nt, Artificial Sequence
  Description of Artificial Sequence: Synthetic oligonucleotide
cccagcuguccucaguuug

SEQ ID NO: 3076030 - RNA, 19 nt, Artificial Sequence
  Description of Artificial Sequence: Synthetic oligonucleotide
gguauggagcccaggccug

SEQ ID NO: 3076031 - RNA, 19 nt, Artificial Sequence
  Description of Artificial Sequence: Synthetic oligonucleotide
gacccagcuguccucaguu

SEQ ID NO: 3076032 - RNA, 19 nt, Artificial Sequence
  Description of Artificial Sequence: Synthetic oligonucleotide
ggugaguugguggaggccu

SEQ ID NO: 3076033 - RNA, 19 nt, Artificial Sequence
  Description of Artificial Sequence: Synthetic oligonucleotide
gaguacagucaggcucagc

SEQ ID NO: 3076034 - RNA, 19 nt, Artificial Sequence
  Description of Artificial Sequence: Synthetic oligonucleotide
acccacacugcaggcacgu

SEQ ID NO: 3076035 - RNA, 19 nt, Artificial Sequence
  Description of Artificial Sequence: Synthetic oligonucleotide
gcuagguauggagcccagg

SEQ ID NO: 3076036 - RNA, 19 nt, Artificial Sequence
  Description of Artificial Sequence: Synthetic oligonucleotide
gugucccgagcccuucuuc

SEQ ID NO: 3076037 - RNA, 19 nt, Artificial Sequence
  Description of Artificial Sequence: Synthetic oligonucleotide
gaccacagcuagguaugga

SEQ ID NO: 3076038 - RNA, 19 nt, Artificial Sequence
  Description of Artificial Sequence: Synthetic oligonucleotide
gugaguugguggaggccug

SEQ ID NO: 3076039 - RNA, 19 nt, Artificial Sequence
  Description of Artificial Sequence: Synthetic oligonucleotide
ggggucugggaccacagcu

SEQ ID NO: 3076040 - RNA, 19 nt, Artificial Sequence
  Description of Artificial Sequence: Synthetic oligonucleotide
ggaccacagcuagguaugg

SEQ ID NO: 3076041 - RNA, 19 nt, Artificial Sequence
  Description of Artificial Sequence: Synthetic oligonucleotide
cugggacccgccguuugac

SEQ ID NO: 3076042 - RNA, 19 nt, Artificial Sequence
  Description of Artificial Sequence: Synthetic oligonucleotide
cagcuagguauggagccca

SEQ ID NO: 3076043 - RNA, 19 nt, Artificial Sequence
  Description of Artificial Sequence: Synthetic oligonucleotide
agcuagguauggagcccag

SEQ ID NO: 3076044 - RNA, 19 nt, Artificial Sequence
  Description of Artificial Sequence: Synthetic oligonucleotide
gguugggacccagcugucc

SEQ ID NO: 3076045 - RNA, 19 nt, Artificial Sequence
  Description of Artificial Sequence: Synthetic oligonucleotide
caggucuucaggaccgggu

SEQ ID NO: 3076046 - RNA, 19 nt, Artificial Sequence
  Description of Artificial Sequence: Synthetic oligonucleotide
accgggugucccgagcccu

SEQ ID NO: 3076047 - RNA, 19 nt, Artificial Sequence
  Description of Artificial Sequence: Synthetic oligonucleotide
gugucuggugagguuggga

SEQ ID NO: 3076048 - RNA, 19 nt, Artificial Sequence
  Description of Artificial Sequence: Synthetic oligonucleotide
ccgacugaguagcacccac

SEQ ID NO: 3076049 - RNA, 19 nt, Artificial Sequence
  Description of Artificial Sequence: Synthetic oligonucleotide
cccgagcccuucuucgggg

SEQ ID NO: 3076050 - RNA, 19 nt, Artificial Sequence
  Description of Artificial Sequence: Synthetic oligonucleotide
ggugagguugggacccagc

SEQ ID NO: 3076051 - RNA, 19 nt, Artificial Sequence
  Description of Artificial Sequence: Synthetic oligonucleotide
agguugggacccagcuguc

SEQ ID NO: 3076052 - RNA, 19 nt, Artificial Sequence
  Description of Artificial Sequence: Synthetic oligonucleotide
ggguugguagccacauuca

SEQ ID NO: 3076053 - RNA, 19 nt, Artificial Sequence
  Description of Artificial Sequence: Synthetic oligonucleotide
gcaggucuucaggaccggg

SEQ ID NO: 3076054 - RNA, 19 nt, Artificial Sequence
  Description of Artificial Sequence: Synthetic oligonucleotide
ccacacugcaggcacguga

SEQ ID NO: 3076055 - RNA, 19 nt, Artificial Sequence
  Description of Artificial Sequence: Synthetic oligonucleotide
acccagcuguccucaguuu

SEQ ID NO: 3076056 - RNA, 19 nt, Artificial Sequence
  Description of Artificial Sequence: Synthetic oligonucleotide
caggcacgugacgucgaac

SEQ ID NO: 3076057 - RNA, 19 nt, Artificial Sequence
  Description of Artificial Sequence: Synthetic oligonucleotide
cacugcaggcacgugacgu

SEQ ID NO: 3076058 - RNA, 19 nt, Artificial Sequence
  Description of Artificial Sequence: Synthetic oligonucleotide
cccuucuucggggucuggg

SEQ ID NO: 3076059 - RNA, 19 nt, Artificial Sequence
  Description of Artificial Sequence: Synthetic oligonucleotide
gaggccugggacccgccgu

SEQ ID NO: 3076060 - RNA, 19 nt, Artificial Sequence
  Description of Artificial Sequence: Synthetic oligonucleotide
ggguccaaggggucccgac

SEQ ID NO: 3076061 - RNA, 19 nt, Artificial Sequence
  Description of Artificial Sequence: Synthetic oligonucleotide
aggccugggacccgccguu

SEQ ID NO: 3076062 - RNA, 19 nt, Artificial Sequence
  Description of Artificial Sequence: Synthetic oligonucleotide
caggaccgggugucccgag

SEQ ID NO: 3076063 - RNA, 19 nt, Artificial Sequence
  Description of Artificial Sequence: Synthetic oligonucleotide
ccuucuucggggucuggga

SEQ ID NO: 3076064 - RNA, 19 nt, Artificial Sequence
  Description of Artificial Sequence: Synthetic oligonucleotide
cagucaggcucagcagguc

SEQ ID NO: 3076065 - RNA, 19 nt, Artificial Sequence
  Description of Artificial Sequence: Synthetic oligonucleotide
gagcccuucuucggggucu

SEQ ID NO: 3076066 - RNA, 19 nt, Artificial Sequence
  Description of Artificial Sequence: Synthetic oligonucleotide
agcccuucuucggggucug

SEQ ID NO: 3076067 - RNA, 19 nt, Artificial Sequence
  Description of Artificial Sequence: Synthetic oligonucleotide
cagcuguccucaguuugca

SEQ ID NO: 3076068 - RNA, 19 nt, Artificial Sequence
  Description of Artificial Sequence: Synthetic oligonucleotide
gguccaaggggucccgacu

SEQ ID NO: 3076069 - RNA, 19 nt, Artificial Sequence
  Description of Artificial Sequence: Synthetic oligonucleotide
ggucccgacugaguagcac

SEQ ID NO: 3076070 - RNA, 19 nt, Artificial Sequence
  Description of Artificial Sequence: Synthetic oligonucleotide
ggggucuaggccugugucu

SEQ ID NO: 3076071 - RNA, 19 nt, Artificial Sequence
  Description of Artificial Sequence: Synthetic oligonucleotide
ccaaggggucccgacugag

SEQ ID NO: 3076072 - RNA, 19 nt, Artificial Sequence
  Description of Artificial Sequence: Synthetic oligonucleotide
caaggggucccgacugagu

SEQ ID NO: 3076073 - RNA, 19 nt, Artificial Sequence
  Description of Artificial Sequence: Synthetic oligonucleotide
gcacagagaaucaggucua

SEQ ID NO: 3076074 - RNA, 19 nt, Artificial Sequence
  Description of Artificial Sequence: Synthetic oligonucleotide
ggucuucaggaccgggugu

SEQ ID NO: 3076075 - RNA, 19 nt, Artificial Sequence
  Description of Artificial Sequence: Synthetic oligonucleotide
gucuaggccugugucuggu

SEQ ID NO: 3076076 - RNA, 19 nt, Artificial Sequence
  Description of Artificial Sequence: Synthetic oligonucleotide
gggacccagcuguccucag

SEQ ID NO: 3076077 - RNA, 19 nt, Artificial Sequence
  Description of Artificial Sequence: Synthetic oligonucleotide
gguggaggccugggacccg

SEQ ID NO: 3076078 - RNA, 19 nt, Artificial Sequence
  Description of Artificial Sequence: Synthetic oligonucleotide
gcacgugacgucgaacugu

SEQ ID NO: 3076079 - RNA, 19 nt, Artificial Sequence
  Description of Artificial Sequence: Synthetic oligonucleotide
caggcucagcaggucuuca

SEQ ID NO: 3076080 - RNA, 19 nt, Artificial Sequence
  Description of Artificial Sequence: Synthetic oligonucleotide
gggucugggaccacagcua

SEQ ID NO: 3076081 - RNA, 19 nt, Artificial Sequence
  Description of Artificial Sequence: Synthetic oligonucleotide
gcaggaaacgaagcuuggu

SEQ ID NO: 3076082 - RNA, 19 nt, Artificial Sequence
  Description of Artificial Sequence: Synthetic oligonucleotide
cugggaccacagcuaggua

SEQ ID NO: 3076083 - RNA, 19 nt, Artificial Sequence
  Description of Artificial Sequence: Synthetic oligonucleotide
cgacugaguagcacccaca

SEQ ID NO: 3076084 - RNA, 19 nt, Artificial Sequence
  Description of Artificial Sequence: Synthetic oligonucleotide
acgugacgucgaacuguga

SEQ ID NO: 3076085 - RNA, 19 nt, Artificial Sequence
  Description of Artificial Sequence: Synthetic oligonucleotide
gcaggcacgugacgucgaa

SEQ ID NO: 3076086 - RNA, 19 nt, Artificial Sequence
  Description of Artificial Sequence: Synthetic oligonucleotide
gucaggcucagcaggucuu

SEQ ID NO: 3076087 - RNA, 19 nt, Artificial Sequence
  Description of Artificial Sequence: Synthetic oligonucleotide
cuggugagguugggaccca

SEQ ID NO: 3076088 - RNA, 19 nt, Artificial Sequence
  Description of Artificial Sequence: Synthetic oligonucleotide
ggacccagcuguccucagu

SEQ ID NO: 3076089 - RNA, 19 nt, Artificial Sequence
  Description of Artificial Sequence: Synthetic oligonucleotide
cuucggggucugggaccac

SEQ ID NO: 3076090 - RNA, 19 nt, Artificial Sequence
  Description of Artificial Sequence: Synthetic oligonucleotide
cggggucugggaccacagc

SEQ ID NO: 3076091 - RNA, 19 nt, Artificial Sequence
  Description of Artificial Sequence: Synthetic oligonucleotide
cacauucacugggguccaa

SEQ ID NO: 3076092 - RNA, 19 nt, Artificial Sequence
  Description of Artificial Sequence: Synthetic oligonucleotide
ccacauucacuggggucca

SEQ ID NO: 3076093 - RNA, 19 nt, Artificial Sequence
  Description of Artificial Sequence: Synthetic oligonucleotide
ggccugugucuggugaggu

SEQ ID NO: 3076094 - RNA, 19 nt, Artificial Sequence
  Description of Artificial Sequence: Synthetic oligonucleotide
ggugucccgagcccuucuu

SEQ ID NO: 3076095 - RNA, 19 nt, Artificial Sequence
  Description of Artificial Sequence: Synthetic oligonucleotide
cgaagcuuggugaguuggu

SEQ ID NO: 3076096 - RNA, 19 nt, Artificial Sequence
  Description of Artificial Sequence: Synthetic oligonucleotide
gggucccgacugaguagca

SEQ ID NO: 3076097 - RNA, 19 nt, Artificial Sequence
  Description of Artificial Sequence: Synthetic oligonucleotide
cccacacugcaggcacgug

SEQ ID NO: 3076098 - RNA, 19 nt, Artificial Sequence
  Description of Artificial Sequence: Synthetic oligonucleotide
gggguccaaggggucccga

SEQ ID NO: 3076099 - RNA, 19 nt, Artificial Sequence
  Description of Artificial Sequence: Synthetic oligonucleotide
cccgacugaguagcaccca

SEQ ID NO: 3076100 - RNA, 19 nt, Artificial Sequence
  Description of Artificial Sequence: Synthetic oligonucleotide
gccugugucuggugagguu

SEQ ID NO: 3076101 - RNA, 19 nt, Artificial Sequence
  Description of Artificial Sequence: Synthetic oligonucleotide
ccgagcccuucuucggggu

SEQ ID NO: 3076102 - RNA, 19 nt, Artificial Sequence
  Description of Artificial Sequence: Synthetic oligonucleotide
ccgggugucccgagcccuu

SEQ ID NO: 3076103 - RNA, 19 nt, Artificial Sequence
  Description of Artificial Sequence: Synthetic oligonucleotide
ggccugggacccgccguuu

SEQ ID NO: 3076104 - RNA, 19 nt, Artificial Sequence
  Description of Artificial Sequence: Synthetic oligonucleotide
  modified_base (17)..(17): a, c, u, g, unknown or other
uuuauuaccaauacacncc

SEQ ID NO: 3076105 - RNA, 19 nt, Artificial Sequence
  Description of Artificial Sequence: Synthetic oligonucleotide
agaacuugcgcucagcccc

SEQ ID NO: 3076106 - RNA, 19 nt, Artificial Sequence
  Description of Artificial Sequence: Synthetic oligonucleotide
ucuguugccacugacaugg

SEQ ID NO: 3076107 - RNA, 19 nt, Artificial Sequence
  Description of Artificial Sequence: Synthetic oligonucleotide
  modified_base (18)..(18): a, c, u, g, unknown or other
uuuuauuaccaauacacnc

SEQ ID NO: 3076108 - RNA, 19 nt, Artificial Sequence
  Description of Artificial Sequence: Synthetic oligonucleotide
  modified_base (7)..(7): a, c, u, g, unknown or other
auacacnccuuucaagagc

SEQ ID NO: 3076109 - RNA, 19 nt, Artificial Sequence
  Description of Artificial Sequence: Synthetic oligonucleotide
  modified_base (16)..(16): a, c, u, g, unknown or other
uuauuaccaauacacnccu

SEQ ID NO: 3076110 - RNA, 19 nt, Artificial Sequence
  Description of Artificial Sequence: Synthetic oligonucleotide
  modified_base (8)..(8): a, c, u, g, unknown or other
aauacacnccuuucaagag

SEQ ID NO: 3076111 - RNA, 19 nt, Artificial Sequence
  Description of Artificial Sequence: Synthetic oligonucleotide
ucugggaaagguucaaccg

SEQ ID NO: 3076112 - RNA, 19 nt, Artificial Sequence
  Description of Artificial Sequence: Synthetic oligonucleotide
uccaaauacagccaucugu

SEQ ID NO: 3076113 - RNA, 19 nt, Artificial Sequence
  Description of Artificial Sequence: Synthetic oligonucleotide
ugaccuucgaagcagaguc

SEQ ID NO: 3076114 - RNA, 19 nt, Artificial Sequence
  Description of Artificial Sequence: Synthetic oligonucleotide
ucaagagccagaacuugcg

SEQ ID NO: 3076115 - RNA, 19 nt, Artificial Sequence
  Description of Artificial Sequence: Synthetic oligonucleotide
  modified_base (6)..(6): a, c, u, g, unknown or other
uacacnccuuucaagagcc

SEQ ID NO: 3076116 - RNA, 19 nt, Artificial Sequence
  Description of Artificial Sequence: Synthetic oligonucleotide
  modified_base (14)..(14): a, c, u, g, unknown or other
auuaccaauacacnccuuu

SEQ ID NO: 3076117 - RNA, 19 nt, Artificial Sequence
  Description of Artificial Sequence: Synthetic oligonucleotide
aaagguucaaccguucugu

SEQ ID NO: 3076118 - RNA, 19 nt, Artificial Sequence
  Description of Artificial Sequence: Synthetic oligonucleotide
uucaagagccagaacuugc

SEQ ID NO: 3076119 - RNA, 19 nt, Artificial Sequence
  Description of Artificial Sequence: Synthetic oligonucleotide
uggagagcccuucuggcgg

SEQ ID NO: 3076120 - RNA, 19 nt, Artificial Sequence
  Description of Artificial Sequence: Synthetic oligonucleotide
aagagccagaacuugcgcu

SEQ ID NO: 3076121 - RNA, 19 nt, Artificial Sequence
  Description of Artificial Sequence: Synthetic oligonucleotide
acugacaugguguuuggcu

SEQ ID NO: 3076122 - RNA, 19 nt, Artificial Sequence
  Description of Artificial Sequence: Synthetic oligonucleotide
gaaagguucaaccguucug

SEQ ID NO: 3076123 - RNA, 19 nt, Artificial Sequence
  Description of Artificial Sequence: Synthetic oligonucleotide
  modified_base (9)..(9): a, c, u, g, unknown or other
caauacacnccuuucaaga

SEQ ID NO: 3076124 - RNA, 19 nt, Artificial Sequence
  Description of Artificial Sequence: Synthetic oligonucleotide
gguucaaccguucuguugc

SEQ ID NO: 3076125 - RNA, 19 nt, Artificial Sequence
  Description of Artificial Sequence: Synthetic oligonucleotide
agagccagaacuugcgcuc

SEQ ID NO: 3076126 - RNA, 19 nt, Artificial Sequence
  Description of Artificial Sequence: Synthetic oligonucleotide
  modified_base (12)..(12): a, c, u, g, unknown or other
uaccaauacacnccuuuca

SEQ ID NO: 3076127 - RNA, 19 nt, Artificial Sequence
  Description of Artificial Sequence: Synthetic oligonucleotide
agcagcccauuccaaauac

SEQ ID NO: 3076128 - RNA, 19 nt, Artificial Sequence
  Description of Artificial Sequence: Synthetic oligonucleotide
cucugggaaagguucaacc

SEQ ID NO: 3076129 - RNA, 19 nt, Artificial Sequence
  Description of Artificial Sequence: Synthetic oligonucleotide
gcccauuccaaauacagcc

SEQ ID NO: 3076130 - RNA, 19 nt, Artificial Sequence
  Description of Artificial Sequence: Synthetic oligonucleotide
  modified_base (13)..(13): a, c, u, g, unknown or other
uuaccaauacacnccuuuc

SEQ ID NO: 3076131 - RNA, 19 nt, Artificial Sequence
  Description of Artificial Sequence: Synthetic oligonucleotide
ugguguuuggcugccacgg

SEQ ID NO: 3076132 - RNA, 19 nt, Artificial Sequence
  Description of Artificial Sequence: Synthetic oligonucleotide
auuccaaauacagccaucu

SEQ ID NO: 3076133 - RNA, 19 nt, Artificial Sequence
  Description of Artificial Sequence: Synthetic oligonucleotide
cagcccauuccaaauacag

SEQ ID NO: 3076134 - RNA, 19 nt, Artificial Sequence
  Description of Artificial Sequence: Synthetic oligonucleotide
agcuggagagcccuucugg

SEQ ID NO: 3076135 - RNA, 19 nt, Artificial Sequence
  Description of Artificial Sequence: Synthetic oligonucleotide
cugacaugguguuuggcug

SEQ ID NO: 3076136 - RNA, 19 nt, Artificial Sequence
  Description of Artificial Sequence: Synthetic oligonucleotide
accuucgaagcagagucgc

SEQ ID NO: 3076137 - RNA, 19 nt, Artificial Sequence
  Description of Artificial Sequence: Synthetic oligonucleotide
ccaaauacagccaucugug

SEQ ID NO: 3076138 - RNA, 19 nt, Artificial Sequence
  Description of Artificial Sequence: Synthetic oligonucleotide
  modified_base (11)..(11): a, c, u, g, unknown or other
accaauacacnccuuucaa

SEQ ID NO: 3076139 - RNA, 19 nt, Artificial Sequence
  Description of Artificial Sequence: Synthetic oligonucleotide
ugacaugguguuuggcugc

SEQ ID NO: 3076140 - RNA, 19 nt, Artificial Sequence
  Description of Artificial Sequence: Synthetic oligonucleotide
ucaaccguucuguugccac

SEQ ID NO: 3076141 - RNA, 19 nt, Artificial Sequence
  Description of Artificial Sequence: Synthetic oligonucleotide
uucgaagcagagucgcccc

SEQ ID NO: 3076142 - RNA, 19 nt, Artificial Sequence
  Description of Artificial Sequence: Synthetic oligonucleotide
guguuuggcugccacgggg

SEQ ID NO: 3076143 - RNA, 19 nt, Artificial Sequence
  Description of Artificial Sequence: Synthetic oligonucleotide
cuucgaagcagagucgccc

SEQ ID NO: 3076144 - RNA, 19 nt, Artificial Sequence
  Description of Artificial Sequence: Synthetic oligonucleotide
ucuguguuccucugggaaa

SEQ ID NO: 3076145 - RNA, 19 nt, Artificial Sequence
  Description of Artificial Sequence: Synthetic oligonucleotide
aucuguguuccucugggaa

SEQ ID NO: 3076146 - RNA, 19 nt, Artificial Sequence
  Description of Artificial Sequence: Synthetic oligonucleotide
uuccaaauacagccaucug

SEQ ID NO: 3076147 - RNA, 19 nt, Artificial Sequence
  Description of Artificial Sequence: Synthetic oligonucleotide
agcagagucgccccuccuc

SEQ ID NO: 3076148 - RNA, 19 nt, Artificial Sequence
  Description of Artificial Sequence: Synthetic oligonucleotide
cuggagagcccuucuggcg

SEQ ID NO: 3076149 - RNA, 19 nt, Artificial Sequence
  Description of Artificial Sequence: Synthetic oligonucleotide
uguugccacugacauggug

SEQ ID NO: 3076150 - RNA, 19 nt, Artificial Sequence
  Description of Artificial Sequence: Synthetic oligonucleotide
agcccauuccaaauacagc

SEQ ID NO: 3076151 - RNA, 19 nt, Artificial Sequence
  Description of Artificial Sequence: Synthetic oligonucleotide
acagccaucuguguuccuc

SEQ ID NO: 3076152 - RNA, 19 nt, Artificial Sequence
  Description of Artificial Sequence: Synthetic oligonucleotide
cagaacuugcgcucagccc

SEQ ID NO: 3076153 - RNA, 19 nt, Artificial Sequence
  Description of Artificial Sequence: Synthetic oligonucleotide
ucuggcggcagagagcaug

SEQ ID NO: 3076154 - RNA, 19 nt, Artificial Sequence
  Description of Artificial Sequence: Synthetic oligonucleotide
  modified_base (10)..(10): a, c, u, g, unknown or other
ccaauacacnccuuucaag

SEQ ID NO: 3076155 - RNA, 19 nt, Artificial Sequence
  Description of Artificial Sequence: Synthetic oligonucleotide
agguucaaccguucuguug

SEQ ID NO: 3076156 - RNA, 19 nt, Artificial Sequence
  Description of Artificial Sequence: Synthetic oligonucleotide
agcaugggcggcguguccc

SEQ ID NO: 3076157 - RNA, 19 nt, Artificial Sequence
  Description of Artificial Sequence: Synthetic oligonucleotide
ugaugaccuucgaagcaga

SEQ ID NO: 3076158 - RNA, 19 nt, Artificial Sequence
  Description of Artificial Sequence: Synthetic oligonucleotide
agaagcagcccauuccaaa

SEQ ID NO: 3076159 - RNA, 19 nt, Artificial Sequence
  Description of Artificial Sequence: Synthetic oligonucleotide
ugcgcgcugaugaccuucg

SEQ ID NO: 3076160 - RNA, 19 nt, Artificial Sequence
  Description of Artificial Sequence: Synthetic oligonucleotide
ugggaaagguucaaccguu

SEQ ID NO: 3076161 - RNA, 19 nt, Artificial Sequence
  Description of Artificial Sequence: Synthetic oligonucleotide
  modified_base (4)..(4): a, c, u, g, unknown or other
cacnccuuucaagagccag

SEQ ID NO: 3076162 - RNA, 19 nt, Artificial Sequence
  Description of Artificial Sequence: Synthetic oligonucleotide
uguuccucugggaaagguu

SEQ ID NO: 3076163 - RNA, 19 nt, Artificial Sequence
  Description of Artificial Sequence: Synthetic oligonucleotide
gcgcugaugaccuucgaag

SEQ ID NO: 3076164 - RNA, 19 nt, Artificial Sequence
  Description of Artificial Sequence: Synthetic oligonucleotide
caagagccagaacuugcgc

SEQ ID NO: 3076165 - RNA, 19 nt, Artificial Sequence
  Description of Artificial Sequence: Synthetic oligonucleotide
aaccguucuguugccacug

SEQ ID NO: 3076166 - RNA, 19 nt, Artificial Sequence
  Description of Artificial Sequence: Synthetic oligonucleotide
agucgccccuccucguugc

SEQ ID NO: 3076167 - RNA, 19 nt, Artificial Sequence
  Description of Artificial Sequence: Synthetic oligonucleotide
gaagcagagucgccccucc

SEQ ID NO: 3076168 - RNA, 19 nt, Artificial Sequence
  Description of Artificial Sequence: Synthetic oligonucleotide
uccugcgcgcugaugaccu

SEQ ID NO: 3076169 - RNA, 19 nt, Artificial Sequence
  Description of Artificial Sequence: Synthetic oligonucleotide
guuccucugggaaagguuc

SEQ ID NO: 3076170 - RNA, 19 nt, Artificial Sequence
  Description of Artificial Sequence: Synthetic oligonucleotide
caugguguuuggcugccac

SEQ ID NO: 3076171 - RNA, 19 nt, Artificial Sequence
  Description of Artificial Sequence: Synthetic oligonucleotide
cauuccaaauacagccauc

SEQ ID NO: 3076172 - RNA, 19 nt, Artificial Sequence
  Description of Artificial Sequence: Synthetic oligonucleotide
uucuguugccacugacaug

SEQ ID NO: 3076173 - RNA, 19 nt, Artificial Sequence
  Description of Artificial Sequence: Synthetic oligonucleotide
aagcagcccauuccaaaua

SEQ ID NO: 3076174 - RNA, 19 nt, Artificial Sequence
  Description of Artificial Sequence: Synthetic oligonucleotide
cuucuggcggcagagagca

SEQ ID NO: 3076175 - RNA, 19 nt, Artificial Sequence
  Description of Artificial Sequence: Synthetic oligonucleotide
gaccuucgaagcagagucg

SEQ ID NO: 3076176 - RNA, 19 nt, Artificial Sequence
  Description of Artificial Sequence: Synthetic oligonucleotide
augggcggcgugucccucc

SEQ ID NO: 3076177 - RNA, 19 nt, Artificial Sequence
  Description of Artificial Sequence: Synthetic oligonucleotide
aaggcuuccugcgcgcuga

SEQ ID NO: 3076178 - RNA, 19 nt, Artificial Sequence
  Description of Artificial Sequence: Synthetic oligonucleotide
cuccucguugccgggaugg

SEQ ID NO: 3076179 - RNA, 19 nt, Artificial Sequence
  Description of Artificial Sequence: Synthetic oligonucleotide
ccuuucaagagccagaacu

SEQ ID NO: 3076180 - RNA, 19 nt, Artificial Sequence
  Description of Artificial Sequence: Synthetic oligonucleotide
gcggcagagagcaugggcg

SEQ ID NO: 3076181 - RNA, 19 nt, Artificial Sequence
  Description of Artificial Sequence: Synthetic oligonucleotide
gcagagucgccccuccucg

SEQ ID NO: 3076182 - RNA, 19 nt, Artificial Sequence
  Description of Artificial Sequence: Synthetic oligonucleotide
aagguucaaccguucuguu

SEQ ID NO: 3076183 - RNA, 19 nt, Artificial Sequence
  Description of Artificial Sequence: Synthetic oligonucleotide
guugccacugacauggugu

SEQ ID NO: 3076184 - RNA, 19 nt, Artificial Sequence
  Description of Artificial Sequence: Synthetic oligonucleotide
guucuguugccacugacau

SEQ ID NO: 3076185 - RNA, 19 nt, Artificial Sequence
  Description of Artificial Sequence: Synthetic oligonucleotide
uguguuccucugggaaagg

SEQ ID NO: 3076186 - RNA, 19 nt, Artificial Sequence
  Description of Artificial Sequence: Synthetic oligonucleotide
ggagaggagcuggagagcc

SEQ ID NO: 3076187 - RNA, 19 nt, Artificial Sequence
  Description of Artificial Sequence: Synthetic oligonucleotide
gaagcagcccauuccaaau

SEQ ID NO: 3076188 - RNA, 19 nt, Artificial Sequence
  Description of Artificial Sequence: Synthetic oligonucleotide
agagcaugggcggcguguc

SEQ ID NO: 3076189 - RNA, 19 nt, Artificial Sequence
  Description of Artificial Sequence: Synthetic oligonucleotide
augaccuucgaagcagagu

SEQ ID NO: 3076190 - RNA, 19 nt, Artificial Sequence
  Description of Artificial Sequence: Synthetic oligonucleotide
gacaugguguuuggcugcc

SEQ ID NO: 3076191 - RNA, 19 nt, Artificial Sequence
  Description of Artificial Sequence: Synthetic oligonucleotide
  modified_base (15)..(15): a, c, u, g, unknown or other
uauuaccaauacacnccuu

SEQ ID NO: 3076192 - RNA, 19 nt, Artificial Sequence
  Description of Artificial Sequence: Synthetic oligonucleotide
ccagaacuugcgcucagcc

SEQ ID NO: 3076193 - RNA, 19 nt, Artificial Sequence
  Description of Artificial Sequence: Synthetic oligonucleotide
ucgaagcagagucgccccu

SEQ ID NO: 3076194 - RNA, 19 nt, Artificial Sequence
  Description of Artificial Sequence: Synthetic oligonucleotide
aucggcuccgcgcggccgg

SEQ ID NO: 3076195 - RNA, 19 nt, Artificial Sequence
  Description of Artificial Sequence: Synthetic oligonucleotide
gccacugacaugguguuug

SEQ ID NO: 3076196 - RNA, 19 nt, Artificial Sequence
  Description of Artificial Sequence: Synthetic oligonucleotide
  modified_base (3)..(3): a, c, u, g, unknown or other
acnccuuucaagagccaga

SEQ ID NO: 3076197 - RNA, 19 nt, Artificial Sequence
  Description of Artificial Sequence: Synthetic oligonucleotide
guucaaccguucuguugcc

SEQ ID NO: 3076198 - RNA, 19 nt, Artificial Sequence
  Description of Artificial Sequence: Synthetic oligonucleotide
gcuggagagcccuucuggc

SEQ ID NO: 3076199 - RNA, 19 nt, Artificial Sequence
  Description of Artificial Sequence: Synthetic oligonucleotide
uugccacugacaugguguu

SEQ ID NO: 3076200 - RNA, 19 nt, Artificial Sequence
  Description of Artificial Sequence: Synthetic oligonucleotide
gagucgccccuccucguug

SEQ ID NO: 3076201 - RNA, 19 nt, Artificial Sequence
  Description of Artificial Sequence: Synthetic oligonucleotide
cuuucaagagccagaacuu

SEQ ID NO: 3076202 - RNA, 19 nt, Artificial Sequence
  Description of Artificial Sequence: Synthetic oligonucleotide
uucaaccguucuguugcca

SEQ ID NO: 3076203 - RNA, 19 nt, Artificial Sequence
  Description of Artificial Sequence: Synthetic oligonucleotide
gggcaaggcuuccugcgcg

SEQ ID NO: 3076204 - RNA, 19 nt, Artificial Sequence
  Description of Artificial Sequence: Synthetic oligonucleotide
gcugaugaccuucgaagca

SEQ ID NO: 3076205 - RNA, 19 nt, Artificial Sequence
  Description of Artificial Sequence: Synthetic oligonucleotide
aggagcuggagagcccuuc

SEQ ID NO: 3076206 - RNA, 19 nt, Artificial Sequence
  Description of Artificial Sequence: Synthetic oligonucleotide
cccagaagcagcccauucc

SEQ ID NO: 3076207 - RNA, 19 nt, Artificial Sequence
  Description of Artificial Sequence: Synthetic oligonucleotide
ugucccucccgcggggccg

SEQ ID NO: 3076208 - RNA, 19 nt, Artificial Sequence
  Description of Artificial Sequence: Synthetic oligonucleotide
cuuccugcgcgcugaugac

SEQ ID NO: 3076209 - RNA, 19 nt, Artificial Sequence
  Description of Artificial Sequence: Synthetic oligonucleotide
aagcagagucgccccuccu

SEQ ID NO: 3076210 - RNA, 19 nt, Artificial Sequence
  Description of Artificial Sequence: Synthetic oligonucleotide
uuccugcgcgcugaugacc

SEQ ID NO: 3076211 - RNA, 19 nt, Artificial Sequence
  Description of Artificial Sequence: Synthetic oligonucleotide
gguguuuggcugccacggg

SEQ ID NO: 3076212 - RNA, 19 nt, Artificial Sequence
  Description of Artificial Sequence: Synthetic oligonucleotide
cugggaaagguucaaccgu

SEQ ID NO: 3076213 - RNA, 19 nt, Artificial Sequence
  Description of Artificial Sequence: Synthetic oligonucleotide
ggggcuggagaggagcugg

SEQ ID NO: 3076214 - RNA, 19 nt, Artificial Sequence
  Description of Artificial Sequence: Synthetic oligonucleotide
ggcggcagagagcaugggc

SEQ ID NO: 3076215 - RNA, 19 nt, Artificial Sequence
  Description of Artificial Sequence: Synthetic oligonucleotide
agccagaacuugcgcucag

SEQ ID NO: 3076216 - RNA, 19 nt, Artificial Sequence
  Description of Artificial Sequence: Synthetic oligonucleotide
uccucguugccgggauggg

SEQ ID NO: 3076217 - RNA, 19 nt, Artificial Sequence
  Description of Artificial Sequence: Synthetic oligonucleotide
gagaggagcuggagagccc

SEQ ID NO: 3076218 - RNA, 19 nt, Artificial Sequence
  Description of Artificial Sequence: Synthetic oligonucleotide
gaucggcuccgcgcggccg

SEQ ID NO: 3076219 - RNA, 19 nt, Artificial Sequence
  Description of Artificial Sequence: Synthetic oligonucleotide
ugggcggcgugucccuccc

SEQ ID NO: 3076220 - RNA, 19 nt, Artificial Sequence
  Description of Artificial Sequence: Synthetic oligonucleotide
cgcugaugaccuucgaagc

SEQ ID NO: 3076221 - RNA, 19 nt, Artificial Sequence
  Description of Artificial Sequence: Synthetic oligonucleotide
cacugacaugguguuuggc

SEQ ID NO: 3076222 - RNA, 19 nt, Artificial Sequence
  Description of Artificial Sequence: Synthetic oligonucleotide
gagcaugggcggcgugucc

SEQ ID NO: 3076223 - RNA, 19 nt, Artificial Sequence
  Description of Artificial Sequence: Synthetic oligonucleotide
uccucugggaaagguucaa

SEQ ID NO: 3076224 - RNA, 19 nt, Artificial Sequence
  Description of Artificial Sequence: Synthetic oligonucleotide
caaggcuuccugcgcgcug

SEQ ID NO: 3076225 - RNA, 19 nt, Artificial Sequence
  Description of Artificial Sequence: Synthetic oligonucleotide
  modified_base (2)..(2): a, c, u, g, unknown or other
cnccuuucaagagccagaa

SEQ ID NO: 3076226 - RNA, 19 nt, Artificial Sequence
  Description of Artificial Sequence: Synthetic oligonucleotide
gcagagagcaugggcggcg

SEQ ID NO: 3076227 - RNA, 19 nt, Artificial Sequence
  Description of Artificial Sequence: Synthetic oligonucleotide
ucgccccuccucguugccg

SEQ ID NO: 3076228 - RNA, 19 nt, Artificial Sequence
  Description of Artificial Sequence: Synthetic oligonucleotide
ccagaagcagcccauucca

SEQ ID NO: 3076229 - RNA, 19 nt, Artificial Sequence
  Description of Artificial Sequence: Synthetic oligonucleotide
caaauacagccaucugugu

SEQ ID NO: 3076230 - RNA, 19 nt, Artificial Sequence
  Description of Artificial Sequence: Synthetic oligonucleotide
agagagcaugggcggcgug

SEQ ID NO: 3076231 - RNA, 19 nt, Artificial Sequence
  Description of Artificial Sequence: Synthetic oligonucleotide
ccgggcaaggcuuccugcg

SEQ ID NO: 3076232 - RNA, 19 nt, Artificial Sequence
  Description of Artificial Sequence: Synthetic oligonucleotide
caucuguguuccucuggga

SEQ ID NO: 3076233 - RNA, 19 nt, Artificial Sequence
  Description of Artificial Sequence: Synthetic oligonucleotide
cccuucuggcggcagagag

SEQ ID NO: 3076234 - RNA, 19 nt, Artificial Sequence
  Description of Artificial Sequence: Synthetic oligonucleotide
ggcgugucccucccgcggg

SEQ ID NO: 3076235 - RNA, 19 nt, Artificial Sequence
  Description of Artificial Sequence: Synthetic oligonucleotide
accguucuguugccacuga

SEQ ID NO: 3076236 - RNA, 19 nt, Artificial Sequence
  Description of Artificial Sequence: Synthetic oligonucleotide
ggaaagguucaaccguucu

SEQ ID NO: 3076237 - RNA, 19 nt, Artificial Sequence
  Description of Artificial Sequence: Synthetic oligonucleotide
agagucgccccuccucguu

SEQ ID NO: 3076238 - RNA, 19 nt, Artificial Sequence
  Description of Artificial Sequence: Synthetic oligonucleotide
gagccagaacuugcgcuca

SEQ ID NO: 3076239 - RNA, 19 nt, Artificial Sequence
  Description of Artificial Sequence: Synthetic oligonucleotide
ggcaaggcuuccugcgcgc

SEQ ID NO: 3076240 - RNA, 19 nt, Artificial Sequence
  Description of Artificial Sequence: Synthetic oligonucleotide
ccuucgaagcagagucgcc

SEQ ID NO: 3076241 - RNA, 19 nt, Artificial Sequence
  Description of Artificial Sequence: Synthetic oligonucleotide
ccacugacaugguguuugg

SEQ ID NO: 3076242 - RNA, 19 nt, Artificial Sequence
  Description of Artificial Sequence: Synthetic oligonucleotide
ggagagcccuucuggcggc

SEQ ID NO: 3076243 - RNA, 19 nt, Artificial Sequence
  Description of Artificial Sequence: Synthetic oligonucleotide
cccauuccaaauacagcca

SEQ ID NO: 3076244 - RNA, 19 nt, Artificial Sequence
  Description of Artificial Sequence: Synthetic oligonucleotide
cagaagcagcccauuccaa

SEQ ID NO: 3076245 - RNA, 19 nt, Artificial Sequence
  Description of Artificial Sequence: Synthetic oligonucleotide
uggcggcagagagcauggg

SEQ ID NO: 3076246 - RNA, 19 nt, Artificial Sequence
  Description of Artificial Sequence: Synthetic oligonucleotide
ggcggcgugucccucccgc

SEQ ID NO: 3076247 - RNA, 19 nt, Artificial Sequence
  Description of Artificial Sequence: Synthetic oligonucleotide
gugucccucccgcggggcc

SEQ ID NO: 3076248 - RNA, 19 nt, Artificial Sequence
  Description of Artificial Sequence: Synthetic oligonucleotide
agagcccuucuggcggcag

SEQ ID NO: 3076249 - RNA, 19 nt, Artificial Sequence
  Description of Artificial Sequence: Synthetic oligonucleotide
cugcgcgcugaugaccuuc

SEQ ID NO: 3076250 - RNA, 19 nt, Artificial Sequence
  Description of Artificial Sequence: Synthetic oligonucleotide
cguucuguugccacugaca

SEQ ID NO: 3076251 - RNA, 19 nt, Artificial Sequence
  Description of Artificial Sequence: Synthetic oligonucleotide
cggcagagagcaugggcgg

SEQ ID NO: 3076252 - RNA, 19 nt, Artificial Sequence
  Description of Artificial Sequence: Synthetic oligonucleotide
cagccaucuguguuccucu

SEQ ID NO: 3076253 - RNA, 19 nt, Artificial Sequence
  Description of Artificial Sequence: Synthetic oligonucleotide
ggcagagagcaugggcggc

SEQ ID NO: 3076254 - RNA, 19 nt, Artificial Sequence
  Description of Artificial Sequence: Synthetic oligonucleotide
  modified_base (5)..(5): a, c, u, g, unknown or other
acacnccuuucaagagcca

SEQ ID NO: 3076255 - RNA, 19 nt, Artificial Sequence
  Description of Artificial Sequence: Synthetic oligonucleotide
gccgggcaaggcuuccugc

SEQ ID NO: 3076256 - RNA, 19 nt, Artificial Sequence
  Description of Artificial Sequence: Synthetic oligonucleotide
gggaaagguucaaccguuc

SEQ ID NO: 3076257 - RNA, 19 nt, Artificial Sequence
  Description of Artificial Sequence: Synthetic oligonucleotide
caaccguucuguugccacu

SEQ ID NO: 3076258 - RNA, 19 nt, Artificial Sequence
  Description of Artificial Sequence: Synthetic oligonucleotide
ggccgggcaaggcuuccug

SEQ ID NO: 3076259 - RNA, 19 nt, Artificial Sequence
  Description of Artificial Sequence: Synthetic oligonucleotide
gucgccccuccucguugcc

SEQ ID NO: 3076260 - RNA, 19 nt, Artificial Sequence
  Description of Artificial Sequence: Synthetic oligonucleotide
uccgcgcggccgggcaagg

SEQ ID NO: 3076261 - RNA, 19 nt, Artificial Sequence
  Description of Artificial Sequence: Synthetic oligonucleotide
gcggcgugucccucccgcg

SEQ ID NO: 3076262 - RNA, 19 nt, Artificial Sequence
  Description of Artificial Sequence: Synthetic oligonucleotide
ugccacugacaugguguuu

SEQ ID NO: 3076263 - RNA, 19 nt, Artificial Sequence
  Description of Artificial Sequence: Synthetic oligonucleotide
ccguucuguugccacugac

SEQ ID NO: 3076264 - RNA, 19 nt, Artificial Sequence
  Description of Artificial Sequence: Synthetic oligonucleotide
ggggaucggcuccgcgcgg

SEQ ID NO: 3076265 - RNA, 19 nt, Artificial Sequence
  Description of Artificial Sequence: Synthetic oligonucleotide
gccagaacuugcgcucagc

SEQ ID NO: 3076266 - RNA, 19 nt, Artificial Sequence
  Description of Artificial Sequence: Synthetic oligonucleotide
ggaucggcuccgcgcggcc

SEQ ID NO: 3076267 - RNA, 19 nt, Artificial Sequence
  Description of Artificial Sequence: Synthetic oligonucleotide
cuccgcgcggccgggcaag

SEQ ID NO: 3076268 - RNA, 19 nt, Artificial Sequence
  Description of Artificial Sequence: Synthetic oligonucleotide
ccucugggaaagguucaac

SEQ ID NO: 3076269 - RNA, 19 nt, Artificial Sequence
  Description of Artificial Sequence: Synthetic oligonucleotide
gcagcccauuccaaauaca

SEQ ID NO: 3076270 - RNA, 19 nt, Artificial Sequence
  Description of Artificial Sequence: Synthetic oligonucleotide
ccccagaagcagcccauuc

SEQ ID NO: 3076271 - RNA, 19 nt, Artificial Sequence
  Description of Artificial Sequence: Synthetic oligonucleotide
cgccccuccucguugccgg

SEQ ID NO: 3076272 - RNA, 19 nt, Artificial Sequence
  Description of Artificial Sequence: Synthetic oligonucleotide
gcgugucccucccgcgggg

SEQ ID NO: 3076273 - RNA, 19 nt, Artificial Sequence
  Description of Artificial Sequence: Synthetic oligonucleotide
ggagcuggagagcccuucu

SEQ ID NO: 3076274 - RNA, 19 nt, Artificial Sequence
  Description of Artificial Sequence: Synthetic oligonucleotide
gggaucggcuccgcgcggc

SEQ ID NO: 3076275 - RNA, 19 nt, Artificial Sequence
  Description of Artificial Sequence: Synthetic oligonucleotide
gagagcccuucuggcggca

SEQ ID NO: 3076276 - RNA, 19 nt, Artificial Sequence
  Description of Artificial Sequence: Synthetic oligonucleotide
cgggcaaggcuuccugcgc

SEQ ID NO: 3076277 - RNA, 19 nt, Artificial Sequence
  Description of Artificial Sequence: Synthetic oligonucleotide
caugggcggcgugucccuc

SEQ ID NO: 3076278 - RNA, 19 nt, Artificial Sequence
  Description of Artificial Sequence: Synthetic oligonucleotide
aggcuuccugcgcgcugau

SEQ ID NO: 3076279 - RNA, 19 nt, Artificial Sequence
  Description of Artificial Sequence: Synthetic oligonucleotide
cggcgugucccucccgcgg

SEQ ID NO: 3076280 - RNA, 19 nt, Artificial Sequence
  Description of Artificial Sequence: Synthetic oligonucleotide
gccccuccucguugccggg

SEQ ID NO: 3076281 - RNA, 19 nt, Artificial Sequence
  Description of Artificial Sequence: Synthetic oligonucleotide
cagagucgccccuccucgu

SEQ ID NO: 3076282 - RNA, 19 nt, Artificial Sequence
  Description of Artificial Sequence: Synthetic oligonucleotide
cgaagcagagucgccccuc

SEQ ID NO: 3076283 - RNA, 19 nt, Artificial Sequence
  Description of Artificial Sequence: Synthetic oligonucleotide
ggcuccgcgcggccgggca

SEQ ID NO: 3076284 - RNA, 19 nt, Artificial Sequence
  Description of Artificial Sequence: Synthetic oligonucleotide
ccuccucguugccgggaug

SEQ ID NO: 3076285 - RNA, 19 nt, Artificial Sequence
  Description of Artificial Sequence: Synthetic oligonucleotide
cgcgcugaugaccuucgaa

SEQ ID NO: 3076286 - RNA, 19 nt, Artificial Sequence
  Description of Artificial Sequence: Synthetic oligonucleotide
cagagagcaugggcggcgu

SEQ ID NO: 3076287 - RNA, 19 nt, Artificial Sequence
  Description of Artificial Sequence: Synthetic oligonucleotide
gggcggcgugucccucccg

SEQ ID NO: 3076288 - RNA, 19 nt, Artificial Sequence
  Description of Artificial Sequence: Synthetic oligonucleotide
cuguugccacugacauggu

SEQ ID NO: 3076289 - RNA, 19 nt, Artificial Sequence
  Description of Artificial Sequence: Synthetic oligonucleotide
gucccucccgcggggccga

SEQ ID NO: 3076290 - RNA, 19 nt, Artificial Sequence
  Description of Artificial Sequence: Synthetic oligonucleotide
cucccgcggggccgaccuc

SEQ ID NO: 3076291 - RNA, 19 nt, Artificial Sequence
  Description of Artificial Sequence: Synthetic oligonucleotide
gcaugggcggcgugucccu

SEQ ID NO: 3076292 - RNA, 19 nt, Artificial Sequence
  Description of Artificial Sequence: Synthetic oligonucleotide
gaggagcuggagagcccuu

SEQ ID NO: 3076293 - RNA, 19 nt, Artificial Sequence
  Description of Artificial Sequence: Synthetic oligonucleotide
cgugucccucccgcggggc

SEQ ID NO: 3076294 - RNA, 19 nt, Artificial Sequence
  Description of Artificial Sequence: Synthetic oligonucleotide
gcaaggcuuccugcgcgcu

SEQ ID NO: 3076295 - RNA, 19 nt, Artificial Sequence
  Description of Artificial Sequence: Synthetic oligonucleotide
gcggccgggcaaggcuucc

SEQ ID NO: 3076296 - RNA, 19 nt, Artificial Sequence
  Description of Artificial Sequence: Synthetic oligonucleotide
gcgcgcugaugaccuucga

SEQ ID NO: 3076297 - RNA, 19 nt, Artificial Sequence
  Description of Artificial Sequence: Synthetic oligonucleotide
gcccuucuggcggcagaga

SEQ ID NO: 3076298 - RNA, 19 nt, Artificial Sequence
  Description of Artificial Sequence: Synthetic oligonucleotide
ccucccgcggggccgaccu

SEQ ID NO: 3076299 - RNA, 19 nt, Artificial Sequence
  Description of Artificial Sequence: Synthetic oligonucleotide
gcuccgcgcggccgggcaa

SEQ ID NO: 3076300 - RNA, 19 nt, Artificial Sequence
  Description of Artificial Sequence: Synthetic oligonucleotide
ucccucccgcggggccgac

SEQ ID NO: 3076301 - RNA, 19 nt, Artificial Sequence
  Description of Artificial Sequence: Synthetic oligonucleotide
cgcggccgggcaaggcuuc

SEQ ID NO: 3076302 - RNA, 19 nt, Artificial Sequence
  Description of Artificial Sequence: Synthetic oligonucleotide
ccgcgcggccgggcaaggc

SEQ ID NO: 3076303 - RNA, 19 nt, Artificial Sequence
  Description of Artificial Sequence: Synthetic oligonucleotide
ccccuccucguugccggga

SEQ ID NO: 3076304 - RNA, 19 nt, Artificial Sequence
  Description of Artificial Sequence: Synthetic oligonucleotide
cccucccgcggggccgacc

SEQ ID NO: 3076305 - RNA, 19 nt, Artificial Sequence
  Description of Artificial Sequence: Synthetic oligonucleotide
cccuccucguugccgggau

SEQ ID NO: 3076306 - RNA, 19 nt, Artificial Sequence
  Description of Artificial Sequence: Synthetic oligonucleotide
cgcgcggccgggcaaggcu

SEQ ID NO: 3076307 - RNA, 19 nt, Artificial Sequence
  Description of Artificial Sequence: Synthetic oligonucleotide
gcgcggccgggcaaggcuu

SEQ ID NO: 3076308 - RNA, 19 nt, Artificial Sequence
  Description of Artificial Sequence: Synthetic oligonucleotide
cggccgggcaaggcuuccu

SEQ ID NO: 3076309 - RNA, 19 nt, Artificial Sequence
  Description of Artificial Sequence: Synthetic oligonucleotide
  modified_base (1)..(1): a, c, u, g, unknown or other
nccuuucaagagccagaac

SEQ ID NO: 3076310 - RNA, 19 nt, Artificial Sequence
  Description of Artificial Sequence: Synthetic oligonucleotide
uuuucauucucugaaaugg

SEQ ID NO: 3076311 - RNA, 19 nt, Artificial Sequence
  Description of Artificial Sequence: Synthetic oligonucleotide
aaaugguacuuucuccucc

SEQ ID NO: 3076312 - RNA, 19 nt, Artificial Sequence
  Description of Artificial Sequence: Synthetic oligonucleotide
ucuguuauugccuaucuug

SEQ ID NO: 3076313 - RNA, 19 nt, Artificial Sequence
  Description of Artificial Sequence: Synthetic oligonucleotide
uggucaaucuuccagauga

SEQ ID NO: 3076314 - RNA, 19 nt, Artificial Sequence
  Description of Artificial Sequence: Synthetic oligonucleotide
uguuggcuguauaauaucg

SEQ ID NO: 3076315 - RNA, 19 nt, Artificial Sequence
  Description of Artificial Sequence: Synthetic oligonucleotide
uuuaucacaauuucuacau

SEQ ID NO: 3076316 - RNA, 19 nt, Artificial Sequence
  Description of Artificial Sequence: Synthetic oligonucleotide
uuuaucaucucccucacau

SEQ ID NO: 3076317 - RNA, 19 nt, Artificial Sequence
  Description of Artificial Sequence: Synthetic oligonucleotide
aguguuuucacauccccac

SEQ ID NO: 3076318 - RNA, 19 nt, Artificial Sequence
  Description of Artificial Sequence: Synthetic oligonucleotide
uuugaacugaccucuauga

SEQ ID NO: 3076319 - RNA, 19 nt, Artificial Sequence
  Description of Artificial Sequence: Synthetic oligonucleotide
uauaauaucgguuggucaa

SEQ ID NO: 3076320 - RNA, 19 nt, Artificial Sequence
  Description of Artificial Sequence: Synthetic oligonucleotide
uuuucacauccccacaagg

SEQ ID NO: 3076321 - RNA, 19 nt, Artificial Sequence
  Description of Artificial Sequence: Synthetic oligonucleotide
ugaacugaccucuaugacc

SEQ ID NO: 3076322 - RNA, 19 nt, Artificial Sequence
  Description of Artificial Sequence: Synthetic oligonucleotide
uaucacaauuucuacaugu

SEQ ID NO: 3076323 - RNA, 19 nt, Artificial Sequence
  Description of Artificial Sequence: Synthetic oligonucleotide
auugucuuuaucaucuccc

SEQ ID NO: 3076324 - RNA, 19 nt, Artificial Sequence
  Description of Artificial Sequence: Synthetic oligonucleotide
ucuuugucacugaugaacc

SEQ ID NO: 3076325 - RNA, 19 nt, Artificial Sequence
  Description of Artificial Sequence: Synthetic oligonucleotide
gaugaaccaguuuacauca

SEQ ID NO: 3076326 - RNA, 19 nt, Artificial Sequence
  Description of Artificial Sequence: Synthetic oligonucleotide
ugaaaugguacuuucuccu

SEQ ID NO: 3076327 - RNA, 19 nt, Artificial Sequence
  Description of Artificial Sequence: Synthetic oligonucleotide
uccucauuugaacugaccu

SEQ ID NO: 3076328 - RNA, 19 nt, Artificial Sequence
  Description of Artificial Sequence: Synthetic oligonucleotide
accaguuuacaucaucuuc

SEQ ID NO: 3076329 - RNA, 19 nt, Artificial Sequence
  Description of Artificial Sequence: Synthetic oligonucleotide
uuccccuucagcaucagug

SEQ ID NO: 3076330 - RNA, 19 nt, Artificial Sequence
  Description of Artificial Sequence: Synthetic oligonucleotide
cacaauuucuacaugugac

SEQ ID NO: 3076331 - RNA, 19 nt, Artificial Sequence
  Description of Artificial Sequence: Synthetic oligonucleotide
cagaugaucuguuauugcc

SEQ ID NO: 3076332 - RNA, 19 nt, Artificial Sequence
  Description of Artificial Sequence: Synthetic oligonucleotide
ucauucucugaaaugguac

SEQ ID NO: 3076333 - RNA, 19 nt, Artificial Sequence
  Description of Artificial Sequence: Synthetic oligonucleotide
ugaugaaccaguuuacauc

SEQ ID NO: 3076334 - RNA, 19 nt, Artificial Sequence
  Description of Artificial Sequence: Synthetic oligonucleotide
guuauugccuaucuuggcc

SEQ ID NO: 3076335 - RNA, 19 nt, Artificial Sequence
  Description of Artificial Sequence: Synthetic oligonucleotide
cuguuauugccuaucuugg

SEQ ID NO: 3076336 - RNA, 19 nt, Artificial Sequence
  Description of Artificial Sequence: Synthetic oligonucleotide
ucacaauuucuacauguga

SEQ ID NO: 3076337 - RNA, 19 nt, Artificial Sequence
  Description of Artificial Sequence: Synthetic oligonucleotide
auuuucauucucugaaaug

SEQ ID NO: 3076338 - RNA, 19 nt, Artificial Sequence
  Description of Artificial Sequence: Synthetic oligonucleotide
uuucacauccccacaaggu

SEQ ID NO: 3076339 - RNA, 19 nt, Artificial Sequence
  Description of Artificial Sequence: Synthetic oligonucleotide
guugagaaggaugucauug

SEQ ID NO: 3076340 - RNA, 19 nt, Artificial Sequence
  Description of Artificial Sequence: Synthetic oligonucleotide
acaauuucuacaugugaca

SEQ ID NO: 3076341 - RNA, 19 nt, Artificial Sequence
  Description of Artificial Sequence: Synthetic oligonucleotide
ucaguguuuucacaucccc

SEQ ID NO: 3076342 - RNA, 19 nt, Artificial Sequence
  Description of Artificial Sequence: Synthetic oligonucleotide
auuugaacugaccucuaug

SEQ ID NO: 3076343 - RNA, 19 nt, Artificial Sequence
  Description of Artificial Sequence: Synthetic oligonucleotide
caaauggccacguuuauca

SEQ ID NO: 3076344 - RNA, 19 nt, Artificial Sequence
  Description of Artificial Sequence: Synthetic oligonucleotide
uuugucacugaugaaccag

SEQ ID NO: 3076345 - RNA, 19 nt, Artificial Sequence
  Description of Artificial Sequence: Synthetic oligonucleotide
aaauggccacguuuaucac

SEQ ID NO: 3076346 - RNA, 19 nt, Artificial Sequence
  Description of Artificial Sequence: Synthetic oligonucleotide
aauggccacguuuaucaca

SEQ ID NO: 3076347 - RNA, 19 nt, Artificial Sequence
  Description of Artificial Sequence: Synthetic oligonucleotide
ucacaucccaguagcaucc

SEQ ID NO: 3076348 - RNA, 19 nt, Artificial Sequence
  Description of Artificial Sequence: Synthetic oligonucleotide
aguuuacaucaucuucccc

SEQ ID NO: 3076349 - RNA, 19 nt, Artificial Sequence
  Description of Artificial Sequence: Synthetic oligonucleotide
aauaucgguuggucaaucu

SEQ ID NO: 3076350 - RNA, 19 nt, Artificial Sequence
  Description of Artificial Sequence: Synthetic oligonucleotide
uuauugccuaucuuggccu

SEQ ID NO: 3076351 - RNA, 19 nt, Artificial Sequence
  Description of Artificial Sequence: Synthetic oligonucleotide
caucaguguuuucacaucc

SEQ ID NO: 3076352 - RNA, 19 nt, Artificial Sequence
  Description of Artificial Sequence: Synthetic oligonucleotide
aagguugagaaggauguca

SEQ ID NO: 3076353 - RNA, 19 nt, Artificial Sequence
  Description of Artificial Sequence: Synthetic oligonucleotide
ugacaaauggccacguuua

SEQ ID NO: 3076354 - RNA, 19 nt, Artificial Sequence
  Description of Artificial Sequence: Synthetic oligonucleotide
guuuaucacaauuucuaca

SEQ ID NO: 3076355 - RNA, 19 nt, Artificial Sequence
  Description of Artificial Sequence: Synthetic oligonucleotide
gacuuuugugguaaggggc

SEQ ID NO: 3076356 - RNA, 19 nt, Artificial Sequence
  Description of Artificial Sequence: Synthetic oligonucleotide
ucacauccccacaagguug

SEQ ID NO: 3076357 - RNA, 19 nt, Artificial Sequence
  Description of Artificial Sequence: Synthetic oligonucleotide
uuuuguuggcuguauaaua

SEQ ID NO: 3076358 - RNA, 19 nt, Artificial Sequence
  Description of Artificial Sequence: Synthetic oligonucleotide
uccacauuuucauucucug

SEQ ID NO: 3076359 - RNA, 19 nt, Artificial Sequence
  Description of Artificial Sequence: Synthetic oligonucleotide
ugugguaaggggcaguuuu

SEQ ID NO: 3076360 - RNA, 19 nt, Artificial Sequence
  Description of Artificial Sequence: Synthetic oligonucleotide
uaucgguuggucaaucuuc

SEQ ID NO: 3076361 - RNA, 19 nt, Artificial Sequence
  Description of Artificial Sequence: Synthetic oligonucleotide
ggcuguauaauaucgguug

SEQ ID NO: 3076362 - RNA, 19 nt, Artificial Sequence
  Description of Artificial Sequence: Synthetic oligonucleotide
uguuuucacauccccacaa

SEQ ID NO: 3076363 - RNA, 19 nt, Artificial Sequence
  Description of Artificial Sequence: Synthetic oligonucleotide
uuggcuguauaauaucggu

SEQ ID NO: 3076364 - RNA, 19 nt, Artificial Sequence
  Description of Artificial Sequence: Synthetic oligonucleotide
uguauaauaucgguugguc

SEQ ID NO: 3076365 - RNA, 19 nt, Artificial Sequence
  Description of Artificial Sequence: Synthetic oligonucleotide
auuucuacaugugacauuu

SEQ ID NO: 3076366 - RNA, 19 nt, Artificial Sequence
  Description of Artificial Sequence: Synthetic oligonucleotide
guuuacaucaucuuccccu

SEQ ID NO: 3076367 - RNA, 19 nt, Artificial Sequence
  Description of Artificial Sequence: Synthetic oligonucleotide
uuaucacaauuucuacaug

SEQ ID NO: 3076368 - RNA, 19 nt, Artificial Sequence
  Description of Artificial Sequence: Synthetic oligonucleotide
gaacugaccucuaugacca

SEQ ID NO: 3076369 - RNA, 19 nt, Artificial Sequence
  Description of Artificial Sequence: Synthetic oligonucleotide
uguuauugccuaucuuggc

SEQ ID NO: 3076370 - RNA, 19 nt, Artificial Sequence
  Description of Artificial Sequence: Synthetic oligonucleotide
ccaguuuacaucaucuucc

SEQ ID NO: 3076371 - RNA, 19 nt, Artificial Sequence
  Description of Artificial Sequence: Synthetic oligonucleotide
uuucauucucugaaauggu

SEQ ID NO: 3076372 - RNA, 19 nt, Artificial Sequence
  Description of Artificial Sequence: Synthetic oligonucleotide
agaaggaugucauugucuu

SEQ ID NO: 3076373 - RNA, 19 nt, Artificial Sequence
  Description of Artificial Sequence: Synthetic oligonucleotide
cacaagguugagaaggaug

SEQ ID NO: 3076374 - RNA, 19 nt, Artificial Sequence
  Description of Artificial Sequence: Synthetic oligonucleotide
aaggaugucauugucuuua

SEQ ID NO: 3076375 - RNA, 19 nt, Artificial Sequence
  Description of Artificial Sequence: Synthetic oligonucleotide
uccagaugaucuguuauug

SEQ ID NO: 3076376 - RNA, 19 nt, Artificial Sequence
  Description of Artificial Sequence: Synthetic oligonucleotide
uuccacauuuucauucucu

SEQ ID NO: 3076377 - RNA, 19 nt, Artificial Sequence
  Description of Artificial Sequence: Synthetic oligonucleotide
agcaucaguguuuucacau

SEQ ID NO: 3076378 - RNA, 19 nt, Artificial Sequence
  Description of Artificial Sequence: Synthetic oligonucleotide
acaagguugagaaggaugu

SEQ ID NO: 3076379 - RNA, 19 nt, Artificial Sequence
  Description of Artificial Sequence: Synthetic oligonucleotide
ucccucacaucccaguagc

SEQ ID NO: 3076380 - RNA, 19 nt, Artificial Sequence
  Description of Artificial Sequence: Synthetic oligonucleotide
uugagaaggaugucauugu

SEQ ID NO: 3076381 - RNA, 19 nt, Artificial Sequence
  Description of Artificial Sequence: Synthetic oligonucleotide
auccccacaagguugagaa

SEQ ID NO: 3076382 - RNA, 19 nt, Artificial Sequence
  Description of Artificial Sequence: Synthetic oligonucleotide
guauaauaucgguugguca

SEQ ID NO: 3076383 - RNA, 19 nt, Artificial Sequence
  Description of Artificial Sequence: Synthetic oligonucleotide
aauuucuacaugugacauu

SEQ ID NO: 3076384 - RNA, 19 nt, Artificial Sequence
  Description of Artificial Sequence: Synthetic oligonucleotide
ugaaccaguuuacaucauc

SEQ ID NO: 3076385 - RNA, 19 nt, Artificial Sequence
  Description of Artificial Sequence: Synthetic oligonucleotide
uugaacugaccucuaugac

SEQ ID NO: 3076386 - RNA, 19 nt, Artificial Sequence
  Description of Artificial Sequence: Synthetic oligonucleotide
ucagcaucaguguuuucac

SEQ ID NO: 3076387 - RNA, 19 nt, Artificial Sequence
  Description of Artificial Sequence: Synthetic oligonucleotide
ucuccuccucauuugaacu

SEQ ID NO: 3076388 - RNA, 19 nt, Artificial Sequence
  Description of Artificial Sequence: Synthetic oligonucleotide
uucauucucugaaauggua

SEQ ID NO: 3076389 - RNA, 19 nt, Artificial Sequence
  Description of Artificial Sequence: Synthetic oligonucleotide
caaucuuccagaugaucug

SEQ ID NO: 3076390 - RNA, 19 nt, Artificial Sequence
  Description of Artificial Sequence: Synthetic oligonucleotide
ugagaaggaugucauuguc

SEQ ID NO: 3076391 - RNA, 19 nt, Artificial Sequence
  Description of Artificial Sequence: Synthetic oligonucleotide
ucuuuaucaucucccucac

SEQ ID NO: 3076392 - RNA, 19 nt, Artificial Sequence
  Description of Artificial Sequence: Synthetic oligonucleotide
cacauuuucauucucugaa

SEQ ID NO: 3076393 - RNA, 19 nt, Artificial Sequence
  Description of Artificial Sequence: Synthetic oligonucleotide
ggacuuuugugguaagggg

SEQ ID NO: 3076394 - RNA, 19 nt, Artificial Sequence
  Description of Artificial Sequence: Synthetic oligonucleotide
uucacauccccacaagguu

SEQ ID NO: 3076395 - RNA, 19 nt, Artificial Sequence
  Description of Artificial Sequence: Synthetic oligonucleotide
caguuuacaucaucuuccc

SEQ ID NO: 3076396 - RNA, 19 nt, Artificial Sequence
  Description of Artificial Sequence: Synthetic oligonucleotide
aucgguuggucaaucuucc

SEQ ID NO: 3076397 - RNA, 19 nt, Artificial Sequence
  Description of Artificial Sequence: Synthetic oligonucleotide
guuggcuguauaauaucgg

SEQ ID NO: 3076398 - RNA, 19 nt, Artificial Sequence
  Description of Artificial Sequence: Synthetic oligonucleotide
aaucuuccagaugaucugu

SEQ ID NO: 3076399 - RNA, 19 nt, Artificial Sequence
  Description of Artificial Sequence: Synthetic oligonucleotide
caucccaguagcauccagc

SEQ ID NO: 3076400 - RNA, 19 nt, Artificial Sequence
  Description of Artificial Sequence: Synthetic oligonucleotide
uucuccuccucauuugaac

SEQ ID NO: 3076401 - RNA, 19 nt, Artificial Sequence
  Description of Artificial Sequence: Synthetic oligonucleotide
ucaucucccucacauccca

SEQ ID NO: 3076402 - RNA, 19 nt, Artificial Sequence
  Description of Artificial Sequence: Synthetic oligonucleotide
uuuacaucaucuuccccuu

SEQ ID NO: 3076403 - RNA, 19 nt, Artificial Sequence
  Description of Artificial Sequence: Synthetic oligonucleotide
uacuuucuccuccucauuu

SEQ ID NO: 3076404 - RNA, 19 nt, Artificial Sequence
  Description of Artificial Sequence: Synthetic oligonucleotide
gaugucuuugucacugaug

SEQ ID NO: 3076405 - RNA, 19 nt, Artificial Sequence
  Description of Artificial Sequence: Synthetic oligonucleotide
aucccaguagcauccagcu

SEQ ID NO: 3076406 - RNA, 19 nt, Artificial Sequence
  Description of Artificial Sequence: Synthetic oligonucleotide
cucacaucccaguagcauc

SEQ ID NO: 3076407 - RNA, 19 nt, Artificial Sequence
  Description of Artificial Sequence: Synthetic oligonucleotide
guuuucacauccccacaag

SEQ ID NO: 3076408 - RNA, 19 nt, Artificial Sequence
  Description of Artificial Sequence: Synthetic oligonucleotide
cucgaugucuuugucacug

SEQ ID NO: 3076409 - RNA, 19 nt, Artificial Sequence
  Description of Artificial Sequence: Synthetic oligonucleotide
acaaauggccacguuuauc

SEQ ID NO: 3076410 - RNA, 19 nt, Artificial Sequence
  Description of Artificial Sequence: Synthetic oligonucleotide
acuuucuccuccucauuug

SEQ ID NO: 3076411 - RNA, 19 nt, Artificial Sequence
  Description of Artificial Sequence: Synthetic oligonucleotide
ugucuuuaucaucucccuc

SEQ ID NO: 3076412 - RNA, 19 nt, Artificial Sequence
  Description of Artificial Sequence: Synthetic oligonucleotide
aaccaguuuacaucaucuu

SEQ ID NO: 3076413 - RNA, 19 nt, Artificial Sequence
  Description of Artificial Sequence: Synthetic oligonucleotide
gcuguauaauaucgguugg

SEQ ID NO: 3076414 - RNA, 19 nt, Artificial Sequence
  Description of Artificial Sequence: Synthetic oligonucleotide
uuggucaaucuuccagaug

SEQ ID NO: 3076415 - RNA, 19 nt, Artificial Sequence
  Description of Artificial Sequence: Synthetic oligonucleotide
acauuuucauucucugaaa

SEQ ID NO: 3076416 - RNA, 19 nt, Artificial Sequence
  Description of Artificial Sequence: Synthetic oligonucleotide
uuguuggcuguauaauauc

SEQ ID NO: 3076417 - RNA, 19 nt, Artificial Sequence
  Description of Artificial Sequence: Synthetic oligonucleotide
acguuuaucacaauuucua

SEQ ID NO: 3076418 - RNA, 19 nt, Artificial Sequence
  Description of Artificial Sequence: Synthetic oligonucleotide
aucacaauuucuacaugug

SEQ ID NO: 3076419 - RNA, 19 nt, Artificial Sequence
  Description of Artificial Sequence: Synthetic oligonucleotide
acuuuugugguaaggggca

SEQ ID NO: 3076420 - RNA, 19 nt, Artificial Sequence
  Description of Artificial Sequence: Synthetic oligonucleotide
auaucgguuggucaaucuu

SEQ ID NO: 3076421 - RNA, 19 nt, Artificial Sequence
  Description of Artificial Sequence: Synthetic oligonucleotide
uuaucaucucccucacauc

SEQ ID NO: 3076422 - RNA, 19 nt, Artificial Sequence
  Description of Artificial Sequence: Synthetic oligonucleotide
ugaucuguuauugccuauc

SEQ ID NO: 3076423 - RNA, 19 nt, Artificial Sequence
  Description of Artificial Sequence: Synthetic oligonucleotide
agaugaucuguuauugccu

SEQ ID NO: 3076424 - RNA, 19 nt, Artificial Sequence
  Description of Artificial Sequence: Synthetic oligonucleotide
uuccagaugaucuguuauu

SEQ ID NO: 3076425 - RNA, 19 nt, Artificial Sequence
  Description of Artificial Sequence: Synthetic oligonucleotide
uuuccacauuuucauucuc

SEQ ID NO: 3076426 - RNA, 19 nt, Artificial Sequence
  Description of Artificial Sequence: Synthetic oligonucleotide
uggcuguauaauaucgguu

SEQ ID NO: 3076427 - RNA, 19 nt, Artificial Sequence
  Description of Artificial Sequence: Synthetic oligonucleotide
uccccuucagcaucagugu

SEQ ID NO: 3076428 - RNA, 19 nt, Artificial Sequence
  Description of Artificial Sequence: Synthetic oligonucleotide
uuuugacaaauggccacgu

SEQ ID NO: 3076429 - RNA, 19 nt, Artificial Sequence
  Description of Artificial Sequence: Synthetic oligonucleotide
uuggccucgaugucuuugu

SEQ ID NO: 3076430 - RNA, 19 nt, Artificial Sequence
  Description of Artificial Sequence: Synthetic oligonucleotide
acugaugaaccaguuuaca

SEQ ID NO: 3076431 - RNA, 19 nt, Artificial Sequence
  Description of Artificial Sequence: Synthetic oligonucleotide
ucuuccagaugaucuguua

SEQ ID NO: 3076432 - RNA, 19 nt, Artificial Sequence
  Description of Artificial Sequence: Synthetic oligonucleotide
uuucuccuccucauuugaa

SEQ ID NO: 3076433 - RNA, 19 nt, Artificial Sequence
  Description of Artificial Sequence: Synthetic oligonucleotide
cuccucauuugaacugacc

SEQ ID NO: 3076434 - RNA, 19 nt, Artificial Sequence
  Description of Artificial Sequence: Synthetic oligonucleotide
gaaccaguuuacaucaucu

SEQ ID NO: 3076435 - RNA, 19 nt, Artificial Sequence
  Description of Artificial Sequence: Synthetic oligonucleotide
gguuggucaaucuuccaga

SEQ ID NO: 3076436 - RNA, 19 nt, Artificial Sequence
  Description of Artificial Sequence: Synthetic oligonucleotide
uuugacaaauggccacguu

SEQ ID NO: 3076437 - RNA, 19 nt, Artificial Sequence
  Description of Artificial Sequence: Synthetic oligonucleotide
ccccacaagguugagaagg

SEQ ID NO: 3076438 - RNA, 19 nt, Artificial Sequence
  Description of Artificial Sequence: Synthetic oligonucleotide
auugccuaucuuggccucg

SEQ ID NO: 3076439 - RNA, 19 nt, Artificial Sequence
  Description of Artificial Sequence: Synthetic oligonucleotide
uauugccuaucuuggccuc

SEQ ID NO: 3076440 - RNA, 19 nt, Artificial Sequence
  Description of Artificial Sequence: Synthetic oligonucleotide
gaucuguuauugccuaucu

SEQ ID NO: 3076441 - RNA, 19 nt, Artificial Sequence
  Description of Artificial Sequence: Synthetic oligonucleotide
ucucccucacaucccagua

SEQ ID NO: 3076442 - RNA, 19 nt, Artificial Sequence
  Description of Artificial Sequence: Synthetic oligonucleotide
cucauuugaacugaccucu

SEQ ID NO: 3076443 - RNA, 19 nt, Artificial Sequence
  Description of Artificial Sequence: Synthetic oligonucleotide
uuugugguaaggggcaguu

SEQ ID NO: 3076444 - RNA, 19 nt, Artificial Sequence
  Description of Artificial Sequence: Synthetic oligonucleotide
uaauaucgguuggucaauc

SEQ ID NO: 3076445 - RNA, 19 nt, Artificial Sequence
  Description of Artificial Sequence: Synthetic oligonucleotide
ugucacugaugaaccaguu

SEQ ID NO: 3076446 - RNA, 19 nt, Artificial Sequence
  Description of Artificial Sequence: Synthetic oligonucleotide
uuuugugguaaggggcagu

SEQ ID NO: 3076447 - RNA, 19 nt, Artificial Sequence
  Description of Artificial Sequence: Synthetic oligonucleotide
gccucgaugucuuugucac

SEQ ID NO: 3076448 - RNA, 19 nt, Artificial Sequence
  Description of Artificial Sequence: Synthetic oligonucleotide
auaauaucgguuggucaau

SEQ ID NO: 3076449 - RNA, 19 nt, Artificial Sequence
  Description of Artificial Sequence: Synthetic oligonucleotide
cuuucuccuccucauuuga

SEQ ID NO: 3076450 - RNA, 19 nt, Artificial Sequence
  Description of Artificial Sequence: Synthetic oligonucleotide
cucccucacaucccaguag

SEQ ID NO: 3076451 - RNA, 19 nt, Artificial Sequence
  Description of Artificial Sequence: Synthetic oligonucleotide
ucauuugaacugaccucua

SEQ ID NO: 3076452 - RNA, 19 nt, Artificial Sequence
  Description of Artificial Sequence: Synthetic oligonucleotide
auggccacguuuaucacaa

SEQ ID NO: 3076453 - RNA, 19 nt, Artificial Sequence
  Description of Artificial Sequence: Synthetic oligonucleotide
caguguuuucacaucccca

SEQ ID NO: 3076454 - RNA, 19 nt, Artificial Sequence
  Description of Artificial Sequence: Synthetic oligonucleotide
ucgaugucuuugucacuga

SEQ ID NO: 3076455 - RNA, 19 nt, Artificial Sequence
  Description of Artificial Sequence: Synthetic oligonucleotide
cuuugucacugaugaacca

SEQ ID NO: 3076456 - RNA, 19 nt, Artificial Sequence
  Description of Artificial Sequence: Synthetic oligonucleotide
cauucucugaaaugguacu

SEQ ID NO: 3076457 - RNA, 19 nt, Artificial Sequence
  Description of Artificial Sequence: Synthetic oligonucleotide
cuaucuuggccucgauguc

SEQ ID NO: 3076458 - RNA, 19 nt, Artificial Sequence
  Description of Artificial Sequence: Synthetic oligonucleotide
gagaaggaugucauugucu

SEQ ID NO: 3076459 - RNA, 19 nt, Artificial Sequence
  Description of Artificial Sequence: Synthetic oligonucleotide
ccagaugaucuguuauugc

SEQ ID NO: 3076460 - RNA, 19 nt, Artificial Sequence
  Description of Artificial Sequence: Synthetic oligonucleotide
ugucuuugucacugaugaa

SEQ ID NO: 3076461 - RNA, 19 nt, Artificial Sequence
  Description of Artificial Sequence: Synthetic oligonucleotide
cuuuugugguaaggggcag

SEQ ID NO: 3076462 - RNA, 19 nt, Artificial Sequence
  Description of Artificial Sequence: Synthetic oligonucleotide
aucuguuauugccuaucuu

SEQ ID NO: 3076463 - RNA, 19 nt, Artificial Sequence
  Description of Artificial Sequence: Synthetic oligonucleotide
cuuuccacauuuucauucu

SEQ ID NO: 3076464 - RNA, 19 nt, Artificial Sequence
  Description of Artificial Sequence: Synthetic oligonucleotide
cacguuuaucacaauuucu

SEQ ID NO: 3076465 - RNA, 19 nt, Artificial Sequence
  Description of Artificial Sequence: Synthetic oligonucleotide
auucucugaaaugguacuu

SEQ ID NO: 3076466 - RNA, 19 nt, Artificial Sequence
  Description of Artificial Sequence: Synthetic oligonucleotide
uccccacaagguugagaag

SEQ ID NO: 3076467 - RNA, 19 nt, Artificial Sequence
  Description of Artificial Sequence: Synthetic oligonucleotide
cauuuucauucucugaaau

SEQ ID NO: 3076468 - RNA, 19 nt, Artificial Sequence
  Description of Artificial Sequence: Synthetic oligonucleotide
ccucauuugaacugaccuc

SEQ ID NO: 3076469 - RNA, 19 nt, Artificial Sequence
  Description of Artificial Sequence: Synthetic oligonucleotide
cguuuaucacaauuucuac

SEQ ID NO: 3076470 - RNA, 19 nt, Artificial Sequence
  Description of Artificial Sequence: Synthetic oligonucleotide
ccagcuuuccacauuuuca

SEQ ID NO: 3076471 - RNA, 19 nt, Artificial Sequence
  Description of Artificial Sequence: Synthetic oligonucleotide
augaucuguuauugccuau

SEQ ID NO: 3076472 - RNA, 19 nt, Artificial Sequence
  Description of Artificial Sequence: Synthetic oligonucleotide
ucgguuggucaaucuucca

SEQ ID NO: 3076473 - RNA, 19 nt, Artificial Sequence
  Description of Artificial Sequence: Synthetic oligonucleotide
agguugagaaggaugucau

SEQ ID NO: 3076474 - RNA, 19 nt, Artificial Sequence
  Description of Artificial Sequence: Synthetic oligonucleotide
cugaugaaccaguuuacau

SEQ ID NO: 3076475 - RNA, 19 nt, Artificial Sequence
  Description of Artificial Sequence: Synthetic oligonucleotide
guguuuucacauccccaca

SEQ ID NO: 3076476 - RNA, 19 nt, Artificial Sequence
  Description of Artificial Sequence: Synthetic oligonucleotide
aggaugucauugucuuuau

SEQ ID NO: 3076477 - RNA, 19 nt, Artificial Sequence
  Description of Artificial Sequence: Synthetic oligonucleotide
ccacguuuaucacaauuuc

SEQ ID NO: 3076478 - RNA, 19 nt, Artificial Sequence
  Description of Artificial Sequence: Synthetic oligonucleotide
agcauccagcuuuccacau

SEQ ID NO: 3076479 - RNA, 19 nt, Artificial Sequence
  Description of Artificial Sequence: Synthetic oligonucleotide
agcuuuccacauuuucauu

SEQ ID NO: 3076480 - RNA, 19 nt, Artificial Sequence
  Description of Artificial Sequence: Synthetic oligonucleotide
uuucuacaugugacauuuu

SEQ ID NO: 3076481 - RNA, 19 nt, Artificial Sequence
  Description of Artificial Sequence: Synthetic oligonucleotide
cggacuuuugugguaaggg

SEQ ID NO: 3076482 - RNA, 19 nt, Artificial Sequence
  Description of Artificial Sequence: Synthetic oligonucleotide
uugccuaucuuggccucga

SEQ ID NO: 3076483 - RNA, 19 nt, Artificial Sequence
  Description of Artificial Sequence: Synthetic oligonucleotide
caucucccucacaucccag

SEQ ID NO: 3076484 - RNA, 19 nt, Artificial Sequence
  Description of Artificial Sequence: Synthetic oligonucleotide
cuuccagaugaucuguuau

SEQ ID NO: 3076485 - RNA, 19 nt, Artificial Sequence
  Description of Artificial Sequence: Synthetic oligonucleotide
caauuucuacaugugacau

SEQ ID NO: 3076486 - RNA, 19 nt, Artificial Sequence
  Description of Artificial Sequence: Synthetic oligonucleotide
cagcuuuccacauuuucau

SEQ ID NO: 3076487 - RNA, 19 nt, Artificial Sequence
  Description of Artificial Sequence: Synthetic oligonucleotide
guuggucaaucuuccagau

SEQ ID NO: 3076488 - RNA, 19 nt, Artificial Sequence
  Description of Artificial Sequence: Synthetic oligonucleotide
cuuuaucaucucccucaca

SEQ ID NO: 3076489 - RNA, 19 nt, Artificial Sequence
  Description of Artificial Sequence: Synthetic oligonucleotide
caagguugagaaggauguc

SEQ ID NO: 3076490 - RNA, 19 nt, Artificial Sequence
  Description of Artificial Sequence: Synthetic oligonucleotide
gccuaucuuggccucgaug

SEQ ID NO: 3076491 - RNA, 19 nt, Artificial Sequence
  Description of Artificial Sequence: Synthetic oligonucleotide
aacugaccucuaugaccau

SEQ ID NO: 3076492 - RNA, 19 nt, Artificial Sequence
  Description of Artificial Sequence: Synthetic oligonucleotide
cgguuggucaaucuuccag

SEQ ID NO: 3076493 - RNA, 19 nt, Artificial Sequence
  Description of Artificial Sequence: Synthetic oligonucleotide
gacaaauggccacguuuau

SEQ ID NO: 3076494 - RNA, 19 nt, Artificial Sequence
  Description of Artificial Sequence: Synthetic oligonucleotide
uggccucgaugucuuuguc

SEQ ID NO: 3076495 - RNA, 19 nt, Artificial Sequence
  Description of Artificial Sequence: Synthetic oligonucleotide
ucccaguagcauccagcuu

SEQ ID NO: 3076496 - RNA, 19 nt, Artificial Sequence
  Description of Artificial Sequence: Synthetic oligonucleotide
ggccucgaugucuuuguca

SEQ ID NO: 3076497 - RNA, 19 nt, Artificial Sequence
  Description of Artificial Sequence: Synthetic oligonucleotide
cauccagcuuuccacauuu

SEQ ID NO: 3076498 - RNA, 19 nt, Artificial Sequence
  Description of Artificial Sequence: Synthetic oligonucleotide
cuguauaauaucgguuggu

SEQ ID NO: 3076499 - RNA, 19 nt, Artificial Sequence
  Description of Artificial Sequence: Synthetic oligonucleotide
ccacauuuucauucucuga

SEQ ID NO: 3076500 - RNA, 19 nt, Artificial Sequence
  Description of Artificial Sequence: Synthetic oligonucleotide
gaaggaugucauugucuuu

SEQ ID NO: 3076501 - RNA, 19 nt, Artificial Sequence
  Description of Artificial Sequence: Synthetic oligonucleotide
gucacugaugaaccaguuu

SEQ ID NO: 3076502 - RNA, 19 nt, Artificial Sequence
  Description of Artificial Sequence: Synthetic oligonucleotide
cauuugaacugaccucuau

SEQ ID NO: 3076503 - RNA, 19 nt, Artificial Sequence
  Description of Artificial Sequence: Synthetic oligonucleotide
cuucagcaucaguguuuuc

SEQ ID NO: 3076504 - RNA, 19 nt, Artificial Sequence
  Description of Artificial Sequence: Synthetic oligonucleotide
ccaguagcauccagcuuuc

SEQ ID NO: 3076505 - RNA, 19 nt, Artificial Sequence
  Description of Artificial Sequence: Synthetic oligonucleotide
ugccuaucuuggccucgau

SEQ ID NO: 3076506 - RNA, 19 nt, Artificial Sequence
  Description of Artificial Sequence: Synthetic oligonucleotide
uugugguaaggggcaguuu

SEQ ID NO: 3076507 - RNA, 19 nt, Artificial Sequence
  Description of Artificial Sequence: Synthetic oligonucleotide
aucuuccagaugaucuguu

SEQ ID NO: 3076508 - RNA, 19 nt, Artificial Sequence
  Description of Artificial Sequence: Synthetic oligonucleotide
ccggacuuuugugguaagg

SEQ ID NO: 3076509 - RNA, 19 nt, Artificial Sequence
  Description of Artificial Sequence: Synthetic oligonucleotide
cccaguagcauccagcuuu

SEQ ID NO: 3076510 - RNA, 19 nt, Artificial Sequence
  Description of Artificial Sequence: Synthetic oligonucleotide
cauccccacaagguugaga

SEQ ID NO: 3076511 - RNA, 19 nt, Artificial Sequence
  Description of Artificial Sequence: Synthetic oligonucleotide
acauccccacaagguugag

SEQ ID NO: 3076512 - RNA, 19 nt, Artificial Sequence
  Description of Artificial Sequence: Synthetic oligonucleotide
augaaccaguuuacaucau

SEQ ID NO: 3076513 - RNA, 19 nt, Artificial Sequence
  Description of Artificial Sequence: Synthetic oligonucleotide
ccuccucauuugaacugac

SEQ ID NO: 3076514 - RNA, 19 nt, Artificial Sequence
  Description of Artificial Sequence: Synthetic oligonucleotide
cccacaagguugagaagga

SEQ ID NO: 3076515 - RNA, 19 nt, Artificial Sequence
  Description of Artificial Sequence: Synthetic oligonucleotide
gccacguuuaucacaauuu

SEQ ID NO: 3076516 - RNA, 19 nt, Artificial Sequence
  Description of Artificial Sequence: Synthetic oligonucleotide
ggccacguuuaucacaauu

SEQ ID NO: 3076517 - RNA, 19 nt, Artificial Sequence
  Description of Artificial Sequence: Synthetic oligonucleotide
uggccacguuuaucacaau

SEQ ID NO: 3076518 - RNA, 19 nt, Artificial Sequence
  Description of Artificial Sequence: Synthetic oligonucleotide
cacaucccaguagcaucca

SEQ ID NO: 3076519 - RNA, 19 nt, Artificial Sequence
  Description of Artificial Sequence: Synthetic oligonucleotide
cccucacaucccaguagca

SEQ ID NO: 3076520 - RNA, 19 nt, Artificial Sequence
  Description of Artificial Sequence: Synthetic oligonucleotide
ggucaaucuuccagaugau

SEQ ID NO: 3076521 - RNA, 19 nt, Artificial Sequence
  Description of Artificial Sequence: Synthetic oligonucleotide
gcauccagcuuuccacauu

SEQ ID NO: 3076522 - RNA, 19 nt, Artificial Sequence
  Description of Artificial Sequence: Synthetic oligonucleotide
ccucacaucccaguagcau

SEQ ID NO: 3076523 - RNA, 19 nt, Artificial Sequence
  Description of Artificial Sequence: Synthetic oligonucleotide
cgaugucuuugucacugau

SEQ ID NO: 3076524 - RNA, 19 nt, Artificial Sequence
  Description of Artificial Sequence: Synthetic oligonucleotide
ccacaagguugagaaggau

SEQ ID NO: 3076525 - RNA, 19 nt, Artificial Sequence
  Description of Artificial Sequence: Synthetic oligonucleotide
ccccuucagcaucaguguu

SEQ ID NO: 3076526 - RNA, 19 nt, Artificial Sequence
  Description of Artificial Sequence: Synthetic oligonucleotide
uucaauuagcugaugaagg

SEQ ID NO: 3076527 - RNA, 19 nt, Artificial Sequence
  Description of Artificial Sequence: Synthetic oligonucleotide
aacucuaucugccuguuuc

SEQ ID NO: 3076528 - RNA, 19 nt, Artificial Sequence
  Description of Artificial Sequence: Synthetic oligonucleotide
uguuuguuggcaaaacacg

SEQ ID NO: 3076529 - RNA, 19 nt, Artificial Sequence
  Description of Artificial Sequence: Synthetic oligonucleotide
aaaaccuuggguagguucc

SEQ ID NO: 3076530 - RNA, 19 nt, Artificial Sequence
  Description of Artificial Sequence: Synthetic oligonucleotide
agcggaauggcucacugcc

SEQ ID NO: 3076531 - RNA, 19 nt, Artificial Sequence
  Description of Artificial Sequence: Synthetic oligonucleotide
uuuguggucagccgaaucc

SEQ ID NO: 3076532 - RNA, 19 nt, Artificial Sequence
  Description of Artificial Sequence: Synthetic oligonucleotide
uguuggaagccauugagug

SEQ ID NO: 3076533 - RNA, 19 nt, Artificial Sequence
  Description of Artificial Sequence: Synthetic oligonucleotide
ucuguuggaagccauugag

SEQ ID NO: 3076534 - RNA, 19 nt, Artificial Sequence
  Description of Artificial Sequence: Synthetic oligonucleotide
uguagaugcaaacuucgug

SEQ ID NO: 3076535 - RNA, 19 nt, Artificial Sequence
  Description of Artificial Sequence: Synthetic oligonucleotide
guuugguucaauuagcuga

SEQ ID NO: 3076536 - RNA, 19 nt, Artificial Sequence
  Description of Artificial Sequence: Synthetic oligonucleotide
ugaugaaggcauuucuugg

SEQ ID NO: 3076537 - RNA, 19 nt, Artificial Sequence
  Description of Artificial Sequence: Synthetic oligonucleotide
ucaauuagcugaugaaggc

SEQ ID NO: 3076538 - RNA, 19 nt, Artificial Sequence
  Description of Artificial Sequence: Synthetic oligonucleotide
aagaucaguagccaucccu

SEQ ID NO: 3076539 - RNA, 19 nt, Artificial Sequence
  Description of Artificial Sequence: Synthetic oligonucleotide
uuguuggcaaaacacgacc

SEQ ID NO: 3076540 - RNA, 19 nt, Artificial Sequence
  Description of Artificial Sequence: Synthetic oligonucleotide
uucgugaaaaccuugggua

SEQ ID NO: 3076541 - RNA, 19 nt, Artificial Sequence
  Description of Artificial Sequence: Synthetic oligonucleotide
gaugaaggcauuucuuggc

SEQ ID NO: 3076542 - RNA, 19 nt, Artificial Sequence
  Description of Artificial Sequence: Synthetic oligonucleotide
uggcaaaacacgaccagag

SEQ ID NO: 3076543 - RNA, 19 nt, Artificial Sequence
  Description of Artificial Sequence: Synthetic oligonucleotide
guagaugcaaacuucguga

SEQ ID NO: 3076544 - RNA, 19 nt, Artificial Sequence
  Description of Artificial Sequence: Synthetic oligonucleotide
cuguuuguuggcaaaacac

SEQ ID NO: 3076545 - RNA, 19 nt, Artificial Sequence
  Description of Artificial Sequence: Synthetic oligonucleotide
uucagguaaccguuugugg

SEQ ID NO: 3076546 - RNA, 19 nt, Artificial Sequence
  Description of Artificial Sequence: Synthetic oligonucleotide
gcaaaacacgaccagaggg

SEQ ID NO: 3076547 - RNA, 19 nt, Artificial Sequence
  Description of Artificial Sequence: Synthetic oligonucleotide
aaagaucaguagccauccc

SEQ ID NO: 3076548 - RNA, 19 nt, Artificial Sequence
  Description of Artificial Sequence: Synthetic oligonucleotide
ucagguaaccguuuguggu

SEQ ID NO: 3076549 - RNA, 19 nt, Artificial Sequence
  Description of Artificial Sequence: Synthetic oligonucleotide
cuaucugccuguuucagug

SEQ ID NO: 3076550 - RNA, 19 nt, Artificial Sequence
  Description of Artificial Sequence: Synthetic oligonucleotide
agguacguaucccaguagg

SEQ ID NO: 3076551 - RNA, 19 nt, Artificial Sequence
  Description of Artificial Sequence: Synthetic oligonucleotide
ccuguuucaguguagaugc

SEQ ID NO: 3076552 - RNA, 19 nt, Artificial Sequence
  Description of Artificial Sequence: Synthetic oligonucleotide
agccgaauccaccacaaag

SEQ ID NO: 3076553 - RNA, 19 nt, Artificial Sequence
  Description of Artificial Sequence: Synthetic oligonucleotide
ugguucaauuagcugauga

SEQ ID NO: 3076554 - RNA, 19 nt, Artificial Sequence
  Description of Artificial Sequence: Synthetic oligonucleotide
uccaccacaaagaucagua

SEQ ID NO: 3076555 - RNA, 19 nt, Artificial Sequence
  Description of Artificial Sequence: Synthetic oligonucleotide
uuuguuggcaaaacacgac

SEQ ID NO: 3076556 - RNA, 19 nt, Artificial Sequence
  Description of Artificial Sequence: Synthetic oligonucleotide
uguuggcaaaacacgacca

SEQ ID NO: 3076557 - RNA, 19 nt, Artificial Sequence
  Description of Artificial Sequence: Synthetic oligonucleotide
ucaguguagaugcaaacuu

SEQ ID NO: 3076558 - RNA, 19 nt, Artificial Sequence
  Description of Artificial Sequence: Synthetic oligonucleotide
aguguagaugcaaacuucg

SEQ ID NO: 3076559 - RNA, 19 nt, Artificial Sequence
  Description of Artificial Sequence: Synthetic oligonucleotide
aacuucgugaaaaccuugg

SEQ ID NO: 3076560 - RNA, 19 nt, Artificial Sequence
  Description of Artificial Sequence: Synthetic oligonucleotide
cuggguuugguucaauuag

SEQ ID NO: 3076561 - RNA, 19 nt, Artificial Sequence
  Description of Artificial Sequence: Synthetic oligonucleotide
uccaggaacucuaucugcc

SEQ ID NO: 3076562 - RNA, 19 nt, Artificial Sequence
  Description of Artificial Sequence: Synthetic oligonucleotide
uccugcuccauccaagccc

SEQ ID NO: 3076563 - RNA, 19 nt, Artificial Sequence
  Description of Artificial Sequence: Synthetic oligonucleotide
aaaacacgaccagagggag

SEQ ID NO: 3076564 - RNA, 19 nt, Artificial Sequence
  Description of Artificial Sequence: Synthetic oligonucleotide
aacacgaccagagggagcu

SEQ ID NO: 3076565 - RNA, 19 nt, Artificial Sequence
  Description of Artificial Sequence: Synthetic oligonucleotide
ucgugaaaaccuuggguag

SEQ ID NO: 3076566 - RNA, 19 nt, Artificial Sequence
  Description of Artificial Sequence: Synthetic oligonucleotide
uuggaagccauugagugga

SEQ ID NO: 3076567 - RNA, 19 nt, Artificial Sequence
  Description of Artificial Sequence: Synthetic oligonucleotide
cugugcugcacucuguugg

SEQ ID NO: 3076568 - RNA, 19 nt, Artificial Sequence
  Description of Artificial Sequence: Synthetic oligonucleotide
gaaaaccuuggguagguuc

SEQ ID NO: 3076569 - RNA, 19 nt, Artificial Sequence
  Description of Artificial Sequence: Synthetic oligonucleotide
uuugguucaauuagcugau

SEQ ID NO: 3076570 - RNA, 19 nt, Artificial Sequence
  Description of Artificial Sequence: Synthetic oligonucleotide
uuggguagguuccaagcug

SEQ ID NO: 3076571 - RNA, 19 nt, Artificial Sequence
  Description of Artificial Sequence: Synthetic oligonucleotide
acaaagaucaguagccauc

SEQ ID NO: 3076572 - RNA, 19 nt, Artificial Sequence
  Description of Artificial Sequence: Synthetic oligonucleotide
caccacaaagaucaguagc

SEQ ID NO: 3076573 - RNA, 19 nt, Artificial Sequence
  Description of Artificial Sequence: Synthetic oligonucleotide
gaugcaaacuucgugaaaa

SEQ ID NO: 3076574 - RNA, 19 nt, Artificial Sequence
  Description of Artificial Sequence: Synthetic oligonucleotide
guuggaagccauugagugg

SEQ ID NO: 3076575 - RNA, 19 nt, Artificial Sequence
  Description of Artificial Sequence: Synthetic oligonucleotide
aucaguagccaucccuugg

SEQ ID NO: 3076576 - RNA, 19 nt, Artificial Sequence
  Description of Artificial Sequence: Synthetic oligonucleotide
acuucgugaaaaccuuggg

SEQ ID NO: 3076577 - RNA, 19 nt, Artificial Sequence
  Description of Artificial Sequence: Synthetic oligonucleotide
aauuagcugaugaaggcau

SEQ ID NO: 3076578 - RNA, 19 nt, Artificial Sequence
  Description of Artificial Sequence: Synthetic oligonucleotide
uggguuugguucaauuagc

SEQ ID NO: 3076579 - RNA, 19 nt, Artificial Sequence
  Description of Artificial Sequence: Synthetic oligonucleotide
gaagccauugaguggagga

SEQ ID NO: 3076580 - RNA, 19 nt, Artificial Sequence
  Description of Artificial Sequence: Synthetic oligonucleotide
caaagaucaguagccaucc

SEQ ID NO: 3076581 - RNA, 19 nt, Artificial Sequence
  Description of Artificial Sequence: Synthetic oligonucleotide
guagccaucccuugggcag

SEQ ID NO: 3076582 - RNA, 19 nt, Artificial Sequence
  Description of Artificial Sequence: Synthetic oligonucleotide
aagccauugaguggaggac

SEQ ID NO: 3076583 - RNA, 19 nt, Artificial Sequence
  Description of Artificial Sequence: Synthetic oligonucleotide
aaccguuuguggucagccg

SEQ ID NO: 3076584 - RNA, 19 nt, Artificial Sequence
  Description of Artificial Sequence: Synthetic oligonucleotide
aguaggagcggaauggcuc

SEQ ID NO: 3076585 - RNA, 19 nt, Artificial Sequence
  Description of Artificial Sequence: Synthetic oligonucleotide
uucaguguagaugcaaacu

SEQ ID NO: 3076586 - RNA, 19 nt, Artificial Sequence
  Description of Artificial Sequence: Synthetic oligonucleotide
uuucaguguagaugcaaac

SEQ ID NO: 3076587 - RNA, 19 nt, Artificial Sequence
  Description of Artificial Sequence: Synthetic oligonucleotide
augcaaacuucgugaaaac

SEQ ID NO: 3076588 - RNA, 19 nt, Artificial Sequence
  Description of Artificial Sequence: Synthetic oligonucleotide
uuuccugcuccauccaagc

SEQ ID NO: 3076589 - RNA, 19 nt, Artificial Sequence
  Description of Artificial Sequence: Synthetic oligonucleotide
ugcaaacuucgugaaaacc

SEQ ID NO: 3076590 - RNA, 19 nt, Artificial Sequence
  Description of Artificial Sequence: Synthetic oligonucleotide
uugaguggaggacacuggu

SEQ ID NO: 3076591 - RNA, 19 nt, Artificial Sequence
  Description of Artificial Sequence: Synthetic oligonucleotide
guuggcaaaacacgaccag

SEQ ID NO: 3076592 - RNA, 19 nt, Artificial Sequence
  Description of Artificial Sequence: Synthetic oligonucleotide
uccaagcccaguacuagga

SEQ ID NO: 3076593 - RNA, 19 nt, Artificial Sequence
  Description of Artificial Sequence: Synthetic oligonucleotide
caaaacacgaccagaggga

SEQ ID NO: 3076594 - RNA, 19 nt, Artificial Sequence
  Description of Artificial Sequence: Synthetic oligonucleotide
ucuggguuugguucaauua

SEQ ID NO: 3076595 - RNA, 19 nt, Artificial Sequence
  Description of Artificial Sequence: Synthetic oligonucleotide
aagcccaguacuaggaucu

SEQ ID NO: 3076596 - RNA, 19 nt, Artificial Sequence
  Description of Artificial Sequence: Synthetic oligonucleotide
uccauccaagcccaguacu

SEQ ID NO: 3076597 - RNA, 19 nt, Artificial Sequence
  Description of Artificial Sequence: Synthetic oligonucleotide
cuuuccugcuccauccaag

SEQ ID NO: 3076598 - RNA, 19 nt, Artificial Sequence
  Description of Artificial Sequence: Synthetic oligonucleotide
uaaccguuuguggucagcc

SEQ ID NO: 3076599 - RNA, 19 nt, Artificial Sequence
  Description of Artificial Sequence: Synthetic oligonucleotide
aaacacgaccagagggagc

SEQ ID NO: 3076600 - RNA, 19 nt, Artificial Sequence
  Description of Artificial Sequence: Synthetic oligonucleotide
augaaggcauuucuuggcu

SEQ ID NO: 3076601 - RNA, 19 nt, Artificial Sequence
  Description of Artificial Sequence: Synthetic oligonucleotide
auccaagcccaguacuagg

SEQ ID NO: 3076602 - RNA, 19 nt, Artificial Sequence
  Description of Artificial Sequence: Synthetic oligonucleotide
cauugaguggaggacacug

SEQ ID NO: 3076603 - RNA, 19 nt, Artificial Sequence
  Description of Artificial Sequence: Synthetic oligonucleotide
uuggcuucagguaaccguu

SEQ ID NO: 3076604 - RNA, 19 nt, Artificial Sequence
  Description of Artificial Sequence: Synthetic oligonucleotide
agcugaugaaggcauuucu

SEQ ID NO: 3076605 - RNA, 19 nt, Artificial Sequence
  Description of Artificial Sequence: Synthetic oligonucleotide
ugcugcacucuguuggaag

SEQ ID NO: 3076606 - RNA, 19 nt, Artificial Sequence
  Description of Artificial Sequence: Synthetic oligonucleotide
caucccuugggcagguacg

SEQ ID NO: 3076607 - RNA, 19 nt, Artificial Sequence
  Description of Artificial Sequence: Synthetic oligonucleotide
uggguagguuccaagcugu

SEQ ID NO: 3076608 - RNA, 19 nt, Artificial Sequence
  Description of Artificial Sequence: Synthetic oligonucleotide
acguaucccaguaggagcg

SEQ ID NO: 3076609 - RNA, 19 nt, Artificial Sequence
  Description of Artificial Sequence: Synthetic oligonucleotide
guacguaucccaguaggag

SEQ ID NO: 3076610 - RNA, 19 nt, Artificial Sequence
  Description of Artificial Sequence: Synthetic oligonucleotide
uggucagccgaauccacca

SEQ ID NO: 3076611 - RNA, 19 nt, Artificial Sequence
  Description of Artificial Sequence: Synthetic oligonucleotide
uagaugcaaacuucgugaa

SEQ ID NO: 3076612 - RNA, 19 nt, Artificial Sequence
  Description of Artificial Sequence: Synthetic oligonucleotide
ucuaucugccuguuucagu

SEQ ID NO: 3076613 - RNA, 19 nt, Artificial Sequence
  Description of Artificial Sequence: Synthetic oligonucleotide
guuuguuggcaaaacacga

SEQ ID NO: 3076614 - RNA, 19 nt, Artificial Sequence
  Description of Artificial Sequence: Synthetic oligonucleotide
ucugccuguuucaguguag

SEQ ID NO: 3076615 - RNA, 19 nt, Artificial Sequence
  Description of Artificial Sequence: Synthetic oligonucleotide
cuucagguaaccguuugug

SEQ ID NO: 3076616 - RNA, 19 nt, Artificial Sequence
  Description of Artificial Sequence: Synthetic oligonucleotide
uuucuuggcuucagguaac

SEQ ID NO: 3076617 - RNA, 19 nt, Artificial Sequence
  Description of Artificial Sequence: Synthetic oligonucleotide
gaucaguagccaucccuug

SEQ ID NO: 3076618 - RNA, 19 nt, Artificial Sequence
  Description of Artificial Sequence: Synthetic oligonucleotide
caguguagaugcaaacuuc

SEQ ID NO: 3076619 - RNA, 19 nt, Artificial Sequence
  Description of Artificial Sequence: Synthetic oligonucleotide
aggacacuggucuuuccug

SEQ ID NO: 3076620 - RNA, 19 nt, Artificial Sequence
  Description of Artificial Sequence: Synthetic oligonucleotide
uuggcaaaacacgaccaga

SEQ ID NO: 3076621 - RNA, 19 nt, Artificial Sequence
  Description of Artificial Sequence: Synthetic oligonucleotide
aaacuucgugaaaaccuug

SEQ ID NO: 3076622 - RNA, 19 nt, Artificial Sequence
  Description of Artificial Sequence: Synthetic oligonucleotide
accguuuguggucagccga

SEQ ID NO: 3076623 - RNA, 19 nt, Artificial Sequence
  Description of Artificial Sequence: Synthetic oligonucleotide
gaccagagggagcucuggg

SEQ ID NO: 3076624 - RNA, 19 nt, Artificial Sequence
  Description of Artificial Sequence: Synthetic oligonucleotide
agguuccaagcugugcugc

SEQ ID NO: 3076625 - RNA, 19 nt, Artificial Sequence
  Description of Artificial Sequence: Synthetic oligonucleotide
auugaguggaggacacugg

SEQ ID NO: 3076626 - RNA, 19 nt, Artificial Sequence
  Description of Artificial Sequence: Synthetic oligonucleotide
ugggcagguacguauccca

SEQ ID NO: 3076627 - RNA, 19 nt, Artificial Sequence
  Description of Artificial Sequence: Synthetic oligonucleotide
aguagccaucccuugggca

SEQ ID NO: 3076628 - RNA, 19 nt, Artificial Sequence
  Description of Artificial Sequence: Synthetic oligonucleotide
aggaacucuaucugccugu

SEQ ID NO: 3076629 - RNA, 19 nt, Artificial Sequence
  Description of Artificial Sequence: Synthetic oligonucleotide
gaguggaggacacuggucu

SEQ ID NO: 3076630 - RNA, 19 nt, Artificial Sequence
  Description of Artificial Sequence: Synthetic oligonucleotide
ucagccgaauccaccacaa

SEQ ID NO: 3076631 - RNA, 19 nt, Artificial Sequence
  Description of Artificial Sequence: Synthetic oligonucleotide
ggucuuuccugcuccaucc

SEQ ID NO: 3076632 - RNA, 19 nt, Artificial Sequence
  Description of Artificial Sequence: Synthetic oligonucleotide
ucccaguaggagcggaaug

SEQ ID NO: 3076633 - RNA, 19 nt, Artificial Sequence
  Description of Artificial Sequence: Synthetic oligonucleotide
uuccaagcugugcugcacu

SEQ ID NO: 3076634 - RNA, 19 nt, Artificial Sequence
  Description of Artificial Sequence: Synthetic oligonucleotide
ucuuggcuucagguaaccg

SEQ ID NO: 3076635 - RNA, 19 nt, Artificial Sequence
  Description of Artificial Sequence: Synthetic oligonucleotide
caagcugugcugcacucug

SEQ ID NO: 3076636 - RNA, 19 nt, Artificial Sequence
  Description of Artificial Sequence: Synthetic oligonucleotide
ugugcugcacucuguugga

SEQ ID NO: 3076637 - RNA, 19 nt, Artificial Sequence
  Description of Artificial Sequence: Synthetic oligonucleotide
acucuaucugccuguuuca

SEQ ID NO: 3076638 - RNA, 19 nt, Artificial Sequence
  Description of Artificial Sequence: Synthetic oligonucleotide
uagguuccaagcugugcug

SEQ ID NO: 3076639 - RNA, 19 nt, Artificial Sequence
  Description of Artificial Sequence: Synthetic oligonucleotide
ugaguggaggacacugguc

SEQ ID NO: 3076640 - RNA, 19 nt, Artificial Sequence
  Description of Artificial Sequence: Synthetic oligonucleotide
caagcccaguacuaggauc

SEQ ID NO: 3076641 - RNA, 19 nt, Artificial Sequence
  Description of Artificial Sequence: Synthetic oligonucleotide
guagguuccaagcugugcu

SEQ ID NO: 3076642 - RNA, 19 nt, Artificial Sequence
  Description of Artificial Sequence: Synthetic oligonucleotide
ggcaaaacacgaccagagg

SEQ ID NO: 3076643 - RNA, 19 nt, Artificial Sequence
  Description of Artificial Sequence: Synthetic oligonucleotide
acacuggucuuuccugcuc

SEQ ID NO: 3076644 - RNA, 19 nt, Artificial Sequence
  Description of Artificial Sequence: Synthetic oligonucleotide
cagguaaccguuugugguc

SEQ ID NO: 3076645 - RNA, 19 nt, Artificial Sequence
  Description of Artificial Sequence: Synthetic oligonucleotide
cuugggcagguacguaucc

SEQ ID NO: 3076646 - RNA, 19 nt, Artificial Sequence
  Description of Artificial Sequence: Synthetic oligonucleotide
uuccugcuccauccaagcc

SEQ ID NO: 3076647 - RNA, 19 nt, Artificial Sequence
  Description of Artificial Sequence: Synthetic oligonucleotide
uguggucagccgaauccac

SEQ ID NO: 3076648 - RNA, 19 nt, Artificial Sequence
  Description of Artificial Sequence: Synthetic oligonucleotide
uuguggucagccgaaucca

SEQ ID NO: 3076649 - RNA, 19 nt, Artificial Sequence
  Description of Artificial Sequence: Synthetic oligonucleotide
gguuugguucaauuagcug

SEQ ID NO: 3076650 - RNA, 19 nt, Artificial Sequence
  Description of Artificial Sequence: Synthetic oligonucleotide
caggaacucuaucugccug

SEQ ID NO: 3076651 - RNA, 19 nt, Artificial Sequence
  Description of Artificial Sequence: Synthetic oligonucleotide
cauccaagcccaguacuag

SEQ ID NO: 3076652 - RNA, 19 nt, Artificial Sequence
  Description of Artificial Sequence: Synthetic oligonucleotide
gaauggcucacugccacca

SEQ ID NO: 3076653 - RNA, 19 nt, Artificial Sequence
  Description of Artificial Sequence: Synthetic oligonucleotide
uggcucacugccaccaauc

SEQ ID NO: 3076654 - RNA, 19 nt, Artificial Sequence
  Description of Artificial Sequence: Synthetic oligonucleotide
uuagcugaugaaggcauuu

SEQ ID NO: 3076655 - RNA, 19 nt, Artificial Sequence
  Description of Artificial Sequence: Synthetic oligonucleotide
guaggagcggaauggcuca

SEQ ID NO: 3076656 - RNA, 19 nt, Artificial Sequence
  Description of Artificial Sequence: Synthetic oligonucleotide
caauuagcugaugaaggca

SEQ ID NO: 3076657 - RNA, 19 nt, Artificial Sequence
  Description of Artificial Sequence: Synthetic oligonucleotide
gguucaauuagcugaugaa

SEQ ID NO: 3076658 - RNA, 19 nt, Artificial Sequence
  Description of Artificial Sequence: Synthetic oligonucleotide
cauuucuuggcuucaggua

SEQ ID NO: 3076659 - RNA, 19 nt, Artificial Sequence
  Description of Artificial Sequence: Synthetic oligonucleotide
aaggcauuucuuggcuuca

SEQ ID NO: 3076660 - RNA, 19 nt, Artificial Sequence
  Description of Artificial Sequence: Synthetic oligonucleotide
ggcauuucuuggcuucagg

SEQ ID NO: 3076661 - RNA, 19 nt, Artificial Sequence
  Description of Artificial Sequence: Synthetic oligonucleotide
gagcggaauggcucacugc

SEQ ID NO: 3076662 - RNA, 19 nt, Artificial Sequence
  Description of Artificial Sequence: Synthetic oligonucleotide
uaucccaguaggagcggaa

SEQ ID NO: 3076663 - RNA, 19 nt, Artificial Sequence
  Description of Artificial Sequence: Synthetic oligonucleotide
agaugcaaacuucgugaaa

SEQ ID NO: 3076664 - RNA, 19 nt, Artificial Sequence
  Description of Artificial Sequence: Synthetic oligonucleotide
ccuuggguagguuccaagc

SEQ ID NO: 3076665 - RNA, 19 nt, Artificial Sequence
  Description of Artificial Sequence: Synthetic oligonucleotide
cuuggcuucagguaaccgu

SEQ ID NO: 3076666 - RNA, 19 nt, Artificial Sequence
  Description of Artificial Sequence: Synthetic oligonucleotide
aaaccuuggguagguucca

SEQ ID NO: 3076667 - RNA, 19 nt, Artificial Sequence
  Description of Artificial Sequence: Synthetic oligonucleotide
ugcacucuguuggaagcca

SEQ ID NO: 3076668 - RNA, 19 nt, Artificial Sequence
  Description of Artificial Sequence: Synthetic oligonucleotide
uaucugccuguuucagugu

SEQ ID NO: 3076669 - RNA, 19 nt, Artificial Sequence
  Description of Artificial Sequence: Synthetic oligonucleotide
agccauugaguggaggaca

SEQ ID NO: 3076670 - RNA, 19 nt, Artificial Sequence
  Description of Artificial Sequence: Synthetic oligonucleotide
ggacacuggucuuuccugc

SEQ ID NO: 3076671 - RNA, 19 nt, Artificial Sequence
  Description of Artificial Sequence: Synthetic oligonucleotide
gcugcacucuguuggaagc

SEQ ID NO: 3076672 - RNA, 19 nt, Artificial Sequence
  Description of Artificial Sequence: Synthetic oligonucleotide
cucuaucugccuguuucag

SEQ ID NO: 3076673 - RNA, 19 nt, Artificial Sequence
  Description of Artificial Sequence: Synthetic oligonucleotide
cuucgugaaaaccuugggu

SEQ ID NO: 3076674 - RNA, 19 nt, Artificial Sequence
  Description of Artificial Sequence: Synthetic oligonucleotide
guuuguggucagccgaauc

SEQ ID NO: 3076675 - RNA, 19 nt, Artificial Sequence
  Description of Artificial Sequence: Synthetic oligonucleotide
aauggcucacugccaccaa

SEQ ID NO: 3076676 - RNA, 19 nt, Artificial Sequence
  Description of Artificial Sequence: Synthetic oligonucleotide
uugggcagguacguauccc

SEQ ID NO: 3076677 - RNA, 19 nt, Artificial Sequence
  Description of Artificial Sequence: Synthetic oligonucleotide
uucuuggcuucagguaacc

SEQ ID NO: 3076678 - RNA, 19 nt, Artificial Sequence
  Description of Artificial Sequence: Synthetic oligonucleotide
agaucaguagccaucccuu

SEQ ID NO: 3076679 - RNA, 19 nt, Artificial Sequence
  Description of Artificial Sequence: Synthetic oligonucleotide
gccaccaaucuccaggaac

SEQ ID NO: 3076680 - RNA, 19 nt, Artificial Sequence
  Description of Artificial Sequence: Synthetic oligonucleotide
uagccaucccuugggcagg

SEQ ID NO: 3076681 - RNA, 19 nt, Artificial Sequence
  Description of Artificial Sequence: Synthetic oligonucleotide
uccaagcugugcugcacuc

SEQ ID NO: 3076682 - RNA, 19 nt, Artificial Sequence
  Description of Artificial Sequence: Synthetic oligonucleotide
cuccauccaagcccaguac

SEQ ID NO: 3076683 - RNA, 19 nt, Artificial Sequence
  Description of Artificial Sequence: Synthetic oligonucleotide
cccaguaggagcggaaugg

SEQ ID NO: 3076684 - RNA, 19 nt, Artificial Sequence
  Description of Artificial Sequence: Synthetic oligonucleotide
gaggacacuggucuuuccu

SEQ ID NO: 3076685 - RNA, 19 nt, Artificial Sequence
  Description of Artificial Sequence: Synthetic oligonucleotide
agguaaccguuugugguca

SEQ ID NO: 3076686 - RNA, 19 nt, Artificial Sequence
  Description of Artificial Sequence: Synthetic oligonucleotide
caguagccaucccuugggc

SEQ ID NO: 3076687 - RNA, 19 nt, Artificial Sequence
  Description of Artificial Sequence: Synthetic oligonucleotide
gcaaacuucgugaaaaccu

SEQ ID NO: 3076688 - RNA, 19 nt, Artificial Sequence
  Description of Artificial Sequence: Synthetic oligonucleotide
accaaucuccaggaacucu

SEQ ID NO: 3076689 - RNA, 19 nt, Artificial Sequence
  Description of Artificial Sequence: Synthetic oligonucleotide
aucugccuguuucagugua

SEQ ID NO: 3076690 - RNA, 19 nt, Artificial Sequence
  Description of Artificial Sequence: Synthetic oligonucleotide
uagcugaugaaggcauuuc

SEQ ID NO: 3076691 - RNA, 19 nt, Artificial Sequence
  Description of Artificial Sequence: Synthetic oligonucleotide
aauccaccacaaagaucag

SEQ ID NO: 3076692 - RNA, 19 nt, Artificial Sequence
  Description of Artificial Sequence: Synthetic oligonucleotide
gucagccgaauccaccaca

SEQ ID NO: 3076693 - RNA, 19 nt, Artificial Sequence
  Description of Artificial Sequence: Synthetic oligonucleotide
agagggagcucuggguuug

SEQ ID NO: 3076694 - RNA, 19 nt, Artificial Sequence
  Description of Artificial Sequence: Synthetic oligonucleotide
cugcacucuguuggaagcc

SEQ ID NO: 3076695 - RNA, 19 nt, Artificial Sequence
  Description of Artificial Sequence: Synthetic oligonucleotide
ggagcggaauggcucacug

SEQ ID NO: 3076696 - RNA, 19 nt, Artificial Sequence
  Description of Artificial Sequence: Synthetic oligonucleotide
cuuggguagguuccaagcu

SEQ ID NO: 3076697 - RNA, 19 nt, Artificial Sequence
  Description of Artificial Sequence: Synthetic oligonucleotide
gguagguuccaagcugugc

SEQ ID NO: 3076698 - RNA, 19 nt, Artificial Sequence
  Description of Artificial Sequence: Synthetic oligonucleotide
uugguucaauuagcugaug

SEQ ID NO: 3076699 - RNA, 19 nt, Artificial Sequence
  Description of Artificial Sequence: Synthetic oligonucleotide
caaacuucgugaaaaccuu

SEQ ID NO: 3076700 - RNA, 19 nt, Artificial Sequence
  Description of Artificial Sequence: Synthetic oligonucleotide
agcugugcugcacucuguu

SEQ ID NO: 3076701 - RNA, 19 nt, Artificial Sequence
  Description of Artificial Sequence: Synthetic oligonucleotide
guggucagccgaauccacc

SEQ ID NO: 3076702 - RNA, 19 nt, Artificial Sequence
  Description of Artificial Sequence: Synthetic oligonucleotide
auggcucacugccaccaau

SEQ ID NO: 3076703 - RNA, 19 nt, Artificial Sequence
  Description of Artificial Sequence: Synthetic oligonucleotide
cucuguuggaagccauuga

SEQ ID NO: 3076704 - RNA, 19 nt, Artificial Sequence
  Description of Artificial Sequence: Synthetic oligonucleotide
guaaccguuuguggucagc

SEQ ID NO: 3076705 - RNA, 19 nt, Artificial Sequence
  Description of Artificial Sequence: Synthetic oligonucleotide
aguggaggacacuggucuu

SEQ ID NO: 3076706 - RNA, 19 nt, Artificial Sequence
  Description of Artificial Sequence: Synthetic oligonucleotide
ggcuucagguaaccguuug

SEQ ID NO: 3076707 - RNA, 19 nt, Artificial Sequence
  Description of Artificial Sequence: Synthetic oligonucleotide
cuguuggaagccauugagu

SEQ ID NO: 3076708 - RNA, 19 nt, Artificial Sequence
  Description of Artificial Sequence: Synthetic oligonucleotide
ugcuccauccaagcccagu

SEQ ID NO: 3076709 - RNA, 19 nt, Artificial Sequence
  Description of Artificial Sequence: Synthetic oligonucleotide
gcauuucuuggcuucaggu

SEQ ID NO: 3076710 - RNA, 19 nt, Artificial Sequence
  Description of Artificial Sequence: Synthetic oligonucleotide
ggaagccauugaguggagg

SEQ ID NO: 3076711 - RNA, 19 nt, Artificial Sequence
  Description of Artificial Sequence: Synthetic oligonucleotide
ggaauggcucacugccacc

SEQ ID NO: 3076712 - RNA, 19 nt, Artificial Sequence
  Description of Artificial Sequence: Synthetic oligonucleotide
aggcauuucuuggcuucag

SEQ ID NO: 3076713 - RNA, 19 nt, Artificial Sequence
  Description of Artificial Sequence: Synthetic oligonucleotide
ccaccacaaagaucaguag

SEQ ID NO: 3076714 - RNA, 19 nt, Artificial Sequence
  Description of Artificial Sequence: Synthetic oligonucleotide
aucccuugggcagguacgu

SEQ ID NO: 3076715 - RNA, 19 nt, Artificial Sequence
  Description of Artificial Sequence: Synthetic oligonucleotide
gacacuggucuuuccugcu

SEQ ID NO: 3076716 - RNA, 19 nt, Artificial Sequence
  Description of Artificial Sequence: Synthetic oligonucleotide
cacaaagaucaguagccau

SEQ ID NO: 3076717 - RNA, 19 nt, Artificial Sequence
  Description of Artificial Sequence: Synthetic oligonucleotide
gguacguaucccaguagga

SEQ ID NO: 3076718 - RNA, 19 nt, Artificial Sequence
  Description of Artificial Sequence: Synthetic oligonucleotide
uggcuucagguaaccguuu

SEQ ID NO: 3076719 - RNA, 19 nt, Artificial Sequence
  Description of Artificial Sequence: Synthetic oligonucleotide
cgugaaaaccuuggguagg

SEQ ID NO: 3076720 - RNA, 19 nt, Artificial Sequence
  Description of Artificial Sequence: Synthetic oligonucleotide
ugaaaaccuuggguagguu

SEQ ID NO: 3076721 - RNA, 19 nt, Artificial Sequence
  Description of Artificial Sequence: Synthetic oligonucleotide
gcagguacguaucccagua

SEQ ID NO: 3076722 - RNA, 19 nt, Artificial Sequence
  Description of Artificial Sequence: Synthetic oligonucleotide
aucccaguaggagcggaau

SEQ ID NO: 3076723 - RNA, 19 nt, Artificial Sequence
  Description of Artificial Sequence: Synthetic oligonucleotide
aaccuuggguagguuccaa

SEQ ID NO: 3076724 - RNA, 19 nt, Artificial Sequence
  Description of Artificial Sequence: Synthetic oligonucleotide
aagcugugcugcacucugu

SEQ ID NO: 3076725 - RNA, 19 nt, Artificial Sequence
  Description of Artificial Sequence: Synthetic oligonucleotide
auuagcugaugaaggcauu

SEQ ID NO: 3076726 - RNA, 19 nt, Artificial Sequence
  Description of Artificial Sequence: Synthetic oligonucleotide
gcugugcugcacucuguug

SEQ ID NO: 3076727 - RNA, 19 nt, Artificial Sequence
  Description of Artificial Sequence: Synthetic oligonucleotide
gguaaccguuuguggucag

SEQ ID NO: 3076728 - RNA, 19 nt, Artificial Sequence
  Description of Artificial Sequence: Synthetic oligonucleotide
gugaaaaccuuggguaggu

SEQ ID NO: 3076729 - RNA, 19 nt, Artificial Sequence
  Description of Artificial Sequence: Synthetic oligonucleotide
ccaucccuugggcagguac

SEQ ID NO: 3076730 - RNA, 19 nt, Artificial Sequence
  Description of Artificial Sequence: Synthetic oligonucleotide
ccaaucuccaggaacucua

SEQ ID NO: 3076731 - RNA, 19 nt, Artificial Sequence
  Description of Artificial Sequence: Synthetic oligonucleotide
cacugccaccaaucuccag

SEQ ID NO: 3076732 - RNA, 19 nt, Artificial Sequence
  Description of Artificial Sequence: Synthetic oligonucleotide
ccugcuccauccaagccca

SEQ ID NO: 3076733 - RNA, 19 nt, Artificial Sequence
  Description of Artificial Sequence: Synthetic oligonucleotide
ccaguaggagcggaauggc

SEQ ID NO: 3076734 - RNA, 19 nt, Artificial Sequence
  Description of Artificial Sequence: Synthetic oligonucleotide
gguuccaagcugugcugca

SEQ ID NO: 3076735 - RNA, 19 nt, Artificial Sequence
  Description of Artificial Sequence: Synthetic oligonucleotide
guaucccaguaggagcgga

SEQ ID NO: 3076736 - RNA, 19 nt, Artificial Sequence
  Description of Artificial Sequence: Synthetic oligonucleotide
ccaccaaucuccaggaacu

SEQ ID NO: 3076737 - RNA, 19 nt, Artificial Sequence
  Description of Artificial Sequence: Synthetic oligonucleotide
caccaaucuccaggaacuc

SEQ ID NO: 3076738 - RNA, 19 nt, Artificial Sequence
  Description of Artificial Sequence: Synthetic oligonucleotide
gccauugaguggaggacac

SEQ ID NO: 3076739 - RNA, 19 nt, Artificial Sequence
  Description of Artificial Sequence: Synthetic oligonucleotide
gcuccauccaagcccagua

SEQ ID NO: 3076740 - RNA, 19 nt, Artificial Sequence
  Description of Artificial Sequence: Synthetic oligonucleotide
cgaauccaccacaaagauc

SEQ ID NO: 3076741 - RNA, 19 nt, Artificial Sequence
  Description of Artificial Sequence: Synthetic oligonucleotide
uaggagcggaauggcucac

SEQ ID NO: 3076742 - RNA, 19 nt, Artificial Sequence
  Description of Artificial Sequence: Synthetic oligonucleotide
ccuugggcagguacguauc

SEQ ID NO: 3076743 - RNA, 19 nt, Artificial Sequence
  Description of Artificial Sequence: Synthetic oligonucleotide
cggaauggcucacugccac

SEQ ID NO: 3076744 - RNA, 19 nt, Artificial Sequence
  Description of Artificial Sequence: Synthetic oligonucleotide
ggucagccgaauccaccac

SEQ ID NO: 3076745 - RNA, 19 nt, Artificial Sequence
  Description of Artificial Sequence: Synthetic oligonucleotide
gggcagguacguaucccag

SEQ ID NO: 3076746 - RNA, 19 nt, Artificial Sequence
  Description of Artificial Sequence: Synthetic oligonucleotide
aggagcggaauggcucacu

SEQ ID NO: 3076747 - RNA, 19 nt, Artificial Sequence
  Description of Artificial Sequence: Synthetic oligonucleotide
guguagaugcaaacuucgu

SEQ ID NO: 3076748 - RNA, 19 nt, Artificial Sequence
  Description of Artificial Sequence: Synthetic oligonucleotide
caguaggagcggaauggcu

SEQ ID NO: 3076749 - RNA, 19 nt, Artificial Sequence
  Description of Artificial Sequence: Synthetic oligonucleotide
acgaccagagggagcucug

SEQ ID NO: 3076750 - RNA, 19 nt, Artificial Sequence
  Description of Artificial Sequence: Synthetic oligonucleotide
agcccaguacuaggaucug

SEQ ID NO: 3076751 - RNA, 19 nt, Artificial Sequence
  Description of Artificial Sequence: Synthetic oligonucleotide
ggguuugguucaauuagcu

SEQ ID NO: 3076752 - RNA, 19 nt, Artificial Sequence
  Description of Artificial Sequence: Synthetic oligonucleotide
caaucuccaggaacucuau

SEQ ID NO: 3076753 - RNA, 19 nt, Artificial Sequence
  Description of Artificial Sequence: Synthetic oligonucleotide
gcccaguacuaggaucugc

SEQ ID NO: 3076754 - RNA, 19 nt, Artificial Sequence
  Description of Artificial Sequence: Synthetic oligonucleotide
gcuucagguaaccguuugu

SEQ ID NO: 3076755 - RNA, 19 nt, Artificial Sequence
  Description of Artificial Sequence: Synthetic oligonucleotide
ccacaaagaucaguagcca

SEQ ID NO: 3076756 - RNA, 19 nt, Artificial Sequence
  Description of Artificial Sequence: Synthetic oligonucleotide
cucuggguuugguucaauu

SEQ ID NO: 3076757 - RNA, 19 nt, Artificial Sequence
  Description of Artificial Sequence: Synthetic oligonucleotide
ccauccaagcccaguacua

SEQ ID NO: 3076758 - RNA, 19 nt, Artificial Sequence
  Description of Artificial Sequence: Synthetic oligonucleotide
agggagcucuggguuuggu

SEQ ID NO: 3076759 - RNA, 19 nt, Artificial Sequence
  Description of Artificial Sequence: Synthetic oligonucleotide
gaacucuaucugccuguuu

SEQ ID NO: 3076760 - RNA, 19 nt, Artificial Sequence
  Description of Artificial Sequence: Synthetic oligonucleotide
cugcuccauccaagcccag

SEQ ID NO: 3076761 - RNA, 19 nt, Artificial Sequence
  Description of Artificial Sequence: Synthetic oligonucleotide
ggcucacugccaccaaucu

SEQ ID NO: 3076762 - RNA, 19 nt, Artificial Sequence
  Description of Artificial Sequence: Synthetic oligonucleotide
ggcagguacguaucccagu

SEQ ID NO: 3076763 - RNA, 19 nt, Artificial Sequence
  Description of Artificial Sequence: Synthetic oligonucleotide
ucccuugggcagguacgua

SEQ ID NO: 3076764 - RNA, 19 nt, Artificial Sequence
  Description of Artificial Sequence: Synthetic oligonucleotide
cacgaccagagggagcucu

SEQ ID NO: 3076765 - RNA, 19 nt, Artificial Sequence
  Description of Artificial Sequence: Synthetic oligonucleotide
ggguagguuccaagcugug

SEQ ID NO: 3076766 - RNA, 19 nt, Artificial Sequence
  Description of Artificial Sequence: Synthetic oligonucleotide
agccaucccuugggcaggu

SEQ ID NO: 3076767 - RNA, 19 nt, Artificial Sequence
  Description of Artificial Sequence: Synthetic oligonucleotide
cagccgaauccaccacaaa

SEQ ID NO: 3076768 - RNA, 19 nt, Artificial Sequence
  Description of Artificial Sequence: Synthetic oligonucleotide
ccguuuguggucagccgaa

SEQ ID NO: 3076769 - RNA, 19 nt, Artificial Sequence
  Description of Artificial Sequence: Synthetic oligonucleotide
guggaggacacuggucuuu

SEQ ID NO: 3076770 - RNA, 19 nt, Artificial Sequence
  Description of Artificial Sequence: Synthetic oligonucleotide
cguaucccaguaggagcgg

SEQ ID NO: 3076771 - RNA, 19 nt, Artificial Sequence
  Description of Artificial Sequence: Synthetic oligonucleotide
gugcugcacucuguuggaa

SEQ ID NO: 3076772 - RNA, 19 nt, Artificial Sequence
  Description of Artificial Sequence: Synthetic oligonucleotide
cgaccagagggagcucugg

SEQ ID NO: 3076773 - RNA, 19 nt, Artificial Sequence
  Description of Artificial Sequence: Synthetic oligonucleotide
gcggaauggcucacugcca

SEQ ID NO: 3076774 - RNA, 19 nt, Artificial Sequence
  Description of Artificial Sequence: Synthetic oligonucleotide
ccaggaacucuaucugccu

SEQ ID NO: 3076775 - RNA, 19 nt, Artificial Sequence
  Description of Artificial Sequence: Synthetic oligonucleotide
gggagcucuggguuugguu

SEQ ID NO: 3076776 - RNA, 19 nt, Artificial Sequence
  Description of Artificial Sequence: Synthetic oligonucleotide
cccuugggcagguacguau

SEQ ID NO: 3076777 - RNA, 19 nt, Artificial Sequence
  Description of Artificial Sequence: Synthetic oligonucleotide
ggaacucuaucugccuguu

SEQ ID NO: 3076778 - RNA, 19 nt, Artificial Sequence
  Description of Artificial Sequence: Synthetic oligonucleotide
ccaagcccaguacuaggau

SEQ ID NO: 3076779 - RNA, 19 nt, Artificial Sequence
  Description of Artificial Sequence: Synthetic oligonucleotide
ccaguacuaggaucugcuu

SEQ ID NO: 3076780 - RNA, 19 nt, Artificial Sequence
  Description of Artificial Sequence: Synthetic oligonucleotide
gcacucuguuggaagccau

SEQ ID NO: 3076781 - RNA, 19 nt, Artificial Sequence
  Description of Artificial Sequence: Synthetic oligonucleotide
ccauugaguggaggacacu

SEQ ID NO: 3076782 - RNA, 19 nt, Artificial Sequence
  Description of Artificial Sequence: Synthetic oligonucleotide
cguuuguggucagccgaau

SEQ ID NO: 3076783 - RNA, 19 nt, Artificial Sequence
  Description of Artificial Sequence: Synthetic oligonucleotide
gccaucccuugggcaggua

SEQ ID NO: 3076784 - RNA, 19 nt, Artificial Sequence
  Description of Artificial Sequence: Synthetic oligonucleotide
auggaauucacuuagaccc

SEQ ID NO: 3076785 - RNA, 19 nt, Artificial Sequence
  Description of Artificial Sequence: Synthetic oligonucleotide
aaaauuuuggcacuuguac

SEQ ID NO: 3076786 - RNA, 19 nt, Artificial Sequence
  Description of Artificial Sequence: Synthetic oligonucleotide
agaaacaaaauuuuggcac

SEQ ID NO: 3076787 - RNA, 19 nt, Artificial Sequence
  Description of Artificial Sequence: Synthetic oligonucleotide
agagaaacaaaauuuuggc

SEQ ID NO: 3076788 - RNA, 19 nt, Artificial Sequence
  Description of Artificial Sequence: Synthetic oligonucleotide
aaugccagcaauaucaagc

SEQ ID NO: 3076789 - RNA, 19 nt, Artificial Sequence
  Description of Artificial Sequence: Synthetic oligonucleotide
aauaucaagcauuguaggg

SEQ ID NO: 3076790 - RNA, 19 nt, Artificial Sequence
  Description of Artificial Sequence: Synthetic oligonucleotide
aaauuuuggcacuuguacg

SEQ ID NO: 3076791 - RNA, 19 nt, Artificial Sequence
  Description of Artificial Sequence: Synthetic oligonucleotide
aaagaguauccacugagag

SEQ ID NO: 3076792 - RNA, 19 nt, Artificial Sequence
  Description of Artificial Sequence: Synthetic oligonucleotide
uguacguugaccuuaauuc

SEQ ID NO: 3076793 - RNA, 19 nt, Artificial Sequence
  Description of Artificial Sequence: Synthetic oligonucleotide
cauuguaggguaaauaucc

SEQ ID NO: 3076794 - RNA, 19 nt, Artificial Sequence
  Description of Artificial Sequence: Synthetic oligonucleotide
aagagaaacaaaauuuugg

SEQ ID NO: 3076795 - RNA, 19 nt, Artificial Sequence
  Description of Artificial Sequence: Synthetic oligonucleotide
ucugaugacagcaucaaca

SEQ ID NO: 3076796 - RNA, 19 nt, Artificial Sequence
  Description of Artificial Sequence: Synthetic oligonucleotide
aaaguggaaacaugggcac

SEQ ID NO: 3076797 - RNA, 19 nt, Artificial Sequence
  Description of Artificial Sequence: Synthetic oligonucleotide
gaugacagcaucaacaaag

SEQ ID NO: 3076798 - RNA, 19 nt, Artificial Sequence
  Description of Artificial Sequence: Synthetic oligonucleotide
acuuccauugaccaguucg

SEQ ID NO: 3076799 - RNA, 19 nt, Artificial Sequence
  Description of Artificial Sequence: Synthetic oligonucleotide
uccacugagagucugaggc

SEQ ID NO: 3076800 - RNA, 19 nt, Artificial Sequence
  Description of Artificial Sequence: Synthetic oligonucleotide
agaguauccacugagaguc

SEQ ID NO: 3076801 - RNA, 19 nt, Artificial Sequence
  Description of Artificial Sequence: Synthetic oligonucleotide
aaauauccacaagagaaac

SEQ ID NO: 3076802 - RNA, 19 nt, Artificial Sequence
  Description of Artificial Sequence: Synthetic oligonucleotide
aauuuuggcacuuguacgu

SEQ ID NO: 3076803 - RNA, 19 nt, Artificial Sequence
  Description of Artificial Sequence: Synthetic oligonucleotide
aauucacuuagacccaagg

SEQ ID NO: 3076804 - RNA, 19 nt, Artificial Sequence
  Description of Artificial Sequence: Synthetic oligonucleotide
guucguagcauguaggugg

SEQ ID NO: 3076805 - RNA, 19 nt, Artificial Sequence
  Description of Artificial Sequence: Synthetic oligonucleotide
ucaacaaagaguauccacu

SEQ ID NO: 3076806 - RNA, 19 nt, Artificial Sequence
  Description of Artificial Sequence: Synthetic oligonucleotide
aucaacaaagaguauccac

SEQ ID NO: 3076807 - RNA, 19 nt, Artificial Sequence
  Description of Artificial Sequence: Synthetic oligonucleotide
cacagaagcaccaucagag

SEQ ID NO: 3076808 - RNA, 19 nt, Artificial Sequence
  Description of Artificial Sequence: Synthetic oligonucleotide
uguaggguaaauauccaca

SEQ ID NO: 3076809 - RNA, 19 nt, Artificial Sequence
  Description of Artificial Sequence: Synthetic oligonucleotide
aaaaguggaaacaugggca

SEQ ID NO: 3076810 - RNA, 19 nt, Artificial Sequence
  Description of Artificial Sequence: Synthetic oligonucleotide
aucaaaaguggaaacaugg

SEQ ID NO: 3076811 - RNA, 19 nt, Artificial Sequence
  Description of Artificial Sequence: Synthetic oligonucleotide
ucacuuagacccaagguug

SEQ ID NO: 3076812 - RNA, 19 nt, Artificial Sequence
  Description of Artificial Sequence: Synthetic oligonucleotide
guaaauauccacaagagaa

SEQ ID NO: 3076813 - RNA, 19 nt, Artificial Sequence
  Description of Artificial Sequence: Synthetic oligonucleotide
acaaagaguauccacugag

SEQ ID NO: 3076814 - RNA, 19 nt, Artificial Sequence
  Description of Artificial Sequence: Synthetic oligonucleotide
aucagaguaggcgauauac

SEQ ID NO: 3076815 - RNA, 19 nt, Artificial Sequence
  Description of Artificial Sequence: Synthetic oligonucleotide
ugaccuuaauuccuggucc

SEQ ID NO: 3076816 - RNA, 19 nt, Artificial Sequence
  Description of Artificial Sequence: Synthetic oligonucleotide
aggguaaauauccacaaga

SEQ ID NO: 3076817 - RNA, 19 nt, Artificial Sequence
  Description of Artificial Sequence: Synthetic oligonucleotide
aggcauuugcauugcaucc

SEQ ID NO: 3076818 - RNA, 19 nt, Artificial Sequence
  Description of Artificial Sequence: Synthetic oligonucleotide
uauacuuccauugaccagu

SEQ ID NO: 3076819 - RNA, 19 nt, Artificial Sequence
  Description of Artificial Sequence: Synthetic oligonucleotide
caauaucaagcauuguagg

SEQ ID NO: 3076820 - RNA, 19 nt, Artificial Sequence
  Description of Artificial Sequence: Synthetic oligonucleotide
uucacuuagacccaagguu

SEQ ID NO: 3076821 - RNA, 19 nt, Artificial Sequence
  Description of Artificial Sequence: Synthetic oligonucleotide
uaaauauccacaagagaaa

SEQ ID NO: 3076822 - RNA, 19 nt, Artificial Sequence
  Description of Artificial Sequence: Synthetic oligonucleotide
cauggaauucacuuagacc

SEQ ID NO: 3076823 - RNA, 19 nt, Artificial Sequence
  Description of Artificial Sequence: Synthetic oligonucleotide
agcaucaacaaagaguauc

SEQ ID NO: 3076824 - RNA, 19 nt, Artificial Sequence
  Description of Artificial Sequence: Synthetic oligonucleotide
gaguaggcgauauacuucc

SEQ ID NO: 3076825 - RNA, 19 nt, Artificial Sequence
  Description of Artificial Sequence: Synthetic oligonucleotide
agcauuguaggguaaauau

SEQ ID NO: 3076826 - RNA, 19 nt, Artificial Sequence
  Description of Artificial Sequence: Synthetic oligonucleotide
uguagguggaggcauuugc

SEQ ID NO: 3076827 - RNA, 19 nt, Artificial Sequence
  Description of Artificial Sequence: Synthetic oligonucleotide
uccccaucaucaaaagugg

SEQ ID NO: 3076828 - RNA, 19 nt, Artificial Sequence
  Description of Artificial Sequence: Synthetic oligonucleotide
ugaggcagagcaaugccag

SEQ ID NO: 3076829 - RNA, 19 nt, Artificial Sequence
  Description of Artificial Sequence: Synthetic oligonucleotide
aagaguauccacugagagu

SEQ ID NO: 3076830 - RNA, 19 nt, Artificial Sequence
  Description of Artificial Sequence: Synthetic oligonucleotide
auccauggaauucacuuag

SEQ ID NO: 3076831 - RNA, 19 nt, Artificial Sequence
  Description of Artificial Sequence: Synthetic oligonucleotide
agcaauaucaagcauugua

SEQ ID NO: 3076832 - RNA, 19 nt, Artificial Sequence
  Description of Artificial Sequence: Synthetic oligonucleotide
gagaaacaaaauuuuggca

SEQ ID NO: 3076833 - RNA, 19 nt, Artificial Sequence
  Description of Artificial Sequence: Synthetic oligonucleotide
aaacaugggcacuggcuuc

SEQ ID NO: 3076834 - RNA, 19 nt, Artificial Sequence
  Description of Artificial Sequence: Synthetic oligonucleotide
agcaccaucagaguaggcg

SEQ ID NO: 3076835 - RNA, 19 nt, Artificial Sequence
  Description of Artificial Sequence: Synthetic oligonucleotide
uuagacccaagguugacgu

SEQ ID NO: 3076836 - RNA, 19 nt, Artificial Sequence
  Description of Artificial Sequence: Synthetic oligonucleotide
uugcauugcauccauggaa

SEQ ID NO: 3076837 - RNA, 19 nt, Artificial Sequence
  Description of Artificial Sequence: Synthetic oligonucleotide
uccauugaccaguucguag

SEQ ID NO: 3076838 - RNA, 19 nt, Artificial Sequence
  Description of Artificial Sequence: Synthetic oligonucleotide
ugcgcaucuguucaucugc

SEQ ID NO: 3076839 - RNA, 19 nt, Artificial Sequence
  Description of Artificial Sequence: Synthetic oligonucleotide
guccccaucaucaaaagug

SEQ ID NO: 3076840 - RNA, 19 nt, Artificial Sequence
  Description of Artificial Sequence: Synthetic oligonucleotide
acaaaauuuuggcacuugu

SEQ ID NO: 3076841 - RNA, 19 nt, Artificial Sequence
  Description of Artificial Sequence: Synthetic oligonucleotide
acagcaucaacaaagagua

SEQ ID NO: 3076842 - RNA, 19 nt, Artificial Sequence
  Description of Artificial Sequence: Synthetic oligonucleotide
aacaaagaguauccacuga

SEQ ID NO: 3076843 - RNA, 19 nt, Artificial Sequence
  Description of Artificial Sequence: Synthetic oligonucleotide
auaucaagcauuguagggu

SEQ ID NO: 3076844 - RNA, 19 nt, Artificial Sequence
  Description of Artificial Sequence: Synthetic oligonucleotide
uuugcauugcauccaugga

SEQ ID NO: 3076845 - RNA, 19 nt, Artificial Sequence
  Description of Artificial Sequence: Synthetic oligonucleotide
auauccacaagagaaacaa

SEQ ID NO: 3076846 - RNA, 19 nt, Artificial Sequence
  Description of Artificial Sequence: Synthetic oligonucleotide
auucacuuagacccaaggu

SEQ ID NO: 3076847 - RNA, 19 nt, Artificial Sequence
  Description of Artificial Sequence: Synthetic oligonucleotide
uuccugguccccaucauca

SEQ ID NO: 3076848 - RNA, 19 nt, Artificial Sequence
  Description of Artificial Sequence: Synthetic oligonucleotide
uacguugaccuuaauuccu

SEQ ID NO: 3076849 - RNA, 19 nt, Artificial Sequence
  Description of Artificial Sequence: Synthetic oligonucleotide
guacguugaccuuaauucc

SEQ ID NO: 3076850 - RNA, 19 nt, Artificial Sequence
  Description of Artificial Sequence: Synthetic oligonucleotide
uaauuccugguccccauca

SEQ ID NO: 3076851 - RNA, 19 nt, Artificial Sequence
  Description of Artificial Sequence: Synthetic oligonucleotide
ugcauugcauccauggaau

SEQ ID NO: 3076852 - RNA, 19 nt, Artificial Sequence
  Description of Artificial Sequence: Synthetic oligonucleotide
auauacuuccauugaccag

SEQ ID NO: 3076853 - RNA, 19 nt, Artificial Sequence
  Description of Artificial Sequence: Synthetic oligonucleotide
uccacaagagaaacaaaau

SEQ ID NO: 3076854 - RNA, 19 nt, Artificial Sequence
  Description of Artificial Sequence: Synthetic oligonucleotide
caacaaagaguauccacug

SEQ ID NO: 3076855 - RNA, 19 nt, Artificial Sequence
  Description of Artificial Sequence: Synthetic oligonucleotide
uaggguaaauauccacaag

SEQ ID NO: 3076856 - RNA, 19 nt, Artificial Sequence
  Description of Artificial Sequence: Synthetic oligonucleotide
guagcauguagguggaggc

SEQ ID NO: 3076857 - RNA, 19 nt, Artificial Sequence
  Description of Artificial Sequence: Synthetic oligonucleotide
gaggcauuugcauugcauc

SEQ ID NO: 3076858 - RNA, 19 nt, Artificial Sequence
  Description of Artificial Sequence: Synthetic oligonucleotide
accaguucguagcauguag

SEQ ID NO: 3076859 - RNA, 19 nt, Artificial Sequence
  Description of Artificial Sequence: Synthetic oligonucleotide
uuuggcacuuguacguuga

SEQ ID NO: 3076860 - RNA, 19 nt, Artificial Sequence
  Description of Artificial Sequence: Synthetic oligonucleotide
uugaccaguucguagcaug

SEQ ID NO: 3076861 - RNA, 19 nt, Artificial Sequence
  Description of Artificial Sequence: Synthetic oligonucleotide
aggcgauauacuuccauug

SEQ ID NO: 3076862 - RNA, 19 nt, Artificial Sequence
  Description of Artificial Sequence: Synthetic oligonucleotide
gcaauaucaagcauuguag

SEQ ID NO: 3076863 - RNA, 19 nt, Artificial Sequence
  Description of Artificial Sequence: Synthetic oligonucleotide
ucagaguaggcgauauacu

SEQ ID NO: 3076864 - RNA, 19 nt, Artificial Sequence
  Description of Artificial Sequence: Synthetic oligonucleotide
auugcauccauggaauuca

SEQ ID NO: 3076865 - RNA, 19 nt, Artificial Sequence
  Description of Artificial Sequence: Synthetic oligonucleotide
ugacagcaucaacaaagag

SEQ ID NO: 3076866 - RNA, 19 nt, Artificial Sequence
  Description of Artificial Sequence: Synthetic oligonucleotide
caucaucaaaaguggaaac

SEQ ID NO: 3076867 - RNA, 19 nt, Artificial Sequence
  Description of Artificial Sequence: Synthetic oligonucleotide
uuguaggguaaauauccac

SEQ ID NO: 3076868 - RNA, 19 nt, Artificial Sequence
  Description of Artificial Sequence: Synthetic oligonucleotide
uuguacguugaccuuaauu

SEQ ID NO: 3076869 - RNA, 19 nt, Artificial Sequence
  Description of Artificial Sequence: Synthetic oligonucleotide
aauauccacaagagaaaca

SEQ ID NO: 3076870 - RNA, 19 nt, Artificial Sequence
  Description of Artificial Sequence: Synthetic oligonucleotide
agaagcaccaucagaguag

SEQ ID NO: 3076871 - RNA, 19 nt, Artificial Sequence
  Description of Artificial Sequence: Synthetic oligonucleotide
gaaacaaaauuuuggcacu

SEQ ID NO: 3076872 - RNA, 19 nt, Artificial Sequence
  Description of Artificial Sequence: Synthetic oligonucleotide
aucaucaaaaguggaaaca

SEQ ID NO: 3076873 - RNA, 19 nt, Artificial Sequence
  Description of Artificial Sequence: Synthetic oligonucleotide
uaucaagcauuguagggua

SEQ ID NO: 3076874 - RNA, 19 nt, Artificial Sequence
  Description of Artificial Sequence: Synthetic oligonucleotide
ugcacagaagcaccaucag

SEQ ID NO: 3076875 - RNA, 19 nt, Artificial Sequence
  Description of Artificial Sequence: Synthetic oligonucleotide
gaagcaccaucagaguagg

SEQ ID NO: 3076876 - RNA, 19 nt, Artificial Sequence
  Description of Artificial Sequence: Synthetic oligonucleotide
agaguaggcgauauacuuc

SEQ ID NO: 3076877 - RNA, 19 nt, Artificial Sequence
  Description of Artificial Sequence: Synthetic oligonucleotide
augccagcaauaucaagca

SEQ ID NO: 3076878 - RNA, 19 nt, Artificial Sequence
  Description of Artificial Sequence: Synthetic oligonucleotide
uuuuggcacuuguacguug

SEQ ID NO: 3076879 - RNA, 19 nt, Artificial Sequence
  Description of Artificial Sequence: Synthetic oligonucleotide
cuuagacccaagguugacg

SEQ ID NO: 3076880 - RNA, 19 nt, Artificial Sequence
  Description of Artificial Sequence: Synthetic oligonucleotide
uggaauucacuuagaccca

SEQ ID NO: 3076881 - RNA, 19 nt, Artificial Sequence
  Description of Artificial Sequence: Synthetic oligonucleotide
gcaucuguucaucugcagg

SEQ ID NO: 3076882 - RNA, 19 nt, Artificial Sequence
  Description of Artificial Sequence: Synthetic oligonucleotide
uauccacugagagucugag

SEQ ID NO: 3076883 - RNA, 19 nt, Artificial Sequence
  Description of Artificial Sequence: Synthetic oligonucleotide
aguggaaacaugggcacug

SEQ ID NO: 3076884 - RNA, 19 nt, Artificial Sequence
  Description of Artificial Sequence: Synthetic oligonucleotide
guaggguaaauauccacaa

SEQ ID NO: 3076885 - RNA, 19 nt, Artificial Sequence
  Description of Artificial Sequence: Synthetic oligonucleotide
uuugcgcaucuguucaucu

SEQ ID NO: 3076886 - RNA, 19 nt, Artificial Sequence
  Description of Artificial Sequence: Synthetic oligonucleotide
ugaccaguucguagcaugu

SEQ ID NO: 3076887 - RNA, 19 nt, Artificial Sequence
  Description of Artificial Sequence: Synthetic oligonucleotide
gguggaggcauuugcauug

SEQ ID NO: 3076888 - RNA, 19 nt, Artificial Sequence
  Description of Artificial Sequence: Synthetic oligonucleotide
gguaaauauccacaagaga

SEQ ID NO: 3076889 - RNA, 19 nt, Artificial Sequence
  Description of Artificial Sequence: Synthetic oligonucleotide
agacccaagguugacguug

SEQ ID NO: 3076890 - RNA, 19 nt, Artificial Sequence
  Description of Artificial Sequence: Synthetic oligonucleotide
ugagggugcacagaagcac

SEQ ID NO: 3076891 - RNA, 19 nt, Artificial Sequence
  Description of Artificial Sequence: Synthetic oligonucleotide
ucugcaggugccucugaug

SEQ ID NO: 3076892 - RNA, 19 nt, Artificial Sequence
  Description of Artificial Sequence: Synthetic oligonucleotide
ggguaaauauccacaagag

SEQ ID NO: 3076893 - RNA, 19 nt, Artificial Sequence
  Description of Artificial Sequence: Synthetic oligonucleotide
gcugagggugcacagaagc

SEQ ID NO: 3076894 - RNA, 19 nt, Artificial Sequence
  Description of Artificial Sequence: Synthetic oligonucleotide
uucguagcauguaggugga

SEQ ID NO: 3076895 - RNA, 19 nt, Artificial Sequence
  Description of Artificial Sequence: Synthetic oligonucleotide
uggaaacaugggcacuggc

SEQ ID NO: 3076896 - RNA, 19 nt, Artificial Sequence
  Description of Artificial Sequence: Synthetic oligonucleotide
gcaucaacaaagaguaucc

SEQ ID NO: 3076897 - RNA, 19 nt, Artificial Sequence
  Description of Artificial Sequence: Synthetic oligonucleotide
accuuaauuccuggucccc

SEQ ID NO: 3076898 - RNA, 19 nt, Artificial Sequence
  Description of Artificial Sequence: Synthetic oligonucleotide
ccauugaccaguucguagc

SEQ ID NO: 3076899 - RNA, 19 nt, Artificial Sequence
  Description of Artificial Sequence: Synthetic oligonucleotide
uauccacaagagaaacaaa

SEQ ID NO: 3076900 - RNA, 19 nt, Artificial Sequence
  Description of Artificial Sequence: Synthetic oligonucleotide
agagcaaugccagcaauau

SEQ ID NO: 3076901 - RNA, 19 nt, Artificial Sequence
  Description of Artificial Sequence: Synthetic oligonucleotide
ugaugacagcaucaacaaa

SEQ ID NO: 3076902 - RNA, 19 nt, Artificial Sequence
  Description of Artificial Sequence: Synthetic oligonucleotide
acagaagcaccaucagagu

SEQ ID NO: 3076903 - RNA, 19 nt, Artificial Sequence
  Description of Artificial Sequence: Synthetic oligonucleotide
uaggcgauauacuuccauu

SEQ ID NO: 3076904 - RNA, 19 nt, Artificial Sequence
  Description of Artificial Sequence: Synthetic oligonucleotide
ccagcaauaucaagcauug

SEQ ID NO: 3076905 - RNA, 19 nt, Artificial Sequence
  Description of Artificial Sequence: Synthetic oligonucleotide
caaagaguauccacugaga

SEQ ID NO: 3076906 - RNA, 19 nt, Artificial Sequence
  Description of Artificial Sequence: Synthetic oligonucleotide
aacaugggcacuggcuuca

SEQ ID NO: 3076907 - RNA, 19 nt, Artificial Sequence
  Description of Artificial Sequence: Synthetic oligonucleotide
cugaugacagcaucaacaa

SEQ ID NO: 3076908 - RNA, 19 nt, Artificial Sequence
  Description of Artificial Sequence: Synthetic oligonucleotide
aauuccugguccccaucau

SEQ ID NO: 3076909 - RNA, 19 nt, Artificial Sequence
  Description of Artificial Sequence: Synthetic oligonucleotide
uuaauuccugguccccauc

SEQ ID NO: 3076910 - RNA, 19 nt, Artificial Sequence
  Description of Artificial Sequence: Synthetic oligonucleotide
uccauggaauucacuuaga

SEQ ID NO: 3076911 - RNA, 19 nt, Artificial Sequence
  Description of Artificial Sequence: Synthetic oligonucleotide
gaaacaugggcacuggcuu

SEQ ID NO: 3076912 - RNA, 19 nt, Artificial Sequence
  Description of Artificial Sequence: Synthetic oligonucleotide
cauugcauccauggaauuc

SEQ ID NO: 3076913 - RNA, 19 nt, Artificial Sequence
  Description of Artificial Sequence: Synthetic oligonucleotide
auccacugagagucugagg

SEQ ID NO: 3076914 - RNA, 19 nt, Artificial Sequence
  Description of Artificial Sequence: Synthetic oligonucleotide
aagcauuguaggguaaaua

SEQ ID NO: 3076915 - RNA, 19 nt, Artificial Sequence
  Description of Artificial Sequence: Synthetic oligonucleotide
aguucguagcauguaggug

SEQ ID NO: 3076916 - RNA, 19 nt, Artificial Sequence
  Description of Artificial Sequence: Synthetic oligonucleotide
caaugccagcaauaucaag

SEQ ID NO: 3076917 - RNA, 19 nt, Artificial Sequence
  Description of Artificial Sequence: Synthetic oligonucleotide
caaaauuuuggcacuugua

SEQ ID NO: 3076918 - RNA, 19 nt, Artificial Sequence
  Description of Artificial Sequence: Synthetic oligonucleotide
cacugagagucugaggcag

SEQ ID NO: 3076919 - RNA, 19 nt, Artificial Sequence
  Description of Artificial Sequence: Synthetic oligonucleotide
acuuagacccaagguugac

SEQ ID NO: 3076920 - RNA, 19 nt, Artificial Sequence
  Description of Artificial Sequence: Synthetic oligonucleotide
gagggugcacagaagcacc

SEQ ID NO: 3076921 - RNA, 19 nt, Artificial Sequence
  Description of Artificial Sequence: Synthetic oligonucleotide
gaauucacuuagacccaag

SEQ ID NO: 3076922 - RNA, 19 nt, Artificial Sequence
  Description of Artificial Sequence: Synthetic oligonucleotide
cugcaggugccucugauga

SEQ ID NO: 3076923 - RNA, 19 nt, Artificial Sequence
  Description of Artificial Sequence: Synthetic oligonucleotide
ugcauccauggaauucacu

SEQ ID NO: 3076924 - RNA, 19 nt, Artificial Sequence
  Description of Artificial Sequence: Synthetic oligonucleotide
gacccaagguugacguugg

SEQ ID NO: 3076925 - RNA, 19 nt, Artificial Sequence
  Description of Artificial Sequence: Synthetic oligonucleotide
uggcacuuguacguugacc

SEQ ID NO: 3076926 - RNA, 19 nt, Artificial Sequence
  Description of Artificial Sequence: Synthetic oligonucleotide
aguauccacugagagucug

SEQ ID NO: 3076927 - RNA, 19 nt, Artificial Sequence
  Description of Artificial Sequence: Synthetic oligonucleotide
ggcacuuguacguugaccu

SEQ ID NO: 3076928 - RNA, 19 nt, Artificial Sequence
  Description of Artificial Sequence: Synthetic oligonucleotide
auuguaggguaaauaucca

SEQ ID NO: 3076929 - RNA, 19 nt, Artificial Sequence
  Description of Artificial Sequence: Synthetic oligonucleotide
ccaguucguagcauguagg

SEQ ID NO: 3076930 - RNA, 19 nt, Artificial Sequence
  Description of Artificial Sequence: Synthetic oligonucleotide
augacagcaucaacaaaga

SEQ ID NO: 3076931 - RNA, 19 nt, Artificial Sequence
  Description of Artificial Sequence: Synthetic oligonucleotide
aaguggaaacaugggcacu

SEQ ID NO: 3076932 - RNA, 19 nt, Artificial Sequence
  Description of Artificial Sequence: Synthetic oligonucleotide
caucuguucaucugcaggu

SEQ ID NO: 3076933 - RNA, 19 nt, Artificial Sequence
  Description of Artificial Sequence: Synthetic oligonucleotide
aagguugacguuggguuuu

SEQ ID NO: 3076934 - RNA, 19 nt, Artificial Sequence
  Description of Artificial Sequence: Synthetic oligonucleotide
uuuugcgcaucuguucauc

SEQ ID NO: 3076935 - RNA, 19 nt, Artificial Sequence
  Description of Artificial Sequence: Synthetic oligonucleotide
uguucaucugcaggugccu

SEQ ID NO: 3076936 - RNA, 19 nt, Artificial Sequence
  Description of Artificial Sequence: Synthetic oligonucleotide
gcgauauacuuccauugac

SEQ ID NO: 3076937 - RNA, 19 nt, Artificial Sequence
  Description of Artificial Sequence: Synthetic oligonucleotide
cugaggcagagcaaugcca

SEQ ID NO: 3076938 - RNA, 19 nt, Artificial Sequence
  Description of Artificial Sequence: Synthetic oligonucleotide
uugcauccauggaauucac

SEQ ID NO: 3076939 - RNA, 19 nt, Artificial Sequence
  Description of Artificial Sequence: Synthetic oligonucleotide
gaggcagagcaaugccagc

SEQ ID NO: 3076940 - RNA, 19 nt, Artificial Sequence
  Description of Artificial Sequence: Synthetic oligonucleotide
ccauggaauucacuuagac

SEQ ID NO: 3076941 - RNA, 19 nt, Artificial Sequence
  Description of Artificial Sequence: Synthetic oligonucleotide
cucugaugacagcaucaac

SEQ ID NO: 3076942 - RNA, 19 nt, Artificial Sequence
  Description of Artificial Sequence: Synthetic oligonucleotide
cugagagucugaggcagag

SEQ ID NO: 3076943 - RNA, 19 nt, Artificial Sequence
  Description of Artificial Sequence: Synthetic oligonucleotide
gugcacagaagcaccauca

SEQ ID NO: 3076944 - RNA, 19 nt, Artificial Sequence
  Description of Artificial Sequence: Synthetic oligonucleotide
uagcauguagguggaggca

SEQ ID NO: 3076945 - RNA, 19 nt, Artificial Sequence
  Description of Artificial Sequence: Synthetic oligonucleotide
aggcagagcaaugccagca

SEQ ID NO: 3076946 - RNA, 19 nt, Artificial Sequence
  Description of Artificial Sequence: Synthetic oligonucleotide
cauuugcauugcauccaug

SEQ ID NO: 3076947 - RNA, 19 nt, Artificial Sequence
  Description of Artificial Sequence: Synthetic oligonucleotide
agcauguagguggaggcau

SEQ ID NO: 3076948 - RNA, 19 nt, Artificial Sequence
  Description of Artificial Sequence: Synthetic oligonucleotide
gagcaaugccagcaauauc

SEQ ID NO: 3076949 - RNA, 19 nt, Artificial Sequence
  Description of Artificial Sequence: Synthetic oligonucleotide
aagcaccaucagaguaggc

SEQ ID NO: 3076950 - RNA, 19 nt, Artificial Sequence
  Description of Artificial Sequence: Synthetic oligonucleotide
ggcgauauacuuccauuga

SEQ ID NO: 3076951 - RNA, 19 nt, Artificial Sequence
  Description of Artificial Sequence: Synthetic oligonucleotide
ugagagucugaggcagagc

SEQ ID NO: 3076952 - RNA, 19 nt, Artificial Sequence
  Description of Artificial Sequence: Synthetic oligonucleotide
aggugccucugaugacagc

SEQ ID NO: 3076953 - RNA, 19 nt, Artificial Sequence
  Description of Artificial Sequence: Synthetic oligonucleotide
caggugccucugaugacag

SEQ ID NO: 3076954 - RNA, 19 nt, Artificial Sequence
  Description of Artificial Sequence: Synthetic oligonucleotide
agguggaggcauuugcauu

SEQ ID NO: 3076955 - RNA, 19 nt, Artificial Sequence
  Description of Artificial Sequence: Synthetic oligonucleotide
guagguggaggcauuugca

SEQ ID NO: 3076956 - RNA, 19 nt, Artificial Sequence
  Description of Artificial Sequence: Synthetic oligonucleotide
guggaaacaugggcacugg

SEQ ID NO: 3076957 - RNA, 19 nt, Artificial Sequence
  Description of Artificial Sequence: Synthetic oligonucleotide
cauccauggaauucacuua

SEQ ID NO: 3076958 - RNA, 19 nt, Artificial Sequence
  Description of Artificial Sequence: Synthetic oligonucleotide
uuggcacuuguacguugac

SEQ ID NO: 3076959 - RNA, 19 nt, Artificial Sequence
  Description of Artificial Sequence: Synthetic oligonucleotide
ggugccucugaugacagca

SEQ ID NO: 3076960 - RNA, 19 nt, Artificial Sequence
  Description of Artificial Sequence: Synthetic oligonucleotide
cagaagcaccaucagagua

SEQ ID NO: 3076961 - RNA, 19 nt, Artificial Sequence
  Description of Artificial Sequence: Synthetic oligonucleotide
cauugaccaguucguagca

SEQ ID NO: 3076962 - RNA, 19 nt, Artificial Sequence
  Description of Artificial Sequence: Synthetic oligonucleotide
gcaccaucagaguaggcga

SEQ ID NO: 3076963 - RNA, 19 nt, Artificial Sequence
  Description of Artificial Sequence: Synthetic oligonucleotide
acguugaccuuaauuccug

SEQ ID NO: 3076964 - RNA, 19 nt, Artificial Sequence
  Description of Artificial Sequence: Synthetic oligonucleotide
cugagggugcacagaagca

SEQ ID NO: 3076965 - RNA, 19 nt, Artificial Sequence
  Description of Artificial Sequence: Synthetic oligonucleotide
uggaggcauuugcauugca

SEQ ID NO: 3076966 - RNA, 19 nt, Artificial Sequence
  Description of Artificial Sequence: Synthetic oligonucleotide
cuuccauugaccaguucgu

SEQ ID NO: 3076967 - RNA, 19 nt, Artificial Sequence
  Description of Artificial Sequence: Synthetic oligonucleotide
ugccagcaauaucaagcau

SEQ ID NO: 3076968 - RNA, 19 nt, Artificial Sequence
  Description of Artificial Sequence: Synthetic oligonucleotide
cacuuagacccaagguuga

SEQ ID NO: 3076969 - RNA, 19 nt, Artificial Sequence
  Description of Artificial Sequence: Synthetic oligonucleotide
aucugcaggugccucugau

SEQ ID NO: 3076970 - RNA, 19 nt, Artificial Sequence
  Description of Artificial Sequence: Synthetic oligonucleotide
cagaguaggcgauauacuu

SEQ ID NO: 3076971 - RNA, 19 nt, Artificial Sequence
  Description of Artificial Sequence: Synthetic oligonucleotide
ugcaggugccucugaugac

SEQ ID NO: 3076972 - RNA, 19 nt, Artificial Sequence
  Description of Artificial Sequence: Synthetic oligonucleotide
cagagcaaugccagcaaua

SEQ ID NO: 3076973 - RNA, 19 nt, Artificial Sequence
  Description of Artificial Sequence: Synthetic oligonucleotide
cguagcauguagguggagg

SEQ ID NO: 3076974 - RNA, 19 nt, Artificial Sequence
  Description of Artificial Sequence: Synthetic oligonucleotide
ggugcacagaagcaccauc

SEQ ID NO: 3076975 - RNA, 19 nt, Artificial Sequence
  Description of Artificial Sequence: Synthetic oligonucleotide
gcauuguaggguaaauauc

SEQ ID NO: 3076976 - RNA, 19 nt, Artificial Sequence
  Description of Artificial Sequence: Synthetic oligonucleotide
caucaacaaagaguaucca

SEQ ID NO: 3076977 - RNA, 19 nt, Artificial Sequence
  Description of Artificial Sequence: Synthetic oligonucleotide
uuccauugaccaguucgua

SEQ ID NO: 3076978 - RNA, 19 nt, Artificial Sequence
  Description of Artificial Sequence: Synthetic oligonucleotide
auguagguggaggcauuug

SEQ ID NO: 3076979 - RNA, 19 nt, Artificial Sequence
  Description of Artificial Sequence: Synthetic oligonucleotide
acuuguacguugaccuuaa

SEQ ID NO: 3076980 - RNA, 19 nt, Artificial Sequence
  Description of Artificial Sequence: Synthetic oligonucleotide
acccaagguugacguuggg

SEQ ID NO: 3076981 - RNA, 19 nt, Artificial Sequence
  Description of Artificial Sequence: Synthetic oligonucleotide
caguucguagcauguaggu

SEQ ID NO: 3076982 - RNA, 19 nt, Artificial Sequence
  Description of Artificial Sequence: Synthetic oligonucleotide
agucugaggcagagcaaug

SEQ ID NO: 3076983 - RNA, 19 nt, Artificial Sequence
  Description of Artificial Sequence: Synthetic oligonucleotide
uacuuccauugaccaguuc

SEQ ID NO: 3076984 - RNA, 19 nt, Artificial Sequence
  Description of Artificial Sequence: Synthetic oligonucleotide
guaggcgauauacuuccau

SEQ ID NO: 3076985 - RNA, 19 nt, Artificial Sequence
  Description of Artificial Sequence: Synthetic oligonucleotide
guauccacugagagucuga

SEQ ID NO: 3076986 - RNA, 19 nt, Artificial Sequence
  Description of Artificial Sequence: Synthetic oligonucleotide
ggcauuugcauugcaucca

SEQ ID NO: 3076987 - RNA, 19 nt, Artificial Sequence
  Description of Artificial Sequence: Synthetic oligonucleotide
ggaaacaugggcacuggcu

SEQ ID NO: 3076988 - RNA, 19 nt, Artificial Sequence
  Description of Artificial Sequence: Synthetic oligonucleotide
cccaucaucaaaaguggaa

SEQ ID NO: 3076989 - RNA, 19 nt, Artificial Sequence
  Description of Artificial Sequence: Synthetic oligonucleotide
guggaggcauuugcauugc

SEQ ID NO: 3076990 - RNA, 19 nt, Artificial Sequence
  Description of Artificial Sequence: Synthetic oligonucleotide
cuuaauuccugguccccau

SEQ ID NO: 3076991 - RNA, 19 nt, Artificial Sequence
  Description of Artificial Sequence: Synthetic oligonucleotide
cacuuguacguugaccuua

SEQ ID NO: 3076992 - RNA, 19 nt, Artificial Sequence
  Description of Artificial Sequence: Synthetic oligonucleotide
uagacccaagguugacguu

SEQ ID NO: 3076993 - RNA, 19 nt, Artificial Sequence
  Description of Artificial Sequence: Synthetic oligonucleotide
ucguagcauguagguggag

SEQ ID NO: 3076994 - RNA, 19 nt, Artificial Sequence
  Description of Artificial Sequence: Synthetic oligonucleotide
cguugaccuuaauuccugg

SEQ ID NO: 3076995 - RNA, 19 nt, Artificial Sequence
  Description of Artificial Sequence: Synthetic oligonucleotide
agcugagggugcacagaag

SEQ ID NO: 3076996 - RNA, 19 nt, Artificial Sequence
  Description of Artificial Sequence: Synthetic oligonucleotide
gcaggugccucugaugaca

SEQ ID NO: 3076997 - RNA, 19 nt, Artificial Sequence
  Description of Artificial Sequence: Synthetic oligonucleotide
acugagagucugaggcaga

SEQ ID NO: 3076998 - RNA, 19 nt, Artificial Sequence
  Description of Artificial Sequence: Synthetic oligonucleotide
agagucugaggcagagcaa

SEQ ID NO: 3076999 - RNA, 19 nt, Artificial Sequence
  Description of Artificial Sequence: Synthetic oligonucleotide
aguaggcgauauacuucca

SEQ ID NO: 3077000 - RNA, 19 nt, Artificial Sequence
  Description of Artificial Sequence: Synthetic oligonucleotide
ggaauucacuuagacccaa

SEQ ID NO: 3077001 - RNA, 19 nt, Artificial Sequence
  Description of Artificial Sequence: Synthetic oligonucleotide
ccaagguugacguuggguu

SEQ ID NO: 3077002 - RNA, 19 nt, Artificial Sequence
  Description of Artificial Sequence: Synthetic oligonucleotide
ccacaagagaaacaaaauu

SEQ ID NO: 3077003 - RNA, 19 nt, Artificial Sequence
  Description of Artificial Sequence: Synthetic oligonucleotide
caagguugacguuggguuu

SEQ ID NO: 3077004 - RNA, 19 nt, Artificial Sequence
  Description of Artificial Sequence: Synthetic oligonucleotide
accaucagaguaggcgaua

SEQ ID NO: 3077005 - RNA, 19 nt, Artificial Sequence
  Description of Artificial Sequence: Synthetic oligonucleotide
gccucugaugacagcauca

SEQ ID NO: 3077006 - RNA, 19 nt, Artificial Sequence
  Description of Artificial Sequence: Synthetic oligonucleotide
ggcagagcaaugccagcaa

SEQ ID NO: 3077007 - RNA, 19 nt, Artificial Sequence
  Description of Artificial Sequence: Synthetic oligonucleotide
gaccaguucguagcaugua

SEQ ID NO: 3077008 - RNA, 19 nt, Artificial Sequence
  Description of Artificial Sequence: Synthetic oligonucleotide
auacuuccauugaccaguu

SEQ ID NO: 3077009 - RNA, 19 nt, Artificial Sequence
  Description of Artificial Sequence: Synthetic oligonucleotide
caucagaguaggcgauaua

SEQ ID NO: 3077010 - RNA, 19 nt, Artificial Sequence
  Description of Artificial Sequence: Synthetic oligonucleotide
ccuuaauuccuggucccca

SEQ ID NO: 3077011 - RNA, 19 nt, Artificial Sequence
  Description of Artificial Sequence: Synthetic oligonucleotide
caagcauuguaggguaaau

SEQ ID NO: 3077012 - RNA, 19 nt, Artificial Sequence
  Description of Artificial Sequence: Synthetic oligonucleotide
cgcaucuguucaucugcag

SEQ ID NO: 3077013 - RNA, 19 nt, Artificial Sequence
  Description of Artificial Sequence: Synthetic oligonucleotide
gcaaugccagcaauaucaa

SEQ ID NO: 3077014 - RNA, 19 nt, Artificial Sequence
  Description of Artificial Sequence: Synthetic oligonucleotide
ccacugagagucugaggca

SEQ ID NO: 3077015 - RNA, 19 nt, Artificial Sequence
  Description of Artificial Sequence: Synthetic oligonucleotide
caccaucagaguaggcgau

SEQ ID NO: 3077016 - RNA, 19 nt, Artificial Sequence
  Description of Artificial Sequence: Synthetic oligonucleotide
gaguauccacugagagucu

SEQ ID NO: 3077017 - RNA, 19 nt, Artificial Sequence
  Description of Artificial Sequence: Synthetic oligonucleotide
caucugcaggugccucuga

SEQ ID NO: 3077018 - RNA, 19 nt, Artificial Sequence
  Description of Artificial Sequence: Synthetic oligonucleotide
ccccaucaucaaaagugga

SEQ ID NO: 3077019 - RNA, 19 nt, Artificial Sequence
  Description of Artificial Sequence: Synthetic oligonucleotide
acaugggcacuggcuucau

SEQ ID NO: 3077020 - RNA, 19 nt, Artificial Sequence
  Description of Artificial Sequence: Synthetic oligonucleotide
gcgcaucuguucaucugca

SEQ ID NO: 3077021 - RNA, 19 nt, Artificial Sequence
  Description of Artificial Sequence: Synthetic oligonucleotide
cauguagguggaggcauuu

SEQ ID NO: 3077022 - RNA, 19 nt, Artificial Sequence
  Description of Artificial Sequence: Synthetic oligonucleotide
cagcaucaacaaagaguau

SEQ ID NO: 3077023 - RNA, 19 nt, Artificial Sequence
  Description of Artificial Sequence: Synthetic oligonucleotide
cagcaauaucaagcauugu

SEQ ID NO: 3077024 - RNA, 19 nt, Artificial Sequence
  Description of Artificial Sequence: Synthetic oligonucleotide
gcauugcauccauggaauu

SEQ ID NO: 3077025 - RNA, 19 nt, Artificial Sequence
  Description of Artificial Sequence: Synthetic oligonucleotide
gugccucugaugacagcau

SEQ ID NO: 3077026 - RNA, 19 nt, Artificial Sequence
  Description of Artificial Sequence: Synthetic oligonucleotide
cuuguacguugaccuuaau

SEQ ID NO: 3077027 - RNA, 19 nt, Artificial Sequence
  Description of Artificial Sequence: Synthetic oligonucleotide
gcacuuguacguugaccuu

SEQ ID NO: 3077028 - RNA, 19 nt, Artificial Sequence
  Description of Artificial Sequence: Synthetic oligonucleotide
cccaagguugacguugggu

SEQ ID NO: 3077029 - RNA, 19 nt, Artificial Sequence
  Description of Artificial Sequence: Synthetic oligonucleotide
ccaucagaguaggcgauau

SEQ ID NO: 3077030 - RNA, 19 nt, Artificial Sequence
  Description of Artificial Sequence: Synthetic oligonucleotide
gcauguagguggaggcauu

SEQ ID NO: 3077031 - RNA, 19 nt, Artificial Sequence
  Description of Artificial Sequence: Synthetic oligonucleotide
gggugcacagaagcaccau

SEQ ID NO: 3077032 - RNA, 19 nt, Artificial Sequence
  Description of Artificial Sequence: Synthetic oligonucleotide
aauaaugauggcuauaacc

SEQ ID NO: 3077033 - RNA, 19 nt, Artificial Sequence
  Description of Artificial Sequence: Synthetic oligonucleotide
aauagaaccaaccagcgcc

SEQ ID NO: 3077034 - RNA, 19 nt, Artificial Sequence
  Description of Artificial Sequence: Synthetic oligonucleotide
ucugcugugaaccaggggc

SEQ ID NO: 3077035 - RNA, 19 nt, Artificial Sequence
  Description of Artificial Sequence: Synthetic oligonucleotide
auaaugauggcuauaaccg

SEQ ID NO: 3077036 - RNA, 19 nt, Artificial Sequence
  Description of Artificial Sequence: Synthetic oligonucleotide
aaggaccagauguagaggg

SEQ ID NO: 3077037 - RNA, 19 nt, Artificial Sequence
  Description of Artificial Sequence: Synthetic oligonucleotide
ucuguggccaaaauaauga

SEQ ID NO: 3077038 - RNA, 19 nt, Artificial Sequence
  Description of Artificial Sequence: Synthetic oligonucleotide
caugcagccuaauagaacc

SEQ ID NO: 3077039 - RNA, 19 nt, Artificial Sequence
  Description of Artificial Sequence: Synthetic oligonucleotide
agcacauuuacccacaaga

SEQ ID NO: 3077040 - RNA, 19 nt, Artificial Sequence
  Description of Artificial Sequence: Synthetic oligonucleotide
aaaauaaugauggcuauaa

SEQ ID NO: 3077041 - RNA, 19 nt, Artificial Sequence
  Description of Artificial Sequence: Synthetic oligonucleotide
aaauaaugauggcuauaac

SEQ ID NO: 3077042 - RNA, 19 nt, Artificial Sequence
  Description of Artificial Sequence: Synthetic oligonucleotide
guggccaaaauaaugaugg

SEQ ID NO: 3077043 - RNA, 19 nt, Artificial Sequence
  Description of Artificial Sequence: Synthetic oligonucleotide
uugcccuuaaucuaggccc

SEQ ID NO: 3077044 - RNA, 19 nt, Artificial Sequence
  Description of Artificial Sequence: Synthetic oligonucleotide
uaggaucacgucuuuaagg

SEQ ID NO: 3077045 - RNA, 19 nt, Artificial Sequence
  Description of Artificial Sequence: Synthetic oligonucleotide
cuaauagaaccaaccagcg

SEQ ID NO: 3077046 - RNA, 19 nt, Artificial Sequence
  Description of Artificial Sequence: Synthetic oligonucleotide
uuaaucuaggcccucgcug

SEQ ID NO: 3077047 - RNA, 19 nt, Artificial Sequence
  Description of Artificial Sequence: Synthetic oligonucleotide
agaaggaccagauguagag

SEQ ID NO: 3077048 - RNA, 19 nt, Artificial Sequence
  Description of Artificial Sequence: Synthetic oligonucleotide
aaagggcccgaccuggagc

SEQ ID NO: 3077049 - RNA, 19 nt, Artificial Sequence
  Description of Artificial Sequence: Synthetic oligonucleotide
acccacaagagguaaaggg

SEQ ID NO: 3077050 - RNA, 19 nt, Artificial Sequence
  Description of Artificial Sequence: Synthetic oligonucleotide
ggagccagaagccagaagg

SEQ ID NO: 3077051 - RNA, 19 nt, Artificial Sequence
  Description of Artificial Sequence: Synthetic oligonucleotide
aaccgcuucaucugccgcc

SEQ ID NO: 3077052 - RNA, 19 nt, Artificial Sequence
  Description of Artificial Sequence: Synthetic oligonucleotide
uuugcccuuaaucuaggcc

SEQ ID NO: 3077053 - RNA, 19 nt, Artificial Sequence
  Description of Artificial Sequence: Synthetic oligonucleotide
ugaacaauggcugucagua

SEQ ID NO: 3077054 - RNA, 19 nt, Artificial Sequence
  Description of Artificial Sequence: Synthetic oligonucleotide
ccuaauagaaccaaccagc

SEQ ID NO: 3077055 - RNA, 19 nt, Artificial Sequence
  Description of Artificial Sequence: Synthetic oligonucleotide
cacauuuacccacaagagg

SEQ ID NO: 3077056 - RNA, 19 nt, Artificial Sequence
  Description of Artificial Sequence: Synthetic oligonucleotide
acauuuacccacaagaggu

SEQ ID NO: 3077057 - RNA, 19 nt, Artificial Sequence
  Description of Artificial Sequence: Synthetic oligonucleotide
gaucacgucuuuaaggugc

SEQ ID NO: 3077058 - RNA, 19 nt, Artificial Sequence
  Description of Artificial Sequence: Synthetic oligonucleotide
uguggccaaaauaaugaug

SEQ ID NO: 3077059 - RNA, 19 nt, Artificial Sequence
  Description of Artificial Sequence: Synthetic oligonucleotide
ugucaguaggaucacgucu

SEQ ID NO: 3077060 - RNA, 19 nt, Artificial Sequence
  Description of Artificial Sequence: Synthetic oligonucleotide
uaaucuaggcccucgcugc

SEQ ID NO: 3077061 - RNA, 19 nt, Artificial Sequence
  Description of Artificial Sequence: Synthetic oligonucleotide
uuuucauugugcucuggug

SEQ ID NO: 3077062 - RNA, 19 nt, Artificial Sequence
  Description of Artificial Sequence: Synthetic oligonucleotide
aggaucacgucuuuaaggu

SEQ ID NO: 3077063 - RNA, 19 nt, Artificial Sequence
  Description of Artificial Sequence: Synthetic oligonucleotide
agagguaaagggcccgacc

SEQ ID NO: 3077064 - RNA, 19 nt, Artificial Sequence
  Description of Artificial Sequence: Synthetic oligonucleotide
uaaugauggcuauaaccgc

SEQ ID NO: 3077065 - RNA, 19 nt, Artificial Sequence
  Description of Artificial Sequence: Synthetic oligonucleotide
uaauagaaccaaccagcgc

SEQ ID NO: 3077066 - RNA, 19 nt, Artificial Sequence
  Description of Artificial Sequence: Synthetic oligonucleotide
aaugauggcuauaaccgcu

SEQ ID NO: 3077067 - RNA, 19 nt, Artificial Sequence
  Description of Artificial Sequence: Synthetic oligonucleotide
cagauguagagggagaagc

SEQ ID NO: 3077068 - RNA, 19 nt, Artificial Sequence
  Description of Artificial Sequence: Synthetic oligonucleotide
cugagcaccugaacaaugg

SEQ ID NO: 3077069 - RNA, 19 nt, Artificial Sequence
  Description of Artificial Sequence: Synthetic oligonucleotide
cagccuaauagaaccaacc

SEQ ID NO: 3077070 - RNA, 19 nt, Artificial Sequence
  Description of Artificial Sequence: Synthetic oligonucleotide
aguaggaucacgucuuuaa

SEQ ID NO: 3077071 - RNA, 19 nt, Artificial Sequence
  Description of Artificial Sequence: Synthetic oligonucleotide
gauguagagggagaagcag

SEQ ID NO: 3077072 - RNA, 19 nt, Artificial Sequence
  Description of Artificial Sequence: Synthetic oligonucleotide
auguagagggagaagcagc

SEQ ID NO: 3077073 - RNA, 19 nt, Artificial Sequence
  Description of Artificial Sequence: Synthetic oligonucleotide
uauaaccgcuucaucugcc

SEQ ID NO: 3077074 - RNA, 19 nt, Artificial Sequence
  Description of Artificial Sequence: Synthetic oligonucleotide
auaaccgcuucaucugccg

SEQ ID NO: 3077075 - RNA, 19 nt, Artificial Sequence
  Description of Artificial Sequence: Synthetic oligonucleotide
uuacccacaagagguaaag

SEQ ID NO: 3077076 - RNA, 19 nt, Artificial Sequence
  Description of Artificial Sequence: Synthetic oligonucleotide
ugugcucuggugcugggga

SEQ ID NO: 3077077 - RNA, 19 nt, Artificial Sequence
  Description of Artificial Sequence: Synthetic oligonucleotide
cagucuguggccaaaauaa

SEQ ID NO: 3077078 - RNA, 19 nt, Artificial Sequence
  Description of Artificial Sequence: Synthetic oligonucleotide
auagaaccaaccagcgccc

SEQ ID NO: 3077079 - RNA, 19 nt, Artificial Sequence
  Description of Artificial Sequence: Synthetic oligonucleotide
cuauaaccgcuucaucugc

SEQ ID NO: 3077080 - RNA, 19 nt, Artificial Sequence
  Description of Artificial Sequence: Synthetic oligonucleotide
ugagcaccugaacaauggc

SEQ ID NO: 3077081 - RNA, 19 nt, Artificial Sequence
  Description of Artificial Sequence: Synthetic oligonucleotide
guaggaucacgucuuuaag

SEQ ID NO: 3077082 - RNA, 19 nt, Artificial Sequence
  Description of Artificial Sequence: Synthetic oligonucleotide
caggcauugggccaugcag

SEQ ID NO: 3077083 - RNA, 19 nt, Artificial Sequence
  Description of Artificial Sequence: Synthetic oligonucleotide
aggcauugggccaugcagc

SEQ ID NO: 3077084 - RNA, 19 nt, Artificial Sequence
  Description of Artificial Sequence: Synthetic oligonucleotide
gaaggaccagauguagagg

SEQ ID NO: 3077085 - RNA, 19 nt, Artificial Sequence
  Description of Artificial Sequence: Synthetic oligonucleotide
cacaagagguaaagggccc

SEQ ID NO: 3077086 - RNA, 19 nt, Artificial Sequence
  Description of Artificial Sequence: Synthetic oligonucleotide
gccuaauagaaccaaccag

SEQ ID NO: 3077087 - RNA, 19 nt, Artificial Sequence
  Description of Artificial Sequence: Synthetic oligonucleotide
gaacaauggcugucaguag

SEQ ID NO: 3077088 - RNA, 19 nt, Artificial Sequence
  Description of Artificial Sequence: Synthetic oligonucleotide
agcaccugaacaauggcug

SEQ ID NO: 3077089 - RNA, 19 nt, Artificial Sequence
  Description of Artificial Sequence: Synthetic oligonucleotide
cuuuugcccuuaaucuagg

SEQ ID NO: 3077090 - RNA, 19 nt, Artificial Sequence
  Description of Artificial Sequence: Synthetic oligonucleotide
aagagguaaagggcccgac

SEQ ID NO: 3077091 - RNA, 19 nt, Artificial Sequence
  Description of Artificial Sequence: Synthetic oligonucleotide
uuuacccacaagagguaaa

SEQ ID NO: 3077092 - RNA, 19 nt, Artificial Sequence
  Description of Artificial Sequence: Synthetic oligonucleotide
gcuauaaccgcuucaucug

SEQ ID NO: 3077093 - RNA, 19 nt, Artificial Sequence
  Description of Artificial Sequence: Synthetic oligonucleotide
uaaagggcccgaccuggag

SEQ ID NO: 3077094 - RNA, 19 nt, Artificial Sequence
  Description of Artificial Sequence: Synthetic oligonucleotide
ugaaccaggggcccagcac

SEQ ID NO: 3077095 - RNA, 19 nt, Artificial Sequence
  Description of Artificial Sequence: Synthetic oligonucleotide
agcagcugagcaccugaac

SEQ ID NO: 3077096 - RNA, 19 nt, Artificial Sequence
  Description of Artificial Sequence: Synthetic oligonucleotide
uuuugcccuuaaucuaggc

SEQ ID NO: 3077097 - RNA, 19 nt, Artificial Sequence
  Description of Artificial Sequence: Synthetic oligonucleotide
ucuaggcccucgcugcucc

SEQ ID NO: 3077098 - RNA, 19 nt, Artificial Sequence
  Description of Artificial Sequence: Synthetic oligonucleotide
gcugcuuuugcccuuaauc

SEQ ID NO: 3077099 - RNA, 19 nt, Artificial Sequence
  Description of Artificial Sequence: Synthetic oligonucleotide
ugcuuuugcccuuaaucua

SEQ ID NO: 3077100 - RNA, 19 nt, Artificial Sequence
  Description of Artificial Sequence: Synthetic oligonucleotide
gaaccaggggcccagcaca

SEQ ID NO: 3077101 - RNA, 19 nt, Artificial Sequence
  Description of Artificial Sequence: Synthetic oligonucleotide
ccacaagagguaaagggcc

SEQ ID NO: 3077102 - RNA, 19 nt, Artificial Sequence
  Description of Artificial Sequence: Synthetic oligonucleotide
gauggcuauaaccgcuuca

SEQ ID NO: 3077103 - RNA, 19 nt, Artificial Sequence
  Description of Artificial Sequence: Synthetic oligonucleotide
aagccagaaggaccagaug

SEQ ID NO: 3077104 - RNA, 19 nt, Artificial Sequence
  Description of Artificial Sequence: Synthetic oligonucleotide
gggcccagcacauuuaccc

SEQ ID NO: 3077105 - RNA, 19 nt, Artificial Sequence
  Description of Artificial Sequence: Synthetic oligonucleotide
acaagagguaaagggcccg

SEQ ID NO: 3077106 - RNA, 19 nt, Artificial Sequence
  Description of Artificial Sequence: Synthetic oligonucleotide
cccacaagagguaaagggc

SEQ ID NO: 3077107 - RNA, 19 nt, Artificial Sequence
  Description of Artificial Sequence: Synthetic oligonucleotide
uccacugucugcugugaac

SEQ ID NO: 3077108 - RNA, 19 nt, Artificial Sequence
  Description of Artificial Sequence: Synthetic oligonucleotide
uaaccgcuucaucugccgc

SEQ ID NO: 3077109 - RNA, 19 nt, Artificial Sequence
  Description of Artificial Sequence: Synthetic oligonucleotide
cugcugugaaccaggggcc

SEQ ID NO: 3077110 - RNA, 19 nt, Artificial Sequence
  Description of Artificial Sequence: Synthetic oligonucleotide
aggggcccagcacauuuac

SEQ ID NO: 3077111 - RNA, 19 nt, Artificial Sequence
  Description of Artificial Sequence: Synthetic oligonucleotide
gagguaaagggcccgaccu

SEQ ID NO: 3077112 - RNA, 19 nt, Artificial Sequence
  Description of Artificial Sequence: Synthetic oligonucleotide
ccgaccuggagccagaagc

SEQ ID NO: 3077113 - RNA, 19 nt, Artificial Sequence
  Description of Artificial Sequence: Synthetic oligonucleotide
aaucuaggcccucgcugcu

SEQ ID NO: 3077114 - RNA, 19 nt, Artificial Sequence
  Description of Artificial Sequence: Synthetic oligonucleotide
uacccacaagagguaaagg

SEQ ID NO: 3077115 - RNA, 19 nt, Artificial Sequence
  Description of Artificial Sequence: Synthetic oligonucleotide
gaaccaaccagcgcccagc

SEQ ID NO: 3077116 - RNA, 19 nt, Artificial Sequence
  Description of Artificial Sequence: Synthetic oligonucleotide
uggggauccacugucugcu

SEQ ID NO: 3077117 - RNA, 19 nt, Artificial Sequence
  Description of Artificial Sequence: Synthetic oligonucleotide
uggccaaaauaaugauggc

SEQ ID NO: 3077118 - RNA, 19 nt, Artificial Sequence
  Description of Artificial Sequence: Synthetic oligonucleotide
gguaaagggcccgaccugg

SEQ ID NO: 3077119 - RNA, 19 nt, Artificial Sequence
  Description of Artificial Sequence: Synthetic oligonucleotide
ugcccuuaaucuaggcccu

SEQ ID NO: 3077120 - RNA, 19 nt, Artificial Sequence
  Description of Artificial Sequence: Synthetic oligonucleotide
cauugugcucuggugcugg

SEQ ID NO: 3077121 - RNA, 19 nt, Artificial Sequence
  Description of Artificial Sequence: Synthetic oligonucleotide
agaaccaaccagcgcccag

SEQ ID NO: 3077122 - RNA, 19 nt, Artificial Sequence
  Description of Artificial Sequence: Synthetic oligonucleotide
aaccaaccagcgcccagca

SEQ ID NO: 3077123 - RNA, 19 nt, Artificial Sequence
  Description of Artificial Sequence: Synthetic oligonucleotide
cuggggauccacugucugc

SEQ ID NO: 3077124 - RNA, 19 nt, Artificial Sequence
  Description of Artificial Sequence: Synthetic oligonucleotide
cugcuuuugcccuuaaucu

SEQ ID NO: 3077125 - RNA, 19 nt, Artificial Sequence
  Description of Artificial Sequence: Synthetic oligonucleotide
auggcuauaaccgcuucau

SEQ ID NO: 3077126 - RNA, 19 nt, Artificial Sequence
  Description of Artificial Sequence: Synthetic oligonucleotide
cugcuccaggcauugggcc

SEQ ID NO: 3077127 - RNA, 19 nt, Artificial Sequence
  Description of Artificial Sequence: Synthetic oligonucleotide
ugcuccaggcauugggcca

SEQ ID NO: 3077128 - RNA, 19 nt, Artificial Sequence
  Description of Artificial Sequence: Synthetic oligonucleotide
ggcuauaaccgcuucaucu

SEQ ID NO: 3077129 - RNA, 19 nt, Artificial Sequence
  Description of Artificial Sequence: Synthetic oligonucleotide
agguaaagggcccgaccug

SEQ ID NO: 3077130 - RNA, 19 nt, Artificial Sequence
  Description of Artificial Sequence: Synthetic oligonucleotide
acugucugcugugaaccag

SEQ ID NO: 3077131 - RNA, 19 nt, Artificial Sequence
  Description of Artificial Sequence: Synthetic oligonucleotide
agauguagagggagaagca

SEQ ID NO: 3077132 - RNA, 19 nt, Artificial Sequence
  Description of Artificial Sequence: Synthetic oligonucleotide
auugugcucuggugcuggg

SEQ ID NO: 3077133 - RNA, 19 nt, Artificial Sequence
  Description of Artificial Sequence: Synthetic oligonucleotide
cuucaucugccgccgcucc

SEQ ID NO: 3077134 - RNA, 19 nt, Artificial Sequence
  Description of Artificial Sequence: Synthetic oligonucleotide
auuuacccacaagagguaa

SEQ ID NO: 3077135 - RNA, 19 nt, Artificial Sequence
  Description of Artificial Sequence: Synthetic oligonucleotide
cugucaguaggaucacguc

SEQ ID NO: 3077136 - RNA, 19 nt, Artificial Sequence
  Description of Artificial Sequence: Synthetic oligonucleotide
ugauggcuauaaccgcuuc

SEQ ID NO: 3077137 - RNA, 19 nt, Artificial Sequence
  Description of Artificial Sequence: Synthetic oligonucleotide
ugcagccuaauagaaccaa

SEQ ID NO: 3077138 - RNA, 19 nt, Artificial Sequence
  Description of Artificial Sequence: Synthetic oligonucleotide
uugugcucuggugcugggg

SEQ ID NO: 3077139 - RNA, 19 nt, Artificial Sequence
  Description of Artificial Sequence: Synthetic oligonucleotide
ucaucugccgccgcuccug

SEQ ID NO: 3077140 - RNA, 19 nt, Artificial Sequence
  Description of Artificial Sequence: Synthetic oligonucleotide
gcuccugucggcguugucg

SEQ ID NO: 3077141 - RNA, 19 nt, Artificial Sequence
  Description of Artificial Sequence: Synthetic oligonucleotide
ugggccaugcagccuaaua

SEQ ID NO: 3077142 - RNA, 19 nt, Artificial Sequence
  Description of Artificial Sequence: Synthetic oligonucleotide
accagcgcccagcagucug

SEQ ID NO: 3077143 - RNA, 19 nt, Artificial Sequence
  Description of Artificial Sequence: Synthetic oligonucleotide
ggaccagauguagagggag

SEQ ID NO: 3077144 - RNA, 19 nt, Artificial Sequence
  Description of Artificial Sequence: Synthetic oligonucleotide
accgcuucaucugccgccg

SEQ ID NO: 3077145 - RNA, 19 nt, Artificial Sequence
  Description of Artificial Sequence: Synthetic oligonucleotide
accugaacaauggcuguca

SEQ ID NO: 3077146 - RNA, 19 nt, Artificial Sequence
  Description of Artificial Sequence: Synthetic oligonucleotide
ggcauugggccaugcagcc

SEQ ID NO: 3077147 - RNA, 19 nt, Artificial Sequence
  Description of Artificial Sequence: Synthetic oligonucleotide
uggcuauaaccgcuucauc

SEQ ID NO: 3077148 - RNA, 19 nt, Artificial Sequence
  Description of Artificial Sequence: Synthetic oligonucleotide
cagaaggaccagauguaga

SEQ ID NO: 3077149 - RNA, 19 nt, Artificial Sequence
  Description of Artificial Sequence: Synthetic oligonucleotide
accagauguagagggagaa

SEQ ID NO: 3077150 - RNA, 19 nt, Artificial Sequence
  Description of Artificial Sequence: Synthetic oligonucleotide
ucuggugcuggggauccac

SEQ ID NO: 3077151 - RNA, 19 nt, Artificial Sequence
  Description of Artificial Sequence: Synthetic oligonucleotide
ggaucacgucuuuaaggug

SEQ ID NO: 3077152 - RNA, 19 nt, Artificial Sequence
  Description of Artificial Sequence: Synthetic oligonucleotide
gagggagaagcagcugagc

SEQ ID NO: 3077153 - RNA, 19 nt, Artificial Sequence
  Description of Artificial Sequence: Synthetic oligonucleotide
ugcuggggauccacugucu

SEQ ID NO: 3077154 - RNA, 19 nt, Artificial Sequence
  Description of Artificial Sequence: Synthetic oligonucleotide
cagcacauuuacccacaag

SEQ ID NO: 3077155 - RNA, 19 nt, Artificial Sequence
  Description of Artificial Sequence: Synthetic oligonucleotide
ucaguaggaucacgucuuu

SEQ ID NO: 3077156 - RNA, 19 nt, Artificial Sequence
  Description of Artificial Sequence: Synthetic oligonucleotide
uucaucugccgccgcuccu

SEQ ID NO: 3077157 - RNA, 19 nt, Artificial Sequence
  Description of Artificial Sequence: Synthetic oligonucleotide
caaccagcgcccagcaguc

SEQ ID NO: 3077158 - RNA, 19 nt, Artificial Sequence
  Description of Artificial Sequence: Synthetic oligonucleotide
ugcugugaaccaggggccc

SEQ ID NO: 3077159 - RNA, 19 nt, Artificial Sequence
  Description of Artificial Sequence: Synthetic oligonucleotide
agaagccagaaggaccaga

SEQ ID NO: 3077160 - RNA, 19 nt, Artificial Sequence
  Description of Artificial Sequence: Synthetic oligonucleotide
ccacugucugcugugaacc

SEQ ID NO: 3077161 - RNA, 19 nt, Artificial Sequence
  Description of Artificial Sequence: Synthetic oligonucleotide
cauugggccaugcagccua

SEQ ID NO: 3077162 - RNA, 19 nt, Artificial Sequence
  Description of Artificial Sequence: Synthetic oligonucleotide
caaaauaaugauggcuaua

SEQ ID NO: 3077163 - RNA, 19 nt, Artificial Sequence
  Description of Artificial Sequence: Synthetic oligonucleotide
cauuuacccacaagaggua

SEQ ID NO: 3077164 - RNA, 19 nt, Artificial Sequence
  Description of Artificial Sequence: Synthetic oligonucleotide
gaagccagaaggaccagau

SEQ ID NO: 3077165 - RNA, 19 nt, Artificial Sequence
  Description of Artificial Sequence: Synthetic oligonucleotide
agcagucuguggccaaaau

SEQ ID NO: 3077166 - RNA, 19 nt, Artificial Sequence
  Description of Artificial Sequence: Synthetic oligonucleotide
gaccagauguagagggaga

SEQ ID NO: 3077167 - RNA, 19 nt, Artificial Sequence
  Description of Artificial Sequence: Synthetic oligonucleotide
ccaugcagccuaauagaac

SEQ ID NO: 3077168 - RNA, 19 nt, Artificial Sequence
  Description of Artificial Sequence: Synthetic oligonucleotide
cuuaaucuaggcccucgcu

SEQ ID NO: 3077169 - RNA, 19 nt, Artificial Sequence
  Description of Artificial Sequence: Synthetic oligonucleotide
gcgcccagcagucuguggc

SEQ ID NO: 3077170 - RNA, 19 nt, Artificial Sequence
  Description of Artificial Sequence: Synthetic oligonucleotide
guagagggagaagcagcug

SEQ ID NO: 3077171 - RNA, 19 nt, Artificial Sequence
  Description of Artificial Sequence: Synthetic oligonucleotide
gagcaccugaacaauggcu

SEQ ID NO: 3077172 - RNA, 19 nt, Artificial Sequence
  Description of Artificial Sequence: Synthetic oligonucleotide
agcgcccagcagucugugg

SEQ ID NO: 3077173 - RNA, 19 nt, Artificial Sequence
  Description of Artificial Sequence: Synthetic oligonucleotide
ccuuaaucuaggcccucgc

SEQ ID NO: 3077174 - RNA, 19 nt, Artificial Sequence
  Description of Artificial Sequence: Synthetic oligonucleotide
aucuaggcccucgcugcuc

SEQ ID NO: 3077175 - RNA, 19 nt, Artificial Sequence
  Description of Artificial Sequence: Synthetic oligonucleotide
accaaccagcgcccagcag

SEQ ID NO: 3077176 - RNA, 19 nt, Artificial Sequence
  Description of Artificial Sequence: Synthetic oligonucleotide
uagaaccaaccagcgccca

SEQ ID NO: 3077177 - RNA, 19 nt, Artificial Sequence
  Description of Artificial Sequence: Synthetic oligonucleotide
gauccacugucugcuguga

SEQ ID NO: 3077178 - RNA, 19 nt, Artificial Sequence
  Description of Artificial Sequence: Synthetic oligonucleotide
cugugaaccaggggcccag

SEQ ID NO: 3077179 - RNA, 19 nt, Artificial Sequence
  Description of Artificial Sequence: Synthetic oligonucleotide
cucgcugcuccaggcauug

SEQ ID NO: 3077180 - RNA, 19 nt, Artificial Sequence
  Description of Artificial Sequence: Synthetic oligonucleotide
ggccaaaauaaugauggcu

SEQ ID NO: 3077181 - RNA, 19 nt, Artificial Sequence
  Description of Artificial Sequence: Synthetic oligonucleotide
ugcucuggugcuggggauc

SEQ ID NO: 3077182 - RNA, 19 nt, Artificial Sequence
  Description of Artificial Sequence: Synthetic oligonucleotide
ugugaaccaggggcccagc

SEQ ID NO: 3077183 - RNA, 19 nt, Artificial Sequence
  Description of Artificial Sequence: Synthetic oligonucleotide
caccugaacaauggcuguc

SEQ ID NO: 3077184 - RNA, 19 nt, Artificial Sequence
  Description of Artificial Sequence: Synthetic oligonucleotide
gcagucuguggccaaaaua

SEQ ID NO: 3077185 - RNA, 19 nt, Artificial Sequence
  Description of Artificial Sequence: Synthetic oligonucleotide
gcugcuccaggcauugggc

SEQ ID NO: 3077186 - RNA, 19 nt, Artificial Sequence
  Description of Artificial Sequence: Synthetic oligonucleotide
gaccuggagccagaagcca

SEQ ID NO: 3077187 - RNA, 19 nt, Artificial Sequence
  Description of Artificial Sequence: Synthetic oligonucleotide
aggaccagauguagaggga

SEQ ID NO: 3077188 - RNA, 19 nt, Artificial Sequence
  Description of Artificial Sequence: Synthetic oligonucleotide
gcugagcaccugaacaaug

SEQ ID NO: 3077189 - RNA, 19 nt, Artificial Sequence
  Description of Artificial Sequence: Synthetic oligonucleotide
augcagccuaauagaacca

SEQ ID NO: 3077190 - RNA, 19 nt, Artificial Sequence
  Description of Artificial Sequence: Synthetic oligonucleotide
augauggcuauaaccgcuu

SEQ ID NO: 3077191 - RNA, 19 nt, Artificial Sequence
  Description of Artificial Sequence: Synthetic oligonucleotide
gugaaccaggggcccagca

SEQ ID NO: 3077192 - RNA, 19 nt, Artificial Sequence
  Description of Artificial Sequence: Synthetic oligonucleotide
gucaguaggaucacgucuu

SEQ ID NO: 3077193 - RNA, 19 nt, Artificial Sequence
  Description of Artificial Sequence: Synthetic oligonucleotide
ccugaacaauggcugucag

SEQ ID NO: 3077194 - RNA, 19 nt, Artificial Sequence
  Description of Artificial Sequence: Synthetic oligonucleotide
cacugucugcugugaacca

SEQ ID NO: 3077195 - RNA, 19 nt, Artificial Sequence
  Description of Artificial Sequence: Synthetic oligonucleotide
aucugccgccgcuccuguc

SEQ ID NO: 3077196 - RNA, 19 nt, Artificial Sequence
  Description of Artificial Sequence: Synthetic oligonucleotide
caagagguaaagggcccga

SEQ ID NO: 3077197 - RNA, 19 nt, Artificial Sequence
  Description of Artificial Sequence: Synthetic oligonucleotide
gcagccuaauagaaccaac

SEQ ID NO: 3077198 - RNA, 19 nt, Artificial Sequence
  Description of Artificial Sequence: Synthetic oligonucleotide
aaccaggggcccagcacau

SEQ ID NO: 3077199 - RNA, 19 nt, Artificial Sequence
  Description of Artificial Sequence: Synthetic oligonucleotide
cccuuaaucuaggcccucg

SEQ ID NO: 3077200 - RNA, 19 nt, Artificial Sequence
  Description of Artificial Sequence: Synthetic oligonucleotide
ccagauguagagggagaag

SEQ ID NO: 3077201 - RNA, 19 nt, Artificial Sequence
  Description of Artificial Sequence: Synthetic oligonucleotide
cuguggccaaaauaaugau

SEQ ID NO: 3077202 - RNA, 19 nt, Artificial Sequence
  Description of Artificial Sequence: Synthetic oligonucleotide
ggcccagcacauuuaccca

SEQ ID NO: 3077203 - RNA, 19 nt, Artificial Sequence
  Description of Artificial Sequence: Synthetic oligonucleotide
gcugucaguaggaucacgu

SEQ ID NO: 3077204 - RNA, 19 nt, Artificial Sequence
  Description of Artificial Sequence: Synthetic oligonucleotide
guaaagggcccgaccugga

SEQ ID NO: 3077205 - RNA, 19 nt, Artificial Sequence
  Description of Artificial Sequence: Synthetic oligonucleotide
ccaaccagcgcccagcagu

SEQ ID NO: 3077206 - RNA, 19 nt, Artificial Sequence
  Description of Artificial Sequence: Synthetic oligonucleotide
uggcugucaguaggaucac

SEQ ID NO: 3077207 - RNA, 19 nt, Artificial Sequence
  Description of Artificial Sequence: Synthetic oligonucleotide
gcucuggugcuggggaucc

SEQ ID NO: 3077208 - RNA, 19 nt, Artificial Sequence
  Description of Artificial Sequence: Synthetic oligonucleotide
cuccugucggcguugucgu

SEQ ID NO: 3077209 - RNA, 19 nt, Artificial Sequence
  Description of Artificial Sequence: Synthetic oligonucleotide
aaccagcgcccagcagucu

SEQ ID NO: 3077210 - RNA, 19 nt, Artificial Sequence
  Description of Artificial Sequence: Synthetic oligonucleotide
ucgcugcuccaggcauugg

SEQ ID NO: 3077211 - RNA, 19 nt, Artificial Sequence
  Description of Artificial Sequence: Synthetic oligonucleotide
ggugcuggggauccacugu

SEQ ID NO: 3077212 - RNA, 19 nt, Artificial Sequence
  Description of Artificial Sequence: Synthetic oligonucleotide
ccaaaauaaugauggcuau

SEQ ID NO: 3077213 - RNA, 19 nt, Artificial Sequence
  Description of Artificial Sequence: Synthetic oligonucleotide
ggggauccacugucugcug

SEQ ID NO: 3077214 - RNA, 19 nt, Artificial Sequence
  Description of Artificial Sequence: Synthetic oligonucleotide
ggcccucgcugcuccaggc

SEQ ID NO: 3077215 - RNA, 19 nt, Artificial Sequence
  Description of Artificial Sequence: Synthetic oligonucleotide
ccuggagccagaagccaga

SEQ ID NO: 3077216 - RNA, 19 nt, Artificial Sequence
  Description of Artificial Sequence: Synthetic oligonucleotide
gcuucaucugccgccgcuc

SEQ ID NO: 3077217 - RNA, 19 nt, Artificial Sequence
  Description of Artificial Sequence: Synthetic oligonucleotide
gccgccgcuccugucggcg

SEQ ID NO: 3077218 - RNA, 19 nt, Artificial Sequence
  Description of Artificial Sequence: Synthetic oligonucleotide
gcaccugaacaauggcugu

SEQ ID NO: 3077219 - RNA, 19 nt, Artificial Sequence
  Description of Artificial Sequence: Synthetic oligonucleotide
ugccgccgcuccugucggc

SEQ ID NO: 3077220 - RNA, 19 nt, Artificial Sequence
  Description of Artificial Sequence: Synthetic oligonucleotide
uccugucggcguugucguu

SEQ ID NO: 3077221 - RNA, 19 nt, Artificial Sequence
  Description of Artificial Sequence: Synthetic oligonucleotide
ggggcccagcacauuuacc

SEQ ID NO: 3077222 - RNA, 19 nt, Artificial Sequence
  Description of Artificial Sequence: Synthetic oligonucleotide
auugggccaugcagccuaa

SEQ ID NO: 3077223 - RNA, 19 nt, Artificial Sequence
  Description of Artificial Sequence: Synthetic oligonucleotide
cuggagccagaagccagaa

SEQ ID NO: 3077224 - RNA, 19 nt, Artificial Sequence
  Description of Artificial Sequence: Synthetic oligonucleotide
cuggugcuggggauccacu

SEQ ID NO: 3077225 - RNA, 19 nt, Artificial Sequence
  Description of Artificial Sequence: Synthetic oligonucleotide
caggggcccagcacauuua

SEQ ID NO: 3077226 - RNA, 19 nt, Artificial Sequence
  Description of Artificial Sequence: Synthetic oligonucleotide
cgcccagcagucuguggcc

SEQ ID NO: 3077227 - RNA, 19 nt, Artificial Sequence
  Description of Artificial Sequence: Synthetic oligonucleotide
uugggccaugcagccuaau

SEQ ID NO: 3077228 - RNA, 19 nt, Artificial Sequence
  Description of Artificial Sequence: Synthetic oligonucleotide
cagcgcccagcagucugug

SEQ ID NO: 3077229 - RNA, 19 nt, Artificial Sequence
  Description of Artificial Sequence: Synthetic oligonucleotide
gggcccgaccuggagccag

SEQ ID NO: 3077230 - RNA, 19 nt, Artificial Sequence
  Description of Artificial Sequence: Synthetic oligonucleotide
cuaggcccucgcugcucca

SEQ ID NO: 3077231 - RNA, 19 nt, Artificial Sequence
  Description of Artificial Sequence: Synthetic oligonucleotide
aggcugcuuuugcccuuaa

SEQ ID NO: 3077232 - RNA, 19 nt, Artificial Sequence
  Description of Artificial Sequence: Synthetic oligonucleotide
gcugugaaccaggggccca

SEQ ID NO: 3077233 - RNA, 19 nt, Artificial Sequence
  Description of Artificial Sequence: Synthetic oligonucleotide
cagcagucuguggccaaaa

SEQ ID NO: 3077234 - RNA, 19 nt, Artificial Sequence
  Description of Artificial Sequence: Synthetic oligonucleotide
cccgaccuggagccagaag

SEQ ID NO: 3077235 - RNA, 19 nt, Artificial Sequence
  Description of Artificial Sequence: Synthetic oligonucleotide
caauggcugucaguaggau

SEQ ID NO: 3077236 - RNA, 19 nt, Artificial Sequence
  Description of Artificial Sequence: Synthetic oligonucleotide
cuccaggcauugggccaug

SEQ ID NO: 3077237 - RNA, 19 nt, Artificial Sequence
  Description of Artificial Sequence: Synthetic oligonucleotide
gugcucuggugcuggggau

SEQ ID NO: 3077238 - RNA, 19 nt, Artificial Sequence
  Description of Artificial Sequence: Synthetic oligonucleotide
caggcugcuuuugcccuua

SEQ ID NO: 3077239 - RNA, 19 nt, Artificial Sequence
  Description of Artificial Sequence: Synthetic oligonucleotide
gcccucgcugcuccaggca

SEQ ID NO: 3077240 - RNA, 19 nt, Artificial Sequence
  Description of Artificial Sequence: Synthetic oligonucleotide
cugucggcguugucguuuu

SEQ ID NO: 3077241 - RNA, 19 nt, Artificial Sequence
  Description of Artificial Sequence: Synthetic oligonucleotide
accaggggcccagcacauu

SEQ ID NO: 3077242 - RNA, 19 nt, Artificial Sequence
  Description of Artificial Sequence: Synthetic oligonucleotide
caucugccgccgcuccugu

SEQ ID NO: 3077243 - RNA, 19 nt, Artificial Sequence
  Description of Artificial Sequence: Synthetic oligonucleotide
agggcccgaccuggagcca

SEQ ID NO: 3077244 - RNA, 19 nt, Artificial Sequence
  Description of Artificial Sequence: Synthetic oligonucleotide
gccgcuccugucggcguug

SEQ ID NO: 3077245 - RNA, 19 nt, Artificial Sequence
  Description of Artificial Sequence: Synthetic oligonucleotide
gcccuuaaucuaggcccuc

SEQ ID NO: 3077246 - RNA, 19 nt, Artificial Sequence
  Description of Artificial Sequence: Synthetic oligonucleotide
ggcugcuuuugcccuuaau

SEQ ID NO: 3077247 - RNA, 19 nt, Artificial Sequence
  Description of Artificial Sequence: Synthetic oligonucleotide
cucuggugcuggggaucca

SEQ ID NO: 3077248 - RNA, 19 nt, Artificial Sequence
  Description of Artificial Sequence: Synthetic oligonucleotide
ccaggggcccagcacauuu

SEQ ID NO: 3077249 - RNA, 19 nt, Artificial Sequence
  Description of Artificial Sequence: Synthetic oligonucleotide
gcuccaggcauugggccau

SEQ ID NO: 3077250 - RNA, 19 nt, Artificial Sequence
  Description of Artificial Sequence: Synthetic oligonucleotide
ccgcuucaucugccgccgc

SEQ ID NO: 3077251 - RNA, 19 nt, Artificial Sequence
  Description of Artificial Sequence: Synthetic oligonucleotide
ccagcagucuguggccaaa

SEQ ID NO: 3077252 - RNA, 19 nt, Artificial Sequence
  Description of Artificial Sequence: Synthetic oligonucleotide
cccagcagucuguggccaa

SEQ ID NO: 3077253 - RNA, 19 nt, Artificial Sequence
  Description of Artificial Sequence: Synthetic oligonucleotide
ccagcgcccagcagucugu

SEQ ID NO: 3077254 - RNA, 19 nt, Artificial Sequence
  Description of Artificial Sequence: Synthetic oligonucleotide
ccugucggcguugucguuu

SEQ ID NO: 3077255 - RNA, 19 nt, Artificial Sequence
  Description of Artificial Sequence: Synthetic oligonucleotide
ggcccgaccuggagccaga

SEQ ID NO: 3077256 - RNA, 19 nt, Artificial Sequence
  Description of Artificial Sequence: Synthetic oligonucleotide
cccucgcugcuccaggcau

SEQ ID NO: 3077257 - RNA, 19 nt, Artificial Sequence
  Description of Artificial Sequence: Synthetic oligonucleotide
gcccgaccuggagccagaa

SEQ ID NO: 3077258 - RNA, 19 nt, Artificial Sequence
  Description of Artificial Sequence: Synthetic oligonucleotide
cgcuccugucggcguuguc

SEQ ID NO: 3077259 - RNA, 19 nt, Artificial Sequence
  Description of Artificial Sequence: Synthetic oligonucleotide
ccgccgcuccugucggcgu

SEQ ID NO: 3077260 - RNA, 19 nt, Artificial Sequence
  Description of Artificial Sequence: Synthetic oligonucleotide
ccgcuccugucggcguugu

SEQ ID NO: 3077261 - RNA, 19 nt, Artificial Sequence
  Description of Artificial Sequence: Synthetic oligonucleotide
cgccgcuccugucggcguu

SEQ ID NO: 3077262 - RNA, 19 nt, Artificial Sequence
  Description of Artificial Sequence: Synthetic oligonucleotide
aaacauuucucauaaauuc

SEQ ID NO: 3077263 - RNA, 19 nt, Artificial Sequence
  Description of Artificial Sequence: Synthetic oligonucleotide
aaaacuaaaacauuucuca

SEQ ID NO: 3077264 - RNA, 19 nt, Artificial Sequence
  Description of Artificial Sequence: Synthetic oligonucleotide
auuacaauggcgcugaugg

SEQ ID NO: 3077265 - RNA, 19 nt, Artificial Sequence
  Description of Artificial Sequence: Synthetic oligonucleotide
aauaucucauucuacaauc

SEQ ID NO: 3077266 - RNA, 19 nt, Artificial Sequence
  Description of Artificial Sequence: Synthetic oligonucleotide
aagagcaagaauuacaaug

SEQ ID NO: 3077267 - RNA, 19 nt, Artificial Sequence
  Description of Artificial Sequence: Synthetic oligonucleotide
auuagaaaauaucucauuc

SEQ ID NO: 3077268 - RNA, 19 nt, Artificial Sequence
  Description of Artificial Sequence: Synthetic oligonucleotide
aaauucacaacucagucca

SEQ ID NO: 3077269 - RNA, 19 nt, Artificial Sequence
  Description of Artificial Sequence: Synthetic oligonucleotide
aauagagagaggguaagcc

SEQ ID NO: 3077270 - RNA, 19 nt, Artificial Sequence
  Description of Artificial Sequence: Synthetic oligonucleotide
auaaauucacaacucaguc

SEQ ID NO: 3077271 - RNA, 19 nt, Artificial Sequence
  Description of Artificial Sequence: Synthetic oligonucleotide
uucucauaaauucacaacu

SEQ ID NO: 3077272 - RNA, 19 nt, Artificial Sequence
  Description of Artificial Sequence: Synthetic oligonucleotide
aaacaaugcauguauauaa

SEQ ID NO: 3077273 - RNA, 19 nt, Artificial Sequence
  Description of Artificial Sequence: Synthetic oligonucleotide
aaugcauguauauaagaga

SEQ ID NO: 3077274 - RNA, 19 nt, Artificial Sequence
  Description of Artificial Sequence: Synthetic oligonucleotide
ucuacaaucucucuguacu

SEQ ID NO: 3077275 - RNA, 19 nt, Artificial Sequence
  Description of Artificial Sequence: Synthetic oligonucleotide
uccauuagaaaauaucuca

SEQ ID NO: 3077276 - RNA, 19 nt, Artificial Sequence
  Description of Artificial Sequence: Synthetic oligonucleotide
ucauaaauucacaacucag

SEQ ID NO: 3077277 - RNA, 19 nt, Artificial Sequence
  Description of Artificial Sequence: Synthetic oligonucleotide
aaaacgccauaauaaacag

SEQ ID NO: 3077278 - RNA, 19 nt, Artificial Sequence
  Description of Artificial Sequence: Synthetic oligonucleotide
gaaaauaucucauucuaca

SEQ ID NO: 3077279 - RNA, 19 nt, Artificial Sequence
  Description of Artificial Sequence: Synthetic oligonucleotide
aaauaagaaacaaugcaug

SEQ ID NO: 3077280 - RNA, 19 nt, Artificial Sequence
  Description of Artificial Sequence: Synthetic oligonucleotide
aacucaguccauuagaaaa

SEQ ID NO: 3077281 - RNA, 19 nt, Artificial Sequence
  Description of Artificial Sequence: Synthetic oligonucleotide
auagagagaggguaagccc

SEQ ID NO: 3077282 - RNA, 19 nt, Artificial Sequence
  Description of Artificial Sequence: Synthetic oligonucleotide
aaaauaagaaacaaugcau

SEQ ID NO: 3077283 - RNA, 19 nt, Artificial Sequence
  Description of Artificial Sequence: Synthetic oligonucleotide
uaagaaacaaugcauguau

SEQ ID NO: 3077284 - RNA, 19 nt, Artificial Sequence
  Description of Artificial Sequence: Synthetic oligonucleotide
cuauauuucuguuugggug

SEQ ID NO: 3077285 - RNA, 19 nt, Artificial Sequence
  Description of Artificial Sequence: Synthetic oligonucleotide
acuaaaacauuucucauaa

SEQ ID NO: 3077286 - RNA, 19 nt, Artificial Sequence
  Description of Artificial Sequence: Synthetic oligonucleotide
uuagaaaauaucucauucu

SEQ ID NO: 3077287 - RNA, 19 nt, Artificial Sequence
  Description of Artificial Sequence: Synthetic oligonucleotide
uauauuucuguuuggguga

SEQ ID NO: 3077288 - RNA, 19 nt, Artificial Sequence
  Description of Artificial Sequence: Synthetic oligonucleotide
uaaauucacaacucagucc

SEQ ID NO: 3077289 - RNA, 19 nt, Artificial Sequence
  Description of Artificial Sequence: Synthetic oligonucleotide
caaugcauguauauaagag

SEQ ID NO: 3077290 - RNA, 19 nt, Artificial Sequence
  Description of Artificial Sequence: Synthetic oligonucleotide
aaauaucucauucuacaau

SEQ ID NO: 3077291 - RNA, 19 nt, Artificial Sequence
  Description of Artificial Sequence: Synthetic oligonucleotide
agagcaagaauuacaaugg

SEQ ID NO: 3077292 - RNA, 19 nt, Artificial Sequence
  Description of Artificial Sequence: Synthetic oligonucleotide
aaaauaucucauucuacaa

SEQ ID NO: 3077293 - RNA, 19 nt, Artificial Sequence
  Description of Artificial Sequence: Synthetic oligonucleotide
acucacuucaagucaaagg

SEQ ID NO: 3077294 - RNA, 19 nt, Artificial Sequence
  Description of Artificial Sequence: Synthetic oligonucleotide
augcauguauauaagagac

SEQ ID NO: 3077295 - RNA, 19 nt, Artificial Sequence
  Description of Artificial Sequence: Synthetic oligonucleotide
aaauagagagaggguaagc

SEQ ID NO: 3077296 - RNA, 19 nt, Artificial Sequence
  Description of Artificial Sequence: Synthetic oligonucleotide
ucauucuacaaucucucug

SEQ ID NO: 3077297 - RNA, 19 nt, Artificial Sequence
  Description of Artificial Sequence: Synthetic oligonucleotide
uucuauauuucuguuuggg

SEQ ID NO: 3077298 - RNA, 19 nt, Artificial Sequence
  Description of Artificial Sequence: Synthetic oligonucleotide
gauaaaauacucugaauua

SEQ ID NO: 3077299 - RNA, 19 nt, Artificial Sequence
  Description of Artificial Sequence: Synthetic oligonucleotide
ugugcuucuauauuucugu

SEQ ID NO: 3077300 - RNA, 19 nt, Artificial Sequence
  Description of Artificial Sequence: Synthetic oligonucleotide
ugauuuuccaucaguuuca

SEQ ID NO: 3077301 - RNA, 19 nt, Artificial Sequence
  Description of Artificial Sequence: Synthetic oligonucleotide
aaaacaaucccaaggagaa

SEQ ID NO: 3077302 - RNA, 19 nt, Artificial Sequence
  Description of Artificial Sequence: Synthetic oligonucleotide
agaggguaagcccagaaca

SEQ ID NO: 3077303 - RNA, 19 nt, Artificial Sequence
  Description of Artificial Sequence: Synthetic oligonucleotide
uuuacuuggugagaaaaca

SEQ ID NO: 3077304 - RNA, 19 nt, Artificial Sequence
  Description of Artificial Sequence: Synthetic oligonucleotide
aaaauagagagaggguaag

SEQ ID NO: 3077305 - RNA, 19 nt, Artificial Sequence
  Description of Artificial Sequence: Synthetic oligonucleotide
auggggauaaaauacucug

SEQ ID NO: 3077306 - RNA, 19 nt, Artificial Sequence
  Description of Artificial Sequence: Synthetic oligonucleotide
agagacauuucuuuacuug

SEQ ID NO: 3077307 - RNA, 19 nt, Artificial Sequence
  Description of Artificial Sequence: Synthetic oligonucleotide
uuucucauaaauucacaac

SEQ ID NO: 3077308 - RNA, 19 nt, Artificial Sequence
  Description of Artificial Sequence: Synthetic oligonucleotide
aacuaaaacauuucucaua

SEQ ID NO: 3077309 - RNA, 19 nt, Artificial Sequence
  Description of Artificial Sequence: Synthetic oligonucleotide
uauauaagagacauuucuu

SEQ ID NO: 3077310 - RNA, 19 nt, Artificial Sequence
  Description of Artificial Sequence: Synthetic oligonucleotide
cauuucuuuacuuggugag

SEQ ID NO: 3077311 - RNA, 19 nt, Artificial Sequence
  Description of Artificial Sequence: Synthetic oligonucleotide
aaucucucuguacugauuu

SEQ ID NO: 3077312 - RNA, 19 nt, Artificial Sequence
  Description of Artificial Sequence: Synthetic oligonucleotide
aaacuaaaacauuucucau

SEQ ID NO: 3077313 - RNA, 19 nt, Artificial Sequence
  Description of Artificial Sequence: Synthetic oligonucleotide
aacgccauaauaaacagua

SEQ ID NO: 3077314 - RNA, 19 nt, Artificial Sequence
  Description of Artificial Sequence: Synthetic oligonucleotide
auguauauaagagacauuu

SEQ ID NO: 3077315 - RNA, 19 nt, Artificial Sequence
  Description of Artificial Sequence: Synthetic oligonucleotide
uaagagacauuucuuuacu

SEQ ID NO: 3077316 - RNA, 19 nt, Artificial Sequence
  Description of Artificial Sequence: Synthetic oligonucleotide
auauaagagacauuucuuu

SEQ ID NO: 3077317 - RNA, 19 nt, Artificial Sequence
  Description of Artificial Sequence: Synthetic oligonucleotide
uagagagaggguaagccca

SEQ ID NO: 3077318 - RNA, 19 nt, Artificial Sequence
  Description of Artificial Sequence: Synthetic oligonucleotide
acauuucucauaaauucac

SEQ ID NO: 3077319 - RNA, 19 nt, Artificial Sequence
  Description of Artificial Sequence: Synthetic oligonucleotide
aguccauuagaaaauaucu

SEQ ID NO: 3077320 - RNA, 19 nt, Artificial Sequence
  Description of Artificial Sequence: Synthetic oligonucleotide
agaaaauaucucauucuac

SEQ ID NO: 3077321 - RNA, 19 nt, Artificial Sequence
  Description of Artificial Sequence: Synthetic oligonucleotide
auuucucauaaauucacaa

SEQ ID NO: 3077322 - RNA, 19 nt, Artificial Sequence
  Description of Artificial Sequence: Synthetic oligonucleotide
ucuauauuucuguuugggu

SEQ ID NO: 3077323 - RNA, 19 nt, Artificial Sequence
  Description of Artificial Sequence: Synthetic oligonucleotide
aagaauuacaauggcgcug

SEQ ID NO: 3077324 - RNA, 19 nt, Artificial Sequence
  Description of Artificial Sequence: Synthetic oligonucleotide
ucucauaaauucacaacuc

SEQ ID NO: 3077325 - RNA, 19 nt, Artificial Sequence
  Description of Artificial Sequence: Synthetic oligonucleotide
agaaacaaugcauguauau

SEQ ID NO: 3077326 - RNA, 19 nt, Artificial Sequence
  Description of Artificial Sequence: Synthetic oligonucleotide
uauaagagacauuucuuua

SEQ ID NO: 3077327 - RNA, 19 nt, Artificial Sequence
  Description of Artificial Sequence: Synthetic oligonucleotide
aguuucaucgugcugugcu

SEQ ID NO: 3077328 - RNA, 19 nt, Artificial Sequence
  Description of Artificial Sequence: Synthetic oligonucleotide
guauauaagagacauuucu

SEQ ID NO: 3077329 - RNA, 19 nt, Artificial Sequence
  Description of Artificial Sequence: Synthetic oligonucleotide
aacaaugcauguauauaag

SEQ ID NO: 3077330 - RNA, 19 nt, Artificial Sequence
  Description of Artificial Sequence: Synthetic oligonucleotide
aacauuucucauaaauuca

SEQ ID NO: 3077331 - RNA, 19 nt, Artificial Sequence
  Description of Artificial Sequence: Synthetic oligonucleotide
aucaguuucaucgugcugu

SEQ ID NO: 3077332 - RNA, 19 nt, Artificial Sequence
  Description of Artificial Sequence: Synthetic oligonucleotide
ucucauucuacaaucucuc

SEQ ID NO: 3077333 - RNA, 19 nt, Artificial Sequence
  Description of Artificial Sequence: Synthetic oligonucleotide
uucaagucaaaggugacaa

SEQ ID NO: 3077334 - RNA, 19 nt, Artificial Sequence
  Description of Artificial Sequence: Synthetic oligonucleotide
uguacugauuuuccaucag

SEQ ID NO: 3077335 - RNA, 19 nt, Artificial Sequence
  Description of Artificial Sequence: Synthetic oligonucleotide
agcaagaauuacaauggcg

SEQ ID NO: 3077336 - RNA, 19 nt, Artificial Sequence
  Description of Artificial Sequence: Synthetic oligonucleotide
uguauauaagagacauuuc

SEQ ID NO: 3077337 - RNA, 19 nt, Artificial Sequence
  Description of Artificial Sequence: Synthetic oligonucleotide
uccaucaguuucaucgugc

SEQ ID NO: 3077338 - RNA, 19 nt, Artificial Sequence
  Description of Artificial Sequence: Synthetic oligonucleotide
acaaugcauguauauaaga

SEQ ID NO: 3077339 - RNA, 19 nt, Artificial Sequence
  Description of Artificial Sequence: Synthetic oligonucleotide
aaaauacucugaauuaaaa

SEQ ID NO: 3077340 - RNA, 19 nt, Artificial Sequence
  Description of Artificial Sequence: Synthetic oligonucleotide
uacuuggugagaaaacaaa

SEQ ID NO: 3077341 - RNA, 19 nt, Artificial Sequence
  Description of Artificial Sequence: Synthetic oligonucleotide
gcaagaauuacaauggcgc

SEQ ID NO: 3077342 - RNA, 19 nt, Artificial Sequence
  Description of Artificial Sequence: Synthetic oligonucleotide
uuacuuggugagaaaacaa

SEQ ID NO: 3077343 - RNA, 19 nt, Artificial Sequence
  Description of Artificial Sequence: Synthetic oligonucleotide
acauuucuuuacuugguga

SEQ ID NO: 3077344 - RNA, 19 nt, Artificial Sequence
  Description of Artificial Sequence: Synthetic oligonucleotide
cuuuacuuggugagaaaac

SEQ ID NO: 3077345 - RNA, 19 nt, Artificial Sequence
  Description of Artificial Sequence: Synthetic oligonucleotide
ucacaacucaguccauuag

SEQ ID NO: 3077346 - RNA, 19 nt, Artificial Sequence
  Description of Artificial Sequence: Synthetic oligonucleotide
auaaaauacucugaauuaa

SEQ ID NO: 3077347 - RNA, 19 nt, Artificial Sequence
  Description of Artificial Sequence: Synthetic oligonucleotide
uggggauaaaauacucuga

SEQ ID NO: 3077348 - RNA, 19 nt, Artificial Sequence
  Description of Artificial Sequence: Synthetic oligonucleotide
ucuuuacuuggugagaaaa

SEQ ID NO: 3077349 - RNA, 19 nt, Artificial Sequence
  Description of Artificial Sequence: Synthetic oligonucleotide
aauuacaauggcgcugaug

SEQ ID NO: 3077350 - RNA, 19 nt, Artificial Sequence
  Description of Artificial Sequence: Synthetic oligonucleotide
ugcauguauauaagagaca

SEQ ID NO: 3077351 - RNA, 19 nt, Artificial Sequence
  Description of Artificial Sequence: Synthetic oligonucleotide
agaauuacaauggcgcuga

SEQ ID NO: 3077352 - RNA, 19 nt, Artificial Sequence
  Description of Artificial Sequence: Synthetic oligonucleotide
uaucucauucuacaaucuc

SEQ ID NO: 3077353 - RNA, 19 nt, Artificial Sequence
  Description of Artificial Sequence: Synthetic oligonucleotide
caguccauuagaaaauauc

SEQ ID NO: 3077354 - RNA, 19 nt, Artificial Sequence
  Description of Artificial Sequence: Synthetic oligonucleotide
ugauggggauaaaauacuc

SEQ ID NO: 3077355 - RNA, 19 nt, Artificial Sequence
  Description of Artificial Sequence: Synthetic oligonucleotide
cauaacucacuucaaguca

SEQ ID NO: 3077356 - RNA, 19 nt, Artificial Sequence
  Description of Artificial Sequence: Synthetic oligonucleotide
uuucuuuacuuggugagaa

SEQ ID NO: 3077357 - RNA, 19 nt, Artificial Sequence
  Description of Artificial Sequence: Synthetic oligonucleotide
cuucuauauuucuguuugg

SEQ ID NO: 3077358 - RNA, 19 nt, Artificial Sequence
  Description of Artificial Sequence: Synthetic oligonucleotide
agaagagcaagaauuacaa

SEQ ID NO: 3077359 - RNA, 19 nt, Artificial Sequence
  Description of Artificial Sequence: Synthetic oligonucleotide
cucacuucaagucaaaggu

SEQ ID NO: 3077360 - RNA, 19 nt, Artificial Sequence
  Description of Artificial Sequence: Synthetic oligonucleotide
gagaagagcaagaauuaca

SEQ ID NO: 3077361 - RNA, 19 nt, Artificial Sequence
  Description of Artificial Sequence: Synthetic oligonucleotide
aacucacuucaagucaaag

SEQ ID NO: 3077362 - RNA, 19 nt, Artificial Sequence
  Description of Artificial Sequence: Synthetic oligonucleotide
cacuucaagucaaagguga

SEQ ID NO: 3077363 - RNA, 19 nt, Artificial Sequence
  Description of Artificial Sequence: Synthetic oligonucleotide
gagcaagaauuacaauggc

SEQ ID NO: 3077364 - RNA, 19 nt, Artificial Sequence
  Description of Artificial Sequence: Synthetic oligonucleotide
cucauaaauucacaacuca

SEQ ID NO: 3077365 - RNA, 19 nt, Artificial Sequence
  Description of Artificial Sequence: Synthetic oligonucleotide
uuuccaucaguuucaucgu

SEQ ID NO: 3077366 - RNA, 19 nt, Artificial Sequence
  Description of Artificial Sequence: Synthetic oligonucleotide
uuacaauggcgcugauggg

SEQ ID NO: 3077367 - RNA, 19 nt, Artificial Sequence
  Description of Artificial Sequence: Synthetic oligonucleotide
aagagacauuucuuuacuu

SEQ ID NO: 3077368 - RNA, 19 nt, Artificial Sequence
  Description of Artificial Sequence: Synthetic oligonucleotide
uucuacaaucucucuguac

SEQ ID NO: 3077369 - RNA, 19 nt, Artificial Sequence
  Description of Artificial Sequence: Synthetic oligonucleotide
cauaaauucacaacucagu

SEQ ID NO: 3077370 - RNA, 19 nt, Artificial Sequence
  Description of Artificial Sequence: Synthetic oligonucleotide
ggauaaaauacucugaauu

SEQ ID NO: 3077371 - RNA, 19 nt, Artificial Sequence
  Description of Artificial Sequence: Synthetic oligonucleotide
uacaaucucucuguacuga

SEQ ID NO: 3077372 - RNA, 19 nt, Artificial Sequence
  Description of Artificial Sequence: Synthetic oligonucleotide
uucacaacucaguccauua

SEQ ID NO: 3077373 - RNA, 19 nt, Artificial Sequence
  Description of Artificial Sequence: Synthetic oligonucleotide
gaaacaaugcauguauaua

SEQ ID NO: 3077374 - RNA, 19 nt, Artificial Sequence
  Description of Artificial Sequence: Synthetic oligonucleotide
aaacaaucccaaggagaag

SEQ ID NO: 3077375 - RNA, 19 nt, Artificial Sequence
  Description of Artificial Sequence: Synthetic oligonucleotide
gcugauggggauaaaauac

SEQ ID NO: 3077376 - RNA, 19 nt, Artificial Sequence
  Description of Artificial Sequence: Synthetic oligonucleotide
gagaggguaagcccagaac

SEQ ID NO: 3077377 - RNA, 19 nt, Artificial Sequence
  Description of Artificial Sequence: Synthetic oligonucleotide
auuucuguuugggugaaaa

SEQ ID NO: 3077378 - RNA, 19 nt, Artificial Sequence
  Description of Artificial Sequence: Synthetic oligonucleotide
ucaguccauuagaaaauau

SEQ ID NO: 3077379 - RNA, 19 nt, Artificial Sequence
  Description of Artificial Sequence: Synthetic oligonucleotide
cugugcuucuauauuucug

SEQ ID NO: 3077380 - RNA, 19 nt, Artificial Sequence
  Description of Artificial Sequence: Synthetic oligonucleotide
ucaguuucaucgugcugug

SEQ ID NO: 3077381 - RNA, 19 nt, Artificial Sequence
  Description of Artificial Sequence: Synthetic oligonucleotide
cauucuacaaucucucugu

SEQ ID NO: 3077382 - RNA, 19 nt, Artificial Sequence
  Description of Artificial Sequence: Synthetic oligonucleotide
ugcugugcuucuauauuuc

SEQ ID NO: 3077383 - RNA, 19 nt, Artificial Sequence
  Description of Artificial Sequence: Synthetic oligonucleotide
acuucaagucaaaggugac

SEQ ID NO: 3077384 - RNA, 19 nt, Artificial Sequence
  Description of Artificial Sequence: Synthetic oligonucleotide
ucccaaggagaagagcaag

SEQ ID NO: 3077385 - RNA, 19 nt, Artificial Sequence
  Description of Artificial Sequence: Synthetic oligonucleotide
cauuucucauaaauucaca

SEQ ID NO: 3077386 - RNA, 19 nt, Artificial Sequence
  Description of Artificial Sequence: Synthetic oligonucleotide
caagucaaaggugacaaaa

SEQ ID NO: 3077387 - RNA, 19 nt, Artificial Sequence
  Description of Artificial Sequence: Synthetic oligonucleotide
aaacgccauaauaaacagu

SEQ ID NO: 3077388 - RNA, 19 nt, Artificial Sequence
  Description of Artificial Sequence: Synthetic oligonucleotide
auuucuuuacuuggugaga

SEQ ID NO: 3077389 - RNA, 19 nt, Artificial Sequence
  Description of Artificial Sequence: Synthetic oligonucleotide
auaacucacuucaagucaa

SEQ ID NO: 3077390 - RNA, 19 nt, Artificial Sequence
  Description of Artificial Sequence: Synthetic oligonucleotide
acuuggugagaaaacaaaa

SEQ ID NO: 3077391 - RNA, 19 nt, Artificial Sequence
  Description of Artificial Sequence: Synthetic oligonucleotide
acaaucucucuguacugau

SEQ ID NO: 3077392 - RNA, 19 nt, Artificial Sequence
  Description of Artificial Sequence: Synthetic oligonucleotide
cacaacucaguccauuaga

SEQ ID NO: 3077393 - RNA, 19 nt, Artificial Sequence
  Description of Artificial Sequence: Synthetic oligonucleotide
gccauaauaaacaguaaga

SEQ ID NO: 3077394 - RNA, 19 nt, Artificial Sequence
  Description of Artificial Sequence: Synthetic oligonucleotide
ccauaacucacuucaaguc

SEQ ID NO: 3077395 - RNA, 19 nt, Artificial Sequence
  Description of Artificial Sequence: Synthetic oligonucleotide
guccauuagaaaauaucuc

SEQ ID NO: 3077396 - RNA, 19 nt, Artificial Sequence
  Description of Artificial Sequence: Synthetic oligonucleotide
gaggguaagcccagaacac

SEQ ID NO: 3077397 - RNA, 19 nt, Artificial Sequence
  Description of Artificial Sequence: Synthetic oligonucleotide
auaucucauucuacaaucu

SEQ ID NO: 3077398 - RNA, 19 nt, Artificial Sequence
  Description of Artificial Sequence: Synthetic oligonucleotide
cuguacugauuuuccauca

SEQ ID NO: 3077399 - RNA, 19 nt, Artificial Sequence
  Description of Artificial Sequence: Synthetic oligonucleotide
acaacucaguccauuagaa

SEQ ID NO: 3077400 - RNA, 19 nt, Artificial Sequence
  Description of Artificial Sequence: Synthetic oligonucleotide
ggggauaaaauacucugaa

SEQ ID NO: 3077401 - RNA, 19 nt, Artificial Sequence
  Description of Artificial Sequence: Synthetic oligonucleotide
ucaagucaaaggugacaaa

SEQ ID NO: 3077402 - RNA, 19 nt, Artificial Sequence
  Description of Artificial Sequence: Synthetic oligonucleotide
aagaaacaaugcauguaua

SEQ ID NO: 3077403 - RNA, 19 nt, Artificial Sequence
  Description of Artificial Sequence: Synthetic oligonucleotide
ucgugcugugcuucuauau

SEQ ID NO: 3077404 - RNA, 19 nt, Artificial Sequence
  Description of Artificial Sequence: Synthetic oligonucleotide
uucuuuacuuggugagaaa

SEQ ID NO: 3077405 - RNA, 19 nt, Artificial Sequence
  Description of Artificial Sequence: Synthetic oligonucleotide
uuucaucgugcugugcuuc

SEQ ID NO: 3077406 - RNA, 19 nt, Artificial Sequence
  Description of Artificial Sequence: Synthetic oligonucleotide
uucaucgugcugugcuucu

SEQ ID NO: 3077407 - RNA, 19 nt, Artificial Sequence
  Description of Artificial Sequence: Synthetic oligonucleotide
cgccauaauaaacaguaag

SEQ ID NO: 3077408 - RNA, 19 nt, Artificial Sequence
  Description of Artificial Sequence: Synthetic oligonucleotide
agagaggguaagcccagaa

SEQ ID NO: 3077409 - RNA, 19 nt, Artificial Sequence
  Description of Artificial Sequence: Synthetic oligonucleotide
agacauuucuuuacuuggu

SEQ ID NO: 3077410 - RNA, 19 nt, Artificial Sequence
  Description of Artificial Sequence: Synthetic oligonucleotide
acucaguccauuagaaaau

SEQ ID NO: 3077411 - RNA, 19 nt, Artificial Sequence
  Description of Artificial Sequence: Synthetic oligonucleotide
uaacucacuucaagucaaa

SEQ ID NO: 3077412 - RNA, 19 nt, Artificial Sequence
  Description of Artificial Sequence: Synthetic oligonucleotide
acaaucccaaggagaagag

SEQ ID NO: 3077413 - RNA, 19 nt, Artificial Sequence
  Description of Artificial Sequence: Synthetic oligonucleotide
gauggggauaaaauacucu

SEQ ID NO: 3077414 - RNA, 19 nt, Artificial Sequence
  Description of Artificial Sequence: Synthetic oligonucleotide
caaucccaaggagaagagc

SEQ ID NO: 3077415 - RNA, 19 nt, Artificial Sequence
  Description of Artificial Sequence: Synthetic oligonucleotide
caagaauuacaauggcgcu

SEQ ID NO: 3077416 - RNA, 19 nt, Artificial Sequence
  Description of Artificial Sequence: Synthetic oligonucleotide
cuucaagucaaaggugaca

SEQ ID NO: 3077417 - RNA, 19 nt, Artificial Sequence
  Description of Artificial Sequence: Synthetic oligonucleotide
caucaguuucaucgugcug

SEQ ID NO: 3077418 - RNA, 19 nt, Artificial Sequence
  Description of Artificial Sequence: Synthetic oligonucleotide
auucuacaaucucucugua

SEQ ID NO: 3077419 - RNA, 19 nt, Artificial Sequence
  Description of Artificial Sequence: Synthetic oligonucleotide
aggguaagcccagaacaca

SEQ ID NO: 3077420 - RNA, 19 nt, Artificial Sequence
  Description of Artificial Sequence: Synthetic oligonucleotide
ccauaauaaacaguaagaa

SEQ ID NO: 3077421 - RNA, 19 nt, Artificial Sequence
  Description of Artificial Sequence: Synthetic oligonucleotide
guacugauuuuccaucagu

SEQ ID NO: 3077422 - RNA, 19 nt, Artificial Sequence
  Description of Artificial Sequence: Synthetic oligonucleotide
aggagaagagcaagaauua

SEQ ID NO: 3077423 - RNA, 19 nt, Artificial Sequence
  Description of Artificial Sequence: Synthetic oligonucleotide
agagagaggguaagcccag

SEQ ID NO: 3077424 - RNA, 19 nt, Artificial Sequence
  Description of Artificial Sequence: Synthetic oligonucleotide
acaauggcgcugaugggga

SEQ ID NO: 3077425 - RNA, 19 nt, Artificial Sequence
  Description of Artificial Sequence: Synthetic oligonucleotide
cauuagaaaauaucucauu

SEQ ID NO: 3077426 - RNA, 19 nt, Artificial Sequence
  Description of Artificial Sequence: Synthetic oligonucleotide
ggagaagagcaagaauuac

SEQ ID NO: 3077427 - RNA, 19 nt, Artificial Sequence
  Description of Artificial Sequence: Synthetic oligonucleotide
gcauguauauaagagacau

SEQ ID NO: 3077428 - RNA, 19 nt, Artificial Sequence
  Description of Artificial Sequence: Synthetic oligonucleotide
auucacaacucaguccauu

SEQ ID NO: 3077429 - RNA, 19 nt, Artificial Sequence
  Description of Artificial Sequence: Synthetic oligonucleotide
aauggcgcugauggggaua

SEQ ID NO: 3077430 - RNA, 19 nt, Artificial Sequence
  Description of Artificial Sequence: Synthetic oligonucleotide
caacucaguccauuagaaa

SEQ ID NO: 3077431 - RNA, 19 nt, Artificial Sequence
  Description of Artificial Sequence: Synthetic oligonucleotide
auauuucuguuugggugaa

SEQ ID NO: 3077432 - RNA, 19 nt, Artificial Sequence
  Description of Artificial Sequence: Synthetic oligonucleotide
cucuguacugauuuuccau

SEQ ID NO: 3077433 - RNA, 19 nt, Artificial Sequence
  Description of Artificial Sequence: Synthetic oligonucleotide
aauucacaacucaguccau

SEQ ID NO: 3077434 - RNA, 19 nt, Artificial Sequence
  Description of Artificial Sequence: Synthetic oligonucleotide
aucucucuguacugauuuu

SEQ ID NO: 3077435 - RNA, 19 nt, Artificial Sequence
  Description of Artificial Sequence: Synthetic oligonucleotide
aucgugcugugcuucuaua

SEQ ID NO: 3077436 - RNA, 19 nt, Artificial Sequence
  Description of Artificial Sequence: Synthetic oligonucleotide
auggcgcugauggggauaa

SEQ ID NO: 3077437 - RNA, 19 nt, Artificial Sequence
  Description of Artificial Sequence: Synthetic oligonucleotide
cucauucuacaaucucucu

SEQ ID NO: 3077438 - RNA, 19 nt, Artificial Sequence
  Description of Artificial Sequence: Synthetic oligonucleotide
gugcugugcuucuauauuu

SEQ ID NO: 3077439 - RNA, 19 nt, Artificial Sequence
  Description of Artificial Sequence: Synthetic oligonucleotide
cucaguccauuagaaaaua

SEQ ID NO: 3077440 - RNA, 19 nt, Artificial Sequence
  Description of Artificial Sequence: Synthetic oligonucleotide
uauuucuguuugggugaaa

SEQ ID NO: 3077441 - RNA, 19 nt, Artificial Sequence
  Description of Artificial Sequence: Synthetic oligonucleotide
aucccaaggagaagagcaa

SEQ ID NO: 3077442 - RNA, 19 nt, Artificial Sequence
  Description of Artificial Sequence: Synthetic oligonucleotide
gggauaaaauacucugaau

SEQ ID NO: 3077443 - RNA, 19 nt, Artificial Sequence
  Description of Artificial Sequence: Synthetic oligonucleotide
caguuucaucgugcugugc

SEQ ID NO: 3077444 - RNA, 19 nt, Artificial Sequence
  Description of Artificial Sequence: Synthetic oligonucleotide
gauuuuccaucaguuucau

SEQ ID NO: 3077445 - RNA, 19 nt, Artificial Sequence
  Description of Artificial Sequence: Synthetic oligonucleotide
cauguauauaagagacauu

SEQ ID NO: 3077446 - RNA, 19 nt, Artificial Sequence
  Description of Artificial Sequence: Synthetic oligonucleotide
cccaaggagaagagcaaga

SEQ ID NO: 3077447 - RNA, 19 nt, Artificial Sequence
  Description of Artificial Sequence: Synthetic oligonucleotide
ucaucgugcugugcuucua

SEQ ID NO: 3077448 - RNA, 19 nt, Artificial Sequence
  Description of Artificial Sequence: Synthetic oligonucleotide
acgccauaauaaacaguaa

SEQ ID NO: 3077449 - RNA, 19 nt, Artificial Sequence
  Description of Artificial Sequence: Synthetic oligonucleotide
guuucaucgugcugugcuu

SEQ ID NO: 3077450 - RNA, 19 nt, Artificial Sequence
  Description of Artificial Sequence: Synthetic oligonucleotide
gagagaggguaagcccaga

SEQ ID NO: 3077451 - RNA, 19 nt, Artificial Sequence
  Description of Artificial Sequence: Synthetic oligonucleotide
gcugugcuucuauauuucu

SEQ ID NO: 3077452 - RNA, 19 nt, Artificial Sequence
  Description of Artificial Sequence: Synthetic oligonucleotide
ggcgcugauggggauaaaa

SEQ ID NO: 3077453 - RNA, 19 nt, Artificial Sequence
  Description of Artificial Sequence: Synthetic oligonucleotide
ccaaggagaagagcaagaa

SEQ ID NO: 3077454 - RNA, 19 nt, Artificial Sequence
  Description of Artificial Sequence: Synthetic oligonucleotide
caaucucucuguacugauu

SEQ ID NO: 3077455 - RNA, 19 nt, Artificial Sequence
  Description of Artificial Sequence: Synthetic oligonucleotide
cgcugauggggauaaaaua

SEQ ID NO: 3077456 - RNA, 19 nt, Artificial Sequence
  Description of Artificial Sequence: Synthetic oligonucleotide
caucgugcugugcuucuau

SEQ ID NO: 3077457 - RNA, 19 nt, Artificial Sequence
  Description of Artificial Sequence: Synthetic oligonucleotide
gaauuacaauggcgcugau

SEQ ID NO: 3077458 - RNA, 19 nt, Artificial Sequence
  Description of Artificial Sequence: Synthetic oligonucleotide
ccaucaguuucaucgugcu

SEQ ID NO: 3077459 - RNA, 19 nt, Artificial Sequence
  Description of Artificial Sequence: Synthetic oligonucleotide
gcgcugauggggauaaaau

SEQ ID NO: 3077460 - RNA, 19 nt, Artificial Sequence
  Description of Artificial Sequence: Synthetic oligonucleotide
caauggcgcugauggggau

SEQ ID NO: 3077461 - RNA, 19 nt, Artificial Sequence
  Description of Artificial Sequence: Synthetic oligonucleotide
uggcgcugauggggauaaa

SEQ ID NO: 3077462 - RNA, 19 nt, Artificial Sequence
  Description of Artificial Sequence: Synthetic oligonucleotide
cgugcugugcuucuauauu

SEQ ID NO: 3077463 - RNA, 19 nt, Artificial Sequence
  Description of Artificial Sequence: Synthetic oligonucleotide
aguuguauaaauuugucuc

SEQ ID NO: 3077464 - RNA, 19 nt, Artificial Sequence
  Description of Artificial Sequence: Synthetic oligonucleotide
agagauaucauuacgauag

SEQ ID NO: 3077465 - RNA, 19 nt, Artificial Sequence
  Description of Artificial Sequence: Synthetic oligonucleotide
uuacgauagaaauugaucu

SEQ ID NO: 3077466 - RNA, 19 nt, Artificial Sequence
  Description of Artificial Sequence: Synthetic oligonucleotide
aauuccaggguuugaaggg

SEQ ID NO: 3077467 - RNA, 19 nt, Artificial Sequence
  Description of Artificial Sequence: Synthetic oligonucleotide
uuguaaaguagucauagca

SEQ ID NO: 3077468 - RNA, 19 nt, Artificial Sequence
  Description of Artificial Sequence: Synthetic oligonucleotide
gauggcauugaaaugaggg

SEQ ID NO: 3077469 - RNA, 19 nt, Artificial Sequence
  Description of Artificial Sequence: Synthetic oligonucleotide
aaaguagucauagcauucc

SEQ ID NO: 3077470 - RNA, 19 nt, Artificial Sequence
  Description of Artificial Sequence: Synthetic oligonucleotide
uauuguaaaguagucauag

SEQ ID NO: 3077471 - RNA, 19 nt, Artificial Sequence
  Description of Artificial Sequence: Synthetic oligonucleotide
ucuaaguauuguaaaguag

SEQ ID NO: 3077472 - RNA, 19 nt, Artificial Sequence
  Description of Artificial Sequence: Synthetic oligonucleotide
uauaaauuugucucuaagu

SEQ ID NO: 3077473 - RNA, 19 nt, Artificial Sequence
  Description of Artificial Sequence: Synthetic oligonucleotide
aucauuacgauagaaauug

SEQ ID NO: 3077474 - RNA, 19 nt, Artificial Sequence
  Description of Artificial Sequence: Synthetic oligonucleotide
aguauuguaaaguagucau

SEQ ID NO: 3077475 - RNA, 19 nt, Artificial Sequence
  Description of Artificial Sequence: Synthetic oligonucleotide
auaucauuacgauagaaau

SEQ ID NO: 3077476 - RNA, 19 nt, Artificial Sequence
  Description of Artificial Sequence: Synthetic oligonucleotide
auaaauuugucucuaagua

SEQ ID NO: 3077477 - RNA, 19 nt, Artificial Sequence
  Description of Artificial Sequence: Synthetic oligonucleotide
aaaggagacuuuccugggc

SEQ ID NO: 3077478 - RNA, 19 nt, Artificial Sequence
  Description of Artificial Sequence: Synthetic oligonucleotide
uguagaagguucuucagga

SEQ ID NO: 3077479 - RNA, 19 nt, Artificial Sequence
  Description of Artificial Sequence: Synthetic oligonucleotide
auuacgauagaaauugauc

SEQ ID NO: 3077480 - RNA, 19 nt, Artificial Sequence
  Description of Artificial Sequence: Synthetic oligonucleotide
auauccagcaguucaggac

SEQ ID NO: 3077481 - RNA, 19 nt, Artificial Sequence
  Description of Artificial Sequence: Synthetic oligonucleotide
uguaaaguagucauagcau

SEQ ID NO: 3077482 - RNA, 19 nt, Artificial Sequence
  Description of Artificial Sequence: Synthetic oligonucleotide
agucauagcauuccagagg

SEQ ID NO: 3077483 - RNA, 19 nt, Artificial Sequence
  Description of Artificial Sequence: Synthetic oligonucleotide
aucuugguaagcugggagc

SEQ ID NO: 3077484 - RNA, 19 nt, Artificial Sequence
  Description of Artificial Sequence: Synthetic oligonucleotide
aaaugaggguccuucaagu

SEQ ID NO: 3077485 - RNA, 19 nt, Artificial Sequence
  Description of Artificial Sequence: Synthetic oligonucleotide
ggcugugugauguagaagg

SEQ ID NO: 3077486 - RNA, 19 nt, Artificial Sequence
  Description of Artificial Sequence: Synthetic oligonucleotide
uauccagcaguucaggaca

SEQ ID NO: 3077487 - RNA, 19 nt, Artificial Sequence
  Description of Artificial Sequence: Synthetic oligonucleotide
auugaaaugaggguccuuc

SEQ ID NO: 3077488 - RNA, 19 nt, Artificial Sequence
  Description of Artificial Sequence: Synthetic oligonucleotide
ugugugauguagaagguuc

SEQ ID NO: 3077489 - RNA, 19 nt, Artificial Sequence
  Description of Artificial Sequence: Synthetic oligonucleotide
cuucaggacaagcagagag

SEQ ID NO: 3077490 - RNA, 19 nt, Artificial Sequence
  Description of Artificial Sequence: Synthetic oligonucleotide
ugaaggguacuuuugaguc

SEQ ID NO: 3077491 - RNA, 19 nt, Artificial Sequence
  Description of Artificial Sequence: Synthetic oligonucleotide
uucuucaggacaagcagag

SEQ ID NO: 3077492 - RNA, 19 nt, Artificial Sequence
  Description of Artificial Sequence: Synthetic oligonucleotide
gucagagcaggcaagaugg

SEQ ID NO: 3077493 - RNA, 19 nt, Artificial Sequence
  Description of Artificial Sequence: Synthetic oligonucleotide
aauugaucuugguaagcug

SEQ ID NO: 3077494 - RNA, 19 nt, Artificial Sequence
  Description of Artificial Sequence: Synthetic oligonucleotide
ugauguagaagguucuuca

SEQ ID NO: 3077495 - RNA, 19 nt, Artificial Sequence
  Description of Artificial Sequence: Synthetic oligonucleotide
gaaaugaggguccuucaag

SEQ ID NO: 3077496 - RNA, 19 nt, Artificial Sequence
  Description of Artificial Sequence: Synthetic oligonucleotide
agaaauugaucuugguaag

SEQ ID NO: 3077497 - RNA, 19 nt, Artificial Sequence
  Description of Artificial Sequence: Synthetic oligonucleotide
caauuccaggguuugaagg

SEQ ID NO: 3077498 - RNA, 19 nt, Artificial Sequence
  Description of Artificial Sequence: Synthetic oligonucleotide
aaauugaucuugguaagcu

SEQ ID NO: 3077499 - RNA, 19 nt, Artificial Sequence
  Description of Artificial Sequence: Synthetic oligonucleotide
auguagaagguucuucagg

SEQ ID NO: 3077500 - RNA, 19 nt, Artificial Sequence
  Description of Artificial Sequence: Synthetic oligonucleotide
uuugaaggguacuuuugag

SEQ ID NO: 3077501 - RNA, 19 nt, Artificial Sequence
  Description of Artificial Sequence: Synthetic oligonucleotide
auugaucuugguaagcugg

SEQ ID NO: 3077502 - RNA, 19 nt, Artificial Sequence
  Description of Artificial Sequence: Synthetic oligonucleotide
uaaauuugucucuaaguau

SEQ ID NO: 3077503 - RNA, 19 nt, Artificial Sequence
  Description of Artificial Sequence: Synthetic oligonucleotide
aguugcacugcuccaauuc

SEQ ID NO: 3077504 - RNA, 19 nt, Artificial Sequence
  Description of Artificial Sequence: Synthetic oligonucleotide
uagaagguucuucaggaca

SEQ ID NO: 3077505 - RNA, 19 nt, Artificial Sequence
  Description of Artificial Sequence: Synthetic oligonucleotide
ugaggguccuucaaguugc

SEQ ID NO: 3077506 - RNA, 19 nt, Artificial Sequence
  Description of Artificial Sequence: Synthetic oligonucleotide
agcagagagauaucauuac

SEQ ID NO: 3077507 - RNA, 19 nt, Artificial Sequence
  Description of Artificial Sequence: Synthetic oligonucleotide
gaguauauccagcaguuca

SEQ ID NO: 3077508 - RNA, 19 nt, Artificial Sequence
  Description of Artificial Sequence: Synthetic oligonucleotide
uaguuguauaaauuugucu

SEQ ID NO: 3077509 - RNA, 19 nt, Artificial Sequence
  Description of Artificial Sequence: Synthetic oligonucleotide
cuucaaguugcacugcucc

SEQ ID NO: 3077510 - RNA, 19 nt, Artificial Sequence
  Description of Artificial Sequence: Synthetic oligonucleotide
auagaaauugaucuuggua

SEQ ID NO: 3077511 - RNA, 19 nt, Artificial Sequence
  Description of Artificial Sequence: Synthetic oligonucleotide
uaagcugggagcauugggu

SEQ ID NO: 3077512 - RNA, 19 nt, Artificial Sequence
  Description of Artificial Sequence: Synthetic oligonucleotide
uaaguauuguaaaguaguc

SEQ ID NO: 3077513 - RNA, 19 nt, Artificial Sequence
  Description of Artificial Sequence: Synthetic oligonucleotide
gaucuugguaagcugggag

SEQ ID NO: 3077514 - RNA, 19 nt, Artificial Sequence
  Description of Artificial Sequence: Synthetic oligonucleotide
aaauuugucucuaaguauu

SEQ ID NO: 3077515 - RNA, 19 nt, Artificial Sequence
  Description of Artificial Sequence: Synthetic oligonucleotide
aaggguacuuuugagucuc

SEQ ID NO: 3077516 - RNA, 19 nt, Artificial Sequence
  Description of Artificial Sequence: Synthetic oligonucleotide
uugaucuugguaagcuggg

SEQ ID NO: 3077517 - RNA, 19 nt, Artificial Sequence
  Description of Artificial Sequence: Synthetic oligonucleotide
ucuacccugaguauaucca

SEQ ID NO: 3077518 - RNA, 19 nt, Artificial Sequence
  Description of Artificial Sequence: Synthetic oligonucleotide
aaguauuguaaaguaguca

SEQ ID NO: 3077519 - RNA, 19 nt, Artificial Sequence
  Description of Artificial Sequence: Synthetic oligonucleotide
aggggcgggauacagcucc

SEQ ID NO: 3077520 - RNA, 19 nt, Artificial Sequence
  Description of Artificial Sequence: Synthetic oligonucleotide
aagcugggagcauuggguc

SEQ ID NO: 3077521 - RNA, 19 nt, Artificial Sequence
  Description of Artificial Sequence: Synthetic oligonucleotide
aaggagacuuuccugggcu

SEQ ID NO: 3077522 - RNA, 19 nt, Artificial Sequence
  Description of Artificial Sequence: Synthetic oligonucleotide
uugucucuaaguauuguaa

SEQ ID NO: 3077523 - RNA, 19 nt, Artificial Sequence
  Description of Artificial Sequence: Synthetic oligonucleotide
aagguucuucaggacaagc

SEQ ID NO: 3077524 - RNA, 19 nt, Artificial Sequence
  Description of Artificial Sequence: Synthetic oligonucleotide
gcaaaggagacuuuccugg

SEQ ID NO: 3077525 - RNA, 19 nt, Artificial Sequence
  Description of Artificial Sequence: Synthetic oligonucleotide
gauguagaagguucuucag

SEQ ID NO: 3077526 - RNA, 19 nt, Artificial Sequence
  Description of Artificial Sequence: Synthetic oligonucleotide
uagucauagcauuccagag

SEQ ID NO: 3077527 - RNA, 19 nt, Artificial Sequence
  Description of Artificial Sequence: Synthetic oligonucleotide
ucucuaaguauuguaaagu

SEQ ID NO: 3077528 - RNA, 19 nt, Artificial Sequence
  Description of Artificial Sequence: Synthetic oligonucleotide
gucucuaaguauuguaaag

SEQ ID NO: 3077529 - RNA, 19 nt, Artificial Sequence
  Description of Artificial Sequence: Synthetic oligonucleotide
ugccuuucuacccugagua

SEQ ID NO: 3077530 - RNA, 19 nt, Artificial Sequence
  Description of Artificial Sequence: Synthetic oligonucleotide
uugaaggguacuuuugagu

SEQ ID NO: 3077531 - RNA, 19 nt, Artificial Sequence
  Description of Artificial Sequence: Synthetic oligonucleotide
aggacaagcagagagauau

SEQ ID NO: 3077532 - RNA, 19 nt, Artificial Sequence
  Description of Artificial Sequence: Synthetic oligonucleotide
gauaucauuacgauagaaa

SEQ ID NO: 3077533 - RNA, 19 nt, Artificial Sequence
  Description of Artificial Sequence: Synthetic oligonucleotide
auaguuguauaaauuuguc

SEQ ID NO: 3077534 - RNA, 19 nt, Artificial Sequence
  Description of Artificial Sequence: Synthetic oligonucleotide
uaucauuacgauagaaauu

SEQ ID NO: 3077535 - RNA, 19 nt, Artificial Sequence
  Description of Artificial Sequence: Synthetic oligonucleotide
cauagcauuccagaggggc

SEQ ID NO: 3077536 - RNA, 19 nt, Artificial Sequence
  Description of Artificial Sequence: Synthetic oligonucleotide
uucuacccugaguauaucc

SEQ ID NO: 3077537 - RNA, 19 nt, Artificial Sequence
  Description of Artificial Sequence: Synthetic oligonucleotide
ggagcauugggucagagca

SEQ ID NO: 3077538 - RNA, 19 nt, Artificial Sequence
  Description of Artificial Sequence: Synthetic oligonucleotide
uuugucucuaaguauugua

SEQ ID NO: 3077539 - RNA, 19 nt, Artificial Sequence
  Description of Artificial Sequence: Synthetic oligonucleotide
agagagauaucauuacgau

SEQ ID NO: 3077540 - RNA, 19 nt, Artificial Sequence
  Description of Artificial Sequence: Synthetic oligonucleotide
caagauggcauugaaauga

SEQ ID NO: 3077541 - RNA, 19 nt, Artificial Sequence
  Description of Artificial Sequence: Synthetic oligonucleotide
guagucauagcauuccaga

SEQ ID NO: 3077542 - RNA, 19 nt, Artificial Sequence
  Description of Artificial Sequence: Synthetic oligonucleotide
uacuuuugagucucucaag

SEQ ID NO: 3077543 - RNA, 19 nt, Artificial Sequence
  Description of Artificial Sequence: Synthetic oligonucleotide
acgauagaaauugaucuug

SEQ ID NO: 3077544 - RNA, 19 nt, Artificial Sequence
  Description of Artificial Sequence: Synthetic oligonucleotide
augaggguccuucaaguug

SEQ ID NO: 3077545 - RNA, 19 nt, Artificial Sequence
  Description of Artificial Sequence: Synthetic oligonucleotide
ugucucuaaguauuguaaa

SEQ ID NO: 3077546 - RNA, 19 nt, Artificial Sequence
  Description of Artificial Sequence: Synthetic oligonucleotide
uagcaaaggagacuuuccu

SEQ ID NO: 3077547 - RNA, 19 nt, Artificial Sequence
  Description of Artificial Sequence: Synthetic oligonucleotide
uauauccagcaguucagga

SEQ ID NO: 3077548 - RNA, 19 nt, Artificial Sequence
  Description of Artificial Sequence: Synthetic oligonucleotide
ugggucagccuucucaucu

SEQ ID NO: 3077549 - RNA, 19 nt, Artificial Sequence
  Description of Artificial Sequence: Synthetic oligonucleotide
agccuucucaucuuggcug

SEQ ID NO: 3077550 - RNA, 19 nt, Artificial Sequence
  Description of Artificial Sequence: Synthetic oligonucleotide
guaagcugggagcauuggg

SEQ ID NO: 3077551 - RNA, 19 nt, Artificial Sequence
  Description of Artificial Sequence: Synthetic oligonucleotide
aggacauaguuguauaaau

SEQ ID NO: 3077552 - RNA, 19 nt, Artificial Sequence
  Description of Artificial Sequence: Synthetic oligonucleotide
aaguagucauagcauucca

SEQ ID NO: 3077553 - RNA, 19 nt, Artificial Sequence
  Description of Artificial Sequence: Synthetic oligonucleotide
acauaguuguauaaauuug

SEQ ID NO: 3077554 - RNA, 19 nt, Artificial Sequence
  Description of Artificial Sequence: Synthetic oligonucleotide
agcaguucaggacauaguu

SEQ ID NO: 3077555 - RNA, 19 nt, Artificial Sequence
  Description of Artificial Sequence: Synthetic oligonucleotide
gaaauugaucuugguaagc

SEQ ID NO: 3077556 - RNA, 19 nt, Artificial Sequence
  Description of Artificial Sequence: Synthetic oligonucleotide
gacauaguuguauaaauuu

SEQ ID NO: 3077557 - RNA, 19 nt, Artificial Sequence
  Description of Artificial Sequence: Synthetic oligonucleotide
aauuugucucuaaguauug

SEQ ID NO: 3077558 - RNA, 19 nt, Artificial Sequence
  Description of Artificial Sequence: Synthetic oligonucleotide
ugcacugcuccaauuccag

SEQ ID NO: 3077559 - RNA, 19 nt, Artificial Sequence
  Description of Artificial Sequence: Synthetic oligonucleotide
auggcauugaaaugagggu

SEQ ID NO: 3077560 - RNA, 19 nt, Artificial Sequence
  Description of Artificial Sequence: Synthetic oligonucleotide
uguauaaauuugucucuaa

SEQ ID NO: 3077561 - RNA, 19 nt, Artificial Sequence
  Description of Artificial Sequence: Synthetic oligonucleotide
agaggggcgggauacagcu

SEQ ID NO: 3077562 - RNA, 19 nt, Artificial Sequence
  Description of Artificial Sequence: Synthetic oligonucleotide
uccugggucagccuucuca

SEQ ID NO: 3077563 - RNA, 19 nt, Artificial Sequence
  Description of Artificial Sequence: Synthetic oligonucleotide
uguagcaaaggagacuuuc

SEQ ID NO: 3077564 - RNA, 19 nt, Artificial Sequence
  Description of Artificial Sequence: Synthetic oligonucleotide
cagagagauaucauuacga

SEQ ID NO: 3077565 - RNA, 19 nt, Artificial Sequence
  Description of Artificial Sequence: Synthetic oligonucleotide
caaaggagacuuuccuggg

SEQ ID NO: 3077566 - RNA, 19 nt, Artificial Sequence
  Description of Artificial Sequence: Synthetic oligonucleotide
aguauauccagcaguucag

SEQ ID NO: 3077567 - RNA, 19 nt, Artificial Sequence
  Description of Artificial Sequence: Synthetic oligonucleotide
ucuugguaagcugggagca

SEQ ID NO: 3077568 - RNA, 19 nt, Artificial Sequence
  Description of Artificial Sequence: Synthetic oligonucleotide
guugcacugcuccaauucc

SEQ ID NO: 3077569 - RNA, 19 nt, Artificial Sequence
  Description of Artificial Sequence: Synthetic oligonucleotide
guuugaaggguacuuuuga

SEQ ID NO: 3077570 - RNA, 19 nt, Artificial Sequence
  Description of Artificial Sequence: Synthetic oligonucleotide
gacaagcagagagauauca

SEQ ID NO: 3077571 - RNA, 19 nt, Artificial Sequence
  Description of Artificial Sequence: Synthetic oligonucleotide
ucagccuucucaucuuggc

SEQ ID NO: 3077572 - RNA, 19 nt, Artificial Sequence
  Description of Artificial Sequence: Synthetic oligonucleotide
uggcauugaaaugaggguc

SEQ ID NO: 3077573 - RNA, 19 nt, Artificial Sequence
  Description of Artificial Sequence: Synthetic oligonucleotide
cuacccugaguauauccag

SEQ ID NO: 3077574 - RNA, 19 nt, Artificial Sequence
  Description of Artificial Sequence: Synthetic oligonucleotide
aaugaggguccuucaaguu

SEQ ID NO: 3077575 - RNA, 19 nt, Artificial Sequence
  Description of Artificial Sequence: Synthetic oligonucleotide
uacccugaguauauccagc

SEQ ID NO: 3077576 - RNA, 19 nt, Artificial Sequence
  Description of Artificial Sequence: Synthetic oligonucleotide
cauaguuguauaaauuugu

SEQ ID NO: 3077577 - RNA, 19 nt, Artificial Sequence
  Description of Artificial Sequence: Synthetic oligonucleotide
uugaaaugaggguccuuca

SEQ ID NO: 3077578 - RNA, 19 nt, Artificial Sequence
  Description of Artificial Sequence: Synthetic oligonucleotide
gcagagagauaucauuacg

SEQ ID NO: 3077579 - RNA, 19 nt, Artificial Sequence
  Description of Artificial Sequence: Synthetic oligonucleotide
uacgauagaaauugaucuu

SEQ ID NO: 3077580 - RNA, 19 nt, Artificial Sequence
  Description of Artificial Sequence: Synthetic oligonucleotide
uucucaucuuggcugugug

SEQ ID NO: 3077581 - RNA, 19 nt, Artificial Sequence
  Description of Artificial Sequence: Synthetic oligonucleotide
aagauggcauugaaaugag

SEQ ID NO: 3077582 - RNA, 19 nt, Artificial Sequence
  Description of Artificial Sequence: Synthetic oligonucleotide
guacuuuugagucucucaa

SEQ ID NO: 3077583 - RNA, 19 nt, Artificial Sequence
  Description of Artificial Sequence: Synthetic oligonucleotide
uagcauuccagaggggcgg

SEQ ID NO: 3077584 - RNA, 19 nt, Artificial Sequence
  Description of Artificial Sequence: Synthetic oligonucleotide
auugggucagagcaggcaa

SEQ ID NO: 3077585 - RNA, 19 nt, Artificial Sequence
  Description of Artificial Sequence: Synthetic oligonucleotide
ucauuacgauagaaauuga

SEQ ID NO: 3077586 - RNA, 19 nt, Artificial Sequence
  Description of Artificial Sequence: Synthetic oligonucleotide
ucaggacauaguuguauaa

SEQ ID NO: 3077587 - RNA, 19 nt, Artificial Sequence
  Description of Artificial Sequence: Synthetic oligonucleotide
uucaaguugcacugcucca

SEQ ID NO: 3077588 - RNA, 19 nt, Artificial Sequence
  Description of Artificial Sequence: Synthetic oligonucleotide
aagcagagagauaucauua

SEQ ID NO: 3077589 - RNA, 19 nt, Artificial Sequence
  Description of Artificial Sequence: Synthetic oligonucleotide
guauauccagcaguucagg

SEQ ID NO: 3077590 - RNA, 19 nt, Artificial Sequence
  Description of Artificial Sequence: Synthetic oligonucleotide
guuguauaaauuugucucu

SEQ ID NO: 3077591 - RNA, 19 nt, Artificial Sequence
  Description of Artificial Sequence: Synthetic oligonucleotide
uucaggacauaguuguaua

SEQ ID NO: 3077592 - RNA, 19 nt, Artificial Sequence
  Description of Artificial Sequence: Synthetic oligonucleotide
uccuucaaguugcacugcu

SEQ ID NO: 3077593 - RNA, 19 nt, Artificial Sequence
  Description of Artificial Sequence: Synthetic oligonucleotide
aguagucauagcauuccag

SEQ ID NO: 3077594 - RNA, 19 nt, Artificial Sequence
  Description of Artificial Sequence: Synthetic oligonucleotide
uugggucagagcaggcaag

SEQ ID NO: 3077595 - RNA, 19 nt, Artificial Sequence
  Description of Artificial Sequence: Synthetic oligonucleotide
ucaggacaagcagagagau

SEQ ID NO: 3077596 - RNA, 19 nt, Artificial Sequence
  Description of Artificial Sequence: Synthetic oligonucleotide
gguccuucaaguugcacug

SEQ ID NO: 3077597 - RNA, 19 nt, Artificial Sequence
  Description of Artificial Sequence: Synthetic oligonucleotide
ucauagcauuccagagggg

SEQ ID NO: 3077598 - RNA, 19 nt, Artificial Sequence
  Description of Artificial Sequence: Synthetic oligonucleotide
gagagauaucauuacgaua

SEQ ID NO: 3077599 - RNA, 19 nt, Artificial Sequence
  Description of Artificial Sequence: Synthetic oligonucleotide
uuggcugugugauguagaa

SEQ ID NO: 3077600 - RNA, 19 nt, Artificial Sequence
  Description of Artificial Sequence: Synthetic oligonucleotide
guagcaaaggagacuuucc

SEQ ID NO: 3077601 - RNA, 19 nt, Artificial Sequence
  Description of Artificial Sequence: Synthetic oligonucleotide
ugguaagcugggagcauug

SEQ ID NO: 3077602 - RNA, 19 nt, Artificial Sequence
  Description of Artificial Sequence: Synthetic oligonucleotide
ucuuggcugugugauguag

SEQ ID NO: 3077603 - RNA, 19 nt, Artificial Sequence
  Description of Artificial Sequence: Synthetic oligonucleotide
uuguauaaauuugucucua

SEQ ID NO: 3077604 - RNA, 19 nt, Artificial Sequence
  Description of Artificial Sequence: Synthetic oligonucleotide
cucuaaguauuguaaagua

SEQ ID NO: 3077605 - RNA, 19 nt, Artificial Sequence
  Description of Artificial Sequence: Synthetic oligonucleotide
acccugaguauauccagca

SEQ ID NO: 3077606 - RNA, 19 nt, Artificial Sequence
  Description of Artificial Sequence: Synthetic oligonucleotide
ucaaguugcacugcuccaa

SEQ ID NO: 3077607 - RNA, 19 nt, Artificial Sequence
  Description of Artificial Sequence: Synthetic oligonucleotide
ggcaagauggcauugaaau

SEQ ID NO: 3077608 - RNA, 19 nt, Artificial Sequence
  Description of Artificial Sequence: Synthetic oligonucleotide
gauacagcuccugggucag

SEQ ID NO: 3077609 - RNA, 19 nt, Artificial Sequence
  Description of Artificial Sequence: Synthetic oligonucleotide
caguucaggacauaguugu

SEQ ID NO: 3077610 - RNA, 19 nt, Artificial Sequence
  Description of Artificial Sequence: Synthetic oligonucleotide
ucucaucuuggcuguguga

SEQ ID NO: 3077611 - RNA, 19 nt, Artificial Sequence
  Description of Artificial Sequence: Synthetic oligonucleotide
ugggcugccuuucuacccu

SEQ ID NO: 3077612 - RNA, 19 nt, Artificial Sequence
  Description of Artificial Sequence: Synthetic oligonucleotide
gauagaaauugaucuuggu

SEQ ID NO: 3077613 - RNA, 19 nt, Artificial Sequence
  Description of Artificial Sequence: Synthetic oligonucleotide
agauaucauuacgauagaa

SEQ ID NO: 3077614 - RNA, 19 nt, Artificial Sequence
  Description of Artificial Sequence: Synthetic oligonucleotide
guagaagguucuucaggac

SEQ ID NO: 3077615 - RNA, 19 nt, Artificial Sequence
  Description of Artificial Sequence: Synthetic oligonucleotide
ggucagagcaggcaagaug

SEQ ID NO: 3077616 - RNA, 19 nt, Artificial Sequence
  Description of Artificial Sequence: Synthetic oligonucleotide
uccaggguuugaaggguac

SEQ ID NO: 3077617 - RNA, 19 nt, Artificial Sequence
  Description of Artificial Sequence: Synthetic oligonucleotide
gguacuuuugagucucuca

SEQ ID NO: 3077618 - RNA, 19 nt, Artificial Sequence
  Description of Artificial Sequence: Synthetic oligonucleotide
agaagguucuucaggacaa

SEQ ID NO: 3077619 - RNA, 19 nt, Artificial Sequence
  Description of Artificial Sequence: Synthetic oligonucleotide
cugggcugccuuucuaccc

SEQ ID NO: 3077620 - RNA, 19 nt, Artificial Sequence
  Description of Artificial Sequence: Synthetic oligonucleotide
ucagagcaggcaagauggc

SEQ ID NO: 3077621 - RNA, 19 nt, Artificial Sequence
  Description of Artificial Sequence: Synthetic oligonucleotide
auuugucucuaaguauugu

SEQ ID NO: 3077622 - RNA, 19 nt, Artificial Sequence
  Description of Artificial Sequence: Synthetic oligonucleotide
ggcauugaaaugagggucc

SEQ ID NO: 3077623 - RNA, 19 nt, Artificial Sequence
  Description of Artificial Sequence: Synthetic oligonucleotide
gagauaucauuacgauaga

SEQ ID NO: 3077624 - RNA, 19 nt, Artificial Sequence
  Description of Artificial Sequence: Synthetic oligonucleotide
uccugggcugccuuucuac

SEQ ID NO: 3077625 - RNA, 19 nt, Artificial Sequence
  Description of Artificial Sequence: Synthetic oligonucleotide
agguucuucaggacaagca

SEQ ID NO: 3077626 - RNA, 19 nt, Artificial Sequence
  Description of Artificial Sequence: Synthetic oligonucleotide
gcaagauggcauugaaaug

SEQ ID NO: 3077627 - RNA, 19 nt, Artificial Sequence
  Description of Artificial Sequence: Synthetic oligonucleotide
ugaucuugguaagcuggga

SEQ ID NO: 3077628 - RNA, 19 nt, Artificial Sequence
  Description of Artificial Sequence: Synthetic oligonucleotide
agagcaggcaagauggcau

SEQ ID NO: 3077629 - RNA, 19 nt, Artificial Sequence
  Description of Artificial Sequence: Synthetic oligonucleotide
ugcuccaauuccaggguuu

SEQ ID NO: 3077630 - RNA, 19 nt, Artificial Sequence
  Description of Artificial Sequence: Synthetic oligonucleotide
cgauagaaauugaucuugg

SEQ ID NO: 3077631 - RNA, 19 nt, Artificial Sequence
  Description of Artificial Sequence: Synthetic oligonucleotide
gaagguucuucaggacaag

SEQ ID NO: 3077632 - RNA, 19 nt, Artificial Sequence
  Description of Artificial Sequence: Synthetic oligonucleotide
aggagacuuuccugggcug

SEQ ID NO: 3077633 - RNA, 19 nt, Artificial Sequence
  Description of Artificial Sequence: Synthetic oligonucleotide
auuccaggguuugaagggu

SEQ ID NO: 3077634 - RNA, 19 nt, Artificial Sequence
  Description of Artificial Sequence: Synthetic oligonucleotide
ugaguauauccagcaguuc

SEQ ID NO: 3077635 - RNA, 19 nt, Artificial Sequence
  Description of Artificial Sequence: Synthetic oligonucleotide
gugauguagaagguucuuc

SEQ ID NO: 3077636 - RNA, 19 nt, Artificial Sequence
  Description of Artificial Sequence: Synthetic oligonucleotide
ggauacagcuccuggguca

SEQ ID NO: 3077637 - RNA, 19 nt, Artificial Sequence
  Description of Artificial Sequence: Synthetic oligonucleotide
aaguugcacugcuccaauu

SEQ ID NO: 3077638 - RNA, 19 nt, Artificial Sequence
  Description of Artificial Sequence: Synthetic oligonucleotide
gagcauugggucagagcag

SEQ ID NO: 3077639 - RNA, 19 nt, Artificial Sequence
  Description of Artificial Sequence: Synthetic oligonucleotide
uuuccugggcugccuuucu

SEQ ID NO: 3077640 - RNA, 19 nt, Artificial Sequence
  Description of Artificial Sequence: Synthetic oligonucleotide
cauuacgauagaaauugau

SEQ ID NO: 3077641 - RNA, 19 nt, Artificial Sequence
  Description of Artificial Sequence: Synthetic oligonucleotide
gguuugaaggguacuuuug

SEQ ID NO: 3077642 - RNA, 19 nt, Artificial Sequence
  Description of Artificial Sequence: Synthetic oligonucleotide
gaaggguacuuuugagucu

SEQ ID NO: 3077643 - RNA, 19 nt, Artificial Sequence
  Description of Artificial Sequence: Synthetic oligonucleotide
cuuggcugugugauguaga

SEQ ID NO: 3077644 - RNA, 19 nt, Artificial Sequence
  Description of Artificial Sequence: Synthetic oligonucleotide
ugugauguagaagguucuu

SEQ ID NO: 3077645 - RNA, 19 nt, Artificial Sequence
  Description of Artificial Sequence: Synthetic oligonucleotide
gucagccuucucaucuugg

SEQ ID NO: 3077646 - RNA, 19 nt, Artificial Sequence
  Description of Artificial Sequence: Synthetic oligonucleotide
ugggucagagcaggcaaga

SEQ ID NO: 3077647 - RNA, 19 nt, Artificial Sequence
  Description of Artificial Sequence: Synthetic oligonucleotide
gagacuuuccugggcugcc

SEQ ID NO: 3077648 - RNA, 19 nt, Artificial Sequence
  Description of Artificial Sequence: Synthetic oligonucleotide
ggcgggauacagcuccugg

SEQ ID NO: 3077649 - RNA, 19 nt, Artificial Sequence
  Description of Artificial Sequence: Synthetic oligonucleotide
uggcugugugauguagaag

SEQ ID NO: 3077650 - RNA, 19 nt, Artificial Sequence
  Description of Artificial Sequence: Synthetic oligonucleotide
gcgggauacagcuccuggg

SEQ ID NO: 3077651 - RNA, 19 nt, Artificial Sequence
  Description of Artificial Sequence: Synthetic oligonucleotide
uuccaggguuugaagggua

SEQ ID NO: 3077652 - RNA, 19 nt, Artificial Sequence
  Description of Artificial Sequence: Synthetic oligonucleotide
ccaauuccaggguuugaag

SEQ ID NO: 3077653 - RNA, 19 nt, Artificial Sequence
  Description of Artificial Sequence: Synthetic oligonucleotide
ucuucaggacaagcagaga

SEQ ID NO: 3077654 - RNA, 19 nt, Artificial Sequence
  Description of Artificial Sequence: Synthetic oligonucleotide
cagaggggcgggauacagc

SEQ ID NO: 3077655 - RNA, 19 nt, Artificial Sequence
  Description of Artificial Sequence: Synthetic oligonucleotide
cuuucuacccugaguauau

SEQ ID NO: 3077656 - RNA, 19 nt, Artificial Sequence
  Description of Artificial Sequence: Synthetic oligonucleotide
caagcagagagauaucauu

SEQ ID NO: 3077657 - RNA, 19 nt, Artificial Sequence
  Description of Artificial Sequence: Synthetic oligonucleotide
acaagcagagagauaucau

SEQ ID NO: 3077658 - RNA, 19 nt, Artificial Sequence
  Description of Artificial Sequence: Synthetic oligonucleotide
uugguaagcugggagcauu

SEQ ID NO: 3077659 - RNA, 19 nt, Artificial Sequence
  Description of Artificial Sequence: Synthetic oligonucleotide
cugaguauauccagcaguu

SEQ ID NO: 3077660 - RNA, 19 nt, Artificial Sequence
  Description of Artificial Sequence: Synthetic oligonucleotide
gcaguucaggacauaguug

SEQ ID NO: 3077661 - RNA, 19 nt, Artificial Sequence
  Description of Artificial Sequence: Synthetic oligonucleotide
caggacauaguuguauaaa

SEQ ID NO: 3077662 - RNA, 19 nt, Artificial Sequence
  Description of Artificial Sequence: Synthetic oligonucleotide
gguaagcugggagcauugg

SEQ ID NO: 3077663 - RNA, 19 nt, Artificial Sequence
  Description of Artificial Sequence: Synthetic oligonucleotide
gggagcauugggucagagc

SEQ ID NO: 3077664 - RNA, 19 nt, Artificial Sequence
  Description of Artificial Sequence: Synthetic oligonucleotide
ccagcaguucaggacauag

SEQ ID NO: 3077665 - RNA, 19 nt, Artificial Sequence
  Description of Artificial Sequence: Synthetic oligonucleotide
guauuguaaaguagucaua

SEQ ID NO: 3077666 - RNA, 19 nt, Artificial Sequence
  Description of Artificial Sequence: Synthetic oligonucleotide
agcauuccagaggggcggg

SEQ ID NO: 3077667 - RNA, 19 nt, Artificial Sequence
  Description of Artificial Sequence: Synthetic oligonucleotide
cuuuccugggcugccuuuc

SEQ ID NO: 3077668 - RNA, 19 nt, Artificial Sequence
  Description of Artificial Sequence: Synthetic oligonucleotide
agcaggcaagauggcauug

SEQ ID NO: 3077669 - RNA, 19 nt, Artificial Sequence
  Description of Artificial Sequence: Synthetic oligonucleotide
cauugggucagagcaggca

SEQ ID NO: 3077670 - RNA, 19 nt, Artificial Sequence
  Description of Artificial Sequence: Synthetic oligonucleotide
ggguccuucaaguugcacu

SEQ ID NO: 3077671 - RNA, 19 nt, Artificial Sequence
  Description of Artificial Sequence: Synthetic oligonucleotide
uuucuacccugaguauauc

SEQ ID NO: 3077672 - RNA, 19 nt, Artificial Sequence
  Description of Artificial Sequence: Synthetic oligonucleotide
ugggagcauugggucagag

SEQ ID NO: 3077673 - RNA, 19 nt, Artificial Sequence
  Description of Artificial Sequence: Synthetic oligonucleotide
aggguuugaaggguacuuu

SEQ ID NO: 3077674 - RNA, 19 nt, Artificial Sequence
  Description of Artificial Sequence: Synthetic oligonucleotide
ggagacuuuccugggcugc

SEQ ID NO: 3077675 - RNA, 19 nt, Artificial Sequence
  Description of Artificial Sequence: Synthetic oligonucleotide
gcugggagcauugggucag

SEQ ID NO: 3077676 - RNA, 19 nt, Artificial Sequence
  Description of Artificial Sequence: Synthetic oligonucleotide
ggucagccuucucaucuug

SEQ ID NO: 3077677 - RNA, 19 nt, Artificial Sequence
  Description of Artificial Sequence: Synthetic oligonucleotide
acuuuccugggcugccuuu

SEQ ID NO: 3077678 - RNA, 19 nt, Artificial Sequence
  Description of Artificial Sequence: Synthetic oligonucleotide
agcuccugggucagccuuc

SEQ ID NO: 3077679 - RNA, 19 nt, Artificial Sequence
  Description of Artificial Sequence: Synthetic oligonucleotide
cucaucuuggcugugugau

SEQ ID NO: 3077680 - RNA, 19 nt, Artificial Sequence
  Description of Artificial Sequence: Synthetic oligonucleotide
cagagcaggcaagauggca

SEQ ID NO: 3077681 - RNA, 19 nt, Artificial Sequence
  Description of Artificial Sequence: Synthetic oligonucleotide
gcugccuuucuacccugag

SEQ ID NO: 3077682 - RNA, 19 nt, Artificial Sequence
  Description of Artificial Sequence: Synthetic oligonucleotide
gggauacagcuccuggguc

SEQ ID NO: 3077683 - RNA, 19 nt, Artificial Sequence
  Description of Artificial Sequence: Synthetic oligonucleotide
uuccugggcugccuuucua

SEQ ID NO: 3077684 - RNA, 19 nt, Artificial Sequence
  Description of Artificial Sequence: Synthetic oligonucleotide
aggcaagauggcauugaaa

SEQ ID NO: 3077685 - RNA, 19 nt, Artificial Sequence
  Description of Artificial Sequence: Synthetic oligonucleotide
ccugaguauauccagcagu

SEQ ID NO: 3077686 - RNA, 19 nt, Artificial Sequence
  Description of Artificial Sequence: Synthetic oligonucleotide
caggcaagauggcauugaa

SEQ ID NO: 3077687 - RNA, 19 nt, Artificial Sequence
  Description of Artificial Sequence: Synthetic oligonucleotide
guccuucaaguugcacugc

SEQ ID NO: 3077688 - RNA, 19 nt, Artificial Sequence
  Description of Artificial Sequence: Synthetic oligonucleotide
agacuuuccugggcugccu

SEQ ID NO: 3077689 - RNA, 19 nt, Artificial Sequence
  Description of Artificial Sequence: Synthetic oligonucleotide
ccuucaaguugcacugcuc

SEQ ID NO: 3077690 - RNA, 19 nt, Artificial Sequence
  Description of Artificial Sequence: Synthetic oligonucleotide
uccagaggggcgggauaca

SEQ ID NO: 3077691 - RNA, 19 nt, Artificial Sequence
  Description of Artificial Sequence: Synthetic oligonucleotide
cccugaguauauccagcag

SEQ ID NO: 3077692 - RNA, 19 nt, Artificial Sequence
  Description of Artificial Sequence: Synthetic oligonucleotide
gugugauguagaagguucu

SEQ ID NO: 3077693 - RNA, 19 nt, Artificial Sequence
  Description of Artificial Sequence: Synthetic oligonucleotide
aucuuggcugugugaugua

SEQ ID NO: 3077694 - RNA, 19 nt, Artificial Sequence
  Description of Artificial Sequence: Synthetic oligonucleotide
ggacauaguuguauaaauu

SEQ ID NO: 3077695 - RNA, 19 nt, Artificial Sequence
  Description of Artificial Sequence: Synthetic oligonucleotide
gagcaggcaagauggcauu

SEQ ID NO: 3077696 - RNA, 19 nt, Artificial Sequence
  Description of Artificial Sequence: Synthetic oligonucleotide
cagccuucucaucuuggcu

SEQ ID NO: 3077697 - RNA, 19 nt, Artificial Sequence
  Description of Artificial Sequence: Synthetic oligonucleotide
cugccuuucuacccugagu

SEQ ID NO: 3077698 - RNA, 19 nt, Artificial Sequence
  Description of Artificial Sequence: Synthetic oligonucleotide
caaguugcacugcuccaau

SEQ ID NO: 3077699 - RNA, 19 nt, Artificial Sequence
  Description of Artificial Sequence: Synthetic oligonucleotide
ggguuugaaggguacuuuu

SEQ ID NO: 3077700 - RNA, 19 nt, Artificial Sequence
  Description of Artificial Sequence: Synthetic oligonucleotide
ccagaggggcgggauacag

SEQ ID NO: 3077701 - RNA, 19 nt, Artificial Sequence
  Description of Artificial Sequence: Synthetic oligonucleotide
auccagcaguucaggacau

SEQ ID NO: 3077702 - RNA, 19 nt, Artificial Sequence
  Description of Artificial Sequence: Synthetic oligonucleotide
caggacaagcagagagaua

SEQ ID NO: 3077703 - RNA, 19 nt, Artificial Sequence
  Description of Artificial Sequence: Synthetic oligonucleotide
uccagcaguucaggacaua

SEQ ID NO: 3077704 - RNA, 19 nt, Artificial Sequence
  Description of Artificial Sequence: Synthetic oligonucleotide
cuucucaucuuggcugugu

SEQ ID NO: 3077705 - RNA, 19 nt, Artificial Sequence
  Description of Artificial Sequence: Synthetic oligonucleotide
ggguacuuuugagucucuc

SEQ ID NO: 3077706 - RNA, 19 nt, Artificial Sequence
  Description of Artificial Sequence: Synthetic oligonucleotide
gacuuuccugggcugccuu

SEQ ID NO: 3077707 - RNA, 19 nt, Artificial Sequence
  Description of Artificial Sequence: Synthetic oligonucleotide
gaggguccuucaaguugca

SEQ ID NO: 3077708 - RNA, 19 nt, Artificial Sequence
  Description of Artificial Sequence: Synthetic oligonucleotide
ccuuucuacccugaguaua

SEQ ID NO: 3077709 - RNA, 19 nt, Artificial Sequence
  Description of Artificial Sequence: Synthetic oligonucleotide
aggguacuuuugagucucu

SEQ ID NO: 3077710 - RNA, 19 nt, Artificial Sequence
  Description of Artificial Sequence: Synthetic oligonucleotide
ggacaagcagagagauauc

SEQ ID NO: 3077711 - RNA, 19 nt, Artificial Sequence
  Description of Artificial Sequence: Synthetic oligonucleotide
gggcugccuuucuacccug

SEQ ID NO: 3077712 - RNA, 19 nt, Artificial Sequence
  Description of Artificial Sequence: Synthetic oligonucleotide
gaggggcgggauacagcuc

SEQ ID NO: 3077713 - RNA, 19 nt, Artificial Sequence
  Description of Artificial Sequence: Synthetic oligonucleotide
cugugugauguagaagguu

SEQ ID NO: 3077714 - RNA, 19 nt, Artificial Sequence
  Description of Artificial Sequence: Synthetic oligonucleotide
gccuucucaucuuggcugu

SEQ ID NO: 3077715 - RNA, 19 nt, Artificial Sequence
  Description of Artificial Sequence: Synthetic oligonucleotide
caggguuugaaggguacuu

SEQ ID NO: 3077716 - RNA, 19 nt, Artificial Sequence
  Description of Artificial Sequence: Synthetic oligonucleotide
cauuccagaggggcgggau

SEQ ID NO: 3077717 - RNA, 19 nt, Artificial Sequence
  Description of Artificial Sequence: Synthetic oligonucleotide
cuugguaagcugggagcau

SEQ ID NO: 3077718 - RNA, 19 nt, Artificial Sequence
  Description of Artificial Sequence: Synthetic oligonucleotide
gcauugaaaugaggguccu

SEQ ID NO: 3077719 - RNA, 19 nt, Artificial Sequence
  Description of Artificial Sequence: Synthetic oligonucleotide
ccugggucagccuucucau

SEQ ID NO: 3077720 - RNA, 19 nt, Artificial Sequence
  Description of Artificial Sequence: Synthetic oligonucleotide
cuccugggucagccuucuc

SEQ ID NO: 3077721 - RNA, 19 nt, Artificial Sequence
  Description of Artificial Sequence: Synthetic oligonucleotide
gccuuucuacccugaguau

SEQ ID NO: 3077722 - RNA, 19 nt, Artificial Sequence
  Description of Artificial Sequence: Synthetic oligonucleotide
cauugaaaugaggguccuu

SEQ ID NO: 3077723 - RNA, 19 nt, Artificial Sequence
  Description of Artificial Sequence: Synthetic oligonucleotide
cugggagcauugggucaga

SEQ ID NO: 3077724 - RNA, 19 nt, Artificial Sequence
  Description of Artificial Sequence: Synthetic oligonucleotide
cgggauacagcuccugggu

SEQ ID NO: 3077725 - RNA, 19 nt, Artificial Sequence
  Description of Artificial Sequence: Synthetic oligonucleotide
gcauuccagaggggcggga

SEQ ID NO: 3077726 - RNA, 19 nt, Artificial Sequence
  Description of Artificial Sequence: Synthetic oligonucleotide
ccaggguuugaaggguacu

SEQ ID NO: 3077727 - RNA, 19 nt, Artificial Sequence
  Description of Artificial Sequence: Synthetic oligonucleotide
gggucagagcaggcaagau

SEQ ID NO: 3077728 - RNA, 19 nt, Artificial Sequence
  Description of Artificial Sequence: Synthetic oligonucleotide
gcuccugggucagccuucu

SEQ ID NO: 3077729 - RNA, 19 nt, Artificial Sequence
  Description of Artificial Sequence: Synthetic oligonucleotide
ggggcgggauacagcuccu

SEQ ID NO: 3077730 - RNA, 19 nt, Artificial Sequence
  Description of Artificial Sequence: Synthetic oligonucleotide
aaccucauaagauauggcc

SEQ ID NO: 3077731 - RNA, 19 nt, Artificial Sequence
  Description of Artificial Sequence: Synthetic oligonucleotide
uaagauauggccgaaaugg

SEQ ID NO: 3077732 - RNA, 19 nt, Artificial Sequence
  Description of Artificial Sequence: Synthetic oligonucleotide
uaaacuaaggcuaacacac

SEQ ID NO: 3077733 - RNA, 19 nt, Artificial Sequence
  Description of Artificial Sequence: Synthetic oligonucleotide
ucugauuccacuuugcaga

SEQ ID NO: 3077734 - RNA, 19 nt, Artificial Sequence
  Description of Artificial Sequence: Synthetic oligonucleotide
uaacacacaaggauugugg

SEQ ID NO: 3077735 - RNA, 19 nt, Artificial Sequence
  Description of Artificial Sequence: Synthetic oligonucleotide
aacauuggcagcgagaugu

SEQ ID NO: 3077736 - RNA, 19 nt, Artificial Sequence
  Description of Artificial Sequence: Synthetic oligonucleotide
aaggcuaacacacaaggau

SEQ ID NO: 3077737 - RNA, 19 nt, Artificial Sequence
  Description of Artificial Sequence: Synthetic oligonucleotide
cuaaggcuaacacacaagg

SEQ ID NO: 3077738 - RNA, 19 nt, Artificial Sequence
  Description of Artificial Sequence: Synthetic oligonucleotide
aacacacaaggauuguggg

SEQ ID NO: 3077739 - RNA, 19 nt, Artificial Sequence
  Description of Artificial Sequence: Synthetic oligonucleotide
uucuugagcaggcaaagcc

SEQ ID NO: 3077740 - RNA, 19 nt, Artificial Sequence
  Description of Artificial Sequence: Synthetic oligonucleotide
aaagcugaguggaacaugg

SEQ ID NO: 3077741 - RNA, 19 nt, Artificial Sequence
  Description of Artificial Sequence: Synthetic oligonucleotide
uguaacaacuguccucugg

SEQ ID NO: 3077742 - RNA, 19 nt, Artificial Sequence
  Description of Artificial Sequence: Synthetic oligonucleotide
agaaacugggcucacugac

SEQ ID NO: 3077743 - RNA, 19 nt, Artificial Sequence
  Description of Artificial Sequence: Synthetic oligonucleotide
uucaugcucagucugauuc

SEQ ID NO: 3077744 - RNA, 19 nt, Artificial Sequence
  Description of Artificial Sequence: Synthetic oligonucleotide
aucuccuucaugcucaguc

SEQ ID NO: 3077745 - RNA, 19 nt, Artificial Sequence
  Description of Artificial Sequence: Synthetic oligonucleotide
cagcaaaucuccuucaugc

SEQ ID NO: 3077746 - RNA, 19 nt, Artificial Sequence
  Description of Artificial Sequence: Synthetic oligonucleotide
guaacaacuguccucuggg

SEQ ID NO: 3077747 - RNA, 19 nt, Artificial Sequence
  Description of Artificial Sequence: Synthetic oligonucleotide
agauguaacaacuguccuc

SEQ ID NO: 3077748 - RNA, 19 nt, Artificial Sequence
  Description of Artificial Sequence: Synthetic oligonucleotide
aaaacauuggcagcgagau

SEQ ID NO: 3077749 - RNA, 19 nt, Artificial Sequence
  Description of Artificial Sequence: Synthetic oligonucleotide
aacauggcaggccaaugag

SEQ ID NO: 3077750 - RNA, 19 nt, Artificial Sequence
  Description of Artificial Sequence: Synthetic oligonucleotide
acaacuguccucuggggac

SEQ ID NO: 3077751 - RNA, 19 nt, Artificial Sequence
  Description of Artificial Sequence: Synthetic oligonucleotide
aaucccaggcacugguccc

SEQ ID NO: 3077752 - RNA, 19 nt, Artificial Sequence
  Description of Artificial Sequence: Synthetic oligonucleotide
gauuccacuuugcagaaac

SEQ ID NO: 3077753 - RNA, 19 nt, Artificial Sequence
  Description of Artificial Sequence: Synthetic oligonucleotide
gauauggccgaaauggcag

SEQ ID NO: 3077754 - RNA, 19 nt, Artificial Sequence
  Description of Artificial Sequence: Synthetic oligonucleotide
aagauauggccgaaauggc

SEQ ID NO: 3077755 - RNA, 19 nt, Artificial Sequence
  Description of Artificial Sequence: Synthetic oligonucleotide
agcaguccaaguuuugggg

SEQ ID NO: 3077756 - RNA, 19 nt, Artificial Sequence
  Description of Artificial Sequence: Synthetic oligonucleotide
aacuaaggcuaacacacaa

SEQ ID NO: 3077757 - RNA, 19 nt, Artificial Sequence
  Description of Artificial Sequence: Synthetic oligonucleotide
aaacugggcucacugaccu

SEQ ID NO: 3077758 - RNA, 19 nt, Artificial Sequence
  Description of Artificial Sequence: Synthetic oligonucleotide
aacaacuguccucugggga

SEQ ID NO: 3077759 - RNA, 19 nt, Artificial Sequence
  Description of Artificial Sequence: Synthetic oligonucleotide
gaguugaggaaucccaggc

SEQ ID NO: 3077760 - RNA, 19 nt, Artificial Sequence
  Description of Artificial Sequence: Synthetic oligonucleotide
uggggacuaaagcugagug

SEQ ID NO: 3077761 - RNA, 19 nt, Artificial Sequence
  Description of Artificial Sequence: Synthetic oligonucleotide
auaagauauggccgaaaug

SEQ ID NO: 3077762 - RNA, 19 nt, Artificial Sequence
  Description of Artificial Sequence: Synthetic oligonucleotide
guaaacuaaggcuaacaca

SEQ ID NO: 3077763 - RNA, 19 nt, Artificial Sequence
  Description of Artificial Sequence: Synthetic oligonucleotide
cacacaaggauugugggag

SEQ ID NO: 3077764 - RNA, 19 nt, Artificial Sequence
  Description of Artificial Sequence: Synthetic oligonucleotide
acuaaagcugaguggaaca

SEQ ID NO: 3077765 - RNA, 19 nt, Artificial Sequence
  Description of Artificial Sequence: Synthetic oligonucleotide
accucauaagauauggccg

SEQ ID NO: 3077766 - RNA, 19 nt, Artificial Sequence
  Description of Artificial Sequence: Synthetic oligonucleotide
gagcaguccaaguuuuggg

SEQ ID NO: 3077767 - RNA, 19 nt, Artificial Sequence
  Description of Artificial Sequence: Synthetic oligonucleotide
ugagcaguccaaguuuugg

SEQ ID NO: 3077768 - RNA, 19 nt, Artificial Sequence
  Description of Artificial Sequence: Synthetic oligonucleotide
uuugcagaaacugggcuca

SEQ ID NO: 3077769 - RNA, 19 nt, Artificial Sequence
  Description of Artificial Sequence: Synthetic oligonucleotide
gaaucccaggcacuggucc

SEQ ID NO: 3077770 - RNA, 19 nt, Artificial Sequence
  Description of Artificial Sequence: Synthetic oligonucleotide
ugggaguugaggaauccca

SEQ ID NO: 3077771 - RNA, 19 nt, Artificial Sequence
  Description of Artificial Sequence: Synthetic oligonucleotide
cugaguggaacauggcagg

SEQ ID NO: 3077772 - RNA, 19 nt, Artificial Sequence
  Description of Artificial Sequence: Synthetic oligonucleotide
ggaaccucauaagauaugg

SEQ ID NO: 3077773 - RNA, 19 nt, Artificial Sequence
  Description of Artificial Sequence: Synthetic oligonucleotide
aguggaacauggcaggcca

SEQ ID NO: 3077774 - RNA, 19 nt, Artificial Sequence
  Description of Artificial Sequence: Synthetic oligonucleotide
uaacaacuguccucugggg

SEQ ID NO: 3077775 - RNA, 19 nt, Artificial Sequence
  Description of Artificial Sequence: Synthetic oligonucleotide
uuggcagcgagauguaaca

SEQ ID NO: 3077776 - RNA, 19 nt, Artificial Sequence
  Description of Artificial Sequence: Synthetic oligonucleotide
guugaggaaucccaggcac

SEQ ID NO: 3077777 - RNA, 19 nt, Artificial Sequence
  Description of Artificial Sequence: Synthetic oligonucleotide
uuccacuuugcagaaacug

SEQ ID NO: 3077778 - RNA, 19 nt, Artificial Sequence
  Description of Artificial Sequence: Synthetic oligonucleotide
acuuugcagaaacugggcu

SEQ ID NO: 3077779 - RNA, 19 nt, Artificial Sequence
  Description of Artificial Sequence: Synthetic oligonucleotide
agcgagauguaacaacugu

SEQ ID NO: 3077780 - RNA, 19 nt, Artificial Sequence
  Description of Artificial Sequence: Synthetic oligonucleotide
ucagguaaacuaaggcuaa

SEQ ID NO: 3077781 - RNA, 19 nt, Artificial Sequence
  Description of Artificial Sequence: Synthetic oligonucleotide
cuuugcagaaacugggcuc

SEQ ID NO: 3077782 - RNA, 19 nt, Artificial Sequence
  Description of Artificial Sequence: Synthetic oligonucleotide
aggauugugggaguugagg

SEQ ID NO: 3077783 - RNA, 19 nt, Artificial Sequence
  Description of Artificial Sequence: Synthetic oligonucleotide
gguaaacuaaggcuaacac

SEQ ID NO: 3077784 - RNA, 19 nt, Artificial Sequence
  Description of Artificial Sequence: Synthetic oligonucleotide
auuggcagcgagauguaac

SEQ ID NO: 3077785 - RNA, 19 nt, Artificial Sequence
  Description of Artificial Sequence: Synthetic oligonucleotide
uggccgaaauggcagacug

SEQ ID NO: 3077786 - RNA, 19 nt, Artificial Sequence
  Description of Artificial Sequence: Synthetic oligonucleotide
aaauggcagacuguccaag

SEQ ID NO: 3077787 - RNA, 19 nt, Artificial Sequence
  Description of Artificial Sequence: Synthetic oligonucleotide
gauguaacaacuguccucu

SEQ ID NO: 3077788 - RNA, 19 nt, Artificial Sequence
  Description of Artificial Sequence: Synthetic oligonucleotide
caaaucuccuucaugcuca

SEQ ID NO: 3077789 - RNA, 19 nt, Artificial Sequence
  Description of Artificial Sequence: Synthetic oligonucleotide
aaagccucagguaaacuaa

SEQ ID NO: 3077790 - RNA, 19 nt, Artificial Sequence
  Description of Artificial Sequence: Synthetic oligonucleotide
agcugaguggaacauggca

SEQ ID NO: 3077791 - RNA, 19 nt, Artificial Sequence
  Description of Artificial Sequence: Synthetic oligonucleotide
cucagguaaacuaaggcua

SEQ ID NO: 3077792 - RNA, 19 nt, Artificial Sequence
  Description of Artificial Sequence: Synthetic oligonucleotide
ucaugcucagucugauucc

SEQ ID NO: 3077793 - RNA, 19 nt, Artificial Sequence
  Description of Artificial Sequence: Synthetic oligonucleotide
agacuguccaagcuucuug

SEQ ID NO: 3077794 - RNA, 19 nt, Artificial Sequence
  Description of Artificial Sequence: Synthetic oligonucleotide
acugggcucacugaccugg

SEQ ID NO: 3077795 - RNA, 19 nt, Artificial Sequence
  Description of Artificial Sequence: Synthetic oligonucleotide
cauggcaggccaaugagca

SEQ ID NO: 3077796 - RNA, 19 nt, Artificial Sequence
  Description of Artificial Sequence: Synthetic oligonucleotide
gaacauggcaggccaauga

SEQ ID NO: 3077797 - RNA, 19 nt, Artificial Sequence
  Description of Artificial Sequence: Synthetic oligonucleotide
aguugaggaaucccaggca

SEQ ID NO: 3077798 - RNA, 19 nt, Artificial Sequence
  Description of Artificial Sequence: Synthetic oligonucleotide
ugaggaaucccaggcacug

SEQ ID NO: 3077799 - RNA, 19 nt, Artificial Sequence
  Description of Artificial Sequence: Synthetic oligonucleotide
agucugauuccacuuugca

SEQ ID NO: 3077800 - RNA, 19 nt, Artificial Sequence
  Description of Artificial Sequence: Synthetic oligonucleotide
cacuuugcagaaacugggc

SEQ ID NO: 3077801 - RNA, 19 nt, Artificial Sequence
  Description of Artificial Sequence: Synthetic oligonucleotide
aaacauuggcagcgagaug

SEQ ID NO: 3077802 - RNA, 19 nt, Artificial Sequence
  Description of Artificial Sequence: Synthetic oligonucleotide
gacuaaagcugaguggaac

SEQ ID NO: 3077803 - RNA, 19 nt, Artificial Sequence
  Description of Artificial Sequence: Synthetic oligonucleotide
ucuccuucaugcucagucu

SEQ ID NO: 3077804 - RNA, 19 nt, Artificial Sequence
  Description of Artificial Sequence: Synthetic oligonucleotide
uaaagcugaguggaacaug

SEQ ID NO: 3077805 - RNA, 19 nt, Artificial Sequence
  Description of Artificial Sequence: Synthetic oligonucleotide
acauggcaggccaaugagc

SEQ ID NO: 3077806 - RNA, 19 nt, Artificial Sequence
  Description of Artificial Sequence: Synthetic oligonucleotide
ugcucagucugauuccacu

SEQ ID NO: 3077807 - RNA, 19 nt, Artificial Sequence
  Description of Artificial Sequence: Synthetic oligonucleotide
gaaacugggcucacugacc

SEQ ID NO: 3077808 - RNA, 19 nt, Artificial Sequence
  Description of Artificial Sequence: Synthetic oligonucleotide
gacuguccaagcuucuuga

SEQ ID NO: 3077809 - RNA, 19 nt, Artificial Sequence
  Description of Artificial Sequence: Synthetic oligonucleotide
ccacuuugcagaaacuggg

SEQ ID NO: 3077810 - RNA, 19 nt, Artificial Sequence
  Description of Artificial Sequence: Synthetic oligonucleotide
acacacaaggauuguggga

SEQ ID NO: 3077811 - RNA, 19 nt, Artificial Sequence
  Description of Artificial Sequence: Synthetic oligonucleotide
cgagauguaacaacugucc

SEQ ID NO: 3077812 - RNA, 19 nt, Artificial Sequence
  Description of Artificial Sequence: Synthetic oligonucleotide
gauugugggaguugaggaa

SEQ ID NO: 3077813 - RNA, 19 nt, Artificial Sequence
  Description of Artificial Sequence: Synthetic oligonucleotide
agcaaaucuccuucaugcu

SEQ ID NO: 3077814 - RNA, 19 nt, Artificial Sequence
  Description of Artificial Sequence: Synthetic oligonucleotide
uugaggaaucccaggcacu

SEQ ID NO: 3077815 - RNA, 19 nt, Artificial Sequence
  Description of Artificial Sequence: Synthetic oligonucleotide
acuaaggcuaacacacaag

SEQ ID NO: 3077816 - RNA, 19 nt, Artificial Sequence
  Description of Artificial Sequence: Synthetic oligonucleotide
aaugagcaguccaaguuuu

SEQ ID NO: 3077817 - RNA, 19 nt, Artificial Sequence
  Description of Artificial Sequence: Synthetic oligonucleotide
ugaccugguggccucggug

SEQ ID NO: 3077818 - RNA, 19 nt, Artificial Sequence
  Description of Artificial Sequence: Synthetic oligonucleotide
cuggucccagcaaaucucc

SEQ ID NO: 3077819 - RNA, 19 nt, Artificial Sequence
  Description of Artificial Sequence: Synthetic oligonucleotide
ggggacuaaagcugagugg

SEQ ID NO: 3077820 - RNA, 19 nt, Artificial Sequence
  Description of Artificial Sequence: Synthetic oligonucleotide
aggaaucccaggcacuggu

SEQ ID NO: 3077821 - RNA, 19 nt, Artificial Sequence
  Description of Artificial Sequence: Synthetic oligonucleotide
aagcugaguggaacauggc

SEQ ID NO: 3077822 - RNA, 19 nt, Artificial Sequence
  Description of Artificial Sequence: Synthetic oligonucleotide
agguaaacuaaggcuaaca

SEQ ID NO: 3077823 - RNA, 19 nt, Artificial Sequence
  Description of Artificial Sequence: Synthetic oligonucleotide
gcugaguggaacauggcag

SEQ ID NO: 3077824 - RNA, 19 nt, Artificial Sequence
  Description of Artificial Sequence: Synthetic oligonucleotide
aagccucagguaaacuaag

SEQ ID NO: 3077825 - RNA, 19 nt, Artificial Sequence
  Description of Artificial Sequence: Synthetic oligonucleotide
gaaccucauaagauauggc

SEQ ID NO: 3077826 - RNA, 19 nt, Artificial Sequence
  Description of Artificial Sequence: Synthetic oligonucleotide
auugugggaguugaggaau

SEQ ID NO: 3077827 - RNA, 19 nt, Artificial Sequence
  Description of Artificial Sequence: Synthetic oligonucleotide
auggcagacuguccaagcu

SEQ ID NO: 3077828 - RNA, 19 nt, Artificial Sequence
  Description of Artificial Sequence: Synthetic oligonucleotide
ucggugagagaugacagua

SEQ ID NO: 3077829 - RNA, 19 nt, Artificial Sequence
  Description of Artificial Sequence: Synthetic oligonucleotide
agauauggccgaaauggca

SEQ ID NO: 3077830 - RNA, 19 nt, Artificial Sequence
  Description of Artificial Sequence: Synthetic oligonucleotide
caaagccucagguaaacua

SEQ ID NO: 3077831 - RNA, 19 nt, Artificial Sequence
  Description of Artificial Sequence: Synthetic oligonucleotide
ggauugugggaguugagga

SEQ ID NO: 3077832 - RNA, 19 nt, Artificial Sequence
  Description of Artificial Sequence: Synthetic oligonucleotide
caggcaaagccucagguaa

SEQ ID NO: 3077833 - RNA, 19 nt, Artificial Sequence
  Description of Artificial Sequence: Synthetic oligonucleotide
ugagcaggcaaagccucag

SEQ ID NO: 3077834 - RNA, 19 nt, Artificial Sequence
  Description of Artificial Sequence: Synthetic oligonucleotide
cagucugauuccacuuugc

SEQ ID NO: 3077835 - RNA, 19 nt, Artificial Sequence
  Description of Artificial Sequence: Synthetic oligonucleotide
gggcucacugaccuggugg

SEQ ID NO: 3077836 - RNA, 19 nt, Artificial Sequence
  Description of Artificial Sequence: Synthetic oligonucleotide
aaacuaaggcuaacacaca

SEQ ID NO: 3077837 - RNA, 19 nt, Artificial Sequence
  Description of Artificial Sequence: Synthetic oligonucleotide
gggacuaaagcugagugga

SEQ ID NO: 3077838 - RNA, 19 nt, Artificial Sequence
  Description of Artificial Sequence: Synthetic oligonucleotide
ugaguggaacauggcaggc

SEQ ID NO: 3077839 - RNA, 19 nt, Artificial Sequence
  Description of Artificial Sequence: Synthetic oligonucleotide
gagcaggcaaagccucagg

SEQ ID NO: 3077840 - RNA, 19 nt, Artificial Sequence
  Description of Artificial Sequence: Synthetic oligonucleotide
gccucagguaaacuaaggc

SEQ ID NO: 3077841 - RNA, 19 nt, Artificial Sequence
  Description of Artificial Sequence: Synthetic oligonucleotide
auauggccgaaauggcaga

SEQ ID NO: 3077842 - RNA, 19 nt, Artificial Sequence
  Description of Artificial Sequence: Synthetic oligonucleotide
ugugggaguugaggaaucc

SEQ ID NO: 3077843 - RNA, 19 nt, Artificial Sequence
  Description of Artificial Sequence: Synthetic oligonucleotide
uggcaggccaaugagcagu

SEQ ID NO: 3077844 - RNA, 19 nt, Artificial Sequence
  Description of Artificial Sequence: Synthetic oligonucleotide
gucccagcaaaucuccuuc

SEQ ID NO: 3077845 - RNA, 19 nt, Artificial Sequence
  Description of Artificial Sequence: Synthetic oligonucleotide
gagauguaacaacuguccu

SEQ ID NO: 3077846 - RNA, 19 nt, Artificial Sequence
  Description of Artificial Sequence: Synthetic oligonucleotide
gaaauggcagacuguccaa

SEQ ID NO: 3077847 - RNA, 19 nt, Artificial Sequence
  Description of Artificial Sequence: Synthetic oligonucleotide
gaccugguggccucgguga

SEQ ID NO: 3077848 - RNA, 19 nt, Artificial Sequence
  Description of Artificial Sequence: Synthetic oligonucleotide
cuccuucaugcucagucug

SEQ ID NO: 3077849 - RNA, 19 nt, Artificial Sequence
  Description of Artificial Sequence: Synthetic oligonucleotide
gaguggaacauggcaggcc

SEQ ID NO: 3077850 - RNA, 19 nt, Artificial Sequence
  Description of Artificial Sequence: Synthetic oligonucleotide
uggcagacuguccaagcuu

SEQ ID NO: 3077851 - RNA, 19 nt, Artificial Sequence
  Description of Artificial Sequence: Synthetic oligonucleotide
ucauaagauauggccgaaa

SEQ ID NO: 3077852 - RNA, 19 nt, Artificial Sequence
  Description of Artificial Sequence: Synthetic oligonucleotide
gcaaaucuccuucaugcuc

SEQ ID NO: 3077853 - RNA, 19 nt, Artificial Sequence
  Description of Artificial Sequence: Synthetic oligonucleotide
uugugggaguugaggaauc

SEQ ID NO: 3077854 - RNA, 19 nt, Artificial Sequence
  Description of Artificial Sequence: Synthetic oligonucleotide
aaggauugugggaguugag

SEQ ID NO: 3077855 - RNA, 19 nt, Artificial Sequence
  Description of Artificial Sequence: Synthetic oligonucleotide
acaaggauugugggaguug

SEQ ID NO: 3077856 - RNA, 19 nt, Artificial Sequence
  Description of Artificial Sequence: Synthetic oligonucleotide
cuucuugagcaggcaaagc

SEQ ID NO: 3077857 - RNA, 19 nt, Artificial Sequence
  Description of Artificial Sequence: Synthetic oligonucleotide
cauaagauauggccgaaau

SEQ ID NO: 3077858 - RNA, 19 nt, Artificial Sequence
  Description of Artificial Sequence: Synthetic oligonucleotide
ucccagcaaaucuccuuca

SEQ ID NO: 3077859 - RNA, 19 nt, Artificial Sequence
  Description of Artificial Sequence: Synthetic oligonucleotide
agccucagguaaacuaagg

SEQ ID NO: 3077860 - RNA, 19 nt, Artificial Sequence
  Description of Artificial Sequence: Synthetic oligonucleotide
uauggccgaaauggcagac

SEQ ID NO: 3077861 - RNA, 19 nt, Artificial Sequence
  Description of Artificial Sequence: Synthetic oligonucleotide
gaggaaucccaggcacugg

SEQ ID NO: 3077862 - RNA, 19 nt, Artificial Sequence
  Description of Artificial Sequence: Synthetic oligonucleotide
auggcaggccaaugagcag

SEQ ID NO: 3077863 - RNA, 19 nt, Artificial Sequence
  Description of Artificial Sequence: Synthetic oligonucleotide
ggcagcgagauguaacaac

SEQ ID NO: 3077864 - RNA, 19 nt, Artificial Sequence
  Description of Artificial Sequence: Synthetic oligonucleotide
aacugggcucacugaccug

SEQ ID NO: 3077865 - RNA, 19 nt, Artificial Sequence
  Description of Artificial Sequence: Synthetic oligonucleotide
caaggauugugggaguuga

SEQ ID NO: 3077866 - RNA, 19 nt, Artificial Sequence
  Description of Artificial Sequence: Synthetic oligonucleotide
cagcgagauguaacaacug

SEQ ID NO: 3077867 - RNA, 19 nt, Artificial Sequence
  Description of Artificial Sequence: Synthetic oligonucleotide
cugguggccucggugagag

SEQ ID NO: 3077868 - RNA, 19 nt, Artificial Sequence
  Description of Artificial Sequence: Synthetic oligonucleotide
guccaagcuucuugagcag

SEQ ID NO: 3077869 - RNA, 19 nt, Artificial Sequence
  Description of Artificial Sequence: Synthetic oligonucleotide
ggcucacugaccugguggc

SEQ ID NO: 3077870 - RNA, 19 nt, Artificial Sequence
  Description of Artificial Sequence: Synthetic oligonucleotide
ggggcaggaaccucauaag

SEQ ID NO: 3077871 - RNA, 19 nt, Artificial Sequence
  Description of Artificial Sequence: Synthetic oligonucleotide
ccaagcuucuugagcaggc

SEQ ID NO: 3077872 - RNA, 19 nt, Artificial Sequence
  Description of Artificial Sequence: Synthetic oligonucleotide
ccucggugagagaugacag

SEQ ID NO: 3077873 - RNA, 19 nt, Artificial Sequence
  Description of Artificial Sequence: Synthetic oligonucleotide
caggccaaugagcagucca

SEQ ID NO: 3077874 - RNA, 19 nt, Artificial Sequence
  Description of Artificial Sequence: Synthetic oligonucleotide
cucuggggacuaaagcuga

SEQ ID NO: 3077875 - RNA, 19 nt, Artificial Sequence
  Description of Artificial Sequence: Synthetic oligonucleotide
uggaacauggcaggccaau

SEQ ID NO: 3077876 - RNA, 19 nt, Artificial Sequence
  Description of Artificial Sequence: Synthetic oligonucleotide
aggcuaacacacaaggauu

SEQ ID NO: 3077877 - RNA, 19 nt, Artificial Sequence
  Description of Artificial Sequence: Synthetic oligonucleotide
gcuucuugagcaggcaaag

SEQ ID NO: 3077878 - RNA, 19 nt, Artificial Sequence
  Description of Artificial Sequence: Synthetic oligonucleotide
ccucauaagauauggccga

SEQ ID NO: 3077879 - RNA, 19 nt, Artificial Sequence
  Description of Artificial Sequence: Synthetic oligonucleotide
aggaaccucauaagauaug

SEQ ID NO: 3077880 - RNA, 19 nt, Artificial Sequence
  Description of Artificial Sequence: Synthetic oligonucleotide
gcaggaaccucauaagaua

SEQ ID NO: 3077881 - RNA, 19 nt, Artificial Sequence
  Description of Artificial Sequence: Synthetic oligonucleotide
ugggcucacugaccuggug

SEQ ID NO: 3077882 - RNA, 19 nt, Artificial Sequence
  Description of Artificial Sequence: Synthetic oligonucleotide
auguaacaacuguccucug

SEQ ID NO: 3077883 - RNA, 19 nt, Artificial Sequence
  Description of Artificial Sequence: Synthetic oligonucleotide
agcuucuugagcaggcaaa

SEQ ID NO: 3077884 - RNA, 19 nt, Artificial Sequence
  Description of Artificial Sequence: Synthetic oligonucleotide
accugguggccucggugag

SEQ ID NO: 3077885 - RNA, 19 nt, Artificial Sequence
  Description of Artificial Sequence: Synthetic oligonucleotide
ucacugaccugguggccuc

SEQ ID NO: 3077886 - RNA, 19 nt, Artificial Sequence
  Description of Artificial Sequence: Synthetic oligonucleotide
cugauuccacuuugcagaa

SEQ ID NO: 3077887 - RNA, 19 nt, Artificial Sequence
  Description of Artificial Sequence: Synthetic oligonucleotide
caggaaccucauaagauau

SEQ ID NO: 3077888 - RNA, 19 nt, Artificial Sequence
  Description of Artificial Sequence: Synthetic oligonucleotide
ccagcaaaucuccuucaug

SEQ ID NO: 3077889 - RNA, 19 nt, Artificial Sequence
  Description of Artificial Sequence: Synthetic oligonucleotide
gggcaggaaccucauaaga

SEQ ID NO: 3077890 - RNA, 19 nt, Artificial Sequence
  Description of Artificial Sequence: Synthetic oligonucleotide
gccgaaauggcagacuguc

SEQ ID NO: 3077891 - RNA, 19 nt, Artificial Sequence
  Description of Artificial Sequence: Synthetic oligonucleotide
cgaaauggcagacugucca

SEQ ID NO: 3077892 - RNA, 19 nt, Artificial Sequence
  Description of Artificial Sequence: Synthetic oligonucleotide
caugcucagucugauucca

SEQ ID NO: 3077893 - RNA, 19 nt, Artificial Sequence
  Description of Artificial Sequence: Synthetic oligonucleotide
auuccacuuugcagaaacu

SEQ ID NO: 3077894 - RNA, 19 nt, Artificial Sequence
  Description of Artificial Sequence: Synthetic oligonucleotide
cagguaaacuaaggcuaac

SEQ ID NO: 3077895 - RNA, 19 nt, Artificial Sequence
  Description of Artificial Sequence: Synthetic oligonucleotide
caaugagcaguccaaguuu

SEQ ID NO: 3077896 - RNA, 19 nt, Artificial Sequence
  Description of Artificial Sequence: Synthetic oligonucleotide
aaucuccuucaugcucagu

SEQ ID NO: 3077897 - RNA, 19 nt, Artificial Sequence
  Description of Artificial Sequence: Synthetic oligonucleotide
ccucagguaaacuaaggcu

SEQ ID NO: 3077898 - RNA, 19 nt, Artificial Sequence
  Description of Artificial Sequence: Synthetic oligonucleotide
gcgagauguaacaacuguc

SEQ ID NO: 3077899 - RNA, 19 nt, Artificial Sequence
  Description of Artificial Sequence: Synthetic oligonucleotide
augagcaguccaaguuuug

SEQ ID NO: 3077900 - RNA, 19 nt, Artificial Sequence
  Description of Artificial Sequence: Synthetic oligonucleotide
acugaccugguggccucgg

SEQ ID NO: 3077901 - RNA, 19 nt, Artificial Sequence
  Description of Artificial Sequence: Synthetic oligonucleotide
ggaacauggcaggccaaug

SEQ ID NO: 3077902 - RNA, 19 nt, Artificial Sequence
  Description of Artificial Sequence: Synthetic oligonucleotide
ccgaaauggcagacugucc

SEQ ID NO: 3077903 - RNA, 19 nt, Artificial Sequence
  Description of Artificial Sequence: Synthetic oligonucleotide
auggccgaaauggcagacu

SEQ ID NO: 3077904 - RNA, 19 nt, Artificial Sequence
  Description of Artificial Sequence: Synthetic oligonucleotide
uggcagcgagauguaacaa

SEQ ID NO: 3077905 - RNA, 19 nt, Artificial Sequence
  Description of Artificial Sequence: Synthetic oligonucleotide
ugauuccacuuugcagaaa

SEQ ID NO: 3077906 - RNA, 19 nt, Artificial Sequence
  Description of Artificial Sequence: Synthetic oligonucleotide
ggcaaagccucagguaaac

SEQ ID NO: 3077907 - RNA, 19 nt, Artificial Sequence
  Description of Artificial Sequence: Synthetic oligonucleotide
cacuggucccagcaaaucu

SEQ ID NO: 3077908 - RNA, 19 nt, Artificial Sequence
  Description of Artificial Sequence: Synthetic oligonucleotide
ggccaaugagcaguccaag

SEQ ID NO: 3077909 - RNA, 19 nt, Artificial Sequence
  Description of Artificial Sequence: Synthetic oligonucleotide
gcagcgagauguaacaacu

SEQ ID NO: 3077910 - RNA, 19 nt, Artificial Sequence
  Description of Artificial Sequence: Synthetic oligonucleotide
caagcuucuugagcaggca

SEQ ID NO: 3077911 - RNA, 19 nt, Artificial Sequence
  Description of Artificial Sequence: Synthetic oligonucleotide
aucccaggcacugguccca

SEQ ID NO: 3077912 - RNA, 19 nt, Artificial Sequence
  Description of Artificial Sequence: Synthetic oligonucleotide
gccucggugagagaugaca

SEQ ID NO: 3077913 - RNA, 19 nt, Artificial Sequence
  Description of Artificial Sequence: Synthetic oligonucleotide
ucccaggcacuggucccag

SEQ ID NO: 3077914 - RNA, 19 nt, Artificial Sequence
  Description of Artificial Sequence: Synthetic oligonucleotide
cucggugagagaugacagu

SEQ ID NO: 3077915 - RNA, 19 nt, Artificial Sequence
  Description of Artificial Sequence: Synthetic oligonucleotide
cucauaagauauggccgaa

SEQ ID NO: 3077916 - RNA, 19 nt, Artificial Sequence
  Description of Artificial Sequence: Synthetic oligonucleotide
gcaggcaaagccucaggua

SEQ ID NO: 3077917 - RNA, 19 nt, Artificial Sequence
  Description of Artificial Sequence: Synthetic oligonucleotide
uugcagaaacugggcucac

SEQ ID NO: 3077918 - RNA, 19 nt, Artificial Sequence
  Description of Artificial Sequence: Synthetic oligonucleotide
cggugagagaugacaguag

SEQ ID NO: 3077919 - RNA, 19 nt, Artificial Sequence
  Description of Artificial Sequence: Synthetic oligonucleotide
guggccucggugagagaug

SEQ ID NO: 3077920 - RNA, 19 nt, Artificial Sequence
  Description of Artificial Sequence: Synthetic oligonucleotide
aggcaaagccucagguaaa

SEQ ID NO: 3077921 - RNA, 19 nt, Artificial Sequence
  Description of Artificial Sequence: Synthetic oligonucleotide
cucagucugauuccacuuu

SEQ ID NO: 3077922 - RNA, 19 nt, Artificial Sequence
  Description of Artificial Sequence: Synthetic oligonucleotide
cacugaccugguggccucg

SEQ ID NO: 3077923 - RNA, 19 nt, Artificial Sequence
  Description of Artificial Sequence: Synthetic oligonucleotide
cucacugaccugguggccu

SEQ ID NO: 3077924 - RNA, 19 nt, Artificial Sequence
  Description of Artificial Sequence: Synthetic oligonucleotide
gccaaugagcaguccaagu

SEQ ID NO: 3077925 - RNA, 19 nt, Artificial Sequence
  Description of Artificial Sequence: Synthetic oligonucleotide
cauuggcagcgagauguaa

SEQ ID NO: 3077926 - RNA, 19 nt, Artificial Sequence
  Description of Artificial Sequence: Synthetic oligonucleotide
gguggccucggugagagau

SEQ ID NO: 3077927 - RNA, 19 nt, Artificial Sequence
  Description of Artificial Sequence: Synthetic oligonucleotide
ccaaugagcaguccaaguu

SEQ ID NO: 3077928 - RNA, 19 nt, Artificial Sequence
  Description of Artificial Sequence: Synthetic oligonucleotide
ggaaucccaggcacugguc

SEQ ID NO: 3077929 - RNA, 19 nt, Artificial Sequence
  Description of Artificial Sequence: Synthetic oligonucleotide
acauuggcagcgagaugua

SEQ ID NO: 3077930 - RNA, 19 nt, Artificial Sequence
  Description of Artificial Sequence: Synthetic oligonucleotide
gcucacugaccugguggcc

SEQ ID NO: 3077931 - RNA, 19 nt, Artificial Sequence
  Description of Artificial Sequence: Synthetic oligonucleotide
gcacuggucccagcaaauc

SEQ ID NO: 3077932 - RNA, 19 nt, Artificial Sequence
  Description of Artificial Sequence: Synthetic oligonucleotide
cuguccucuggggacuaaa

SEQ ID NO: 3077933 - RNA, 19 nt, Artificial Sequence
  Description of Artificial Sequence: Synthetic oligonucleotide
cuggggacuaaagcugagu

SEQ ID NO: 3077934 - RNA, 19 nt, Artificial Sequence
  Description of Artificial Sequence: Synthetic oligonucleotide
ggucccagcaaaucuccuu

SEQ ID NO: 3077935 - RNA, 19 nt, Artificial Sequence
  Description of Artificial Sequence: Synthetic oligonucleotide
gcucagucugauuccacuu

SEQ ID NO: 3077936 - RNA, 19 nt, Artificial Sequence
  Description of Artificial Sequence: Synthetic oligonucleotide
ggacuaaagcugaguggaa

SEQ ID NO: 3077937 - RNA, 19 nt, Artificial Sequence
  Description of Artificial Sequence: Synthetic oligonucleotide
ggcaggccaaugagcaguc

SEQ ID NO: 3077938 - RNA, 19 nt, Artificial Sequence
  Description of Artificial Sequence: Synthetic oligonucleotide
cuucaugcucagucugauu

SEQ ID NO: 3077939 - RNA, 19 nt, Artificial Sequence
  Description of Artificial Sequence: Synthetic oligonucleotide
guggaacauggcaggccaa

SEQ ID NO: 3077940 - RNA, 19 nt, Artificial Sequence
  Description of Artificial Sequence: Synthetic oligonucleotide
acuguccucuggggacuaa

SEQ ID NO: 3077941 - RNA, 19 nt, Artificial Sequence
  Description of Artificial Sequence: Synthetic oligonucleotide
gcaaagccucagguaaacu

SEQ ID NO: 3077942 - RNA, 19 nt, Artificial Sequence
  Description of Artificial Sequence: Synthetic oligonucleotide
cugggcucacugaccuggu

SEQ ID NO: 3077943 - RNA, 19 nt, Artificial Sequence
  Description of Artificial Sequence: Synthetic oligonucleotide
cagacuguccaagcuucuu

SEQ ID NO: 3077944 - RNA, 19 nt, Artificial Sequence
  Description of Artificial Sequence: Synthetic oligonucleotide
cugaccugguggccucggu

SEQ ID NO: 3077945 - RNA, 19 nt, Artificial Sequence
  Description of Artificial Sequence: Synthetic oligonucleotide
ggccgaaauggcagacugu

SEQ ID NO: 3077946 - RNA, 19 nt, Artificial Sequence
  Description of Artificial Sequence: Synthetic oligonucleotide
ccuucaugcucagucugau

SEQ ID NO: 3077947 - RNA, 19 nt, Artificial Sequence
  Description of Artificial Sequence: Synthetic oligonucleotide
cccagcaaaucuccuucau

SEQ ID NO: 3077948 - RNA, 19 nt, Artificial Sequence
  Description of Artificial Sequence: Synthetic oligonucleotide
ggccucggugagagaugac

SEQ ID NO: 3077949 - RNA, 19 nt, Artificial Sequence
  Description of Artificial Sequence: Synthetic oligonucleotide
aaggauggaaguuguaucc

SEQ ID NO: 3077950 - RNA, 19 nt, Artificial Sequence
  Description of Artificial Sequence: Synthetic oligonucleotide
agaguaagcaucuguaucc

SEQ ID NO: 3077951 - RNA, 19 nt, Artificial Sequence
  Description of Artificial Sequence: Synthetic oligonucleotide
uuaagcuucggaaggaugg

SEQ ID NO: 3077952 - RNA, 19 nt, Artificial Sequence
  Description of Artificial Sequence: Synthetic oligonucleotide
aauuguuggggccuucccc

SEQ ID NO: 3077953 - RNA, 19 nt, Artificial Sequence
  Description of Artificial Sequence: Synthetic oligonucleotide
gaaguuguauccuccaugg

SEQ ID NO: 3077954 - RNA, 19 nt, Artificial Sequence
  Description of Artificial Sequence: Synthetic oligonucleotide
aaugccauaggcauuagag

SEQ ID NO: 3077955 - RNA, 19 nt, Artificial Sequence
  Description of Artificial Sequence: Synthetic oligonucleotide
agaacgaugacuuggccag

SEQ ID NO: 3077956 - RNA, 19 nt, Artificial Sequence
  Description of Artificial Sequence: Synthetic oligonucleotide
uguaggcuuugucacaugg

SEQ ID NO: 3077957 - RNA, 19 nt, Artificial Sequence
  Description of Artificial Sequence: Synthetic oligonucleotide
aaacgagccuccuucucgc

SEQ ID NO: 3077958 - RNA, 19 nt, Artificial Sequence
  Description of Artificial Sequence: Synthetic oligonucleotide
uuugcgaccaccugcuagg

SEQ ID NO: 3077959 - RNA, 19 nt, Artificial Sequence
  Description of Artificial Sequence: Synthetic oligonucleotide
ugccacucaaucauguggg

SEQ ID NO: 3077960 - RNA, 19 nt, Artificial Sequence
  Description of Artificial Sequence: Synthetic oligonucleotide
gaaacgagccuccuucucg

SEQ ID NO: 3077961 - RNA, 19 nt, Artificial Sequence
  Description of Artificial Sequence: Synthetic oligonucleotide
uuagaguuucgcuuaagcu

SEQ ID NO: 3077962 - RNA, 19 nt, Artificial Sequence
  Description of Artificial Sequence: Synthetic oligonucleotide
cucgagaucccugagaacg

SEQ ID NO: 3077963 - RNA, 19 nt, Artificial Sequence
  Description of Artificial Sequence: Synthetic oligonucleotide
uucgcuuaagcuucggaag

SEQ ID NO: 3077964 - RNA, 19 nt, Artificial Sequence
  Description of Artificial Sequence: Synthetic oligonucleotide
ugguccuucaugcuucucg

SEQ ID NO: 3077965 - RNA, 19 nt, Artificial Sequence
  Description of Artificial Sequence: Synthetic oligonucleotide
auaggcauuagaguuucgc

SEQ ID NO: 3077966 - RNA, 19 nt, Artificial Sequence
  Description of Artificial Sequence: Synthetic oligonucleotide
guuguggcugaauuguugg

SEQ ID NO: 3077967 - RNA, 19 nt, Artificial Sequence
  Description of Artificial Sequence: Synthetic oligonucleotide
uuuugcgaccaccugcuag

SEQ ID NO: 3077968 - RNA, 19 nt, Artificial Sequence
  Description of Artificial Sequence: Synthetic oligonucleotide
ucgcuuaagcuucggaagg

SEQ ID NO: 3077969 - RNA, 19 nt, Artificial Sequence
  Description of Artificial Sequence: Synthetic oligonucleotide
ugucacaugguccuucaug

SEQ ID NO: 3077970 - RNA, 19 nt, Artificial Sequence
  Description of Artificial Sequence: Synthetic oligonucleotide
uagaguuucgcuuaagcuu

SEQ ID NO: 3077971 - RNA, 19 nt, Artificial Sequence
  Description of Artificial Sequence: Synthetic oligonucleotide
gucacaugguccuucaugc

SEQ ID NO: 3077972 - RNA, 19 nt, Artificial Sequence
  Description of Artificial Sequence: Synthetic oligonucleotide
agaguuucgcuuaagcuuc

SEQ ID NO: 3077973 - RNA, 19 nt, Artificial Sequence
  Description of Artificial Sequence: Synthetic oligonucleotide
uaggaaacgagccuccuuc

SEQ ID NO: 3077974 - RNA, 19 nt, Artificial Sequence
  Description of Artificial Sequence: Synthetic oligonucleotide
uguggcugaauuguugggg

SEQ ID NO: 3077975 - RNA, 19 nt, Artificial Sequence
  Description of Artificial Sequence: Synthetic oligonucleotide
uuucgcuuaagcuucggaa

SEQ ID NO: 3077976 - RNA, 19 nt, Artificial Sequence
  Description of Artificial Sequence: Synthetic oligonucleotide
uucucgagaucccugagaa

SEQ ID NO: 3077977 - RNA, 19 nt, Artificial Sequence
  Description of Artificial Sequence: Synthetic oligonucleotide
uguguuguggcugaauugu

SEQ ID NO: 3077978 - RNA, 19 nt, Artificial Sequence
  Description of Artificial Sequence: Synthetic oligonucleotide
uguaucccugcgcacagcc

SEQ ID NO: 3077979 - RNA, 19 nt, Artificial Sequence
  Description of Artificial Sequence: Synthetic oligonucleotide
gaaggauggaaguuguauc

SEQ ID NO: 3077980 - RNA, 19 nt, Artificial Sequence
  Description of Artificial Sequence: Synthetic oligonucleotide
uguuguggcugaauuguug

SEQ ID NO: 3077981 - RNA, 19 nt, Artificial Sequence
  Description of Artificial Sequence: Synthetic oligonucleotide
agcaucuguaucccugcgc

SEQ ID NO: 3077982 - RNA, 19 nt, Artificial Sequence
  Description of Artificial Sequence: Synthetic oligonucleotide
uaggcuuugucacaugguc

SEQ ID NO: 3077983 - RNA, 19 nt, Artificial Sequence
  Description of Artificial Sequence: Synthetic oligonucleotide
ugccauaggcauuagaguu

SEQ ID NO: 3077984 - RNA, 19 nt, Artificial Sequence
  Description of Artificial Sequence: Synthetic oligonucleotide
uucaugcuucucgagaucc

SEQ ID NO: 3077985 - RNA, 19 nt, Artificial Sequence
  Description of Artificial Sequence: Synthetic oligonucleotide
cugccacucaaucaugugg

SEQ ID NO: 3077986 - RNA, 19 nt, Artificial Sequence
  Description of Artificial Sequence: Synthetic oligonucleotide
uaagcaucuguaucccugc

SEQ ID NO: 3077987 - RNA, 19 nt, Artificial Sequence
  Description of Artificial Sequence: Synthetic oligonucleotide
uccuucaugcuucucgaga

SEQ ID NO: 3077988 - RNA, 19 nt, Artificial Sequence
  Description of Artificial Sequence: Synthetic oligonucleotide
gaugacuuggccagggccc

SEQ ID NO: 3077989 - RNA, 19 nt, Artificial Sequence
  Description of Artificial Sequence: Synthetic oligonucleotide
gagaacgaugacuuggcca

SEQ ID NO: 3077990 - RNA, 19 nt, Artificial Sequence
  Description of Artificial Sequence: Synthetic oligonucleotide
uuggccagggccccaaugc

SEQ ID NO: 3077991 - RNA, 19 nt, Artificial Sequence
  Description of Artificial Sequence: Synthetic oligonucleotide
uucggaaggauggaaguug

SEQ ID NO: 3077992 - RNA, 19 nt, Artificial Sequence
  Description of Artificial Sequence: Synthetic oligonucleotide
uaggcauuagaguuucgcu

SEQ ID NO: 3077993 - RNA, 19 nt, Artificial Sequence
  Description of Artificial Sequence: Synthetic oligonucleotide
gauggaaguuguauccucc

SEQ ID NO: 3077994 - RNA, 19 nt, Artificial Sequence
  Description of Artificial Sequence: Synthetic oligonucleotide
ucuguaucccugcgcacag

SEQ ID NO: 3077995 - RNA, 19 nt, Artificial Sequence
  Description of Artificial Sequence: Synthetic oligonucleotide
cugagaacgaugacuuggc

SEQ ID NO: 3077996 - RNA, 19 nt, Artificial Sequence
  Description of Artificial Sequence: Synthetic oligonucleotide
aacgaugacuuggccaggg

SEQ ID NO: 3077997 - RNA, 19 nt, Artificial Sequence
  Description of Artificial Sequence: Synthetic oligonucleotide
aagcaucuguaucccugcg

SEQ ID NO: 3077998 - RNA, 19 nt, Artificial Sequence
  Description of Artificial Sequence: Synthetic oligonucleotide
accugcuaggaaacgagcc

SEQ ID NO: 3077999 - RNA, 19 nt, Artificial Sequence
  Description of Artificial Sequence: Synthetic oligonucleotide
cagaguaagcaucuguauc

SEQ ID NO: 3078000 - RNA, 19 nt, Artificial Sequence
  Description of Artificial Sequence: Synthetic oligonucleotide
aacgagccuccuucucgcc

SEQ ID NO: 3078001 - RNA, 19 nt, Artificial Sequence
  Description of Artificial Sequence: Synthetic oligonucleotide
cuuaagcuucggaaggaug

SEQ ID NO: 3078002 - RNA, 19 nt, Artificial Sequence
  Description of Artificial Sequence: Synthetic oligonucleotide
ucagaguaagcaucuguau

SEQ ID NO: 3078003 - RNA, 19 nt, Artificial Sequence
  Description of Artificial Sequence: Synthetic oligonucleotide
ucaaucaugugggccaccc

SEQ ID NO: 3078004 - RNA, 19 nt, Artificial Sequence
  Description of Artificial Sequence: Synthetic oligonucleotide
ucccugagaacgaugacuu

SEQ ID NO: 3078005 - RNA, 19 nt, Artificial Sequence
  Description of Artificial Sequence: Synthetic oligonucleotide
uuugucacaugguccuuca

SEQ ID NO: 3078006 - RNA, 19 nt, Artificial Sequence
  Description of Artificial Sequence: Synthetic oligonucleotide
ugagaacgaugacuuggcc

SEQ ID NO: 3078007 - RNA, 19 nt, Artificial Sequence
  Description of Artificial Sequence: Synthetic oligonucleotide
guaagcaucuguaucccug

SEQ ID NO: 3078008 - RNA, 19 nt, Artificial Sequence
  Description of Artificial Sequence: Synthetic oligonucleotide
aggcuuugucacauggucc

SEQ ID NO: 3078009 - RNA, 19 nt, Artificial Sequence
  Description of Artificial Sequence: Synthetic oligonucleotide
gaauuguuggggccuuccc

SEQ ID NO: 3078010 - RNA, 19 nt, Artificial Sequence
  Description of Artificial Sequence: Synthetic oligonucleotide
ggaaguuguauccuccaug

SEQ ID NO: 3078011 - RNA, 19 nt, Artificial Sequence
  Description of Artificial Sequence: Synthetic oligonucleotide
ugcuaggaaacgagccucc

SEQ ID NO: 3078012 - RNA, 19 nt, Artificial Sequence
  Description of Artificial Sequence: Synthetic oligonucleotide
ucggaaggauggaaguugu

SEQ ID NO: 3078013 - RNA, 19 nt, Artificial Sequence
  Description of Artificial Sequence: Synthetic oligonucleotide
acaugguccuucaugcuuc

SEQ ID NO: 3078014 - RNA, 19 nt, Artificial Sequence
  Description of Artificial Sequence: Synthetic oligonucleotide
cacucaaucaugugggcca

SEQ ID NO: 3078015 - RNA, 19 nt, Artificial Sequence
  Description of Artificial Sequence: Synthetic oligonucleotide
aggcauuagaguuucgcuu

SEQ ID NO: 3078016 - RNA, 19 nt, Artificial Sequence
  Description of Artificial Sequence: Synthetic oligonucleotide
ugaauuguuggggccuucc

SEQ ID NO: 3078017 - RNA, 19 nt, Artificial Sequence
  Description of Artificial Sequence: Synthetic oligonucleotide
ugcuucucgagaucccuga

SEQ ID NO: 3078018 - RNA, 19 nt, Artificial Sequence
  Description of Artificial Sequence: Synthetic oligonucleotide
gaguaagcaucuguauccc

SEQ ID NO: 3078019 - RNA, 19 nt, Artificial Sequence
  Description of Artificial Sequence: Synthetic oligonucleotide
cucgccaucgcugagguca

SEQ ID NO: 3078020 - RNA, 19 nt, Artificial Sequence
  Description of Artificial Sequence: Synthetic oligonucleotide
acgaugacuuggccagggc

SEQ ID NO: 3078021 - RNA, 19 nt, Artificial Sequence
  Description of Artificial Sequence: Synthetic oligonucleotide
cuguguuguggcugaauug

SEQ ID NO: 3078022 - RNA, 19 nt, Artificial Sequence
  Description of Artificial Sequence: Synthetic oligonucleotide
aaguuguauccuccaugga

SEQ ID NO: 3078023 - RNA, 19 nt, Artificial Sequence
  Description of Artificial Sequence: Synthetic oligonucleotide
auggaaguuguauccucca

SEQ ID NO: 3078024 - RNA, 19 nt, Artificial Sequence
  Description of Artificial Sequence: Synthetic oligonucleotide
agaucccugagaacgauga

SEQ ID NO: 3078025 - RNA, 19 nt, Artificial Sequence
  Description of Artificial Sequence: Synthetic oligonucleotide
aucccugagaacgaugacu

SEQ ID NO: 3078026 - RNA, 19 nt, Artificial Sequence
  Description of Artificial Sequence: Synthetic oligonucleotide
aucaugugggccacccgcc

SEQ ID NO: 3078027 - RNA, 19 nt, Artificial Sequence
  Description of Artificial Sequence: Synthetic oligonucleotide
ucgagaucccugagaacga

SEQ ID NO: 3078028 - RNA, 19 nt, Artificial Sequence
  Description of Artificial Sequence: Synthetic oligonucleotide
agcccugccacucaaucau

SEQ ID NO: 3078029 - RNA, 19 nt, Artificial Sequence
  Description of Artificial Sequence: Synthetic oligonucleotide
uucucgccaucgcugaggu

SEQ ID NO: 3078030 - RNA, 19 nt, Artificial Sequence
  Description of Artificial Sequence: Synthetic oligonucleotide
augacuuggccagggcccc

SEQ ID NO: 3078031 - RNA, 19 nt, Artificial Sequence
  Description of Artificial Sequence: Synthetic oligonucleotide
ccugagaacgaugacuugg

SEQ ID NO: 3078032 - RNA, 19 nt, Artificial Sequence
  Description of Artificial Sequence: Synthetic oligonucleotide
cucguggcuguguuguggc

SEQ ID NO: 3078033 - RNA, 19 nt, Artificial Sequence
  Description of Artificial Sequence: Synthetic oligonucleotide
aguaagcaucuguaucccu

SEQ ID NO: 3078034 - RNA, 19 nt, Artificial Sequence
  Description of Artificial Sequence: Synthetic oligonucleotide
ucaugugggccacccgccc

SEQ ID NO: 3078035 - RNA, 19 nt, Artificial Sequence
  Description of Artificial Sequence: Synthetic oligonucleotide
uggaaguuguauccuccau

SEQ ID NO: 3078036 - RNA, 19 nt, Artificial Sequence
  Description of Artificial Sequence: Synthetic oligonucleotide
uggcugaauuguuggggcc

SEQ ID NO: 3078037 - RNA, 19 nt, Artificial Sequence
  Description of Artificial Sequence: Synthetic oligonucleotide
uccuucucgccaucgcuga

SEQ ID NO: 3078038 - RNA, 19 nt, Artificial Sequence
  Description of Artificial Sequence: Synthetic oligonucleotide
uaagcuucggaaggaugga

SEQ ID NO: 3078039 - RNA, 19 nt, Artificial Sequence
  Description of Artificial Sequence: Synthetic oligonucleotide
cuccuucucgccaucgcug

SEQ ID NO: 3078040 - RNA, 19 nt, Artificial Sequence
  Description of Artificial Sequence: Synthetic oligonucleotide
aucuguaucccugcgcaca

SEQ ID NO: 3078041 - RNA, 19 nt, Artificial Sequence
  Description of Artificial Sequence: Synthetic oligonucleotide
ucgcugaggucagaguaag

SEQ ID NO: 3078042 - RNA, 19 nt, Artificial Sequence
  Description of Artificial Sequence: Synthetic oligonucleotide
agcuucggaaggauggaag

SEQ ID NO: 3078043 - RNA, 19 nt, Artificial Sequence
  Description of Artificial Sequence: Synthetic oligonucleotide
cuucucgccaucgcugagg

SEQ ID NO: 3078044 - RNA, 19 nt, Artificial Sequence
  Description of Artificial Sequence: Synthetic oligonucleotide
caccugcuaggaaacgagc

SEQ ID NO: 3078045 - RNA, 19 nt, Artificial Sequence
  Description of Artificial Sequence: Synthetic oligonucleotide
ucacaugguccuucaugcu

SEQ ID NO: 3078046 - RNA, 19 nt, Artificial Sequence
  Description of Artificial Sequence: Synthetic oligonucleotide
aggaaacgagccuccuucu

SEQ ID NO: 3078047 - RNA, 19 nt, Artificial Sequence
  Description of Artificial Sequence: Synthetic oligonucleotide
caaucaugugggccacccg

SEQ ID NO: 3078048 - RNA, 19 nt, Artificial Sequence
  Description of Artificial Sequence: Synthetic oligonucleotide
cuugccccauggcuguagg

SEQ ID NO: 3078049 - RNA, 19 nt, Artificial Sequence
  Description of Artificial Sequence: Synthetic oligonucleotide
gcaucuguaucccugcgca

SEQ ID NO: 3078050 - RNA, 19 nt, Artificial Sequence
  Description of Artificial Sequence: Synthetic oligonucleotide
gcugaggucagaguaagca

SEQ ID NO: 3078051 - RNA, 19 nt, Artificial Sequence
  Description of Artificial Sequence: Synthetic oligonucleotide
caucgcugaggucagagua

SEQ ID NO: 3078052 - RNA, 19 nt, Artificial Sequence
  Description of Artificial Sequence: Synthetic oligonucleotide
cuuugucacaugguccuuc

SEQ ID NO: 3078053 - RNA, 19 nt, Artificial Sequence
  Description of Artificial Sequence: Synthetic oligonucleotide
guuucgcuuaagcuucgga

SEQ ID NO: 3078054 - RNA, 19 nt, Artificial Sequence
  Description of Artificial Sequence: Synthetic oligonucleotide
aggauggaaguuguauccu

SEQ ID NO: 3078055 - RNA, 19 nt, Artificial Sequence
  Description of Artificial Sequence: Synthetic oligonucleotide
gucagaguaagcaucugua

SEQ ID NO: 3078056 - RNA, 19 nt, Artificial Sequence
  Description of Artificial Sequence: Synthetic oligonucleotide
cugcuaggaaacgagccuc

SEQ ID NO: 3078057 - RNA, 19 nt, Artificial Sequence
  Description of Artificial Sequence: Synthetic oligonucleotide
ggcauuagaguuucgcuua

SEQ ID NO: 3078058 - RNA, 19 nt, Artificial Sequence
  Description of Artificial Sequence: Synthetic oligonucleotide
ucucgagaucccugagaac

SEQ ID NO: 3078059 - RNA, 19 nt, Artificial Sequence
  Description of Artificial Sequence: Synthetic oligonucleotide
gaguuucgcuuaagcuucg

SEQ ID NO: 3078060 - RNA, 19 nt, Artificial Sequence
  Description of Artificial Sequence: Synthetic oligonucleotide
cuucaugcuucucgagauc

SEQ ID NO: 3078061 - RNA, 19 nt, Artificial Sequence
  Description of Artificial Sequence: Synthetic oligonucleotide
gagaucccugagaacgaug

SEQ ID NO: 3078062 - RNA, 19 nt, Artificial Sequence
  Description of Artificial Sequence: Synthetic oligonucleotide
gaacgaugacuuggccagg

SEQ ID NO: 3078063 - RNA, 19 nt, Artificial Sequence
  Description of Artificial Sequence: Synthetic oligonucleotide
aguuucgcuuaagcuucgg

SEQ ID NO: 3078064 - RNA, 19 nt, Artificial Sequence
  Description of Artificial Sequence: Synthetic oligonucleotide
ggauggaaguuguauccuc

SEQ ID NO: 3078065 - RNA, 19 nt, Artificial Sequence
  Description of Artificial Sequence: Synthetic oligonucleotide
agccucguggcuguguugu

SEQ ID NO: 3078066 - RNA, 19 nt, Artificial Sequence
  Description of Artificial Sequence: Synthetic oligonucleotide
cuucucgagaucccugaga

SEQ ID NO: 3078067 - RNA, 19 nt, Artificial Sequence
  Description of Artificial Sequence: Synthetic oligonucleotide
caucuguaucccugcgcac

SEQ ID NO: 3078068 - RNA, 19 nt, Artificial Sequence
  Description of Artificial Sequence: Synthetic oligonucleotide
ucgccaucgcugaggucag

SEQ ID NO: 3078069 - RNA, 19 nt, Artificial Sequence
  Description of Artificial Sequence: Synthetic oligonucleotide
aagcuucggaaggauggaa

SEQ ID NO: 3078070 - RNA, 19 nt, Artificial Sequence
  Description of Artificial Sequence: Synthetic oligonucleotide
guccuucaugcuucucgag

SEQ ID NO: 3078071 - RNA, 19 nt, Artificial Sequence
  Description of Artificial Sequence: Synthetic oligonucleotide
acgagccuccuucucgcca

SEQ ID NO: 3078072 - RNA, 19 nt, Artificial Sequence
  Description of Artificial Sequence: Synthetic oligonucleotide
gaccaccugcuaggaaacg

SEQ ID NO: 3078073 - RNA, 19 nt, Artificial Sequence
  Description of Artificial Sequence: Synthetic oligonucleotide
uugccccauggcuguaggc

SEQ ID NO: 3078074 - RNA, 19 nt, Artificial Sequence
  Description of Artificial Sequence: Synthetic oligonucleotide
agggccccaaugccauagg

SEQ ID NO: 3078075 - RNA, 19 nt, Artificial Sequence
  Description of Artificial Sequence: Synthetic oligonucleotide
ccaccugcuaggaaacgag

SEQ ID NO: 3078076 - RNA, 19 nt, Artificial Sequence
  Description of Artificial Sequence: Synthetic oligonucleotide
ccugcgcacagccucgugg

SEQ ID NO: 3078077 - RNA, 19 nt, Artificial Sequence
  Description of Artificial Sequence: Synthetic oligonucleotide
gguccuucaugcuucucga

SEQ ID NO: 3078078 - RNA, 19 nt, Artificial Sequence
  Description of Artificial Sequence: Synthetic oligonucleotide
guggcuguguuguggcuga

SEQ ID NO: 3078079 - RNA, 19 nt, Artificial Sequence
  Description of Artificial Sequence: Synthetic oligonucleotide
gaggucagaguaagcaucu

SEQ ID NO: 3078080 - RNA, 19 nt, Artificial Sequence
  Description of Artificial Sequence: Synthetic oligonucleotide
gcgaccaccugcuaggaaa

SEQ ID NO: 3078081 - RNA, 19 nt, Artificial Sequence
  Description of Artificial Sequence: Synthetic oligonucleotide
acagccucguggcuguguu

SEQ ID NO: 3078082 - RNA, 19 nt, Artificial Sequence
  Description of Artificial Sequence: Synthetic oligonucleotide
ggcuuugucacaugguccu

SEQ ID NO: 3078083 - RNA, 19 nt, Artificial Sequence
  Description of Artificial Sequence: Synthetic oligonucleotide
cagggccccaaugccauag

SEQ ID NO: 3078084 - RNA, 19 nt, Artificial Sequence
  Description of Artificial Sequence: Synthetic oligonucleotide
uugucacaugguccuucau

SEQ ID NO: 3078085 - RNA, 19 nt, Artificial Sequence
  Description of Artificial Sequence: Synthetic oligonucleotide
caaugccauaggcauuaga

SEQ ID NO: 3078086 - RNA, 19 nt, Artificial Sequence
  Description of Artificial Sequence: Synthetic oligonucleotide
ugcgaccaccugcuaggaa

SEQ ID NO: 3078087 - RNA, 19 nt, Artificial Sequence
  Description of Artificial Sequence: Synthetic oligonucleotide
ugcgcacagccucguggcu

SEQ ID NO: 3078088 - RNA, 19 nt, Artificial Sequence
  Description of Artificial Sequence: Synthetic oligonucleotide
cgaugacuuggccagggcc

SEQ ID NO: 3078089 - RNA, 19 nt, Artificial Sequence
  Description of Artificial Sequence: Synthetic oligonucleotide
aucgcugaggucagaguaa

SEQ ID NO: 3078090 - RNA, 19 nt, Artificial Sequence
  Description of Artificial Sequence: Synthetic oligonucleotide
ccacucaaucaugugggcc

SEQ ID NO: 3078091 - RNA, 19 nt, Artificial Sequence
  Description of Artificial Sequence: Synthetic oligonucleotide
ggucagaguaagcaucugu

SEQ ID NO: 3078092 - RNA, 19 nt, Artificial Sequence
  Description of Artificial Sequence: Synthetic oligonucleotide
cuguaggcuuugucacaug

SEQ ID NO: 3078093 - RNA, 19 nt, Artificial Sequence
  Description of Artificial Sequence: Synthetic oligonucleotide
ggaaacgagccuccuucuc

SEQ ID NO: 3078094 - RNA, 19 nt, Artificial Sequence
  Description of Artificial Sequence: Synthetic oligonucleotide
agccuccuucucgccaucg

SEQ ID NO: 3078095 - RNA, 19 nt, Artificial Sequence
  Description of Artificial Sequence: Synthetic oligonucleotide
augcuucucgagaucccug

SEQ ID NO: 3078096 - RNA, 19 nt, Artificial Sequence
  Description of Artificial Sequence: Synthetic oligonucleotide
gcuucucgagaucccugag

SEQ ID NO: 3078097 - RNA, 19 nt, Artificial Sequence
  Description of Artificial Sequence: Synthetic oligonucleotide
cagcccugccacucaauca

SEQ ID NO: 3078098 - RNA, 19 nt, Artificial Sequence
  Description of Artificial Sequence: Synthetic oligonucleotide
ucguggcuguguuguggcu

SEQ ID NO: 3078099 - RNA, 19 nt, Artificial Sequence
  Description of Artificial Sequence: Synthetic oligonucleotide
ggaaggauggaaguuguau

SEQ ID NO: 3078100 - RNA, 19 nt, Artificial Sequence
  Description of Artificial Sequence: Synthetic oligonucleotide
gccaucgcugaggucagag

SEQ ID NO: 3078101 - RNA, 19 nt, Artificial Sequence
  Description of Artificial Sequence: Synthetic oligonucleotide
gccacucaaucaugugggc

SEQ ID NO: 3078102 - RNA, 19 nt, Artificial Sequence
  Description of Artificial Sequence: Synthetic oligonucleotide
acccgcccuugccccaugg

SEQ ID NO: 3078103 - RNA, 19 nt, Artificial Sequence
  Description of Artificial Sequence: Synthetic oligonucleotide
uugcgaccaccugcuagga

SEQ ID NO: 3078104 - RNA, 19 nt, Artificial Sequence
  Description of Artificial Sequence: Synthetic oligonucleotide
gggccccaaugccauaggc

SEQ ID NO: 3078105 - RNA, 19 nt, Artificial Sequence
  Description of Artificial Sequence: Synthetic oligonucleotide
gcuucggaaggauggaagu

SEQ ID NO: 3078106 - RNA, 19 nt, Artificial Sequence
  Description of Artificial Sequence: Synthetic oligonucleotide
augugggccacccgcccuu

SEQ ID NO: 3078107 - RNA, 19 nt, Artificial Sequence
  Description of Artificial Sequence: Synthetic oligonucleotide
ccugccacucaaucaugug

SEQ ID NO: 3078108 - RNA, 19 nt, Artificial Sequence
  Description of Artificial Sequence: Synthetic oligonucleotide
augguccuucaugcuucuc

SEQ ID NO: 3078109 - RNA, 19 nt, Artificial Sequence
  Description of Artificial Sequence: Synthetic oligonucleotide
cacaugguccuucaugcuu

SEQ ID NO: 3078110 - RNA, 19 nt, Artificial Sequence
  Description of Artificial Sequence: Synthetic oligonucleotide
ccucguggcuguguugugg

SEQ ID NO: 3078111 - RNA, 19 nt, Artificial Sequence
  Description of Artificial Sequence: Synthetic oligonucleotide
cuguaucccugcgcacagc

SEQ ID NO: 3078112 - RNA, 19 nt, Artificial Sequence
  Description of Artificial Sequence: Synthetic oligonucleotide
gccccaaugccauaggcau

SEQ ID NO: 3078113 - RNA, 19 nt, Artificial Sequence
  Description of Artificial Sequence: Synthetic oligonucleotide
guaggcuuugucacauggu

SEQ ID NO: 3078114 - RNA, 19 nt, Artificial Sequence
  Description of Artificial Sequence: Synthetic oligonucleotide
caugcuucucgagaucccu

SEQ ID NO: 3078115 - RNA, 19 nt, Artificial Sequence
  Description of Artificial Sequence: Synthetic oligonucleotide
gcuguguuguggcugaauu

SEQ ID NO: 3078116 - RNA, 19 nt, Artificial Sequence
  Description of Artificial Sequence: Synthetic oligonucleotide
ugugggccacccgcccuug

SEQ ID NO: 3078117 - RNA, 19 nt, Artificial Sequence
  Description of Artificial Sequence: Synthetic oligonucleotide
ccagcccugccacucaauc

SEQ ID NO: 3078118 - RNA, 19 nt, Artificial Sequence
  Description of Artificial Sequence: Synthetic oligonucleotide
ggccccaaugccauaggca

SEQ ID NO: 3078119 - RNA, 19 nt, Artificial Sequence
  Description of Artificial Sequence: Synthetic oligonucleotide
cugaauuguuggggccuuc

SEQ ID NO: 3078120 - RNA, 19 nt, Artificial Sequence
  Description of Artificial Sequence: Synthetic oligonucleotide
gcauuagaguuucgcuuaa

SEQ ID NO: 3078121 - RNA, 19 nt, Artificial Sequence
  Description of Artificial Sequence: Synthetic oligonucleotide
cagccucguggcuguguug

SEQ ID NO: 3078122 - RNA, 19 nt, Artificial Sequence
  Description of Artificial Sequence: Synthetic oligonucleotide
ugacuuggccagggcccca

SEQ ID NO: 3078123 - RNA, 19 nt, Artificial Sequence
  Description of Artificial Sequence: Synthetic oligonucleotide
ucucgccaucgcugagguc

SEQ ID NO: 3078124 - RNA, 19 nt, Artificial Sequence
  Description of Artificial Sequence: Synthetic oligonucleotide
ccuucaugcuucucgagau

SEQ ID NO: 3078125 - RNA, 19 nt, Artificial Sequence
  Description of Artificial Sequence: Synthetic oligonucleotide
gccuccuucucgccaucgc

SEQ ID NO: 3078126 - RNA, 19 nt, Artificial Sequence
  Description of Artificial Sequence: Synthetic oligonucleotide
cgaccaccugcuaggaaac

SEQ ID NO: 3078127 - RNA, 19 nt, Artificial Sequence
  Description of Artificial Sequence: Synthetic oligonucleotide
cuaggaaacgagccuccuu

SEQ ID NO: 3078128 - RNA, 19 nt, Artificial Sequence
  Description of Artificial Sequence: Synthetic oligonucleotide
cgcccuugccccauggcug

SEQ ID NO: 3078129 - RNA, 19 nt, Artificial Sequence
  Description of Artificial Sequence: Synthetic oligonucleotide
gagccuccuucucgccauc

SEQ ID NO: 3078130 - RNA, 19 nt, Artificial Sequence
  Description of Artificial Sequence: Synthetic oligonucleotide
caugguccuucaugcuucu

SEQ ID NO: 3078131 - RNA, 19 nt, Artificial Sequence
  Description of Artificial Sequence: Synthetic oligonucleotide
ccugcuaggaaacgagccu

SEQ ID NO: 3078132 - RNA, 19 nt, Artificial Sequence
  Description of Artificial Sequence: Synthetic oligonucleotide
cccaaugccauaggcauua

SEQ ID NO: 3078133 - RNA, 19 nt, Artificial Sequence
  Description of Artificial Sequence: Synthetic oligonucleotide
ggcugaauuguuggggccu

SEQ ID NO: 3078134 - RNA, 19 nt, Artificial Sequence
  Description of Artificial Sequence: Synthetic oligonucleotide
cccugagaacgaugacuug

SEQ ID NO: 3078135 - RNA, 19 nt, Artificial Sequence
  Description of Artificial Sequence: Synthetic oligonucleotide
gcgcacagccucguggcug

SEQ ID NO: 3078136 - RNA, 19 nt, Artificial Sequence
  Description of Artificial Sequence: Synthetic oligonucleotide
cuucggaaggauggaaguu

SEQ ID NO: 3078137 - RNA, 19 nt, Artificial Sequence
  Description of Artificial Sequence: Synthetic oligonucleotide
cguggcuguguuguggcug

SEQ ID NO: 3078138 - RNA, 19 nt, Artificial Sequence
  Description of Artificial Sequence: Synthetic oligonucleotide
gugggccacccgcccuugc

SEQ ID NO: 3078139 - RNA, 19 nt, Artificial Sequence
  Description of Artificial Sequence: Synthetic oligonucleotide
caugugggccacccgcccu

SEQ ID NO: 3078140 - RNA, 19 nt, Artificial Sequence
  Description of Artificial Sequence: Synthetic oligonucleotide
gcuguaggcuuugucacau

SEQ ID NO: 3078141 - RNA, 19 nt, Artificial Sequence
  Description of Artificial Sequence: Synthetic oligonucleotide
ccuucucgccaucgcugag

SEQ ID NO: 3078142 - RNA, 19 nt, Artificial Sequence
  Description of Artificial Sequence: Synthetic oligonucleotide
ccuugccccauggcuguag

SEQ ID NO: 3078143 - RNA, 19 nt, Artificial Sequence
  Description of Artificial Sequence: Synthetic oligonucleotide
guaucccugcgcacagccu

SEQ ID NO: 3078144 - RNA, 19 nt, Artificial Sequence
  Description of Artificial Sequence: Synthetic oligonucleotide
cgcugaggucagaguaagc

SEQ ID NO: 3078145 - RNA, 19 nt, Artificial Sequence
  Description of Artificial Sequence: Synthetic oligonucleotide
uggcuguguuguggcugaa

SEQ ID NO: 3078146 - RNA, 19 nt, Artificial Sequence
  Description of Artificial Sequence: Synthetic oligonucleotide
gccucguggcuguguugug

SEQ ID NO: 3078147 - RNA, 19 nt, Artificial Sequence
  Description of Artificial Sequence: Synthetic oligonucleotide
gcuuaagcuucggaaggau

SEQ ID NO: 3078148 - RNA, 19 nt, Artificial Sequence
  Description of Artificial Sequence: Synthetic oligonucleotide
ccaaugccauaggcauuag

SEQ ID NO: 3078149 - RNA, 19 nt, Artificial Sequence
  Description of Artificial Sequence: Synthetic oligonucleotide
guguuguggcugaauuguu

SEQ ID NO: 3078150 - RNA, 19 nt, Artificial Sequence
  Description of Artificial Sequence: Synthetic oligonucleotide
gcccugccacucaaucaug

SEQ ID NO: 3078151 - RNA, 19 nt, Artificial Sequence
  Description of Artificial Sequence: Synthetic oligonucleotide
cccgcccuugccccauggc

SEQ ID NO: 3078152 - RNA, 19 nt, Artificial Sequence
  Description of Artificial Sequence: Synthetic oligonucleotide
ccuccuucucgccaucgcu

SEQ ID NO: 3078153 - RNA, 19 nt, Artificial Sequence
  Description of Artificial Sequence: Synthetic oligonucleotide
gcuaggaaacgagccuccu

SEQ ID NO: 3078154 - RNA, 19 nt, Artificial Sequence
  Description of Artificial Sequence: Synthetic oligonucleotide
cccauggcuguaggcuuug

SEQ ID NO: 3078155 - RNA, 19 nt, Artificial Sequence
  Description of Artificial Sequence: Synthetic oligonucleotide
cccugccacucaaucaugu

SEQ ID NO: 3078156 - RNA, 19 nt, Artificial Sequence
  Description of Artificial Sequence: Synthetic oligonucleotide
gcccuugccccauggcugu

SEQ ID NO: 3078157 - RNA, 19 nt, Artificial Sequence
  Description of Artificial Sequence: Synthetic oligonucleotide
cgcuuaagcuucggaagga

SEQ ID NO: 3078158 - RNA, 19 nt, Artificial Sequence
  Description of Artificial Sequence: Synthetic oligonucleotide
cacccgcccuugccccaug

SEQ ID NO: 3078159 - RNA, 19 nt, Artificial Sequence
  Description of Artificial Sequence: Synthetic oligonucleotide
ccaucgcugaggucagagu

SEQ ID NO: 3078160 - RNA, 19 nt, Artificial Sequence
  Description of Artificial Sequence: Synthetic oligonucleotide
gccccauggcuguaggcuu

SEQ ID NO: 3078161 - RNA, 19 nt, Artificial Sequence
  Description of Artificial Sequence: Synthetic oligonucleotide
cacagccucguggcugugu

SEQ ID NO: 3078162 - RNA, 19 nt, Artificial Sequence
  Description of Artificial Sequence: Synthetic oligonucleotide
gcugaauuguuggggccuu

SEQ ID NO: 3078163 - RNA, 19 nt, Artificial Sequence
  Description of Artificial Sequence: Synthetic oligonucleotide
ccgcccuugccccauggcu

SEQ ID NO: 3078164 - RNA, 19 nt, Artificial Sequence
  Description of Artificial Sequence: Synthetic oligonucleotide
gccacccgcccuugcccca

SEQ ID NO: 3078165 - RNA, 19 nt, Artificial Sequence
  Description of Artificial Sequence: Synthetic oligonucleotide
cccugcgcacagccucgug

SEQ ID NO: 3078166 - RNA, 19 nt, Artificial Sequence
  Description of Artificial Sequence: Synthetic oligonucleotide
ggcuguguuguggcugaau

SEQ ID NO: 3078167 - RNA, 19 nt, Artificial Sequence
  Description of Artificial Sequence: Synthetic oligonucleotide
cggaaggauggaaguugua

SEQ ID NO: 3078168 - RNA, 19 nt, Artificial Sequence
  Description of Artificial Sequence: Synthetic oligonucleotide
cgagccuccuucucgccau

SEQ ID NO: 3078169 - RNA, 19 nt, Artificial Sequence
  Description of Artificial Sequence: Synthetic oligonucleotide
cgcacagccucguggcugu

SEQ ID NO: 3078170 - RNA, 19 nt, Artificial Sequence
  Description of Artificial Sequence: Synthetic oligonucleotide
gcuuugucacaugguccuu

SEQ ID NO: 3078171 - RNA, 19 nt, Artificial Sequence
  Description of Artificial Sequence: Synthetic oligonucleotide
gcacagccucguggcugug

SEQ ID NO: 3078172 - RNA, 19 nt, Artificial Sequence
  Description of Artificial Sequence: Synthetic oligonucleotide
ccccaaugccauaggcauu

SEQ ID NO: 3078173 - RNA, 19 nt, Artificial Sequence
  Description of Artificial Sequence: Synthetic oligonucleotide
ccccagcccugccacucaa

SEQ ID NO: 3078174 - RNA, 19 nt, Artificial Sequence
  Description of Artificial Sequence: Synthetic oligonucleotide
ccccauggcuguaggcuuu

SEQ ID NO: 3078175 - RNA, 19 nt, Artificial Sequence
  Description of Artificial Sequence: Synthetic oligonucleotide
cgagaucccugagaacgau

SEQ ID NO: 3078176 - RNA, 19 nt, Artificial Sequence
  Description of Artificial Sequence: Synthetic oligonucleotide
cccagcccugccacucaau

SEQ ID NO: 3078177 - RNA, 19 nt, Artificial Sequence
  Description of Artificial Sequence: Synthetic oligonucleotide
cccuugccccauggcugua

SEQ ID NO: 3078178 - RNA, 19 nt, Artificial Sequence
  Description of Artificial Sequence: Synthetic oligonucleotide
cgccaucgcugaggucaga

SEQ ID NO: 3078179 - RNA, 19 nt, Artificial Sequence
  Description of Artificial Sequence: Synthetic oligonucleotide
ccacccgcccuugccccau

SEQ ID NO: 3078180 - RNA, 19 nt, Artificial Sequence
  Description of Artificial Sequence: Synthetic oligonucleotide
ugaaccagugacagaaagg

SEQ ID NO: 3078181 - RNA, 19 nt, Artificial Sequence
  Description of Artificial Sequence: Synthetic oligonucleotide
gaaccagugacagaaaggc

SEQ ID NO: 3078182 - RNA, 19 nt, Artificial Sequence
  Description of Artificial Sequence: Synthetic oligonucleotide
aaggccuugcuccuggaug

SEQ ID NO: 3078183 - RNA, 19 nt, Artificial Sequence
  Description of Artificial Sequence: Synthetic oligonucleotide
agaaaggccuugcuccugg

SEQ ID NO: 3078184 - RNA, 19 nt, Artificial Sequence
  Description of Artificial Sequence: Synthetic oligonucleotide
agugacagaaaggccuugc

SEQ ID NO: 3078185 - RNA, 19 nt, Artificial Sequence
  Description of Artificial Sequence: Synthetic oligonucleotide
gugaaccagugacagaaag

SEQ ID NO: 3078186 - RNA, 19 nt, Artificial Sequence
  Description of Artificial Sequence: Synthetic oligonucleotide
aggccuugcuccuggaugg

SEQ ID NO: 3078187 - RNA, 19 nt, Artificial Sequence
  Description of Artificial Sequence: Synthetic oligonucleotide
ugacagaaaggccuugcuc

SEQ ID NO: 3078188 - RNA, 19 nt, Artificial Sequence
  Description of Artificial Sequence: Synthetic oligonucleotide
accagugacagaaaggccu

SEQ ID NO: 3078189 - RNA, 19 nt, Artificial Sequence
  Description of Artificial Sequence: Synthetic oligonucleotide
aaaggccuugcuccuggau

SEQ ID NO: 3078190 - RNA, 19 nt, Artificial Sequence
  Description of Artificial Sequence: Synthetic oligonucleotide
ccuugcuccuggauggccg

SEQ ID NO: 3078191 - RNA, 19 nt, Artificial Sequence
  Description of Artificial Sequence: Synthetic oligonucleotide
gccggugaaccagugacag

SEQ ID NO: 3078192 - RNA, 19 nt, Artificial Sequence
  Description of Artificial Sequence: Synthetic oligonucleotide
gaaaggccuugcuccugga

SEQ ID NO: 3078193 - RNA, 19 nt, Artificial Sequence
  Description of Artificial Sequence: Synthetic oligonucleotide
gugacagaaaggccuugcu

SEQ ID NO: 3078194 - RNA, 19 nt, Artificial Sequence
  Description of Artificial Sequence: Synthetic oligonucleotide
cagaaaggccuugcuccug

SEQ ID NO: 3078195 - RNA, 19 nt, Artificial Sequence
  Description of Artificial Sequence: Synthetic oligonucleotide
cagugacagaaaggccuug

SEQ ID NO: 3078196 - RNA, 19 nt, Artificial Sequence
  Description of Artificial Sequence: Synthetic oligonucleotide
cggugaaccagugacagaa

SEQ ID NO: 3078197 - RNA, 19 nt, Artificial Sequence
  Description of Artificial Sequence: Synthetic oligonucleotide
cuugcuccuggauggccgu

SEQ ID NO: 3078198 - RNA, 19 nt, Artificial Sequence
  Description of Artificial Sequence: Synthetic oligonucleotide
gccuugcuccuggauggcc

SEQ ID NO: 3078199 - RNA, 19 nt, Artificial Sequence
  Description of Artificial Sequence: Synthetic oligonucleotide
ggugaaccagugacagaaa

SEQ ID NO: 3078200 - RNA, 19 nt, Artificial Sequence
  Description of Artificial Sequence: Synthetic oligonucleotide
ggccuugcuccuggauggc

SEQ ID NO: 3078201 - RNA, 19 nt, Artificial Sequence
  Description of Artificial Sequence: Synthetic oligonucleotide
ccagugacagaaaggccuu

SEQ ID NO: 3078202 - RNA, 19 nt, Artificial Sequence
  Description of Artificial Sequence: Synthetic oligonucleotide
ccggugaaccagugacaga

SEQ ID NO: 3078203 - RNA, 19 nt, Artificial Sequence
  Description of Artificial Sequence: Synthetic oligonucleotide
cgccggugaaccagugaca

SEQ ID NO: 3078204 - RNA, 19 nt, Artificial Sequence
  Description of Artificial Sequence: Synthetic oligonucleotide
gauggcgagaagcaggugg

SEQ ID NO: 3078205 - RNA, 19 nt, Artificial Sequence
  Description of Artificial Sequence: Synthetic oligonucleotide
uucuuguuguccuuggcgg

SEQ ID NO: 3078206 - RNA, 19 nt, Artificial Sequence
  Description of Artificial Sequence: Synthetic oligonucleotide
uugaggaagcgcccgaugc

SEQ ID NO: 3078207 - RNA, 19 nt, Artificial Sequence
  Description of Artificial Sequence: Synthetic oligonucleotide
acggcggcgagguagacgg

SEQ ID NO: 3078208 - RNA, 19 nt, Artificial Sequence
  Description of Artificial Sequence: Synthetic oligonucleotide
uccaugucguugcggaugg

SEQ ID NO: 3078209 - RNA, 19 nt, Artificial Sequence
  Description of Artificial Sequence: Synthetic oligonucleotide
cuuuccgagcuccaugucg

SEQ ID NO: 3078210 - RNA, 19 nt, Artificial Sequence
  Description of Artificial Sequence: Synthetic oligonucleotide
guagcgacccuucuugagg

SEQ ID NO: 3078211 - RNA, 19 nt, Artificial Sequence
  Description of Artificial Sequence: Synthetic oligonucleotide
ucugcugcgagguacucga

SEQ ID NO: 3078212 - RNA, 19 nt, Artificial Sequence
  Description of Artificial Sequence: Synthetic oligonucleotide
acuucuuguuguccuuggc

SEQ ID NO: 3078213 - RNA, 19 nt, Artificial Sequence
  Description of Artificial Sequence: Synthetic oligonucleotide
uuuccgagcuccaugucgu

SEQ ID NO: 3078214 - RNA, 19 nt, Artificial Sequence
  Description of Artificial Sequence: Synthetic oligonucleotide
guaggggcggucuucuugg

SEQ ID NO: 3078215 - RNA, 19 nt, Artificial Sequence
  Description of Artificial Sequence: Synthetic oligonucleotide
aagcagguggcguggcacg

SEQ ID NO: 3078216 - RNA, 19 nt, Artificial Sequence
  Description of Artificial Sequence: Synthetic oligonucleotide
ugcugcgagguacucgagg

SEQ ID NO: 3078217 - RNA, 19 nt, Artificial Sequence
  Description of Artificial Sequence: Synthetic oligonucleotide
uggcguggcacgaugcggg

SEQ ID NO: 3078218 - RNA, 19 nt, Artificial Sequence
  Description of Artificial Sequence: Synthetic oligonucleotide
gaugcgggacuucuuguug

SEQ ID NO: 3078219 - RNA, 19 nt, Artificial Sequence
  Description of Artificial Sequence: Synthetic oligonucleotide
guugcggauggcgagaagc

SEQ ID NO: 3078220 - RNA, 19 nt, Artificial Sequence
  Description of Artificial Sequence: Synthetic oligonucleotide
uuggggagcagcacggacu

SEQ ID NO: 3078221 - RNA, 19 nt, Artificial Sequence
  Description of Artificial Sequence: Synthetic oligonucleotide
uccuuggcggcguugccgg

SEQ ID NO: 3078222 - RNA, 19 nt, Artificial Sequence
  Description of Artificial Sequence: Synthetic oligonucleotide
ucuuguuguccuuggcggc

SEQ ID NO: 3078223 - RNA, 19 nt, Artificial Sequence
  Description of Artificial Sequence: Synthetic oligonucleotide
uggggagcagcacggacug

SEQ ID NO: 3078224 - RNA, 19 nt, Artificial Sequence
  Description of Artificial Sequence: Synthetic oligonucleotide
auggcgagaagcagguggc

SEQ ID NO: 3078225 - RNA, 19 nt, Artificial Sequence
  Description of Artificial Sequence: Synthetic oligonucleotide
acggacuggauguugggga

SEQ ID NO: 3078226 - RNA, 19 nt, Artificial Sequence
  Description of Artificial Sequence: Synthetic oligonucleotide
agcuccaugucguugcgga

SEQ ID NO: 3078227 - RNA, 19 nt, Artificial Sequence
  Description of Artificial Sequence: Synthetic oligonucleotide
uugcggauggcgagaagca

SEQ ID NO: 3078228 - RNA, 19 nt, Artificial Sequence
  Description of Artificial Sequence: Synthetic oligonucleotide
ugggcgauggugaccccgg

SEQ ID NO: 3078229 - RNA, 19 nt, Artificial Sequence
  Description of Artificial Sequence: Synthetic oligonucleotide
uagcgacccuucuugagga

SEQ ID NO: 3078230 - RNA, 19 nt, Artificial Sequence
  Description of Artificial Sequence: Synthetic oligonucleotide
gaggacggcggcgagguag

SEQ ID NO: 3078231 - RNA, 19 nt, Artificial Sequence
  Description of Artificial Sequence: Synthetic oligonucleotide
cuucuugaggaagcgcccg

SEQ ID NO: 3078232 - RNA, 19 nt, Artificial Sequence
  Description of Artificial Sequence: Synthetic oligonucleotide
cacgaugcgggacuucuug

SEQ ID NO: 3078233 - RNA, 19 nt, Artificial Sequence
  Description of Artificial Sequence: Synthetic oligonucleotide
uugccggcgagcuccagga

SEQ ID NO: 3078234 - RNA, 19 nt, Artificial Sequence
  Description of Artificial Sequence: Synthetic oligonucleotide
cccuucuugaggaagcgcc

SEQ ID NO: 3078235 - RNA, 19 nt, Artificial Sequence
  Description of Artificial Sequence: Synthetic oligonucleotide
acgcgcugggcguagcgac

SEQ ID NO: 3078236 - RNA, 19 nt, Artificial Sequence
  Description of Artificial Sequence: Synthetic oligonucleotide
guugccggcgagcuccagg

SEQ ID NO: 3078237 - RNA, 19 nt, Artificial Sequence
  Description of Artificial Sequence: Synthetic oligonucleotide
ggagccgacgcgcugggcg

SEQ ID NO: 3078238 - RNA, 19 nt, Artificial Sequence
  Description of Artificial Sequence: Synthetic oligonucleotide
agcacggacuggauguugg

SEQ ID NO: 3078239 - RNA, 19 nt, Artificial Sequence
  Description of Artificial Sequence: Synthetic oligonucleotide
gaagcagguggcguggcac

SEQ ID NO: 3078240 - RNA, 19 nt, Artificial Sequence
  Description of Artificial Sequence: Synthetic oligonucleotide
ggcguagcgacccuucuug

SEQ ID NO: 3078241 - RNA, 19 nt, Artificial Sequence
  Description of Artificial Sequence: Synthetic oligonucleotide
uuguccuuggcggcguugc

SEQ ID NO: 3078242 - RNA, 19 nt, Artificial Sequence
  Description of Artificial Sequence: Synthetic oligonucleotide
augcgggacuucuuguugu

SEQ ID NO: 3078243 - RNA, 19 nt, Artificial Sequence
  Description of Artificial Sequence: Synthetic oligonucleotide
agguacucgaggacggcgg

SEQ ID NO: 3078244 - RNA, 19 nt, Artificial Sequence
  Description of Artificial Sequence: Synthetic oligonucleotide
gacccuucuugaggaagcg

SEQ ID NO: 3078245 - RNA, 19 nt, Artificial Sequence
  Description of Artificial Sequence: Synthetic oligonucleotide
uuggggaggacgccgccgu

SEQ ID NO: 3078246 - RNA, 19 nt, Artificial Sequence
  Description of Artificial Sequence: Synthetic oligonucleotide
gaagcgcccgaugcggccg

SEQ ID NO: 3078247 - RNA, 19 nt, Artificial Sequence
  Description of Artificial Sequence: Synthetic oligonucleotide
acccuucuugaggaagcgc

SEQ ID NO: 3078248 - RNA, 19 nt, Artificial Sequence
  Description of Artificial Sequence: Synthetic oligonucleotide
cacggacuggauguugggg

SEQ ID NO: 3078249 - RNA, 19 nt, Artificial Sequence
  Description of Artificial Sequence: Synthetic oligonucleotide
cuccaugucguugcggaug

SEQ ID NO: 3078250 - RNA, 19 nt, Artificial Sequence
  Description of Artificial Sequence: Synthetic oligonucleotide
ugcggauggcgagaagcag

SEQ ID NO: 3078251 - RNA, 19 nt, Artificial Sequence
  Description of Artificial Sequence: Synthetic oligonucleotide
auguuggggaggacgccgc

SEQ ID NO: 3078252 - RNA, 19 nt, Artificial Sequence
  Description of Artificial Sequence: Synthetic oligonucleotide
aggaccucugcugcgaggu

SEQ ID NO: 3078253 - RNA, 19 nt, Artificial Sequence
  Description of Artificial Sequence: Synthetic oligonucleotide
uuuucguaggggcggucuu

SEQ ID NO: 3078254 - RNA, 19 nt, Artificial Sequence
  Description of Artificial Sequence: Synthetic oligonucleotide
uguuggggaggacgccgcc

SEQ ID NO: 3078255 - RNA, 19 nt, Artificial Sequence
  Description of Artificial Sequence: Synthetic oligonucleotide
uacucgaggacggcggcga

SEQ ID NO: 3078256 - RNA, 19 nt, Artificial Sequence
  Description of Artificial Sequence: Synthetic oligonucleotide
aggggcggucuucuugggg

SEQ ID NO: 3078257 - RNA, 19 nt, Artificial Sequence
  Description of Artificial Sequence: Synthetic oligonucleotide
ucgaggacggcggcgaggu

SEQ ID NO: 3078258 - RNA, 19 nt, Artificial Sequence
  Description of Artificial Sequence: Synthetic oligonucleotide
acgaugcgggacuucuugu

SEQ ID NO: 3078259 - RNA, 19 nt, Artificial Sequence
  Description of Artificial Sequence: Synthetic oligonucleotide
ccgacggggaacuggagcc

SEQ ID NO: 3078260 - RNA, 19 nt, Artificial Sequence
  Description of Artificial Sequence: Synthetic oligonucleotide
uucguaggggcggucuucu

SEQ ID NO: 3078261 - RNA, 19 nt, Artificial Sequence
  Description of Artificial Sequence: Synthetic oligonucleotide
guccuuggcggcguugccg

SEQ ID NO: 3078262 - RNA, 19 nt, Artificial Sequence
  Description of Artificial Sequence: Synthetic oligonucleotide
cucugcugcgagguacucg

SEQ ID NO: 3078263 - RNA, 19 nt, Artificial Sequence
  Description of Artificial Sequence: Synthetic oligonucleotide
uguccuuggcggcguugcc

SEQ ID NO: 3078264 - RNA, 19 nt, Artificial Sequence
  Description of Artificial Sequence: Synthetic oligonucleotide
cagcuuuccgagcuccaug

SEQ ID NO: 3078265 - RNA, 19 nt, Artificial Sequence
  Description of Artificial Sequence: Synthetic oligonucleotide
guuggggaggacgccgccg

SEQ ID NO: 3078266 - RNA, 19 nt, Artificial Sequence
  Description of Artificial Sequence: Synthetic oligonucleotide
gacggcggcgagguagacg

SEQ ID NO: 3078267 - RNA, 19 nt, Artificial Sequence
  Description of Artificial Sequence: Synthetic oligonucleotide
gacuggauguuggggagga

SEQ ID NO: 3078268 - RNA, 19 nt, Artificial Sequence
  Description of Artificial Sequence: Synthetic oligonucleotide
gaugcggccgacggggaac

SEQ ID NO: 3078269 - RNA, 19 nt, Artificial Sequence
  Description of Artificial Sequence: Synthetic oligonucleotide
uccaggaccucugcugcga

SEQ ID NO: 3078270 - RNA, 19 nt, Artificial Sequence
  Description of Artificial Sequence: Synthetic oligonucleotide
cuccaggaccucugcugcg

SEQ ID NO: 3078271 - RNA, 19 nt, Artificial Sequence
  Description of Artificial Sequence: Synthetic oligonucleotide
gcugcgagguacucgagga

SEQ ID NO: 3078272 - RNA, 19 nt, Artificial Sequence
  Description of Artificial Sequence: Synthetic oligonucleotide
uggcgagaagcagguggcg

SEQ ID NO: 3078273 - RNA, 19 nt, Artificial Sequence
  Description of Artificial Sequence: Synthetic oligonucleotide
guggcguggcacgaugcgg

SEQ ID NO: 3078274 - RNA, 19 nt, Artificial Sequence
  Description of Artificial Sequence: Synthetic oligonucleotide
cuuggcggcguugccggcg

SEQ ID NO: 3078275 - RNA, 19 nt, Artificial Sequence
  Description of Artificial Sequence: Synthetic oligonucleotide
uuucguaggggcggucuuc

SEQ ID NO: 3078276 - RNA, 19 nt, Artificial Sequence
  Description of Artificial Sequence: Synthetic oligonucleotide
gcuccaggaccucugcugc

SEQ ID NO: 3078277 - RNA, 19 nt, Artificial Sequence
  Description of Artificial Sequence: Synthetic oligonucleotide
gcggauggcgagaagcagg

SEQ ID NO: 3078278 - RNA, 19 nt, Artificial Sequence
  Description of Artificial Sequence: Synthetic oligonucleotide
auggugaccccggcgagca

SEQ ID NO: 3078279 - RNA, 19 nt, Artificial Sequence
  Description of Artificial Sequence: Synthetic oligonucleotide
caggaccucugcugcgagg

SEQ ID NO: 3078280 - RNA, 19 nt, Artificial Sequence
  Description of Artificial Sequence: Synthetic oligonucleotide
gugggcgauggugaccccg

SEQ ID NO: 3078281 - RNA, 19 nt, Artificial Sequence
  Description of Artificial Sequence: Synthetic oligonucleotide
ccuucuugaggaagcgccc

SEQ ID NO: 3078282 - RNA, 19 nt, Artificial Sequence
  Description of Artificial Sequence: Synthetic oligonucleotide
augucguugcggauggcga

SEQ ID NO: 3078283 - RNA, 19 nt, Artificial Sequence
  Description of Artificial Sequence: Synthetic oligonucleotide
ugggcguagcgacccuucu

SEQ ID NO: 3078284 - RNA, 19 nt, Artificial Sequence
  Description of Artificial Sequence: Synthetic oligonucleotide
guacucgaggacggcggcg

SEQ ID NO: 3078285 - RNA, 19 nt, Artificial Sequence
  Description of Artificial Sequence: Synthetic oligonucleotide
ccgagcuccaugucguugc

SEQ ID NO: 3078286 - RNA, 19 nt, Artificial Sequence
  Description of Artificial Sequence: Synthetic oligonucleotide
ggcgauggugaccccggcg

SEQ ID NO: 3078287 - RNA, 19 nt, Artificial Sequence
  Description of Artificial Sequence: Synthetic oligonucleotide
ucuugaggaagcgcccgau

SEQ ID NO: 3078288 - RNA, 19 nt, Artificial Sequence
  Description of Artificial Sequence: Synthetic oligonucleotide
ugcgggacuucuuguuguc

SEQ ID NO: 3078289 - RNA, 19 nt, Artificial Sequence
  Description of Artificial Sequence: Synthetic oligonucleotide
uuggcggcguugccggcga

SEQ ID NO: 3078290 - RNA, 19 nt, Artificial Sequence
  Description of Artificial Sequence: Synthetic oligonucleotide
gagcuccaugucguugcgg

SEQ ID NO: 3078291 - RNA, 19 nt, Artificial Sequence
  Description of Artificial Sequence: Synthetic oligonucleotide
gcgagaagcagguggcgug

SEQ ID NO: 3078292 - RNA, 19 nt, Artificial Sequence
  Description of Artificial Sequence: Synthetic oligonucleotide
ggggcggucuucuugggga

SEQ ID NO: 3078293 - RNA, 19 nt, Artificial Sequence
  Description of Artificial Sequence: Synthetic oligonucleotide
cugcgagguacucgaggac

SEQ ID NO: 3078294 - RNA, 19 nt, Artificial Sequence
  Description of Artificial Sequence: Synthetic oligonucleotide
uuguuguccuuggcggcgu

SEQ ID NO: 3078295 - RNA, 19 nt, Artificial Sequence
  Description of Artificial Sequence: Synthetic oligonucleotide
gccgacggggaacuggagc

SEQ ID NO: 3078296 - RNA, 19 nt, Artificial Sequence
  Description of Artificial Sequence: Synthetic oligonucleotide
gcgauggugaccccggcga

SEQ ID NO: 3078297 - RNA, 19 nt, Artificial Sequence
  Description of Artificial Sequence: Synthetic oligonucleotide
gagaagcagguggcguggc

SEQ ID NO: 3078298 - RNA, 19 nt, Artificial Sequence
  Description of Artificial Sequence: Synthetic oligonucleotide
cugggcguagcgacccuuc

SEQ ID NO: 3078299 - RNA, 19 nt, Artificial Sequence
  Description of Artificial Sequence: Synthetic oligonucleotide
cagguggcguggcacgaug

SEQ ID NO: 3078300 - RNA, 19 nt, Artificial Sequence
  Description of Artificial Sequence: Synthetic oligonucleotide
cucgaggacggcggcgagg

SEQ ID NO: 3078301 - RNA, 19 nt, Artificial Sequence
  Description of Artificial Sequence: Synthetic oligonucleotide
gggaggacgccgccguggg

SEQ ID NO: 3078302 - RNA, 19 nt, Artificial Sequence
  Description of Artificial Sequence: Synthetic oligonucleotide
gcgagguacucgaggacgg

SEQ ID NO: 3078303 - RNA, 19 nt, Artificial Sequence
  Description of Artificial Sequence: Synthetic oligonucleotide
gcacggacuggauguuggg

SEQ ID NO: 3078304 - RNA, 19 nt, Artificial Sequence
  Description of Artificial Sequence: Synthetic oligonucleotide
gccggcgagcuccaggacc

SEQ ID NO: 3078305 - RNA, 19 nt, Artificial Sequence
  Description of Artificial Sequence: Synthetic oligonucleotide
ggcggcgagguagacgggg

SEQ ID NO: 3078306 - RNA, 19 nt, Artificial Sequence
  Description of Artificial Sequence: Synthetic oligonucleotide
acucgaggacggcggcgag

SEQ ID NO: 3078307 - RNA, 19 nt, Artificial Sequence
  Description of Artificial Sequence: Synthetic oligonucleotide
ggaagcgcccgaugcggcc

SEQ ID NO: 3078308 - RNA, 19 nt, Artificial Sequence
  Description of Artificial Sequence: Synthetic oligonucleotide
cccgaugcggccgacgggg

SEQ ID NO: 3078309 - RNA, 19 nt, Artificial Sequence
  Description of Artificial Sequence: Synthetic oligonucleotide
ggacuggauguuggggagg

SEQ ID NO: 3078310 - RNA, 19 nt, Artificial Sequence
  Description of Artificial Sequence: Synthetic oligonucleotide
ggugaccccggcgagcagc

SEQ ID NO: 3078311 - RNA, 19 nt, Artificial Sequence
  Description of Artificial Sequence: Synthetic oligonucleotide
ucguugcggauggcgagaa

SEQ ID NO: 3078312 - RNA, 19 nt, Artificial Sequence
  Description of Artificial Sequence: Synthetic oligonucleotide
aagcgcccgaugcggccga

SEQ ID NO: 3078313 - RNA, 19 nt, Artificial Sequence
  Description of Artificial Sequence: Synthetic oligonucleotide
gacggggaacuggagccca

SEQ ID NO: 3078314 - RNA, 19 nt, Artificial Sequence
  Description of Artificial Sequence: Synthetic oligonucleotide
cgacccuucuugaggaagc

SEQ ID NO: 3078315 - RNA, 19 nt, Artificial Sequence
  Description of Artificial Sequence: Synthetic oligonucleotide
uggggaggacgccgccgug

SEQ ID NO: 3078316 - RNA, 19 nt, Artificial Sequence
  Description of Artificial Sequence: Synthetic oligonucleotide
ccgugggcgauggugaccc

SEQ ID NO: 3078317 - RNA, 19 nt, Artificial Sequence
  Description of Artificial Sequence: Synthetic oligonucleotide
gcgacccuucuugaggaag

SEQ ID NO: 3078318 - RNA, 19 nt, Artificial Sequence
  Description of Artificial Sequence: Synthetic oligonucleotide
accccggcgagcagcuuuc

SEQ ID NO: 3078319 - RNA, 19 nt, Artificial Sequence
  Description of Artificial Sequence: Synthetic oligonucleotide
gggagcagcacggacugga

SEQ ID NO: 3078320 - RNA, 19 nt, Artificial Sequence
  Description of Artificial Sequence: Synthetic oligonucleotide
cguagcgacccuucuugag

SEQ ID NO: 3078321 - RNA, 19 nt, Artificial Sequence
  Description of Artificial Sequence: Synthetic oligonucleotide
uggugaccccggcgagcag

SEQ ID NO: 3078322 - RNA, 19 nt, Artificial Sequence
  Description of Artificial Sequence: Synthetic oligonucleotide
ggggaggacgccgccgugg

SEQ ID NO: 3078323 - RNA, 19 nt, Artificial Sequence
  Description of Artificial Sequence: Synthetic oligonucleotide
accucugcugcgagguacu

SEQ ID NO: 3078324 - RNA, 19 nt, Artificial Sequence
  Description of Artificial Sequence: Synthetic oligonucleotide
gacgcgcugggcguagcga

SEQ ID NO: 3078325 - RNA, 19 nt, Artificial Sequence
  Description of Artificial Sequence: Synthetic oligonucleotide
cugcugcgagguacucgag

SEQ ID NO: 3078326 - RNA, 19 nt, Artificial Sequence
  Description of Artificial Sequence: Synthetic oligonucleotide
uguuguccuuggcggcguu

SEQ ID NO: 3078327 - RNA, 19 nt, Artificial Sequence
  Description of Artificial Sequence: Synthetic oligonucleotide
gggcggucuucuuggggag

SEQ ID NO: 3078328 - RNA, 19 nt, Artificial Sequence
  Description of Artificial Sequence: Synthetic oligonucleotide
cagcacggacuggauguug

SEQ ID NO: 3078329 - RNA, 19 nt, Artificial Sequence
  Description of Artificial Sequence: Synthetic oligonucleotide
agcgacccuucuugaggaa

SEQ ID NO: 3078330 - RNA, 19 nt, Artificial Sequence
  Description of Artificial Sequence: Synthetic oligonucleotide
cguaggggcggucuucuug

SEQ ID NO: 3078331 - RNA, 19 nt, Artificial Sequence
  Description of Artificial Sequence: Synthetic oligonucleotide
ugccggcgagcuccaggac

SEQ ID NO: 3078332 - RNA, 19 nt, Artificial Sequence
  Description of Artificial Sequence: Synthetic oligonucleotide
cggacuggauguuggggag

SEQ ID NO: 3078333 - RNA, 19 nt, Artificial Sequence
  Description of Artificial Sequence: Synthetic oligonucleotide
aggacggcggcgagguaga

SEQ ID NO: 3078334 - RNA, 19 nt, Artificial Sequence
  Description of Artificial Sequence: Synthetic oligonucleotide
uuccgagcuccaugucguu

SEQ ID NO: 3078335 - RNA, 19 nt, Artificial Sequence
  Description of Artificial Sequence: Synthetic oligonucleotide
ggcgagcagcuuuccgagc

SEQ ID NO: 3078336 - RNA, 19 nt, Artificial Sequence
  Description of Artificial Sequence: Synthetic oligonucleotide
gccggagccgacgcgcugg

SEQ ID NO: 3078337 - RNA, 19 nt, Artificial Sequence
  Description of Artificial Sequence: Synthetic oligonucleotide
gcgagcagcuuuccgagcu

SEQ ID NO: 3078338 - RNA, 19 nt, Artificial Sequence
  Description of Artificial Sequence: Synthetic oligonucleotide
gccgccgugggcgauggug

SEQ ID NO: 3078339 - RNA, 19 nt, Artificial Sequence
  Description of Artificial Sequence: Synthetic oligonucleotide
ccggcgagcagcuuuccga

SEQ ID NO: 3078340 - RNA, 19 nt, Artificial Sequence
  Description of Artificial Sequence: Synthetic oligonucleotide
agcagcuuuccgagcucca

SEQ ID NO: 3078341 - RNA, 19 nt, Artificial Sequence
  Description of Artificial Sequence: Synthetic oligonucleotide
gagccgacgcgcugggcgu

SEQ ID NO: 3078342 - RNA, 19 nt, Artificial Sequence
  Description of Artificial Sequence: Synthetic oligonucleotide
gcggccgacggggaacugg

SEQ ID NO: 3078343 - RNA, 19 nt, Artificial Sequence
  Description of Artificial Sequence: Synthetic oligonucleotide
augcggccgacggggaacu

SEQ ID NO: 3078344 - RNA, 19 nt, Artificial Sequence
  Description of Artificial Sequence: Synthetic oligonucleotide
ggcgccggagccgacgcgc

SEQ ID NO: 3078345 - RNA, 19 nt, Artificial Sequence
  Description of Artificial Sequence: Synthetic oligonucleotide
cggcgagcagcuuuccgag

SEQ ID NO: 3078346 - RNA, 19 nt, Artificial Sequence
  Description of Artificial Sequence: Synthetic oligonucleotide
gcgggacuucuuguugucc

SEQ ID NO: 3078347 - RNA, 19 nt, Artificial Sequence
  Description of Artificial Sequence: Synthetic oligonucleotide
gaccccggcgagcagcuuu

SEQ ID NO: 3078348 - RNA, 19 nt, Artificial Sequence
  Description of Artificial Sequence: Synthetic oligonucleotide
acgccgccgugggcgaugg

SEQ ID NO: 3078349 - RNA, 19 nt, Artificial Sequence
  Description of Artificial Sequence: Synthetic oligonucleotide
ggggcgccggagccgacgc

SEQ ID NO: 3078350 - RNA, 19 nt, Artificial Sequence
  Description of Artificial Sequence: Synthetic oligonucleotide
ucguaggggcggucuucuu

SEQ ID NO: 3078351 - RNA, 19 nt, Artificial Sequence
  Description of Artificial Sequence: Synthetic oligonucleotide
gcuuuccgagcuccauguc

SEQ ID NO: 3078352 - RNA, 19 nt, Artificial Sequence
  Description of Artificial Sequence: Synthetic oligonucleotide
ccaggaccucugcugcgag

SEQ ID NO: 3078353 - RNA, 19 nt, Artificial Sequence
  Description of Artificial Sequence: Synthetic oligonucleotide
gcccgaugcggccgacggg

SEQ ID NO: 3078354 - RNA, 19 nt, Artificial Sequence
  Description of Artificial Sequence: Synthetic oligonucleotide
ggcacgaugcgggacuucu

SEQ ID NO: 3078355 - RNA, 19 nt, Artificial Sequence
  Description of Artificial Sequence: Synthetic oligonucleotide
gcgagcuccaggaccucug

SEQ ID NO: 3078356 - RNA, 19 nt, Artificial Sequence
  Description of Artificial Sequence: Synthetic oligonucleotide
cgcccgaugcggccgacgg

SEQ ID NO: 3078357 - RNA, 19 nt, Artificial Sequence
  Description of Artificial Sequence: Synthetic oligonucleotide
cccggcgagcagcuuuccg

SEQ ID NO: 3078358 - RNA, 19 nt, Artificial Sequence
  Description of Artificial Sequence: Synthetic oligonucleotide
cgagcuccaggaccucugc

SEQ ID NO: 3078359 - RNA, 19 nt, Artificial Sequence
  Description of Artificial Sequence: Synthetic oligonucleotide
gcguagcgacccuucuuga

SEQ ID NO: 3078360 - RNA, 19 nt, Artificial Sequence
  Description of Artificial Sequence: Synthetic oligonucleotide
cgagcuccaugucguugcg

SEQ ID NO: 3078361 - RNA, 19 nt, Artificial Sequence
  Description of Artificial Sequence: Synthetic oligonucleotide
ggcggucuucuuggggagc

SEQ ID NO: 3078362 - RNA, 19 nt, Artificial Sequence
  Description of Artificial Sequence: Synthetic oligonucleotide
ggaggacgccgccgugggc

SEQ ID NO: 3078363 - RNA, 19 nt, Artificial Sequence
  Description of Artificial Sequence: Synthetic oligonucleotide
uggcacgaugcgggacuuc

SEQ ID NO: 3078364 - RNA, 19 nt, Artificial Sequence
  Description of Artificial Sequence: Synthetic oligonucleotide
gcgcugggcguagcgaccc

SEQ ID NO: 3078365 - RNA, 19 nt, Artificial Sequence
  Description of Artificial Sequence: Synthetic oligonucleotide
ggauggcgagaagcaggug

SEQ ID NO: 3078366 - RNA, 19 nt, Artificial Sequence
  Description of Artificial Sequence: Synthetic oligonucleotide
gggcgauggugaccccggc

SEQ ID NO: 3078367 - RNA, 19 nt, Artificial Sequence
  Description of Artificial Sequence: Synthetic oligonucleotide
ggcguggcacgaugcggga

SEQ ID NO: 3078368 - RNA, 19 nt, Artificial Sequence
  Description of Artificial Sequence: Synthetic oligonucleotide
agcgcccgaugcggccgac

SEQ ID NO: 3078369 - RNA, 19 nt, Artificial Sequence
  Description of Artificial Sequence: Synthetic oligonucleotide
ggcgagaagcagguggcgu

SEQ ID NO: 3078370 - RNA, 19 nt, Artificial Sequence
  Description of Artificial Sequence: Synthetic oligonucleotide
ggcggcguugccggcgagc

SEQ ID NO: 3078371 - RNA, 19 nt, Artificial Sequence
  Description of Artificial Sequence: Synthetic oligonucleotide
ccgccgugggcgaugguga

SEQ ID NO: 3078372 - RNA, 19 nt, Artificial Sequence
  Description of Artificial Sequence: Synthetic oligonucleotide
ugcggccgacggggaacug

SEQ ID NO: 3078373 - RNA, 19 nt, Artificial Sequence
  Description of Artificial Sequence: Synthetic oligonucleotide
gccgugggcgauggugacc

SEQ ID NO: 3078374 - RNA, 19 nt, Artificial Sequence
  Description of Artificial Sequence: Synthetic oligonucleotide
ggggagcagcacggacugg

SEQ ID NO: 3078375 - RNA, 19 nt, Artificial Sequence
  Description of Artificial Sequence: Synthetic oligonucleotide
cgcgcugggcguagcgacc

SEQ ID NO: 3078376 - RNA, 19 nt, Artificial Sequence
  Description of Artificial Sequence: Synthetic oligonucleotide
gggcgccggagccgacgcg

SEQ ID NO: 3078377 - RNA, 19 nt, Artificial Sequence
  Description of Artificial Sequence: Synthetic oligonucleotide
cgacgcgcugggcguagcg

SEQ ID NO: 3078378 - RNA, 19 nt, Artificial Sequence
  Description of Artificial Sequence: Synthetic oligonucleotide
gugaccccggcgagcagcu

SEQ ID NO: 3078379 - RNA, 19 nt, Artificial Sequence
  Description of Artificial Sequence: Synthetic oligonucleotide
ccggagccgacgcgcuggg

SEQ ID NO: 3078380 - RNA, 19 nt, Artificial Sequence
  Description of Artificial Sequence: Synthetic oligonucleotide
ccuuggcggcguugccggc

SEQ ID NO: 3078381 - RNA, 19 nt, Artificial Sequence
  Description of Artificial Sequence: Synthetic oligonucleotide
cgggacuucuuguuguccu

SEQ ID NO: 3078382 - RNA, 19 nt, Artificial Sequence
  Description of Artificial Sequence: Synthetic oligonucleotide
ccggcgagcuccaggaccu

SEQ ID NO: 3078383 - RNA, 19 nt, Artificial Sequence
  Description of Artificial Sequence: Synthetic oligonucleotide
cgacggggaacuggagccc

SEQ ID NO: 3078384 - RNA, 19 nt, Artificial Sequence
  Description of Artificial Sequence: Synthetic oligonucleotide
ggccgacggggaacuggag

SEQ ID NO: 3078385 - RNA, 19 nt, Artificial Sequence
  Description of Artificial Sequence: Synthetic oligonucleotide
cggauggcgagaagcaggu

SEQ ID NO: 3078386 - RNA, 19 nt, Artificial Sequence
  Description of Artificial Sequence: Synthetic oligonucleotide
gcguggcacgaugcgggac

SEQ ID NO: 3078387 - RNA, 19 nt, Artificial Sequence
  Description of Artificial Sequence: Synthetic oligonucleotide
cguggcacgaugcgggacu

SEQ ID NO: 3078388 - RNA, 19 nt, Artificial Sequence
  Description of Artificial Sequence: Synthetic oligonucleotide
cguugcggauggcgagaag

SEQ ID NO: 3078389 - RNA, 19 nt, Artificial Sequence
  Description of Artificial Sequence: Synthetic oligonucleotide
gccgacgcgcugggcguag

SEQ ID NO: 3078390 - RNA, 19 nt, Artificial Sequence
  Description of Artificial Sequence: Synthetic oligonucleotide
gcgcccgaugcggccgacg

SEQ ID NO: 3078391 - RNA, 19 nt, Artificial Sequence
  Description of Artificial Sequence: Synthetic oligonucleotide
ggaccucugcugcgaggua

SEQ ID NO: 3078392 - RNA, 19 nt, Artificial Sequence
  Description of Artificial Sequence: Synthetic oligonucleotide
gcagcuuuccgagcuccau

SEQ ID NO: 3078393 - RNA, 19 nt, Artificial Sequence
  Description of Artificial Sequence: Synthetic oligonucleotide
agccgacgcgcugggcgua

SEQ ID NO: 3078394 - RNA, 19 nt, Artificial Sequence
  Description of Artificial Sequence: Synthetic oligonucleotide
cggccgacggggaacugga

SEQ ID NO: 3078395 - RNA, 19 nt, Artificial Sequence
  Description of Artificial Sequence: Synthetic oligonucleotide
ugaccccggcgagcagcuu

SEQ ID NO: 3078396 - RNA, 19 nt, Artificial Sequence
  Description of Artificial Sequence: Synthetic oligonucleotide
gcggcguugccggcgagcu

SEQ ID NO: 3078397 - RNA, 19 nt, Artificial Sequence
  Description of Artificial Sequence: Synthetic oligonucleotide
gggcguagcgacccuucuu

SEQ ID NO: 3078398 - RNA, 19 nt, Artificial Sequence
  Description of Artificial Sequence: Synthetic oligonucleotide
ggcgagcuccaggaccucu

SEQ ID NO: 3078399 - RNA, 19 nt, Artificial Sequence
  Description of Artificial Sequence: Synthetic oligonucleotide
cgccgugggcgauggugac

SEQ ID NO: 3078400 - RNA, 19 nt, Artificial Sequence
  Description of Artificial Sequence: Synthetic oligonucleotide
ggagcagcacggacuggau

SEQ ID NO: 3078401 - RNA, 19 nt, Artificial Sequence
  Description of Artificial Sequence: Synthetic oligonucleotide
guggcacgaugcgggacuu

SEQ ID NO: 3078402 - RNA, 19 nt, Artificial Sequence
  Description of Artificial Sequence: Synthetic oligonucleotide
ggacggcggcgagguagac

SEQ ID NO: 3078403 - RNA, 19 nt, Artificial Sequence
  Description of Artificial Sequence: Synthetic oligonucleotide
cgugggcgauggugacccc

SEQ ID NO: 3078404 - RNA, 19 nt, Artificial Sequence
  Description of Artificial Sequence: Synthetic oligonucleotide
ccgaugcggccgacgggga

SEQ ID NO: 3078405 - RNA, 19 nt, Artificial Sequence
  Description of Artificial Sequence: Synthetic oligonucleotide
cgaugcgggacuucuuguu

SEQ ID NO: 3078406 - RNA, 19 nt, Artificial Sequence
  Description of Artificial Sequence: Synthetic oligonucleotide
cggcggcgagguagacggg

SEQ ID NO: 3078407 - RNA, 19 nt, Artificial Sequence
  Description of Artificial Sequence: Synthetic oligonucleotide
ccccggcgagcagcuuucc

SEQ ID NO: 3078408 - RNA, 19 nt, Artificial Sequence
  Description of Artificial Sequence: Synthetic oligonucleotide
ccgacgcgcugggcguagc

SEQ ID NO: 3078409 - RNA, 19 nt, Artificial Sequence
  Description of Artificial Sequence: Synthetic oligonucleotide
cgaugcggccgacggggaa

SEQ ID NO: 3078410 - RNA, 19 nt, Artificial Sequence
  Description of Artificial Sequence: Synthetic oligonucleotide
gcagguggcguggcacgau

SEQ ID NO: 3078411 - RNA, 19 nt, Artificial Sequence
  Description of Artificial Sequence: Synthetic oligonucleotide
gcguugccggcgagcucca

SEQ ID NO: 3078412 - RNA, 19 nt, Artificial Sequence
  Description of Artificial Sequence: Synthetic oligonucleotide
gcugggcguagcgacccuu

SEQ ID NO: 3078413 - RNA, 19 nt, Artificial Sequence
  Description of Artificial Sequence: Synthetic oligonucleotide
cgccggagccgacgcgcug

SEQ ID NO: 3078414 - RNA, 19 nt, Artificial Sequence
  Description of Artificial Sequence: Synthetic oligonucleotide
gcacgaugcgggacuucuu

SEQ ID NO: 3078415 - RNA, 19 nt, Artificial Sequence
  Description of Artificial Sequence: Synthetic oligonucleotide
cguugccggcgagcuccag

SEQ ID NO: 3078416 - RNA, 19 nt, Artificial Sequence
  Description of Artificial Sequence: Synthetic oligonucleotide
cggagccgacgcgcugggc

SEQ ID NO: 3078417 - RNA, 19 nt, Artificial Sequence
  Description of Artificial Sequence: Synthetic oligonucleotide
cggcguugccggcgagcuc

SEQ ID NO: 3078418 - RNA, 19 nt, Artificial Sequence
  Description of Artificial Sequence: Synthetic oligonucleotide
gcgccggagccgacgcgcu

SEQ ID NO: 3078419 - RNA, 19 nt, Artificial Sequence
  Description of Artificial Sequence: Synthetic oligonucleotide
cgaggacggcggcgaggua

SEQ ID NO: 3078420 - RNA, 19 nt, Artificial Sequence
  Description of Artificial Sequence: Synthetic oligonucleotide
cgcugggcguagcgacccu

SEQ ID NO: 3078421 - RNA, 19 nt, Artificial Sequence
  Description of Artificial Sequence: Synthetic oligonucleotide
cgccgccgugggcgauggu

SEQ ID NO: 3078422 - RNA, 19 nt, Artificial Sequence
  Description of Artificial Sequence: Synthetic oligonucleotide
aaaagcagaguagugaggc

SEQ ID NO: 3078423 - RNA, 19 nt, Artificial Sequence
  Description of Artificial Sequence: Synthetic oligonucleotide
uagagugacuccaauacgg

SEQ ID NO: 3078424 - RNA, 19 nt, Artificial Sequence
  Description of Artificial Sequence: Synthetic oligonucleotide
uccaauacggagcaggucc

SEQ ID NO: 3078425 - RNA, 19 nt, Artificial Sequence
  Description of Artificial Sequence: Synthetic oligonucleotide
aagccacucacccacagag

SEQ ID NO: 3078426 - RNA, 19 nt, Artificial Sequence
  Description of Artificial Sequence: Synthetic oligonucleotide
accucaaaggagccgaacc

SEQ ID NO: 3078427 - RNA, 19 nt, Artificial Sequence
  Description of Artificial Sequence: Synthetic oligonucleotide
uuagcuugggacuucauau

SEQ ID NO: 3078428 - RNA, 19 nt, Artificial Sequence
  Description of Artificial Sequence: Synthetic oligonucleotide
uggaggucagaacuguugg

SEQ ID NO: 3078429 - RNA, 19 nt, Artificial Sequence
  Description of Artificial Sequence: Synthetic oligonucleotide
agcuugggacuucauaugc

SEQ ID NO: 3078430 - RNA, 19 nt, Artificial Sequence
  Description of Artificial Sequence: Synthetic oligonucleotide
agugacuccaauacggagc

SEQ ID NO: 3078431 - RNA, 19 nt, Artificial Sequence
  Description of Artificial Sequence: Synthetic oligonucleotide
ucauaugcugcacacuggc

SEQ ID NO: 3078432 - RNA, 19 nt, Artificial Sequence
  Description of Artificial Sequence: Synthetic oligonucleotide
ucuucugguguccugcuag

SEQ ID NO: 3078433 - RNA, 19 nt, Artificial Sequence
  Description of Artificial Sequence: Synthetic oligonucleotide
ugcugcaaaacuuuccuca

SEQ ID NO: 3078434 - RNA, 19 nt, Artificial Sequence
  Description of Artificial Sequence: Synthetic oligonucleotide
ugcaaaacuuuccucauau

SEQ ID NO: 3078435 - RNA, 19 nt, Artificial Sequence
  Description of Artificial Sequence: Synthetic oligonucleotide
uggcugaccaccucaaagg

SEQ ID NO: 3078436 - RNA, 19 nt, Artificial Sequence
  Description of Artificial Sequence: Synthetic oligonucleotide
cugaccaccucaaaggagc

SEQ ID NO: 3078437 - RNA, 19 nt, Artificial Sequence
  Description of Artificial Sequence: Synthetic oligonucleotide
aaaaguuguggugaguccu

SEQ ID NO: 3078438 - RNA, 19 nt, Artificial Sequence
  Description of Artificial Sequence: Synthetic oligonucleotide
cuucauaugcugcacacug

SEQ ID NO: 3078439 - RNA, 19 nt, Artificial Sequence
  Description of Artificial Sequence: Synthetic oligonucleotide
ugcacacuggccaagauuu

SEQ ID NO: 3078440 - RNA, 19 nt, Artificial Sequence
  Description of Artificial Sequence: Synthetic oligonucleotide
aaaggagccgaacccagcu

SEQ ID NO: 3078441 - RNA, 19 nt, Artificial Sequence
  Description of Artificial Sequence: Synthetic oligonucleotide
uucauaugcugcacacugg

SEQ ID NO: 3078442 - RNA, 19 nt, Artificial Sequence
  Description of Artificial Sequence: Synthetic oligonucleotide
aggagccgaacccagcugc

SEQ ID NO: 3078443 - RNA, 19 nt, Artificial Sequence
  Description of Artificial Sequence: Synthetic oligonucleotide
ucugcagagaucuggcuga

SEQ ID NO: 3078444 - RNA, 19 nt, Artificial Sequence
  Description of Artificial Sequence: Synthetic oligonucleotide
caucuugauggcucgaagc

SEQ ID NO: 3078445 - RNA, 19 nt, Artificial Sequence
  Description of Artificial Sequence: Synthetic oligonucleotide
gacuccaauacggagcagg

SEQ ID NO: 3078446 - RNA, 19 nt, Artificial Sequence
  Description of Artificial Sequence: Synthetic oligonucleotide
uuggaggucagaacuguug

SEQ ID NO: 3078447 - RNA, 19 nt, Artificial Sequence
  Description of Artificial Sequence: Synthetic oligonucleotide
ucaaaggagccgaacccag

SEQ ID NO: 3078448 - RNA, 19 nt, Artificial Sequence
  Description of Artificial Sequence: Synthetic oligonucleotide
cuagagugacuccaauacg

SEQ ID NO: 3078449 - RNA, 19 nt, Artificial Sequence
  Description of Artificial Sequence: Synthetic oligonucleotide
cugguguccugcuagagug

SEQ ID NO: 3078450 - RNA, 19 nt, Artificial Sequence
  Description of Artificial Sequence: Synthetic oligonucleotide
aagcagaguagugaggcug

SEQ ID NO: 3078451 - RNA, 19 nt, Artificial Sequence
  Description of Artificial Sequence: Synthetic oligonucleotide
cacagagccaaaagcagag

SEQ ID NO: 3078452 - RNA, 19 nt, Artificial Sequence
  Description of Artificial Sequence: Synthetic oligonucleotide
agauuuucuucuggugucc

SEQ ID NO: 3078453 - RNA, 19 nt, Artificial Sequence
  Description of Artificial Sequence: Synthetic oligonucleotide
cuugggacuucauaugcug

SEQ ID NO: 3078454 - RNA, 19 nt, Artificial Sequence
  Description of Artificial Sequence: Synthetic oligonucleotide
cuugauggcucgaagccac

SEQ ID NO: 3078455 - RNA, 19 nt, Artificial Sequence
  Description of Artificial Sequence: Synthetic oligonucleotide
aggaguggaugugaggccc

SEQ ID NO: 3078456 - RNA, 19 nt, Artificial Sequence
  Description of Artificial Sequence: Synthetic oligonucleotide
ucacccacagagccaaaag

SEQ ID NO: 3078457 - RNA, 19 nt, Artificial Sequence
  Description of Artificial Sequence: Synthetic oligonucleotide
uuguggugaguccuuggag

SEQ ID NO: 3078458 - RNA, 19 nt, Artificial Sequence
  Description of Artificial Sequence: Synthetic oligonucleotide
gacuucauaugcugcacac

SEQ ID NO: 3078459 - RNA, 19 nt, Artificial Sequence
  Description of Artificial Sequence: Synthetic oligonucleotide
gcuagagugacuccaauac

SEQ ID NO: 3078460 - RNA, 19 nt, Artificial Sequence
  Description of Artificial Sequence: Synthetic oligonucleotide
auggcucgaagccacucac

SEQ ID NO: 3078461 - RNA, 19 nt, Artificial Sequence
  Description of Artificial Sequence: Synthetic oligonucleotide
cucgaagccacucacccac

SEQ ID NO: 3078462 - RNA, 19 nt, Artificial Sequence
  Description of Artificial Sequence: Synthetic oligonucleotide
cucauaucuucccaucuug

SEQ ID NO: 3078463 - RNA, 19 nt, Artificial Sequence
  Description of Artificial Sequence: Synthetic oligonucleotide
caaaacuuuccucauaucu

SEQ ID NO: 3078464 - RNA, 19 nt, Artificial Sequence
  Description of Artificial Sequence: Synthetic oligonucleotide
uugggacuucauaugcugc

SEQ ID NO: 3078465 - RNA, 19 nt, Artificial Sequence
  Description of Artificial Sequence: Synthetic oligonucleotide
aaagcagaguagugaggcu

SEQ ID NO: 3078466 - RNA, 19 nt, Artificial Sequence
  Description of Artificial Sequence: Synthetic oligonucleotide
uccucauaucuucccaucu

SEQ ID NO: 3078467 - RNA, 19 nt, Artificial Sequence
  Description of Artificial Sequence: Synthetic oligonucleotide
aacccagcugcugcaaaac

SEQ ID NO: 3078468 - RNA, 19 nt, Artificial Sequence
  Description of Artificial Sequence: Synthetic oligonucleotide
uguccugcuagagugacuc

SEQ ID NO: 3078469 - RNA, 19 nt, Artificial Sequence
  Description of Artificial Sequence: Synthetic oligonucleotide
ucugguguccugcuagagu

SEQ ID NO: 3078470 - RNA, 19 nt, Artificial Sequence
  Description of Artificial Sequence: Synthetic oligonucleotide
cuggcugaccaccucaaag

SEQ ID NO: 3078471 - RNA, 19 nt, Artificial Sequence
  Description of Artificial Sequence: Synthetic oligonucleotide
agagccaaaagcagaguag

SEQ ID NO: 3078472 - RNA, 19 nt, Artificial Sequence
  Description of Artificial Sequence: Synthetic oligonucleotide
aguuguggugaguccuugg

SEQ ID NO: 3078473 - RNA, 19 nt, Artificial Sequence
  Description of Artificial Sequence: Synthetic oligonucleotide
cacccacagagccaaaagc

SEQ ID NO: 3078474 - RNA, 19 nt, Artificial Sequence
  Description of Artificial Sequence: Synthetic oligonucleotide
cucugcagagaucuggcug

SEQ ID NO: 3078475 - RNA, 19 nt, Artificial Sequence
  Description of Artificial Sequence: Synthetic oligonucleotide
uccuccugucccaccaggg

SEQ ID NO: 3078476 - RNA, 19 nt, Artificial Sequence
  Description of Artificial Sequence: Synthetic oligonucleotide
uccuuggaggucagaacug

SEQ ID NO: 3078477 - RNA, 19 nt, Artificial Sequence
  Description of Artificial Sequence: Synthetic oligonucleotide
uagcuugggacuucauaug

SEQ ID NO: 3078478 - RNA, 19 nt, Artificial Sequence
  Description of Artificial Sequence: Synthetic oligonucleotide
agcagaguagugaggcugc

SEQ ID NO: 3078479 - RNA, 19 nt, Artificial Sequence
  Description of Artificial Sequence: Synthetic oligonucleotide
uccaggaguggaugugagg

SEQ ID NO: 3078480 - RNA, 19 nt, Artificial Sequence
  Description of Artificial Sequence: Synthetic oligonucleotide
agcugcugcaaaacuuucc

SEQ ID NO: 3078481 - RNA, 19 nt, Artificial Sequence
  Description of Artificial Sequence: Synthetic oligonucleotide
cauaugcugcacacuggcc

SEQ ID NO: 3078482 - RNA, 19 nt, Artificial Sequence
  Description of Artificial Sequence: Synthetic oligonucleotide
gucagaacuguugggcugg

SEQ ID NO: 3078483 - RNA, 19 nt, Artificial Sequence
  Description of Artificial Sequence: Synthetic oligonucleotide
uccuggcuuagcuugggac

SEQ ID NO: 3078484 - RNA, 19 nt, Artificial Sequence
  Description of Artificial Sequence: Synthetic oligonucleotide
aauacggagcagguccucu

SEQ ID NO: 3078485 - RNA, 19 nt, Artificial Sequence
  Description of Artificial Sequence: Synthetic oligonucleotide
guagugaggcugccguugg

SEQ ID NO: 3078486 - RNA, 19 nt, Artificial Sequence
  Description of Artificial Sequence: Synthetic oligonucleotide
aguagugaggcugccguug

SEQ ID NO: 3078487 - RNA, 19 nt, Artificial Sequence
  Description of Artificial Sequence: Synthetic oligonucleotide
ucuugauggcucgaagcca

SEQ ID NO: 3078488 - RNA, 19 nt, Artificial Sequence
  Description of Artificial Sequence: Synthetic oligonucleotide
ugccguugguccaggagug

SEQ ID NO: 3078489 - RNA, 19 nt, Artificial Sequence
  Description of Artificial Sequence: Synthetic oligonucleotide
aaggagccgaacccagcug

SEQ ID NO: 3078490 - RNA, 19 nt, Artificial Sequence
  Description of Artificial Sequence: Synthetic oligonucleotide
caagauuuucuucuggugu

SEQ ID NO: 3078491 - RNA, 19 nt, Artificial Sequence
  Description of Artificial Sequence: Synthetic oligonucleotide
gugacuccaauacggagca

SEQ ID NO: 3078492 - RNA, 19 nt, Artificial Sequence
  Description of Artificial Sequence: Synthetic oligonucleotide
acuguugggcugguccucc

SEQ ID NO: 3078493 - RNA, 19 nt, Artificial Sequence
  Description of Artificial Sequence: Synthetic oligonucleotide
uacggagcagguccucugc

SEQ ID NO: 3078494 - RNA, 19 nt, Artificial Sequence
  Description of Artificial Sequence: Synthetic oligonucleotide
aucuucccaucuugauggc

SEQ ID NO: 3078495 - RNA, 19 nt, Artificial Sequence
  Description of Artificial Sequence: Synthetic oligonucleotide
ugaccaccucaaaggagcc

SEQ ID NO: 3078496 - RNA, 19 nt, Artificial Sequence
  Description of Artificial Sequence: Synthetic oligonucleotide
uccugcuagagugacucca

SEQ ID NO: 3078497 - RNA, 19 nt, Artificial Sequence
  Description of Artificial Sequence: Synthetic oligonucleotide
ugcuagagugacuccaaua

SEQ ID NO: 3078498 - RNA, 19 nt, Artificial Sequence
  Description of Artificial Sequence: Synthetic oligonucleotide
aacuguugggcugguccuc

SEQ ID NO: 3078499 - RNA, 19 nt, Artificial Sequence
  Description of Artificial Sequence: Synthetic oligonucleotide
cuccugucccaccaggggc

SEQ ID NO: 3078500 - RNA, 19 nt, Artificial Sequence
  Description of Artificial Sequence: Synthetic oligonucleotide
acccacagagccaaaagca

SEQ ID NO: 3078501 - RNA, 19 nt, Artificial Sequence
  Description of Artificial Sequence: Synthetic oligonucleotide
guuguggugaguccuugga

SEQ ID NO: 3078502 - RNA, 19 nt, Artificial Sequence
  Description of Artificial Sequence: Synthetic oligonucleotide
uccugucccaccaggggcu

SEQ ID NO: 3078503 - RNA, 19 nt, Artificial Sequence
  Description of Artificial Sequence: Synthetic oligonucleotide
gauggcucgaagccacuca

SEQ ID NO: 3078504 - RNA, 19 nt, Artificial Sequence
  Description of Artificial Sequence: Synthetic oligonucleotide
uuccucauaucuucccauc

SEQ ID NO: 3078505 - RNA, 19 nt, Artificial Sequence
  Description of Artificial Sequence: Synthetic oligonucleotide
agaucuggcugaccaccuc

SEQ ID NO: 3078506 - RNA, 19 nt, Artificial Sequence
  Description of Artificial Sequence: Synthetic oligonucleotide
gccacucacccacagagcc

SEQ ID NO: 3078507 - RNA, 19 nt, Artificial Sequence
  Description of Artificial Sequence: Synthetic oligonucleotide
ccaggaguggaugugaggc

SEQ ID NO: 3078508 - RNA, 19 nt, Artificial Sequence
  Description of Artificial Sequence: Synthetic oligonucleotide
ggcucgaagccacucaccc

SEQ ID NO: 3078509 - RNA, 19 nt, Artificial Sequence
  Description of Artificial Sequence: Synthetic oligonucleotide
accaccucaaaggagccga

SEQ ID NO: 3078510 - RNA, 19 nt, Artificial Sequence
  Description of Artificial Sequence: Synthetic oligonucleotide
aaguuguggugaguccuug

SEQ ID NO: 3078511 - RNA, 19 nt, Artificial Sequence
  Description of Artificial Sequence: Synthetic oligonucleotide
caggaguggaugugaggcc

SEQ ID NO: 3078512 - RNA, 19 nt, Artificial Sequence
  Description of Artificial Sequence: Synthetic oligonucleotide
ggaggucagaacuguuggg

SEQ ID NO: 3078513 - RNA, 19 nt, Artificial Sequence
  Description of Artificial Sequence: Synthetic oligonucleotide
auacggagcagguccucug

SEQ ID NO: 3078514 - RNA, 19 nt, Artificial Sequence
  Description of Artificial Sequence: Synthetic oligonucleotide
uggccaagauuuucuucug

SEQ ID NO: 3078515 - RNA, 19 nt, Artificial Sequence
  Description of Artificial Sequence: Synthetic oligonucleotide
ugggcugguccuccugucc

SEQ ID NO: 3078516 - RNA, 19 nt, Artificial Sequence
  Description of Artificial Sequence: Synthetic oligonucleotide
ccucaaaggagccgaaccc

SEQ ID NO: 3078517 - RNA, 19 nt, Artificial Sequence
  Description of Artificial Sequence: Synthetic oligonucleotide
ggccaagauuuucuucugg

SEQ ID NO: 3078518 - RNA, 19 nt, Artificial Sequence
  Description of Artificial Sequence: Synthetic oligonucleotide
guugguccaggaguggaug

SEQ ID NO: 3078519 - RNA, 19 nt, Artificial Sequence
  Description of Artificial Sequence: Synthetic oligonucleotide
uggcucgaagccacucacc

SEQ ID NO: 3078520 - RNA, 19 nt, Artificial Sequence
  Description of Artificial Sequence: Synthetic oligonucleotide
cuuagcuugggacuucaua

SEQ ID NO: 3078521 - RNA, 19 nt, Artificial Sequence
  Description of Artificial Sequence: Synthetic oligonucleotide
ggucagaacuguugggcug

SEQ ID NO: 3078522 - RNA, 19 nt, Artificial Sequence
  Description of Artificial Sequence: Synthetic oligonucleotide
ccaagauuuucuucuggug

SEQ ID NO: 3078523 - RNA, 19 nt, Artificial Sequence
  Description of Artificial Sequence: Synthetic oligonucleotide
acuucauaugcugcacacu

SEQ ID NO: 3078524 - RNA, 19 nt, Artificial Sequence
  Description of Artificial Sequence: Synthetic oligonucleotide
agagugacuccaauacgga

SEQ ID NO: 3078525 - RNA, 19 nt, Artificial Sequence
  Description of Artificial Sequence: Synthetic oligonucleotide
aaaguuguggugaguccuu

SEQ ID NO: 3078526 - RNA, 19 nt, Artificial Sequence
  Description of Artificial Sequence: Synthetic oligonucleotide
gaacccagcugcugcaaaa

SEQ ID NO: 3078527 - RNA, 19 nt, Artificial Sequence
  Description of Artificial Sequence: Synthetic oligonucleotide
ugguguccugcuagaguga

SEQ ID NO: 3078528 - RNA, 19 nt, Artificial Sequence
  Description of Artificial Sequence: Synthetic oligonucleotide
aggggcuccuggcuuagcu

SEQ ID NO: 3078529 - RNA, 19 nt, Artificial Sequence
  Description of Artificial Sequence: Synthetic oligonucleotide
gaagccacucacccacaga

SEQ ID NO: 3078530 - RNA, 19 nt, Artificial Sequence
  Description of Artificial Sequence: Synthetic oligonucleotide
gaccaccucaaaggagccg

SEQ ID NO: 3078531 - RNA, 19 nt, Artificial Sequence
  Description of Artificial Sequence: Synthetic oligonucleotide
gagccaaaagcagaguagu

SEQ ID NO: 3078532 - RNA, 19 nt, Artificial Sequence
  Description of Artificial Sequence: Synthetic oligonucleotide
acacuggccaagauuuucu

SEQ ID NO: 3078533 - RNA, 19 nt, Artificial Sequence
  Description of Artificial Sequence: Synthetic oligonucleotide
cagaguagugaggcugccg

SEQ ID NO: 3078534 - RNA, 19 nt, Artificial Sequence
  Description of Artificial Sequence: Synthetic oligonucleotide
ucuucccaucuugauggcu

SEQ ID NO: 3078535 - RNA, 19 nt, Artificial Sequence
  Description of Artificial Sequence: Synthetic oligonucleotide
cagagaucuggcugaccac

SEQ ID NO: 3078536 - RNA, 19 nt, Artificial Sequence
  Description of Artificial Sequence: Synthetic oligonucleotide
cacacuggccaagauuuuc

SEQ ID NO: 3078537 - RNA, 19 nt, Artificial Sequence
  Description of Artificial Sequence: Synthetic oligonucleotide
agccacucacccacagagc

SEQ ID NO: 3078538 - RNA, 19 nt, Artificial Sequence
  Description of Artificial Sequence: Synthetic oligonucleotide
cagagccaaaagcagagua

SEQ ID NO: 3078539 - RNA, 19 nt, Artificial Sequence
  Description of Artificial Sequence: Synthetic oligonucleotide
gccaaaagcagaguaguga

SEQ ID NO: 3078540 - RNA, 19 nt, Artificial Sequence
  Description of Artificial Sequence: Synthetic oligonucleotide
gaacuguugggcugguccu

SEQ ID NO: 3078541 - RNA, 19 nt, Artificial Sequence
  Description of Artificial Sequence: Synthetic oligonucleotide
cugcugcaaaacuuuccuc

SEQ ID NO: 3078542 - RNA, 19 nt, Artificial Sequence
  Description of Artificial Sequence: Synthetic oligonucleotide
acuccaauacggagcaggu

SEQ ID NO: 3078543 - RNA, 19 nt, Artificial Sequence
  Description of Artificial Sequence: Synthetic oligonucleotide
ucuggcugaccaccucaaa

SEQ ID NO: 3078544 - RNA, 19 nt, Artificial Sequence
  Description of Artificial Sequence: Synthetic oligonucleotide
gggcuccuggcuuagcuug

SEQ ID NO: 3078545 - RNA, 19 nt, Artificial Sequence
  Description of Artificial Sequence: Synthetic oligonucleotide
uugauggcucgaagccacu

SEQ ID NO: 3078546 - RNA, 19 nt, Artificial Sequence
  Description of Artificial Sequence: Synthetic oligonucleotide
agccaaaagcagaguagug

SEQ ID NO: 3078547 - RNA, 19 nt, Artificial Sequence
  Description of Artificial Sequence: Synthetic oligonucleotide
uucuucugguguccugcua

SEQ ID NO: 3078548 - RNA, 19 nt, Artificial Sequence
  Description of Artificial Sequence: Synthetic oligonucleotide
ucgaagccacucacccaca

SEQ ID NO: 3078549 - RNA, 19 nt, Artificial Sequence
  Description of Artificial Sequence: Synthetic oligonucleotide
gaggcugccguugguccag

SEQ ID NO: 3078550 - RNA, 19 nt, Artificial Sequence
  Description of Artificial Sequence: Synthetic oligonucleotide
ugauggcucgaagccacuc

SEQ ID NO: 3078551 - RNA, 19 nt, Artificial Sequence
  Description of Artificial Sequence: Synthetic oligonucleotide
ggugaguccuuggagguca

SEQ ID NO: 3078552 - RNA, 19 nt, Artificial Sequence
  Description of Artificial Sequence: Synthetic oligonucleotide
ugcugcacacuggccaaga

SEQ ID NO: 3078553 - RNA, 19 nt, Artificial Sequence
  Description of Artificial Sequence: Synthetic oligonucleotide
cauaucuucccaucuugau

SEQ ID NO: 3078554 - RNA, 19 nt, Artificial Sequence
  Description of Artificial Sequence: Synthetic oligonucleotide
ggacuucauaugcugcaca

SEQ ID NO: 3078555 - RNA, 19 nt, Artificial Sequence
  Description of Artificial Sequence: Synthetic oligonucleotide
cagcugcugcaaaacuuuc

SEQ ID NO: 3078556 - RNA, 19 nt, Artificial Sequence
  Description of Artificial Sequence: Synthetic oligonucleotide
gcugcugcaaaacuuuccu

SEQ ID NO: 3078557 - RNA, 19 nt, Artificial Sequence
  Description of Artificial Sequence: Synthetic oligonucleotide
uagugaggcugccguuggu

SEQ ID NO: 3078558 - RNA, 19 nt, Artificial Sequence
  Description of Artificial Sequence: Synthetic oligonucleotide
acagagccaaaagcagagu

SEQ ID NO: 3078559 - RNA, 19 nt, Artificial Sequence
  Description of Artificial Sequence: Synthetic oligonucleotide
guccaggaguggaugugag

SEQ ID NO: 3078560 - RNA, 19 nt, Artificial Sequence
  Description of Artificial Sequence: Synthetic oligonucleotide
gcugccguugguccaggag

SEQ ID NO: 3078561 - RNA, 19 nt, Artificial Sequence
  Description of Artificial Sequence: Synthetic oligonucleotide
ugcagagaucuggcugacc

SEQ ID NO: 3078562 - RNA, 19 nt, Artificial Sequence
  Description of Artificial Sequence: Synthetic oligonucleotide
ccaucuugauggcucgaag

SEQ ID NO: 3078563 - RNA, 19 nt, Artificial Sequence
  Description of Artificial Sequence: Synthetic oligonucleotide
ggcugaccaccucaaagga

SEQ ID NO: 3078564 - RNA, 19 nt, Artificial Sequence
  Description of Artificial Sequence: Synthetic oligonucleotide
gauuuucuucugguguccu

SEQ ID NO: 3078565 - RNA, 19 nt, Artificial Sequence
  Description of Artificial Sequence: Synthetic oligonucleotide
uugggcugguccuccuguc

SEQ ID NO: 3078566 - RNA, 19 nt, Artificial Sequence
  Description of Artificial Sequence: Synthetic oligonucleotide
gcugaccaccucaaaggag

SEQ ID NO: 3078567 - RNA, 19 nt, Artificial Sequence
  Description of Artificial Sequence: Synthetic oligonucleotide
ugucccaccaggggcuccu

SEQ ID NO: 3078568 - RNA, 19 nt, Artificial Sequence
  Description of Artificial Sequence: Synthetic oligonucleotide
gcaaaacuuuccucauauc

SEQ ID NO: 3078569 - RNA, 19 nt, Artificial Sequence
  Description of Artificial Sequence: Synthetic oligonucleotide
cugccguugguccaggagu

SEQ ID NO: 3078570 - RNA, 19 nt, Artificial Sequence
  Description of Artificial Sequence: Synthetic oligonucleotide
ccuccugucccaccagggg

SEQ ID NO: 3078571 - RNA, 19 nt, Artificial Sequence
  Description of Artificial Sequence: Synthetic oligonucleotide
gccaagauuuucuucuggu

SEQ ID NO: 3078572 - RNA, 19 nt, Artificial Sequence
  Description of Artificial Sequence: Synthetic oligonucleotide
cuccaauacggagcagguc

SEQ ID NO: 3078573 - RNA, 19 nt, Artificial Sequence
  Description of Artificial Sequence: Synthetic oligonucleotide
guccugcuagagugacucc

SEQ ID NO: 3078574 - RNA, 19 nt, Artificial Sequence
  Description of Artificial Sequence: Synthetic oligonucleotide
gagccgaacccagcugcug

SEQ ID NO: 3078575 - RNA, 19 nt, Artificial Sequence
  Description of Artificial Sequence: Synthetic oligonucleotide
ugacuccaauacggagcag

SEQ ID NO: 3078576 - RNA, 19 nt, Artificial Sequence
  Description of Artificial Sequence: Synthetic oligonucleotide
gguguccugcuagagugac

SEQ ID NO: 3078577 - RNA, 19 nt, Artificial Sequence
  Description of Artificial Sequence: Synthetic oligonucleotide
cacucacccacagagccaa

SEQ ID NO: 3078578 - RNA, 19 nt, Artificial Sequence
  Description of Artificial Sequence: Synthetic oligonucleotide
ccacagagccaaaagcaga

SEQ ID NO: 3078579 - RNA, 19 nt, Artificial Sequence
  Description of Artificial Sequence: Synthetic oligonucleotide
caccucaaaggagccgaac

SEQ ID NO: 3078580 - RNA, 19 nt, Artificial Sequence
  Description of Artificial Sequence: Synthetic oligonucleotide
ucagaacuguugggcuggu

SEQ ID NO: 3078581 - RNA, 19 nt, Artificial Sequence
  Description of Artificial Sequence: Synthetic oligonucleotide
cugcaaaacuuuccucaua

SEQ ID NO: 3078582 - RNA, 19 nt, Artificial Sequence
  Description of Artificial Sequence: Synthetic oligonucleotide
caauacggagcagguccuc

SEQ ID NO: 3078583 - RNA, 19 nt, Artificial Sequence
  Description of Artificial Sequence: Synthetic oligonucleotide
ucccaucuugauggcucga

SEQ ID NO: 3078584 - RNA, 19 nt, Artificial Sequence
  Description of Artificial Sequence: Synthetic oligonucleotide
augcugcacacuggccaag

SEQ ID NO: 3078585 - RNA, 19 nt, Artificial Sequence
  Description of Artificial Sequence: Synthetic oligonucleotide
gagaucuggcugaccaccu

SEQ ID NO: 3078586 - RNA, 19 nt, Artificial Sequence
  Description of Artificial Sequence: Synthetic oligonucleotide
gguccaggaguggauguga

SEQ ID NO: 3078587 - RNA, 19 nt, Artificial Sequence
  Description of Artificial Sequence: Synthetic oligonucleotide
cucacccacagagccaaaa

SEQ ID NO: 3078588 - RNA, 19 nt, Artificial Sequence
  Description of Artificial Sequence: Synthetic oligonucleotide
cugcagagaucuggcugac

SEQ ID NO: 3078589 - RNA, 19 nt, Artificial Sequence
  Description of Artificial Sequence: Synthetic oligonucleotide
ggcuccuggcuuagcuugg

SEQ ID NO: 3078590 - RNA, 19 nt, Artificial Sequence
  Description of Artificial Sequence: Synthetic oligonucleotide
uggcuuagcuugggacuuc

SEQ ID NO: 3078591 - RNA, 19 nt, Artificial Sequence
  Description of Artificial Sequence: Synthetic oligonucleotide
gugaguccuuggaggucag

SEQ ID NO: 3078592 - RNA, 19 nt, Artificial Sequence
  Description of Artificial Sequence: Synthetic oligonucleotide
gcucgaagccacucaccca

SEQ ID NO: 3078593 - RNA, 19 nt, Artificial Sequence
  Description of Artificial Sequence: Synthetic oligonucleotide
gcugcaaaacuuuccucau

SEQ ID NO: 3078594 - RNA, 19 nt, Artificial Sequence
  Description of Artificial Sequence: Synthetic oligonucleotide
ccuggcuuagcuugggacu

SEQ ID NO: 3078595 - RNA, 19 nt, Artificial Sequence
  Description of Artificial Sequence: Synthetic oligonucleotide
gcuccuggcuuagcuuggg

SEQ ID NO: 3078596 - RNA, 19 nt, Artificial Sequence
  Description of Artificial Sequence: Synthetic oligonucleotide
cuccuggcuuagcuuggga

SEQ ID NO: 3078597 - RNA, 19 nt, Artificial Sequence
  Description of Artificial Sequence: Synthetic oligonucleotide
cugcacacuggccaagauu

SEQ ID NO: 3078598 - RNA, 19 nt, Artificial Sequence
  Description of Artificial Sequence: Synthetic oligonucleotide
gcagaguagugaggcugcc

SEQ ID NO: 3078599 - RNA, 19 nt, Artificial Sequence
  Description of Artificial Sequence: Synthetic oligonucleotide
cuuggaggucagaacuguu

SEQ ID NO: 3078600 - RNA, 19 nt, Artificial Sequence
  Description of Artificial Sequence: Synthetic oligonucleotide
cagaacuguugggcugguc

SEQ ID NO: 3078601 - RNA, 19 nt, Artificial Sequence
  Description of Artificial Sequence: Synthetic oligonucleotide
cggagcagguccucugcag

SEQ ID NO: 3078602 - RNA, 19 nt, Artificial Sequence
  Description of Artificial Sequence: Synthetic oligonucleotide
ccugcuagagugacuccaa

SEQ ID NO: 3078603 - RNA, 19 nt, Artificial Sequence
  Description of Artificial Sequence: Synthetic oligonucleotide
gccgaacccagcugcugca

SEQ ID NO: 3078604 - RNA, 19 nt, Artificial Sequence
  Description of Artificial Sequence: Synthetic oligonucleotide
ggcuuagcuugggacuuca

SEQ ID NO: 3078605 - RNA, 19 nt, Artificial Sequence
  Description of Artificial Sequence: Synthetic oligonucleotide
gccguugguccaggagugg

SEQ ID NO: 3078606 - RNA, 19 nt, Artificial Sequence
  Description of Artificial Sequence: Synthetic oligonucleotide
cugucccaccaggggcucc

SEQ ID NO: 3078607 - RNA, 19 nt, Artificial Sequence
  Description of Artificial Sequence: Synthetic oligonucleotide
aggcugccguugguccagg

SEQ ID NO: 3078608 - RNA, 19 nt, Artificial Sequence
  Description of Artificial Sequence: Synthetic oligonucleotide
cuggcuuagcuugggacuu

SEQ ID NO: 3078609 - RNA, 19 nt, Artificial Sequence
  Description of Artificial Sequence: Synthetic oligonucleotide
ccagcugcugcaaaacuuu

SEQ ID NO: 3078610 - RNA, 19 nt, Artificial Sequence
  Description of Artificial Sequence: Synthetic oligonucleotide
ccacucacccacagagcca

SEQ ID NO: 3078611 - RNA, 19 nt, Artificial Sequence
  Description of Artificial Sequence: Synthetic oligonucleotide
cacuggccaagauuuucuu

SEQ ID NO: 3078612 - RNA, 19 nt, Artificial Sequence
  Description of Artificial Sequence: Synthetic oligonucleotide
cugcuagagugacuccaau

SEQ ID NO: 3078613 - RNA, 19 nt, Artificial Sequence
  Description of Artificial Sequence: Synthetic oligonucleotide
ccaauacggagcagguccu

SEQ ID NO: 3078614 - RNA, 19 nt, Artificial Sequence
  Description of Artificial Sequence: Synthetic oligonucleotide
caggggcuccuggcuuagc

SEQ ID NO: 3078615 - RNA, 19 nt, Artificial Sequence
  Description of Artificial Sequence: Synthetic oligonucleotide
cccagcugcugcaaaacuu

SEQ ID NO: 3078616 - RNA, 19 nt, Artificial Sequence
  Description of Artificial Sequence: Synthetic oligonucleotide
ccucauaucuucccaucuu

SEQ ID NO: 3078617 - RNA, 19 nt, Artificial Sequence
  Description of Artificial Sequence: Synthetic oligonucleotide
ccguugguccaggagugga

SEQ ID NO: 3078618 - RNA, 19 nt, Artificial Sequence
  Description of Artificial Sequence: Synthetic oligonucleotide
ccuuggaggucagaacugu

SEQ ID NO: 3078619 - RNA, 19 nt, Artificial Sequence
  Description of Artificial Sequence: Synthetic oligonucleotide
guguccugcuagagugacu

SEQ ID NO: 3078620 - RNA, 19 nt, Artificial Sequence
  Description of Artificial Sequence: Synthetic oligonucleotide
cccaucuugauggcucgaa

SEQ ID NO: 3078621 - RNA, 19 nt, Artificial Sequence
  Description of Artificial Sequence: Synthetic oligonucleotide
cuguugggcugguccuccu

SEQ ID NO: 3078622 - RNA, 19 nt, Artificial Sequence
  Description of Artificial Sequence: Synthetic oligonucleotide
ccaggggcuccuggcuuag

SEQ ID NO: 3078623 - RNA, 19 nt, Artificial Sequence
  Description of Artificial Sequence: Synthetic oligonucleotide
gcugcacacuggccaagau

SEQ ID NO: 3078624 - RNA, 19 nt, Artificial Sequence
  Description of Artificial Sequence: Synthetic oligonucleotide
ggcugccguugguccagga

SEQ ID NO: 3078625 - RNA, 19 nt, Artificial Sequence
  Description of Artificial Sequence: Synthetic oligonucleotide
ccaccucaaaggagccgaa

SEQ ID NO: 3078626 - RNA, 19 nt, Artificial Sequence
  Description of Artificial Sequence: Synthetic oligonucleotide
cgaacccagcugcugcaaa

SEQ ID NO: 3078627 - RNA, 19 nt, Artificial Sequence
  Description of Artificial Sequence: Synthetic oligonucleotide
cguugguccaggaguggau

SEQ ID NO: 3078628 - RNA, 19 nt, Artificial Sequence
  Description of Artificial Sequence: Synthetic oligonucleotide
ccgaacccagcugcugcaa

SEQ ID NO: 3078629 - RNA, 19 nt, Artificial Sequence
  Description of Artificial Sequence: Synthetic oligonucleotide
gcuuagcuugggacuucau

SEQ ID NO: 3078630 - RNA, 19 nt, Artificial Sequence
  Description of Artificial Sequence: Synthetic oligonucleotide
gcacacuggccaagauuuu

SEQ ID NO: 3078631 - RNA, 19 nt, Artificial Sequence
  Description of Artificial Sequence: Synthetic oligonucleotide
  modified_base (5)..(5): a, c, u, g, unknown or other
aaaanaaaaguacaugagc

SEQ ID NO: 3078632 - RNA, 19 nt, Artificial Sequence
  Description of Artificial Sequence: Synthetic oligonucleotide
aauauuuucucccaggguc

SEQ ID NO: 3078633 - RNA, 19 nt, Artificial Sequence
  Description of Artificial Sequence: Synthetic oligonucleotide
  modified_base (14)..(14): a, c, u, g, unknown or other
aaagaaaagaaaanaaaag

SEQ ID NO: 3078634 - RNA, 19 nt, Artificial Sequence
  Description of Artificial Sequence: Synthetic oligonucleotide
aauaauaguugcuauacug

SEQ ID NO: 3078635 - RNA, 19 nt, Artificial Sequence
  Description of Artificial Sequence: Synthetic oligonucleotide
  modified_base (7)..(7): a, c, u, g, unknown or other
agaaaanaaaaguacauga

SEQ ID NO: 3078636 - RNA, 19 nt, Artificial Sequence
  Description of Artificial Sequence: Synthetic oligonucleotide
  modified_base (4)..(4): a, c, u, g, unknown or other
aaanaaaaguacaugagca

SEQ ID NO: 3078637 - RNA, 19 nt, Artificial Sequence
  Description of Artificial Sequence: Synthetic oligonucleotide
aaacuuuucuucugagucc

SEQ ID NO: 3078638 - RNA, 19 nt, Artificial Sequence
  Description of Artificial Sequence: Synthetic oligonucleotide
uccauuaucagcaauauuu

SEQ ID NO: 3078639 - RNA, 19 nt, Artificial Sequence
  Description of Artificial Sequence: Synthetic oligonucleotide
augagcauaacucaggaag

SEQ ID NO: 3078640 - RNA, 19 nt, Artificial Sequence
  Description of Artificial Sequence: Synthetic oligonucleotide
  modified_base (13)..(13): a, c, u, g, unknown or other
aagaaaagaaaanaaaagu

SEQ ID NO: 3078641 - RNA, 19 nt, Artificial Sequence
  Description of Artificial Sequence: Synthetic oligonucleotide
aucagcaauauuuucuccc

SEQ ID NO: 3078642 - RNA, 19 nt, Artificial Sequence
  Description of Artificial Sequence: Synthetic oligonucleotide
uaaacuuuucuucugaguc

SEQ ID NO: 3078643 - RNA, 19 nt, Artificial Sequence
  Description of Artificial Sequence: Synthetic oligonucleotide
aaguacaugagcauaacuc

SEQ ID NO: 3078644 - RNA, 19 nt, Artificial Sequence
  Description of Artificial Sequence: Synthetic oligonucleotide
  modified_base (6)..(6): a, c, u, g, unknown or other
gaaaanaaaaguacaugag

SEQ ID NO: 3078645 - RNA, 19 nt, Artificial Sequence
  Description of Artificial Sequence: Synthetic oligonucleotide
uaacucaggaagaagagcu

SEQ ID NO: 3078646 - RNA, 19 nt, Artificial Sequence
  Description of Artificial Sequence: Synthetic oligonucleotide
  modified_base (8)..(8): a, c, u, g, unknown or other
aagaaaanaaaaguacaug

SEQ ID NO: 3078647 - RNA, 19 nt, Artificial Sequence
  Description of Artificial Sequence: Synthetic oligonucleotide
  modified_base (16)..(16): a, c, u, g, unknown or other
gaaaagaaaagaaaanaaa

SEQ ID NO: 3078648 - RNA, 19 nt, Artificial Sequence
  Description of Artificial Sequence: Synthetic oligonucleotide
  modified_base (3)..(3): a, c, u, g, unknown or other
aanaaaaguacaugagcau

SEQ ID NO: 3078649 - RNA, 19 nt, Artificial Sequence
  Description of Artificial Sequence: Synthetic oligonucleotide
auacugguuaaucaugcac

SEQ ID NO: 3078650 - RNA, 19 nt, Artificial Sequence
  Description of Artificial Sequence: Synthetic oligonucleotide
ucauuuauccauuuccugu

SEQ ID NO: 3078651 - RNA, 19 nt, Artificial Sequence
  Description of Artificial Sequence: Synthetic oligonucleotide
uuguuugugaaggugaugc

SEQ ID NO: 3078652 - RNA, 19 nt, Artificial Sequence
  Description of Artificial Sequence: Synthetic oligonucleotide
ucgaagaccuccauuauca

SEQ ID NO: 3078653 - RNA, 19 nt, Artificial Sequence
  Description of Artificial Sequence: Synthetic oligonucleotide
aaaagcuucucgaagaccu

SEQ ID NO: 3078654 - RNA, 19 nt, Artificial Sequence
  Description of Artificial Sequence: Synthetic oligonucleotide
auccauuuccuguaagccc

SEQ ID NO: 3078655 - RNA, 19 nt, Artificial Sequence
  Description of Artificial Sequence: Synthetic oligonucleotide
auaauaguugcuauacugg

SEQ ID NO: 3078656 - RNA, 19 nt, Artificial Sequence
  Description of Artificial Sequence: Synthetic oligonucleotide
aguacaugagcauaacuca

SEQ ID NO: 3078657 - RNA, 19 nt, Artificial Sequence
  Description of Artificial Sequence: Synthetic oligonucleotide
  modified_base (19)..(19): a, c, u, g, unknown or other
aaagaaaagaaaagaaaan

SEQ ID NO: 3078658 - RNA, 19 nt, Artificial Sequence
  Description of Artificial Sequence: Synthetic oligonucleotide
uuacguuuaagccagcuuu

SEQ ID NO: 3078659 - RNA, 19 nt, Artificial Sequence
  Description of Artificial Sequence: Synthetic oligonucleotide
uacaugagcauaacucagg

SEQ ID NO: 3078660 - RNA, 19 nt, Artificial Sequence
  Description of Artificial Sequence: Synthetic oligonucleotide
uaaucaugcacuuuguuuu

SEQ ID NO: 3078661 - RNA, 19 nt, Artificial Sequence
  Description of Artificial Sequence: Synthetic oligonucleotide
uuugugaaggugaugccug

SEQ ID NO: 3078662 - RNA, 19 nt, Artificial Sequence
  Description of Artificial Sequence: Synthetic oligonucleotide
uuuaagccagcuuucuucc

SEQ ID NO: 3078663 - RNA, 19 nt, Artificial Sequence
  Description of Artificial Sequence: Synthetic oligonucleotide
cuauacugguuaaucaugc

SEQ ID NO: 3078664 - RNA, 19 nt, Artificial Sequence
  Description of Artificial Sequence: Synthetic oligonucleotide
aagaccuccauuaucagca

SEQ ID NO: 3078665 - RNA, 19 nt, Artificial Sequence
  Description of Artificial Sequence: Synthetic oligonucleotide
uuauccauuuccuguaagc

SEQ ID NO: 3078666 - RNA, 19 nt, Artificial Sequence
  Description of Artificial Sequence: Synthetic oligonucleotide
uacugguuaaucaugcacu

SEQ ID NO: 3078667 - RNA, 19 nt, Artificial Sequence
  Description of Artificial Sequence: Synthetic oligonucleotide
aagcccuaaaagcuucucg

SEQ ID NO: 3078668 - RNA, 19 nt, Artificial Sequence
  Description of Artificial Sequence: Synthetic oligonucleotide
aaaguacaugagcauaacu

SEQ ID NO: 3078669 - RNA, 19 nt, Artificial Sequence
  Description of Artificial Sequence: Synthetic oligonucleotide
uuaaucaugcacuuuguuu

SEQ ID NO: 3078670 - RNA, 19 nt, Artificial Sequence
  Description of Artificial Sequence: Synthetic oligonucleotide
uuccuguaagcccuaaaag

SEQ ID NO: 3078671 - RNA, 19 nt, Artificial Sequence
  Description of Artificial Sequence: Synthetic oligonucleotide
agcaauauuuucucccagg

SEQ ID NO: 3078672 - RNA, 19 nt, Artificial Sequence
  Description of Artificial Sequence: Synthetic oligonucleotide
auaacucaggaagaagagc

SEQ ID NO: 3078673 - RNA, 19 nt, Artificial Sequence
  Description of Artificial Sequence: Synthetic oligonucleotide
ugaaggugaugccugguag

SEQ ID NO: 3078674 - RNA, 19 nt, Artificial Sequence
  Description of Artificial Sequence: Synthetic oligonucleotide
  modified_base (2)..(2): a, c, u, g, unknown or other
anaaaaguacaugagcaua

SEQ ID NO: 3078675 - RNA, 19 nt, Artificial Sequence
  Description of Artificial Sequence: Synthetic oligonucleotide
uuuccuguaagcccuaaaa

SEQ ID NO: 3078676 - RNA, 19 nt, Artificial Sequence
  Description of Artificial Sequence: Synthetic oligonucleotide
uaauaguugcuauacuggu

SEQ ID NO: 3078677 - RNA, 19 nt, Artificial Sequence
  Description of Artificial Sequence: Synthetic oligonucleotide
uccccuuuacguuuaagcc

SEQ ID NO: 3078678 - RNA, 19 nt, Artificial Sequence
  Description of Artificial Sequence: Synthetic oligonucleotide
cauaacucaggaagaagag

SEQ ID NO: 3078679 - RNA, 19 nt, Artificial Sequence
  Description of Artificial Sequence: Synthetic oligonucleotide
ugagcauaacucaggaaga

SEQ ID NO: 3078680 - RNA, 19 nt, Artificial Sequence
  Description of Artificial Sequence: Synthetic oligonucleotide
ucuucggucauuuauccau

SEQ ID NO: 3078681 - RNA, 19 nt, Artificial Sequence
  Description of Artificial Sequence: Synthetic oligonucleotide
uuuauccauuuccuguaag

SEQ ID NO: 3078682 - RNA, 19 nt, Artificial Sequence
  Description of Artificial Sequence: Synthetic oligonucleotide
gaaggugaugccugguagg

SEQ ID NO: 3078683 - RNA, 19 nt, Artificial Sequence
  Description of Artificial Sequence: Synthetic oligonucleotide
uauccauuuccuguaagcc

SEQ ID NO: 3078684 - RNA, 19 nt, Artificial Sequence
  Description of Artificial Sequence: Synthetic oligonucleotide
auauuuucucccagggucc

SEQ ID NO: 3078685 - RNA, 19 nt, Artificial Sequence
  Description of Artificial Sequence: Synthetic oligonucleotide
auaguugcuauacugguua

SEQ ID NO: 3078686 - RNA, 19 nt, Artificial Sequence
  Description of Artificial Sequence: Synthetic oligonucleotide
ugguuguuugugaagguga

SEQ ID NO: 3078687 - RNA, 19 nt, Artificial Sequence
  Description of Artificial Sequence: Synthetic oligonucleotide
guuuaagccagcuuucuuc

SEQ ID NO: 3078688 - RNA, 19 nt, Artificial Sequence
  Description of Artificial Sequence: Synthetic oligonucleotide
cuuaaacuuuucuucugag

SEQ ID NO: 3078689 - RNA, 19 nt, Artificial Sequence
  Description of Artificial Sequence: Synthetic oligonucleotide
ucagcaauauuuucuccca

SEQ ID NO: 3078690 - RNA, 19 nt, Artificial Sequence
  Description of Artificial Sequence: Synthetic oligonucleotide
ucuuccaauaauaguugcu

SEQ ID NO: 3078691 - RNA, 19 nt, Artificial Sequence
  Description of Artificial Sequence: Synthetic oligonucleotide
uucucgaagaccuccauua

SEQ ID NO: 3078692 - RNA, 19 nt, Artificial Sequence
  Description of Artificial Sequence: Synthetic oligonucleotide
gaagaccuccauuaucagc

SEQ ID NO: 3078693 - RNA, 19 nt, Artificial Sequence
  Description of Artificial Sequence: Synthetic oligonucleotide
ucuucugaguccacagacc

SEQ ID NO: 3078694 - RNA, 19 nt, Artificial Sequence
  Description of Artificial Sequence: Synthetic oligonucleotide
aggaagaagagcugguugu

SEQ ID NO: 3078695 - RNA, 19 nt, Artificial Sequence
  Description of Artificial Sequence: Synthetic oligonucleotide
uugcuauacugguuaauca

SEQ ID NO: 3078696 - RNA, 19 nt, Artificial Sequence
  Description of Artificial Sequence: Synthetic oligonucleotide
uucuuccaauaauaguugc

SEQ ID NO: 3078697 - RNA, 19 nt, Artificial Sequence
  Description of Artificial Sequence: Synthetic oligonucleotide
ugcuauacugguuaaucau

SEQ ID NO: 3078698 - RNA, 19 nt, Artificial Sequence
  Description of Artificial Sequence: Synthetic oligonucleotide
uguaagcccuaaaagcuuc

SEQ ID NO: 3078699 - RNA, 19 nt, Artificial Sequence
  Description of Artificial Sequence: Synthetic oligonucleotide
gcaauauuuucucccaggg

SEQ ID NO: 3078700 - RNA, 19 nt, Artificial Sequence
  Description of Artificial Sequence: Synthetic oligonucleotide
agcugguuguuugugaagg

SEQ ID NO: 3078701 - RNA, 19 nt, Artificial Sequence
  Description of Artificial Sequence: Synthetic oligonucleotide
cuuucuuccaauaauaguu

SEQ ID NO: 3078702 - RNA, 19 nt, Artificial Sequence
  Description of Artificial Sequence: Synthetic oligonucleotide
uaggagaggcucuucaacu

SEQ ID NO: 3078703 - RNA, 19 nt, Artificial Sequence
  Description of Artificial Sequence: Synthetic oligonucleotide
ucucccaggguccucuucc

SEQ ID NO: 3078704 - RNA, 19 nt, Artificial Sequence
  Description of Artificial Sequence: Synthetic oligonucleotide
uugucuucggucauuuauc

SEQ ID NO: 3078705 - RNA, 19 nt, Artificial Sequence
  Description of Artificial Sequence: Synthetic oligonucleotide
cuaaaagcuucucgaagac

SEQ ID NO: 3078706 - RNA, 19 nt, Artificial Sequence
  Description of Artificial Sequence: Synthetic oligonucleotide
agcccuaaaagcuucucga

SEQ ID NO: 3078707 - RNA, 19 nt, Artificial Sequence
  Description of Artificial Sequence: Synthetic oligonucleotide
uaucagcaauauuuucucc

SEQ ID NO: 3078708 - RNA, 19 nt, Artificial Sequence
  Description of Artificial Sequence: Synthetic oligonucleotide
acaugagcauaacucagga

SEQ ID NO: 3078709 - RNA, 19 nt, Artificial Sequence
  Description of Artificial Sequence: Synthetic oligonucleotide
acucaggaagaagagcugg

SEQ ID NO: 3078710 - RNA, 19 nt, Artificial Sequence
  Description of Artificial Sequence: Synthetic oligonucleotide
uccaauaauaguugcuaua

SEQ ID NO: 3078711 - RNA, 19 nt, Artificial Sequence
  Description of Artificial Sequence: Synthetic oligonucleotide
uccuuaaacuuuucuucug

SEQ ID NO: 3078712 - RNA, 19 nt, Artificial Sequence
  Description of Artificial Sequence: Synthetic oligonucleotide
aagagcugguuguuuguga

SEQ ID NO: 3078713 - RNA, 19 nt, Artificial Sequence
  Description of Artificial Sequence: Synthetic oligonucleotide
uauacugguuaaucaugca

SEQ ID NO: 3078714 - RNA, 19 nt, Artificial Sequence
  Description of Artificial Sequence: Synthetic oligonucleotide
cauuaucagcaauauuuuc

SEQ ID NO: 3078715 - RNA, 19 nt, Artificial Sequence
  Description of Artificial Sequence: Synthetic oligonucleotide
uucaacuccuugucuucgg

SEQ ID NO: 3078716 - RNA, 19 nt, Artificial Sequence
  Description of Artificial Sequence: Synthetic oligonucleotide
uuucuucugaguccacaga

SEQ ID NO: 3078717 - RNA, 19 nt, Artificial Sequence
  Description of Artificial Sequence: Synthetic oligonucleotide
gaugccugguaggagaggc

SEQ ID NO: 3078718 - RNA, 19 nt, Artificial Sequence
  Description of Artificial Sequence: Synthetic oligonucleotide
aggagaggcucuucaacuc

SEQ ID NO: 3078719 - RNA, 19 nt, Artificial Sequence
  Description of Artificial Sequence: Synthetic oligonucleotide
uuuacguuuaagccagcuu

SEQ ID NO: 3078720 - RNA, 19 nt, Artificial Sequence
  Description of Artificial Sequence: Synthetic oligonucleotide
accaaggaucaagauuucc

SEQ ID NO: 3078721 - RNA, 19 nt, Artificial Sequence
  Description of Artificial Sequence: Synthetic oligonucleotide
uaaaagcuucucgaagacc

SEQ ID NO: 3078722 - RNA, 19 nt, Artificial Sequence
  Description of Artificial Sequence: Synthetic oligonucleotide
uguuugugaaggugaugcc

SEQ ID NO: 3078723 - RNA, 19 nt, Artificial Sequence
  Description of Artificial Sequence: Synthetic oligonucleotide
guugcuauacugguuaauc

SEQ ID NO: 3078724 - RNA, 19 nt, Artificial Sequence
  Description of Artificial Sequence: Synthetic oligonucleotide
uaagccagcuuucuuccaa

SEQ ID NO: 3078725 - RNA, 19 nt, Artificial Sequence
  Description of Artificial Sequence: Synthetic oligonucleotide
uugugaaggugaugccugg

SEQ ID NO: 3078726 - RNA, 19 nt, Artificial Sequence
  Description of Artificial Sequence: Synthetic oligonucleotide
uacguuuaagccagcuuuc

SEQ ID NO: 3078727 - RNA, 19 nt, Artificial Sequence
  Description of Artificial Sequence: Synthetic oligonucleotide
uuccaauaauaguugcuau

SEQ ID NO: 3078728 - RNA, 19 nt, Artificial Sequence
  Description of Artificial Sequence: Synthetic oligonucleotide
uccacagaccaccaaggau

SEQ ID NO: 3078729 - RNA, 19 nt, Artificial Sequence
  Description of Artificial Sequence: Synthetic oligonucleotide
guacaugagcauaacucag

SEQ ID NO: 3078730 - RNA, 19 nt, Artificial Sequence
  Description of Artificial Sequence: Synthetic oligonucleotide
accaccaaggaucaagauu

SEQ ID NO: 3078731 - RNA, 19 nt, Artificial Sequence
  Description of Artificial Sequence: Synthetic oligonucleotide
ucuucaacuccuugucuuc

SEQ ID NO: 3078732 - RNA, 19 nt, Artificial Sequence
  Description of Artificial Sequence: Synthetic oligonucleotide
guaggagaggcucuucaac

SEQ ID NO: 3078733 - RNA, 19 nt, Artificial Sequence
  Description of Artificial Sequence: Synthetic oligonucleotide
ccaauaauaguugcuauac

SEQ ID NO: 3078734 - RNA, 19 nt, Artificial Sequence
  Description of Artificial Sequence: Synthetic oligonucleotide
aaggugaugccugguagga

SEQ ID NO: 3078735 - RNA, 19 nt, Artificial Sequence
  Description of Artificial Sequence: Synthetic oligonucleotide
cuucugaguccacagacca

SEQ ID NO: 3078736 - RNA, 19 nt, Artificial Sequence
  Description of Artificial Sequence: Synthetic oligonucleotide
agcuuucuuccaauaauag

SEQ ID NO: 3078737 - RNA, 19 nt, Artificial Sequence
  Description of Artificial Sequence: Synthetic oligonucleotide
agcauaacucaggaagaag

SEQ ID NO: 3078738 - RNA, 19 nt, Artificial Sequence
  Description of Artificial Sequence: Synthetic oligonucleotide
aauaguugcuauacugguu

SEQ ID NO: 3078739 - RNA, 19 nt, Artificial Sequence
  Description of Artificial Sequence: Synthetic oligonucleotide
cagaccaccaaggaucaag

SEQ ID NO: 3078740 - RNA, 19 nt, Artificial Sequence
  Description of Artificial Sequence: Synthetic oligonucleotide
ucaacuccuugucuucggu

SEQ ID NO: 3078741 - RNA, 19 nt, Artificial Sequence
  Description of Artificial Sequence: Synthetic oligonucleotide
aaagcuucucgaagaccuc

SEQ ID NO: 3078742 - RNA, 19 nt, Artificial Sequence
  Description of Artificial Sequence: Synthetic oligonucleotide
agaagagcugguuguuugu

SEQ ID NO: 3078743 - RNA, 19 nt, Artificial Sequence
  Description of Artificial Sequence: Synthetic oligonucleotide
cuucaacuccuugucuucg

SEQ ID NO: 3078744 - RNA, 19 nt, Artificial Sequence
  Description of Artificial Sequence: Synthetic oligonucleotide
ccacagaccaccaaggauc

SEQ ID NO: 3078745 - RNA, 19 nt, Artificial Sequence
  Description of Artificial Sequence: Synthetic oligonucleotide
agagcugguuguuugugaa

SEQ ID NO: 3078746 - RNA, 19 nt, Artificial Sequence
  Description of Artificial Sequence: Synthetic oligonucleotide
acugguuaaucaugcacuu

SEQ ID NO: 3078747 - RNA, 19 nt, Artificial Sequence
  Description of Artificial Sequence: Synthetic oligonucleotide
cccuuuacguuuaagccag

SEQ ID NO: 3078748 - RNA, 19 nt, Artificial Sequence
  Description of Artificial Sequence: Synthetic oligonucleotide
aggcucuucaacuccuugu

SEQ ID NO: 3078749 - RNA, 19 nt, Artificial Sequence
  Description of Artificial Sequence: Synthetic oligonucleotide
auuuauccauuuccuguaa

SEQ ID NO: 3078750 - RNA, 19 nt, Artificial Sequence
  Description of Artificial Sequence: Synthetic oligonucleotide
gaagagcugguuguuugug

SEQ ID NO: 3078751 - RNA, 19 nt, Artificial Sequence
  Description of Artificial Sequence: Synthetic oligonucleotide
cauuuauccauuuccugua

SEQ ID NO: 3078752 - RNA, 19 nt, Artificial Sequence
  Description of Artificial Sequence: Synthetic oligonucleotide
aacucaggaagaagagcug

SEQ ID NO: 3078753 - RNA, 19 nt, Artificial Sequence
  Description of Artificial Sequence: Synthetic oligonucleotide
gagcugguuguuugugaag

SEQ ID NO: 3078754 - RNA, 19 nt, Artificial Sequence
  Description of Artificial Sequence: Synthetic oligonucleotide
ucggucauuuauccauuuc

SEQ ID NO: 3078755 - RNA, 19 nt, Artificial Sequence
  Description of Artificial Sequence: Synthetic oligonucleotide
ccuaaaagcuucucgaaga

SEQ ID NO: 3078756 - RNA, 19 nt, Artificial Sequence
  Description of Artificial Sequence: Synthetic oligonucleotide
cucgaagaccuccauuauc

SEQ ID NO: 3078757 - RNA, 19 nt, Artificial Sequence
  Description of Artificial Sequence: Synthetic oligonucleotide
gcauaacucaggaagaaga

SEQ ID NO: 3078758 - RNA, 19 nt, Artificial Sequence
  Description of Artificial Sequence: Synthetic oligonucleotide
uccucuuccccuuuacguu

SEQ ID NO: 3078759 - RNA, 19 nt, Artificial Sequence
  Description of Artificial Sequence: Synthetic oligonucleotide
uuaagccagcuuucuucca

SEQ ID NO: 3078760 - RNA, 19 nt, Artificial Sequence
  Description of Artificial Sequence: Synthetic oligonucleotide
cuuccaauaauaguugcua

SEQ ID NO: 3078761 - RNA, 19 nt, Artificial Sequence
  Description of Artificial Sequence: Synthetic oligonucleotide
ggugaugccugguaggaga

SEQ ID NO: 3078762 - RNA, 19 nt, Artificial Sequence
  Description of Artificial Sequence: Synthetic oligonucleotide
gaggcucuucaacuccuug

SEQ ID NO: 3078763 - RNA, 19 nt, Artificial Sequence
  Description of Artificial Sequence: Synthetic oligonucleotide
ucucgaagaccuccauuau

SEQ ID NO: 3078764 - RNA, 19 nt, Artificial Sequence
  Description of Artificial Sequence: Synthetic oligonucleotide
uucugaguccacagaccac

SEQ ID NO: 3078765 - RNA, 19 nt, Artificial Sequence
  Description of Artificial Sequence: Synthetic oligonucleotide
aagccagcuuucuuccaau

SEQ ID NO: 3078766 - RNA, 19 nt, Artificial Sequence
  Description of Artificial Sequence: Synthetic oligonucleotide
cugguuguuugugaaggug

SEQ ID NO: 3078767 - RNA, 19 nt, Artificial Sequence
  Description of Artificial Sequence: Synthetic oligonucleotide
cagcaauauuuucucccag

SEQ ID NO: 3078768 - RNA, 19 nt, Artificial Sequence
  Description of Artificial Sequence: Synthetic oligonucleotide
gcuauacugguuaaucaug

SEQ ID NO: 3078769 - RNA, 19 nt, Artificial Sequence
  Description of Artificial Sequence: Synthetic oligonucleotide
cggucauuuauccauuucc

SEQ ID NO: 3078770 - RNA, 19 nt, Artificial Sequence
  Description of Artificial Sequence: Synthetic oligonucleotide
ggagaggcucuucaacucc

SEQ ID NO: 3078771 - RNA, 19 nt, Artificial Sequence
  Description of Artificial Sequence: Synthetic oligonucleotide
uauuuucucccaggguccu

SEQ ID NO: 3078772 - RNA, 19 nt, Artificial Sequence
  Description of Artificial Sequence: Synthetic oligonucleotide
cuugucuucggucauuuau

SEQ ID NO: 3078773 - RNA, 19 nt, Artificial Sequence
  Description of Artificial Sequence: Synthetic oligonucleotide
ccaaggaucaagauuucca

SEQ ID NO: 3078774 - RNA, 19 nt, Artificial Sequence
  Description of Artificial Sequence: Synthetic oligonucleotide
auuuccuguaagcccuaaa

SEQ ID NO: 3078775 - RNA, 19 nt, Artificial Sequence
  Description of Artificial Sequence: Synthetic oligonucleotide
caacuccuugucuucgguc

SEQ ID NO: 3078776 - RNA, 19 nt, Artificial Sequence
  Description of Artificial Sequence: Synthetic oligonucleotide
cagcuuucuuccaauaaua

SEQ ID NO: 3078777 - RNA, 19 nt, Artificial Sequence
  Description of Artificial Sequence: Synthetic oligonucleotide
uaguugcuauacugguuaa

SEQ ID NO: 3078778 - RNA, 19 nt, Artificial Sequence
  Description of Artificial Sequence: Synthetic oligonucleotide
guuguuugugaaggugaug

SEQ ID NO: 3078779 - RNA, 19 nt, Artificial Sequence
  Description of Artificial Sequence: Synthetic oligonucleotide
cccuaaaagcuucucgaag

SEQ ID NO: 3078780 - RNA, 19 nt, Artificial Sequence
  Description of Artificial Sequence: Synthetic oligonucleotide
ugaguccacagaccaccaa

SEQ ID NO: 3078781 - RNA, 19 nt, Artificial Sequence
  Description of Artificial Sequence: Synthetic oligonucleotide
gguccucuuccccuuuacg

SEQ ID NO: 3078782 - RNA, 19 nt, Artificial Sequence
  Description of Artificial Sequence: Synthetic oligonucleotide
agaccaccaaggaucaaga

SEQ ID NO: 3078783 - RNA, 19 nt, Artificial Sequence
  Description of Artificial Sequence: Synthetic oligonucleotide
guuugugaaggugaugccu

SEQ ID NO: 3078784 - RNA, 19 nt, Artificial Sequence
  Description of Artificial Sequence: Synthetic oligonucleotide
ugugaaggugaugccuggu

SEQ ID NO: 3078785 - RNA, 19 nt, Artificial Sequence
  Description of Artificial Sequence: Synthetic oligonucleotide
caaggaucaagauuuccau

SEQ ID NO: 3078786 - RNA, 19 nt, Artificial Sequence
  Description of Artificial Sequence: Synthetic oligonucleotide
cacagaccaccaaggauca

SEQ ID NO: 3078787 - RNA, 19 nt, Artificial Sequence
  Description of Artificial Sequence: Synthetic oligonucleotide
ugccugguaggagaggcuc

SEQ ID NO: 3078788 - RNA, 19 nt, Artificial Sequence
  Description of Artificial Sequence: Synthetic oligonucleotide
uucggucauuuauccauuu

SEQ ID NO: 3078789 - RNA, 19 nt, Artificial Sequence
  Description of Artificial Sequence: Synthetic oligonucleotide
gugaugccugguaggagag

SEQ ID NO: 3078790 - RNA, 19 nt, Artificial Sequence
  Description of Artificial Sequence: Synthetic oligonucleotide
accuccauuaucagcaaua

SEQ ID NO: 3078791 - RNA, 19 nt, Artificial Sequence
  Description of Artificial Sequence: Synthetic oligonucleotide
guccucuuccccuuuacgu

SEQ ID NO: 3078792 - RNA, 19 nt, Artificial Sequence
  Description of Artificial Sequence: Synthetic oligonucleotide
gagcauaacucaggaagaa

SEQ ID NO: 3078793 - RNA, 19 nt, Artificial Sequence
  Description of Artificial Sequence: Synthetic oligonucleotide
uaagcccuaaaagcuucuc

SEQ ID NO: 3078794 - RNA, 19 nt, Artificial Sequence
  Description of Artificial Sequence: Synthetic oligonucleotide
acguuuaagccagcuuucu

SEQ ID NO: 3078795 - RNA, 19 nt, Artificial Sequence
  Description of Artificial Sequence: Synthetic oligonucleotide
ccuguaagcccuaaaagcu

SEQ ID NO: 3078796 - RNA, 19 nt, Artificial Sequence
  Description of Artificial Sequence: Synthetic oligonucleotide
ccuuaaacuuuucuucuga

SEQ ID NO: 3078797 - RNA, 19 nt, Artificial Sequence
  Description of Artificial Sequence: Synthetic oligonucleotide
caugagcauaacucaggaa

SEQ ID NO: 3078798 - RNA, 19 nt, Artificial Sequence
  Description of Artificial Sequence: Synthetic oligonucleotide
aguugcuauacugguuaau

SEQ ID NO: 3078799 - RNA, 19 nt, Artificial Sequence
  Description of Artificial Sequence: Synthetic oligonucleotide
guuaaucaugcacuuuguu

SEQ ID NO: 3078800 - RNA, 19 nt, Artificial Sequence
  Description of Artificial Sequence: Synthetic oligonucleotide
gucuucggucauuuaucca

SEQ ID NO: 3078801 - RNA, 19 nt, Artificial Sequence
  Description of Artificial Sequence: Synthetic oligonucleotide
caauauuuucucccagggu

SEQ ID NO: 3078802 - RNA, 19 nt, Artificial Sequence
  Description of Artificial Sequence: Synthetic oligonucleotide
gugaaggugaugccuggua

SEQ ID NO: 3078803 - RNA, 19 nt, Artificial Sequence
  Description of Artificial Sequence: Synthetic oligonucleotide
gcuuucuuccaauaauagu

SEQ ID NO: 3078804 - RNA, 19 nt, Artificial Sequence
  Description of Artificial Sequence: Synthetic oligonucleotide
uucucccaggguccucuuc

SEQ ID NO: 3078805 - RNA, 19 nt, Artificial Sequence
  Description of Artificial Sequence: Synthetic oligonucleotide
uccuugucuucggucauuu

SEQ ID NO: 3078806 - RNA, 19 nt, Artificial Sequence
  Description of Artificial Sequence: Synthetic oligonucleotide
acuccuugucuucggucau

SEQ ID NO: 3078807 - RNA, 19 nt, Artificial Sequence
  Description of Artificial Sequence: Synthetic oligonucleotide
aggugaugccugguaggag

SEQ ID NO: 3078808 - RNA, 19 nt, Artificial Sequence
  Description of Artificial Sequence: Synthetic oligonucleotide
ccccuuuacguuuaagcca

SEQ ID NO: 3078809 - RNA, 19 nt, Artificial Sequence
  Description of Artificial Sequence: Synthetic oligonucleotide
cucuucaacuccuugucuu

SEQ ID NO: 3078810 - RNA, 19 nt, Artificial Sequence
  Description of Artificial Sequence: Synthetic oligonucleotide
agaccuccauuaucagcaa

SEQ ID NO: 3078811 - RNA, 19 nt, Artificial Sequence
  Description of Artificial Sequence: Synthetic oligonucleotide
ucuuccccuuuacguuuaa

SEQ ID NO: 3078812 - RNA, 19 nt, Artificial Sequence
  Description of Artificial Sequence: Synthetic oligonucleotide
ggucauuuauccauuuccu

SEQ ID NO: 3078813 - RNA, 19 nt, Artificial Sequence
  Description of Artificial Sequence: Synthetic oligonucleotide
gguaggagaggcucuucaa

SEQ ID NO: 3078814 - RNA, 19 nt, Artificial Sequence
  Description of Artificial Sequence: Synthetic oligonucleotide
cugaguccacagaccacca

SEQ ID NO: 3078815 - RNA, 19 nt, Artificial Sequence
  Description of Artificial Sequence: Synthetic oligonucleotide
agccagcuuucuuccaaua

SEQ ID NO: 3078816 - RNA, 19 nt, Artificial Sequence
  Description of Artificial Sequence: Synthetic oligonucleotide
cuuuacguuuaagccagcu

SEQ ID NO: 3078817 - RNA, 19 nt, Artificial Sequence
  Description of Artificial Sequence: Synthetic oligonucleotide
cuguaagcccuaaaagcuu

SEQ ID NO: 3078818 - RNA, 19 nt, Artificial Sequence
  Description of Artificial Sequence: Synthetic oligonucleotide
gccagcuuucuuccaauaa

SEQ ID NO: 3078819 - RNA, 19 nt, Artificial Sequence
  Description of Artificial Sequence: Synthetic oligonucleotide
gagaggcucuucaacuccu

SEQ ID NO: 3078820 - RNA, 19 nt, Artificial Sequence
  Description of Artificial Sequence: Synthetic oligonucleotide
gcccuaaaagcuucucgaa

SEQ ID NO: 3078821 - RNA, 19 nt, Artificial Sequence
  Description of Artificial Sequence: Synthetic oligonucleotide
gaccaccaaggaucaagau

SEQ ID NO: 3078822 - RNA, 19 nt, Artificial Sequence
  Description of Artificial Sequence: Synthetic oligonucleotide
cgaagaccuccauuaucag

SEQ ID NO: 3078823 - RNA, 19 nt, Artificial Sequence
  Description of Artificial Sequence: Synthetic oligonucleotide
uuucucccaggguccucuu

SEQ ID NO: 3078824 - RNA, 19 nt, Artificial Sequence
  Description of Artificial Sequence: Synthetic oligonucleotide
gaccuccauuaucagcaau

SEQ ID NO: 3078825 - RNA, 19 nt, Artificial Sequence
  Description of Artificial Sequence: Synthetic oligonucleotide
cugguaggagaggcucuuc

SEQ ID NO: 3078826 - RNA, 19 nt, Artificial Sequence
  Description of Artificial Sequence: Synthetic oligonucleotide
cucuuccccuuuacguuua

SEQ ID NO: 3078827 - RNA, 19 nt, Artificial Sequence
  Description of Artificial Sequence: Synthetic oligonucleotide
guaagcccuaaaagcuucu

SEQ ID NO: 3078828 - RNA, 19 nt, Artificial Sequence
  Description of Artificial Sequence: Synthetic oligonucleotide
augccugguaggagaggcu

SEQ ID NO: 3078829 - RNA, 19 nt, Artificial Sequence
  Description of Artificial Sequence: Synthetic oligonucleotide
ggguccucuuccccuuuac

SEQ ID NO: 3078830 - RNA, 19 nt, Artificial Sequence
  Description of Artificial Sequence: Synthetic oligonucleotide
cuucggucauuuauccauu

SEQ ID NO: 3078831 - RNA, 19 nt, Artificial Sequence
  Description of Artificial Sequence: Synthetic oligonucleotide
aggguccucuuccccuuua

SEQ ID NO: 3078832 - RNA, 19 nt, Artificial Sequence
  Description of Artificial Sequence: Synthetic oligonucleotide
ggaucaagauuuccauuuu

SEQ ID NO: 3078833 - RNA, 19 nt, Artificial Sequence
  Description of Artificial Sequence: Synthetic oligonucleotide
cuucucgaagaccuccauu

SEQ ID NO: 3078834 - RNA, 19 nt, Artificial Sequence
  Description of Artificial Sequence: Synthetic oligonucleotide
ccagcuuucuuccaauaau

SEQ ID NO: 3078835 - RNA, 19 nt, Artificial Sequence
  Description of Artificial Sequence: Synthetic oligonucleotide
ccuuuacguuuaagccagc

SEQ ID NO: 3078836 - RNA, 19 nt, Artificial Sequence
  Description of Artificial Sequence: Synthetic oligonucleotide
agaggcucuucaacuccuu

SEQ ID NO: 3078837 - RNA, 19 nt, Artificial Sequence
  Description of Artificial Sequence: Synthetic oligonucleotide
gguuguuugugaaggugau

SEQ ID NO: 3078838 - RNA, 19 nt, Artificial Sequence
  Description of Artificial Sequence: Synthetic oligonucleotide
gcugguuguuugugaaggu

SEQ ID NO: 3078839 - RNA, 19 nt, Artificial Sequence
  Description of Artificial Sequence: Synthetic oligonucleotide
cauuuccuguaagcccuaa

SEQ ID NO: 3078840 - RNA, 19 nt, Artificial Sequence
  Description of Artificial Sequence: Synthetic oligonucleotide
cuccauuaucagcaauauu

SEQ ID NO: 3078841 - RNA, 19 nt, Artificial Sequence
  Description of Artificial Sequence: Synthetic oligonucleotide
acagaccaccaaggaucaa

SEQ ID NO: 3078842 - RNA, 19 nt, Artificial Sequence
  Description of Artificial Sequence: Synthetic oligonucleotide
cugguuaaucaugcacuuu

SEQ ID NO: 3078843 - RNA, 19 nt, Artificial Sequence
  Description of Artificial Sequence: Synthetic oligonucleotide
ccuccauuaucagcaauau

SEQ ID NO: 3078844 - RNA, 19 nt, Artificial Sequence
  Description of Artificial Sequence: Synthetic oligonucleotide
ccucuuccccuuuacguuu

SEQ ID NO: 3078845 - RNA, 19 nt, Artificial Sequence
  Description of Artificial Sequence: Synthetic oligonucleotide
ccauuuccuguaagcccua

SEQ ID NO: 3078846 - RNA, 19 nt, Artificial Sequence
  Description of Artificial Sequence: Synthetic oligonucleotide
ccuugucuucggucauuua

SEQ ID NO: 3078847 - RNA, 19 nt, Artificial Sequence
  Description of Artificial Sequence: Synthetic oligonucleotide
gccugguaggagaggcucu

SEQ ID NO: 3078848 - RNA, 19 nt, Artificial Sequence
  Description of Artificial Sequence: Synthetic oligonucleotide
cuccuugucuucggucauu

SEQ ID NO: 3078849 - RNA, 19 nt, Artificial Sequence
  Description of Artificial Sequence: Synthetic oligonucleotide
cguuuaagccagcuuucuu

SEQ ID NO: 3078850 - RNA, 19 nt, Artificial Sequence
  Description of Artificial Sequence: Synthetic oligonucleotide
ccugguaggagaggcucuu

SEQ ID NO: 3078851 - RNA, 19 nt, Artificial Sequence
  Description of Artificial Sequence: Synthetic oligonucleotide
uaugccugcacaccaaaag

SEQ ID NO: 3078852 - RNA, 19 nt, Artificial Sequence
  Description of Artificial Sequence: Synthetic oligonucleotide
uuuauugugugugugugug

SEQ ID NO: 3078853 - RNA, 19 nt, Artificial Sequence
  Description of Artificial Sequence: Synthetic oligonucleotide
ugccugcacaccaaaaggg

SEQ ID NO: 3078854 - RNA, 19 nt, Artificial Sequence
  Description of Artificial Sequence: Synthetic oligonucleotide
ucugccuccauguaugccu

SEQ ID NO: 3078855 - RNA, 19 nt, Artificial Sequence
  Description of Artificial Sequence: Synthetic oligonucleotide
augccugcacaccaaaagg

SEQ ID NO: 3078856 - RNA, 19 nt, Artificial Sequence
  Description of Artificial Sequence: Synthetic oligonucleotide
uguggcagccaggagaggg

SEQ ID NO: 3078857 - RNA, 19 nt, Artificial Sequence
  Description of Artificial Sequence: Synthetic oligonucleotide
uauugugugugugugugug

SEQ ID NO: 3078858 - RNA, 19 nt, Artificial Sequence
  Description of Artificial Sequence: Synthetic oligonucleotide
accaaaagggcaccagauc

SEQ ID NO: 3078859 - RNA, 19 nt, Artificial Sequence
  Description of Artificial Sequence: Synthetic oligonucleotide
aggagagggcaccagaucu

SEQ ID NO: 3078860 - RNA, 19 nt, Artificial Sequence
  Description of Artificial Sequence: Synthetic oligonucleotide
agcaauuggugcucuuaac

SEQ ID NO: 3078861 - RNA, 19 nt, Artificial Sequence
  Description of Artificial Sequence: Synthetic oligonucleotide
uuuuauugugugugugugu

SEQ ID NO: 3078862 - RNA, 19 nt, Artificial Sequence
  Description of Artificial Sequence: Synthetic oligonucleotide
auugugugugugugugugg

SEQ ID NO: 3078863 - RNA, 19 nt, Artificial Sequence
  Description of Artificial Sequence: Synthetic oligonucleotide
uuguguguguguguguggc

SEQ ID NO: 3078864 - RNA, 19 nt, Artificial Sequence
  Description of Artificial Sequence: Synthetic oligonucleotide
uguguguguggcagccagg

SEQ ID NO: 3078865 - RNA, 19 nt, Artificial Sequence
  Description of Artificial Sequence: Synthetic oligonucleotide
acaccaaaagggcaccaga

SEQ ID NO: 3078866 - RNA, 19 nt, Artificial Sequence
  Description of Artificial Sequence: Synthetic oligonucleotide
cugcacaccaaaagggcac

SEQ ID NO: 3078867 - RNA, 19 nt, Artificial Sequence
  Description of Artificial Sequence: Synthetic oligonucleotide
caucucuccagccccagug

SEQ ID NO: 3078868 - RNA, 19 nt, Artificial Sequence
  Description of Artificial Sequence: Synthetic oligonucleotide
uguaugccugcacaccaaa

SEQ ID NO: 3078869 - RNA, 19 nt, Artificial Sequence
  Description of Artificial Sequence: Synthetic oligonucleotide
guguguguguggcagccag

SEQ ID NO: 3078870 - RNA, 19 nt, Artificial Sequence
  Description of Artificial Sequence: Synthetic oligonucleotide
uuauugugugugugugugu

SEQ ID NO: 3078871 - RNA, 19 nt, Artificial Sequence
  Description of Artificial Sequence: Synthetic oligonucleotide
uguguguguguguggcagc

SEQ ID NO: 3078872 - RNA, 19 nt, Artificial Sequence
  Description of Artificial Sequence: Synthetic oligonucleotide
guguguguguguguggcag

SEQ ID NO: 3078873 - RNA, 19 nt, Artificial Sequence
  Description of Artificial Sequence: Synthetic oligonucleotide
accucuggaagagcaauug

SEQ ID NO: 3078874 - RNA, 19 nt, Artificial Sequence
  Description of Artificial Sequence: Synthetic oligonucleotide
gagcaauuggugcucuuaa

SEQ ID NO: 3078875 - RNA, 19 nt, Artificial Sequence
  Description of Artificial Sequence: Synthetic oligonucleotide
uguguguguguguguggca

SEQ ID NO: 3078876 - RNA, 19 nt, Artificial Sequence
  Description of Artificial Sequence: Synthetic oligonucleotide
ugcacaccaaaagggcacc

SEQ ID NO: 3078877 - RNA, 19 nt, Artificial Sequence
  Description of Artificial Sequence: Synthetic oligonucleotide
ucuccagccccagugcugu

SEQ ID NO: 3078878 - RNA, 19 nt, Artificial Sequence
  Description of Artificial Sequence: Synthetic oligonucleotide
ugcuguaauuacuguuguu

SEQ ID NO: 3078879 - RNA, 19 nt, Artificial Sequence
  Description of Artificial Sequence: Synthetic oligonucleotide
uucugccuccauguaugcc

SEQ ID NO: 3078880 - RNA, 19 nt, Artificial Sequence
  Description of Artificial Sequence: Synthetic oligonucleotide
guguguguguguggcagcc

SEQ ID NO: 3078881 - RNA, 19 nt, Artificial Sequence
  Description of Artificial Sequence: Synthetic oligonucleotide
agagcaauuggugcucuua

SEQ ID NO: 3078882 - RNA, 19 nt, Artificial Sequence
  Description of Artificial Sequence: Synthetic oligonucleotide
aagagcaauuggugcucuu

SEQ ID NO: 3078883 - RNA, 19 nt, Artificial Sequence
  Description of Artificial Sequence: Synthetic oligonucleotide
cugccuccauguaugccug

SEQ ID NO: 3078884 - RNA, 19 nt, Artificial Sequence
  Description of Artificial Sequence: Synthetic oligonucleotide
cucuccagccccagugcug

SEQ ID NO: 3078885 - RNA, 19 nt, Artificial Sequence
  Description of Artificial Sequence: Synthetic oligonucleotide
caggagagggcaccagauc

SEQ ID NO: 3078886 - RNA, 19 nt, Artificial Sequence
  Description of Artificial Sequence: Synthetic oligonucleotide
cuguaauuacuguuguuuu

SEQ ID NO: 3078887 - RNA, 19 nt, Artificial Sequence
  Description of Artificial Sequence: Synthetic oligonucleotide
guguguguggcagccagga

SEQ ID NO: 3078888 - RNA, 19 nt, Artificial Sequence
  Description of Artificial Sequence: Synthetic oligonucleotide
ccaaaagggcaccagaucu

SEQ ID NO: 3078889 - RNA, 19 nt, Artificial Sequence
  Description of Artificial Sequence: Synthetic oligonucleotide
uguguguguguggcagcca

SEQ ID NO: 3078890 - RNA, 19 nt, Artificial Sequence
  Description of Artificial Sequence: Synthetic oligonucleotide
agccccagugcuguaauua

SEQ ID NO: 3078891 - RNA, 19 nt, Artificial Sequence
  Description of Artificial Sequence: Synthetic oligonucleotide
uggcagccaggagagggca

SEQ ID NO: 3078892 - RNA, 19 nt, Artificial Sequence
  Description of Artificial Sequence: Synthetic oligonucleotide
gcuguaauuacuguuguuu

SEQ ID NO: 3078893 - RNA, 19 nt, Artificial Sequence
  Description of Artificial Sequence: Synthetic oligonucleotide
ccauguaugccugcacacc

SEQ ID NO: 3078894 - RNA, 19 nt, Artificial Sequence
  Description of Artificial Sequence: Synthetic oligonucleotide
gccugcacaccaaaagggc

SEQ ID NO: 3078895 - RNA, 19 nt, Artificial Sequence
  Description of Artificial Sequence: Synthetic oligonucleotide
caccaaaagggcaccagau

SEQ ID NO: 3078896 - RNA, 19 nt, Artificial Sequence
  Description of Artificial Sequence: Synthetic oligonucleotide
ugccuccauguaugccugc

SEQ ID NO: 3078897 - RNA, 19 nt, Artificial Sequence
  Description of Artificial Sequence: Synthetic oligonucleotide
ccugcacaccaaaagggca

SEQ ID NO: 3078898 - RNA, 19 nt, Artificial Sequence
  Description of Artificial Sequence: Synthetic oligonucleotide
uccagccccagugcuguaa

SEQ ID NO: 3078899 - RNA, 19 nt, Artificial Sequence
  Description of Artificial Sequence: Synthetic oligonucleotide
gaagagcaauuggugcucu

SEQ ID NO: 3078900 - RNA, 19 nt, Artificial Sequence
  Description of Artificial Sequence: Synthetic oligonucleotide
cagugcuguaauuacuguu

SEQ ID NO: 3078901 - RNA, 19 nt, Artificial Sequence
  Description of Artificial Sequence: Synthetic oligonucleotide
auguaugccugcacaccaa

SEQ ID NO: 3078902 - RNA, 19 nt, Artificial Sequence
  Description of Artificial Sequence: Synthetic oligonucleotide
guaugccugcacaccaaaa

SEQ ID NO: 3078903 - RNA, 19 nt, Artificial Sequence
  Description of Artificial Sequence: Synthetic oligonucleotide
agccaggagagggcaccag

SEQ ID NO: 3078904 - RNA, 19 nt, Artificial Sequence
  Description of Artificial Sequence: Synthetic oligonucleotide
ggagagggcaccagaucuc

SEQ ID NO: 3078905 - RNA, 19 nt, Artificial Sequence
  Description of Artificial Sequence: Synthetic oligonucleotide
gccaggagagggcaccaga

SEQ ID NO: 3078906 - RNA, 19 nt, Artificial Sequence
  Description of Artificial Sequence: Synthetic oligonucleotide
gccuccauguaugccugca

SEQ ID NO: 3078907 - RNA, 19 nt, Artificial Sequence
  Description of Artificial Sequence: Synthetic oligonucleotide
cagccaggagagggcacca

SEQ ID NO: 3078908 - RNA, 19 nt, Artificial Sequence
  Description of Artificial Sequence: Synthetic oligonucleotide
ccaggagagggcaccagau

SEQ ID NO: 3078909 - RNA, 19 nt, Artificial Sequence
  Description of Artificial Sequence: Synthetic oligonucleotide
ccccagugcuguaauuacu

SEQ ID NO: 3078910 - RNA, 19 nt, Artificial Sequence
  Description of Artificial Sequence: Synthetic oligonucleotide
cuccagccccagugcugua

SEQ ID NO: 3078911 - RNA, 19 nt, Artificial Sequence
  Description of Artificial Sequence: Synthetic oligonucleotide
cagccccagugcuguaauu

SEQ ID NO: 3078912 - RNA, 19 nt, Artificial Sequence
  Description of Artificial Sequence: Synthetic oligonucleotide
ccagccccagugcuguaau

SEQ ID NO: 3078913 - RNA, 19 nt, Artificial Sequence
  Description of Artificial Sequence: Synthetic oligonucleotide
aaaacaggaccucuuauuc

SEQ ID NO: 3078914 - RNA, 19 nt, Artificial Sequence
  Description of Artificial Sequence: Synthetic oligonucleotide
aagucuuucagagauagcg

SEQ ID NO: 3078915 - RNA, 19 nt, Artificial Sequence
  Description of Artificial Sequence: Synthetic oligonucleotide
aaaggcagagcauagacug

SEQ ID NO: 3078916 - RNA, 19 nt, Artificial Sequence
  Description of Artificial Sequence: Synthetic oligonucleotide
aaacaggaccucuuauucc

SEQ ID NO: 3078917 - RNA, 19 nt, Artificial Sequence
  Description of Artificial Sequence: Synthetic oligonucleotide
uacaguuggaccaaguaca

SEQ ID NO: 3078918 - RNA, 19 nt, Artificial Sequence
  Description of Artificial Sequence: Synthetic oligonucleotide
acuaugacuagcugcaggg

SEQ ID NO: 3078919 - RNA, 19 nt, Artificial Sequence
  Description of Artificial Sequence: Synthetic oligonucleotide
aguuggaccaaguacaugu

SEQ ID NO: 3078920 - RNA, 19 nt, Artificial Sequence
  Description of Artificial Sequence: Synthetic oligonucleotide
agagcuggcacucaagggg

SEQ ID NO: 3078921 - RNA, 19 nt, Artificial Sequence
  Description of Artificial Sequence: Synthetic oligonucleotide
uucacuaugacuagcugca

SEQ ID NO: 3078922 - RNA, 19 nt, Artificial Sequence
  Description of Artificial Sequence: Synthetic oligonucleotide
cuuuggaagucuuucagag

SEQ ID NO: 3078923 - RNA, 19 nt, Artificial Sequence
  Description of Artificial Sequence: Synthetic oligonucleotide
ucuaacauucuuuggaagu

SEQ ID NO: 3078924 - RNA, 19 nt, Artificial Sequence
  Description of Artificial Sequence: Synthetic oligonucleotide
aggagugucaguugcacac

SEQ ID NO: 3078925 - RNA, 19 nt, Artificial Sequence
  Description of Artificial Sequence: Synthetic oligonucleotide
ugcucuaacauucuuugga

SEQ ID NO: 3078926 - RNA, 19 nt, Artificial Sequence
  Description of Artificial Sequence: Synthetic oligonucleotide
uuggaagucuuucagagau

SEQ ID NO: 3078927 - RNA, 19 nt, Artificial Sequence
  Description of Artificial Sequence: Synthetic oligonucleotide
gacacuacacaugaugugg

SEQ ID NO: 3078928 - RNA, 19 nt, Artificial Sequence
  Description of Artificial Sequence: Synthetic oligonucleotide
ugugcucuaacauucuuug

SEQ ID NO: 3078929 - RNA, 19 nt, Artificial Sequence
  Description of Artificial Sequence: Synthetic oligonucleotide
aaguacaugugagagagcu

SEQ ID NO: 3078930 - RNA, 19 nt, Artificial Sequence
  Description of Artificial Sequence: Synthetic oligonucleotide
caugaugugggcugaaagg

SEQ ID NO: 3078931 - RNA, 19 nt, Artificial Sequence
  Description of Artificial Sequence: Synthetic oligonucleotide
ugggcugaaaggcagagca

SEQ ID NO: 3078932 - RNA, 19 nt, Artificial Sequence
  Description of Artificial Sequence: Synthetic oligonucleotide
aacaggaccucuuauucca

SEQ ID NO: 3078933 - RNA, 19 nt, Artificial Sequence
  Description of Artificial Sequence: Synthetic oligonucleotide
ugaaaggcagagcauagac

SEQ ID NO: 3078934 - RNA, 19 nt, Artificial Sequence
  Description of Artificial Sequence: Synthetic oligonucleotide
augaugugggcugaaaggc

SEQ ID NO: 3078935 - RNA, 19 nt, Artificial Sequence
  Description of Artificial Sequence: Synthetic oligonucleotide
ucuuauuccauaguucuug

SEQ ID NO: 3078936 - RNA, 19 nt, Artificial Sequence
  Description of Artificial Sequence: Synthetic oligonucleotide
uucuuuggaagucuuucag

SEQ ID NO: 3078937 - RNA, 19 nt, Artificial Sequence
  Description of Artificial Sequence: Synthetic oligonucleotide
guacaugugagagagcugg

SEQ ID NO: 3078938 - RNA, 19 nt, Artificial Sequence
  Description of Artificial Sequence: Synthetic oligonucleotide
uacacuguguggcauaaca

SEQ ID NO: 3078939 - RNA, 19 nt, Artificial Sequence
  Description of Artificial Sequence: Synthetic oligonucleotide
cagagcauagacuggauag

SEQ ID NO: 3078940 - RNA, 19 nt, Artificial Sequence
  Description of Artificial Sequence: Synthetic oligonucleotide
uggaccaaguacaugugag

SEQ ID NO: 3078941 - RNA, 19 nt, Artificial Sequence
  Description of Artificial Sequence: Synthetic oligonucleotide
auaacagggcuucacaaga

SEQ ID NO: 3078942 - RNA, 19 nt, Artificial Sequence
  Description of Artificial Sequence: Synthetic oligonucleotide
agagagcuggcacucaagg

SEQ ID NO: 3078943 - RNA, 19 nt, Artificial Sequence
  Description of Artificial Sequence: Synthetic oligonucleotide
auggacacuacacaugaug

SEQ ID NO: 3078944 - RNA, 19 nt, Artificial Sequence
  Description of Artificial Sequence: Synthetic oligonucleotide
guucacuaugacuagcugc

SEQ ID NO: 3078945 - RNA, 19 nt, Artificial Sequence
  Description of Artificial Sequence: Synthetic oligonucleotide
agauggacacuacacauga

SEQ ID NO: 3078946 - RNA, 19 nt, Artificial Sequence
  Description of Artificial Sequence: Synthetic oligonucleotide
cacaagauggacacuacac

SEQ ID NO: 3078947 - RNA, 19 nt, Artificial Sequence
  Description of Artificial Sequence: Synthetic oligonucleotide
uuauguacugugcucuaac

SEQ ID NO: 3078948 - RNA, 19 nt, Artificial Sequence
  Description of Artificial Sequence: Synthetic oligonucleotide
acaagauggacacuacaca

SEQ ID NO: 3078949 - RNA, 19 nt, Artificial Sequence
  Description of Artificial Sequence: Synthetic oligonucleotide
agggauguuauguacugug

SEQ ID NO: 3078950 - RNA, 19 nt, Artificial Sequence
  Description of Artificial Sequence: Synthetic oligonucleotide
cacucaaggggccuuaggg

SEQ ID NO: 3078951 - RNA, 19 nt, Artificial Sequence
  Description of Artificial Sequence: Synthetic oligonucleotide
gauguuauguacugugcuc

SEQ ID NO: 3078952 - RNA, 19 nt, Artificial Sequence
  Description of Artificial Sequence: Synthetic oligonucleotide
acaugaugugggcugaaag

SEQ ID NO: 3078953 - RNA, 19 nt, Artificial Sequence
  Description of Artificial Sequence: Synthetic oligonucleotide
agucaccuacaguuggacc

SEQ ID NO: 3078954 - RNA, 19 nt, Artificial Sequence
  Description of Artificial Sequence: Synthetic oligonucleotide
cauaacagggcuucacaag

SEQ ID NO: 3078955 - RNA, 19 nt, Artificial Sequence
  Description of Artificial Sequence: Synthetic oligonucleotide
cauagacuggauaggagug

SEQ ID NO: 3078956 - RNA, 19 nt, Artificial Sequence
  Description of Artificial Sequence: Synthetic oligonucleotide
cuacaguuggaccaaguac

SEQ ID NO: 3078957 - RNA, 19 nt, Artificial Sequence
  Description of Artificial Sequence: Synthetic oligonucleotide
gaccaaguacaugugagag

SEQ ID NO: 3078958 - RNA, 19 nt, Artificial Sequence
  Description of Artificial Sequence: Synthetic oligonucleotide
gucuuucagagauagcggc

SEQ ID NO: 3078959 - RNA, 19 nt, Artificial Sequence
  Description of Artificial Sequence: Synthetic oligonucleotide
ucuuuggaagucuuucaga

SEQ ID NO: 3078960 - RNA, 19 nt, Artificial Sequence
  Description of Artificial Sequence: Synthetic oligonucleotide
uguacugugcucuaacauu

SEQ ID NO: 3078961 - RNA, 19 nt, Artificial Sequence
  Description of Artificial Sequence: Synthetic oligonucleotide
gugucaguugcacacgggg

SEQ ID NO: 3078962 - RNA, 19 nt, Artificial Sequence
  Description of Artificial Sequence: Synthetic oligonucleotide
aacagggcuucacaagaug

SEQ ID NO: 3078963 - RNA, 19 nt, Artificial Sequence
  Description of Artificial Sequence: Synthetic oligonucleotide
ucaaggggccuuagggugg

SEQ ID NO: 3078964 - RNA, 19 nt, Artificial Sequence
  Description of Artificial Sequence: Synthetic oligonucleotide
acuguguggcauaacaggg

SEQ ID NO: 3078965 - RNA, 19 nt, Artificial Sequence
  Description of Artificial Sequence: Synthetic oligonucleotide
uauguacugugcucuaaca

SEQ ID NO: 3078966 - RNA, 19 nt, Artificial Sequence
  Description of Artificial Sequence: Synthetic oligonucleotide
ucuuucagagauagcggca

SEQ ID NO: 3078967 - RNA, 19 nt, Artificial Sequence
  Description of Artificial Sequence: Synthetic oligonucleotide
uuggggaguggguaguggg

SEQ ID NO: 3078968 - RNA, 19 nt, Artificial Sequence
  Description of Artificial Sequence: Synthetic oligonucleotide
cauggcuacacuguguggc

SEQ ID NO: 3078969 - RNA, 19 nt, Artificial Sequence
  Description of Artificial Sequence: Synthetic oligonucleotide
cuacacaugaugugggcug

SEQ ID NO: 3078970 - RNA, 19 nt, Artificial Sequence
  Description of Artificial Sequence: Synthetic oligonucleotide
ucacaagauggacacuaca

SEQ ID NO: 3078971 - RNA, 19 nt, Artificial Sequence
  Description of Artificial Sequence: Synthetic oligonucleotide
gucaccuacaguuggacca

SEQ ID NO: 3078972 - RNA, 19 nt, Artificial Sequence
  Description of Artificial Sequence: Synthetic oligonucleotide
aggaccucuuauuccauag

SEQ ID NO: 3078973 - RNA, 19 nt, Artificial Sequence
  Description of Artificial Sequence: Synthetic oligonucleotide
auaggagugucaguugcac

SEQ ID NO: 3078974 - RNA, 19 nt, Artificial Sequence
  Description of Artificial Sequence: Synthetic oligonucleotide
auucuuuggaagucuuuca

SEQ ID NO: 3078975 - RNA, 19 nt, Artificial Sequence
  Description of Artificial Sequence: Synthetic oligonucleotide
uuuggaagucuuucagaga

SEQ ID NO: 3078976 - RNA, 19 nt, Artificial Sequence
  Description of Artificial Sequence: Synthetic oligonucleotide
cucuaacauucuuuggaag

SEQ ID NO: 3078977 - RNA, 19 nt, Artificial Sequence
  Description of Artificial Sequence: Synthetic oligonucleotide
gagugucaguugcacacgg

SEQ ID NO: 3078978 - RNA, 19 nt, Artificial Sequence
  Description of Artificial Sequence: Synthetic oligonucleotide
cucaaggggccuuagggug

SEQ ID NO: 3078979 - RNA, 19 nt, Artificial Sequence
  Description of Artificial Sequence: Synthetic oligonucleotide
gaugugggcugaaaggcag

SEQ ID NO: 3078980 - RNA, 19 nt, Artificial Sequence
  Description of Artificial Sequence: Synthetic oligonucleotide
uuggaccaaguacauguga

SEQ ID NO: 3078981 - RNA, 19 nt, Artificial Sequence
  Description of Artificial Sequence: Synthetic oligonucleotide
agagcauagacuggauagg

SEQ ID NO: 3078982 - RNA, 19 nt, Artificial Sequence
  Description of Artificial Sequence: Synthetic oligonucleotide
aagauggacacuacacaug

SEQ ID NO: 3078983 - RNA, 19 nt, Artificial Sequence
  Description of Artificial Sequence: Synthetic oligonucleotide
gacuggauaggagugucag

SEQ ID NO: 3078984 - RNA, 19 nt, Artificial Sequence
  Description of Artificial Sequence: Synthetic oligonucleotide
uagggugggguucacuaug

SEQ ID NO: 3078985 - RNA, 19 nt, Artificial Sequence
  Description of Artificial Sequence: Synthetic oligonucleotide
acagggcuucacaagaugg

SEQ ID NO: 3078986 - RNA, 19 nt, Artificial Sequence
  Description of Artificial Sequence: Synthetic oligonucleotide
ugaugugggcugaaaggca

SEQ ID NO: 3078987 - RNA, 19 nt, Artificial Sequence
  Description of Artificial Sequence: Synthetic oligonucleotide
cacuaugacuagcugcagg

SEQ ID NO: 3078988 - RNA, 19 nt, Artificial Sequence
  Description of Artificial Sequence: Synthetic oligonucleotide
cuuucagagauagcggcag

SEQ ID NO: 3078989 - RNA, 19 nt, Artificial Sequence
  Description of Artificial Sequence: Synthetic oligonucleotide
agucuuucagagauagcgg

SEQ ID NO: 3078990 - RNA, 19 nt, Artificial Sequence
  Description of Artificial Sequence: Synthetic oligonucleotide
cagagauagcggcaguucc

SEQ ID NO: 3078991 - RNA, 19 nt, Artificial Sequence
  Description of Artificial Sequence: Synthetic oligonucleotide
ccaaguacaugugagagag

SEQ ID NO: 3078992 - RNA, 19 nt, Artificial Sequence
  Description of Artificial Sequence: Synthetic oligonucleotide
caugugagagagcuggcac

SEQ ID NO: 3078993 - RNA, 19 nt, Artificial Sequence
  Description of Artificial Sequence: Synthetic oligonucleotide
auguuauguacugugcucu

SEQ ID NO: 3078994 - RNA, 19 nt, Artificial Sequence
  Description of Artificial Sequence: Synthetic oligonucleotide
auguacugugcucuaacau

SEQ ID NO: 3078995 - RNA, 19 nt, Artificial Sequence
  Description of Artificial Sequence: Synthetic oligonucleotide
acucaaggggccuuagggu

SEQ ID NO: 3078996 - RNA, 19 nt, Artificial Sequence
  Description of Artificial Sequence: Synthetic oligonucleotide
agggcuucacaagauggac

SEQ ID NO: 3078997 - RNA, 19 nt, Artificial Sequence
  Description of Artificial Sequence: Synthetic oligonucleotide
ggauaggagugucaguugc

SEQ ID NO: 3078998 - RNA, 19 nt, Artificial Sequence
  Description of Artificial Sequence: Synthetic oligonucleotide
cuguguggcauaacagggc

SEQ ID NO: 3078999 - RNA, 19 nt, Artificial Sequence
  Description of Artificial Sequence: Synthetic oligonucleotide
accucuuauuccauaguuc

SEQ ID NO: 3079000 - RNA, 19 nt, Artificial Sequence
  Description of Artificial Sequence: Synthetic oligonucleotide
uaacauucuuuggaagucu

SEQ ID NO: 3079001 - RNA, 19 nt, Artificial Sequence
  Description of Artificial Sequence: Synthetic oligonucleotide
uucacaagauggacacuac

SEQ ID NO: 3079002 - RNA, 19 nt, Artificial Sequence
  Description of Artificial Sequence: Synthetic oligonucleotide
uggauaggagugucaguug

SEQ ID NO: 3079003 - RNA, 19 nt, Artificial Sequence
  Description of Artificial Sequence: Synthetic oligonucleotide
uuuggggaguggguagugg

SEQ ID NO: 3079004 - RNA, 19 nt, Artificial Sequence
  Description of Artificial Sequence: Synthetic oligonucleotide
accaaguacaugugagaga

SEQ ID NO: 3079005 - RNA, 19 nt, Artificial Sequence
  Description of Artificial Sequence: Synthetic oligonucleotide
acacuacacaugauguggg

SEQ ID NO: 3079006 - RNA, 19 nt, Artificial Sequence
  Description of Artificial Sequence: Synthetic oligonucleotide
augugagagagcuggcacu

SEQ ID NO: 3079007 - RNA, 19 nt, Artificial Sequence
  Description of Artificial Sequence: Synthetic oligonucleotide
ggcuucacaagauggacac

SEQ ID NO: 3079008 - RNA, 19 nt, Artificial Sequence
  Description of Artificial Sequence: Synthetic oligonucleotide
aaggcagagcauagacugg

SEQ ID NO: 3079009 - RNA, 19 nt, Artificial Sequence
  Description of Artificial Sequence: Synthetic oligonucleotide
ugagagagcuggcacucaa

SEQ ID NO: 3079010 - RNA, 19 nt, Artificial Sequence
  Description of Artificial Sequence: Synthetic oligonucleotide
guacugugcucuaacauuc

SEQ ID NO: 3079011 - RNA, 19 nt, Artificial Sequence
  Description of Artificial Sequence: Synthetic oligonucleotide
ugugggcugaaaggcagag

SEQ ID NO: 3079012 - RNA, 19 nt, Artificial Sequence
  Description of Artificial Sequence: Synthetic oligonucleotide
gugggguucacuaugacua

SEQ ID NO: 3079013 - RNA, 19 nt, Artificial Sequence
  Description of Artificial Sequence: Synthetic oligonucleotide
acuacacaugaugugggcu

SEQ ID NO: 3079014 - RNA, 19 nt, Artificial Sequence
  Description of Artificial Sequence: Synthetic oligonucleotide
ugggguucacuaugacuag

SEQ ID NO: 3079015 - RNA, 19 nt, Artificial Sequence
  Description of Artificial Sequence: Synthetic oligonucleotide
cacuacacaugaugugggc

SEQ ID NO: 3079016 - RNA, 19 nt, Artificial Sequence
  Description of Artificial Sequence: Synthetic oligonucleotide
uacaugugagagagcuggc

SEQ ID NO: 3079017 - RNA, 19 nt, Artificial Sequence
  Description of Artificial Sequence: Synthetic oligonucleotide
gugcucuaacauucuuugg

SEQ ID NO: 3079018 - RNA, 19 nt, Artificial Sequence
  Description of Artificial Sequence: Synthetic oligonucleotide
ugugagagagcuggcacuc

SEQ ID NO: 3079019 - RNA, 19 nt, Artificial Sequence
  Description of Artificial Sequence: Synthetic oligonucleotide
ucagagauagcggcaguuc

SEQ ID NO: 3079020 - RNA, 19 nt, Artificial Sequence
  Description of Artificial Sequence: Synthetic oligonucleotide
uuucagagauagcggcagu

SEQ ID NO: 3079021 - RNA, 19 nt, Artificial Sequence
  Description of Artificial Sequence: Synthetic oligonucleotide
uaggagugucaguugcaca

SEQ ID NO: 3079022 - RNA, 19 nt, Artificial Sequence
  Description of Artificial Sequence: Synthetic oligonucleotide
uaacagggcuucacaagau

SEQ ID NO: 3079023 - RNA, 19 nt, Artificial Sequence
  Description of Artificial Sequence: Synthetic oligonucleotide
cuaugacuagcugcagggg

SEQ ID NO: 3079024 - RNA, 19 nt, Artificial Sequence
  Description of Artificial Sequence: Synthetic oligonucleotide
ggcauggcuacacugugug

SEQ ID NO: 3079025 - RNA, 19 nt, Artificial Sequence
  Description of Artificial Sequence: Synthetic oligonucleotide
cuuagggugggguucacua

SEQ ID NO: 3079026 - RNA, 19 nt, Artificial Sequence
  Description of Artificial Sequence: Synthetic oligonucleotide
acacuguguggcauaacag

SEQ ID NO: 3079027 - RNA, 19 nt, Artificial Sequence
  Description of Artificial Sequence: Synthetic oligonucleotide
uacugugcucuaacauucu

SEQ ID NO: 3079028 - RNA, 19 nt, Artificial Sequence
  Description of Artificial Sequence: Synthetic oligonucleotide
uguuauguacugugcucua

SEQ ID NO: 3079029 - RNA, 19 nt, Artificial Sequence
  Description of Artificial Sequence: Synthetic oligonucleotide
auagacuggauaggagugu

SEQ ID NO: 3079030 - RNA, 19 nt, Artificial Sequence
  Description of Artificial Sequence: Synthetic oligonucleotide
uuagggugggguucacuau

SEQ ID NO: 3079031 - RNA, 19 nt, Artificial Sequence
  Description of Artificial Sequence: Synthetic oligonucleotide
gagcuggcacucaaggggc

SEQ ID NO: 3079032 - RNA, 19 nt, Artificial Sequence
  Description of Artificial Sequence: Synthetic oligonucleotide
auggcuacacuguguggca

SEQ ID NO: 3079033 - RNA, 19 nt, Artificial Sequence
  Description of Artificial Sequence: Synthetic oligonucleotide
acuggauaggagugucagu

SEQ ID NO: 3079034 - RNA, 19 nt, Artificial Sequence
  Description of Artificial Sequence: Synthetic oligonucleotide
uagacuggauaggaguguc

SEQ ID NO: 3079035 - RNA, 19 nt, Artificial Sequence
  Description of Artificial Sequence: Synthetic oligonucleotide
uacacaugaugugggcuga

SEQ ID NO: 3079036 - RNA, 19 nt, Artificial Sequence
  Description of Artificial Sequence: Synthetic oligonucleotide
caagauggacacuacacau

SEQ ID NO: 3079037 - RNA, 19 nt, Artificial Sequence
  Description of Artificial Sequence: Synthetic oligonucleotide
ggacacuacacaugaugug

SEQ ID NO: 3079038 - RNA, 19 nt, Artificial Sequence
  Description of Artificial Sequence: Synthetic oligonucleotide
gguagugggagcagggcag

SEQ ID NO: 3079039 - RNA, 19 nt, Artificial Sequence
  Description of Artificial Sequence: Synthetic oligonucleotide
gauaggagugucaguugca

SEQ ID NO: 3079040 - RNA, 19 nt, Artificial Sequence
  Description of Artificial Sequence: Synthetic oligonucleotide
acaugugagagagcuggca

SEQ ID NO: 3079041 - RNA, 19 nt, Artificial Sequence
  Description of Artificial Sequence: Synthetic oligonucleotide
gugggcuuuggggaguggg

SEQ ID NO: 3079042 - RNA, 19 nt, Artificial Sequence
  Description of Artificial Sequence: Synthetic oligonucleotide
gaagucuuucagagauagc

SEQ ID NO: 3079043 - RNA, 19 nt, Artificial Sequence
  Description of Artificial Sequence: Synthetic oligonucleotide
agagauagcggcaguuccu

SEQ ID NO: 3079044 - RNA, 19 nt, Artificial Sequence
  Description of Artificial Sequence: Synthetic oligonucleotide
caaguacaugugagagagc

SEQ ID NO: 3079045 - RNA, 19 nt, Artificial Sequence
  Description of Artificial Sequence: Synthetic oligonucleotide
uucagagauagcggcaguu

SEQ ID NO: 3079046 - RNA, 19 nt, Artificial Sequence
  Description of Artificial Sequence: Synthetic oligonucleotide
ucacuaugacuagcugcag

SEQ ID NO: 3079047 - RNA, 19 nt, Artificial Sequence
  Description of Artificial Sequence: Synthetic oligonucleotide
gagagagcuggcacucaag

SEQ ID NO: 3079048 - RNA, 19 nt, Artificial Sequence
  Description of Artificial Sequence: Synthetic oligonucleotide
agugucaguugcacacggg

SEQ ID NO: 3079049 - RNA, 19 nt, Artificial Sequence
  Description of Artificial Sequence: Synthetic oligonucleotide
gguucacuaugacuagcug

SEQ ID NO: 3079050 - RNA, 19 nt, Artificial Sequence
  Description of Artificial Sequence: Synthetic oligonucleotide
aggcagagcauagacugga

SEQ ID NO: 3079051 - RNA, 19 nt, Artificial Sequence
  Description of Artificial Sequence: Synthetic oligonucleotide
guggguagugggagcaggg

SEQ ID NO: 3079052 - RNA, 19 nt, Artificial Sequence
  Description of Artificial Sequence: Synthetic oligonucleotide
gaccucuuauuccauaguu

SEQ ID NO: 3079053 - RNA, 19 nt, Artificial Sequence
  Description of Artificial Sequence: Synthetic oligonucleotide
auagcggcaguuccuuuua

SEQ ID NO: 3079054 - RNA, 19 nt, Artificial Sequence
  Description of Artificial Sequence: Synthetic oligonucleotide
guuggaccaaguacaugug

SEQ ID NO: 3079055 - RNA, 19 nt, Artificial Sequence
  Description of Artificial Sequence: Synthetic oligonucleotide
uggguagugggagcagggc

SEQ ID NO: 3079056 - RNA, 19 nt, Artificial Sequence
  Description of Artificial Sequence: Synthetic oligonucleotide
uggaagucuuucagagaua

SEQ ID NO: 3079057 - RNA, 19 nt, Artificial Sequence
  Description of Artificial Sequence: Synthetic oligonucleotide
gaaaggcagagcauagacu

SEQ ID NO: 3079058 - RNA, 19 nt, Artificial Sequence
  Description of Artificial Sequence: Synthetic oligonucleotide
acugugcucuaacauucuu

SEQ ID NO: 3079059 - RNA, 19 nt, Artificial Sequence
  Description of Artificial Sequence: Synthetic oligonucleotide
guagugggagcagggcagg

SEQ ID NO: 3079060 - RNA, 19 nt, Artificial Sequence
  Description of Artificial Sequence: Synthetic oligonucleotide
aguacaugugagagagcug

SEQ ID NO: 3079061 - RNA, 19 nt, Artificial Sequence
  Description of Artificial Sequence: Synthetic oligonucleotide
uggcauaacagggcuucac

SEQ ID NO: 3079062 - RNA, 19 nt, Artificial Sequence
  Description of Artificial Sequence: Synthetic oligonucleotide
gcauagacuggauaggagu

SEQ ID NO: 3079063 - RNA, 19 nt, Artificial Sequence
  Description of Artificial Sequence: Synthetic oligonucleotide
ggcauaacagggcuucaca

SEQ ID NO: 3079064 - RNA, 19 nt, Artificial Sequence
  Description of Artificial Sequence: Synthetic oligonucleotide
agggcagggauguuaugua

SEQ ID NO: 3079065 - RNA, 19 nt, Artificial Sequence
  Description of Artificial Sequence: Synthetic oligonucleotide
ucaccuacaguuggaccaa

SEQ ID NO: 3079066 - RNA, 19 nt, Artificial Sequence
  Description of Artificial Sequence: Synthetic oligonucleotide
agcggcaguuccuuuuaaa

SEQ ID NO: 3079067 - RNA, 19 nt, Artificial Sequence
  Description of Artificial Sequence: Synthetic oligonucleotide
gcugaaaggcagagcauag

SEQ ID NO: 3079068 - RNA, 19 nt, Artificial Sequence
  Description of Artificial Sequence: Synthetic oligonucleotide
ggauguuauguacugugcu

SEQ ID NO: 3079069 - RNA, 19 nt, Artificial Sequence
  Description of Artificial Sequence: Synthetic oligonucleotide
gcucuaacauucuuuggaa

SEQ ID NO: 3079070 - RNA, 19 nt, Artificial Sequence
  Description of Artificial Sequence: Synthetic oligonucleotide
ggcuuuggggaguggguag

SEQ ID NO: 3079071 - RNA, 19 nt, Artificial Sequence
  Description of Artificial Sequence: Synthetic oligonucleotide
gggauguuauguacugugc

SEQ ID NO: 3079072 - RNA, 19 nt, Artificial Sequence
  Description of Artificial Sequence: Synthetic oligonucleotide
cagggcuucacaagaugga

SEQ ID NO: 3079073 - RNA, 19 nt, Artificial Sequence
  Description of Artificial Sequence: Synthetic oligonucleotide
ggaccaaguacaugugaga

SEQ ID NO: 3079074 - RNA, 19 nt, Artificial Sequence
  Description of Artificial Sequence: Synthetic oligonucleotide
ggagugucaguugcacacg

SEQ ID NO: 3079075 - RNA, 19 nt, Artificial Sequence
  Description of Artificial Sequence: Synthetic oligonucleotide
gcauaacagggcuucacaa

SEQ ID NO: 3079076 - RNA, 19 nt, Artificial Sequence
  Description of Artificial Sequence: Synthetic oligonucleotide
ccucuuauuccauaguucu

SEQ ID NO: 3079077 - RNA, 19 nt, Artificial Sequence
  Description of Artificial Sequence: Synthetic oligonucleotide
cagucaccuacaguuggac

SEQ ID NO: 3079078 - RNA, 19 nt, Artificial Sequence
  Description of Artificial Sequence: Synthetic oligonucleotide
agcuggcacucaaggggcc

SEQ ID NO: 3079079 - RNA, 19 nt, Artificial Sequence
  Description of Artificial Sequence: Synthetic oligonucleotide
acaguuggaccaaguacau

SEQ ID NO: 3079080 - RNA, 19 nt, Artificial Sequence
  Description of Artificial Sequence: Synthetic oligonucleotide
guuauguacugugcucuaa

SEQ ID NO: 3079081 - RNA, 19 nt, Artificial Sequence
  Description of Artificial Sequence: Synthetic oligonucleotide
cuggauaggagugucaguu

SEQ ID NO: 3079082 - RNA, 19 nt, Artificial Sequence
  Description of Artificial Sequence: Synthetic oligonucleotide
gcggcaguuccuuuuaaaa

SEQ ID NO: 3079083 - RNA, 19 nt, Artificial Sequence
  Description of Artificial Sequence: Synthetic oligonucleotide
caaggggccuuaggguggg

SEQ ID NO: 3079084 - RNA, 19 nt, Artificial Sequence
  Description of Artificial Sequence: Synthetic oligonucleotide
ggguagugggagcagggca

SEQ ID NO: 3079085 - RNA, 19 nt, Artificial Sequence
  Description of Artificial Sequence: Synthetic oligonucleotide
agugggagcagggcaggga

SEQ ID NO: 3079086 - RNA, 19 nt, Artificial Sequence
  Description of Artificial Sequence: Synthetic oligonucleotide
cuuuggggaguggguagug

SEQ ID NO: 3079087 - RNA, 19 nt, Artificial Sequence
  Description of Artificial Sequence: Synthetic oligonucleotide
ggggaguggguagugggag

SEQ ID NO: 3079088 - RNA, 19 nt, Artificial Sequence
  Description of Artificial Sequence: Synthetic oligonucleotide
ggggcauggcuacacugug

SEQ ID NO: 3079089 - RNA, 19 nt, Artificial Sequence
  Description of Artificial Sequence: Synthetic oligonucleotide
gggcagggauguuauguac

SEQ ID NO: 3079090 - RNA, 19 nt, Artificial Sequence
  Description of Artificial Sequence: Synthetic oligonucleotide
cugaaaggcagagcauaga

SEQ ID NO: 3079091 - RNA, 19 nt, Artificial Sequence
  Description of Artificial Sequence: Synthetic oligonucleotide
gcacucaaggggccuuagg

SEQ ID NO: 3079092 - RNA, 19 nt, Artificial Sequence
  Description of Artificial Sequence: Synthetic oligonucleotide
uagcggcaguuccuuuuaa

SEQ ID NO: 3079093 - RNA, 19 nt, Artificial Sequence
  Description of Artificial Sequence: Synthetic oligonucleotide
agcagggcagggauguuau

SEQ ID NO: 3079094 - RNA, 19 nt, Artificial Sequence
  Description of Artificial Sequence: Synthetic oligonucleotide
caguuggaccaaguacaug

SEQ ID NO: 3079095 - RNA, 19 nt, Artificial Sequence
  Description of Artificial Sequence: Synthetic oligonucleotide
agacuggauaggaguguca

SEQ ID NO: 3079096 - RNA, 19 nt, Artificial Sequence
  Description of Artificial Sequence: Synthetic oligonucleotide
agauagcggcaguuccuuu

SEQ ID NO: 3079097 - RNA, 19 nt, Artificial Sequence
  Description of Artificial Sequence: Synthetic oligonucleotide
acauucuuuggaagucuuu

SEQ ID NO: 3079098 - RNA, 19 nt, Artificial Sequence
  Description of Artificial Sequence: Synthetic oligonucleotide
gggaguggguagugggagc

SEQ ID NO: 3079099 - RNA, 19 nt, Artificial Sequence
  Description of Artificial Sequence: Synthetic oligonucleotide
agggugggguucacuauga

SEQ ID NO: 3079100 - RNA, 19 nt, Artificial Sequence
  Description of Artificial Sequence: Synthetic oligonucleotide
gugggcugaaaggcagagc

SEQ ID NO: 3079101 - RNA, 19 nt, Artificial Sequence
  Description of Artificial Sequence: Synthetic oligonucleotide
ggcugaaaggcagagcaua

SEQ ID NO: 3079102 - RNA, 19 nt, Artificial Sequence
  Description of Artificial Sequence: Synthetic oligonucleotide
accuacaguuggaccaagu

SEQ ID NO: 3079103 - RNA, 19 nt, Artificial Sequence
  Description of Artificial Sequence: Synthetic oligonucleotide
cugugcucuaacauucuuu

SEQ ID NO: 3079104 - RNA, 19 nt, Artificial Sequence
  Description of Artificial Sequence: Synthetic oligonucleotide
gggguucacuaugacuagc

SEQ ID NO: 3079105 - RNA, 19 nt, Artificial Sequence
  Description of Artificial Sequence: Synthetic oligonucleotide
cagggcagggauguuaugu

SEQ ID NO: 3079106 - RNA, 19 nt, Artificial Sequence
  Description of Artificial Sequence: Synthetic oligonucleotide
uggcuacacuguguggcau

SEQ ID NO: 3079107 - RNA, 19 nt, Artificial Sequence
  Description of Artificial Sequence: Synthetic oligonucleotide
aggggccuuaggguggggu

SEQ ID NO: 3079108 - RNA, 19 nt, Artificial Sequence
  Description of Artificial Sequence: Synthetic oligonucleotide
gcagagcauagacuggaua

SEQ ID NO: 3079109 - RNA, 19 nt, Artificial Sequence
  Description of Artificial Sequence: Synthetic oligonucleotide
gggcuucacaagauggaca

SEQ ID NO: 3079110 - RNA, 19 nt, Artificial Sequence
  Description of Artificial Sequence: Synthetic oligonucleotide
cuacacuguguggcauaac

SEQ ID NO: 3079111 - RNA, 19 nt, Artificial Sequence
  Description of Artificial Sequence: Synthetic oligonucleotide
ccuacaguuggaccaagua

SEQ ID NO: 3079112 - RNA, 19 nt, Artificial Sequence
  Description of Artificial Sequence: Synthetic oligonucleotide
gugggagcagggcagggau

SEQ ID NO: 3079113 - RNA, 19 nt, Artificial Sequence
  Description of Artificial Sequence: Synthetic oligonucleotide
gagauagcggcaguuccuu

SEQ ID NO: 3079114 - RNA, 19 nt, Artificial Sequence
  Description of Artificial Sequence: Synthetic oligonucleotide
augugggcugaaaggcaga

SEQ ID NO: 3079115 - RNA, 19 nt, Artificial Sequence
  Description of Artificial Sequence: Synthetic oligonucleotide
aaggggccuuagggugggg

SEQ ID NO: 3079116 - RNA, 19 nt, Artificial Sequence
  Description of Artificial Sequence: Synthetic oligonucleotide
caccuacaguuggaccaag

SEQ ID NO: 3079117 - RNA, 19 nt, Artificial Sequence
  Description of Artificial Sequence: Synthetic oligonucleotide
caggaccucuuauuccaua

SEQ ID NO: 3079118 - RNA, 19 nt, Artificial Sequence
  Description of Artificial Sequence: Synthetic oligonucleotide
cucuuauuccauaguucuu

SEQ ID NO: 3079119 - RNA, 19 nt, Artificial Sequence
  Description of Artificial Sequence: Synthetic oligonucleotide
acaggaccucuuauuccau

SEQ ID NO: 3079120 - RNA, 19 nt, Artificial Sequence
  Description of Artificial Sequence: Synthetic oligonucleotide
ggguucacuaugacuagcu

SEQ ID NO: 3079121 - RNA, 19 nt, Artificial Sequence
  Description of Artificial Sequence: Synthetic oligonucleotide
cacaugaugugggcugaaa

SEQ ID NO: 3079122 - RNA, 19 nt, Artificial Sequence
  Description of Artificial Sequence: Synthetic oligonucleotide
acacaugaugugggcugaa

SEQ ID NO: 3079123 - RNA, 19 nt, Artificial Sequence
  Description of Artificial Sequence: Synthetic oligonucleotide
ggcagggauguuauguacu

SEQ ID NO: 3079124 - RNA, 19 nt, Artificial Sequence
  Description of Artificial Sequence: Synthetic oligonucleotide
gugagagagcuggcacuca

SEQ ID NO: 3079125 - RNA, 19 nt, Artificial Sequence
  Description of Artificial Sequence: Synthetic oligonucleotide
gcuacacuguguggcauaa

SEQ ID NO: 3079126 - RNA, 19 nt, Artificial Sequence
  Description of Artificial Sequence: Synthetic oligonucleotide
ggaccucuuauuccauagu

SEQ ID NO: 3079127 - RNA, 19 nt, Artificial Sequence
  Description of Artificial Sequence: Synthetic oligonucleotide
ccagucaccuacaguugga

SEQ ID NO: 3079128 - RNA, 19 nt, Artificial Sequence
  Description of Artificial Sequence: Synthetic oligonucleotide
uggcacucaaggggccuua

SEQ ID NO: 3079129 - RNA, 19 nt, Artificial Sequence
  Description of Artificial Sequence: Synthetic oligonucleotide
gauggacacuacacaugau

SEQ ID NO: 3079130 - RNA, 19 nt, Artificial Sequence
  Description of Artificial Sequence: Synthetic oligonucleotide
ggcacucaaggggccuuag

SEQ ID NO: 3079131 - RNA, 19 nt, Artificial Sequence
  Description of Artificial Sequence: Synthetic oligonucleotide
ggcuacacuguguggcaua

SEQ ID NO: 3079132 - RNA, 19 nt, Artificial Sequence
  Description of Artificial Sequence: Synthetic oligonucleotide
gggccuuagggugggguuc

SEQ ID NO: 3079133 - RNA, 19 nt, Artificial Sequence
  Description of Artificial Sequence: Synthetic oligonucleotide
gcagggcagggauguuaug

SEQ ID NO: 3079134 - RNA, 19 nt, Artificial Sequence
  Description of Artificial Sequence: Synthetic oligonucleotide
ggccuuagggugggguuca

SEQ ID NO: 3079135 - RNA, 19 nt, Artificial Sequence
  Description of Artificial Sequence: Synthetic oligonucleotide
cagggauguuauguacugu

SEQ ID NO: 3079136 - RNA, 19 nt, Artificial Sequence
  Description of Artificial Sequence: Synthetic oligonucleotide
ggugggcuuuggggagugg

SEQ ID NO: 3079137 - RNA, 19 nt, Artificial Sequence
  Description of Artificial Sequence: Synthetic oligonucleotide
gggugggcuuuggggagug

SEQ ID NO: 3079138 - RNA, 19 nt, Artificial Sequence
  Description of Artificial Sequence: Synthetic oligonucleotide
gcuuuggggaguggguagu

SEQ ID NO: 3079139 - RNA, 19 nt, Artificial Sequence
  Description of Artificial Sequence: Synthetic oligonucleotide
ggggccuuagggugggguu

SEQ ID NO: 3079140 - RNA, 19 nt, Artificial Sequence
  Description of Artificial Sequence: Synthetic oligonucleotide
gggcauggcuacacugugu

SEQ ID NO: 3079141 - RNA, 19 nt, Artificial Sequence
  Description of Artificial Sequence: Synthetic oligonucleotide
gcuucacaagauggacacu

SEQ ID NO: 3079142 - RNA, 19 nt, Artificial Sequence
  Description of Artificial Sequence: Synthetic oligonucleotide
ggcagagcauagacuggau

SEQ ID NO: 3079143 - RNA, 19 nt, Artificial Sequence
  Description of Artificial Sequence: Synthetic oligonucleotide
cuggcacucaaggggccuu

SEQ ID NO: 3079144 - RNA, 19 nt, Artificial Sequence
  Description of Artificial Sequence: Synthetic oligonucleotide
gggcugaaaggcagagcau

SEQ ID NO: 3079145 - RNA, 19 nt, Artificial Sequence
  Description of Artificial Sequence: Synthetic oligonucleotide
gccuuagggugggguucac

SEQ ID NO: 3079146 - RNA, 19 nt, Artificial Sequence
  Description of Artificial Sequence: Synthetic oligonucleotide
ggggugggcuuuggggagu

SEQ ID NO: 3079147 - RNA, 19 nt, Artificial Sequence
  Description of Artificial Sequence: Synthetic oligonucleotide
ccuuagggugggguucacu

SEQ ID NO: 3079148 - RNA, 19 nt, Artificial Sequence
  Description of Artificial Sequence: Synthetic oligonucleotide
ggagcagggcagggauguu

SEQ ID NO: 3079149 - RNA, 19 nt, Artificial Sequence
  Description of Artificial Sequence: Synthetic oligonucleotide
  modified_base (7)..(7): a, c, u, g, unknown or other
aggguanaagcccauggcc

SEQ ID NO: 3079150 - RNA, 19 nt, Artificial Sequence
  Description of Artificial Sequence: Synthetic oligonucleotide
  modified_base (8)..(8): a, c, u, g, unknown or other
caggguanaagcccauggc

SEQ ID NO: 3079151 - RNA, 19 nt, Artificial Sequence
  Description of Artificial Sequence: Synthetic oligonucleotide
  modified_base (9)..(9): a, c, u, g, unknown or other
gcaggguanaagcccaugg

SEQ ID NO: 3079152 - RNA, 19 nt, Artificial Sequence
  Description of Artificial Sequence: Synthetic oligonucleotide
  modified_base (2)..(2): a, c, u, g, unknown or other
anaagcccauggcccagca

SEQ ID NO: 3079153 - RNA, 19 nt, Artificial Sequence
  Description of Artificial Sequence: Synthetic oligonucleotide
  modified_base (6)..(6): a, c, u, g, unknown or other
ggguanaagcccauggccc

SEQ ID NO: 3079154 - RNA, 19 nt, Artificial Sequence
  Description of Artificial Sequence: Synthetic oligonucleotide
  modified_base (5)..(5): a, c, u, g, unknown or other
gguanaagcccauggccca

SEQ ID NO: 3079155 - RNA, 19 nt, Artificial Sequence
  Description of Artificial Sequence: Synthetic oligonucleotide
  modified_base (3)..(3): a, c, u, g, unknown or other
uanaagcccauggcccagc

SEQ ID NO: 3079156 - RNA, 19 nt, Artificial Sequence
  Description of Artificial Sequence: Synthetic oligonucleotide
  modified_base (4)..(4): a, c, u, g, unknown or other
guanaagcccauggcccag

SEQ ID NO: 3079157 - RNA, 19 nt, Artificial Sequence
  Description of Artificial Sequence: Synthetic oligonucleotide
ucaaguucugguaagaaga

SEQ ID NO: 3079158 - RNA, 19 nt, Artificial Sequence
  Description of Artificial Sequence: Synthetic oligonucleotide
ugguaagaagaguugaggg

SEQ ID NO: 3079159 - RNA, 19 nt, Artificial Sequence
  Description of Artificial Sequence: Synthetic oligonucleotide
agagguauccccuggaagg

SEQ ID NO: 3079160 - RNA, 19 nt, Artificial Sequence
  Description of Artificial Sequence: Synthetic oligonucleotide
ucucuggugaucaaguucu

SEQ ID NO: 3079161 - RNA, 19 nt, Artificial Sequence
  Description of Artificial Sequence: Synthetic oligonucleotide
uguacacacgcucugccag

SEQ ID NO: 3079162 - RNA, 19 nt, Artificial Sequence
  Description of Artificial Sequence: Synthetic oligonucleotide
caggcugagagucaaagcc

SEQ ID NO: 3079163 - RNA, 19 nt, Artificial Sequence
  Description of Artificial Sequence: Synthetic oligonucleotide
guaagaagaguugagggcc

SEQ ID NO: 3079164 - RNA, 19 nt, Artificial Sequence
  Description of Artificial Sequence: Synthetic oligonucleotide
ucugguaagaagaguugag

SEQ ID NO: 3079165 - RNA, 19 nt, Artificial Sequence
  Description of Artificial Sequence: Synthetic oligonucleotide
uccucagucucacuuaagc

SEQ ID NO: 3079166 - RNA, 19 nt, Artificial Sequence
  Description of Artificial Sequence: Synthetic oligonucleotide
ucuuccugggacuaguggc

SEQ ID NO: 3079167 - RNA, 19 nt, Artificial Sequence
  Description of Artificial Sequence: Synthetic oligonucleotide
aagggauguccucagucuc

SEQ ID NO: 3079168 - RNA, 19 nt, Artificial Sequence
  Description of Artificial Sequence: Synthetic oligonucleotide
aucaaguucugguaagaag

SEQ ID NO: 3079169 - RNA, 19 nt, Artificial Sequence
  Description of Artificial Sequence: Synthetic oligonucleotide
ugacaggcugcccugaacc

SEQ ID NO: 3079170 - RNA, 19 nt, Artificial Sequence
  Description of Artificial Sequence: Synthetic oligonucleotide
ugagagucaaagccuguag

SEQ ID NO: 3079171 - RNA, 19 nt, Artificial Sequence
  Description of Artificial Sequence: Synthetic oligonucleotide
uucucuagguuguacacac

SEQ ID NO: 3079172 - RNA, 19 nt, Artificial Sequence
  Description of Artificial Sequence: Synthetic oligonucleotide
agagucaaagccuguagcu

SEQ ID NO: 3079173 - RNA, 19 nt, Artificial Sequence
  Description of Artificial Sequence: Synthetic oligonucleotide
agucaaagccuguagcuug

SEQ ID NO: 3079174 - RNA, 19 nt, Artificial Sequence
  Description of Artificial Sequence: Synthetic oligonucleotide
uggguauucuuccugggac

SEQ ID NO: 3079175 - RNA, 19 nt, Artificial Sequence
  Description of Artificial Sequence: Synthetic oligonucleotide
cucuagguuguacacacgc

SEQ ID NO: 3079176 - RNA, 19 nt, Artificial Sequence
  Description of Artificial Sequence: Synthetic oligonucleotide
gagagucaaagccuguagc

SEQ ID NO: 3079177 - RNA, 19 nt, Artificial Sequence
  Description of Artificial Sequence: Synthetic oligonucleotide
uucuuccugggacuagugg

SEQ ID NO: 3079178 - RNA, 19 nt, Artificial Sequence
  Description of Artificial Sequence: Synthetic oligonucleotide
gaggucaaaggcuagugca

SEQ ID NO: 3079179 - RNA, 19 nt, Artificial Sequence
  Description of Artificial Sequence: Synthetic oligonucleotide
agaguugagggcccgcugg

SEQ ID NO: 3079180 - RNA, 19 nt, Artificial Sequence
  Description of Artificial Sequence: Synthetic oligonucleotide
ggcucuauccucuugcagg

SEQ ID NO: 3079181 - RNA, 19 nt, Artificial Sequence
  Description of Artificial Sequence: Synthetic oligonucleotide
ucagucucacuuaagccaa

SEQ ID NO: 3079182 - RNA, 19 nt, Artificial Sequence
  Description of Artificial Sequence: Synthetic oligonucleotide
uugagggcccgcuggaugg

SEQ ID NO: 3079183 - RNA, 19 nt, Artificial Sequence
  Description of Artificial Sequence: Synthetic oligonucleotide
gguaagaagaguugagggc

SEQ ID NO: 3079184 - RNA, 19 nt, Artificial Sequence
  Description of Artificial Sequence: Synthetic oligonucleotide
acuaguggcgaucucuucu

SEQ ID NO: 3079185 - RNA, 19 nt, Artificial Sequence
  Description of Artificial Sequence: Synthetic oligonucleotide
uucugcagcugcuagucgc

SEQ ID NO: 3079186 - RNA, 19 nt, Artificial Sequence
  Description of Artificial Sequence: Synthetic oligonucleotide
uaagaagaguugagggccc

SEQ ID NO: 3079187 - RNA, 19 nt, Artificial Sequence
  Description of Artificial Sequence: Synthetic oligonucleotide
cuuccugggacuaguggcg

SEQ ID NO: 3079188 - RNA, 19 nt, Artificial Sequence
  Description of Artificial Sequence: Synthetic oligonucleotide
gauggguauucuuccuggg

SEQ ID NO: 3079189 - RNA, 19 nt, Artificial Sequence
  Description of Artificial Sequence: Synthetic oligonucleotide
cucagucucacuuaagcca

SEQ ID NO: 3079190 - RNA, 19 nt, Artificial Sequence
  Description of Artificial Sequence: Synthetic oligonucleotide
caaguucugguaagaagag

SEQ ID NO: 3079191 - RNA, 19 nt, Artificial Sequence
  Description of Artificial Sequence: Synthetic oligonucleotide
cugguaagaagaguugagg

SEQ ID NO: 3079192 - RNA, 19 nt, Artificial Sequence
  Description of Artificial Sequence: Synthetic oligonucleotide
cuagguuguacacacgcuc

SEQ ID NO: 3079193 - RNA, 19 nt, Artificial Sequence
  Description of Artificial Sequence: Synthetic oligonucleotide
ucaucaaggcucuauccuc

SEQ ID NO: 3079194 - RNA, 19 nt, Artificial Sequence
  Description of Artificial Sequence: Synthetic oligonucleotide
uagguuguacacacgcucu

SEQ ID NO: 3079195 - RNA, 19 nt, Artificial Sequence
  Description of Artificial Sequence: Synthetic oligonucleotide
ucucuucugcagcugcuag

SEQ ID NO: 3079196 - RNA, 19 nt, Artificial Sequence
  Description of Artificial Sequence: Synthetic oligonucleotide
cuugcugcugacaggcugc

SEQ ID NO: 3079197 - RNA, 19 nt, Artificial Sequence
  Description of Artificial Sequence: Synthetic oligonucleotide
ucuagguuguacacacgcu

SEQ ID NO: 3079198 - RNA, 19 nt, Artificial Sequence
  Description of Artificial Sequence: Synthetic oligonucleotide
uucugguaagaagaguuga

SEQ ID NO: 3079199 - RNA, 19 nt, Artificial Sequence
  Description of Artificial Sequence: Synthetic oligonucleotide
ucuggugaucaaguucugg

SEQ ID NO: 3079200 - RNA, 19 nt, Artificial Sequence
  Description of Artificial Sequence: Synthetic oligonucleotide
ucuugcaggcuuacaguca

SEQ ID NO: 3079201 - RNA, 19 nt, Artificial Sequence
  Description of Artificial Sequence: Synthetic oligonucleotide
gugaucaaguucugguaag

SEQ ID NO: 3079202 - RNA, 19 nt, Artificial Sequence
  Description of Artificial Sequence: Synthetic oligonucleotide
uagucgcuucucuagguug

SEQ ID NO: 3079203 - RNA, 19 nt, Artificial Sequence
  Description of Artificial Sequence: Synthetic oligonucleotide
cuugcaggcuuacagucac

SEQ ID NO: 3079204 - RNA, 19 nt, Artificial Sequence
  Description of Artificial Sequence: Synthetic oligonucleotide
guuguacacacgcucugcc

SEQ ID NO: 3079205 - RNA, 19 nt, Artificial Sequence
  Description of Artificial Sequence: Synthetic oligonucleotide
cuagugcagagguaucccc

SEQ ID NO: 3079206 - RNA, 19 nt, Artificial Sequence
  Description of Artificial Sequence: Synthetic oligonucleotide
aguucugguaagaagaguu

SEQ ID NO: 3079207 - RNA, 19 nt, Artificial Sequence
  Description of Artificial Sequence: Synthetic oligonucleotide
gacaggcugcccugaaccg

SEQ ID NO: 3079208 - RNA, 19 nt, Artificial Sequence
  Description of Artificial Sequence: Synthetic oligonucleotide
ggauggguauucuuccugg

SEQ ID NO: 3079209 - RNA, 19 nt, Artificial Sequence
  Description of Artificial Sequence: Synthetic oligonucleotide
cucuugcaggcuuacaguc

SEQ ID NO: 3079210 - RNA, 19 nt, Artificial Sequence
  Description of Artificial Sequence: Synthetic oligonucleotide
aagaguugagggcccgcug

SEQ ID NO: 3079211 - RNA, 19 nt, Artificial Sequence
  Description of Artificial Sequence: Synthetic oligonucleotide
ucucuagguuguacacacg

SEQ ID NO: 3079212 - RNA, 19 nt, Artificial Sequence
  Description of Artificial Sequence: Synthetic oligonucleotide
cuggaagggucaucaaggc

SEQ ID NO: 3079213 - RNA, 19 nt, Artificial Sequence
  Description of Artificial Sequence: Synthetic oligonucleotide
aagaagaguugagggcccg

SEQ ID NO: 3079214 - RNA, 19 nt, Artificial Sequence
  Description of Artificial Sequence: Synthetic oligonucleotide
uagugcagagguauccccu

SEQ ID NO: 3079215 - RNA, 19 nt, Artificial Sequence
  Description of Artificial Sequence: Synthetic oligonucleotide
aaggcucuauccucuugca

SEQ ID NO: 3079216 - RNA, 19 nt, Artificial Sequence
  Description of Artificial Sequence: Synthetic oligonucleotide
uggaagggucaucaaggcu

SEQ ID NO: 3079217 - RNA, 19 nt, Artificial Sequence
  Description of Artificial Sequence: Synthetic oligonucleotide
guggcgaucucuucugcag

SEQ ID NO: 3079218 - RNA, 19 nt, Artificial Sequence
  Description of Artificial Sequence: Synthetic oligonucleotide
gagguauccccuggaaggg

SEQ ID NO: 3079219 - RNA, 19 nt, Artificial Sequence
  Description of Artificial Sequence: Synthetic oligonucleotide
cuaguggcgaucucuucug

SEQ ID NO: 3079220 - RNA, 19 nt, Artificial Sequence
  Description of Artificial Sequence: Synthetic oligonucleotide
ugaucaaguucugguaaga

SEQ ID NO: 3079221 - RNA, 19 nt, Artificial Sequence
  Description of Artificial Sequence: Synthetic oligonucleotide
ucuauccucuugcaggcuu

SEQ ID NO: 3079222 - RNA, 19 nt, Artificial Sequence
  Description of Artificial Sequence: Synthetic oligonucleotide
cugcuagucgcuucucuag

SEQ ID NO: 3079223 - RNA, 19 nt, Artificial Sequence
  Description of Artificial Sequence: Synthetic oligonucleotide
gucaaaggcuagugcagag

SEQ ID NO: 3079224 - RNA, 19 nt, Artificial Sequence
  Description of Artificial Sequence: Synthetic oligonucleotide
uguccucagucucacuuaa

SEQ ID NO: 3079225 - RNA, 19 nt, Artificial Sequence
  Description of Artificial Sequence: Synthetic oligonucleotide
agugcagagguauccccug

SEQ ID NO: 3079226 - RNA, 19 nt, Artificial Sequence
  Description of Artificial Sequence: Synthetic oligonucleotide
ggaagggucaucaaggcuc

SEQ ID NO: 3079227 - RNA, 19 nt, Artificial Sequence
  Description of Artificial Sequence: Synthetic oligonucleotide
ucaaggcucuauccucuug

SEQ ID NO: 3079228 - RNA, 19 nt, Artificial Sequence
  Description of Artificial Sequence: Synthetic oligonucleotide
uauucuuccugggacuagu

SEQ ID NO: 3079229 - RNA, 19 nt, Artificial Sequence
  Description of Artificial Sequence: Synthetic oligonucleotide
cagagguauccccuggaag

SEQ ID NO: 3079230 - RNA, 19 nt, Artificial Sequence
  Description of Artificial Sequence: Synthetic oligonucleotide
ucugcagcugcuagucgcu

SEQ ID NO: 3079231 - RNA, 19 nt, Artificial Sequence
  Description of Artificial Sequence: Synthetic oligonucleotide
auggguauucuuccuggga

SEQ ID NO: 3079232 - RNA, 19 nt, Artificial Sequence
  Description of Artificial Sequence: Synthetic oligonucleotide
aaguucugguaagaagagu

SEQ ID NO: 3079233 - RNA, 19 nt, Artificial Sequence
  Description of Artificial Sequence: Synthetic oligonucleotide
gagaggucaaaggcuagug

SEQ ID NO: 3079234 - RNA, 19 nt, Artificial Sequence
  Description of Artificial Sequence: Synthetic oligonucleotide
acagucacugcuugcugcu

SEQ ID NO: 3079235 - RNA, 19 nt, Artificial Sequence
  Description of Artificial Sequence: Synthetic oligonucleotide
uggugaucaaguucuggua

SEQ ID NO: 3079236 - RNA, 19 nt, Artificial Sequence
  Description of Artificial Sequence: Synthetic oligonucleotide
caaagccuguagcuugggg

SEQ ID NO: 3079237 - RNA, 19 nt, Artificial Sequence
  Description of Artificial Sequence: Synthetic oligonucleotide
uggcgaucucuucugcagc

SEQ ID NO: 3079238 - RNA, 19 nt, Artificial Sequence
  Description of Artificial Sequence: Synthetic oligonucleotide
uggagaggucaaaggcuag

SEQ ID NO: 3079239 - RNA, 19 nt, Artificial Sequence
  Description of Artificial Sequence: Synthetic oligonucleotide
ggucaucaaggcucuaucc

SEQ ID NO: 3079240 - RNA, 19 nt, Artificial Sequence
  Description of Artificial Sequence: Synthetic oligonucleotide
gaaccgggaagggaugucc

SEQ ID NO: 3079241 - RNA, 19 nt, Artificial Sequence
  Description of Artificial Sequence: Synthetic oligonucleotide
guacacacgcucugccagg

SEQ ID NO: 3079242 - RNA, 19 nt, Artificial Sequence
  Description of Artificial Sequence: Synthetic oligonucleotide
ugcagagguauccccugga

SEQ ID NO: 3079243 - RNA, 19 nt, Artificial Sequence
  Description of Artificial Sequence: Synthetic oligonucleotide
gaagggauguccucagucu

SEQ ID NO: 3079244 - RNA, 19 nt, Artificial Sequence
  Description of Artificial Sequence: Synthetic oligonucleotide
gcuggauggguauucuucc

SEQ ID NO: 3079245 - RNA, 19 nt, Artificial Sequence
  Description of Artificial Sequence: Synthetic oligonucleotide
guucugguaagaagaguug

SEQ ID NO: 3079246 - RNA, 19 nt, Artificial Sequence
  Description of Artificial Sequence: Synthetic oligonucleotide
agaagaguugagggcccgc

SEQ ID NO: 3079247 - RNA, 19 nt, Artificial Sequence
  Description of Artificial Sequence: Synthetic oligonucleotide
gucaaagccuguagcuugg

SEQ ID NO: 3079248 - RNA, 19 nt, Artificial Sequence
  Description of Artificial Sequence: Synthetic oligonucleotide
agguuguacacacgcucug

SEQ ID NO: 3079249 - RNA, 19 nt, Artificial Sequence
  Description of Artificial Sequence: Synthetic oligonucleotide
caggcugcccugaaccggg

SEQ ID NO: 3079250 - RNA, 19 nt, Artificial Sequence
  Description of Artificial Sequence: Synthetic oligonucleotide
uccccuggaagggucauca

SEQ ID NO: 3079251 - RNA, 19 nt, Artificial Sequence
  Description of Artificial Sequence: Synthetic oligonucleotide
aguggcgaucucuucugca

SEQ ID NO: 3079252 - RNA, 19 nt, Artificial Sequence
  Description of Artificial Sequence: Synthetic oligonucleotide
gauguccucagucucacuu

SEQ ID NO: 3079253 - RNA, 19 nt, Artificial Sequence
  Description of Artificial Sequence: Synthetic oligonucleotide
aggucaaaggcuagugcag

SEQ ID NO: 3079254 - RNA, 19 nt, Artificial Sequence
  Description of Artificial Sequence: Synthetic oligonucleotide
cuuggagaggucaaaggcu

SEQ ID NO: 3079255 - RNA, 19 nt, Artificial Sequence
  Description of Artificial Sequence: Synthetic oligonucleotide
aggcucuauccucuugcag

SEQ ID NO: 3079256 - RNA, 19 nt, Artificial Sequence
  Description of Artificial Sequence: Synthetic oligonucleotide
ggugaucaaguucugguaa

SEQ ID NO: 3079257 - RNA, 19 nt, Artificial Sequence
  Description of Artificial Sequence: Synthetic oligonucleotide
gucaucaaggcucuauccu

SEQ ID NO: 3079258 - RNA, 19 nt, Artificial Sequence
  Description of Artificial Sequence: Synthetic oligonucleotide
ccucagucucacuuaagcc

SEQ ID NO: 3079259 - RNA, 19 nt, Artificial Sequence
  Description of Artificial Sequence: Synthetic oligonucleotide
ucaaagccuguagcuuggg

SEQ ID NO: 3079260 - RNA, 19 nt, Artificial Sequence
  Description of Artificial Sequence: Synthetic oligonucleotide
acaggcugcccugaaccgg

SEQ ID NO: 3079261 - RNA, 19 nt, Artificial Sequence
  Description of Artificial Sequence: Synthetic oligonucleotide
cacacgcucugccaggcug

SEQ ID NO: 3079262 - RNA, 19 nt, Artificial Sequence
  Description of Artificial Sequence: Synthetic oligonucleotide
uaguggcgaucucuucugc

SEQ ID NO: 3079263 - RNA, 19 nt, Artificial Sequence
  Description of Artificial Sequence: Synthetic oligonucleotide
gaucaaguucugguaagaa

SEQ ID NO: 3079264 - RNA, 19 nt, Artificial Sequence
  Description of Artificial Sequence: Synthetic oligonucleotide
accgggaagggauguccuc

SEQ ID NO: 3079265 - RNA, 19 nt, Artificial Sequence
  Description of Artificial Sequence: Synthetic oligonucleotide
gcucuauccucuugcaggc

SEQ ID NO: 3079266 - RNA, 19 nt, Artificial Sequence
  Description of Artificial Sequence: Synthetic oligonucleotide
gugcagagguauccccugg

SEQ ID NO: 3079267 - RNA, 19 nt, Artificial Sequence
  Description of Artificial Sequence: Synthetic oligonucleotide
ugccucucuggugaucaag

SEQ ID NO: 3079268 - RNA, 19 nt, Artificial Sequence
  Description of Artificial Sequence: Synthetic oligonucleotide
cuggugaucaaguucuggu

SEQ ID NO: 3079269 - RNA, 19 nt, Artificial Sequence
  Description of Artificial Sequence: Synthetic oligonucleotide
uacacacgcucugccaggc

SEQ ID NO: 3079270 - RNA, 19 nt, Artificial Sequence
  Description of Artificial Sequence: Synthetic oligonucleotide
caaaggcuagugcagaggu

SEQ ID NO: 3079271 - RNA, 19 nt, Artificial Sequence
  Description of Artificial Sequence: Synthetic oligonucleotide
caggcuuacagucacugcu

SEQ ID NO: 3079272 - RNA, 19 nt, Artificial Sequence
  Description of Artificial Sequence: Synthetic oligonucleotide
agcugcuagucgcuucucu

SEQ ID NO: 3079273 - RNA, 19 nt, Artificial Sequence
  Description of Artificial Sequence: Synthetic oligonucleotide
caccuuggagaggucaaag

SEQ ID NO: 3079274 - RNA, 19 nt, Artificial Sequence
  Description of Artificial Sequence: Synthetic oligonucleotide
cuuacagucacugcuugcu

SEQ ID NO: 3079275 - RNA, 19 nt, Artificial Sequence
  Description of Artificial Sequence: Synthetic oligonucleotide
auguccucagucucacuua

SEQ ID NO: 3079276 - RNA, 19 nt, Artificial Sequence
  Description of Artificial Sequence: Synthetic oligonucleotide
gacuaguggcgaucucuuc

SEQ ID NO: 3079277 - RNA, 19 nt, Artificial Sequence
  Description of Artificial Sequence: Synthetic oligonucleotide
aggcugagagucaaagccu

SEQ ID NO: 3079278 - RNA, 19 nt, Artificial Sequence
  Description of Artificial Sequence: Synthetic oligonucleotide
ugcccugaaccgggaaggg

SEQ ID NO: 3079279 - RNA, 19 nt, Artificial Sequence
  Description of Artificial Sequence: Synthetic oligonucleotide
guauucuuccugggacuag

SEQ ID NO: 3079280 - RNA, 19 nt, Artificial Sequence
  Description of Artificial Sequence: Synthetic oligonucleotide
ggcugggcaccuuggagag

SEQ ID NO: 3079281 - RNA, 19 nt, Artificial Sequence
  Description of Artificial Sequence: Synthetic oligonucleotide
agucgcuucucuagguugu

SEQ ID NO: 3079282 - RNA, 19 nt, Artificial Sequence
  Description of Artificial Sequence: Synthetic oligonucleotide
aaccgggaagggauguccu

SEQ ID NO: 3079283 - RNA, 19 nt, Artificial Sequence
  Description of Artificial Sequence: Synthetic oligonucleotide
cuucucuagguuguacaca

SEQ ID NO: 3079284 - RNA, 19 nt, Artificial Sequence
  Description of Artificial Sequence: Synthetic oligonucleotide
ggcuuacagucacugcuug

SEQ ID NO: 3079285 - RNA, 19 nt, Artificial Sequence
  Description of Artificial Sequence: Synthetic oligonucleotide
gguuguacacacgcucugc

SEQ ID NO: 3079286 - RNA, 19 nt, Artificial Sequence
  Description of Artificial Sequence: Synthetic oligonucleotide
ggcuagugcagagguaucc

SEQ ID NO: 3079287 - RNA, 19 nt, Artificial Sequence
  Description of Artificial Sequence: Synthetic oligonucleotide
gcugcccugaaccgggaag

SEQ ID NO: 3079288 - RNA, 19 nt, Artificial Sequence
  Description of Artificial Sequence: Synthetic oligonucleotide
cugacaggcugcccugaac

SEQ ID NO: 3079289 - RNA, 19 nt, Artificial Sequence
  Description of Artificial Sequence: Synthetic oligonucleotide
gaguugagggcccgcugga

SEQ ID NO: 3079290 - RNA, 19 nt, Artificial Sequence
  Description of Artificial Sequence: Synthetic oligonucleotide
gcuuacagucacugcuugc

SEQ ID NO: 3079291 - RNA, 19 nt, Artificial Sequence
  Description of Artificial Sequence: Synthetic oligonucleotide
uauccucuugcaggcuuac

SEQ ID NO: 3079292 - RNA, 19 nt, Artificial Sequence
  Description of Artificial Sequence: Synthetic oligonucleotide
ggcugagagucaaagccug

SEQ ID NO: 3079293 - RNA, 19 nt, Artificial Sequence
  Description of Artificial Sequence: Synthetic oligonucleotide
agggucaucaaggcucuau

SEQ ID NO: 3079294 - RNA, 19 nt, Artificial Sequence
  Description of Artificial Sequence: Synthetic oligonucleotide
uuccugggacuaguggcga

SEQ ID NO: 3079295 - RNA, 19 nt, Artificial Sequence
  Description of Artificial Sequence: Synthetic oligonucleotide
gcuagugcagagguauccc

SEQ ID NO: 3079296 - RNA, 19 nt, Artificial Sequence
  Description of Artificial Sequence: Synthetic oligonucleotide
aaaggcuagugcagaggua

SEQ ID NO: 3079297 - RNA, 19 nt, Artificial Sequence
  Description of Artificial Sequence: Synthetic oligonucleotide
auucuuccugggacuagug

SEQ ID NO: 3079298 - RNA, 19 nt, Artificial Sequence
  Description of Artificial Sequence: Synthetic oligonucleotide
gggucaucaaggcucuauc

SEQ ID NO: 3079299 - RNA, 19 nt, Artificial Sequence
  Description of Artificial Sequence: Synthetic oligonucleotide
ccaggcugagagucaaagc

SEQ ID NO: 3079300 - RNA, 19 nt, Artificial Sequence
  Description of Artificial Sequence: Synthetic oligonucleotide
agggauguccucagucuca

SEQ ID NO: 3079301 - RNA, 19 nt, Artificial Sequence
  Description of Artificial Sequence: Synthetic oligonucleotide
gccaggcugagagucaaag

SEQ ID NO: 3079302 - RNA, 19 nt, Artificial Sequence
  Description of Artificial Sequence: Synthetic oligonucleotide
cucuggugaucaaguucug

SEQ ID NO: 3079303 - RNA, 19 nt, Artificial Sequence
  Description of Artificial Sequence: Synthetic oligonucleotide
cugcugacaggcugcccug

SEQ ID NO: 3079304 - RNA, 19 nt, Artificial Sequence
  Description of Artificial Sequence: Synthetic oligonucleotide
cucugggcugggcaccuug

SEQ ID NO: 3079305 - RNA, 19 nt, Artificial Sequence
  Description of Artificial Sequence: Synthetic oligonucleotide
ugagggcccgcuggauggg

SEQ ID NO: 3079306 - RNA, 19 nt, Artificial Sequence
  Description of Artificial Sequence: Synthetic oligonucleotide
ugaaccgggaagggauguc

SEQ ID NO: 3079307 - RNA, 19 nt, Artificial Sequence
  Description of Artificial Sequence: Synthetic oligonucleotide
ugcuugcugcugacaggcu

SEQ ID NO: 3079308 - RNA, 19 nt, Artificial Sequence
  Description of Artificial Sequence: Synthetic oligonucleotide
aucaaggcucuauccucuu

SEQ ID NO: 3079309 - RNA, 19 nt, Artificial Sequence
  Description of Artificial Sequence: Synthetic oligonucleotide
ucgcuucucuagguuguac

SEQ ID NO: 3079310 - RNA, 19 nt, Artificial Sequence
  Description of Artificial Sequence: Synthetic oligonucleotide
gcaggcuuacagucacugc

SEQ ID NO: 3079311 - RNA, 19 nt, Artificial Sequence
  Description of Artificial Sequence: Synthetic oligonucleotide
gaagaguugagggcccgcu

SEQ ID NO: 3079312 - RNA, 19 nt, Artificial Sequence
  Description of Artificial Sequence: Synthetic oligonucleotide
gaagggucaucaaggcucu

SEQ ID NO: 3079313 - RNA, 19 nt, Artificial Sequence
  Description of Artificial Sequence: Synthetic oligonucleotide
ggucaaaggcuagugcaga

SEQ ID NO: 3079314 - RNA, 19 nt, Artificial Sequence
  Description of Artificial Sequence: Synthetic oligonucleotide
aggcuagugcagagguauc

SEQ ID NO: 3079315 - RNA, 19 nt, Artificial Sequence
  Description of Artificial Sequence: Synthetic oligonucleotide
cuauccucuugcaggcuua

SEQ ID NO: 3079316 - RNA, 19 nt, Artificial Sequence
  Description of Artificial Sequence: Synthetic oligonucleotide
gggguugccucugggcugg

SEQ ID NO: 3079317 - RNA, 19 nt, Artificial Sequence
  Description of Artificial Sequence: Synthetic oligonucleotide
gcugcugacaggcugcccu

SEQ ID NO: 3079318 - RNA, 19 nt, Artificial Sequence
  Description of Artificial Sequence: Synthetic oligonucleotide
agguauccccuggaagggu

SEQ ID NO: 3079319 - RNA, 19 nt, Artificial Sequence
  Description of Artificial Sequence: Synthetic oligonucleotide
aucucuucugcagcugcua

SEQ ID NO: 3079320 - RNA, 19 nt, Artificial Sequence
  Description of Artificial Sequence: Synthetic oligonucleotide
ugggacuaguggcgaucuc

SEQ ID NO: 3079321 - RNA, 19 nt, Artificial Sequence
  Description of Artificial Sequence: Synthetic oligonucleotide
gagucaaagccuguagcuu

SEQ ID NO: 3079322 - RNA, 19 nt, Artificial Sequence
  Description of Artificial Sequence: Synthetic oligonucleotide
cgaucucuucugcagcugc

SEQ ID NO: 3079323 - RNA, 19 nt, Artificial Sequence
  Description of Artificial Sequence: Synthetic oligonucleotide
aggcuuacagucacugcuu

SEQ ID NO: 3079324 - RNA, 19 nt, Artificial Sequence
  Description of Artificial Sequence: Synthetic oligonucleotide
cgcuggauggguauucuuc

SEQ ID NO: 3079325 - RNA, 19 nt, Artificial Sequence
  Description of Artificial Sequence: Synthetic oligonucleotide
uccugggacuaguggcgau

SEQ ID NO: 3079326 - RNA, 19 nt, Artificial Sequence
  Description of Artificial Sequence: Synthetic oligonucleotide
guccucagucucacuuaag

SEQ ID NO: 3079327 - RNA, 19 nt, Artificial Sequence
  Description of Artificial Sequence: Synthetic oligonucleotide
cugagagucaaagccugua

SEQ ID NO: 3079328 - RNA, 19 nt, Artificial Sequence
  Description of Artificial Sequence: Synthetic oligonucleotide
gcugccucucuggugauca

SEQ ID NO: 3079329 - RNA, 19 nt, Artificial Sequence
  Description of Artificial Sequence: Synthetic oligonucleotide
acacacgcucugccaggcu

SEQ ID NO: 3079330 - RNA, 19 nt, Artificial Sequence
  Description of Artificial Sequence: Synthetic oligonucleotide
gguauccccuggaaggguc

SEQ ID NO: 3079331 - RNA, 19 nt, Artificial Sequence
  Description of Artificial Sequence: Synthetic oligonucleotide
acacgcucugccaggcuga

SEQ ID NO: 3079332 - RNA, 19 nt, Artificial Sequence
  Description of Artificial Sequence: Synthetic oligonucleotide
ccugaaccgggaagggaug

SEQ ID NO: 3079333 - RNA, 19 nt, Artificial Sequence
  Description of Artificial Sequence: Synthetic oligonucleotide
gaucucuucugcagcugcu

SEQ ID NO: 3079334 - RNA, 19 nt, Artificial Sequence
  Description of Artificial Sequence: Synthetic oligonucleotide
uauccccuggaagggucau

SEQ ID NO: 3079335 - RNA, 19 nt, Artificial Sequence
  Description of Artificial Sequence: Synthetic oligonucleotide
agcugccucucuggugauc

SEQ ID NO: 3079336 - RNA, 19 nt, Artificial Sequence
  Description of Artificial Sequence: Synthetic oligonucleotide
gguauucuuccugggacua

SEQ ID NO: 3079337 - RNA, 19 nt, Artificial Sequence
  Description of Artificial Sequence: Synthetic oligonucleotide
gcugcuagucgcuucucua

SEQ ID NO: 3079338 - RNA, 19 nt, Artificial Sequence
  Description of Artificial Sequence: Synthetic oligonucleotide
ggguauucuuccugggacu

SEQ ID NO: 3079339 - RNA, 19 nt, Artificial Sequence
  Description of Artificial Sequence: Synthetic oligonucleotide
ugccaggcugagagucaaa

SEQ ID NO: 3079340 - RNA, 19 nt, Artificial Sequence
  Description of Artificial Sequence: Synthetic oligonucleotide
aguugagggcccgcuggau

SEQ ID NO: 3079341 - RNA, 19 nt, Artificial Sequence
  Description of Artificial Sequence: Synthetic oligonucleotide
cuggauggguauucuuccu

SEQ ID NO: 3079342 - RNA, 19 nt, Artificial Sequence
  Description of Artificial Sequence: Synthetic oligonucleotide
gggacuaguggcgaucucu

SEQ ID NO: 3079343 - RNA, 19 nt, Artificial Sequence
  Description of Artificial Sequence: Synthetic oligonucleotide
gcagagguauccccuggaa

SEQ ID NO: 3079344 - RNA, 19 nt, Artificial Sequence
  Description of Artificial Sequence: Synthetic oligonucleotide
cagucacugcuugcugcug

SEQ ID NO: 3079345 - RNA, 19 nt, Artificial Sequence
  Description of Artificial Sequence: Synthetic oligonucleotide
ggcgaucucuucugcagcu

SEQ ID NO: 3079346 - RNA, 19 nt, Artificial Sequence
  Description of Artificial Sequence: Synthetic oligonucleotide
cuagucgcuucucuagguu

SEQ ID NO: 3079347 - RNA, 19 nt, Artificial Sequence
  Description of Artificial Sequence: Synthetic oligonucleotide
cacgcucugccaggcugag

SEQ ID NO: 3079348 - RNA, 19 nt, Artificial Sequence
  Description of Artificial Sequence: Synthetic oligonucleotide
cugggcugggcaccuugga

SEQ ID NO: 3079349 - RNA, 19 nt, Artificial Sequence
  Description of Artificial Sequence: Synthetic oligonucleotide
gcagcugcuagucgcuucu

SEQ ID NO: 3079350 - RNA, 19 nt, Artificial Sequence
  Description of Artificial Sequence: Synthetic oligonucleotide
cagucucacuuaagccaaa

SEQ ID NO: 3079351 - RNA, 19 nt, Artificial Sequence
  Description of Artificial Sequence: Synthetic oligonucleotide
cugggacuaguggcgaucu

SEQ ID NO: 3079352 - RNA, 19 nt, Artificial Sequence
  Description of Artificial Sequence: Synthetic oligonucleotide
ggagaggucaaaggcuagu

SEQ ID NO: 3079353 - RNA, 19 nt, Artificial Sequence
  Description of Artificial Sequence: Synthetic oligonucleotide
gcgaucucuucugcagcug

SEQ ID NO: 3079354 - RNA, 19 nt, Artificial Sequence
  Description of Artificial Sequence: Synthetic oligonucleotide
cugccaggcugagagucaa

SEQ ID NO: 3079355 - RNA, 19 nt, Artificial Sequence
  Description of Artificial Sequence: Synthetic oligonucleotide
ccugggacuaguggcgauc

SEQ ID NO: 3079356 - RNA, 19 nt, Artificial Sequence
  Description of Artificial Sequence: Synthetic oligonucleotide
cugaaccgggaagggaugu

SEQ ID NO: 3079357 - RNA, 19 nt, Artificial Sequence
  Description of Artificial Sequence: Synthetic oligonucleotide
ccucuugcaggcuuacagu

SEQ ID NO: 3079358 - RNA, 19 nt, Artificial Sequence
  Description of Artificial Sequence: Synthetic oligonucleotide
aagggucaucaaggcucua

SEQ ID NO: 3079359 - RNA, 19 nt, Artificial Sequence
  Description of Artificial Sequence: Synthetic oligonucleotide
cccugaaccgggaagggau

SEQ ID NO: 3079360 - RNA, 19 nt, Artificial Sequence
  Description of Artificial Sequence: Synthetic oligonucleotide
gcugggcaccuuggagagg

SEQ ID NO: 3079361 - RNA, 19 nt, Artificial Sequence
  Description of Artificial Sequence: Synthetic oligonucleotide
gcugacaggcugcccugaa

SEQ ID NO: 3079362 - RNA, 19 nt, Artificial Sequence
  Description of Artificial Sequence: Synthetic oligonucleotide
gucgcuucucuagguugua

SEQ ID NO: 3079363 - RNA, 19 nt, Artificial Sequence
  Description of Artificial Sequence: Synthetic oligonucleotide
gguugccucugggcugggc

SEQ ID NO: 3079364 - RNA, 19 nt, Artificial Sequence
  Description of Artificial Sequence: Synthetic oligonucleotide
cugccucucuggugaucaa

SEQ ID NO: 3079365 - RNA, 19 nt, Artificial Sequence
  Description of Artificial Sequence: Synthetic oligonucleotide
ggacuaguggcgaucucuu

SEQ ID NO: 3079366 - RNA, 19 nt, Artificial Sequence
  Description of Artificial Sequence: Synthetic oligonucleotide
acgcucugccaggcugaga

SEQ ID NO: 3079367 - RNA, 19 nt, Artificial Sequence
  Description of Artificial Sequence: Synthetic oligonucleotide
gcccugaaccgggaaggga

SEQ ID NO: 3079368 - RNA, 19 nt, Artificial Sequence
  Description of Artificial Sequence: Synthetic oligonucleotide
gggaagggauguccucagu

SEQ ID NO: 3079369 - RNA, 19 nt, Artificial Sequence
  Description of Artificial Sequence: Synthetic oligonucleotide
cucuauccucuugcaggcu

SEQ ID NO: 3079370 - RNA, 19 nt, Artificial Sequence
  Description of Artificial Sequence: Synthetic oligonucleotide
gcccgcuggauggguauuc

SEQ ID NO: 3079371 - RNA, 19 nt, Artificial Sequence
  Description of Artificial Sequence: Synthetic oligonucleotide
ggcugcccugaaccgggaa

SEQ ID NO: 3079372 - RNA, 19 nt, Artificial Sequence
  Description of Artificial Sequence: Synthetic oligonucleotide
agggcccgcuggaugggua

SEQ ID NO: 3079373 - RNA, 19 nt, Artificial Sequence
  Description of Artificial Sequence: Synthetic oligonucleotide
gcugagagucaaagccugu

SEQ ID NO: 3079374 - RNA, 19 nt, Artificial Sequence
  Description of Artificial Sequence: Synthetic oligonucleotide
ggauguccucagucucacu

SEQ ID NO: 3079375 - RNA, 19 nt, Artificial Sequence
  Description of Artificial Sequence: Synthetic oligonucleotide
gagcugccucucuggugau

SEQ ID NO: 3079376 - RNA, 19 nt, Artificial Sequence
  Description of Artificial Sequence: Synthetic oligonucleotide
aggcugcccugaaccggga

SEQ ID NO: 3079377 - RNA, 19 nt, Artificial Sequence
  Description of Artificial Sequence: Synthetic oligonucleotide
gagggcccgcuggaugggu

SEQ ID NO: 3079378 - RNA, 19 nt, Artificial Sequence
  Description of Artificial Sequence: Synthetic oligonucleotide
gcucugccaggcugagagu

SEQ ID NO: 3079379 - RNA, 19 nt, Artificial Sequence
  Description of Artificial Sequence: Synthetic oligonucleotide
ccucucuggugaucaaguu

SEQ ID NO: 3079380 - RNA, 19 nt, Artificial Sequence
  Description of Artificial Sequence: Synthetic oligonucleotide
gggcccgcuggauggguau

SEQ ID NO: 3079381 - RNA, 19 nt, Artificial Sequence
  Description of Artificial Sequence: Synthetic oligonucleotide
ggguugccucugggcuggg

SEQ ID NO: 3079382 - RNA, 19 nt, Artificial Sequence
  Description of Artificial Sequence: Synthetic oligonucleotide
ccccuggaagggucaucaa

SEQ ID NO: 3079383 - RNA, 19 nt, Artificial Sequence
  Description of Artificial Sequence: Synthetic oligonucleotide
cccgcuggauggguauucu

SEQ ID NO: 3079384 - RNA, 19 nt, Artificial Sequence
  Description of Artificial Sequence: Synthetic oligonucleotide
ccgcuggauggguauucuu

SEQ ID NO: 3079385 - RNA, 19 nt, Artificial Sequence
  Description of Artificial Sequence: Synthetic oligonucleotide
ggcccgcuggauggguauu

SEQ ID NO: 3079386 - RNA, 19 nt, Artificial Sequence
  Description of Artificial Sequence: Synthetic oligonucleotide
ccucugggcugggcaccuu

SEQ ID NO: 3079387 - RNA, 19 nt, Artificial Sequence
  Description of Artificial Sequence: Synthetic oligonucleotide
uuuaaaaugugcaucauug

SEQ ID NO: 3079388 - RNA, 19 nt, Artificial Sequence
  Description of Artificial Sequence: Synthetic oligonucleotide
aauuuuaaaaugugcauca

SEQ ID NO: 3079389 - RNA, 19 nt, Artificial Sequence
  Description of Artificial Sequence: Synthetic oligonucleotide
ucuuuaauuaaaaugugca

SEQ ID NO: 3079390 - RNA, 19 nt, Artificial Sequence
  Description of Artificial Sequence: Synthetic oligonucleotide
ugugucuuuaauuaaaaug

SEQ ID NO: 3079391 - RNA, 19 nt, Artificial Sequence
  Description of Artificial Sequence: Synthetic oligonucleotide
uuaauuaaaaugugcauca

SEQ ID NO: 3079392 - RNA, 19 nt, Artificial Sequence
  Description of Artificial Sequence: Synthetic oligonucleotide
ucuuuuaauuuuaaaaugu

SEQ ID NO: 3079393 - RNA, 19 nt, Artificial Sequence
  Description of Artificial Sequence: Synthetic oligonucleotide
aaagaacuaguuuaugcug

SEQ ID NO: 3079394 - RNA, 19 nt, Artificial Sequence
  Description of Artificial Sequence: Synthetic oligonucleotide
aaaugugcaucauugucuc

SEQ ID NO: 3079395 - RNA, 19 nt, Artificial Sequence
  Description of Artificial Sequence: Synthetic oligonucleotide
uucuuuuaauuuuaaaaug

SEQ ID NO: 3079396 - RNA, 19 nt, Artificial Sequence
  Description of Artificial Sequence: Synthetic oligonucleotide
uaaaaugugcaucauuucu

SEQ ID NO: 3079397 - RNA, 19 nt, Artificial Sequence
  Description of Artificial Sequence: Synthetic oligonucleotide
uuaggaaagaacuaguuua

SEQ ID NO: 3079398 - RNA, 19 nt, Artificial Sequence
  Description of Artificial Sequence: Synthetic oligonucleotide
uuuaauuaaaaugugcauc

SEQ ID NO: 3079399 - RNA, 19 nt, Artificial Sequence
  Description of Artificial Sequence: Synthetic oligonucleotide
agcagcgucagacaguggc

SEQ ID NO: 3079400 - RNA, 19 nt, Artificial Sequence
  Description of Artificial Sequence: Synthetic oligonucleotide
uuaauuuuaaaaugugcau

SEQ ID NO: 3079401 - RNA, 19 nt, Artificial Sequence
  Description of Artificial Sequence: Synthetic oligonucleotide
uaaaaugugcaucauuguc

SEQ ID NO: 3079402 - RNA, 19 nt, Artificial Sequence
  Description of Artificial Sequence: Synthetic oligonucleotide
augauccguagcuacaggc

SEQ ID NO: 3079403 - RNA, 19 nt, Artificial Sequence
  Description of Artificial Sequence: Synthetic oligonucleotide
aaaaugugcaucauugucu

SEQ ID NO: 3079404 - RNA, 19 nt, Artificial Sequence
  Description of Artificial Sequence: Synthetic oligonucleotide
uaugcugugucuuuaauua

SEQ ID NO: 3079405 - RNA, 19 nt, Artificial Sequence
  Description of Artificial Sequence: Synthetic oligonucleotide
uaauuuuaaaaugugcauc

SEQ ID NO: 3079406 - RNA, 19 nt, Artificial Sequence
  Description of Artificial Sequence: Synthetic oligonucleotide
aauuaaaaugugcaucauu

SEQ ID NO: 3079407 - RNA, 19 nt, Artificial Sequence
  Description of Artificial Sequence: Synthetic oligonucleotide
uuuaggaaagaacuaguuu

SEQ ID NO: 3079408 - RNA, 19 nt, Artificial Sequence
  Description of Artificial Sequence: Synthetic oligonucleotide
auugucucgugcucggcgc

SEQ ID NO: 3079409 - RNA, 19 nt, Artificial Sequence
  Description of Artificial Sequence: Synthetic oligonucleotide
auuaaaaugugcaucauuu

SEQ ID NO: 3079410 - RNA, 19 nt, Artificial Sequence
  Description of Artificial Sequence: Synthetic oligonucleotide
ggaaagaacuaguuuaugc

SEQ ID NO: 3079411 - RNA, 19 nt, Artificial Sequence
  Description of Artificial Sequence: Synthetic oligonucleotide
aggguuaugauccguagcu

SEQ ID NO: 3079412 - RNA, 19 nt, Artificial Sequence
  Description of Artificial Sequence: Synthetic oligonucleotide
uuaaaaugugcaucauugu

SEQ ID NO: 3079413 - RNA, 19 nt, Artificial Sequence
  Description of Artificial Sequence: Synthetic oligonucleotide
uuuuaggaaagaacuaguu

SEQ ID NO: 3079414 - RNA, 19 nt, Artificial Sequence
  Description of Artificial Sequence: Synthetic oligonucleotide
gaaagaacuaguuuaugcu

SEQ ID NO: 3079415 - RNA, 19 nt, Artificial Sequence
  Description of Artificial Sequence: Synthetic oligonucleotide
ugcaucauuucuuuuaauu

SEQ ID NO: 3079416 - RNA, 19 nt, Artificial Sequence
  Description of Artificial Sequence: Synthetic oligonucleotide
aaaugugcaucauuucuuu

SEQ ID NO: 3079417 - RNA, 19 nt, Artificial Sequence
  Description of Artificial Sequence: Synthetic oligonucleotide
ccugacaggguuaugaucc

SEQ ID NO: 3079418 - RNA, 19 nt, Artificial Sequence
  Description of Artificial Sequence: Synthetic oligonucleotide
uuaaaaugugcaucauuuc

SEQ ID NO: 3079419 - RNA, 19 nt, Artificial Sequence
  Description of Artificial Sequence: Synthetic oligonucleotide
aagaacuaguuuaugcugu

SEQ ID NO: 3079420 - RNA, 19 nt, Artificial Sequence
  Description of Artificial Sequence: Synthetic oligonucleotide
ugugcaucauuucuuuuaa

SEQ ID NO: 3079421 - RNA, 19 nt, Artificial Sequence
  Description of Artificial Sequence: Synthetic oligonucleotide
acuaguuuaugcugugucu

SEQ ID NO: 3079422 - RNA, 19 nt, Artificial Sequence
  Description of Artificial Sequence: Synthetic oligonucleotide
uuaugauccguagcuacag

SEQ ID NO: 3079423 - RNA, 19 nt, Artificial Sequence
  Description of Artificial Sequence: Synthetic oligonucleotide
uaugauccguagcuacagg

SEQ ID NO: 3079424 - RNA, 19 nt, Artificial Sequence
  Description of Artificial Sequence: Synthetic oligonucleotide
gucuuuaauuaaaaugugc

SEQ ID NO: 3079425 - RNA, 19 nt, Artificial Sequence
  Description of Artificial Sequence: Synthetic oligonucleotide
aaugugcaucauugucucg

SEQ ID NO: 3079426 - RNA, 19 nt, Artificial Sequence
  Description of Artificial Sequence: Synthetic oligonucleotide
gugucuuuaauuaaaaugu

SEQ ID NO: 3079427 - RNA, 19 nt, Artificial Sequence
  Description of Artificial Sequence: Synthetic oligonucleotide
ugcaucauugucucgugcu

SEQ ID NO: 3079428 - RNA, 19 nt, Artificial Sequence
  Description of Artificial Sequence: Synthetic oligonucleotide
uaggaaagaacuaguuuau

SEQ ID NO: 3079429 - RNA, 19 nt, Artificial Sequence
  Description of Artificial Sequence: Synthetic oligonucleotide
acucagguggcacgggccc

SEQ ID NO: 3079430 - RNA, 19 nt, Artificial Sequence
  Description of Artificial Sequence: Synthetic oligonucleotide
guagcuacaggcuccgggc

SEQ ID NO: 3079431 - RNA, 19 nt, Artificial Sequence
  Description of Artificial Sequence: Synthetic oligonucleotide
ugauccguagcuacaggcu

SEQ ID NO: 3079432 - RNA, 19 nt, Artificial Sequence
  Description of Artificial Sequence: Synthetic oligonucleotide
ugcugugucuuuaauuaaa

SEQ ID NO: 3079433 - RNA, 19 nt, Artificial Sequence
  Description of Artificial Sequence: Synthetic oligonucleotide
agggcucccgcccauggcc

SEQ ID NO: 3079434 - RNA, 19 nt, Artificial Sequence
  Description of Artificial Sequence: Synthetic oligonucleotide
ugcgaccucagcguggugg

SEQ ID NO: 3079435 - RNA, 19 nt, Artificial Sequence
  Description of Artificial Sequence: Synthetic oligonucleotide
aucauugucucgugcucgg

SEQ ID NO: 3079436 - RNA, 19 nt, Artificial Sequence
  Description of Artificial Sequence: Synthetic oligonucleotide
uuaugcugugucuuuaauu

SEQ ID NO: 3079437 - RNA, 19 nt, Artificial Sequence
  Description of Artificial Sequence: Synthetic oligonucleotide
ucauuucuuuuaauuuuaa

SEQ ID NO: 3079438 - RNA, 19 nt, Artificial Sequence
  Description of Artificial Sequence: Synthetic oligonucleotide
agaacuaguuuaugcugug

SEQ ID NO: 3079439 - RNA, 19 nt, Artificial Sequence
  Description of Artificial Sequence: Synthetic oligonucleotide
cauugucucgugcucggcg

SEQ ID NO: 3079440 - RNA, 19 nt, Artificial Sequence
  Description of Artificial Sequence: Synthetic oligonucleotide
acgugcagcagcgucagac

SEQ ID NO: 3079441 - RNA, 19 nt, Artificial Sequence
  Description of Artificial Sequence: Synthetic oligonucleotide
ucagacaguggcagcccgg

SEQ ID NO: 3079442 - RNA, 19 nt, Artificial Sequence
  Description of Artificial Sequence: Synthetic oligonucleotide
acaggguuaugauccguag

SEQ ID NO: 3079443 - RNA, 19 nt, Artificial Sequence
  Description of Artificial Sequence: Synthetic oligonucleotide
uuuaugcugugucuuuaau

SEQ ID NO: 3079444 - RNA, 19 nt, Artificial Sequence
  Description of Artificial Sequence: Synthetic oligonucleotide
ugcgcaggcgcacucaggu

SEQ ID NO: 3079445 - RNA, 19 nt, Artificial Sequence
  Description of Artificial Sequence: Synthetic oligonucleotide
augugcaucauuucuuuua

SEQ ID NO: 3079446 - RNA, 19 nt, Artificial Sequence
  Description of Artificial Sequence: Synthetic oligonucleotide
caucauugucucgugcucg

SEQ ID NO: 3079447 - RNA, 19 nt, Artificial Sequence
  Description of Artificial Sequence: Synthetic oligonucleotide
gauccguagcuacaggcuc

SEQ ID NO: 3079448 - RNA, 19 nt, Artificial Sequence
  Description of Artificial Sequence: Synthetic oligonucleotide
gguuaugauccguagcuac

SEQ ID NO: 3079449 - RNA, 19 nt, Artificial Sequence
  Description of Artificial Sequence: Synthetic oligonucleotide
ugugcaucauugucucgug

SEQ ID NO: 3079450 - RNA, 19 nt, Artificial Sequence
  Description of Artificial Sequence: Synthetic oligonucleotide
guagacgucgaugggcacg

SEQ ID NO: 3079451 - RNA, 19 nt, Artificial Sequence
  Description of Artificial Sequence: Synthetic oligonucleotide
gguggcacgggcccgaggg

SEQ ID NO: 3079452 - RNA, 19 nt, Artificial Sequence
  Description of Artificial Sequence: Synthetic oligonucleotide
ucgaugggcacgugcagca

SEQ ID NO: 3079453 - RNA, 19 nt, Artificial Sequence
  Description of Artificial Sequence: Synthetic oligonucleotide
augugcaucauugucucgu

SEQ ID NO: 3079454 - RNA, 19 nt, Artificial Sequence
  Description of Artificial Sequence: Synthetic oligonucleotide
agcgucagacaguggcagc

SEQ ID NO: 3079455 - RNA, 19 nt, Artificial Sequence
  Description of Artificial Sequence: Synthetic oligonucleotide
gacaguggcagcccgggca

SEQ ID NO: 3079456 - RNA, 19 nt, Artificial Sequence
  Description of Artificial Sequence: Synthetic oligonucleotide
uugucucgugcucggcgcg

SEQ ID NO: 3079457 - RNA, 19 nt, Artificial Sequence
  Description of Artificial Sequence: Synthetic oligonucleotide
gacgucgaugggcacgugc

SEQ ID NO: 3079458 - RNA, 19 nt, Artificial Sequence
  Description of Artificial Sequence: Synthetic oligonucleotide
cuuuaauuaaaaugugcau

SEQ ID NO: 3079459 - RNA, 19 nt, Artificial Sequence
  Description of Artificial Sequence: Synthetic oligonucleotide
auccguagcuacaggcucc

SEQ ID NO: 3079460 - RNA, 19 nt, Artificial Sequence
  Description of Artificial Sequence: Synthetic oligonucleotide
caggguuaugauccguagc

SEQ ID NO: 3079461 - RNA, 19 nt, Artificial Sequence
  Description of Artificial Sequence: Synthetic oligonucleotide
cagguagacgucgaugggc

SEQ ID NO: 3079462 - RNA, 19 nt, Artificial Sequence
  Description of Artificial Sequence: Synthetic oligonucleotide
gucagacaguggcagcccg

SEQ ID NO: 3079463 - RNA, 19 nt, Artificial Sequence
  Description of Artificial Sequence: Synthetic oligonucleotide
cugacaggguuaugauccg

SEQ ID NO: 3079464 - RNA, 19 nt, Artificial Sequence
  Description of Artificial Sequence: Synthetic oligonucleotide
aucauuucuuuuaauuuua

SEQ ID NO: 3079465 - RNA, 19 nt, Artificial Sequence
  Description of Artificial Sequence: Synthetic oligonucleotide
ggcgcgugcgaccucagcg

SEQ ID NO: 3079466 - RNA, 19 nt, Artificial Sequence
  Description of Artificial Sequence: Synthetic oligonucleotide
cauggccagguagacgucg

SEQ ID NO: 3079467 - RNA, 19 nt, Artificial Sequence
  Description of Artificial Sequence: Synthetic oligonucleotide
gugcagcagcgucagacag

SEQ ID NO: 3079468 - RNA, 19 nt, Artificial Sequence
  Description of Artificial Sequence: Synthetic oligonucleotide
aggaaagaacuaguuuaug

SEQ ID NO: 3079469 - RNA, 19 nt, Artificial Sequence
  Description of Artificial Sequence: Synthetic oligonucleotide
agcugccgugcgcaggcgc

SEQ ID NO: 3079470 - RNA, 19 nt, Artificial Sequence
  Description of Artificial Sequence: Synthetic oligonucleotide
uccguagcuacaggcuccg

SEQ ID NO: 3079471 - RNA, 19 nt, Artificial Sequence
  Description of Artificial Sequence: Synthetic oligonucleotide
agacaguggcagcccgggc

SEQ ID NO: 3079472 - RNA, 19 nt, Artificial Sequence
  Description of Artificial Sequence: Synthetic oligonucleotide
guuaugauccguagcuaca

SEQ ID NO: 3079473 - RNA, 19 nt, Artificial Sequence
  Description of Artificial Sequence: Synthetic oligonucleotide
ugcagcagcgucagacagu

SEQ ID NO: 3079474 - RNA, 19 nt, Artificial Sequence
  Description of Artificial Sequence: Synthetic oligonucleotide
ucggagcggccugacaggg

SEQ ID NO: 3079475 - RNA, 19 nt, Artificial Sequence
  Description of Artificial Sequence: Synthetic oligonucleotide
guuuaugcugugucuuuaa

SEQ ID NO: 3079476 - RNA, 19 nt, Artificial Sequence
  Description of Artificial Sequence: Synthetic oligonucleotide
ucagcgugguggcccgcgg

SEQ ID NO: 3079477 - RNA, 19 nt, Artificial Sequence
  Description of Artificial Sequence: Synthetic oligonucleotide
gucggagcggccugacagg

SEQ ID NO: 3079478 - RNA, 19 nt, Artificial Sequence
  Description of Artificial Sequence: Synthetic oligonucleotide
uagcuacaggcuccgggcu

SEQ ID NO: 3079479 - RNA, 19 nt, Artificial Sequence
  Description of Artificial Sequence: Synthetic oligonucleotide
uagacgucgaugggcacgu

SEQ ID NO: 3079480 - RNA, 19 nt, Artificial Sequence
  Description of Artificial Sequence: Synthetic oligonucleotide
agcuacaggcuccgggcug

SEQ ID NO: 3079481 - RNA, 19 nt, Artificial Sequence
  Description of Artificial Sequence: Synthetic oligonucleotide
cagacaguggcagcccggg

SEQ ID NO: 3079482 - RNA, 19 nt, Artificial Sequence
  Description of Artificial Sequence: Synthetic oligonucleotide
agguagacgucgaugggca

SEQ ID NO: 3079483 - RNA, 19 nt, Artificial Sequence
  Description of Artificial Sequence: Synthetic oligonucleotide
augcugugucuuuaauuaa

SEQ ID NO: 3079484 - RNA, 19 nt, Artificial Sequence
  Description of Artificial Sequence: Synthetic oligonucleotide
accucagcgugguggcccg

SEQ ID NO: 3079485 - RNA, 19 nt, Artificial Sequence
  Description of Artificial Sequence: Synthetic oligonucleotide
gugcaucauugucucgugc

SEQ ID NO: 3079486 - RNA, 19 nt, Artificial Sequence
  Description of Artificial Sequence: Synthetic oligonucleotide
uccugcccggcuccugcgg

SEQ ID NO: 3079487 - RNA, 19 nt, Artificial Sequence
  Description of Artificial Sequence: Synthetic oligonucleotide
aguuuaugcugugucuuua

SEQ ID NO: 3079488 - RNA, 19 nt, Artificial Sequence
  Description of Artificial Sequence: Synthetic oligonucleotide
aguggcagcccgggcagcg

SEQ ID NO: 3079489 - RNA, 19 nt, Artificial Sequence
  Description of Artificial Sequence: Synthetic oligonucleotide
ugcggagcugccgugcgca

SEQ ID NO: 3079490 - RNA, 19 nt, Artificial Sequence
  Description of Artificial Sequence: Synthetic oligonucleotide
gcuggccucguccugcccg

SEQ ID NO: 3079491 - RNA, 19 nt, Artificial Sequence
  Description of Artificial Sequence: Synthetic oligonucleotide
gucgaugggcacgugcagc

SEQ ID NO: 3079492 - RNA, 19 nt, Artificial Sequence
  Description of Artificial Sequence: Synthetic oligonucleotide
cagcgucagacaguggcag

SEQ ID NO: 3079493 - RNA, 19 nt, Artificial Sequence
  Description of Artificial Sequence: Synthetic oligonucleotide
gcagcagcgucagacagug

SEQ ID NO: 3079494 - RNA, 19 nt, Artificial Sequence
  Description of Artificial Sequence: Synthetic oligonucleotide
ucauugucucgugcucggc

SEQ ID NO: 3079495 - RNA, 19 nt, Artificial Sequence
  Description of Artificial Sequence: Synthetic oligonucleotide
cuggccucguccugcccgg

SEQ ID NO: 3079496 - RNA, 19 nt, Artificial Sequence
  Description of Artificial Sequence: Synthetic oligonucleotide
ggagcugccgugcgcaggc

SEQ ID NO: 3079497 - RNA, 19 nt, Artificial Sequence
  Description of Artificial Sequence: Synthetic oligonucleotide
ggcgcacucagguggcacg

SEQ ID NO: 3079498 - RNA, 19 nt, Artificial Sequence
  Description of Artificial Sequence: Synthetic oligonucleotide
gcaucauuucuuuuaauuu

SEQ ID NO: 3079499 - RNA, 19 nt, Artificial Sequence
  Description of Artificial Sequence: Synthetic oligonucleotide
acgucgaugggcacgugca

SEQ ID NO: 3079500 - RNA, 19 nt, Artificial Sequence
  Description of Artificial Sequence: Synthetic oligonucleotide
ugacaggguuaugauccgu

SEQ ID NO: 3079501 - RNA, 19 nt, Artificial Sequence
  Description of Artificial Sequence: Synthetic oligonucleotide
cguagcuacaggcuccggg

SEQ ID NO: 3079502 - RNA, 19 nt, Artificial Sequence
  Description of Artificial Sequence: Synthetic oligonucleotide
agcgugguggcccgcggcu

SEQ ID NO: 3079503 - RNA, 19 nt, Artificial Sequence
  Description of Artificial Sequence: Synthetic oligonucleotide
gacaggguuaugauccgua

SEQ ID NO: 3079504 - RNA, 19 nt, Artificial Sequence
  Description of Artificial Sequence: Synthetic oligonucleotide
ucucgugcucggcgcgugc

SEQ ID NO: 3079505 - RNA, 19 nt, Artificial Sequence
  Description of Artificial Sequence: Synthetic oligonucleotide
aggcgcacucagguggcac

SEQ ID NO: 3079506 - RNA, 19 nt, Artificial Sequence
  Description of Artificial Sequence: Synthetic oligonucleotide
cgcaggcgcacucaggugg

SEQ ID NO: 3079507 - RNA, 19 nt, Artificial Sequence
  Description of Artificial Sequence: Synthetic oligonucleotide
gagggcucccgcccauggc

SEQ ID NO: 3079508 - RNA, 19 nt, Artificial Sequence
  Description of Artificial Sequence: Synthetic oligonucleotide
gcaucauugucucgugcuc

SEQ ID NO: 3079509 - RNA, 19 nt, Artificial Sequence
  Description of Artificial Sequence: Synthetic oligonucleotide
ugcucggcgcgugcgaccu

SEQ ID NO: 3079510 - RNA, 19 nt, Artificial Sequence
  Description of Artificial Sequence: Synthetic oligonucleotide
ucgugcucggcgcgugcga

SEQ ID NO: 3079511 - RNA, 19 nt, Artificial Sequence
  Description of Artificial Sequence: Synthetic oligonucleotide
uccugcggagcugccgugc

SEQ ID NO: 3079512 - RNA, 19 nt, Artificial Sequence
  Description of Artificial Sequence: Synthetic oligonucleotide
ucagguggcacgggcccga

SEQ ID NO: 3079513 - RNA, 19 nt, Artificial Sequence
  Description of Artificial Sequence: Synthetic oligonucleotide
cucagcgugguggcccgcg

SEQ ID NO: 3079514 - RNA, 19 nt, Artificial Sequence
  Description of Artificial Sequence: Synthetic oligonucleotide
cucgugcucggcgcgugcg

SEQ ID NO: 3079515 - RNA, 19 nt, Artificial Sequence
  Description of Artificial Sequence: Synthetic oligonucleotide
cgucggagcggccugacag

SEQ ID NO: 3079516 - RNA, 19 nt, Artificial Sequence
  Description of Artificial Sequence: Synthetic oligonucleotide
uggcacgggcccgagggcu

SEQ ID NO: 3079517 - RNA, 19 nt, Artificial Sequence
  Description of Artificial Sequence: Synthetic oligonucleotide
gaacuaguuuaugcugugu

SEQ ID NO: 3079518 - RNA, 19 nt, Artificial Sequence
  Description of Artificial Sequence: Synthetic oligonucleotide
agcccgggcagcgucggag

SEQ ID NO: 3079519 - RNA, 19 nt, Artificial Sequence
  Description of Artificial Sequence: Synthetic oligonucleotide
cugugucuuuaauuaaaau

SEQ ID NO: 3079520 - RNA, 19 nt, Artificial Sequence
  Description of Artificial Sequence: Synthetic oligonucleotide
cucagguggcacgggcccg

SEQ ID NO: 3079521 - RNA, 19 nt, Artificial Sequence
  Description of Artificial Sequence: Synthetic oligonucleotide
gcgucagacaguggcagcc

SEQ ID NO: 3079522 - RNA, 19 nt, Artificial Sequence
  Description of Artificial Sequence: Synthetic oligonucleotide
ccagguagacgucgauggg

SEQ ID NO: 3079523 - RNA, 19 nt, Artificial Sequence
  Description of Artificial Sequence: Synthetic oligonucleotide
guccugcccggcuccugcg

SEQ ID NO: 3079524 - RNA, 19 nt, Artificial Sequence
  Description of Artificial Sequence: Synthetic oligonucleotide
gcgaccucagcgugguggc

SEQ ID NO: 3079525 - RNA, 19 nt, Artificial Sequence
  Description of Artificial Sequence: Synthetic oligonucleotide
uggcccgcggcuggccucg

SEQ ID NO: 3079526 - RNA, 19 nt, Artificial Sequence
  Description of Artificial Sequence: Synthetic oligonucleotide
gccugacaggguuaugauc

SEQ ID NO: 3079527 - RNA, 19 nt, Artificial Sequence
  Description of Artificial Sequence: Synthetic oligonucleotide
uacaggcuccgggcugucc

SEQ ID NO: 3079528 - RNA, 19 nt, Artificial Sequence
  Description of Artificial Sequence: Synthetic oligonucleotide
agguggcacgggcccgagg

SEQ ID NO: 3079529 - RNA, 19 nt, Artificial Sequence
  Description of Artificial Sequence: Synthetic oligonucleotide
ugucucgugcucggcgcgu

SEQ ID NO: 3079530 - RNA, 19 nt, Artificial Sequence
  Description of Artificial Sequence: Synthetic oligonucleotide
ggccagguagacgucgaug

SEQ ID NO: 3079531 - RNA, 19 nt, Artificial Sequence
  Description of Artificial Sequence: Synthetic oligonucleotide
cagcgugguggcccgcggc

SEQ ID NO: 3079532 - RNA, 19 nt, Artificial Sequence
  Description of Artificial Sequence: Synthetic oligonucleotide
agcgucggagcggccugac

SEQ ID NO: 3079533 - RNA, 19 nt, Artificial Sequence
  Description of Artificial Sequence: Synthetic oligonucleotide
cugcccggcuccugcggag

SEQ ID NO: 3079534 - RNA, 19 nt, Artificial Sequence
  Description of Artificial Sequence: Synthetic oligonucleotide
gguagacgucgaugggcac

SEQ ID NO: 3079535 - RNA, 19 nt, Artificial Sequence
  Description of Artificial Sequence: Synthetic oligonucleotide
guggcacgggcccgagggc

SEQ ID NO: 3079536 - RNA, 19 nt, Artificial Sequence
  Description of Artificial Sequence: Synthetic oligonucleotide
cugcggagcugccgugcgc

SEQ ID NO: 3079537 - RNA, 19 nt, Artificial Sequence
  Description of Artificial Sequence: Synthetic oligonucleotide
gugcucggcgcgugcgacc

SEQ ID NO: 3079538 - RNA, 19 nt, Artificial Sequence
  Description of Artificial Sequence: Synthetic oligonucleotide
ucggcgcgugcgaccucag

SEQ ID NO: 3079539 - RNA, 19 nt, Artificial Sequence
  Description of Artificial Sequence: Synthetic oligonucleotide
ugcccggcuccugcggagc

SEQ ID NO: 3079540 - RNA, 19 nt, Artificial Sequence
  Description of Artificial Sequence: Synthetic oligonucleotide
ggcacgugcagcagcguca

SEQ ID NO: 3079541 - RNA, 19 nt, Artificial Sequence
  Description of Artificial Sequence: Synthetic oligonucleotide
gugcgcaggcgcacucagg

SEQ ID NO: 3079542 - RNA, 19 nt, Artificial Sequence
  Description of Artificial Sequence: Synthetic oligonucleotide
agcggccugacaggguuau

SEQ ID NO: 3079543 - RNA, 19 nt, Artificial Sequence
  Description of Artificial Sequence: Synthetic oligonucleotide
cccgcccauggccagguag

SEQ ID NO: 3079544 - RNA, 19 nt, Artificial Sequence
  Description of Artificial Sequence: Synthetic oligonucleotide
gcacgugcagcagcgucag

SEQ ID NO: 3079545 - RNA, 19 nt, Artificial Sequence
  Description of Artificial Sequence: Synthetic oligonucleotide
cagcagcgucagacagugg

SEQ ID NO: 3079546 - RNA, 19 nt, Artificial Sequence
  Description of Artificial Sequence: Synthetic oligonucleotide
cuccugcggagcugccgug

SEQ ID NO: 3079547 - RNA, 19 nt, Artificial Sequence
  Description of Artificial Sequence: Synthetic oligonucleotide
gggcacgugcagcagcguc

SEQ ID NO: 3079548 - RNA, 19 nt, Artificial Sequence
  Description of Artificial Sequence: Synthetic oligonucleotide
ccugcggagcugccgugcg

SEQ ID NO: 3079549 - RNA, 19 nt, Artificial Sequence
  Description of Artificial Sequence: Synthetic oligonucleotide
gcgcacucagguggcacgg

SEQ ID NO: 3079550 - RNA, 19 nt, Artificial Sequence
  Description of Artificial Sequence: Synthetic oligonucleotide
ggcuccugcggagcugccg

SEQ ID NO: 3079551 - RNA, 19 nt, Artificial Sequence
  Description of Artificial Sequence: Synthetic oligonucleotide
gcagcgucggagcggccug

SEQ ID NO: 3079552 - RNA, 19 nt, Artificial Sequence
  Description of Artificial Sequence: Synthetic oligonucleotide
gagcugccgugcgcaggcg

SEQ ID NO: 3079553 - RNA, 19 nt, Artificial Sequence
  Description of Artificial Sequence: Synthetic oligonucleotide
cccgcggcuggccucgucc

SEQ ID NO: 3079554 - RNA, 19 nt, Artificial Sequence
  Description of Artificial Sequence: Synthetic oligonucleotide
gucucgugcucggcgcgug

SEQ ID NO: 3079555 - RNA, 19 nt, Artificial Sequence
  Description of Artificial Sequence: Synthetic oligonucleotide
gcccauggccagguagacg

SEQ ID NO: 3079556 - RNA, 19 nt, Artificial Sequence
  Description of Artificial Sequence: Synthetic oligonucleotide
gugcaucauuucuuuuaau

SEQ ID NO: 3079557 - RNA, 19 nt, Artificial Sequence
  Description of Artificial Sequence: Synthetic oligonucleotide
gcagcgucagacaguggca

SEQ ID NO: 3079558 - RNA, 19 nt, Artificial Sequence
  Description of Artificial Sequence: Synthetic oligonucleotide
cucggcgcgugcgaccuca

SEQ ID NO: 3079559 - RNA, 19 nt, Artificial Sequence
  Description of Artificial Sequence: Synthetic oligonucleotide
ucguccugcccggcuccug

SEQ ID NO: 3079560 - RNA, 19 nt, Artificial Sequence
  Description of Artificial Sequence: Synthetic oligonucleotide
ugccgugcgcaggcgcacu

SEQ ID NO: 3079561 - RNA, 19 nt, Artificial Sequence
  Description of Artificial Sequence: Synthetic oligonucleotide
ugggcacgugcagcagcgu

SEQ ID NO: 3079562 - RNA, 19 nt, Artificial Sequence
  Description of Artificial Sequence: Synthetic oligonucleotide
ccucguccugcccggcucc

SEQ ID NO: 3079563 - RNA, 19 nt, Artificial Sequence
  Description of Artificial Sequence: Synthetic oligonucleotide
ugguggcccgcggcuggcc

SEQ ID NO: 3079564 - RNA, 19 nt, Artificial Sequence
  Description of Artificial Sequence: Synthetic oligonucleotide
gcaggcgcacucagguggc

SEQ ID NO: 3079565 - RNA, 19 nt, Artificial Sequence
  Description of Artificial Sequence: Synthetic oligonucleotide
ggagcggccugacaggguu

SEQ ID NO: 3079566 - RNA, 19 nt, Artificial Sequence
  Description of Artificial Sequence: Synthetic oligonucleotide
gcgugcgaccucagcgugg

SEQ ID NO: 3079567 - RNA, 19 nt, Artificial Sequence
  Description of Artificial Sequence: Synthetic oligonucleotide
ggguuaugauccguagcua

SEQ ID NO: 3079568 - RNA, 19 nt, Artificial Sequence
  Description of Artificial Sequence: Synthetic oligonucleotide
gcuccugcggagcugccgu

SEQ ID NO: 3079569 - RNA, 19 nt, Artificial Sequence
  Description of Artificial Sequence: Synthetic oligonucleotide
gcccgggcagcgucggagc

SEQ ID NO: 3079570 - RNA, 19 nt, Artificial Sequence
  Description of Artificial Sequence: Synthetic oligonucleotide
acgggcccgagggcucccg

SEQ ID NO: 3079571 - RNA, 19 nt, Artificial Sequence
  Description of Artificial Sequence: Synthetic oligonucleotide
cugccgugcgcaggcgcac

SEQ ID NO: 3079572 - RNA, 19 nt, Artificial Sequence
  Description of Artificial Sequence: Synthetic oligonucleotide
cgagggcucccgcccaugg

SEQ ID NO: 3079573 - RNA, 19 nt, Artificial Sequence
  Description of Artificial Sequence: Synthetic oligonucleotide
cccgggcagcgucggagcg

SEQ ID NO: 3079574 - RNA, 19 nt, Artificial Sequence
  Description of Artificial Sequence: Synthetic oligonucleotide
cgugguggcccgcggcugg

SEQ ID NO: 3079575 - RNA, 19 nt, Artificial Sequence
  Description of Artificial Sequence: Synthetic oligonucleotide
ggcucccgcccauggccag

SEQ ID NO: 3079576 - RNA, 19 nt, Artificial Sequence
  Description of Artificial Sequence: Synthetic oligonucleotide
gccucguccugcccggcuc

SEQ ID NO: 3079577 - RNA, 19 nt, Artificial Sequence
  Description of Artificial Sequence: Synthetic oligonucleotide
gcgcaggcgcacucaggug

SEQ ID NO: 3079578 - RNA, 19 nt, Artificial Sequence
  Description of Artificial Sequence: Synthetic oligonucleotide
ccgcccauggccagguaga

SEQ ID NO: 3079579 - RNA, 19 nt, Artificial Sequence
  Description of Artificial Sequence: Synthetic oligonucleotide
guggcccgcggcuggccuc

SEQ ID NO: 3079580 - RNA, 19 nt, Artificial Sequence
  Description of Artificial Sequence: Synthetic oligonucleotide
cgugcagcagcgucagaca

SEQ ID NO: 3079581 - RNA, 19 nt, Artificial Sequence
  Description of Artificial Sequence: Synthetic oligonucleotide
ccggcuccugcggagcugc

SEQ ID NO: 3079582 - RNA, 19 nt, Artificial Sequence
  Description of Artificial Sequence: Synthetic oligonucleotide
cgugcgcaggcgcacucag

SEQ ID NO: 3079583 - RNA, 19 nt, Artificial Sequence
  Description of Artificial Sequence: Synthetic oligonucleotide
gugguggcccgcggcuggc

SEQ ID NO: 3079584 - RNA, 19 nt, Artificial Sequence
  Description of Artificial Sequence: Synthetic oligonucleotide
cgucagacaguggcagccc

SEQ ID NO: 3079585 - RNA, 19 nt, Artificial Sequence
  Description of Artificial Sequence: Synthetic oligonucleotide
ggccugacaggguuaugau

SEQ ID NO: 3079586 - RNA, 19 nt, Artificial Sequence
  Description of Artificial Sequence: Synthetic oligonucleotide
uggccucguccugcccggc

SEQ ID NO: 3079587 - RNA, 19 nt, Artificial Sequence
  Description of Artificial Sequence: Synthetic oligonucleotide
gcugccgugcgcaggcgca

SEQ ID NO: 3079588 - RNA, 19 nt, Artificial Sequence
  Description of Artificial Sequence: Synthetic oligonucleotide
cagguggcacgggcccgag

SEQ ID NO: 3079589 - RNA, 19 nt, Artificial Sequence
  Description of Artificial Sequence: Synthetic oligonucleotide
agacgucgaugggcacgug

SEQ ID NO: 3079590 - RNA, 19 nt, Artificial Sequence
  Description of Artificial Sequence: Synthetic oligonucleotide
cuacaggcuccgggcuguc

SEQ ID NO: 3079591 - RNA, 19 nt, Artificial Sequence
  Description of Artificial Sequence: Synthetic oligonucleotide
gcggagcugccgugcgcag

SEQ ID NO: 3079592 - RNA, 19 nt, Artificial Sequence
  Description of Artificial Sequence: Synthetic oligonucleotide
gcucccgcccauggccagg

SEQ ID NO: 3079593 - RNA, 19 nt, Artificial Sequence
  Description of Artificial Sequence: Synthetic oligonucleotide
gugcgaccucagcguggug

SEQ ID NO: 3079594 - RNA, 19 nt, Artificial Sequence
  Description of Artificial Sequence: Synthetic oligonucleotide
cggccugacaggguuauga

SEQ ID NO: 3079595 - RNA, 19 nt, Artificial Sequence
  Description of Artificial Sequence: Synthetic oligonucleotide
gcgcgugcgaccucagcgu

SEQ ID NO: 3079596 - RNA, 19 nt, Artificial Sequence
  Description of Artificial Sequence: Synthetic oligonucleotide
gcuacaggcuccgggcugu

SEQ ID NO: 3079597 - RNA, 19 nt, Artificial Sequence
  Description of Artificial Sequence: Synthetic oligonucleotide
ccgggcagcgucggagcgg

SEQ ID NO: 3079598 - RNA, 19 nt, Artificial Sequence
  Description of Artificial Sequence: Synthetic oligonucleotide
gagcggccugacaggguua

SEQ ID NO: 3079599 - RNA, 19 nt, Artificial Sequence
  Description of Artificial Sequence: Synthetic oligonucleotide
cgggcagcgucggagcggc

SEQ ID NO: 3079600 - RNA, 19 nt, Artificial Sequence
  Description of Artificial Sequence: Synthetic oligonucleotide
cgcgugcgaccucagcgug

SEQ ID NO: 3079601 - RNA, 19 nt, Artificial Sequence
  Description of Artificial Sequence: Synthetic oligonucleotide
ggcagcgucggagcggccu

SEQ ID NO: 3079602 - RNA, 19 nt, Artificial Sequence
  Description of Artificial Sequence: Synthetic oligonucleotide
cacgggcccgagggcuccc

SEQ ID NO: 3079603 - RNA, 19 nt, Artificial Sequence
  Description of Artificial Sequence: Synthetic oligonucleotide
gggcucccgcccauggcca

SEQ ID NO: 3079604 - RNA, 19 nt, Artificial Sequence
  Description of Artificial Sequence: Synthetic oligonucleotide
gccgugcgcaggcgcacuc

SEQ ID NO: 3079605 - RNA, 19 nt, Artificial Sequence
  Description of Artificial Sequence: Synthetic oligonucleotide
gcgugguggcccgcggcug

SEQ ID NO: 3079606 - RNA, 19 nt, Artificial Sequence
  Description of Artificial Sequence: Synthetic oligonucleotide
cacgugcagcagcgucaga

SEQ ID NO: 3079607 - RNA, 19 nt, Artificial Sequence
  Description of Artificial Sequence: Synthetic oligonucleotide
ggcacgggcccgagggcuc

SEQ ID NO: 3079608 - RNA, 19 nt, Artificial Sequence
  Description of Artificial Sequence: Synthetic oligonucleotide
cggagcugccgugcgcagg

SEQ ID NO: 3079609 - RNA, 19 nt, Artificial Sequence
  Description of Artificial Sequence: Synthetic oligonucleotide
ccugcccggcuccugcgga

SEQ ID NO: 3079610 - RNA, 19 nt, Artificial Sequence
  Description of Artificial Sequence: Synthetic oligonucleotide
caggcgcacucagguggca

SEQ ID NO: 3079611 - RNA, 19 nt, Artificial Sequence
  Description of Artificial Sequence: Synthetic oligonucleotide
cgugcucggcgcgugcgac

SEQ ID NO: 3079612 - RNA, 19 nt, Artificial Sequence
  Description of Artificial Sequence: Synthetic oligonucleotide
gguggcccgcggcuggccu

SEQ ID NO: 3079613 - RNA, 19 nt, Artificial Sequence
  Description of Artificial Sequence: Synthetic oligonucleotide
cgaugggcacgugcagcag

SEQ ID NO: 3079614 - RNA, 19 nt, Artificial Sequence
  Description of Artificial Sequence: Synthetic oligonucleotide
cagcgucggagcggccuga

SEQ ID NO: 3079615 - RNA, 19 nt, Artificial Sequence
  Description of Artificial Sequence: Synthetic oligonucleotide
gcgucggagcggccugaca

SEQ ID NO: 3079616 - RNA, 19 nt, Artificial Sequence
  Description of Artificial Sequence: Synthetic oligonucleotide
ccguagcuacaggcuccgg

SEQ ID NO: 3079617 - RNA, 19 nt, Artificial Sequence
  Description of Artificial Sequence: Synthetic oligonucleotide
gcccgagggcucccgccca

SEQ ID NO: 3079618 - RNA, 19 nt, Artificial Sequence
  Description of Artificial Sequence: Synthetic oligonucleotide
cucccgcccauggccaggu

SEQ ID NO: 3079619 - RNA, 19 nt, Artificial Sequence
  Description of Artificial Sequence: Synthetic oligonucleotide
cgcccauggccagguagac

SEQ ID NO: 3079620 - RNA, 19 nt, Artificial Sequence
  Description of Artificial Sequence: Synthetic oligonucleotide
gcggccugacaggguuaug

SEQ ID NO: 3079621 - RNA, 19 nt, Artificial Sequence
  Description of Artificial Sequence: Synthetic oligonucleotide
ggccucguccugcccggcu

SEQ ID NO: 3079622 - RNA, 19 nt, Artificial Sequence
  Description of Artificial Sequence: Synthetic oligonucleotide
cccggcuccugcggagcug

SEQ ID NO: 3079623 - RNA, 19 nt, Artificial Sequence
  Description of Artificial Sequence: Synthetic oligonucleotide
cggcgcgugcgaccucagc

SEQ ID NO: 3079624 - RNA, 19 nt, Artificial Sequence
  Description of Artificial Sequence: Synthetic oligonucleotide
ccgagggcucccgcccaug

SEQ ID NO: 3079625 - RNA, 19 nt, Artificial Sequence
  Description of Artificial Sequence: Synthetic oligonucleotide
ccucagcgugguggcccgc

SEQ ID NO: 3079626 - RNA, 19 nt, Artificial Sequence
  Description of Artificial Sequence: Synthetic oligonucleotide
cucguccugcccggcuccu

SEQ ID NO: 3079627 - RNA, 19 nt, Artificial Sequence
  Description of Artificial Sequence: Synthetic oligonucleotide
cgugcgaccucagcguggu

SEQ ID NO: 3079628 - RNA, 19 nt, Artificial Sequence
  Description of Artificial Sequence: Synthetic oligonucleotide
ccgugcgcaggcgcacuca

SEQ ID NO: 3079629 - RNA, 19 nt, Artificial Sequence
  Description of Artificial Sequence: Synthetic oligonucleotide
cgggcccgagggcucccgc

SEQ ID NO: 3079630 - RNA, 19 nt, Artificial Sequence
  Description of Artificial Sequence: Synthetic oligonucleotide
gcccggcuccugcggagcu

SEQ ID NO: 3079631 - RNA, 19 nt, Artificial Sequence
  Description of Artificial Sequence: Synthetic oligonucleotide
gcucggcgcgugcgaccuc

SEQ ID NO: 3079632 - RNA, 19 nt, Artificial Sequence
  Description of Artificial Sequence: Synthetic oligonucleotide
cggcuccugcggagcugcc

SEQ ID NO: 3079633 - RNA, 19 nt, Artificial Sequence
  Description of Artificial Sequence: Synthetic oligonucleotide
gggcagcgucggagcggcc

SEQ ID NO: 3079634 - RNA, 19 nt, Artificial Sequence
  Description of Artificial Sequence: Synthetic oligonucleotide
ccgcggcuggccucguccu

SEQ ID NO: 3079635 - RNA, 19 nt, Artificial Sequence
  Description of Artificial Sequence: Synthetic oligonucleotide
gcccgcggcuggccucguc

SEQ ID NO: 3079636 - RNA, 19 nt, Artificial Sequence
  Description of Artificial Sequence: Synthetic oligonucleotide
cccgagggcucccgcccau

SEQ ID NO: 3079637 - RNA, 19 nt, Artificial Sequence
  Description of Artificial Sequence: Synthetic oligonucleotide
ggcccgcggcuggccucgu

SEQ ID NO: 3079638 - RNA, 19 nt, Artificial Sequence
  Description of Artificial Sequence: Synthetic oligonucleotide
acuaggucacacuuguugc

SEQ ID NO: 3079639 - RNA, 19 nt, Artificial Sequence
  Description of Artificial Sequence: Synthetic oligonucleotide
  modified_base (12)..(12): a, c, u, g, unknown or other
uggacaagcagnguaaagg

SEQ ID NO: 3079640 - RNA, 19 nt, Artificial Sequence
  Description of Artificial Sequence: Synthetic oligonucleotide
uuccucuacaccuugccgg

SEQ ID NO: 3079641 - RNA, 19 nt, Artificial Sequence
  Description of Artificial Sequence: Synthetic oligonucleotide
  modified_base (19)..(19): a, c, u, g, unknown or other
aaucucauggacaagcagn

SEQ ID NO: 3079642 - RNA, 19 nt, Artificial Sequence
  Description of Artificial Sequence: Synthetic oligonucleotide
agcagccacagcuacacac

SEQ ID NO: 3079643 - RNA, 19 nt, Artificial Sequence
  Description of Artificial Sequence: Synthetic oligonucleotide
uugcccacgaguaccaggg

SEQ ID NO: 3079644 - RNA, 19 nt, Artificial Sequence
  Description of Artificial Sequence: Synthetic oligonucleotide
gagaugaggggucaucaag

SEQ ID NO: 3079645 - RNA, 19 nt, Artificial Sequence
  Description of Artificial Sequence: Synthetic oligonucleotide
cugaaucucauggacaagc

SEQ ID NO: 3079646 - RNA, 19 nt, Artificial Sequence
  Description of Artificial Sequence: Synthetic oligonucleotide
aguaccaggggcugcuucg

SEQ ID NO: 3079647 - RNA, 19 nt, Artificial Sequence
  Description of Artificial Sequence: Synthetic oligonucleotide
gaugaggggucaucaagag

SEQ ID NO: 3079648 - RNA, 19 nt, Artificial Sequence
  Description of Artificial Sequence: Synthetic oligonucleotide
uuggcugaggucuucacaa

SEQ ID NO: 3079649 - RNA, 19 nt, Artificial Sequence
  Description of Artificial Sequence: Synthetic oligonucleotide
ugaaucucauggacaagca

SEQ ID NO: 3079650 - RNA, 19 nt, Artificial Sequence
  Description of Artificial Sequence: Synthetic oligonucleotide
augaggggucaucaagagc

SEQ ID NO: 3079651 - RNA, 19 nt, Artificial Sequence
  Description of Artificial Sequence: Synthetic oligonucleotide
  modified_base (16)..(16): a, c, u, g, unknown or other
guggugucgggucuunucc

SEQ ID NO: 3079652 - RNA, 19 nt, Artificial Sequence
  Description of Artificial Sequence: Synthetic oligonucleotide
cacuaggucacacuuguug

SEQ ID NO: 3079653 - RNA, 19 nt, Artificial Sequence
  Description of Artificial Sequence: Synthetic oligonucleotide
uccagguggaccauaucug

SEQ ID NO: 3079654 - RNA, 19 nt, Artificial Sequence
  Description of Artificial Sequence: Synthetic oligonucleotide
  modified_base (7)..(7): a, c, u, g, unknown or other
aagcagnguaaaggcuucc

SEQ ID NO: 3079655 - RNA, 19 nt, Artificial Sequence
  Description of Artificial Sequence: Synthetic oligonucleotide
auugcugcagcagugugag

SEQ ID NO: 3079656 - RNA, 19 nt, Artificial Sequence
  Description of Artificial Sequence: Synthetic oligonucleotide
uccagcagucgucacuagg

SEQ ID NO: 3079657 - RNA, 19 nt, Artificial Sequence
  Description of Artificial Sequence: Synthetic oligonucleotide
  modified_base (15)..(15): a, c, u, g, unknown or other
ucauggacaagcagnguaa

SEQ ID NO: 3079658 - RNA, 19 nt, Artificial Sequence
  Description of Artificial Sequence: Synthetic oligonucleotide
ugugagccaggauugcugc

SEQ ID NO: 3079659 - RNA, 19 nt, Artificial Sequence
  Description of Artificial Sequence: Synthetic oligonucleotide
uugugagccaggauugcug

SEQ ID NO: 3079660 - RNA, 19 nt, Artificial Sequence
  Description of Artificial Sequence: Synthetic oligonucleotide
uccucuacaccuugccggg

SEQ ID NO: 3079661 - RNA, 19 nt, Artificial Sequence
  Description of Artificial Sequence: Synthetic oligonucleotide
uaaaggcuuccucuacacc

SEQ ID NO: 3079662 - RNA, 19 nt, Artificial Sequence
  Description of Artificial Sequence: Synthetic oligonucleotide
  modified_base (11)..(11): a, c, u, g, unknown or other
ggacaagcagnguaaaggc

SEQ ID NO: 3079663 - RNA, 19 nt, Artificial Sequence
  Description of Artificial Sequence: Synthetic oligonucleotide
acuuguugcccacgaguac

SEQ ID NO: 3079664 - RNA, 19 nt, Artificial Sequence
  Description of Artificial Sequence: Synthetic oligonucleotide
acacuuguugcccacgagu

SEQ ID NO: 3079665 - RNA, 19 nt, Artificial Sequence
  Description of Artificial Sequence: Synthetic oligonucleotide
  modified_base (5)..(5): a, c, u, g, unknown or other
ucuunucccugcuuggcuc

SEQ ID NO: 3079666 - RNA, 19 nt, Artificial Sequence
  Description of Artificial Sequence: Synthetic oligonucleotide
cuaggucacacuuguugcc

SEQ ID NO: 3079667 - RNA, 19 nt, Artificial Sequence
  Description of Artificial Sequence: Synthetic oligonucleotide
ggcccucugaaucucaugg

SEQ ID NO: 3079668 - RNA, 19 nt, Artificial Sequence
  Description of Artificial Sequence: Synthetic oligonucleotide
uaucugcugcagcuggucc

SEQ ID NO: 3079669 - RNA, 19 nt, Artificial Sequence
  Description of Artificial Sequence: Synthetic oligonucleotide
guaaaggcuuccucuacac

SEQ ID NO: 3079670 - RNA, 19 nt, Artificial Sequence
  Description of Artificial Sequence: Synthetic oligonucleotide
cugaggucuucacaagggg

SEQ ID NO: 3079671 - RNA, 19 nt, Artificial Sequence
  Description of Artificial Sequence: Synthetic oligonucleotide
  modified_base (18)..(18): a, c, u, g, unknown or other
aucucauggacaagcagng

SEQ ID NO: 3079672 - RNA, 19 nt, Artificial Sequence
  Description of Artificial Sequence: Synthetic oligonucleotide
uucggaugcgggcuccagg

SEQ ID NO: 3079673 - RNA, 19 nt, Artificial Sequence
  Description of Artificial Sequence: Synthetic oligonucleotide
cuuccucuacaccuugccg

SEQ ID NO: 3079674 - RNA, 19 nt, Artificial Sequence
  Description of Artificial Sequence: Synthetic oligonucleotide
cacuugugagccaggauug

SEQ ID NO: 3079675 - RNA, 19 nt, Artificial Sequence
  Description of Artificial Sequence: Synthetic oligonucleotide
gcuacacacggcuuugugg

SEQ ID NO: 3079676 - RNA, 19 nt, Artificial Sequence
  Description of Artificial Sequence: Synthetic oligonucleotide
ugagccaggauugcugcag

SEQ ID NO: 3079677 - RNA, 19 nt, Artificial Sequence
  Description of Artificial Sequence: Synthetic oligonucleotide
  modified_base (3)..(3): a, c, u, g, unknown or other
agnguaaaggcuuccucua

SEQ ID NO: 3079678 - RNA, 19 nt, Artificial Sequence
  Description of Artificial Sequence: Synthetic oligonucleotide
caggcuacagagcagccac

SEQ ID NO: 3079679 - RNA, 19 nt, Artificial Sequence
  Description of Artificial Sequence: Synthetic oligonucleotide
  modified_base (16)..(16): a, c, u, g, unknown or other
cucauggacaagcagngua

SEQ ID NO: 3079680 - RNA, 19 nt, Artificial Sequence
  Description of Artificial Sequence: Synthetic oligonucleotide
agcugguccagagaugagg

SEQ ID NO: 3079681 - RNA, 19 nt, Artificial Sequence
  Description of Artificial Sequence: Synthetic oligonucleotide
agguggaccauaucugcug

SEQ ID NO: 3079682 - RNA, 19 nt, Artificial Sequence
  Description of Artificial Sequence: Synthetic oligonucleotide
ugagcaucuccagcagucg

SEQ ID NO: 3079683 - RNA, 19 nt, Artificial Sequence
  Description of Artificial Sequence: Synthetic oligonucleotide
guugcccacgaguaccagg

SEQ ID NO: 3079684 - RNA, 19 nt, Artificial Sequence
  Description of Artificial Sequence: Synthetic oligonucleotide
  modified_base (2)..(2): a, c, u, g, unknown or other
gnguaaaggcuuccucuac

SEQ ID NO: 3079685 - RNA, 19 nt, Artificial Sequence
  Description of Artificial Sequence: Synthetic oligonucleotide
uggaccauaucugcugcag

SEQ ID NO: 3079686 - RNA, 19 nt, Artificial Sequence
  Description of Artificial Sequence: Synthetic oligonucleotide
ucgucacuaggucacacuu

SEQ ID NO: 3079687 - RNA, 19 nt, Artificial Sequence
  Description of Artificial Sequence: Synthetic oligonucleotide
ugguccagagaugaggggu

SEQ ID NO: 3079688 - RNA, 19 nt, Artificial Sequence
  Description of Artificial Sequence: Synthetic oligonucleotide
agcagucgucacuagguca

SEQ ID NO: 3079689 - RNA, 19 nt, Artificial Sequence
  Description of Artificial Sequence: Synthetic oligonucleotide
ucggaugcgggcuccaggu

SEQ ID NO: 3079690 - RNA, 19 nt, Artificial Sequence
  Description of Artificial Sequence: Synthetic oligonucleotide
cucugaaucucauggacaa

SEQ ID NO: 3079691 - RNA, 19 nt, Artificial Sequence
  Description of Artificial Sequence: Synthetic oligonucleotide
ugcagcagugugagcaucu

SEQ ID NO: 3079692 - RNA, 19 nt, Artificial Sequence
  Description of Artificial Sequence: Synthetic oligonucleotide
gcuuggcucagccacagcc

SEQ ID NO: 3079693 - RNA, 19 nt, Artificial Sequence
  Description of Artificial Sequence: Synthetic oligonucleotide
  modified_base (9)..(9): a, c, u, g, unknown or other
acaagcagnguaaaggcuu

SEQ ID NO: 3079694 - RNA, 19 nt, Artificial Sequence
  Description of Artificial Sequence: Synthetic oligonucleotide
acuugugagccaggauugc

SEQ ID NO: 3079695 - RNA, 19 nt, Artificial Sequence
  Description of Artificial Sequence: Synthetic oligonucleotide
agaugaggggucaucaaga

SEQ ID NO: 3079696 - RNA, 19 nt, Artificial Sequence
  Description of Artificial Sequence: Synthetic oligonucleotide
cuacagagcagccacagcu

SEQ ID NO: 3079697 - RNA, 19 nt, Artificial Sequence
  Description of Artificial Sequence: Synthetic oligonucleotide
  modified_base (12)..(12): a, c, u, g, unknown or other
ugucgggucuunucccugc

SEQ ID NO: 3079698 - RNA, 19 nt, Artificial Sequence
  Description of Artificial Sequence: Synthetic oligonucleotide
  modified_base (8)..(8): a, c, u, g, unknown or other
caagcagnguaaaggcuuc

SEQ ID NO: 3079699 - RNA, 19 nt, Artificial Sequence
  Description of Artificial Sequence: Synthetic oligonucleotide
  modified_base (17)..(17): a, c, u, g, unknown or other
uguggugucgggucuunuc

SEQ ID NO: 3079700 - RNA, 19 nt, Artificial Sequence
  Description of Artificial Sequence: Synthetic oligonucleotide
ucuacaccuugccgggucu

SEQ ID NO: 3079701 - RNA, 19 nt, Artificial Sequence
  Description of Artificial Sequence: Synthetic oligonucleotide
uucaggcuacagagcagcc

SEQ ID NO: 3079702 - RNA, 19 nt, Artificial Sequence
  Description of Artificial Sequence: Synthetic oligonucleotide
ggaugcgggcuccaggugg

SEQ ID NO: 3079703 - RNA, 19 nt, Artificial Sequence
  Description of Artificial Sequence: Synthetic oligonucleotide
gaccauaucugcugcagcu

SEQ ID NO: 3079704 - RNA, 19 nt, Artificial Sequence
  Description of Artificial Sequence: Synthetic oligonucleotide
  modified_base (15)..(15): a, c, u, g, unknown or other
uggugucgggucuunuccc

SEQ ID NO: 3079705 - RNA, 19 nt, Artificial Sequence
  Description of Artificial Sequence: Synthetic oligonucleotide
ggcugaggucuucacaagg

SEQ ID NO: 3079706 - RNA, 19 nt, Artificial Sequence
  Description of Artificial Sequence: Synthetic oligonucleotide
ucugaaucucauggacaag

SEQ ID NO: 3079707 - RNA, 19 nt, Artificial Sequence
  Description of Artificial Sequence: Synthetic oligonucleotide
  modified_base (4)..(4): a, c, u, g, unknown or other
cagnguaaaggcuuccucu

SEQ ID NO: 3079708 - RNA, 19 nt, Artificial Sequence
  Description of Artificial Sequence: Synthetic oligonucleotide
caggauugcugcagcagug

SEQ ID NO: 3079709 - RNA, 19 nt, Artificial Sequence
  Description of Artificial Sequence: Synthetic oligonucleotide
aucuccagcagucgucacu

SEQ ID NO: 3079710 - RNA, 19 nt, Artificial Sequence
  Description of Artificial Sequence: Synthetic oligonucleotide
agcuacacacggcuuugug

SEQ ID NO: 3079711 - RNA, 19 nt, Artificial Sequence
  Description of Artificial Sequence: Synthetic oligonucleotide
acggcuuuguggugucggg

SEQ ID NO: 3079712 - RNA, 19 nt, Artificial Sequence
  Description of Artificial Sequence: Synthetic oligonucleotide
cuacacacggcuuuguggu

SEQ ID NO: 3079713 - RNA, 19 nt, Artificial Sequence
  Description of Artificial Sequence: Synthetic oligonucleotide
ucaggcuacagagcagcca

SEQ ID NO: 3079714 - RNA, 19 nt, Artificial Sequence
  Description of Artificial Sequence: Synthetic oligonucleotide
gauugcugcagcaguguga

SEQ ID NO: 3079715 - RNA, 19 nt, Artificial Sequence
  Description of Artificial Sequence: Synthetic oligonucleotide
gucacuaggucacacuugu

SEQ ID NO: 3079716 - RNA, 19 nt, Artificial Sequence
  Description of Artificial Sequence: Synthetic oligonucleotide
cagccacagcuacacacgg

SEQ ID NO: 3079717 - RNA, 19 nt, Artificial Sequence
  Description of Artificial Sequence: Synthetic oligonucleotide
agucgucacuaggucacac

SEQ ID NO: 3079718 - RNA, 19 nt, Artificial Sequence
  Description of Artificial Sequence: Synthetic oligonucleotide
ucuccagcagucgucacua

SEQ ID NO: 3079719 - RNA, 19 nt, Artificial Sequence
  Description of Artificial Sequence: Synthetic oligonucleotide
gcugaggucuucacaaggg

SEQ ID NO: 3079720 - RNA, 19 nt, Artificial Sequence
  Description of Artificial Sequence: Synthetic oligonucleotide
  modified_base (13)..(13): a, c, u, g, unknown or other
auggacaagcagnguaaag

SEQ ID NO: 3079721 - RNA, 19 nt, Artificial Sequence
  Description of Artificial Sequence: Synthetic oligonucleotide
agcaucuccagcagucguc

SEQ ID NO: 3079722 - RNA, 19 nt, Artificial Sequence
  Description of Artificial Sequence: Synthetic oligonucleotide
gcugguccagagaugaggg

SEQ ID NO: 3079723 - RNA, 19 nt, Artificial Sequence
  Description of Artificial Sequence: Synthetic oligonucleotide
  modified_base (10)..(10): a, c, u, g, unknown or other
gacaagcagnguaaaggcu

SEQ ID NO: 3079724 - RNA, 19 nt, Artificial Sequence
  Description of Artificial Sequence: Synthetic oligonucleotide
cugguccagagaugagggg

SEQ ID NO: 3079725 - RNA, 19 nt, Artificial Sequence
  Description of Artificial Sequence: Synthetic oligonucleotide
  modified_base (4)..(4): a, c, u, g, unknown or other
cuunucccugcuuggcuca

SEQ ID NO: 3079726 - RNA, 19 nt, Artificial Sequence
  Description of Artificial Sequence: Synthetic oligonucleotide
uggcugaggucuucacaag

SEQ ID NO: 3079727 - RNA, 19 nt, Artificial Sequence
  Description of Artificial Sequence: Synthetic oligonucleotide
ccauaucugcugcagcugg

SEQ ID NO: 3079728 - RNA, 19 nt, Artificial Sequence
  Description of Artificial Sequence: Synthetic oligonucleotide
agagaugaggggucaucaa

SEQ ID NO: 3079729 - RNA, 19 nt, Artificial Sequence
  Description of Artificial Sequence: Synthetic oligonucleotide
gguggaccauaucugcugc

SEQ ID NO: 3079730 - RNA, 19 nt, Artificial Sequence
  Description of Artificial Sequence: Synthetic oligonucleotide
  modified_base (8)..(8): a, c, u, g, unknown or other
gggucuunucccugcuugg

SEQ ID NO: 3079731 - RNA, 19 nt, Artificial Sequence
  Description of Artificial Sequence: Synthetic oligonucleotide
uacacacggcuuuguggug

SEQ ID NO: 3079732 - RNA, 19 nt, Artificial Sequence
  Description of Artificial Sequence: Synthetic oligonucleotide
gugagcaucuccagcaguc

SEQ ID NO: 3079733 - RNA, 19 nt, Artificial Sequence
  Description of Artificial Sequence: Synthetic oligonucleotide
acagcuacacacggcuuug

SEQ ID NO: 3079734 - RNA, 19 nt, Artificial Sequence
  Description of Artificial Sequence: Synthetic oligonucleotide
ccagguggaccauaucugc

SEQ ID NO: 3079735 - RNA, 19 nt, Artificial Sequence
  Description of Artificial Sequence: Synthetic oligonucleotide
cuccugggcccucugaauc

SEQ ID NO: 3079736 - RNA, 19 nt, Artificial Sequence
  Description of Artificial Sequence: Synthetic oligonucleotide
cagcagugugagcaucucc

SEQ ID NO: 3079737 - RNA, 19 nt, Artificial Sequence
  Description of Artificial Sequence: Synthetic oligonucleotide
accauaucugcugcagcug

SEQ ID NO: 3079738 - RNA, 19 nt, Artificial Sequence
  Description of Artificial Sequence: Synthetic oligonucleotide
cuccagguggaccauaucu

SEQ ID NO: 3079739 - RNA, 19 nt, Artificial Sequence
  Description of Artificial Sequence: Synthetic oligonucleotide
  modified_base (6)..(6): a, c, u, g, unknown or other
agcagnguaaaggcuuccu

SEQ ID NO: 3079740 - RNA, 19 nt, Artificial Sequence
  Description of Artificial Sequence: Synthetic oligonucleotide
ugcccacgaguaccagggg

SEQ ID NO: 3079741 - RNA, 19 nt, Artificial Sequence
  Description of Artificial Sequence: Synthetic oligonucleotide
cacuuguugcccacgagua

SEQ ID NO: 3079742 - RNA, 19 nt, Artificial Sequence
  Description of Artificial Sequence: Synthetic oligonucleotide
  modified_base (7)..(7): a, c, u, g, unknown or other
ggucuunucccugcuuggc

SEQ ID NO: 3079743 - RNA, 19 nt, Artificial Sequence
  Description of Artificial Sequence: Synthetic oligonucleotide
cucuacaccuugccggguc

SEQ ID NO: 3079744 - RNA, 19 nt, Artificial Sequence
  Description of Artificial Sequence: Synthetic oligonucleotide
uggcucagccacagccucc

SEQ ID NO: 3079745 - RNA, 19 nt, Artificial Sequence
  Description of Artificial Sequence: Synthetic oligonucleotide
agccacagcuacacacggc

SEQ ID NO: 3079746 - RNA, 19 nt, Artificial Sequence
  Description of Artificial Sequence: Synthetic oligonucleotide
gcagccacagcuacacacg

SEQ ID NO: 3079747 - RNA, 19 nt, Artificial Sequence
  Description of Artificial Sequence: Synthetic oligonucleotide
acaccuugccgggucuugg

SEQ ID NO: 3079748 - RNA, 19 nt, Artificial Sequence
  Description of Artificial Sequence: Synthetic oligonucleotide
acacacggcuuuguggugu

SEQ ID NO: 3079749 - RNA, 19 nt, Artificial Sequence
  Description of Artificial Sequence: Synthetic oligonucleotide
caggggcugcuucggaugc

SEQ ID NO: 3079750 - RNA, 19 nt, Artificial Sequence
  Description of Artificial Sequence: Synthetic oligonucleotide
  modified_base (3)..(3): a, c, u, g, unknown or other
uunucccugcuuggcucag

SEQ ID NO: 3079751 - RNA, 19 nt, Artificial Sequence
  Description of Artificial Sequence: Synthetic oligonucleotide
aggauugcugcagcagugu

SEQ ID NO: 3079752 - RNA, 19 nt, Artificial Sequence
  Description of Artificial Sequence: Synthetic oligonucleotide
cagagaugaggggucauca

SEQ ID NO: 3079753 - RNA, 19 nt, Artificial Sequence
  Description of Artificial Sequence: Synthetic oligonucleotide
  modified_base (5)..(5): a, c, u, g, unknown or other
gcagnguaaaggcuuccuc

SEQ ID NO: 3079754 - RNA, 19 nt, Artificial Sequence
  Description of Artificial Sequence: Synthetic oligonucleotide
  modified_base (17)..(17): a, c, u, g, unknown or other
ucucauggacaagcagngu

SEQ ID NO: 3079755 - RNA, 19 nt, Artificial Sequence
  Description of Artificial Sequence: Synthetic oligonucleotide
  modified_base (10)..(10): a, c, u, g, unknown or other
ucgggucuunucccugcuu

SEQ ID NO: 3079756 - RNA, 19 nt, Artificial Sequence
  Description of Artificial Sequence: Synthetic oligonucleotide
ggaccauaucugcugcagc

SEQ ID NO: 3079757 - RNA, 19 nt, Artificial Sequence
  Description of Artificial Sequence: Synthetic oligonucleotide
ucccacuugugagccagga

SEQ ID NO: 3079758 - RNA, 19 nt, Artificial Sequence
  Description of Artificial Sequence: Synthetic oligonucleotide
ggauugcugcagcagugug

SEQ ID NO: 3079759 - RNA, 19 nt, Artificial Sequence
  Description of Artificial Sequence: Synthetic oligonucleotide
uacaccuugccgggucuug

SEQ ID NO: 3079760 - RNA, 19 nt, Artificial Sequence
  Description of Artificial Sequence: Synthetic oligonucleotide
guaccaggggcugcuucgg

SEQ ID NO: 3079761 - RNA, 19 nt, Artificial Sequence
  Description of Artificial Sequence: Synthetic oligonucleotide
aaggcuuccucuacaccuu

SEQ ID NO: 3079762 - RNA, 19 nt, Artificial Sequence
  Description of Artificial Sequence: Synthetic oligonucleotide
cccucugaaucucauggac

SEQ ID NO: 3079763 - RNA, 19 nt, Artificial Sequence
  Description of Artificial Sequence: Synthetic oligonucleotide
caccuugccgggucuuggc

SEQ ID NO: 3079764 - RNA, 19 nt, Artificial Sequence
  Description of Artificial Sequence: Synthetic oligonucleotide
ggcuuuguggugucggguc

SEQ ID NO: 3079765 - RNA, 19 nt, Artificial Sequence
  Description of Artificial Sequence: Synthetic oligonucleotide
agccaggauugcugcagca

SEQ ID NO: 3079766 - RNA, 19 nt, Artificial Sequence
  Description of Artificial Sequence: Synthetic oligonucleotide
ggcuacagagcagccacag

SEQ ID NO: 3079767 - RNA, 19 nt, Artificial Sequence
  Description of Artificial Sequence: Synthetic oligonucleotide
cagcagucgucacuagguc

SEQ ID NO: 3079768 - RNA, 19 nt, Artificial Sequence
  Description of Artificial Sequence: Synthetic oligonucleotide
  modified_base (14)..(14): a, c, u, g, unknown or other
cauggacaagcagnguaaa

SEQ ID NO: 3079769 - RNA, 19 nt, Artificial Sequence
  Description of Artificial Sequence: Synthetic oligonucleotide
gcagucgucacuaggucac

SEQ ID NO: 3079770 - RNA, 19 nt, Artificial Sequence
  Description of Artificial Sequence: Synthetic oligonucleotide
uguugcccacgaguaccag

SEQ ID NO: 3079771 - RNA, 19 nt, Artificial Sequence
  Description of Artificial Sequence: Synthetic oligonucleotide
accaggggcugcuucggau

SEQ ID NO: 3079772 - RNA, 19 nt, Artificial Sequence
  Description of Artificial Sequence: Synthetic oligonucleotide
acgaguaccaggggcugcu

SEQ ID NO: 3079773 - RNA, 19 nt, Artificial Sequence
  Description of Artificial Sequence: Synthetic oligonucleotide
ggggcucccacuugugagc

SEQ ID NO: 3079774 - RNA, 19 nt, Artificial Sequence
  Description of Artificial Sequence: Synthetic oligonucleotide
  modified_base (6)..(6): a, c, u, g, unknown or other
gucuunucccugcuuggcu

SEQ ID NO: 3079775 - RNA, 19 nt, Artificial Sequence
  Description of Artificial Sequence: Synthetic oligonucleotide
ugcuuggcucagccacagc

SEQ ID NO: 3079776 - RNA, 19 nt, Artificial Sequence
  Description of Artificial Sequence: Synthetic oligonucleotide
ugggcccucugaaucucau

SEQ ID NO: 3079777 - RNA, 19 nt, Artificial Sequence
  Description of Artificial Sequence: Synthetic oligonucleotide
gcccacgaguaccaggggc

SEQ ID NO: 3079778 - RNA, 19 nt, Artificial Sequence
  Description of Artificial Sequence: Synthetic oligonucleotide
  modified_base (19)..(19): a, c, u, g, unknown or other
uuuguggugucgggucuun

SEQ ID NO: 3079779 - RNA, 19 nt, Artificial Sequence
  Description of Artificial Sequence: Synthetic oligonucleotide
gaugcgggcuccaggugga

SEQ ID NO: 3079780 - RNA, 19 nt, Artificial Sequence
  Description of Artificial Sequence: Synthetic oligonucleotide
ggcugcuucggaugcgggc

SEQ ID NO: 3079781 - RNA, 19 nt, Artificial Sequence
  Description of Artificial Sequence: Synthetic oligonucleotide
ucacuaggucacacuuguu

SEQ ID NO: 3079782 - RNA, 19 nt, Artificial Sequence
  Description of Artificial Sequence: Synthetic oligonucleotide
  modified_base (2)..(2): a, c, u, g, unknown or other
unucccugcuuggcucagc

SEQ ID NO: 3079783 - RNA, 19 nt, Artificial Sequence
  Description of Artificial Sequence: Synthetic oligonucleotide
ugcuucggaugcgggcucc

SEQ ID NO: 3079784 - RNA, 19 nt, Artificial Sequence
  Description of Artificial Sequence: Synthetic oligonucleotide
cuuggcucagccacagccu

SEQ ID NO: 3079785 - RNA, 19 nt, Artificial Sequence
  Description of Artificial Sequence: Synthetic oligonucleotide
gagcaucuccagcagucgu

SEQ ID NO: 3079786 - RNA, 19 nt, Artificial Sequence
  Description of Artificial Sequence: Synthetic oligonucleotide
gcucccacuugugagccag

SEQ ID NO: 3079787 - RNA, 19 nt, Artificial Sequence
  Description of Artificial Sequence: Synthetic oligonucleotide
cucccacuugugagccagg

SEQ ID NO: 3079788 - RNA, 19 nt, Artificial Sequence
  Description of Artificial Sequence: Synthetic oligonucleotide
ucccugcuuggcucagcca

SEQ ID NO: 3079789 - RNA, 19 nt, Artificial Sequence
  Description of Artificial Sequence: Synthetic oligonucleotide
gccacagcuacacacggcu

SEQ ID NO: 3079790 - RNA, 19 nt, Artificial Sequence
  Description of Artificial Sequence: Synthetic oligonucleotide
guggaccauaucugcugca

SEQ ID NO: 3079791 - RNA, 19 nt, Artificial Sequence
  Description of Artificial Sequence: Synthetic oligonucleotide
cacacggcuuugugguguc

SEQ ID NO: 3079792 - RNA, 19 nt, Artificial Sequence
  Description of Artificial Sequence: Synthetic oligonucleotide
cacgaguaccaggggcugc

SEQ ID NO: 3079793 - RNA, 19 nt, Artificial Sequence
  Description of Artificial Sequence: Synthetic oligonucleotide
caucuccagcagucgucac

SEQ ID NO: 3079794 - RNA, 19 nt, Artificial Sequence
  Description of Artificial Sequence: Synthetic oligonucleotide
  modified_base (14)..(14): a, c, u, g, unknown or other
ggugucgggucuunucccu

SEQ ID NO: 3079795 - RNA, 19 nt, Artificial Sequence
  Description of Artificial Sequence: Synthetic oligonucleotide
  modified_base (9)..(9): a, c, u, g, unknown or other
cgggucuunucccugcuug

SEQ ID NO: 3079796 - RNA, 19 nt, Artificial Sequence
  Description of Artificial Sequence: Synthetic oligonucleotide
gucgucacuaggucacacu

SEQ ID NO: 3079797 - RNA, 19 nt, Artificial Sequence
  Description of Artificial Sequence: Synthetic oligonucleotide
cagcugguccagagaugag

SEQ ID NO: 3079798 - RNA, 19 nt, Artificial Sequence
  Description of Artificial Sequence: Synthetic oligonucleotide
  modified_base (13)..(13): a, c, u, g, unknown or other
gugucgggucuunucccug

SEQ ID NO: 3079799 - RNA, 19 nt, Artificial Sequence
  Description of Artificial Sequence: Synthetic oligonucleotide
ggggcugcuucggaugcgg

SEQ ID NO: 3079800 - RNA, 19 nt, Artificial Sequence
  Description of Artificial Sequence: Synthetic oligonucleotide
cugcagcugguccagagau

SEQ ID NO: 3079801 - RNA, 19 nt, Artificial Sequence
  Description of Artificial Sequence: Synthetic oligonucleotide
gugagccaggauugcugca

SEQ ID NO: 3079802 - RNA, 19 nt, Artificial Sequence
  Description of Artificial Sequence: Synthetic oligonucleotide
cuccagcagucgucacuag

SEQ ID NO: 3079803 - RNA, 19 nt, Artificial Sequence
  Description of Artificial Sequence: Synthetic oligonucleotide
ccaggggcugcuucggaug

SEQ ID NO: 3079804 - RNA, 19 nt, Artificial Sequence
  Description of Artificial Sequence: Synthetic oligonucleotide
cuucggaugcgggcuccag

SEQ ID NO: 3079805 - RNA, 19 nt, Artificial Sequence
  Description of Artificial Sequence: Synthetic oligonucleotide
acacggcuuuguggugucg

SEQ ID NO: 3079806 - RNA, 19 nt, Artificial Sequence
  Description of Artificial Sequence: Synthetic oligonucleotide
uugcugcagcagugugagc

SEQ ID NO: 3079807 - RNA, 19 nt, Artificial Sequence
  Description of Artificial Sequence: Synthetic oligonucleotide
uccagagaugaggggucau

SEQ ID NO: 3079808 - RNA, 19 nt, Artificial Sequence
  Description of Artificial Sequence: Synthetic oligonucleotide
gguccagagaugagggguc

SEQ ID NO: 3079809 - RNA, 19 nt, Artificial Sequence
  Description of Artificial Sequence: Synthetic oligonucleotide
cagccacagccuccugggc

SEQ ID NO: 3079810 - RNA, 19 nt, Artificial Sequence
  Description of Artificial Sequence: Synthetic oligonucleotide
cauaucugcugcagcuggu

SEQ ID NO: 3079811 - RNA, 19 nt, Artificial Sequence
  Description of Artificial Sequence: Synthetic oligonucleotide
gcgggcuccagguggacca

SEQ ID NO: 3079812 - RNA, 19 nt, Artificial Sequence
  Description of Artificial Sequence: Synthetic oligonucleotide
cagguggaccauaucugcu

SEQ ID NO: 3079813 - RNA, 19 nt, Artificial Sequence
  Description of Artificial Sequence: Synthetic oligonucleotide
agccuccugggcccucuga

SEQ ID NO: 3079814 - RNA, 19 nt, Artificial Sequence
  Description of Artificial Sequence: Synthetic oligonucleotide
cuugugagccaggauugcu

SEQ ID NO: 3079815 - RNA, 19 nt, Artificial Sequence
  Description of Artificial Sequence: Synthetic oligonucleotide
cugcuucggaugcgggcuc

SEQ ID NO: 3079816 - RNA, 19 nt, Artificial Sequence
  Description of Artificial Sequence: Synthetic oligonucleotide
cacagcuacacacggcuuu

SEQ ID NO: 3079817 - RNA, 19 nt, Artificial Sequence
  Description of Artificial Sequence: Synthetic oligonucleotide
guccagagaugagggguca

SEQ ID NO: 3079818 - RNA, 19 nt, Artificial Sequence
  Description of Artificial Sequence: Synthetic oligonucleotide
cgucacuaggucacacuug

SEQ ID NO: 3079819 - RNA, 19 nt, Artificial Sequence
  Description of Artificial Sequence: Synthetic oligonucleotide
ccagcagucgucacuaggu

SEQ ID NO: 3079820 - RNA, 19 nt, Artificial Sequence
  Description of Artificial Sequence: Synthetic oligonucleotide
  modified_base (18)..(18): a, c, u, g, unknown or other
uuguggugucgggucuunu

SEQ ID NO: 3079821 - RNA, 19 nt, Artificial Sequence
  Description of Artificial Sequence: Synthetic oligonucleotide
gggcucccacuugugagcc

SEQ ID NO: 3079822 - RNA, 19 nt, Artificial Sequence
  Description of Artificial Sequence: Synthetic oligonucleotide
ccacuugugagccaggauu

SEQ ID NO: 3079823 - RNA, 19 nt, Artificial Sequence
  Description of Artificial Sequence: Synthetic oligonucleotide
acagccuccugggcccucu

SEQ ID NO: 3079824 - RNA, 19 nt, Artificial Sequence
  Description of Artificial Sequence: Synthetic oligonucleotide
gggcccucugaaucucaug

SEQ ID NO: 3079825 - RNA, 19 nt, Artificial Sequence
  Description of Artificial Sequence: Synthetic oligonucleotide
gcccucugaaucucaugga

SEQ ID NO: 3079826 - RNA, 19 nt, Artificial Sequence
  Description of Artificial Sequence: Synthetic oligonucleotide
augcgggcuccagguggac

SEQ ID NO: 3079827 - RNA, 19 nt, Artificial Sequence
  Description of Artificial Sequence: Synthetic oligonucleotide
cugggcccucugaaucuca

SEQ ID NO: 3079828 - RNA, 19 nt, Artificial Sequence
  Description of Artificial Sequence: Synthetic oligonucleotide
ccagagaugaggggucauc

SEQ ID NO: 3079829 - RNA, 19 nt, Artificial Sequence
  Description of Artificial Sequence: Synthetic oligonucleotide
aggcuacagagcagccaca

SEQ ID NO: 3079830 - RNA, 19 nt, Artificial Sequence
  Description of Artificial Sequence: Synthetic oligonucleotide
gcugcuucggaugcgggcu

SEQ ID NO: 3079831 - RNA, 19 nt, Artificial Sequence
  Description of Artificial Sequence: Synthetic oligonucleotide
gcuuuguggugucgggucu

SEQ ID NO: 3079832 - RNA, 19 nt, Artificial Sequence
  Description of Artificial Sequence: Synthetic oligonucleotide
  modified_base (11)..(11): a, c, u, g, unknown or other
gucgggucuunucccugcu

SEQ ID NO: 3079833 - RNA, 19 nt, Artificial Sequence
  Description of Artificial Sequence: Synthetic oligonucleotide
ccaggauugcugcagcagu

SEQ ID NO: 3079834 - RNA, 19 nt, Artificial Sequence
  Description of Artificial Sequence: Synthetic oligonucleotide
cccacgaguaccaggggcu

SEQ ID NO: 3079835 - RNA, 19 nt, Artificial Sequence
  Description of Artificial Sequence: Synthetic oligonucleotide
gccuccugggcccucugaa

SEQ ID NO: 3079836 - RNA, 19 nt, Artificial Sequence
  Description of Artificial Sequence: Synthetic oligonucleotide
ccugcuuggcucagccaca

SEQ ID NO: 3079837 - RNA, 19 nt, Artificial Sequence
  Description of Artificial Sequence: Synthetic oligonucleotide
gggcugcuucggaugcggg

SEQ ID NO: 3079838 - RNA, 19 nt, Artificial Sequence
  Description of Artificial Sequence: Synthetic oligonucleotide
ccacgaguaccaggggcug

SEQ ID NO: 3079839 - RNA, 19 nt, Artificial Sequence
  Description of Artificial Sequence: Synthetic oligonucleotide
cagucgucacuaggucaca

SEQ ID NO: 3079840 - RNA, 19 nt, Artificial Sequence
  Description of Artificial Sequence: Synthetic oligonucleotide
cagccuccugggcccucug

SEQ ID NO: 3079841 - RNA, 19 nt, Artificial Sequence
  Description of Artificial Sequence: Synthetic oligonucleotide
cuuuguggugucgggucuu

SEQ ID NO: 3079842 - RNA, 19 nt, Artificial Sequence
  Description of Artificial Sequence: Synthetic oligonucleotide
ggcucagccacagccuccu

SEQ ID NO: 3079843 - RNA, 19 nt, Artificial Sequence
  Description of Artificial Sequence: Synthetic oligonucleotide
ggcucccacuugugagcca

SEQ ID NO: 3079844 - RNA, 19 nt, Artificial Sequence
  Description of Artificial Sequence: Synthetic oligonucleotide
ggcuccagguggaccauau

SEQ ID NO: 3079845 - RNA, 19 nt, Artificial Sequence
  Description of Artificial Sequence: Synthetic oligonucleotide
cagcuacacacggcuuugu

SEQ ID NO: 3079846 - RNA, 19 nt, Artificial Sequence
  Description of Artificial Sequence: Synthetic oligonucleotide
gcuucggaugcgggcucca

SEQ ID NO: 3079847 - RNA, 19 nt, Artificial Sequence
  Description of Artificial Sequence: Synthetic oligonucleotide
cggaugcgggcuccaggug

SEQ ID NO: 3079848 - RNA, 19 nt, Artificial Sequence
  Description of Artificial Sequence: Synthetic oligonucleotide
cuacaccuugccgggucuu

SEQ ID NO: 3079849 - RNA, 19 nt, Artificial Sequence
  Description of Artificial Sequence: Synthetic oligonucleotide
ccuccugggcccucugaau

SEQ ID NO: 3079850 - RNA, 19 nt, Artificial Sequence
  Description of Artificial Sequence: Synthetic oligonucleotide
ccacagcuacacacggcuu

SEQ ID NO: 3079851 - RNA, 19 nt, Artificial Sequence
  Description of Artificial Sequence: Synthetic oligonucleotide
gggcuccagguggaccaua

SEQ ID NO: 3079852 - RNA, 19 nt, Artificial Sequence
  Description of Artificial Sequence: Synthetic oligonucleotide
cggcuuuguggugucgggu

SEQ ID NO: 3079853 - RNA, 19 nt, Artificial Sequence
  Description of Artificial Sequence: Synthetic oligonucleotide
ccucuacaccuugccgggu

SEQ ID NO: 3079854 - RNA, 19 nt, Artificial Sequence
  Description of Artificial Sequence: Synthetic oligonucleotide
cgaguaccaggggcugcuu

SEQ ID NO: 3079855 - RNA, 19 nt, Artificial Sequence
  Description of Artificial Sequence: Synthetic oligonucleotide
  modified_base (1)..(1): a, c, u, g, unknown or other
nguaaaggcuuccucuaca

SEQ ID NO: 3079856 - RNA, 19 nt, Artificial Sequence
  Description of Artificial Sequence: Synthetic oligonucleotide
acuaauaucaggaagaugg

SEQ ID NO: 3079857 - RNA, 19 nt, Artificial Sequence
  Description of Artificial Sequence: Synthetic oligonucleotide
aauuguaugguucaaggag

SEQ ID NO: 3079858 - RNA, 19 nt, Artificial Sequence
  Description of Artificial Sequence: Synthetic oligonucleotide
aaucgaaguauacaggcag

SEQ ID NO: 3079859 - RNA, 19 nt, Artificial Sequence
  Description of Artificial Sequence: Synthetic oligonucleotide
agagcaacuaauuguaugg

SEQ ID NO: 3079860 - RNA, 19 nt, Artificial Sequence
  Description of Artificial Sequence: Synthetic oligonucleotide
ugguucaaggagaugaugg

SEQ ID NO: 3079861 - RNA, 19 nt, Artificial Sequence
  Description of Artificial Sequence: Synthetic oligonucleotide
gaaguauacaggcagacac

SEQ ID NO: 3079862 - RNA, 19 nt, Artificial Sequence
  Description of Artificial Sequence: Synthetic oligonucleotide
cuaauuguaugguucaagg

SEQ ID NO: 3079863 - RNA, 19 nt, Artificial Sequence
  Description of Artificial Sequence: Synthetic oligonucleotide
cacaguaccagauucaccc

SEQ ID NO: 3079864 - RNA, 19 nt, Artificial Sequence
  Description of Artificial Sequence: Synthetic oligonucleotide
caaaucgaaguauacaggc

SEQ ID NO: 3079865 - RNA, 19 nt, Artificial Sequence
  Description of Artificial Sequence: Synthetic oligonucleotide
accagauucacccaagaag

SEQ ID NO: 3079866 - RNA, 19 nt, Artificial Sequence
  Description of Artificial Sequence: Synthetic oligonucleotide
aguaaaacugcacagcagu

SEQ ID NO: 3079867 - RNA, 19 nt, Artificial Sequence
  Description of Artificial Sequence: Synthetic oligonucleotide
uguagguuggaguaaaacu

SEQ ID NO: 3079868 - RNA, 19 nt, Artificial Sequence
  Description of Artificial Sequence: Synthetic oligonucleotide
gagaacuggugccaaaucg

SEQ ID NO: 3079869 - RNA, 19 nt, Artificial Sequence
  Description of Artificial Sequence: Synthetic oligonucleotide
uggaauugcagagagaacu

SEQ ID NO: 3079870 - RNA, 19 nt, Artificial Sequence
  Description of Artificial Sequence: Synthetic oligonucleotide
auuucugggcuucagagca

SEQ ID NO: 3079871 - RNA, 19 nt, Artificial Sequence
  Description of Artificial Sequence: Synthetic oligonucleotide
gaauccucgaugcagcugc

SEQ ID NO: 3079872 - RNA, 19 nt, Artificial Sequence
  Description of Artificial Sequence: Synthetic oligonucleotide
uuggaguaaaacugcacag

SEQ ID NO: 3079873 - RNA, 19 nt, Artificial Sequence
  Description of Artificial Sequence: Synthetic oligonucleotide
augauggaauugcagagag

SEQ ID NO: 3079874 - RNA, 19 nt, Artificial Sequence
  Description of Artificial Sequence: Synthetic oligonucleotide
agacacuaauaucaggaag

SEQ ID NO: 3079875 - RNA, 19 nt, Artificial Sequence
  Description of Artificial Sequence: Synthetic oligonucleotide
aauaucaggaagauggcaa

SEQ ID NO: 3079876 - RNA, 19 nt, Artificial Sequence
  Description of Artificial Sequence: Synthetic oligonucleotide
acuggugccaaaucgaagu

SEQ ID NO: 3079877 - RNA, 19 nt, Artificial Sequence
  Description of Artificial Sequence: Synthetic oligonucleotide
uguccaugaggauuucugg

SEQ ID NO: 3079878 - RNA, 19 nt, Artificial Sequence
  Description of Artificial Sequence: Synthetic oligonucleotide
guagguuggaguaaaacug

SEQ ID NO: 3079879 - RNA, 19 nt, Artificial Sequence
  Description of Artificial Sequence: Synthetic oligonucleotide
gagaugauggaauugcaga

SEQ ID NO: 3079880 - RNA, 19 nt, Artificial Sequence
  Description of Artificial Sequence: Synthetic oligonucleotide
uauacaggcagacacuaau

SEQ ID NO: 3079881 - RNA, 19 nt, Artificial Sequence
  Description of Artificial Sequence: Synthetic oligonucleotide
uucagagcaacuaauugua

SEQ ID NO: 3079882 - RNA, 19 nt, Artificial Sequence
  Description of Artificial Sequence: Synthetic oligonucleotide
uagguuggaguaaaacugc

SEQ ID NO: 3079883 - RNA, 19 nt, Artificial Sequence
  Description of Artificial Sequence: Synthetic oligonucleotide
gacacuaauaucaggaaga

SEQ ID NO: 3079884 - RNA, 19 nt, Artificial Sequence
  Description of Artificial Sequence: Synthetic oligonucleotide
uaauuguaugguucaagga

SEQ ID NO: 3079885 - RNA, 19 nt, Artificial Sequence
  Description of Artificial Sequence: Synthetic oligonucleotide
uugcagagagaacuggugc

SEQ ID NO: 3079886 - RNA, 19 nt, Artificial Sequence
  Description of Artificial Sequence: Synthetic oligonucleotide
caggcagacacuaauauca

SEQ ID NO: 3079887 - RNA, 19 nt, Artificial Sequence
  Description of Artificial Sequence: Synthetic oligonucleotide
gguuucagcguuuuguagg

SEQ ID NO: 3079888 - RNA, 19 nt, Artificial Sequence
  Description of Artificial Sequence: Synthetic oligonucleotide
aauucggagcccuauggaa

SEQ ID NO: 3079889 - RNA, 19 nt, Artificial Sequence
  Description of Artificial Sequence: Synthetic oligonucleotide
acaccacaguaccagauuc

SEQ ID NO: 3079890 - RNA, 19 nt, Artificial Sequence
  Description of Artificial Sequence: Synthetic oligonucleotide
gccaaaucgaaguauacag

SEQ ID NO: 3079891 - RNA, 19 nt, Artificial Sequence
  Description of Artificial Sequence: Synthetic oligonucleotide
ucagcguuuuguagguugg

SEQ ID NO: 3079892 - RNA, 19 nt, Artificial Sequence
  Description of Artificial Sequence: Synthetic oligonucleotide
uucaaggagaugauggaau

SEQ ID NO: 3079893 - RNA, 19 nt, Artificial Sequence
  Description of Artificial Sequence: Synthetic oligonucleotide
ccaagaagagguuucagcg

SEQ ID NO: 3079894 - RNA, 19 nt, Artificial Sequence
  Description of Artificial Sequence: Synthetic oligonucleotide
guuggaguaaaacugcaca

SEQ ID NO: 3079895 - RNA, 19 nt, Artificial Sequence
  Description of Artificial Sequence: Synthetic oligonucleotide
uccaugaggauuucugggc

SEQ ID NO: 3079896 - RNA, 19 nt, Artificial Sequence
  Description of Artificial Sequence: Synthetic oligonucleotide
uucagcguuuuguagguug

SEQ ID NO: 3079897 - RNA, 19 nt, Artificial Sequence
  Description of Artificial Sequence: Synthetic oligonucleotide
aagaagagguuucagcguu

SEQ ID NO: 3079898 - RNA, 19 nt, Artificial Sequence
  Description of Artificial Sequence: Synthetic oligonucleotide
augcagcugcuguagaccc

SEQ ID NO: 3079899 - RNA, 19 nt, Artificial Sequence
  Description of Artificial Sequence: Synthetic oligonucleotide
guaugguucaaggagauga

SEQ ID NO: 3079900 - RNA, 19 nt, Artificial Sequence
  Description of Artificial Sequence: Synthetic oligonucleotide
ugcacagcaguuccagggg

SEQ ID NO: 3079901 - RNA, 19 nt, Artificial Sequence
  Description of Artificial Sequence: Synthetic oligonucleotide
cuaauaucaggaagauggc

SEQ ID NO: 3079902 - RNA, 19 nt, Artificial Sequence
  Description of Artificial Sequence: Synthetic oligonucleotide
ugcagagagaacuggugcc

SEQ ID NO: 3079903 - RNA, 19 nt, Artificial Sequence
  Description of Artificial Sequence: Synthetic oligonucleotide
acaggcagacacuaauauc

SEQ ID NO: 3079904 - RNA, 19 nt, Artificial Sequence
  Description of Artificial Sequence: Synthetic oligonucleotide
gauggcaauagcugagaug

SEQ ID NO: 3079905 - RNA, 19 nt, Artificial Sequence
  Description of Artificial Sequence: Synthetic oligonucleotide
gauuucugggcuucagagc

SEQ ID NO: 3079906 - RNA, 19 nt, Artificial Sequence
  Description of Artificial Sequence: Synthetic oligonucleotide
ugcuguagacccagaagag

SEQ ID NO: 3079907 - RNA, 19 nt, Artificial Sequence
  Description of Artificial Sequence: Synthetic oligonucleotide
cugcacagcaguuccaggg

SEQ ID NO: 3079908 - RNA, 19 nt, Artificial Sequence
  Description of Artificial Sequence: Synthetic oligonucleotide
agauggccaaagcaauucg

SEQ ID NO: 3079909 - RNA, 19 nt, Artificial Sequence
  Description of Artificial Sequence: Synthetic oligonucleotide
gaauugcagagagaacugg

SEQ ID NO: 3079910 - RNA, 19 nt, Artificial Sequence
  Description of Artificial Sequence: Synthetic oligonucleotide
guccaugaggauuucuggg

SEQ ID NO: 3079911 - RNA, 19 nt, Artificial Sequence
  Description of Artificial Sequence: Synthetic oligonucleotide
agauucacccaagaagagg

SEQ ID NO: 3079912 - RNA, 19 nt, Artificial Sequence
  Description of Artificial Sequence: Synthetic oligonucleotide
uguagacccagaagaggag

SEQ ID NO: 3079913 - RNA, 19 nt, Artificial Sequence
  Description of Artificial Sequence: Synthetic oligonucleotide
uacaggcagacacuaauau

SEQ ID NO: 3079914 - RNA, 19 nt, Artificial Sequence
  Description of Artificial Sequence: Synthetic oligonucleotide
acuaauuguaugguucaag

SEQ ID NO: 3079915 - RNA, 19 nt, Artificial Sequence
  Description of Artificial Sequence: Synthetic oligonucleotide
gauggccaaagcaauucgg

SEQ ID NO: 3079916 - RNA, 19 nt, Artificial Sequence
  Description of Artificial Sequence: Synthetic oligonucleotide
aucaaggccagacaccaca

SEQ ID NO: 3079917 - RNA, 19 nt, Artificial Sequence
  Description of Artificial Sequence: Synthetic oligonucleotide
gaagauggcaauagcugag

SEQ ID NO: 3079918 - RNA, 19 nt, Artificial Sequence
  Description of Artificial Sequence: Synthetic oligonucleotide
uggaguaaaacugcacagc

SEQ ID NO: 3079919 - RNA, 19 nt, Artificial Sequence
  Description of Artificial Sequence: Synthetic oligonucleotide
uaauaucaggaagauggca

SEQ ID NO: 3079920 - RNA, 19 nt, Artificial Sequence
  Description of Artificial Sequence: Synthetic oligonucleotide
uauggaaccucugugggaa

SEQ ID NO: 3079921 - RNA, 19 nt, Artificial Sequence
  Description of Artificial Sequence: Synthetic oligonucleotide
ggauuucugggcuucagag

SEQ ID NO: 3079922 - RNA, 19 nt, Artificial Sequence
  Description of Artificial Sequence: Synthetic oligonucleotide
ugggaauccucgaugcagc

SEQ ID NO: 3079923 - RNA, 19 nt, Artificial Sequence
  Description of Artificial Sequence: Synthetic oligonucleotide
cagagcaacuaauuguaug

SEQ ID NO: 3079924 - RNA, 19 nt, Artificial Sequence
  Description of Artificial Sequence: Synthetic oligonucleotide
agagguuucagcguuuugu

SEQ ID NO: 3079925 - RNA, 19 nt, Artificial Sequence
  Description of Artificial Sequence: Synthetic oligonucleotide
aaggccagacaccacagua

SEQ ID NO: 3079926 - RNA, 19 nt, Artificial Sequence
  Description of Artificial Sequence: Synthetic oligonucleotide
gagcaucaaggccagacac

SEQ ID NO: 3079927 - RNA, 19 nt, Artificial Sequence
  Description of Artificial Sequence: Synthetic oligonucleotide
acgaccuggagcaucaagg

SEQ ID NO: 3079928 - RNA, 19 nt, Artificial Sequence
  Description of Artificial Sequence: Synthetic oligonucleotide
aucaggaagauggcaauag

SEQ ID NO: 3079929 - RNA, 19 nt, Artificial Sequence
  Description of Artificial Sequence: Synthetic oligonucleotide
uggccaaagcaauucggag

SEQ ID NO: 3079930 - RNA, 19 nt, Artificial Sequence
  Description of Artificial Sequence: Synthetic oligonucleotide
ucaaggccagacaccacag

SEQ ID NO: 3079931 - RNA, 19 nt, Artificial Sequence
  Description of Artificial Sequence: Synthetic oligonucleotide
auuguaugguucaaggaga

SEQ ID NO: 3079932 - RNA, 19 nt, Artificial Sequence
  Description of Artificial Sequence: Synthetic oligonucleotide
aauugcagagagaacuggu

SEQ ID NO: 3079933 - RNA, 19 nt, Artificial Sequence
  Description of Artificial Sequence: Synthetic oligonucleotide
aaaucgaaguauacaggca

SEQ ID NO: 3079934 - RNA, 19 nt, Artificial Sequence
  Description of Artificial Sequence: Synthetic oligonucleotide
uucggagcccuauggaacc

SEQ ID NO: 3079935 - RNA, 19 nt, Artificial Sequence
  Description of Artificial Sequence: Synthetic oligonucleotide
auagcugagauggccaaag

SEQ ID NO: 3079936 - RNA, 19 nt, Artificial Sequence
  Description of Artificial Sequence: Synthetic oligonucleotide
aacugcacagcaguuccag

SEQ ID NO: 3079937 - RNA, 19 nt, Artificial Sequence
  Description of Artificial Sequence: Synthetic oligonucleotide
cugugggaauccucgaugc

SEQ ID NO: 3079938 - RNA, 19 nt, Artificial Sequence
  Description of Artificial Sequence: Synthetic oligonucleotide
aggaagauggcaauagcug

SEQ ID NO: 3079939 - RNA, 19 nt, Artificial Sequence
  Description of Artificial Sequence: Synthetic oligonucleotide
auucggagcccuauggaac

SEQ ID NO: 3079940 - RNA, 19 nt, Artificial Sequence
  Description of Artificial Sequence: Synthetic oligonucleotide
uaaaacugcacagcaguuc

SEQ ID NO: 3079941 - RNA, 19 nt, Artificial Sequence
  Description of Artificial Sequence: Synthetic oligonucleotide
cugcuguagacccagaaga

SEQ ID NO: 3079942 - RNA, 19 nt, Artificial Sequence
  Description of Artificial Sequence: Synthetic oligonucleotide
accacaguaccagauucac

SEQ ID NO: 3079943 - RNA, 19 nt, Artificial Sequence
  Description of Artificial Sequence: Synthetic oligonucleotide
gccaaagcaauucggagcc

SEQ ID NO: 3079944 - RNA, 19 nt, Artificial Sequence
  Description of Artificial Sequence: Synthetic oligonucleotide
cuguagacccagaagagga

SEQ ID NO: 3079945 - RNA, 19 nt, Artificial Sequence
  Description of Artificial Sequence: Synthetic oligonucleotide
ugccaaaucgaaguauaca

SEQ ID NO: 3079946 - RNA, 19 nt, Artificial Sequence
  Description of Artificial Sequence: Synthetic oligonucleotide
agcaucaaggccagacacc

SEQ ID NO: 3079947 - RNA, 19 nt, Artificial Sequence
  Description of Artificial Sequence: Synthetic oligonucleotide
uccucgaugcagcugcugu

SEQ ID NO: 3079948 - RNA, 19 nt, Artificial Sequence
  Description of Artificial Sequence: Synthetic oligonucleotide
gaguaaaacugcacagcag

SEQ ID NO: 3079949 - RNA, 19 nt, Artificial Sequence
  Description of Artificial Sequence: Synthetic oligonucleotide
agguuucagcguuuuguag

SEQ ID NO: 3079950 - RNA, 19 nt, Artificial Sequence
  Description of Artificial Sequence: Synthetic oligonucleotide
ugggcuucagagcaacuaa

SEQ ID NO: 3079951 - RNA, 19 nt, Artificial Sequence
  Description of Artificial Sequence: Synthetic oligonucleotide
uaugguucaaggagaugau

SEQ ID NO: 3079952 - RNA, 19 nt, Artificial Sequence
  Description of Artificial Sequence: Synthetic oligonucleotide
uuguaugguucaaggagau

SEQ ID NO: 3079953 - RNA, 19 nt, Artificial Sequence
  Description of Artificial Sequence: Synthetic oligonucleotide
ucacccaagaagagguuuc

SEQ ID NO: 3079954 - RNA, 19 nt, Artificial Sequence
  Description of Artificial Sequence: Synthetic oligonucleotide
gauucacccaagaagaggu

SEQ ID NO: 3079955 - RNA, 19 nt, Artificial Sequence
  Description of Artificial Sequence: Synthetic oligonucleotide
uuguagguuggaguaaaac

SEQ ID NO: 3079956 - RNA, 19 nt, Artificial Sequence
  Description of Artificial Sequence: Synthetic oligonucleotide
caacuaauuguaugguuca

SEQ ID NO: 3079957 - RNA, 19 nt, Artificial Sequence
  Description of Artificial Sequence: Synthetic oligonucleotide
auaucaggaagauggcaau

SEQ ID NO: 3079958 - RNA, 19 nt, Artificial Sequence
  Description of Artificial Sequence: Synthetic oligonucleotide
ucaaggagaugauggaauu

SEQ ID NO: 3079959 - RNA, 19 nt, Artificial Sequence
  Description of Artificial Sequence: Synthetic oligonucleotide
gcaauucggagcccuaugg

SEQ ID NO: 3079960 - RNA, 19 nt, Artificial Sequence
  Description of Artificial Sequence: Synthetic oligonucleotide
accucugugggaauccucg

SEQ ID NO: 3079961 - RNA, 19 nt, Artificial Sequence
  Description of Artificial Sequence: Synthetic oligonucleotide
ggaguaaaacugcacagca

SEQ ID NO: 3079962 - RNA, 19 nt, Artificial Sequence
  Description of Artificial Sequence: Synthetic oligonucleotide
aaguauacaggcagacacu

SEQ ID NO: 3079963 - RNA, 19 nt, Artificial Sequence
  Description of Artificial Sequence: Synthetic oligonucleotide
ccaaaucgaaguauacagg

SEQ ID NO: 3079964 - RNA, 19 nt, Artificial Sequence
  Description of Artificial Sequence: Synthetic oligonucleotide
uggagcaucaaggccagac

SEQ ID NO: 3079965 - RNA, 19 nt, Artificial Sequence
  Description of Artificial Sequence: Synthetic oligonucleotide
gaugauggaauugcagaga

SEQ ID NO: 3079966 - RNA, 19 nt, Artificial Sequence
  Description of Artificial Sequence: Synthetic oligonucleotide
ugcacugcacgaccuggag

SEQ ID NO: 3079967 - RNA, 19 nt, Artificial Sequence
  Description of Artificial Sequence: Synthetic oligonucleotide
cacugcacgaccuggagca

SEQ ID NO: 3079968 - RNA, 19 nt, Artificial Sequence
  Description of Artificial Sequence: Synthetic oligonucleotide
uaccagauucacccaagaa

SEQ ID NO: 3079969 - RNA, 19 nt, Artificial Sequence
  Description of Artificial Sequence: Synthetic oligonucleotide
ucgaaguauacaggcagac

SEQ ID NO: 3079970 - RNA, 19 nt, Artificial Sequence
  Description of Artificial Sequence: Synthetic oligonucleotide
aagauggcaauagcugaga

SEQ ID NO: 3079971 - RNA, 19 nt, Artificial Sequence
  Description of Artificial Sequence: Synthetic oligonucleotide
ggccaaagcaauucggagc

SEQ ID NO: 3079972 - RNA, 19 nt, Artificial Sequence
  Description of Artificial Sequence: Synthetic oligonucleotide
gcuucagagcaacuaauug

SEQ ID NO: 3079973 - RNA, 19 nt, Artificial Sequence
  Description of Artificial Sequence: Synthetic oligonucleotide
uagacccagaagaggagaa

SEQ ID NO: 3079974 - RNA, 19 nt, Artificial Sequence
  Description of Artificial Sequence: Synthetic oligonucleotide
ccagauucacccaagaaga

SEQ ID NO: 3079975 - RNA, 19 nt, Artificial Sequence
  Description of Artificial Sequence: Synthetic oligonucleotide
gugggaauccucgaugcag

SEQ ID NO: 3079976 - RNA, 19 nt, Artificial Sequence
  Description of Artificial Sequence: Synthetic oligonucleotide
aagagguuucagcguuuug

SEQ ID NO: 3079977 - RNA, 19 nt, Artificial Sequence
  Description of Artificial Sequence: Synthetic oligonucleotide
ggaagauggcaauagcuga

SEQ ID NO: 3079978 - RNA, 19 nt, Artificial Sequence
  Description of Artificial Sequence: Synthetic oligonucleotide
ugauggaauugcagagaga

SEQ ID NO: 3079979 - RNA, 19 nt, Artificial Sequence
  Description of Artificial Sequence: Synthetic oligonucleotide
gagauggccaaagcaauuc

SEQ ID NO: 3079980 - RNA, 19 nt, Artificial Sequence
  Description of Artificial Sequence: Synthetic oligonucleotide
agcaacuaauuguaugguu

SEQ ID NO: 3079981 - RNA, 19 nt, Artificial Sequence
  Description of Artificial Sequence: Synthetic oligonucleotide
cagauucacccaagaagag

SEQ ID NO: 3079982 - RNA, 19 nt, Artificial Sequence
  Description of Artificial Sequence: Synthetic oligonucleotide
acugcacagcaguuccagg

SEQ ID NO: 3079983 - RNA, 19 nt, Artificial Sequence
  Description of Artificial Sequence: Synthetic oligonucleotide
aacuggugccaaaucgaag

SEQ ID NO: 3079984 - RNA, 19 nt, Artificial Sequence
  Description of Artificial Sequence: Synthetic oligonucleotide
augaggauuucugggcuuc

SEQ ID NO: 3079985 - RNA, 19 nt, Artificial Sequence
  Description of Artificial Sequence: Synthetic oligonucleotide
agaacuggugccaaaucga

SEQ ID NO: 3079986 - RNA, 19 nt, Artificial Sequence
  Description of Artificial Sequence: Synthetic oligonucleotide
agcaauucggagcccuaug

SEQ ID NO: 3079987 - RNA, 19 nt, Artificial Sequence
  Description of Artificial Sequence: Synthetic oligonucleotide
ugugggaauccucgaugca

SEQ ID NO: 3079988 - RNA, 19 nt, Artificial Sequence
  Description of Artificial Sequence: Synthetic oligonucleotide
ucagagcaacuaauuguau

SEQ ID NO: 3079989 - RNA, 19 nt, Artificial Sequence
  Description of Artificial Sequence: Synthetic oligonucleotide
uuuguagguuggaguaaaa

SEQ ID NO: 3079990 - RNA, 19 nt, Artificial Sequence
  Description of Artificial Sequence: Synthetic oligonucleotide
ugagauggccaaagcaauu

SEQ ID NO: 3079991 - RNA, 19 nt, Artificial Sequence
  Description of Artificial Sequence: Synthetic oligonucleotide
aguauacaggcagacacua

SEQ ID NO: 3079992 - RNA, 19 nt, Artificial Sequence
  Description of Artificial Sequence: Synthetic oligonucleotide
gcagacacuaauaucagga

SEQ ID NO: 3079993 - RNA, 19 nt, Artificial Sequence
  Description of Artificial Sequence: Synthetic oligonucleotide
gcaacuaauuguaugguuc

SEQ ID NO: 3079994 - RNA, 19 nt, Artificial Sequence
  Description of Artificial Sequence: Synthetic oligonucleotide
agcccuauggaaccucugu

SEQ ID NO: 3079995 - RNA, 19 nt, Artificial Sequence
  Description of Artificial Sequence: Synthetic oligonucleotide
aggauuucugggcuucaga

SEQ ID NO: 3079996 - RNA, 19 nt, Artificial Sequence
  Description of Artificial Sequence: Synthetic oligonucleotide
agcguuuuguagguuggag

SEQ ID NO: 3079997 - RNA, 19 nt, Artificial Sequence
  Description of Artificial Sequence: Synthetic oligonucleotide
ccuauggaaccucuguggg

SEQ ID NO: 3079998 - RNA, 19 nt, Artificial Sequence
  Description of Artificial Sequence: Synthetic oligonucleotide
aggccagacaccacaguac

SEQ ID NO: 3079999 - RNA, 19 nt, Artificial Sequence
  Description of Artificial Sequence: Synthetic oligonucleotide
cccaagaagagguuucagc

SEQ ID NO: 3080000 - RNA, 19 nt, Artificial Sequence
  Description of Artificial Sequence: Synthetic oligonucleotide
ggagaugauggaauugcag

SEQ ID NO: 3080001 - RNA, 19 nt, Artificial Sequence
  Description of Artificial Sequence: Synthetic oligonucleotide
cccuauggaaccucugugg

SEQ ID NO: 3080002 - RNA, 19 nt, Artificial Sequence
  Description of Artificial Sequence: Synthetic oligonucleotide
aacuaauuguaugguucaa

SEQ ID NO: 3080003 - RNA, 19 nt, Artificial Sequence
  Description of Artificial Sequence: Synthetic oligonucleotide
gagguuucagcguuuugua

SEQ ID NO: 3080004 - RNA, 19 nt, Artificial Sequence
  Description of Artificial Sequence: Synthetic oligonucleotide
uagcugagauggccaaagc

SEQ ID NO: 3080005 - RNA, 19 nt, Artificial Sequence
  Description of Artificial Sequence: Synthetic oligonucleotide
aguaccagauucacccaag

SEQ ID NO: 3080006 - RNA, 19 nt, Artificial Sequence
  Description of Artificial Sequence: Synthetic oligonucleotide
ggcaauagcugagauggcc

SEQ ID NO: 3080007 - RNA, 19 nt, Artificial Sequence
  Description of Artificial Sequence: Synthetic oligonucleotide
auggaauugcagagagaac

SEQ ID NO: 3080008 - RNA, 19 nt, Artificial Sequence
  Description of Artificial Sequence: Synthetic oligonucleotide
cucgaugcagcugcuguag

SEQ ID NO: 3080009 - RNA, 19 nt, Artificial Sequence
  Description of Artificial Sequence: Synthetic oligonucleotide
gcugcuguagacccagaag

SEQ ID NO: 3080010 - RNA, 19 nt, Artificial Sequence
  Description of Artificial Sequence: Synthetic oligonucleotide
uguaugguucaaggagaug

SEQ ID NO: 3080011 - RNA, 19 nt, Artificial Sequence
  Description of Artificial Sequence: Synthetic oligonucleotide
agauggcaauagcugagau

SEQ ID NO: 3080012 - RNA, 19 nt, Artificial Sequence
  Description of Artificial Sequence: Synthetic oligonucleotide
acaguaccagauucaccca

SEQ ID NO: 3080013 - RNA, 19 nt, Artificial Sequence
  Description of Artificial Sequence: Synthetic oligonucleotide
aauagcugagauggccaaa

SEQ ID NO: 3080014 - RNA, 19 nt, Artificial Sequence
  Description of Artificial Sequence: Synthetic oligonucleotide
acacuaauaucaggaagau

SEQ ID NO: 3080015 - RNA, 19 nt, Artificial Sequence
  Description of Artificial Sequence: Synthetic oligonucleotide
uucacccaagaagagguuu

SEQ ID NO: 3080016 - RNA, 19 nt, Artificial Sequence
  Description of Artificial Sequence: Synthetic oligonucleotide
aaccucugugggaauccuc

SEQ ID NO: 3080017 - RNA, 19 nt, Artificial Sequence
  Description of Artificial Sequence: Synthetic oligonucleotide
gcuguagacccagaagagg

SEQ ID NO: 3080018 - RNA, 19 nt, Artificial Sequence
  Description of Artificial Sequence: Synthetic oligonucleotide
augguucaaggagaugaug

SEQ ID NO: 3080019 - RNA, 19 nt, Artificial Sequence
  Description of Artificial Sequence: Synthetic oligonucleotide
ggccagacaccacaguacc

SEQ ID NO: 3080020 - RNA, 19 nt, Artificial Sequence
  Description of Artificial Sequence: Synthetic oligonucleotide
ggaauugcagagagaacug

SEQ ID NO: 3080021 - RNA, 19 nt, Artificial Sequence
  Description of Artificial Sequence: Synthetic oligonucleotide
gguucaaggagaugaugga

SEQ ID NO: 3080022 - RNA, 19 nt, Artificial Sequence
  Description of Artificial Sequence: Synthetic oligonucleotide
guuucagcguuuuguaggu

SEQ ID NO: 3080023 - RNA, 19 nt, Artificial Sequence
  Description of Artificial Sequence: Synthetic oligonucleotide
gaggauuucugggcuucag

SEQ ID NO: 3080024 - RNA, 19 nt, Artificial Sequence
  Description of Artificial Sequence: Synthetic oligonucleotide
cacuaauaucaggaagaug

SEQ ID NO: 3080025 - RNA, 19 nt, Artificial Sequence
  Description of Artificial Sequence: Synthetic oligonucleotide
uaucaggaagauggcaaua

SEQ ID NO: 3080026 - RNA, 19 nt, Artificial Sequence
  Description of Artificial Sequence: Synthetic oligonucleotide
aagcaauucggagcccuau

SEQ ID NO: 3080027 - RNA, 19 nt, Artificial Sequence
  Description of Artificial Sequence: Synthetic oligonucleotide
ucgaugcagcugcuguaga

SEQ ID NO: 3080028 - RNA, 19 nt, Artificial Sequence
  Description of Artificial Sequence: Synthetic oligonucleotide
cuauggaaccucuguggga

SEQ ID NO: 3080029 - RNA, 19 nt, Artificial Sequence
  Description of Artificial Sequence: Synthetic oligonucleotide
agacccagaagaggagaag

SEQ ID NO: 3080030 - RNA, 19 nt, Artificial Sequence
  Description of Artificial Sequence: Synthetic oligonucleotide
cagacacuaauaucaggaa

SEQ ID NO: 3080031 - RNA, 19 nt, Artificial Sequence
  Description of Artificial Sequence: Synthetic oligonucleotide
cacgaccuggagcaucaag

SEQ ID NO: 3080032 - RNA, 19 nt, Artificial Sequence
  Description of Artificial Sequence: Synthetic oligonucleotide
uggcaauagcugagauggc

SEQ ID NO: 3080033 - RNA, 19 nt, Artificial Sequence
  Description of Artificial Sequence: Synthetic oligonucleotide
guucaaggagaugauggaa

SEQ ID NO: 3080034 - RNA, 19 nt, Artificial Sequence
  Description of Artificial Sequence: Synthetic oligonucleotide
aucgaaguauacaggcaga

SEQ ID NO: 3080035 - RNA, 19 nt, Artificial Sequence
  Description of Artificial Sequence: Synthetic oligonucleotide
guaccagauucacccaaga

SEQ ID NO: 3080036 - RNA, 19 nt, Artificial Sequence
  Description of Artificial Sequence: Synthetic oligonucleotide
caauucggagcccuaugga

SEQ ID NO: 3080037 - RNA, 19 nt, Artificial Sequence
  Description of Artificial Sequence: Synthetic oligonucleotide
guagacccagaagaggaga

SEQ ID NO: 3080038 - RNA, 19 nt, Artificial Sequence
  Description of Artificial Sequence: Synthetic oligonucleotide
agcugcuguagacccagaa

SEQ ID NO: 3080039 - RNA, 19 nt, Artificial Sequence
  Description of Artificial Sequence: Synthetic oligonucleotide
gaacuggugccaaaucgaa

SEQ ID NO: 3080040 - RNA, 19 nt, Artificial Sequence
  Description of Artificial Sequence: Synthetic oligonucleotide
gcugagauggccaaagcaa

SEQ ID NO: 3080041 - RNA, 19 nt, Artificial Sequence
  Description of Artificial Sequence: Synthetic oligonucleotide
uuucugggcuucagagcaa

SEQ ID NO: 3080042 - RNA, 19 nt, Artificial Sequence
  Description of Artificial Sequence: Synthetic oligonucleotide
uggugccaaaucgaaguau

SEQ ID NO: 3080043 - RNA, 19 nt, Artificial Sequence
  Description of Artificial Sequence: Synthetic oligonucleotide
ucugggcuucagagcaacu

SEQ ID NO: 3080044 - RNA, 19 nt, Artificial Sequence
  Description of Artificial Sequence: Synthetic oligonucleotide
agagagaacuggugccaaa

SEQ ID NO: 3080045 - RNA, 19 nt, Artificial Sequence
  Description of Artificial Sequence: Synthetic oligonucleotide
aaacugcacagcaguucca

SEQ ID NO: 3080046 - RNA, 19 nt, Artificial Sequence
  Description of Artificial Sequence: Synthetic oligonucleotide
caagaagagguuucagcgu

SEQ ID NO: 3080047 - RNA, 19 nt, Artificial Sequence
  Description of Artificial Sequence: Synthetic oligonucleotide
caauagcugagauggccaa

SEQ ID NO: 3080048 - RNA, 19 nt, Artificial Sequence
  Description of Artificial Sequence: Synthetic oligonucleotide
uggaaccucugugggaauc

SEQ ID NO: 3080049 - RNA, 19 nt, Artificial Sequence
  Description of Artificial Sequence: Synthetic oligonucleotide
ugaggauuucugggcuuca

SEQ ID NO: 3080050 - RNA, 19 nt, Artificial Sequence
  Description of Artificial Sequence: Synthetic oligonucleotide
aggagaugauggaauugca

SEQ ID NO: 3080051 - RNA, 19 nt, Artificial Sequence
  Description of Artificial Sequence: Synthetic oligonucleotide
acccaagaagagguuucag

SEQ ID NO: 3080052 - RNA, 19 nt, Artificial Sequence
  Description of Artificial Sequence: Synthetic oligonucleotide
agguuggaguaaaacugca

SEQ ID NO: 3080053 - RNA, 19 nt, Artificial Sequence
  Description of Artificial Sequence: Synthetic oligonucleotide
caccacaguaccagauuca

SEQ ID NO: 3080054 - RNA, 19 nt, Artificial Sequence
  Description of Artificial Sequence: Synthetic oligonucleotide
gcaucaaggccagacacca

SEQ ID NO: 3080055 - RNA, 19 nt, Artificial Sequence
  Description of Artificial Sequence: Synthetic oligonucleotide
gugccaaaucgaaguauac

SEQ ID NO: 3080056 - RNA, 19 nt, Artificial Sequence
  Description of Artificial Sequence: Synthetic oligonucleotide
aaagcaauucggagcccua

SEQ ID NO: 3080057 - RNA, 19 nt, Artificial Sequence
  Description of Artificial Sequence: Synthetic oligonucleotide
ggagcaucaaggccagaca

SEQ ID NO: 3080058 - RNA, 19 nt, Artificial Sequence
  Description of Artificial Sequence: Synthetic oligonucleotide
auacaggcagacacuaaua

SEQ ID NO: 3080059 - RNA, 19 nt, Artificial Sequence
  Description of Artificial Sequence: Synthetic oligonucleotide
ggaaccucugugggaaucc

SEQ ID NO: 3080060 - RNA, 19 nt, Artificial Sequence
  Description of Artificial Sequence: Synthetic oligonucleotide
guuuuguagguuggaguaa

SEQ ID NO: 3080061 - RNA, 19 nt, Artificial Sequence
  Description of Artificial Sequence: Synthetic oligonucleotide
gguuggaguaaaacugcac

SEQ ID NO: 3080062 - RNA, 19 nt, Artificial Sequence
  Description of Artificial Sequence: Synthetic oligonucleotide
gcccuauggaaccucugug

SEQ ID NO: 3080063 - RNA, 19 nt, Artificial Sequence
  Description of Artificial Sequence: Synthetic oligonucleotide
gcaauagcugagauggcca

SEQ ID NO: 3080064 - RNA, 19 nt, Artificial Sequence
  Description of Artificial Sequence: Synthetic oligonucleotide
caucaaggccagacaccac

SEQ ID NO: 3080065 - RNA, 19 nt, Artificial Sequence
  Description of Artificial Sequence: Synthetic oligonucleotide
caguaccagauucacccaa

SEQ ID NO: 3080066 - RNA, 19 nt, Artificial Sequence
  Description of Artificial Sequence: Synthetic oligonucleotide
cugagauggccaaagcaau

SEQ ID NO: 3080067 - RNA, 19 nt, Artificial Sequence
  Description of Artificial Sequence: Synthetic oligonucleotide
gagcaacuaauuguauggu

SEQ ID NO: 3080068 - RNA, 19 nt, Artificial Sequence
  Description of Artificial Sequence: Synthetic oligonucleotide
gacaccacaguaccagauu

SEQ ID NO: 3080069 - RNA, 19 nt, Artificial Sequence
  Description of Artificial Sequence: Synthetic oligonucleotide
gagagaacuggugccaaau

SEQ ID NO: 3080070 - RNA, 19 nt, Artificial Sequence
  Description of Artificial Sequence: Synthetic oligonucleotide
ccacaguaccagauucacc

SEQ ID NO: 3080071 - RNA, 19 nt, Artificial Sequence
  Description of Artificial Sequence: Synthetic oligonucleotide
gcacugcacgaccuggagc

SEQ ID NO: 3080072 - RNA, 19 nt, Artificial Sequence
  Description of Artificial Sequence: Synthetic oligonucleotide
ggugccaaaucgaaguaua

SEQ ID NO: 3080073 - RNA, 19 nt, Artificial Sequence
  Description of Artificial Sequence: Synthetic oligonucleotide
aauccucgaugcagcugcu

SEQ ID NO: 3080074 - RNA, 19 nt, Artificial Sequence
  Description of Artificial Sequence: Synthetic oligonucleotide
cguuuuguagguuggagua

SEQ ID NO: 3080075 - RNA, 19 nt, Artificial Sequence
  Description of Artificial Sequence: Synthetic oligonucleotide
caaagcaauucggagcccu

SEQ ID NO: 3080076 - RNA, 19 nt, Artificial Sequence
  Description of Artificial Sequence: Synthetic oligonucleotide
ccuggagcaucaaggccag

SEQ ID NO: 3080077 - RNA, 19 nt, Artificial Sequence
  Description of Artificial Sequence: Synthetic oligonucleotide
ggaauccucgaugcagcug

SEQ ID NO: 3080078 - RNA, 19 nt, Artificial Sequence
  Description of Artificial Sequence: Synthetic oligonucleotide
gagcccuauggaaccucug

SEQ ID NO: 3080079 - RNA, 19 nt, Artificial Sequence
  Description of Artificial Sequence: Synthetic oligonucleotide
gcguuuuguagguuggagu

SEQ ID NO: 3080080 - RNA, 19 nt, Artificial Sequence
  Description of Artificial Sequence: Synthetic oligonucleotide
guauacaggcagacacuaa

SEQ ID NO: 3080081 - RNA, 19 nt, Artificial Sequence
  Description of Artificial Sequence: Synthetic oligonucleotide
auggaaccucugugggaau

SEQ ID NO: 3080082 - RNA, 19 nt, Artificial Sequence
  Description of Artificial Sequence: Synthetic oligonucleotide
cugggcuucagagcaacua

SEQ ID NO: 3080083 - RNA, 19 nt, Artificial Sequence
  Description of Artificial Sequence: Synthetic oligonucleotide
ucggagcccuauggaaccu

SEQ ID NO: 3080084 - RNA, 19 nt, Artificial Sequence
  Description of Artificial Sequence: Synthetic oligonucleotide
cacccaagaagagguuuca

SEQ ID NO: 3080085 - RNA, 19 nt, Artificial Sequence
  Description of Artificial Sequence: Synthetic oligonucleotide
cuggugccaaaucgaagua

SEQ ID NO: 3080086 - RNA, 19 nt, Artificial Sequence
  Description of Artificial Sequence: Synthetic oligonucleotide
uuucagcguuuuguagguu

SEQ ID NO: 3080087 - RNA, 19 nt, Artificial Sequence
  Description of Artificial Sequence: Synthetic oligonucleotide
agaagagguuucagcguuu

SEQ ID NO: 3080088 - RNA, 19 nt, Artificial Sequence
  Description of Artificial Sequence: Synthetic oligonucleotide
guaaaacugcacagcaguu

SEQ ID NO: 3080089 - RNA, 19 nt, Artificial Sequence
  Description of Artificial Sequence: Synthetic oligonucleotide
auccucgaugcagcugcug

SEQ ID NO: 3080090 - RNA, 19 nt, Artificial Sequence
  Description of Artificial Sequence: Synthetic oligonucleotide
gaagagguuucagcguuuu

SEQ ID NO: 3080091 - RNA, 19 nt, Artificial Sequence
  Description of Artificial Sequence: Synthetic oligonucleotide
cugcacgaccuggagcauc

SEQ ID NO: 3080092 - RNA, 19 nt, Artificial Sequence
  Description of Artificial Sequence: Synthetic oligonucleotide
cgaugcagcugcuguagac

SEQ ID NO: 3080093 - RNA, 19 nt, Artificial Sequence
  Description of Artificial Sequence: Synthetic oligonucleotide
auucacccaagaagagguu

SEQ ID NO: 3080094 - RNA, 19 nt, Artificial Sequence
  Description of Artificial Sequence: Synthetic oligonucleotide
gaaccucugugggaauccu

SEQ ID NO: 3080095 - RNA, 19 nt, Artificial Sequence
  Description of Artificial Sequence: Synthetic oligonucleotide
cagagagaacuggugccaa

SEQ ID NO: 3080096 - RNA, 19 nt, Artificial Sequence
  Description of Artificial Sequence: Synthetic oligonucleotide
caugaggauuucugggcuu

SEQ ID NO: 3080097 - RNA, 19 nt, Artificial Sequence
  Description of Artificial Sequence: Synthetic oligonucleotide
cucugugggaauccucgau

SEQ ID NO: 3080098 - RNA, 19 nt, Artificial Sequence
  Description of Artificial Sequence: Synthetic oligonucleotide
cagcguuuuguagguugga

SEQ ID NO: 3080099 - RNA, 19 nt, Artificial Sequence
  Description of Artificial Sequence: Synthetic oligonucleotide
ccaaagcaauucggagccc

SEQ ID NO: 3080100 - RNA, 19 nt, Artificial Sequence
  Description of Artificial Sequence: Synthetic oligonucleotide
caaggccagacaccacagu

SEQ ID NO: 3080101 - RNA, 19 nt, Artificial Sequence
  Description of Artificial Sequence: Synthetic oligonucleotide
acugcacgaccuggagcau

SEQ ID NO: 3080102 - RNA, 19 nt, Artificial Sequence
  Description of Artificial Sequence: Synthetic oligonucleotide
gggaauccucgaugcagcu

SEQ ID NO: 3080103 - RNA, 19 nt, Artificial Sequence
  Description of Artificial Sequence: Synthetic oligonucleotide
cgaaguauacaggcagaca

SEQ ID NO: 3080104 - RNA, 19 nt, Artificial Sequence
  Description of Artificial Sequence: Synthetic oligonucleotide
gggguguccaugaggauuu

SEQ ID NO: 3080105 - RNA, 19 nt, Artificial Sequence
  Description of Artificial Sequence: Synthetic oligonucleotide
gccagacaccacaguacca

SEQ ID NO: 3080106 - RNA, 19 nt, Artificial Sequence
  Description of Artificial Sequence: Synthetic oligonucleotide
ccucugugggaauccucga

SEQ ID NO: 3080107 - RNA, 19 nt, Artificial Sequence
  Description of Artificial Sequence: Synthetic oligonucleotide
gguguccaugaggauuucu

SEQ ID NO: 3080108 - RNA, 19 nt, Artificial Sequence
  Description of Artificial Sequence: Synthetic oligonucleotide
ggagcccuauggaaccucu

SEQ ID NO: 3080109 - RNA, 19 nt, Artificial Sequence
  Description of Artificial Sequence: Synthetic oligonucleotide
ccucgaugcagcugcugua

SEQ ID NO: 3080110 - RNA, 19 nt, Artificial Sequence
  Description of Artificial Sequence: Synthetic oligonucleotide
cagcugcuguagacccaga

SEQ ID NO: 3080111 - RNA, 19 nt, Artificial Sequence
  Description of Artificial Sequence: Synthetic oligonucleotide
gggcuucagagcaacuaau

SEQ ID NO: 3080112 - RNA, 19 nt, Artificial Sequence
  Description of Artificial Sequence: Synthetic oligonucleotide
ggguguccaugaggauuuc

SEQ ID NO: 3080113 - RNA, 19 nt, Artificial Sequence
  Description of Artificial Sequence: Synthetic oligonucleotide
cuggagcaucaaggccaga

SEQ ID NO: 3080114 - RNA, 19 nt, Artificial Sequence
  Description of Artificial Sequence: Synthetic oligonucleotide
cggagcccuauggaaccuc

SEQ ID NO: 3080115 - RNA, 19 nt, Artificial Sequence
  Description of Artificial Sequence: Synthetic oligonucleotide
gaggaaaugagccagaggc

SEQ ID NO: 3080116 - RNA, 19 nt, Artificial Sequence
  Description of Artificial Sequence: Synthetic oligonucleotide
agaaugaccagccagcuug

SEQ ID NO: 3080117 - RNA, 19 nt, Artificial Sequence
  Description of Artificial Sequence: Synthetic oligonucleotide
ucaaggauggccauuguug

SEQ ID NO: 3080118 - RNA, 19 nt, Artificial Sequence
  Description of Artificial Sequence: Synthetic oligonucleotide
ugaaagucugugcucaggg

SEQ ID NO: 3080119 - RNA, 19 nt, Artificial Sequence
  Description of Artificial Sequence: Synthetic oligonucleotide
uggaguagcagcaggaugc

SEQ ID NO: 3080120 - RNA, 19 nt, Artificial Sequence
  Description of Artificial Sequence: Synthetic oligonucleotide
uucuugaccuucaggaugg

SEQ ID NO: 3080121 - RNA, 19 nt, Artificial Sequence
  Description of Artificial Sequence: Synthetic oligonucleotide
aaagucugugcucagggcu

SEQ ID NO: 3080122 - RNA, 19 nt, Artificial Sequence
  Description of Artificial Sequence: Synthetic oligonucleotide
aaaugagccagaggcaccc

SEQ ID NO: 3080123 - RNA, 19 nt, Artificial Sequence
  Description of Artificial Sequence: Synthetic oligonucleotide
acuuguaggugacagaaug

SEQ ID NO: 3080124 - RNA, 19 nt, Artificial Sequence
  Description of Artificial Sequence: Synthetic oligonucleotide
ugaccagccagcuugagca

SEQ ID NO: 3080125 - RNA, 19 nt, Artificial Sequence
  Description of Artificial Sequence: Synthetic oligonucleotide
uucaggauggaguagcagc

SEQ ID NO: 3080126 - RNA, 19 nt, Artificial Sequence
  Description of Artificial Sequence: Synthetic oligonucleotide
cuucaggaggaaaugagcc

SEQ ID NO: 3080127 - RNA, 19 nt, Artificial Sequence
  Description of Artificial Sequence: Synthetic oligonucleotide
uuuugggcuguccugagug

SEQ ID NO: 3080128 - RNA, 19 nt, Artificial Sequence
  Description of Artificial Sequence: Synthetic oligonucleotide
ugacagaaugaccagccag

SEQ ID NO: 3080129 - RNA, 19 nt, Artificial Sequence
  Description of Artificial Sequence: Synthetic oligonucleotide
gaugcuauguuggagauga

SEQ ID NO: 3080130 - RNA, 19 nt, Artificial Sequence
  Description of Artificial Sequence: Synthetic oligonucleotide
uuuagugucauuccugcau

SEQ ID NO: 3080131 - RNA, 19 nt, Artificial Sequence
  Description of Artificial Sequence: Synthetic oligonucleotide
aaaauggucugaaagucug

SEQ ID NO: 3080132 - RNA, 19 nt, Artificial Sequence
  Description of Artificial Sequence: Synthetic oligonucleotide
uugaccuucaggauggagu

SEQ ID NO: 3080133 - RNA, 19 nt, Artificial Sequence
  Description of Artificial Sequence: Synthetic oligonucleotide
agagccaacgugcagcuuc

SEQ ID NO: 3080134 - RNA, 19 nt, Artificial Sequence
  Description of Artificial Sequence: Synthetic oligonucleotide
guccaaaauggucugaaag

SEQ ID NO: 3080135 - RNA, 19 nt, Artificial Sequence
  Description of Artificial Sequence: Synthetic oligonucleotide
aaggauggccauuguugcc

SEQ ID NO: 3080136 - RNA, 19 nt, Artificial Sequence
  Description of Artificial Sequence: Synthetic oligonucleotide
auuccugcauucuugaccu

SEQ ID NO: 3080137 - RNA, 19 nt, Artificial Sequence
  Description of Artificial Sequence: Synthetic oligonucleotide
auucuugaccuucaggaug

SEQ ID NO: 3080138 - RNA, 19 nt, Artificial Sequence
  Description of Artificial Sequence: Synthetic oligonucleotide
uggucugaaagucugugcu

SEQ ID NO: 3080139 - RNA, 19 nt, Artificial Sequence
  Description of Artificial Sequence: Synthetic oligonucleotide
aacgugcagcuucaggagg

SEQ ID NO: 3080140 - RNA, 19 nt, Artificial Sequence
  Description of Artificial Sequence: Synthetic oligonucleotide
ugcauucuugaccuucagg

SEQ ID NO: 3080141 - RNA, 19 nt, Artificial Sequence
  Description of Artificial Sequence: Synthetic oligonucleotide
cauuccugcauucuugacc

SEQ ID NO: 3080142 - RNA, 19 nt, Artificial Sequence
  Description of Artificial Sequence: Synthetic oligonucleotide
ugucauuccugcauucuug

SEQ ID NO: 3080143 - RNA, 19 nt, Artificial Sequence
  Description of Artificial Sequence: Synthetic oligonucleotide
auggucugaaagucugugc

SEQ ID NO: 3080144 - RNA, 19 nt, Artificial Sequence
  Description of Artificial Sequence: Synthetic oligonucleotide
ucaggauggaguagcagca

SEQ ID NO: 3080145 - RNA, 19 nt, Artificial Sequence
  Description of Artificial Sequence: Synthetic oligonucleotide
agcaggaaggcucgguagc

SEQ ID NO: 3080146 - RNA, 19 nt, Artificial Sequence
  Description of Artificial Sequence: Synthetic oligonucleotide
uguaggugacagaaugacc

SEQ ID NO: 3080147 - RNA, 19 nt, Artificial Sequence
  Description of Artificial Sequence: Synthetic oligonucleotide
aauggucugaaagucugug

SEQ ID NO: 3080148 - RNA, 19 nt, Artificial Sequence
  Description of Artificial Sequence: Synthetic oligonucleotide
ucagcugcagccucaagga

SEQ ID NO: 3080149 - RNA, 19 nt, Artificial Sequence
  Description of Artificial Sequence: Synthetic oligonucleotide
ucccaggagacacuuguag

SEQ ID NO: 3080150 - RNA, 19 nt, Artificial Sequence
  Description of Artificial Sequence: Synthetic oligonucleotide
guaggugacagaaugacca

SEQ ID NO: 3080151 - RNA, 19 nt, Artificial Sequence
  Description of Artificial Sequence: Synthetic oligonucleotide
caaggauggccauuguugc

SEQ ID NO: 3080152 - RNA, 19 nt, Artificial Sequence
  Description of Artificial Sequence: Synthetic oligonucleotide
aggauggccauuguugccc

SEQ ID NO: 3080153 - RNA, 19 nt, Artificial Sequence
  Description of Artificial Sequence: Synthetic oligonucleotide
augaccagccagcuugagc

SEQ ID NO: 3080154 - RNA, 19 nt, Artificial Sequence
  Description of Artificial Sequence: Synthetic oligonucleotide
gaaggagcgggguuagucc

SEQ ID NO: 3080155 - RNA, 19 nt, Artificial Sequence
  Description of Artificial Sequence: Synthetic oligonucleotide
accuucaggauggaguagc

SEQ ID NO: 3080156 - RNA, 19 nt, Artificial Sequence
  Description of Artificial Sequence: Synthetic oligonucleotide
gacagaaugaccagccagc

SEQ ID NO: 3080157 - RNA, 19 nt, Artificial Sequence
  Description of Artificial Sequence: Synthetic oligonucleotide
gcuauguuggagaugaugc

SEQ ID NO: 3080158 - RNA, 19 nt, Artificial Sequence
  Description of Artificial Sequence: Synthetic oligonucleotide
guuaguccaaaauggucug

SEQ ID NO: 3080159 - RNA, 19 nt, Artificial Sequence
  Description of Artificial Sequence: Synthetic oligonucleotide
gcauucuugaccuucagga

SEQ ID NO: 3080160 - RNA, 19 nt, Artificial Sequence
  Description of Artificial Sequence: Synthetic oligonucleotide
uuggccuuuagugucauuc

SEQ ID NO: 3080161 - RNA, 19 nt, Artificial Sequence
  Description of Artificial Sequence: Synthetic oligonucleotide
uuguaggugacagaaugac

SEQ ID NO: 3080162 - RNA, 19 nt, Artificial Sequence
  Description of Artificial Sequence: Synthetic oligonucleotide
cauuguugcccuugggagc

SEQ ID NO: 3080163 - RNA, 19 nt, Artificial Sequence
  Description of Artificial Sequence: Synthetic oligonucleotide
ugcagcuucaggaggaaau

SEQ ID NO: 3080164 - RNA, 19 nt, Artificial Sequence
  Description of Artificial Sequence: Synthetic oligonucleotide
gaaagucugugcucagggc

SEQ ID NO: 3080165 - RNA, 19 nt, Artificial Sequence
  Description of Artificial Sequence: Synthetic oligonucleotide
cagcaggaugcuauguugg

SEQ ID NO: 3080166 - RNA, 19 nt, Artificial Sequence
  Description of Artificial Sequence: Synthetic oligonucleotide
acccuuggccuuuaguguc

SEQ ID NO: 3080167 - RNA, 19 nt, Artificial Sequence
  Description of Artificial Sequence: Synthetic oligonucleotide
ugcuauguuggagaugaug

SEQ ID NO: 3080168 - RNA, 19 nt, Artificial Sequence
  Description of Artificial Sequence: Synthetic oligonucleotide
uccggcacagcuguuuugg

SEQ ID NO: 3080169 - RNA, 19 nt, Artificial Sequence
  Description of Artificial Sequence: Synthetic oligonucleotide
uuugggcuguccugagugg

SEQ ID NO: 3080170 - RNA, 19 nt, Artificial Sequence
  Description of Artificial Sequence: Synthetic oligonucleotide
aaggagcgggguuagucca

SEQ ID NO: 3080171 - RNA, 19 nt, Artificial Sequence
  Description of Artificial Sequence: Synthetic oligonucleotide
uuagugucauuccugcauu

SEQ ID NO: 3080172 - RNA, 19 nt, Artificial Sequence
  Description of Artificial Sequence: Synthetic oligonucleotide
cucgguagcagagccaacg

SEQ ID NO: 3080173 - RNA, 19 nt, Artificial Sequence
  Description of Artificial Sequence: Synthetic oligonucleotide
ugaccuucaggauggagua

SEQ ID NO: 3080174 - RNA, 19 nt, Artificial Sequence
  Description of Artificial Sequence: Synthetic oligonucleotide
auggaguagcagcaggaug

SEQ ID NO: 3080175 - RNA, 19 nt, Artificial Sequence
  Description of Artificial Sequence: Synthetic oligonucleotide
aggugacagaaugaccagc

SEQ ID NO: 3080176 - RNA, 19 nt, Artificial Sequence
  Description of Artificial Sequence: Synthetic oligonucleotide
ugugcucagggcuggguca

SEQ ID NO: 3080177 - RNA, 19 nt, Artificial Sequence
  Description of Artificial Sequence: Synthetic oligonucleotide
uccagcugaaggagcgggg

SEQ ID NO: 3080178 - RNA, 19 nt, Artificial Sequence
  Description of Artificial Sequence: Synthetic oligonucleotide
gguagcagagccaacgugc

SEQ ID NO: 3080179 - RNA, 19 nt, Artificial Sequence
  Description of Artificial Sequence: Synthetic oligonucleotide
acacuuguaggugacagaa

SEQ ID NO: 3080180 - RNA, 19 nt, Artificial Sequence
  Description of Artificial Sequence: Synthetic oligonucleotide
uggccuuuagugucauucc

SEQ ID NO: 3080181 - RNA, 19 nt, Artificial Sequence
  Description of Artificial Sequence: Synthetic oligonucleotide
ucugaaagucugugcucag

SEQ ID NO: 3080182 - RNA, 19 nt, Artificial Sequence
  Description of Artificial Sequence: Synthetic oligonucleotide
caacgugcagcuucaggag

SEQ ID NO: 3080183 - RNA, 19 nt, Artificial Sequence
  Description of Artificial Sequence: Synthetic oligonucleotide
auuguugcccuugggagcu

SEQ ID NO: 3080184 - RNA, 19 nt, Artificial Sequence
  Description of Artificial Sequence: Synthetic oligonucleotide
ugcccuugggagcuuccgg

SEQ ID NO: 3080185 - RNA, 19 nt, Artificial Sequence
  Description of Artificial Sequence: Synthetic oligonucleotide
agcuguuuugggcuguccu

SEQ ID NO: 3080186 - RNA, 19 nt, Artificial Sequence
  Description of Artificial Sequence: Synthetic oligonucleotide
aggagacacuuguagguga

SEQ ID NO: 3080187 - RNA, 19 nt, Artificial Sequence
  Description of Artificial Sequence: Synthetic oligonucleotide
guucauccagcugaaggag

SEQ ID NO: 3080188 - RNA, 19 nt, Artificial Sequence
  Description of Artificial Sequence: Synthetic oligonucleotide
uguuuugggcuguccugag

SEQ ID NO: 3080189 - RNA, 19 nt, Artificial Sequence
  Description of Artificial Sequence: Synthetic oligonucleotide
caggaugcuauguuggaga

SEQ ID NO: 3080190 - RNA, 19 nt, Artificial Sequence
  Description of Artificial Sequence: Synthetic oligonucleotide
ccuuuagugucauuccugc

SEQ ID NO: 3080191 - RNA, 19 nt, Artificial Sequence
  Description of Artificial Sequence: Synthetic oligonucleotide
ugagcaggaaggcucggua

SEQ ID NO: 3080192 - RNA, 19 nt, Artificial Sequence
  Description of Artificial Sequence: Synthetic oligonucleotide
aguagcagcaggaugcuau

SEQ ID NO: 3080193 - RNA, 19 nt, Artificial Sequence
  Description of Artificial Sequence: Synthetic oligonucleotide
gcacccuuggccuuuagug

SEQ ID NO: 3080194 - RNA, 19 nt, Artificial Sequence
  Description of Artificial Sequence: Synthetic oligonucleotide
gaaaugagccagaggcacc

SEQ ID NO: 3080195 - RNA, 19 nt, Artificial Sequence
  Description of Artificial Sequence: Synthetic oligonucleotide
ugaaggagcgggguuaguc

SEQ ID NO: 3080196 - RNA, 19 nt, Artificial Sequence
  Description of Artificial Sequence: Synthetic oligonucleotide
cuuguaggugacagaauga

SEQ ID NO: 3080197 - RNA, 19 nt, Artificial Sequence
  Description of Artificial Sequence: Synthetic oligonucleotide
ccauuguugcccuugggag

SEQ ID NO: 3080198 - RNA, 19 nt, Artificial Sequence
  Description of Artificial Sequence: Synthetic oligonucleotide
agcuucaggaggaaaugag

SEQ ID NO: 3080199 - RNA, 19 nt, Artificial Sequence
  Description of Artificial Sequence: Synthetic oligonucleotide
gagccagaggcacccuugg

SEQ ID NO: 3080200 - RNA, 19 nt, Artificial Sequence
  Description of Artificial Sequence: Synthetic oligonucleotide
ggugacagaaugaccagcc

SEQ ID NO: 3080201 - RNA, 19 nt, Artificial Sequence
  Description of Artificial Sequence: Synthetic oligonucleotide
ugcagccucaaggauggcc

SEQ ID NO: 3080202 - RNA, 19 nt, Artificial Sequence
  Description of Artificial Sequence: Synthetic oligonucleotide
cugaguggucccaggagac

SEQ ID NO: 3080203 - RNA, 19 nt, Artificial Sequence
  Description of Artificial Sequence: Synthetic oligonucleotide
ggaaaugagccagaggcac

SEQ ID NO: 3080204 - RNA, 19 nt, Artificial Sequence
  Description of Artificial Sequence: Synthetic oligonucleotide
cgggguuaguccaaaaugg

SEQ ID NO: 3080205 - RNA, 19 nt, Artificial Sequence
  Description of Artificial Sequence: Synthetic oligonucleotide
uaguccaaaauggucugaa

SEQ ID NO: 3080206 - RNA, 19 nt, Artificial Sequence
  Description of Artificial Sequence: Synthetic oligonucleotide
ucgguagcagagccaacgu

SEQ ID NO: 3080207 - RNA, 19 nt, Artificial Sequence
  Description of Artificial Sequence: Synthetic oligonucleotide
gucauuccugcauucuuga

SEQ ID NO: 3080208 - RNA, 19 nt, Artificial Sequence
  Description of Artificial Sequence: Synthetic oligonucleotide
ggaggaaaugagccagagg

SEQ ID NO: 3080209 - RNA, 19 nt, Artificial Sequence
  Description of Artificial Sequence: Synthetic oligonucleotide
gcgggguuaguccaaaaug

SEQ ID NO: 3080210 - RNA, 19 nt, Artificial Sequence
  Description of Artificial Sequence: Synthetic oligonucleotide
gucugaaagucugugcuca

SEQ ID NO: 3080211 - RNA, 19 nt, Artificial Sequence
  Description of Artificial Sequence: Synthetic oligonucleotide
aaauggucugaaagucugu

SEQ ID NO: 3080212 - RNA, 19 nt, Artificial Sequence
  Description of Artificial Sequence: Synthetic oligonucleotide
agccagaggcacccuuggc

SEQ ID NO: 3080213 - RNA, 19 nt, Artificial Sequence
  Description of Artificial Sequence: Synthetic oligonucleotide
guagcagcaggaugcuaug

SEQ ID NO: 3080214 - RNA, 19 nt, Artificial Sequence
  Description of Artificial Sequence: Synthetic oligonucleotide
gacacuuguaggugacaga

SEQ ID NO: 3080215 - RNA, 19 nt, Artificial Sequence
  Description of Artificial Sequence: Synthetic oligonucleotide
agcaggaugcuauguugga

SEQ ID NO: 3080216 - RNA, 19 nt, Artificial Sequence
  Description of Artificial Sequence: Synthetic oligonucleotide
agccagcuugagcaggaag

SEQ ID NO: 3080217 - RNA, 19 nt, Artificial Sequence
  Description of Artificial Sequence: Synthetic oligonucleotide
uuaguccaaaauggucuga

SEQ ID NO: 3080218 - RNA, 19 nt, Artificial Sequence
  Description of Artificial Sequence: Synthetic oligonucleotide
aggaggaaaugagccagag

SEQ ID NO: 3080219 - RNA, 19 nt, Artificial Sequence
  Description of Artificial Sequence: Synthetic oligonucleotide
aggaugcuauguuggagau

SEQ ID NO: 3080220 - RNA, 19 nt, Artificial Sequence
  Description of Artificial Sequence: Synthetic oligonucleotide
agcgggguuaguccaaaau

SEQ ID NO: 3080221 - RNA, 19 nt, Artificial Sequence
  Description of Artificial Sequence: Synthetic oligonucleotide
gaguggucccaggagacac

SEQ ID NO: 3080222 - RNA, 19 nt, Artificial Sequence
  Description of Artificial Sequence: Synthetic oligonucleotide
ucauuccugcauucuugac

SEQ ID NO: 3080223 - RNA, 19 nt, Artificial Sequence
  Description of Artificial Sequence: Synthetic oligonucleotide
gguuaguccaaaauggucu

SEQ ID NO: 3080224 - RNA, 19 nt, Artificial Sequence
  Description of Artificial Sequence: Synthetic oligonucleotide
aggaaggcucgguagcaga

SEQ ID NO: 3080225 - RNA, 19 nt, Artificial Sequence
  Description of Artificial Sequence: Synthetic oligonucleotide
agugucauuccugcauucu

SEQ ID NO: 3080226 - RNA, 19 nt, Artificial Sequence
  Description of Artificial Sequence: Synthetic oligonucleotide
uagcagagccaacgugcag

SEQ ID NO: 3080227 - RNA, 19 nt, Artificial Sequence
  Description of Artificial Sequence: Synthetic oligonucleotide
gcagcaggaugcuauguug

SEQ ID NO: 3080228 - RNA, 19 nt, Artificial Sequence
  Description of Artificial Sequence: Synthetic oligonucleotide
aaugaccagccagcuugag

SEQ ID NO: 3080229 - RNA, 19 nt, Artificial Sequence
  Description of Artificial Sequence: Synthetic oligonucleotide
acagaaugaccagccagcu

SEQ ID NO: 3080230 - RNA, 19 nt, Artificial Sequence
  Description of Artificial Sequence: Synthetic oligonucleotide
aguccaaaauggucugaaa

SEQ ID NO: 3080231 - RNA, 19 nt, Artificial Sequence
  Description of Artificial Sequence: Synthetic oligonucleotide
ccaacgugcagcuucagga

SEQ ID NO: 3080232 - RNA, 19 nt, Artificial Sequence
  Description of Artificial Sequence: Synthetic oligonucleotide
uccugcauucuugaccuuc

SEQ ID NO: 3080233 - RNA, 19 nt, Artificial Sequence
  Description of Artificial Sequence: Synthetic oligonucleotide
gaaggcucgguagcagagc

SEQ ID NO: 3080234 - RNA, 19 nt, Artificial Sequence
  Description of Artificial Sequence: Synthetic oligonucleotide
uagugucauuccugcauuc

SEQ ID NO: 3080235 - RNA, 19 nt, Artificial Sequence
  Description of Artificial Sequence: Synthetic oligonucleotide
cccaggagacacuuguagg

SEQ ID NO: 3080236 - RNA, 19 nt, Artificial Sequence
  Description of Artificial Sequence: Synthetic oligonucleotide
cuucaggauggaguagcag

SEQ ID NO: 3080237 - RNA, 19 nt, Artificial Sequence
  Description of Artificial Sequence: Synthetic oligonucleotide
gcuguuuugggcuguccug

SEQ ID NO: 3080238 - RNA, 19 nt, Artificial Sequence
  Description of Artificial Sequence: Synthetic oligonucleotide
caggagacacuuguaggug

SEQ ID NO: 3080239 - RNA, 19 nt, Artificial Sequence
  Description of Artificial Sequence: Synthetic oligonucleotide
uugcccuugggagcuuccg

SEQ ID NO: 3080240 - RNA, 19 nt, Artificial Sequence
  Description of Artificial Sequence: Synthetic oligonucleotide
aggaaaugagccagaggca

SEQ ID NO: 3080241 - RNA, 19 nt, Artificial Sequence
  Description of Artificial Sequence: Synthetic oligonucleotide
cuuuagugucauuccugca

SEQ ID NO: 3080242 - RNA, 19 nt, Artificial Sequence
  Description of Artificial Sequence: Synthetic oligonucleotide
cuugaccuucaggauggag

SEQ ID NO: 3080243 - RNA, 19 nt, Artificial Sequence
  Description of Artificial Sequence: Synthetic oligonucleotide
agucugugcucagggcugg

SEQ ID NO: 3080244 - RNA, 19 nt, Artificial Sequence
  Description of Artificial Sequence: Synthetic oligonucleotide
gccauuguugcccuuggga

SEQ ID NO: 3080245 - RNA, 19 nt, Artificial Sequence
  Description of Artificial Sequence: Synthetic oligonucleotide
uugggagcuuccggcacag

SEQ ID NO: 3080246 - RNA, 19 nt, Artificial Sequence
  Description of Artificial Sequence: Synthetic oligonucleotide
uugggcuguccugaguggu

SEQ ID NO: 3080247 - RNA, 19 nt, Artificial Sequence
  Description of Artificial Sequence: Synthetic oligonucleotide
ugaguggucccaggagaca

SEQ ID NO: 3080248 - RNA, 19 nt, Artificial Sequence
  Description of Artificial Sequence: Synthetic oligonucleotide
cugugcucagggcuggguc

SEQ ID NO: 3080249 - RNA, 19 nt, Artificial Sequence
  Description of Artificial Sequence: Synthetic oligonucleotide
uugagcaggaaggcucggu

SEQ ID NO: 3080250 - RNA, 19 nt, Artificial Sequence
  Description of Artificial Sequence: Synthetic oligonucleotide
uuccggcacagcuguuuug

SEQ ID NO: 3080251 - RNA, 19 nt, Artificial Sequence
  Description of Artificial Sequence: Synthetic oligonucleotide
gccaacgugcagcuucagg

SEQ ID NO: 3080252 - RNA, 19 nt, Artificial Sequence
  Description of Artificial Sequence: Synthetic oligonucleotide
gugacagaaugaccagcca

SEQ ID NO: 3080253 - RNA, 19 nt, Artificial Sequence
  Description of Artificial Sequence: Synthetic oligonucleotide
cuguuuugggcuguccuga

SEQ ID NO: 3080254 - RNA, 19 nt, Artificial Sequence
  Description of Artificial Sequence: Synthetic oligonucleotide
ugggcuguccugagugguc

SEQ ID NO: 3080255 - RNA, 19 nt, Artificial Sequence
  Description of Artificial Sequence: Synthetic oligonucleotide
guagcagagccaacgugca

SEQ ID NO: 3080256 - RNA, 19 nt, Artificial Sequence
  Description of Artificial Sequence: Synthetic oligonucleotide
cugcauucuugaccuucag

SEQ ID NO: 3080257 - RNA, 19 nt, Artificial Sequence
  Description of Artificial Sequence: Synthetic oligonucleotide
gaccuucaggauggaguag

SEQ ID NO: 3080258 - RNA, 19 nt, Artificial Sequence
  Description of Artificial Sequence: Synthetic oligonucleotide
ggucugaaagucugugcuc

SEQ ID NO: 3080259 - RNA, 19 nt, Artificial Sequence
  Description of Artificial Sequence: Synthetic oligonucleotide
ggcacagcuguuuugggcu

SEQ ID NO: 3080260 - RNA, 19 nt, Artificial Sequence
  Description of Artificial Sequence: Synthetic oligonucleotide
ggaaggcucgguagcagag

SEQ ID NO: 3080261 - RNA, 19 nt, Artificial Sequence
  Description of Artificial Sequence: Synthetic oligonucleotide
cauccagcugaaggagcgg

SEQ ID NO: 3080262 - RNA, 19 nt, Artificial Sequence
  Description of Artificial Sequence: Synthetic oligonucleotide
aaugagccagaggcacccu

SEQ ID NO: 3080263 - RNA, 19 nt, Artificial Sequence
  Description of Artificial Sequence: Synthetic oligonucleotide
acagcuguuuugggcuguc

SEQ ID NO: 3080264 - RNA, 19 nt, Artificial Sequence
  Description of Artificial Sequence: Synthetic oligonucleotide
ggguuaguccaaaaugguc

SEQ ID NO: 3080265 - RNA, 19 nt, Artificial Sequence
  Description of Artificial Sequence: Synthetic oligonucleotide
gaaugaccagccagcuuga

SEQ ID NO: 3080266 - RNA, 19 nt, Artificial Sequence
  Description of Artificial Sequence: Synthetic oligonucleotide
cauguucauccagcugaag

SEQ ID NO: 3080267 - RNA, 19 nt, Artificial Sequence
  Description of Artificial Sequence: Synthetic oligonucleotide
uagcagcaggaugcuaugu

SEQ ID NO: 3080268 - RNA, 19 nt, Artificial Sequence
  Description of Artificial Sequence: Synthetic oligonucleotide
cuugggagcuuccggcaca

SEQ ID NO: 3080269 - RNA, 19 nt, Artificial Sequence
  Description of Artificial Sequence: Synthetic oligonucleotide
gccuuuagugucauuccug

SEQ ID NO: 3080270 - RNA, 19 nt, Artificial Sequence
  Description of Artificial Sequence: Synthetic oligonucleotide
agcugaaggagcgggguua

SEQ ID NO: 3080271 - RNA, 19 nt, Artificial Sequence
  Description of Artificial Sequence: Synthetic oligonucleotide
acgugcagcuucaggagga

SEQ ID NO: 3080272 - RNA, 19 nt, Artificial Sequence
  Description of Artificial Sequence: Synthetic oligonucleotide
gcagcuucaggaggaaaug

SEQ ID NO: 3080273 - RNA, 19 nt, Artificial Sequence
  Description of Artificial Sequence: Synthetic oligonucleotide
gcccuugggagcuuccggc

SEQ ID NO: 3080274 - RNA, 19 nt, Artificial Sequence
  Description of Artificial Sequence: Synthetic oligonucleotide
caggaaggcucgguagcag

SEQ ID NO: 3080275 - RNA, 19 nt, Artificial Sequence
  Description of Artificial Sequence: Synthetic oligonucleotide
cucagggcugggucagcug

SEQ ID NO: 3080276 - RNA, 19 nt, Artificial Sequence
  Description of Artificial Sequence: Synthetic oligonucleotide
cauucuugaccuucaggau

SEQ ID NO: 3080277 - RNA, 19 nt, Artificial Sequence
  Description of Artificial Sequence: Synthetic oligonucleotide
gcagccucaaggauggcca

SEQ ID NO: 3080278 - RNA, 19 nt, Artificial Sequence
  Description of Artificial Sequence: Synthetic oligonucleotide
ggauggaguagcagcagga

SEQ ID NO: 3080279 - RNA, 19 nt, Artificial Sequence
  Description of Artificial Sequence: Synthetic oligonucleotide
gagacacuuguaggugaca

SEQ ID NO: 3080280 - RNA, 19 nt, Artificial Sequence
  Description of Artificial Sequence: Synthetic oligonucleotide
cuguccugaguggucccag

SEQ ID NO: 3080281 - RNA, 19 nt, Artificial Sequence
  Description of Artificial Sequence: Synthetic oligonucleotide
ggagacacuuguaggugac

SEQ ID NO: 3080282 - RNA, 19 nt, Artificial Sequence
  Description of Artificial Sequence: Synthetic oligonucleotide
cugggucagcugcagccuc

SEQ ID NO: 3080283 - RNA, 19 nt, Artificial Sequence
  Description of Artificial Sequence: Synthetic oligonucleotide
gugcucagggcugggucag

SEQ ID NO: 3080284 - RNA, 19 nt, Artificial Sequence
  Description of Artificial Sequence: Synthetic oligonucleotide
gagccaacgugcagcuuca

SEQ ID NO: 3080285 - RNA, 19 nt, Artificial Sequence
  Description of Artificial Sequence: Synthetic oligonucleotide
cagcuucaggaggaaauga

SEQ ID NO: 3080286 - RNA, 19 nt, Artificial Sequence
  Description of Artificial Sequence: Synthetic oligonucleotide
cacccuuggccuuuagugu

SEQ ID NO: 3080287 - RNA, 19 nt, Artificial Sequence
  Description of Artificial Sequence: Synthetic oligonucleotide
uguugcccuugggagcuuc

SEQ ID NO: 3080288 - RNA, 19 nt, Artificial Sequence
  Description of Artificial Sequence: Synthetic oligonucleotide
gcugaaggagcgggguuag

SEQ ID NO: 3080289 - RNA, 19 nt, Artificial Sequence
  Description of Artificial Sequence: Synthetic oligonucleotide
guugcccuugggagcuucc

SEQ ID NO: 3080290 - RNA, 19 nt, Artificial Sequence
  Description of Artificial Sequence: Synthetic oligonucleotide
ucuugaccuucaggaugga

SEQ ID NO: 3080291 - RNA, 19 nt, Artificial Sequence
  Description of Artificial Sequence: Synthetic oligonucleotide
aguggucccaggagacacu

SEQ ID NO: 3080292 - RNA, 19 nt, Artificial Sequence
  Description of Artificial Sequence: Synthetic oligonucleotide
ccaggagacacuuguaggu

SEQ ID NO: 3080293 - RNA, 19 nt, Artificial Sequence
  Description of Artificial Sequence: Synthetic oligonucleotide
ggaugcuauguuggagaug

SEQ ID NO: 3080294 - RNA, 19 nt, Artificial Sequence
  Description of Artificial Sequence: Synthetic oligonucleotide
gggagcuuccggcacagcu

SEQ ID NO: 3080295 - RNA, 19 nt, Artificial Sequence
  Description of Artificial Sequence: Synthetic oligonucleotide
gcacagcuguuuugggcug

SEQ ID NO: 3080296 - RNA, 19 nt, Artificial Sequence
  Description of Artificial Sequence: Synthetic oligonucleotide
gggcuguccugaguggucc

SEQ ID NO: 3080297 - RNA, 19 nt, Artificial Sequence
  Description of Artificial Sequence: Synthetic oligonucleotide
gugucauuccugcauucuu

SEQ ID NO: 3080298 - RNA, 19 nt, Artificial Sequence
  Description of Artificial Sequence: Synthetic oligonucleotide
ccugcauucuugaccuuca

SEQ ID NO: 3080299 - RNA, 19 nt, Artificial Sequence
  Description of Artificial Sequence: Synthetic oligonucleotide
guuuugggcuguccugagu

SEQ ID NO: 3080300 - RNA, 19 nt, Artificial Sequence
  Description of Artificial Sequence: Synthetic oligonucleotide
cagcuguuuugggcugucc

SEQ ID NO: 3080301 - RNA, 19 nt, Artificial Sequence
  Description of Artificial Sequence: Synthetic oligonucleotide
cucaaggauggccauuguu

SEQ ID NO: 3080302 - RNA, 19 nt, Artificial Sequence
  Description of Artificial Sequence: Synthetic oligonucleotide
ggccuuuagugucauuccu

SEQ ID NO: 3080303 - RNA, 19 nt, Artificial Sequence
  Description of Artificial Sequence: Synthetic oligonucleotide
cggcacagcuguuuugggc

SEQ ID NO: 3080304 - RNA, 19 nt, Artificial Sequence
  Description of Artificial Sequence: Synthetic oligonucleotide
ggcucgguagcagagccaa

SEQ ID NO: 3080305 - RNA, 19 nt, Artificial Sequence
  Description of Artificial Sequence: Synthetic oligonucleotide
ccuugggagcuuccggcac

SEQ ID NO: 3080306 - RNA, 19 nt, Artificial Sequence
  Description of Artificial Sequence: Synthetic oligonucleotide
agaggcacccuuggccuuu

SEQ ID NO: 3080307 - RNA, 19 nt, Artificial Sequence
  Description of Artificial Sequence: Synthetic oligonucleotide
ggcuguccugagugguccc

SEQ ID NO: 3080308 - RNA, 19 nt, Artificial Sequence
  Description of Artificial Sequence: Synthetic oligonucleotide
cagggcugggucagcugca

SEQ ID NO: 3080309 - RNA, 19 nt, Artificial Sequence
  Description of Artificial Sequence: Synthetic oligonucleotide
ccggcacagcuguuuuggg

SEQ ID NO: 3080310 - RNA, 19 nt, Artificial Sequence
  Description of Artificial Sequence: Synthetic oligonucleotide
gagcgggguuaguccaaaa

SEQ ID NO: 3080311 - RNA, 19 nt, Artificial Sequence
  Description of Artificial Sequence: Synthetic oligonucleotide
ugcucagggcugggucagc

SEQ ID NO: 3080312 - RNA, 19 nt, Artificial Sequence
  Description of Artificial Sequence: Synthetic oligonucleotide
gcaggaaggcucgguagca

SEQ ID NO: 3080313 - RNA, 19 nt, Artificial Sequence
  Description of Artificial Sequence: Synthetic oligonucleotide
gggguuaguccaaaauggu

SEQ ID NO: 3080314 - RNA, 19 nt, Artificial Sequence
  Description of Artificial Sequence: Synthetic oligonucleotide
aggcacccuuggccuuuag

SEQ ID NO: 3080315 - RNA, 19 nt, Artificial Sequence
  Description of Artificial Sequence: Synthetic oligonucleotide
agccaacgugcagcuucag

SEQ ID NO: 3080316 - RNA, 19 nt, Artificial Sequence
  Description of Artificial Sequence: Synthetic oligonucleotide
uuccugcauucuugaccuu

SEQ ID NO: 3080317 - RNA, 19 nt, Artificial Sequence
  Description of Artificial Sequence: Synthetic oligonucleotide
ccagaggcacccuuggccu

SEQ ID NO: 3080318 - RNA, 19 nt, Artificial Sequence
  Description of Artificial Sequence: Synthetic oligonucleotide
gaguagcagcaggaugcua

SEQ ID NO: 3080319 - RNA, 19 nt, Artificial Sequence
  Description of Artificial Sequence: Synthetic oligonucleotide
ugggagcuuccggcacagc

SEQ ID NO: 3080320 - RNA, 19 nt, Artificial Sequence
  Description of Artificial Sequence: Synthetic oligonucleotide
agccucaaggauggccauu

SEQ ID NO: 3080321 - RNA, 19 nt, Artificial Sequence
  Description of Artificial Sequence: Synthetic oligonucleotide
cgguagcagagccaacgug

SEQ ID NO: 3080322 - RNA, 19 nt, Artificial Sequence
  Description of Artificial Sequence: Synthetic oligonucleotide
aggagcgggguuaguccaa

SEQ ID NO: 3080323 - RNA, 19 nt, Artificial Sequence
  Description of Artificial Sequence: Synthetic oligonucleotide
cuuccggcacagcuguuuu

SEQ ID NO: 3080324 - RNA, 19 nt, Artificial Sequence
  Description of Artificial Sequence: Synthetic oligonucleotide
gugcagcuucaggaggaaa

SEQ ID NO: 3080325 - RNA, 19 nt, Artificial Sequence
  Description of Artificial Sequence: Synthetic oligonucleotide
ggauggccauuguugcccu

SEQ ID NO: 3080326 - RNA, 19 nt, Artificial Sequence
  Description of Artificial Sequence: Synthetic oligonucleotide
ggcacccuuggccuuuagu

SEQ ID NO: 3080327 - RNA, 19 nt, Artificial Sequence
  Description of Artificial Sequence: Synthetic oligonucleotide
cccuuggccuuuaguguca

SEQ ID NO: 3080328 - RNA, 19 nt, Artificial Sequence
  Description of Artificial Sequence: Synthetic oligonucleotide
gucccaggagacacuugua

SEQ ID NO: 3080329 - RNA, 19 nt, Artificial Sequence
  Description of Artificial Sequence: Synthetic oligonucleotide
cccuugggagcuuccggca

SEQ ID NO: 3080330 - RNA, 19 nt, Artificial Sequence
  Description of Artificial Sequence: Synthetic oligonucleotide
cagaaugaccagccagcuu

SEQ ID NO: 3080331 - RNA, 19 nt, Artificial Sequence
  Description of Artificial Sequence: Synthetic oligonucleotide
gcuguccugagugguccca

SEQ ID NO: 3080332 - RNA, 19 nt, Artificial Sequence
  Description of Artificial Sequence: Synthetic oligonucleotide
cagcuugagcaggaaggcu

SEQ ID NO: 3080333 - RNA, 19 nt, Artificial Sequence
  Description of Artificial Sequence: Synthetic oligonucleotide
ggaguagcagcaggaugcu

SEQ ID NO: 3080334 - RNA, 19 nt, Artificial Sequence
  Description of Artificial Sequence: Synthetic oligonucleotide
guggucccaggagacacuu

SEQ ID NO: 3080335 - RNA, 19 nt, Artificial Sequence
  Description of Artificial Sequence: Synthetic oligonucleotide
gauggccauuguugcccuu

SEQ ID NO: 3080336 - RNA, 19 nt, Artificial Sequence
  Description of Artificial Sequence: Synthetic oligonucleotide
augcuauguuggagaugau

SEQ ID NO: 3080337 - RNA, 19 nt, Artificial Sequence
  Description of Artificial Sequence: Synthetic oligonucleotide
ggagcgggguuaguccaaa

SEQ ID NO: 3080338 - RNA, 19 nt, Artificial Sequence
  Description of Artificial Sequence: Synthetic oligonucleotide
cugcagccucaaggauggc

SEQ ID NO: 3080339 - RNA, 19 nt, Artificial Sequence
  Description of Artificial Sequence: Synthetic oligonucleotide
uuguugcccuugggagcuu

SEQ ID NO: 3080340 - RNA, 19 nt, Artificial Sequence
  Description of Artificial Sequence: Synthetic oligonucleotide
gcugggucagcugcagccu

SEQ ID NO: 3080341 - RNA, 19 nt, Artificial Sequence
  Description of Artificial Sequence: Synthetic oligonucleotide
cagcugaaggagcgggguu

SEQ ID NO: 3080342 - RNA, 19 nt, Artificial Sequence
  Description of Artificial Sequence: Synthetic oligonucleotide
gaggcacccuuggccuuua

SEQ ID NO: 3080343 - RNA, 19 nt, Artificial Sequence
  Description of Artificial Sequence: Synthetic oligonucleotide
gcucgguagcagagccaac

SEQ ID NO: 3080344 - RNA, 19 nt, Artificial Sequence
  Description of Artificial Sequence: Synthetic oligonucleotide
gcuuccggcacagcuguuu

SEQ ID NO: 3080345 - RNA, 19 nt, Artificial Sequence
  Description of Artificial Sequence: Synthetic oligonucleotide
cagaggcacccuuggccuu

SEQ ID NO: 3080346 - RNA, 19 nt, Artificial Sequence
  Description of Artificial Sequence: Synthetic oligonucleotide
gcucagggcugggucagcu

SEQ ID NO: 3080347 - RNA, 19 nt, Artificial Sequence
  Description of Artificial Sequence: Synthetic oligonucleotide
cuuggccuuuagugucauu

SEQ ID NO: 3080348 - RNA, 19 nt, Artificial Sequence
  Description of Artificial Sequence: Synthetic oligonucleotide
cugaaggagcgggguuagu

SEQ ID NO: 3080349 - RNA, 19 nt, Artificial Sequence
  Description of Artificial Sequence: Synthetic oligonucleotide
agcuuccggcacagcuguu

SEQ ID NO: 3080350 - RNA, 19 nt, Artificial Sequence
  Description of Artificial Sequence: Synthetic oligonucleotide
ccucaaggauggccauugu

SEQ ID NO: 3080351 - RNA, 19 nt, Artificial Sequence
  Description of Artificial Sequence: Synthetic oligonucleotide
cgugcagcuucaggaggaa

SEQ ID NO: 3080352 - RNA, 19 nt, Artificial Sequence
  Description of Artificial Sequence: Synthetic oligonucleotide
cagagccaacgugcagcuu

SEQ ID NO: 3080353 - RNA, 19 nt, Artificial Sequence
  Description of Artificial Sequence: Synthetic oligonucleotide
ccuuggccuuuagugucau

SEQ ID NO: 3080354 - RNA, 19 nt, Artificial Sequence
  Description of Artificial Sequence: Synthetic oligonucleotide
aaaagcaugagucagaagu

SEQ ID NO: 3080355 - RNA, 19 nt, Artificial Sequence
  Description of Artificial Sequence: Synthetic oligonucleotide
agaaauaaguuauuuauuc

SEQ ID NO: 3080356 - RNA, 19 nt, Artificial Sequence
  Description of Artificial Sequence: Synthetic oligonucleotide
aacauauucauuugcauug

SEQ ID NO: 3080357 - RNA, 19 nt, Artificial Sequence
  Description of Artificial Sequence: Synthetic oligonucleotide
aaaccaguauaucuguucc

SEQ ID NO: 3080358 - RNA, 19 nt, Artificial Sequence
  Description of Artificial Sequence: Synthetic oligonucleotide
uuuuaaaccaguauaucug

SEQ ID NO: 3080359 - RNA, 19 nt, Artificial Sequence
  Description of Artificial Sequence: Synthetic oligonucleotide
uuauucacuacaacuauag

SEQ ID NO: 3080360 - RNA, 19 nt, Artificial Sequence
  Description of Artificial Sequence: Synthetic oligonucleotide
aaguuauuuauucauaaaa

SEQ ID NO: 3080361 - RNA, 19 nt, Artificial Sequence
  Description of Artificial Sequence: Synthetic oligonucleotide
acaacuauagaaugaaauc

SEQ ID NO: 3080362 - RNA, 19 nt, Artificial Sequence
  Description of Artificial Sequence: Synthetic oligonucleotide
aaauaaguuauuuauucau

SEQ ID NO: 3080363 - RNA, 19 nt, Artificial Sequence
  Description of Artificial Sequence: Synthetic oligonucleotide
uuacuaacccauaacauug

SEQ ID NO: 3080364 - RNA, 19 nt, Artificial Sequence
  Description of Artificial Sequence: Synthetic oligonucleotide
uauuuuaaaugcaaucuug

SEQ ID NO: 3080365 - RNA, 19 nt, Artificial Sequence
  Description of Artificial Sequence: Synthetic oligonucleotide
aaugcaaucuugucuuuac

SEQ ID NO: 3080366 - RNA, 19 nt, Artificial Sequence
  Description of Artificial Sequence: Synthetic oligonucleotide
ucagaaguugcuuugaaga

SEQ ID NO: 3080367 - RNA, 19 nt, Artificial Sequence
  Description of Artificial Sequence: Synthetic oligonucleotide
aaucccaccucauuugugg

SEQ ID NO: 3080368 - RNA, 19 nt, Artificial Sequence
  Description of Artificial Sequence: Synthetic oligonucleotide
aaugaaaucaucucaccau

SEQ ID NO: 3080369 - RNA, 19 nt, Artificial Sequence
  Description of Artificial Sequence: Synthetic oligonucleotide
uugauuacaaaucccaccu

SEQ ID NO: 3080370 - RNA, 19 nt, Artificial Sequence
  Description of Artificial Sequence: Synthetic oligonucleotide
auaacauuggcuuuguggu

SEQ ID NO: 3080371 - RNA, 19 nt, Artificial Sequence
  Description of Artificial Sequence: Synthetic oligonucleotide
uauucauuugcauuguuga

SEQ ID NO: 3080372 - RNA, 19 nt, Artificial Sequence
  Description of Artificial Sequence: Synthetic oligonucleotide
aacauuggcuuuguggucc

SEQ ID NO: 3080373 - RNA, 19 nt, Artificial Sequence
  Description of Artificial Sequence: Synthetic oligonucleotide
uauaucuguuccuaaaagc

SEQ ID NO: 3080374 - RNA, 19 nt, Artificial Sequence
  Description of Artificial Sequence: Synthetic oligonucleotide
auuauuuuaaaugcaaucu

SEQ ID NO: 3080375 - RNA, 19 nt, Artificial Sequence
  Description of Artificial Sequence: Synthetic oligonucleotide
uucacuacaacuauagaau

SEQ ID NO: 3080376 - RNA, 19 nt, Artificial Sequence
  Description of Artificial Sequence: Synthetic oligonucleotide
gauuauuuuaaaugcaauc

SEQ ID NO: 3080377 - RNA, 19 nt, Artificial Sequence
  Description of Artificial Sequence: Synthetic oligonucleotide
ugucuuauucacuacaacu

SEQ ID NO: 3080378 - RNA, 19 nt, Artificial Sequence
  Description of Artificial Sequence: Synthetic oligonucleotide
auagaaugaaaucaucuca

SEQ ID NO: 3080379 - RNA, 19 nt, Artificial Sequence
  Description of Artificial Sequence: Synthetic oligonucleotide
uggaauguucccuagaggu

SEQ ID NO: 3080380 - RNA, 19 nt, Artificial Sequence
  Description of Artificial Sequence: Synthetic oligonucleotide
uacaacuauagaaugaaau

SEQ ID NO: 3080381 - RNA, 19 nt, Artificial Sequence
  Description of Artificial Sequence: Synthetic oligonucleotide
uuguugauuacaaauccca

SEQ ID NO: 3080382 - RNA, 19 nt, Artificial Sequence
  Description of Artificial Sequence: Synthetic oligonucleotide
auucacuacaacuauagaa

SEQ ID NO: 3080383 - RNA, 19 nt, Artificial Sequence
  Description of Artificial Sequence: Synthetic oligonucleotide
uguggaauguucccuagag

SEQ ID NO: 3080384 - RNA, 19 nt, Artificial Sequence
  Description of Artificial Sequence: Synthetic oligonucleotide
cauuguugauuacaaaucc

SEQ ID NO: 3080385 - RNA, 19 nt, Artificial Sequence
  Description of Artificial Sequence: Synthetic oligonucleotide
uauagaaugaaaucaucuc

SEQ ID NO: 3080386 - RNA, 19 nt, Artificial Sequence
  Description of Artificial Sequence: Synthetic oligonucleotide
cuugucuuuaccugcauag

SEQ ID NO: 3080387 - RNA, 19 nt, Artificial Sequence
  Description of Artificial Sequence: Synthetic oligonucleotide
uagaaugaaaucaucucac

SEQ ID NO: 3080388 - RNA, 19 nt, Artificial Sequence
  Description of Artificial Sequence: Synthetic oligonucleotide
aaaacauauucauuugcau

SEQ ID NO: 3080389 - RNA, 19 nt, Artificial Sequence
  Description of Artificial Sequence: Synthetic oligonucleotide
ugcauuguugauuacaaau

SEQ ID NO: 3080390 - RNA, 19 nt, Artificial Sequence
  Description of Artificial Sequence: Synthetic oligonucleotide
auaaguuauuuauucauaa

SEQ ID NO: 3080391 - RNA, 19 nt, Artificial Sequence
  Description of Artificial Sequence: Synthetic oligonucleotide
aguugcuuugaagaggacc

SEQ ID NO: 3080392 - RNA, 19 nt, Artificial Sequence
  Description of Artificial Sequence: Synthetic oligonucleotide
uguuacucuguuacuaacc

SEQ ID NO: 3080393 - RNA, 19 nt, Artificial Sequence
  Description of Artificial Sequence: Synthetic oligonucleotide
augaaaucaucucaccauc

SEQ ID NO: 3080394 - RNA, 19 nt, Artificial Sequence
  Description of Artificial Sequence: Synthetic oligonucleotide
uuuaaaccaguauaucugu

SEQ ID NO: 3080395 - RNA, 19 nt, Artificial Sequence
  Description of Artificial Sequence: Synthetic oligonucleotide
uuugcauuguugauuacaa

SEQ ID NO: 3080396 - RNA, 19 nt, Artificial Sequence
  Description of Artificial Sequence: Synthetic oligonucleotide
guugauuacaaaucccacc

SEQ ID NO: 3080397 - RNA, 19 nt, Artificial Sequence
  Description of Artificial Sequence: Synthetic oligonucleotide
ugucuuuaccugcauagug

SEQ ID NO: 3080398 - RNA, 19 nt, Artificial Sequence
  Description of Artificial Sequence: Synthetic oligonucleotide
ugaagaggaccccaaagga

SEQ ID NO: 3080399 - RNA, 19 nt, Artificial Sequence
  Description of Artificial Sequence: Synthetic oligonucleotide
uuauuuuaaaugcaaucuu

SEQ ID NO: 3080400 - RNA, 19 nt, Artificial Sequence
  Description of Artificial Sequence: Synthetic oligonucleotide
guuccuaaaagcaugaguc

SEQ ID NO: 3080401 - RNA, 19 nt, Artificial Sequence
  Description of Artificial Sequence: Synthetic oligonucleotide
auuguugauuacaaauccc

SEQ ID NO: 3080402 - RNA, 19 nt, Artificial Sequence
  Description of Artificial Sequence: Synthetic oligonucleotide
cucauuuguggaauguucc

SEQ ID NO: 3080403 - RNA, 19 nt, Artificial Sequence
  Description of Artificial Sequence: Synthetic oligonucleotide
uaacccauaacauuggcuu

SEQ ID NO: 3080404 - RNA, 19 nt, Artificial Sequence
  Description of Artificial Sequence: Synthetic oligonucleotide
gugacuguuacucuguuac

SEQ ID NO: 3080405 - RNA, 19 nt, Artificial Sequence
  Description of Artificial Sequence: Synthetic oligonucleotide
guauaucuguuccuaaaag

SEQ ID NO: 3080406 - RNA, 19 nt, Artificial Sequence
  Description of Artificial Sequence: Synthetic oligonucleotide
guuacucuguuacuaaccc

SEQ ID NO: 3080407 - RNA, 19 nt, Artificial Sequence
  Description of Artificial Sequence: Synthetic oligonucleotide
uguuggaugugacuguuac

SEQ ID NO: 3080408 - RNA, 19 nt, Artificial Sequence
  Description of Artificial Sequence: Synthetic oligonucleotide
acuaacccauaacauuggc

SEQ ID NO: 3080409 - RNA, 19 nt, Artificial Sequence
  Description of Artificial Sequence: Synthetic oligonucleotide
gaaugaaaucaucucacca

SEQ ID NO: 3080410 - RNA, 19 nt, Artificial Sequence
  Description of Artificial Sequence: Synthetic oligonucleotide
uguuacuaacccauaacau

SEQ ID NO: 3080411 - RNA, 19 nt, Artificial Sequence
  Description of Artificial Sequence: Synthetic oligonucleotide
auaagaaauaaguuauuua

SEQ ID NO: 3080412 - RNA, 19 nt, Artificial Sequence
  Description of Artificial Sequence: Synthetic oligonucleotide
ugaaaucaucucaccaucc

SEQ ID NO: 3080413 - RNA, 19 nt, Artificial Sequence
  Description of Artificial Sequence: Synthetic oligonucleotide
ucuguuacuaacccauaac

SEQ ID NO: 3080414 - RNA, 19 nt, Artificial Sequence
  Description of Artificial Sequence: Synthetic oligonucleotide
aaucaucucaccauccuug

SEQ ID NO: 3080415 - RNA, 19 nt, Artificial Sequence
  Description of Artificial Sequence: Synthetic oligonucleotide
ugcaaucuugucuuuaccu

SEQ ID NO: 3080416 - RNA, 19 nt, Artificial Sequence
  Description of Artificial Sequence: Synthetic oligonucleotide
guugcuuugaagaggaccc

SEQ ID NO: 3080417 - RNA, 19 nt, Artificial Sequence
  Description of Artificial Sequence: Synthetic oligonucleotide
ucuuauucacuacaacuau

SEQ ID NO: 3080418 - RNA, 19 nt, Artificial Sequence
  Description of Artificial Sequence: Synthetic oligonucleotide
ucacuacaacuauagaaug

SEQ ID NO: 3080419 - RNA, 19 nt, Artificial Sequence
  Description of Artificial Sequence: Synthetic oligonucleotide
uacucuguuacuaacccau

SEQ ID NO: 3080420 - RNA, 19 nt, Artificial Sequence
  Description of Artificial Sequence: Synthetic oligonucleotide
uauaagaaauaaguuauuu

SEQ ID NO: 3080421 - RNA, 19 nt, Artificial Sequence
  Description of Artificial Sequence: Synthetic oligonucleotide
ucauuugcauuguugauua

SEQ ID NO: 3080422 - RNA, 19 nt, Artificial Sequence
  Description of Artificial Sequence: Synthetic oligonucleotide
uuggaugugacuguuacuc

SEQ ID NO: 3080423 - RNA, 19 nt, Artificial Sequence
  Description of Artificial Sequence: Synthetic oligonucleotide
ugcauagugucuuauucac

SEQ ID NO: 3080424 - RNA, 19 nt, Artificial Sequence
  Description of Artificial Sequence: Synthetic oligonucleotide
cauauaagaaauaaguuau

SEQ ID NO: 3080425 - RNA, 19 nt, Artificial Sequence
  Description of Artificial Sequence: Synthetic oligonucleotide
uacuaacccauaacauugg

SEQ ID NO: 3080426 - RNA, 19 nt, Artificial Sequence
  Description of Artificial Sequence: Synthetic oligonucleotide
uacaaaucccaccucauuu

SEQ ID NO: 3080427 - RNA, 19 nt, Artificial Sequence
  Description of Artificial Sequence: Synthetic oligonucleotide
uguugauuacaaaucccac

SEQ ID NO: 3080428 - RNA, 19 nt, Artificial Sequence
  Description of Artificial Sequence: Synthetic oligonucleotide
auaucuguuccuaaaagca

SEQ ID NO: 3080429 - RNA, 19 nt, Artificial Sequence
  Description of Artificial Sequence: Synthetic oligonucleotide
agaaguugcuuugaagagg

SEQ ID NO: 3080430 - RNA, 19 nt, Artificial Sequence
  Description of Artificial Sequence: Synthetic oligonucleotide
uccuaaaagcaugagucag

SEQ ID NO: 3080431 - RNA, 19 nt, Artificial Sequence
  Description of Artificial Sequence: Synthetic oligonucleotide
ucuguuccuaaaagcauga

SEQ ID NO: 3080432 - RNA, 19 nt, Artificial Sequence
  Description of Artificial Sequence: Synthetic oligonucleotide
ucauuuguggaauguuccc

SEQ ID NO: 3080433 - RNA, 19 nt, Artificial Sequence
  Description of Artificial Sequence: Synthetic oligonucleotide
acaaaucccaccucauuug

SEQ ID NO: 3080434 - RNA, 19 nt, Artificial Sequence
  Description of Artificial Sequence: Synthetic oligonucleotide
auagugucuuauucacuac

SEQ ID NO: 3080435 - RNA, 19 nt, Artificial Sequence
  Description of Artificial Sequence: Synthetic oligonucleotide
ugagucagaaguugcuuug

SEQ ID NO: 3080436 - RNA, 19 nt, Artificial Sequence
  Description of Artificial Sequence: Synthetic oligonucleotide
aacuauagaaugaaaucau

SEQ ID NO: 3080437 - RNA, 19 nt, Artificial Sequence
  Description of Artificial Sequence: Synthetic oligonucleotide
uggccauauaagaaauaag

SEQ ID NO: 3080438 - RNA, 19 nt, Artificial Sequence
  Description of Artificial Sequence: Synthetic oligonucleotide
aguauaucuguuccuaaaa

SEQ ID NO: 3080439 - RNA, 19 nt, Artificial Sequence
  Description of Artificial Sequence: Synthetic oligonucleotide
augcaaucuugucuuuacc

SEQ ID NO: 3080440 - RNA, 19 nt, Artificial Sequence
  Description of Artificial Sequence: Synthetic oligonucleotide
uccugugucaucuuuuaaa

SEQ ID NO: 3080441 - RNA, 19 nt, Artificial Sequence
  Description of Artificial Sequence: Synthetic oligonucleotide
caacuauagaaugaaauca

SEQ ID NO: 3080442 - RNA, 19 nt, Artificial Sequence
  Description of Artificial Sequence: Synthetic oligonucleotide
auuuuaaaugcaaucuugu

SEQ ID NO: 3080443 - RNA, 19 nt, Artificial Sequence
  Description of Artificial Sequence: Synthetic oligonucleotide
cuuuuaaaccaguauaucu

SEQ ID NO: 3080444 - RNA, 19 nt, Artificial Sequence
  Description of Artificial Sequence: Synthetic oligonucleotide
cuagaggugacacauccuc

SEQ ID NO: 3080445 - RNA, 19 nt, Artificial Sequence
  Description of Artificial Sequence: Synthetic oligonucleotide
uuggccauauaagaaauaa

SEQ ID NO: 3080446 - RNA, 19 nt, Artificial Sequence
  Description of Artificial Sequence: Synthetic oligonucleotide
acuauagaaugaaaucauc

SEQ ID NO: 3080447 - RNA, 19 nt, Artificial Sequence
  Description of Artificial Sequence: Synthetic oligonucleotide
cagaaguugcuuugaagag

SEQ ID NO: 3080448 - RNA, 19 nt, Artificial Sequence
  Description of Artificial Sequence: Synthetic oligonucleotide
uuccuaaaagcaugaguca

SEQ ID NO: 3080449 - RNA, 19 nt, Artificial Sequence
  Description of Artificial Sequence: Synthetic oligonucleotide
uauucacuacaacuauaga

SEQ ID NO: 3080450 - RNA, 19 nt, Artificial Sequence
  Description of Artificial Sequence: Synthetic oligonucleotide
uaucuguuccuaaaagcau

SEQ ID NO: 3080451 - RNA, 19 nt, Artificial Sequence
  Description of Artificial Sequence: Synthetic oligonucleotide
uuuguggaauguucccuag

SEQ ID NO: 3080452 - RNA, 19 nt, Artificial Sequence
  Description of Artificial Sequence: Synthetic oligonucleotide
aaaucaucucaccauccuu

SEQ ID NO: 3080453 - RNA, 19 nt, Artificial Sequence
  Description of Artificial Sequence: Synthetic oligonucleotide
gaaguugcuuugaagagga

SEQ ID NO: 3080454 - RNA, 19 nt, Artificial Sequence
  Description of Artificial Sequence: Synthetic oligonucleotide
cuguuacuaacccauaaca

SEQ ID NO: 3080455 - RNA, 19 nt, Artificial Sequence
  Description of Artificial Sequence: Synthetic oligonucleotide
acuacaacuauagaaugaa

SEQ ID NO: 3080456 - RNA, 19 nt, Artificial Sequence
  Description of Artificial Sequence: Synthetic oligonucleotide
caucuuuuaaaccaguaua

SEQ ID NO: 3080457 - RNA, 19 nt, Artificial Sequence
  Description of Artificial Sequence: Synthetic oligonucleotide
auauucauuugcauuguug

SEQ ID NO: 3080458 - RNA, 19 nt, Artificial Sequence
  Description of Artificial Sequence: Synthetic oligonucleotide
aagaaauaaguuauuuauu

SEQ ID NO: 3080459 - RNA, 19 nt, Artificial Sequence
  Description of Artificial Sequence: Synthetic oligonucleotide
agcaugagucagaaguugc

SEQ ID NO: 3080460 - RNA, 19 nt, Artificial Sequence
  Description of Artificial Sequence: Synthetic oligonucleotide
uccuuggccauauaagaaa

SEQ ID NO: 3080461 - RNA, 19 nt, Artificial Sequence
  Description of Artificial Sequence: Synthetic oligonucleotide
agaggugacacauccucug

SEQ ID NO: 3080462 - RNA, 19 nt, Artificial Sequence
  Description of Artificial Sequence: Synthetic oligonucleotide
cuauagaaugaaaucaucu

SEQ ID NO: 3080463 - RNA, 19 nt, Artificial Sequence
  Description of Artificial Sequence: Synthetic oligonucleotide
ucuuuaccugcauaguguc

SEQ ID NO: 3080464 - RNA, 19 nt, Artificial Sequence
  Description of Artificial Sequence: Synthetic oligonucleotide
auuugcauuguugauuaca

SEQ ID NO: 3080465 - RNA, 19 nt, Artificial Sequence
  Description of Artificial Sequence: Synthetic oligonucleotide
gucagaaguugcuuugaag

SEQ ID NO: 3080466 - RNA, 19 nt, Artificial Sequence
  Description of Artificial Sequence: Synthetic oligonucleotide
aagcaugagucagaaguug

SEQ ID NO: 3080467 - RNA, 19 nt, Artificial Sequence
  Description of Artificial Sequence: Synthetic oligonucleotide
gaauguucccuagagguga

SEQ ID NO: 3080468 - RNA, 19 nt, Artificial Sequence
  Description of Artificial Sequence: Synthetic oligonucleotide
ucuuuuaaaccaguauauc

SEQ ID NO: 3080469 - RNA, 19 nt, Artificial Sequence
  Description of Artificial Sequence: Synthetic oligonucleotide
cauagugucuuauucacua

SEQ ID NO: 3080470 - RNA, 19 nt, Artificial Sequence
  Description of Artificial Sequence: Synthetic oligonucleotide
uucauuugcauuguugauu

SEQ ID NO: 3080471 - RNA, 19 nt, Artificial Sequence
  Description of Artificial Sequence: Synthetic oligonucleotide
cugugucaucuuuuaaacc

SEQ ID NO: 3080472 - RNA, 19 nt, Artificial Sequence
  Description of Artificial Sequence: Synthetic oligonucleotide
aucuuuuaaaccaguauau

SEQ ID NO: 3080473 - RNA, 19 nt, Artificial Sequence
  Description of Artificial Sequence: Synthetic oligonucleotide
uuuaccugcauagugucuu

SEQ ID NO: 3080474 - RNA, 19 nt, Artificial Sequence
  Description of Artificial Sequence: Synthetic oligonucleotide
gugacacauccucuguugg

SEQ ID NO: 3080475 - RNA, 19 nt, Artificial Sequence
  Description of Artificial Sequence: Synthetic oligonucleotide
guggaauguucccuagagg

SEQ ID NO: 3080476 - RNA, 19 nt, Artificial Sequence
  Description of Artificial Sequence: Synthetic oligonucleotide
uuacucuguuacuaaccca

SEQ ID NO: 3080477 - RNA, 19 nt, Artificial Sequence
  Description of Artificial Sequence: Synthetic oligonucleotide
cauccuuggccauauaaga

SEQ ID NO: 3080478 - RNA, 19 nt, Artificial Sequence
  Description of Artificial Sequence: Synthetic oligonucleotide
uaaaagcaugagucagaag

SEQ ID NO: 3080479 - RNA, 19 nt, Artificial Sequence
  Description of Artificial Sequence: Synthetic oligonucleotide
acuguuacucuguuacuaa

SEQ ID NO: 3080480 - RNA, 19 nt, Artificial Sequence
  Description of Artificial Sequence: Synthetic oligonucleotide
aauguucccuagaggugac

SEQ ID NO: 3080481 - RNA, 19 nt, Artificial Sequence
  Description of Artificial Sequence: Synthetic oligonucleotide
uagaggugacacauccucu

SEQ ID NO: 3080482 - RNA, 19 nt, Artificial Sequence
  Description of Artificial Sequence: Synthetic oligonucleotide
auucauuugcauuguugau

SEQ ID NO: 3080483 - RNA, 19 nt, Artificial Sequence
  Description of Artificial Sequence: Synthetic oligonucleotide
aucuguuccuaaaagcaug

SEQ ID NO: 3080484 - RNA, 19 nt, Artificial Sequence
  Description of Artificial Sequence: Synthetic oligonucleotide
uuacaaaucccaccucauu

SEQ ID NO: 3080485 - RNA, 19 nt, Artificial Sequence
  Description of Artificial Sequence: Synthetic oligonucleotide
auuuguggaauguucccua

SEQ ID NO: 3080486 - RNA, 19 nt, Artificial Sequence
  Description of Artificial Sequence: Synthetic oligonucleotide
uuaaaccaguauaucuguu

SEQ ID NO: 3080487 - RNA, 19 nt, Artificial Sequence
  Description of Artificial Sequence: Synthetic oligonucleotide
ugacacauccucuguugga

SEQ ID NO: 3080488 - RNA, 19 nt, Artificial Sequence
  Description of Artificial Sequence: Synthetic oligonucleotide
uucccuagaggugacacau

SEQ ID NO: 3080489 - RNA, 19 nt, Artificial Sequence
  Description of Artificial Sequence: Synthetic oligonucleotide
gcaaucuugucuuuaccug

SEQ ID NO: 3080490 - RNA, 19 nt, Artificial Sequence
  Description of Artificial Sequence: Synthetic oligonucleotide
ugauuacaaaucccaccuc

SEQ ID NO: 3080491 - RNA, 19 nt, Artificial Sequence
  Description of Artificial Sequence: Synthetic oligonucleotide
cuguuacucuguuacuaac

SEQ ID NO: 3080492 - RNA, 19 nt, Artificial Sequence
  Description of Artificial Sequence: Synthetic oligonucleotide
uguucccuagaggugacac

SEQ ID NO: 3080493 - RNA, 19 nt, Artificial Sequence
  Description of Artificial Sequence: Synthetic oligonucleotide
aaagcaugagucagaaguu

SEQ ID NO: 3080494 - RNA, 19 nt, Artificial Sequence
  Description of Artificial Sequence: Synthetic oligonucleotide
guuacuaacccauaacauu

SEQ ID NO: 3080495 - RNA, 19 nt, Artificial Sequence
  Description of Artificial Sequence: Synthetic oligonucleotide
augagucagaaguugcuuu

SEQ ID NO: 3080496 - RNA, 19 nt, Artificial Sequence
  Description of Artificial Sequence: Synthetic oligonucleotide
cacuacaacuauagaauga

SEQ ID NO: 3080497 - RNA, 19 nt, Artificial Sequence
  Description of Artificial Sequence: Synthetic oligonucleotide
ucuugucuuuaccugcaua

SEQ ID NO: 3080498 - RNA, 19 nt, Artificial Sequence
  Description of Artificial Sequence: Synthetic oligonucleotide
uuguggaauguucccuaga

SEQ ID NO: 3080499 - RNA, 19 nt, Artificial Sequence
  Description of Artificial Sequence: Synthetic oligonucleotide
gaaaucaucucaccauccu

SEQ ID NO: 3080500 - RNA, 19 nt, Artificial Sequence
  Description of Artificial Sequence: Synthetic oligonucleotide
aacccauaacauuggcuuu

SEQ ID NO: 3080501 - RNA, 19 nt, Artificial Sequence
  Description of Artificial Sequence: Synthetic oligonucleotide
ucaucucaccauccuuggc

SEQ ID NO: 3080502 - RNA, 19 nt, Artificial Sequence
  Description of Artificial Sequence: Synthetic oligonucleotide
ccugugucaucuuuuaaac

SEQ ID NO: 3080503 - RNA, 19 nt, Artificial Sequence
  Description of Artificial Sequence: Synthetic oligonucleotide
gucuuauucacuacaacua

SEQ ID NO: 3080504 - RNA, 19 nt, Artificial Sequence
  Description of Artificial Sequence: Synthetic oligonucleotide
ggaugugacuguuacucug

SEQ ID NO: 3080505 - RNA, 19 nt, Artificial Sequence
  Description of Artificial Sequence: Synthetic oligonucleotide
aaaugcaaucuugucuuua

SEQ ID NO: 3080506 - RNA, 19 nt, Artificial Sequence
  Description of Artificial Sequence: Synthetic oligonucleotide
ggugacacauccucuguug

SEQ ID NO: 3080507 - RNA, 19 nt, Artificial Sequence
  Description of Artificial Sequence: Synthetic oligonucleotide
uugugguccugugucaucu

SEQ ID NO: 3080508 - RNA, 19 nt, Artificial Sequence
  Description of Artificial Sequence: Synthetic oligonucleotide
uaacauuggcuuugugguc

SEQ ID NO: 3080509 - RNA, 19 nt, Artificial Sequence
  Description of Artificial Sequence: Synthetic oligonucleotide
cugcauagugucuuauuca

SEQ ID NO: 3080510 - RNA, 19 nt, Artificial Sequence
  Description of Artificial Sequence: Synthetic oligonucleotide
uuggcuuugugguccugug

SEQ ID NO: 3080511 - RNA, 19 nt, Artificial Sequence
  Description of Artificial Sequence: Synthetic oligonucleotide
uccucuguuggaugugacu

SEQ ID NO: 3080512 - RNA, 19 nt, Artificial Sequence
  Description of Artificial Sequence: Synthetic oligonucleotide
aaaucccaccucauuugug

SEQ ID NO: 3080513 - RNA, 19 nt, Artificial Sequence
  Description of Artificial Sequence: Synthetic oligonucleotide
gugucuuauucacuacaac

SEQ ID NO: 3080514 - RNA, 19 nt, Artificial Sequence
  Description of Artificial Sequence: Synthetic oligonucleotide
ugacuguuacucuguuacu

SEQ ID NO: 3080515 - RNA, 19 nt, Artificial Sequence
  Description of Artificial Sequence: Synthetic oligonucleotide
cuuauucacuacaacuaua

SEQ ID NO: 3080516 - RNA, 19 nt, Artificial Sequence
  Description of Artificial Sequence: Synthetic oligonucleotide
acccauaacauuggcuuug

SEQ ID NO: 3080517 - RNA, 19 nt, Artificial Sequence
  Description of Artificial Sequence: Synthetic oligonucleotide
ggccauauaagaaauaagu

SEQ ID NO: 3080518 - RNA, 19 nt, Artificial Sequence
  Description of Artificial Sequence: Synthetic oligonucleotide
ugcuuugaagaggacccca

SEQ ID NO: 3080519 - RNA, 19 nt, Artificial Sequence
  Description of Artificial Sequence: Synthetic oligonucleotide
acauauucauuugcauugu

SEQ ID NO: 3080520 - RNA, 19 nt, Artificial Sequence
  Description of Artificial Sequence: Synthetic oligonucleotide
cuaaaagcaugagucagaa

SEQ ID NO: 3080521 - RNA, 19 nt, Artificial Sequence
  Description of Artificial Sequence: Synthetic oligonucleotide
ccauccuuggccauauaag

SEQ ID NO: 3080522 - RNA, 19 nt, Artificial Sequence
  Description of Artificial Sequence: Synthetic oligonucleotide
acacauccucuguuggaug

SEQ ID NO: 3080523 - RNA, 19 nt, Artificial Sequence
  Description of Artificial Sequence: Synthetic oligonucleotide
uugcauuguugauuacaaa

SEQ ID NO: 3080524 - RNA, 19 nt, Artificial Sequence
  Description of Artificial Sequence: Synthetic oligonucleotide
uugucuuuaccugcauagu

SEQ ID NO: 3080525 - RNA, 19 nt, Artificial Sequence
  Description of Artificial Sequence: Synthetic oligonucleotide
agugucuuauucacuacaa

SEQ ID NO: 3080526 - RNA, 19 nt, Artificial Sequence
  Description of Artificial Sequence: Synthetic oligonucleotide
gacuguuacucuguuacua

SEQ ID NO: 3080527 - RNA, 19 nt, Artificial Sequence
  Description of Artificial Sequence: Synthetic oligonucleotide
agucagaaguugcuuugaa

SEQ ID NO: 3080528 - RNA, 19 nt, Artificial Sequence
  Description of Artificial Sequence: Synthetic oligonucleotide
gcauuguugauuacaaauc

SEQ ID NO: 3080529 - RNA, 19 nt, Artificial Sequence
  Description of Artificial Sequence: Synthetic oligonucleotide
ccugcauagugucuuauuc

SEQ ID NO: 3080530 - RNA, 19 nt, Artificial Sequence
  Description of Artificial Sequence: Synthetic oligonucleotide
auauaagaaauaaguuauu

SEQ ID NO: 3080531 - RNA, 19 nt, Artificial Sequence
  Description of Artificial Sequence: Synthetic oligonucleotide
cccuagaggugacacaucc

SEQ ID NO: 3080532 - RNA, 19 nt, Artificial Sequence
  Description of Artificial Sequence: Synthetic oligonucleotide
auuacaaaucccaccucau

SEQ ID NO: 3080533 - RNA, 19 nt, Artificial Sequence
  Description of Artificial Sequence: Synthetic oligonucleotide
ggcuuugugguccuguguc

SEQ ID NO: 3080534 - RNA, 19 nt, Artificial Sequence
  Description of Artificial Sequence: Synthetic oligonucleotide
caguauaucuguuccuaaa

SEQ ID NO: 3080535 - RNA, 19 nt, Artificial Sequence
  Description of Artificial Sequence: Synthetic oligonucleotide
accaguauaucuguuccua

SEQ ID NO: 3080536 - RNA, 19 nt, Artificial Sequence
  Description of Artificial Sequence: Synthetic oligonucleotide
uggcuuugugguccugugu

SEQ ID NO: 3080537 - RNA, 19 nt, Artificial Sequence
  Description of Artificial Sequence: Synthetic oligonucleotide
uaaaugcaaucuugucuuu

SEQ ID NO: 3080538 - RNA, 19 nt, Artificial Sequence
  Description of Artificial Sequence: Synthetic oligonucleotide
auuggcuuugugguccugu

SEQ ID NO: 3080539 - RNA, 19 nt, Artificial Sequence
  Description of Artificial Sequence: Synthetic oligonucleotide
aaguugcuuugaagaggac

SEQ ID NO: 3080540 - RNA, 19 nt, Artificial Sequence
  Description of Artificial Sequence: Synthetic oligonucleotide
cuaacccauaacauuggcu

SEQ ID NO: 3080541 - RNA, 19 nt, Artificial Sequence
  Description of Artificial Sequence: Synthetic oligonucleotide
ccucauuuguggaauguuc

SEQ ID NO: 3080542 - RNA, 19 nt, Artificial Sequence
  Description of Artificial Sequence: Synthetic oligonucleotide
uugcuuugaagaggacccc

SEQ ID NO: 3080543 - RNA, 19 nt, Artificial Sequence
  Description of Artificial Sequence: Synthetic oligonucleotide
ucuguuggaugugacuguu

SEQ ID NO: 3080544 - RNA, 19 nt, Artificial Sequence
  Description of Artificial Sequence: Synthetic oligonucleotide
ugguccugugucaucuuuu

SEQ ID NO: 3080545 - RNA, 19 nt, Artificial Sequence
  Description of Artificial Sequence: Synthetic oligonucleotide
cucuguuacuaacccauaa

SEQ ID NO: 3080546 - RNA, 19 nt, Artificial Sequence
  Description of Artificial Sequence: Synthetic oligonucleotide
ccucuguuggaugugacug

SEQ ID NO: 3080547 - RNA, 19 nt, Artificial Sequence
  Description of Artificial Sequence: Synthetic oligonucleotide
ggaauguucccuagaggug

SEQ ID NO: 3080548 - RNA, 19 nt, Artificial Sequence
  Description of Artificial Sequence: Synthetic oligonucleotide
ucccaccucauuuguggaa

SEQ ID NO: 3080549 - RNA, 19 nt, Artificial Sequence
  Description of Artificial Sequence: Synthetic oligonucleotide
aucccaccucauuugugga

SEQ ID NO: 3080550 - RNA, 19 nt, Artificial Sequence
  Description of Artificial Sequence: Synthetic oligonucleotide
gaugugacuguuacucugu

SEQ ID NO: 3080551 - RNA, 19 nt, Artificial Sequence
  Description of Artificial Sequence: Synthetic oligonucleotide
auccuuggccauauaagaa

SEQ ID NO: 3080552 - RNA, 19 nt, Artificial Sequence
  Description of Artificial Sequence: Synthetic oligonucleotide
cauuugcauuguugauuac

SEQ ID NO: 3080553 - RNA, 19 nt, Artificial Sequence
  Description of Artificial Sequence: Synthetic oligonucleotide
gucuuuaccugcauagugu

SEQ ID NO: 3080554 - RNA, 19 nt, Artificial Sequence
  Description of Artificial Sequence: Synthetic oligonucleotide
uuaccugcauagugucuua

SEQ ID NO: 3080555 - RNA, 19 nt, Artificial Sequence
  Description of Artificial Sequence: Synthetic oligonucleotide
gagucagaaguugcuuuga

SEQ ID NO: 3080556 - RNA, 19 nt, Artificial Sequence
  Description of Artificial Sequence: Synthetic oligonucleotide
acauuggcuuugugguccu

SEQ ID NO: 3080557 - RNA, 19 nt, Artificial Sequence
  Description of Artificial Sequence: Synthetic oligonucleotide
aggugacacauccucuguu

SEQ ID NO: 3080558 - RNA, 19 nt, Artificial Sequence
  Description of Artificial Sequence: Synthetic oligonucleotide
guucccuagaggugacaca

SEQ ID NO: 3080559 - RNA, 19 nt, Artificial Sequence
  Description of Artificial Sequence: Synthetic oligonucleotide
auccucuguuggaugugac

SEQ ID NO: 3080560 - RNA, 19 nt, Artificial Sequence
  Description of Artificial Sequence: Synthetic oligonucleotide
accugcauagugucuuauu

SEQ ID NO: 3080561 - RNA, 19 nt, Artificial Sequence
  Description of Artificial Sequence: Synthetic oligonucleotide
cuuugaagaggaccccaaa

SEQ ID NO: 3080562 - RNA, 19 nt, Artificial Sequence
  Description of Artificial Sequence: Synthetic oligonucleotide
ucaccauccuuggccauau

SEQ ID NO: 3080563 - RNA, 19 nt, Artificial Sequence
  Description of Artificial Sequence: Synthetic oligonucleotide
ccuaaaagcaugagucaga

SEQ ID NO: 3080564 - RNA, 19 nt, Artificial Sequence
  Description of Artificial Sequence: Synthetic oligonucleotide
gucaucuuuuaaaccagua

SEQ ID NO: 3080565 - RNA, 19 nt, Artificial Sequence
  Description of Artificial Sequence: Synthetic oligonucleotide
gacacauccucuguuggau

SEQ ID NO: 3080566 - RNA, 19 nt, Artificial Sequence
  Description of Artificial Sequence: Synthetic oligonucleotide
acauccucuguuggaugug

SEQ ID NO: 3080567 - RNA, 19 nt, Artificial Sequence
  Description of Artificial Sequence: Synthetic oligonucleotide
ucccuagaggugacacauc

SEQ ID NO: 3080568 - RNA, 19 nt, Artificial Sequence
  Description of Artificial Sequence: Synthetic oligonucleotide
accucauuuguggaauguu

SEQ ID NO: 3080569 - RNA, 19 nt, Artificial Sequence
  Description of Artificial Sequence: Synthetic oligonucleotide
cauuuguggaauguucccu

SEQ ID NO: 3080570 - RNA, 19 nt, Artificial Sequence
  Description of Artificial Sequence: Synthetic oligonucleotide
cacauccucuguuggaugu

SEQ ID NO: 3080571 - RNA, 19 nt, Artificial Sequence
  Description of Artificial Sequence: Synthetic oligonucleotide
gaggugacacauccucugu

SEQ ID NO: 3080572 - RNA, 19 nt, Artificial Sequence
  Description of Artificial Sequence: Synthetic oligonucleotide
caaaucccaccucauuugu

SEQ ID NO: 3080573 - RNA, 19 nt, Artificial Sequence
  Description of Artificial Sequence: Synthetic oligonucleotide
guuggaugugacuguuacu

SEQ ID NO: 3080574 - RNA, 19 nt, Artificial Sequence
  Description of Artificial Sequence: Synthetic oligonucleotide
cuuuaccugcauagugucu

SEQ ID NO: 3080575 - RNA, 19 nt, Artificial Sequence
  Description of Artificial Sequence: Synthetic oligonucleotide
ucucaccauccuuggccau

SEQ ID NO: 3080576 - RNA, 19 nt, Artificial Sequence
  Description of Artificial Sequence: Synthetic oligonucleotide
uaccugcauagugucuuau

SEQ ID NO: 3080577 - RNA, 19 nt, Artificial Sequence
  Description of Artificial Sequence: Synthetic oligonucleotide
cauccucuguuggauguga

SEQ ID NO: 3080578 - RNA, 19 nt, Artificial Sequence
  Description of Artificial Sequence: Synthetic oligonucleotide
gcuuugugguccuguguca

SEQ ID NO: 3080579 - RNA, 19 nt, Artificial Sequence
  Description of Artificial Sequence: Synthetic oligonucleotide
ugugguccugugucaucuu

SEQ ID NO: 3080580 - RNA, 19 nt, Artificial Sequence
  Description of Artificial Sequence: Synthetic oligonucleotide
gguccugugucaucuuuua

SEQ ID NO: 3080581 - RNA, 19 nt, Artificial Sequence
  Description of Artificial Sequence: Synthetic oligonucleotide
guccugugucaucuuuuaa

SEQ ID NO: 3080582 - RNA, 19 nt, Artificial Sequence
  Description of Artificial Sequence: Synthetic oligonucleotide
acucuguuacuaacccaua

SEQ ID NO: 3080583 - RNA, 19 nt, Artificial Sequence
  Description of Artificial Sequence: Synthetic oligonucleotide
cauauucauuugcauuguu

SEQ ID NO: 3080584 - RNA, 19 nt, Artificial Sequence
  Description of Artificial Sequence: Synthetic oligonucleotide
auguucccuagaggugaca

SEQ ID NO: 3080585 - RNA, 19 nt, Artificial Sequence
  Description of Artificial Sequence: Synthetic oligonucleotide
caugagucagaaguugcuu

SEQ ID NO: 3080586 - RNA, 19 nt, Artificial Sequence
  Description of Artificial Sequence: Synthetic oligonucleotide
ccaguauaucuguuccuaa

SEQ ID NO: 3080587 - RNA, 19 nt, Artificial Sequence
  Description of Artificial Sequence: Synthetic oligonucleotide
ccaccucauuuguggaaug

SEQ ID NO: 3080588 - RNA, 19 nt, Artificial Sequence
  Description of Artificial Sequence: Synthetic oligonucleotide
ccauaacauuggcuuugug

SEQ ID NO: 3080589 - RNA, 19 nt, Artificial Sequence
  Description of Artificial Sequence: Synthetic oligonucleotide
gcuuugaagaggaccccaa

SEQ ID NO: 3080590 - RNA, 19 nt, Artificial Sequence
  Description of Artificial Sequence: Synthetic oligonucleotide
cucaccauccuuggccaua

SEQ ID NO: 3080591 - RNA, 19 nt, Artificial Sequence
  Description of Artificial Sequence: Synthetic oligonucleotide
cauuggcuuugugguccug

SEQ ID NO: 3080592 - RNA, 19 nt, Artificial Sequence
  Description of Artificial Sequence: Synthetic oligonucleotide
ccuuggccauauaagaaau

SEQ ID NO: 3080593 - RNA, 19 nt, Artificial Sequence
  Description of Artificial Sequence: Synthetic oligonucleotide
gcaugagucagaaguugcu

SEQ ID NO: 3080594 - RNA, 19 nt, Artificial Sequence
  Description of Artificial Sequence: Synthetic oligonucleotide
caccucauuuguggaaugu

SEQ ID NO: 3080595 - RNA, 19 nt, Artificial Sequence
  Description of Artificial Sequence: Synthetic oligonucleotide
gcauagugucuuauucacu

SEQ ID NO: 3080596 - RNA, 19 nt, Artificial Sequence
  Description of Artificial Sequence: Synthetic oligonucleotide
ccuagaggugacacauccu

SEQ ID NO: 3080597 - RNA, 19 nt, Artificial Sequence
  Description of Artificial Sequence: Synthetic oligonucleotide
cccaccucauuuguggaau

SEQ ID NO: 3080598 - RNA, 19 nt, Artificial Sequence
  Description of Artificial Sequence: Synthetic oligonucleotide
cccauaacauuggcuuugu

SEQ ID NO: 3080599 - RNA, 19 nt, Artificial Sequence
  Description of Artificial Sequence: Synthetic oligonucleotide
caccauccuuggccauaua

SEQ ID NO: 3080600 - RNA, 19 nt, Artificial Sequence
  Description of Artificial Sequence: Synthetic oligonucleotide
uuuauacuaacaaugcugg

SEQ ID NO: 3080601 - RNA, 19 nt, Artificial Sequence
  Description of Artificial Sequence: Synthetic oligonucleotide
auccacaacauccaggucc

SEQ ID NO: 3080602 - RNA, 19 nt, Artificial Sequence
  Description of Artificial Sequence: Synthetic oligonucleotide
uugguuuauacuaacaaug

SEQ ID NO: 3080603 - RNA, 19 nt, Artificial Sequence
  Description of Artificial Sequence: Synthetic oligonucleotide
aacaaugcugguugaauuc

SEQ ID NO: 3080604 - RNA, 19 nt, Artificial Sequence
  Description of Artificial Sequence: Synthetic oligonucleotide
acuuuugucuugcaguccc

SEQ ID NO: 3080605 - RNA, 19 nt, Artificial Sequence
  Description of Artificial Sequence: Synthetic oligonucleotide
uugauuuugguuuauacua

SEQ ID NO: 3080606 - RNA, 19 nt, Artificial Sequence
  Description of Artificial Sequence: Synthetic oligonucleotide
ucuaguacgaagauccuca

SEQ ID NO: 3080607 - RNA, 19 nt, Artificial Sequence
  Description of Artificial Sequence: Synthetic oligonucleotide
aguacgaagauccucagga

SEQ ID NO: 3080608 - RNA, 19 nt, Artificial Sequence
  Description of Artificial Sequence: Synthetic oligonucleotide
ucauccuggacuuugcagg

SEQ ID NO: 3080609 - RNA, 19 nt, Artificial Sequence
  Description of Artificial Sequence: Synthetic oligonucleotide
auacuaacaaugcugguug

SEQ ID NO: 3080610 - RNA, 19 nt, Artificial Sequence
  Description of Artificial Sequence: Synthetic oligonucleotide
ugguuuauacuaacaaugc

SEQ ID NO: 3080611 - RNA, 19 nt, Artificial Sequence
  Description of Artificial Sequence: Synthetic oligonucleotide
augcugguugaauucaucc

SEQ ID NO: 3080612 - RNA, 19 nt, Artificial Sequence
  Description of Artificial Sequence: Synthetic oligonucleotide
guuuauacuaacaaugcug

SEQ ID NO: 3080613 - RNA, 19 nt, Artificial Sequence
  Description of Artificial Sequence: Synthetic oligonucleotide
auugauuuugguuuauacu

SEQ ID NO: 3080614 - RNA, 19 nt, Artificial Sequence
  Description of Artificial Sequence: Synthetic oligonucleotide
uauugauuuugguuuauac

SEQ ID NO: 3080615 - RNA, 19 nt, Artificial Sequence
  Description of Artificial Sequence: Synthetic oligonucleotide
aacauccagguccucugcc

SEQ ID NO: 3080616 - RNA, 19 nt, Artificial Sequence
  Description of Artificial Sequence: Synthetic oligonucleotide
ugauuuauugauuuugguu

SEQ ID NO: 3080617 - RNA, 19 nt, Artificial Sequence
  Description of Artificial Sequence: Synthetic oligonucleotide
uuugguuuauacuaacaau

SEQ ID NO: 3080618 - RNA, 19 nt, Artificial Sequence
  Description of Artificial Sequence: Synthetic oligonucleotide
uacgaagauccucaggagc

SEQ ID NO: 3080619 - RNA, 19 nt, Artificial Sequence
  Description of Artificial Sequence: Synthetic oligonucleotide
ugagcuguagugcaucccc

SEQ ID NO: 3080620 - RNA, 19 nt, Artificial Sequence
  Description of Artificial Sequence: Synthetic oligonucleotide
uauaaccucuagaagucca

SEQ ID NO: 3080621 - RNA, 19 nt, Artificial Sequence
  Description of Artificial Sequence: Synthetic oligonucleotide
agaugcaguaguuugcuca

SEQ ID NO: 3080622 - RNA, 19 nt, Artificial Sequence
  Description of Artificial Sequence: Synthetic oligonucleotide
acauccacaacauccaggu

SEQ ID NO: 3080623 - RNA, 19 nt, Artificial Sequence
  Description of Artificial Sequence: Synthetic oligonucleotide
uaguuugcucaccagcucc

SEQ ID NO: 3080624 - RNA, 19 nt, Artificial Sequence
  Description of Artificial Sequence: Synthetic oligonucleotide
guugaauucauccuggacu

SEQ ID NO: 3080625 - RNA, 19 nt, Artificial Sequence
  Description of Artificial Sequence: Synthetic oligonucleotide
gcuucuaguacgaagaucc

SEQ ID NO: 3080626 - RNA, 19 nt, Artificial Sequence
  Description of Artificial Sequence: Synthetic oligonucleotide
aauucauccuggacuuugc

SEQ ID NO: 3080627 - RNA, 19 nt, Artificial Sequence
  Description of Artificial Sequence: Synthetic oligonucleotide
acggguauaaccucuagaa

SEQ ID NO: 3080628 - RNA, 19 nt, Artificial Sequence
  Description of Artificial Sequence: Synthetic oligonucleotide
uccgccaugagcuguagug

SEQ ID NO: 3080629 - RNA, 19 nt, Artificial Sequence
  Description of Artificial Sequence: Synthetic oligonucleotide
ugauuuugguuuauacuaa

SEQ ID NO: 3080630 - RNA, 19 nt, Artificial Sequence
  Description of Artificial Sequence: Synthetic oligonucleotide
gauuuugguuuauacuaac

SEQ ID NO: 3080631 - RNA, 19 nt, Artificial Sequence
  Description of Artificial Sequence: Synthetic oligonucleotide
uauacuaacaaugcugguu

SEQ ID NO: 3080632 - RNA, 19 nt, Artificial Sequence
  Description of Artificial Sequence: Synthetic oligonucleotide
acugacuuuugucuugcag

SEQ ID NO: 3080633 - RNA, 19 nt, Artificial Sequence
  Description of Artificial Sequence: Synthetic oligonucleotide
uugaauucauccuggacuu

SEQ ID NO: 3080634 - RNA, 19 nt, Artificial Sequence
  Description of Artificial Sequence: Synthetic oligonucleotide
aaccucuagaaguccagga

SEQ ID NO: 3080635 - RNA, 19 nt, Artificial Sequence
  Description of Artificial Sequence: Synthetic oligonucleotide
ugcagaugcaguaguuugc

SEQ ID NO: 3080636 - RNA, 19 nt, Artificial Sequence
  Description of Artificial Sequence: Synthetic oligonucleotide
cuugcagucccugaagugc

SEQ ID NO: 3080637 - RNA, 19 nt, Artificial Sequence
  Description of Artificial Sequence: Synthetic oligonucleotide
uaguacgaagauccucagg

SEQ ID NO: 3080638 - RNA, 19 nt, Artificial Sequence
  Description of Artificial Sequence: Synthetic oligonucleotide
accucuagaaguccaggag

SEQ ID NO: 3080639 - RNA, 19 nt, Artificial Sequence
  Description of Artificial Sequence: Synthetic oligonucleotide
uagaaguccaggagcagcu

SEQ ID NO: 3080640 - RNA, 19 nt, Artificial Sequence
  Description of Artificial Sequence: Synthetic oligonucleotide
ugacuuuugucuugcaguc

SEQ ID NO: 3080641 - RNA, 19 nt, Artificial Sequence
  Description of Artificial Sequence: Synthetic oligonucleotide
ugucuugcagucccugaag

SEQ ID NO: 3080642 - RNA, 19 nt, Artificial Sequence
  Description of Artificial Sequence: Synthetic oligonucleotide
ugaagugcagaugcaguag

SEQ ID NO: 3080643 - RNA, 19 nt, Artificial Sequence
  Description of Artificial Sequence: Synthetic oligonucleotide
gaugcaguaguuugcucac

SEQ ID NO: 3080644 - RNA, 19 nt, Artificial Sequence
  Description of Artificial Sequence: Synthetic oligonucleotide
aaugcugguugaauucauc

SEQ ID NO: 3080645 - RNA, 19 nt, Artificial Sequence
  Description of Artificial Sequence: Synthetic oligonucleotide
cacauccacaacauccagg

SEQ ID NO: 3080646 - RNA, 19 nt, Artificial Sequence
  Description of Artificial Sequence: Synthetic oligonucleotide
uguagugcauccccacuga

SEQ ID NO: 3080647 - RNA, 19 nt, Artificial Sequence
  Description of Artificial Sequence: Synthetic oligonucleotide
agugcauccccacugacuu

SEQ ID NO: 3080648 - RNA, 19 nt, Artificial Sequence
  Description of Artificial Sequence: Synthetic oligonucleotide
caguaguuugcucaccagc

SEQ ID NO: 3080649 - RNA, 19 nt, Artificial Sequence
  Description of Artificial Sequence: Synthetic oligonucleotide
uccuccauggccacagucu

SEQ ID NO: 3080650 - RNA, 19 nt, Artificial Sequence
  Description of Artificial Sequence: Synthetic oligonucleotide
uccacaacauccagguccu

SEQ ID NO: 3080651 - RNA, 19 nt, Artificial Sequence
  Description of Artificial Sequence: Synthetic oligonucleotide
uaacaaugcugguugaauu

SEQ ID NO: 3080652 - RNA, 19 nt, Artificial Sequence
  Description of Artificial Sequence: Synthetic oligonucleotide
gaagccgcuggcuuccucc

SEQ ID NO: 3080653 - RNA, 19 nt, Artificial Sequence
  Description of Artificial Sequence: Synthetic oligonucleotide
uccccacugacuuuugucu

SEQ ID NO: 3080654 - RNA, 19 nt, Artificial Sequence
  Description of Artificial Sequence: Synthetic oligonucleotide
auccccacugacuuuuguc

SEQ ID NO: 3080655 - RNA, 19 nt, Artificial Sequence
  Description of Artificial Sequence: Synthetic oligonucleotide
aguaguuugcucaccagcu

SEQ ID NO: 3080656 - RNA, 19 nt, Artificial Sequence
  Description of Artificial Sequence: Synthetic oligonucleotide
gugcagaugcaguaguuug

SEQ ID NO: 3080657 - RNA, 19 nt, Artificial Sequence
  Description of Artificial Sequence: Synthetic oligonucleotide
cuagaaguccaggagcagc

SEQ ID NO: 3080658 - RNA, 19 nt, Artificial Sequence
  Description of Artificial Sequence: Synthetic oligonucleotide
uaaccucuagaaguccagg

SEQ ID NO: 3080659 - RNA, 19 nt, Artificial Sequence
  Description of Artificial Sequence: Synthetic oligonucleotide
cugaggaagcaccuucucc

SEQ ID NO: 3080660 - RNA, 19 nt, Artificial Sequence
  Description of Artificial Sequence: Synthetic oligonucleotide
ucuugcagucccugaagug

SEQ ID NO: 3080661 - RNA, 19 nt, Artificial Sequence
  Description of Artificial Sequence: Synthetic oligonucleotide
ugcugguugaauucauccu

SEQ ID NO: 3080662 - RNA, 19 nt, Artificial Sequence
  Description of Artificial Sequence: Synthetic oligonucleotide
agcuguagugcauccccac

SEQ ID NO: 3080663 - RNA, 19 nt, Artificial Sequence
  Description of Artificial Sequence: Synthetic oligonucleotide
uggacuuugcaggccacgg

SEQ ID NO: 3080664 - RNA, 19 nt, Artificial Sequence
  Description of Artificial Sequence: Synthetic oligonucleotide
agcggcuucuaguacgaag

SEQ ID NO: 3080665 - RNA, 19 nt, Artificial Sequence
  Description of Artificial Sequence: Synthetic oligonucleotide
uuauacuaacaaugcuggu

SEQ ID NO: 3080666 - RNA, 19 nt, Artificial Sequence
  Description of Artificial Sequence: Synthetic oligonucleotide
uuugucuugcagucccuga

SEQ ID NO: 3080667 - RNA, 19 nt, Artificial Sequence
  Description of Artificial Sequence: Synthetic oligonucleotide
uugcagucccugaagugca

SEQ ID NO: 3080668 - RNA, 19 nt, Artificial Sequence
  Description of Artificial Sequence: Synthetic oligonucleotide
uugucuugcagucccugaa

SEQ ID NO: 3080669 - RNA, 19 nt, Artificial Sequence
  Description of Artificial Sequence: Synthetic oligonucleotide
uccuggacuuugcaggcca

SEQ ID NO: 3080670 - RNA, 19 nt, Artificial Sequence
  Description of Artificial Sequence: Synthetic oligonucleotide
uagugcauccccacugacu

SEQ ID NO: 3080671 - RNA, 19 nt, Artificial Sequence
  Description of Artificial Sequence: Synthetic oligonucleotide
cauccuggacuuugcaggc

SEQ ID NO: 3080672 - RNA, 19 nt, Artificial Sequence
  Description of Artificial Sequence: Synthetic oligonucleotide
guacgaagauccucaggag

SEQ ID NO: 3080673 - RNA, 19 nt, Artificial Sequence
  Description of Artificial Sequence: Synthetic oligonucleotide
caugagcuguagugcaucc

SEQ ID NO: 3080674 - RNA, 19 nt, Artificial Sequence
  Description of Artificial Sequence: Synthetic oligonucleotide
ggguauaaccucuagaagu

SEQ ID NO: 3080675 - RNA, 19 nt, Artificial Sequence
  Description of Artificial Sequence: Synthetic oligonucleotide
aggagcuccgccaugagcu

SEQ ID NO: 3080676 - RNA, 19 nt, Artificial Sequence
  Description of Artificial Sequence: Synthetic oligonucleotide
cuguagugcauccccacug

SEQ ID NO: 3080677 - RNA, 19 nt, Artificial Sequence
  Description of Artificial Sequence: Synthetic oligonucleotide
auuuugguuuauacuaaca

SEQ ID NO: 3080678 - RNA, 19 nt, Artificial Sequence
  Description of Artificial Sequence: Synthetic oligonucleotide
uuuugucuugcagucccug

SEQ ID NO: 3080679 - RNA, 19 nt, Artificial Sequence
  Description of Artificial Sequence: Synthetic oligonucleotide
agcuccuuccggaagccgc

SEQ ID NO: 3080680 - RNA, 19 nt, Artificial Sequence
  Description of Artificial Sequence: Synthetic oligonucleotide
ugcucaccagcuccuuccg

SEQ ID NO: 3080681 - RNA, 19 nt, Artificial Sequence
  Description of Artificial Sequence: Synthetic oligonucleotide
acgaagauccucaggagcu

SEQ ID NO: 3080682 - RNA, 19 nt, Artificial Sequence
  Description of Artificial Sequence: Synthetic oligonucleotide
cuaguacgaagauccucag

SEQ ID NO: 3080683 - RNA, 19 nt, Artificial Sequence
  Description of Artificial Sequence: Synthetic oligonucleotide
acaaugcugguugaauuca

SEQ ID NO: 3080684 - RNA, 19 nt, Artificial Sequence
  Description of Artificial Sequence: Synthetic oligonucleotide
augagcuguagugcauccc

SEQ ID NO: 3080685 - RNA, 19 nt, Artificial Sequence
  Description of Artificial Sequence: Synthetic oligonucleotide
gaagauccucaggagcucc

SEQ ID NO: 3080686 - RNA, 19 nt, Artificial Sequence
  Description of Artificial Sequence: Synthetic oligonucleotide
aaguccaggagcagcugag

SEQ ID NO: 3080687 - RNA, 19 nt, Artificial Sequence
  Description of Artificial Sequence: Synthetic oligonucleotide
auaaccucuagaaguccag

SEQ ID NO: 3080688 - RNA, 19 nt, Artificial Sequence
  Description of Artificial Sequence: Synthetic oligonucleotide
uucuaguacgaagauccuc

SEQ ID NO: 3080689 - RNA, 19 nt, Artificial Sequence
  Description of Artificial Sequence: Synthetic oligonucleotide
gaaguccaggagcagcuga

SEQ ID NO: 3080690 - RNA, 19 nt, Artificial Sequence
  Description of Artificial Sequence: Synthetic oligonucleotide
cugacuuuugucuugcagu

SEQ ID NO: 3080691 - RNA, 19 nt, Artificial Sequence
  Description of Artificial Sequence: Synthetic oligonucleotide
ggcagcggcuucuaguacg

SEQ ID NO: 3080692 - RNA, 19 nt, Artificial Sequence
  Description of Artificial Sequence: Synthetic oligonucleotide
aagauccucaggagcuccg

SEQ ID NO: 3080693 - RNA, 19 nt, Artificial Sequence
  Description of Artificial Sequence: Synthetic oligonucleotide
uacuaacaaugcugguuga

SEQ ID NO: 3080694 - RNA, 19 nt, Artificial Sequence
  Description of Artificial Sequence: Synthetic oligonucleotide
uuugcucaccagcuccuuc

SEQ ID NO: 3080695 - RNA, 19 nt, Artificial Sequence
  Description of Artificial Sequence: Synthetic oligonucleotide
gguauaaccucuagaaguc

SEQ ID NO: 3080696 - RNA, 19 nt, Artificial Sequence
  Description of Artificial Sequence: Synthetic oligonucleotide
uccaggagcagcugaggaa

SEQ ID NO: 3080697 - RNA, 19 nt, Artificial Sequence
  Description of Artificial Sequence: Synthetic oligonucleotide
guauaaccucuagaagucc

SEQ ID NO: 3080698 - RNA, 19 nt, Artificial Sequence
  Description of Artificial Sequence: Synthetic oligonucleotide
gauccucaggagcuccgcc

SEQ ID NO: 3080699 - RNA, 19 nt, Artificial Sequence
  Description of Artificial Sequence: Synthetic oligonucleotide
ccucuagaaguccaggagc

SEQ ID NO: 3080700 - RNA, 19 nt, Artificial Sequence
  Description of Artificial Sequence: Synthetic oligonucleotide
agauccucaggagcuccgc

SEQ ID NO: 3080701 - RNA, 19 nt, Artificial Sequence
  Description of Artificial Sequence: Synthetic oligonucleotide
auccagguccucugccugg

SEQ ID NO: 3080702 - RNA, 19 nt, Artificial Sequence
  Description of Artificial Sequence: Synthetic oligonucleotide
ugguugaauucauccugga

SEQ ID NO: 3080703 - RNA, 19 nt, Artificial Sequence
  Description of Artificial Sequence: Synthetic oligonucleotide
uuauugauuuugguuuaua

SEQ ID NO: 3080704 - RNA, 19 nt, Artificial Sequence
  Description of Artificial Sequence: Synthetic oligonucleotide
gacuuuugucuugcagucc

SEQ ID NO: 3080705 - RNA, 19 nt, Artificial Sequence
  Description of Artificial Sequence: Synthetic oligonucleotide
gguugaauucauccuggac

SEQ ID NO: 3080706 - RNA, 19 nt, Artificial Sequence
  Description of Artificial Sequence: Synthetic oligonucleotide
gacuuugcaggccacgggu

SEQ ID NO: 3080707 - RNA, 19 nt, Artificial Sequence
  Description of Artificial Sequence: Synthetic oligonucleotide
gcuggcuuccuccauggcc

SEQ ID NO: 3080708 - RNA, 19 nt, Artificial Sequence
  Description of Artificial Sequence: Synthetic oligonucleotide
caccuucuccagcuggucc

SEQ ID NO: 3080709 - RNA, 19 nt, Artificial Sequence
  Description of Artificial Sequence: Synthetic oligonucleotide
gaagugcagaugcaguagu

SEQ ID NO: 3080710 - RNA, 19 nt, Artificial Sequence
  Description of Artificial Sequence: Synthetic oligonucleotide
guaguuugcucaccagcuc

SEQ ID NO: 3080711 - RNA, 19 nt, Artificial Sequence
  Description of Artificial Sequence: Synthetic oligonucleotide
ugcagucccugaagugcag

SEQ ID NO: 3080712 - RNA, 19 nt, Artificial Sequence
  Description of Artificial Sequence: Synthetic oligonucleotide
caacauccagguccucugc

SEQ ID NO: 3080713 - RNA, 19 nt, Artificial Sequence
  Description of Artificial Sequence: Synthetic oligonucleotide
ucaggagcuccgccaugag

SEQ ID NO: 3080714 - RNA, 19 nt, Artificial Sequence
  Description of Artificial Sequence: Synthetic oligonucleotide
gaagcaccuucuccagcug

SEQ ID NO: 3080715 - RNA, 19 nt, Artificial Sequence
  Description of Artificial Sequence: Synthetic oligonucleotide
aggccacggguauaaccuc

SEQ ID NO: 3080716 - RNA, 19 nt, Artificial Sequence
  Description of Artificial Sequence: Synthetic oligonucleotide
acuaacaaugcugguugaa

SEQ ID NO: 3080717 - RNA, 19 nt, Artificial Sequence
  Description of Artificial Sequence: Synthetic oligonucleotide
cugaagugcagaugcagua

SEQ ID NO: 3080718 - RNA, 19 nt, Artificial Sequence
  Description of Artificial Sequence: Synthetic oligonucleotide
cauccagguccucugccug

SEQ ID NO: 3080719 - RNA, 19 nt, Artificial Sequence
  Description of Artificial Sequence: Synthetic oligonucleotide
uccagguccucugccuggg

SEQ ID NO: 3080720 - RNA, 19 nt, Artificial Sequence
  Description of Artificial Sequence: Synthetic oligonucleotide
cagcugaggaagcaccuuc

SEQ ID NO: 3080721 - RNA, 19 nt, Artificial Sequence
  Description of Artificial Sequence: Synthetic oligonucleotide
auccuggacuuugcaggcc

SEQ ID NO: 3080722 - RNA, 19 nt, Artificial Sequence
  Description of Artificial Sequence: Synthetic oligonucleotide
aguccaggagcagcugagg

SEQ ID NO: 3080723 - RNA, 19 nt, Artificial Sequence
  Description of Artificial Sequence: Synthetic oligonucleotide
caggagcuccgccaugagc

SEQ ID NO: 3080724 - RNA, 19 nt, Artificial Sequence
  Description of Artificial Sequence: Synthetic oligonucleotide
agugcagaugcaguaguuu

SEQ ID NO: 3080725 - RNA, 19 nt, Artificial Sequence
  Description of Artificial Sequence: Synthetic oligonucleotide
gguuuauacuaacaaugcu

SEQ ID NO: 3080726 - RNA, 19 nt, Artificial Sequence
  Description of Artificial Sequence: Synthetic oligonucleotide
agguccucugccugggccu

SEQ ID NO: 3080727 - RNA, 19 nt, Artificial Sequence
  Description of Artificial Sequence: Synthetic oligonucleotide
aagccgcuggcuuccucca

SEQ ID NO: 3080728 - RNA, 19 nt, Artificial Sequence
  Description of Artificial Sequence: Synthetic oligonucleotide
ggacuuugcaggccacggg

SEQ ID NO: 3080729 - RNA, 19 nt, Artificial Sequence
  Description of Artificial Sequence: Synthetic oligonucleotide
ugcauccccacugacuuuu

SEQ ID NO: 3080730 - RNA, 19 nt, Artificial Sequence
  Description of Artificial Sequence: Synthetic oligonucleotide
uggcagaccccgcgggcag

SEQ ID NO: 3080731 - RNA, 19 nt, Artificial Sequence
  Description of Artificial Sequence: Synthetic oligonucleotide
ucccugaagugcagaugca

SEQ ID NO: 3080732 - RNA, 19 nt, Artificial Sequence
  Description of Artificial Sequence: Synthetic oligonucleotide
guagugcauccccacugac

SEQ ID NO: 3080733 - RNA, 19 nt, Artificial Sequence
  Description of Artificial Sequence: Synthetic oligonucleotide
caggccacggguauaaccu

SEQ ID NO: 3080734 - RNA, 19 nt, Artificial Sequence
  Description of Artificial Sequence: Synthetic oligonucleotide
uccggaagccgcuggcuuc

SEQ ID NO: 3080735 - RNA, 19 nt, Artificial Sequence
  Description of Artificial Sequence: Synthetic oligonucleotide
cuggacuuugcaggccacg

SEQ ID NO: 3080736 - RNA, 19 nt, Artificial Sequence
  Description of Artificial Sequence: Synthetic oligonucleotide
cacggguauaaccucuaga

SEQ ID NO: 3080737 - RNA, 19 nt, Artificial Sequence
  Description of Artificial Sequence: Synthetic oligonucleotide
gcaggccacggguauaacc

SEQ ID NO: 3080738 - RNA, 19 nt, Artificial Sequence
  Description of Artificial Sequence: Synthetic oligonucleotide
uuccggaagccgcuggcuu

SEQ ID NO: 3080739 - RNA, 19 nt, Artificial Sequence
  Description of Artificial Sequence: Synthetic oligonucleotide
ccaggagcagcugaggaag

SEQ ID NO: 3080740 - RNA, 19 nt, Artificial Sequence
  Description of Artificial Sequence: Synthetic oligonucleotide
guccaggagcagcugagga

SEQ ID NO: 3080741 - RNA, 19 nt, Artificial Sequence
  Description of Artificial Sequence: Synthetic oligonucleotide
aguuugcucaccagcuccu

SEQ ID NO: 3080742 - RNA, 19 nt, Artificial Sequence
  Description of Artificial Sequence: Synthetic oligonucleotide
caggagcagcugaggaagc

SEQ ID NO: 3080743 - RNA, 19 nt, Artificial Sequence
  Description of Artificial Sequence: Synthetic oligonucleotide
aagugcagaugcaguaguu

SEQ ID NO: 3080744 - RNA, 19 nt, Artificial Sequence
  Description of Artificial Sequence: Synthetic oligonucleotide
cagaugcaguaguuugcuc

SEQ ID NO: 3080745 - RNA, 19 nt, Artificial Sequence
  Description of Artificial Sequence: Synthetic oligonucleotide
cugggccuggcagaccccg

SEQ ID NO: 3080746 - RNA, 19 nt, Artificial Sequence
  Description of Artificial Sequence: Synthetic oligonucleotide
gcggcuucuaguacgaaga

SEQ ID NO: 3080747 - RNA, 19 nt, Artificial Sequence
  Description of Artificial Sequence: Synthetic oligonucleotide
gucuugcagucccugaagu

SEQ ID NO: 3080748 - RNA, 19 nt, Artificial Sequence
  Description of Artificial Sequence: Synthetic oligonucleotide
agcagcugaggaagcaccu

SEQ ID NO: 3080749 - RNA, 19 nt, Artificial Sequence
  Description of Artificial Sequence: Synthetic oligonucleotide
uuugcaggccacggguaua

SEQ ID NO: 3080750 - RNA, 19 nt, Artificial Sequence
  Description of Artificial Sequence: Synthetic oligonucleotide
cuaacaaugcugguugaau

SEQ ID NO: 3080751 - RNA, 19 nt, Artificial Sequence
  Description of Artificial Sequence: Synthetic oligonucleotide
cauccacaacauccagguc

SEQ ID NO: 3080752 - RNA, 19 nt, Artificial Sequence
  Description of Artificial Sequence: Synthetic oligonucleotide
gagcuguagugcaucccca

SEQ ID NO: 3080753 - RNA, 19 nt, Artificial Sequence
  Description of Artificial Sequence: Synthetic oligonucleotide
cggguauaaccucuagaag

SEQ ID NO: 3080754 - RNA, 19 nt, Artificial Sequence
  Description of Artificial Sequence: Synthetic oligonucleotide
ugggccuggcagaccccgc

SEQ ID NO: 3080755 - RNA, 19 nt, Artificial Sequence
  Description of Artificial Sequence: Synthetic oligonucleotide
gggccuggcagaccccgcg

SEQ ID NO: 3080756 - RNA, 19 nt, Artificial Sequence
  Description of Artificial Sequence: Synthetic oligonucleotide
ggagcagcugaggaagcac

SEQ ID NO: 3080757 - RNA, 19 nt, Artificial Sequence
  Description of Artificial Sequence: Synthetic oligonucleotide
ggcuucuaguacgaagauc

SEQ ID NO: 3080758 - RNA, 19 nt, Artificial Sequence
  Description of Artificial Sequence: Synthetic oligonucleotide
ccuccauggccacagucuc

SEQ ID NO: 3080759 - RNA, 19 nt, Artificial Sequence
  Description of Artificial Sequence: Synthetic oligonucleotide
gcugaggaagcaccuucuc

SEQ ID NO: 3080760 - RNA, 19 nt, Artificial Sequence
  Description of Artificial Sequence: Synthetic oligonucleotide
cuucuaguacgaagauccu

SEQ ID NO: 3080761 - RNA, 19 nt, Artificial Sequence
  Description of Artificial Sequence: Synthetic oligonucleotide
uccucugccugggccuggc

SEQ ID NO: 3080762 - RNA, 19 nt, Artificial Sequence
  Description of Artificial Sequence: Synthetic oligonucleotide
ggagcuccgccaugagcug

SEQ ID NO: 3080763 - RNA, 19 nt, Artificial Sequence
  Description of Artificial Sequence: Synthetic oligonucleotide
acuuugcaggccacgggua

SEQ ID NO: 3080764 - RNA, 19 nt, Artificial Sequence
  Description of Artificial Sequence: Synthetic oligonucleotide
gccuggcagaccccgcggg

SEQ ID NO: 3080765 - RNA, 19 nt, Artificial Sequence
  Description of Artificial Sequence: Synthetic oligonucleotide
ccgcuggcuuccuccaugg

SEQ ID NO: 3080766 - RNA, 19 nt, Artificial Sequence
  Description of Artificial Sequence: Synthetic oligonucleotide
cagcuccuuccggaagccg

SEQ ID NO: 3080767 - RNA, 19 nt, Artificial Sequence
  Description of Artificial Sequence: Synthetic oligonucleotide
ggccuggcagaccccgcgg

SEQ ID NO: 3080768 - RNA, 19 nt, Artificial Sequence
  Description of Artificial Sequence: Synthetic oligonucleotide
gccgcuggcuuccuccaug

SEQ ID NO: 3080769 - RNA, 19 nt, Artificial Sequence
  Description of Artificial Sequence: Synthetic oligonucleotide
gguccacauccacaacauc

SEQ ID NO: 3080770 - RNA, 19 nt, Artificial Sequence
  Description of Artificial Sequence: Synthetic oligonucleotide
ccuuccggaagccgcuggc

SEQ ID NO: 3080771 - RNA, 19 nt, Artificial Sequence
  Description of Artificial Sequence: Synthetic oligonucleotide
cuuuugucuugcagucccu

SEQ ID NO: 3080772 - RNA, 19 nt, Artificial Sequence
  Description of Artificial Sequence: Synthetic oligonucleotide
cuuugcaggccacggguau

SEQ ID NO: 3080773 - RNA, 19 nt, Artificial Sequence
  Description of Artificial Sequence: Synthetic oligonucleotide
ccgccaugagcuguagugc

SEQ ID NO: 3080774 - RNA, 19 nt, Artificial Sequence
  Description of Artificial Sequence: Synthetic oligonucleotide
caaugcugguugaauucau

SEQ ID NO: 3080775 - RNA, 19 nt, Artificial Sequence
  Description of Artificial Sequence: Synthetic oligonucleotide
cacugacuuuugucuugca

SEQ ID NO: 3080776 - RNA, 19 nt, Artificial Sequence
  Description of Artificial Sequence: Synthetic oligonucleotide
cuggcagaccccgcgggca

SEQ ID NO: 3080777 - RNA, 19 nt, Artificial Sequence
  Description of Artificial Sequence: Synthetic oligonucleotide
gcagaugcaguaguuugcu

SEQ ID NO: 3080778 - RNA, 19 nt, Artificial Sequence
  Description of Artificial Sequence: Synthetic oligonucleotide
ccugaagugcagaugcagu

SEQ ID NO: 3080779 - RNA, 19 nt, Artificial Sequence
  Description of Artificial Sequence: Synthetic oligonucleotide
ccacggguauaaccucuag

SEQ ID NO: 3080780 - RNA, 19 nt, Artificial Sequence
  Description of Artificial Sequence: Synthetic oligonucleotide
ugcaggccacggguauaac

SEQ ID NO: 3080781 - RNA, 19 nt, Artificial Sequence
  Description of Artificial Sequence: Synthetic oligonucleotide
ccuggcagaccccgcgggc

SEQ ID NO: 3080782 - RNA, 19 nt, Artificial Sequence
  Description of Artificial Sequence: Synthetic oligonucleotide
gcugguccacauccacaac

SEQ ID NO: 3080783 - RNA, 19 nt, Artificial Sequence
  Description of Artificial Sequence: Synthetic oligonucleotide
gcagaccccgcgggcagcg

SEQ ID NO: 3080784 - RNA, 19 nt, Artificial Sequence
  Description of Artificial Sequence: Synthetic oligonucleotide
cuccuuccggaagccgcug

SEQ ID NO: 3080785 - RNA, 19 nt, Artificial Sequence
  Description of Artificial Sequence: Synthetic oligonucleotide
gcuguagugcauccccacu

SEQ ID NO: 3080786 - RNA, 19 nt, Artificial Sequence
  Description of Artificial Sequence: Synthetic oligonucleotide
ccuggacuuugcaggccac

SEQ ID NO: 3080787 - RNA, 19 nt, Artificial Sequence
  Description of Artificial Sequence: Synthetic oligonucleotide
cagucccugaagugcagau

SEQ ID NO: 3080788 - RNA, 19 nt, Artificial Sequence
  Description of Artificial Sequence: Synthetic oligonucleotide
ccggaagccgcuggcuucc

SEQ ID NO: 3080789 - RNA, 19 nt, Artificial Sequence
  Description of Artificial Sequence: Synthetic oligonucleotide
ugccugggccuggcagacc

SEQ ID NO: 3080790 - RNA, 19 nt, Artificial Sequence
  Description of Artificial Sequence: Synthetic oligonucleotide
gcagcggcuucuaguacga

SEQ ID NO: 3080791 - RNA, 19 nt, Artificial Sequence
  Description of Artificial Sequence: Synthetic oligonucleotide
agccgcuggcuuccuccau

SEQ ID NO: 3080792 - RNA, 19 nt, Artificial Sequence
  Description of Artificial Sequence: Synthetic oligonucleotide
gggcagcggcuucuaguac

SEQ ID NO: 3080793 - RNA, 19 nt, Artificial Sequence
  Description of Artificial Sequence: Synthetic oligonucleotide
cauccccacugacuuuugu

SEQ ID NO: 3080794 - RNA, 19 nt, Artificial Sequence
  Description of Artificial Sequence: Synthetic oligonucleotide
cgccaugagcuguagugca

SEQ ID NO: 3080795 - RNA, 19 nt, Artificial Sequence
  Description of Artificial Sequence: Synthetic oligonucleotide
agcuccgccaugagcugua

SEQ ID NO: 3080796 - RNA, 19 nt, Artificial Sequence
  Description of Artificial Sequence: Synthetic oligonucleotide
gagcuccgccaugagcugu

SEQ ID NO: 3080797 - RNA, 19 nt, Artificial Sequence
  Description of Artificial Sequence: Synthetic oligonucleotide
gcagucccugaagugcaga

SEQ ID NO: 3080798 - RNA, 19 nt, Artificial Sequence
  Description of Artificial Sequence: Synthetic oligonucleotide
cuuccggaagccgcuggcu

SEQ ID NO: 3080799 - RNA, 19 nt, Artificial Sequence
  Description of Artificial Sequence: Synthetic oligonucleotide
ggaagccgcuggcuuccuc

SEQ ID NO: 3080800 - RNA, 19 nt, Artificial Sequence
  Description of Artificial Sequence: Synthetic oligonucleotide
gcgggcagcggcuucuagu

SEQ ID NO: 3080801 - RNA, 19 nt, Artificial Sequence
  Description of Artificial Sequence: Synthetic oligonucleotide
cgaagauccucaggagcuc

SEQ ID NO: 3080802 - RNA, 19 nt, Artificial Sequence
  Description of Artificial Sequence: Synthetic oligonucleotide
ccucaggagcuccgccaug

SEQ ID NO: 3080803 - RNA, 19 nt, Artificial Sequence
  Description of Artificial Sequence: Synthetic oligonucleotide
ccagguccucugccugggc

SEQ ID NO: 3080804 - RNA, 19 nt, Artificial Sequence
  Description of Artificial Sequence: Synthetic oligonucleotide
gcauccccacugacuuuug

SEQ ID NO: 3080805 - RNA, 19 nt, Artificial Sequence
  Description of Artificial Sequence: Synthetic oligonucleotide
ggccacggguauaaccucu

SEQ ID NO: 3080806 - RNA, 19 nt, Artificial Sequence
  Description of Artificial Sequence: Synthetic oligonucleotide
gcuccgccaugagcuguag

SEQ ID NO: 3080807 - RNA, 19 nt, Artificial Sequence
  Description of Artificial Sequence: Synthetic oligonucleotide
cgggcagcggcuucuagua

SEQ ID NO: 3080808 - RNA, 19 nt, Artificial Sequence
  Description of Artificial Sequence: Synthetic oligonucleotide
guuugcucaccagcuccuu

SEQ ID NO: 3080809 - RNA, 19 nt, Artificial Sequence
  Description of Artificial Sequence: Synthetic oligonucleotide
ggcagaccccgcgggcagc

SEQ ID NO: 3080810 - RNA, 19 nt, Artificial Sequence
  Description of Artificial Sequence: Synthetic oligonucleotide
gaccccgcgggcagcggcu

SEQ ID NO: 3080811 - RNA, 19 nt, Artificial Sequence
  Description of Artificial Sequence: Synthetic oligonucleotide
cuccgccaugagcuguagu

SEQ ID NO: 3080812 - RNA, 19 nt, Artificial Sequence
  Description of Artificial Sequence: Synthetic oligonucleotide
gugcauccccacugacuuu

SEQ ID NO: 3080813 - RNA, 19 nt, Artificial Sequence
  Description of Artificial Sequence: Synthetic oligonucleotide
gcuccuuccggaagccgcu

SEQ ID NO: 3080814 - RNA, 19 nt, Artificial Sequence
  Description of Artificial Sequence: Synthetic oligonucleotide
gccacggguauaaccucua

SEQ ID NO: 3080815 - RNA, 19 nt, Artificial Sequence
  Description of Artificial Sequence: Synthetic oligonucleotide
cagcggcuucuaguacgaa

SEQ ID NO: 3080816 - RNA, 19 nt, Artificial Sequence
  Description of Artificial Sequence: Synthetic oligonucleotide
gcagcugaggaagcaccuu

SEQ ID NO: 3080817 - RNA, 19 nt, Artificial Sequence
  Description of Artificial Sequence: Synthetic oligonucleotide
cgcgggcagcggcuucuag

SEQ ID NO: 3080818 - RNA, 19 nt, Artificial Sequence
  Description of Artificial Sequence: Synthetic oligonucleotide
cggcuucuaguacgaagau

SEQ ID NO: 3080819 - RNA, 19 nt, Artificial Sequence
  Description of Artificial Sequence: Synthetic oligonucleotide
cggaagccgcuggcuuccu

SEQ ID NO: 3080820 - RNA, 19 nt, Artificial Sequence
  Description of Artificial Sequence: Synthetic oligonucleotide
gaugcugaggcacagagag

SEQ ID NO: 3080821 - RNA, 19 nt, Artificial Sequence
  Description of Artificial Sequence: Synthetic oligonucleotide
ucuacaucaaacucccugg

SEQ ID NO: 3080822 - RNA, 19 nt, Artificial Sequence
  Description of Artificial Sequence: Synthetic oligonucleotide
cauacagccaucaguaugg

SEQ ID NO: 3080823 - RNA, 19 nt, Artificial Sequence
  Description of Artificial Sequence: Synthetic oligonucleotide
uccccauuuacaaaugagg

SEQ ID NO: 3080824 - RNA, 19 nt, Artificial Sequence
  Description of Artificial Sequence: Synthetic oligonucleotide
aaugaggaugcugaggcac

SEQ ID NO: 3080825 - RNA, 19 nt, Artificial Sequence
  Description of Artificial Sequence: Synthetic oligonucleotide
uccauagggacccucagag

SEQ ID NO: 3080826 - RNA, 19 nt, Artificial Sequence
  Description of Artificial Sequence: Synthetic oligonucleotide
uucuacaucaaacucccug

SEQ ID NO: 3080827 - RNA, 19 nt, Artificial Sequence
  Description of Artificial Sequence: Synthetic oligonucleotide
gaaaguuucagagaucccc

SEQ ID NO: 3080828 - RNA, 19 nt, Artificial Sequence
  Description of Artificial Sequence: Synthetic oligonucleotide
ucagacuuuuccagaaugg

SEQ ID NO: 3080829 - RNA, 19 nt, Artificial Sequence
  Description of Artificial Sequence: Synthetic oligonucleotide
acaucaaacucccuggguc

SEQ ID NO: 3080830 - RNA, 19 nt, Artificial Sequence
  Description of Artificial Sequence: Synthetic oligonucleotide
uccagaauggcccuggaga

SEQ ID NO: 3080831 - RNA, 19 nt, Artificial Sequence
  Description of Artificial Sequence: Synthetic oligonucleotide
acagccaucaguauggagg

SEQ ID NO: 3080832 - RNA, 19 nt, Artificial Sequence
  Description of Artificial Sequence: Synthetic oligonucleotide
gaagcucagacuuuuccag

SEQ ID NO: 3080833 - RNA, 19 nt, Artificial Sequence
  Description of Artificial Sequence: Synthetic oligonucleotide
ucagagauccccauuuaca

SEQ ID NO: 3080834 - RNA, 19 nt, Artificial Sequence
  Description of Artificial Sequence: Synthetic oligonucleotide
uuuacaaaugaggaugcug

SEQ ID NO: 3080835 - RNA, 19 nt, Artificial Sequence
  Description of Artificial Sequence: Synthetic oligonucleotide
gcuucuaugaucuccagcc

SEQ ID NO: 3080836 - RNA, 19 nt, Artificial Sequence
  Description of Artificial Sequence: Synthetic oligonucleotide
cauuuacaaaugaggaugc

SEQ ID NO: 3080837 - RNA, 19 nt, Artificial Sequence
  Description of Artificial Sequence: Synthetic oligonucleotide
cagccugugagguaggugg

SEQ ID NO: 3080838 - RNA, 19 nt, Artificial Sequence
  Description of Artificial Sequence: Synthetic oligonucleotide
auauucucuccacugcuuc

SEQ ID NO: 3080839 - RNA, 19 nt, Artificial Sequence
  Description of Artificial Sequence: Synthetic oligonucleotide
ucuaugaucuccagccuca

SEQ ID NO: 3080840 - RNA, 19 nt, Artificial Sequence
  Description of Artificial Sequence: Synthetic oligonucleotide
cucacuacagccugugagg

SEQ ID NO: 3080841 - RNA, 19 nt, Artificial Sequence
  Description of Artificial Sequence: Synthetic oligonucleotide
agagucagcaguccucugg

SEQ ID NO: 3080842 - RNA, 19 nt, Artificial Sequence
  Description of Artificial Sequence: Synthetic oligonucleotide
ucagaagacuccuuggguc

SEQ ID NO: 3080843 - RNA, 19 nt, Artificial Sequence
  Description of Artificial Sequence: Synthetic oligonucleotide
guauggagggcacagaguc

SEQ ID NO: 3080844 - RNA, 19 nt, Artificial Sequence
  Description of Artificial Sequence: Synthetic oligonucleotide
cucagagaaggcuggaagc

SEQ ID NO: 3080845 - RNA, 19 nt, Artificial Sequence
  Description of Artificial Sequence: Synthetic oligonucleotide
augaucuccagccucagaa

SEQ ID NO: 3080846 - RNA, 19 nt, Artificial Sequence
  Description of Artificial Sequence: Synthetic oligonucleotide
acuacagccugugagguag

SEQ ID NO: 3080847 - RNA, 19 nt, Artificial Sequence
  Description of Artificial Sequence: Synthetic oligonucleotide
agaauggcccuggagaagg

SEQ ID NO: 3080848 - RNA, 19 nt, Artificial Sequence
  Description of Artificial Sequence: Synthetic oligonucleotide
aggaugcugaggcacagag

SEQ ID NO: 3080849 - RNA, 19 nt, Artificial Sequence
  Description of Artificial Sequence: Synthetic oligonucleotide
caucaaacucccugggucc

SEQ ID NO: 3080850 - RNA, 19 nt, Artificial Sequence
  Description of Artificial Sequence: Synthetic oligonucleotide
uucagagauccccauuuac

SEQ ID NO: 3080851 - RNA, 19 nt, Artificial Sequence
  Description of Artificial Sequence: Synthetic oligonucleotide
acaaaugaggaugcugagg

SEQ ID NO: 3080852 - RNA, 19 nt, Artificial Sequence
  Description of Artificial Sequence: Synthetic oligonucleotide
aaaguuucagagaucccca

SEQ ID NO: 3080853 - RNA, 19 nt, Artificial Sequence
  Description of Artificial Sequence: Synthetic oligonucleotide
uacaaaugaggaugcugag

SEQ ID NO: 3080854 - RNA, 19 nt, Artificial Sequence
  Description of Artificial Sequence: Synthetic oligonucleotide
uuuuccagaauggcccugg

SEQ ID NO: 3080855 - RNA, 19 nt, Artificial Sequence
  Description of Artificial Sequence: Synthetic oligonucleotide
aauggcccuggagaaggcc

SEQ ID NO: 3080856 - RNA, 19 nt, Artificial Sequence
  Description of Artificial Sequence: Synthetic oligonucleotide
aggucauacagccaucagu

SEQ ID NO: 3080857 - RNA, 19 nt, Artificial Sequence
  Description of Artificial Sequence: Synthetic oligonucleotide
uucuaugaucuccagccuc

SEQ ID NO: 3080858 - RNA, 19 nt, Artificial Sequence
  Description of Artificial Sequence: Synthetic oligonucleotide
ugccccaggucauacagcc

SEQ ID NO: 3080859 - RNA, 19 nt, Artificial Sequence
  Description of Artificial Sequence: Synthetic oligonucleotide
cucagacuuuuccagaaug

SEQ ID NO: 3080860 - RNA, 19 nt, Artificial Sequence
  Description of Artificial Sequence: Synthetic oligonucleotide
aggugggacguccugcccc

SEQ ID NO: 3080861 - RNA, 19 nt, Artificial Sequence
  Description of Artificial Sequence: Synthetic oligonucleotide
cagaagacuccuugggucc

SEQ ID NO: 3080862 - RNA, 19 nt, Artificial Sequence
  Description of Artificial Sequence: Synthetic oligonucleotide
ugcuucuaugaucuccagc

SEQ ID NO: 3080863 - RNA, 19 nt, Artificial Sequence
  Description of Artificial Sequence: Synthetic oligonucleotide
acagagaggugggacgucc

SEQ ID NO: 3080864 - RNA, 19 nt, Artificial Sequence
  Description of Artificial Sequence: Synthetic oligonucleotide
ccauuuacaaaugaggaug

SEQ ID NO: 3080865 - RNA, 19 nt, Artificial Sequence
  Description of Artificial Sequence: Synthetic oligonucleotide
gacuccuuggguccauagg

SEQ ID NO: 3080866 - RNA, 19 nt, Artificial Sequence
  Description of Artificial Sequence: Synthetic oligonucleotide
ugaucuccagccucagaag

SEQ ID NO: 3080867 - RNA, 19 nt, Artificial Sequence
  Description of Artificial Sequence: Synthetic oligonucleotide
cuacaucaaacucccuggg

SEQ ID NO: 3080868 - RNA, 19 nt, Artificial Sequence
  Description of Artificial Sequence: Synthetic oligonucleotide
aaaugaggaugcugaggca

SEQ ID NO: 3080869 - RNA, 19 nt, Artificial Sequence
  Description of Artificial Sequence: Synthetic oligonucleotide
cuuggguccauagggaccc

SEQ ID NO: 3080870 - RNA, 19 nt, Artificial Sequence
  Description of Artificial Sequence: Synthetic oligonucleotide
caguauggagggcacagag

SEQ ID NO: 3080871 - RNA, 19 nt, Artificial Sequence
  Description of Artificial Sequence: Synthetic oligonucleotide
uacaucaaacucccugggu

SEQ ID NO: 3080872 - RNA, 19 nt, Artificial Sequence
  Description of Artificial Sequence: Synthetic oligonucleotide
ucagagaaggcuggaagcu

SEQ ID NO: 3080873 - RNA, 19 nt, Artificial Sequence
  Description of Artificial Sequence: Synthetic oligonucleotide
aucaguauggagggcacag

SEQ ID NO: 3080874 - RNA, 19 nt, Artificial Sequence
  Description of Artificial Sequence: Synthetic oligonucleotide
gagucagcaguccucuggc

SEQ ID NO: 3080875 - RNA, 19 nt, Artificial Sequence
  Description of Artificial Sequence: Synthetic oligonucleotide
gaucuccagccucagaaga

SEQ ID NO: 3080876 - RNA, 19 nt, Artificial Sequence
  Description of Artificial Sequence: Synthetic oligonucleotide
cauagggacccucagagaa

SEQ ID NO: 3080877 - RNA, 19 nt, Artificial Sequence
  Description of Artificial Sequence: Synthetic oligonucleotide
uuccagaauggcccuggag

SEQ ID NO: 3080878 - RNA, 19 nt, Artificial Sequence
  Description of Artificial Sequence: Synthetic oligonucleotide
ucaggcgguccccauauuc

SEQ ID NO: 3080879 - RNA, 19 nt, Artificial Sequence
  Description of Artificial Sequence: Synthetic oligonucleotide
agucagcaguccucuggcc

SEQ ID NO: 3080880 - RNA, 19 nt, Artificial Sequence
  Description of Artificial Sequence: Synthetic oligonucleotide
aguccucuggcccucccuc

SEQ ID NO: 3080881 - RNA, 19 nt, Artificial Sequence
  Description of Artificial Sequence: Synthetic oligonucleotide
auggagggcacagagucag

SEQ ID NO: 3080882 - RNA, 19 nt, Artificial Sequence
  Description of Artificial Sequence: Synthetic oligonucleotide
cuggguccucacuacagcc

SEQ ID NO: 3080883 - RNA, 19 nt, Artificial Sequence
  Description of Artificial Sequence: Synthetic oligonucleotide
agccucagaagacuccuug

SEQ ID NO: 3080884 - RNA, 19 nt, Artificial Sequence
  Description of Artificial Sequence: Synthetic oligonucleotide
uauggagggcacagaguca

SEQ ID NO: 3080885 - RNA, 19 nt, Artificial Sequence
  Description of Artificial Sequence: Synthetic oligonucleotide
gagauccccauuuacaaau

SEQ ID NO: 3080886 - RNA, 19 nt, Artificial Sequence
  Description of Artificial Sequence: Synthetic oligonucleotide
ucagcaguccucuggcccu

SEQ ID NO: 3080887 - RNA, 19 nt, Artificial Sequence
  Description of Artificial Sequence: Synthetic oligonucleotide
agggcacagagucagcagu

SEQ ID NO: 3080888 - RNA, 19 nt, Artificial Sequence
  Description of Artificial Sequence: Synthetic oligonucleotide
aaguuucagagauccccau

SEQ ID NO: 3080889 - RNA, 19 nt, Artificial Sequence
  Description of Artificial Sequence: Synthetic oligonucleotide
cucuccacugcuucuauga

SEQ ID NO: 3080890 - RNA, 19 nt, Artificial Sequence
  Description of Artificial Sequence: Synthetic oligonucleotide
gauccccauuuacaaauga

SEQ ID NO: 3080891 - RNA, 19 nt, Artificial Sequence
  Description of Artificial Sequence: Synthetic oligonucleotide
uccuuggguccauagggac

SEQ ID NO: 3080892 - RNA, 19 nt, Artificial Sequence
  Description of Artificial Sequence: Synthetic oligonucleotide
ggcacagagaggugggacg

SEQ ID NO: 3080893 - RNA, 19 nt, Artificial Sequence
  Description of Artificial Sequence: Synthetic oligonucleotide
uaugaucuccagccucaga

SEQ ID NO: 3080894 - RNA, 19 nt, Artificial Sequence
  Description of Artificial Sequence: Synthetic oligonucleotide
uacagccaucaguauggag

SEQ ID NO: 3080895 - RNA, 19 nt, Artificial Sequence
  Description of Artificial Sequence: Synthetic oligonucleotide
gagggcacagagucagcag

SEQ ID NO: 3080896 - RNA, 19 nt, Artificial Sequence
  Description of Artificial Sequence: Synthetic oligonucleotide
uuucagagauccccauuua

SEQ ID NO: 3080897 - RNA, 19 nt, Artificial Sequence
  Description of Artificial Sequence: Synthetic oligonucleotide
auccccauuuacaaaugag

SEQ ID NO: 3080898 - RNA, 19 nt, Artificial Sequence
  Description of Artificial Sequence: Synthetic oligonucleotide
agcucagacuuuuccagaa

SEQ ID NO: 3080899 - RNA, 19 nt, Artificial Sequence
  Description of Artificial Sequence: Synthetic oligonucleotide
cagagauccccauuuacaa

SEQ ID NO: 3080900 - RNA, 19 nt, Artificial Sequence
  Description of Artificial Sequence: Synthetic oligonucleotide
cuggcccucccucaggcgg

SEQ ID NO: 3080901 - RNA, 19 nt, Artificial Sequence
  Description of Artificial Sequence: Synthetic oligonucleotide
ucacuacagccugugaggu

SEQ ID NO: 3080902 - RNA, 19 nt, Artificial Sequence
  Description of Artificial Sequence: Synthetic oligonucleotide
agagauccccauuuacaaa

SEQ ID NO: 3080903 - RNA, 19 nt, Artificial Sequence
  Description of Artificial Sequence: Synthetic oligonucleotide
gacguccugccccagguca

SEQ ID NO: 3080904 - RNA, 19 nt, Artificial Sequence
  Description of Artificial Sequence: Synthetic oligonucleotide
gggcgggaaaguuucagag

SEQ ID NO: 3080905 - RNA, 19 nt, Artificial Sequence
  Description of Artificial Sequence: Synthetic oligonucleotide
uccccauauucucuccacu

SEQ ID NO: 3080906 - RNA, 19 nt, Artificial Sequence
  Description of Artificial Sequence: Synthetic oligonucleotide
aaacucccuggguccucac

SEQ ID NO: 3080907 - RNA, 19 nt, Artificial Sequence
  Description of Artificial Sequence: Synthetic oligonucleotide
cacagagucagcaguccuc

SEQ ID NO: 3080908 - RNA, 19 nt, Artificial Sequence
  Description of Artificial Sequence: Synthetic oligonucleotide
aggcgguccccauauucuc

SEQ ID NO: 3080909 - RNA, 19 nt, Artificial Sequence
  Description of Artificial Sequence: Synthetic oligonucleotide
acagagucagcaguccucu

SEQ ID NO: 3080910 - RNA, 19 nt, Artificial Sequence
  Description of Artificial Sequence: Synthetic oligonucleotide
agacuccuuggguccauag

SEQ ID NO: 3080911 - RNA, 19 nt, Artificial Sequence
  Description of Artificial Sequence: Synthetic oligonucleotide
ugggcgggaaaguuucaga

SEQ ID NO: 3080912 - RNA, 19 nt, Artificial Sequence
  Description of Artificial Sequence: Synthetic oligonucleotide
ucuccagccucagaagacu

SEQ ID NO: 3080913 - RNA, 19 nt, Artificial Sequence
  Description of Artificial Sequence: Synthetic oligonucleotide
aggcacagagaggugggac

SEQ ID NO: 3080914 - RNA, 19 nt, Artificial Sequence
  Description of Artificial Sequence: Synthetic oligonucleotide
ggaagcucagacuuuucca

SEQ ID NO: 3080915 - RNA, 19 nt, Artificial Sequence
  Description of Artificial Sequence: Synthetic oligonucleotide
aggugggcgggaaaguuuc

SEQ ID NO: 3080916 - RNA, 19 nt, Artificial Sequence
  Description of Artificial Sequence: Synthetic oligonucleotide
cuccacugcuucuaugauc

SEQ ID NO: 3080917 - RNA, 19 nt, Artificial Sequence
  Description of Artificial Sequence: Synthetic oligonucleotide
aggccuggucaacucuugg

SEQ ID NO: 3080918 - RNA, 19 nt, Artificial Sequence
  Description of Artificial Sequence: Synthetic oligonucleotide
ccucacuacagccugugag

SEQ ID NO: 3080919 - RNA, 19 nt, Artificial Sequence
  Description of Artificial Sequence: Synthetic oligonucleotide
agagaggugggacguccug

SEQ ID NO: 3080920 - RNA, 19 nt, Artificial Sequence
  Description of Artificial Sequence: Synthetic oligonucleotide
aacucccuggguccucacu

SEQ ID NO: 3080921 - RNA, 19 nt, Artificial Sequence
  Description of Artificial Sequence: Synthetic oligonucleotide
ccucagaagacuccuuggg

SEQ ID NO: 3080922 - RNA, 19 nt, Artificial Sequence
  Description of Artificial Sequence: Synthetic oligonucleotide
guuucagagauccccauuu

SEQ ID NO: 3080923 - RNA, 19 nt, Artificial Sequence
  Description of Artificial Sequence: Synthetic oligonucleotide
gagaaggccuggucaacuc

SEQ ID NO: 3080924 - RNA, 19 nt, Artificial Sequence
  Description of Artificial Sequence: Synthetic oligonucleotide
aguuucagagauccccauu

SEQ ID NO: 3080925 - RNA, 19 nt, Artificial Sequence
  Description of Artificial Sequence: Synthetic oligonucleotide
auuuacaaaugaggaugcu

SEQ ID NO: 3080926 - RNA, 19 nt, Artificial Sequence
  Description of Artificial Sequence: Synthetic oligonucleotide
ucuccacugcuucuaugau

SEQ ID NO: 3080927 - RNA, 19 nt, Artificial Sequence
  Description of Artificial Sequence: Synthetic oligonucleotide
ggucauacagccaucagua

SEQ ID NO: 3080928 - RNA, 19 nt, Artificial Sequence
  Description of Artificial Sequence: Synthetic oligonucleotide
ugggacguccugccccagg

SEQ ID NO: 3080929 - RNA, 19 nt, Artificial Sequence
  Description of Artificial Sequence: Synthetic oligonucleotide
ggccuggucaacucuuggg

SEQ ID NO: 3080930 - RNA, 19 nt, Artificial Sequence
  Description of Artificial Sequence: Synthetic oligonucleotide
gccuggucaacucuugggc

SEQ ID NO: 3080931 - RNA, 19 nt, Artificial Sequence
  Description of Artificial Sequence: Synthetic oligonucleotide
acucccuggguccucacua

SEQ ID NO: 3080932 - RNA, 19 nt, Artificial Sequence
  Description of Artificial Sequence: Synthetic oligonucleotide
auagggacccucagagaag

SEQ ID NO: 3080933 - RNA, 19 nt, Artificial Sequence
  Description of Artificial Sequence: Synthetic oligonucleotide
uuucuacaucaaacucccu

SEQ ID NO: 3080934 - RNA, 19 nt, Artificial Sequence
  Description of Artificial Sequence: Synthetic oligonucleotide
ccucagagaaggcuggaag

SEQ ID NO: 3080935 - RNA, 19 nt, Artificial Sequence
  Description of Artificial Sequence: Synthetic oligonucleotide
ucaguauggagggcacaga

SEQ ID NO: 3080936 - RNA, 19 nt, Artificial Sequence
  Description of Artificial Sequence: Synthetic oligonucleotide
gccucagaagacuccuugg

SEQ ID NO: 3080937 - RNA, 19 nt, Artificial Sequence
  Description of Artificial Sequence: Synthetic oligonucleotide
uaggugggcgggaaaguuu

SEQ ID NO: 3080938 - RNA, 19 nt, Artificial Sequence
  Description of Artificial Sequence: Synthetic oligonucleotide
cucuggcccucccucaggc

SEQ ID NO: 3080939 - RNA, 19 nt, Artificial Sequence
  Description of Artificial Sequence: Synthetic oligonucleotide
ccuggucaacucuugggcc

SEQ ID NO: 3080940 - RNA, 19 nt, Artificial Sequence
  Description of Artificial Sequence: Synthetic oligonucleotide
aguauggagggcacagagu

SEQ ID NO: 3080941 - RNA, 19 nt, Artificial Sequence
  Description of Artificial Sequence: Synthetic oligonucleotide
ccccauuuacaaaugagga

SEQ ID NO: 3080942 - RNA, 19 nt, Artificial Sequence
  Description of Artificial Sequence: Synthetic oligonucleotide
cccauauucucuccacugc

SEQ ID NO: 3080943 - RNA, 19 nt, Artificial Sequence
  Description of Artificial Sequence: Synthetic oligonucleotide
uccucacuacagccuguga

SEQ ID NO: 3080944 - RNA, 19 nt, Artificial Sequence
  Description of Artificial Sequence: Synthetic oligonucleotide
caggucauacagccaucag

SEQ ID NO: 3080945 - RNA, 19 nt, Artificial Sequence
  Description of Artificial Sequence: Synthetic oligonucleotide
ucccuggguccucacuaca

SEQ ID NO: 3080946 - RNA, 19 nt, Artificial Sequence
  Description of Artificial Sequence: Synthetic oligonucleotide
guccccauauucucuccac

SEQ ID NO: 3080947 - RNA, 19 nt, Artificial Sequence
  Description of Artificial Sequence: Synthetic oligonucleotide
aaggccuggucaacucuug

SEQ ID NO: 3080948 - RNA, 19 nt, Artificial Sequence
  Description of Artificial Sequence: Synthetic oligonucleotide
gagaaggcuggaagcucag

SEQ ID NO: 3080949 - RNA, 19 nt, Artificial Sequence
  Description of Artificial Sequence: Synthetic oligonucleotide
agauccccauuuacaaaug

SEQ ID NO: 3080950 - RNA, 19 nt, Artificial Sequence
  Description of Artificial Sequence: Synthetic oligonucleotide
cuacagccugugagguagg

SEQ ID NO: 3080951 - RNA, 19 nt, Artificial Sequence
  Description of Artificial Sequence: Synthetic oligonucleotide
cuggagaaggccuggucaa

SEQ ID NO: 3080952 - RNA, 19 nt, Artificial Sequence
  Description of Artificial Sequence: Synthetic oligonucleotide
aucaaacucccuggguccu

SEQ ID NO: 3080953 - RNA, 19 nt, Artificial Sequence
  Description of Artificial Sequence: Synthetic oligonucleotide
cuccagccucagaagacuc

SEQ ID NO: 3080954 - RNA, 19 nt, Artificial Sequence
  Description of Artificial Sequence: Synthetic oligonucleotide
cugcuucuaugaucuccag

SEQ ID NO: 3080955 - RNA, 19 nt, Artificial Sequence
  Description of Artificial Sequence: Synthetic oligonucleotide
cuaugaucuccagccucag

SEQ ID NO: 3080956 - RNA, 19 nt, Artificial Sequence
  Description of Artificial Sequence: Synthetic oligonucleotide
gaggugggacguccugccc

SEQ ID NO: 3080957 - RNA, 19 nt, Artificial Sequence
  Description of Artificial Sequence: Synthetic oligonucleotide
ggacccucagagaaggcug

SEQ ID NO: 3080958 - RNA, 19 nt, Artificial Sequence
  Description of Artificial Sequence: Synthetic oligonucleotide
ccuuggguccauagggacc

SEQ ID NO: 3080959 - RNA, 19 nt, Artificial Sequence
  Description of Artificial Sequence: Synthetic oligonucleotide
cagaauggcccuggagaag

SEQ ID NO: 3080960 - RNA, 19 nt, Artificial Sequence
  Description of Artificial Sequence: Synthetic oligonucleotide
guccauagggacccucaga

SEQ ID NO: 3080961 - RNA, 19 nt, Artificial Sequence
  Description of Artificial Sequence: Synthetic oligonucleotide
ccccauauucucuccacug

SEQ ID NO: 3080962 - RNA, 19 nt, Artificial Sequence
  Description of Artificial Sequence: Synthetic oligonucleotide
ccugccccaggucauacag

SEQ ID NO: 3080963 - RNA, 19 nt, Artificial Sequence
  Description of Artificial Sequence: Synthetic oligonucleotide
cugccccaggucauacagc

SEQ ID NO: 3080964 - RNA, 19 nt, Artificial Sequence
  Description of Artificial Sequence: Synthetic oligonucleotide
gugggcgggaaaguuucag

SEQ ID NO: 3080965 - RNA, 19 nt, Artificial Sequence
  Description of Artificial Sequence: Synthetic oligonucleotide
agccaucaguauggagggc

SEQ ID NO: 3080966 - RNA, 19 nt, Artificial Sequence
  Description of Artificial Sequence: Synthetic oligonucleotide
gguccauagggacccucag

SEQ ID NO: 3080967 - RNA, 19 nt, Artificial Sequence
  Description of Artificial Sequence: Synthetic oligonucleotide
ugagguaggugggcgggaa

SEQ ID NO: 3080968 - RNA, 19 nt, Artificial Sequence
  Description of Artificial Sequence: Synthetic oligonucleotide
agaagacuccuugggucca

SEQ ID NO: 3080969 - RNA, 19 nt, Artificial Sequence
  Description of Artificial Sequence: Synthetic oligonucleotide
uggagggcacagagucagc

SEQ ID NO: 3080970 - RNA, 19 nt, Artificial Sequence
  Description of Artificial Sequence: Synthetic oligonucleotide
cagagaaggcuggaagcuc

SEQ ID NO: 3080971 - RNA, 19 nt, Artificial Sequence
  Description of Artificial Sequence: Synthetic oligonucleotide
cucccuggguccucacuac

SEQ ID NO: 3080972 - RNA, 19 nt, Artificial Sequence
  Description of Artificial Sequence: Synthetic oligonucleotide
auucucuccacugcuucua

SEQ ID NO: 3080973 - RNA, 19 nt, Artificial Sequence
  Description of Artificial Sequence: Synthetic oligonucleotide
cuuuuccagaauggcccug

SEQ ID NO: 3080974 - RNA, 19 nt, Artificial Sequence
  Description of Artificial Sequence: Synthetic oligonucleotide
auggcccuggagaaggccu

SEQ ID NO: 3080975 - RNA, 19 nt, Artificial Sequence
  Description of Artificial Sequence: Synthetic oligonucleotide
cucagaagacuccuugggu

SEQ ID NO: 3080976 - RNA, 19 nt, Artificial Sequence
  Description of Artificial Sequence: Synthetic oligonucleotide
augaggaugcugaggcaca

SEQ ID NO: 3080977 - RNA, 19 nt, Artificial Sequence
  Description of Artificial Sequence: Synthetic oligonucleotide
uggagaaggccuggucaac

SEQ ID NO: 3080978 - RNA, 19 nt, Artificial Sequence
  Description of Artificial Sequence: Synthetic oligonucleotide
agccugugagguagguggg

SEQ ID NO: 3080979 - RNA, 19 nt, Artificial Sequence
  Description of Artificial Sequence: Synthetic oligonucleotide
gcgggaaaguuucagagau

SEQ ID NO: 3080980 - RNA, 19 nt, Artificial Sequence
  Description of Artificial Sequence: Synthetic oligonucleotide
ccuggagaaggccugguca

SEQ ID NO: 3080981 - RNA, 19 nt, Artificial Sequence
  Description of Artificial Sequence: Synthetic oligonucleotide
gccaucaguauggagggca

SEQ ID NO: 3080982 - RNA, 19 nt, Artificial Sequence
  Description of Artificial Sequence: Synthetic oligonucleotide
ggaaaguuucagagauccc

SEQ ID NO: 3080983 - RNA, 19 nt, Artificial Sequence
  Description of Artificial Sequence: Synthetic oligonucleotide
ggcgggaaaguuucagaga

SEQ ID NO: 3080984 - RNA, 19 nt, Artificial Sequence
  Description of Artificial Sequence: Synthetic oligonucleotide
guccucacuacagccugug

SEQ ID NO: 3080985 - RNA, 19 nt, Artificial Sequence
  Description of Artificial Sequence: Synthetic oligonucleotide
cuggucaacucuugggccu

SEQ ID NO: 3080986 - RNA, 19 nt, Artificial Sequence
  Description of Artificial Sequence: Synthetic oligonucleotide
uccugccccaggucauaca

SEQ ID NO: 3080987 - RNA, 19 nt, Artificial Sequence
  Description of Artificial Sequence: Synthetic oligonucleotide
uacagccugugagguaggu

SEQ ID NO: 3080988 - RNA, 19 nt, Artificial Sequence
  Description of Artificial Sequence: Synthetic oligonucleotide
ccuggguccucacuacagc

SEQ ID NO: 3080989 - RNA, 19 nt, Artificial Sequence
  Description of Artificial Sequence: Synthetic oligonucleotide
uggcccucccucaggcggu

SEQ ID NO: 3080990 - RNA, 19 nt, Artificial Sequence
  Description of Artificial Sequence: Synthetic oligonucleotide
auacagccaucaguaugga

SEQ ID NO: 3080991 - RNA, 19 nt, Artificial Sequence
  Description of Artificial Sequence: Synthetic oligonucleotide
agcaguccucuggcccucc

SEQ ID NO: 3080992 - RNA, 19 nt, Artificial Sequence
  Description of Artificial Sequence: Synthetic oligonucleotide
ucaaacucccuggguccuc

SEQ ID NO: 3080993 - RNA, 19 nt, Artificial Sequence
  Description of Artificial Sequence: Synthetic oligonucleotide
ggcacagagucagcagucc

SEQ ID NO: 3080994 - RNA, 19 nt, Artificial Sequence
  Description of Artificial Sequence: Synthetic oligonucleotide
agaaggcuggaagcucaga

SEQ ID NO: 3080995 - RNA, 19 nt, Artificial Sequence
  Description of Artificial Sequence: Synthetic oligonucleotide
ccaucaguauggagggcac

SEQ ID NO: 3080996 - RNA, 19 nt, Artificial Sequence
  Description of Artificial Sequence: Synthetic oligonucleotide
agggacccucagagaaggc

SEQ ID NO: 3080997 - RNA, 19 nt, Artificial Sequence
  Description of Artificial Sequence: Synthetic oligonucleotide
cagagucagcaguccucug

SEQ ID NO: 3080998 - RNA, 19 nt, Artificial Sequence
  Description of Artificial Sequence: Synthetic oligonucleotide
uggucaacucuugggccua

SEQ ID NO: 3080999 - RNA, 19 nt, Artificial Sequence
  Description of Artificial Sequence: Synthetic oligonucleotide
ggagggcacagagucagca

SEQ ID NO: 3081000 - RNA, 19 nt, Artificial Sequence
  Description of Artificial Sequence: Synthetic oligonucleotide
cauauucucuccacugcuu

SEQ ID NO: 3081001 - RNA, 19 nt, Artificial Sequence
  Description of Artificial Sequence: Synthetic oligonucleotide
cuucuaugaucuccagccu

SEQ ID NO: 3081002 - RNA, 19 nt, Artificial Sequence
  Description of Artificial Sequence: Synthetic oligonucleotide
cccuggguccucacuacag

SEQ ID NO: 3081003 - RNA, 19 nt, Artificial Sequence
  Description of Artificial Sequence: Synthetic oligonucleotide
gguccccauauucucucca

SEQ ID NO: 3081004 - RNA, 19 nt, Artificial Sequence
  Description of Artificial Sequence: Synthetic oligonucleotide
caggcgguccccauauucu

SEQ ID NO: 3081005 - RNA, 19 nt, Artificial Sequence
  Description of Artificial Sequence: Synthetic oligonucleotide
gagguaggugggcgggaaa

SEQ ID NO: 3081006 - RNA, 19 nt, Artificial Sequence
  Description of Artificial Sequence: Synthetic oligonucleotide
caaacucccuggguccuca

SEQ ID NO: 3081007 - RNA, 19 nt, Artificial Sequence
  Description of Artificial Sequence: Synthetic oligonucleotide
aagacuccuuggguccaua

SEQ ID NO: 3081008 - RNA, 19 nt, Artificial Sequence
  Description of Artificial Sequence: Synthetic oligonucleotide
gaggaugcugaggcacaga

SEQ ID NO: 3081009 - RNA, 19 nt, Artificial Sequence
  Description of Artificial Sequence: Synthetic oligonucleotide
gaggcacagagagguggga

SEQ ID NO: 3081010 - RNA, 19 nt, Artificial Sequence
  Description of Artificial Sequence: Synthetic oligonucleotide
ggugggacguccugcccca

SEQ ID NO: 3081011 - RNA, 19 nt, Artificial Sequence
  Description of Artificial Sequence: Synthetic oligonucleotide
caucaguauggagggcaca

SEQ ID NO: 3081012 - RNA, 19 nt, Artificial Sequence
  Description of Artificial Sequence: Synthetic oligonucleotide
gucauacagccaucaguau

SEQ ID NO: 3081013 - RNA, 19 nt, Artificial Sequence
  Description of Artificial Sequence: Synthetic oligonucleotide
uggguccauagggacccuc

SEQ ID NO: 3081014 - RNA, 19 nt, Artificial Sequence
  Description of Artificial Sequence: Synthetic oligonucleotide
gcgguccccauauucucuc

SEQ ID NO: 3081015 - RNA, 19 nt, Artificial Sequence
  Description of Artificial Sequence: Synthetic oligonucleotide
cccauuuacaaaugaggau

SEQ ID NO: 3081016 - RNA, 19 nt, Artificial Sequence
  Description of Artificial Sequence: Synthetic oligonucleotide
cacagagaggugggacguc

SEQ ID NO: 3081017 - RNA, 19 nt, Artificial Sequence
  Description of Artificial Sequence: Synthetic oligonucleotide
ccauauucucuccacugcu

SEQ ID NO: 3081018 - RNA, 19 nt, Artificial Sequence
  Description of Artificial Sequence: Synthetic oligonucleotide
ggaugcugaggcacagaga

SEQ ID NO: 3081019 - RNA, 19 nt, Artificial Sequence
  Description of Artificial Sequence: Synthetic oligonucleotide
cacuacagccugugaggua

SEQ ID NO: 3081020 - RNA, 19 nt, Artificial Sequence
  Description of Artificial Sequence: Synthetic oligonucleotide
acccucagagaaggcugga

SEQ ID NO: 3081021 - RNA, 19 nt, Artificial Sequence
  Description of Artificial Sequence: Synthetic oligonucleotide
guccugccccaggucauac

SEQ ID NO: 3081022 - RNA, 19 nt, Artificial Sequence
  Description of Artificial Sequence: Synthetic oligonucleotide
ggguccauagggacccuca

SEQ ID NO: 3081023 - RNA, 19 nt, Artificial Sequence
  Description of Artificial Sequence: Synthetic oligonucleotide
ggagaaggccuggucaacu

SEQ ID NO: 3081024 - RNA, 19 nt, Artificial Sequence
  Description of Artificial Sequence: Synthetic oligonucleotide
ccaggucauacagccauca

SEQ ID NO: 3081025 - RNA, 19 nt, Artificial Sequence
  Description of Artificial Sequence: Synthetic oligonucleotide
ucccucaggcgguccccau

SEQ ID NO: 3081026 - RNA, 19 nt, Artificial Sequence
  Description of Artificial Sequence: Synthetic oligonucleotide
ggcccuggagaaggccugg

SEQ ID NO: 3081027 - RNA, 19 nt, Artificial Sequence
  Description of Artificial Sequence: Synthetic oligonucleotide
guaggugggcgggaaaguu

SEQ ID NO: 3081028 - RNA, 19 nt, Artificial Sequence
  Description of Artificial Sequence: Synthetic oligonucleotide
gugagguaggugggcggga

SEQ ID NO: 3081029 - RNA, 19 nt, Artificial Sequence
  Description of Artificial Sequence: Synthetic oligonucleotide
gggacccucagagaaggcu

SEQ ID NO: 3081030 - RNA, 19 nt, Artificial Sequence
  Description of Artificial Sequence: Synthetic oligonucleotide
ccucuggcccucccucagg

SEQ ID NO: 3081031 - RNA, 19 nt, Artificial Sequence
  Description of Artificial Sequence: Synthetic oligonucleotide
gcacagagucagcaguccu

SEQ ID NO: 3081032 - RNA, 19 nt, Artificial Sequence
  Description of Artificial Sequence: Synthetic oligonucleotide
ccauagggacccucagaga

SEQ ID NO: 3081033 - RNA, 19 nt, Artificial Sequence
  Description of Artificial Sequence: Synthetic oligonucleotide
uuggguccauagggacccu

SEQ ID NO: 3081034 - RNA, 19 nt, Artificial Sequence
  Description of Artificial Sequence: Synthetic oligonucleotide
gggacguccugccccaggu

SEQ ID NO: 3081035 - RNA, 19 nt, Artificial Sequence
  Description of Artificial Sequence: Synthetic oligonucleotide
cagagaggugggacguccu

SEQ ID NO: 3081036 - RNA, 19 nt, Artificial Sequence
  Description of Artificial Sequence: Synthetic oligonucleotide
cccaggucauacagccauc

SEQ ID NO: 3081037 - RNA, 19 nt, Artificial Sequence
  Description of Artificial Sequence: Synthetic oligonucleotide
ggacguccugccccagguc

SEQ ID NO: 3081038 - RNA, 19 nt, Artificial Sequence
  Description of Artificial Sequence: Synthetic oligonucleotide
gcacagagaggugggacgu

SEQ ID NO: 3081039 - RNA, 19 nt, Artificial Sequence
  Description of Artificial Sequence: Synthetic oligonucleotide
cagcaguccucuggcccuc

SEQ ID NO: 3081040 - RNA, 19 nt, Artificial Sequence
  Description of Artificial Sequence: Synthetic oligonucleotide
gaagacuccuuggguccau

SEQ ID NO: 3081041 - RNA, 19 nt, Artificial Sequence
  Description of Artificial Sequence: Synthetic oligonucleotide
ccccaggucauacagccau

SEQ ID NO: 3081042 - RNA, 19 nt, Artificial Sequence
  Description of Artificial Sequence: Synthetic oligonucleotide
gcucagacuuuuccagaau

SEQ ID NO: 3081043 - RNA, 19 nt, Artificial Sequence
  Description of Artificial Sequence: Synthetic oligonucleotide
cucccucaggcggucccca

SEQ ID NO: 3081044 - RNA, 19 nt, Artificial Sequence
  Description of Artificial Sequence: Synthetic oligonucleotide
cgguccccauauucucucc

SEQ ID NO: 3081045 - RNA, 19 nt, Artificial Sequence
  Description of Artificial Sequence: Synthetic oligonucleotide
gugggacguccugccccag

SEQ ID NO: 3081046 - RNA, 19 nt, Artificial Sequence
  Description of Artificial Sequence: Synthetic oligonucleotide
caguccucuggcccucccu

SEQ ID NO: 3081047 - RNA, 19 nt, Artificial Sequence
  Description of Artificial Sequence: Synthetic oligonucleotide
ggugggcgggaaaguuuca

SEQ ID NO: 3081048 - RNA, 19 nt, Artificial Sequence
  Description of Artificial Sequence: Synthetic oligonucleotide
ccucccucaggcggucccc

SEQ ID NO: 3081049 - RNA, 19 nt, Artificial Sequence
  Description of Artificial Sequence: Synthetic oligonucleotide
ccagccucagaagacuccu

SEQ ID NO: 3081050 - RNA, 19 nt, Artificial Sequence
  Description of Artificial Sequence: Synthetic oligonucleotide
ggcgguccccauauucucu

SEQ ID NO: 3081051 - RNA, 19 nt, Artificial Sequence
  Description of Artificial Sequence: Synthetic oligonucleotide
ccucaggcgguccccauau

SEQ ID NO: 3081052 - RNA, 19 nt, Artificial Sequence
  Description of Artificial Sequence: Synthetic oligonucleotide
cagccucagaagacuccuu

SEQ ID NO: 3081053 - RNA, 19 nt, Artificial Sequence
  Description of Artificial Sequence: Synthetic oligonucleotide
cccucagagaaggcuggaa

SEQ ID NO: 3081054 - RNA, 19 nt, Artificial Sequence
  Description of Artificial Sequence: Synthetic oligonucleotide
gguccucacuacagccugu

SEQ ID NO: 3081055 - RNA, 19 nt, Artificial Sequence
  Description of Artificial Sequence: Synthetic oligonucleotide
gccccaggucauacagcca

SEQ ID NO: 3081056 - RNA, 19 nt, Artificial Sequence
  Description of Artificial Sequence: Synthetic oligonucleotide
ggcuggaagcucagacuuu

SEQ ID NO: 3081057 - RNA, 19 nt, Artificial Sequence
  Description of Artificial Sequence: Synthetic oligonucleotide
cccucaggcgguccccaua

SEQ ID NO: 3081058 - RNA, 19 nt, Artificial Sequence
  Description of Artificial Sequence: Synthetic oligonucleotide
cucaggcgguccccauauu

SEQ ID NO: 3081059 - RNA, 19 nt, Artificial Sequence
  Description of Artificial Sequence: Synthetic oligonucleotide
gcccucccucaggcggucc

SEQ ID NO: 3081060 - RNA, 19 nt, Artificial Sequence
  Description of Artificial Sequence: Synthetic oligonucleotide
ggcccucccucaggcgguc

SEQ ID NO: 3081061 - RNA, 19 nt, Artificial Sequence
  Description of Artificial Sequence: Synthetic oligonucleotide
gcccuggagaaggccuggu

SEQ ID NO: 3081062 - RNA, 19 nt, Artificial Sequence
  Description of Artificial Sequence: Synthetic oligonucleotide
cugacauuuaaauagaaag

SEQ ID NO: 3081063 - RNA, 19 nt, Artificial Sequence
  Description of Artificial Sequence: Synthetic oligonucleotide
aauagaaagaucucugaug

SEQ ID NO: 3081064 - RNA, 19 nt, Artificial Sequence
  Description of Artificial Sequence: Synthetic oligonucleotide
ucucuuucuucucugaucg

SEQ ID NO: 3081065 - RNA, 19 nt, Artificial Sequence
  Description of Artificial Sequence: Synthetic oligonucleotide
uuaaauagaaagaucucug

SEQ ID NO: 3081066 - RNA, 19 nt, Artificial Sequence
  Description of Artificial Sequence: Synthetic oligonucleotide
ugacauuuaaauagaaaga

SEQ ID NO: 3081067 - RNA, 19 nt, Artificial Sequence
  Description of Artificial Sequence: Synthetic oligonucleotide
ucaagaaccuuccaguuca

SEQ ID NO: 3081068 - RNA, 19 nt, Artificial Sequence
  Description of Artificial Sequence: Synthetic oligonucleotide
cuuugguacauuuucacac

SEQ ID NO: 3081069 - RNA, 19 nt, Artificial Sequence
  Description of Artificial Sequence: Synthetic oligonucleotide
aagauauacagcagcaggg

SEQ ID NO: 3081070 - RNA, 19 nt, Artificial Sequence
  Description of Artificial Sequence: Synthetic oligonucleotide
caagauauacagcagcagg

SEQ ID NO: 3081071 - RNA, 19 nt, Artificial Sequence
  Description of Artificial Sequence: Synthetic oligonucleotide
ugugaguucacuucagacc

SEQ ID NO: 3081072 - RNA, 19 nt, Artificial Sequence
  Description of Artificial Sequence: Synthetic oligonucleotide
aaauagaaagaucucugau

SEQ ID NO: 3081073 - RNA, 19 nt, Artificial Sequence
  Description of Artificial Sequence: Synthetic oligonucleotide
aacccgaagacacagcaug

SEQ ID NO: 3081074 - RNA, 19 nt, Artificial Sequence
  Description of Artificial Sequence: Synthetic oligonucleotide
accaaugcaacccgaagac

SEQ ID NO: 3081075 - RNA, 19 nt, Artificial Sequence
  Description of Artificial Sequence: Synthetic oligonucleotide
cauuuaaauagaaagaucu

SEQ ID NO: 3081076 - RNA, 19 nt, Artificial Sequence
  Description of Artificial Sequence: Synthetic oligonucleotide
uucacuucagaccaaugca

SEQ ID NO: 3081077 - RNA, 19 nt, Artificial Sequence
  Description of Artificial Sequence: Synthetic oligonucleotide
uguucaagaaccuuccagu

SEQ ID NO: 3081078 - RNA, 19 nt, Artificial Sequence
  Description of Artificial Sequence: Synthetic oligonucleotide
ugaucgcugcuucuuaucg

SEQ ID NO: 3081079 - RNA, 19 nt, Artificial Sequence
  Description of Artificial Sequence: Synthetic oligonucleotide
uaaauagaaagaucucuga

SEQ ID NO: 3081080 - RNA, 19 nt, Artificial Sequence
  Description of Artificial Sequence: Synthetic oligonucleotide
ugcaguuuggcuuccaggc

SEQ ID NO: 3081081 - RNA, 19 nt, Artificial Sequence
  Description of Artificial Sequence: Synthetic oligonucleotide
uuugcugccaagauauaca

SEQ ID NO: 3081082 - RNA, 19 nt, Artificial Sequence
  Description of Artificial Sequence: Synthetic oligonucleotide
acuucagaccaaugcaacc

SEQ ID NO: 3081083 - RNA, 19 nt, Artificial Sequence
  Description of Artificial Sequence: Synthetic oligonucleotide
uuuccuuugguacauuuuc

SEQ ID NO: 3081084 - RNA, 19 nt, Artificial Sequence
  Description of Artificial Sequence: Synthetic oligonucleotide
uuucacacccgcaaaggcc

SEQ ID NO: 3081085 - RNA, 19 nt, Artificial Sequence
  Description of Artificial Sequence: Synthetic oligonucleotide
aucgcugcuucuuaucggc

SEQ ID NO: 3081086 - RNA, 19 nt, Artificial Sequence
  Description of Artificial Sequence: Synthetic oligonucleotide
agaucucugauguuucuuc

SEQ ID NO: 3081087 - RNA, 19 nt, Artificial Sequence
  Description of Artificial Sequence: Synthetic oligonucleotide
uuugguacauuuucacacc

SEQ ID NO: 3081088 - RNA, 19 nt, Artificial Sequence
  Description of Artificial Sequence: Synthetic oligonucleotide
uacauuuucacacccgcaa

SEQ ID NO: 3081089 - RNA, 19 nt, Artificial Sequence
  Description of Artificial Sequence: Synthetic oligonucleotide
guucacuucagaccaaugc

SEQ ID NO: 3081090 - RNA, 19 nt, Artificial Sequence
  Description of Artificial Sequence: Synthetic oligonucleotide
uucagaccaaugcaacccg

SEQ ID NO: 3081091 - RNA, 19 nt, Artificial Sequence
  Description of Artificial Sequence: Synthetic oligonucleotide
gaagacacagcaugagaag

SEQ ID NO: 3081092 - RNA, 19 nt, Artificial Sequence
  Description of Artificial Sequence: Synthetic oligonucleotide
uuuucacacccgcaaaggc

SEQ ID NO: 3081093 - RNA, 19 nt, Artificial Sequence
  Description of Artificial Sequence: Synthetic oligonucleotide
caaugcaacccgaagacac

SEQ ID NO: 3081094 - RNA, 19 nt, Artificial Sequence
  Description of Artificial Sequence: Synthetic oligonucleotide
ugccaagauauacagcagc

SEQ ID NO: 3081095 - RNA, 19 nt, Artificial Sequence
  Description of Artificial Sequence: Synthetic oligonucleotide
auuuaaauagaaagaucuc

SEQ ID NO: 3081096 - RNA, 19 nt, Artificial Sequence
  Description of Artificial Sequence: Synthetic oligonucleotide
uucacacccgcaaaggcca

SEQ ID NO: 3081097 - RNA, 19 nt, Artificial Sequence
  Description of Artificial Sequence: Synthetic oligonucleotide
gauauacagcagcaggggc

SEQ ID NO: 3081098 - RNA, 19 nt, Artificial Sequence
  Description of Artificial Sequence: Synthetic oligonucleotide
gaaccuuccaguucauggc

SEQ ID NO: 3081099 - RNA, 19 nt, Artificial Sequence
  Description of Artificial Sequence: Synthetic oligonucleotide
gugaguucacuucagacca

SEQ ID NO: 3081100 - RNA, 19 nt, Artificial Sequence
  Description of Artificial Sequence: Synthetic oligonucleotide
uugguacauuuucacaccc

SEQ ID NO: 3081101 - RNA, 19 nt, Artificial Sequence
  Description of Artificial Sequence: Synthetic oligonucleotide
caggcuuuuccuuugguac

SEQ ID NO: 3081102 - RNA, 19 nt, Artificial Sequence
  Description of Artificial Sequence: Synthetic oligonucleotide
agauauacagcagcagggg

SEQ ID NO: 3081103 - RNA, 19 nt, Artificial Sequence
  Description of Artificial Sequence: Synthetic oligonucleotide
uugcugccaagauauacag

SEQ ID NO: 3081104 - RNA, 19 nt, Artificial Sequence
  Description of Artificial Sequence: Synthetic oligonucleotide
guguucaagaaccuuccag

SEQ ID NO: 3081105 - RNA, 19 nt, Artificial Sequence
  Description of Artificial Sequence: Synthetic oligonucleotide
ugguacauuuucacacccg

SEQ ID NO: 3081106 - RNA, 19 nt, Artificial Sequence
  Description of Artificial Sequence: Synthetic oligonucleotide
aaagaucucugauguuucu

SEQ ID NO: 3081107 - RNA, 19 nt, Artificial Sequence
  Description of Artificial Sequence: Synthetic oligonucleotide
auuuucacacccgcaaagg

SEQ ID NO: 3081108 - RNA, 19 nt, Artificial Sequence
  Description of Artificial Sequence: Synthetic oligonucleotide
cuucagaccaaugcaaccc

SEQ ID NO: 3081109 - RNA, 19 nt, Artificial Sequence
  Description of Artificial Sequence: Synthetic oligonucleotide
uugcaguuuggcuuccagg

SEQ ID NO: 3081110 - RNA, 19 nt, Artificial Sequence
  Description of Artificial Sequence: Synthetic oligonucleotide
cauuuucacacccgcaaag

SEQ ID NO: 3081111 - RNA, 19 nt, Artificial Sequence
  Description of Artificial Sequence: Synthetic oligonucleotide
ucugauguuucuucaguuc

SEQ ID NO: 3081112 - RNA, 19 nt, Artificial Sequence
  Description of Artificial Sequence: Synthetic oligonucleotide
ucucugauguuucuucagu

SEQ ID NO: 3081113 - RNA, 19 nt, Artificial Sequence
  Description of Artificial Sequence: Synthetic oligonucleotide
gcugccaagauauacagca

SEQ ID NO: 3081114 - RNA, 19 nt, Artificial Sequence
  Description of Artificial Sequence: Synthetic oligonucleotide
uuuugcugccaagauauac

SEQ ID NO: 3081115 - RNA, 19 nt, Artificial Sequence
  Description of Artificial Sequence: Synthetic oligonucleotide
aaccuuccaguucauggcu

SEQ ID NO: 3081116 - RNA, 19 nt, Artificial Sequence
  Description of Artificial Sequence: Synthetic oligonucleotide
uucaagaaccuuccaguuc

SEQ ID NO: 3081117 - RNA, 19 nt, Artificial Sequence
  Description of Artificial Sequence: Synthetic oligonucleotide
agaaagaucucugauguuu

SEQ ID NO: 3081118 - RNA, 19 nt, Artificial Sequence
  Description of Artificial Sequence: Synthetic oligonucleotide
gaucgcugcuucuuaucgg

SEQ ID NO: 3081119 - RNA, 19 nt, Artificial Sequence
  Description of Artificial Sequence: Synthetic oligonucleotide
uccuuugguacauuuucac

SEQ ID NO: 3081120 - RNA, 19 nt, Artificial Sequence
  Description of Artificial Sequence: Synthetic oligonucleotide
uuccuuugguacauuuuca

SEQ ID NO: 3081121 - RNA, 19 nt, Artificial Sequence
  Description of Artificial Sequence: Synthetic oligonucleotide
gaccaaugcaacccgaaga

SEQ ID NO: 3081122 - RNA, 19 nt, Artificial Sequence
  Description of Artificial Sequence: Synthetic oligonucleotide
ucuuucuucucugaucgcu

SEQ ID NO: 3081123 - RNA, 19 nt, Artificial Sequence
  Description of Artificial Sequence: Synthetic oligonucleotide
uuucuucucugaucgcugc

SEQ ID NO: 3081124 - RNA, 19 nt, Artificial Sequence
  Description of Artificial Sequence: Synthetic oligonucleotide
cugugaguucacuucagac

SEQ ID NO: 3081125 - RNA, 19 nt, Artificial Sequence
  Description of Artificial Sequence: Synthetic oligonucleotide
gaagccagguccgaggagc

SEQ ID NO: 3081126 - RNA, 19 nt, Artificial Sequence
  Description of Artificial Sequence: Synthetic oligonucleotide
cacguguucaagaaccuuc

SEQ ID NO: 3081127 - RNA, 19 nt, Artificial Sequence
  Description of Artificial Sequence: Synthetic oligonucleotide
gguacauuuucacacccgc

SEQ ID NO: 3081128 - RNA, 19 nt, Artificial Sequence
  Description of Artificial Sequence: Synthetic oligonucleotide
cuuaucggcuugcaguuug

SEQ ID NO: 3081129 - RNA, 19 nt, Artificial Sequence
  Description of Artificial Sequence: Synthetic oligonucleotide
uuaucggcuugcaguuugg

SEQ ID NO: 3081130 - RNA, 19 nt, Artificial Sequence
  Description of Artificial Sequence: Synthetic oligonucleotide
acguguucaagaaccuucc

SEQ ID NO: 3081131 - RNA, 19 nt, Artificial Sequence
  Description of Artificial Sequence: Synthetic oligonucleotide
ucggcuugcaguuuggcuu

SEQ ID NO: 3081132 - RNA, 19 nt, Artificial Sequence
  Description of Artificial Sequence: Synthetic oligonucleotide
agaccaaugcaacccgaag

SEQ ID NO: 3081133 - RNA, 19 nt, Artificial Sequence
  Description of Artificial Sequence: Synthetic oligonucleotide
ugcuggaguccacccaacg

SEQ ID NO: 3081134 - RNA, 19 nt, Artificial Sequence
  Description of Artificial Sequence: Synthetic oligonucleotide
acccgcaaaggccaggcag

SEQ ID NO: 3081135 - RNA, 19 nt, Artificial Sequence
  Description of Artificial Sequence: Synthetic oligonucleotide
uucuuaucggcuugcaguu

SEQ ID NO: 3081136 - RNA, 19 nt, Artificial Sequence
  Description of Artificial Sequence: Synthetic oligonucleotide
gacacagcaugagaagcag

SEQ ID NO: 3081137 - RNA, 19 nt, Artificial Sequence
  Description of Artificial Sequence: Synthetic oligonucleotide
auauacagcagcaggggca

SEQ ID NO: 3081138 - RNA, 19 nt, Artificial Sequence
  Description of Artificial Sequence: Synthetic oligonucleotide
cuucuuaucggcuugcagu

SEQ ID NO: 3081139 - RNA, 19 nt, Artificial Sequence
  Description of Artificial Sequence: Synthetic oligonucleotide
gaaagaucucugauguuuc

SEQ ID NO: 3081140 - RNA, 19 nt, Artificial Sequence
  Description of Artificial Sequence: Synthetic oligonucleotide
uauacagcagcaggggcac

SEQ ID NO: 3081141 - RNA, 19 nt, Artificial Sequence
  Description of Artificial Sequence: Synthetic oligonucleotide
gaucucugauguuucuuca

SEQ ID NO: 3081142 - RNA, 19 nt, Artificial Sequence
  Description of Artificial Sequence: Synthetic oligonucleotide
cacuucagaccaaugcaac

SEQ ID NO: 3081143 - RNA, 19 nt, Artificial Sequence
  Description of Artificial Sequence: Synthetic oligonucleotide
cuggaagccagguccgagg

SEQ ID NO: 3081144 - RNA, 19 nt, Artificial Sequence
  Description of Artificial Sequence: Synthetic oligonucleotide
uggaguccacccaacgcug

SEQ ID NO: 3081145 - RNA, 19 nt, Artificial Sequence
  Description of Artificial Sequence: Synthetic oligonucleotide
uggaagccagguccgagga

SEQ ID NO: 3081146 - RNA, 19 nt, Artificial Sequence
  Description of Artificial Sequence: Synthetic oligonucleotide
gcaaaggccaggcagagga

SEQ ID NO: 3081147 - RNA, 19 nt, Artificial Sequence
  Description of Artificial Sequence: Synthetic oligonucleotide
ucagaccaaugcaacccga

SEQ ID NO: 3081148 - RNA, 19 nt, Artificial Sequence
  Description of Artificial Sequence: Synthetic oligonucleotide
uuccaggcuuuuccuuugg

SEQ ID NO: 3081149 - RNA, 19 nt, Artificial Sequence
  Description of Artificial Sequence: Synthetic oligonucleotide
aaugcaacccgaagacaca

SEQ ID NO: 3081150 - RNA, 19 nt, Artificial Sequence
  Description of Artificial Sequence: Synthetic oligonucleotide
agaagcagcuggaagccag

SEQ ID NO: 3081151 - RNA, 19 nt, Artificial Sequence
  Description of Artificial Sequence: Synthetic oligonucleotide
aguucucuuucuucucuga

SEQ ID NO: 3081152 - RNA, 19 nt, Artificial Sequence
  Description of Artificial Sequence: Synthetic oligonucleotide
agguccgaggagcuggaag

SEQ ID NO: 3081153 - RNA, 19 nt, Artificial Sequence
  Description of Artificial Sequence: Synthetic oligonucleotide
ugcugccaagauauacagc

SEQ ID NO: 3081154 - RNA, 19 nt, Artificial Sequence
  Description of Artificial Sequence: Synthetic oligonucleotide
cuugcaguuuggcuuccag

SEQ ID NO: 3081155 - RNA, 19 nt, Artificial Sequence
  Description of Artificial Sequence: Synthetic oligonucleotide
uuucuucaguucucuuucu

SEQ ID NO: 3081156 - RNA, 19 nt, Artificial Sequence
  Description of Artificial Sequence: Synthetic oligonucleotide
acauuuucacacccgcaaa

SEQ ID NO: 3081157 - RNA, 19 nt, Artificial Sequence
  Description of Artificial Sequence: Synthetic oligonucleotide
agcagcuggaagccagguc

SEQ ID NO: 3081158 - RNA, 19 nt, Artificial Sequence
  Description of Artificial Sequence: Synthetic oligonucleotide
acacccgcaaaggccaggc

SEQ ID NO: 3081159 - RNA, 19 nt, Artificial Sequence
  Description of Artificial Sequence: Synthetic oligonucleotide
uucaguucucuuucuucuc

SEQ ID NO: 3081160 - RNA, 19 nt, Artificial Sequence
  Description of Artificial Sequence: Synthetic oligonucleotide
aggcuuuuccuuugguaca

SEQ ID NO: 3081161 - RNA, 19 nt, Artificial Sequence
  Description of Artificial Sequence: Synthetic oligonucleotide
ucuucucugcuggagucca

SEQ ID NO: 3081162 - RNA, 19 nt, Artificial Sequence
  Description of Artificial Sequence: Synthetic oligonucleotide
aucggcuugcaguuuggcu

SEQ ID NO: 3081163 - RNA, 19 nt, Artificial Sequence
  Description of Artificial Sequence: Synthetic oligonucleotide
ucugaucgcugcuucuuau

SEQ ID NO: 3081164 - RNA, 19 nt, Artificial Sequence
  Description of Artificial Sequence: Synthetic oligonucleotide
uucauggcuggccggcugu

SEQ ID NO: 3081165 - RNA, 19 nt, Artificial Sequence
  Description of Artificial Sequence: Synthetic oligonucleotide
gaagcagcuggaagccagg

SEQ ID NO: 3081166 - RNA, 19 nt, Artificial Sequence
  Description of Artificial Sequence: Synthetic oligonucleotide
acacagcaugagaagcagc

SEQ ID NO: 3081167 - RNA, 19 nt, Artificial Sequence
  Description of Artificial Sequence: Synthetic oligonucleotide
uucuucucugaucgcugcu

SEQ ID NO: 3081168 - RNA, 19 nt, Artificial Sequence
  Description of Artificial Sequence: Synthetic oligonucleotide
cugccaagauauacagcag

SEQ ID NO: 3081169 - RNA, 19 nt, Artificial Sequence
  Description of Artificial Sequence: Synthetic oligonucleotide
uucucugcuggaguccacc

SEQ ID NO: 3081170 - RNA, 19 nt, Artificial Sequence
  Description of Artificial Sequence: Synthetic oligonucleotide
ugcaacccgaagacacagc

SEQ ID NO: 3081171 - RNA, 19 nt, Artificial Sequence
  Description of Artificial Sequence: Synthetic oligonucleotide
augcaacccgaagacacag

SEQ ID NO: 3081172 - RNA, 19 nt, Artificial Sequence
  Description of Artificial Sequence: Synthetic oligonucleotide
aagaaccuuccaguucaug

SEQ ID NO: 3081173 - RNA, 19 nt, Artificial Sequence
  Description of Artificial Sequence: Synthetic oligonucleotide
aagaucucugauguuucuu

SEQ ID NO: 3081174 - RNA, 19 nt, Artificial Sequence
  Description of Artificial Sequence: Synthetic oligonucleotide
cuuccaggcuuuuccuuug

SEQ ID NO: 3081175 - RNA, 19 nt, Artificial Sequence
  Description of Artificial Sequence: Synthetic oligonucleotide
agacacagcaugagaagca

SEQ ID NO: 3081176 - RNA, 19 nt, Artificial Sequence
  Description of Artificial Sequence: Synthetic oligonucleotide
gggcacguguucaagaacc

SEQ ID NO: 3081177 - RNA, 19 nt, Artificial Sequence
  Description of Artificial Sequence: Synthetic oligonucleotide
uucucugaucgcugcuucu

SEQ ID NO: 3081178 - RNA, 19 nt, Artificial Sequence
  Description of Artificial Sequence: Synthetic oligonucleotide
cacagcaugagaagcagcu

SEQ ID NO: 3081179 - RNA, 19 nt, Artificial Sequence
  Description of Artificial Sequence: Synthetic oligonucleotide
cuucucugaucgcugcuuc

SEQ ID NO: 3081180 - RNA, 19 nt, Artificial Sequence
  Description of Artificial Sequence: Synthetic oligonucleotide
cagcuggaagccagguccg

SEQ ID NO: 3081181 - RNA, 19 nt, Artificial Sequence
  Description of Artificial Sequence: Synthetic oligonucleotide
cugaucgcugcuucuuauc

SEQ ID NO: 3081182 - RNA, 19 nt, Artificial Sequence
  Description of Artificial Sequence: Synthetic oligonucleotide
aggggcacguguucaagaa

SEQ ID NO: 3081183 - RNA, 19 nt, Artificial Sequence
  Description of Artificial Sequence: Synthetic oligonucleotide
cucuuucuucucugaucgc

SEQ ID NO: 3081184 - RNA, 19 nt, Artificial Sequence
  Description of Artificial Sequence: Synthetic oligonucleotide
ugaguucacuucagaccaa

SEQ ID NO: 3081185 - RNA, 19 nt, Artificial Sequence
  Description of Artificial Sequence: Synthetic oligonucleotide
gcaacccgaagacacagca

SEQ ID NO: 3081186 - RNA, 19 nt, Artificial Sequence
  Description of Artificial Sequence: Synthetic oligonucleotide
uagaaagaucucugauguu

SEQ ID NO: 3081187 - RNA, 19 nt, Artificial Sequence
  Description of Artificial Sequence: Synthetic oligonucleotide
uggcuuccaggcuuuuccu

SEQ ID NO: 3081188 - RNA, 19 nt, Artificial Sequence
  Description of Artificial Sequence: Synthetic oligonucleotide
gcuucuuaucggcuugcag

SEQ ID NO: 3081189 - RNA, 19 nt, Artificial Sequence
  Description of Artificial Sequence: Synthetic oligonucleotide
gcuggaguccacccaacgc

SEQ ID NO: 3081190 - RNA, 19 nt, Artificial Sequence
  Description of Artificial Sequence: Synthetic oligonucleotide
acagcaugagaagcagcug

SEQ ID NO: 3081191 - RNA, 19 nt, Artificial Sequence
  Description of Artificial Sequence: Synthetic oligonucleotide
ucuucucugaucgcugcuu

SEQ ID NO: 3081192 - RNA, 19 nt, Artificial Sequence
  Description of Artificial Sequence: Synthetic oligonucleotide
uaucggcuugcaguuuggc

SEQ ID NO: 3081193 - RNA, 19 nt, Artificial Sequence
  Description of Artificial Sequence: Synthetic oligonucleotide
ccuuccaguucauggcugg

SEQ ID NO: 3081194 - RNA, 19 nt, Artificial Sequence
  Description of Artificial Sequence: Synthetic oligonucleotide
agcaugagaagcagcugga

SEQ ID NO: 3081195 - RNA, 19 nt, Artificial Sequence
  Description of Artificial Sequence: Synthetic oligonucleotide
aagcagcuggaagccaggu

SEQ ID NO: 3081196 - RNA, 19 nt, Artificial Sequence
  Description of Artificial Sequence: Synthetic oligonucleotide
gaguccacccaacgcugac

SEQ ID NO: 3081197 - RNA, 19 nt, Artificial Sequence
  Description of Artificial Sequence: Synthetic oligonucleotide
ucucugaucgcugcuucuu

SEQ ID NO: 3081198 - RNA, 19 nt, Artificial Sequence
  Description of Artificial Sequence: Synthetic oligonucleotide
cuggaguccacccaacgcu

SEQ ID NO: 3081199 - RNA, 19 nt, Artificial Sequence
  Description of Artificial Sequence: Synthetic oligonucleotide
guacauuuucacacccgca

SEQ ID NO: 3081200 - RNA, 19 nt, Artificial Sequence
  Description of Artificial Sequence: Synthetic oligonucleotide
ucgcugcuucuuaucggcu

SEQ ID NO: 3081201 - RNA, 19 nt, Artificial Sequence
  Description of Artificial Sequence: Synthetic oligonucleotide
acgcugacauuuaaauaga

SEQ ID NO: 3081202 - RNA, 19 nt, Artificial Sequence
  Description of Artificial Sequence: Synthetic oligonucleotide
aguucacuucagaccaaug

SEQ ID NO: 3081203 - RNA, 19 nt, Artificial Sequence
  Description of Artificial Sequence: Synthetic oligonucleotide
ccaagauauacagcagcag

SEQ ID NO: 3081204 - RNA, 19 nt, Artificial Sequence
  Description of Artificial Sequence: Synthetic oligonucleotide
ugcuucuuaucggcuugca

SEQ ID NO: 3081205 - RNA, 19 nt, Artificial Sequence
  Description of Artificial Sequence: Synthetic oligonucleotide
gccagguccgaggagcugg

SEQ ID NO: 3081206 - RNA, 19 nt, Artificial Sequence
  Description of Artificial Sequence: Synthetic oligonucleotide
guucaagaaccuuccaguu

SEQ ID NO: 3081207 - RNA, 19 nt, Artificial Sequence
  Description of Artificial Sequence: Synthetic oligonucleotide
gccaagauauacagcagca

SEQ ID NO: 3081208 - RNA, 19 nt, Artificial Sequence
  Description of Artificial Sequence: Synthetic oligonucleotide
cuuccaguucauggcuggc

SEQ ID NO: 3081209 - RNA, 19 nt, Artificial Sequence
  Description of Artificial Sequence: Synthetic oligonucleotide
cgaagacacagcaugagaa

SEQ ID NO: 3081210 - RNA, 19 nt, Artificial Sequence
  Description of Artificial Sequence: Synthetic oligonucleotide
uccgaggagcuggaaguuc

SEQ ID NO: 3081211 - RNA, 19 nt, Artificial Sequence
  Description of Artificial Sequence: Synthetic oligonucleotide
gcugacauuuaaauagaaa

SEQ ID NO: 3081212 - RNA, 19 nt, Artificial Sequence
  Description of Artificial Sequence: Synthetic oligonucleotide
ccuuugguacauuuucaca

SEQ ID NO: 3081213 - RNA, 19 nt, Artificial Sequence
  Description of Artificial Sequence: Synthetic oligonucleotide
cugcuucuuaucggcuugc

SEQ ID NO: 3081214 - RNA, 19 nt, Artificial Sequence
  Description of Artificial Sequence: Synthetic oligonucleotide
cagaccaaugcaacccgaa

SEQ ID NO: 3081215 - RNA, 19 nt, Artificial Sequence
  Description of Artificial Sequence: Synthetic oligonucleotide
aagccagguccgaggagcu

SEQ ID NO: 3081216 - RNA, 19 nt, Artificial Sequence
  Description of Artificial Sequence: Synthetic oligonucleotide
accuuccaguucauggcug

SEQ ID NO: 3081217 - RNA, 19 nt, Artificial Sequence
  Description of Artificial Sequence: Synthetic oligonucleotide
gguccgaggagcuggaagu

SEQ ID NO: 3081218 - RNA, 19 nt, Artificial Sequence
  Description of Artificial Sequence: Synthetic oligonucleotide
aguccacccaacgcugaca

SEQ ID NO: 3081219 - RNA, 19 nt, Artificial Sequence
  Description of Artificial Sequence: Synthetic oligonucleotide
ccggcugugaguucacuuc

SEQ ID NO: 3081220 - RNA, 19 nt, Artificial Sequence
  Description of Artificial Sequence: Synthetic oligonucleotide
acccgaagacacagcauga

SEQ ID NO: 3081221 - RNA, 19 nt, Artificial Sequence
  Description of Artificial Sequence: Synthetic oligonucleotide
ccaguucauggcuggccgg

SEQ ID NO: 3081222 - RNA, 19 nt, Artificial Sequence
  Description of Artificial Sequence: Synthetic oligonucleotide
gcugugaguucacuucaga

SEQ ID NO: 3081223 - RNA, 19 nt, Artificial Sequence
  Description of Artificial Sequence: Synthetic oligonucleotide
ggaagccagguccgaggag

SEQ ID NO: 3081224 - RNA, 19 nt, Artificial Sequence
  Description of Artificial Sequence: Synthetic oligonucleotide
caggggcacguguucaaga

SEQ ID NO: 3081225 - RNA, 19 nt, Artificial Sequence
  Description of Artificial Sequence: Synthetic oligonucleotide
gagaagcagcuggaagcca

SEQ ID NO: 3081226 - RNA, 19 nt, Artificial Sequence
  Description of Artificial Sequence: Synthetic oligonucleotide
ucuuaucggcuugcaguuu

SEQ ID NO: 3081227 - RNA, 19 nt, Artificial Sequence
  Description of Artificial Sequence: Synthetic oligonucleotide
acccaacgcugacauuuaa

SEQ ID NO: 3081228 - RNA, 19 nt, Artificial Sequence
  Description of Artificial Sequence: Synthetic oligonucleotide
aggcagaggaucaggguuu

SEQ ID NO: 3081229 - RNA, 19 nt, Artificial Sequence
  Description of Artificial Sequence: Synthetic oligonucleotide
cuucucugcuggaguccac

SEQ ID NO: 3081230 - RNA, 19 nt, Artificial Sequence
  Description of Artificial Sequence: Synthetic oligonucleotide
uggcuggccggcugugagu

SEQ ID NO: 3081231 - RNA, 19 nt, Artificial Sequence
  Description of Artificial Sequence: Synthetic oligonucleotide
cugcuggaguccacccaac

SEQ ID NO: 3081232 - RNA, 19 nt, Artificial Sequence
  Description of Artificial Sequence: Synthetic oligonucleotide
cucugauguuucuucaguu

SEQ ID NO: 3081233 - RNA, 19 nt, Artificial Sequence
  Description of Artificial Sequence: Synthetic oligonucleotide
cucugcuggaguccaccca

SEQ ID NO: 3081234 - RNA, 19 nt, Artificial Sequence
  Description of Artificial Sequence: Synthetic oligonucleotide
ccaacgcugacauuuaaau

SEQ ID NO: 3081235 - RNA, 19 nt, Artificial Sequence
  Description of Artificial Sequence: Synthetic oligonucleotide
caggcagaggaucaggguu

SEQ ID NO: 3081236 - RNA, 19 nt, Artificial Sequence
  Description of Artificial Sequence: Synthetic oligonucleotide
auacagcagcaggggcacg

SEQ ID NO: 3081237 - RNA, 19 nt, Artificial Sequence
  Description of Artificial Sequence: Synthetic oligonucleotide
ggggcacguguucaagaac

SEQ ID NO: 3081238 - RNA, 19 nt, Artificial Sequence
  Description of Artificial Sequence: Synthetic oligonucleotide
cuggccggcugugaguuca

SEQ ID NO: 3081239 - RNA, 19 nt, Artificial Sequence
  Description of Artificial Sequence: Synthetic oligonucleotide
guccacccaacgcugacau

SEQ ID NO: 3081240 - RNA, 19 nt, Artificial Sequence
  Description of Artificial Sequence: Synthetic oligonucleotide
aguuuggcuuccaggcuuu

SEQ ID NO: 3081241 - RNA, 19 nt, Artificial Sequence
  Description of Artificial Sequence: Synthetic oligonucleotide
gaguucacuucagaccaau

SEQ ID NO: 3081242 - RNA, 19 nt, Artificial Sequence
  Description of Artificial Sequence: Synthetic oligonucleotide
ggcugugaguucacuucag

SEQ ID NO: 3081243 - RNA, 19 nt, Artificial Sequence
  Description of Artificial Sequence: Synthetic oligonucleotide
gcuggaagccagguccgag

SEQ ID NO: 3081244 - RNA, 19 nt, Artificial Sequence
  Description of Artificial Sequence: Synthetic oligonucleotide
cccgaagacacagcaugag

SEQ ID NO: 3081245 - RNA, 19 nt, Artificial Sequence
  Description of Artificial Sequence: Synthetic oligonucleotide
cucugaucgcugcuucuua

SEQ ID NO: 3081246 - RNA, 19 nt, Artificial Sequence
  Description of Artificial Sequence: Synthetic oligonucleotide
ccgaagacacagcaugaga

SEQ ID NO: 3081247 - RNA, 19 nt, Artificial Sequence
  Description of Artificial Sequence: Synthetic oligonucleotide
caguuuggcuuccaggcuu

SEQ ID NO: 3081248 - RNA, 19 nt, Artificial Sequence
  Description of Artificial Sequence: Synthetic oligonucleotide
gcagcaggggcacguguuc

SEQ ID NO: 3081249 - RNA, 19 nt, Artificial Sequence
  Description of Artificial Sequence: Synthetic oligonucleotide
uggccggcugugaguucac

SEQ ID NO: 3081250 - RNA, 19 nt, Artificial Sequence
  Description of Artificial Sequence: Synthetic oligonucleotide
cccgcaaaggccaggcaga

SEQ ID NO: 3081251 - RNA, 19 nt, Artificial Sequence
  Description of Artificial Sequence: Synthetic oligonucleotide
agcuggaagccagguccga

SEQ ID NO: 3081252 - RNA, 19 nt, Artificial Sequence
  Description of Artificial Sequence: Synthetic oligonucleotide
uccacccaacgcugacauu

SEQ ID NO: 3081253 - RNA, 19 nt, Artificial Sequence
  Description of Artificial Sequence: Synthetic oligonucleotide
ccaggcuuuuccuuuggua

SEQ ID NO: 3081254 - RNA, 19 nt, Artificial Sequence
  Description of Artificial Sequence: Synthetic oligonucleotide
cccaacgcugacauuuaaa

SEQ ID NO: 3081255 - RNA, 19 nt, Artificial Sequence
  Description of Artificial Sequence: Synthetic oligonucleotide
gcuuccaggcuuuuccuuu

SEQ ID NO: 3081256 - RNA, 19 nt, Artificial Sequence
  Description of Artificial Sequence: Synthetic oligonucleotide
cacccaacgcugacauuua

SEQ ID NO: 3081257 - RNA, 19 nt, Artificial Sequence
  Description of Artificial Sequence: Synthetic oligonucleotide
gcaguuuggcuuccaggcu

SEQ ID NO: 3081258 - RNA, 19 nt, Artificial Sequence
  Description of Artificial Sequence: Synthetic oligonucleotide
cagcaggggcacguguuca

SEQ ID NO: 3081259 - RNA, 19 nt, Artificial Sequence
  Description of Artificial Sequence: Synthetic oligonucleotide
gcaugagaagcagcuggaa

SEQ ID NO: 3081260 - RNA, 19 nt, Artificial Sequence
  Description of Artificial Sequence: Synthetic oligonucleotide
ggaguccacccaacgcuga

SEQ ID NO: 3081261 - RNA, 19 nt, Artificial Sequence
  Description of Artificial Sequence: Synthetic oligonucleotide
ccaaugcaacccgaagaca

SEQ ID NO: 3081262 - RNA, 19 nt, Artificial Sequence
  Description of Artificial Sequence: Synthetic oligonucleotide
cggcuugcaguuuggcuuc

SEQ ID NO: 3081263 - RNA, 19 nt, Artificial Sequence
  Description of Artificial Sequence: Synthetic oligonucleotide
ccgcaaaggccaggcagag

SEQ ID NO: 3081264 - RNA, 19 nt, Artificial Sequence
  Description of Artificial Sequence: Synthetic oligonucleotide
caaaggccaggcagaggau

SEQ ID NO: 3081265 - RNA, 19 nt, Artificial Sequence
  Description of Artificial Sequence: Synthetic oligonucleotide
ccgaggagcuggaaguucu

SEQ ID NO: 3081266 - RNA, 19 nt, Artificial Sequence
  Description of Artificial Sequence: Synthetic oligonucleotide
caagaaccuuccaguucau

SEQ ID NO: 3081267 - RNA, 19 nt, Artificial Sequence
  Description of Artificial Sequence: Synthetic oligonucleotide
cacccgcaaaggccaggca

SEQ ID NO: 3081268 - RNA, 19 nt, Artificial Sequence
  Description of Artificial Sequence: Synthetic oligonucleotide
cgaggagcuggaaguucug

SEQ ID NO: 3081269 - RNA, 19 nt, Artificial Sequence
  Description of Artificial Sequence: Synthetic oligonucleotide
ccacccaacgcugacauuu

SEQ ID NO: 3081270 - RNA, 19 nt, Artificial Sequence
  Description of Artificial Sequence: Synthetic oligonucleotide
ggcuuuuccuuugguacau

SEQ ID NO: 3081271 - RNA, 19 nt, Artificial Sequence
  Description of Artificial Sequence: Synthetic oligonucleotide
cgcugacauuuaaauagaa

SEQ ID NO: 3081272 - RNA, 19 nt, Artificial Sequence
  Description of Artificial Sequence: Synthetic oligonucleotide
ggcuugcaguuuggcuucc

SEQ ID NO: 3081273 - RNA, 19 nt, Artificial Sequence
  Description of Artificial Sequence: Synthetic oligonucleotide
ggcacguguucaagaaccu

SEQ ID NO: 3081274 - RNA, 19 nt, Artificial Sequence
  Description of Artificial Sequence: Synthetic oligonucleotide
cguguucaagaaccuucca

SEQ ID NO: 3081275 - RNA, 19 nt, Artificial Sequence
  Description of Artificial Sequence: Synthetic oligonucleotide
cggcugugaguucacuuca

SEQ ID NO: 3081276 - RNA, 19 nt, Artificial Sequence
  Description of Artificial Sequence: Synthetic oligonucleotide
ccagguccgaggagcugga

SEQ ID NO: 3081277 - RNA, 19 nt, Artificial Sequence
  Description of Artificial Sequence: Synthetic oligonucleotide
gcuugcaguuuggcuucca

SEQ ID NO: 3081278 - RNA, 19 nt, Artificial Sequence
  Description of Artificial Sequence: Synthetic oligonucleotide
gccggcugugaguucacuu

SEQ ID NO: 3081279 - RNA, 19 nt, Artificial Sequence
  Description of Artificial Sequence: Synthetic oligonucleotide
guccgaggagcuggaaguu

SEQ ID NO: 3081280 - RNA, 19 nt, Artificial Sequence
  Description of Artificial Sequence: Synthetic oligonucleotide
gcuggccggcugugaguuc

SEQ ID NO: 3081281 - RNA, 19 nt, Artificial Sequence
  Description of Artificial Sequence: Synthetic oligonucleotide
ggcuggccggcugugaguu

SEQ ID NO: 3081282 - RNA, 19 nt, Artificial Sequence
  Description of Artificial Sequence: Synthetic oligonucleotide
gcacguguucaagaaccuu

SEQ ID NO: 3081283 - RNA, 19 nt, Artificial Sequence
  Description of Artificial Sequence: Synthetic oligonucleotide
cagguccgaggagcuggaa

SEQ ID NO: 3081284 - RNA, 19 nt, Artificial Sequence
  Description of Artificial Sequence: Synthetic oligonucleotide
ggcagaggaucaggguuuu

SEQ ID NO: 3081285 - RNA, 19 nt, Artificial Sequence
  Description of Artificial Sequence: Synthetic oligonucleotide
cgcugcuucuuaucggcuu

SEQ ID NO: 3081286 - RNA, 19 nt, Artificial Sequence
  Description of Artificial Sequence: Synthetic oligonucleotide
ggccggcugugaguucacu

SEQ ID NO: 3081287 - RNA, 19 nt, Artificial Sequence
  Description of Artificial Sequence: Synthetic oligonucleotide
aagguauucauucgugccc

SEQ ID NO: 3081288 - RNA, 19 nt, Artificial Sequence
  Description of Artificial Sequence: Synthetic oligonucleotide
ucugaggacaucuuuaaag

SEQ ID NO: 3081289 - RNA, 19 nt, Artificial Sequence
  Description of Artificial Sequence: Synthetic oligonucleotide
uucuugaagaaacugauuc

SEQ ID NO: 3081290 - RNA, 19 nt, Artificial Sequence
  Description of Artificial Sequence: Synthetic oligonucleotide
ucauuugcagaucuagagg

SEQ ID NO: 3081291 - RNA, 19 nt, Artificial Sequence
  Description of Artificial Sequence: Synthetic oligonucleotide
uguagcuguaguaaaagcu

SEQ ID NO: 3081292 - RNA, 19 nt, Artificial Sequence
  Description of Artificial Sequence: Synthetic oligonucleotide
cauuugcagaucuagaggc

SEQ ID NO: 3081293 - RNA, 19 nt, Artificial Sequence
  Description of Artificial Sequence: Synthetic oligonucleotide
uucauucgugcccagaucc

SEQ ID NO: 3081294 - RNA, 19 nt, Artificial Sequence
  Description of Artificial Sequence: Synthetic oligonucleotide
ucuagaggcagcuucuagg

SEQ ID NO: 3081295 - RNA, 19 nt, Artificial Sequence
  Description of Artificial Sequence: Synthetic oligonucleotide
acuguucucacuccagugc

SEQ ID NO: 3081296 - RNA, 19 nt, Artificial Sequence
  Description of Artificial Sequence: Synthetic oligonucleotide
agaggcagcuucuaggcgc

SEQ ID NO: 3081297 - RNA, 19 nt, Artificial Sequence
  Description of Artificial Sequence: Synthetic oligonucleotide
aguaaaagcucucugcucu

SEQ ID NO: 3081298 - RNA, 19 nt, Artificial Sequence
  Description of Artificial Sequence: Synthetic oligonucleotide
caucuuuaaaggauagugg

SEQ ID NO: 3081299 - RNA, 19 nt, Artificial Sequence
  Description of Artificial Sequence: Synthetic oligonucleotide
cuuuguggcccauagaaag

SEQ ID NO: 3081300 - RNA, 19 nt, Artificial Sequence
  Description of Artificial Sequence: Synthetic oligonucleotide
aucuuuaaaggauaguggu

SEQ ID NO: 3081301 - RNA, 19 nt, Artificial Sequence
  Description of Artificial Sequence: Synthetic oligonucleotide
cugaggacaucuuuaaagg

SEQ ID NO: 3081302 - RNA, 19 nt, Artificial Sequence
  Description of Artificial Sequence: Synthetic oligonucleotide
ucaggcaccacuaacucug

SEQ ID NO: 3081303 - RNA, 19 nt, Artificial Sequence
  Description of Artificial Sequence: Synthetic oligonucleotide
acaucuuuaaaggauagug

SEQ ID NO: 3081304 - RNA, 19 nt, Artificial Sequence
  Description of Artificial Sequence: Synthetic oligonucleotide
ucuugaagaaacugauucc

SEQ ID NO: 3081305 - RNA, 19 nt, Artificial Sequence
  Description of Artificial Sequence: Synthetic oligonucleotide
ucuuuaaaggauaguggug

SEQ ID NO: 3081306 - RNA, 19 nt, Artificial Sequence
  Description of Artificial Sequence: Synthetic oligonucleotide
aacucuggcacuugcaaca

SEQ ID NO: 3081307 - RNA, 19 nt, Artificial Sequence
  Description of Artificial Sequence: Synthetic oligonucleotide
auagaaaguuccuucccuc

SEQ ID NO: 3081308 - RNA, 19 nt, Artificial Sequence
  Description of Artificial Sequence: Synthetic oligonucleotide
uguucuugaagaaacugau

SEQ ID NO: 3081309 - RNA, 19 nt, Artificial Sequence
  Description of Artificial Sequence: Synthetic oligonucleotide
uaaaggauagugguguagc

SEQ ID NO: 3081310 - RNA, 19 nt, Artificial Sequence
  Description of Artificial Sequence: Synthetic oligonucleotide
ucugcauacagcucaggca

SEQ ID NO: 3081311 - RNA, 19 nt, Artificial Sequence
  Description of Artificial Sequence: Synthetic oligonucleotide
agaaacugauuccaaguca

SEQ ID NO: 3081312 - RNA, 19 nt, Artificial Sequence
  Description of Artificial Sequence: Synthetic oligonucleotide
agcuucuaggcgcaagagc

SEQ ID NO: 3081313 - RNA, 19 nt, Artificial Sequence
  Description of Artificial Sequence: Synthetic oligonucleotide
cuagaggcagcuucuaggc

SEQ ID NO: 3081314 - RNA, 19 nt, Artificial Sequence
  Description of Artificial Sequence: Synthetic oligonucleotide
aguuccuucccucuguucu

SEQ ID NO: 3081315 - RNA, 19 nt, Artificial Sequence
  Description of Artificial Sequence: Synthetic oligonucleotide
gaaacugauuccaagucac

SEQ ID NO: 3081316 - RNA, 19 nt, Artificial Sequence
  Description of Artificial Sequence: Synthetic oligonucleotide
acugauuccaagucacuug

SEQ ID NO: 3081317 - RNA, 19 nt, Artificial Sequence
  Description of Artificial Sequence: Synthetic oligonucleotide
aggauagugguguagcugu

SEQ ID NO: 3081318 - RNA, 19 nt, Artificial Sequence
  Description of Artificial Sequence: Synthetic oligonucleotide
uggcacuugcaacacagcc

SEQ ID NO: 3081319 - RNA, 19 nt, Artificial Sequence
  Description of Artificial Sequence: Synthetic oligonucleotide
uugucauuugcagaucuag

SEQ ID NO: 3081320 - RNA, 19 nt, Artificial Sequence
  Description of Artificial Sequence: Synthetic oligonucleotide
aaaggauagugguguagcu

SEQ ID NO: 3081321 - RNA, 19 nt, Artificial Sequence
  Description of Artificial Sequence: Synthetic oligonucleotide
cugcauacagcucaggcac

SEQ ID NO: 3081322 - RNA, 19 nt, Artificial Sequence
  Description of Artificial Sequence: Synthetic oligonucleotide
uauucauucgugcccagau

SEQ ID NO: 3081323 - RNA, 19 nt, Artificial Sequence
  Description of Artificial Sequence: Synthetic oligonucleotide
acagccuugucauuugcag

SEQ ID NO: 3081324 - RNA, 19 nt, Artificial Sequence
  Description of Artificial Sequence: Synthetic oligonucleotide
ugcaacacagccuugucau

SEQ ID NO: 3081325 - RNA, 19 nt, Artificial Sequence
  Description of Artificial Sequence: Synthetic oligonucleotide
ucuguucuugaagaaacug

SEQ ID NO: 3081326 - RNA, 19 nt, Artificial Sequence
  Description of Artificial Sequence: Synthetic oligonucleotide
uuugcagaucuagaggcag

SEQ ID NO: 3081327 - RNA, 19 nt, Artificial Sequence
  Description of Artificial Sequence: Synthetic oligonucleotide
aagucacuugucugaggac

SEQ ID NO: 3081328 - RNA, 19 nt, Artificial Sequence
  Description of Artificial Sequence: Synthetic oligonucleotide
uuaaaggauagugguguag

SEQ ID NO: 3081329 - RNA, 19 nt, Artificial Sequence
  Description of Artificial Sequence: Synthetic oligonucleotide
aaagcucucugcucugaug

SEQ ID NO: 3081330 - RNA, 19 nt, Artificial Sequence
  Description of Artificial Sequence: Synthetic oligonucleotide
ugucauuugcagaucuaga

SEQ ID NO: 3081331 - RNA, 19 nt, Artificial Sequence
  Description of Artificial Sequence: Synthetic oligonucleotide
auuccaagucacuugucug

SEQ ID NO: 3081332 - RNA, 19 nt, Artificial Sequence
  Description of Artificial Sequence: Synthetic oligonucleotide
ugaggacaucuuuaaagga

SEQ ID NO: 3081333 - RNA, 19 nt, Artificial Sequence
  Description of Artificial Sequence: Synthetic oligonucleotide
uucccucuguucuugaaga

SEQ ID NO: 3081334 - RNA, 19 nt, Artificial Sequence
  Description of Artificial Sequence: Synthetic oligonucleotide
gaagaaacugauuccaagu

SEQ ID NO: 3081335 - RNA, 19 nt, Artificial Sequence
  Description of Artificial Sequence: Synthetic oligonucleotide
aaggauagugguguagcug

SEQ ID NO: 3081336 - RNA, 19 nt, Artificial Sequence
  Description of Artificial Sequence: Synthetic oligonucleotide
aacacagccuugucauuug

SEQ ID NO: 3081337 - RNA, 19 nt, Artificial Sequence
  Description of Artificial Sequence: Synthetic oligonucleotide
auucauucgugcccagauc

SEQ ID NO: 3081338 - RNA, 19 nt, Artificial Sequence
  Description of Artificial Sequence: Synthetic oligonucleotide
uugcaacacagccuuguca

SEQ ID NO: 3081339 - RNA, 19 nt, Artificial Sequence
  Description of Artificial Sequence: Synthetic oligonucleotide
uuuguggcccauagaaagu

SEQ ID NO: 3081340 - RNA, 19 nt, Artificial Sequence
  Description of Artificial Sequence: Synthetic oligonucleotide
uuuucucccuuuguggccc

SEQ ID NO: 3081341 - RNA, 19 nt, Artificial Sequence
  Description of Artificial Sequence: Synthetic oligonucleotide
agaaaguuccuucccucug

SEQ ID NO: 3081342 - RNA, 19 nt, Artificial Sequence
  Description of Artificial Sequence: Synthetic oligonucleotide
cuugaagaaacugauucca

SEQ ID NO: 3081343 - RNA, 19 nt, Artificial Sequence
  Description of Artificial Sequence: Synthetic oligonucleotide
uagaaaguuccuucccucu

SEQ ID NO: 3081344 - RNA, 19 nt, Artificial Sequence
  Description of Artificial Sequence: Synthetic oligonucleotide
uugaagaaacugauuccaa

SEQ ID NO: 3081345 - RNA, 19 nt, Artificial Sequence
  Description of Artificial Sequence: Synthetic oligonucleotide
uagaggcagcuucuaggcg

SEQ ID NO: 3081346 - RNA, 19 nt, Artificial Sequence
  Description of Artificial Sequence: Synthetic oligonucleotide
gacuguucucacuccagug

SEQ ID NO: 3081347 - RNA, 19 nt, Artificial Sequence
  Description of Artificial Sequence: Synthetic oligonucleotide
cacaucugcauacagcuca

SEQ ID NO: 3081348 - RNA, 19 nt, Artificial Sequence
  Description of Artificial Sequence: Synthetic oligonucleotide
cuguucucacuccagugcc

SEQ ID NO: 3081349 - RNA, 19 nt, Artificial Sequence
  Description of Artificial Sequence: Synthetic oligonucleotide
guagcuguaguaaaagcuc

SEQ ID NO: 3081350 - RNA, 19 nt, Artificial Sequence
  Description of Artificial Sequence: Synthetic oligonucleotide
cagaucuagaggcagcuuc

SEQ ID NO: 3081351 - RNA, 19 nt, Artificial Sequence
  Description of Artificial Sequence: Synthetic oligonucleotide
agcucuccaggcaaggggc

SEQ ID NO: 3081352 - RNA, 19 nt, Artificial Sequence
  Description of Artificial Sequence: Synthetic oligonucleotide
ugucugaggacaucuuuaa

SEQ ID NO: 3081353 - RNA, 19 nt, Artificial Sequence
  Description of Artificial Sequence: Synthetic oligonucleotide
caagucacuugucugagga

SEQ ID NO: 3081354 - RNA, 19 nt, Artificial Sequence
  Description of Artificial Sequence: Synthetic oligonucleotide
agucacuugucugaggaca

SEQ ID NO: 3081355 - RNA, 19 nt, Artificial Sequence
  Description of Artificial Sequence: Synthetic oligonucleotide
gauuccaagucacuugucu

SEQ ID NO: 3081356 - RNA, 19 nt, Artificial Sequence
  Description of Artificial Sequence: Synthetic oligonucleotide
acacagccuugucauuugc

SEQ ID NO: 3081357 - RNA, 19 nt, Artificial Sequence
  Description of Artificial Sequence: Synthetic oligonucleotide
auagugguguagcuguagu

SEQ ID NO: 3081358 - RNA, 19 nt, Artificial Sequence
  Description of Artificial Sequence: Synthetic oligonucleotide
ucugcucugaugccagcca

SEQ ID NO: 3081359 - RNA, 19 nt, Artificial Sequence
  Description of Artificial Sequence: Synthetic oligonucleotide
gauagugguguagcuguag

SEQ ID NO: 3081360 - RNA, 19 nt, Artificial Sequence
  Description of Artificial Sequence: Synthetic oligonucleotide
guguagcuguaguaaaagc

SEQ ID NO: 3081361 - RNA, 19 nt, Artificial Sequence
  Description of Artificial Sequence: Synthetic oligonucleotide
guaguaaaagcucucugcu

SEQ ID NO: 3081362 - RNA, 19 nt, Artificial Sequence
  Description of Artificial Sequence: Synthetic oligonucleotide
uaguaaaagcucucugcuc

SEQ ID NO: 3081363 - RNA, 19 nt, Artificial Sequence
  Description of Artificial Sequence: Synthetic oligonucleotide
ucucacuccagugccagca

SEQ ID NO: 3081364 - RNA, 19 nt, Artificial Sequence
  Description of Artificial Sequence: Synthetic oligonucleotide
cuucccucuguucuugaag

SEQ ID NO: 3081365 - RNA, 19 nt, Artificial Sequence
  Description of Artificial Sequence: Synthetic oligonucleotide
aacugauuccaagucacuu

SEQ ID NO: 3081366 - RNA, 19 nt, Artificial Sequence
  Description of Artificial Sequence: Synthetic oligonucleotide
aucuagaggcagcuucuag

SEQ ID NO: 3081367 - RNA, 19 nt, Artificial Sequence
  Description of Artificial Sequence: Synthetic oligonucleotide
aaaagcucucugcucugau

SEQ ID NO: 3081368 - RNA, 19 nt, Artificial Sequence
  Description of Artificial Sequence: Synthetic oligonucleotide
cuuuaaaggauaguggugu

SEQ ID NO: 3081369 - RNA, 19 nt, Artificial Sequence
  Description of Artificial Sequence: Synthetic oligonucleotide
agugguguagcuguaguaa

SEQ ID NO: 3081370 - RNA, 19 nt, Artificial Sequence
  Description of Artificial Sequence: Synthetic oligonucleotide
uuuaaaggauaguggugua

SEQ ID NO: 3081371 - RNA, 19 nt, Artificial Sequence
  Description of Artificial Sequence: Synthetic oligonucleotide
ugaugccagccacaucugc

SEQ ID NO: 3081372 - RNA, 19 nt, Artificial Sequence
  Description of Artificial Sequence: Synthetic oligonucleotide
agcucucugcucugaugcc

SEQ ID NO: 3081373 - RNA, 19 nt, Artificial Sequence
  Description of Artificial Sequence: Synthetic oligonucleotide
ugguguagcuguaguaaaa

SEQ ID NO: 3081374 - RNA, 19 nt, Artificial Sequence
  Description of Artificial Sequence: Synthetic oligonucleotide
uugcagaucuagaggcagc

SEQ ID NO: 3081375 - RNA, 19 nt, Artificial Sequence
  Description of Artificial Sequence: Synthetic oligonucleotide
gcaagagcagcucuccagg

SEQ ID NO: 3081376 - RNA, 19 nt, Artificial Sequence
  Description of Artificial Sequence: Synthetic oligonucleotide
uucgugcccagauccaugu

SEQ ID NO: 3081377 - RNA, 19 nt, Artificial Sequence
  Description of Artificial Sequence: Synthetic oligonucleotide
agagcagcucuccaggcaa

SEQ ID NO: 3081378 - RNA, 19 nt, Artificial Sequence
  Description of Artificial Sequence: Synthetic oligonucleotide
aaaguuccuucccucuguu

SEQ ID NO: 3081379 - RNA, 19 nt, Artificial Sequence
  Description of Artificial Sequence: Synthetic oligonucleotide
ucauucgugcccagaucca

SEQ ID NO: 3081380 - RNA, 19 nt, Artificial Sequence
  Description of Artificial Sequence: Synthetic oligonucleotide
uguucucacuccagugcca

SEQ ID NO: 3081381 - RNA, 19 nt, Artificial Sequence
  Description of Artificial Sequence: Synthetic oligonucleotide
uacagcucaggcaccacua

SEQ ID NO: 3081382 - RNA, 19 nt, Artificial Sequence
  Description of Artificial Sequence: Synthetic oligonucleotide
ucuaggcgcaagagcagcu

SEQ ID NO: 3081383 - RNA, 19 nt, Artificial Sequence
  Description of Artificial Sequence: Synthetic oligonucleotide
cagcuuuucauaauguugu

SEQ ID NO: 3081384 - RNA, 19 nt, Artificial Sequence
  Description of Artificial Sequence: Synthetic oligonucleotide
cagcucuccaggcaagggg

SEQ ID NO: 3081385 - RNA, 19 nt, Artificial Sequence
  Description of Artificial Sequence: Synthetic oligonucleotide
auacagcucaggcaccacu

SEQ ID NO: 3081386 - RNA, 19 nt, Artificial Sequence
  Description of Artificial Sequence: Synthetic oligonucleotide
uucuaggcgcaagagcagc

SEQ ID NO: 3081387 - RNA, 19 nt, Artificial Sequence
  Description of Artificial Sequence: Synthetic oligonucleotide
guaaaagcucucugcucug

SEQ ID NO: 3081388 - RNA, 19 nt, Artificial Sequence
  Description of Artificial Sequence: Synthetic oligonucleotide
gcagcuuuucauaauguug

SEQ ID NO: 3081389 - RNA, 19 nt, Artificial Sequence
  Description of Artificial Sequence: Synthetic oligonucleotide
ucacuccagugccagcagc

SEQ ID NO: 3081390 - RNA, 19 nt, Artificial Sequence
  Description of Artificial Sequence: Synthetic oligonucleotide
ugcagaucuagaggcagcu

SEQ ID NO: 3081391 - RNA, 19 nt, Artificial Sequence
  Description of Artificial Sequence: Synthetic oligonucleotide
agcagcuuuucauaauguu

SEQ ID NO: 3081392 - RNA, 19 nt, Artificial Sequence
  Description of Artificial Sequence: Synthetic oligonucleotide
ccucuguucuugaagaaac

SEQ ID NO: 3081393 - RNA, 19 nt, Artificial Sequence
  Description of Artificial Sequence: Synthetic oligonucleotide
ugcauacagcucaggcacc

SEQ ID NO: 3081394 - RNA, 19 nt, Artificial Sequence
  Description of Artificial Sequence: Synthetic oligonucleotide
cuucuaggcgcaagagcag

SEQ ID NO: 3081395 - RNA, 19 nt, Artificial Sequence
  Description of Artificial Sequence: Synthetic oligonucleotide
cucucugcucugaugccag

SEQ ID NO: 3081396 - RNA, 19 nt, Artificial Sequence
  Description of Artificial Sequence: Synthetic oligonucleotide
acuugcaacacagccuugu

SEQ ID NO: 3081397 - RNA, 19 nt, Artificial Sequence
  Description of Artificial Sequence: Synthetic oligonucleotide
gcuucuaggcgcaagagca

SEQ ID NO: 3081398 - RNA, 19 nt, Artificial Sequence
  Description of Artificial Sequence: Synthetic oligonucleotide
cacuaacucuggcacuugc

SEQ ID NO: 3081399 - RNA, 19 nt, Artificial Sequence
  Description of Artificial Sequence: Synthetic oligonucleotide
uaaaagcucucugcucuga

SEQ ID NO: 3081400 - RNA, 19 nt, Artificial Sequence
  Description of Artificial Sequence: Synthetic oligonucleotide
cuaacucuggcacuugcaa

SEQ ID NO: 3081401 - RNA, 19 nt, Artificial Sequence
  Description of Artificial Sequence: Synthetic oligonucleotide
agguauucauucgugccca

SEQ ID NO: 3081402 - RNA, 19 nt, Artificial Sequence
  Description of Artificial Sequence: Synthetic oligonucleotide
cucccuuuguggcccauag

SEQ ID NO: 3081403 - RNA, 19 nt, Artificial Sequence
  Description of Artificial Sequence: Synthetic oligonucleotide
ugcucugaugccagccaca

SEQ ID NO: 3081404 - RNA, 19 nt, Artificial Sequence
  Description of Artificial Sequence: Synthetic oligonucleotide
aaacugauuccaagucacu

SEQ ID NO: 3081405 - RNA, 19 nt, Artificial Sequence
  Description of Artificial Sequence: Synthetic oligonucleotide
aaggggcgacuguucucac

SEQ ID NO: 3081406 - RNA, 19 nt, Artificial Sequence
  Description of Artificial Sequence: Synthetic oligonucleotide
gaugccagccacaucugca

SEQ ID NO: 3081407 - RNA, 19 nt, Artificial Sequence
  Description of Artificial Sequence: Synthetic oligonucleotide
uggcccauagaaaguuccu

SEQ ID NO: 3081408 - RNA, 19 nt, Artificial Sequence
  Description of Artificial Sequence: Synthetic oligonucleotide
gaaaguuccuucccucugu

SEQ ID NO: 3081409 - RNA, 19 nt, Artificial Sequence
  Description of Artificial Sequence: Synthetic oligonucleotide
agcuguaguaaaagcucuc

SEQ ID NO: 3081410 - RNA, 19 nt, Artificial Sequence
  Description of Artificial Sequence: Synthetic oligonucleotide
agcucaggcaccacuaacu

SEQ ID NO: 3081411 - RNA, 19 nt, Artificial Sequence
  Description of Artificial Sequence: Synthetic oligonucleotide
uagugguguagcuguagua

SEQ ID NO: 3081412 - RNA, 19 nt, Artificial Sequence
  Description of Artificial Sequence: Synthetic oligonucleotide
agaucuagaggcagcuucu

SEQ ID NO: 3081413 - RNA, 19 nt, Artificial Sequence
  Description of Artificial Sequence: Synthetic oligonucleotide
ugauuccaagucacuuguc

SEQ ID NO: 3081414 - RNA, 19 nt, Artificial Sequence
  Description of Artificial Sequence: Synthetic oligonucleotide
cauagaaaguuccuucccu

SEQ ID NO: 3081415 - RNA, 19 nt, Artificial Sequence
  Description of Artificial Sequence: Synthetic oligonucleotide
gcaccacuaacucuggcac

SEQ ID NO: 3081416 - RNA, 19 nt, Artificial Sequence
  Description of Artificial Sequence: Synthetic oligonucleotide
gaggacaucuuuaaaggau

SEQ ID NO: 3081417 - RNA, 19 nt, Artificial Sequence
  Description of Artificial Sequence: Synthetic oligonucleotide
cuugcaacacagccuuguc

SEQ ID NO: 3081418 - RNA, 19 nt, Artificial Sequence
  Description of Artificial Sequence: Synthetic oligonucleotide
ccagcagcuuuucauaaug

SEQ ID NO: 3081419 - RNA, 19 nt, Artificial Sequence
  Description of Artificial Sequence: Synthetic oligonucleotide
ccauagaaaguuccuuccc

SEQ ID NO: 3081420 - RNA, 19 nt, Artificial Sequence
  Description of Artificial Sequence: Synthetic oligonucleotide
aggacaucuuuaaaggaua

SEQ ID NO: 3081421 - RNA, 19 nt, Artificial Sequence
  Description of Artificial Sequence: Synthetic oligonucleotide
auuugcagaucuagaggca

SEQ ID NO: 3081422 - RNA, 19 nt, Artificial Sequence
  Description of Artificial Sequence: Synthetic oligonucleotide
ggacaucuuuaaaggauag

SEQ ID NO: 3081423 - RNA, 19 nt, Artificial Sequence
  Description of Artificial Sequence: Synthetic oligonucleotide
cucugcucugaugccagcc

SEQ ID NO: 3081424 - RNA, 19 nt, Artificial Sequence
  Description of Artificial Sequence: Synthetic oligonucleotide
uuguggcccauagaaaguu

SEQ ID NO: 3081425 - RNA, 19 nt, Artificial Sequence
  Description of Artificial Sequence: Synthetic oligonucleotide
acuaacucuggcacuugca

SEQ ID NO: 3081426 - RNA, 19 nt, Artificial Sequence
  Description of Artificial Sequence: Synthetic oligonucleotide
cugauuccaagucacuugu

SEQ ID NO: 3081427 - RNA, 19 nt, Artificial Sequence
  Description of Artificial Sequence: Synthetic oligonucleotide
gcuuuucauaauguuguac

SEQ ID NO: 3081428 - RNA, 19 nt, Artificial Sequence
  Description of Artificial Sequence: Synthetic oligonucleotide
agcuuuucauaauguugua

SEQ ID NO: 3081429 - RNA, 19 nt, Artificial Sequence
  Description of Artificial Sequence: Synthetic oligonucleotide
ucccuuuguggcccauaga

SEQ ID NO: 3081430 - RNA, 19 nt, Artificial Sequence
  Description of Artificial Sequence: Synthetic oligonucleotide
agcagcucuccaggcaagg

SEQ ID NO: 3081431 - RNA, 19 nt, Artificial Sequence
  Description of Artificial Sequence: Synthetic oligonucleotide
accacuaacucuggcacuu

SEQ ID NO: 3081432 - RNA, 19 nt, Artificial Sequence
  Description of Artificial Sequence: Synthetic oligonucleotide
gugguguagcuguaguaaa

SEQ ID NO: 3081433 - RNA, 19 nt, Artificial Sequence
  Description of Artificial Sequence: Synthetic oligonucleotide
gcccauagaaaguuccuuc

SEQ ID NO: 3081434 - RNA, 19 nt, Artificial Sequence
  Description of Artificial Sequence: Synthetic oligonucleotide
cugcucugaugccagccac

SEQ ID NO: 3081435 - RNA, 19 nt, Artificial Sequence
  Description of Artificial Sequence: Synthetic oligonucleotide
caaggggcgacuguucuca

SEQ ID NO: 3081436 - RNA, 19 nt, Artificial Sequence
  Description of Artificial Sequence: Synthetic oligonucleotide
uucucacuccagugccagc

SEQ ID NO: 3081437 - RNA, 19 nt, Artificial Sequence
  Description of Artificial Sequence: Synthetic oligonucleotide
caggcaccacuaacucugg

SEQ ID NO: 3081438 - RNA, 19 nt, Artificial Sequence
  Description of Artificial Sequence: Synthetic oligonucleotide
cagcucaggcaccacuaac

SEQ ID NO: 3081439 - RNA, 19 nt, Artificial Sequence
  Description of Artificial Sequence: Synthetic oligonucleotide
ggggcgacuguucucacuc

SEQ ID NO: 3081440 - RNA, 19 nt, Artificial Sequence
  Description of Artificial Sequence: Synthetic oligonucleotide
ucccucuguucuugaagaa

SEQ ID NO: 3081441 - RNA, 19 nt, Artificial Sequence
  Description of Artificial Sequence: Synthetic oligonucleotide
acagcucaggcaccacuaa

SEQ ID NO: 3081442 - RNA, 19 nt, Artificial Sequence
  Description of Artificial Sequence: Synthetic oligonucleotide
cagccuugucauuugcaga

SEQ ID NO: 3081443 - RNA, 19 nt, Artificial Sequence
  Description of Artificial Sequence: Synthetic oligonucleotide
ucucugcucugaugccagc

SEQ ID NO: 3081444 - RNA, 19 nt, Artificial Sequence
  Description of Artificial Sequence: Synthetic oligonucleotide
cagccacaucugcauacag

SEQ ID NO: 3081445 - RNA, 19 nt, Artificial Sequence
  Description of Artificial Sequence: Synthetic oligonucleotide
cacagccuugucauuugca

SEQ ID NO: 3081446 - RNA, 19 nt, Artificial Sequence
  Description of Artificial Sequence: Synthetic oligonucleotide
auucgugcccagauccaug

SEQ ID NO: 3081447 - RNA, 19 nt, Artificial Sequence
  Description of Artificial Sequence: Synthetic oligonucleotide
cgugcccagauccaugucc

SEQ ID NO: 3081448 - RNA, 19 nt, Artificial Sequence
  Description of Artificial Sequence: Synthetic oligonucleotide
cccuuuguggcccauagaa

SEQ ID NO: 3081449 - RNA, 19 nt, Artificial Sequence
  Description of Artificial Sequence: Synthetic oligonucleotide
gacaucuuuaaaggauagu

SEQ ID NO: 3081450 - RNA, 19 nt, Artificial Sequence
  Description of Artificial Sequence: Synthetic oligonucleotide
caucugcauacagcucagg

SEQ ID NO: 3081451 - RNA, 19 nt, Artificial Sequence
  Description of Artificial Sequence: Synthetic oligonucleotide
cagcuucuaggcgcaagag

SEQ ID NO: 3081452 - RNA, 19 nt, Artificial Sequence
  Description of Artificial Sequence: Synthetic oligonucleotide
cuugucauuugcagaucua

SEQ ID NO: 3081453 - RNA, 19 nt, Artificial Sequence
  Description of Artificial Sequence: Synthetic oligonucleotide
uccuucccucuguucuuga

SEQ ID NO: 3081454 - RNA, 19 nt, Artificial Sequence
  Description of Artificial Sequence: Synthetic oligonucleotide
gguauucauucgugcccag

SEQ ID NO: 3081455 - RNA, 19 nt, Artificial Sequence
  Description of Artificial Sequence: Synthetic oligonucleotide
guauucauucgugcccaga

SEQ ID NO: 3081456 - RNA, 19 nt, Artificial Sequence
  Description of Artificial Sequence: Synthetic oligonucleotide
gccagccacaucugcauac

SEQ ID NO: 3081457 - RNA, 19 nt, Artificial Sequence
  Description of Artificial Sequence: Synthetic oligonucleotide
gcagcuucuaggcgcaaga

SEQ ID NO: 3081458 - RNA, 19 nt, Artificial Sequence
  Description of Artificial Sequence: Synthetic oligonucleotide
gucugaggacaucuuuaaa

SEQ ID NO: 3081459 - RNA, 19 nt, Artificial Sequence
  Description of Artificial Sequence: Synthetic oligonucleotide
uccaggcaaggggcgacug

SEQ ID NO: 3081460 - RNA, 19 nt, Artificial Sequence
  Description of Artificial Sequence: Synthetic oligonucleotide
cuaggcgcaagagcagcuc

SEQ ID NO: 3081461 - RNA, 19 nt, Artificial Sequence
  Description of Artificial Sequence: Synthetic oligonucleotide
aggcgcaagagcagcucuc

SEQ ID NO: 3081462 - RNA, 19 nt, Artificial Sequence
  Description of Artificial Sequence: Synthetic oligonucleotide
uuucucccuuuguggccca

SEQ ID NO: 3081463 - RNA, 19 nt, Artificial Sequence
  Description of Artificial Sequence: Synthetic oligonucleotide
ccaagucacuugucugagg

SEQ ID NO: 3081464 - RNA, 19 nt, Artificial Sequence
  Description of Artificial Sequence: Synthetic oligonucleotide
gcucaggcaccacuaacuc

SEQ ID NO: 3081465 - RNA, 19 nt, Artificial Sequence
  Description of Artificial Sequence: Synthetic oligonucleotide
aggggcgacuguucucacu

SEQ ID NO: 3081466 - RNA, 19 nt, Artificial Sequence
  Description of Artificial Sequence: Synthetic oligonucleotide
ucacuugucugaggacauc

SEQ ID NO: 3081467 - RNA, 19 nt, Artificial Sequence
  Description of Artificial Sequence: Synthetic oligonucleotide
ugccagccacaucugcaua

SEQ ID NO: 3081468 - RNA, 19 nt, Artificial Sequence
  Description of Artificial Sequence: Synthetic oligonucleotide
gagcagcucuccaggcaag

SEQ ID NO: 3081469 - RNA, 19 nt, Artificial Sequence
  Description of Artificial Sequence: Synthetic oligonucleotide
gaggcagcuucuaggcgca

SEQ ID NO: 3081470 - RNA, 19 nt, Artificial Sequence
  Description of Artificial Sequence: Synthetic oligonucleotide
cgcaagagcagcucuccag

SEQ ID NO: 3081471 - RNA, 19 nt, Artificial Sequence
  Description of Artificial Sequence: Synthetic oligonucleotide
aggcaaggggcgacuguuc

SEQ ID NO: 3081472 - RNA, 19 nt, Artificial Sequence
  Description of Artificial Sequence: Synthetic oligonucleotide
cauacagcucaggcaccac

SEQ ID NO: 3081473 - RNA, 19 nt, Artificial Sequence
  Description of Artificial Sequence: Synthetic oligonucleotide
cacuugcaacacagccuug

SEQ ID NO: 3081474 - RNA, 19 nt, Artificial Sequence
  Description of Artificial Sequence: Synthetic oligonucleotide
ggcgcaagagcagcucucc

SEQ ID NO: 3081475 - RNA, 19 nt, Artificial Sequence
  Description of Artificial Sequence: Synthetic oligonucleotide
ggcgacuguucucacucca

SEQ ID NO: 3081476 - RNA, 19 nt, Artificial Sequence
  Description of Artificial Sequence: Synthetic oligonucleotide
gaucuagaggcagcuucua

SEQ ID NO: 3081477 - RNA, 19 nt, Artificial Sequence
  Description of Artificial Sequence: Synthetic oligonucleotide
ucgugcccagauccauguc

SEQ ID NO: 3081478 - RNA, 19 nt, Artificial Sequence
  Description of Artificial Sequence: Synthetic oligonucleotide
cacuugucugaggacaucu

SEQ ID NO: 3081479 - RNA, 19 nt, Artificial Sequence
  Description of Artificial Sequence: Synthetic oligonucleotide
gcagcucuccaggcaaggg

SEQ ID NO: 3081480 - RNA, 19 nt, Artificial Sequence
  Description of Artificial Sequence: Synthetic oligonucleotide
cacuccagugccagcagcu

SEQ ID NO: 3081481 - RNA, 19 nt, Artificial Sequence
  Description of Artificial Sequence: Synthetic oligonucleotide
cucaggcaccacuaacucu

SEQ ID NO: 3081482 - RNA, 19 nt, Artificial Sequence
  Description of Artificial Sequence: Synthetic oligonucleotide
gcacuugcaacacagccuu

SEQ ID NO: 3081483 - RNA, 19 nt, Artificial Sequence
  Description of Artificial Sequence: Synthetic oligonucleotide
cagcagcuuuucauaaugu

SEQ ID NO: 3081484 - RNA, 19 nt, Artificial Sequence
  Description of Artificial Sequence: Synthetic oligonucleotide
gcuguaguaaaagcucucu

SEQ ID NO: 3081485 - RNA, 19 nt, Artificial Sequence
  Description of Artificial Sequence: Synthetic oligonucleotide
ggcagcuucuaggcgcaag

SEQ ID NO: 3081486 - RNA, 19 nt, Artificial Sequence
  Description of Artificial Sequence: Synthetic oligonucleotide
gcgacuguucucacuccag

SEQ ID NO: 3081487 - RNA, 19 nt, Artificial Sequence
  Description of Artificial Sequence: Synthetic oligonucleotide
ggcacuugcaacacagccu

SEQ ID NO: 3081488 - RNA, 19 nt, Artificial Sequence
  Description of Artificial Sequence: Synthetic oligonucleotide
gcauacagcucaggcacca

SEQ ID NO: 3081489 - RNA, 19 nt, Artificial Sequence
  Description of Artificial Sequence: Synthetic oligonucleotide
caacacagccuugucauuu

SEQ ID NO: 3081490 - RNA, 19 nt, Artificial Sequence
  Description of Artificial Sequence: Synthetic oligonucleotide
ucucccuuuguggcccaua

SEQ ID NO: 3081491 - RNA, 19 nt, Artificial Sequence
  Description of Artificial Sequence: Synthetic oligonucleotide
ccuuuguggcccauagaaa

SEQ ID NO: 3081492 - RNA, 19 nt, Artificial Sequence
  Description of Artificial Sequence: Synthetic oligonucleotide
cucuggcacuugcaacaca

SEQ ID NO: 3081493 - RNA, 19 nt, Artificial Sequence
  Description of Artificial Sequence: Synthetic oligonucleotide
gggcgacuguucucacucc

SEQ ID NO: 3081494 - RNA, 19 nt, Artificial Sequence
  Description of Artificial Sequence: Synthetic oligonucleotide
acuccagugccagcagcuu

SEQ ID NO: 3081495 - RNA, 19 nt, Artificial Sequence
  Description of Artificial Sequence: Synthetic oligonucleotide
ccacaucugcauacagcuc

SEQ ID NO: 3081496 - RNA, 19 nt, Artificial Sequence
  Description of Artificial Sequence: Synthetic oligonucleotide
gugcccagauccauguccu

SEQ ID NO: 3081497 - RNA, 19 nt, Artificial Sequence
  Description of Artificial Sequence: Synthetic oligonucleotide
gcucucugcucugaugcca

SEQ ID NO: 3081498 - RNA, 19 nt, Artificial Sequence
  Description of Artificial Sequence: Synthetic oligonucleotide
gcaaggggcgacuguucuc

SEQ ID NO: 3081499 - RNA, 19 nt, Artificial Sequence
  Description of Artificial Sequence: Synthetic oligonucleotide
ccuugucauuugcagaucu

SEQ ID NO: 3081500 - RNA, 19 nt, Artificial Sequence
  Description of Artificial Sequence: Synthetic oligonucleotide
ggcaaggggcgacuguucu

SEQ ID NO: 3081501 - RNA, 19 nt, Artificial Sequence
  Description of Artificial Sequence: Synthetic oligonucleotide
gucacuugucugaggacau

SEQ ID NO: 3081502 - RNA, 19 nt, Artificial Sequence
  Description of Artificial Sequence: Synthetic oligonucleotide
caccacuaacucuggcacu

SEQ ID NO: 3081503 - RNA, 19 nt, Artificial Sequence
  Description of Artificial Sequence: Synthetic oligonucleotide
cagugccagcagcuuuuca

SEQ ID NO: 3081504 - RNA, 19 nt, Artificial Sequence
  Description of Artificial Sequence: Synthetic oligonucleotide
cauucgugcccagauccau

SEQ ID NO: 3081505 - RNA, 19 nt, Artificial Sequence
  Description of Artificial Sequence: Synthetic oligonucleotide
uucucccuuuguggcccau

SEQ ID NO: 3081506 - RNA, 19 nt, Artificial Sequence
  Description of Artificial Sequence: Synthetic oligonucleotide
cccucuguucuugaagaaa

SEQ ID NO: 3081507 - RNA, 19 nt, Artificial Sequence
  Description of Artificial Sequence: Synthetic oligonucleotide
gcgcaagagcagcucucca

SEQ ID NO: 3081508 - RNA, 19 nt, Artificial Sequence
  Description of Artificial Sequence: Synthetic oligonucleotide
cuccagugccagcagcuuu

SEQ ID NO: 3081509 - RNA, 19 nt, Artificial Sequence
  Description of Artificial Sequence: Synthetic oligonucleotide
gccuugucauuugcagauc

SEQ ID NO: 3081510 - RNA, 19 nt, Artificial Sequence
  Description of Artificial Sequence: Synthetic oligonucleotide
caggcaaggggcgacuguu

SEQ ID NO: 3081511 - RNA, 19 nt, Artificial Sequence
  Description of Artificial Sequence: Synthetic oligonucleotide
ccagccacaucugcauaca

SEQ ID NO: 3081512 - RNA, 19 nt, Artificial Sequence
  Description of Artificial Sequence: Synthetic oligonucleotide
ccacuaacucuggcacuug

SEQ ID NO: 3081513 - RNA, 19 nt, Artificial Sequence
  Description of Artificial Sequence: Synthetic oligonucleotide
ggauagugguguagcugua

SEQ ID NO: 3081514 - RNA, 19 nt, Artificial Sequence
  Description of Artificial Sequence: Synthetic oligonucleotide
ccuucccucuguucuugaa

SEQ ID NO: 3081515 - RNA, 19 nt, Artificial Sequence
  Description of Artificial Sequence: Synthetic oligonucleotide
ggcccauagaaaguuccuu

SEQ ID NO: 3081516 - RNA, 19 nt, Artificial Sequence
  Description of Artificial Sequence: Synthetic oligonucleotide
cccagauccauguccuuuu

SEQ ID NO: 3081517 - RNA, 19 nt, Artificial Sequence
  Description of Artificial Sequence: Synthetic oligonucleotide
gcaacacagccuugucauu

SEQ ID NO: 3081518 - RNA, 19 nt, Artificial Sequence
  Description of Artificial Sequence: Synthetic oligonucleotide
cgacuguucucacuccagu

SEQ ID NO: 3081519 - RNA, 19 nt, Artificial Sequence
  Description of Artificial Sequence: Synthetic oligonucleotide
cuccaggcaaggggcgacu

SEQ ID NO: 3081520 - RNA, 19 nt, Artificial Sequence
  Description of Artificial Sequence: Synthetic oligonucleotide
ccaggcaaggggcgacugu

SEQ ID NO: 3081521 - RNA, 19 nt, Artificial Sequence
  Description of Artificial Sequence: Synthetic oligonucleotide
uagauaauaacacaggugg

SEQ ID NO: 3081522 - RNA, 19 nt, Artificial Sequence
  Description of Artificial Sequence: Synthetic oligonucleotide
uuaagaacgcuuuacauac

SEQ ID NO: 3081523 - RNA, 19 nt, Artificial Sequence
  Description of Artificial Sequence: Synthetic oligonucleotide
ucaccuaggaucuuggugg

SEQ ID NO: 3081524 - RNA, 19 nt, Artificial Sequence
  Description of Artificial Sequence: Synthetic oligonucleotide
uguagaaucgguuuaagaa

SEQ ID NO: 3081525 - RNA, 19 nt, Artificial Sequence
  Description of Artificial Sequence: Synthetic oligonucleotide
caaaaggucacuaggauag

SEQ ID NO: 3081526 - RNA, 19 nt, Artificial Sequence
  Description of Artificial Sequence: Synthetic oligonucleotide
uagaaucgguuuaagaacg

SEQ ID NO: 3081527 - RNA, 19 nt, Artificial Sequence
  Description of Artificial Sequence: Synthetic oligonucleotide
acauacuucacagucagcc

SEQ ID NO: 3081528 - RNA, 19 nt, Artificial Sequence
  Description of Artificial Sequence: Synthetic oligonucleotide
ugugacuucaccuaggauc

SEQ ID NO: 3081529 - RNA, 19 nt, Artificial Sequence
  Description of Artificial Sequence: Synthetic oligonucleotide
uuacauacuucacagucag

SEQ ID NO: 3081530 - RNA, 19 nt, Artificial Sequence
  Description of Artificial Sequence: Synthetic oligonucleotide
uuugcuggcuccuagauaa

SEQ ID NO: 3081531 - RNA, 19 nt, Artificial Sequence
  Description of Artificial Sequence: Synthetic oligonucleotide
uuggcauccaagcaaaagc

SEQ ID NO: 3081532 - RNA, 19 nt, Artificial Sequence
  Description of Artificial Sequence: Synthetic oligonucleotide
gaaaagucuacuccucugg

SEQ ID NO: 3081533 - RNA, 19 nt, Artificial Sequence
  Description of Artificial Sequence: Synthetic oligonucleotide
uccuagauaauaacacagg

SEQ ID NO: 3081534 - RNA, 19 nt, Artificial Sequence
  Description of Artificial Sequence: Synthetic oligonucleotide
cuuuacauacuucacaguc

SEQ ID NO: 3081535 - RNA, 19 nt, Artificial Sequence
  Description of Artificial Sequence: Synthetic oligonucleotide
uuuccuuuggcauccaagc

SEQ ID NO: 3081536 - RNA, 19 nt, Artificial Sequence
  Description of Artificial Sequence: Synthetic oligonucleotide
ugcacuagguucgagaucc

SEQ ID NO: 3081537 - RNA, 19 nt, Artificial Sequence
  Description of Artificial Sequence: Synthetic oligonucleotide
uuuacauacuucacaguca

SEQ ID NO: 3081538 - RNA, 19 nt, Artificial Sequence
  Description of Artificial Sequence: Synthetic oligonucleotide
uuuaagaacgcuuuacaua

SEQ ID NO: 3081539 - RNA, 19 nt, Artificial Sequence
  Description of Artificial Sequence: Synthetic oligonucleotide
uucgagauccaaagcaggg

SEQ ID NO: 3081540 - RNA, 19 nt, Artificial Sequence
  Description of Artificial Sequence: Synthetic oligonucleotide
  modified_base (13)..(13): a, c, u, g, unknown or other
uaugguguccacngaaaag

SEQ ID NO: 3081541 - RNA, 19 nt, Artificial Sequence
  Description of Artificial Sequence: Synthetic oligonucleotide
agcaaggaguuguagaauc

SEQ ID NO: 3081542 - RNA, 19 nt, Artificial Sequence
  Description of Artificial Sequence: Synthetic oligonucleotide
cuagauaauaacacaggug

SEQ ID NO: 3081543 - RNA, 19 nt, Artificial Sequence
  Description of Artificial Sequence: Synthetic oligonucleotide
cuccuagauaauaacacag

SEQ ID NO: 3081544 - RNA, 19 nt, Artificial Sequence
  Description of Artificial Sequence: Synthetic oligonucleotide
acagucagccuccaacugc

SEQ ID NO: 3081545 - RNA, 19 nt, Artificial Sequence
  Description of Artificial Sequence: Synthetic oligonucleotide
caaagcagggcgcaaaagg

SEQ ID NO: 3081546 - RNA, 19 nt, Artificial Sequence
  Description of Artificial Sequence: Synthetic oligonucleotide
guagaaucgguuuaagaac

SEQ ID NO: 3081547 - RNA, 19 nt, Artificial Sequence
  Description of Artificial Sequence: Synthetic oligonucleotide
auacuucacagucagccuc

SEQ ID NO: 3081548 - RNA, 19 nt, Artificial Sequence
  Description of Artificial Sequence: Synthetic oligonucleotide
cuagguucgagauccaaag

SEQ ID NO: 3081549 - RNA, 19 nt, Artificial Sequence
  Description of Artificial Sequence: Synthetic oligonucleotide
aauaacacagguggcuuuc

SEQ ID NO: 3081550 - RNA, 19 nt, Artificial Sequence
  Description of Artificial Sequence: Synthetic oligonucleotide
  modified_base (18)..(18): a, c, u, g, unknown or other
uccucuaugguguccacng

SEQ ID NO: 3081551 - RNA, 19 nt, Artificial Sequence
  Description of Artificial Sequence: Synthetic oligonucleotide
uucaccuaggaucuuggug

SEQ ID NO: 3081552 - RNA, 19 nt, Artificial Sequence
  Description of Artificial Sequence: Synthetic oligonucleotide
aaagucuacuccucuggug

SEQ ID NO: 3081553 - RNA, 19 nt, Artificial Sequence
  Description of Artificial Sequence: Synthetic oligonucleotide
guggcugaaucuuugcugg

SEQ ID NO: 3081554 - RNA, 19 nt, Artificial Sequence
  Description of Artificial Sequence: Synthetic oligonucleotide
aggucacuaggauagcugg

SEQ ID NO: 3081555 - RNA, 19 nt, Artificial Sequence
  Description of Artificial Sequence: Synthetic oligonucleotide
gaacgcuuuacauacuuca

SEQ ID NO: 3081556 - RNA, 19 nt, Artificial Sequence
  Description of Artificial Sequence: Synthetic oligonucleotide
ugagcaaggaguuguagaa

SEQ ID NO: 3081557 - RNA, 19 nt, Artificial Sequence
  Description of Artificial Sequence: Synthetic oligonucleotide
aaucuuugcuggcuccuag

SEQ ID NO: 3081558 - RNA, 19 nt, Artificial Sequence
  Description of Artificial Sequence: Synthetic oligonucleotide
agguucgagauccaaagca

SEQ ID NO: 3081559 - RNA, 19 nt, Artificial Sequence
  Description of Artificial Sequence: Synthetic oligonucleotide
aacucuuccucuauggugu

SEQ ID NO: 3081560 - RNA, 19 nt, Artificial Sequence
  Description of Artificial Sequence: Synthetic oligonucleotide
ugcgccugcacuagguucg

SEQ ID NO: 3081561 - RNA, 19 nt, Artificial Sequence
  Description of Artificial Sequence: Synthetic oligonucleotide
cugcguaucgguauccugg

SEQ ID NO: 3081562 - RNA, 19 nt, Artificial Sequence
  Description of Artificial Sequence: Synthetic oligonucleotide
aggauagcugggcuagugc

SEQ ID NO: 3081563 - RNA, 19 nt, Artificial Sequence
  Description of Artificial Sequence: Synthetic oligonucleotide
uggcauccaagcaaaagcu

SEQ ID NO: 3081564 - RNA, 19 nt, Artificial Sequence
  Description of Artificial Sequence: Synthetic oligonucleotide
aacgcuuuacauacuucac

SEQ ID NO: 3081565 - RNA, 19 nt, Artificial Sequence
  Description of Artificial Sequence: Synthetic oligonucleotide
agauaauaacacagguggc

SEQ ID NO: 3081566 - RNA, 19 nt, Artificial Sequence
  Description of Artificial Sequence: Synthetic oligonucleotide
uuuggcauccaagcaaaag

SEQ ID NO: 3081567 - RNA, 19 nt, Artificial Sequence
  Description of Artificial Sequence: Synthetic oligonucleotide
aagaacgcuuuacauacuu

SEQ ID NO: 3081568 - RNA, 19 nt, Artificial Sequence
  Description of Artificial Sequence: Synthetic oligonucleotide
aaaaggucacuaggauagc

SEQ ID NO: 3081569 - RNA, 19 nt, Artificial Sequence
  Description of Artificial Sequence: Synthetic oligonucleotide
uuguagaaucgguuuaaga

SEQ ID NO: 3081570 - RNA, 19 nt, Artificial Sequence
  Description of Artificial Sequence: Synthetic oligonucleotide
  modified_base (6)..(6): a, c, u, g, unknown or other
uccacngaaaagucuacuc

SEQ ID NO: 3081571 - RNA, 19 nt, Artificial Sequence
  Description of Artificial Sequence: Synthetic oligonucleotide
accgcugagccugagaccg

SEQ ID NO: 3081572 - RNA, 19 nt, Artificial Sequence
  Description of Artificial Sequence: Synthetic oligonucleotide
aaagcagggcgcaaaaggu

SEQ ID NO: 3081573 - RNA, 19 nt, Artificial Sequence
  Description of Artificial Sequence: Synthetic oligonucleotide
uggcuccuagauaauaaca

SEQ ID NO: 3081574 - RNA, 19 nt, Artificial Sequence
  Description of Artificial Sequence: Synthetic oligonucleotide
auagcugggcuagugcacc

SEQ ID NO: 3081575 - RNA, 19 nt, Artificial Sequence
  Description of Artificial Sequence: Synthetic oligonucleotide
uccaagcaaaagcuggcca

SEQ ID NO: 3081576 - RNA, 19 nt, Artificial Sequence
  Description of Artificial Sequence: Synthetic oligonucleotide
uuucuuuuccuuuggcauc

SEQ ID NO: 3081577 - RNA, 19 nt, Artificial Sequence
  Description of Artificial Sequence: Synthetic oligonucleotide
agcaaaagcuggccaacuc

SEQ ID NO: 3081578 - RNA, 19 nt, Artificial Sequence
  Description of Artificial Sequence: Synthetic oligonucleotide
acuaggauagcugggcuag

SEQ ID NO: 3081579 - RNA, 19 nt, Artificial Sequence
  Description of Artificial Sequence: Synthetic oligonucleotide
caacucuuccucuauggug

SEQ ID NO: 3081580 - RNA, 19 nt, Artificial Sequence
  Description of Artificial Sequence: Synthetic oligonucleotide
uucuuuuccuuuggcaucc

SEQ ID NO: 3081581 - RNA, 19 nt, Artificial Sequence
  Description of Artificial Sequence: Synthetic oligonucleotide
aucgguauccugguccugc

SEQ ID NO: 3081582 - RNA, 19 nt, Artificial Sequence
  Description of Artificial Sequence: Synthetic oligonucleotide
  modified_base (15)..(15): a, c, u, g, unknown or other
ucuaugguguccacngaaa

SEQ ID NO: 3081583 - RNA, 19 nt, Artificial Sequence
  Description of Artificial Sequence: Synthetic oligonucleotide
cagucagccuccaacugcg

SEQ ID NO: 3081584 - RNA, 19 nt, Artificial Sequence
  Description of Artificial Sequence: Synthetic oligonucleotide
ggcgcaaaaggucacuagg

SEQ ID NO: 3081585 - RNA, 19 nt, Artificial Sequence
  Description of Artificial Sequence: Synthetic oligonucleotide
uccucuggugagcaaggag

SEQ ID NO: 3081586 - RNA, 19 nt, Artificial Sequence
  Description of Artificial Sequence: Synthetic oligonucleotide
uagguucgagauccaaagc

SEQ ID NO: 3081587 - RNA, 19 nt, Artificial Sequence
  Description of Artificial Sequence: Synthetic oligonucleotide
acgcuuuacauacuucaca

SEQ ID NO: 3081588 - RNA, 19 nt, Artificial Sequence
  Description of Artificial Sequence: Synthetic oligonucleotide
aaggucacuaggauagcug

SEQ ID NO: 3081589 - RNA, 19 nt, Artificial Sequence
  Description of Artificial Sequence: Synthetic oligonucleotide
uuccuuuggcauccaagca

SEQ ID NO: 3081590 - RNA, 19 nt, Artificial Sequence
  Description of Artificial Sequence: Synthetic oligonucleotide
  modified_base (3)..(3): a, c, u, g, unknown or other
acngaaaagucuacuccuc

SEQ ID NO: 3081591 - RNA, 19 nt, Artificial Sequence
  Description of Artificial Sequence: Synthetic oligonucleotide
uagugcaccgcugagccug

SEQ ID NO: 3081592 - RNA, 19 nt, Artificial Sequence
  Description of Artificial Sequence: Synthetic oligonucleotide
guucgagauccaaagcagg

SEQ ID NO: 3081593 - RNA, 19 nt, Artificial Sequence
  Description of Artificial Sequence: Synthetic oligonucleotide
agaaucgguuuaagaacgc

SEQ ID NO: 3081594 - RNA, 19 nt, Artificial Sequence
  Description of Artificial Sequence: Synthetic oligonucleotide
aagcagggcgcaaaagguc

SEQ ID NO: 3081595 - RNA, 19 nt, Artificial Sequence
  Description of Artificial Sequence: Synthetic oligonucleotide
uacuccucuggugagcaag

SEQ ID NO: 3081596 - RNA, 19 nt, Artificial Sequence
  Description of Artificial Sequence: Synthetic oligonucleotide
ucuuccucuauggugucca

SEQ ID NO: 3081597 - RNA, 19 nt, Artificial Sequence
  Description of Artificial Sequence: Synthetic oligonucleotide
ucuuugcuggcuccuagau

SEQ ID NO: 3081598 - RNA, 19 nt, Artificial Sequence
  Description of Artificial Sequence: Synthetic oligonucleotide
ugggcuagugcaccgcuga

SEQ ID NO: 3081599 - RNA, 19 nt, Artificial Sequence
  Description of Artificial Sequence: Synthetic oligonucleotide
cugaaucuuugcuggcucc

SEQ ID NO: 3081600 - RNA, 19 nt, Artificial Sequence
  Description of Artificial Sequence: Synthetic oligonucleotide
uccaacugcguaucgguau

SEQ ID NO: 3081601 - RNA, 19 nt, Artificial Sequence
  Description of Artificial Sequence: Synthetic oligonucleotide
ucagccuccaacugcguau

SEQ ID NO: 3081602 - RNA, 19 nt, Artificial Sequence
  Description of Artificial Sequence: Synthetic oligonucleotide
gcauccaagcaaaagcugg

SEQ ID NO: 3081603 - RNA, 19 nt, Artificial Sequence
  Description of Artificial Sequence: Synthetic oligonucleotide
gcuagugcaccgcugagcc

SEQ ID NO: 3081604 - RNA, 19 nt, Artificial Sequence
  Description of Artificial Sequence: Synthetic oligonucleotide
aagcuggccaacucuuccu

SEQ ID NO: 3081605 - RNA, 19 nt, Artificial Sequence
  Description of Artificial Sequence: Synthetic oligonucleotide
ucacuaggauagcugggcu

SEQ ID NO: 3081606 - RNA, 19 nt, Artificial Sequence
  Description of Artificial Sequence: Synthetic oligonucleotide
gguuuaagaacgcuuuaca

SEQ ID NO: 3081607 - RNA, 19 nt, Artificial Sequence
  Description of Artificial Sequence: Synthetic oligonucleotide
  modified_base (5)..(5): a, c, u, g, unknown or other
ccacngaaaagucuacucc

SEQ ID NO: 3081608 - RNA, 19 nt, Artificial Sequence
  Description of Artificial Sequence: Synthetic oligonucleotide
ucuacuccucuggugagca

SEQ ID NO: 3081609 - RNA, 19 nt, Artificial Sequence
  Description of Artificial Sequence: Synthetic oligonucleotide
gguggcugaaucuuugcug

SEQ ID NO: 3081610 - RNA, 19 nt, Artificial Sequence
  Description of Artificial Sequence: Synthetic oligonucleotide
ucgagauccaaagcagggc

SEQ ID NO: 3081611 - RNA, 19 nt, Artificial Sequence
  Description of Artificial Sequence: Synthetic oligonucleotide
gucacuaggauagcugggc

SEQ ID NO: 3081612 - RNA, 19 nt, Artificial Sequence
  Description of Artificial Sequence: Synthetic oligonucleotide
aaucgguuuaagaacgcuu

SEQ ID NO: 3081613 - RNA, 19 nt, Artificial Sequence
  Description of Artificial Sequence: Synthetic oligonucleotide
aaggaguuguagaaucggu

SEQ ID NO: 3081614 - RNA, 19 nt, Artificial Sequence
  Description of Artificial Sequence: Synthetic oligonucleotide
ugguggcugaaucuuugcu

SEQ ID NO: 3081615 - RNA, 19 nt, Artificial Sequence
  Description of Artificial Sequence: Synthetic oligonucleotide
ugagccugagaccgggaac

SEQ ID NO: 3081616 - RNA, 19 nt, Artificial Sequence
  Description of Artificial Sequence: Synthetic oligonucleotide
cuggcuccuagauaauaac

SEQ ID NO: 3081617 - RNA, 19 nt, Artificial Sequence
  Description of Artificial Sequence: Synthetic oligonucleotide
gugagcaaggaguuguaga

SEQ ID NO: 3081618 - RNA, 19 nt, Artificial Sequence
  Description of Artificial Sequence: Synthetic oligonucleotide
  modified_base (8)..(8): a, c, u, g, unknown or other
uguccacngaaaagucuac

SEQ ID NO: 3081619 - RNA, 19 nt, Artificial Sequence
  Description of Artificial Sequence: Synthetic oligonucleotide
auaauaacacagguggcuu

SEQ ID NO: 3081620 - RNA, 19 nt, Artificial Sequence
  Description of Artificial Sequence: Synthetic oligonucleotide
gccaacucuuccucuaugg

SEQ ID NO: 3081621 - RNA, 19 nt, Artificial Sequence
  Description of Artificial Sequence: Synthetic oligonucleotide
cuuucuuuuccuuuggcau

SEQ ID NO: 3081622 - RNA, 19 nt, Artificial Sequence
  Description of Artificial Sequence: Synthetic oligonucleotide
  modified_base (4)..(4): a, c, u, g, unknown or other
cacngaaaagucuacuccu

SEQ ID NO: 3081623 - RNA, 19 nt, Artificial Sequence
  Description of Artificial Sequence: Synthetic oligonucleotide
acacagguggcuuucuuuu

SEQ ID NO: 3081624 - RNA, 19 nt, Artificial Sequence
  Description of Artificial Sequence: Synthetic oligonucleotide
gguauccugguccugcgcc

SEQ ID NO: 3081625 - RNA, 19 nt, Artificial Sequence
  Description of Artificial Sequence: Synthetic oligonucleotide
uaauaacacagguggcuuu

SEQ ID NO: 3081626 - RNA, 19 nt, Artificial Sequence
  Description of Artificial Sequence: Synthetic oligonucleotide
agcuggccaacucuuccuc

SEQ ID NO: 3081627 - RNA, 19 nt, Artificial Sequence
  Description of Artificial Sequence: Synthetic oligonucleotide
uacauacuucacagucagc

SEQ ID NO: 3081628 - RNA, 19 nt, Artificial Sequence
  Description of Artificial Sequence: Synthetic oligonucleotide
uaagaacgcuuuacauacu

SEQ ID NO: 3081629 - RNA, 19 nt, Artificial Sequence
  Description of Artificial Sequence: Synthetic oligonucleotide
uccaaagcagggcgcaaaa

SEQ ID NO: 3081630 - RNA, 19 nt, Artificial Sequence
  Description of Artificial Sequence: Synthetic oligonucleotide
uugguggcugaaucuuugc

SEQ ID NO: 3081631 - RNA, 19 nt, Artificial Sequence
  Description of Artificial Sequence: Synthetic oligonucleotide
  modified_base (11)..(11): a, c, u, g, unknown or other
ugguguccacngaaaaguc

SEQ ID NO: 3081632 - RNA, 19 nt, Artificial Sequence
  Description of Artificial Sequence: Synthetic oligonucleotide
agucuacuccucuggugag

SEQ ID NO: 3081633 - RNA, 19 nt, Artificial Sequence
  Description of Artificial Sequence: Synthetic oligonucleotide
ucgguauccugguccugcg

SEQ ID NO: 3081634 - RNA, 19 nt, Artificial Sequence
  Description of Artificial Sequence: Synthetic oligonucleotide
agaacgcuuuacauacuuc

SEQ ID NO: 3081635 - RNA, 19 nt, Artificial Sequence
  Description of Artificial Sequence: Synthetic oligonucleotide
  modified_base (16)..(16): a, c, u, g, unknown or other
cucuaugguguccacngaa

SEQ ID NO: 3081636 - RNA, 19 nt, Artificial Sequence
  Description of Artificial Sequence: Synthetic oligonucleotide
acuucaccuaggaucuugg

SEQ ID NO: 3081637 - RNA, 19 nt, Artificial Sequence
  Description of Artificial Sequence: Synthetic oligonucleotide
gacuucaccuaggaucuug

SEQ ID NO: 3081638 - RNA, 19 nt, Artificial Sequence
  Description of Artificial Sequence: Synthetic oligonucleotide
guuguagaaucgguuuaag

SEQ ID NO: 3081639 - RNA, 19 nt, Artificial Sequence
  Description of Artificial Sequence: Synthetic oligonucleotide
  modified_base (14)..(14): a, c, u, g, unknown or other
cuaugguguccacngaaaa

SEQ ID NO: 3081640 - RNA, 19 nt, Artificial Sequence
  Description of Artificial Sequence: Synthetic oligonucleotide
acugcguaucgguauccug

SEQ ID NO: 3081641 - RNA, 19 nt, Artificial Sequence
  Description of Artificial Sequence: Synthetic oligonucleotide
gguucgagauccaaagcag

SEQ ID NO: 3081642 - RNA, 19 nt, Artificial Sequence
  Description of Artificial Sequence: Synthetic oligonucleotide
ugaaucuuugcuggcuccu

SEQ ID NO: 3081643 - RNA, 19 nt, Artificial Sequence
  Description of Artificial Sequence: Synthetic oligonucleotide
ugcguaucgguauccuggu

SEQ ID NO: 3081644 - RNA, 19 nt, Artificial Sequence
  Description of Artificial Sequence: Synthetic oligonucleotide
aagcaaaagcuggccaacu

SEQ ID NO: 3081645 - RNA, 19 nt, Artificial Sequence
  Description of Artificial Sequence: Synthetic oligonucleotide
gaguuguagaaucgguuua

SEQ ID NO: 3081646 - RNA, 19 nt, Artificial Sequence
  Description of Artificial Sequence: Synthetic oligonucleotide
uaggauagcugggcuagug

SEQ ID NO: 3081647 - RNA, 19 nt, Artificial Sequence
  Description of Artificial Sequence: Synthetic oligonucleotide
cgcuuuacauacuucacag

SEQ ID NO: 3081648 - RNA, 19 nt, Artificial Sequence
  Description of Artificial Sequence: Synthetic oligonucleotide
gauagcugggcuagugcac

SEQ ID NO: 3081649 - RNA, 19 nt, Artificial Sequence
  Description of Artificial Sequence: Synthetic oligonucleotide
aguuguagaaucgguuuaa

SEQ ID NO: 3081650 - RNA, 19 nt, Artificial Sequence
  Description of Artificial Sequence: Synthetic oligonucleotide
ucgguuuaagaacgcuuua

SEQ ID NO: 3081651 - RNA, 19 nt, Artificial Sequence
  Description of Artificial Sequence: Synthetic oligonucleotide
ggcuccuagauaauaacac

SEQ ID NO: 3081652 - RNA, 19 nt, Artificial Sequence
  Description of Artificial Sequence: Synthetic oligonucleotide
gagauccaaagcagggcgc

SEQ ID NO: 3081653 - RNA, 19 nt, Artificial Sequence
  Description of Artificial Sequence: Synthetic oligonucleotide
cguaucgguauccuggucc

SEQ ID NO: 3081654 - RNA, 19 nt, Artificial Sequence
  Description of Artificial Sequence: Synthetic oligonucleotide
caagcaaaagcuggccaac

SEQ ID NO: 3081655 - RNA, 19 nt, Artificial Sequence
  Description of Artificial Sequence: Synthetic oligonucleotide
aucuuugcuggcuccuaga

SEQ ID NO: 3081656 - RNA, 19 nt, Artificial Sequence
  Description of Artificial Sequence: Synthetic oligonucleotide
ccugagaccgggaacuacc

SEQ ID NO: 3081657 - RNA, 19 nt, Artificial Sequence
  Description of Artificial Sequence: Synthetic oligonucleotide
aucgguuuaagaacgcuuu

SEQ ID NO: 3081658 - RNA, 19 nt, Artificial Sequence
  Description of Artificial Sequence: Synthetic oligonucleotide
cgagauccaaagcagggcg

SEQ ID NO: 3081659 - RNA, 19 nt, Artificial Sequence
  Description of Artificial Sequence: Synthetic oligonucleotide
ggauagcugggcuagugca

SEQ ID NO: 3081660 - RNA, 19 nt, Artificial Sequence
  Description of Artificial Sequence: Synthetic oligonucleotide
agauccaaagcagggcgca

SEQ ID NO: 3081661 - RNA, 19 nt, Artificial Sequence
  Description of Artificial Sequence: Synthetic oligonucleotide
uagcugggcuagugcaccg

SEQ ID NO: 3081662 - RNA, 19 nt, Artificial Sequence
  Description of Artificial Sequence: Synthetic oligonucleotide
gcaaggaguuguagaaucg

SEQ ID NO: 3081663 - RNA, 19 nt, Artificial Sequence
  Description of Artificial Sequence: Synthetic oligonucleotide
agcagggcgcaaaagguca

SEQ ID NO: 3081664 - RNA, 19 nt, Artificial Sequence
  Description of Artificial Sequence: Synthetic oligonucleotide
aacugcguaucgguauccu

SEQ ID NO: 3081665 - RNA, 19 nt, Artificial Sequence
  Description of Artificial Sequence: Synthetic oligonucleotide
gcuccuagauaauaacaca

SEQ ID NO: 3081666 - RNA, 19 nt, Artificial Sequence
  Description of Artificial Sequence: Synthetic oligonucleotide
caccuaggaucuugguggc

SEQ ID NO: 3081667 - RNA, 19 nt, Artificial Sequence
  Description of Artificial Sequence: Synthetic oligonucleotide
uccugcgccugcacuaggu

SEQ ID NO: 3081668 - RNA, 19 nt, Artificial Sequence
  Description of Artificial Sequence: Synthetic oligonucleotide
acuagguucgagauccaaa

SEQ ID NO: 3081669 - RNA, 19 nt, Artificial Sequence
  Description of Artificial Sequence: Synthetic oligonucleotide
gugacuucaccuaggaucu

SEQ ID NO: 3081670 - RNA, 19 nt, Artificial Sequence
  Description of Artificial Sequence: Synthetic oligonucleotide
cacagucagccuccaacug

SEQ ID NO: 3081671 - RNA, 19 nt, Artificial Sequence
  Description of Artificial Sequence: Synthetic oligonucleotide
acuccucuggugagcaagg

SEQ ID NO: 3081672 - RNA, 19 nt, Artificial Sequence
  Description of Artificial Sequence: Synthetic oligonucleotide
  modified_base (19)..(19): a, c, u, g, unknown or other
uuccucuaugguguccacn

SEQ ID NO: 3081673 - RNA, 19 nt, Artificial Sequence
  Description of Artificial Sequence: Synthetic oligonucleotide
uggcugaaucuuugcuggc

SEQ ID NO: 3081674 - RNA, 19 nt, Artificial Sequence
  Description of Artificial Sequence: Synthetic oligonucleotide
  modified_base (9)..(9): a, c, u, g, unknown or other
guguccacngaaaagucua

SEQ ID NO: 3081675 - RNA, 19 nt, Artificial Sequence
  Description of Artificial Sequence: Synthetic oligonucleotide
gcaccgcugagccugagac

SEQ ID NO: 3081676 - RNA, 19 nt, Artificial Sequence
  Description of Artificial Sequence: Synthetic oligonucleotide
gcaaaaggucacuaggaua

SEQ ID NO: 3081677 - RNA, 19 nt, Artificial Sequence
  Description of Artificial Sequence: Synthetic oligonucleotide
ugcaccgcugagccugaga

SEQ ID NO: 3081678 - RNA, 19 nt, Artificial Sequence
  Description of Artificial Sequence: Synthetic oligonucleotide
cugcgccugcacuagguuc

SEQ ID NO: 3081679 - RNA, 19 nt, Artificial Sequence
  Description of Artificial Sequence: Synthetic oligonucleotide
aggaguuguagaaucgguu

SEQ ID NO: 3081680 - RNA, 19 nt, Artificial Sequence
  Description of Artificial Sequence: Synthetic oligonucleotide
agcugggcuagugcaccgc

SEQ ID NO: 3081681 - RNA, 19 nt, Artificial Sequence
  Description of Artificial Sequence: Synthetic oligonucleotide
ugguccugcgccugcacua

SEQ ID NO: 3081682 - RNA, 19 nt, Artificial Sequence
  Description of Artificial Sequence: Synthetic oligonucleotide
aucuugguggcugaaucuu

SEQ ID NO: 3081683 - RNA, 19 nt, Artificial Sequence
  Description of Artificial Sequence: Synthetic oligonucleotide
cacagguggcuuucuuuuc

SEQ ID NO: 3081684 - RNA, 19 nt, Artificial Sequence
  Description of Artificial Sequence: Synthetic oligonucleotide
uauccugguccugcgccug

SEQ ID NO: 3081685 - RNA, 19 nt, Artificial Sequence
  Description of Artificial Sequence: Synthetic oligonucleotide
acgugugacuucaccuagg

SEQ ID NO: 3081686 - RNA, 19 nt, Artificial Sequence
  Description of Artificial Sequence: Synthetic oligonucleotide
ggucacuaggauagcuggg

SEQ ID NO: 3081687 - RNA, 19 nt, Artificial Sequence
  Description of Artificial Sequence: Synthetic oligonucleotide
agccuccaacugcguaucg

SEQ ID NO: 3081688 - RNA, 19 nt, Artificial Sequence
  Description of Artificial Sequence: Synthetic oligonucleotide
gcugaaucuuugcuggcuc

SEQ ID NO: 3081689 - RNA, 19 nt, Artificial Sequence
  Description of Artificial Sequence: Synthetic oligonucleotide
caacugcguaucgguaucc

SEQ ID NO: 3081690 - RNA, 19 nt, Artificial Sequence
  Description of Artificial Sequence: Synthetic oligonucleotide
uggccaacucuuccucuau

SEQ ID NO: 3081691 - RNA, 19 nt, Artificial Sequence
  Description of Artificial Sequence: Synthetic oligonucleotide
auaacacagguggcuuucu

SEQ ID NO: 3081692 - RNA, 19 nt, Artificial Sequence
  Description of Artificial Sequence: Synthetic oligonucleotide
cauacuucacagucagccu

SEQ ID NO: 3081693 - RNA, 19 nt, Artificial Sequence
  Description of Artificial Sequence: Synthetic oligonucleotide
gaaucgguuuaagaacgcu

SEQ ID NO: 3081694 - RNA, 19 nt, Artificial Sequence
  Description of Artificial Sequence: Synthetic oligonucleotide
caccgcugagccugagacc

SEQ ID NO: 3081695 - RNA, 19 nt, Artificial Sequence
  Description of Artificial Sequence: Synthetic oligonucleotide
uggugagcaaggaguugua

SEQ ID NO: 3081696 - RNA, 19 nt, Artificial Sequence
  Description of Artificial Sequence: Synthetic oligonucleotide
guaucgguauccugguccu

SEQ ID NO: 3081697 - RNA, 19 nt, Artificial Sequence
  Description of Artificial Sequence: Synthetic oligonucleotide
ggugagcaaggaguuguag

SEQ ID NO: 3081698 - RNA, 19 nt, Artificial Sequence
  Description of Artificial Sequence: Synthetic oligonucleotide
  modified_base (2)..(2): a, c, u, g, unknown or other
cngaaaagucuacuccucu

SEQ ID NO: 3081699 - RNA, 19 nt, Artificial Sequence
  Description of Artificial Sequence: Synthetic oligonucleotide
ccuagauaauaacacaggu

SEQ ID NO: 3081700 - RNA, 19 nt, Artificial Sequence
  Description of Artificial Sequence: Synthetic oligonucleotide
cuaggaucuugguggcuga

SEQ ID NO: 3081701 - RNA, 19 nt, Artificial Sequence
  Description of Artificial Sequence: Synthetic oligonucleotide
gagccugagaccgggaacu

SEQ ID NO: 3081702 - RNA, 19 nt, Artificial Sequence
  Description of Artificial Sequence: Synthetic oligonucleotide
ggaguuguagaaucgguuu

SEQ ID NO: 3081703 - RNA, 19 nt, Artificial Sequence
  Description of Artificial Sequence: Synthetic oligonucleotide
ggcauccaagcaaaagcug

SEQ ID NO: 3081704 - RNA, 19 nt, Artificial Sequence
  Description of Artificial Sequence: Synthetic oligonucleotide
gcaaaagcuggccaacucu

SEQ ID NO: 3081705 - RNA, 19 nt, Artificial Sequence
  Description of Artificial Sequence: Synthetic oligonucleotide
ugcuggcuccuagauaaua

SEQ ID NO: 3081706 - RNA, 19 nt, Artificial Sequence
  Description of Artificial Sequence: Synthetic oligonucleotide
ccuaggaucuugguggcug

SEQ ID NO: 3081707 - RNA, 19 nt, Artificial Sequence
  Description of Artificial Sequence: Synthetic oligonucleotide
gggcgcaaaaggucacuag

SEQ ID NO: 3081708 - RNA, 19 nt, Artificial Sequence
  Description of Artificial Sequence: Synthetic oligonucleotide
gucuacuccucuggugagc

SEQ ID NO: 3081709 - RNA, 19 nt, Artificial Sequence
  Description of Artificial Sequence: Synthetic oligonucleotide
cugcacuagguucgagauc

SEQ ID NO: 3081710 - RNA, 19 nt, Artificial Sequence
  Description of Artificial Sequence: Synthetic oligonucleotide
cuuccucuaugguguccac

SEQ ID NO: 3081711 - RNA, 19 nt, Artificial Sequence
  Description of Artificial Sequence: Synthetic oligonucleotide
cugggcuagugcaccgcug

SEQ ID NO: 3081712 - RNA, 19 nt, Artificial Sequence
  Description of Artificial Sequence: Synthetic oligonucleotide
caaaagcuggccaacucuu

SEQ ID NO: 3081713 - RNA, 19 nt, Artificial Sequence
  Description of Artificial Sequence: Synthetic oligonucleotide
cacuaggauagcugggcua

SEQ ID NO: 3081714 - RNA, 19 nt, Artificial Sequence
  Description of Artificial Sequence: Synthetic oligonucleotide
uaucgguauccugguccug

SEQ ID NO: 3081715 - RNA, 19 nt, Artificial Sequence
  Description of Artificial Sequence: Synthetic oligonucleotide
cuggugagcaaggaguugu

SEQ ID NO: 3081716 - RNA, 19 nt, Artificial Sequence
  Description of Artificial Sequence: Synthetic oligonucleotide
cuuugcuggcuccuagaua

SEQ ID NO: 3081717 - RNA, 19 nt, Artificial Sequence
  Description of Artificial Sequence: Synthetic oligonucleotide
ccaagcaaaagcuggccaa

SEQ ID NO: 3081718 - RNA, 19 nt, Artificial Sequence
  Description of Artificial Sequence: Synthetic oligonucleotide
  modified_base (10)..(10): a, c, u, g, unknown or other
gguguccacngaaaagucu

SEQ ID NO: 3081719 - RNA, 19 nt, Artificial Sequence
  Description of Artificial Sequence: Synthetic oligonucleotide
gaaucuuugcuggcuccua

SEQ ID NO: 3081720 - RNA, 19 nt, Artificial Sequence
  Description of Artificial Sequence: Synthetic oligonucleotide
aggaucuugguggcugaau

SEQ ID NO: 3081721 - RNA, 19 nt, Artificial Sequence
  Description of Artificial Sequence: Synthetic oligonucleotide
  modified_base (7)..(7): a, c, u, g, unknown or other
guccacngaaaagucuacu

SEQ ID NO: 3081722 - RNA, 19 nt, Artificial Sequence
  Description of Artificial Sequence: Synthetic oligonucleotide
gccuccaacugcguaucgg

SEQ ID NO: 3081723 - RNA, 19 nt, Artificial Sequence
  Description of Artificial Sequence: Synthetic oligonucleotide
ggcuagugcaccgcugagc

SEQ ID NO: 3081724 - RNA, 19 nt, Artificial Sequence
  Description of Artificial Sequence: Synthetic oligonucleotide
cugagccugagaccgggaa

SEQ ID NO: 3081725 - RNA, 19 nt, Artificial Sequence
  Description of Artificial Sequence: Synthetic oligonucleotide
ccaacugcguaucgguauc

SEQ ID NO: 3081726 - RNA, 19 nt, Artificial Sequence
  Description of Artificial Sequence: Synthetic oligonucleotide
gccugcacuagguucgaga

SEQ ID NO: 3081727 - RNA, 19 nt, Artificial Sequence
  Description of Artificial Sequence: Synthetic oligonucleotide
ccuuuggcauccaagcaaa

SEQ ID NO: 3081728 - RNA, 19 nt, Artificial Sequence
  Description of Artificial Sequence: Synthetic oligonucleotide
ggccaacucuuccucuaug

SEQ ID NO: 3081729 - RNA, 19 nt, Artificial Sequence
  Description of Artificial Sequence: Synthetic oligonucleotide
agguggcuuucuuuuccuu

SEQ ID NO: 3081730 - RNA, 19 nt, Artificial Sequence
  Description of Artificial Sequence: Synthetic oligonucleotide
ccucuggugagcaaggagu

SEQ ID NO: 3081731 - RNA, 19 nt, Artificial Sequence
  Description of Artificial Sequence: Synthetic oligonucleotide
uaggaucuugguggcugaa

SEQ ID NO: 3081732 - RNA, 19 nt, Artificial Sequence
  Description of Artificial Sequence: Synthetic oligonucleotide
gcgcaaaaggucacuagga

SEQ ID NO: 3081733 - RNA, 19 nt, Artificial Sequence
  Description of Artificial Sequence: Synthetic oligonucleotide
uugcuggcuccuagauaau

SEQ ID NO: 3081734 - RNA, 19 nt, Artificial Sequence
  Description of Artificial Sequence: Synthetic oligonucleotide
gucagccuccaacugcgua

SEQ ID NO: 3081735 - RNA, 19 nt, Artificial Sequence
  Description of Artificial Sequence: Synthetic oligonucleotide
cuggccaacucuuccucua

SEQ ID NO: 3081736 - RNA, 19 nt, Artificial Sequence
  Description of Artificial Sequence: Synthetic oligonucleotide
cuuuggcauccaagcaaaa

SEQ ID NO: 3081737 - RNA, 19 nt, Artificial Sequence
  Description of Artificial Sequence: Synthetic oligonucleotide
guauccugguccugcgccu

SEQ ID NO: 3081738 - RNA, 19 nt, Artificial Sequence
  Description of Artificial Sequence: Synthetic oligonucleotide
acuucacagucagccucca

SEQ ID NO: 3081739 - RNA, 19 nt, Artificial Sequence
  Description of Artificial Sequence: Synthetic oligonucleotide
cgguuuaagaacgcuuuac

SEQ ID NO: 3081740 - RNA, 19 nt, Artificial Sequence
  Description of Artificial Sequence: Synthetic oligonucleotide
gcuggcuccuagauaauaa

SEQ ID NO: 3081741 - RNA, 19 nt, Artificial Sequence
  Description of Artificial Sequence: Synthetic oligonucleotide
cagccuccaacugcguauc

SEQ ID NO: 3081742 - RNA, 19 nt, Artificial Sequence
  Description of Artificial Sequence: Synthetic oligonucleotide
agggcgcaaaaggucacua

SEQ ID NO: 3081743 - RNA, 19 nt, Artificial Sequence
  Description of Artificial Sequence: Synthetic oligonucleotide
cuccaacugcguaucggua

SEQ ID NO: 3081744 - RNA, 19 nt, Artificial Sequence
  Description of Artificial Sequence: Synthetic oligonucleotide
ccaaagcagggcgcaaaag

SEQ ID NO: 3081745 - RNA, 19 nt, Artificial Sequence
  Description of Artificial Sequence: Synthetic oligonucleotide
uccugguccugcgccugca

SEQ ID NO: 3081746 - RNA, 19 nt, Artificial Sequence
  Description of Artificial Sequence: Synthetic oligonucleotide
gguccugcgccugcacuag

SEQ ID NO: 3081747 - RNA, 19 nt, Artificial Sequence
  Description of Artificial Sequence: Synthetic oligonucleotide
gcuuuacauacuucacagu

SEQ ID NO: 3081748 - RNA, 19 nt, Artificial Sequence
  Description of Artificial Sequence: Synthetic oligonucleotide
gagcaaggaguuguagaau

SEQ ID NO: 3081749 - RNA, 19 nt, Artificial Sequence
  Description of Artificial Sequence: Synthetic oligonucleotide
cucuggugagcaaggaguu

SEQ ID NO: 3081750 - RNA, 19 nt, Artificial Sequence
  Description of Artificial Sequence: Synthetic oligonucleotide
gggcuagugcaccgcugag

SEQ ID NO: 3081751 - RNA, 19 nt, Artificial Sequence
  Description of Artificial Sequence: Synthetic oligonucleotide
accuaggaucuugguggcu

SEQ ID NO: 3081752 - RNA, 19 nt, Artificial Sequence
  Description of Artificial Sequence: Synthetic oligonucleotide
gguggcuuucuuuuccuuu

SEQ ID NO: 3081753 - RNA, 19 nt, Artificial Sequence
  Description of Artificial Sequence: Synthetic oligonucleotide
cacuagguucgagauccaa

SEQ ID NO: 3081754 - RNA, 19 nt, Artificial Sequence
  Description of Artificial Sequence: Synthetic oligonucleotide
cagguggcuuucuuuuccu

SEQ ID NO: 3081755 - RNA, 19 nt, Artificial Sequence
  Description of Artificial Sequence: Synthetic oligonucleotide
cgugugacuucaccuagga

SEQ ID NO: 3081756 - RNA, 19 nt, Artificial Sequence
  Description of Artificial Sequence: Synthetic oligonucleotide
ccugcacuagguucgagau

SEQ ID NO: 3081757 - RNA, 19 nt, Artificial Sequence
  Description of Artificial Sequence: Synthetic oligonucleotide
gugugacuucaccuaggau

SEQ ID NO: 3081758 - RNA, 19 nt, Artificial Sequence
  Description of Artificial Sequence: Synthetic oligonucleotide
ccuccaacugcguaucggu

SEQ ID NO: 3081759 - RNA, 19 nt, Artificial Sequence
  Description of Artificial Sequence: Synthetic oligonucleotide
ggcugaaucuuugcuggcu

SEQ ID NO: 3081760 - RNA, 19 nt, Artificial Sequence
  Description of Artificial Sequence: Synthetic oligonucleotide
agugcaccgcugagccuga

SEQ ID NO: 3081761 - RNA, 19 nt, Artificial Sequence
  Description of Artificial Sequence: Synthetic oligonucleotide
ugacuucaccuaggaucuu

SEQ ID NO: 3081762 - RNA, 19 nt, Artificial Sequence
  Description of Artificial Sequence: Synthetic oligonucleotide
agucagccuccaacugcgu

SEQ ID NO: 3081763 - RNA, 19 nt, Artificial Sequence
  Description of Artificial Sequence: Synthetic oligonucleotide
cuccucuggugagcaagga

SEQ ID NO: 3081764 - RNA, 19 nt, Artificial Sequence
  Description of Artificial Sequence: Synthetic oligonucleotide
cuacuccucuggugagcaa

SEQ ID NO: 3081765 - RNA, 19 nt, Artificial Sequence
  Description of Artificial Sequence: Synthetic oligonucleotide
cugguccugcgccugcacu

SEQ ID NO: 3081766 - RNA, 19 nt, Artificial Sequence
  Description of Artificial Sequence: Synthetic oligonucleotide
cuagugcaccgcugagccu

SEQ ID NO: 3081767 - RNA, 19 nt, Artificial Sequence
  Description of Artificial Sequence: Synthetic oligonucleotide
gccugagaccgggaacuac

SEQ ID NO: 3081768 - RNA, 19 nt, Artificial Sequence
  Description of Artificial Sequence: Synthetic oligonucleotide
gcagggcgcaaaaggucac

SEQ ID NO: 3081769 - RNA, 19 nt, Artificial Sequence
  Description of Artificial Sequence: Synthetic oligonucleotide
gcguaucgguauccugguc

SEQ ID NO: 3081770 - RNA, 19 nt, Artificial Sequence
  Description of Artificial Sequence: Synthetic oligonucleotide
gcuggccaacucuuccucu

SEQ ID NO: 3081771 - RNA, 19 nt, Artificial Sequence
  Description of Artificial Sequence: Synthetic oligonucleotide
agccugagaccgggaacua

SEQ ID NO: 3081772 - RNA, 19 nt, Artificial Sequence
  Description of Artificial Sequence: Synthetic oligonucleotide
cgcugagccugagaccggg

SEQ ID NO: 3081773 - RNA, 19 nt, Artificial Sequence
  Description of Artificial Sequence: Synthetic oligonucleotide
gcugggcuagugcaccgcu

SEQ ID NO: 3081774 - RNA, 19 nt, Artificial Sequence
  Description of Artificial Sequence: Synthetic oligonucleotide
  modified_base (17)..(17): a, c, u, g, unknown or other
ccucuaugguguccacnga

SEQ ID NO: 3081775 - RNA, 19 nt, Artificial Sequence
  Description of Artificial Sequence: Synthetic oligonucleotide
cgguauccugguccugcgc

SEQ ID NO: 3081776 - RNA, 19 nt, Artificial Sequence
  Description of Artificial Sequence: Synthetic oligonucleotide
ccugguccugcgccugcac

SEQ ID NO: 3081777 - RNA, 19 nt, Artificial Sequence
  Description of Artificial Sequence: Synthetic oligonucleotide
ccgcugagccugagaccgg

SEQ ID NO: 3081778 - RNA, 19 nt, Artificial Sequence
  Description of Artificial Sequence: Synthetic oligonucleotide
cuaggauagcugggcuagu

SEQ ID NO: 3081779 - RNA, 19 nt, Artificial Sequence
  Description of Artificial Sequence: Synthetic oligonucleotide
cgcaaaaggucacuaggau

SEQ ID NO: 3081780 - RNA, 19 nt, Artificial Sequence
  Description of Artificial Sequence: Synthetic oligonucleotide
gugcaccgcugagccugag

SEQ ID NO: 3081781 - RNA, 19 nt, Artificial Sequence
  Description of Artificial Sequence: Synthetic oligonucleotide
cagggcgcaaaaggucacu

SEQ ID NO: 3081782 - RNA, 19 nt, Artificial Sequence
  Description of Artificial Sequence: Synthetic oligonucleotide
gcugagccugagaccggga

SEQ ID NO: 3081783 - RNA, 19 nt, Artificial Sequence
  Description of Artificial Sequence: Synthetic oligonucleotide
gcacuagguucgagaucca

SEQ ID NO: 3081784 - RNA, 19 nt, Artificial Sequence
  Description of Artificial Sequence: Synthetic oligonucleotide
gcgccugcacuagguucga

SEQ ID NO: 3081785 - RNA, 19 nt, Artificial Sequence
  Description of Artificial Sequence: Synthetic oligonucleotide
ccugcgccugcacuagguu

SEQ ID NO: 3081786 - RNA, 19 nt, Artificial Sequence
  Description of Artificial Sequence: Synthetic oligonucleotide
cgccugcacuagguucgag

SEQ ID NO: 3081787 - RNA, 19 nt, Artificial Sequence
  Description of Artificial Sequence: Synthetic oligonucleotide
aaauguaagacuuauaguc

SEQ ID NO: 3081788 - RNA, 19 nt, Artificial Sequence
  Description of Artificial Sequence: Synthetic oligonucleotide
uuaaauguaagacuuauag

SEQ ID NO: 3081789 - RNA, 19 nt, Artificial Sequence
  Description of Artificial Sequence: Synthetic oligonucleotide
aaaaguuguguguugauuc

SEQ ID NO: 3081790 - RNA, 19 nt, Artificial Sequence
  Description of Artificial Sequence: Synthetic oligonucleotide
aauacaucauaccagaaca

SEQ ID NO: 3081791 - RNA, 19 nt, Artificial Sequence
  Description of Artificial Sequence: Synthetic oligonucleotide
aucacuacaacacaauacc

SEQ ID NO: 3081792 - RNA, 19 nt, Artificial Sequence
  Description of Artificial Sequence: Synthetic oligonucleotide
aguuaaucaacuuauaaca

SEQ ID NO: 3081793 - RNA, 19 nt, Artificial Sequence
  Description of Artificial Sequence: Synthetic oligonucleotide
ucauaccagaacaaaaucg

SEQ ID NO: 3081794 - RNA, 19 nt, Artificial Sequence
  Description of Artificial Sequence: Synthetic oligonucleotide
ugauucacaguuuugaaca

SEQ ID NO: 3081795 - RNA, 19 nt, Artificial Sequence
  Description of Artificial Sequence: Synthetic oligonucleotide
aaggcaauacaucauacca

SEQ ID NO: 3081796 - RNA, 19 nt, Artificial Sequence
  Description of Artificial Sequence: Synthetic oligonucleotide
accucauacacacacacac

SEQ ID NO: 3081797 - RNA, 19 nt, Artificial Sequence
  Description of Artificial Sequence: Synthetic oligonucleotide
cuuuucaucacuacaacac

SEQ ID NO: 3081798 - RNA, 19 nt, Artificial Sequence
  Description of Artificial Sequence: Synthetic oligonucleotide
acugcaucaccucauacac

SEQ ID NO: 3081799 - RNA, 19 nt, Artificial Sequence
  Description of Artificial Sequence: Synthetic oligonucleotide
aaucguucacugcaucacc

SEQ ID NO: 3081800 - RNA, 19 nt, Artificial Sequence
  Description of Artificial Sequence: Synthetic oligonucleotide
uuuugaacauuccagucca

SEQ ID NO: 3081801 - RNA, 19 nt, Artificial Sequence
  Description of Artificial Sequence: Synthetic oligonucleotide
uuugguuccaugccguugg

SEQ ID NO: 3081802 - RNA, 19 nt, Artificial Sequence
  Description of Artificial Sequence: Synthetic oligonucleotide
aagacuuauagucuuggga

SEQ ID NO: 3081803 - RNA, 19 nt, Artificial Sequence
  Description of Artificial Sequence: Synthetic oligonucleotide
uaaucaacuuauaacaaaa

SEQ ID NO: 3081804 - RNA, 19 nt, Artificial Sequence
  Description of Artificial Sequence: Synthetic oligonucleotide
uaucauuaaauguaagacu

SEQ ID NO: 3081805 - RNA, 19 nt, Artificial Sequence
  Description of Artificial Sequence: Synthetic oligonucleotide
gaguuaaucaacuuauaac

SEQ ID NO: 3081806 - RNA, 19 nt, Artificial Sequence
  Description of Artificial Sequence: Synthetic oligonucleotide
uccaugaucauuugguucc

SEQ ID NO: 3081807 - RNA, 19 nt, Artificial Sequence
  Description of Artificial Sequence: Synthetic oligonucleotide
agaacaaaaucguucacug

SEQ ID NO: 3081808 - RNA, 19 nt, Artificial Sequence
  Description of Artificial Sequence: Synthetic oligonucleotide
aacauuccaguccaugauc

SEQ ID NO: 3081809 - RNA, 19 nt, Artificial Sequence
  Description of Artificial Sequence: Synthetic oligonucleotide
uguguguugauucacaguu

SEQ ID NO: 3081810 - RNA, 19 nt, Artificial Sequence
  Description of Artificial Sequence: Synthetic oligonucleotide
uacaacauuguguugguca

SEQ ID NO: 3081811 - RNA, 19 nt, Artificial Sequence
  Description of Artificial Sequence: Synthetic oligonucleotide
cuaucauuaaauguaagac

SEQ ID NO: 3081812 - RNA, 19 nt, Artificial Sequence
  Description of Artificial Sequence: Synthetic oligonucleotide
ugaucauuugguuccaugc

SEQ ID NO: 3081813 - RNA, 19 nt, Artificial Sequence
  Description of Artificial Sequence: Synthetic oligonucleotide
aaaaucguucacugcauca

SEQ ID NO: 3081814 - RNA, 19 nt, Artificial Sequence
  Description of Artificial Sequence: Synthetic oligonucleotide
aaaucguucacugcaucac

SEQ ID NO: 3081815 - RNA, 19 nt, Artificial Sequence
  Description of Artificial Sequence: Synthetic oligonucleotide
aguuuugaacauuccaguc

SEQ ID NO: 3081816 - RNA, 19 nt, Artificial Sequence
  Description of Artificial Sequence: Synthetic oligonucleotide
cacuacaacacaauacccg

SEQ ID NO: 3081817 - RNA, 19 nt, Artificial Sequence
  Description of Artificial Sequence: Synthetic oligonucleotide
aucauuugguuccaugccg

SEQ ID NO: 3081818 - RNA, 19 nt, Artificial Sequence
  Description of Artificial Sequence: Synthetic oligonucleotide
uguguaggcaugcagguac

SEQ ID NO: 3081819 - RNA, 19 nt, Artificial Sequence
  Description of Artificial Sequence: Synthetic oligonucleotide
aucauaccagaacaaaauc

SEQ ID NO: 3081820 - RNA, 19 nt, Artificial Sequence
  Description of Artificial Sequence: Synthetic oligonucleotide
uacacacacacacacacac

SEQ ID NO: 3081821 - RNA, 19 nt, Artificial Sequence
  Description of Artificial Sequence: Synthetic oligonucleotide
uuaaucaacuuauaacaaa

SEQ ID NO: 3081822 - RNA, 19 nt, Artificial Sequence
  Description of Artificial Sequence: Synthetic oligonucleotide
guuuugaacauuccagucc

SEQ ID NO: 3081823 - RNA, 19 nt, Artificial Sequence
  Description of Artificial Sequence: Synthetic oligonucleotide
uaaauguaagacuuauagu

SEQ ID NO: 3081824 - RNA, 19 nt, Artificial Sequence
  Description of Artificial Sequence: Synthetic oligonucleotide
cauacacacacacacacac

SEQ ID NO: 3081825 - RNA, 19 nt, Artificial Sequence
  Description of Artificial Sequence: Synthetic oligonucleotide
agacuuauagucuugggaa

SEQ ID NO: 3081826 - RNA, 19 nt, Artificial Sequence
  Description of Artificial Sequence: Synthetic oligonucleotide
uauagucuugggaauggag

SEQ ID NO: 3081827 - RNA, 19 nt, Artificial Sequence
  Description of Artificial Sequence: Synthetic oligonucleotide
uuuucaucacuacaacaca

SEQ ID NO: 3081828 - RNA, 19 nt, Artificial Sequence
  Description of Artificial Sequence: Synthetic oligonucleotide
ugcaucaccucauacacac

SEQ ID NO: 3081829 - RNA, 19 nt, Artificial Sequence
  Description of Artificial Sequence: Synthetic oligonucleotide
agguacaacauuguguugg

SEQ ID NO: 3081830 - RNA, 19 nt, Artificial Sequence
  Description of Artificial Sequence: Synthetic oligonucleotide
aauguaagacuuauagucu

SEQ ID NO: 3081831 - RNA, 19 nt, Artificial Sequence
  Description of Artificial Sequence: Synthetic oligonucleotide
aacacaauacccgaguuaa

SEQ ID NO: 3081832 - RNA, 19 nt, Artificial Sequence
  Description of Artificial Sequence: Synthetic oligonucleotide
ucagcuuuucaucacuaca

SEQ ID NO: 3081833 - RNA, 19 nt, Artificial Sequence
  Description of Artificial Sequence: Synthetic oligonucleotide
ugaacauuccaguccauga

SEQ ID NO: 3081834 - RNA, 19 nt, Artificial Sequence
  Description of Artificial Sequence: Synthetic oligonucleotide
aaaguuguguguugauuca

SEQ ID NO: 3081835 - RNA, 19 nt, Artificial Sequence
  Description of Artificial Sequence: Synthetic oligonucleotide
uguugauucacaguuuuga

SEQ ID NO: 3081836 - RNA, 19 nt, Artificial Sequence
  Description of Artificial Sequence: Synthetic oligonucleotide
ugcagguacaacauugugu

SEQ ID NO: 3081837 - RNA, 19 nt, Artificial Sequence
  Description of Artificial Sequence: Synthetic oligonucleotide
cuaagaacccaccucgugc

SEQ ID NO: 3081838 - RNA, 19 nt, Artificial Sequence
  Description of Artificial Sequence: Synthetic oligonucleotide
uaggcaugcagguacaaca

SEQ ID NO: 3081839 - RNA, 19 nt, Artificial Sequence
  Description of Artificial Sequence: Synthetic oligonucleotide
caucacuacaacacaauac

SEQ ID NO: 3081840 - RNA, 19 nt, Artificial Sequence
  Description of Artificial Sequence: Synthetic oligonucleotide
acuacaacacaauacccga

SEQ ID NO: 3081841 - RNA, 19 nt, Artificial Sequence
  Description of Artificial Sequence: Synthetic oligonucleotide
uugauucacaguuuugaac

SEQ ID NO: 3081842 - RNA, 19 nt, Artificial Sequence
  Description of Artificial Sequence: Synthetic oligonucleotide
accagaacaaaaucguuca

SEQ ID NO: 3081843 - RNA, 19 nt, Artificial Sequence
  Description of Artificial Sequence: Synthetic oligonucleotide
auagucuugggaauggagg

SEQ ID NO: 3081844 - RNA, 19 nt, Artificial Sequence
  Description of Artificial Sequence: Synthetic oligonucleotide
gaucauuugguuccaugcc

SEQ ID NO: 3081845 - RNA, 19 nt, Artificial Sequence
  Description of Artificial Sequence: Synthetic oligonucleotide
aauacccgaguuaaucaac

SEQ ID NO: 3081846 - RNA, 19 nt, Artificial Sequence
  Description of Artificial Sequence: Synthetic oligonucleotide
acaguuuugaacauuccag

SEQ ID NO: 3081847 - RNA, 19 nt, Artificial Sequence
  Description of Artificial Sequence: Synthetic oligonucleotide
uaagacuuauagucuuggg

SEQ ID NO: 3081848 - RNA, 19 nt, Artificial Sequence
  Description of Artificial Sequence: Synthetic oligonucleotide
uaccagaacaaaaucguuc

SEQ ID NO: 3081849 - RNA, 19 nt, Artificial Sequence
  Description of Artificial Sequence: Synthetic oligonucleotide
cucauacacacacacacac

SEQ ID NO: 3081850 - RNA, 19 nt, Artificial Sequence
  Description of Artificial Sequence: Synthetic oligonucleotide
uaagaacccaccucgugcc

SEQ ID NO: 3081851 - RNA, 19 nt, Artificial Sequence
  Description of Artificial Sequence: Synthetic oligonucleotide
acaacauuguguuggucag

SEQ ID NO: 3081852 - RNA, 19 nt, Artificial Sequence
  Description of Artificial Sequence: Synthetic oligonucleotide
caauacaucauaccagaac

SEQ ID NO: 3081853 - RNA, 19 nt, Artificial Sequence
  Description of Artificial Sequence: Synthetic oligonucleotide
ucacuacaacacaauaccc

SEQ ID NO: 3081854 - RNA, 19 nt, Artificial Sequence
  Description of Artificial Sequence: Synthetic oligonucleotide
uacaacacaauacccgagu

SEQ ID NO: 3081855 - RNA, 19 nt, Artificial Sequence
  Description of Artificial Sequence: Synthetic oligonucleotide
uuucaucacuacaacacaa

SEQ ID NO: 3081856 - RNA, 19 nt, Artificial Sequence
  Description of Artificial Sequence: Synthetic oligonucleotide
uguaagacuuauagucuug

SEQ ID NO: 3081857 - RNA, 19 nt, Artificial Sequence
  Description of Artificial Sequence: Synthetic oligonucleotide
agcuuuucaucacuacaac

SEQ ID NO: 3081858 - RNA, 19 nt, Artificial Sequence
  Description of Artificial Sequence: Synthetic oligonucleotide
ucaccucauacacacacac

SEQ ID NO: 3081859 - RNA, 19 nt, Artificial Sequence
  Description of Artificial Sequence: Synthetic oligonucleotide
acaauacccgaguuaauca

SEQ ID NO: 3081860 - RNA, 19 nt, Artificial Sequence
  Description of Artificial Sequence: Synthetic oligonucleotide
aucauuaaauguaagacuu

SEQ ID NO: 3081861 - RNA, 19 nt, Artificial Sequence
  Description of Artificial Sequence: Synthetic oligonucleotide
aacauuguguuggucagcu

SEQ ID NO: 3081862 - RNA, 19 nt, Artificial Sequence
  Description of Artificial Sequence: Synthetic oligonucleotide
aggagcuaucauuaaaugu

SEQ ID NO: 3081863 - RNA, 19 nt, Artificial Sequence
  Description of Artificial Sequence: Synthetic oligonucleotide
ugggaauggagguugggug

SEQ ID NO: 3081864 - RNA, 19 nt, Artificial Sequence
  Description of Artificial Sequence: Synthetic oligonucleotide
caaggcaauacaucauacc

SEQ ID NO: 3081865 - RNA, 19 nt, Artificial Sequence
  Description of Artificial Sequence: Synthetic oligonucleotide
uguguugauucacaguuuu

SEQ ID NO: 3081866 - RNA, 19 nt, Artificial Sequence
  Description of Artificial Sequence: Synthetic oligonucleotide
cacacacacacacacacac

SEQ ID NO: 3081867 - RNA, 19 nt, Artificial Sequence
  Description of Artificial Sequence: Synthetic oligonucleotide
aaguuguguguugauucac

SEQ ID NO: 3081868 - RNA, 19 nt, Artificial Sequence
  Description of Artificial Sequence: Synthetic oligonucleotide
gaacaaaaucguucacugc

SEQ ID NO: 3081869 - RNA, 19 nt, Artificial Sequence
  Description of Artificial Sequence: Synthetic oligonucleotide
caucaccucauacacacac

SEQ ID NO: 3081870 - RNA, 19 nt, Artificial Sequence
  Description of Artificial Sequence: Synthetic oligonucleotide
guaagacuuauagucuugg

SEQ ID NO: 3081871 - RNA, 19 nt, Artificial Sequence
  Description of Artificial Sequence: Synthetic oligonucleotide
guuguguguugauucacag

SEQ ID NO: 3081872 - RNA, 19 nt, Artificial Sequence
  Description of Artificial Sequence: Synthetic oligonucleotide
cuuauagucuugggaaugg

SEQ ID NO: 3081873 - RNA, 19 nt, Artificial Sequence
  Description of Artificial Sequence: Synthetic oligonucleotide
uagucuugggaauggaggu

SEQ ID NO: 3081874 - RNA, 19 nt, Artificial Sequence
  Description of Artificial Sequence: Synthetic oligonucleotide
uggagguuggguguguagg

SEQ ID NO: 3081875 - RNA, 19 nt, Artificial Sequence
  Description of Artificial Sequence: Synthetic oligonucleotide
uguggcaaggcaauacauc

SEQ ID NO: 3081876 - RNA, 19 nt, Artificial Sequence
  Description of Artificial Sequence: Synthetic oligonucleotide
ucaucacuacaacacaaua

SEQ ID NO: 3081877 - RNA, 19 nt, Artificial Sequence
  Description of Artificial Sequence: Synthetic oligonucleotide
ucauuugguuccaugccgu

SEQ ID NO: 3081878 - RNA, 19 nt, Artificial Sequence
  Description of Artificial Sequence: Synthetic oligonucleotide
ucauacacacacacacaca

SEQ ID NO: 3081879 - RNA, 19 nt, Artificial Sequence
  Description of Artificial Sequence: Synthetic oligonucleotide
uguuggucagcuuuucauc

SEQ ID NO: 3081880 - RNA, 19 nt, Artificial Sequence
  Description of Artificial Sequence: Synthetic oligonucleotide
uuccaguccaugaucauuu

SEQ ID NO: 3081881 - RNA, 19 nt, Artificial Sequence
  Description of Artificial Sequence: Synthetic oligonucleotide
caugccguugggcaugugg

SEQ ID NO: 3081882 - RNA, 19 nt, Artificial Sequence
  Description of Artificial Sequence: Synthetic oligonucleotide
gcuaucauuaaauguaaga

SEQ ID NO: 3081883 - RNA, 19 nt, Artificial Sequence
  Description of Artificial Sequence: Synthetic oligonucleotide
augaucauuugguuccaug

SEQ ID NO: 3081884 - RNA, 19 nt, Artificial Sequence
  Description of Artificial Sequence: Synthetic oligonucleotide
ucauuaaauguaagacuua

SEQ ID NO: 3081885 - RNA, 19 nt, Artificial Sequence
  Description of Artificial Sequence: Synthetic oligonucleotide
uugggcauguggcaaggca

SEQ ID NO: 3081886 - RNA, 19 nt, Artificial Sequence
  Description of Artificial Sequence: Synthetic oligonucleotide
guuggucagcuuuucauca

SEQ ID NO: 3081887 - RNA, 19 nt, Artificial Sequence
  Description of Artificial Sequence: Synthetic oligonucleotide
uggguguguaggcaugcag

SEQ ID NO: 3081888 - RNA, 19 nt, Artificial Sequence
  Description of Artificial Sequence: Synthetic oligonucleotide
acuuauagucuugggaaug

SEQ ID NO: 3081889 - RNA, 19 nt, Artificial Sequence
  Description of Artificial Sequence: Synthetic oligonucleotide
ucuugggaauggagguugg

SEQ ID NO: 3081890 - RNA, 19 nt, Artificial Sequence
  Description of Artificial Sequence: Synthetic oligonucleotide
ucacaguuuugaacauucc

SEQ ID NO: 3081891 - RNA, 19 nt, Artificial Sequence
  Description of Artificial Sequence: Synthetic oligonucleotide
uugaacauuccaguccaug

SEQ ID NO: 3081892 - RNA, 19 nt, Artificial Sequence
  Description of Artificial Sequence: Synthetic oligonucleotide
uacaucauaccagaacaaa

SEQ ID NO: 3081893 - RNA, 19 nt, Artificial Sequence
  Description of Artificial Sequence: Synthetic oligonucleotide
auguaagacuuauagucuu

SEQ ID NO: 3081894 - RNA, 19 nt, Artificial Sequence
  Description of Artificial Sequence: Synthetic oligonucleotide
uguguuggucagcuuuuca

SEQ ID NO: 3081895 - RNA, 19 nt, Artificial Sequence
  Description of Artificial Sequence: Synthetic oligonucleotide
cacaauacccgaguuaauc

SEQ ID NO: 3081896 - RNA, 19 nt, Artificial Sequence
  Description of Artificial Sequence: Synthetic oligonucleotide
cauaccagaacaaaaucgu

SEQ ID NO: 3081897 - RNA, 19 nt, Artificial Sequence
  Description of Artificial Sequence: Synthetic oligonucleotide
augccguugggcauguggc

SEQ ID NO: 3081898 - RNA, 19 nt, Artificial Sequence
  Description of Artificial Sequence: Synthetic oligonucleotide
cuacaacacaauacccgag

SEQ ID NO: 3081899 - RNA, 19 nt, Artificial Sequence
  Description of Artificial Sequence: Synthetic oligonucleotide
ugggcauguggcaaggcaa

SEQ ID NO: 3081900 - RNA, 19 nt, Artificial Sequence
  Description of Artificial Sequence: Synthetic oligonucleotide
caggagcuaucauuaaaug

SEQ ID NO: 3081901 - RNA, 19 nt, Artificial Sequence
  Description of Artificial Sequence: Synthetic oligonucleotide
ggcaauacaucauaccaga

SEQ ID NO: 3081902 - RNA, 19 nt, Artificial Sequence
  Description of Artificial Sequence: Synthetic oligonucleotide
cacaguuuugaacauucca

SEQ ID NO: 3081903 - RNA, 19 nt, Artificial Sequence
  Description of Artificial Sequence: Synthetic oligonucleotide
uuguguguugauucacagu

SEQ ID NO: 3081904 - RNA, 19 nt, Artificial Sequence
  Description of Artificial Sequence: Synthetic oligonucleotide
guuaaucaacuuauaacaa

SEQ ID NO: 3081905 - RNA, 19 nt, Artificial Sequence
  Description of Artificial Sequence: Synthetic oligonucleotide
aggcaauacaucauaccag

SEQ ID NO: 3081906 - RNA, 19 nt, Artificial Sequence
  Description of Artificial Sequence: Synthetic oligonucleotide
uggucagcuuuucaucacu

SEQ ID NO: 3081907 - RNA, 19 nt, Artificial Sequence
  Description of Artificial Sequence: Synthetic oligonucleotide
ggagcuaucauuaaaugua

SEQ ID NO: 3081908 - RNA, 19 nt, Artificial Sequence
  Description of Artificial Sequence: Synthetic oligonucleotide
guccaugaucauuugguuc

SEQ ID NO: 3081909 - RNA, 19 nt, Artificial Sequence
  Description of Artificial Sequence: Synthetic oligonucleotide
augcagguacaacauugug

SEQ ID NO: 3081910 - RNA, 19 nt, Artificial Sequence
  Description of Artificial Sequence: Synthetic oligonucleotide
guugauucacaguuuugaa

SEQ ID NO: 3081911 - RNA, 19 nt, Artificial Sequence
  Description of Artificial Sequence: Synthetic oligonucleotide
uugggaauggagguugggu

SEQ ID NO: 3081912 - RNA, 19 nt, Artificial Sequence
  Description of Artificial Sequence: Synthetic oligonucleotide
cagcuuuucaucacuacaa

SEQ ID NO: 3081913 - RNA, 19 nt, Artificial Sequence
  Description of Artificial Sequence: Synthetic oligonucleotide
acauuccaguccaugauca

SEQ ID NO: 3081914 - RNA, 19 nt, Artificial Sequence
  Description of Artificial Sequence: Synthetic oligonucleotide
ucacugcaucaccucauac

SEQ ID NO: 3081915 - RNA, 19 nt, Artificial Sequence
  Description of Artificial Sequence: Synthetic oligonucleotide
acaucauaccagaacaaaa

SEQ ID NO: 3081916 - RNA, 19 nt, Artificial Sequence
  Description of Artificial Sequence: Synthetic oligonucleotide
gaacccaccucgugccagg

SEQ ID NO: 3081917 - RNA, 19 nt, Artificial Sequence
  Description of Artificial Sequence: Synthetic oligonucleotide
cacugcaucaccucauaca

SEQ ID NO: 3081918 - RNA, 19 nt, Artificial Sequence
  Description of Artificial Sequence: Synthetic oligonucleotide
caaaaucguucacugcauc

SEQ ID NO: 3081919 - RNA, 19 nt, Artificial Sequence
  Description of Artificial Sequence: Synthetic oligonucleotide
acaacacaauacccgaguu

SEQ ID NO: 3081920 - RNA, 19 nt, Artificial Sequence
  Description of Artificial Sequence: Synthetic oligonucleotide
uuauagucuugggaaugga

SEQ ID NO: 3081921 - RNA, 19 nt, Artificial Sequence
  Description of Artificial Sequence: Synthetic oligonucleotide
caucauaccagaacaaaau

SEQ ID NO: 3081922 - RNA, 19 nt, Artificial Sequence
  Description of Artificial Sequence: Synthetic oligonucleotide
gucuugggaauggagguug

SEQ ID NO: 3081923 - RNA, 19 nt, Artificial Sequence
  Description of Artificial Sequence: Synthetic oligonucleotide
gguuccaugccguugggca

SEQ ID NO: 3081924 - RNA, 19 nt, Artificial Sequence
  Description of Artificial Sequence: Synthetic oligonucleotide
uuggucagcuuuucaucac

SEQ ID NO: 3081925 - RNA, 19 nt, Artificial Sequence
  Description of Artificial Sequence: Synthetic oligonucleotide
aguccaugaucauuugguu

SEQ ID NO: 3081926 - RNA, 19 nt, Artificial Sequence
  Description of Artificial Sequence: Synthetic oligonucleotide
acccgaguuaaucaacuua

SEQ ID NO: 3081927 - RNA, 19 nt, Artificial Sequence
  Description of Artificial Sequence: Synthetic oligonucleotide
auuugguuccaugccguug

SEQ ID NO: 3081928 - RNA, 19 nt, Artificial Sequence
  Description of Artificial Sequence: Synthetic oligonucleotide
auggagguuggguguguag

SEQ ID NO: 3081929 - RNA, 19 nt, Artificial Sequence
  Description of Artificial Sequence: Synthetic oligonucleotide
uugguuccaugccguuggg

SEQ ID NO: 3081930 - RNA, 19 nt, Artificial Sequence
  Description of Artificial Sequence: Synthetic oligonucleotide
ggguguguaggcaugcagg

SEQ ID NO: 3081931 - RNA, 19 nt, Artificial Sequence
  Description of Artificial Sequence: Synthetic oligonucleotide
cauguggcaaggcaauaca

SEQ ID NO: 3081932 - RNA, 19 nt, Artificial Sequence
  Description of Artificial Sequence: Synthetic oligonucleotide
uucacugcaucaccucaua

SEQ ID NO: 3081933 - RNA, 19 nt, Artificial Sequence
  Description of Artificial Sequence: Synthetic oligonucleotide
gucagcuuuucaucacuac

SEQ ID NO: 3081934 - RNA, 19 nt, Artificial Sequence
  Description of Artificial Sequence: Synthetic oligonucleotide
gcaugcagguacaacauug

SEQ ID NO: 3081935 - RNA, 19 nt, Artificial Sequence
  Description of Artificial Sequence: Synthetic oligonucleotide
auacccgaguuaaucaacu

SEQ ID NO: 3081936 - RNA, 19 nt, Artificial Sequence
  Description of Artificial Sequence: Synthetic oligonucleotide
caauacccgaguuaaucaa

SEQ ID NO: 3081937 - RNA, 19 nt, Artificial Sequence
  Description of Artificial Sequence: Synthetic oligonucleotide
aagaacccaccucgugcca

SEQ ID NO: 3081938 - RNA, 19 nt, Artificial Sequence
  Description of Artificial Sequence: Synthetic oligonucleotide
agcuaucauuaaauguaag

SEQ ID NO: 3081939 - RNA, 19 nt, Artificial Sequence
  Description of Artificial Sequence: Synthetic oligonucleotide
aguuguguguugauucaca

SEQ ID NO: 3081940 - RNA, 19 nt, Artificial Sequence
  Description of Artificial Sequence: Synthetic oligonucleotide
caguccaugaucauuuggu

SEQ ID NO: 3081941 - RNA, 19 nt, Artificial Sequence
  Description of Artificial Sequence: Synthetic oligonucleotide
gagcuaucauuaaauguaa

SEQ ID NO: 3081942 - RNA, 19 nt, Artificial Sequence
  Description of Artificial Sequence: Synthetic oligonucleotide
uccaguccaugaucauuug

SEQ ID NO: 3081943 - RNA, 19 nt, Artificial Sequence
  Description of Artificial Sequence: Synthetic oligonucleotide
auuaaauguaagacuuaua

SEQ ID NO: 3081944 - RNA, 19 nt, Artificial Sequence
  Description of Artificial Sequence: Synthetic oligonucleotide
uggcaaggcaauacaucau

SEQ ID NO: 3081945 - RNA, 19 nt, Artificial Sequence
  Description of Artificial Sequence: Synthetic oligonucleotide
ggagguuggguguguaggc

SEQ ID NO: 3081946 - RNA, 19 nt, Artificial Sequence
  Description of Artificial Sequence: Synthetic oligonucleotide
gaacauuccaguccaugau

SEQ ID NO: 3081947 - RNA, 19 nt, Artificial Sequence
  Description of Artificial Sequence: Synthetic oligonucleotide
caguuuugaacauuccagu

SEQ ID NO: 3081948 - RNA, 19 nt, Artificial Sequence
  Description of Artificial Sequence: Synthetic oligonucleotide
uuugaacauuccaguccau

SEQ ID NO: 3081949 - RNA, 19 nt, Artificial Sequence
  Description of Artificial Sequence: Synthetic oligonucleotide
ucguucacugcaucaccuc

SEQ ID NO: 3081950 - RNA, 19 nt, Artificial Sequence
  Description of Artificial Sequence: Synthetic oligonucleotide
cauuaaauguaagacuuau

SEQ ID NO: 3081951 - RNA, 19 nt, Artificial Sequence
  Description of Artificial Sequence: Synthetic oligonucleotide
acaaaaucguucacugcau

SEQ ID NO: 3081952 - RNA, 19 nt, Artificial Sequence
  Description of Artificial Sequence: Synthetic oligonucleotide
aucguucacugcaucaccu

SEQ ID NO: 3081953 - RNA, 19 nt, Artificial Sequence
  Description of Artificial Sequence: Synthetic oligonucleotide
uuccaugccguugggcaug

SEQ ID NO: 3081954 - RNA, 19 nt, Artificial Sequence
  Description of Artificial Sequence: Synthetic oligonucleotide
agaacccaccucgugccag

SEQ ID NO: 3081955 - RNA, 19 nt, Artificial Sequence
  Description of Artificial Sequence: Synthetic oligonucleotide
auacaucauaccagaacaa

SEQ ID NO: 3081956 - RNA, 19 nt, Artificial Sequence
  Description of Artificial Sequence: Synthetic oligonucleotide
gacuuauagucuugggaau

SEQ ID NO: 3081957 - RNA, 19 nt, Artificial Sequence
  Description of Artificial Sequence: Synthetic oligonucleotide
ugccguugggcauguggca

SEQ ID NO: 3081958 - RNA, 19 nt, Artificial Sequence
  Description of Artificial Sequence: Synthetic oligonucleotide
guuggguguguaggcaugc

SEQ ID NO: 3081959 - RNA, 19 nt, Artificial Sequence
  Description of Artificial Sequence: Synthetic oligonucleotide
auuccaguccaugaucauu

SEQ ID NO: 3081960 - RNA, 19 nt, Artificial Sequence
  Description of Artificial Sequence: Synthetic oligonucleotide
cauuguguuggucagcuuu

SEQ ID NO: 3081961 - RNA, 19 nt, Artificial Sequence
  Description of Artificial Sequence: Synthetic oligonucleotide
gcagguacaacauuguguu

SEQ ID NO: 3081962 - RNA, 19 nt, Artificial Sequence
  Description of Artificial Sequence: Synthetic oligonucleotide
caacauuguguuggucagc

SEQ ID NO: 3081963 - RNA, 19 nt, Artificial Sequence
  Description of Artificial Sequence: Synthetic oligonucleotide
cagguacaacauuguguug

SEQ ID NO: 3081964 - RNA, 19 nt, Artificial Sequence
  Description of Artificial Sequence: Synthetic oligonucleotide
cagaacaaaaucguucacu

SEQ ID NO: 3081965 - RNA, 19 nt, Artificial Sequence
  Description of Artificial Sequence: Synthetic oligonucleotide
gauucacaguuuugaacau

SEQ ID NO: 3081966 - RNA, 19 nt, Artificial Sequence
  Description of Artificial Sequence: Synthetic oligonucleotide
ccaguccaugaucauuugg

SEQ ID NO: 3081967 - RNA, 19 nt, Artificial Sequence
  Description of Artificial Sequence: Synthetic oligonucleotide
guaggcaugcagguacaac

SEQ ID NO: 3081968 - RNA, 19 nt, Artificial Sequence
  Description of Artificial Sequence: Synthetic oligonucleotide
auacacacacacacacaca

SEQ ID NO: 3081969 - RNA, 19 nt, Artificial Sequence
  Description of Artificial Sequence: Synthetic oligonucleotide
caacacaauacccgaguua

SEQ ID NO: 3081970 - RNA, 19 nt, Artificial Sequence
  Description of Artificial Sequence: Synthetic oligonucleotide
aauggagguugggugugua

SEQ ID NO: 3081971 - RNA, 19 nt, Artificial Sequence
  Description of Artificial Sequence: Synthetic oligonucleotide
auucacaguuuugaacauu

SEQ ID NO: 3081972 - RNA, 19 nt, Artificial Sequence
  Description of Artificial Sequence: Synthetic oligonucleotide
guguuggucagcuuuucau

SEQ ID NO: 3081973 - RNA, 19 nt, Artificial Sequence
  Description of Artificial Sequence: Synthetic oligonucleotide
uacccgaguuaaucaacuu

SEQ ID NO: 3081974 - RNA, 19 nt, Artificial Sequence
  Description of Artificial Sequence: Synthetic oligonucleotide
ggcaaggcaauacaucaua

SEQ ID NO: 3081975 - RNA, 19 nt, Artificial Sequence
  Description of Artificial Sequence: Synthetic oligonucleotide
gagguuggguguguaggca

SEQ ID NO: 3081976 - RNA, 19 nt, Artificial Sequence
  Description of Artificial Sequence: Synthetic oligonucleotide
auaccagaacaaaaucguu

SEQ ID NO: 3081977 - RNA, 19 nt, Artificial Sequence
  Description of Artificial Sequence: Synthetic oligonucleotide
ugguuccaugccguugggc

SEQ ID NO: 3081978 - RNA, 19 nt, Artificial Sequence
  Description of Artificial Sequence: Synthetic oligonucleotide
cccaccucgugccaggagc

SEQ ID NO: 3081979 - RNA, 19 nt, Artificial Sequence
  Description of Artificial Sequence: Synthetic oligonucleotide
uguaggcaugcagguacaa

SEQ ID NO: 3081980 - RNA, 19 nt, Artificial Sequence
  Description of Artificial Sequence: Synthetic oligonucleotide
caugcagguacaacauugu

SEQ ID NO: 3081981 - RNA, 19 nt, Artificial Sequence
  Description of Artificial Sequence: Synthetic oligonucleotide
aucaccucauacacacaca

SEQ ID NO: 3081982 - RNA, 19 nt, Artificial Sequence
  Description of Artificial Sequence: Synthetic oligonucleotide
gcaaggcaauacaucauac

SEQ ID NO: 3081983 - RNA, 19 nt, Artificial Sequence
  Description of Artificial Sequence: Synthetic oligonucleotide
auguggcaaggcaauacau

SEQ ID NO: 3081984 - RNA, 19 nt, Artificial Sequence
  Description of Artificial Sequence: Synthetic oligonucleotide
ccuaagaacccaccucgug

SEQ ID NO: 3081985 - RNA, 19 nt, Artificial Sequence
  Description of Artificial Sequence: Synthetic oligonucleotide
uuguguuggucagcuuuuc

SEQ ID NO: 3081986 - RNA, 19 nt, Artificial Sequence
  Description of Artificial Sequence: Synthetic oligonucleotide
caccucauacacacacaca

SEQ ID NO: 3081987 - RNA, 19 nt, Artificial Sequence
  Description of Artificial Sequence: Synthetic oligonucleotide
ugccaggagcuaucauuaa

SEQ ID NO: 3081988 - RNA, 19 nt, Artificial Sequence
  Description of Artificial Sequence: Synthetic oligonucleotide
ggaauggagguugggugug

SEQ ID NO: 3081989 - RNA, 19 nt, Artificial Sequence
  Description of Artificial Sequence: Synthetic oligonucleotide
gugccaggagcuaucauua

SEQ ID NO: 3081990 - RNA, 19 nt, Artificial Sequence
  Description of Artificial Sequence: Synthetic oligonucleotide
acacacacacacacacaca

SEQ ID NO: 3081991 - RNA, 19 nt, Artificial Sequence
  Description of Artificial Sequence: Synthetic oligonucleotide
aggcaugcagguacaacau

SEQ ID NO: 3081992 - RNA, 19 nt, Artificial Sequence
  Description of Artificial Sequence: Synthetic oligonucleotide
cgaguuaaucaacuuauaa

SEQ ID NO: 3081993 - RNA, 19 nt, Artificial Sequence
  Description of Artificial Sequence: Synthetic oligonucleotide
gguguguaggcaugcaggu

SEQ ID NO: 3081994 - RNA, 19 nt, Artificial Sequence
  Description of Artificial Sequence: Synthetic oligonucleotide
gcauguggcaaggcaauac

SEQ ID NO: 3081995 - RNA, 19 nt, Artificial Sequence
  Description of Artificial Sequence: Synthetic oligonucleotide
cugcaucaccucauacaca

SEQ ID NO: 3081996 - RNA, 19 nt, Artificial Sequence
  Description of Artificial Sequence: Synthetic oligonucleotide
agucuugggaauggagguu

SEQ ID NO: 3081997 - RNA, 19 nt, Artificial Sequence
  Description of Artificial Sequence: Synthetic oligonucleotide
ccagaacaaaaucguucac

SEQ ID NO: 3081998 - RNA, 19 nt, Artificial Sequence
  Description of Artificial Sequence: Synthetic oligonucleotide
gggaauggagguugggugu

SEQ ID NO: 3081999 - RNA, 19 nt, Artificial Sequence
  Description of Artificial Sequence: Synthetic oligonucleotide
acccaccucgugccaggag

SEQ ID NO: 3082000 - RNA, 19 nt, Artificial Sequence
  Description of Artificial Sequence: Synthetic oligonucleotide
gguacaacauuguguuggu

SEQ ID NO: 3082001 - RNA, 19 nt, Artificial Sequence
  Description of Artificial Sequence: Synthetic oligonucleotide
guacaacauuguguugguc

SEQ ID NO: 3082002 - RNA, 19 nt, Artificial Sequence
  Description of Artificial Sequence: Synthetic oligonucleotide
acauuguguuggucagcuu

SEQ ID NO: 3082003 - RNA, 19 nt, Artificial Sequence
  Description of Artificial Sequence: Synthetic oligonucleotide
gguuggguguguaggcaug

SEQ ID NO: 3082004 - RNA, 19 nt, Artificial Sequence
  Description of Artificial Sequence: Synthetic oligonucleotide
ucgugccaggagcuaucau

SEQ ID NO: 3082005 - RNA, 19 nt, Artificial Sequence
  Description of Artificial Sequence: Synthetic oligonucleotide
aacccaccucgugccagga

SEQ ID NO: 3082006 - RNA, 19 nt, Artificial Sequence
  Description of Artificial Sequence: Synthetic oligonucleotide
gccaggagcuaucauuaaa

SEQ ID NO: 3082007 - RNA, 19 nt, Artificial Sequence
  Description of Artificial Sequence: Synthetic oligonucleotide
ccucauacacacacacaca

SEQ ID NO: 3082008 - RNA, 19 nt, Artificial Sequence
  Description of Artificial Sequence: Synthetic oligonucleotide
cccgaguuaaucaacuuau

SEQ ID NO: 3082009 - RNA, 19 nt, Artificial Sequence
  Description of Artificial Sequence: Synthetic oligonucleotide
accucgugccaggagcuau

SEQ ID NO: 3082010 - RNA, 19 nt, Artificial Sequence
  Description of Artificial Sequence: Synthetic oligonucleotide
ccaggagcuaucauuaaau

SEQ ID NO: 3082011 - RNA, 19 nt, Artificial Sequence
  Description of Artificial Sequence: Synthetic oligonucleotide
uccaugccguugggcaugu

SEQ ID NO: 3082012 - RNA, 19 nt, Artificial Sequence
  Description of Artificial Sequence: Synthetic oligonucleotide
guguaggcaugcagguaca

SEQ ID NO: 3082013 - RNA, 19 nt, Artificial Sequence
  Description of Artificial Sequence: Synthetic oligonucleotide
guuccaugccguugggcau

SEQ ID NO: 3082014 - RNA, 19 nt, Artificial Sequence
  Description of Artificial Sequence: Synthetic oligonucleotide
acacaauacccgaguuaau

SEQ ID NO: 3082015 - RNA, 19 nt, Artificial Sequence
  Description of Artificial Sequence: Synthetic oligonucleotide
ccguugggcauguggcaag

SEQ ID NO: 3082016 - RNA, 19 nt, Artificial Sequence
  Description of Artificial Sequence: Synthetic oligonucleotide
gcaauacaucauaccagaa

SEQ ID NO: 3082017 - RNA, 19 nt, Artificial Sequence
  Description of Artificial Sequence: Synthetic oligonucleotide
guucacugcaucaccucau

SEQ ID NO: 3082018 - RNA, 19 nt, Artificial Sequence
  Description of Artificial Sequence: Synthetic oligonucleotide
cucgugccaggagcuauca

SEQ ID NO: 3082019 - RNA, 19 nt, Artificial Sequence
  Description of Artificial Sequence: Synthetic oligonucleotide
gaauggagguugggugugu

SEQ ID NO: 3082020 - RNA, 19 nt, Artificial Sequence
  Description of Artificial Sequence: Synthetic oligonucleotide
cguucacugcaucaccuca

SEQ ID NO: 3082021 - RNA, 19 nt, Artificial Sequence
  Description of Artificial Sequence: Synthetic oligonucleotide
guguguaggcaugcaggua

SEQ ID NO: 3082022 - RNA, 19 nt, Artificial Sequence
  Description of Artificial Sequence: Synthetic oligonucleotide
ggucagcuuuucaucacua

SEQ ID NO: 3082023 - RNA, 19 nt, Artificial Sequence
  Description of Artificial Sequence: Synthetic oligonucleotide
cauuccaguccaugaucau

SEQ ID NO: 3082024 - RNA, 19 nt, Artificial Sequence
  Description of Artificial Sequence: Synthetic oligonucleotide
ccucgugccaggagcuauc

SEQ ID NO: 3082025 - RNA, 19 nt, Artificial Sequence
  Description of Artificial Sequence: Synthetic oligonucleotide
cauuugguuccaugccguu

SEQ ID NO: 3082026 - RNA, 19 nt, Artificial Sequence
  Description of Artificial Sequence: Synthetic oligonucleotide
cguugggcauguggcaagg

SEQ ID NO: 3082027 - RNA, 19 nt, Artificial Sequence
  Description of Artificial Sequence: Synthetic oligonucleotide
guguguugauucacaguuu

SEQ ID NO: 3082028 - RNA, 19 nt, Artificial Sequence
  Description of Artificial Sequence: Synthetic oligonucleotide
ccgaguuaaucaacuuaua

SEQ ID NO: 3082029 - RNA, 19 nt, Artificial Sequence
  Description of Artificial Sequence: Synthetic oligonucleotide
gccguugggcauguggcaa

SEQ ID NO: 3082030 - RNA, 19 nt, Artificial Sequence
  Description of Artificial Sequence: Synthetic oligonucleotide
cgugccaggagcuaucauu

SEQ ID NO: 3082031 - RNA, 19 nt, Artificial Sequence
  Description of Artificial Sequence: Synthetic oligonucleotide
ggcaugcagguacaacauu

SEQ ID NO: 3082032 - RNA, 19 nt, Artificial Sequence
  Description of Artificial Sequence: Synthetic oligonucleotide
ccaugaucauuugguucca

SEQ ID NO: 3082033 - RNA, 19 nt, Artificial Sequence
  Description of Artificial Sequence: Synthetic oligonucleotide
caugaucauuugguuccau

SEQ ID NO: 3082034 - RNA, 19 nt, Artificial Sequence
  Description of Artificial Sequence: Synthetic oligonucleotide
gcaucaccucauacacaca

SEQ ID NO: 3082035 - RNA, 19 nt, Artificial Sequence
  Description of Artificial Sequence: Synthetic oligonucleotide
ggcauguggcaaggcaaua

SEQ ID NO: 3082036 - RNA, 19 nt, Artificial Sequence
  Description of Artificial Sequence: Synthetic oligonucleotide
gggcauguggcaaggcaau

SEQ ID NO: 3082037 - RNA, 19 nt, Artificial Sequence
  Description of Artificial Sequence: Synthetic oligonucleotide
ccaccucgugccaggagcu

SEQ ID NO: 3082038 - RNA, 19 nt, Artificial Sequence
  Description of Artificial Sequence: Synthetic oligonucleotide
caccucgugccaggagcua

SEQ ID NO: 3082039 - RNA, 19 nt, Artificial Sequence
  Description of Artificial Sequence: Synthetic oligonucleotide
ccaugccguugggcaugug

SEQ ID NO: 3082040 - RNA, 19 nt, Artificial Sequence
  Description of Artificial Sequence: Synthetic oligonucleotide
aauacaacccucuauccgc

SEQ ID NO: 3082041 - RNA, 19 nt, Artificial Sequence
  Description of Artificial Sequence: Synthetic oligonucleotide
aauauugucuccuuucaac

SEQ ID NO: 3082042 - RNA, 19 nt, Artificial Sequence
  Description of Artificial Sequence: Synthetic oligonucleotide
ucuccuuucaacaugaucc

SEQ ID NO: 3082043 - RNA, 19 nt, Artificial Sequence
  Description of Artificial Sequence: Synthetic oligonucleotide
cugaagaugagguugaugg

SEQ ID NO: 3082044 - RNA, 19 nt, Artificial Sequence
  Description of Artificial Sequence: Synthetic oligonucleotide
uuuacuugcucauauagcc

SEQ ID NO: 3082045 - RNA, 19 nt, Artificial Sequence
  Description of Artificial Sequence: Synthetic oligonucleotide
ucuaauacgagguucaugu

SEQ ID NO: 3082046 - RNA, 19 nt, Artificial Sequence
  Description of Artificial Sequence: Synthetic oligonucleotide
aaagccaauaauacaaccc

SEQ ID NO: 3082047 - RNA, 19 nt, Artificial Sequence
  Description of Artificial Sequence: Synthetic oligonucleotide
uauuuacuugcucauauag

SEQ ID NO: 3082048 - RNA, 19 nt, Artificial Sequence
  Description of Artificial Sequence: Synthetic oligonucleotide
uucugcaucaucuaauacg

SEQ ID NO: 3082049 - RNA, 19 nt, Artificial Sequence
  Description of Artificial Sequence: Synthetic oligonucleotide
uuuagagugaaucucuucu

SEQ ID NO: 3082050 - RNA, 19 nt, Artificial Sequence
  Description of Artificial Sequence: Synthetic oligonucleotide
cuugacuuguuuuagagug

SEQ ID NO: 3082051 - RNA, 19 nt, Artificial Sequence
  Description of Artificial Sequence: Synthetic oligonucleotide
auaauacaacccucuaucc

SEQ ID NO: 3082052 - RNA, 19 nt, Artificial Sequence
  Description of Artificial Sequence: Synthetic oligonucleotide
uaauacaacccucuauccg

SEQ ID NO: 3082053 - RNA, 19 nt, Artificial Sequence
  Description of Artificial Sequence: Synthetic oligonucleotide
ugcaucaucuaauacgagg

SEQ ID NO: 3082054 - RNA, 19 nt, Artificial Sequence
  Description of Artificial Sequence: Synthetic oligonucleotide
aacacuuuggagcagagua

SEQ ID NO: 3082055 - RNA, 19 nt, Artificial Sequence
  Description of Artificial Sequence: Synthetic oligonucleotide
ucaucaaagccaauaauac

SEQ ID NO: 3082056 - RNA, 19 nt, Artificial Sequence
  Description of Artificial Sequence: Synthetic oligonucleotide
ucugcaucaucuaauacga

SEQ ID NO: 3082057 - RNA, 19 nt, Artificial Sequence
  Description of Artificial Sequence: Synthetic oligonucleotide
agcagaguaauauugucuc

SEQ ID NO: 3082058 - RNA, 19 nt, Artificial Sequence
  Description of Artificial Sequence: Synthetic oligonucleotide
acuuguuuuagagugaauc

SEQ ID NO: 3082059 - RNA, 19 nt, Artificial Sequence
  Description of Artificial Sequence: Synthetic oligonucleotide
aagccaauaauacaacccu

SEQ ID NO: 3082060 - RNA, 19 nt, Artificial Sequence
  Description of Artificial Sequence: Synthetic oligonucleotide
uuuugcagguaucugaaga

SEQ ID NO: 3082061 - RNA, 19 nt, Artificial Sequence
  Description of Artificial Sequence: Synthetic oligonucleotide
gaauccgagaccuauuuug

SEQ ID NO: 3082062 - RNA, 19 nt, Artificial Sequence
  Description of Artificial Sequence: Synthetic oligonucleotide
acuaguuggaaacacuuug

SEQ ID NO: 3082063 - RNA, 19 nt, Artificial Sequence
  Description of Artificial Sequence: Synthetic oligonucleotide
uguuuuagagugaaucucu

SEQ ID NO: 3082064 - RNA, 19 nt, Artificial Sequence
  Description of Artificial Sequence: Synthetic oligonucleotide
ugcaccaucaccuucugca

SEQ ID NO: 3082065 - RNA, 19 nt, Artificial Sequence
  Description of Artificial Sequence: Synthetic oligonucleotide
uaauacgagguucauguac

SEQ ID NO: 3082066 - RNA, 19 nt, Artificial Sequence
  Description of Artificial Sequence: Synthetic oligonucleotide
uuggagcagaguaauauug

SEQ ID NO: 3082067 - RNA, 19 nt, Artificial Sequence
  Description of Artificial Sequence: Synthetic oligonucleotide
ugcucauauagccacaccu

SEQ ID NO: 3082068 - RNA, 19 nt, Artificial Sequence
  Description of Artificial Sequence: Synthetic oligonucleotide
ucaucuaauacgagguuca

SEQ ID NO: 3082069 - RNA, 19 nt, Artificial Sequence
  Description of Artificial Sequence: Synthetic oligonucleotide
aauccgagaccuauuuugc

SEQ ID NO: 3082070 - RNA, 19 nt, Artificial Sequence
  Description of Artificial Sequence: Synthetic oligonucleotide
uauagccacaccugaaucc

SEQ ID NO: 3082071 - RNA, 19 nt, Artificial Sequence
  Description of Artificial Sequence: Synthetic oligonucleotide
uuggaaacacuuuggagca

SEQ ID NO: 3082072 - RNA, 19 nt, Artificial Sequence
  Description of Artificial Sequence: Synthetic oligonucleotide
accuucugcaccuucuggc

SEQ ID NO: 3082073 - RNA, 19 nt, Artificial Sequence
  Description of Artificial Sequence: Synthetic oligonucleotide
auuuacuugcucauauagc

SEQ ID NO: 3082074 - RNA, 19 nt, Artificial Sequence
  Description of Artificial Sequence: Synthetic oligonucleotide
agugaaucucuucugcauc

SEQ ID NO: 3082075 - RNA, 19 nt, Artificial Sequence
  Description of Artificial Sequence: Synthetic oligonucleotide
uucaacaugauccgaccca

SEQ ID NO: 3082076 - RNA, 19 nt, Artificial Sequence
  Description of Artificial Sequence: Synthetic oligonucleotide
aguuggaaacacuuuggag

SEQ ID NO: 3082077 - RNA, 19 nt, Artificial Sequence
  Description of Artificial Sequence: Synthetic oligonucleotide
uccuugacuuguuuuagag

SEQ ID NO: 3082078 - RNA, 19 nt, Artificial Sequence
  Description of Artificial Sequence: Synthetic oligonucleotide
auauagccacaccugaauc

SEQ ID NO: 3082079 - RNA, 19 nt, Artificial Sequence
  Description of Artificial Sequence: Synthetic oligonucleotide
uucauguacucaucaaagc

SEQ ID NO: 3082080 - RNA, 19 nt, Artificial Sequence
  Description of Artificial Sequence: Synthetic oligonucleotide
uagagugaaucucuucugc

SEQ ID NO: 3082081 - RNA, 19 nt, Artificial Sequence
  Description of Artificial Sequence: Synthetic oligonucleotide
gaagaugagguugaugggc

SEQ ID NO: 3082082 - RNA, 19 nt, Artificial Sequence
  Description of Artificial Sequence: Synthetic oligonucleotide
uauuuugcagguaucugaa

SEQ ID NO: 3082083 - RNA, 19 nt, Artificial Sequence
  Description of Artificial Sequence: Synthetic oligonucleotide
caaagccaauaauacaacc

SEQ ID NO: 3082084 - RNA, 19 nt, Artificial Sequence
  Description of Artificial Sequence: Synthetic oligonucleotide
uuucaacaugauccgaccc

SEQ ID NO: 3082085 - RNA, 19 nt, Artificial Sequence
  Description of Artificial Sequence: Synthetic oligonucleotide
ugaagaugagguugauggg

SEQ ID NO: 3082086 - RNA, 19 nt, Artificial Sequence
  Description of Artificial Sequence: Synthetic oligonucleotide
ugcagguaucugaagauga

SEQ ID NO: 3082087 - RNA, 19 nt, Artificial Sequence
  Description of Artificial Sequence: Synthetic oligonucleotide
aauacgagguucauguacu

SEQ ID NO: 3082088 - RNA, 19 nt, Artificial Sequence
  Description of Artificial Sequence: Synthetic oligonucleotide
aucaucuaauacgagguuc

SEQ ID NO: 3082089 - RNA, 19 nt, Artificial Sequence
  Description of Artificial Sequence: Synthetic oligonucleotide
uuagagugaaucucuucug

SEQ ID NO: 3082090 - RNA, 19 nt, Artificial Sequence
  Description of Artificial Sequence: Synthetic oligonucleotide
uaucugaagaugagguuga

SEQ ID NO: 3082091 - RNA, 19 nt, Artificial Sequence
  Description of Artificial Sequence: Synthetic oligonucleotide
uccgagaccuauuuugcag

SEQ ID NO: 3082092 - RNA, 19 nt, Artificial Sequence
  Description of Artificial Sequence: Synthetic oligonucleotide
ucaaagccaauaauacaac

SEQ ID NO: 3082093 - RNA, 19 nt, Artificial Sequence
  Description of Artificial Sequence: Synthetic oligonucleotide
cuuucaacaugauccgacc

SEQ ID NO: 3082094 - RNA, 19 nt, Artificial Sequence
  Description of Artificial Sequence: Synthetic oligonucleotide
uacuugcucauauagccac

SEQ ID NO: 3082095 - RNA, 19 nt, Artificial Sequence
  Description of Artificial Sequence: Synthetic oligonucleotide
uauccgcauauuuacuugc

SEQ ID NO: 3082096 - RNA, 19 nt, Artificial Sequence
  Description of Artificial Sequence: Synthetic oligonucleotide
uacucaucaaagccaauaa

SEQ ID NO: 3082097 - RNA, 19 nt, Artificial Sequence
  Description of Artificial Sequence: Synthetic oligonucleotide
uugucuccuuucaacauga

SEQ ID NO: 3082098 - RNA, 19 nt, Artificial Sequence
  Description of Artificial Sequence: Synthetic oligonucleotide
aaaacuaguuggaaacacu

SEQ ID NO: 3082099 - RNA, 19 nt, Artificial Sequence
  Description of Artificial Sequence: Synthetic oligonucleotide
uuacuugcucauauagcca

SEQ ID NO: 3082100 - RNA, 19 nt, Artificial Sequence
  Description of Artificial Sequence: Synthetic oligonucleotide
cuauuuugcagguaucuga

SEQ ID NO: 3082101 - RNA, 19 nt, Artificial Sequence
  Description of Artificial Sequence: Synthetic oligonucleotide
auagccacaccugaauccg

SEQ ID NO: 3082102 - RNA, 19 nt, Artificial Sequence
  Description of Artificial Sequence: Synthetic oligonucleotide
cucaucaaagccaauaaua

SEQ ID NO: 3082103 - RNA, 19 nt, Artificial Sequence
  Description of Artificial Sequence: Synthetic oligonucleotide
aacaugauccgacccaguu

SEQ ID NO: 3082104 - RNA, 19 nt, Artificial Sequence
  Description of Artificial Sequence: Synthetic oligonucleotide
uuugcagguaucugaagau

SEQ ID NO: 3082105 - RNA, 19 nt, Artificial Sequence
  Description of Artificial Sequence: Synthetic oligonucleotide
agaccuauuuugcagguau

SEQ ID NO: 3082106 - RNA, 19 nt, Artificial Sequence
  Description of Artificial Sequence: Synthetic oligonucleotide
ucaacaugauccgacccag

SEQ ID NO: 3082107 - RNA, 19 nt, Artificial Sequence
  Description of Artificial Sequence: Synthetic oligonucleotide
ucuauccgcauauuuacuu

SEQ ID NO: 3082108 - RNA, 19 nt, Artificial Sequence
  Description of Artificial Sequence: Synthetic oligonucleotide
cuccuuucaacaugauccg

SEQ ID NO: 3082109 - RNA, 19 nt, Artificial Sequence
  Description of Artificial Sequence: Synthetic oligonucleotide
uaauauugucuccuuucaa

SEQ ID NO: 3082110 - RNA, 19 nt, Artificial Sequence
  Description of Artificial Sequence: Synthetic oligonucleotide
uggagcagaguaauauugu

SEQ ID NO: 3082111 - RNA, 19 nt, Artificial Sequence
  Description of Artificial Sequence: Synthetic oligonucleotide
uuguuuuagagugaaucuc

SEQ ID NO: 3082112 - RNA, 19 nt, Artificial Sequence
  Description of Artificial Sequence: Synthetic oligonucleotide
guaauauugucuccuuuca

SEQ ID NO: 3082113 - RNA, 19 nt, Artificial Sequence
  Description of Artificial Sequence: Synthetic oligonucleotide
aaacuaguuggaaacacuu

SEQ ID NO: 3082114 - RNA, 19 nt, Artificial Sequence
  Description of Artificial Sequence: Synthetic oligonucleotide
uuuuagagugaaucucuuc

SEQ ID NO: 3082115 - RNA, 19 nt, Artificial Sequence
  Description of Artificial Sequence: Synthetic oligonucleotide
uuuccuugacuuguuuuag

SEQ ID NO: 3082116 - RNA, 19 nt, Artificial Sequence
  Description of Artificial Sequence: Synthetic oligonucleotide
cuauccgcauauuuacuug

SEQ ID NO: 3082117 - RNA, 19 nt, Artificial Sequence
  Description of Artificial Sequence: Synthetic oligonucleotide
agagugaaucucuucugca

SEQ ID NO: 3082118 - RNA, 19 nt, Artificial Sequence
  Description of Artificial Sequence: Synthetic oligonucleotide
uugacuuguuuuagaguga

SEQ ID NO: 3082119 - RNA, 19 nt, Artificial Sequence
  Description of Artificial Sequence: Synthetic oligonucleotide
aguuguuuccuugacuugu

SEQ ID NO: 3082120 - RNA, 19 nt, Artificial Sequence
  Description of Artificial Sequence: Synthetic oligonucleotide
ucauauagccacaccugaa

SEQ ID NO: 3082121 - RNA, 19 nt, Artificial Sequence
  Description of Artificial Sequence: Synthetic oligonucleotide
acaugauccgacccaguug

SEQ ID NO: 3082122 - RNA, 19 nt, Artificial Sequence
  Description of Artificial Sequence: Synthetic oligonucleotide
uugaugggcugcaccauca

SEQ ID NO: 3082123 - RNA, 19 nt, Artificial Sequence
  Description of Artificial Sequence: Synthetic oligonucleotide
aagaugagguugaugggcu

SEQ ID NO: 3082124 - RNA, 19 nt, Artificial Sequence
  Description of Artificial Sequence: Synthetic oligonucleotide
ucucuucugcaucaucuaa

SEQ ID NO: 3082125 - RNA, 19 nt, Artificial Sequence
  Description of Artificial Sequence: Synthetic oligonucleotide
uacgccaugguggaaguca

SEQ ID NO: 3082126 - RNA, 19 nt, Artificial Sequence
  Description of Artificial Sequence: Synthetic oligonucleotide
auuuugcagguaucugaag

SEQ ID NO: 3082127 - RNA, 19 nt, Artificial Sequence
  Description of Artificial Sequence: Synthetic oligonucleotide
uuuggagcagaguaauauu

SEQ ID NO: 3082128 - RNA, 19 nt, Artificial Sequence
  Description of Artificial Sequence: Synthetic oligonucleotide
acaccugaauccgagaccu

SEQ ID NO: 3082129 - RNA, 19 nt, Artificial Sequence
  Description of Artificial Sequence: Synthetic oligonucleotide
agguugaugggcugcacca

SEQ ID NO: 3082130 - RNA, 19 nt, Artificial Sequence
  Description of Artificial Sequence: Synthetic oligonucleotide
gauccgacccaguuguuuc

SEQ ID NO: 3082131 - RNA, 19 nt, Artificial Sequence
  Description of Artificial Sequence: Synthetic oligonucleotide
gagguucauguacucauca

SEQ ID NO: 3082132 - RNA, 19 nt, Artificial Sequence
  Description of Artificial Sequence: Synthetic oligonucleotide
caucaaagccaauaauaca

SEQ ID NO: 3082133 - RNA, 19 nt, Artificial Sequence
  Description of Artificial Sequence: Synthetic oligonucleotide
auccgacccaguuguuucc

SEQ ID NO: 3082134 - RNA, 19 nt, Artificial Sequence
  Description of Artificial Sequence: Synthetic oligonucleotide
gagguugaugggcugcacc

SEQ ID NO: 3082135 - RNA, 19 nt, Artificial Sequence
  Description of Artificial Sequence: Synthetic oligonucleotide
acgagguucauguacucau

SEQ ID NO: 3082136 - RNA, 19 nt, Artificial Sequence
  Description of Artificial Sequence: Synthetic oligonucleotide
uguuuccuugacuuguuuu

SEQ ID NO: 3082137 - RNA, 19 nt, Artificial Sequence
  Description of Artificial Sequence: Synthetic oligonucleotide
accaucaccuucugcaccu

SEQ ID NO: 3082138 - RNA, 19 nt, Artificial Sequence
  Description of Artificial Sequence: Synthetic oligonucleotide
acucaucaaagccaauaau

SEQ ID NO: 3082139 - RNA, 19 nt, Artificial Sequence
  Description of Artificial Sequence: Synthetic oligonucleotide
ucugaagaugagguugaug

SEQ ID NO: 3082140 - RNA, 19 nt, Artificial Sequence
  Description of Artificial Sequence: Synthetic oligonucleotide
cuuguuuuagagugaaucu

SEQ ID NO: 3082141 - RNA, 19 nt, Artificial Sequence
  Description of Artificial Sequence: Synthetic oligonucleotide
auacgagguucauguacuc

SEQ ID NO: 3082142 - RNA, 19 nt, Artificial Sequence
  Description of Artificial Sequence: Synthetic oligonucleotide
cagguaucugaagaugagg

SEQ ID NO: 3082143 - RNA, 19 nt, Artificial Sequence
  Description of Artificial Sequence: Synthetic oligonucleotide
caccuucuggcccuggccg

SEQ ID NO: 3082144 - RNA, 19 nt, Artificial Sequence
  Description of Artificial Sequence: Synthetic oligonucleotide
guuuccuugacuuguuuua

SEQ ID NO: 3082145 - RNA, 19 nt, Artificial Sequence
  Description of Artificial Sequence: Synthetic oligonucleotide
gugaaucucuucugcauca

SEQ ID NO: 3082146 - RNA, 19 nt, Artificial Sequence
  Description of Artificial Sequence: Synthetic oligonucleotide
ucaccuucugcaccuucug

SEQ ID NO: 3082147 - RNA, 19 nt, Artificial Sequence
  Description of Artificial Sequence: Synthetic oligonucleotide
accuauuuugcagguaucu

SEQ ID NO: 3082148 - RNA, 19 nt, Artificial Sequence
  Description of Artificial Sequence: Synthetic oligonucleotide
cacaccugaauccgagacc

SEQ ID NO: 3082149 - RNA, 19 nt, Artificial Sequence
  Description of Artificial Sequence: Synthetic oligonucleotide
cucauauagccacaccuga

SEQ ID NO: 3082150 - RNA, 19 nt, Artificial Sequence
  Description of Artificial Sequence: Synthetic oligonucleotide
uugcagguaucugaagaug

SEQ ID NO: 3082151 - RNA, 19 nt, Artificial Sequence
  Description of Artificial Sequence: Synthetic oligonucleotide
uuccuugacuuguuuuaga

SEQ ID NO: 3082152 - RNA, 19 nt, Artificial Sequence
  Description of Artificial Sequence: Synthetic oligonucleotide
auauuuacuugcucauaua

SEQ ID NO: 3082153 - RNA, 19 nt, Artificial Sequence
  Description of Artificial Sequence: Synthetic oligonucleotide
uccgcauauuuacuugcuc

SEQ ID NO: 3082154 - RNA, 19 nt, Artificial Sequence
  Description of Artificial Sequence: Synthetic oligonucleotide
agccaauaauacaacccuc

SEQ ID NO: 3082155 - RNA, 19 nt, Artificial Sequence
  Description of Artificial Sequence: Synthetic oligonucleotide
acccaguuguuuccuugac

SEQ ID NO: 3082156 - RNA, 19 nt, Artificial Sequence
  Description of Artificial Sequence: Synthetic oligonucleotide
uugcucauauagccacacc

SEQ ID NO: 3082157 - RNA, 19 nt, Artificial Sequence
  Description of Artificial Sequence: Synthetic oligonucleotide
accuucuggcccuggccgc

SEQ ID NO: 3082158 - RNA, 19 nt, Artificial Sequence
  Description of Artificial Sequence: Synthetic oligonucleotide
aaacacuuuggagcagagu

SEQ ID NO: 3082159 - RNA, 19 nt, Artificial Sequence
  Description of Artificial Sequence: Synthetic oligonucleotide
aucuaauacgagguucaug

SEQ ID NO: 3082160 - RNA, 19 nt, Artificial Sequence
  Description of Artificial Sequence: Synthetic oligonucleotide
agaguaauauugucuccuu

SEQ ID NO: 3082161 - RNA, 19 nt, Artificial Sequence
  Description of Artificial Sequence: Synthetic oligonucleotide
caugauccgacccaguugu

SEQ ID NO: 3082162 - RNA, 19 nt, Artificial Sequence
  Description of Artificial Sequence: Synthetic oligonucleotide
ugaauccgagaccuauuuu

SEQ ID NO: 3082163 - RNA, 19 nt, Artificial Sequence
  Description of Artificial Sequence: Synthetic oligonucleotide
ccucuauccgcauauuuac

SEQ ID NO: 3082164 - RNA, 19 nt, Artificial Sequence
  Description of Artificial Sequence: Synthetic oligonucleotide
ccuuucaacaugauccgac

SEQ ID NO: 3082165 - RNA, 19 nt, Artificial Sequence
  Description of Artificial Sequence: Synthetic oligonucleotide
cuugcucauauagccacac

SEQ ID NO: 3082166 - RNA, 19 nt, Artificial Sequence
  Description of Artificial Sequence: Synthetic oligonucleotide
gguucauguacucaucaaa

SEQ ID NO: 3082167 - RNA, 19 nt, Artificial Sequence
  Description of Artificial Sequence: Synthetic oligonucleotide
uacgagguucauguacuca

SEQ ID NO: 3082168 - RNA, 19 nt, Artificial Sequence
  Description of Artificial Sequence: Synthetic oligonucleotide
gucuccuuucaacaugauc

SEQ ID NO: 3082169 - RNA, 19 nt, Artificial Sequence
  Description of Artificial Sequence: Synthetic oligonucleotide
aacuaguuggaaacacuuu

SEQ ID NO: 3082170 - RNA, 19 nt, Artificial Sequence
  Description of Artificial Sequence: Synthetic oligonucleotide
agaugagguugaugggcug

SEQ ID NO: 3082171 - RNA, 19 nt, Artificial Sequence
  Description of Artificial Sequence: Synthetic oligonucleotide
auccgagaccuauuuugca

SEQ ID NO: 3082172 - RNA, 19 nt, Artificial Sequence
  Description of Artificial Sequence: Synthetic oligonucleotide
caccaucaccuucugcacc

SEQ ID NO: 3082173 - RNA, 19 nt, Artificial Sequence
  Description of Artificial Sequence: Synthetic oligonucleotide
ggagcagaguaauauuguc

SEQ ID NO: 3082174 - RNA, 19 nt, Artificial Sequence
  Description of Artificial Sequence: Synthetic oligonucleotide
gacccaguuguuuccuuga

SEQ ID NO: 3082175 - RNA, 19 nt, Artificial Sequence
  Description of Artificial Sequence: Synthetic oligonucleotide
agguucauguacucaucaa

SEQ ID NO: 3082176 - RNA, 19 nt, Artificial Sequence
  Description of Artificial Sequence: Synthetic oligonucleotide
guugaugggcugcaccauc

SEQ ID NO: 3082177 - RNA, 19 nt, Artificial Sequence
  Description of Artificial Sequence: Synthetic oligonucleotide
ccgagaccuauuuugcagg

SEQ ID NO: 3082178 - RNA, 19 nt, Artificial Sequence
  Description of Artificial Sequence: Synthetic oligonucleotide
caguuguuuccuugacuug

SEQ ID NO: 3082179 - RNA, 19 nt, Artificial Sequence
  Description of Artificial Sequence: Synthetic oligonucleotide
guacucaucaaagccaaua

SEQ ID NO: 3082180 - RNA, 19 nt, Artificial Sequence
  Description of Artificial Sequence: Synthetic oligonucleotide
gagcagaguaauauugucu

SEQ ID NO: 3082181 - RNA, 19 nt, Artificial Sequence
  Description of Artificial Sequence: Synthetic oligonucleotide
gcagaguaauauugucucc

SEQ ID NO: 3082182 - RNA, 19 nt, Artificial Sequence
  Description of Artificial Sequence: Synthetic oligonucleotide
aucucuucugcaucaucua

SEQ ID NO: 3082183 - RNA, 19 nt, Artificial Sequence
  Description of Artificial Sequence: Synthetic oligonucleotide
uccuuucaacaugauccga

SEQ ID NO: 3082184 - RNA, 19 nt, Artificial Sequence
  Description of Artificial Sequence: Synthetic oligonucleotide
gagugaaucucuucugcau

SEQ ID NO: 3082185 - RNA, 19 nt, Artificial Sequence
  Description of Artificial Sequence: Synthetic oligonucleotide
uuguuuccuugacuuguuu

SEQ ID NO: 3082186 - RNA, 19 nt, Artificial Sequence
  Description of Artificial Sequence: Synthetic oligonucleotide
cugcaucaucuaauacgag

SEQ ID NO: 3082187 - RNA, 19 nt, Artificial Sequence
  Description of Artificial Sequence: Synthetic oligonucleotide
uguacucaucaaagccaau

SEQ ID NO: 3082188 - RNA, 19 nt, Artificial Sequence
  Description of Artificial Sequence: Synthetic oligonucleotide
gcucauauagccacaccug

SEQ ID NO: 3082189 - RNA, 19 nt, Artificial Sequence
  Description of Artificial Sequence: Synthetic oligonucleotide
accugaauccgagaccuau

SEQ ID NO: 3082190 - RNA, 19 nt, Artificial Sequence
  Description of Artificial Sequence: Synthetic oligonucleotide
ccuucugcaccuucuggcc

SEQ ID NO: 3082191 - RNA, 19 nt, Artificial Sequence
  Description of Artificial Sequence: Synthetic oligonucleotide
cuuuggagcagaguaauau

SEQ ID NO: 3082192 - RNA, 19 nt, Artificial Sequence
  Description of Artificial Sequence: Synthetic oligonucleotide
cauauagccacaccugaau

SEQ ID NO: 3082193 - RNA, 19 nt, Artificial Sequence
  Description of Artificial Sequence: Synthetic oligonucleotide
acccucuauccgcauauuu

SEQ ID NO: 3082194 - RNA, 19 nt, Artificial Sequence
  Description of Artificial Sequence: Synthetic oligonucleotide
ugauccgacccaguuguuu

SEQ ID NO: 3082195 - RNA, 19 nt, Artificial Sequence
  Description of Artificial Sequence: Synthetic oligonucleotide
acgccaugguggaagucac

SEQ ID NO: 3082196 - RNA, 19 nt, Artificial Sequence
  Description of Artificial Sequence: Synthetic oligonucleotide
uagccacaccugaauccga

SEQ ID NO: 3082197 - RNA, 19 nt, Artificial Sequence
  Description of Artificial Sequence: Synthetic oligonucleotide
cagaguaauauugucuccu

SEQ ID NO: 3082198 - RNA, 19 nt, Artificial Sequence
  Description of Artificial Sequence: Synthetic oligonucleotide
auacaacccucuauccgca

SEQ ID NO: 3082199 - RNA, 19 nt, Artificial Sequence
  Description of Artificial Sequence: Synthetic oligonucleotide
agccacaccugaauccgag

SEQ ID NO: 3082200 - RNA, 19 nt, Artificial Sequence
  Description of Artificial Sequence: Synthetic oligonucleotide
ccgcgguacgccauggugg

SEQ ID NO: 3082201 - RNA, 19 nt, Artificial Sequence
  Description of Artificial Sequence: Synthetic oligonucleotide
acaacccucuauccgcaua

SEQ ID NO: 3082202 - RNA, 19 nt, Artificial Sequence
  Description of Artificial Sequence: Synthetic oligonucleotide
ccacaccugaauccgagac

SEQ ID NO: 3082203 - RNA, 19 nt, Artificial Sequence
  Description of Artificial Sequence: Synthetic oligonucleotide
acacuuuggagcagaguaa

SEQ ID NO: 3082204 - RNA, 19 nt, Artificial Sequence
  Description of Artificial Sequence: Synthetic oligonucleotide
ggaaacacuuuggagcaga

SEQ ID NO: 3082205 - RNA, 19 nt, Artificial Sequence
  Description of Artificial Sequence: Synthetic oligonucleotide
ccgcauauuuacuugcuca

SEQ ID NO: 3082206 - RNA, 19 nt, Artificial Sequence
  Description of Artificial Sequence: Synthetic oligonucleotide
gcagguaucugaagaugag

SEQ ID NO: 3082207 - RNA, 19 nt, Artificial Sequence
  Description of Artificial Sequence: Synthetic oligonucleotide
augagguugaugggcugca

SEQ ID NO: 3082208 - RNA, 19 nt, Artificial Sequence
  Description of Artificial Sequence: Synthetic oligonucleotide
gaccuauuuugcagguauc

SEQ ID NO: 3082209 - RNA, 19 nt, Artificial Sequence
  Description of Artificial Sequence: Synthetic oligonucleotide
ccuauuuugcagguaucug

SEQ ID NO: 3082210 - RNA, 19 nt, Artificial Sequence
  Description of Artificial Sequence: Synthetic oligonucleotide
uggcccuggccgcgguacg

SEQ ID NO: 3082211 - RNA, 19 nt, Artificial Sequence
  Description of Artificial Sequence: Synthetic oligonucleotide
auccgcauauuuacuugcu

SEQ ID NO: 3082212 - RNA, 19 nt, Artificial Sequence
  Description of Artificial Sequence: Synthetic oligonucleotide
ugucuccuuucaacaugau

SEQ ID NO: 3082213 - RNA, 19 nt, Artificial Sequence
  Description of Artificial Sequence: Synthetic oligonucleotide
cuaauacgagguucaugua

SEQ ID NO: 3082214 - RNA, 19 nt, Artificial Sequence
  Description of Artificial Sequence: Synthetic oligonucleotide
caucaccuucugcaccuuc

SEQ ID NO: 3082215 - RNA, 19 nt, Artificial Sequence
  Description of Artificial Sequence: Synthetic oligonucleotide
ugagguugaugggcugcac

SEQ ID NO: 3082216 - RNA, 19 nt, Artificial Sequence
  Description of Artificial Sequence: Synthetic oligonucleotide
acuugcucauauagccaca

SEQ ID NO: 3082217 - RNA, 19 nt, Artificial Sequence
  Description of Artificial Sequence: Synthetic oligonucleotide
uacaacccucuauccgcau

SEQ ID NO: 3082218 - RNA, 19 nt, Artificial Sequence
  Description of Artificial Sequence: Synthetic oligonucleotide
ugggcugcaccaucaccuu

SEQ ID NO: 3082219 - RNA, 19 nt, Artificial Sequence
  Description of Artificial Sequence: Synthetic oligonucleotide
gccaauaauacaacccucu

SEQ ID NO: 3082220 - RNA, 19 nt, Artificial Sequence
  Description of Artificial Sequence: Synthetic oligonucleotide
gcaccuucuggcccuggcc

SEQ ID NO: 3082221 - RNA, 19 nt, Artificial Sequence
  Description of Artificial Sequence: Synthetic oligonucleotide
cugaauccgagaccuauuu

SEQ ID NO: 3082222 - RNA, 19 nt, Artificial Sequence
  Description of Artificial Sequence: Synthetic oligonucleotide
cucuauccgcauauuuacu

SEQ ID NO: 3082223 - RNA, 19 nt, Artificial Sequence
  Description of Artificial Sequence: Synthetic oligonucleotide
gccgcgguacgccauggug

SEQ ID NO: 3082224 - RNA, 19 nt, Artificial Sequence
  Description of Artificial Sequence: Synthetic oligonucleotide
ucugcaccuucuggcccug

SEQ ID NO: 3082225 - RNA, 19 nt, Artificial Sequence
  Description of Artificial Sequence: Synthetic oligonucleotide
uggccgcgguacgccaugg

SEQ ID NO: 3082226 - RNA, 19 nt, Artificial Sequence
  Description of Artificial Sequence: Synthetic oligonucleotide
caacccucuauccgcauau

SEQ ID NO: 3082227 - RNA, 19 nt, Artificial Sequence
  Description of Artificial Sequence: Synthetic oligonucleotide
gagaccuauuuugcaggua

SEQ ID NO: 3082228 - RNA, 19 nt, Artificial Sequence
  Description of Artificial Sequence: Synthetic oligonucleotide
cccucuauccgcauauuua

SEQ ID NO: 3082229 - RNA, 19 nt, Artificial Sequence
  Description of Artificial Sequence: Synthetic oligonucleotide
aacccucuauccgcauauu

SEQ ID NO: 3082230 - RNA, 19 nt, Artificial Sequence
  Description of Artificial Sequence: Synthetic oligonucleotide
guuuuagagugaaucucuu

SEQ ID NO: 3082231 - RNA, 19 nt, Artificial Sequence
  Description of Artificial Sequence: Synthetic oligonucleotide
cuucuggcccuggccgcgg

SEQ ID NO: 3082232 - RNA, 19 nt, Artificial Sequence
  Description of Artificial Sequence: Synthetic oligonucleotide
aucugaagaugagguugau

SEQ ID NO: 3082233 - RNA, 19 nt, Artificial Sequence
  Description of Artificial Sequence: Synthetic oligonucleotide
cuggccgcgguacgccaug

SEQ ID NO: 3082234 - RNA, 19 nt, Artificial Sequence
  Description of Artificial Sequence: Synthetic oligonucleotide
cacuuuggagcagaguaau

SEQ ID NO: 3082235 - RNA, 19 nt, Artificial Sequence
  Description of Artificial Sequence: Synthetic oligonucleotide
ccaauaauacaacccucua

SEQ ID NO: 3082236 - RNA, 19 nt, Artificial Sequence
  Description of Artificial Sequence: Synthetic oligonucleotide
uucuggcccuggccgcggu

SEQ ID NO: 3082237 - RNA, 19 nt, Artificial Sequence
  Description of Artificial Sequence: Synthetic oligonucleotide
caucaucuaauacgagguu

SEQ ID NO: 3082238 - RNA, 19 nt, Artificial Sequence
  Description of Artificial Sequence: Synthetic oligonucleotide
gcugcaccaucaccuucug

SEQ ID NO: 3082239 - RNA, 19 nt, Artificial Sequence
  Description of Artificial Sequence: Synthetic oligonucleotide
gcauauuuacuugcucaua

SEQ ID NO: 3082240 - RNA, 19 nt, Artificial Sequence
  Description of Artificial Sequence: Synthetic oligonucleotide
cgacccaguuguuuccuug

SEQ ID NO: 3082241 - RNA, 19 nt, Artificial Sequence
  Description of Artificial Sequence: Synthetic oligonucleotide
cgagguucauguacucauc

SEQ ID NO: 3082242 - RNA, 19 nt, Artificial Sequence
  Description of Artificial Sequence: Synthetic oligonucleotide
cgguacgccaugguggaag

SEQ ID NO: 3082243 - RNA, 19 nt, Artificial Sequence
  Description of Artificial Sequence: Synthetic oligonucleotide
ccuugacuuguuuuagagu

SEQ ID NO: 3082244 - RNA, 19 nt, Artificial Sequence
  Description of Artificial Sequence: Synthetic oligonucleotide
guuguuuccuugacuuguu

SEQ ID NO: 3082245 - RNA, 19 nt, Artificial Sequence
  Description of Artificial Sequence: Synthetic oligonucleotide
gguacgccaugguggaagu

SEQ ID NO: 3082246 - RNA, 19 nt, Artificial Sequence
  Description of Artificial Sequence: Synthetic oligonucleotide
ccuucuggcccuggccgcg

SEQ ID NO: 3082247 - RNA, 19 nt, Artificial Sequence
  Description of Artificial Sequence: Synthetic oligonucleotide
caacaugauccgacccagu

SEQ ID NO: 3082248 - RNA, 19 nt, Artificial Sequence
  Description of Artificial Sequence: Synthetic oligonucleotide
gccacaccugaauccgaga

SEQ ID NO: 3082249 - RNA, 19 nt, Artificial Sequence
  Description of Artificial Sequence: Synthetic oligonucleotide
gacuuguuuuagagugaau

SEQ ID NO: 3082250 - RNA, 19 nt, Artificial Sequence
  Description of Artificial Sequence: Synthetic oligonucleotide
guacgccaugguggaaguc

SEQ ID NO: 3082251 - RNA, 19 nt, Artificial Sequence
  Description of Artificial Sequence: Synthetic oligonucleotide
gggcugcaccaucaccuuc

SEQ ID NO: 3082252 - RNA, 19 nt, Artificial Sequence
  Description of Artificial Sequence: Synthetic oligonucleotide
cugcaccuucuggcccugg

SEQ ID NO: 3082253 - RNA, 19 nt, Artificial Sequence
  Description of Artificial Sequence: Synthetic oligonucleotide
caucuaauacgagguucau

SEQ ID NO: 3082254 - RNA, 19 nt, Artificial Sequence
  Description of Artificial Sequence: Synthetic oligonucleotide
ccaugguggaagucacaaa

SEQ ID NO: 3082255 - RNA, 19 nt, Artificial Sequence
  Description of Artificial Sequence: Synthetic oligonucleotide
cgcauauuuacuugcucau

SEQ ID NO: 3082256 - RNA, 19 nt, Artificial Sequence
  Description of Artificial Sequence: Synthetic oligonucleotide
cccaguuguuuccuugacu

SEQ ID NO: 3082257 - RNA, 19 nt, Artificial Sequence
  Description of Artificial Sequence: Synthetic oligonucleotide
augauccgacccaguuguu

SEQ ID NO: 3082258 - RNA, 19 nt, Artificial Sequence
  Description of Artificial Sequence: Synthetic oligonucleotide
cgcgguacgccauggugga

SEQ ID NO: 3082259 - RNA, 19 nt, Artificial Sequence
  Description of Artificial Sequence: Synthetic oligonucleotide
ggcccuggccgcgguacgc

SEQ ID NO: 3082260 - RNA, 19 nt, Artificial Sequence
  Description of Artificial Sequence: Synthetic oligonucleotide
caccugaauccgagaccua

SEQ ID NO: 3082261 - RNA, 19 nt, Artificial Sequence
  Description of Artificial Sequence: Synthetic oligonucleotide
gguugaugggcugcaccau

SEQ ID NO: 3082262 - RNA, 19 nt, Artificial Sequence
  Description of Artificial Sequence: Synthetic oligonucleotide
gcccuggccgcgguacgcc

SEQ ID NO: 3082263 - RNA, 19 nt, Artificial Sequence
  Description of Artificial Sequence: Synthetic oligonucleotide
cgagaccuauuuugcaggu

SEQ ID NO: 3082264 - RNA, 19 nt, Artificial Sequence
  Description of Artificial Sequence: Synthetic oligonucleotide
ccugaauccgagaccuauu

SEQ ID NO: 3082265 - RNA, 19 nt, Artificial Sequence
  Description of Artificial Sequence: Synthetic oligonucleotide
cccuggccgcgguacgcca

SEQ ID NO: 3082266 - RNA, 19 nt, Artificial Sequence
  Description of Artificial Sequence: Synthetic oligonucleotide
cgccaugguggaagucaca

SEQ ID NO: 3082267 - RNA, 19 nt, Artificial Sequence
  Description of Artificial Sequence: Synthetic oligonucleotide
ggccgcgguacgccauggu

SEQ ID NO: 3082268 - RNA, 19 nt, Artificial Sequence
  Description of Artificial Sequence: Synthetic oligonucleotide
gcgguacgccaugguggaa

SEQ ID NO: 3082269 - RNA, 19 nt, Artificial Sequence
  Description of Artificial Sequence: Synthetic oligonucleotide
ccuggccgcgguacgccau

SEQ ID NO: 3082270 - RNA, 19 nt, Artificial Sequence
  Description of Artificial Sequence: Synthetic oligonucleotide
ccaucaccuucugcaccuu

SEQ ID NO: 3082271 - RNA, 19 nt, Artificial Sequence
  Description of Artificial Sequence: Synthetic oligonucleotide
uggaaaauagcuuagagca

SEQ ID NO: 3082272 - RNA, 19 nt, Artificial Sequence
  Description of Artificial Sequence: Synthetic oligonucleotide
uuagauaaugucaaaaggc

SEQ ID NO: 3082273 - RNA, 19 nt, Artificial Sequence
  Description of Artificial Sequence: Synthetic oligonucleotide
aauagcuuagagcacagag

SEQ ID NO: 3082274 - RNA, 19 nt, Artificial Sequence
  Description of Artificial Sequence: Synthetic oligonucleotide
aaugucaaaaggcauugcg

SEQ ID NO: 3082275 - RNA, 19 nt, Artificial Sequence
  Description of Artificial Sequence: Synthetic oligonucleotide
uuaggagugaaauucaugc

SEQ ID NO: 3082276 - RNA, 19 nt, Artificial Sequence
  Description of Artificial Sequence: Synthetic oligonucleotide
guuagauaaugucaaaagg

SEQ ID NO: 3082277 - RNA, 19 nt, Artificial Sequence
  Description of Artificial Sequence: Synthetic oligonucleotide
ugaaauucaugcuucuggg

SEQ ID NO: 3082278 - RNA, 19 nt, Artificial Sequence
  Description of Artificial Sequence: Synthetic oligonucleotide
uagauaaugucaaaaggca

SEQ ID NO: 3082279 - RNA, 19 nt, Artificial Sequence
  Description of Artificial Sequence: Synthetic oligonucleotide
gaauagacuacgcagcuug

SEQ ID NO: 3082280 - RNA, 19 nt, Artificial Sequence
  Description of Artificial Sequence: Synthetic oligonucleotide
uuggaaaauagcuuagagc

SEQ ID NO: 3082281 - RNA, 19 nt, Artificial Sequence
  Description of Artificial Sequence: Synthetic oligonucleotide
uagcuuagagcacagagca

SEQ ID NO: 3082282 - RNA, 19 nt, Artificial Sequence
  Description of Artificial Sequence: Synthetic oligonucleotide
ucuggguuagauaauguca

SEQ ID NO: 3082283 - RNA, 19 nt, Artificial Sequence
  Description of Artificial Sequence: Synthetic oligonucleotide
gugaaauucaugcuucugg

SEQ ID NO: 3082284 - RNA, 19 nt, Artificial Sequence
  Description of Artificial Sequence: Synthetic oligonucleotide
uugaaagaggcccucacca

SEQ ID NO: 3082285 - RNA, 19 nt, Artificial Sequence
  Description of Artificial Sequence: Synthetic oligonucleotide
aaauucaugcuucuggguu

SEQ ID NO: 3082286 - RNA, 19 nt, Artificial Sequence
  Description of Artificial Sequence: Synthetic oligonucleotide
ugucaaaaggcauugcggu

SEQ ID NO: 3082287 - RNA, 19 nt, Artificial Sequence
  Description of Artificial Sequence: Synthetic oligonucleotide
ucagaguguuggaaaauag

SEQ ID NO: 3082288 - RNA, 19 nt, Artificial Sequence
  Description of Artificial Sequence: Synthetic oligonucleotide
gguuagauaaugucaaaag

SEQ ID NO: 3082289 - RNA, 19 nt, Artificial Sequence
  Description of Artificial Sequence: Synthetic oligonucleotide
auagcuuagagcacagagc

SEQ ID NO: 3082290 - RNA, 19 nt, Artificial Sequence
  Description of Artificial Sequence: Synthetic oligonucleotide
aguguuggaaaauagcuua

SEQ ID NO: 3082291 - RNA, 19 nt, Artificial Sequence
  Description of Artificial Sequence: Synthetic oligonucleotide
uggcgaauagacuacgcag

SEQ ID NO: 3082292 - RNA, 19 nt, Artificial Sequence
  Description of Artificial Sequence: Synthetic oligonucleotide
ucugagcucacggucaugg

SEQ ID NO: 3082293 - RNA, 19 nt, Artificial Sequence
  Description of Artificial Sequence: Synthetic oligonucleotide
aaagaggcccucaccaccc

SEQ ID NO: 3082294 - RNA, 19 nt, Artificial Sequence
  Description of Artificial Sequence: Synthetic oligonucleotide
gaaaauagcuuagagcaca

SEQ ID NO: 3082295 - RNA, 19 nt, Artificial Sequence
  Description of Artificial Sequence: Synthetic oligonucleotide
accacccuacccuugaccg

SEQ ID NO: 3082296 - RNA, 19 nt, Artificial Sequence
  Description of Artificial Sequence: Synthetic oligonucleotide
uagacuacgcagcuuggcc

SEQ ID NO: 3082297 - RNA, 19 nt, Artificial Sequence
  Description of Artificial Sequence: Synthetic oligonucleotide
agcacagagcaccagggag

SEQ ID NO: 3082298 - RNA, 19 nt, Artificial Sequence
  Description of Artificial Sequence: Synthetic oligonucleotide
agaguguuggaaaauagcu

SEQ ID NO: 3082299 - RNA, 19 nt, Artificial Sequence
  Description of Artificial Sequence: Synthetic oligonucleotide
gaaagaggcccucaccacc

SEQ ID NO: 3082300 - RNA, 19 nt, Artificial Sequence
  Description of Artificial Sequence: Synthetic oligonucleotide
ugagcucacggucaugggc

SEQ ID NO: 3082301 - RNA, 19 nt, Artificial Sequence
  Description of Artificial Sequence: Synthetic oligonucleotide
ucuuucagaguguuggaaa

SEQ ID NO: 3082302 - RNA, 19 nt, Artificial Sequence
  Description of Artificial Sequence: Synthetic oligonucleotide
cagaguguuggaaaauagc

SEQ ID NO: 3082303 - RNA, 19 nt, Artificial Sequence
  Description of Artificial Sequence: Synthetic oligonucleotide
aauuccccaccagaggcac

SEQ ID NO: 3082304 - RNA, 19 nt, Artificial Sequence
  Description of Artificial Sequence: Synthetic oligonucleotide
aauucaugcuucuggguua

SEQ ID NO: 3082305 - RNA, 19 nt, Artificial Sequence
  Description of Artificial Sequence: Synthetic oligonucleotide
augcuucuggguuagauaa

SEQ ID NO: 3082306 - RNA, 19 nt, Artificial Sequence
  Description of Artificial Sequence: Synthetic oligonucleotide
augucaaaaggcauugcgg

SEQ ID NO: 3082307 - RNA, 19 nt, Artificial Sequence
  Description of Artificial Sequence: Synthetic oligonucleotide
aaggcauugcgguuucaug

SEQ ID NO: 3082308 - RNA, 19 nt, Artificial Sequence
  Description of Artificial Sequence: Synthetic oligonucleotide
ucauucuccgugcuggcga

SEQ ID NO: 3082309 - RNA, 19 nt, Artificial Sequence
  Description of Artificial Sequence: Synthetic oligonucleotide
uccugcagagggcaaaccc

SEQ ID NO: 3082310 - RNA, 19 nt, Artificial Sequence
  Description of Artificial Sequence: Synthetic oligonucleotide
cagagcaccagggagaggc

SEQ ID NO: 3082311 - RNA, 19 nt, Artificial Sequence
  Description of Artificial Sequence: Synthetic oligonucleotide
aggcauugcgguuucaugu

SEQ ID NO: 3082312 - RNA, 19 nt, Artificial Sequence
  Description of Artificial Sequence: Synthetic oligonucleotide
agagggcaaacccgggacc

SEQ ID NO: 3082313 - RNA, 19 nt, Artificial Sequence
  Description of Artificial Sequence: Synthetic oligonucleotide
aaacccgggaccucacuug

SEQ ID NO: 3082314 - RNA, 19 nt, Artificial Sequence
  Description of Artificial Sequence: Synthetic oligonucleotide
aaaauagcuuagagcacag

SEQ ID NO: 3082315 - RNA, 19 nt, Artificial Sequence
  Description of Artificial Sequence: Synthetic oligonucleotide
uggccaucuggucugagcu

SEQ ID NO: 3082316 - RNA, 19 nt, Artificial Sequence
  Description of Artificial Sequence: Synthetic oligonucleotide
uuucuuuccugcagagggc

SEQ ID NO: 3082317 - RNA, 19 nt, Artificial Sequence
  Description of Artificial Sequence: Synthetic oligonucleotide
auagacuacgcagcuuggc

SEQ ID NO: 3082318 - RNA, 19 nt, Artificial Sequence
  Description of Artificial Sequence: Synthetic oligonucleotide
cuugaaagaggcccucacc

SEQ ID NO: 3082319 - RNA, 19 nt, Artificial Sequence
  Description of Artificial Sequence: Synthetic oligonucleotide
gaccucacuugaaagaggc

SEQ ID NO: 3082320 - RNA, 19 nt, Artificial Sequence
  Description of Artificial Sequence: Synthetic oligonucleotide
aucuggucugagcucacgg

SEQ ID NO: 3082321 - RNA, 19 nt, Artificial Sequence
  Description of Artificial Sequence: Synthetic oligonucleotide
uucuggguuagauaauguc

SEQ ID NO: 3082322 - RNA, 19 nt, Artificial Sequence
  Description of Artificial Sequence: Synthetic oligonucleotide
ugcgguuucaugugacugc

SEQ ID NO: 3082323 - RNA, 19 nt, Artificial Sequence
  Description of Artificial Sequence: Synthetic oligonucleotide
aauagacuacgcagcuugg

SEQ ID NO: 3082324 - RNA, 19 nt, Artificial Sequence
  Description of Artificial Sequence: Synthetic oligonucleotide
aggcaggcgacucuucagg

SEQ ID NO: 3082325 - RNA, 19 nt, Artificial Sequence
  Description of Artificial Sequence: Synthetic oligonucleotide
ucaaaaggcauugcgguuu

SEQ ID NO: 3082326 - RNA, 19 nt, Artificial Sequence
  Description of Artificial Sequence: Synthetic oligonucleotide
uuucuuucagaguguugga

SEQ ID NO: 3082327 - RNA, 19 nt, Artificial Sequence
  Description of Artificial Sequence: Synthetic oligonucleotide
cugcagagggcaaacccgg

SEQ ID NO: 3082328 - RNA, 19 nt, Artificial Sequence
  Description of Artificial Sequence: Synthetic oligonucleotide
uguuggaaaauagcuuaga

SEQ ID NO: 3082329 - RNA, 19 nt, Artificial Sequence
  Description of Artificial Sequence: Synthetic oligonucleotide
uggucugagcucacgguca

SEQ ID NO: 3082330 - RNA, 19 nt, Artificial Sequence
  Description of Artificial Sequence: Synthetic oligonucleotide
uccgugcuggcgaauagac

SEQ ID NO: 3082331 - RNA, 19 nt, Artificial Sequence
  Description of Artificial Sequence: Synthetic oligonucleotide
agacuacgcagcuuggcca

SEQ ID NO: 3082332 - RNA, 19 nt, Artificial Sequence
  Description of Artificial Sequence: Synthetic oligonucleotide
ugaaagaggcccucaccac

SEQ ID NO: 3082333 - RNA, 19 nt, Artificial Sequence
  Description of Artificial Sequence: Synthetic oligonucleotide
uuccccaccagaggcaccg

SEQ ID NO: 3082334 - RNA, 19 nt, Artificial Sequence
  Description of Artificial Sequence: Synthetic oligonucleotide
uuucaugugacugcgucuu

SEQ ID NO: 3082335 - RNA, 19 nt, Artificial Sequence
  Description of Artificial Sequence: Synthetic oligonucleotide
agagcacagagcaccaggg

SEQ ID NO: 3082336 - RNA, 19 nt, Artificial Sequence
  Description of Artificial Sequence: Synthetic oligonucleotide
gcuuagagcacagagcacc

SEQ ID NO: 3082337 - RNA, 19 nt, Artificial Sequence
  Description of Artificial Sequence: Synthetic oligonucleotide
cuggguuagauaaugucaa

SEQ ID NO: 3082338 - RNA, 19 nt, Artificial Sequence
  Description of Artificial Sequence: Synthetic oligonucleotide
cagguuuucuuuccugcag

SEQ ID NO: 3082339 - RNA, 19 nt, Artificial Sequence
  Description of Artificial Sequence: Synthetic oligonucleotide
ucuggucugagcucacggu

SEQ ID NO: 3082340 - RNA, 19 nt, Artificial Sequence
  Description of Artificial Sequence: Synthetic oligonucleotide
uucuuuccugcagagggca

SEQ ID NO: 3082341 - RNA, 19 nt, Artificial Sequence
  Description of Artificial Sequence: Synthetic oligonucleotide
guuuucuuuccugcagagg

SEQ ID NO: 3082342 - RNA, 19 nt, Artificial Sequence
  Description of Artificial Sequence: Synthetic oligonucleotide
uucagaguguuggaaaaua

SEQ ID NO: 3082343 - RNA, 19 nt, Artificial Sequence
  Description of Artificial Sequence: Synthetic oligonucleotide
ccaauuccccaccagaggc

SEQ ID NO: 3082344 - RNA, 19 nt, Artificial Sequence
  Description of Artificial Sequence: Synthetic oligonucleotide
accagggagaggcaggcga

SEQ ID NO: 3082345 - RNA, 19 nt, Artificial Sequence
  Description of Artificial Sequence: Synthetic oligonucleotide
uugcgguuucaugugacug

SEQ ID NO: 3082346 - RNA, 19 nt, Artificial Sequence
  Description of Artificial Sequence: Synthetic oligonucleotide
agugaaauucaugcuucug

SEQ ID NO: 3082347 - RNA, 19 nt, Artificial Sequence
  Description of Artificial Sequence: Synthetic oligonucleotide
aaaggcauugcgguuucau

SEQ ID NO: 3082348 - RNA, 19 nt, Artificial Sequence
  Description of Artificial Sequence: Synthetic oligonucleotide
uuggccaucuggucugagc

SEQ ID NO: 3082349 - RNA, 19 nt, Artificial Sequence
  Description of Artificial Sequence: Synthetic oligonucleotide
gauaaugucaaaaggcauu

SEQ ID NO: 3082350 - RNA, 19 nt, Artificial Sequence
  Description of Artificial Sequence: Synthetic oligonucleotide
cuuucagaguguuggaaaa

SEQ ID NO: 3082351 - RNA, 19 nt, Artificial Sequence
  Description of Artificial Sequence: Synthetic oligonucleotide
ugcagagggcaaacccggg

SEQ ID NO: 3082352 - RNA, 19 nt, Artificial Sequence
  Description of Artificial Sequence: Synthetic oligonucleotide
aacccgggaccucacuuga

SEQ ID NO: 3082353 - RNA, 19 nt, Artificial Sequence
  Description of Artificial Sequence: Synthetic oligonucleotide
auugcgguuucaugugacu

SEQ ID NO: 3082354 - RNA, 19 nt, Artificial Sequence
  Description of Artificial Sequence: Synthetic oligonucleotide
agauaaugucaaaaggcau

SEQ ID NO: 3082355 - RNA, 19 nt, Artificial Sequence
  Description of Artificial Sequence: Synthetic oligonucleotide
cauugcgguuucaugugac

SEQ ID NO: 3082356 - RNA, 19 nt, Artificial Sequence
  Description of Artificial Sequence: Synthetic oligonucleotide
uucuuucagaguguuggaa

SEQ ID NO: 3082357 - RNA, 19 nt, Artificial Sequence
  Description of Artificial Sequence: Synthetic oligonucleotide
ccucacuugaaagaggccc

SEQ ID NO: 3082358 - RNA, 19 nt, Artificial Sequence
  Description of Artificial Sequence: Synthetic oligonucleotide
ucuccgugcuggcgaauag

SEQ ID NO: 3082359 - RNA, 19 nt, Artificial Sequence
  Description of Artificial Sequence: Synthetic oligonucleotide
ggcucauucuccgugcugg

SEQ ID NO: 3082360 - RNA, 19 nt, Artificial Sequence
  Description of Artificial Sequence: Synthetic oligonucleotide
aaauagcuuagagcacaga

SEQ ID NO: 3082361 - RNA, 19 nt, Artificial Sequence
  Description of Artificial Sequence: Synthetic oligonucleotide
gguuucaugugacugcguc

SEQ ID NO: 3082362 - RNA, 19 nt, Artificial Sequence
  Description of Artificial Sequence: Synthetic oligonucleotide
auucaugcuucuggguuag

SEQ ID NO: 3082363 - RNA, 19 nt, Artificial Sequence
  Description of Artificial Sequence: Synthetic oligonucleotide
gaaauucaugcuucugggu

SEQ ID NO: 3082364 - RNA, 19 nt, Artificial Sequence
  Description of Artificial Sequence: Synthetic oligonucleotide
ccugcagagggcaaacccg

SEQ ID NO: 3082365 - RNA, 19 nt, Artificial Sequence
  Description of Artificial Sequence: Synthetic oligonucleotide
ugcuggcgaauagacuacg

SEQ ID NO: 3082366 - RNA, 19 nt, Artificial Sequence
  Description of Artificial Sequence: Synthetic oligonucleotide
guguuggaaaauagcuuag

SEQ ID NO: 3082367 - RNA, 19 nt, Artificial Sequence
  Description of Artificial Sequence: Synthetic oligonucleotide
agaggcaggcgacucuuca

SEQ ID NO: 3082368 - RNA, 19 nt, Artificial Sequence
  Description of Artificial Sequence: Synthetic oligonucleotide
cagagggcaaacccgggac

SEQ ID NO: 3082369 - RNA, 19 nt, Artificial Sequence
  Description of Artificial Sequence: Synthetic oligonucleotide
cuacccuugaccggcugcg

SEQ ID NO: 3082370 - RNA, 19 nt, Artificial Sequence
  Description of Artificial Sequence: Synthetic oligonucleotide
cuggucugagcucacgguc

SEQ ID NO: 3082371 - RNA, 19 nt, Artificial Sequence
  Description of Artificial Sequence: Synthetic oligonucleotide
ucagggcagguuuucuuuc

SEQ ID NO: 3082372 - RNA, 19 nt, Artificial Sequence
  Description of Artificial Sequence: Synthetic oligonucleotide
uuagagcacagagcaccag

SEQ ID NO: 3082373 - RNA, 19 nt, Artificial Sequence
  Description of Artificial Sequence: Synthetic oligonucleotide
ucaugcuucuggguuagau

SEQ ID NO: 3082374 - RNA, 19 nt, Artificial Sequence
  Description of Artificial Sequence: Synthetic oligonucleotide
ggcgaauagacuacgcagc

SEQ ID NO: 3082375 - RNA, 19 nt, Artificial Sequence
  Description of Artificial Sequence: Synthetic oligonucleotide
cagggcagguuuucuuucc

SEQ ID NO: 3082376 - RNA, 19 nt, Artificial Sequence
  Description of Artificial Sequence: Synthetic oligonucleotide
uuucagaguguuggaaaau

SEQ ID NO: 3082377 - RNA, 19 nt, Artificial Sequence
  Description of Artificial Sequence: Synthetic oligonucleotide
gggaccucacuugaaagag

SEQ ID NO: 3082378 - RNA, 19 nt, Artificial Sequence
  Description of Artificial Sequence: Synthetic oligonucleotide
uggguuagauaaugucaaa

SEQ ID NO: 3082379 - RNA, 19 nt, Artificial Sequence
  Description of Artificial Sequence: Synthetic oligonucleotide
cuuagagcacagagcacca

SEQ ID NO: 3082380 - RNA, 19 nt, Artificial Sequence
  Description of Artificial Sequence: Synthetic oligonucleotide
uuuccugcagagggcaaac

SEQ ID NO: 3082381 - RNA, 19 nt, Artificial Sequence
  Description of Artificial Sequence: Synthetic oligonucleotide
ggagugaaauucaugcuuc

SEQ ID NO: 3082382 - RNA, 19 nt, Artificial Sequence
  Description of Artificial Sequence: Synthetic oligonucleotide
gccaauuccccaccagagg

SEQ ID NO: 3082383 - RNA, 19 nt, Artificial Sequence
  Description of Artificial Sequence: Synthetic oligonucleotide
cuggcgaauagacuacgca

SEQ ID NO: 3082384 - RNA, 19 nt, Artificial Sequence
  Description of Artificial Sequence: Synthetic oligonucleotide
ggcauugcgguuucaugug

SEQ ID NO: 3082385 - RNA, 19 nt, Artificial Sequence
  Description of Artificial Sequence: Synthetic oligonucleotide
cacagagcaccagggagag

SEQ ID NO: 3082386 - RNA, 19 nt, Artificial Sequence
  Description of Artificial Sequence: Synthetic oligonucleotide
caaaaggcauugcgguuuc

SEQ ID NO: 3082387 - RNA, 19 nt, Artificial Sequence
  Description of Artificial Sequence: Synthetic oligonucleotide
cacccuacccuugaccggc

SEQ ID NO: 3082388 - RNA, 19 nt, Artificial Sequence
  Description of Artificial Sequence: Synthetic oligonucleotide
gacucuucagggcagguuu

SEQ ID NO: 3082389 - RNA, 19 nt, Artificial Sequence
  Description of Artificial Sequence: Synthetic oligonucleotide
cucauucuccgugcuggcg

SEQ ID NO: 3082390 - RNA, 19 nt, Artificial Sequence
  Description of Artificial Sequence: Synthetic oligonucleotide
accucacuugaaagaggcc

SEQ ID NO: 3082391 - RNA, 19 nt, Artificial Sequence
  Description of Artificial Sequence: Synthetic oligonucleotide
caccacccuacccuugacc

SEQ ID NO: 3082392 - RNA, 19 nt, Artificial Sequence
  Description of Artificial Sequence: Synthetic oligonucleotide
gcuucuggguuagauaaug

SEQ ID NO: 3082393 - RNA, 19 nt, Artificial Sequence
  Description of Artificial Sequence: Synthetic oligonucleotide
cugagcucacggucauggg

SEQ ID NO: 3082394 - RNA, 19 nt, Artificial Sequence
  Description of Artificial Sequence: Synthetic oligonucleotide
caggcgacucuucagggca

SEQ ID NO: 3082395 - RNA, 19 nt, Artificial Sequence
  Description of Artificial Sequence: Synthetic oligonucleotide
ucuucagggcagguuuucu

SEQ ID NO: 3082396 - RNA, 19 nt, Artificial Sequence
  Description of Artificial Sequence: Synthetic oligonucleotide
agcuuagagcacagagcac

SEQ ID NO: 3082397 - RNA, 19 nt, Artificial Sequence
  Description of Artificial Sequence: Synthetic oligonucleotide
caugcuucuggguuagaua

SEQ ID NO: 3082398 - RNA, 19 nt, Artificial Sequence
  Description of Artificial Sequence: Synthetic oligonucleotide
agcucacggucaugggcuc

SEQ ID NO: 3082399 - RNA, 19 nt, Artificial Sequence
  Description of Artificial Sequence: Synthetic oligonucleotide
ggcaggcgacucuucaggg

SEQ ID NO: 3082400 - RNA, 19 nt, Artificial Sequence
  Description of Artificial Sequence: Synthetic oligonucleotide
ggaaaauagcuuagagcac

SEQ ID NO: 3082401 - RNA, 19 nt, Artificial Sequence
  Description of Artificial Sequence: Synthetic oligonucleotide
agcaccagggagaggcagg

SEQ ID NO: 3082402 - RNA, 19 nt, Artificial Sequence
  Description of Artificial Sequence: Synthetic oligonucleotide
ucaugugacugcgucuuuu

SEQ ID NO: 3082403 - RNA, 19 nt, Artificial Sequence
  Description of Artificial Sequence: Synthetic oligonucleotide
ugcuucuggguuagauaau

SEQ ID NO: 3082404 - RNA, 19 nt, Artificial Sequence
  Description of Artificial Sequence: Synthetic oligonucleotide
guuucaugugacugcgucu

SEQ ID NO: 3082405 - RNA, 19 nt, Artificial Sequence
  Description of Artificial Sequence: Synthetic oligonucleotide
agggagaggcaggcgacuc

SEQ ID NO: 3082406 - RNA, 19 nt, Artificial Sequence
  Description of Artificial Sequence: Synthetic oligonucleotide
gagcaccagggagaggcag

SEQ ID NO: 3082407 - RNA, 19 nt, Artificial Sequence
  Description of Artificial Sequence: Synthetic oligonucleotide
gagcacagagcaccaggga

SEQ ID NO: 3082408 - RNA, 19 nt, Artificial Sequence
  Description of Artificial Sequence: Synthetic oligonucleotide
gagugaaauucaugcuucu

SEQ ID NO: 3082409 - RNA, 19 nt, Artificial Sequence
  Description of Artificial Sequence: Synthetic oligonucleotide
caauuccccaccagaggca

SEQ ID NO: 3082410 - RNA, 19 nt, Artificial Sequence
  Description of Artificial Sequence: Synthetic oligonucleotide
gcgguuucaugugacugcg

SEQ ID NO: 3082411 - RNA, 19 nt, Artificial Sequence
  Description of Artificial Sequence: Synthetic oligonucleotide
aagaggcccucaccacccu

SEQ ID NO: 3082412 - RNA, 19 nt, Artificial Sequence
  Description of Artificial Sequence: Synthetic oligonucleotide
ucacuugaaagaggcccuc

SEQ ID NO: 3082413 - RNA, 19 nt, Artificial Sequence
  Description of Artificial Sequence: Synthetic oligonucleotide
ggguuagauaaugucaaaa

SEQ ID NO: 3082414 - RNA, 19 nt, Artificial Sequence
  Description of Artificial Sequence: Synthetic oligonucleotide
caucuggucugagcucacg

SEQ ID NO: 3082415 - RNA, 19 nt, Artificial Sequence
  Description of Artificial Sequence: Synthetic oligonucleotide
gagcucacggucaugggcu

SEQ ID NO: 3082416 - RNA, 19 nt, Artificial Sequence
  Description of Artificial Sequence: Synthetic oligonucleotide
cucacuugaaagaggcccu

SEQ ID NO: 3082417 - RNA, 19 nt, Artificial Sequence
  Description of Artificial Sequence: Synthetic oligonucleotide
aaaaggcauugcgguuuca

SEQ ID NO: 3082418 - RNA, 19 nt, Artificial Sequence
  Description of Artificial Sequence: Synthetic oligonucleotide
gaggcccucaccacccuac

SEQ ID NO: 3082419 - RNA, 19 nt, Artificial Sequence
  Description of Artificial Sequence: Synthetic oligonucleotide
uacgcagcuuggccaucug

SEQ ID NO: 3082420 - RNA, 19 nt, Artificial Sequence
  Description of Artificial Sequence: Synthetic oligonucleotide
ggaccucacuugaaagagg

SEQ ID NO: 3082421 - RNA, 19 nt, Artificial Sequence
  Description of Artificial Sequence: Synthetic oligonucleotide
uuccugcagagggcaaacc

SEQ ID NO: 3082422 - RNA, 19 nt, Artificial Sequence
  Description of Artificial Sequence: Synthetic oligonucleotide
uacccuugaccggcugcgg

SEQ ID NO: 3082423 - RNA, 19 nt, Artificial Sequence
  Description of Artificial Sequence: Synthetic oligonucleotide
ucaccacccuacccuugac

SEQ ID NO: 3082424 - RNA, 19 nt, Artificial Sequence
  Description of Artificial Sequence: Synthetic oligonucleotide
gaguguuggaaaauagcuu

SEQ ID NO: 3082425 - RNA, 19 nt, Artificial Sequence
  Description of Artificial Sequence: Synthetic oligonucleotide
cucaccacccuacccuuga

SEQ ID NO: 3082426 - RNA, 19 nt, Artificial Sequence
  Description of Artificial Sequence: Synthetic oligonucleotide
uucuccgugcuggcgaaua

SEQ ID NO: 3082427 - RNA, 19 nt, Artificial Sequence
  Description of Artificial Sequence: Synthetic oligonucleotide
uucaugugacugcgucuuu

SEQ ID NO: 3082428 - RNA, 19 nt, Artificial Sequence
  Description of Artificial Sequence: Synthetic oligonucleotide
gcagguuuucuuuccugca

SEQ ID NO: 3082429 - RNA, 19 nt, Artificial Sequence
  Description of Artificial Sequence: Synthetic oligonucleotide
gcaggcgacucuucagggc

SEQ ID NO: 3082430 - RNA, 19 nt, Artificial Sequence
  Description of Artificial Sequence: Synthetic oligonucleotide
gacuacgcagcuuggccau

SEQ ID NO: 3082431 - RNA, 19 nt, Artificial Sequence
  Description of Artificial Sequence: Synthetic oligonucleotide
cuucuggguuagauaaugu

SEQ ID NO: 3082432 - RNA, 19 nt, Artificial Sequence
  Description of Artificial Sequence: Synthetic oligonucleotide
cgugcuggcgaauagacua

SEQ ID NO: 3082433 - RNA, 19 nt, Artificial Sequence
  Description of Artificial Sequence: Synthetic oligonucleotide
ccgggaccucacuugaaag

SEQ ID NO: 3082434 - RNA, 19 nt, Artificial Sequence
  Description of Artificial Sequence: Synthetic oligonucleotide
cccuugaccggcugcgggg

SEQ ID NO: 3082435 - RNA, 19 nt, Artificial Sequence
  Description of Artificial Sequence: Synthetic oligonucleotide
acuacgcagcuuggccauc

SEQ ID NO: 3082436 - RNA, 19 nt, Artificial Sequence
  Description of Artificial Sequence: Synthetic oligonucleotide
agggcaaacccgggaccuc

SEQ ID NO: 3082437 - RNA, 19 nt, Artificial Sequence
  Description of Artificial Sequence: Synthetic oligonucleotide
gugcuggcgaauagacuac

SEQ ID NO: 3082438 - RNA, 19 nt, Artificial Sequence
  Description of Artificial Sequence: Synthetic oligonucleotide
cgccaauuccccaccagag

SEQ ID NO: 3082439 - RNA, 19 nt, Artificial Sequence
  Description of Artificial Sequence: Synthetic oligonucleotide
gucaaaaggcauugcgguu

SEQ ID NO: 3082440 - RNA, 19 nt, Artificial Sequence
  Description of Artificial Sequence: Synthetic oligonucleotide
ccuacccuugaccggcugc

SEQ ID NO: 3082441 - RNA, 19 nt, Artificial Sequence
  Description of Artificial Sequence: Synthetic oligonucleotide
cuuuccugcagagggcaaa

SEQ ID NO: 3082442 - RNA, 19 nt, Artificial Sequence
  Description of Artificial Sequence: Synthetic oligonucleotide
gcagcuuggccaucugguc

SEQ ID NO: 3082443 - RNA, 19 nt, Artificial Sequence
  Description of Artificial Sequence: Synthetic oligonucleotide
ggcgccaauuccccaccag

SEQ ID NO: 3082444 - RNA, 19 nt, Artificial Sequence
  Description of Artificial Sequence: Synthetic oligonucleotide
gagggcaaacccgggaccu

SEQ ID NO: 3082445 - RNA, 19 nt, Artificial Sequence
  Description of Artificial Sequence: Synthetic oligonucleotide
gccaucuggucugagcuca

SEQ ID NO: 3082446 - RNA, 19 nt, Artificial Sequence
  Description of Artificial Sequence: Synthetic oligonucleotide
gcacagagcaccagggaga

SEQ ID NO: 3082447 - RNA, 19 nt, Artificial Sequence
  Description of Artificial Sequence: Synthetic oligonucleotide
cauucuccgugcuggcgaa

SEQ ID NO: 3082448 - RNA, 19 nt, Artificial Sequence
  Description of Artificial Sequence: Synthetic oligonucleotide
gcauugcgguuucauguga

SEQ ID NO: 3082449 - RNA, 19 nt, Artificial Sequence
  Description of Artificial Sequence: Synthetic oligonucleotide
acagagcaccagggagagg

SEQ ID NO: 3082450 - RNA, 19 nt, Artificial Sequence
  Description of Artificial Sequence: Synthetic oligonucleotide
cagcuuggccaucuggucu

SEQ ID NO: 3082451 - RNA, 19 nt, Artificial Sequence
  Description of Artificial Sequence: Synthetic oligonucleotide
gcgaauagacuacgcagcu

SEQ ID NO: 3082452 - RNA, 19 nt, Artificial Sequence
  Description of Artificial Sequence: Synthetic oligonucleotide
gcgccaauuccccaccaga

SEQ ID NO: 3082453 - RNA, 19 nt, Artificial Sequence
  Description of Artificial Sequence: Synthetic oligonucleotide
cacuugaaagaggcccuca

SEQ ID NO: 3082454 - RNA, 19 nt, Artificial Sequence
  Description of Artificial Sequence: Synthetic oligonucleotide
gcuggcgaauagacuacgc

SEQ ID NO: 3082455 - RNA, 19 nt, Artificial Sequence
  Description of Artificial Sequence: Synthetic oligonucleotide
ccacccuacccuugaccgg

SEQ ID NO: 3082456 - RNA, 19 nt, Artificial Sequence
  Description of Artificial Sequence: Synthetic oligonucleotide
ccagggagaggcaggcgac

SEQ ID NO: 3082457 - RNA, 19 nt, Artificial Sequence
  Description of Artificial Sequence: Synthetic oligonucleotide
cuuggccaucuggucugag

SEQ ID NO: 3082458 - RNA, 19 nt, Artificial Sequence
  Description of Artificial Sequence: Synthetic oligonucleotide
agaggcccucaccacccua

SEQ ID NO: 3082459 - RNA, 19 nt, Artificial Sequence
  Description of Artificial Sequence: Synthetic oligonucleotide
aggcgacucuucagggcag

SEQ ID NO: 3082460 - RNA, 19 nt, Artificial Sequence
  Description of Artificial Sequence: Synthetic oligonucleotide
uucaugcuucuggguuaga

SEQ ID NO: 3082461 - RNA, 19 nt, Artificial Sequence
  Description of Artificial Sequence: Synthetic oligonucleotide
ggcgacucuucagggcagg

SEQ ID NO: 3082462 - RNA, 19 nt, Artificial Sequence
  Description of Artificial Sequence: Synthetic oligonucleotide
gggcucauucuccgugcug

SEQ ID NO: 3082463 - RNA, 19 nt, Artificial Sequence
  Description of Artificial Sequence: Synthetic oligonucleotide
cuccgugcuggcgaauaga

SEQ ID NO: 3082464 - RNA, 19 nt, Artificial Sequence
  Description of Artificial Sequence: Synthetic oligonucleotide
gagaggcaggcgacucuuc

SEQ ID NO: 3082465 - RNA, 19 nt, Artificial Sequence
  Description of Artificial Sequence: Synthetic oligonucleotide
agagcaccagggagaggca

SEQ ID NO: 3082466 - RNA, 19 nt, Artificial Sequence
  Description of Artificial Sequence: Synthetic oligonucleotide
cuucagggcagguuuucuu

SEQ ID NO: 3082467 - RNA, 19 nt, Artificial Sequence
  Description of Artificial Sequence: Synthetic oligonucleotide
caaacccgggaccucacuu

SEQ ID NO: 3082468 - RNA, 19 nt, Artificial Sequence
  Description of Artificial Sequence: Synthetic oligonucleotide
ggccaucuggucugagcuc

SEQ ID NO: 3082469 - RNA, 19 nt, Artificial Sequence
  Description of Artificial Sequence: Synthetic oligonucleotide
cgggaccucacuugaaaga

SEQ ID NO: 3082470 - RNA, 19 nt, Artificial Sequence
  Description of Artificial Sequence: Synthetic oligonucleotide
gggcaaacccgggaccuca

SEQ ID NO: 3082471 - RNA, 19 nt, Artificial Sequence
  Description of Artificial Sequence: Synthetic oligonucleotide
ccucaccacccuacccuug

SEQ ID NO: 3082472 - RNA, 19 nt, Artificial Sequence
  Description of Artificial Sequence: Synthetic oligonucleotide
auucuccgugcuggcgaau

SEQ ID NO: 3082473 - RNA, 19 nt, Artificial Sequence
  Description of Artificial Sequence: Synthetic oligonucleotide
cuacgcagcuuggccaucu

SEQ ID NO: 3082474 - RNA, 19 nt, Artificial Sequence
  Description of Artificial Sequence: Synthetic oligonucleotide
ccaucuggucugagcucac

SEQ ID NO: 3082475 - RNA, 19 nt, Artificial Sequence
  Description of Artificial Sequence: Synthetic oligonucleotide
ggcaaacccgggaccucac

SEQ ID NO: 3082476 - RNA, 19 nt, Artificial Sequence
  Description of Artificial Sequence: Synthetic oligonucleotide
cccgggaccucacuugaaa

SEQ ID NO: 3082477 - RNA, 19 nt, Artificial Sequence
  Description of Artificial Sequence: Synthetic oligonucleotide
gggagaggcaggcgacucu

SEQ ID NO: 3082478 - RNA, 19 nt, Artificial Sequence
  Description of Artificial Sequence: Synthetic oligonucleotide
ggucugagcucacggucau

SEQ ID NO: 3082479 - RNA, 19 nt, Artificial Sequence
  Description of Artificial Sequence: Synthetic oligonucleotide
acccuacccuugaccggcu

SEQ ID NO: 3082480 - RNA, 19 nt, Artificial Sequence
  Description of Artificial Sequence: Synthetic oligonucleotide
gcaaacccgggaccucacu

SEQ ID NO: 3082481 - RNA, 19 nt, Artificial Sequence
  Description of Artificial Sequence: Synthetic oligonucleotide
ggagaggcaggcgacucuu

SEQ ID NO: 3082482 - RNA, 19 nt, Artificial Sequence
  Description of Artificial Sequence: Synthetic oligonucleotide
ggggcucauucuccgugcu

SEQ ID NO: 3082483 - RNA, 19 nt, Artificial Sequence
  Description of Artificial Sequence: Synthetic oligonucleotide
gggcgccaauuccccacca

SEQ ID NO: 3082484 - RNA, 19 nt, Artificial Sequence
  Description of Artificial Sequence: Synthetic oligonucleotide
acccgggaccucacuugaa

SEQ ID NO: 3082485 - RNA, 19 nt, Artificial Sequence
  Description of Artificial Sequence: Synthetic oligonucleotide
cagggagaggcaggcgacu

SEQ ID NO: 3082486 - RNA, 19 nt, Artificial Sequence
  Description of Artificial Sequence: Synthetic oligonucleotide
cccuacccuugaccggcug

SEQ ID NO: 3082487 - RNA, 19 nt, Artificial Sequence
  Description of Artificial Sequence: Synthetic oligonucleotide
gcuuggccaucuggucuga

SEQ ID NO: 3082488 - RNA, 19 nt, Artificial Sequence
  Description of Artificial Sequence: Synthetic oligonucleotide
ccgugcuggcgaauagacu

SEQ ID NO: 3082489 - RNA, 19 nt, Artificial Sequence
  Description of Artificial Sequence: Synthetic oligonucleotide
cccucaccacccuacccuu

SEQ ID NO: 3082490 - RNA, 19 nt, Artificial Sequence
  Description of Artificial Sequence: Synthetic oligonucleotide
cgaauagacuacgcagcuu

SEQ ID NO: 3082491 - RNA, 19 nt, Artificial Sequence
  Description of Artificial Sequence: Synthetic oligonucleotide
cgguuucaugugacugcgu

SEQ ID NO: 3082492 - RNA, 19 nt, Artificial Sequence
  Description of Artificial Sequence: Synthetic oligonucleotide
ugcauguagauaaagagcu

SEQ ID NO: 3082493 - RNA, 19 nt, Artificial Sequence
  Description of Artificial Sequence: Synthetic oligonucleotide
acugcauguagauaaagag

SEQ ID NO: 3082494 - RNA, 19 nt, Artificial Sequence
  Description of Artificial Sequence: Synthetic oligonucleotide
gauggcaaaaugcaaguag

SEQ ID NO: 3082495 - RNA, 19 nt, Artificial Sequence
  Description of Artificial Sequence: Synthetic oligonucleotide
guagauaaagagcuguccg

SEQ ID NO: 3082496 - RNA, 19 nt, Artificial Sequence
  Description of Artificial Sequence: Synthetic oligonucleotide
uacagcacaagugaggagg

SEQ ID NO: 3082497 - RNA, 19 nt, Artificial Sequence
  Description of Artificial Sequence: Synthetic oligonucleotide
aaaugcaaguagugcacac

SEQ ID NO: 3082498 - RNA, 19 nt, Artificial Sequence
  Description of Artificial Sequence: Synthetic oligonucleotide
caagugaggaggaacaggg

SEQ ID NO: 3082499 - RNA, 19 nt, Artificial Sequence
  Description of Artificial Sequence: Synthetic oligonucleotide
uccaggaccagccucagag

SEQ ID NO: 3082500 - RNA, 19 nt, Artificial Sequence
  Description of Artificial Sequence: Synthetic oligonucleotide
agugaggaggaacagggcg

SEQ ID NO: 3082501 - RNA, 19 nt, Artificial Sequence
  Description of Artificial Sequence: Synthetic oligonucleotide
aagcccggccaucagaccc

SEQ ID NO: 3082502 - RNA, 19 nt, Artificial Sequence
  Description of Artificial Sequence: Synthetic oligonucleotide
gaagauggcggugacaggg

SEQ ID NO: 3082503 - RNA, 19 nt, Artificial Sequence
  Description of Artificial Sequence: Synthetic oligonucleotide
aaguagugcacacugcgga

SEQ ID NO: 3082504 - RNA, 19 nt, Artificial Sequence
  Description of Artificial Sequence: Synthetic oligonucleotide
gagggguggacucaguagg

SEQ ID NO: 3082505 - RNA, 19 nt, Artificial Sequence
  Description of Artificial Sequence: Synthetic oligonucleotide
cugcauguagauaaagagc

SEQ ID NO: 3082506 - RNA, 19 nt, Artificial Sequence
  Description of Artificial Sequence: Synthetic oligonucleotide
aaaggcucccugcucauug

SEQ ID NO: 3082507 - RNA, 19 nt, Artificial Sequence
  Description of Artificial Sequence: Synthetic oligonucleotide
uagauaaagagcuguccgc

SEQ ID NO: 3082508 - RNA, 19 nt, Artificial Sequence
  Description of Artificial Sequence: Synthetic oligonucleotide
aggaauuccaggaccagcc

SEQ ID NO: 3082509 - RNA, 19 nt, Artificial Sequence
  Description of Artificial Sequence: Synthetic oligonucleotide
ucaucugucugaccgcagg

SEQ ID NO: 3082510 - RNA, 19 nt, Artificial Sequence
  Description of Artificial Sequence: Synthetic oligonucleotide
ugcucauuggcccuccucc

SEQ ID NO: 3082511 - RNA, 19 nt, Artificial Sequence
  Description of Artificial Sequence: Synthetic oligonucleotide
uguagauaaagagcugucc

SEQ ID NO: 3082512 - RNA, 19 nt, Artificial Sequence
  Description of Artificial Sequence: Synthetic oligonucleotide
caaaaugcaaguagugcac

SEQ ID NO: 3082513 - RNA, 19 nt, Artificial Sequence
  Description of Artificial Sequence: Synthetic oligonucleotide
acucaguaggcucccagcg

SEQ ID NO: 3082514 - RNA, 19 nt, Artificial Sequence
  Description of Artificial Sequence: Synthetic oligonucleotide
ucaguaggcucccagcggc

SEQ ID NO: 3082515 - RNA, 19 nt, Artificial Sequence
  Description of Artificial Sequence: Synthetic oligonucleotide
augcccaggacgaagaugg

SEQ ID NO: 3082516 - RNA, 19 nt, Artificial Sequence
  Description of Artificial Sequence: Synthetic oligonucleotide
accgacugcauguagauaa

SEQ ID NO: 3082517 - RNA, 19 nt, Artificial Sequence
  Description of Artificial Sequence: Synthetic oligonucleotide
uacaggaauuccaggacca

SEQ ID NO: 3082518 - RNA, 19 nt, Artificial Sequence
  Description of Artificial Sequence: Synthetic oligonucleotide
acgaagauggcggugacag

SEQ ID NO: 3082519 - RNA, 19 nt, Artificial Sequence
  Description of Artificial Sequence: Synthetic oligonucleotide
augcaaguagugcacacug

SEQ ID NO: 3082520 - RNA, 19 nt, Artificial Sequence
  Description of Artificial Sequence: Synthetic oligonucleotide
uggcaaaaugcaaguagug

SEQ ID NO: 3082521 - RNA, 19 nt, Artificial Sequence
  Description of Artificial Sequence: Synthetic oligonucleotide
agcacaagugaggaggaac

SEQ ID NO: 3082522 - RNA, 19 nt, Artificial Sequence
  Description of Artificial Sequence: Synthetic oligonucleotide
cacuacagcacaagugagg

SEQ ID NO: 3082523 - RNA, 19 nt, Artificial Sequence
  Description of Artificial Sequence: Synthetic oligonucleotide
auaaagagcuguccgcugu

SEQ ID NO: 3082524 - RNA, 19 nt, Artificial Sequence
  Description of Artificial Sequence: Synthetic oligonucleotide
guacaggaauuccaggacc

SEQ ID NO: 3082525 - RNA, 19 nt, Artificial Sequence
  Description of Artificial Sequence: Synthetic oligonucleotide
aggaggaacagggcgaugg

SEQ ID NO: 3082526 - RNA, 19 nt, Artificial Sequence
  Description of Artificial Sequence: Synthetic oligonucleotide
accccaaaaggcucccugc

SEQ ID NO: 3082527 - RNA, 19 nt, Artificial Sequence
  Description of Artificial Sequence: Synthetic oligonucleotide
gcaaguagugcacacugcg

SEQ ID NO: 3082528 - RNA, 19 nt, Artificial Sequence
  Description of Artificial Sequence: Synthetic oligonucleotide
gauaaagagcuguccgcug

SEQ ID NO: 3082529 - RNA, 19 nt, Artificial Sequence
  Description of Artificial Sequence: Synthetic oligonucleotide
uuggcccuccuccagaaga

SEQ ID NO: 3082530 - RNA, 19 nt, Artificial Sequence
  Description of Artificial Sequence: Synthetic oligonucleotide
agagcacccaccagaagcc

SEQ ID NO: 3082531 - RNA, 19 nt, Artificial Sequence
  Description of Artificial Sequence: Synthetic oligonucleotide
aaaaugcaaguagugcaca

SEQ ID NO: 3082532 - RNA, 19 nt, Artificial Sequence
  Description of Artificial Sequence: Synthetic oligonucleotide
caaguagugcacacugcgg

SEQ ID NO: 3082533 - RNA, 19 nt, Artificial Sequence
  Description of Artificial Sequence: Synthetic oligonucleotide
aaugcaaguagugcacacu

SEQ ID NO: 3082534 - RNA, 19 nt, Artificial Sequence
  Description of Artificial Sequence: Synthetic oligonucleotide
uuugcugagggguggacuc

SEQ ID NO: 3082535 - RNA, 19 nt, Artificial Sequence
  Description of Artificial Sequence: Synthetic oligonucleotide
gcaaaaugcaaguagugca

SEQ ID NO: 3082536 - RNA, 19 nt, Artificial Sequence
  Description of Artificial Sequence: Synthetic oligonucleotide
acuacagcacaagugagga

SEQ ID NO: 3082537 - RNA, 19 nt, Artificial Sequence
  Description of Artificial Sequence: Synthetic oligonucleotide
cagggcgauggcaaaaugc

SEQ ID NO: 3082538 - RNA, 19 nt, Artificial Sequence
  Description of Artificial Sequence: Synthetic oligonucleotide
aguagugcacacugcggag

SEQ ID NO: 3082539 - RNA, 19 nt, Artificial Sequence
  Description of Artificial Sequence: Synthetic oligonucleotide
acaagugaggaggaacagg

SEQ ID NO: 3082540 - RNA, 19 nt, Artificial Sequence
  Description of Artificial Sequence: Synthetic oligonucleotide
gccaucagaccccaaaagg

SEQ ID NO: 3082541 - RNA, 19 nt, Artificial Sequence
  Description of Artificial Sequence: Synthetic oligonucleotide
aaggcucccugcucauugg

SEQ ID NO: 3082542 - RNA, 19 nt, Artificial Sequence
  Description of Artificial Sequence: Synthetic oligonucleotide
agauaaagagcuguccgcu

SEQ ID NO: 3082543 - RNA, 19 nt, Artificial Sequence
  Description of Artificial Sequence: Synthetic oligonucleotide
uccggguacaggaauucca

SEQ ID NO: 3082544 - RNA, 19 nt, Artificial Sequence
  Description of Artificial Sequence: Synthetic oligonucleotide
aagugaggaggaacagggc

SEQ ID NO: 3082545 - RNA, 19 nt, Artificial Sequence
  Description of Artificial Sequence: Synthetic oligonucleotide
gaagaugcccaggacgaag

SEQ ID NO: 3082546 - RNA, 19 nt, Artificial Sequence
  Description of Artificial Sequence: Synthetic oligonucleotide
ugcaaguagugcacacugc

SEQ ID NO: 3082547 - RNA, 19 nt, Artificial Sequence
  Description of Artificial Sequence: Synthetic oligonucleotide
ugcggaggagggcuggccg

SEQ ID NO: 3082548 - RNA, 19 nt, Artificial Sequence
  Description of Artificial Sequence: Synthetic oligonucleotide
agaagcccggccaucagac

SEQ ID NO: 3082549 - RNA, 19 nt, Artificial Sequence
  Description of Artificial Sequence: Synthetic oligonucleotide
gacucaguaggcucccagc

SEQ ID NO: 3082550 - RNA, 19 nt, Artificial Sequence
  Description of Artificial Sequence: Synthetic oligonucleotide
ccagaagaugcccaggacg

SEQ ID NO: 3082551 - RNA, 19 nt, Artificial Sequence
  Description of Artificial Sequence: Synthetic oligonucleotide
ccaucagaccccaaaaggc

SEQ ID NO: 3082552 - RNA, 19 nt, Artificial Sequence
  Description of Artificial Sequence: Synthetic oligonucleotide
gaauuccaggaccagccuc

SEQ ID NO: 3082553 - RNA, 19 nt, Artificial Sequence
  Description of Artificial Sequence: Synthetic oligonucleotide
auguagauaaagagcuguc

SEQ ID NO: 3082554 - RNA, 19 nt, Artificial Sequence
  Description of Artificial Sequence: Synthetic oligonucleotide
cagaagaugcccaggacga

SEQ ID NO: 3082555 - RNA, 19 nt, Artificial Sequence
  Description of Artificial Sequence: Synthetic oligonucleotide
auggcaaaaugcaaguagu

SEQ ID NO: 3082556 - RNA, 19 nt, Artificial Sequence
  Description of Artificial Sequence: Synthetic oligonucleotide
uccuccagaagaugcccag

SEQ ID NO: 3082557 - RNA, 19 nt, Artificial Sequence
  Description of Artificial Sequence: Synthetic oligonucleotide
caucugucugaccgcaggg

SEQ ID NO: 3082558 - RNA, 19 nt, Artificial Sequence
  Description of Artificial Sequence: Synthetic oligonucleotide
ggcaaaaugcaaguagugc

SEQ ID NO: 3082559 - RNA, 19 nt, Artificial Sequence
  Description of Artificial Sequence: Synthetic oligonucleotide
gacugcauguagauaaaga

SEQ ID NO: 3082560 - RNA, 19 nt, Artificial Sequence
  Description of Artificial Sequence: Synthetic oligonucleotide
cucaguaggcucccagcgg

SEQ ID NO: 3082561 - RNA, 19 nt, Artificial Sequence
  Description of Artificial Sequence: Synthetic oligonucleotide
uagugcacacugcggagga

SEQ ID NO: 3082562 - RNA, 19 nt, Artificial Sequence
  Description of Artificial Sequence: Synthetic oligonucleotide
aagauggcggugacagggg

SEQ ID NO: 3082563 - RNA, 19 nt, Artificial Sequence
  Description of Artificial Sequence: Synthetic oligonucleotide
guagugcacacugcggagg

SEQ ID NO: 3082564 - RNA, 19 nt, Artificial Sequence
  Description of Artificial Sequence: Synthetic oligonucleotide
gaccccaaaaggcucccug

SEQ ID NO: 3082565 - RNA, 19 nt, Artificial Sequence
  Description of Artificial Sequence: Synthetic oligonucleotide
uccagaagaugcccaggac

SEQ ID NO: 3082566 - RNA, 19 nt, Artificial Sequence
  Description of Artificial Sequence: Synthetic oligonucleotide
gccacuacagcacaaguga

SEQ ID NO: 3082567 - RNA, 19 nt, Artificial Sequence
  Description of Artificial Sequence: Synthetic oligonucleotide
aucagaccccaaaaggcuc

SEQ ID NO: 3082568 - RNA, 19 nt, Artificial Sequence
  Description of Artificial Sequence: Synthetic oligonucleotide
gguacaggaauuccaggac

SEQ ID NO: 3082569 - RNA, 19 nt, Artificial Sequence
  Description of Artificial Sequence: Synthetic oligonucleotide
cccaggacgaagauggcgg

SEQ ID NO: 3082570 - RNA, 19 nt, Artificial Sequence
  Description of Artificial Sequence: Synthetic oligonucleotide
aagaugcccaggacgaaga

SEQ ID NO: 3082571 - RNA, 19 nt, Artificial Sequence
  Description of Artificial Sequence: Synthetic oligonucleotide
ucaccgacugcauguagau

SEQ ID NO: 3082572 - RNA, 19 nt, Artificial Sequence
  Description of Artificial Sequence: Synthetic oligonucleotide
ggcgauggcaaaaugcaag

SEQ ID NO: 3082573 - RNA, 19 nt, Artificial Sequence
  Description of Artificial Sequence: Synthetic oligonucleotide
aggcucccugcucauuggc

SEQ ID NO: 3082574 - RNA, 19 nt, Artificial Sequence
  Description of Artificial Sequence: Synthetic oligonucleotide
aucugucugaccgcagggg

SEQ ID NO: 3082575 - RNA, 19 nt, Artificial Sequence
  Description of Artificial Sequence: Synthetic oligonucleotide
agggcgauggcaaaaugca

SEQ ID NO: 3082576 - RNA, 19 nt, Artificial Sequence
  Description of Artificial Sequence: Synthetic oligonucleotide
acgagcuggucaccgacug

SEQ ID NO: 3082577 - RNA, 19 nt, Artificial Sequence
  Description of Artificial Sequence: Synthetic oligonucleotide
gaugcccaggacgaagaug

SEQ ID NO: 3082578 - RNA, 19 nt, Artificial Sequence
  Description of Artificial Sequence: Synthetic oligonucleotide
gugcacacugcggaggagg

SEQ ID NO: 3082579 - RNA, 19 nt, Artificial Sequence
  Description of Artificial Sequence: Synthetic oligonucleotide
ggguacaggaauuccagga

SEQ ID NO: 3082580 - RNA, 19 nt, Artificial Sequence
  Description of Artificial Sequence: Synthetic oligonucleotide
ccgcucaucugucugaccg

SEQ ID NO: 3082581 - RNA, 19 nt, Artificial Sequence
  Description of Artificial Sequence: Synthetic oligonucleotide
  modified_base (4)..(4): a, c, u, g, unknown or other
ggcnccaacgagcugguca

SEQ ID NO: 3082582 - RNA, 19 nt, Artificial Sequence
  Description of Artificial Sequence: Synthetic oligonucleotide
aacagggcgauggcaaaau

SEQ ID NO: 3082583 - RNA, 19 nt, Artificial Sequence
  Description of Artificial Sequence: Synthetic oligonucleotide
aggacgaagauggcgguga

SEQ ID NO: 3082584 - RNA, 19 nt, Artificial Sequence
  Description of Artificial Sequence: Synthetic oligonucleotide
uaaagagcuguccgcuguu

SEQ ID NO: 3082585 - RNA, 19 nt, Artificial Sequence
  Description of Artificial Sequence: Synthetic oligonucleotide
agggguggacucaguaggc

SEQ ID NO: 3082586 - RNA, 19 nt, Artificial Sequence
  Description of Artificial Sequence: Synthetic oligonucleotide
cuacagcacaagugaggag

SEQ ID NO: 3082587 - RNA, 19 nt, Artificial Sequence
  Description of Artificial Sequence: Synthetic oligonucleotide
caacgagcuggucaccgac

SEQ ID NO: 3082588 - RNA, 19 nt, Artificial Sequence
  Description of Artificial Sequence: Synthetic oligonucleotide
gagcuggucaccgacugca

SEQ ID NO: 3082589 - RNA, 19 nt, Artificial Sequence
  Description of Artificial Sequence: Synthetic oligonucleotide
cacaagugaggaggaacag

SEQ ID NO: 3082590 - RNA, 19 nt, Artificial Sequence
  Description of Artificial Sequence: Synthetic oligonucleotide
acccaccagaagcccggcc

SEQ ID NO: 3082591 - RNA, 19 nt, Artificial Sequence
  Description of Artificial Sequence: Synthetic oligonucleotide
acagggcgauggcaaaaug

SEQ ID NO: 3082592 - RNA, 19 nt, Artificial Sequence
  Description of Artificial Sequence: Synthetic oligonucleotide
ggccaucagaccccaaaag

SEQ ID NO: 3082593 - RNA, 19 nt, Artificial Sequence
  Description of Artificial Sequence: Synthetic oligonucleotide
caucagaccccaaaaggcu

SEQ ID NO: 3082594 - RNA, 19 nt, Artificial Sequence
  Description of Artificial Sequence: Synthetic oligonucleotide
caggaccagccucagagca

SEQ ID NO: 3082595 - RNA, 19 nt, Artificial Sequence
  Description of Artificial Sequence: Synthetic oligonucleotide
cuccagaagaugcccagga

SEQ ID NO: 3082596 - RNA, 19 nt, Artificial Sequence
  Description of Artificial Sequence: Synthetic oligonucleotide
  modified_base (3)..(3): a, c, u, g, unknown or other
gcnccaacgagcuggucac

SEQ ID NO: 3082597 - RNA, 19 nt, Artificial Sequence
  Description of Artificial Sequence: Synthetic oligonucleotide
gaagcccggccaucagacc

SEQ ID NO: 3082598 - RNA, 19 nt, Artificial Sequence
  Description of Artificial Sequence: Synthetic oligonucleotide
gguggacucaguaggcucc

SEQ ID NO: 3082599 - RNA, 19 nt, Artificial Sequence
  Description of Artificial Sequence: Synthetic oligonucleotide
ugcugagggguggacucag

SEQ ID NO: 3082600 - RNA, 19 nt, Artificial Sequence
  Description of Artificial Sequence: Synthetic oligonucleotide
aacgagcuggucaccgacu

SEQ ID NO: 3082601 - RNA, 19 nt, Artificial Sequence
  Description of Artificial Sequence: Synthetic oligonucleotide
gcucccugcucauuggccc

SEQ ID NO: 3082602 - RNA, 19 nt, Artificial Sequence
  Description of Artificial Sequence: Synthetic oligonucleotide
agcacccaccagaagcccg

SEQ ID NO: 3082603 - RNA, 19 nt, Artificial Sequence
  Description of Artificial Sequence: Synthetic oligonucleotide
auuggcccuccuccagaag

SEQ ID NO: 3082604 - RNA, 19 nt, Artificial Sequence
  Description of Artificial Sequence: Synthetic oligonucleotide
aggaccagccucagagcac

SEQ ID NO: 3082605 - RNA, 19 nt, Artificial Sequence
  Description of Artificial Sequence: Synthetic oligonucleotide
gugaggaggaacagggcga

SEQ ID NO: 3082606 - RNA, 19 nt, Artificial Sequence
  Description of Artificial Sequence: Synthetic oligonucleotide
cucagagcacccaccagaa

SEQ ID NO: 3082607 - RNA, 19 nt, Artificial Sequence
  Description of Artificial Sequence: Synthetic oligonucleotide
ggacucaguaggcucccag

SEQ ID NO: 3082608 - RNA, 19 nt, Artificial Sequence
  Description of Artificial Sequence: Synthetic oligonucleotide
cucaucugucugaccgcag

SEQ ID NO: 3082609 - RNA, 19 nt, Artificial Sequence
  Description of Artificial Sequence: Synthetic oligonucleotide
cuggccgcucaucugucug

SEQ ID NO: 3082610 - RNA, 19 nt, Artificial Sequence
  Description of Artificial Sequence: Synthetic oligonucleotide
gucaccgacugcauguaga

SEQ ID NO: 3082611 - RNA, 19 nt, Artificial Sequence
  Description of Artificial Sequence: Synthetic oligonucleotide
ccggguacaggaauuccag

SEQ ID NO: 3082612 - RNA, 19 nt, Artificial Sequence
  Description of Artificial Sequence: Synthetic oligonucleotide
uggccgcucaucugucuga

SEQ ID NO: 3082613 - RNA, 19 nt, Artificial Sequence
  Description of Artificial Sequence: Synthetic oligonucleotide
uggcccuccuccagaagau

SEQ ID NO: 3082614 - RNA, 19 nt, Artificial Sequence
  Description of Artificial Sequence: Synthetic oligonucleotide
acagcacaagugaggagga

SEQ ID NO: 3082615 - RNA, 19 nt, Artificial Sequence
  Description of Artificial Sequence: Synthetic oligonucleotide
cuggucaccgacugcaugu

SEQ ID NO: 3082616 - RNA, 19 nt, Artificial Sequence
  Description of Artificial Sequence: Synthetic oligonucleotide
ggccacuacagcacaagug

SEQ ID NO: 3082617 - RNA, 19 nt, Artificial Sequence
  Description of Artificial Sequence: Synthetic oligonucleotide
caguaggcucccagcggcc

SEQ ID NO: 3082618 - RNA, 19 nt, Artificial Sequence
  Description of Artificial Sequence: Synthetic oligonucleotide
ccacuacagcacaagugag

SEQ ID NO: 3082619 - RNA, 19 nt, Artificial Sequence
  Description of Artificial Sequence: Synthetic oligonucleotide
ggaccagccucagagcacc

SEQ ID NO: 3082620 - RNA, 19 nt, Artificial Sequence
  Description of Artificial Sequence: Synthetic oligonucleotide
ucuuugcugagggguggac

SEQ ID NO: 3082621 - RNA, 19 nt, Artificial Sequence
  Description of Artificial Sequence: Synthetic oligonucleotide
gcacaagugaggaggaaca

SEQ ID NO: 3082622 - RNA, 19 nt, Artificial Sequence
  Description of Artificial Sequence: Synthetic oligonucleotide
agaugcccaggacgaagau

SEQ ID NO: 3082623 - RNA, 19 nt, Artificial Sequence
  Description of Artificial Sequence: Synthetic oligonucleotide
cuccggguacaggaauucc

SEQ ID NO: 3082624 - RNA, 19 nt, Artificial Sequence
  Description of Artificial Sequence: Synthetic oligonucleotide
ggaggaacagggcgauggc

SEQ ID NO: 3082625 - RNA, 19 nt, Artificial Sequence
  Description of Artificial Sequence: Synthetic oligonucleotide
ugcccaggacgaagauggc

SEQ ID NO: 3082626 - RNA, 19 nt, Artificial Sequence
  Description of Artificial Sequence: Synthetic oligonucleotide
uuccaggaccagccucaga

SEQ ID NO: 3082627 - RNA, 19 nt, Artificial Sequence
  Description of Artificial Sequence: Synthetic oligonucleotide
aguaggcucccagcggcca

SEQ ID NO: 3082628 - RNA, 19 nt, Artificial Sequence
  Description of Artificial Sequence: Synthetic oligonucleotide
ccagcggccacuacagcac

SEQ ID NO: 3082629 - RNA, 19 nt, Artificial Sequence
  Description of Artificial Sequence: Synthetic oligonucleotide
uugcugagggguggacuca

SEQ ID NO: 3082630 - RNA, 19 nt, Artificial Sequence
  Description of Artificial Sequence: Synthetic oligonucleotide
gagcacccaccagaagccc

SEQ ID NO: 3082631 - RNA, 19 nt, Artificial Sequence
  Description of Artificial Sequence: Synthetic oligonucleotide
gaacagggcgauggcaaaa

SEQ ID NO: 3082632 - RNA, 19 nt, Artificial Sequence
  Description of Artificial Sequence: Synthetic oligonucleotide
ggguggacucaguaggcuc

SEQ ID NO: 3082633 - RNA, 19 nt, Artificial Sequence
  Description of Artificial Sequence: Synthetic oligonucleotide
gacgaagauggcggugaca

SEQ ID NO: 3082634 - RNA, 19 nt, Artificial Sequence
  Description of Artificial Sequence: Synthetic oligonucleotide
cugcucauuggcccuccuc

SEQ ID NO: 3082635 - RNA, 19 nt, Artificial Sequence
  Description of Artificial Sequence: Synthetic oligonucleotide
ccucagagcacccaccaga

SEQ ID NO: 3082636 - RNA, 19 nt, Artificial Sequence
  Description of Artificial Sequence: Synthetic oligonucleotide
gagggcuggccgcucaucu

SEQ ID NO: 3082637 - RNA, 19 nt, Artificial Sequence
  Description of Artificial Sequence: Synthetic oligonucleotide
gcccaggacgaagauggcg

SEQ ID NO: 3082638 - RNA, 19 nt, Artificial Sequence
  Description of Artificial Sequence: Synthetic oligonucleotide
gcauguagauaaagagcug

SEQ ID NO: 3082639 - RNA, 19 nt, Artificial Sequence
  Description of Artificial Sequence: Synthetic oligonucleotide
cagaagcccggccaucaga

SEQ ID NO: 3082640 - RNA, 19 nt, Artificial Sequence
  Description of Artificial Sequence: Synthetic oligonucleotide
ggucaccgacugcauguag

SEQ ID NO: 3082641 - RNA, 19 nt, Artificial Sequence
  Description of Artificial Sequence: Synthetic oligonucleotide
agugcacacugcggaggag

SEQ ID NO: 3082642 - RNA, 19 nt, Artificial Sequence
  Description of Artificial Sequence: Synthetic oligonucleotide
guggacucaguaggcuccc

SEQ ID NO: 3082643 - RNA, 19 nt, Artificial Sequence
  Description of Artificial Sequence: Synthetic oligonucleotide
cauuggcccuccuccagaa

SEQ ID NO: 3082644 - RNA, 19 nt, Artificial Sequence
  Description of Artificial Sequence: Synthetic oligonucleotide
cagaccccaaaaggcuccc

SEQ ID NO: 3082645 - RNA, 19 nt, Artificial Sequence
  Description of Artificial Sequence: Synthetic oligonucleotide
gcacccaccagaagcccgg

SEQ ID NO: 3082646 - RNA, 19 nt, Artificial Sequence
  Description of Artificial Sequence: Synthetic oligonucleotide
caggacgaagauggcggug

SEQ ID NO: 3082647 - RNA, 19 nt, Artificial Sequence
  Description of Artificial Sequence: Synthetic oligonucleotide
gcucccagcggccacuaca

SEQ ID NO: 3082648 - RNA, 19 nt, Artificial Sequence
  Description of Artificial Sequence: Synthetic oligonucleotide
agaagaugcccaggacgaa

SEQ ID NO: 3082649 - RNA, 19 nt, Artificial Sequence
  Description of Artificial Sequence: Synthetic oligonucleotide
cacugcggaggagggcugg

SEQ ID NO: 3082650 - RNA, 19 nt, Artificial Sequence
  Description of Artificial Sequence: Synthetic oligonucleotide
cugagggguggacucagua

SEQ ID NO: 3082651 - RNA, 19 nt, Artificial Sequence
  Description of Artificial Sequence: Synthetic oligonucleotide
gaggagggcuggccgcuca

SEQ ID NO: 3082652 - RNA, 19 nt, Artificial Sequence
  Description of Artificial Sequence: Synthetic oligonucleotide
cacacugcggaggagggcu

SEQ ID NO: 3082653 - RNA, 19 nt, Artificial Sequence
  Description of Artificial Sequence: Synthetic oligonucleotide
uaggcucccagcggccacu

SEQ ID NO: 3082654 - RNA, 19 nt, Artificial Sequence
  Description of Artificial Sequence: Synthetic oligonucleotide
ccaggaccagccucagagc

SEQ ID NO: 3082655 - RNA, 19 nt, Artificial Sequence
  Description of Artificial Sequence: Synthetic oligonucleotide
gcgauggcaaaaugcaagu

SEQ ID NO: 3082656 - RNA, 19 nt, Artificial Sequence
  Description of Artificial Sequence: Synthetic oligonucleotide
uggucaccgacugcaugua

SEQ ID NO: 3082657 - RNA, 19 nt, Artificial Sequence
  Description of Artificial Sequence: Synthetic oligonucleotide
ccuccuccagaagaugccc

SEQ ID NO: 3082658 - RNA, 19 nt, Artificial Sequence
  Description of Artificial Sequence: Synthetic oligonucleotide
cggguacaggaauuccagg

SEQ ID NO: 3082659 - RNA, 19 nt, Artificial Sequence
  Description of Artificial Sequence: Synthetic oligonucleotide
cugcggaggagggcuggcc

SEQ ID NO: 3082660 - RNA, 19 nt, Artificial Sequence
  Description of Artificial Sequence: Synthetic oligonucleotide
accagccucagagcaccca

SEQ ID NO: 3082661 - RNA, 19 nt, Artificial Sequence
  Description of Artificial Sequence: Synthetic oligonucleotide
uggacucaguaggcuccca

SEQ ID NO: 3082662 - RNA, 19 nt, Artificial Sequence
  Description of Artificial Sequence: Synthetic oligonucleotide
gcucauuggcccuccucca

SEQ ID NO: 3082663 - RNA, 19 nt, Artificial Sequence
  Description of Artificial Sequence: Synthetic oligonucleotide
cuuugcugagggguggacu

SEQ ID NO: 3082664 - RNA, 19 nt, Artificial Sequence
  Description of Artificial Sequence: Synthetic oligonucleotide
ggcucccugcucauuggcc

SEQ ID NO: 3082665 - RNA, 19 nt, Artificial Sequence
  Description of Artificial Sequence: Synthetic oligonucleotide
cccaaaaggcucccugcuc

SEQ ID NO: 3082666 - RNA, 19 nt, Artificial Sequence
  Description of Artificial Sequence: Synthetic oligonucleotide
ggacgaagauggcggugac

SEQ ID NO: 3082667 - RNA, 19 nt, Artificial Sequence
  Description of Artificial Sequence: Synthetic oligonucleotide
  modified_base (2)..(2): a, c, u, g, unknown or other
cnccaacgagcuggucacc

SEQ ID NO: 3082668 - RNA, 19 nt, Artificial Sequence
  Description of Artificial Sequence: Synthetic oligonucleotide
gcucaucugucugaccgca

SEQ ID NO: 3082669 - RNA, 19 nt, Artificial Sequence
  Description of Artificial Sequence: Synthetic oligonucleotide
ccuccagaagaugcccagg

SEQ ID NO: 3082670 - RNA, 19 nt, Artificial Sequence
  Description of Artificial Sequence: Synthetic oligonucleotide
gucuuugcugaggggugga

SEQ ID NO: 3082671 - RNA, 19 nt, Artificial Sequence
  Description of Artificial Sequence: Synthetic oligonucleotide
gccucagagcacccaccag

SEQ ID NO: 3082672 - RNA, 19 nt, Artificial Sequence
  Description of Artificial Sequence: Synthetic oligonucleotide
gcggccacuacagcacaag

SEQ ID NO: 3082673 - RNA, 19 nt, Artificial Sequence
  Description of Artificial Sequence: Synthetic oligonucleotide
ggaauuccaggaccagccu

SEQ ID NO: 3082674 - RNA, 19 nt, Artificial Sequence
  Description of Artificial Sequence: Synthetic oligonucleotide
gcggaggagggcuggccgc

SEQ ID NO: 3082675 - RNA, 19 nt, Artificial Sequence
  Description of Artificial Sequence: Synthetic oligonucleotide
aggagggcuggccgcucau

SEQ ID NO: 3082676 - RNA, 19 nt, Artificial Sequence
  Description of Artificial Sequence: Synthetic oligonucleotide
gaccagccucagagcaccc

SEQ ID NO: 3082677 - RNA, 19 nt, Artificial Sequence
  Description of Artificial Sequence: Synthetic oligonucleotide
cgaagauggcggugacagg

SEQ ID NO: 3082678 - RNA, 19 nt, Artificial Sequence
  Description of Artificial Sequence: Synthetic oligonucleotide
agaccccaaaaggcucccu

SEQ ID NO: 3082679 - RNA, 19 nt, Artificial Sequence
  Description of Artificial Sequence: Synthetic oligonucleotide
ucccugcucauuggcccuc

SEQ ID NO: 3082680 - RNA, 19 nt, Artificial Sequence
  Description of Artificial Sequence: Synthetic oligonucleotide
acacugcggaggagggcug

SEQ ID NO: 3082681 - RNA, 19 nt, Artificial Sequence
  Description of Artificial Sequence: Synthetic oligonucleotide
caaaaggcucccugcucau

SEQ ID NO: 3082682 - RNA, 19 nt, Artificial Sequence
  Description of Artificial Sequence: Synthetic oligonucleotide
cgcucaucugucugaccgc

SEQ ID NO: 3082683 - RNA, 19 nt, Artificial Sequence
  Description of Artificial Sequence: Synthetic oligonucleotide
cgacugcauguagauaaag

SEQ ID NO: 3082684 - RNA, 19 nt, Artificial Sequence
  Description of Artificial Sequence: Synthetic oligonucleotide
cagcggccacuacagcaca

SEQ ID NO: 3082685 - RNA, 19 nt, Artificial Sequence
  Description of Artificial Sequence: Synthetic oligonucleotide
ccagaagcccggccaucag

SEQ ID NO: 3082686 - RNA, 19 nt, Artificial Sequence
  Description of Artificial Sequence: Synthetic oligonucleotide
gcuccggguacaggaauuc

SEQ ID NO: 3082687 - RNA, 19 nt, Artificial Sequence
  Description of Artificial Sequence: Synthetic oligonucleotide
cacccaccagaagcccggc

SEQ ID NO: 3082688 - RNA, 19 nt, Artificial Sequence
  Description of Artificial Sequence: Synthetic oligonucleotide
gggcuggccgcucaucugu

SEQ ID NO: 3082689 - RNA, 19 nt, Artificial Sequence
  Description of Artificial Sequence: Synthetic oligonucleotide
gccgcucaucugucugacc

SEQ ID NO: 3082690 - RNA, 19 nt, Artificial Sequence
  Description of Artificial Sequence: Synthetic oligonucleotide
cucccugcucauuggcccu

SEQ ID NO: 3082691 - RNA, 19 nt, Artificial Sequence
  Description of Artificial Sequence: Synthetic oligonucleotide
agcuggucaccgacugcau

SEQ ID NO: 3082692 - RNA, 19 nt, Artificial Sequence
  Description of Artificial Sequence: Synthetic oligonucleotide
ggccgcucaucugucugac

SEQ ID NO: 3082693 - RNA, 19 nt, Artificial Sequence
  Description of Artificial Sequence: Synthetic oligonucleotide
ccaacgagcuggucaccga

SEQ ID NO: 3082694 - RNA, 19 nt, Artificial Sequence
  Description of Artificial Sequence: Synthetic oligonucleotide
ggcccuccuccagaagaug

SEQ ID NO: 3082695 - RNA, 19 nt, Artificial Sequence
  Description of Artificial Sequence: Synthetic oligonucleotide
agcggccacuacagcacaa

SEQ ID NO: 3082696 - RNA, 19 nt, Artificial Sequence
  Description of Artificial Sequence: Synthetic oligonucleotide
gggcgauggcaaaaugcaa

SEQ ID NO: 3082697 - RNA, 19 nt, Artificial Sequence
  Description of Artificial Sequence: Synthetic oligonucleotide
cgagcuggucaccgacugc

SEQ ID NO: 3082698 - RNA, 19 nt, Artificial Sequence
  Description of Artificial Sequence: Synthetic oligonucleotide
ccggccaucagaccccaaa

SEQ ID NO: 3082699 - RNA, 19 nt, Artificial Sequence
  Description of Artificial Sequence: Synthetic oligonucleotide
cagcacaagugaggaggaa

SEQ ID NO: 3082700 - RNA, 19 nt, Artificial Sequence
  Description of Artificial Sequence: Synthetic oligonucleotide
ccgacugcauguagauaaa

SEQ ID NO: 3082701 - RNA, 19 nt, Artificial Sequence
  Description of Artificial Sequence: Synthetic oligonucleotide
caccgacugcauguagaua

SEQ ID NO: 3082702 - RNA, 19 nt, Artificial Sequence
  Description of Artificial Sequence: Synthetic oligonucleotide
ggagggcuggccgcucauc

SEQ ID NO: 3082703 - RNA, 19 nt, Artificial Sequence
  Description of Artificial Sequence: Synthetic oligonucleotide
cccugcucauuggcccucc

SEQ ID NO: 3082704 - RNA, 19 nt, Artificial Sequence
  Description of Artificial Sequence: Synthetic oligonucleotide
gcuggccgcucaucugucu

SEQ ID NO: 3082705 - RNA, 19 nt, Artificial Sequence
  Description of Artificial Sequence: Synthetic oligonucleotide
ggggcuccggguacaggaa

SEQ ID NO: 3082706 - RNA, 19 nt, Artificial Sequence
  Description of Artificial Sequence: Synthetic oligonucleotide
ggcuggccgcucaucuguc

SEQ ID NO: 3082707 - RNA, 19 nt, Artificial Sequence
  Description of Artificial Sequence: Synthetic oligonucleotide
ccaggacgaagauggcggu

SEQ ID NO: 3082708 - RNA, 19 nt, Artificial Sequence
  Description of Artificial Sequence: Synthetic oligonucleotide
cggccaucagaccccaaaa

SEQ ID NO: 3082709 - RNA, 19 nt, Artificial Sequence
  Description of Artificial Sequence: Synthetic oligonucleotide
aggcucccagcggccacua

SEQ ID NO: 3082710 - RNA, 19 nt, Artificial Sequence
  Description of Artificial Sequence: Synthetic oligonucleotide
gggcuccggguacaggaau

SEQ ID NO: 3082711 - RNA, 19 nt, Artificial Sequence
  Description of Artificial Sequence: Synthetic oligonucleotide
ggcucccagcggccacuac

SEQ ID NO: 3082712 - RNA, 19 nt, Artificial Sequence
  Description of Artificial Sequence: Synthetic oligonucleotide
ggaggagggcuggccgcuc

SEQ ID NO: 3082713 - RNA, 19 nt, Artificial Sequence
  Description of Artificial Sequence: Synthetic oligonucleotide
cgauggcaaaaugcaagua

SEQ ID NO: 3082714 - RNA, 19 nt, Artificial Sequence
  Description of Artificial Sequence: Synthetic oligonucleotide
ggcuccggguacaggaauu

SEQ ID NO: 3082715 - RNA, 19 nt, Artificial Sequence
  Description of Artificial Sequence: Synthetic oligonucleotide
  modified_base (6)..(6): a, c, u, g, unknown or other
ggggcnccaacgagcuggu

SEQ ID NO: 3082716 - RNA, 19 nt, Artificial Sequence
  Description of Artificial Sequence: Synthetic oligonucleotide
  modified_base (5)..(5): a, c, u, g, unknown or other
gggcnccaacgagcugguc

SEQ ID NO: 3082717 - RNA, 19 nt, Artificial Sequence
  Description of Artificial Sequence: Synthetic oligonucleotide
gcugagggguggacucagu

SEQ ID NO: 3082718 - RNA, 19 nt, Artificial Sequence
  Description of Artificial Sequence: Synthetic oligonucleotide
gcccggccaucagacccca

SEQ ID NO: 3082719 - RNA, 19 nt, Artificial Sequence
  Description of Artificial Sequence: Synthetic oligonucleotide
cggccacuacagcacaagu

SEQ ID NO: 3082720 - RNA, 19 nt, Artificial Sequence
  Description of Artificial Sequence: Synthetic oligonucleotide
ccugcucauuggcccuccu

SEQ ID NO: 3082721 - RNA, 19 nt, Artificial Sequence
  Description of Artificial Sequence: Synthetic oligonucleotide
cggaggagggcuggccgcu

SEQ ID NO: 3082722 - RNA, 19 nt, Artificial Sequence
  Description of Artificial Sequence: Synthetic oligonucleotide
cccggccaucagaccccaa

SEQ ID NO: 3082723 - RNA, 19 nt, Artificial Sequence
  Description of Artificial Sequence: Synthetic oligonucleotide
  modified_base (1)..(1): a, c, u, g, unknown or other
nccaacgagcuggucaccg

SEQ ID NO: 3082724 - RNA, 19 nt, Artificial Sequence
  Description of Artificial Sequence: Synthetic oligonucleotide
aauaaauaauauuuucuuc

SEQ ID NO: 3082725 - RNA, 19 nt, Artificial Sequence
  Description of Artificial Sequence: Synthetic oligonucleotide
agaagaaagagucaaaauc

SEQ ID NO: 3082726 - RNA, 19 nt, Artificial Sequence
  Description of Artificial Sequence: Synthetic oligonucleotide
auaaauaauauuuucuucu

SEQ ID NO: 3082727 - RNA, 19 nt, Artificial Sequence
  Description of Artificial Sequence: Synthetic oligonucleotide
aauauuuucuucuuuugca

SEQ ID NO: 3082728 - RNA, 19 nt, Artificial Sequence
  Description of Artificial Sequence: Synthetic oligonucleotide
ugaauaaauaauauuuucu

SEQ ID NO: 3082729 - RNA, 19 nt, Artificial Sequence
  Description of Artificial Sequence: Synthetic oligonucleotide
acuuugucaccuuugaccc

SEQ ID NO: 3082730 - RNA, 19 nt, Artificial Sequence
  Description of Artificial Sequence: Synthetic oligonucleotide
ucuuuugcagagaagaaag

SEQ ID NO: 3082731 - RNA, 19 nt, Artificial Sequence
  Description of Artificial Sequence: Synthetic oligonucleotide
aaagagucaaaauccccgc

SEQ ID NO: 3082732 - RNA, 19 nt, Artificial Sequence
  Description of Artificial Sequence: Synthetic oligonucleotide
augaauaaauaauauuuuc

SEQ ID NO: 3082733 - RNA, 19 nt, Artificial Sequence
  Description of Artificial Sequence: Synthetic oligonucleotide
gaagaaagagucaaaaucc

SEQ ID NO: 3082734 - RNA, 19 nt, Artificial Sequence
  Description of Artificial Sequence: Synthetic oligonucleotide
aauaauauuuucuucuuuu

SEQ ID NO: 3082735 - RNA, 19 nt, Artificial Sequence
  Description of Artificial Sequence: Synthetic oligonucleotide
agggaucccauucugaggc

SEQ ID NO: 3082736 - RNA, 19 nt, Artificial Sequence
  Description of Artificial Sequence: Synthetic oligonucleotide
acuuguuuuccccacuucc

SEQ ID NO: 3082737 - RNA, 19 nt, Artificial Sequence
  Description of Artificial Sequence: Synthetic oligonucleotide
uaauauuuucuucuuuugc

SEQ ID NO: 3082738 - RNA, 19 nt, Artificial Sequence
  Description of Artificial Sequence: Synthetic oligonucleotide
gacuuugucaccuuugacc

SEQ ID NO: 3082739 - RNA, 19 nt, Artificial Sequence
  Description of Artificial Sequence: Synthetic oligonucleotide
gaaagagucaaaauccccg

SEQ ID NO: 3082740 - RNA, 19 nt, Artificial Sequence
  Description of Artificial Sequence: Synthetic oligonucleotide
uucguugaagaucugagga

SEQ ID NO: 3082741 - RNA, 19 nt, Artificial Sequence
  Description of Artificial Sequence: Synthetic oligonucleotide
aaagggaucccauucugag

SEQ ID NO: 3082742 - RNA, 19 nt, Artificial Sequence
  Description of Artificial Sequence: Synthetic oligonucleotide
aagaaagagucaaaauccc

SEQ ID NO: 3082743 - RNA, 19 nt, Artificial Sequence
  Description of Artificial Sequence: Synthetic oligonucleotide
ucuucuuuugcagagaaga

SEQ ID NO: 3082744 - RNA, 19 nt, Artificial Sequence
  Description of Artificial Sequence: Synthetic oligonucleotide
ucuucguugaagaucugag

SEQ ID NO: 3082745 - RNA, 19 nt, Artificial Sequence
  Description of Artificial Sequence: Synthetic oligonucleotide
uuugcagagaagaaagagu

SEQ ID NO: 3082746 - RNA, 19 nt, Artificial Sequence
  Description of Artificial Sequence: Synthetic oligonucleotide
uugcagagaagaaagaguc

SEQ ID NO: 3082747 - RNA, 19 nt, Artificial Sequence
  Description of Artificial Sequence: Synthetic oligonucleotide
uucucucucauccacuugc

SEQ ID NO: 3082748 - RNA, 19 nt, Artificial Sequence
  Description of Artificial Sequence: Synthetic oligonucleotide
ggaacauucucucucaucc

SEQ ID NO: 3082749 - RNA, 19 nt, Artificial Sequence
  Description of Artificial Sequence: Synthetic oligonucleotide
auaauauuuucuucuuuug

SEQ ID NO: 3082750 - RNA, 19 nt, Artificial Sequence
  Description of Artificial Sequence: Synthetic oligonucleotide
aaaauccccgcaguauugc

SEQ ID NO: 3082751 - RNA, 19 nt, Artificial Sequence
  Description of Artificial Sequence: Synthetic oligonucleotide
cauugggaagggaagaagc

SEQ ID NO: 3082752 - RNA, 19 nt, Artificial Sequence
  Description of Artificial Sequence: Synthetic oligonucleotide
uauugcucuucguugaaga

SEQ ID NO: 3082753 - RNA, 19 nt, Artificial Sequence
  Description of Artificial Sequence: Synthetic oligonucleotide
agaaagagucaaaaucccc

SEQ ID NO: 3082754 - RNA, 19 nt, Artificial Sequence
  Description of Artificial Sequence: Synthetic oligonucleotide
aagggaucccauucugagg

SEQ ID NO: 3082755 - RNA, 19 nt, Artificial Sequence
  Description of Artificial Sequence: Synthetic oligonucleotide
agagucaaaauccccgcag

SEQ ID NO: 3082756 - RNA, 19 nt, Artificial Sequence
  Description of Artificial Sequence: Synthetic oligonucleotide
ucugaggaggcaaagggau

SEQ ID NO: 3082757 - RNA, 19 nt, Artificial Sequence
  Description of Artificial Sequence: Synthetic oligonucleotide
gaauaaauaauauuuucuu

SEQ ID NO: 3082758 - RNA, 19 nt, Artificial Sequence
  Description of Artificial Sequence: Synthetic oligonucleotide
uaaauaauauuuucuucuu

SEQ ID NO: 3082759 - RNA, 19 nt, Artificial Sequence
  Description of Artificial Sequence: Synthetic oligonucleotide
ucuccauugggaagggaag

SEQ ID NO: 3082760 - RNA, 19 nt, Artificial Sequence
  Description of Artificial Sequence: Synthetic oligonucleotide
cuuugugugacuuguuuuc

SEQ ID NO: 3082761 - RNA, 19 nt, Artificial Sequence
  Description of Artificial Sequence: Synthetic oligonucleotide
aagaagcuuccucagacuu

SEQ ID NO: 3082762 - RNA, 19 nt, Artificial Sequence
  Description of Artificial Sequence: Synthetic oligonucleotide
aaaccaaggaaugaauaaa

SEQ ID NO: 3082763 - RNA, 19 nt, Artificial Sequence
  Description of Artificial Sequence: Synthetic oligonucleotide
cuucguugaagaucugagg

SEQ ID NO: 3082764 - RNA, 19 nt, Artificial Sequence
  Description of Artificial Sequence: Synthetic oligonucleotide
ugugugacuuguuuucccc

SEQ ID NO: 3082765 - RNA, 19 nt, Artificial Sequence
  Description of Artificial Sequence: Synthetic oligonucleotide
ucguugaagaucugaggag

SEQ ID NO: 3082766 - RNA, 19 nt, Artificial Sequence
  Description of Artificial Sequence: Synthetic oligonucleotide
ucagacuuugucaccuuug

SEQ ID NO: 3082767 - RNA, 19 nt, Artificial Sequence
  Description of Artificial Sequence: Synthetic oligonucleotide
ucaaaauccccgcaguauu

SEQ ID NO: 3082768 - RNA, 19 nt, Artificial Sequence
  Description of Artificial Sequence: Synthetic oligonucleotide
cacaucuccauugggaagg

SEQ ID NO: 3082769 - RNA, 19 nt, Artificial Sequence
  Description of Artificial Sequence: Synthetic oligonucleotide
guuuuccccacuuccuucg

SEQ ID NO: 3082770 - RNA, 19 nt, Artificial Sequence
  Description of Artificial Sequence: Synthetic oligonucleotide
aggcaaagggaucccauuc

SEQ ID NO: 3082771 - RNA, 19 nt, Artificial Sequence
  Description of Artificial Sequence: Synthetic oligonucleotide
ugaggaggcaaagggaucc

SEQ ID NO: 3082772 - RNA, 19 nt, Artificial Sequence
  Description of Artificial Sequence: Synthetic oligonucleotide
ugggaagggaagaagcuuc

SEQ ID NO: 3082773 - RNA, 19 nt, Artificial Sequence
  Description of Artificial Sequence: Synthetic oligonucleotide
aagagucaaaauccccgca

SEQ ID NO: 3082774 - RNA, 19 nt, Artificial Sequence
  Description of Artificial Sequence: Synthetic oligonucleotide
uuugucaccuuugacccug

SEQ ID NO: 3082775 - RNA, 19 nt, Artificial Sequence
  Description of Artificial Sequence: Synthetic oligonucleotide
gaagcuuccucagacuuug

SEQ ID NO: 3082776 - RNA, 19 nt, Artificial Sequence
  Description of Artificial Sequence: Synthetic oligonucleotide
ucugaggcuucuuuucccc

SEQ ID NO: 3082777 - RNA, 19 nt, Artificial Sequence
  Description of Artificial Sequence: Synthetic oligonucleotide
ucucucucauccacuugcg

SEQ ID NO: 3082778 - RNA, 19 nt, Artificial Sequence
  Description of Artificial Sequence: Synthetic oligonucleotide
agagaagaaagagucaaaa

SEQ ID NO: 3082779 - RNA, 19 nt, Artificial Sequence
  Description of Artificial Sequence: Synthetic oligonucleotide
cucuguucccucugcagcg

SEQ ID NO: 3082780 - RNA, 19 nt, Artificial Sequence
  Description of Artificial Sequence: Synthetic oligonucleotide
ugccucuccggccacaucu

SEQ ID NO: 3082781 - RNA, 19 nt, Artificial Sequence
  Description of Artificial Sequence: Synthetic oligonucleotide
uucuuuugcagagaagaaa

SEQ ID NO: 3082782 - RNA, 19 nt, Artificial Sequence
  Description of Artificial Sequence: Synthetic oligonucleotide
ugcagagaagaaagaguca

SEQ ID NO: 3082783 - RNA, 19 nt, Artificial Sequence
  Description of Artificial Sequence: Synthetic oligonucleotide
cauucugaggcuucuuuuc

SEQ ID NO: 3082784 - RNA, 19 nt, Artificial Sequence
  Description of Artificial Sequence: Synthetic oligonucleotide
ucuuugugugacuuguuuu

SEQ ID NO: 3082785 - RNA, 19 nt, Artificial Sequence
  Description of Artificial Sequence: Synthetic oligonucleotide
caaaccaaggaaugaauaa

SEQ ID NO: 3082786 - RNA, 19 nt, Artificial Sequence
  Description of Artificial Sequence: Synthetic oligonucleotide
caccuuugacccuggaggg

SEQ ID NO: 3082787 - RNA, 19 nt, Artificial Sequence
  Description of Artificial Sequence: Synthetic oligonucleotide
ggaagaagcuuccucagac

SEQ ID NO: 3082788 - RNA, 19 nt, Artificial Sequence
  Description of Artificial Sequence: Synthetic oligonucleotide
ugugacuuguuuuccccac

SEQ ID NO: 3082789 - RNA, 19 nt, Artificial Sequence
  Description of Artificial Sequence: Synthetic oligonucleotide
uugugugacuuguuuuccc

SEQ ID NO: 3082790 - RNA, 19 nt, Artificial Sequence
  Description of Artificial Sequence: Synthetic oligonucleotide
caaggaaugaauaaauaau

SEQ ID NO: 3082791 - RNA, 19 nt, Artificial Sequence
  Description of Artificial Sequence: Synthetic oligonucleotide
agcuuccucagacuuuguc

SEQ ID NO: 3082792 - RNA, 19 nt, Artificial Sequence
  Description of Artificial Sequence: Synthetic oligonucleotide
aagaucugaggaggcaaag

SEQ ID NO: 3082793 - RNA, 19 nt, Artificial Sequence
  Description of Artificial Sequence: Synthetic oligonucleotide
uucugaggcuucuuuuccc

SEQ ID NO: 3082794 - RNA, 19 nt, Artificial Sequence
  Description of Artificial Sequence: Synthetic oligonucleotide
caaaauccccgcaguauug

SEQ ID NO: 3082795 - RNA, 19 nt, Artificial Sequence
  Description of Artificial Sequence: Synthetic oligonucleotide
aggaaugaauaaauaauau

SEQ ID NO: 3082796 - RNA, 19 nt, Artificial Sequence
  Description of Artificial Sequence: Synthetic oligonucleotide
ugaagaucugaggaggcaa

SEQ ID NO: 3082797 - RNA, 19 nt, Artificial Sequence
  Description of Artificial Sequence: Synthetic oligonucleotide
aauccccgcaguauugcuc

SEQ ID NO: 3082798 - RNA, 19 nt, Artificial Sequence
  Description of Artificial Sequence: Synthetic oligonucleotide
ugcgguugucuucaucccc

SEQ ID NO: 3082799 - RNA, 19 nt, Artificial Sequence
  Description of Artificial Sequence: Synthetic oligonucleotide
aaauccccgcaguauugcu

SEQ ID NO: 3082800 - RNA, 19 nt, Artificial Sequence
  Description of Artificial Sequence: Synthetic oligonucleotide
agggaagaagcuuccucag

SEQ ID NO: 3082801 - RNA, 19 nt, Artificial Sequence
  Description of Artificial Sequence: Synthetic oligonucleotide
cuuuuccccgggaacauuc

SEQ ID NO: 3082802 - RNA, 19 nt, Artificial Sequence
  Description of Artificial Sequence: Synthetic oligonucleotide
guugucuucauccccagcu

SEQ ID NO: 3082803 - RNA, 19 nt, Artificial Sequence
  Description of Artificial Sequence: Synthetic oligonucleotide
ucuucauccccagcuaugu

SEQ ID NO: 3082804 - RNA, 19 nt, Artificial Sequence
  Description of Artificial Sequence: Synthetic oligonucleotide
gcaguauugcucuucguug

SEQ ID NO: 3082805 - RNA, 19 nt, Artificial Sequence
  Description of Artificial Sequence: Synthetic oligonucleotide
uccucuuugugugacuugu

SEQ ID NO: 3082806 - RNA, 19 nt, Artificial Sequence
  Description of Artificial Sequence: Synthetic oligonucleotide
uuccccgggaacauucucu

SEQ ID NO: 3082807 - RNA, 19 nt, Artificial Sequence
  Description of Artificial Sequence: Synthetic oligonucleotide
uguuuuccccacuuccuuc

SEQ ID NO: 3082808 - RNA, 19 nt, Artificial Sequence
  Description of Artificial Sequence: Synthetic oligonucleotide
uuuucuucuuuugcagaga

SEQ ID NO: 3082809 - RNA, 19 nt, Artificial Sequence
  Description of Artificial Sequence: Synthetic oligonucleotide
gaggcuucuuuuccccggg

SEQ ID NO: 3082810 - RNA, 19 nt, Artificial Sequence
  Description of Artificial Sequence: Synthetic oligonucleotide
uccggccacaucuccauug

SEQ ID NO: 3082811 - RNA, 19 nt, Artificial Sequence
  Description of Artificial Sequence: Synthetic oligonucleotide
aggggagccaaaccaagga

SEQ ID NO: 3082812 - RNA, 19 nt, Artificial Sequence
  Description of Artificial Sequence: Synthetic oligonucleotide
ugucuucauccccagcuau

SEQ ID NO: 3082813 - RNA, 19 nt, Artificial Sequence
  Description of Artificial Sequence: Synthetic oligonucleotide
uccucagacuuugucaccu

SEQ ID NO: 3082814 - RNA, 19 nt, Artificial Sequence
  Description of Artificial Sequence: Synthetic oligonucleotide
auccccgcaguauugcucu

SEQ ID NO: 3082815 - RNA, 19 nt, Artificial Sequence
  Description of Artificial Sequence: Synthetic oligonucleotide
guugaagaucugaggaggc

SEQ ID NO: 3082816 - RNA, 19 nt, Artificial Sequence
  Description of Artificial Sequence: Synthetic oligonucleotide
uugaagaucugaggaggca

SEQ ID NO: 3082817 - RNA, 19 nt, Artificial Sequence
  Description of Artificial Sequence: Synthetic oligonucleotide
gaggggagccaaaccaagg

SEQ ID NO: 3082818 - RNA, 19 nt, Artificial Sequence
  Description of Artificial Sequence: Synthetic oligonucleotide
auugggaagggaagaagcu

SEQ ID NO: 3082819 - RNA, 19 nt, Artificial Sequence
  Description of Artificial Sequence: Synthetic oligonucleotide
auugcucuucguugaagau

SEQ ID NO: 3082820 - RNA, 19 nt, Artificial Sequence
  Description of Artificial Sequence: Synthetic oligonucleotide
ugacuuguuuuccccacuu

SEQ ID NO: 3082821 - RNA, 19 nt, Artificial Sequence
  Description of Artificial Sequence: Synthetic oligonucleotide
uuuccccacuuccuucggc

SEQ ID NO: 3082822 - RNA, 19 nt, Artificial Sequence
  Description of Artificial Sequence: Synthetic oligonucleotide
uccacuugcgguugucuuc

SEQ ID NO: 3082823 - RNA, 19 nt, Artificial Sequence
  Description of Artificial Sequence: Synthetic oligonucleotide
gaacauucucucucaucca

SEQ ID NO: 3082824 - RNA, 19 nt, Artificial Sequence
  Description of Artificial Sequence: Synthetic oligonucleotide
gagaagaaagagucaaaau

SEQ ID NO: 3082825 - RNA, 19 nt, Artificial Sequence
  Description of Artificial Sequence: Synthetic oligonucleotide
uggaggggagccaaaccaa

SEQ ID NO: 3082826 - RNA, 19 nt, Artificial Sequence
  Description of Artificial Sequence: Synthetic oligonucleotide
cugaggcuucuuuuccccg

SEQ ID NO: 3082827 - RNA, 19 nt, Artificial Sequence
  Description of Artificial Sequence: Synthetic oligonucleotide
cuggaggggagccaaacca

SEQ ID NO: 3082828 - RNA, 19 nt, Artificial Sequence
  Description of Artificial Sequence: Synthetic oligonucleotide
agucaaaauccccgcagua

SEQ ID NO: 3082829 - RNA, 19 nt, Artificial Sequence
  Description of Artificial Sequence: Synthetic oligonucleotide
uugcgguugucuucauccc

SEQ ID NO: 3082830 - RNA, 19 nt, Artificial Sequence
  Description of Artificial Sequence: Synthetic oligonucleotide
caguauugcucuucguuga

SEQ ID NO: 3082831 - RNA, 19 nt, Artificial Sequence
  Description of Artificial Sequence: Synthetic oligonucleotide
cuucggccugcucuguucc

SEQ ID NO: 3082832 - RNA, 19 nt, Artificial Sequence
  Description of Artificial Sequence: Synthetic oligonucleotide
uugucuucauccccagcua

SEQ ID NO: 3082833 - RNA, 19 nt, Artificial Sequence
  Description of Artificial Sequence: Synthetic oligonucleotide
auucucucucauccacuug

SEQ ID NO: 3082834 - RNA, 19 nt, Artificial Sequence
  Description of Artificial Sequence: Synthetic oligonucleotide
cuucuuuuccccgggaaca

SEQ ID NO: 3082835 - RNA, 19 nt, Artificial Sequence
  Description of Artificial Sequence: Synthetic oligonucleotide
gcuuccucagacuuuguca

SEQ ID NO: 3082836 - RNA, 19 nt, Artificial Sequence
  Description of Artificial Sequence: Synthetic oligonucleotide
aucuccauugggaagggaa

SEQ ID NO: 3082837 - RNA, 19 nt, Artificial Sequence
  Description of Artificial Sequence: Synthetic oligonucleotide
guauugcucuucguugaag

SEQ ID NO: 3082838 - RNA, 19 nt, Artificial Sequence
  Description of Artificial Sequence: Synthetic oligonucleotide
ggaaugaauaaauaauauu

SEQ ID NO: 3082839 - RNA, 19 nt, Artificial Sequence
  Description of Artificial Sequence: Synthetic oligonucleotide
uccauugggaagggaagaa

SEQ ID NO: 3082840 - RNA, 19 nt, Artificial Sequence
  Description of Artificial Sequence: Synthetic oligonucleotide
caaagggaucccauucuga

SEQ ID NO: 3082841 - RNA, 19 nt, Artificial Sequence
  Description of Artificial Sequence: Synthetic oligonucleotide
gacuuguuuuccccacuuc

SEQ ID NO: 3082842 - RNA, 19 nt, Artificial Sequence
  Description of Artificial Sequence: Synthetic oligonucleotide
uugucaccuuugacccugg

SEQ ID NO: 3082843 - RNA, 19 nt, Artificial Sequence
  Description of Artificial Sequence: Synthetic oligonucleotide
cuucuuuugcagagaagaa

SEQ ID NO: 3082844 - RNA, 19 nt, Artificial Sequence
  Description of Artificial Sequence: Synthetic oligonucleotide
ggagccaaaccaaggaaug

SEQ ID NO: 3082845 - RNA, 19 nt, Artificial Sequence
  Description of Artificial Sequence: Synthetic oligonucleotide
uugacccuggaggggagcc

SEQ ID NO: 3082846 - RNA, 19 nt, Artificial Sequence
  Description of Artificial Sequence: Synthetic oligonucleotide
agccaaaccaaggaaugaa

SEQ ID NO: 3082847 - RNA, 19 nt, Artificial Sequence
  Description of Artificial Sequence: Synthetic oligonucleotide
ucucauccacuugcgguug

SEQ ID NO: 3082848 - RNA, 19 nt, Artificial Sequence
  Description of Artificial Sequence: Synthetic oligonucleotide
cagacuuugucaccuuuga

SEQ ID NO: 3082849 - RNA, 19 nt, Artificial Sequence
  Description of Artificial Sequence: Synthetic oligonucleotide
gaagaagcuuccucagacu

SEQ ID NO: 3082850 - RNA, 19 nt, Artificial Sequence
  Description of Artificial Sequence: Synthetic oligonucleotide
uugggaagggaagaagcuu

SEQ ID NO: 3082851 - RNA, 19 nt, Artificial Sequence
  Description of Artificial Sequence: Synthetic oligonucleotide
uuuccccgggaacauucuc

SEQ ID NO: 3082852 - RNA, 19 nt, Artificial Sequence
  Description of Artificial Sequence: Synthetic oligonucleotide
gcaaagggaucccauucug

SEQ ID NO: 3082853 - RNA, 19 nt, Artificial Sequence
  Description of Artificial Sequence: Synthetic oligonucleotide
cguugaagaucugaggagg

SEQ ID NO: 3082854 - RNA, 19 nt, Artificial Sequence
  Description of Artificial Sequence: Synthetic oligonucleotide
ucuccggccacaucuccau

SEQ ID NO: 3082855 - RNA, 19 nt, Artificial Sequence
  Description of Artificial Sequence: Synthetic oligonucleotide
gagucaaaauccccgcagu

SEQ ID NO: 3082856 - RNA, 19 nt, Artificial Sequence
  Description of Artificial Sequence: Synthetic oligonucleotide
cuuguuuuccccacuuccu

SEQ ID NO: 3082857 - RNA, 19 nt, Artificial Sequence
  Description of Artificial Sequence: Synthetic oligonucleotide
uccccgggaacauucucuc

SEQ ID NO: 3082858 - RNA, 19 nt, Artificial Sequence
  Description of Artificial Sequence: Synthetic oligonucleotide
cugaggaggcaaagggauc

SEQ ID NO: 3082859 - RNA, 19 nt, Artificial Sequence
  Description of Artificial Sequence: Synthetic oligonucleotide
accuuugacccuggagggg

SEQ ID NO: 3082860 - RNA, 19 nt, Artificial Sequence
  Description of Artificial Sequence: Synthetic oligonucleotide
gaagaucugaggaggcaaa

SEQ ID NO: 3082861 - RNA, 19 nt, Artificial Sequence
  Description of Artificial Sequence: Synthetic oligonucleotide
uguucccucugcagcgccu

SEQ ID NO: 3082862 - RNA, 19 nt, Artificial Sequence
  Description of Artificial Sequence: Synthetic oligonucleotide
acaucuccauugggaaggg

SEQ ID NO: 3082863 - RNA, 19 nt, Artificial Sequence
  Description of Artificial Sequence: Synthetic oligonucleotide
cuuugacccuggaggggag

SEQ ID NO: 3082864 - RNA, 19 nt, Artificial Sequence
  Description of Artificial Sequence: Synthetic oligonucleotide
gugugacuuguuuucccca

SEQ ID NO: 3082865 - RNA, 19 nt, Artificial Sequence
  Description of Artificial Sequence: Synthetic oligonucleotide
gcuucuuuuccccgggaac

SEQ ID NO: 3082866 - RNA, 19 nt, Artificial Sequence
  Description of Artificial Sequence: Synthetic oligonucleotide
gagccaaaccaaggaauga

SEQ ID NO: 3082867 - RNA, 19 nt, Artificial Sequence
  Description of Artificial Sequence: Synthetic oligonucleotide
uuugacccuggaggggagc

SEQ ID NO: 3082868 - RNA, 19 nt, Artificial Sequence
  Description of Artificial Sequence: Synthetic oligonucleotide
acauucucucucauccacu

SEQ ID NO: 3082869 - RNA, 19 nt, Artificial Sequence
  Description of Artificial Sequence: Synthetic oligonucleotide
auccacuugcgguugucuu

SEQ ID NO: 3082870 - RNA, 19 nt, Artificial Sequence
  Description of Artificial Sequence: Synthetic oligonucleotide
uucuuuuccccgggaacau

SEQ ID NO: 3082871 - RNA, 19 nt, Artificial Sequence
  Description of Artificial Sequence: Synthetic oligonucleotide
cagagaagaaagagucaaa

SEQ ID NO: 3082872 - RNA, 19 nt, Artificial Sequence
  Description of Artificial Sequence: Synthetic oligonucleotide
cucuucguugaagaucuga

SEQ ID NO: 3082873 - RNA, 19 nt, Artificial Sequence
  Description of Artificial Sequence: Synthetic oligonucleotide
uccccacuuccuucggccu

SEQ ID NO: 3082874 - RNA, 19 nt, Artificial Sequence
  Description of Artificial Sequence: Synthetic oligonucleotide
cuucauccccagcuauguc

SEQ ID NO: 3082875 - RNA, 19 nt, Artificial Sequence
  Description of Artificial Sequence: Synthetic oligonucleotide
cuguucccucugcagcgcc

SEQ ID NO: 3082876 - RNA, 19 nt, Artificial Sequence
  Description of Artificial Sequence: Synthetic oligonucleotide
gggaacauucucucucauc

SEQ ID NO: 3082877 - RNA, 19 nt, Artificial Sequence
  Description of Artificial Sequence: Synthetic oligonucleotide
uucggccugcucuguuccc

SEQ ID NO: 3082878 - RNA, 19 nt, Artificial Sequence
  Description of Artificial Sequence: Synthetic oligonucleotide
gccacaucuccauugggaa

SEQ ID NO: 3082879 - RNA, 19 nt, Artificial Sequence
  Description of Artificial Sequence: Synthetic oligonucleotide
cccgcaguauugcucuucg

SEQ ID NO: 3082880 - RNA, 19 nt, Artificial Sequence
  Description of Artificial Sequence: Synthetic oligonucleotide
ggaggggagccaaaccaag

SEQ ID NO: 3082881 - RNA, 19 nt, Artificial Sequence
  Description of Artificial Sequence: Synthetic oligonucleotide
cuccauugggaagggaaga

SEQ ID NO: 3082882 - RNA, 19 nt, Artificial Sequence
  Description of Artificial Sequence: Synthetic oligonucleotide
ccacaucuccauugggaag

SEQ ID NO: 3082883 - RNA, 19 nt, Artificial Sequence
  Description of Artificial Sequence: Synthetic oligonucleotide
ccaaaccaaggaaugaaua

SEQ ID NO: 3082884 - RNA, 19 nt, Artificial Sequence
  Description of Artificial Sequence: Synthetic oligonucleotide
gucaaaauccccgcaguau

SEQ ID NO: 3082885 - RNA, 19 nt, Artificial Sequence
  Description of Artificial Sequence: Synthetic oligonucleotide
ucggccugcucuguucccu

SEQ ID NO: 3082886 - RNA, 19 nt, Artificial Sequence
  Description of Artificial Sequence: Synthetic oligonucleotide
agaagcuuccucagacuuu

SEQ ID NO: 3082887 - RNA, 19 nt, Artificial Sequence
  Description of Artificial Sequence: Synthetic oligonucleotide
gguugucuucauccccagc

SEQ ID NO: 3082888 - RNA, 19 nt, Artificial Sequence
  Description of Artificial Sequence: Synthetic oligonucleotide
cccgggaacauucucucuc

SEQ ID NO: 3082889 - RNA, 19 nt, Artificial Sequence
  Description of Artificial Sequence: Synthetic oligonucleotide
ucauccacuugcgguuguc

SEQ ID NO: 3082890 - RNA, 19 nt, Artificial Sequence
  Description of Artificial Sequence: Synthetic oligonucleotide
ccauugggaagggaagaag

SEQ ID NO: 3082891 - RNA, 19 nt, Artificial Sequence
  Description of Artificial Sequence: Synthetic oligonucleotide
ccuggaggggagccaaacc

SEQ ID NO: 3082892 - RNA, 19 nt, Artificial Sequence
  Description of Artificial Sequence: Synthetic oligonucleotide
cucuccggccacaucucca

SEQ ID NO: 3082893 - RNA, 19 nt, Artificial Sequence
  Description of Artificial Sequence: Synthetic oligonucleotide
gaggcaaagggaucccauu

SEQ ID NO: 3082894 - RNA, 19 nt, Artificial Sequence
  Description of Artificial Sequence: Synthetic oligonucleotide
gcgccuucugccucuccgg

SEQ ID NO: 3082895 - RNA, 19 nt, Artificial Sequence
  Description of Artificial Sequence: Synthetic oligonucleotide
ucuuuuccccgggaacauu

SEQ ID NO: 3082896 - RNA, 19 nt, Artificial Sequence
  Description of Artificial Sequence: Synthetic oligonucleotide
ucugccucuccggccacau

SEQ ID NO: 3082897 - RNA, 19 nt, Artificial Sequence
  Description of Artificial Sequence: Synthetic oligonucleotide
ugacccuggaggggagcca

SEQ ID NO: 3082898 - RNA, 19 nt, Artificial Sequence
  Description of Artificial Sequence: Synthetic oligonucleotide
cucuuugugugacuuguuu

SEQ ID NO: 3082899 - RNA, 19 nt, Artificial Sequence
  Description of Artificial Sequence: Synthetic oligonucleotide
aggcuucuuuuccccggga

SEQ ID NO: 3082900 - RNA, 19 nt, Artificial Sequence
  Description of Artificial Sequence: Synthetic oligonucleotide
ggcaaagggaucccauucu

SEQ ID NO: 3082901 - RNA, 19 nt, Artificial Sequence
  Description of Artificial Sequence: Synthetic oligonucleotide
ccggccacaucuccauugg

SEQ ID NO: 3082902 - RNA, 19 nt, Artificial Sequence
  Description of Artificial Sequence: Synthetic oligonucleotide
ggggagccaaaccaaggaa

SEQ ID NO: 3082903 - RNA, 19 nt, Artificial Sequence
  Description of Artificial Sequence: Synthetic oligonucleotide
ggcuucuuuuccccgggaa

SEQ ID NO: 3082904 - RNA, 19 nt, Artificial Sequence
  Description of Artificial Sequence: Synthetic oligonucleotide
gacccuggaggggagccaa

SEQ ID NO: 3082905 - RNA, 19 nt, Artificial Sequence
  Description of Artificial Sequence: Synthetic oligonucleotide
cugcucuguucccucugca

SEQ ID NO: 3082906 - RNA, 19 nt, Artificial Sequence
  Description of Artificial Sequence: Synthetic oligonucleotide
aagcuuccucagacuuugu

SEQ ID NO: 3082907 - RNA, 19 nt, Artificial Sequence
  Description of Artificial Sequence: Synthetic oligonucleotide
cuuugucaccuuugacccu

SEQ ID NO: 3082908 - RNA, 19 nt, Artificial Sequence
  Description of Artificial Sequence: Synthetic oligonucleotide
gcgguugucuucaucccca

SEQ ID NO: 3082909 - RNA, 19 nt, Artificial Sequence
  Description of Artificial Sequence: Synthetic oligonucleotide
ccuuugacccuggagggga

SEQ ID NO: 3082910 - RNA, 19 nt, Artificial Sequence
  Description of Artificial Sequence: Synthetic oligonucleotide
gggagccaaaccaaggaau

SEQ ID NO: 3082911 - RNA, 19 nt, Artificial Sequence
  Description of Artificial Sequence: Synthetic oligonucleotide
cucagacuuugucaccuuu

SEQ ID NO: 3082912 - RNA, 19 nt, Artificial Sequence
  Description of Artificial Sequence: Synthetic oligonucleotide
ccgggaacauucucucuca

SEQ ID NO: 3082913 - RNA, 19 nt, Artificial Sequence
  Description of Artificial Sequence: Synthetic oligonucleotide
cccacuuccuucggccugc

SEQ ID NO: 3082914 - RNA, 19 nt, Artificial Sequence
  Description of Artificial Sequence: Synthetic oligonucleotide
gccugcucuguucccucug

SEQ ID NO: 3082915 - RNA, 19 nt, Artificial Sequence
  Description of Artificial Sequence: Synthetic oligonucleotide
ccacuugcgguugucuuca

SEQ ID NO: 3082916 - RNA, 19 nt, Artificial Sequence
  Description of Artificial Sequence: Synthetic oligonucleotide
cauccacuugcgguugucu

SEQ ID NO: 3082917 - RNA, 19 nt, Artificial Sequence
  Description of Artificial Sequence: Synthetic oligonucleotide
cacuuccuucggccugcuc

SEQ ID NO: 3082918 - RNA, 19 nt, Artificial Sequence
  Description of Artificial Sequence: Synthetic oligonucleotide
ccccacuuccuucggccug

SEQ ID NO: 3082919 - RNA, 19 nt, Artificial Sequence
  Description of Artificial Sequence: Synthetic oligonucleotide
caucuccauugggaaggga

SEQ ID NO: 3082920 - RNA, 19 nt, Artificial Sequence
  Description of Artificial Sequence: Synthetic oligonucleotide
cagcgccuucugccucucc

SEQ ID NO: 3082921 - RNA, 19 nt, Artificial Sequence
  Description of Artificial Sequence: Synthetic oligonucleotide
gccaaaccaaggaaugaau

SEQ ID NO: 3082922 - RNA, 19 nt, Artificial Sequence
  Description of Artificial Sequence: Synthetic oligonucleotide
cugccucuccggccacauc

SEQ ID NO: 3082923 - RNA, 19 nt, Artificial Sequence
  Description of Artificial Sequence: Synthetic oligonucleotide
uccccgcaguauugcucuu

SEQ ID NO: 3082924 - RNA, 19 nt, Artificial Sequence
  Description of Artificial Sequence: Synthetic oligonucleotide
cccuggaggggagccaaac

SEQ ID NO: 3082925 - RNA, 19 nt, Artificial Sequence
  Description of Artificial Sequence: Synthetic oligonucleotide
cgguugucuucauccccag

SEQ ID NO: 3082926 - RNA, 19 nt, Artificial Sequence
  Description of Artificial Sequence: Synthetic oligonucleotide
ggaagggaagaagcuuccu

SEQ ID NO: 3082927 - RNA, 19 nt, Artificial Sequence
  Description of Artificial Sequence: Synthetic oligonucleotide
cucauccacuugcgguugu

SEQ ID NO: 3082928 - RNA, 19 nt, Artificial Sequence
  Description of Artificial Sequence: Synthetic oligonucleotide
ggaggcaaagggaucccau

SEQ ID NO: 3082929 - RNA, 19 nt, Artificial Sequence
  Description of Artificial Sequence: Synthetic oligonucleotide
cggccacaucuccauuggg

SEQ ID NO: 3082930 - RNA, 19 nt, Artificial Sequence
  Description of Artificial Sequence: Synthetic oligonucleotide
cgcaguauugcucuucguu

SEQ ID NO: 3082931 - RNA, 19 nt, Artificial Sequence
  Description of Artificial Sequence: Synthetic oligonucleotide
gggaucccauucugaggcu

SEQ ID NO: 3082932 - RNA, 19 nt, Artificial Sequence
  Description of Artificial Sequence: Synthetic oligonucleotide
ggaucccauucugaggcuu

SEQ ID NO: 3082933 - RNA, 19 nt, Artificial Sequence
  Description of Artificial Sequence: Synthetic oligonucleotide
ccccgcaguauugcucuuc

SEQ ID NO: 3082934 - RNA, 19 nt, Artificial Sequence
  Description of Artificial Sequence: Synthetic oligonucleotide
cccauucugaggcuucuuu

SEQ ID NO: 3082935 - RNA, 19 nt, Artificial Sequence
  Description of Artificial Sequence: Synthetic oligonucleotide
acccuggaggggagccaaa

SEQ ID NO: 3082936 - RNA, 19 nt, Artificial Sequence
  Description of Artificial Sequence: Synthetic oligonucleotide
cggccugcucuguucccuc

SEQ ID NO: 3082937 - RNA, 19 nt, Artificial Sequence
  Description of Artificial Sequence: Synthetic oligonucleotide
cacuugcgguugucuucau

SEQ ID NO: 3082938 - RNA, 19 nt, Artificial Sequence
  Description of Artificial Sequence: Synthetic oligonucleotide
cuccggccacaucuccauu

SEQ ID NO: 3082939 - RNA, 19 nt, Artificial Sequence
  Description of Artificial Sequence: Synthetic oligonucleotide
ccccgggaacauucucucu

SEQ ID NO: 3082940 - RNA, 19 nt, Artificial Sequence
  Description of Artificial Sequence: Synthetic oligonucleotide
ccgcaguauugcucuucgu

SEQ ID NO: 3082941 - RNA, 19 nt, Artificial Sequence
  Description of Artificial Sequence: Synthetic oligonucleotide
cgggaacauucucucucau

SEQ ID NO: 3082942 - RNA, 19 nt, Artificial Sequence
  Description of Artificial Sequence: Synthetic oligonucleotide
ugauuuacauucaaaaccg

SEQ ID NO: 3082943 - RNA, 19 nt, Artificial Sequence
  Description of Artificial Sequence: Synthetic oligonucleotide
aaugcuugcagccacaugu

SEQ ID NO: 3082944 - RNA, 19 nt, Artificial Sequence
  Description of Artificial Sequence: Synthetic oligonucleotide
uuugcuucuaaucaagaag

SEQ ID NO: 3082945 - RNA, 19 nt, Artificial Sequence
  Description of Artificial Sequence: Synthetic oligonucleotide
uuuaguuaagauguuaagg

SEQ ID NO: 3082946 - RNA, 19 nt, Artificial Sequence
  Description of Artificial Sequence: Synthetic oligonucleotide
uugcuucuaaucaagaagg

SEQ ID NO: 3082947 - RNA, 19 nt, Artificial Sequence
  Description of Artificial Sequence: Synthetic oligonucleotide
cugauuuacauucaaaacc

SEQ ID NO: 3082948 - RNA, 19 nt, Artificial Sequence
  Description of Artificial Sequence: Synthetic oligonucleotide
uuaguuaagauguuaaggu

SEQ ID NO: 3082949 - RNA, 19 nt, Artificial Sequence
  Description of Artificial Sequence: Synthetic oligonucleotide
gauguuaagguccaugacc

SEQ ID NO: 3082950 - RNA, 19 nt, Artificial Sequence
  Description of Artificial Sequence: Synthetic oligonucleotide
gaugacuuuaguuaagaug

SEQ ID NO: 3082951 - RNA, 19 nt, Artificial Sequence
  Description of Artificial Sequence: Synthetic oligonucleotide
ucaggcaggagcaagaccc

SEQ ID NO: 3082952 - RNA, 19 nt, Artificial Sequence
  Description of Artificial Sequence: Synthetic oligonucleotide
aguuaagauguuaaggucc

SEQ ID NO: 3082953 - RNA, 19 nt, Artificial Sequence
  Description of Artificial Sequence: Synthetic oligonucleotide
ugauaugugaugaauggca

SEQ ID NO: 3082954 - RNA, 19 nt, Artificial Sequence
  Description of Artificial Sequence: Synthetic oligonucleotide
guugauaugugaugaaugg

SEQ ID NO: 3082955 - RNA, 19 nt, Artificial Sequence
  Description of Artificial Sequence: Synthetic oligonucleotide
aaucaagaaggucauguug

SEQ ID NO: 3082956 - RNA, 19 nt, Artificial Sequence
  Description of Artificial Sequence: Synthetic oligonucleotide
acugcuucggccuuccucc

SEQ ID NO: 3082957 - RNA, 19 nt, Artificial Sequence
  Description of Artificial Sequence: Synthetic oligonucleotide
aagaaggucauguugccug

SEQ ID NO: 3082958 - RNA, 19 nt, Artificial Sequence
  Description of Artificial Sequence: Synthetic oligonucleotide
aagccuuagacuugcuccc

SEQ ID NO: 3082959 - RNA, 19 nt, Artificial Sequence
  Description of Artificial Sequence: Synthetic oligonucleotide
augacuuuaguuaagaugu

SEQ ID NO: 3082960 - RNA, 19 nt, Artificial Sequence
  Description of Artificial Sequence: Synthetic oligonucleotide
augucauccauucaggcag

SEQ ID NO: 3082961 - RNA, 19 nt, Artificial Sequence
  Description of Artificial Sequence: Synthetic oligonucleotide
aagauguuaagguccauga

SEQ ID NO: 3082962 - RNA, 19 nt, Artificial Sequence
  Description of Artificial Sequence: Synthetic oligonucleotide
aucaagaaggucauguugc

SEQ ID NO: 3082963 - RNA, 19 nt, Artificial Sequence
  Description of Artificial Sequence: Synthetic oligonucleotide
cuucuaaucaagaagguca

SEQ ID NO: 3082964 - RNA, 19 nt, Artificial Sequence
  Description of Artificial Sequence: Synthetic oligonucleotide
aaugucauccauucaggca

SEQ ID NO: 3082965 - RNA, 19 nt, Artificial Sequence
  Description of Artificial Sequence: Synthetic oligonucleotide
aaacccuaggaaugcuugc

SEQ ID NO: 3082966 - RNA, 19 nt, Artificial Sequence
  Description of Artificial Sequence: Synthetic oligonucleotide
caagccuuagacuugcucc

SEQ ID NO: 3082967 - RNA, 19 nt, Artificial Sequence
  Description of Artificial Sequence: Synthetic oligonucleotide
aauggcagugccaagaacu

SEQ ID NO: 3082968 - RNA, 19 nt, Artificial Sequence
  Description of Artificial Sequence: Synthetic oligonucleotide
uggacuugcagcaaucagc

SEQ ID NO: 3082969 - RNA, 19 nt, Artificial Sequence
  Description of Artificial Sequence: Synthetic oligonucleotide
agugccaagaacugcuucg

SEQ ID NO: 3082970 - RNA, 19 nt, Artificial Sequence
  Description of Artificial Sequence: Synthetic oligonucleotide
ucuagggccaaugucaucc

SEQ ID NO: 3082971 - RNA, 19 nt, Artificial Sequence
  Description of Artificial Sequence: Synthetic oligonucleotide
uguugccugauuuacauuc

SEQ ID NO: 3082972 - RNA, 19 nt, Artificial Sequence
  Description of Artificial Sequence: Synthetic oligonucleotide
ucaaguugauaugugauga

SEQ ID NO: 3082973 - RNA, 19 nt, Artificial Sequence
  Description of Artificial Sequence: Synthetic oligonucleotide
gaaguguugguuuugcuuc

SEQ ID NO: 3082974 - RNA, 19 nt, Artificial Sequence
  Description of Artificial Sequence: Synthetic oligonucleotide
uaugugaugaauggcagug

SEQ ID NO: 3082975 - RNA, 19 nt, Artificial Sequence
  Description of Artificial Sequence: Synthetic oligonucleotide
cauccauucaggcaggagc

SEQ ID NO: 3082976 - RNA, 19 nt, Artificial Sequence
  Description of Artificial Sequence: Synthetic oligonucleotide
uccuccacaagccuuagac

SEQ ID NO: 3082977 - RNA, 19 nt, Artificial Sequence
  Description of Artificial Sequence: Synthetic oligonucleotide
uuugcaucaaguugauaug

SEQ ID NO: 3082978 - RNA, 19 nt, Artificial Sequence
  Description of Artificial Sequence: Synthetic oligonucleotide
aggagcaagacccugaaaa

SEQ ID NO: 3082979 - RNA, 19 nt, Artificial Sequence
  Description of Artificial Sequence: Synthetic oligonucleotide
uaggugaggaccaacucug

SEQ ID NO: 3082980 - RNA, 19 nt, Artificial Sequence
  Description of Artificial Sequence: Synthetic oligonucleotide
aacugcuucggccuuccuc

SEQ ID NO: 3082981 - RNA, 19 nt, Artificial Sequence
  Description of Artificial Sequence: Synthetic oligonucleotide
aaggaaguguugguuuugc

SEQ ID NO: 3082982 - RNA, 19 nt, Artificial Sequence
  Description of Artificial Sequence: Synthetic oligonucleotide
uuagacuugcucccaagga

SEQ ID NO: 3082983 - RNA, 19 nt, Artificial Sequence
  Description of Artificial Sequence: Synthetic oligonucleotide
aucaaguugauaugugaug

SEQ ID NO: 3082984 - RNA, 19 nt, Artificial Sequence
  Description of Artificial Sequence: Synthetic oligonucleotide
acuugcagcaaucagcuaa

SEQ ID NO: 3082985 - RNA, 19 nt, Artificial Sequence
  Description of Artificial Sequence: Synthetic oligonucleotide
ucuggaggucuaaaggaag

SEQ ID NO: 3082986 - RNA, 19 nt, Artificial Sequence
  Description of Artificial Sequence: Synthetic oligonucleotide
agauguuaagguccaugac

SEQ ID NO: 3082987 - RNA, 19 nt, Artificial Sequence
  Description of Artificial Sequence: Synthetic oligonucleotide
ucauaggugaggaccaacu

SEQ ID NO: 3082988 - RNA, 19 nt, Artificial Sequence
  Description of Artificial Sequence: Synthetic oligonucleotide
auaggugaggaccaacucu

SEQ ID NO: 3082989 - RNA, 19 nt, Artificial Sequence
  Description of Artificial Sequence: Synthetic oligonucleotide
gcagcaaucagcuaacccc

SEQ ID NO: 3082990 - RNA, 19 nt, Artificial Sequence
  Description of Artificial Sequence: Synthetic oligonucleotide
agccacaugucauagguga

SEQ ID NO: 3082991 - RNA, 19 nt, Artificial Sequence
  Description of Artificial Sequence: Synthetic oligonucleotide
ucggccuuccuccacaagc

SEQ ID NO: 3082992 - RNA, 19 nt, Artificial Sequence
  Description of Artificial Sequence: Synthetic oligonucleotide
auuuacauucaaaaccgag

SEQ ID NO: 3082993 - RNA, 19 nt, Artificial Sequence
  Description of Artificial Sequence: Synthetic oligonucleotide
guugguuuugcuucuaauc

SEQ ID NO: 3082994 - RNA, 19 nt, Artificial Sequence
  Description of Artificial Sequence: Synthetic oligonucleotide
uaguuaagauguuaagguc

SEQ ID NO: 3082995 - RNA, 19 nt, Artificial Sequence
  Description of Artificial Sequence: Synthetic oligonucleotide
uaagauguuaagguccaug

SEQ ID NO: 3082996 - RNA, 19 nt, Artificial Sequence
  Description of Artificial Sequence: Synthetic oligonucleotide
ucagcuaaccccuuugcau

SEQ ID NO: 3082997 - RNA, 19 nt, Artificial Sequence
  Description of Artificial Sequence: Synthetic oligonucleotide
ugcagcaaucagcuaaccc

SEQ ID NO: 3082998 - RNA, 19 nt, Artificial Sequence
  Description of Artificial Sequence: Synthetic oligonucleotide
aguugauaugugaugaaug

SEQ ID NO: 3082999 - RNA, 19 nt, Artificial Sequence
  Description of Artificial Sequence: Synthetic oligonucleotide
ucaagaaggucauguugcc

SEQ ID NO: 3083000 - RNA, 19 nt, Artificial Sequence
  Description of Artificial Sequence: Synthetic oligonucleotide
ugcaucaaguugauaugug

SEQ ID NO: 3083001 - RNA, 19 nt, Artificial Sequence
  Description of Artificial Sequence: Synthetic oligonucleotide
gugaggaccaacucuggag

SEQ ID NO: 3083002 - RNA, 19 nt, Artificial Sequence
  Description of Artificial Sequence: Synthetic oligonucleotide
caaugucauccauucaggc

SEQ ID NO: 3083003 - RNA, 19 nt, Artificial Sequence
  Description of Artificial Sequence: Synthetic oligonucleotide
uucuaaucaagaaggucau

SEQ ID NO: 3083004 - RNA, 19 nt, Artificial Sequence
  Description of Artificial Sequence: Synthetic oligonucleotide
uagacuugcucccaaggau

SEQ ID NO: 3083005 - RNA, 19 nt, Artificial Sequence
  Description of Artificial Sequence: Synthetic oligonucleotide
guccaugaccucuagggcc

SEQ ID NO: 3083006 - RNA, 19 nt, Artificial Sequence
  Description of Artificial Sequence: Synthetic oligonucleotide
ugaugaauggcagugccaa

SEQ ID NO: 3083007 - RNA, 19 nt, Artificial Sequence
  Description of Artificial Sequence: Synthetic oligonucleotide
uccaugaccucuagggcca

SEQ ID NO: 3083008 - RNA, 19 nt, Artificial Sequence
  Description of Artificial Sequence: Synthetic oligonucleotide
accccuuugcaucaaguug

SEQ ID NO: 3083009 - RNA, 19 nt, Artificial Sequence
  Description of Artificial Sequence: Synthetic oligonucleotide
aaguugauaugugaugaau

SEQ ID NO: 3083010 - RNA, 19 nt, Artificial Sequence
  Description of Artificial Sequence: Synthetic oligonucleotide
ggucuaaaggaaguguugg

SEQ ID NO: 3083011 - RNA, 19 nt, Artificial Sequence
  Description of Artificial Sequence: Synthetic oligonucleotide
ucauguugccugauuuaca

SEQ ID NO: 3083012 - RNA, 19 nt, Artificial Sequence
  Description of Artificial Sequence: Synthetic oligonucleotide
ucuaaaggaaguguugguu

SEQ ID NO: 3083013 - RNA, 19 nt, Artificial Sequence
  Description of Artificial Sequence: Synthetic oligonucleotide
cuugcagcaaucagcuaac

SEQ ID NO: 3083014 - RNA, 19 nt, Artificial Sequence
  Description of Artificial Sequence: Synthetic oligonucleotide
uaggaaugcuugcagccac

SEQ ID NO: 3083015 - RNA, 19 nt, Artificial Sequence
  Description of Artificial Sequence: Synthetic oligonucleotide
aaguguugguuuugcuucu

SEQ ID NO: 3083016 - RNA, 19 nt, Artificial Sequence
  Description of Artificial Sequence: Synthetic oligonucleotide
uccacaagccuuagacuug

SEQ ID NO: 3083017 - RNA, 19 nt, Artificial Sequence
  Description of Artificial Sequence: Synthetic oligonucleotide
uugcaucaaguugauaugu

SEQ ID NO: 3083018 - RNA, 19 nt, Artificial Sequence
  Description of Artificial Sequence: Synthetic oligonucleotide
ugaauggcagugccaagaa

SEQ ID NO: 3083019 - RNA, 19 nt, Artificial Sequence
  Description of Artificial Sequence: Synthetic oligonucleotide
auaugugaugaauggcagu

SEQ ID NO: 3083020 - RNA, 19 nt, Artificial Sequence
  Description of Artificial Sequence: Synthetic oligonucleotide
aaaggaaguguugguuuug

SEQ ID NO: 3083021 - RNA, 19 nt, Artificial Sequence
  Description of Artificial Sequence: Synthetic oligonucleotide
acuuuaguuaagauguuaa

SEQ ID NO: 3083022 - RNA, 19 nt, Artificial Sequence
  Description of Artificial Sequence: Synthetic oligonucleotide
uaaaggaaguguugguuuu

SEQ ID NO: 3083023 - RNA, 19 nt, Artificial Sequence
  Description of Artificial Sequence: Synthetic oligonucleotide
ugcuucuaaucaagaaggu

SEQ ID NO: 3083024 - RNA, 19 nt, Artificial Sequence
  Description of Artificial Sequence: Synthetic oligonucleotide
ccugauuuacauucaaaac

SEQ ID NO: 3083025 - RNA, 19 nt, Artificial Sequence
  Description of Artificial Sequence: Synthetic oligonucleotide
augugaugaauggcagugc

SEQ ID NO: 3083026 - RNA, 19 nt, Artificial Sequence
  Description of Artificial Sequence: Synthetic oligonucleotide
uuugguggccauguggacu

SEQ ID NO: 3083027 - RNA, 19 nt, Artificial Sequence
  Description of Artificial Sequence: Synthetic oligonucleotide
caacucuggaggucuaaag

SEQ ID NO: 3083028 - RNA, 19 nt, Artificial Sequence
  Description of Artificial Sequence: Synthetic oligonucleotide
uaaucaagaaggucauguu

SEQ ID NO: 3083029 - RNA, 19 nt, Artificial Sequence
  Description of Artificial Sequence: Synthetic oligonucleotide
uucaggcaggagcaagacc

SEQ ID NO: 3083030 - RNA, 19 nt, Artificial Sequence
  Description of Artificial Sequence: Synthetic oligonucleotide
aaccccuuugcaucaaguu

SEQ ID NO: 3083031 - RNA, 19 nt, Artificial Sequence
  Description of Artificial Sequence: Synthetic oligonucleotide
gaugaauggcagugccaag

SEQ ID NO: 3083032 - RNA, 19 nt, Artificial Sequence
  Description of Artificial Sequence: Synthetic oligonucleotide
aaggaugacuuuaguuaag

SEQ ID NO: 3083033 - RNA, 19 nt, Artificial Sequence
  Description of Artificial Sequence: Synthetic oligonucleotide
uuaagguccaugaccucua

SEQ ID NO: 3083034 - RNA, 19 nt, Artificial Sequence
  Description of Artificial Sequence: Synthetic oligonucleotide
augaauggcagugccaaga

SEQ ID NO: 3083035 - RNA, 19 nt, Artificial Sequence
  Description of Artificial Sequence: Synthetic oligonucleotide
caaggaugacuuuaguuaa

SEQ ID NO: 3083036 - RNA, 19 nt, Artificial Sequence
  Description of Artificial Sequence: Synthetic oligonucleotide
accucuagggccaauguca

SEQ ID NO: 3083037 - RNA, 19 nt, Artificial Sequence
  Description of Artificial Sequence: Synthetic oligonucleotide
auucaggcaggagcaagac

SEQ ID NO: 3083038 - RNA, 19 nt, Artificial Sequence
  Description of Artificial Sequence: Synthetic oligonucleotide
aucagcuaaccccuuugca

SEQ ID NO: 3083039 - RNA, 19 nt, Artificial Sequence
  Description of Artificial Sequence: Synthetic oligonucleotide
guuaagauguuaaggucca

SEQ ID NO: 3083040 - RNA, 19 nt, Artificial Sequence
  Description of Artificial Sequence: Synthetic oligonucleotide
uguugguuuugcuucuaau

SEQ ID NO: 3083041 - RNA, 19 nt, Artificial Sequence
  Description of Artificial Sequence: Synthetic oligonucleotide
uaaccccuuugcaucaagu

SEQ ID NO: 3083042 - RNA, 19 nt, Artificial Sequence
  Description of Artificial Sequence: Synthetic oligonucleotide
cuaaucaagaaggucaugu

SEQ ID NO: 3083043 - RNA, 19 nt, Artificial Sequence
  Description of Artificial Sequence: Synthetic oligonucleotide
ccuaggaaugcuugcagcc

SEQ ID NO: 3083044 - RNA, 19 nt, Artificial Sequence
  Description of Artificial Sequence: Synthetic oligonucleotide
agaacugcuucggccuucc

SEQ ID NO: 3083045 - RNA, 19 nt, Artificial Sequence
  Description of Artificial Sequence: Synthetic oligonucleotide
cagcuaaccccuuugcauc

SEQ ID NO: 3083046 - RNA, 19 nt, Artificial Sequence
  Description of Artificial Sequence: Synthetic oligonucleotide
uaagguccaugaccucuag

SEQ ID NO: 3083047 - RNA, 19 nt, Artificial Sequence
  Description of Artificial Sequence: Synthetic oligonucleotide
gucauguugccugauuuac

SEQ ID NO: 3083048 - RNA, 19 nt, Artificial Sequence
  Description of Artificial Sequence: Synthetic oligonucleotide
ugcagccacaugucauagg

SEQ ID NO: 3083049 - RNA, 19 nt, Artificial Sequence
  Description of Artificial Sequence: Synthetic oligonucleotide
cucccaaggaugacuuuag

SEQ ID NO: 3083050 - RNA, 19 nt, Artificial Sequence
  Description of Artificial Sequence: Synthetic oligonucleotide
guggacuugcagcaaucag

SEQ ID NO: 3083051 - RNA, 19 nt, Artificial Sequence
  Description of Artificial Sequence: Synthetic oligonucleotide
ugaccucuagggccaaugu

SEQ ID NO: 3083052 - RNA, 19 nt, Artificial Sequence
  Description of Artificial Sequence: Synthetic oligonucleotide
uggccauguggacuugcag

SEQ ID NO: 3083053 - RNA, 19 nt, Artificial Sequence
  Description of Artificial Sequence: Synthetic oligonucleotide
ccaaugucauccauucagg

SEQ ID NO: 3083054 - RNA, 19 nt, Artificial Sequence
  Description of Artificial Sequence: Synthetic oligonucleotide
ugccugauuuacauucaaa

SEQ ID NO: 3083055 - RNA, 19 nt, Artificial Sequence
  Description of Artificial Sequence: Synthetic oligonucleotide
ggccauguggacuugcagc

SEQ ID NO: 3083056 - RNA, 19 nt, Artificial Sequence
  Description of Artificial Sequence: Synthetic oligonucleotide
aagaacugcuucggccuuc

SEQ ID NO: 3083057 - RNA, 19 nt, Artificial Sequence
  Description of Artificial Sequence: Synthetic oligonucleotide
ugcuugcagccacauguca

SEQ ID NO: 3083058 - RNA, 19 nt, Artificial Sequence
  Description of Artificial Sequence: Synthetic oligonucleotide
uguggacuugcagcaauca

SEQ ID NO: 3083059 - RNA, 19 nt, Artificial Sequence
  Description of Artificial Sequence: Synthetic oligonucleotide
gguuuugcuucuaaucaag

SEQ ID NO: 3083060 - RNA, 19 nt, Artificial Sequence
  Description of Artificial Sequence: Synthetic oligonucleotide
aggucauguugccugauuu

SEQ ID NO: 3083061 - RNA, 19 nt, Artificial Sequence
  Description of Artificial Sequence: Synthetic oligonucleotide
aggaugacuuuaguuaaga

SEQ ID NO: 3083062 - RNA, 19 nt, Artificial Sequence
  Description of Artificial Sequence: Synthetic oligonucleotide
cauaggugaggaccaacuc

SEQ ID NO: 3083063 - RNA, 19 nt, Artificial Sequence
  Description of Artificial Sequence: Synthetic oligonucleotide
uggaggucuaaaggaagug

SEQ ID NO: 3083064 - RNA, 19 nt, Artificial Sequence
  Description of Artificial Sequence: Synthetic oligonucleotide
agacuugcucccaaggaug

SEQ ID NO: 3083065 - RNA, 19 nt, Artificial Sequence
  Description of Artificial Sequence: Synthetic oligonucleotide
ucuaaucaagaaggucaug

SEQ ID NO: 3083066 - RNA, 19 nt, Artificial Sequence
  Description of Artificial Sequence: Synthetic oligonucleotide
agaaggucauguugccuga

SEQ ID NO: 3083067 - RNA, 19 nt, Artificial Sequence
  Description of Artificial Sequence: Synthetic oligonucleotide
gccaagaacugcuucggcc

SEQ ID NO: 3083068 - RNA, 19 nt, Artificial Sequence
  Description of Artificial Sequence: Synthetic oligonucleotide
uugccugauuuacauucaa

SEQ ID NO: 3083069 - RNA, 19 nt, Artificial Sequence
  Description of Artificial Sequence: Synthetic oligonucleotide
gccugauuuacauucaaaa

SEQ ID NO: 3083070 - RNA, 19 nt, Artificial Sequence
  Description of Artificial Sequence: Synthetic oligonucleotide
gaauggcagugccaagaac

SEQ ID NO: 3083071 - RNA, 19 nt, Artificial Sequence
  Description of Artificial Sequence: Synthetic oligonucleotide
auccauucaggcaggagca

SEQ ID NO: 3083072 - RNA, 19 nt, Artificial Sequence
  Description of Artificial Sequence: Synthetic oligonucleotide
uugguggccauguggacuu

SEQ ID NO: 3083073 - RNA, 19 nt, Artificial Sequence
  Description of Artificial Sequence: Synthetic oligonucleotide
agcuaaccccuuugcauca

SEQ ID NO: 3083074 - RNA, 19 nt, Artificial Sequence
  Description of Artificial Sequence: Synthetic oligonucleotide
ccaaggaugacuuuaguua

SEQ ID NO: 3083075 - RNA, 19 nt, Artificial Sequence
  Description of Artificial Sequence: Synthetic oligonucleotide
gaaugcuugcagccacaug

SEQ ID NO: 3083076 - RNA, 19 nt, Artificial Sequence
  Description of Artificial Sequence: Synthetic oligonucleotide
aaggucauguugccugauu

SEQ ID NO: 3083077 - RNA, 19 nt, Artificial Sequence
  Description of Artificial Sequence: Synthetic oligonucleotide
ucauccauucaggcaggag

SEQ ID NO: 3083078 - RNA, 19 nt, Artificial Sequence
  Description of Artificial Sequence: Synthetic oligonucleotide
aggucuaaaggaaguguug

SEQ ID NO: 3083079 - RNA, 19 nt, Artificial Sequence
  Description of Artificial Sequence: Synthetic oligonucleotide
cauucaggcaggagcaaga

SEQ ID NO: 3083080 - RNA, 19 nt, Artificial Sequence
  Description of Artificial Sequence: Synthetic oligonucleotide
gaccucuagggccaauguc

SEQ ID NO: 3083081 - RNA, 19 nt, Artificial Sequence
  Description of Artificial Sequence: Synthetic oligonucleotide
uugcagccacaugucauag

SEQ ID NO: 3083082 - RNA, 19 nt, Artificial Sequence
  Description of Artificial Sequence: Synthetic oligonucleotide
uugcucccaaggaugacuu

SEQ ID NO: 3083083 - RNA, 19 nt, Artificial Sequence
  Description of Artificial Sequence: Synthetic oligonucleotide
gcaucaaguugauauguga

SEQ ID NO: 3083084 - RNA, 19 nt, Artificial Sequence
  Description of Artificial Sequence: Synthetic oligonucleotide
gacuuuaguuaagauguua

SEQ ID NO: 3083085 - RNA, 19 nt, Artificial Sequence
  Description of Artificial Sequence: Synthetic oligonucleotide
aggaccaacucuggagguc

SEQ ID NO: 3083086 - RNA, 19 nt, Artificial Sequence
  Description of Artificial Sequence: Synthetic oligonucleotide
ugacuuuaguuaagauguu

SEQ ID NO: 3083087 - RNA, 19 nt, Artificial Sequence
  Description of Artificial Sequence: Synthetic oligonucleotide
aggaaguguugguuuugcu

SEQ ID NO: 3083088 - RNA, 19 nt, Artificial Sequence
  Description of Artificial Sequence: Synthetic oligonucleotide
cuaaaggaaguguugguuu

SEQ ID NO: 3083089 - RNA, 19 nt, Artificial Sequence
  Description of Artificial Sequence: Synthetic oligonucleotide
ucccaaggaugacuuuagu

SEQ ID NO: 3083090 - RNA, 19 nt, Artificial Sequence
  Description of Artificial Sequence: Synthetic oligonucleotide
guuaagguccaugaccucu

SEQ ID NO: 3083091 - RNA, 19 nt, Artificial Sequence
  Description of Artificial Sequence: Synthetic oligonucleotide
gguccaugaccucuagggc

SEQ ID NO: 3083092 - RNA, 19 nt, Artificial Sequence
  Description of Artificial Sequence: Synthetic oligonucleotide
augaccucuagggccaaug

SEQ ID NO: 3083093 - RNA, 19 nt, Artificial Sequence
  Description of Artificial Sequence: Synthetic oligonucleotide
caucaaguugauaugugau

SEQ ID NO: 3083094 - RNA, 19 nt, Artificial Sequence
  Description of Artificial Sequence: Synthetic oligonucleotide
cauguugccugauuuacau

SEQ ID NO: 3083095 - RNA, 19 nt, Artificial Sequence
  Description of Artificial Sequence: Synthetic oligonucleotide
cucuggaggucuaaaggaa

SEQ ID NO: 3083096 - RNA, 19 nt, Artificial Sequence
  Description of Artificial Sequence: Synthetic oligonucleotide
auguggacuugcagcaauc

SEQ ID NO: 3083097 - RNA, 19 nt, Artificial Sequence
  Description of Artificial Sequence: Synthetic oligonucleotide
cacaugucauaggugagga

SEQ ID NO: 3083098 - RNA, 19 nt, Artificial Sequence
  Description of Artificial Sequence: Synthetic oligonucleotide
auggcagugccaagaacug

SEQ ID NO: 3083099 - RNA, 19 nt, Artificial Sequence
  Description of Artificial Sequence: Synthetic oligonucleotide
gggccaaugucauccauuc

SEQ ID NO: 3083100 - RNA, 19 nt, Artificial Sequence
  Description of Artificial Sequence: Synthetic oligonucleotide
cuccacaagccuuagacuu

SEQ ID NO: 3083101 - RNA, 19 nt, Artificial Sequence
  Description of Artificial Sequence: Synthetic oligonucleotide
cuugcagccacaugucaua

SEQ ID NO: 3083102 - RNA, 19 nt, Artificial Sequence
  Description of Artificial Sequence: Synthetic oligonucleotide
caaguugauaugugaugaa

SEQ ID NO: 3083103 - RNA, 19 nt, Artificial Sequence
  Description of Artificial Sequence: Synthetic oligonucleotide
augcuugcagccacauguc

SEQ ID NO: 3083104 - RNA, 19 nt, Artificial Sequence
  Description of Artificial Sequence: Synthetic oligonucleotide
gccauguggacuugcagca

SEQ ID NO: 3083105 - RNA, 19 nt, Artificial Sequence
  Description of Artificial Sequence: Synthetic oligonucleotide
gacuugcucccaaggauga

SEQ ID NO: 3083106 - RNA, 19 nt, Artificial Sequence
  Description of Artificial Sequence: Synthetic oligonucleotide
uggcagugccaagaacugc

SEQ ID NO: 3083107 - RNA, 19 nt, Artificial Sequence
  Description of Artificial Sequence: Synthetic oligonucleotide
acuugcucccaaggaugac

SEQ ID NO: 3083108 - RNA, 19 nt, Artificial Sequence
  Description of Artificial Sequence: Synthetic oligonucleotide
uucggccuuccuccacaag

SEQ ID NO: 3083109 - RNA, 19 nt, Artificial Sequence
  Description of Artificial Sequence: Synthetic oligonucleotide
cuaggaaugcuugcagcca

SEQ ID NO: 3083110 - RNA, 19 nt, Artificial Sequence
  Description of Artificial Sequence: Synthetic oligonucleotide
ccccuuugcaucaaguuga

SEQ ID NO: 3083111 - RNA, 19 nt, Artificial Sequence
  Description of Artificial Sequence: Synthetic oligonucleotide
gcuucuaaucaagaagguc

SEQ ID NO: 3083112 - RNA, 19 nt, Artificial Sequence
  Description of Artificial Sequence: Synthetic oligonucleotide
cagccacaugucauaggug

SEQ ID NO: 3083113 - RNA, 19 nt, Artificial Sequence
  Description of Artificial Sequence: Synthetic oligonucleotide
uuccuccacaagccuuaga

SEQ ID NO: 3083114 - RNA, 19 nt, Artificial Sequence
  Description of Artificial Sequence: Synthetic oligonucleotide
gucuaaaggaaguguuggu

SEQ ID NO: 3083115 - RNA, 19 nt, Artificial Sequence
  Description of Artificial Sequence: Synthetic oligonucleotide
cagugccaagaacugcuuc

SEQ ID NO: 3083116 - RNA, 19 nt, Artificial Sequence
  Description of Artificial Sequence: Synthetic oligonucleotide
ccacaugucauaggugagg

SEQ ID NO: 3083117 - RNA, 19 nt, Artificial Sequence
  Description of Artificial Sequence: Synthetic oligonucleotide
uugcagcaaucagcuaacc

SEQ ID NO: 3083118 - RNA, 19 nt, Artificial Sequence
  Description of Artificial Sequence: Synthetic oligonucleotide
cccuaggaaugcuugcagc

SEQ ID NO: 3083119 - RNA, 19 nt, Artificial Sequence
  Description of Artificial Sequence: Synthetic oligonucleotide
cagcaaucagcuaaccccu

SEQ ID NO: 3083120 - RNA, 19 nt, Artificial Sequence
  Description of Artificial Sequence: Synthetic oligonucleotide
uuaagauguuaagguccau

SEQ ID NO: 3083121 - RNA, 19 nt, Artificial Sequence
  Description of Artificial Sequence: Synthetic oligonucleotide
gcagccacaugucauaggu

SEQ ID NO: 3083122 - RNA, 19 nt, Artificial Sequence
  Description of Artificial Sequence: Synthetic oligonucleotide
gucauaggugaggaccaac

SEQ ID NO: 3083123 - RNA, 19 nt, Artificial Sequence
  Description of Artificial Sequence: Synthetic oligonucleotide
uagggccaaugucauccau

SEQ ID NO: 3083124 - RNA, 19 nt, Artificial Sequence
  Description of Artificial Sequence: Synthetic oligonucleotide
gaggucuaaaggaaguguu

SEQ ID NO: 3083125 - RNA, 19 nt, Artificial Sequence
  Description of Artificial Sequence: Synthetic oligonucleotide
cuggaggucuaaaggaagu

SEQ ID NO: 3083126 - RNA, 19 nt, Artificial Sequence
  Description of Artificial Sequence: Synthetic oligonucleotide
auguugccugauuuacauu

SEQ ID NO: 3083127 - RNA, 19 nt, Artificial Sequence
  Description of Artificial Sequence: Synthetic oligonucleotide
aggugaggaccaacucugg

SEQ ID NO: 3083128 - RNA, 19 nt, Artificial Sequence
  Description of Artificial Sequence: Synthetic oligonucleotide
ugcuucggccuuccuccac

SEQ ID NO: 3083129 - RNA, 19 nt, Artificial Sequence
  Description of Artificial Sequence: Synthetic oligonucleotide
ugucauaggugaggaccaa

SEQ ID NO: 3083130 - RNA, 19 nt, Artificial Sequence
  Description of Artificial Sequence: Synthetic oligonucleotide
ggaaguguugguuuugcuu

SEQ ID NO: 3083131 - RNA, 19 nt, Artificial Sequence
  Description of Artificial Sequence: Synthetic oligonucleotide
ccuuagacuugcucccaag

SEQ ID NO: 3083132 - RNA, 19 nt, Artificial Sequence
  Description of Artificial Sequence: Synthetic oligonucleotide
ggugaggaccaacucugga

SEQ ID NO: 3083133 - RNA, 19 nt, Artificial Sequence
  Description of Artificial Sequence: Synthetic oligonucleotide
ggacuugcagcaaucagcu

SEQ ID NO: 3083134 - RNA, 19 nt, Artificial Sequence
  Description of Artificial Sequence: Synthetic oligonucleotide
gaggaccaacucuggaggu

SEQ ID NO: 3083135 - RNA, 19 nt, Artificial Sequence
  Description of Artificial Sequence: Synthetic oligonucleotide
uccauucaggcaggagcaa

SEQ ID NO: 3083136 - RNA, 19 nt, Artificial Sequence
  Description of Artificial Sequence: Synthetic oligonucleotide
ggucauguugccugauuua

SEQ ID NO: 3083137 - RNA, 19 nt, Artificial Sequence
  Description of Artificial Sequence: Synthetic oligonucleotide
cuagggccaaugucaucca

SEQ ID NO: 3083138 - RNA, 19 nt, Artificial Sequence
  Description of Artificial Sequence: Synthetic oligonucleotide
ccacaagccuuagacuugc

SEQ ID NO: 3083139 - RNA, 19 nt, Artificial Sequence
  Description of Artificial Sequence: Synthetic oligonucleotide
cuugcucccaaggaugacu

SEQ ID NO: 3083140 - RNA, 19 nt, Artificial Sequence
  Description of Artificial Sequence: Synthetic oligonucleotide
agggccaaugucauccauu

SEQ ID NO: 3083141 - RNA, 19 nt, Artificial Sequence
  Description of Artificial Sequence: Synthetic oligonucleotide
aggaaugcuugcagccaca

SEQ ID NO: 3083142 - RNA, 19 nt, Artificial Sequence
  Description of Artificial Sequence: Synthetic oligonucleotide
ccauucaggcaggagcaag

SEQ ID NO: 3083143 - RNA, 19 nt, Artificial Sequence
  Description of Artificial Sequence: Synthetic oligonucleotide
agccuuagacuugcuccca

SEQ ID NO: 3083144 - RNA, 19 nt, Artificial Sequence
  Description of Artificial Sequence: Synthetic oligonucleotide
ccaagaacugcuucggccu

SEQ ID NO: 3083145 - RNA, 19 nt, Artificial Sequence
  Description of Artificial Sequence: Synthetic oligonucleotide
aggcaggagcaagacccug

SEQ ID NO: 3083146 - RNA, 19 nt, Artificial Sequence
  Description of Artificial Sequence: Synthetic oligonucleotide
ggaggucuaaaggaagugu

SEQ ID NO: 3083147 - RNA, 19 nt, Artificial Sequence
  Description of Artificial Sequence: Synthetic oligonucleotide
cauguggacuugcagcaau

SEQ ID NO: 3083148 - RNA, 19 nt, Artificial Sequence
  Description of Artificial Sequence: Synthetic oligonucleotide
ggcagugccaagaacugcu

SEQ ID NO: 3083149 - RNA, 19 nt, Artificial Sequence
  Description of Artificial Sequence: Synthetic oligonucleotide
cggccuuccuccacaagcc

SEQ ID NO: 3083150 - RNA, 19 nt, Artificial Sequence
  Description of Artificial Sequence: Synthetic oligonucleotide
aguguugguuuugcuucua

SEQ ID NO: 3083151 - RNA, 19 nt, Artificial Sequence
  Description of Artificial Sequence: Synthetic oligonucleotide
ugcucccaaggaugacuuu

SEQ ID NO: 3083152 - RNA, 19 nt, Artificial Sequence
  Description of Artificial Sequence: Synthetic oligonucleotide
ggaugacuuuaguuaagau

SEQ ID NO: 3083153 - RNA, 19 nt, Artificial Sequence
  Description of Artificial Sequence: Synthetic oligonucleotide
accaacucuggaggucuaa

SEQ ID NO: 3083154 - RNA, 19 nt, Artificial Sequence
  Description of Artificial Sequence: Synthetic oligonucleotide
gacuugcagcaaucagcua

SEQ ID NO: 3083155 - RNA, 19 nt, Artificial Sequence
  Description of Artificial Sequence: Synthetic oligonucleotide
guggccauguggacuugca

SEQ ID NO: 3083156 - RNA, 19 nt, Artificial Sequence
  Description of Artificial Sequence: Synthetic oligonucleotide
caagaaggucauguugccu

SEQ ID NO: 3083157 - RNA, 19 nt, Artificial Sequence
  Description of Artificial Sequence: Synthetic oligonucleotide
gcucccaaggaugacuuua

SEQ ID NO: 3083158 - RNA, 19 nt, Artificial Sequence
  Description of Artificial Sequence: Synthetic oligonucleotide
gcaggagcaagacccugaa

SEQ ID NO: 3083159 - RNA, 19 nt, Artificial Sequence
  Description of Artificial Sequence: Synthetic oligonucleotide
ggcaggagcaagacccuga

SEQ ID NO: 3083160 - RNA, 19 nt, Artificial Sequence
  Description of Artificial Sequence: Synthetic oligonucleotide
gguggccauguggacuugc

SEQ ID NO: 3083161 - RNA, 19 nt, Artificial Sequence
  Description of Artificial Sequence: Synthetic oligonucleotide
ggaccaacucuggaggucu

SEQ ID NO: 3083162 - RNA, 19 nt, Artificial Sequence
  Description of Artificial Sequence: Synthetic oligonucleotide
gucauccauucaggcagga

SEQ ID NO: 3083163 - RNA, 19 nt, Artificial Sequence
  Description of Artificial Sequence: Synthetic oligonucleotide
cuucggccuuccuccacaa

SEQ ID NO: 3083164 - RNA, 19 nt, Artificial Sequence
  Description of Artificial Sequence: Synthetic oligonucleotide
ggccaaugucauccauuca

SEQ ID NO: 3083165 - RNA, 19 nt, Artificial Sequence
  Description of Artificial Sequence: Synthetic oligonucleotide
ccuuccuccacaagccuua

SEQ ID NO: 3083166 - RNA, 19 nt, Artificial Sequence
  Description of Artificial Sequence: Synthetic oligonucleotide
agcaaucagcuaaccccuu

SEQ ID NO: 3083167 - RNA, 19 nt, Artificial Sequence
  Description of Artificial Sequence: Synthetic oligonucleotide
caggagcaagacccugaaa

SEQ ID NO: 3083168 - RNA, 19 nt, Artificial Sequence
  Description of Artificial Sequence: Synthetic oligonucleotide
ugguggccauguggacuug

SEQ ID NO: 3083169 - RNA, 19 nt, Artificial Sequence
  Description of Artificial Sequence: Synthetic oligonucleotide
cccaaggaugacuuuaguu

SEQ ID NO: 3083170 - RNA, 19 nt, Artificial Sequence
  Description of Artificial Sequence: Synthetic oligonucleotide
cugcuucggccuuccucca

SEQ ID NO: 3083171 - RNA, 19 nt, Artificial Sequence
  Description of Artificial Sequence: Synthetic oligonucleotide
gaaggucauguugccugau

SEQ ID NO: 3083172 - RNA, 19 nt, Artificial Sequence
  Description of Artificial Sequence: Synthetic oligonucleotide
gccuuagacuugcucccaa

SEQ ID NO: 3083173 - RNA, 19 nt, Artificial Sequence
  Description of Artificial Sequence: Synthetic oligonucleotide
caagaacugcuucggccuu

SEQ ID NO: 3083174 - RNA, 19 nt, Artificial Sequence
  Description of Artificial Sequence: Synthetic oligonucleotide
ccuccacaagccuuagacu

SEQ ID NO: 3083175 - RNA, 19 nt, Artificial Sequence
  Description of Artificial Sequence: Synthetic oligonucleotide
gcuugcagccacaugucau

SEQ ID NO: 3083176 - RNA, 19 nt, Artificial Sequence
  Description of Artificial Sequence: Synthetic oligonucleotide
gcaaucagcuaaccccuuu

SEQ ID NO: 3083177 - RNA, 19 nt, Artificial Sequence
  Description of Artificial Sequence: Synthetic oligonucleotide
gaccaacucuggaggucua

SEQ ID NO: 3083178 - RNA, 19 nt, Artificial Sequence
  Description of Artificial Sequence: Synthetic oligonucleotide
gaacugcuucggccuuccu

SEQ ID NO: 3083179 - RNA, 19 nt, Artificial Sequence
  Description of Artificial Sequence: Synthetic oligonucleotide
ggaaugcuugcagccacau

SEQ ID NO: 3083180 - RNA, 19 nt, Artificial Sequence
  Description of Artificial Sequence: Synthetic oligonucleotide
ccaacucuggaggucuaaa

SEQ ID NO: 3083181 - RNA, 19 nt, Artificial Sequence
  Description of Artificial Sequence: Synthetic oligonucleotide
gcuaaccccuuugcaucaa

SEQ ID NO: 3083182 - RNA, 19 nt, Artificial Sequence
  Description of Artificial Sequence: Synthetic oligonucleotide
ccauguggacuugcagcaa

SEQ ID NO: 3083183 - RNA, 19 nt, Artificial Sequence
  Description of Artificial Sequence: Synthetic oligonucleotide
cccuuugcaucaaguugau

SEQ ID NO: 3083184 - RNA, 19 nt, Artificial Sequence
  Description of Artificial Sequence: Synthetic oligonucleotide
ccuuugcaucaaguugaua

SEQ ID NO: 3083185 - RNA, 19 nt, Artificial Sequence
  Description of Artificial Sequence: Synthetic oligonucleotide
caugaccucuagggccaau

SEQ ID NO: 3083186 - RNA, 19 nt, Artificial Sequence
  Description of Artificial Sequence: Synthetic oligonucleotide
ccaugaccucuagggccaa

SEQ ID NO: 3083187 - RNA, 19 nt, Artificial Sequence
  Description of Artificial Sequence: Synthetic oligonucleotide
aaguaaagaaccgagaugg

SEQ ID NO: 3083188 - RNA, 19 nt, Artificial Sequence
  Description of Artificial Sequence: Synthetic oligonucleotide
uuuucuaagaugacguugg

SEQ ID NO: 3083189 - RNA, 19 nt, Artificial Sequence
  Description of Artificial Sequence: Synthetic oligonucleotide
aucaucaaaguaaagaacc

SEQ ID NO: 3083190 - RNA, 19 nt, Artificial Sequence
  Description of Artificial Sequence: Synthetic oligonucleotide
auacucaggauucauaagg

SEQ ID NO: 3083191 - RNA, 19 nt, Artificial Sequence
  Description of Artificial Sequence: Synthetic oligonucleotide
ucuaagaugacguuggagu

SEQ ID NO: 3083192 - RNA, 19 nt, Artificial Sequence
  Description of Artificial Sequence: Synthetic oligonucleotide
aguaguuggcagcauagcc

SEQ ID NO: 3083193 - RNA, 19 nt, Artificial Sequence
  Description of Artificial Sequence: Synthetic oligonucleotide
aaaguaaagaaccgagaug

SEQ ID NO: 3083194 - RNA, 19 nt, Artificial Sequence
  Description of Artificial Sequence: Synthetic oligonucleotide
uggcauucagcuuaguugg

SEQ ID NO: 3083195 - RNA, 19 nt, Artificial Sequence
  Description of Artificial Sequence: Synthetic oligonucleotide
ucaucaaaguaaagaaccg

SEQ ID NO: 3083196 - RNA, 19 nt, Artificial Sequence
  Description of Artificial Sequence: Synthetic oligonucleotide
uaguuggugcacaacaugg

SEQ ID NO: 3083197 - RNA, 19 nt, Artificial Sequence
  Description of Artificial Sequence: Synthetic oligonucleotide
uccacaagcucucacaacc

SEQ ID NO: 3083198 - RNA, 19 nt, Artificial Sequence
  Description of Artificial Sequence: Synthetic oligonucleotide
ugugcauugagugggaagg

SEQ ID NO: 3083199 - RNA, 19 nt, Artificial Sequence
  Description of Artificial Sequence: Synthetic oligonucleotide
uucauaaggugaaccaagg

SEQ ID NO: 3083200 - RNA, 19 nt, Artificial Sequence
  Description of Artificial Sequence: Synthetic oligonucleotide
uguacgauggcgugguugg

SEQ ID NO: 3083201 - RNA, 19 nt, Artificial Sequence
  Description of Artificial Sequence: Synthetic oligonucleotide
agcucucacaaccauauuc

SEQ ID NO: 3083202 - RNA, 19 nt, Artificial Sequence
  Description of Artificial Sequence: Synthetic oligonucleotide
uucaugugugcauugagug

SEQ ID NO: 3083203 - RNA, 19 nt, Artificial Sequence
  Description of Artificial Sequence: Synthetic oligonucleotide
auggcauucagcuuaguug

SEQ ID NO: 3083204 - RNA, 19 nt, Artificial Sequence
  Description of Artificial Sequence: Synthetic oligonucleotide
uaucaucaaaguaaagaac

SEQ ID NO: 3083205 - RNA, 19 nt, Artificial Sequence
  Description of Artificial Sequence: Synthetic oligonucleotide
uggaagcucacauacagcu

SEQ ID NO: 3083206 - RNA, 19 nt, Artificial Sequence
  Description of Artificial Sequence: Synthetic oligonucleotide
uaaagaaccgagauggcau

SEQ ID NO: 3083207 - RNA, 19 nt, Artificial Sequence
  Description of Artificial Sequence: Synthetic oligonucleotide
guuggaguuaucaucaaag

SEQ ID NO: 3083208 - RNA, 19 nt, Artificial Sequence
  Description of Artificial Sequence: Synthetic oligonucleotide
augguuuggggacauacuc

SEQ ID NO: 3083209 - RNA, 19 nt, Artificial Sequence
  Description of Artificial Sequence: Synthetic oligonucleotide
cauaaggugaaccaagguc

SEQ ID NO: 3083210 - RNA, 19 nt, Artificial Sequence
  Description of Artificial Sequence: Synthetic oligonucleotide
ucaaaguaaagaaccgaga

SEQ ID NO: 3083211 - RNA, 19 nt, Artificial Sequence
  Description of Artificial Sequence: Synthetic oligonucleotide
ugggaaggaacacucuccg

SEQ ID NO: 3083212 - RNA, 19 nt, Artificial Sequence
  Description of Artificial Sequence: Synthetic oligonucleotide
aggauucauaaggugaacc

SEQ ID NO: 3083213 - RNA, 19 nt, Artificial Sequence
  Description of Artificial Sequence: Synthetic oligonucleotide
ugaaccaaggucuguacga

SEQ ID NO: 3083214 - RNA, 19 nt, Artificial Sequence
  Description of Artificial Sequence: Synthetic oligonucleotide
uuaguuggugcacaacaug

SEQ ID NO: 3083215 - RNA, 19 nt, Artificial Sequence
  Description of Artificial Sequence: Synthetic oligonucleotide
ucaugugugcauugagugg

SEQ ID NO: 3083216 - RNA, 19 nt, Artificial Sequence
  Description of Artificial Sequence: Synthetic oligonucleotide
accgagauggcauucagcu

SEQ ID NO: 3083217 - RNA, 19 nt, Artificial Sequence
  Description of Artificial Sequence: Synthetic oligonucleotide
gaagcucacauacagcuca

SEQ ID NO: 3083218 - RNA, 19 nt, Artificial Sequence
  Description of Artificial Sequence: Synthetic oligonucleotide
agugggaaggaacacucuc

SEQ ID NO: 3083219 - RNA, 19 nt, Artificial Sequence
  Description of Artificial Sequence: Synthetic oligonucleotide
aucaaaguaaagaaccgag

SEQ ID NO: 3083220 - RNA, 19 nt, Artificial Sequence
  Description of Artificial Sequence: Synthetic oligonucleotide
caugugugcauugaguggg

SEQ ID NO: 3083221 - RNA, 19 nt, Artificial Sequence
  Description of Artificial Sequence: Synthetic oligonucleotide
ucuccgucacaguaguugg

SEQ ID NO: 3083222 - RNA, 19 nt, Artificial Sequence
  Description of Artificial Sequence: Synthetic oligonucleotide
ucacauacagcucaugcuu

SEQ ID NO: 3083223 - RNA, 19 nt, Artificial Sequence
  Description of Artificial Sequence: Synthetic oligonucleotide
acauacucaggauucauaa

SEQ ID NO: 3083224 - RNA, 19 nt, Artificial Sequence
  Description of Artificial Sequence: Synthetic oligonucleotide
ucaggauucauaaggugaa

SEQ ID NO: 3083225 - RNA, 19 nt, Artificial Sequence
  Description of Artificial Sequence: Synthetic oligonucleotide
aaugauccaguccugccau

SEQ ID NO: 3083226 - RNA, 19 nt, Artificial Sequence
  Description of Artificial Sequence: Synthetic oligonucleotide
uuugggugcaaugauccag

SEQ ID NO: 3083227 - RNA, 19 nt, Artificial Sequence
  Description of Artificial Sequence: Synthetic oligonucleotide
ucucacaaccauauuccug

SEQ ID NO: 3083228 - RNA, 19 nt, Artificial Sequence
  Description of Artificial Sequence: Synthetic oligonucleotide
cucacaaccauauuccuga

SEQ ID NO: 3083229 - RNA, 19 nt, Artificial Sequence
  Description of Artificial Sequence: Synthetic oligonucleotide
cacaacaugguuuggggac

SEQ ID NO: 3083230 - RNA, 19 nt, Artificial Sequence
  Description of Artificial Sequence: Synthetic oligonucleotide
aacacucuccgucacagua

SEQ ID NO: 3083231 - RNA, 19 nt, Artificial Sequence
  Description of Artificial Sequence: Synthetic oligonucleotide
uggaguuaucaucaaagua

SEQ ID NO: 3083232 - RNA, 19 nt, Artificial Sequence
  Description of Artificial Sequence: Synthetic oligonucleotide
cauucagcuuaguuggugc

SEQ ID NO: 3083233 - RNA, 19 nt, Artificial Sequence
  Description of Artificial Sequence: Synthetic oligonucleotide
aaggaacacucuccgucac

SEQ ID NO: 3083234 - RNA, 19 nt, Artificial Sequence
  Description of Artificial Sequence: Synthetic oligonucleotide
ugagugggaaggaacacuc

SEQ ID NO: 3083235 - RNA, 19 nt, Artificial Sequence
  Description of Artificial Sequence: Synthetic oligonucleotide
uacucaggauucauaaggu

SEQ ID NO: 3083236 - RNA, 19 nt, Artificial Sequence
  Description of Artificial Sequence: Synthetic oligonucleotide
acaugguuuggggacauac

SEQ ID NO: 3083237 - RNA, 19 nt, Artificial Sequence
  Description of Artificial Sequence: Synthetic oligonucleotide
auucauaaggugaaccaag

SEQ ID NO: 3083238 - RNA, 19 nt, Artificial Sequence
  Description of Artificial Sequence: Synthetic oligonucleotide
uuggaguuaucaucaaagu

SEQ ID NO: 3083239 - RNA, 19 nt, Artificial Sequence
  Description of Artificial Sequence: Synthetic oligonucleotide
agcuuaauggcauccacaa

SEQ ID NO: 3083240 - RNA, 19 nt, Artificial Sequence
  Description of Artificial Sequence: Synthetic oligonucleotide
uggugcacaacaugguuug

SEQ ID NO: 3083241 - RNA, 19 nt, Artificial Sequence
  Description of Artificial Sequence: Synthetic oligonucleotide
cucaggauucauaagguga

SEQ ID NO: 3083242 - RNA, 19 nt, Artificial Sequence
  Description of Artificial Sequence: Synthetic oligonucleotide
ugacguuggaguuaucauc

SEQ ID NO: 3083243 - RNA, 19 nt, Artificial Sequence
  Description of Artificial Sequence: Synthetic oligonucleotide
ucauaaggugaaccaaggu

SEQ ID NO: 3083244 - RNA, 19 nt, Artificial Sequence
  Description of Artificial Sequence: Synthetic oligonucleotide
accaaggucuguacgaugg

SEQ ID NO: 3083245 - RNA, 19 nt, Artificial Sequence
  Description of Artificial Sequence: Synthetic oligonucleotide
ggaguuaucaucaaaguaa

SEQ ID NO: 3083246 - RNA, 19 nt, Artificial Sequence
  Description of Artificial Sequence: Synthetic oligonucleotide
aguccugccaucccagguc

SEQ ID NO: 3083247 - RNA, 19 nt, Artificial Sequence
  Description of Artificial Sequence: Synthetic oligonucleotide
ugguuuggggacauacuca

SEQ ID NO: 3083248 - RNA, 19 nt, Artificial Sequence
  Description of Artificial Sequence: Synthetic oligonucleotide
gaugacguuggaguuauca

SEQ ID NO: 3083249 - RNA, 19 nt, Artificial Sequence
  Description of Artificial Sequence: Synthetic oligonucleotide
ucagcuuaauggcauccac

SEQ ID NO: 3083250 - RNA, 19 nt, Artificial Sequence
  Description of Artificial Sequence: Synthetic oligonucleotide
uucuaagaugacguuggag

SEQ ID NO: 3083251 - RNA, 19 nt, Artificial Sequence
  Description of Artificial Sequence: Synthetic oligonucleotide
gugaaccaaggucuguacg

SEQ ID NO: 3083252 - RNA, 19 nt, Artificial Sequence
  Description of Artificial Sequence: Synthetic oligonucleotide
gacguuggaguuaucauca

SEQ ID NO: 3083253 - RNA, 19 nt, Artificial Sequence
  Description of Artificial Sequence: Synthetic oligonucleotide
uugguggcauucaugugug

SEQ ID NO: 3083254 - RNA, 19 nt, Artificial Sequence
  Description of Artificial Sequence: Synthetic oligonucleotide
cauacucaggauucauaag

SEQ ID NO: 3083255 - RNA, 19 nt, Artificial Sequence
  Description of Artificial Sequence: Synthetic oligonucleotide
gaaggaacacucuccguca

SEQ ID NO: 3083256 - RNA, 19 nt, Artificial Sequence
  Description of Artificial Sequence: Synthetic oligonucleotide
aaccgagauggcauucagc

SEQ ID NO: 3083257 - RNA, 19 nt, Artificial Sequence
  Description of Artificial Sequence: Synthetic oligonucleotide
auugagugggaaggaacac

SEQ ID NO: 3083258 - RNA, 19 nt, Artificial Sequence
  Description of Artificial Sequence: Synthetic oligonucleotide
uugggugcaaugauccagu

SEQ ID NO: 3083259 - RNA, 19 nt, Artificial Sequence
  Description of Artificial Sequence: Synthetic oligonucleotide
cauucaugugugcauugag

SEQ ID NO: 3083260 - RNA, 19 nt, Artificial Sequence
  Description of Artificial Sequence: Synthetic oligonucleotide
caucccagguccuggaagc

SEQ ID NO: 3083261 - RNA, 19 nt, Artificial Sequence
  Description of Artificial Sequence: Synthetic oligonucleotide
acucaggauucauaaggug

SEQ ID NO: 3083262 - RNA, 19 nt, Artificial Sequence
  Description of Artificial Sequence: Synthetic oligonucleotide
gguuuggggacauacucag

SEQ ID NO: 3083263 - RNA, 19 nt, Artificial Sequence
  Description of Artificial Sequence: Synthetic oligonucleotide
aaagaaccgagauggcauu

SEQ ID NO: 3083264 - RNA, 19 nt, Artificial Sequence
  Description of Artificial Sequence: Synthetic oligonucleotide
cauugagugggaaggaaca

SEQ ID NO: 3083265 - RNA, 19 nt, Artificial Sequence
  Description of Artificial Sequence: Synthetic oligonucleotide
guccuggaagcucacauac

SEQ ID NO: 3083266 - RNA, 19 nt, Artificial Sequence
  Description of Artificial Sequence: Synthetic oligonucleotide
aagaugacguuggaguuau

SEQ ID NO: 3083267 - RNA, 19 nt, Artificial Sequence
  Description of Artificial Sequence: Synthetic oligonucleotide
aguaaagaaccgagauggc

SEQ ID NO: 3083268 - RNA, 19 nt, Artificial Sequence
  Description of Artificial Sequence: Synthetic oligonucleotide
aaccaaggucuguacgaug

SEQ ID NO: 3083269 - RNA, 19 nt, Artificial Sequence
  Description of Artificial Sequence: Synthetic oligonucleotide
ggugcaaugauccaguccu

SEQ ID NO: 3083270 - RNA, 19 nt, Artificial Sequence
  Description of Artificial Sequence: Synthetic oligonucleotide
uuggugcacaacaugguuu

SEQ ID NO: 3083271 - RNA, 19 nt, Artificial Sequence
  Description of Artificial Sequence: Synthetic oligonucleotide
aagaaccgagauggcauuc

SEQ ID NO: 3083272 - RNA, 19 nt, Artificial Sequence
  Description of Artificial Sequence: Synthetic oligonucleotide
cagcauagccuuugggugc

SEQ ID NO: 3083273 - RNA, 19 nt, Artificial Sequence
  Description of Artificial Sequence: Synthetic oligonucleotide
acaguaguuggcagcauag

SEQ ID NO: 3083274 - RNA, 19 nt, Artificial Sequence
  Description of Artificial Sequence: Synthetic oligonucleotide
uuucuaagaugacguugga

SEQ ID NO: 3083275 - RNA, 19 nt, Artificial Sequence
  Description of Artificial Sequence: Synthetic oligonucleotide
uuggcagcauagccuuugg

SEQ ID NO: 3083276 - RNA, 19 nt, Artificial Sequence
  Description of Artificial Sequence: Synthetic oligonucleotide
ggaaggaacacucuccguc

SEQ ID NO: 3083277 - RNA, 19 nt, Artificial Sequence
  Description of Artificial Sequence: Synthetic oligonucleotide
guaaagaaccgagauggca

SEQ ID NO: 3083278 - RNA, 19 nt, Artificial Sequence
  Description of Artificial Sequence: Synthetic oligonucleotide
gaaccgagauggcauucag

SEQ ID NO: 3083279 - RNA, 19 nt, Artificial Sequence
  Description of Artificial Sequence: Synthetic oligonucleotide
gauucauaaggugaaccaa

SEQ ID NO: 3083280 - RNA, 19 nt, Artificial Sequence
  Description of Artificial Sequence: Synthetic oligonucleotide
ggauucauaaggugaacca

SEQ ID NO: 3083281 - RNA, 19 nt, Artificial Sequence
  Description of Artificial Sequence: Synthetic oligonucleotide
ugauccaguccugccaucc

SEQ ID NO: 3083282 - RNA, 19 nt, Artificial Sequence
  Description of Artificial Sequence: Synthetic oligonucleotide
uccaguccugccaucccag

SEQ ID NO: 3083283 - RNA, 19 nt, Artificial Sequence
  Description of Artificial Sequence: Synthetic oligonucleotide
ugcaaugauccaguccugc

SEQ ID NO: 3083284 - RNA, 19 nt, Artificial Sequence
  Description of Artificial Sequence: Synthetic oligonucleotide
caaggucuguacgauggcg

SEQ ID NO: 3083285 - RNA, 19 nt, Artificial Sequence
  Description of Artificial Sequence: Synthetic oligonucleotide
uagccuuugggugcaauga

SEQ ID NO: 3083286 - RNA, 19 nt, Artificial Sequence
  Description of Artificial Sequence: Synthetic oligonucleotide
auucagcuuaguuggugca

SEQ ID NO: 3083287 - RNA, 19 nt, Artificial Sequence
  Description of Artificial Sequence: Synthetic oligonucleotide
augacguuggaguuaucau

SEQ ID NO: 3083288 - RNA, 19 nt, Artificial Sequence
  Description of Artificial Sequence: Synthetic oligonucleotide
gcucacauacagcucaugc

SEQ ID NO: 3083289 - RNA, 19 nt, Artificial Sequence
  Description of Artificial Sequence: Synthetic oligonucleotide
cucuccgucacaguaguug

SEQ ID NO: 3083290 - RNA, 19 nt, Artificial Sequence
  Description of Artificial Sequence: Synthetic oligonucleotide
uaguuggcagcauagccuu

SEQ ID NO: 3083291 - RNA, 19 nt, Artificial Sequence
  Description of Artificial Sequence: Synthetic oligonucleotide
uggcagcauagccuuuggg

SEQ ID NO: 3083292 - RNA, 19 nt, Artificial Sequence
  Description of Artificial Sequence: Synthetic oligonucleotide
caaaguaaagaaccgagau

SEQ ID NO: 3083293 - RNA, 19 nt, Artificial Sequence
  Description of Artificial Sequence: Synthetic oligonucleotide
cuggaagcucacauacagc

SEQ ID NO: 3083294 - RNA, 19 nt, Artificial Sequence
  Description of Artificial Sequence: Synthetic oligonucleotide
gaguuaucaucaaaguaaa

SEQ ID NO: 3083295 - RNA, 19 nt, Artificial Sequence
  Description of Artificial Sequence: Synthetic oligonucleotide
auucaugugugcauugagu

SEQ ID NO: 3083296 - RNA, 19 nt, Artificial Sequence
  Description of Artificial Sequence: Synthetic oligonucleotide
gcuuaguuggugcacaaca

SEQ ID NO: 3083297 - RNA, 19 nt, Artificial Sequence
  Description of Artificial Sequence: Synthetic oligonucleotide
ccuggaagcucacauacag

SEQ ID NO: 3083298 - RNA, 19 nt, Artificial Sequence
  Description of Artificial Sequence: Synthetic oligonucleotide
gugugcauugagugggaag

SEQ ID NO: 3083299 - RNA, 19 nt, Artificial Sequence
  Description of Artificial Sequence: Synthetic oligonucleotide
gugcacaacaugguuuggg

SEQ ID NO: 3083300 - RNA, 19 nt, Artificial Sequence
  Description of Artificial Sequence: Synthetic oligonucleotide
gcucucacaaccauauucc

SEQ ID NO: 3083301 - RNA, 19 nt, Artificial Sequence
  Description of Artificial Sequence: Synthetic oligonucleotide
uucagcuuaauggcaucca

SEQ ID NO: 3083302 - RNA, 19 nt, Artificial Sequence
  Description of Artificial Sequence: Synthetic oligonucleotide
uaagaugacguuggaguua

SEQ ID NO: 3083303 - RNA, 19 nt, Artificial Sequence
  Description of Artificial Sequence: Synthetic oligonucleotide
gugggaaggaacacucucc

SEQ ID NO: 3083304 - RNA, 19 nt, Artificial Sequence
  Description of Artificial Sequence: Synthetic oligonucleotide
caaugauccaguccugcca

SEQ ID NO: 3083305 - RNA, 19 nt, Artificial Sequence
  Description of Artificial Sequence: Synthetic oligonucleotide
aggucuguacgauggcgug

SEQ ID NO: 3083306 - RNA, 19 nt, Artificial Sequence
  Description of Artificial Sequence: Synthetic oligonucleotide
aguuaucaucaaaguaaag

SEQ ID NO: 3083307 - RNA, 19 nt, Artificial Sequence
  Description of Artificial Sequence: Synthetic oligonucleotide
caucaaaguaaagaaccga

SEQ ID NO: 3083308 - RNA, 19 nt, Artificial Sequence
  Description of Artificial Sequence: Synthetic oligonucleotide
uccuggaagcucacauaca

SEQ ID NO: 3083309 - RNA, 19 nt, Artificial Sequence
  Description of Artificial Sequence: Synthetic oligonucleotide
uucagcuuaguuggugcac

SEQ ID NO: 3083310 - RNA, 19 nt, Artificial Sequence
  Description of Artificial Sequence: Synthetic oligonucleotide
gauccaguccugccauccc

SEQ ID NO: 3083311 - RNA, 19 nt, Artificial Sequence
  Description of Artificial Sequence: Synthetic oligonucleotide
uaauggcauccacaagcuc

SEQ ID NO: 3083312 - RNA, 19 nt, Artificial Sequence
  Description of Artificial Sequence: Synthetic oligonucleotide
uacgauggcgugguuggug

SEQ ID NO: 3083313 - RNA, 19 nt, Artificial Sequence
  Description of Artificial Sequence: Synthetic oligonucleotide
agcuuaguuggugcacaac

SEQ ID NO: 3083314 - RNA, 19 nt, Artificial Sequence
  Description of Artificial Sequence: Synthetic oligonucleotide
guuggcagcauagccuuug

SEQ ID NO: 3083315 - RNA, 19 nt, Artificial Sequence
  Description of Artificial Sequence: Synthetic oligonucleotide
gucacaguaguuggcagca

SEQ ID NO: 3083316 - RNA, 19 nt, Artificial Sequence
  Description of Artificial Sequence: Synthetic oligonucleotide
acaacaugguuuggggaca

SEQ ID NO: 3083317 - RNA, 19 nt, Artificial Sequence
  Description of Artificial Sequence: Synthetic oligonucleotide
ugcauugagugggaaggaa

SEQ ID NO: 3083318 - RNA, 19 nt, Artificial Sequence
  Description of Artificial Sequence: Synthetic oligonucleotide
gagauggcauucagcuuag

SEQ ID NO: 3083319 - RNA, 19 nt, Artificial Sequence
  Description of Artificial Sequence: Synthetic oligonucleotide
gcaaugauccaguccugcc

SEQ ID NO: 3083320 - RNA, 19 nt, Artificial Sequence
  Description of Artificial Sequence: Synthetic oligonucleotide
cuguacgauggcgugguug

SEQ ID NO: 3083321 - RNA, 19 nt, Artificial Sequence
  Description of Artificial Sequence: Synthetic oligonucleotide
cagcuuaauggcauccaca

SEQ ID NO: 3083322 - RNA, 19 nt, Artificial Sequence
  Description of Artificial Sequence: Synthetic oligonucleotide
gauggcauucagcuuaguu

SEQ ID NO: 3083323 - RNA, 19 nt, Artificial Sequence
  Description of Artificial Sequence: Synthetic oligonucleotide
caagcucucacaaccauau

SEQ ID NO: 3083324 - RNA, 19 nt, Artificial Sequence
  Description of Artificial Sequence: Synthetic oligonucleotide
acauacagcucaugcuuuu

SEQ ID NO: 3083325 - RNA, 19 nt, Artificial Sequence
  Description of Artificial Sequence: Synthetic oligonucleotide
augauccaguccugccauc

SEQ ID NO: 3083326 - RNA, 19 nt, Artificial Sequence
  Description of Artificial Sequence: Synthetic oligonucleotide
agaaccgagauggcauuca

SEQ ID NO: 3083327 - RNA, 19 nt, Artificial Sequence
  Description of Artificial Sequence: Synthetic oligonucleotide
aaggugaaccaaggucugu

SEQ ID NO: 3083328 - RNA, 19 nt, Artificial Sequence
  Description of Artificial Sequence: Synthetic oligonucleotide
acacucuccgucacaguag

SEQ ID NO: 3083329 - RNA, 19 nt, Artificial Sequence
  Description of Artificial Sequence: Synthetic oligonucleotide
guaguuggcagcauagccu

SEQ ID NO: 3083330 - RNA, 19 nt, Artificial Sequence
  Description of Artificial Sequence: Synthetic oligonucleotide
caguaguuggcagcauagc

SEQ ID NO: 3083331 - RNA, 19 nt, Artificial Sequence
  Description of Artificial Sequence: Synthetic oligonucleotide
aguuggugcacaacauggu

SEQ ID NO: 3083332 - RNA, 19 nt, Artificial Sequence
  Description of Artificial Sequence: Synthetic oligonucleotide
aggaacacucuccgucaca

SEQ ID NO: 3083333 - RNA, 19 nt, Artificial Sequence
  Description of Artificial Sequence: Synthetic oligonucleotide
cuccgucacaguaguuggc

SEQ ID NO: 3083334 - RNA, 19 nt, Artificial Sequence
  Description of Artificial Sequence: Synthetic oligonucleotide
agccuuugggugcaaugau

SEQ ID NO: 3083335 - RNA, 19 nt, Artificial Sequence
  Description of Artificial Sequence: Synthetic oligonucleotide
ggugaaccaaggucuguac

SEQ ID NO: 3083336 - RNA, 19 nt, Artificial Sequence
  Description of Artificial Sequence: Synthetic oligonucleotide
gacauacucaggauucaua

SEQ ID NO: 3083337 - RNA, 19 nt, Artificial Sequence
  Description of Artificial Sequence: Synthetic oligonucleotide
gcuuaauggcauccacaag

SEQ ID NO: 3083338 - RNA, 19 nt, Artificial Sequence
  Description of Artificial Sequence: Synthetic oligonucleotide
gggugcaaugauccagucc

SEQ ID NO: 3083339 - RNA, 19 nt, Artificial Sequence
  Description of Artificial Sequence: Synthetic oligonucleotide
ggcagcauagccuuugggu

SEQ ID NO: 3083340 - RNA, 19 nt, Artificial Sequence
  Description of Artificial Sequence: Synthetic oligonucleotide
ggggacauacucaggauuc

SEQ ID NO: 3083341 - RNA, 19 nt, Artificial Sequence
  Description of Artificial Sequence: Synthetic oligonucleotide
cuuaguuggugcacaacau

SEQ ID NO: 3083342 - RNA, 19 nt, Artificial Sequence
  Description of Artificial Sequence: Synthetic oligonucleotide
gauggcgugguugguggca

SEQ ID NO: 3083343 - RNA, 19 nt, Artificial Sequence
  Description of Artificial Sequence: Synthetic oligonucleotide
gugguugguggcauucaug

SEQ ID NO: 3083344 - RNA, 19 nt, Artificial Sequence
  Description of Artificial Sequence: Synthetic oligonucleotide
ucacaaccauauuccugau

SEQ ID NO: 3083345 - RNA, 19 nt, Artificial Sequence
  Description of Artificial Sequence: Synthetic oligonucleotide
cuaagaugacguuggaguu

SEQ ID NO: 3083346 - RNA, 19 nt, Artificial Sequence
  Description of Artificial Sequence: Synthetic oligonucleotide
cuuugggugcaaugaucca

SEQ ID NO: 3083347 - RNA, 19 nt, Artificial Sequence
  Description of Artificial Sequence: Synthetic oligonucleotide
uggcauucaugugugcauu

SEQ ID NO: 3083348 - RNA, 19 nt, Artificial Sequence
  Description of Artificial Sequence: Synthetic oligonucleotide
ugugugcauugagugggaa

SEQ ID NO: 3083349 - RNA, 19 nt, Artificial Sequence
  Description of Artificial Sequence: Synthetic oligonucleotide
ggucuguacgauggcgugg

SEQ ID NO: 3083350 - RNA, 19 nt, Artificial Sequence
  Description of Artificial Sequence: Synthetic oligonucleotide
aagcucucacaaccauauu

SEQ ID NO: 3083351 - RNA, 19 nt, Artificial Sequence
  Description of Artificial Sequence: Synthetic oligonucleotide
gcauugagugggaaggaac

SEQ ID NO: 3083352 - RNA, 19 nt, Artificial Sequence
  Description of Artificial Sequence: Synthetic oligonucleotide
gguggcauucaugugugca

SEQ ID NO: 3083353 - RNA, 19 nt, Artificial Sequence
  Description of Artificial Sequence: Synthetic oligonucleotide
caggauucauaaggugaac

SEQ ID NO: 3083354 - RNA, 19 nt, Artificial Sequence
  Description of Artificial Sequence: Synthetic oligonucleotide
aggugaaccaaggucugua

SEQ ID NO: 3083355 - RNA, 19 nt, Artificial Sequence
  Description of Artificial Sequence: Synthetic oligonucleotide
ugggugcaaugauccaguc

SEQ ID NO: 3083356 - RNA, 19 nt, Artificial Sequence
  Description of Artificial Sequence: Synthetic oligonucleotide
guuggugcacaacaugguu

SEQ ID NO: 3083357 - RNA, 19 nt, Artificial Sequence
  Description of Artificial Sequence: Synthetic oligonucleotide
cugccaucccagguccugg

SEQ ID NO: 3083358 - RNA, 19 nt, Artificial Sequence
  Description of Artificial Sequence: Synthetic oligonucleotide
gguugguggcauucaugug

SEQ ID NO: 3083359 - RNA, 19 nt, Artificial Sequence
  Description of Artificial Sequence: Synthetic oligonucleotide
acaagcucucacaaccaua

SEQ ID NO: 3083360 - RNA, 19 nt, Artificial Sequence
  Description of Artificial Sequence: Synthetic oligonucleotide
gcauucagcuuaguuggug

SEQ ID NO: 3083361 - RNA, 19 nt, Artificial Sequence
  Description of Artificial Sequence: Synthetic oligonucleotide
cacaguaguuggcagcaua

SEQ ID NO: 3083362 - RNA, 19 nt, Artificial Sequence
  Description of Artificial Sequence: Synthetic oligonucleotide
gcacaacaugguuugggga

SEQ ID NO: 3083363 - RNA, 19 nt, Artificial Sequence
  Description of Artificial Sequence: Synthetic oligonucleotide
caugguuuggggacauacu

SEQ ID NO: 3083364 - RNA, 19 nt, Artificial Sequence
  Description of Artificial Sequence: Synthetic oligonucleotide
acguuggaguuaucaucaa

SEQ ID NO: 3083365 - RNA, 19 nt, Artificial Sequence
  Description of Artificial Sequence: Synthetic oligonucleotide
guggcauucaugugugcau

SEQ ID NO: 3083366 - RNA, 19 nt, Artificial Sequence
  Description of Artificial Sequence: Synthetic oligonucleotide
aagcucacauacagcucau

SEQ ID NO: 3083367 - RNA, 19 nt, Artificial Sequence
  Description of Artificial Sequence: Synthetic oligonucleotide
ggcauccacaagcucucac

SEQ ID NO: 3083368 - RNA, 19 nt, Artificial Sequence
  Description of Artificial Sequence: Synthetic oligonucleotide
agcucacauacagcucaug

SEQ ID NO: 3083369 - RNA, 19 nt, Artificial Sequence
  Description of Artificial Sequence: Synthetic oligonucleotide
cgagauggcauucagcuua

SEQ ID NO: 3083370 - RNA, 19 nt, Artificial Sequence
  Description of Artificial Sequence: Synthetic oligonucleotide
gaaccaaggucuguacgau

SEQ ID NO: 3083371 - RNA, 19 nt, Artificial Sequence
  Description of Artificial Sequence: Synthetic oligonucleotide
cucucacaaccauauuccu

SEQ ID NO: 3083372 - RNA, 19 nt, Artificial Sequence
  Description of Artificial Sequence: Synthetic oligonucleotide
ggugcacaacaugguuugg

SEQ ID NO: 3083373 - RNA, 19 nt, Artificial Sequence
  Description of Artificial Sequence: Synthetic oligonucleotide
ucccagguccuggaagcuc

SEQ ID NO: 3083374 - RNA, 19 nt, Artificial Sequence
  Description of Artificial Sequence: Synthetic oligonucleotide
uccugccaucccagguccu

SEQ ID NO: 3083375 - RNA, 19 nt, Artificial Sequence
  Description of Artificial Sequence: Synthetic oligonucleotide
gugcaaugauccaguccug

SEQ ID NO: 3083376 - RNA, 19 nt, Artificial Sequence
  Description of Artificial Sequence: Synthetic oligonucleotide
ccaaggucuguacgauggc

SEQ ID NO: 3083377 - RNA, 19 nt, Artificial Sequence
  Description of Artificial Sequence: Synthetic oligonucleotide
gucuguacgauggcguggu

SEQ ID NO: 3083378 - RNA, 19 nt, Artificial Sequence
  Description of Artificial Sequence: Synthetic oligonucleotide
ggaagcucacauacagcuc

SEQ ID NO: 3083379 - RNA, 19 nt, Artificial Sequence
  Description of Artificial Sequence: Synthetic oligonucleotide
gugcauugagugggaagga

SEQ ID NO: 3083380 - RNA, 19 nt, Artificial Sequence
  Description of Artificial Sequence: Synthetic oligonucleotide
ucacaguaguuggcagcau

SEQ ID NO: 3083381 - RNA, 19 nt, Artificial Sequence
  Description of Artificial Sequence: Synthetic oligonucleotide
ccgucacaguaguuggcag

SEQ ID NO: 3083382 - RNA, 19 nt, Artificial Sequence
  Description of Artificial Sequence: Synthetic oligonucleotide
ucuguacgauggcgugguu

SEQ ID NO: 3083383 - RNA, 19 nt, Artificial Sequence
  Description of Artificial Sequence: Synthetic oligonucleotide
augugugcauugaguggga

SEQ ID NO: 3083384 - RNA, 19 nt, Artificial Sequence
  Description of Artificial Sequence: Synthetic oligonucleotide
aacaugguuuggggacaua

SEQ ID NO: 3083385 - RNA, 19 nt, Artificial Sequence
  Description of Artificial Sequence: Synthetic oligonucleotide
gaacacucuccgucacagu

SEQ ID NO: 3083386 - RNA, 19 nt, Artificial Sequence
  Description of Artificial Sequence: Synthetic oligonucleotide
aucccagguccuggaagcu

SEQ ID NO: 3083387 - RNA, 19 nt, Artificial Sequence
  Description of Artificial Sequence: Synthetic oligonucleotide
cacauacagcucaugcuuu

SEQ ID NO: 3083388 - RNA, 19 nt, Artificial Sequence
  Description of Artificial Sequence: Synthetic oligonucleotide
cacucuccgucacaguagu

SEQ ID NO: 3083389 - RNA, 19 nt, Artificial Sequence
  Description of Artificial Sequence: Synthetic oligonucleotide
gguccuggaagcucacaua

SEQ ID NO: 3083390 - RNA, 19 nt, Artificial Sequence
  Description of Artificial Sequence: Synthetic oligonucleotide
auggcgugguugguggcau

SEQ ID NO: 3083391 - RNA, 19 nt, Artificial Sequence
  Description of Artificial Sequence: Synthetic oligonucleotide
uggcauccacaagcucuca

SEQ ID NO: 3083392 - RNA, 19 nt, Artificial Sequence
  Description of Artificial Sequence: Synthetic oligonucleotide
ccaguccugccaucccagg

SEQ ID NO: 3083393 - RNA, 19 nt, Artificial Sequence
  Description of Artificial Sequence: Synthetic oligonucleotide
cagcuuaguuggugcacaa

SEQ ID NO: 3083394 - RNA, 19 nt, Artificial Sequence
  Description of Artificial Sequence: Synthetic oligonucleotide
gccuuugggugcaaugauc

SEQ ID NO: 3083395 - RNA, 19 nt, Artificial Sequence
  Description of Artificial Sequence: Synthetic oligonucleotide
gggacauacucaggauuca

SEQ ID NO: 3083396 - RNA, 19 nt, Artificial Sequence
  Description of Artificial Sequence: Synthetic oligonucleotide
cacaagcucucacaaccau

SEQ ID NO: 3083397 - RNA, 19 nt, Artificial Sequence
  Description of Artificial Sequence: Synthetic oligonucleotide
gagugggaaggaacacucu

SEQ ID NO: 3083398 - RNA, 19 nt, Artificial Sequence
  Description of Artificial Sequence: Synthetic oligonucleotide
ggcgugguugguggcauuc

SEQ ID NO: 3083399 - RNA, 19 nt, Artificial Sequence
  Description of Artificial Sequence: Synthetic oligonucleotide
agauggcauucagcuuagu

SEQ ID NO: 3083400 - RNA, 19 nt, Artificial Sequence
  Description of Artificial Sequence: Synthetic oligonucleotide
caguccugccaucccaggu

SEQ ID NO: 3083401 - RNA, 19 nt, Artificial Sequence
  Description of Artificial Sequence: Synthetic oligonucleotide
ccugccaucccagguccug

SEQ ID NO: 3083402 - RNA, 19 nt, Artificial Sequence
  Description of Artificial Sequence: Synthetic oligonucleotide
gggaaggaacacucuccgu

SEQ ID NO: 3083403 - RNA, 19 nt, Artificial Sequence
  Description of Artificial Sequence: Synthetic oligonucleotide
uggcgugguugguggcauu

SEQ ID NO: 3083404 - RNA, 19 nt, Artificial Sequence
  Description of Artificial Sequence: Synthetic oligonucleotide
aguuggcagcauagccuuu

SEQ ID NO: 3083405 - RNA, 19 nt, Artificial Sequence
  Description of Artificial Sequence: Synthetic oligonucleotide
cguuggaguuaucaucaaa

SEQ ID NO: 3083406 - RNA, 19 nt, Artificial Sequence
  Description of Artificial Sequence: Synthetic oligonucleotide
ggacauacucaggauucau

SEQ ID NO: 3083407 - RNA, 19 nt, Artificial Sequence
  Description of Artificial Sequence: Synthetic oligonucleotide
acucuccgucacaguaguu

SEQ ID NO: 3083408 - RNA, 19 nt, Artificial Sequence
  Description of Artificial Sequence: Synthetic oligonucleotide
cgauggcgugguugguggc

SEQ ID NO: 3083409 - RNA, 19 nt, Artificial Sequence
  Description of Artificial Sequence: Synthetic oligonucleotide
caacaugguuuggggacau

SEQ ID NO: 3083410 - RNA, 19 nt, Artificial Sequence
  Description of Artificial Sequence: Synthetic oligonucleotide
cauagccuuugggugcaau

SEQ ID NO: 3083411 - RNA, 19 nt, Artificial Sequence
  Description of Artificial Sequence: Synthetic oligonucleotide
gcgugguugguggcauuca

SEQ ID NO: 3083412 - RNA, 19 nt, Artificial Sequence
  Description of Artificial Sequence: Synthetic oligonucleotide
guacgauggcgugguuggu

SEQ ID NO: 3083413 - RNA, 19 nt, Artificial Sequence
  Description of Artificial Sequence: Synthetic oligonucleotide
ggcauucagcuuaguuggu

SEQ ID NO: 3083414 - RNA, 19 nt, Artificial Sequence
  Description of Artificial Sequence: Synthetic oligonucleotide
ccgagauggcauucagcuu

SEQ ID NO: 3083415 - RNA, 19 nt, Artificial Sequence
  Description of Artificial Sequence: Synthetic oligonucleotide
cgugguugguggcauucau

SEQ ID NO: 3083416 - RNA, 19 nt, Artificial Sequence
  Description of Artificial Sequence: Synthetic oligonucleotide
aaaaccaucaucgauaggg

SEQ ID NO: 3083417 - RNA, 19 nt, Artificial Sequence
  Description of Artificial Sequence: Synthetic oligonucleotide
aaguauuugacuuuguugu

SEQ ID NO: 3083418 - RNA, 19 nt, Artificial Sequence
  Description of Artificial Sequence: Synthetic oligonucleotide
aguucuaccucuuccaugg

SEQ ID NO: 3083419 - RNA, 19 nt, Artificial Sequence
  Description of Artificial Sequence: Synthetic oligonucleotide
gaaguauuugacuuuguug

SEQ ID NO: 3083420 - RNA, 19 nt, Artificial Sequence
  Description of Artificial Sequence: Synthetic oligonucleotide
ucugggacauaacauagcc

SEQ ID NO: 3083421 - RNA, 19 nt, Artificial Sequence
  Description of Artificial Sequence: Synthetic oligonucleotide
aaggggaugaaguauuuga

SEQ ID NO: 3083422 - RNA, 19 nt, Artificial Sequence
  Description of Artificial Sequence: Synthetic oligonucleotide
aacucaagcacguugggaa

SEQ ID NO: 3083423 - RNA, 19 nt, Artificial Sequence
  Description of Artificial Sequence: Synthetic oligonucleotide
acauaacauagccuccucc

SEQ ID NO: 3083424 - RNA, 19 nt, Artificial Sequence
  Description of Artificial Sequence: Synthetic oligonucleotide
ugggacauaacauagccuc

SEQ ID NO: 3083425 - RNA, 19 nt, Artificial Sequence
  Description of Artificial Sequence: Synthetic oligonucleotide
uauuugacuuuguuguucc

SEQ ID NO: 3083426 - RNA, 19 nt, Artificial Sequence
  Description of Artificial Sequence: Synthetic oligonucleotide
ucaucgauagggaagaguu

SEQ ID NO: 3083427 - RNA, 19 nt, Artificial Sequence
  Description of Artificial Sequence: Synthetic oligonucleotide
auaagguggauaguggugg

SEQ ID NO: 3083428 - RNA, 19 nt, Artificial Sequence
  Description of Artificial Sequence: Synthetic oligonucleotide
ugcauaagguggauagugg

SEQ ID NO: 3083429 - RNA, 19 nt, Artificial Sequence
  Description of Artificial Sequence: Synthetic oligonucleotide
uuuguuguuccuguuaggc

SEQ ID NO: 3083430 - RNA, 19 nt, Artificial Sequence
  Description of Artificial Sequence: Synthetic oligonucleotide
acuuuguuguuccuguuag

SEQ ID NO: 3083431 - RNA, 19 nt, Artificial Sequence
  Description of Artificial Sequence: Synthetic oligonucleotide
gaagaguucuaccucuucc

SEQ ID NO: 3083432 - RNA, 19 nt, Artificial Sequence
  Description of Artificial Sequence: Synthetic oligonucleotide
auagggaagaguucuaccu

SEQ ID NO: 3083433 - RNA, 19 nt, Artificial Sequence
  Description of Artificial Sequence: Synthetic oligonucleotide
  modified_base (18)..(18): a, c, u, g, unknown or other
uuuucaggcacauucccnc

SEQ ID NO: 3083434 - RNA, 19 nt, Artificial Sequence
  Description of Artificial Sequence: Synthetic oligonucleotide
aguagucugggacauaaca

SEQ ID NO: 3083435 - RNA, 19 nt, Artificial Sequence
  Description of Artificial Sequence: Synthetic oligonucleotide
auggaugaagacgucaucg

SEQ ID NO: 3083436 - RNA, 19 nt, Artificial Sequence
  Description of Artificial Sequence: Synthetic oligonucleotide
uaacauagccuccuccucc

SEQ ID NO: 3083437 - RNA, 19 nt, Artificial Sequence
  Description of Artificial Sequence: Synthetic oligonucleotide
aucccaacccuccaggaac

SEQ ID NO: 3083438 - RNA, 19 nt, Artificial Sequence
  Description of Artificial Sequence: Synthetic oligonucleotide
gauagggaagaguucuacc

SEQ ID NO: 3083439 - RNA, 19 nt, Artificial Sequence
  Description of Artificial Sequence: Synthetic oligonucleotide
cauggcugugugaagacgc

SEQ ID NO: 3083440 - RNA, 19 nt, Artificial Sequence
  Description of Artificial Sequence: Synthetic oligonucleotide
auaacauagccuccuccuc

SEQ ID NO: 3083441 - RNA, 19 nt, Artificial Sequence
  Description of Artificial Sequence: Synthetic oligonucleotide
guuaggcugggccuggugg

SEQ ID NO: 3083442 - RNA, 19 nt, Artificial Sequence
  Description of Artificial Sequence: Synthetic oligonucleotide
auaguggugggcccuguac

SEQ ID NO: 3083443 - RNA, 19 nt, Artificial Sequence
  Description of Artificial Sequence: Synthetic oligonucleotide
aagcacguugggaacaugg

SEQ ID NO: 3083444 - RNA, 19 nt, Artificial Sequence
  Description of Artificial Sequence: Synthetic oligonucleotide
uguacauggagaaggggau

SEQ ID NO: 3083445 - RNA, 19 nt, Artificial Sequence
  Description of Artificial Sequence: Synthetic oligonucleotide
uugacuuuguuguuccugu

SEQ ID NO: 3083446 - RNA, 19 nt, Artificial Sequence
  Description of Artificial Sequence: Synthetic oligonucleotide
guuccuguuaggcugggcc

SEQ ID NO: 3083447 - RNA, 19 nt, Artificial Sequence
  Description of Artificial Sequence: Synthetic oligonucleotide
cacguugggaacauggaug

SEQ ID NO: 3083448 - RNA, 19 nt, Artificial Sequence
  Description of Artificial Sequence: Synthetic oligonucleotide
ugaaguauuugacuuuguu

SEQ ID NO: 3083449 - RNA, 19 nt, Artificial Sequence
  Description of Artificial Sequence: Synthetic oligonucleotide
uuugacuuuguuguuccug

SEQ ID NO: 3083450 - RNA, 19 nt, Artificial Sequence
  Description of Artificial Sequence: Synthetic oligonucleotide
cagcuuuucaggcacauuc

SEQ ID NO: 3083451 - RNA, 19 nt, Artificial Sequence
  Description of Artificial Sequence: Synthetic oligonucleotide
ucuuccauggcugugugaa

SEQ ID NO: 3083452 - RNA, 19 nt, Artificial Sequence
  Description of Artificial Sequence: Synthetic oligonucleotide
cauaagguggauaguggug

SEQ ID NO: 3083453 - RNA, 19 nt, Artificial Sequence
  Description of Artificial Sequence: Synthetic oligonucleotide
uggugggcccuguacaugg

SEQ ID NO: 3083454 - RNA, 19 nt, Artificial Sequence
  Description of Artificial Sequence: Synthetic oligonucleotide
agguggauaguggugggcc

SEQ ID NO: 3083455 - RNA, 19 nt, Artificial Sequence
  Description of Artificial Sequence: Synthetic oligonucleotide
guugggaacauggaugaag

SEQ ID NO: 3083456 - RNA, 19 nt, Artificial Sequence
  Description of Artificial Sequence: Synthetic oligonucleotide
aucgauagggaagaguucu

SEQ ID NO: 3083457 - RNA, 19 nt, Artificial Sequence
  Description of Artificial Sequence: Synthetic oligonucleotide
aacauggaugaagacguca

SEQ ID NO: 3083458 - RNA, 19 nt, Artificial Sequence
  Description of Artificial Sequence: Synthetic oligonucleotide
aacauagccuccuccuccu

SEQ ID NO: 3083459 - RNA, 19 nt, Artificial Sequence
  Description of Artificial Sequence: Synthetic oligonucleotide
gggaacauggaugaagacg

SEQ ID NO: 3083460 - RNA, 19 nt, Artificial Sequence
  Description of Artificial Sequence: Synthetic oligonucleotide
acucaagcacguugggaac

SEQ ID NO: 3083461 - RNA, 19 nt, Artificial Sequence
  Description of Artificial Sequence: Synthetic oligonucleotide
aggaacucaagcacguugg

SEQ ID NO: 3083462 - RNA, 19 nt, Artificial Sequence
  Description of Artificial Sequence: Synthetic oligonucleotide
aagguggauaguggugggc

SEQ ID NO: 3083463 - RNA, 19 nt, Artificial Sequence
  Description of Artificial Sequence: Synthetic oligonucleotide
uaagguggauagugguggg

SEQ ID NO: 3083464 - RNA, 19 nt, Artificial Sequence
  Description of Artificial Sequence: Synthetic oligonucleotide
cuguacauggagaagggga

SEQ ID NO: 3083465 - RNA, 19 nt, Artificial Sequence
  Description of Artificial Sequence: Synthetic oligonucleotide
uagucugggacauaacaua

SEQ ID NO: 3083466 - RNA, 19 nt, Artificial Sequence
  Description of Artificial Sequence: Synthetic oligonucleotide
cuccaggaacucaagcacg

SEQ ID NO: 3083467 - RNA, 19 nt, Artificial Sequence
  Description of Artificial Sequence: Synthetic oligonucleotide
ugugaagacgccucacagu

SEQ ID NO: 3083468 - RNA, 19 nt, Artificial Sequence
  Description of Artificial Sequence: Synthetic oligonucleotide
acguugggaacauggauga

SEQ ID NO: 3083469 - RNA, 19 nt, Artificial Sequence
  Description of Artificial Sequence: Synthetic oligonucleotide
cuuuguuguuccuguuagg

SEQ ID NO: 3083470 - RNA, 19 nt, Artificial Sequence
  Description of Artificial Sequence: Synthetic oligonucleotide
agggaagaguucuaccucu

SEQ ID NO: 3083471 - RNA, 19 nt, Artificial Sequence
  Description of Artificial Sequence: Synthetic oligonucleotide
accaucaucgauagggaag

SEQ ID NO: 3083472 - RNA, 19 nt, Artificial Sequence
  Description of Artificial Sequence: Synthetic oligonucleotide
uuguuguuccuguuaggcu

SEQ ID NO: 3083473 - RNA, 19 nt, Artificial Sequence
  Description of Artificial Sequence: Synthetic oligonucleotide
uggaugaagacgucaucgu

SEQ ID NO: 3083474 - RNA, 19 nt, Artificial Sequence
  Description of Artificial Sequence: Synthetic oligonucleotide
uccaggaacucaagcacgu

SEQ ID NO: 3083475 - RNA, 19 nt, Artificial Sequence
  Description of Artificial Sequence: Synthetic oligonucleotide
uagggaagaguucuaccuc

SEQ ID NO: 3083476 - RNA, 19 nt, Artificial Sequence
  Description of Artificial Sequence: Synthetic oligonucleotide
uaguggugggcccuguaca

SEQ ID NO: 3083477 - RNA, 19 nt, Artificial Sequence
  Description of Artificial Sequence: Synthetic oligonucleotide
  modified_base (16)..(16): a, c, u, g, unknown or other
uucaggcacauucccncaa

SEQ ID NO: 3083478 - RNA, 19 nt, Artificial Sequence
  Description of Artificial Sequence: Synthetic oligonucleotide
agucugggacauaacauag

SEQ ID NO: 3083479 - RNA, 19 nt, Artificial Sequence
  Description of Artificial Sequence: Synthetic oligonucleotide
aaccaucaucgauagggaa

SEQ ID NO: 3083480 - RNA, 19 nt, Artificial Sequence
  Description of Artificial Sequence: Synthetic oligonucleotide
gacgccucacaguagucug

SEQ ID NO: 3083481 - RNA, 19 nt, Artificial Sequence
  Description of Artificial Sequence: Synthetic oligonucleotide
caggaacucaagcacguug

SEQ ID NO: 3083482 - RNA, 19 nt, Artificial Sequence
  Description of Artificial Sequence: Synthetic oligonucleotide
gucaccccagcuuuucagg

SEQ ID NO: 3083483 - RNA, 19 nt, Artificial Sequence
  Description of Artificial Sequence: Synthetic oligonucleotide
agagguccugggcaggauc

SEQ ID NO: 3083484 - RNA, 19 nt, Artificial Sequence
  Description of Artificial Sequence: Synthetic oligonucleotide
cugggcaggaucccaaccc

SEQ ID NO: 3083485 - RNA, 19 nt, Artificial Sequence
  Description of Artificial Sequence: Synthetic oligonucleotide
ugaagacgccucacaguag

SEQ ID NO: 3083486 - RNA, 19 nt, Artificial Sequence
  Description of Artificial Sequence: Synthetic oligonucleotide
uuccauggcugugugaaga

SEQ ID NO: 3083487 - RNA, 19 nt, Artificial Sequence
  Description of Artificial Sequence: Synthetic oligonucleotide
auggagaaggggaugaagu

SEQ ID NO: 3083488 - RNA, 19 nt, Artificial Sequence
  Description of Artificial Sequence: Synthetic oligonucleotide
aaaccaucaucgauaggga

SEQ ID NO: 3083489 - RNA, 19 nt, Artificial Sequence
  Description of Artificial Sequence: Synthetic oligonucleotide
ucaccccagcuuuucaggc

SEQ ID NO: 3083490 - RNA, 19 nt, Artificial Sequence
  Description of Artificial Sequence: Synthetic oligonucleotide
gugaagacgccucacagua

SEQ ID NO: 3083491 - RNA, 19 nt, Artificial Sequence
  Description of Artificial Sequence: Synthetic oligonucleotide
uuaggcugggccuggugga

SEQ ID NO: 3083492 - RNA, 19 nt, Artificial Sequence
  Description of Artificial Sequence: Synthetic oligonucleotide
cucacaguagucugggaca

SEQ ID NO: 3083493 - RNA, 19 nt, Artificial Sequence
  Description of Artificial Sequence: Synthetic oligonucleotide
guauuugacuuuguuguuc

SEQ ID NO: 3083494 - RNA, 19 nt, Artificial Sequence
  Description of Artificial Sequence: Synthetic oligonucleotide
  modified_base (19)..(19): a, c, u, g, unknown or other
cuuuucaggcacauucccn

SEQ ID NO: 3083495 - RNA, 19 nt, Artificial Sequence
  Description of Artificial Sequence: Synthetic oligonucleotide
  modified_base (17)..(17): a, c, u, g, unknown or other
uuucaggcacauucccnca

SEQ ID NO: 3083496 - RNA, 19 nt, Artificial Sequence
  Description of Artificial Sequence: Synthetic oligonucleotide
uggagaaggggaugaagua

SEQ ID NO: 3083497 - RNA, 19 nt, Artificial Sequence
  Description of Artificial Sequence: Synthetic oligonucleotide
uuccuguuaggcugggccu

SEQ ID NO: 3083498 - RNA, 19 nt, Artificial Sequence
  Description of Artificial Sequence: Synthetic oligonucleotide
guuguuccuguuaggcugg

SEQ ID NO: 3083499 - RNA, 19 nt, Artificial Sequence
  Description of Artificial Sequence: Synthetic oligonucleotide
aguauuugacuuuguuguu

SEQ ID NO: 3083500 - RNA, 19 nt, Artificial Sequence
  Description of Artificial Sequence: Synthetic oligonucleotide
cauaacauagccuccuccu

SEQ ID NO: 3083501 - RNA, 19 nt, Artificial Sequence
  Description of Artificial Sequence: Synthetic oligonucleotide
cacuaagagguccugggca

SEQ ID NO: 3083502 - RNA, 19 nt, Artificial Sequence
  Description of Artificial Sequence: Synthetic oligonucleotide
acaguagucugggacauaa

SEQ ID NO: 3083503 - RNA, 19 nt, Artificial Sequence
  Description of Artificial Sequence: Synthetic oligonucleotide
gaaggggaugaaguauuug

SEQ ID NO: 3083504 - RNA, 19 nt, Artificial Sequence
  Description of Artificial Sequence: Synthetic oligonucleotide
gaagacgccucacaguagu

SEQ ID NO: 3083505 - RNA, 19 nt, Artificial Sequence
  Description of Artificial Sequence: Synthetic oligonucleotide
ugggcccuguacauggaga

SEQ ID NO: 3083506 - RNA, 19 nt, Artificial Sequence
  Description of Artificial Sequence: Synthetic oligonucleotide
agaguucuaccucuuccau

SEQ ID NO: 3083507 - RNA, 19 nt, Artificial Sequence
  Description of Artificial Sequence: Synthetic oligonucleotide
auagccuccuccuccugca

SEQ ID NO: 3083508 - RNA, 19 nt, Artificial Sequence
  Description of Artificial Sequence: Synthetic oligonucleotide
ugggcaggaucccaacccu

SEQ ID NO: 3083509 - RNA, 19 nt, Artificial Sequence
  Description of Artificial Sequence: Synthetic oligonucleotide
gacauaacauagccuccuc

SEQ ID NO: 3083510 - RNA, 19 nt, Artificial Sequence
  Description of Artificial Sequence: Synthetic oligonucleotide
uguuaggcugggccuggug

SEQ ID NO: 3083511 - RNA, 19 nt, Artificial Sequence
  Description of Artificial Sequence: Synthetic oligonucleotide
ggaacauggaugaagacgu

SEQ ID NO: 3083512 - RNA, 19 nt, Artificial Sequence
  Description of Artificial Sequence: Synthetic oligonucleotide
  modified_base (15)..(15): a, c, u, g, unknown or other
ucaggcacauucccncaaa

SEQ ID NO: 3083513 - RNA, 19 nt, Artificial Sequence
  Description of Artificial Sequence: Synthetic oligonucleotide
gacuuuguuguuccuguua

SEQ ID NO: 3083514 - RNA, 19 nt, Artificial Sequence
  Description of Artificial Sequence: Synthetic oligonucleotide
auggcugugugaagacgcc

SEQ ID NO: 3083515 - RNA, 19 nt, Artificial Sequence
  Description of Artificial Sequence: Synthetic oligonucleotide
aucaucgauagggaagagu

SEQ ID NO: 3083516 - RNA, 19 nt, Artificial Sequence
  Description of Artificial Sequence: Synthetic oligonucleotide
gcuuuucaggcacauuccc

SEQ ID NO: 3083517 - RNA, 19 nt, Artificial Sequence
  Description of Artificial Sequence: Synthetic oligonucleotide
caucgauagggaagaguuc

SEQ ID NO: 3083518 - RNA, 19 nt, Artificial Sequence
  Description of Artificial Sequence: Synthetic oligonucleotide
ggaacucaagcacguuggg

SEQ ID NO: 3083519 - RNA, 19 nt, Artificial Sequence
  Description of Artificial Sequence: Synthetic oligonucleotide
cccacuaagagguccuggg

SEQ ID NO: 3083520 - RNA, 19 nt, Artificial Sequence
  Description of Artificial Sequence: Synthetic oligonucleotide
cauggaugaagacgucauc

SEQ ID NO: 3083521 - RNA, 19 nt, Artificial Sequence
  Description of Artificial Sequence: Synthetic oligonucleotide
ucccaacccuccaggaacu

SEQ ID NO: 3083522 - RNA, 19 nt, Artificial Sequence
  Description of Artificial Sequence: Synthetic oligonucleotide
gaacucaagcacguuggga

SEQ ID NO: 3083523 - RNA, 19 nt, Artificial Sequence
  Description of Artificial Sequence: Synthetic oligonucleotide
aagacgccucacaguaguc

SEQ ID NO: 3083524 - RNA, 19 nt, Artificial Sequence
  Description of Artificial Sequence: Synthetic oligonucleotide
uaagagguccugggcagga

SEQ ID NO: 3083525 - RNA, 19 nt, Artificial Sequence
  Description of Artificial Sequence: Synthetic oligonucleotide
uccuguuaggcugggccug

SEQ ID NO: 3083526 - RNA, 19 nt, Artificial Sequence
  Description of Artificial Sequence: Synthetic oligonucleotide
ccucacaguagucugggac

SEQ ID NO: 3083527 - RNA, 19 nt, Artificial Sequence
  Description of Artificial Sequence: Synthetic oligonucleotide
cuaagagguccugggcagg

SEQ ID NO: 3083528 - RNA, 19 nt, Artificial Sequence
  Description of Artificial Sequence: Synthetic oligonucleotide
gaucccaacccuccaggaa

SEQ ID NO: 3083529 - RNA, 19 nt, Artificial Sequence
  Description of Artificial Sequence: Synthetic oligonucleotide
ggucaccccagcuuuucag

SEQ ID NO: 3083530 - RNA, 19 nt, Artificial Sequence
  Description of Artificial Sequence: Synthetic oligonucleotide
cuuccauggcugugugaag

SEQ ID NO: 3083531 - RNA, 19 nt, Artificial Sequence
  Description of Artificial Sequence: Synthetic oligonucleotide
caggaucccaacccuccag

SEQ ID NO: 3083532 - RNA, 19 nt, Artificial Sequence
  Description of Artificial Sequence: Synthetic oligonucleotide
ucgauagggaagaguucua

SEQ ID NO: 3083533 - RNA, 19 nt, Artificial Sequence
  Description of Artificial Sequence: Synthetic oligonucleotide
agacgccucacaguagucu

SEQ ID NO: 3083534 - RNA, 19 nt, Artificial Sequence
  Description of Artificial Sequence: Synthetic oligonucleotide
gucugggacauaacauagc

SEQ ID NO: 3083535 - RNA, 19 nt, Artificial Sequence
  Description of Artificial Sequence: Synthetic oligonucleotide
gggaugaaguauuugacuu

SEQ ID NO: 3083536 - RNA, 19 nt, Artificial Sequence
  Description of Artificial Sequence: Synthetic oligonucleotide
ucaagcacguugggaacau

SEQ ID NO: 3083537 - RNA, 19 nt, Artificial Sequence
  Description of Artificial Sequence: Synthetic oligonucleotide
gguggauaguggugggccc

SEQ ID NO: 3083538 - RNA, 19 nt, Artificial Sequence
  Description of Artificial Sequence: Synthetic oligonucleotide
caacccuccaggaacucaa

SEQ ID NO: 3083539 - RNA, 19 nt, Artificial Sequence
  Description of Artificial Sequence: Synthetic oligonucleotide
ugacuuuguuguuccuguu

SEQ ID NO: 3083540 - RNA, 19 nt, Artificial Sequence
  Description of Artificial Sequence: Synthetic oligonucleotide
agguccugggcaggauccc

SEQ ID NO: 3083541 - RNA, 19 nt, Artificial Sequence
  Description of Artificial Sequence: Synthetic oligonucleotide
cccuguacauggagaaggg

SEQ ID NO: 3083542 - RNA, 19 nt, Artificial Sequence
  Description of Artificial Sequence: Synthetic oligonucleotide
uggauaguggugggcccug

SEQ ID NO: 3083543 - RNA, 19 nt, Artificial Sequence
  Description of Artificial Sequence: Synthetic oligonucleotide
guagucugggacauaacau

SEQ ID NO: 3083544 - RNA, 19 nt, Artificial Sequence
  Description of Artificial Sequence: Synthetic oligonucleotide
uuguuccuguuaggcuggg

SEQ ID NO: 3083545 - RNA, 19 nt, Artificial Sequence
  Description of Artificial Sequence: Synthetic oligonucleotide
agcacguugggaacaugga

SEQ ID NO: 3083546 - RNA, 19 nt, Artificial Sequence
  Description of Artificial Sequence: Synthetic oligonucleotide
ggggaugaaguauuugacu

SEQ ID NO: 3083547 - RNA, 19 nt, Artificial Sequence
  Description of Artificial Sequence: Synthetic oligonucleotide
caguagucugggacauaac

SEQ ID NO: 3083548 - RNA, 19 nt, Artificial Sequence
  Description of Artificial Sequence: Synthetic oligonucleotide
uguuccuguuaggcugggc

SEQ ID NO: 3083549 - RNA, 19 nt, Artificial Sequence
  Description of Artificial Sequence: Synthetic oligonucleotide
uccugggcaggaucccaac

SEQ ID NO: 3083550 - RNA, 19 nt, Artificial Sequence
  Description of Artificial Sequence: Synthetic oligonucleotide
ggaagaguucuaccucuuc

SEQ ID NO: 3083551 - RNA, 19 nt, Artificial Sequence
  Description of Artificial Sequence: Synthetic oligonucleotide
gggacauaacauagccucc

SEQ ID NO: 3083552 - RNA, 19 nt, Artificial Sequence
  Description of Artificial Sequence: Synthetic oligonucleotide
guucuaccucuuccauggc

SEQ ID NO: 3083553 - RNA, 19 nt, Artificial Sequence
  Description of Artificial Sequence: Synthetic oligonucleotide
ccugguggaugacaucccc

SEQ ID NO: 3083554 - RNA, 19 nt, Artificial Sequence
  Description of Artificial Sequence: Synthetic oligonucleotide
augaaguauuugacuuugu

SEQ ID NO: 3083555 - RNA, 19 nt, Artificial Sequence
  Description of Artificial Sequence: Synthetic oligonucleotide
acgccucacaguagucugg

SEQ ID NO: 3083556 - RNA, 19 nt, Artificial Sequence
  Description of Artificial Sequence: Synthetic oligonucleotide
uggcugugugaagacgccu

SEQ ID NO: 3083557 - RNA, 19 nt, Artificial Sequence
  Description of Artificial Sequence: Synthetic oligonucleotide
cucaagcacguugggaaca

SEQ ID NO: 3083558 - RNA, 19 nt, Artificial Sequence
  Description of Artificial Sequence: Synthetic oligonucleotide
  modified_base (14)..(14): a, c, u, g, unknown or other
caggcacauucccncaaaa

SEQ ID NO: 3083559 - RNA, 19 nt, Artificial Sequence
  Description of Artificial Sequence: Synthetic oligonucleotide
ccacuaagagguccugggc

SEQ ID NO: 3083560 - RNA, 19 nt, Artificial Sequence
  Description of Artificial Sequence: Synthetic oligonucleotide
gcauaagguggauaguggu

SEQ ID NO: 3083561 - RNA, 19 nt, Artificial Sequence
  Description of Artificial Sequence: Synthetic oligonucleotide
ggcaggaucccaacccucc

SEQ ID NO: 3083562 - RNA, 19 nt, Artificial Sequence
  Description of Artificial Sequence: Synthetic oligonucleotide
gaacauggaugaagacguc

SEQ ID NO: 3083563 - RNA, 19 nt, Artificial Sequence
  Description of Artificial Sequence: Synthetic oligonucleotide
acauagccuccuccuccug

SEQ ID NO: 3083564 - RNA, 19 nt, Artificial Sequence
  Description of Artificial Sequence: Synthetic oligonucleotide
gauaguggugggcccugua

SEQ ID NO: 3083565 - RNA, 19 nt, Artificial Sequence
  Description of Artificial Sequence: Synthetic oligonucleotide
cugugugaagacgccucac

SEQ ID NO: 3083566 - RNA, 19 nt, Artificial Sequence
  Description of Artificial Sequence: Synthetic oligonucleotide
caucaucgauagggaagag

SEQ ID NO: 3083567 - RNA, 19 nt, Artificial Sequence
  Description of Artificial Sequence: Synthetic oligonucleotide
ccuguacauggagaagggg

SEQ ID NO: 3083568 - RNA, 19 nt, Artificial Sequence
  Description of Artificial Sequence: Synthetic oligonucleotide
ccaucaucgauagggaaga

SEQ ID NO: 3083569 - RNA, 19 nt, Artificial Sequence
  Description of Artificial Sequence: Synthetic oligonucleotide
agaaggggaugaaguauuu

SEQ ID NO: 3083570 - RNA, 19 nt, Artificial Sequence
  Description of Artificial Sequence: Synthetic oligonucleotide
cugggacauaacauagccu

SEQ ID NO: 3083571 - RNA, 19 nt, Artificial Sequence
  Description of Artificial Sequence: Synthetic oligonucleotide
aagagguccugggcaggau

SEQ ID NO: 3083572 - RNA, 19 nt, Artificial Sequence
  Description of Artificial Sequence: Synthetic oligonucleotide
caccccagcuuuucaggca

SEQ ID NO: 3083573 - RNA, 19 nt, Artificial Sequence
  Description of Artificial Sequence: Synthetic oligonucleotide
gcugugugaagacgccuca

SEQ ID NO: 3083574 - RNA, 19 nt, Artificial Sequence
  Description of Artificial Sequence: Synthetic oligonucleotide
ggaucccaacccuccagga

SEQ ID NO: 3083575 - RNA, 19 nt, Artificial Sequence
  Description of Artificial Sequence: Synthetic oligonucleotide
acauggagaaggggaugaa

SEQ ID NO: 3083576 - RNA, 19 nt, Artificial Sequence
  Description of Artificial Sequence: Synthetic oligonucleotide
ccauggcugugugaagacg

SEQ ID NO: 3083577 - RNA, 19 nt, Artificial Sequence
  Description of Artificial Sequence: Synthetic oligonucleotide
ggaugaaguauuugacuuu

SEQ ID NO: 3083578 - RNA, 19 nt, Artificial Sequence
  Description of Artificial Sequence: Synthetic oligonucleotide
ggcugugugaagacgccuc

SEQ ID NO: 3083579 - RNA, 19 nt, Artificial Sequence
  Description of Artificial Sequence: Synthetic oligonucleotide
ggacauaacauagccuccu

SEQ ID NO: 3083580 - RNA, 19 nt, Artificial Sequence
  Description of Artificial Sequence: Synthetic oligonucleotide
ggagaaggggaugaaguau

SEQ ID NO: 3083581 - RNA, 19 nt, Artificial Sequence
  Description of Artificial Sequence: Synthetic oligonucleotide
caagcacguugggaacaug

SEQ ID NO: 3083582 - RNA, 19 nt, Artificial Sequence
  Description of Artificial Sequence: Synthetic oligonucleotide
uaggcugggccugguggau

SEQ ID NO: 3083583 - RNA, 19 nt, Artificial Sequence
  Description of Artificial Sequence: Synthetic oligonucleotide
cgauagggaagaguucuac

SEQ ID NO: 3083584 - RNA, 19 nt, Artificial Sequence
  Description of Artificial Sequence: Synthetic oligonucleotide
gccuccuccuccugcauaa

SEQ ID NO: 3083585 - RNA, 19 nt, Artificial Sequence
  Description of Artificial Sequence: Synthetic oligonucleotide
aggcugggccugguggaug

SEQ ID NO: 3083586 - RNA, 19 nt, Artificial Sequence
  Description of Artificial Sequence: Synthetic oligonucleotide
gcaggaucccaacccucca

SEQ ID NO: 3083587 - RNA, 19 nt, Artificial Sequence
  Description of Artificial Sequence: Synthetic oligonucleotide
guggauaguggugggcccu

SEQ ID NO: 3083588 - RNA, 19 nt, Artificial Sequence
  Description of Artificial Sequence: Synthetic oligonucleotide
ccccacuaagagguccugg

SEQ ID NO: 3083589 - RNA, 19 nt, Artificial Sequence
  Description of Artificial Sequence: Synthetic oligonucleotide
gcacguugggaacauggau

SEQ ID NO: 3083590 - RNA, 19 nt, Artificial Sequence
  Description of Artificial Sequence: Synthetic oligonucleotide
cgccucacaguagucuggg

SEQ ID NO: 3083591 - RNA, 19 nt, Artificial Sequence
  Description of Artificial Sequence: Synthetic oligonucleotide
gccugguggaugacauccc

SEQ ID NO: 3083592 - RNA, 19 nt, Artificial Sequence
  Description of Artificial Sequence: Synthetic oligonucleotide
guccugggcaggaucccaa

SEQ ID NO: 3083593 - RNA, 19 nt, Artificial Sequence
  Description of Artificial Sequence: Synthetic oligonucleotide
ggggucaccccagcuuuuc

SEQ ID NO: 3083594 - RNA, 19 nt, Artificial Sequence
  Description of Artificial Sequence: Synthetic oligonucleotide
gggcaggaucccaacccuc

SEQ ID NO: 3083595 - RNA, 19 nt, Artificial Sequence
  Description of Artificial Sequence: Synthetic oligonucleotide
gggccugguggaugacauc

SEQ ID NO: 3083596 - RNA, 19 nt, Artificial Sequence
  Description of Artificial Sequence: Synthetic oligonucleotide
ccaacccuccaggaacuca

SEQ ID NO: 3083597 - RNA, 19 nt, Artificial Sequence
  Description of Artificial Sequence: Synthetic oligonucleotide
cacaguagucugggacaua

SEQ ID NO: 3083598 - RNA, 19 nt, Artificial Sequence
  Description of Artificial Sequence: Synthetic oligonucleotide
ggugggcccuguacaugga

SEQ ID NO: 3083599 - RNA, 19 nt, Artificial Sequence
  Description of Artificial Sequence: Synthetic oligonucleotide
ccuccuccuccugcauaag

SEQ ID NO: 3083600 - RNA, 19 nt, Artificial Sequence
  Description of Artificial Sequence: Synthetic oligonucleotide
gggaagaguucuaccucuu

SEQ ID NO: 3083601 - RNA, 19 nt, Artificial Sequence
  Description of Artificial Sequence: Synthetic oligonucleotide
ccccagcuuuucaggcaca

SEQ ID NO: 3083602 - RNA, 19 nt, Artificial Sequence
  Description of Artificial Sequence: Synthetic oligonucleotide
cuguuaggcugggccuggu

SEQ ID NO: 3083603 - RNA, 19 nt, Artificial Sequence
  Description of Artificial Sequence: Synthetic oligonucleotide
cccagcuuuucaggcacau

SEQ ID NO: 3083604 - RNA, 19 nt, Artificial Sequence
  Description of Artificial Sequence: Synthetic oligonucleotide
cguugggaacauggaugaa

SEQ ID NO: 3083605 - RNA, 19 nt, Artificial Sequence
  Description of Artificial Sequence: Synthetic oligonucleotide
ccuccugcauaagguggau

SEQ ID NO: 3083606 - RNA, 19 nt, Artificial Sequence
  Description of Artificial Sequence: Synthetic oligonucleotide
ccaggaacucaagcacguu

SEQ ID NO: 3083607 - RNA, 19 nt, Artificial Sequence
  Description of Artificial Sequence: Synthetic oligonucleotide
ccagcuuuucaggcacauu

SEQ ID NO: 3083608 - RNA, 19 nt, Artificial Sequence
  Description of Artificial Sequence: Synthetic oligonucleotide
ucugcauaccgacagaagg

SEQ ID NO: 3083609 - RNA, 19 nt, Artificial Sequence
  Description of Artificial Sequence: Synthetic oligonucleotide
ucaauccucauccacuucc

SEQ ID NO: 3083610 - RNA, 19 nt, Artificial Sequence
  Description of Artificial Sequence: Synthetic oligonucleotide
auuucuuucaucucaucug

SEQ ID NO: 3083611 - RNA, 19 nt, Artificial Sequence
  Description of Artificial Sequence: Synthetic oligonucleotide
aucucaucugcauaccgac

SEQ ID NO: 3083612 - RNA, 19 nt, Artificial Sequence
  Description of Artificial Sequence: Synthetic oligonucleotide
uuucaucucaucugcauac

SEQ ID NO: 3083613 - RNA, 19 nt, Artificial Sequence
  Description of Artificial Sequence: Synthetic oligonucleotide
auggcauugcgguaggacg

SEQ ID NO: 3083614 - RNA, 19 nt, Artificial Sequence
  Description of Artificial Sequence: Synthetic oligonucleotide
acagaaggcgccuccaaac

SEQ ID NO: 3083615 - RNA, 19 nt, Artificial Sequence
  Description of Artificial Sequence: Synthetic oligonucleotide
ucaucucaucugcauaccg

SEQ ID NO: 3083616 - RNA, 19 nt, Artificial Sequence
  Description of Artificial Sequence: Synthetic oligonucleotide
ucuccacuagcucacuggg

SEQ ID NO: 3083617 - RNA, 19 nt, Artificial Sequence
  Description of Artificial Sequence: Synthetic oligonucleotide
uccuggauuucuuucaucu

SEQ ID NO: 3083618 - RNA, 19 nt, Artificial Sequence
  Description of Artificial Sequence: Synthetic oligonucleotide
uccacuagcucacugggga

SEQ ID NO: 3083619 - RNA, 19 nt, Artificial Sequence
  Description of Artificial Sequence: Synthetic oligonucleotide
uggcauugcgguaggacgg

SEQ ID NO: 3083620 - RNA, 19 nt, Artificial Sequence
  Description of Artificial Sequence: Synthetic oligonucleotide
uguuuucuccgucugcggc

SEQ ID NO: 3083621 - RNA, 19 nt, Artificial Sequence
  Description of Artificial Sequence: Synthetic oligonucleotide
acagcuuaucccucugucg

SEQ ID NO: 3083622 - RNA, 19 nt, Artificial Sequence
  Description of Artificial Sequence: Synthetic oligonucleotide
cucaucugcauaccgacag

SEQ ID NO: 3083623 - RNA, 19 nt, Artificial Sequence
  Description of Artificial Sequence: Synthetic oligonucleotide
ucgcucauacagcuuaucc

SEQ ID NO: 3083624 - RNA, 19 nt, Artificial Sequence
  Description of Artificial Sequence: Synthetic oligonucleotide
ugcauaccgacagaaggcg

SEQ ID NO: 3083625 - RNA, 19 nt, Artificial Sequence
  Description of Artificial Sequence: Synthetic oligonucleotide
ugucuagccaaggggaugg

SEQ ID NO: 3083626 - RNA, 19 nt, Artificial Sequence
  Description of Artificial Sequence: Synthetic oligonucleotide
cauaccgacagaaggcgcc

SEQ ID NO: 3083627 - RNA, 19 nt, Artificial Sequence
  Description of Artificial Sequence: Synthetic oligonucleotide
uugccccaggccuugaagg

SEQ ID NO: 3083628 - RNA, 19 nt, Artificial Sequence
  Description of Artificial Sequence: Synthetic oligonucleotide
cuggggacgaguaggaaag

SEQ ID NO: 3083629 - RNA, 19 nt, Artificial Sequence
  Description of Artificial Sequence: Synthetic oligonucleotide
aaggggacugucuagccaa

SEQ ID NO: 3083630 - RNA, 19 nt, Artificial Sequence
  Description of Artificial Sequence: Synthetic oligonucleotide
gauuucuuucaucucaucu

SEQ ID NO: 3083631 - RNA, 19 nt, Artificial Sequence
  Description of Artificial Sequence: Synthetic oligonucleotide
cugcauaccgacagaaggc

SEQ ID NO: 3083632 - RNA, 19 nt, Artificial Sequence
  Description of Artificial Sequence: Synthetic oligonucleotide
aaaggggacugucuagcca

SEQ ID NO: 3083633 - RNA, 19 nt, Artificial Sequence
  Description of Artificial Sequence: Synthetic oligonucleotide
gccguuucaauccucaucc

SEQ ID NO: 3083634 - RNA, 19 nt, Artificial Sequence
  Description of Artificial Sequence: Synthetic oligonucleotide
cuagccaaggggaugggug

SEQ ID NO: 3083635 - RNA, 19 nt, Artificial Sequence
  Description of Artificial Sequence: Synthetic oligonucleotide
cagcuuaucccucugucgc

SEQ ID NO: 3083636 - RNA, 19 nt, Artificial Sequence
  Description of Artificial Sequence: Synthetic oligonucleotide
uagccaaggggaugggugg

SEQ ID NO: 3083637 - RNA, 19 nt, Artificial Sequence
  Description of Artificial Sequence: Synthetic oligonucleotide
cucuccacuagcucacugg

SEQ ID NO: 3083638 - RNA, 19 nt, Artificial Sequence
  Description of Artificial Sequence: Synthetic oligonucleotide
ucuuucaucucaucugcau

SEQ ID NO: 3083639 - RNA, 19 nt, Artificial Sequence
  Description of Artificial Sequence: Synthetic oligonucleotide
aguaggaaaggggacuguc

SEQ ID NO: 3083640 - RNA, 19 nt, Artificial Sequence
  Description of Artificial Sequence: Synthetic oligonucleotide
cucacuggggacgaguagg

SEQ ID NO: 3083641 - RNA, 19 nt, Artificial Sequence
  Description of Artificial Sequence: Synthetic oligonucleotide
uuguuuucuccgucugcgg

SEQ ID NO: 3083642 - RNA, 19 nt, Artificial Sequence
  Description of Artificial Sequence: Synthetic oligonucleotide
cuggauuucuuucaucuca

SEQ ID NO: 3083643 - RNA, 19 nt, Artificial Sequence
  Description of Artificial Sequence: Synthetic oligonucleotide
gaaaggggacugucuagcc

SEQ ID NO: 3083644 - RNA, 19 nt, Artificial Sequence
  Description of Artificial Sequence: Synthetic oligonucleotide
uaggaaaggggacugucua

SEQ ID NO: 3083645 - RNA, 19 nt, Artificial Sequence
  Description of Artificial Sequence: Synthetic oligonucleotide
uuucaauccucauccacuu

SEQ ID NO: 3083646 - RNA, 19 nt, Artificial Sequence
  Description of Artificial Sequence: Synthetic oligonucleotide
uccacuuccucgcccuccg

SEQ ID NO: 3083647 - RNA, 19 nt, Artificial Sequence
  Description of Artificial Sequence: Synthetic oligonucleotide
accgacagaaggcgccucc

SEQ ID NO: 3083648 - RNA, 19 nt, Artificial Sequence
  Description of Artificial Sequence: Synthetic oligonucleotide
ucauacagcuuaucccucu

SEQ ID NO: 3083649 - RNA, 19 nt, Artificial Sequence
  Description of Artificial Sequence: Synthetic oligonucleotide
guuuucuccgucugcggcc

SEQ ID NO: 3083650 - RNA, 19 nt, Artificial Sequence
  Description of Artificial Sequence: Synthetic oligonucleotide
uggauuucuuucaucucau

SEQ ID NO: 3083651 - RNA, 19 nt, Artificial Sequence
  Description of Artificial Sequence: Synthetic oligonucleotide
caccgcgucgcucauacag

SEQ ID NO: 3083652 - RNA, 19 nt, Artificial Sequence
  Description of Artificial Sequence: Synthetic oligonucleotide
ggacugucuagccaagggg

SEQ ID NO: 3083653 - RNA, 19 nt, Artificial Sequence
  Description of Artificial Sequence: Synthetic oligonucleotide
aaggggauggguggugggg

SEQ ID NO: 3083654 - RNA, 19 nt, Artificial Sequence
  Description of Artificial Sequence: Synthetic oligonucleotide
ugaucccucuccacuagcu

SEQ ID NO: 3083655 - RNA, 19 nt, Artificial Sequence
  Description of Artificial Sequence: Synthetic oligonucleotide
aggaaaggggacugucuag

SEQ ID NO: 3083656 - RNA, 19 nt, Artificial Sequence
  Description of Artificial Sequence: Synthetic oligonucleotide
ucauccacuuccucgcccu

SEQ ID NO: 3083657 - RNA, 19 nt, Artificial Sequence
  Description of Artificial Sequence: Synthetic oligonucleotide
acuggggacgaguaggaaa

SEQ ID NO: 3083658 - RNA, 19 nt, Artificial Sequence
  Description of Artificial Sequence: Synthetic oligonucleotide
ugccccaggccuugaaggg

SEQ ID NO: 3083659 - RNA, 19 nt, Artificial Sequence
  Description of Artificial Sequence: Synthetic oligonucleotide
ugccguuucaauccucauc

SEQ ID NO: 3083660 - RNA, 19 nt, Artificial Sequence
  Description of Artificial Sequence: Synthetic oligonucleotide
gacugucuagccaagggga

SEQ ID NO: 3083661 - RNA, 19 nt, Artificial Sequence
  Description of Artificial Sequence: Synthetic oligonucleotide
gaaggcgccuccaaacuug

SEQ ID NO: 3083662 - RNA, 19 nt, Artificial Sequence
  Description of Artificial Sequence: Synthetic oligonucleotide
gauggcauugcgguaggac

SEQ ID NO: 3083663 - RNA, 19 nt, Artificial Sequence
  Description of Artificial Sequence: Synthetic oligonucleotide
aaggcgccuccaaacuugc

SEQ ID NO: 3083664 - RNA, 19 nt, Artificial Sequence
  Description of Artificial Sequence: Synthetic oligonucleotide
ggugauggcauugcgguag

SEQ ID NO: 3083665 - RNA, 19 nt, Artificial Sequence
  Description of Artificial Sequence: Synthetic oligonucleotide
ucaucugcauaccgacaga

SEQ ID NO: 3083666 - RNA, 19 nt, Artificial Sequence
  Description of Artificial Sequence: Synthetic oligonucleotide
uucaucucaucugcauacc

SEQ ID NO: 3083667 - RNA, 19 nt, Artificial Sequence
  Description of Artificial Sequence: Synthetic oligonucleotide
caucucaucugcauaccga

SEQ ID NO: 3083668 - RNA, 19 nt, Artificial Sequence
  Description of Artificial Sequence: Synthetic oligonucleotide
cacuagcucacuggggacg

SEQ ID NO: 3083669 - RNA, 19 nt, Artificial Sequence
  Description of Artificial Sequence: Synthetic oligonucleotide
cuuaucccucugucgcucc

SEQ ID NO: 3083670 - RNA, 19 nt, Artificial Sequence
  Description of Artificial Sequence: Synthetic oligonucleotide
aucccucugucgcuccugg

SEQ ID NO: 3083671 - RNA, 19 nt, Artificial Sequence
  Description of Artificial Sequence: Synthetic oligonucleotide
cauacagcuuaucccucug

SEQ ID NO: 3083672 - RNA, 19 nt, Artificial Sequence
  Description of Artificial Sequence: Synthetic oligonucleotide
auacagcuuaucccucugu

SEQ ID NO: 3083673 - RNA, 19 nt, Artificial Sequence
  Description of Artificial Sequence: Synthetic oligonucleotide
cuugccccaggccuugaag

SEQ ID NO: 3083674 - RNA, 19 nt, Artificial Sequence
  Description of Artificial Sequence: Synthetic oligonucleotide
cuccacuagcucacugggg

SEQ ID NO: 3083675 - RNA, 19 nt, Artificial Sequence
  Description of Artificial Sequence: Synthetic oligonucleotide
ggaagcugccguuucaauc

SEQ ID NO: 3083676 - RNA, 19 nt, Artificial Sequence
  Description of Artificial Sequence: Synthetic oligonucleotide
acuuccucgcccuccgacu

SEQ ID NO: 3083677 - RNA, 19 nt, Artificial Sequence
  Description of Artificial Sequence: Synthetic oligonucleotide
uucaauccucauccacuuc

SEQ ID NO: 3083678 - RNA, 19 nt, Artificial Sequence
  Description of Artificial Sequence: Synthetic oligonucleotide
ggaaaggggacugucuagc

SEQ ID NO: 3083679 - RNA, 19 nt, Artificial Sequence
  Description of Artificial Sequence: Synthetic oligonucleotide
aagggcacggugauggcau

SEQ ID NO: 3083680 - RNA, 19 nt, Artificial Sequence
  Description of Artificial Sequence: Synthetic oligonucleotide
ucccucuccacuagcucac

SEQ ID NO: 3083681 - RNA, 19 nt, Artificial Sequence
  Description of Artificial Sequence: Synthetic oligonucleotide
guuucaauccucauccacu

SEQ ID NO: 3083682 - RNA, 19 nt, Artificial Sequence
  Description of Artificial Sequence: Synthetic oligonucleotide
ggcgccuccaaacuugccc

SEQ ID NO: 3083683 - RNA, 19 nt, Artificial Sequence
  Description of Artificial Sequence: Synthetic oligonucleotide
cucauacagcuuaucccuc

SEQ ID NO: 3083684 - RNA, 19 nt, Artificial Sequence
  Description of Artificial Sequence: Synthetic oligonucleotide
aaacuugccccaggccuug

SEQ ID NO: 3083685 - RNA, 19 nt, Artificial Sequence
  Description of Artificial Sequence: Synthetic oligonucleotide
gaucccucuccacuagcuc

SEQ ID NO: 3083686 - RNA, 19 nt, Artificial Sequence
  Description of Artificial Sequence: Synthetic oligonucleotide
uuuucuccgucugcggccu

SEQ ID NO: 3083687 - RNA, 19 nt, Artificial Sequence
  Description of Artificial Sequence: Synthetic oligonucleotide
caggccuugaagggcacgg

SEQ ID NO: 3083688 - RNA, 19 nt, Artificial Sequence
  Description of Artificial Sequence: Synthetic oligonucleotide
accgcgucgcucauacagc

SEQ ID NO: 3083689 - RNA, 19 nt, Artificial Sequence
  Description of Artificial Sequence: Synthetic oligonucleotide
caaggggaugggugguggg

SEQ ID NO: 3083690 - RNA, 19 nt, Artificial Sequence
  Description of Artificial Sequence: Synthetic oligonucleotide
gugauggcauugcgguagg

SEQ ID NO: 3083691 - RNA, 19 nt, Artificial Sequence
  Description of Artificial Sequence: Synthetic oligonucleotide
cuuucaucucaucugcaua

SEQ ID NO: 3083692 - RNA, 19 nt, Artificial Sequence
  Description of Artificial Sequence: Synthetic oligonucleotide
agcuuaucccucugucgcu

SEQ ID NO: 3083693 - RNA, 19 nt, Artificial Sequence
  Description of Artificial Sequence: Synthetic oligonucleotide
gacagaaggcgccuccaaa

SEQ ID NO: 3083694 - RNA, 19 nt, Artificial Sequence
  Description of Artificial Sequence: Synthetic oligonucleotide
uccgucugcggccuccccu

SEQ ID NO: 3083695 - RNA, 19 nt, Artificial Sequence
  Description of Artificial Sequence: Synthetic oligonucleotide
cucgcccuccgacucgucg

SEQ ID NO: 3083696 - RNA, 19 nt, Artificial Sequence
  Description of Artificial Sequence: Synthetic oligonucleotide
gcucauacagcuuaucccu

SEQ ID NO: 3083697 - RNA, 19 nt, Artificial Sequence
  Description of Artificial Sequence: Synthetic oligonucleotide
ucgcccuccgacucgucgc

SEQ ID NO: 3083698 - RNA, 19 nt, Artificial Sequence
  Description of Artificial Sequence: Synthetic oligonucleotide
uuaucccucugucgcuccu

SEQ ID NO: 3083699 - RNA, 19 nt, Artificial Sequence
  Description of Artificial Sequence: Synthetic oligonucleotide
agaaggcgccuccaaacuu

SEQ ID NO: 3083700 - RNA, 19 nt, Artificial Sequence
  Description of Artificial Sequence: Synthetic oligonucleotide
uacgggaagcugccguuuc

SEQ ID NO: 3083701 - RNA, 19 nt, Artificial Sequence
  Description of Artificial Sequence: Synthetic oligonucleotide
aguacgggaagcugccguu

SEQ ID NO: 3083702 - RNA, 19 nt, Artificial Sequence
  Description of Artificial Sequence: Synthetic oligonucleotide
cgcucauacagcuuauccc

SEQ ID NO: 3083703 - RNA, 19 nt, Artificial Sequence
  Description of Artificial Sequence: Synthetic oligonucleotide
ucugcggccuccccugauc

SEQ ID NO: 3083704 - RNA, 19 nt, Artificial Sequence
  Description of Artificial Sequence: Synthetic oligonucleotide
uccgacucgucgccgccgc

SEQ ID NO: 3083705 - RNA, 19 nt, Artificial Sequence
  Description of Artificial Sequence: Synthetic oligonucleotide
aucugcauaccgacagaag

SEQ ID NO: 3083706 - RNA, 19 nt, Artificial Sequence
  Description of Artificial Sequence: Synthetic oligonucleotide
cugaucccucuccacuagc

SEQ ID NO: 3083707 - RNA, 19 nt, Artificial Sequence
  Description of Artificial Sequence: Synthetic oligonucleotide
ucgcuccuggauuucuuuc

SEQ ID NO: 3083708 - RNA, 19 nt, Artificial Sequence
  Description of Artificial Sequence: Synthetic oligonucleotide
ucuagccaaggggaugggu

SEQ ID NO: 3083709 - RNA, 19 nt, Artificial Sequence
  Description of Artificial Sequence: Synthetic oligonucleotide
cuuccucgcccuccgacuc

SEQ ID NO: 3083710 - RNA, 19 nt, Artificial Sequence
  Description of Artificial Sequence: Synthetic oligonucleotide
cugcggccuccccugaucc

SEQ ID NO: 3083711 - RNA, 19 nt, Artificial Sequence
  Description of Artificial Sequence: Synthetic oligonucleotide
cacuuccucgcccuccgac

SEQ ID NO: 3083712 - RNA, 19 nt, Artificial Sequence
  Description of Artificial Sequence: Synthetic oligonucleotide
gaagggcacggugauggca

SEQ ID NO: 3083713 - RNA, 19 nt, Artificial Sequence
  Description of Artificial Sequence: Synthetic oligonucleotide
acuagcucacuggggacga

SEQ ID NO: 3083714 - RNA, 19 nt, Artificial Sequence
  Description of Artificial Sequence: Synthetic oligonucleotide
ggggacgaguaggaaaggg

SEQ ID NO: 3083715 - RNA, 19 nt, Artificial Sequence
  Description of Artificial Sequence: Synthetic oligonucleotide
cugucuagccaaggggaug

SEQ ID NO: 3083716 - RNA, 19 nt, Artificial Sequence
  Description of Artificial Sequence: Synthetic oligonucleotide
cuccuggauuucuuucauc

SEQ ID NO: 3083717 - RNA, 19 nt, Artificial Sequence
  Description of Artificial Sequence: Synthetic oligonucleotide
uaucccucugucgcuccug

SEQ ID NO: 3083718 - RNA, 19 nt, Artificial Sequence
  Description of Artificial Sequence: Synthetic oligonucleotide
gacucgucgccgccgccgc

SEQ ID NO: 3083719 - RNA, 19 nt, Artificial Sequence
  Description of Artificial Sequence: Synthetic oligonucleotide
uagcucacuggggacgagu

SEQ ID NO: 3083720 - RNA, 19 nt, Artificial Sequence
  Description of Artificial Sequence: Synthetic oligonucleotide
gcgccuccaaacuugcccc

SEQ ID NO: 3083721 - RNA, 19 nt, Artificial Sequence
  Description of Artificial Sequence: Synthetic oligonucleotide
uucuccgucugcggccucc

SEQ ID NO: 3083722 - RNA, 19 nt, Artificial Sequence
  Description of Artificial Sequence: Synthetic oligonucleotide
acgggaagcugccguuuca

SEQ ID NO: 3083723 - RNA, 19 nt, Artificial Sequence
  Description of Artificial Sequence: Synthetic oligonucleotide
auaccgacagaaggcgccu

SEQ ID NO: 3083724 - RNA, 19 nt, Artificial Sequence
  Description of Artificial Sequence: Synthetic oligonucleotide
caucugcauaccgacagaa

SEQ ID NO: 3083725 - RNA, 19 nt, Artificial Sequence
  Description of Artificial Sequence: Synthetic oligonucleotide
ugucgcuccuggauuucuu

SEQ ID NO: 3083726 - RNA, 19 nt, Artificial Sequence
  Description of Artificial Sequence: Synthetic oligonucleotide
ggccuugaagggcacggug

SEQ ID NO: 3083727 - RNA, 19 nt, Artificial Sequence
  Description of Artificial Sequence: Synthetic oligonucleotide
gaugggugguggggugggg

SEQ ID NO: 3083728 - RNA, 19 nt, Artificial Sequence
  Description of Artificial Sequence: Synthetic oligonucleotide
cguuucaauccucauccac

SEQ ID NO: 3083729 - RNA, 19 nt, Artificial Sequence
  Description of Artificial Sequence: Synthetic oligonucleotide
uccccugaucccucuccac

SEQ ID NO: 3083730 - RNA, 19 nt, Artificial Sequence
  Description of Artificial Sequence: Synthetic oligonucleotide
acugucuagccaaggggau

SEQ ID NO: 3083731 - RNA, 19 nt, Artificial Sequence
  Description of Artificial Sequence: Synthetic oligonucleotide
ggccaguacgggaagcugc

SEQ ID NO: 3083732 - RNA, 19 nt, Artificial Sequence
  Description of Artificial Sequence: Synthetic oligonucleotide
ggauuucuuucaucucauc

SEQ ID NO: 3083733 - RNA, 19 nt, Artificial Sequence
  Description of Artificial Sequence: Synthetic oligonucleotide
guaggaaaggggacugucu

SEQ ID NO: 3083734 - RNA, 19 nt, Artificial Sequence
  Description of Artificial Sequence: Synthetic oligonucleotide
ugcggccuccccugauccc

SEQ ID NO: 3083735 - RNA, 19 nt, Artificial Sequence
  Description of Artificial Sequence: Synthetic oligonucleotide
aggccaguacgggaagcug

SEQ ID NO: 3083736 - RNA, 19 nt, Artificial Sequence
  Description of Artificial Sequence: Synthetic oligonucleotide
ugauggcauugcgguagga

SEQ ID NO: 3083737 - RNA, 19 nt, Artificial Sequence
  Description of Artificial Sequence: Synthetic oligonucleotide
ucugucgcuccuggauuuc

SEQ ID NO: 3083738 - RNA, 19 nt, Artificial Sequence
  Description of Artificial Sequence: Synthetic oligonucleotide
gcucacuggggacgaguag

SEQ ID NO: 3083739 - RNA, 19 nt, Artificial Sequence
  Description of Artificial Sequence: Synthetic oligonucleotide
ucuccgucugcggccuccc

SEQ ID NO: 3083740 - RNA, 19 nt, Artificial Sequence
  Description of Artificial Sequence: Synthetic oligonucleotide
ggauggguggugggguggg

SEQ ID NO: 3083741 - RNA, 19 nt, Artificial Sequence
  Description of Artificial Sequence: Synthetic oligonucleotide
ccuccaaacuugccccagg

SEQ ID NO: 3083742 - RNA, 19 nt, Artificial Sequence
  Description of Artificial Sequence: Synthetic oligonucleotide
gccaguacgggaagcugcc

SEQ ID NO: 3083743 - RNA, 19 nt, Artificial Sequence
  Description of Artificial Sequence: Synthetic oligonucleotide
ccugaucccucuccacuag

SEQ ID NO: 3083744 - RNA, 19 nt, Artificial Sequence
  Description of Artificial Sequence: Synthetic oligonucleotide
gucuagccaaggggauggg

SEQ ID NO: 3083745 - RNA, 19 nt, Artificial Sequence
  Description of Artificial Sequence: Synthetic oligonucleotide
gggaugggugguggggugg

SEQ ID NO: 3083746 - RNA, 19 nt, Artificial Sequence
  Description of Artificial Sequence: Synthetic oligonucleotide
acuugccccaggccuugaa

SEQ ID NO: 3083747 - RNA, 19 nt, Artificial Sequence
  Description of Artificial Sequence: Synthetic oligonucleotide
cccaccgcgucgcucauac

SEQ ID NO: 3083748 - RNA, 19 nt, Artificial Sequence
  Description of Artificial Sequence: Synthetic oligonucleotide
cagaaggcgccuccaaacu

SEQ ID NO: 3083749 - RNA, 19 nt, Artificial Sequence
  Description of Artificial Sequence: Synthetic oligonucleotide
ucccucugucgcuccugga

SEQ ID NO: 3083750 - RNA, 19 nt, Artificial Sequence
  Description of Artificial Sequence: Synthetic oligonucleotide
cuccgacucgucgccgccg

SEQ ID NO: 3083751 - RNA, 19 nt, Artificial Sequence
  Description of Artificial Sequence: Synthetic oligonucleotide
ccaaggggauggguggugg

SEQ ID NO: 3083752 - RNA, 19 nt, Artificial Sequence
  Description of Artificial Sequence: Synthetic oligonucleotide
agcugccguuucaauccuc

SEQ ID NO: 3083753 - RNA, 19 nt, Artificial Sequence
  Description of Artificial Sequence: Synthetic oligonucleotide
ggggacugucuagccaagg

SEQ ID NO: 3083754 - RNA, 19 nt, Artificial Sequence
  Description of Artificial Sequence: Synthetic oligonucleotide
gcgucgcucauacagcuua

SEQ ID NO: 3083755 - RNA, 19 nt, Artificial Sequence
  Description of Artificial Sequence: Synthetic oligonucleotide
gcugccguuucaauccuca

SEQ ID NO: 3083756 - RNA, 19 nt, Artificial Sequence
  Description of Artificial Sequence: Synthetic oligonucleotide
aggcgccuccaaacuugcc

SEQ ID NO: 3083757 - RNA, 19 nt, Artificial Sequence
  Description of Artificial Sequence: Synthetic oligonucleotide
gaggccaguacgggaagcu

SEQ ID NO: 3083758 - RNA, 19 nt, Artificial Sequence
  Description of Artificial Sequence: Synthetic oligonucleotide
gcauaccgacagaaggcgc

SEQ ID NO: 3083759 - RNA, 19 nt, Artificial Sequence
  Description of Artificial Sequence: Synthetic oligonucleotide
caaacuugccccaggccuu

SEQ ID NO: 3083760 - RNA, 19 nt, Artificial Sequence
  Description of Artificial Sequence: Synthetic oligonucleotide
agccaaggggauggguggu

SEQ ID NO: 3083761 - RNA, 19 nt, Artificial Sequence
  Description of Artificial Sequence: Synthetic oligonucleotide
ggcauugcgguaggacggc

SEQ ID NO: 3083762 - RNA, 19 nt, Artificial Sequence
  Description of Artificial Sequence: Synthetic oligonucleotide
agcucacuggggacgagua

SEQ ID NO: 3083763 - RNA, 19 nt, Artificial Sequence
  Description of Artificial Sequence: Synthetic oligonucleotide
gucgcucauacagcuuauc

SEQ ID NO: 3083764 - RNA, 19 nt, Artificial Sequence
  Description of Artificial Sequence: Synthetic oligonucleotide
cuccccugaucccucucca

SEQ ID NO: 3083765 - RNA, 19 nt, Artificial Sequence
  Description of Artificial Sequence: Synthetic oligonucleotide
ggggaugggugguggggug

SEQ ID NO: 3083766 - RNA, 19 nt, Artificial Sequence
  Description of Artificial Sequence: Synthetic oligonucleotide
aggggacugucuagccaag

SEQ ID NO: 3083767 - RNA, 19 nt, Artificial Sequence
  Description of Artificial Sequence: Synthetic oligonucleotide
caguacgggaagcugccgu

SEQ ID NO: 3083768 - RNA, 19 nt, Artificial Sequence
  Description of Artificial Sequence: Synthetic oligonucleotide
gcuuaucccucugucgcuc

SEQ ID NO: 3083769 - RNA, 19 nt, Artificial Sequence
  Description of Artificial Sequence: Synthetic oligonucleotide
cuagcucacuggggacgag

SEQ ID NO: 3083770 - RNA, 19 nt, Artificial Sequence
  Description of Artificial Sequence: Synthetic oligonucleotide
cucgucgccgccgccgcug

SEQ ID NO: 3083771 - RNA, 19 nt, Artificial Sequence
  Description of Artificial Sequence: Synthetic oligonucleotide
aggccuugaagggcacggu

SEQ ID NO: 3083772 - RNA, 19 nt, Artificial Sequence
  Description of Artificial Sequence: Synthetic oligonucleotide
cgaguaggaaaggggacug

SEQ ID NO: 3083773 - RNA, 19 nt, Artificial Sequence
  Description of Artificial Sequence: Synthetic oligonucleotide
ggaggccaguacgggaagc

SEQ ID NO: 3083774 - RNA, 19 nt, Artificial Sequence
  Description of Artificial Sequence: Synthetic oligonucleotide
uaccgacagaaggcgccuc

SEQ ID NO: 3083775 - RNA, 19 nt, Artificial Sequence
  Description of Artificial Sequence: Synthetic oligonucleotide
gaguaggaaaggggacugu

SEQ ID NO: 3083776 - RNA, 19 nt, Artificial Sequence
  Description of Artificial Sequence: Synthetic oligonucleotide
ccucauccacuuccucgcc

SEQ ID NO: 3083777 - RNA, 19 nt, Artificial Sequence
  Description of Artificial Sequence: Synthetic oligonucleotide
ccucuccacuagcucacug

SEQ ID NO: 3083778 - RNA, 19 nt, Artificial Sequence
  Description of Artificial Sequence: Synthetic oligonucleotide
cuccgucugcggccucccc

SEQ ID NO: 3083779 - RNA, 19 nt, Artificial Sequence
  Description of Artificial Sequence: Synthetic oligonucleotide
ccgucugcggccuccccug

SEQ ID NO: 3083780 - RNA, 19 nt, Artificial Sequence
  Description of Artificial Sequence: Synthetic oligonucleotide
gucgcuccuggauuucuuu

SEQ ID NO: 3083781 - RNA, 19 nt, Artificial Sequence
  Description of Artificial Sequence: Synthetic oligonucleotide
cucugucgcuccuggauuu

SEQ ID NO: 3083782 - RNA, 19 nt, Artificial Sequence
  Description of Artificial Sequence: Synthetic oligonucleotide
acucgucgccgccgccgcu

SEQ ID NO: 3083783 - RNA, 19 nt, Artificial Sequence
  Description of Artificial Sequence: Synthetic oligonucleotide
agggcacggugauggcauu

SEQ ID NO: 3083784 - RNA, 19 nt, Artificial Sequence
  Description of Artificial Sequence: Synthetic oligonucleotide
cccuccgacucgucgccgc

SEQ ID NO: 3083785 - RNA, 19 nt, Artificial Sequence
  Description of Artificial Sequence: Synthetic oligonucleotide
ccaguacgggaagcugccg

SEQ ID NO: 3083786 - RNA, 19 nt, Artificial Sequence
  Description of Artificial Sequence: Synthetic oligonucleotide
cgcuccuggauuucuuuca

SEQ ID NO: 3083787 - RNA, 19 nt, Artificial Sequence
  Description of Artificial Sequence: Synthetic oligonucleotide
cauugcgguaggacggcuu

SEQ ID NO: 3083788 - RNA, 19 nt, Artificial Sequence
  Description of Artificial Sequence: Synthetic oligonucleotide
gccaaggggauggguggug

SEQ ID NO: 3083789 - RNA, 19 nt, Artificial Sequence
  Description of Artificial Sequence: Synthetic oligonucleotide
ccuccgacucgucgccgcc

SEQ ID NO: 3083790 - RNA, 19 nt, Artificial Sequence
  Description of Artificial Sequence: Synthetic oligonucleotide
ccaggccuugaagggcacg

SEQ ID NO: 3083791 - RNA, 19 nt, Artificial Sequence
  Description of Artificial Sequence: Synthetic oligonucleotide
cgacucgucgccgccgccg

SEQ ID NO: 3083792 - RNA, 19 nt, Artificial Sequence
  Description of Artificial Sequence: Synthetic oligonucleotide
cccugaucccucuccacua

SEQ ID NO: 3083793 - RNA, 19 nt, Artificial Sequence
  Description of Artificial Sequence: Synthetic oligonucleotide
ccguuucaauccucaucca

SEQ ID NO: 3083794 - RNA, 19 nt, Artificial Sequence
  Description of Artificial Sequence: Synthetic oligonucleotide
gggaagcugccguuucaau

SEQ ID NO: 3083795 - RNA, 19 nt, Artificial Sequence
  Description of Artificial Sequence: Synthetic oligonucleotide
cugccguuucaauccucau

SEQ ID NO: 3083796 - RNA, 19 nt, Artificial Sequence
  Description of Artificial Sequence: Synthetic oligonucleotide
cugucgcuccuggauuucu

SEQ ID NO: 3083797 - RNA, 19 nt, Artificial Sequence
  Description of Artificial Sequence: Synthetic oligonucleotide
guacgggaagcugccguuu

SEQ ID NO: 3083798 - RNA, 19 nt, Artificial Sequence
  Description of Artificial Sequence: Synthetic oligonucleotide
ccuugaagggcacggugau

SEQ ID NO: 3083799 - RNA, 19 nt, Artificial Sequence
  Description of Artificial Sequence: Synthetic oligonucleotide
cgcccuccgacucgucgcc

SEQ ID NO: 3083800 - RNA, 19 nt, Artificial Sequence
  Description of Artificial Sequence: Synthetic oligonucleotide
gcccuccgacucgucgccg

SEQ ID NO: 3083801 - RNA, 19 nt, Artificial Sequence
  Description of Artificial Sequence: Synthetic oligonucleotide
ccccugaucccucuccacu

SEQ ID NO: 3083802 - RNA, 19 nt, Artificial Sequence
  Description of Artificial Sequence: Synthetic oligonucleotide
cccucugucgcuccuggau

SEQ ID NO: 3083803 - RNA, 19 nt, Artificial Sequence
  Description of Artificial Sequence: Synthetic oligonucleotide
ccgcgucgcucauacagcu

SEQ ID NO: 3083804 - RNA, 19 nt, Artificial Sequence
  Description of Artificial Sequence: Synthetic oligonucleotide
ccgacagaaggcgccucca

SEQ ID NO: 3083805 - RNA, 19 nt, Artificial Sequence
  Description of Artificial Sequence: Synthetic oligonucleotide
gucugcggccuccccugau

SEQ ID NO: 3083806 - RNA, 19 nt, Artificial Sequence
  Description of Artificial Sequence: Synthetic oligonucleotide
gccuccccugaucccucuc

SEQ ID NO: 3083807 - RNA, 19 nt, Artificial Sequence
  Description of Artificial Sequence: Synthetic oligonucleotide
ccgacucgucgccgccgcc

SEQ ID NO: 3083808 - RNA, 19 nt, Artificial Sequence
  Description of Artificial Sequence: Synthetic oligonucleotide
ccucugucgcuccuggauu

SEQ ID NO: 3083809 - RNA, 19 nt, Artificial Sequence
  Description of Artificial Sequence: Synthetic oligonucleotide
gcggccuccccugaucccu

SEQ ID NO: 3083810 - RNA, 19 nt, Artificial Sequence
  Description of Artificial Sequence: Synthetic oligonucleotide
cgacagaaggcgccuccaa

SEQ ID NO: 3083811 - RNA, 19 nt, Artificial Sequence
  Description of Artificial Sequence: Synthetic oligonucleotide
gcauugcgguaggacggcu

SEQ ID NO: 3083812 - RNA, 19 nt, Artificial Sequence
  Description of Artificial Sequence: Synthetic oligonucleotide
cgggaagcugccguuucaa

SEQ ID NO: 3083813 - RNA, 19 nt, Artificial Sequence
  Description of Artificial Sequence: Synthetic oligonucleotide
ggccuccccugaucccucu

SEQ ID NO: 3083814 - RNA, 19 nt, Artificial Sequence
  Description of Artificial Sequence: Synthetic oligonucleotide
ccacuuccucgcccuccga

SEQ ID NO: 3083815 - RNA, 19 nt, Artificial Sequence
  Description of Artificial Sequence: Synthetic oligonucleotide
cggccuccccugaucccuc

SEQ ID NO: 3083816 - RNA, 19 nt, Artificial Sequence
  Description of Artificial Sequence: Synthetic oligonucleotide
ccucgcccuccgacucguc

SEQ ID NO: 3083817 - RNA, 19 nt, Artificial Sequence
  Description of Artificial Sequence: Synthetic oligonucleotide
ccaccgcgucgcucauaca

SEQ ID NO: 3083818 - RNA, 19 nt, Artificial Sequence
  Description of Artificial Sequence: Synthetic oligonucleotide
cgucgcucauacagcuuau

SEQ ID NO: 3083819 - RNA, 19 nt, Artificial Sequence
  Description of Artificial Sequence: Synthetic oligonucleotide
cgucugcggccuccccuga

SEQ ID NO: 3083820 - RNA, 19 nt, Artificial Sequence
  Description of Artificial Sequence: Synthetic oligonucleotide
cccucuccacuagcucacu

SEQ ID NO: 3083821 - RNA, 19 nt, Artificial Sequence
  Description of Artificial Sequence: Synthetic oligonucleotide
cgcgucgcucauacagcuu

SEQ ID NO: 3083822 - RNA, 19 nt, Artificial Sequence
  Description of Artificial Sequence: Synthetic oligonucleotide
ccccaccgcgucgcucaua

SEQ ID NO: 3083823 - RNA, 19 nt, Artificial Sequence
  Description of Artificial Sequence: Synthetic oligonucleotide
acaucuauaagcuuaaccc

SEQ ID NO: 3083824 - RNA, 19 nt, Artificial Sequence
  Description of Artificial Sequence: Synthetic oligonucleotide
auuggcaacaucuauaagc

SEQ ID NO: 3083825 - RNA, 19 nt, Artificial Sequence
  Description of Artificial Sequence: Synthetic oligonucleotide
aacaucuauaagcuuaacc

SEQ ID NO: 3083826 - RNA, 19 nt, Artificial Sequence
  Description of Artificial Sequence: Synthetic oligonucleotide
uucauuucuccuaagaagg

SEQ ID NO: 3083827 - RNA, 19 nt, Artificial Sequence
  Description of Artificial Sequence: Synthetic oligonucleotide
ucuacaauuagguaguuag

SEQ ID NO: 3083828 - RNA, 19 nt, Artificial Sequence
  Description of Artificial Sequence: Synthetic oligonucleotide
auaagcuuaacccugcagc

SEQ ID NO: 3083829 - RNA, 19 nt, Artificial Sequence
  Description of Artificial Sequence: Synthetic oligonucleotide
uuuauaaauguccucagca

SEQ ID NO: 3083830 - RNA, 19 nt, Artificial Sequence
  Description of Artificial Sequence: Synthetic oligonucleotide
aucuucuacaauuagguag

SEQ ID NO: 3083831 - RNA, 19 nt, Artificial Sequence
  Description of Artificial Sequence: Synthetic oligonucleotide
uuucauuucuccuaagaag

SEQ ID NO: 3083832 - RNA, 19 nt, Artificial Sequence
  Description of Artificial Sequence: Synthetic oligonucleotide
uauuuuauaaauguccuca

SEQ ID NO: 3083833 - RNA, 19 nt, Artificial Sequence
  Description of Artificial Sequence: Synthetic oligonucleotide
uuaaucacacccauuaacu

SEQ ID NO: 3083834 - RNA, 19 nt, Artificial Sequence
  Description of Artificial Sequence: Synthetic oligonucleotide
aaauguccucagcagaucg

SEQ ID NO: 3083835 - RNA, 19 nt, Artificial Sequence
  Description of Artificial Sequence: Synthetic oligonucleotide
uuaacuguggacuuccugc

SEQ ID NO: 3083836 - RNA, 19 nt, Artificial Sequence
  Description of Artificial Sequence: Synthetic oligonucleotide
uuauaaauguccucagcag

SEQ ID NO: 3083837 - RNA, 19 nt, Artificial Sequence
  Description of Artificial Sequence: Synthetic oligonucleotide
acacagcuuaaucacaccc

SEQ ID NO: 3083838 - RNA, 19 nt, Artificial Sequence
  Description of Artificial Sequence: Synthetic oligonucleotide
ucaucaucacuauaaagug

SEQ ID NO: 3083839 - RNA, 19 nt, Artificial Sequence
  Description of Artificial Sequence: Synthetic oligonucleotide
acuauaaaguggcaggcuc

SEQ ID NO: 3083840 - RNA, 19 nt, Artificial Sequence
  Description of Artificial Sequence: Synthetic oligonucleotide
uauaaauguccucagcaga

SEQ ID NO: 3083841 - RNA, 19 nt, Artificial Sequence
  Description of Artificial Sequence: Synthetic oligonucleotide
uaaauguuuucauuucucc

SEQ ID NO: 3083842 - RNA, 19 nt, Artificial Sequence
  Description of Artificial Sequence: Synthetic oligonucleotide
aaauguuuucauuucuccu

SEQ ID NO: 3083843 - RNA, 19 nt, Artificial Sequence
  Description of Artificial Sequence: Synthetic oligonucleotide
aaucacacccauuaacugu

SEQ ID NO: 3083844 - RNA, 19 nt, Artificial Sequence
  Description of Artificial Sequence: Synthetic oligonucleotide
aauguuuucauuucuccua

SEQ ID NO: 3083845 - RNA, 19 nt, Artificial Sequence
  Description of Artificial Sequence: Synthetic oligonucleotide
ucuucuacaauuagguagu

SEQ ID NO: 3083846 - RNA, 19 nt, Artificial Sequence
  Description of Artificial Sequence: Synthetic oligonucleotide
uuuuauaaauguccucagc

SEQ ID NO: 3083847 - RNA, 19 nt, Artificial Sequence
  Description of Artificial Sequence: Synthetic oligonucleotide
uuuucauuucuccuaagaa

SEQ ID NO: 3083848 - RNA, 19 nt, Artificial Sequence
  Description of Artificial Sequence: Synthetic oligonucleotide
uuggcaacaucuauaagcu

SEQ ID NO: 3083849 - RNA, 19 nt, Artificial Sequence
  Description of Artificial Sequence: Synthetic oligonucleotide
ucaccauccacccaguaca

SEQ ID NO: 3083850 - RNA, 19 nt, Artificial Sequence
  Description of Artificial Sequence: Synthetic oligonucleotide
uuuauaagaugucaguauu

SEQ ID NO: 3083851 - RNA, 19 nt, Artificial Sequence
  Description of Artificial Sequence: Synthetic oligonucleotide
aaaguggcaggcucgucac

SEQ ID NO: 3083852 - RNA, 19 nt, Artificial Sequence
  Description of Artificial Sequence: Synthetic oligonucleotide
uagguaguuagcuuuauaa

SEQ ID NO: 3083853 - RNA, 19 nt, Artificial Sequence
  Description of Artificial Sequence: Synthetic oligonucleotide
cuuaaucacacccauuaac

SEQ ID NO: 3083854 - RNA, 19 nt, Artificial Sequence
  Description of Artificial Sequence: Synthetic oligonucleotide
uuugaauagaucugguaaa

SEQ ID NO: 3083855 - RNA, 19 nt, Artificial Sequence
  Description of Artificial Sequence: Synthetic oligonucleotide
auuuuauaaauguccucag

SEQ ID NO: 3083856 - RNA, 19 nt, Artificial Sequence
  Description of Artificial Sequence: Synthetic oligonucleotide
acuuccugcaaacacagcu

SEQ ID NO: 3083857 - RNA, 19 nt, Artificial Sequence
  Description of Artificial Sequence: Synthetic oligonucleotide
ugccucuuuauccagguca

SEQ ID NO: 3083858 - RNA, 19 nt, Artificial Sequence
  Description of Artificial Sequence: Synthetic oligonucleotide
uaagcuuaacccugcagcc

SEQ ID NO: 3083859 - RNA, 19 nt, Artificial Sequence
  Description of Artificial Sequence: Synthetic oligonucleotide
uaaaguggcaggcucguca

SEQ ID NO: 3083860 - RNA, 19 nt, Artificial Sequence
  Description of Artificial Sequence: Synthetic oligonucleotide
uacaauuagguaguuagcu

SEQ ID NO: 3083861 - RNA, 19 nt, Artificial Sequence
  Description of Artificial Sequence: Synthetic oligonucleotide
ucuccuaagaaggucauca

SEQ ID NO: 3083862 - RNA, 19 nt, Artificial Sequence
  Description of Artificial Sequence: Synthetic oligonucleotide
uauaagcuuaacccugcag

SEQ ID NO: 3083863 - RNA, 19 nt, Artificial Sequence
  Description of Artificial Sequence: Synthetic oligonucleotide
ucuauaagcuuaacccugc

SEQ ID NO: 3083864 - RNA, 19 nt, Artificial Sequence
  Description of Artificial Sequence: Synthetic oligonucleotide
cuauaaaguggcaggcucg

SEQ ID NO: 3083865 - RNA, 19 nt, Artificial Sequence
  Description of Artificial Sequence: Synthetic oligonucleotide
uauccaggucauaaguucc

SEQ ID NO: 3083866 - RNA, 19 nt, Artificial Sequence
  Description of Artificial Sequence: Synthetic oligonucleotide
agguaguuagcuuuauaag

SEQ ID NO: 3083867 - RNA, 19 nt, Artificial Sequence
  Description of Artificial Sequence: Synthetic oligonucleotide
cacuguaucuggaucauag

SEQ ID NO: 3083868 - RNA, 19 nt, Artificial Sequence
  Description of Artificial Sequence: Synthetic oligonucleotide
caucaucacuauaaagugg

SEQ ID NO: 3083869 - RNA, 19 nt, Artificial Sequence
  Description of Artificial Sequence: Synthetic oligonucleotide
gaauagaucugguaaaugu

SEQ ID NO: 3083870 - RNA, 19 nt, Artificial Sequence
  Description of Artificial Sequence: Synthetic oligonucleotide
acacccauuaacuguggac

SEQ ID NO: 3083871 - RNA, 19 nt, Artificial Sequence
  Description of Artificial Sequence: Synthetic oligonucleotide
uuauccaggucauaaguuc

SEQ ID NO: 3083872 - RNA, 19 nt, Artificial Sequence
  Description of Artificial Sequence: Synthetic oligonucleotide
augucaguauuuuauaaau

SEQ ID NO: 3083873 - RNA, 19 nt, Artificial Sequence
  Description of Artificial Sequence: Synthetic oligonucleotide
uaaguuccacuguaucugg

SEQ ID NO: 3083874 - RNA, 19 nt, Artificial Sequence
  Description of Artificial Sequence: Synthetic oligonucleotide
ucuuuauccaggucauaag

SEQ ID NO: 3083875 - RNA, 19 nt, Artificial Sequence
  Description of Artificial Sequence: Synthetic oligonucleotide
gaucgcuuugaauagaucu

SEQ ID NO: 3083876 - RNA, 19 nt, Artificial Sequence
  Description of Artificial Sequence: Synthetic oligonucleotide
aaggucaucaucacuauaa

SEQ ID NO: 3083877 - RNA, 19 nt, Artificial Sequence
  Description of Artificial Sequence: Synthetic oligonucleotide
aagaaggucaucaucacua

SEQ ID NO: 3083878 - RNA, 19 nt, Artificial Sequence
  Description of Artificial Sequence: Synthetic oligonucleotide
caggucauaaguuccacug

SEQ ID NO: 3083879 - RNA, 19 nt, Artificial Sequence
  Description of Artificial Sequence: Synthetic oligonucleotide
agcuuaaucacacccauua

SEQ ID NO: 3083880 - RNA, 19 nt, Artificial Sequence
  Description of Artificial Sequence: Synthetic oligonucleotide
aaacacagcugcaacuggg

SEQ ID NO: 3083881 - RNA, 19 nt, Artificial Sequence
  Description of Artificial Sequence: Synthetic oligonucleotide
agaucugguaaauguuuuc

SEQ ID NO: 3083882 - RNA, 19 nt, Artificial Sequence
  Description of Artificial Sequence: Synthetic oligonucleotide
ucauaaguuccacuguauc

SEQ ID NO: 3083883 - RNA, 19 nt, Artificial Sequence
  Description of Artificial Sequence: Synthetic oligonucleotide
gaugucaguauuuuauaaa

SEQ ID NO: 3083884 - RNA, 19 nt, Artificial Sequence
  Description of Artificial Sequence: Synthetic oligonucleotide
gguaguuagcuuuauaaga

SEQ ID NO: 3083885 - RNA, 19 nt, Artificial Sequence
  Description of Artificial Sequence: Synthetic oligonucleotide
gucaguauuuuauaaaugu

SEQ ID NO: 3083886 - RNA, 19 nt, Artificial Sequence
  Description of Artificial Sequence: Synthetic oligonucleotide
uggacuuccugcaaacaca

SEQ ID NO: 3083887 - RNA, 19 nt, Artificial Sequence
  Description of Artificial Sequence: Synthetic oligonucleotide
uuuauccaggucauaaguu

SEQ ID NO: 3083888 - RNA, 19 nt, Artificial Sequence
  Description of Artificial Sequence: Synthetic oligonucleotide
uuauaagaugucaguauuu

SEQ ID NO: 3083889 - RNA, 19 nt, Artificial Sequence
  Description of Artificial Sequence: Synthetic oligonucleotide
caguacacagcuuaaucac

SEQ ID NO: 3083890 - RNA, 19 nt, Artificial Sequence
  Description of Artificial Sequence: Synthetic oligonucleotide
ucgcuuugaauagaucugg

SEQ ID NO: 3083891 - RNA, 19 nt, Artificial Sequence
  Description of Artificial Sequence: Synthetic oligonucleotide
uuccacuguaucuggauca

SEQ ID NO: 3083892 - RNA, 19 nt, Artificial Sequence
  Description of Artificial Sequence: Synthetic oligonucleotide
agcagaucgcuuugaauag

SEQ ID NO: 3083893 - RNA, 19 nt, Artificial Sequence
  Description of Artificial Sequence: Synthetic oligonucleotide
aagaugucaguauuuuaua

SEQ ID NO: 3083894 - RNA, 19 nt, Artificial Sequence
  Description of Artificial Sequence: Synthetic oligonucleotide
agcuuaacccugcagccuc

SEQ ID NO: 3083895 - RNA, 19 nt, Artificial Sequence
  Description of Artificial Sequence: Synthetic oligonucleotide
uaguuagcuuuauaagaug

SEQ ID NO: 3083896 - RNA, 19 nt, Artificial Sequence
  Description of Artificial Sequence: Synthetic oligonucleotide
cuacaauuagguaguuagc

SEQ ID NO: 3083897 - RNA, 19 nt, Artificial Sequence
  Description of Artificial Sequence: Synthetic oligonucleotide
auuaacuguggacuuccug

SEQ ID NO: 3083898 - RNA, 19 nt, Artificial Sequence
  Description of Artificial Sequence: Synthetic oligonucleotide
cucgucaccauccacccag

SEQ ID NO: 3083899 - RNA, 19 nt, Artificial Sequence
  Description of Artificial Sequence: Synthetic oligonucleotide
aauagaucugguaaauguu

SEQ ID NO: 3083900 - RNA, 19 nt, Artificial Sequence
  Description of Artificial Sequence: Synthetic oligonucleotide
ucacuauaaaguggcaggc

SEQ ID NO: 3083901 - RNA, 19 nt, Artificial Sequence
  Description of Artificial Sequence: Synthetic oligonucleotide
uauaagaugucaguauuuu

SEQ ID NO: 3083902 - RNA, 19 nt, Artificial Sequence
  Description of Artificial Sequence: Synthetic oligonucleotide
gucaucaucacuauaaagu

SEQ ID NO: 3083903 - RNA, 19 nt, Artificial Sequence
  Description of Artificial Sequence: Synthetic oligonucleotide
acacagcugcaacuggggc

SEQ ID NO: 3083904 - RNA, 19 nt, Artificial Sequence
  Description of Artificial Sequence: Synthetic oligonucleotide
aguuagcuuuauaagaugu

SEQ ID NO: 3083905 - RNA, 19 nt, Artificial Sequence
  Description of Artificial Sequence: Synthetic oligonucleotide
agaugucaguauuuuauaa

SEQ ID NO: 3083906 - RNA, 19 nt, Artificial Sequence
  Description of Artificial Sequence: Synthetic oligonucleotide
ugcaaacacagcugcaacu

SEQ ID NO: 3083907 - RNA, 19 nt, Artificial Sequence
  Description of Artificial Sequence: Synthetic oligonucleotide
ugguaaauguuuucauuuc

SEQ ID NO: 3083908 - RNA, 19 nt, Artificial Sequence
  Description of Artificial Sequence: Synthetic oligonucleotide
guuuucauuucuccuaaga

SEQ ID NO: 3083909 - RNA, 19 nt, Artificial Sequence
  Description of Artificial Sequence: Synthetic oligonucleotide
ugaauagaucugguaaaug

SEQ ID NO: 3083910 - RNA, 19 nt, Artificial Sequence
  Description of Artificial Sequence: Synthetic oligonucleotide
ucugguaaauguuuucauu

SEQ ID NO: 3083911 - RNA, 19 nt, Artificial Sequence
  Description of Artificial Sequence: Synthetic oligonucleotide
aacacagcugcaacugggg

SEQ ID NO: 3083912 - RNA, 19 nt, Artificial Sequence
  Description of Artificial Sequence: Synthetic oligonucleotide
uccuaagaaggucaucauc

SEQ ID NO: 3083913 - RNA, 19 nt, Artificial Sequence
  Description of Artificial Sequence: Synthetic oligonucleotide
caucacuauaaaguggcag

SEQ ID NO: 3083914 - RNA, 19 nt, Artificial Sequence
  Description of Artificial Sequence: Synthetic oligonucleotide
aucuauaagcuuaacccug

SEQ ID NO: 3083915 - RNA, 19 nt, Artificial Sequence
  Description of Artificial Sequence: Synthetic oligonucleotide
ucauuucuccuaagaaggu

SEQ ID NO: 3083916 - RNA, 19 nt, Artificial Sequence
  Description of Artificial Sequence: Synthetic oligonucleotide
auuucuccuaagaagguca

SEQ ID NO: 3083917 - RNA, 19 nt, Artificial Sequence
  Description of Artificial Sequence: Synthetic oligonucleotide
gaucugguaaauguuuuca

SEQ ID NO: 3083918 - RNA, 19 nt, Artificial Sequence
  Description of Artificial Sequence: Synthetic oligonucleotide
cuaagaaggucaucaucac

SEQ ID NO: 3083919 - RNA, 19 nt, Artificial Sequence
  Description of Artificial Sequence: Synthetic oligonucleotide
uaacuguggacuuccugca

SEQ ID NO: 3083920 - RNA, 19 nt, Artificial Sequence
  Description of Artificial Sequence: Synthetic oligonucleotide
guucccaucucauugcaga

SEQ ID NO: 3083921 - RNA, 19 nt, Artificial Sequence
  Description of Artificial Sequence: Synthetic oligonucleotide
ucucauugcagauggcauc

SEQ ID NO: 3083922 - RNA, 19 nt, Artificial Sequence
  Description of Artificial Sequence: Synthetic oligonucleotide
acaauuagguaguuagcuu

SEQ ID NO: 3083923 - RNA, 19 nt, Artificial Sequence
  Description of Artificial Sequence: Synthetic oligonucleotide
acagcuuaaucacacccau

SEQ ID NO: 3083924 - RNA, 19 nt, Artificial Sequence
  Description of Artificial Sequence: Synthetic oligonucleotide
aaguggcaggcucgucacc

SEQ ID NO: 3083925 - RNA, 19 nt, Artificial Sequence
  Description of Artificial Sequence: Synthetic oligonucleotide
uggcaucuucuacaauuag

SEQ ID NO: 3083926 - RNA, 19 nt, Artificial Sequence
  Description of Artificial Sequence: Synthetic oligonucleotide
guaaauguuuucauuucuc

SEQ ID NO: 3083927 - RNA, 19 nt, Artificial Sequence
  Description of Artificial Sequence: Synthetic oligonucleotide
uagaucugguaaauguuuu

SEQ ID NO: 3083928 - RNA, 19 nt, Artificial Sequence
  Description of Artificial Sequence: Synthetic oligonucleotide
ucucgugguucccaucuca

SEQ ID NO: 3083929 - RNA, 19 nt, Artificial Sequence
  Description of Artificial Sequence: Synthetic oligonucleotide
auguuuucauuucuccuaa

SEQ ID NO: 3083930 - RNA, 19 nt, Artificial Sequence
  Description of Artificial Sequence: Synthetic oligonucleotide
cagcagaucgcuuugaaua

SEQ ID NO: 3083931 - RNA, 19 nt, Artificial Sequence
  Description of Artificial Sequence: Synthetic oligonucleotide
ggucaucaucacuauaaag

SEQ ID NO: 3083932 - RNA, 19 nt, Artificial Sequence
  Description of Artificial Sequence: Synthetic oligonucleotide
uugaauagaucugguaaau

SEQ ID NO: 3083933 - RNA, 19 nt, Artificial Sequence
  Description of Artificial Sequence: Synthetic oligonucleotide
uauaaaguggcaggcucgu

SEQ ID NO: 3083934 - RNA, 19 nt, Artificial Sequence
  Description of Artificial Sequence: Synthetic oligonucleotide
auaaauguccucagcagau

SEQ ID NO: 3083935 - RNA, 19 nt, Artificial Sequence
  Description of Artificial Sequence: Synthetic oligonucleotide
guggacuuccugcaaacac

SEQ ID NO: 3083936 - RNA, 19 nt, Artificial Sequence
  Description of Artificial Sequence: Synthetic oligonucleotide
ugcaacuggggcuugccuc

SEQ ID NO: 3083937 - RNA, 19 nt, Artificial Sequence
  Description of Artificial Sequence: Synthetic oligonucleotide
aucacacccauuaacugug

SEQ ID NO: 3083938 - RNA, 19 nt, Artificial Sequence
  Description of Artificial Sequence: Synthetic oligonucleotide
auaagaugucaguauuuua

SEQ ID NO: 3083939 - RNA, 19 nt, Artificial Sequence
  Description of Artificial Sequence: Synthetic oligonucleotide
ggcaucuucuacaauuagg

SEQ ID NO: 3083940 - RNA, 19 nt, Artificial Sequence
  Description of Artificial Sequence: Synthetic oligonucleotide
ggggcuugccucuuuaucc

SEQ ID NO: 3083941 - RNA, 19 nt, Artificial Sequence
  Description of Artificial Sequence: Synthetic oligonucleotide
uuagguaguuagcuuuaua

SEQ ID NO: 3083942 - RNA, 19 nt, Artificial Sequence
  Description of Artificial Sequence: Synthetic oligonucleotide
ucacacccauuaacugugg

SEQ ID NO: 3083943 - RNA, 19 nt, Artificial Sequence
  Description of Artificial Sequence: Synthetic oligonucleotide
aucgcuuugaauagaucug

SEQ ID NO: 3083944 - RNA, 19 nt, Artificial Sequence
  Description of Artificial Sequence: Synthetic oligonucleotide
cauaaguuccacuguaucu

SEQ ID NO: 3083945 - RNA, 19 nt, Artificial Sequence
  Description of Artificial Sequence: Synthetic oligonucleotide
cuuuauaagaugucaguau

SEQ ID NO: 3083946 - RNA, 19 nt, Artificial Sequence
  Description of Artificial Sequence: Synthetic oligonucleotide
aucugguaaauguuuucau

SEQ ID NO: 3083947 - RNA, 19 nt, Artificial Sequence
  Description of Artificial Sequence: Synthetic oligonucleotide
aauuagguaguuagcuuua

SEQ ID NO: 3083948 - RNA, 19 nt, Artificial Sequence
  Description of Artificial Sequence: Synthetic oligonucleotide
guacacagcuuaaucacac

SEQ ID NO: 3083949 - RNA, 19 nt, Artificial Sequence
  Description of Artificial Sequence: Synthetic oligonucleotide
auagaucugguaaauguuu

SEQ ID NO: 3083950 - RNA, 19 nt, Artificial Sequence
  Description of Artificial Sequence: Synthetic oligonucleotide
uccucagcagaucgcuuug

SEQ ID NO: 3083951 - RNA, 19 nt, Artificial Sequence
  Description of Artificial Sequence: Synthetic oligonucleotide
aguuccacuguaucuggau

SEQ ID NO: 3083952 - RNA, 19 nt, Artificial Sequence
  Description of Artificial Sequence: Synthetic oligonucleotide
gucaccauccacccaguac

SEQ ID NO: 3083953 - RNA, 19 nt, Artificial Sequence
  Description of Artificial Sequence: Synthetic oligonucleotide
ucagcagaucgcuuugaau

SEQ ID NO: 3083954 - RNA, 19 nt, Artificial Sequence
  Description of Artificial Sequence: Synthetic oligonucleotide
aggucauaaguuccacugu

SEQ ID NO: 3083955 - RNA, 19 nt, Artificial Sequence
  Description of Artificial Sequence: Synthetic oligonucleotide
gugguucccaucucauugc

SEQ ID NO: 3083956 - RNA, 19 nt, Artificial Sequence
  Description of Artificial Sequence: Synthetic oligonucleotide
uuucuccuaagaaggucau

SEQ ID NO: 3083957 - RNA, 19 nt, Artificial Sequence
  Description of Artificial Sequence: Synthetic oligonucleotide
cuuuauccaggucauaagu

SEQ ID NO: 3083958 - RNA, 19 nt, Artificial Sequence
  Description of Artificial Sequence: Synthetic oligonucleotide
auccacccaguacacagcu

SEQ ID NO: 3083959 - RNA, 19 nt, Artificial Sequence
  Description of Artificial Sequence: Synthetic oligonucleotide
caucuauaagcuuaacccu

SEQ ID NO: 3083960 - RNA, 19 nt, Artificial Sequence
  Description of Artificial Sequence: Synthetic oligonucleotide
acuguggacuuccugcaaa

SEQ ID NO: 3083961 - RNA, 19 nt, Artificial Sequence
  Description of Artificial Sequence: Synthetic oligonucleotide
agaaggucaucaucacuau

SEQ ID NO: 3083962 - RNA, 19 nt, Artificial Sequence
  Description of Artificial Sequence: Synthetic oligonucleotide
guuagcuuuauaagauguc

SEQ ID NO: 3083963 - RNA, 19 nt, Artificial Sequence
  Description of Artificial Sequence: Synthetic oligonucleotide
aagcuuaacccugcagccu

SEQ ID NO: 3083964 - RNA, 19 nt, Artificial Sequence
  Description of Artificial Sequence: Synthetic oligonucleotide
ugguucccaucucauugca

SEQ ID NO: 3083965 - RNA, 19 nt, Artificial Sequence
  Description of Artificial Sequence: Synthetic oligonucleotide
cauuucuccuaagaagguc

SEQ ID NO: 3083966 - RNA, 19 nt, Artificial Sequence
  Description of Artificial Sequence: Synthetic oligonucleotide
cacagcuuaaucacaccca

SEQ ID NO: 3083967 - RNA, 19 nt, Artificial Sequence
  Description of Artificial Sequence: Synthetic oligonucleotide
ccauccacccaguacacag

SEQ ID NO: 3083968 - RNA, 19 nt, Artificial Sequence
  Description of Artificial Sequence: Synthetic oligonucleotide
guaguuagcuuuauaagau

SEQ ID NO: 3083969 - RNA, 19 nt, Artificial Sequence
  Description of Artificial Sequence: Synthetic oligonucleotide
aguacacagcuuaaucaca

SEQ ID NO: 3083970 - RNA, 19 nt, Artificial Sequence
  Description of Artificial Sequence: Synthetic oligonucleotide
cauccacccaguacacagc

SEQ ID NO: 3083971 - RNA, 19 nt, Artificial Sequence
  Description of Artificial Sequence: Synthetic oligonucleotide
cuguggacuuccugcaaac

SEQ ID NO: 3083972 - RNA, 19 nt, Artificial Sequence
  Description of Artificial Sequence: Synthetic oligonucleotide
cugguaaauguuuucauuu

SEQ ID NO: 3083973 - RNA, 19 nt, Artificial Sequence
  Description of Artificial Sequence: Synthetic oligonucleotide
uggggcuugccucuuuauc

SEQ ID NO: 3083974 - RNA, 19 nt, Artificial Sequence
  Description of Artificial Sequence: Synthetic oligonucleotide
aacuguggacuuccugcaa

SEQ ID NO: 3083975 - RNA, 19 nt, Artificial Sequence
  Description of Artificial Sequence: Synthetic oligonucleotide
uaaauguccucagcagauc

SEQ ID NO: 3083976 - RNA, 19 nt, Artificial Sequence
  Description of Artificial Sequence: Synthetic oligonucleotide
aggucaucaucacuauaaa

SEQ ID NO: 3083977 - RNA, 19 nt, Artificial Sequence
  Description of Artificial Sequence: Synthetic oligonucleotide
caauuagguaguuagcuuu

SEQ ID NO: 3083978 - RNA, 19 nt, Artificial Sequence
  Description of Artificial Sequence: Synthetic oligonucleotide
aguggcaggcucgucacca

SEQ ID NO: 3083979 - RNA, 19 nt, Artificial Sequence
  Description of Artificial Sequence: Synthetic oligonucleotide
ccaguacacagcuuaauca

SEQ ID NO: 3083980 - RNA, 19 nt, Artificial Sequence
  Description of Artificial Sequence: Synthetic oligonucleotide
uguggacuuccugcaaaca

SEQ ID NO: 3083981 - RNA, 19 nt, Artificial Sequence
  Description of Artificial Sequence: Synthetic oligonucleotide
gguaaauguuuucauuucu

SEQ ID NO: 3083982 - RNA, 19 nt, Artificial Sequence
  Description of Artificial Sequence: Synthetic oligonucleotide
uucccaucucauugcagau

SEQ ID NO: 3083983 - RNA, 19 nt, Artificial Sequence
  Description of Artificial Sequence: Synthetic oligonucleotide
ggcaacaucuauaagcuua

SEQ ID NO: 3083984 - RNA, 19 nt, Artificial Sequence
  Description of Artificial Sequence: Synthetic oligonucleotide
ggacuuccugcaaacacag

SEQ ID NO: 3083985 - RNA, 19 nt, Artificial Sequence
  Description of Artificial Sequence: Synthetic oligonucleotide
uucuacaauuagguaguua

SEQ ID NO: 3083986 - RNA, 19 nt, Artificial Sequence
  Description of Artificial Sequence: Synthetic oligonucleotide
agaucgcuuugaauagauc

SEQ ID NO: 3083987 - RNA, 19 nt, Artificial Sequence
  Description of Artificial Sequence: Synthetic oligonucleotide
ugcagccucucgugguucc

SEQ ID NO: 3083988 - RNA, 19 nt, Artificial Sequence
  Description of Artificial Sequence: Synthetic oligonucleotide
aucucauugcagauggcau

SEQ ID NO: 3083989 - RNA, 19 nt, Artificial Sequence
  Description of Artificial Sequence: Synthetic oligonucleotide
auaaaguggcaggcucguc

SEQ ID NO: 3083990 - RNA, 19 nt, Artificial Sequence
  Description of Artificial Sequence: Synthetic oligonucleotide
ccauuaacuguggacuucc

SEQ ID NO: 3083991 - RNA, 19 nt, Artificial Sequence
  Description of Artificial Sequence: Synthetic oligonucleotide
acccauuaacuguggacuu

SEQ ID NO: 3083992 - RNA, 19 nt, Artificial Sequence
  Description of Artificial Sequence: Synthetic oligonucleotide
gcaucuucuacaauuaggu

SEQ ID NO: 3083993 - RNA, 19 nt, Artificial Sequence
  Description of Artificial Sequence: Synthetic oligonucleotide
ggucauaaguuccacugua

SEQ ID NO: 3083994 - RNA, 19 nt, Artificial Sequence
  Description of Artificial Sequence: Synthetic oligonucleotide
cgugguucccaucucauug

SEQ ID NO: 3083995 - RNA, 19 nt, Artificial Sequence
  Description of Artificial Sequence: Synthetic oligonucleotide
uccaggucauaaguuccac

SEQ ID NO: 3083996 - RNA, 19 nt, Artificial Sequence
  Description of Artificial Sequence: Synthetic oligonucleotide
gaaggucaucaucacuaua

SEQ ID NO: 3083997 - RNA, 19 nt, Artificial Sequence
  Description of Artificial Sequence: Synthetic oligonucleotide
auuagguaguuagcuuuau

SEQ ID NO: 3083998 - RNA, 19 nt, Artificial Sequence
  Description of Artificial Sequence: Synthetic oligonucleotide
aaguuccacuguaucugga

SEQ ID NO: 3083999 - RNA, 19 nt, Artificial Sequence
  Description of Artificial Sequence: Synthetic oligonucleotide
gcuuuauaagaugucagua

SEQ ID NO: 3084000 - RNA, 19 nt, Artificial Sequence
  Description of Artificial Sequence: Synthetic oligonucleotide
cuauaagcuuaacccugca

SEQ ID NO: 3084001 - RNA, 19 nt, Artificial Sequence
  Description of Artificial Sequence: Synthetic oligonucleotide
cacccauuaacuguggacu

SEQ ID NO: 3084002 - RNA, 19 nt, Artificial Sequence
  Description of Artificial Sequence: Synthetic oligonucleotide
ggcucgucaccauccaccc

SEQ ID NO: 3084003 - RNA, 19 nt, Artificial Sequence
  Description of Artificial Sequence: Synthetic oligonucleotide
cccaguacacagcuuaauc

SEQ ID NO: 3084004 - RNA, 19 nt, Artificial Sequence
  Description of Artificial Sequence: Synthetic oligonucleotide
uccacuguaucuggaucau

SEQ ID NO: 3084005 - RNA, 19 nt, Artificial Sequence
  Description of Artificial Sequence: Synthetic oligonucleotide
agcugcaacuggggcuugc

SEQ ID NO: 3084006 - RNA, 19 nt, Artificial Sequence
  Description of Artificial Sequence: Synthetic oligonucleotide
caccauccacccaguacac

SEQ ID NO: 3084007 - RNA, 19 nt, Artificial Sequence
  Description of Artificial Sequence: Synthetic oligonucleotide
uugccucuuuauccagguc

SEQ ID NO: 3084008 - RNA, 19 nt, Artificial Sequence
  Description of Artificial Sequence: Synthetic oligonucleotide
auggcaucuucuacaauua

SEQ ID NO: 3084009 - RNA, 19 nt, Artificial Sequence
  Description of Artificial Sequence: Synthetic oligonucleotide
auccaggucauaaguucca

SEQ ID NO: 3084010 - RNA, 19 nt, Artificial Sequence
  Description of Artificial Sequence: Synthetic oligonucleotide
cuugccucuuuauccaggu

SEQ ID NO: 3084011 - RNA, 19 nt, Artificial Sequence
  Description of Artificial Sequence: Synthetic oligonucleotide
uguccucagcagaucgcuu

SEQ ID NO: 3084012 - RNA, 19 nt, Artificial Sequence
  Description of Artificial Sequence: Synthetic oligonucleotide
uucuccuaagaaggucauc

SEQ ID NO: 3084013 - RNA, 19 nt, Artificial Sequence
  Description of Artificial Sequence: Synthetic oligonucleotide
uggcaacaucuauaagcuu

SEQ ID NO: 3084014 - RNA, 19 nt, Artificial Sequence
  Description of Artificial Sequence: Synthetic oligonucleotide
uggcaggcucgucaccauc

SEQ ID NO: 3084015 - RNA, 19 nt, Artificial Sequence
  Description of Artificial Sequence: Synthetic oligonucleotide
ucgucaccauccacccagu

SEQ ID NO: 3084016 - RNA, 19 nt, Artificial Sequence
  Description of Artificial Sequence: Synthetic oligonucleotide
agauggcaucuucuacaau

SEQ ID NO: 3084017 - RNA, 19 nt, Artificial Sequence
  Description of Artificial Sequence: Synthetic oligonucleotide
cucauugcagauggcaucu

SEQ ID NO: 3084018 - RNA, 19 nt, Artificial Sequence
  Description of Artificial Sequence: Synthetic oligonucleotide
caacaucuauaagcuuaac

SEQ ID NO: 3084019 - RNA, 19 nt, Artificial Sequence
  Description of Artificial Sequence: Synthetic oligonucleotide
ucgugguucccaucucauu

SEQ ID NO: 3084020 - RNA, 19 nt, Artificial Sequence
  Description of Artificial Sequence: Synthetic oligonucleotide
gcuugccucuuuauccagg

SEQ ID NO: 3084021 - RNA, 19 nt, Artificial Sequence
  Description of Artificial Sequence: Synthetic oligonucleotide
ggcaggcucgucaccaucc

SEQ ID NO: 3084022 - RNA, 19 nt, Artificial Sequence
  Description of Artificial Sequence: Synthetic oligonucleotide
ggcuugccucuuuauccag

SEQ ID NO: 3084023 - RNA, 19 nt, Artificial Sequence
  Description of Artificial Sequence: Synthetic oligonucleotide
cucagcagaucgcuuugaa

SEQ ID NO: 3084024 - RNA, 19 nt, Artificial Sequence
  Description of Artificial Sequence: Synthetic oligonucleotide
gcuuaaucacacccauuaa

SEQ ID NO: 3084025 - RNA, 19 nt, Artificial Sequence
  Description of Artificial Sequence: Synthetic oligonucleotide
cacacccauuaacugugga

SEQ ID NO: 3084026 - RNA, 19 nt, Artificial Sequence
  Description of Artificial Sequence: Synthetic oligonucleotide
cagaucgcuuugaauagau

SEQ ID NO: 3084027 - RNA, 19 nt, Artificial Sequence
  Description of Artificial Sequence: Synthetic oligonucleotide
gcaacaucuauaagcuuaa

SEQ ID NO: 3084028 - RNA, 19 nt, Artificial Sequence
  Description of Artificial Sequence: Synthetic oligonucleotide
aacuggggcuugccucuuu

SEQ ID NO: 3084029 - RNA, 19 nt, Artificial Sequence
  Description of Artificial Sequence: Synthetic oligonucleotide
gguucccaucucauugcag

SEQ ID NO: 3084030 - RNA, 19 nt, Artificial Sequence
  Description of Artificial Sequence: Synthetic oligonucleotide
cuuaacccugcagccucuc

SEQ ID NO: 3084031 - RNA, 19 nt, Artificial Sequence
  Description of Artificial Sequence: Synthetic oligonucleotide
acccaguacacagcuuaau

SEQ ID NO: 3084032 - RNA, 19 nt, Artificial Sequence
  Description of Artificial Sequence: Synthetic oligonucleotide
cucucgugguucccaucuc

SEQ ID NO: 3084033 - RNA, 19 nt, Artificial Sequence
  Description of Artificial Sequence: Synthetic oligonucleotide
accauccacccaguacaca

SEQ ID NO: 3084034 - RNA, 19 nt, Artificial Sequence
  Description of Artificial Sequence: Synthetic oligonucleotide
gucauaaguuccacuguau

SEQ ID NO: 3084035 - RNA, 19 nt, Artificial Sequence
  Description of Artificial Sequence: Synthetic oligonucleotide
agccucucgugguucccau

SEQ ID NO: 3084036 - RNA, 19 nt, Artificial Sequence
  Description of Artificial Sequence: Synthetic oligonucleotide
guccucagcagaucgcuuu

SEQ ID NO: 3084037 - RNA, 19 nt, Artificial Sequence
  Description of Artificial Sequence: Synthetic oligonucleotide
cacuauaaaguggcaggcu

SEQ ID NO: 3084038 - RNA, 19 nt, Artificial Sequence
  Description of Artificial Sequence: Synthetic oligonucleotide
ccacccaguacacagcuua

SEQ ID NO: 3084039 - RNA, 19 nt, Artificial Sequence
  Description of Artificial Sequence: Synthetic oligonucleotide
cacccaguacacagcuuaa

SEQ ID NO: 3084040 - RNA, 19 nt, Artificial Sequence
  Description of Artificial Sequence: Synthetic oligonucleotide
ucauugcagauggcaucuu

SEQ ID NO: 3084041 - RNA, 19 nt, Artificial Sequence
  Description of Artificial Sequence: Synthetic oligonucleotide
gcaacuggggcuugccucu

SEQ ID NO: 3084042 - RNA, 19 nt, Artificial Sequence
  Description of Artificial Sequence: Synthetic oligonucleotide
cauuaacuguggacuuccu

SEQ ID NO: 3084043 - RNA, 19 nt, Artificial Sequence
  Description of Artificial Sequence: Synthetic oligonucleotide
ccaucucauugcagauggc

SEQ ID NO: 3084044 - RNA, 19 nt, Artificial Sequence
  Description of Artificial Sequence: Synthetic oligonucleotide
cuccuaagaaggucaucau

SEQ ID NO: 3084045 - RNA, 19 nt, Artificial Sequence
  Description of Artificial Sequence: Synthetic oligonucleotide
gcagaucgcuuugaauaga

SEQ ID NO: 3084046 - RNA, 19 nt, Artificial Sequence
  Description of Artificial Sequence: Synthetic oligonucleotide
cucgugguucccaucucau

SEQ ID NO: 3084047 - RNA, 19 nt, Artificial Sequence
  Description of Artificial Sequence: Synthetic oligonucleotide
cugcagccucucgugguuc

SEQ ID NO: 3084048 - RNA, 19 nt, Artificial Sequence
  Description of Artificial Sequence: Synthetic oligonucleotide
ccucucgugguucccaucu

SEQ ID NO: 3084049 - RNA, 19 nt, Artificial Sequence
  Description of Artificial Sequence: Synthetic oligonucleotide
cugcaacuggggcuugccu

SEQ ID NO: 3084050 - RNA, 19 nt, Artificial Sequence
  Description of Artificial Sequence: Synthetic oligonucleotide
cagccucucgugguuccca

SEQ ID NO: 3084051 - RNA, 19 nt, Artificial Sequence
  Description of Artificial Sequence: Synthetic oligonucleotide
cagcuuaaucacacccauu

SEQ ID NO: 3084052 - RNA, 19 nt, Artificial Sequence
  Description of Artificial Sequence: Synthetic oligonucleotide
ccaggucauaaguuccacu

SEQ ID NO: 3084053 - RNA, 19 nt, Artificial Sequence
  Description of Artificial Sequence: Synthetic oligonucleotide
gcagccucucgugguuccc

SEQ ID NO: 3084054 - RNA, 19 nt, Artificial Sequence
  Description of Artificial Sequence: Synthetic oligonucleotide
gcucgucaccauccaccca

SEQ ID NO: 3084055 - RNA, 19 nt, Artificial Sequence
  Description of Artificial Sequence: Synthetic oligonucleotide
gccucuuuauccaggucau

SEQ ID NO: 3084056 - RNA, 19 nt, Artificial Sequence
  Description of Artificial Sequence: Synthetic oligonucleotide
gccucucgugguucccauc

SEQ ID NO: 3084057 - RNA, 19 nt, Artificial Sequence
  Description of Artificial Sequence: Synthetic oligonucleotide
cuucuacaauuagguaguu

SEQ ID NO: 3084058 - RNA, 19 nt, Artificial Sequence
  Description of Artificial Sequence: Synthetic oligonucleotide
guggcaggcucgucaccau

SEQ ID NO: 3084059 - RNA, 19 nt, Artificial Sequence
  Description of Artificial Sequence: Synthetic oligonucleotide
cagcugcaacuggggcuug

SEQ ID NO: 3084060 - RNA, 19 nt, Artificial Sequence
  Description of Artificial Sequence: Synthetic oligonucleotide
cgcuuugaauagaucuggu

SEQ ID NO: 3084061 - RNA, 19 nt, Artificial Sequence
  Description of Artificial Sequence: Synthetic oligonucleotide
gcuuaacccugcagccucu

SEQ ID NO: 3084062 - RNA, 19 nt, Artificial Sequence
  Description of Artificial Sequence: Synthetic oligonucleotide
ccacuguaucuggaucaua

SEQ ID NO: 3084063 - RNA, 19 nt, Artificial Sequence
  Description of Artificial Sequence: Synthetic oligonucleotide
ccucuuuauccaggucaua

SEQ ID NO: 3084064 - RNA, 19 nt, Artificial Sequence
  Description of Artificial Sequence: Synthetic oligonucleotide
ccugcagccucucgugguu

SEQ ID NO: 3084065 - RNA, 19 nt, Artificial Sequence
  Description of Artificial Sequence: Synthetic oligonucleotide
cgucaccauccacccagua

SEQ ID NO: 3084066 - RNA, 19 nt, Artificial Sequence
  Description of Artificial Sequence: Synthetic oligonucleotide
caacuggggcuugccucuu

SEQ ID NO: 3084067 - RNA, 19 nt, Artificial Sequence
  Description of Artificial Sequence: Synthetic oligonucleotide
aaucucagcgaccucaccc

SEQ ID NO: 3084068 - RNA, 19 nt, Artificial Sequence
  Description of Artificial Sequence: Synthetic oligonucleotide
uuuuauaucaaacuccuau

SEQ ID NO: 3084069 - RNA, 19 nt, Artificial Sequence
  Description of Artificial Sequence: Synthetic oligonucleotide
gauguagugaggaaggugg

SEQ ID NO: 3084070 - RNA, 19 nt, Artificial Sequence
  Description of Artificial Sequence: Synthetic oligonucleotide
uguuacuacccucacagag

SEQ ID NO: 3084071 - RNA, 19 nt, Artificial Sequence
  Description of Artificial Sequence: Synthetic oligonucleotide
aagaucgaaguggagaagc

SEQ ID NO: 3084072 - RNA, 19 nt, Artificial Sequence
  Description of Artificial Sequence: Synthetic oligonucleotide
aagauagccaggcacauga

SEQ ID NO: 3084073 - RNA, 19 nt, Artificial Sequence
  Description of Artificial Sequence: Synthetic oligonucleotide
uuauaucaaacuccuauca

SEQ ID NO: 3084074 - RNA, 19 nt, Artificial Sequence
  Description of Artificial Sequence: Synthetic oligonucleotide
aguagagaaucucagcgac

SEQ ID NO: 3084075 - RNA, 19 nt, Artificial Sequence
  Description of Artificial Sequence: Synthetic oligonucleotide
agagcacuaagacagacag

SEQ ID NO: 3084076 - RNA, 19 nt, Artificial Sequence
  Description of Artificial Sequence: Synthetic oligonucleotide
agcacuaagacagacaguc

SEQ ID NO: 3084077 - RNA, 19 nt, Artificial Sequence
  Description of Artificial Sequence: Synthetic oligonucleotide
uaucaaacuccuaucaaug

SEQ ID NO: 3084078 - RNA, 19 nt, Artificial Sequence
  Description of Artificial Sequence: Synthetic oligonucleotide
uguggcaagaucgaagugg

SEQ ID NO: 3084079 - RNA, 19 nt, Artificial Sequence
  Description of Artificial Sequence: Synthetic oligonucleotide
cucacagaggugaagauag

SEQ ID NO: 3084080 - RNA, 19 nt, Artificial Sequence
  Description of Artificial Sequence: Synthetic oligonucleotide
aaguggagaagcccuuugc

SEQ ID NO: 3084081 - RNA, 19 nt, Artificial Sequence
  Description of Artificial Sequence: Synthetic oligonucleotide
gaucauugcagacuguggc

SEQ ID NO: 3084082 - RNA, 19 nt, Artificial Sequence
  Description of Artificial Sequence: Synthetic oligonucleotide
aguggagaagcccuuugcc

SEQ ID NO: 3084083 - RNA, 19 nt, Artificial Sequence
  Description of Artificial Sequence: Synthetic oligonucleotide
ggaguagagaaucucagcg

SEQ ID NO: 3084084 - RNA, 19 nt, Artificial Sequence
  Description of Artificial Sequence: Synthetic oligonucleotide
auugccaaggaguagagaa

SEQ ID NO: 3084085 - RNA, 19 nt, Artificial Sequence
  Description of Artificial Sequence: Synthetic oligonucleotide
guggagagcacuaagacag

SEQ ID NO: 3084086 - RNA, 19 nt, Artificial Sequence
  Description of Artificial Sequence: Synthetic oligonucleotide
uuuauaucaaacuccuauc

SEQ ID NO: 3084087 - RNA, 19 nt, Artificial Sequence
  Description of Artificial Sequence: Synthetic oligonucleotide
aggcacaugauuccgugcc

SEQ ID NO: 3084088 - RNA, 19 nt, Artificial Sequence
  Description of Artificial Sequence: Synthetic oligonucleotide
cacuaagacagacagucgg

SEQ ID NO: 3084089 - RNA, 19 nt, Artificial Sequence
  Description of Artificial Sequence: Synthetic oligonucleotide
ucaaacuccuaucaaugcu

SEQ ID NO: 3084090 - RNA, 19 nt, Artificial Sequence
  Description of Artificial Sequence: Synthetic oligonucleotide
aagacagacagucgggaca

SEQ ID NO: 3084091 - RNA, 19 nt, Artificial Sequence
  Description of Artificial Sequence: Synthetic oligonucleotide
ugaucauugcagacugugg

SEQ ID NO: 3084092 - RNA, 19 nt, Artificial Sequence
  Description of Artificial Sequence: Synthetic oligonucleotide
gauuccgugccacucagcc

SEQ ID NO: 3084093 - RNA, 19 nt, Artificial Sequence
  Description of Artificial Sequence: Synthetic oligonucleotide
agacagucgggacaagccc

SEQ ID NO: 3084094 - RNA, 19 nt, Artificial Sequence
  Description of Artificial Sequence: Synthetic oligonucleotide
aggaguagagaaucucagc

SEQ ID NO: 3084095 - RNA, 19 nt, Artificial Sequence
  Description of Artificial Sequence: Synthetic oligonucleotide
uuccgugccacucagcccc

SEQ ID NO: 3084096 - RNA, 19 nt, Artificial Sequence
  Description of Artificial Sequence: Synthetic oligonucleotide
uauaucaaacuccuaucaa

SEQ ID NO: 3084097 - RNA, 19 nt, Artificial Sequence
  Description of Artificial Sequence: Synthetic oligonucleotide
auaucaaacuccuaucaau

SEQ ID NO: 3084098 - RNA, 19 nt, Artificial Sequence
  Description of Artificial Sequence: Synthetic oligonucleotide
agguggagagcacuaagac

SEQ ID NO: 3084099 - RNA, 19 nt, Artificial Sequence
  Description of Artificial Sequence: Synthetic oligonucleotide
aucucagcgaccucacccc

SEQ ID NO: 3084100 - RNA, 19 nt, Artificial Sequence
  Description of Artificial Sequence: Synthetic oligonucleotide
uaugugcagauccuguuac

SEQ ID NO: 3084101 - RNA, 19 nt, Artificial Sequence
  Description of Artificial Sequence: Synthetic oligonucleotide
auagccaggcacaugauuc

SEQ ID NO: 3084102 - RNA, 19 nt, Artificial Sequence
  Description of Artificial Sequence: Synthetic oligonucleotide
caaacuccuaucaaugcug

SEQ ID NO: 3084103 - RNA, 19 nt, Artificial Sequence
  Description of Artificial Sequence: Synthetic oligonucleotide
uuacuacccucacagaggu

SEQ ID NO: 3084104 - RNA, 19 nt, Artificial Sequence
  Description of Artificial Sequence: Synthetic oligonucleotide
uggcuguaugugcagaucc

SEQ ID NO: 3084105 - RNA, 19 nt, Artificial Sequence
  Description of Artificial Sequence: Synthetic oligonucleotide
ugcagauccuguuacuacc

SEQ ID NO: 3084106 - RNA, 19 nt, Artificial Sequence
  Description of Artificial Sequence: Synthetic oligonucleotide
ugaaggaugugaucauugc

SEQ ID NO: 3084107 - RNA, 19 nt, Artificial Sequence
  Description of Artificial Sequence: Synthetic oligonucleotide
augugaucauugcagacug

SEQ ID NO: 3084108 - RNA, 19 nt, Artificial Sequence
  Description of Artificial Sequence: Synthetic oligonucleotide
acuguggcaagaucgaagu

SEQ ID NO: 3084109 - RNA, 19 nt, Artificial Sequence
  Description of Artificial Sequence: Synthetic oligonucleotide
acuccuaucaaugcugauc

SEQ ID NO: 3084110 - RNA, 19 nt, Artificial Sequence
  Description of Artificial Sequence: Synthetic oligonucleotide
guuacuacccucacagagg

SEQ ID NO: 3084111 - RNA, 19 nt, Artificial Sequence
  Description of Artificial Sequence: Synthetic oligonucleotide
cagugcuuccaccugaggg

SEQ ID NO: 3084112 - RNA, 19 nt, Artificial Sequence
  Description of Artificial Sequence: Synthetic oligonucleotide
aaggaguagagaaucucag

SEQ ID NO: 3084113 - RNA, 19 nt, Artificial Sequence
  Description of Artificial Sequence: Synthetic oligonucleotide
uagugaggaagguggagag

SEQ ID NO: 3084114 - RNA, 19 nt, Artificial Sequence
  Description of Artificial Sequence: Synthetic oligonucleotide
uagagaaucucagcgaccu

SEQ ID NO: 3084115 - RNA, 19 nt, Artificial Sequence
  Description of Artificial Sequence: Synthetic oligonucleotide
gaagguggagagcacuaag

SEQ ID NO: 3084116 - RNA, 19 nt, Artificial Sequence
  Description of Artificial Sequence: Synthetic oligonucleotide
ccuguuacuacccucacag

SEQ ID NO: 3084117 - RNA, 19 nt, Artificial Sequence
  Description of Artificial Sequence: Synthetic oligonucleotide
aucaaugcugaucaauaaa

SEQ ID NO: 3084118 - RNA, 19 nt, Artificial Sequence
  Description of Artificial Sequence: Synthetic oligonucleotide
uaucaaugcugaucaauaa

SEQ ID NO: 3084119 - RNA, 19 nt, Artificial Sequence
  Description of Artificial Sequence: Synthetic oligonucleotide
agauccuguuacuacccuc

SEQ ID NO: 3084120 - RNA, 19 nt, Artificial Sequence
  Description of Artificial Sequence: Synthetic oligonucleotide
acuacccucacagagguga

SEQ ID NO: 3084121 - RNA, 19 nt, Artificial Sequence
  Description of Artificial Sequence: Synthetic oligonucleotide
uccaaguggcuguaugugc

SEQ ID NO: 3084122 - RNA, 19 nt, Artificial Sequence
  Description of Artificial Sequence: Synthetic oligonucleotide
gaaggaugugaucauugca

SEQ ID NO: 3084123 - RNA, 19 nt, Artificial Sequence
  Description of Artificial Sequence: Synthetic oligonucleotide
ggugaagauagccaggcac

SEQ ID NO: 3084124 - RNA, 19 nt, Artificial Sequence
  Description of Artificial Sequence: Synthetic oligonucleotide
cuccuaucaaugcugauca

SEQ ID NO: 3084125 - RNA, 19 nt, Artificial Sequence
  Description of Artificial Sequence: Synthetic oligonucleotide
cagacagucgggacaagcc

SEQ ID NO: 3084126 - RNA, 19 nt, Artificial Sequence
  Description of Artificial Sequence: Synthetic oligonucleotide
gcagacuguggcaagaucg

SEQ ID NO: 3084127 - RNA, 19 nt, Artificial Sequence
  Description of Artificial Sequence: Synthetic oligonucleotide
auuccgugccacucagccc

SEQ ID NO: 3084128 - RNA, 19 nt, Artificial Sequence
  Description of Artificial Sequence: Synthetic oligonucleotide
gaggugaagauagccaggc

SEQ ID NO: 3084129 - RNA, 19 nt, Artificial Sequence
  Description of Artificial Sequence: Synthetic oligonucleotide
acuaagacagacagucggg

SEQ ID NO: 3084130 - RNA, 19 nt, Artificial Sequence
  Description of Artificial Sequence: Synthetic oligonucleotide
agaucgaaguggagaagcc

SEQ ID NO: 3084131 - RNA, 19 nt, Artificial Sequence
  Description of Artificial Sequence: Synthetic oligonucleotide
uaagacagacagucgggac

SEQ ID NO: 3084132 - RNA, 19 nt, Artificial Sequence
  Description of Artificial Sequence: Synthetic oligonucleotide
gaguagagaaucucagcga

SEQ ID NO: 3084133 - RNA, 19 nt, Artificial Sequence
  Description of Artificial Sequence: Synthetic oligonucleotide
gagaaucucagcgaccuca

SEQ ID NO: 3084134 - RNA, 19 nt, Artificial Sequence
  Description of Artificial Sequence: Synthetic oligonucleotide
uggagaagcccuuugccau

SEQ ID NO: 3084135 - RNA, 19 nt, Artificial Sequence
  Description of Artificial Sequence: Synthetic oligonucleotide
ucagcgaccucaccccucc

SEQ ID NO: 3084136 - RNA, 19 nt, Artificial Sequence
  Description of Artificial Sequence: Synthetic oligonucleotide
uguagugaggaagguggag

SEQ ID NO: 3084137 - RNA, 19 nt, Artificial Sequence
  Description of Artificial Sequence: Synthetic oligonucleotide
gaaguggagaagcccuuug

SEQ ID NO: 3084138 - RNA, 19 nt, Artificial Sequence
  Description of Artificial Sequence: Synthetic oligonucleotide
gacuguggcaagaucgaag

SEQ ID NO: 3084139 - RNA, 19 nt, Artificial Sequence
  Description of Artificial Sequence: Synthetic oligonucleotide
aggaugugaucauugcaga

SEQ ID NO: 3084140 - RNA, 19 nt, Artificial Sequence
  Description of Artificial Sequence: Synthetic oligonucleotide
cacagaggugaagauagcc

SEQ ID NO: 3084141 - RNA, 19 nt, Artificial Sequence
  Description of Artificial Sequence: Synthetic oligonucleotide
caaggaguagagaaucuca

SEQ ID NO: 3084142 - RNA, 19 nt, Artificial Sequence
  Description of Artificial Sequence: Synthetic oligonucleotide
gaucgaaguggagaagccc

SEQ ID NO: 3084143 - RNA, 19 nt, Artificial Sequence
  Description of Artificial Sequence: Synthetic oligonucleotide
gugaucauugcagacugug

SEQ ID NO: 3084144 - RNA, 19 nt, Artificial Sequence
  Description of Artificial Sequence: Synthetic oligonucleotide
acaugauuccgugccacuc

SEQ ID NO: 3084145 - RNA, 19 nt, Artificial Sequence
  Description of Artificial Sequence: Synthetic oligonucleotide
gauccuguuacuacccuca

SEQ ID NO: 3084146 - RNA, 19 nt, Artificial Sequence
  Description of Artificial Sequence: Synthetic oligonucleotide
cucacauuccacaggccug

SEQ ID NO: 3084147 - RNA, 19 nt, Artificial Sequence
  Description of Artificial Sequence: Synthetic oligonucleotide
augauuccgugccacucag

SEQ ID NO: 3084148 - RNA, 19 nt, Artificial Sequence
  Description of Artificial Sequence: Synthetic oligonucleotide
gaagcccuuugccauugcc

SEQ ID NO: 3084149 - RNA, 19 nt, Artificial Sequence
  Description of Artificial Sequence: Synthetic oligonucleotide
uguaugugcagauccuguu

SEQ ID NO: 3084150 - RNA, 19 nt, Artificial Sequence
  Description of Artificial Sequence: Synthetic oligonucleotide
aaacuccuaucaaugcuga

SEQ ID NO: 3084151 - RNA, 19 nt, Artificial Sequence
  Description of Artificial Sequence: Synthetic oligonucleotide
gacagucgggacaagcccc

SEQ ID NO: 3084152 - RNA, 19 nt, Artificial Sequence
  Description of Artificial Sequence: Synthetic oligonucleotide
uagccaggcacaugauucc

SEQ ID NO: 3084153 - RNA, 19 nt, Artificial Sequence
  Description of Artificial Sequence: Synthetic oligonucleotide
ugccaaggaguagagaauc

SEQ ID NO: 3084154 - RNA, 19 nt, Artificial Sequence
  Description of Artificial Sequence: Synthetic oligonucleotide
gaccucaccccuccaagug

SEQ ID NO: 3084155 - RNA, 19 nt, Artificial Sequence
  Description of Artificial Sequence: Synthetic oligonucleotide
aucgaaguggagaagcccu

SEQ ID NO: 3084156 - RNA, 19 nt, Artificial Sequence
  Description of Artificial Sequence: Synthetic oligonucleotide
gaugugaucauugcagacu

SEQ ID NO: 3084157 - RNA, 19 nt, Artificial Sequence
  Description of Artificial Sequence: Synthetic oligonucleotide
ucacauuccacaggccuga

SEQ ID NO: 3084158 - RNA, 19 nt, Artificial Sequence
  Description of Artificial Sequence: Synthetic oligonucleotide
uccuguuacuacccucaca

SEQ ID NO: 3084159 - RNA, 19 nt, Artificial Sequence
  Description of Artificial Sequence: Synthetic oligonucleotide
agaaucucagcgaccucac

SEQ ID NO: 3084160 - RNA, 19 nt, Artificial Sequence
  Description of Artificial Sequence: Synthetic oligonucleotide
ugccacucagccccagugc

SEQ ID NO: 3084161 - RNA, 19 nt, Artificial Sequence
  Description of Artificial Sequence: Synthetic oligonucleotide
auccuguuacuacccucac

SEQ ID NO: 3084162 - RNA, 19 nt, Artificial Sequence
  Description of Artificial Sequence: Synthetic oligonucleotide
agaggugaagauagccagg

SEQ ID NO: 3084163 - RNA, 19 nt, Artificial Sequence
  Description of Artificial Sequence: Synthetic oligonucleotide
ugugcagauccuguuacua

SEQ ID NO: 3084164 - RNA, 19 nt, Artificial Sequence
  Description of Artificial Sequence: Synthetic oligonucleotide
aagcccuuugccauugcca

SEQ ID NO: 3084165 - RNA, 19 nt, Artificial Sequence
  Description of Artificial Sequence: Synthetic oligonucleotide
guggagaagcccuuugcca

SEQ ID NO: 3084166 - RNA, 19 nt, Artificial Sequence
  Description of Artificial Sequence: Synthetic oligonucleotide
agcccuuugccauugccaa

SEQ ID NO: 3084167 - RNA, 19 nt, Artificial Sequence
  Description of Artificial Sequence: Synthetic oligonucleotide
gugaagauagccaggcaca

SEQ ID NO: 3084168 - RNA, 19 nt, Artificial Sequence
  Description of Artificial Sequence: Synthetic oligonucleotide
agagaaucucagcgaccuc

SEQ ID NO: 3084169 - RNA, 19 nt, Artificial Sequence
  Description of Artificial Sequence: Synthetic oligonucleotide
gugcagauccuguuacuac

SEQ ID NO: 3084170 - RNA, 19 nt, Artificial Sequence
  Description of Artificial Sequence: Synthetic oligonucleotide
cauugcagacuguggcaag

SEQ ID NO: 3084171 - RNA, 19 nt, Artificial Sequence
  Description of Artificial Sequence: Synthetic oligonucleotide
caaguggcuguaugugcag

SEQ ID NO: 3084172 - RNA, 19 nt, Artificial Sequence
  Description of Artificial Sequence: Synthetic oligonucleotide
aguggcuguaugugcagau

SEQ ID NO: 3084173 - RNA, 19 nt, Artificial Sequence
  Description of Artificial Sequence: Synthetic oligonucleotide
agaagcccuuugccauugc

SEQ ID NO: 3084174 - RNA, 19 nt, Artificial Sequence
  Description of Artificial Sequence: Synthetic oligonucleotide
ugugaucauugcagacugu

SEQ ID NO: 3084175 - RNA, 19 nt, Artificial Sequence
  Description of Artificial Sequence: Synthetic oligonucleotide
cuuugccauugccaaggag

SEQ ID NO: 3084176 - RNA, 19 nt, Artificial Sequence
  Description of Artificial Sequence: Synthetic oligonucleotide
gaaucucagcgaccucacc

SEQ ID NO: 3084177 - RNA, 19 nt, Artificial Sequence
  Description of Artificial Sequence: Synthetic oligonucleotide
ugaagauagccaggcacau

SEQ ID NO: 3084178 - RNA, 19 nt, Artificial Sequence
  Description of Artificial Sequence: Synthetic oligonucleotide
cauuccacaggccugauuu

SEQ ID NO: 3084179 - RNA, 19 nt, Artificial Sequence
  Description of Artificial Sequence: Synthetic oligonucleotide
gacaagccccugaaggaug

SEQ ID NO: 3084180 - RNA, 19 nt, Artificial Sequence
  Description of Artificial Sequence: Synthetic oligonucleotide
guagagaaucucagcgacc

SEQ ID NO: 3084181 - RNA, 19 nt, Artificial Sequence
  Description of Artificial Sequence: Synthetic oligonucleotide
gcaagaucgaaguggagaa

SEQ ID NO: 3084182 - RNA, 19 nt, Artificial Sequence
  Description of Artificial Sequence: Synthetic oligonucleotide
gaagauagccaggcacaug

SEQ ID NO: 3084183 - RNA, 19 nt, Artificial Sequence
  Description of Artificial Sequence: Synthetic oligonucleotide
ugcagacuguggcaagauc

SEQ ID NO: 3084184 - RNA, 19 nt, Artificial Sequence
  Description of Artificial Sequence: Synthetic oligonucleotide
aagccccugaaggauguga

SEQ ID NO: 3084185 - RNA, 19 nt, Artificial Sequence
  Description of Artificial Sequence: Synthetic oligonucleotide
ugaggaagguggagagcac

SEQ ID NO: 3084186 - RNA, 19 nt, Artificial Sequence
  Description of Artificial Sequence: Synthetic oligonucleotide
ggcaagaucgaaguggaga

SEQ ID NO: 3084187 - RNA, 19 nt, Artificial Sequence
  Description of Artificial Sequence: Synthetic oligonucleotide
aacuccuaucaaugcugau

SEQ ID NO: 3084188 - RNA, 19 nt, Artificial Sequence
  Description of Artificial Sequence: Synthetic oligonucleotide
ucgggacaagccccugaag

SEQ ID NO: 3084189 - RNA, 19 nt, Artificial Sequence
  Description of Artificial Sequence: Synthetic oligonucleotide
auugcagacuguggcaaga

SEQ ID NO: 3084190 - RNA, 19 nt, Artificial Sequence
  Description of Artificial Sequence: Synthetic oligonucleotide
agccccagugcuuccaccu

SEQ ID NO: 3084191 - RNA, 19 nt, Artificial Sequence
  Description of Artificial Sequence: Synthetic oligonucleotide
cuccaaguggcuguaugug

SEQ ID NO: 3084192 - RNA, 19 nt, Artificial Sequence
  Description of Artificial Sequence: Synthetic oligonucleotide
caugauuccgugccacuca

SEQ ID NO: 3084193 - RNA, 19 nt, Artificial Sequence
  Description of Artificial Sequence: Synthetic oligonucleotide
uggagagcacuaagacaga

SEQ ID NO: 3084194 - RNA, 19 nt, Artificial Sequence
  Description of Artificial Sequence: Synthetic oligonucleotide
caggcacaugauuccgugc

SEQ ID NO: 3084195 - RNA, 19 nt, Artificial Sequence
  Description of Artificial Sequence: Synthetic oligonucleotide
cuaagacagacagucggga

SEQ ID NO: 3084196 - RNA, 19 nt, Artificial Sequence
  Description of Artificial Sequence: Synthetic oligonucleotide
ugauuccgugccacucagc

SEQ ID NO: 3084197 - RNA, 19 nt, Artificial Sequence
  Description of Artificial Sequence: Synthetic oligonucleotide
acccucacagaggugaaga

SEQ ID NO: 3084198 - RNA, 19 nt, Artificial Sequence
  Description of Artificial Sequence: Synthetic oligonucleotide
ggaugugaucauugcagac

SEQ ID NO: 3084199 - RNA, 19 nt, Artificial Sequence
  Description of Artificial Sequence: Synthetic oligonucleotide
agacagacagucgggacaa

SEQ ID NO: 3084200 - RNA, 19 nt, Artificial Sequence
  Description of Artificial Sequence: Synthetic oligonucleotide
aaguggcuguaugugcaga

SEQ ID NO: 3084201 - RNA, 19 nt, Artificial Sequence
  Description of Artificial Sequence: Synthetic oligonucleotide
caagaucgaaguggagaag

SEQ ID NO: 3084202 - RNA, 19 nt, Artificial Sequence
  Description of Artificial Sequence: Synthetic oligonucleotide
gugccacucagccccagug

SEQ ID NO: 3084203 - RNA, 19 nt, Artificial Sequence
  Description of Artificial Sequence: Synthetic oligonucleotide
guaugugcagauccuguua

SEQ ID NO: 3084204 - RNA, 19 nt, Artificial Sequence
  Description of Artificial Sequence: Synthetic oligonucleotide
gagaagcccuuugccauug

SEQ ID NO: 3084205 - RNA, 19 nt, Artificial Sequence
  Description of Artificial Sequence: Synthetic oligonucleotide
ucucagcgaccucaccccu

SEQ ID NO: 3084206 - RNA, 19 nt, Artificial Sequence
  Description of Artificial Sequence: Synthetic oligonucleotide
augugcagauccuguuacu

SEQ ID NO: 3084207 - RNA, 19 nt, Artificial Sequence
  Description of Artificial Sequence: Synthetic oligonucleotide
acucagccccagugcuucc

SEQ ID NO: 3084208 - RNA, 19 nt, Artificial Sequence
  Description of Artificial Sequence: Synthetic oligonucleotide
agccaggcacaugauuccg

SEQ ID NO: 3084209 - RNA, 19 nt, Artificial Sequence
  Description of Artificial Sequence: Synthetic oligonucleotide
cgggacaagccccugaagg

SEQ ID NO: 3084210 - RNA, 19 nt, Artificial Sequence
  Description of Artificial Sequence: Synthetic oligonucleotide
guggcaagaucgaagugga

SEQ ID NO: 3084211 - RNA, 19 nt, Artificial Sequence
  Description of Artificial Sequence: Synthetic oligonucleotide
cagacuguggcaagaucga

SEQ ID NO: 3084212 - RNA, 19 nt, Artificial Sequence
  Description of Artificial Sequence: Synthetic oligonucleotide
ggauguagugaggaaggug

SEQ ID NO: 3084213 - RNA, 19 nt, Artificial Sequence
  Description of Artificial Sequence: Synthetic oligonucleotide
ucgaaguggagaagcccuu

SEQ ID NO: 3084214 - RNA, 19 nt, Artificial Sequence
  Description of Artificial Sequence: Synthetic oligonucleotide
ucagccccagugcuuccac

SEQ ID NO: 3084215 - RNA, 19 nt, Artificial Sequence
  Description of Artificial Sequence: Synthetic oligonucleotide
aggugaagauagccaggca

SEQ ID NO: 3084216 - RNA, 19 nt, Artificial Sequence
  Description of Artificial Sequence: Synthetic oligonucleotide
cccuuugccauugccaagg

SEQ ID NO: 3084217 - RNA, 19 nt, Artificial Sequence
  Description of Artificial Sequence: Synthetic oligonucleotide
ugccauugccaaggaguag

SEQ ID NO: 3084218 - RNA, 19 nt, Artificial Sequence
  Description of Artificial Sequence: Synthetic oligonucleotide
agucgggacaagccccuga

SEQ ID NO: 3084219 - RNA, 19 nt, Artificial Sequence
  Description of Artificial Sequence: Synthetic oligonucleotide
ccccucacauuccacaggc

SEQ ID NO: 3084220 - RNA, 19 nt, Artificial Sequence
  Description of Artificial Sequence: Synthetic oligonucleotide
ucaccccuccaaguggcug

SEQ ID NO: 3084221 - RNA, 19 nt, Artificial Sequence
  Description of Artificial Sequence: Synthetic oligonucleotide
gggacaagccccugaagga

SEQ ID NO: 3084222 - RNA, 19 nt, Artificial Sequence
  Description of Artificial Sequence: Synthetic oligonucleotide
uacccucacagaggugaag

SEQ ID NO: 3084223 - RNA, 19 nt, Artificial Sequence
  Description of Artificial Sequence: Synthetic oligonucleotide
gauagccaggcacaugauu

SEQ ID NO: 3084224 - RNA, 19 nt, Artificial Sequence
  Description of Artificial Sequence: Synthetic oligonucleotide
cuguggcaagaucgaagug

SEQ ID NO: 3084225 - RNA, 19 nt, Artificial Sequence
  Description of Artificial Sequence: Synthetic oligonucleotide
cacucagccccagugcuuc

SEQ ID NO: 3084226 - RNA, 19 nt, Artificial Sequence
  Description of Artificial Sequence: Synthetic oligonucleotide
uccuaucaaugcugaucaa

SEQ ID NO: 3084227 - RNA, 19 nt, Artificial Sequence
  Description of Artificial Sequence: Synthetic oligonucleotide
gcagauccuguuacuaccc

SEQ ID NO: 3084228 - RNA, 19 nt, Artificial Sequence
  Description of Artificial Sequence: Synthetic oligonucleotide
acaagccccugaaggaugu

SEQ ID NO: 3084229 - RNA, 19 nt, Artificial Sequence
  Description of Artificial Sequence: Synthetic oligonucleotide
ggagagcacuaagacagac

SEQ ID NO: 3084230 - RNA, 19 nt, Artificial Sequence
  Description of Artificial Sequence: Synthetic oligonucleotide
agcgaccucaccccuccaa

SEQ ID NO: 3084231 - RNA, 19 nt, Artificial Sequence
  Description of Artificial Sequence: Synthetic oligonucleotide
cuguaugugcagauccugu

SEQ ID NO: 3084232 - RNA, 19 nt, Artificial Sequence
  Description of Artificial Sequence: Synthetic oligonucleotide
gcacuaagacagacagucg

SEQ ID NO: 3084233 - RNA, 19 nt, Artificial Sequence
  Description of Artificial Sequence: Synthetic oligonucleotide
ccaaguggcuguaugugca

SEQ ID NO: 3084234 - RNA, 19 nt, Artificial Sequence
  Description of Artificial Sequence: Synthetic oligonucleotide
auguagugaggaaggugga

SEQ ID NO: 3084235 - RNA, 19 nt, Artificial Sequence
  Description of Artificial Sequence: Synthetic oligonucleotide
uugcagacuguggcaagau

SEQ ID NO: 3084236 - RNA, 19 nt, Artificial Sequence
  Description of Artificial Sequence: Synthetic oligonucleotide
ccaggcacaugauuccgug

SEQ ID NO: 3084237 - RNA, 19 nt, Artificial Sequence
  Description of Artificial Sequence: Synthetic oligonucleotide
gcgaccucaccccuccaag

SEQ ID NO: 3084238 - RNA, 19 nt, Artificial Sequence
  Description of Artificial Sequence: Synthetic oligonucleotide
gucgggacaagccccugaa

SEQ ID NO: 3084239 - RNA, 19 nt, Artificial Sequence
  Description of Artificial Sequence: Synthetic oligonucleotide
cucagcgaccucaccccuc

SEQ ID NO: 3084240 - RNA, 19 nt, Artificial Sequence
  Description of Artificial Sequence: Synthetic oligonucleotide
cuguuacuacccucacaga

SEQ ID NO: 3084241 - RNA, 19 nt, Artificial Sequence
  Description of Artificial Sequence: Synthetic oligonucleotide
gaggaagguggagagcacu

SEQ ID NO: 3084242 - RNA, 19 nt, Artificial Sequence
  Description of Artificial Sequence: Synthetic oligonucleotide
ccauugccaaggaguagag

SEQ ID NO: 3084243 - RNA, 19 nt, Artificial Sequence
  Description of Artificial Sequence: Synthetic oligonucleotide
acauuccacaggccugauu

SEQ ID NO: 3084244 - RNA, 19 nt, Artificial Sequence
  Description of Artificial Sequence: Synthetic oligonucleotide
ccaaggaguagagaaucuc

SEQ ID NO: 3084245 - RNA, 19 nt, Artificial Sequence
  Description of Artificial Sequence: Synthetic oligonucleotide
acagucgggacaagccccu

SEQ ID NO: 3084246 - RNA, 19 nt, Artificial Sequence
  Description of Artificial Sequence: Synthetic oligonucleotide
cagccccagugcuuccacc

SEQ ID NO: 3084247 - RNA, 19 nt, Artificial Sequence
  Description of Artificial Sequence: Synthetic oligonucleotide
agacuguggcaagaucgaa

SEQ ID NO: 3084248 - RNA, 19 nt, Artificial Sequence
  Description of Artificial Sequence: Synthetic oligonucleotide
guggcuguaugugcagauc

SEQ ID NO: 3084249 - RNA, 19 nt, Artificial Sequence
  Description of Artificial Sequence: Synthetic oligonucleotide
ccccugaaggaugugauca

SEQ ID NO: 3084250 - RNA, 19 nt, Artificial Sequence
  Description of Artificial Sequence: Synthetic oligonucleotide
agccccugaaggaugugau

SEQ ID NO: 3084251 - RNA, 19 nt, Artificial Sequence
  Description of Artificial Sequence: Synthetic oligonucleotide
gcacaugauuccgugccac

SEQ ID NO: 3084252 - RNA, 19 nt, Artificial Sequence
  Description of Artificial Sequence: Synthetic oligonucleotide
gacagacagucgggacaag

SEQ ID NO: 3084253 - RNA, 19 nt, Artificial Sequence
  Description of Artificial Sequence: Synthetic oligonucleotide
cauugccaaggaguagaga

SEQ ID NO: 3084254 - RNA, 19 nt, Artificial Sequence
  Description of Artificial Sequence: Synthetic oligonucleotide
ggcacaugauuccgugcca

SEQ ID NO: 3084255 - RNA, 19 nt, Artificial Sequence
  Description of Artificial Sequence: Synthetic oligonucleotide
uccgugccacucagcccca

SEQ ID NO: 3084256 - RNA, 19 nt, Artificial Sequence
  Description of Artificial Sequence: Synthetic oligonucleotide
cccagugcuuccaccugag

SEQ ID NO: 3084257 - RNA, 19 nt, Artificial Sequence
  Description of Artificial Sequence: Synthetic oligonucleotide
cccuccaaguggcuguaug

SEQ ID NO: 3084258 - RNA, 19 nt, Artificial Sequence
  Description of Artificial Sequence: Synthetic oligonucleotide
gcccuuugccauugccaag

SEQ ID NO: 3084259 - RNA, 19 nt, Artificial Sequence
  Description of Artificial Sequence: Synthetic oligonucleotide
cuacccucacagaggugaa

SEQ ID NO: 3084260 - RNA, 19 nt, Artificial Sequence
  Description of Artificial Sequence: Synthetic oligonucleotide
agauagccaggcacaugau

SEQ ID NO: 3084261 - RNA, 19 nt, Artificial Sequence
  Description of Artificial Sequence: Synthetic oligonucleotide
ccucacauuccacaggccu

SEQ ID NO: 3084262 - RNA, 19 nt, Artificial Sequence
  Description of Artificial Sequence: Synthetic oligonucleotide
cacaugauuccgugccacu

SEQ ID NO: 3084263 - RNA, 19 nt, Artificial Sequence
  Description of Artificial Sequence: Synthetic oligonucleotide
ccagugcuuccaccugagg

SEQ ID NO: 3084264 - RNA, 19 nt, Artificial Sequence
  Description of Artificial Sequence: Synthetic oligonucleotide
gagcacuaagacagacagu

SEQ ID NO: 3084265 - RNA, 19 nt, Artificial Sequence
  Description of Artificial Sequence: Synthetic oligonucleotide
cagauccuguuacuacccu

SEQ ID NO: 3084266 - RNA, 19 nt, Artificial Sequence
  Description of Artificial Sequence: Synthetic oligonucleotide
caccccuccaaguggcugu

SEQ ID NO: 3084267 - RNA, 19 nt, Artificial Sequence
  Description of Artificial Sequence: Synthetic oligonucleotide
cccucacauuccacaggcc

SEQ ID NO: 3084268 - RNA, 19 nt, Artificial Sequence
  Description of Artificial Sequence: Synthetic oligonucleotide
gccacucagccccagugcu

SEQ ID NO: 3084269 - RNA, 19 nt, Artificial Sequence
  Description of Artificial Sequence: Synthetic oligonucleotide
caagccccugaaggaugug

SEQ ID NO: 3084270 - RNA, 19 nt, Artificial Sequence
  Description of Artificial Sequence: Synthetic oligonucleotide
gccccugaaggaugugauc

SEQ ID NO: 3084271 - RNA, 19 nt, Artificial Sequence
  Description of Artificial Sequence: Synthetic oligonucleotide
cucagccccagugcuucca

SEQ ID NO: 3084272 - RNA, 19 nt, Artificial Sequence
  Description of Artificial Sequence: Synthetic oligonucleotide
ccuaucaaugcugaucaau

SEQ ID NO: 3084273 - RNA, 19 nt, Artificial Sequence
  Description of Artificial Sequence: Synthetic oligonucleotide
gccccagugcuuccaccug

SEQ ID NO: 3084274 - RNA, 19 nt, Artificial Sequence
  Description of Artificial Sequence: Synthetic oligonucleotide
ggacaagccccugaaggau

SEQ ID NO: 3084275 - RNA, 19 nt, Artificial Sequence
  Description of Artificial Sequence: Synthetic oligonucleotide
ccucacagaggugaagaua

SEQ ID NO: 3084276 - RNA, 19 nt, Artificial Sequence
  Description of Artificial Sequence: Synthetic oligonucleotide
ggcuguaugugcagauccu

SEQ ID NO: 3084277 - RNA, 19 nt, Artificial Sequence
  Description of Artificial Sequence: Synthetic oligonucleotide
cagucgggacaagccccug

SEQ ID NO: 3084278 - RNA, 19 nt, Artificial Sequence
  Description of Artificial Sequence: Synthetic oligonucleotide
ggagaagcccuuugccauu

SEQ ID NO: 3084279 - RNA, 19 nt, Artificial Sequence
  Description of Artificial Sequence: Synthetic oligonucleotide
gccaaggaguagagaaucu

SEQ ID NO: 3084280 - RNA, 19 nt, Artificial Sequence
  Description of Artificial Sequence: Synthetic oligonucleotide
ccccagugcuuccaccuga

SEQ ID NO: 3084281 - RNA, 19 nt, Artificial Sequence
  Description of Artificial Sequence: Synthetic oligonucleotide
accccuccaaguggcugua

SEQ ID NO: 3084282 - RNA, 19 nt, Artificial Sequence
  Description of Artificial Sequence: Synthetic oligonucleotide
ccuuugccauugccaagga

SEQ ID NO: 3084283 - RNA, 19 nt, Artificial Sequence
  Description of Artificial Sequence: Synthetic oligonucleotide
cucaccccuccaaguggcu

SEQ ID NO: 3084284 - RNA, 19 nt, Artificial Sequence
  Description of Artificial Sequence: Synthetic oligonucleotide
gccaggcacaugauuccgu

SEQ ID NO: 3084285 - RNA, 19 nt, Artificial Sequence
  Description of Artificial Sequence: Synthetic oligonucleotide
cagcgaccucaccccucca

SEQ ID NO: 3084286 - RNA, 19 nt, Artificial Sequence
  Description of Artificial Sequence: Synthetic oligonucleotide
cccugaaggaugugaucau

SEQ ID NO: 3084287 - RNA, 19 nt, Artificial Sequence
  Description of Artificial Sequence: Synthetic oligonucleotide
cccucacagaggugaagau

SEQ ID NO: 3084288 - RNA, 19 nt, Artificial Sequence
  Description of Artificial Sequence: Synthetic oligonucleotide
ccugaaggaugugaucauu

SEQ ID NO: 3084289 - RNA, 19 nt, Artificial Sequence
  Description of Artificial Sequence: Synthetic oligonucleotide
cgaccucaccccuccaagu

SEQ ID NO: 3084290 - RNA, 19 nt, Artificial Sequence
  Description of Artificial Sequence: Synthetic oligonucleotide
cacauuccacaggccugau

SEQ ID NO: 3084291 - RNA, 19 nt, Artificial Sequence
  Description of Artificial Sequence: Synthetic oligonucleotide
ccgugccacucagccccag

SEQ ID NO: 3084292 - RNA, 19 nt, Artificial Sequence
  Description of Artificial Sequence: Synthetic oligonucleotide
ccacucagccccagugcuu

SEQ ID NO: 3084293 - RNA, 19 nt, Artificial Sequence
  Description of Artificial Sequence: Synthetic oligonucleotide
cgaaguggagaagcccuuu

SEQ ID NO: 3084294 - RNA, 19 nt, Artificial Sequence
  Description of Artificial Sequence: Synthetic oligonucleotide
cgugccacucagccccagu

SEQ ID NO: 3084295 - RNA, 19 nt, Artificial Sequence
  Description of Artificial Sequence: Synthetic oligonucleotide
ccccuccaaguggcuguau

SEQ ID NO: 3084296 - RNA, 19 nt, Artificial Sequence
  Description of Artificial Sequence: Synthetic oligonucleotide
agucuuuacauucauaggg

SEQ ID NO: 3084297 - RNA, 19 nt, Artificial Sequence
  Description of Artificial Sequence: Synthetic oligonucleotide
uucauauuugcacugaaag

SEQ ID NO: 3084298 - RNA, 19 nt, Artificial Sequence
  Description of Artificial Sequence: Synthetic oligonucleotide
auucuagacauacauaagg

SEQ ID NO: 3084299 - RNA, 19 nt, Artificial Sequence
  Description of Artificial Sequence: Synthetic oligonucleotide
agugaguucauauuugcac

SEQ ID NO: 3084300 - RNA, 19 nt, Artificial Sequence
  Description of Artificial Sequence: Synthetic oligonucleotide
cauauuugcacugaaaggc

SEQ ID NO: 3084301 - RNA, 19 nt, Artificial Sequence
  Description of Artificial Sequence: Synthetic oligonucleotide
ucauauuugcacugaaagg

SEQ ID NO: 3084302 - RNA, 19 nt, Artificial Sequence
  Description of Artificial Sequence: Synthetic oligonucleotide
auacauaaggcuucucacc

SEQ ID NO: 3084303 - RNA, 19 nt, Artificial Sequence
  Description of Artificial Sequence: Synthetic oligonucleotide
auugugucaagcuuuacug

SEQ ID NO: 3084304 - RNA, 19 nt, Artificial Sequence
  Description of Artificial Sequence: Synthetic oligonucleotide
guacccuuuauauucaggg

SEQ ID NO: 3084305 - RNA, 19 nt, Artificial Sequence
  Description of Artificial Sequence: Synthetic oligonucleotide
ucugaugccaguuaaggac

SEQ ID NO: 3084306 - RNA, 19 nt, Artificial Sequence
  Description of Artificial Sequence: Synthetic oligonucleotide
uucuagacauacauaaggc

SEQ ID NO: 3084307 - RNA, 19 nt, Artificial Sequence
  Description of Artificial Sequence: Synthetic oligonucleotide
uuauauucaggguuuguca

SEQ ID NO: 3084308 - RNA, 19 nt, Artificial Sequence
  Description of Artificial Sequence: Synthetic oligonucleotide
uguguuuucagaugucgag

SEQ ID NO: 3084309 - RNA, 19 nt, Artificial Sequence
  Description of Artificial Sequence: Synthetic oligonucleotide
uacuguacccuuuauauuc

SEQ ID NO: 3084310 - RNA, 19 nt, Artificial Sequence
  Description of Artificial Sequence: Synthetic oligonucleotide
uauugugucaagcuuuacu

SEQ ID NO: 3084311 - RNA, 19 nt, Artificial Sequence
  Description of Artificial Sequence: Synthetic oligonucleotide
uuucuugcauucuagacau

SEQ ID NO: 3084312 - RNA, 19 nt, Artificial Sequence
  Description of Artificial Sequence: Synthetic oligonucleotide
guuaaggacggacuuauug

SEQ ID NO: 3084313 - RNA, 19 nt, Artificial Sequence
  Description of Artificial Sequence: Synthetic oligonucleotide
uuaaggacggacuuauugu

SEQ ID NO: 3084314 - RNA, 19 nt, Artificial Sequence
  Description of Artificial Sequence: Synthetic oligonucleotide
auauucaggguuugucacc

SEQ ID NO: 3084315 - RNA, 19 nt, Artificial Sequence
  Description of Artificial Sequence: Synthetic oligonucleotide
ugugugaugucuuugcuuc

SEQ ID NO: 3084316 - RNA, 19 nt, Artificial Sequence
  Description of Artificial Sequence: Synthetic oligonucleotide
uauauucaggguuugucac

SEQ ID NO: 3084317 - RNA, 19 nt, Artificial Sequence
  Description of Artificial Sequence: Synthetic oligonucleotide
ugcauguguuuucagaugu

SEQ ID NO: 3084318 - RNA, 19 nt, Artificial Sequence
  Description of Artificial Sequence: Synthetic oligonucleotide
uuugcuucucaccugugug

SEQ ID NO: 3084319 - RNA, 19 nt, Artificial Sequence
  Description of Artificial Sequence: Synthetic oligonucleotide
uguuuucagaugucgagug

SEQ ID NO: 3084320 - RNA, 19 nt, Artificial Sequence
  Description of Artificial Sequence: Synthetic oligonucleotide
ucuagacauacauaaggcu

SEQ ID NO: 3084321 - RNA, 19 nt, Artificial Sequence
  Description of Artificial Sequence: Synthetic oligonucleotide
uuucauauguguucucuga

SEQ ID NO: 3084322 - RNA, 19 nt, Artificial Sequence
  Description of Artificial Sequence: Synthetic oligonucleotide
uuuucagaugucgagugag

SEQ ID NO: 3084323 - RNA, 19 nt, Artificial Sequence
  Description of Artificial Sequence: Synthetic oligonucleotide
ucucugaugccaguuaagg

SEQ ID NO: 3084324 - RNA, 19 nt, Artificial Sequence
  Description of Artificial Sequence: Synthetic oligonucleotide
cauacauaaggcuucucac

SEQ ID NO: 3084325 - RNA, 19 nt, Artificial Sequence
  Description of Artificial Sequence: Synthetic oligonucleotide
uguacccuuuauauucagg

SEQ ID NO: 3084326 - RNA, 19 nt, Artificial Sequence
  Description of Artificial Sequence: Synthetic oligonucleotide
uugcauucuagacauacau

SEQ ID NO: 3084327 - RNA, 19 nt, Artificial Sequence
  Description of Artificial Sequence: Synthetic oligonucleotide
accugugugaugucuuugc

SEQ ID NO: 3084328 - RNA, 19 nt, Artificial Sequence
  Description of Artificial Sequence: Synthetic oligonucleotide
guguagaaagcuuucuugc

SEQ ID NO: 3084329 - RNA, 19 nt, Artificial Sequence
  Description of Artificial Sequence: Synthetic oligonucleotide
uuuauauucaggguuuguc

SEQ ID NO: 3084330 - RNA, 19 nt, Artificial Sequence
  Description of Artificial Sequence: Synthetic oligonucleotide
agugagaucugacuuggug

SEQ ID NO: 3084331 - RNA, 19 nt, Artificial Sequence
  Description of Artificial Sequence: Synthetic oligonucleotide
gaugucuuugcuucucacc

SEQ ID NO: 3084332 - RNA, 19 nt, Artificial Sequence
  Description of Artificial Sequence: Synthetic oligonucleotide
uagacauacauaaggcuuc

SEQ ID NO: 3084333 - RNA, 19 nt, Artificial Sequence
  Description of Artificial Sequence: Synthetic oligonucleotide
uaaggacggacuuauugug

SEQ ID NO: 3084334 - RNA, 19 nt, Artificial Sequence
  Description of Artificial Sequence: Synthetic oligonucleotide
cugaugccaguuaaggacg

SEQ ID NO: 3084335 - RNA, 19 nt, Artificial Sequence
  Description of Artificial Sequence: Synthetic oligonucleotide
ucauauguguucucugaug

SEQ ID NO: 3084336 - RNA, 19 nt, Artificial Sequence
  Description of Artificial Sequence: Synthetic oligonucleotide
ugaguucauauuugcacug

SEQ ID NO: 3084337 - RNA, 19 nt, Artificial Sequence
  Description of Artificial Sequence: Synthetic oligonucleotide
ucuuuacauucauagggcu

SEQ ID NO: 3084338 - RNA, 19 nt, Artificial Sequence
  Description of Artificial Sequence: Synthetic oligonucleotide
uauguguucucugaugcca

SEQ ID NO: 3084339 - RNA, 19 nt, Artificial Sequence
  Description of Artificial Sequence: Synthetic oligonucleotide
ugucaagcuuuacuguacc

SEQ ID NO: 3084340 - RNA, 19 nt, Artificial Sequence
  Description of Artificial Sequence: Synthetic oligonucleotide
cauguguuuucagaugucg

SEQ ID NO: 3084341 - RNA, 19 nt, Artificial Sequence
  Description of Artificial Sequence: Synthetic oligonucleotide
cuuucuugcauucuagaca

SEQ ID NO: 3084342 - RNA, 19 nt, Artificial Sequence
  Description of Artificial Sequence: Synthetic oligonucleotide
ucgagugaguucauauuug

SEQ ID NO: 3084343 - RNA, 19 nt, Artificial Sequence
  Description of Artificial Sequence: Synthetic oligonucleotide
uucaggguuugucaccugc

SEQ ID NO: 3084344 - RNA, 19 nt, Artificial Sequence
  Description of Artificial Sequence: Synthetic oligonucleotide
ugaguucucugauguacag

SEQ ID NO: 3084345 - RNA, 19 nt, Artificial Sequence
  Description of Artificial Sequence: Synthetic oligonucleotide
uuugucaccugcauguguu

SEQ ID NO: 3084346 - RNA, 19 nt, Artificial Sequence
  Description of Artificial Sequence: Synthetic oligonucleotide
aggacggacuuauuguguc

SEQ ID NO: 3084347 - RNA, 19 nt, Artificial Sequence
  Description of Artificial Sequence: Synthetic oligonucleotide
ucaagcuuuacuguacccu

SEQ ID NO: 3084348 - RNA, 19 nt, Artificial Sequence
  Description of Artificial Sequence: Synthetic oligonucleotide
cauucuagacauacauaag

SEQ ID NO: 3084349 - RNA, 19 nt, Artificial Sequence
  Description of Artificial Sequence: Synthetic oligonucleotide
agugaggugugacuugcag

SEQ ID NO: 3084350 - RNA, 19 nt, Artificial Sequence
  Description of Artificial Sequence: Synthetic oligonucleotide
ugugucaagcuuuacugua

SEQ ID NO: 3084351 - RNA, 19 nt, Artificial Sequence
  Description of Artificial Sequence: Synthetic oligonucleotide
cagucuuuacauucauagg

SEQ ID NO: 3084352 - RNA, 19 nt, Artificial Sequence
  Description of Artificial Sequence: Synthetic oligonucleotide
ugaugccaguuaaggacgg

SEQ ID NO: 3084353 - RNA, 19 nt, Artificial Sequence
  Description of Artificial Sequence: Synthetic oligonucleotide
ucgagugagaucugacuug

SEQ ID NO: 3084354 - RNA, 19 nt, Artificial Sequence
  Description of Artificial Sequence: Synthetic oligonucleotide
uucauauguguucucugau

SEQ ID NO: 3084355 - RNA, 19 nt, Artificial Sequence
  Description of Artificial Sequence: Synthetic oligonucleotide
cacugaaaggcuuucccac

SEQ ID NO: 3084356 - RNA, 19 nt, Artificial Sequence
  Description of Artificial Sequence: Synthetic oligonucleotide
cugacuugguguagaaagc

SEQ ID NO: 3084357 - RNA, 19 nt, Artificial Sequence
  Description of Artificial Sequence: Synthetic oligonucleotide
ugagaucugacuuggugua

SEQ ID NO: 3084358 - RNA, 19 nt, Artificial Sequence
  Description of Artificial Sequence: Synthetic oligonucleotide
gcauucuagacauacauaa

SEQ ID NO: 3084359 - RNA, 19 nt, Artificial Sequence
  Description of Artificial Sequence: Synthetic oligonucleotide
uucucugaugccaguuaag

SEQ ID NO: 3084360 - RNA, 19 nt, Artificial Sequence
  Description of Artificial Sequence: Synthetic oligonucleotide
ucugaugucgagugaguuc

SEQ ID NO: 3084361 - RNA, 19 nt, Artificial Sequence
  Description of Artificial Sequence: Synthetic oligonucleotide
ugucgagugagaucugacu

SEQ ID NO: 3084362 - RNA, 19 nt, Artificial Sequence
  Description of Artificial Sequence: Synthetic oligonucleotide
uauucaggguuugucaccu

SEQ ID NO: 3084363 - RNA, 19 nt, Artificial Sequence
  Description of Artificial Sequence: Synthetic oligonucleotide
uuucagaugucgagugaga

SEQ ID NO: 3084364 - RNA, 19 nt, Artificial Sequence
  Description of Artificial Sequence: Synthetic oligonucleotide
uugugucaagcuuuacugu

SEQ ID NO: 3084365 - RNA, 19 nt, Artificial Sequence
  Description of Artificial Sequence: Synthetic oligonucleotide
ugacuugguguagaaagcu

SEQ ID NO: 3084366 - RNA, 19 nt, Artificial Sequence
  Description of Artificial Sequence: Synthetic oligonucleotide
ugcauucuagacauacaua

SEQ ID NO: 3084367 - RNA, 19 nt, Artificial Sequence
  Description of Artificial Sequence: Synthetic oligonucleotide
cuugguguagaaagcuuuc

SEQ ID NO: 3084368 - RNA, 19 nt, Artificial Sequence
  Description of Artificial Sequence: Synthetic oligonucleotide
uacccuuuauauucagggu

SEQ ID NO: 3084369 - RNA, 19 nt, Artificial Sequence
  Description of Artificial Sequence: Synthetic oligonucleotide
ugccaguuaaggacggacu

SEQ ID NO: 3084370 - RNA, 19 nt, Artificial Sequence
  Description of Artificial Sequence: Synthetic oligonucleotide
ucagaugucgagugagauc

SEQ ID NO: 3084371 - RNA, 19 nt, Artificial Sequence
  Description of Artificial Sequence: Synthetic oligonucleotide
uugcuucucaccuguguga

SEQ ID NO: 3084372 - RNA, 19 nt, Artificial Sequence
  Description of Artificial Sequence: Synthetic oligonucleotide
acugaaaggcuuucccaca

SEQ ID NO: 3084373 - RNA, 19 nt, Artificial Sequence
  Description of Artificial Sequence: Synthetic oligonucleotide
augccaguuaaggacggac

SEQ ID NO: 3084374 - RNA, 19 nt, Artificial Sequence
  Description of Artificial Sequence: Synthetic oligonucleotide
augucgagugaguucauau

SEQ ID NO: 3084375 - RNA, 19 nt, Artificial Sequence
  Description of Artificial Sequence: Synthetic oligonucleotide
ucaggguuugucaccugca

SEQ ID NO: 3084376 - RNA, 19 nt, Artificial Sequence
  Description of Artificial Sequence: Synthetic oligonucleotide
uauuugcacugaaaggcuu

SEQ ID NO: 3084377 - RNA, 19 nt, Artificial Sequence
  Description of Artificial Sequence: Synthetic oligonucleotide
uguucucugaugccaguua

SEQ ID NO: 3084378 - RNA, 19 nt, Artificial Sequence
  Description of Artificial Sequence: Synthetic oligonucleotide
acuuauugugucaagcuuu

SEQ ID NO: 3084379 - RNA, 19 nt, Artificial Sequence
  Description of Artificial Sequence: Synthetic oligonucleotide
ugguguagaaagcuuucuu

SEQ ID NO: 3084380 - RNA, 19 nt, Artificial Sequence
  Description of Artificial Sequence: Synthetic oligonucleotide
auauuugcacugaaaggcu

SEQ ID NO: 3084381 - RNA, 19 nt, Artificial Sequence
  Description of Artificial Sequence: Synthetic oligonucleotide
aguucauauuugcacugaa

SEQ ID NO: 3084382 - RNA, 19 nt, Artificial Sequence
  Description of Artificial Sequence: Synthetic oligonucleotide
uuacuguacccuuuauauu

SEQ ID NO: 3084383 - RNA, 19 nt, Artificial Sequence
  Description of Artificial Sequence: Synthetic oligonucleotide
ugaugucuuugcuucucac

SEQ ID NO: 3084384 - RNA, 19 nt, Artificial Sequence
  Description of Artificial Sequence: Synthetic oligonucleotide
aggguuugucaccugcaug

SEQ ID NO: 3084385 - RNA, 19 nt, Artificial Sequence
  Description of Artificial Sequence: Synthetic oligonucleotide
cuagacauacauaaggcuu

SEQ ID NO: 3084386 - RNA, 19 nt, Artificial Sequence
  Description of Artificial Sequence: Synthetic oligonucleotide
uucagaugucgagugagau

SEQ ID NO: 3084387 - RNA, 19 nt, Artificial Sequence
  Description of Artificial Sequence: Synthetic oligonucleotide
gucaagcuuuacuguaccc

SEQ ID NO: 3084388 - RNA, 19 nt, Artificial Sequence
  Description of Artificial Sequence: Synthetic oligonucleotide
gugagaucugacuuggugu

SEQ ID NO: 3084389 - RNA, 19 nt, Artificial Sequence
  Description of Artificial Sequence: Synthetic oligonucleotide
aggugugacuugcaguaga

SEQ ID NO: 3084390 - RNA, 19 nt, Artificial Sequence
  Description of Artificial Sequence: Synthetic oligonucleotide
ugucgagugaguucauauu

SEQ ID NO: 3084391 - RNA, 19 nt, Artificial Sequence
  Description of Artificial Sequence: Synthetic oligonucleotide
cugcauguguuuucagaug

SEQ ID NO: 3084392 - RNA, 19 nt, Artificial Sequence
  Description of Artificial Sequence: Synthetic oligonucleotide
aaggacggacuuauugugu

SEQ ID NO: 3084393 - RNA, 19 nt, Artificial Sequence
  Description of Artificial Sequence: Synthetic oligonucleotide
gugaguucauauuugcacu

SEQ ID NO: 3084394 - RNA, 19 nt, Artificial Sequence
  Description of Artificial Sequence: Synthetic oligonucleotide
cagaugucgagugagaucu

SEQ ID NO: 3084395 - RNA, 19 nt, Artificial Sequence
  Description of Artificial Sequence: Synthetic oligonucleotide
gcuuucuugcauucuagac

SEQ ID NO: 3084396 - RNA, 19 nt, Artificial Sequence
  Description of Artificial Sequence: Synthetic oligonucleotide
uugguguagaaagcuuucu

SEQ ID NO: 3084397 - RNA, 19 nt, Artificial Sequence
  Description of Artificial Sequence: Synthetic oligonucleotide
ugugaugucuuugcuucuc

SEQ ID NO: 3084398 - RNA, 19 nt, Artificial Sequence
  Description of Artificial Sequence: Synthetic oligonucleotide
cuuauugugucaagcuuua

SEQ ID NO: 3084399 - RNA, 19 nt, Artificial Sequence
  Description of Artificial Sequence: Synthetic oligonucleotide
cuugcauucuagacauaca

SEQ ID NO: 3084400 - RNA, 19 nt, Artificial Sequence
  Description of Artificial Sequence: Synthetic oligonucleotide
augucgagugagaucugac

SEQ ID NO: 3084401 - RNA, 19 nt, Artificial Sequence
  Description of Artificial Sequence: Synthetic oligonucleotide
ucuuugcuucucaccugug

SEQ ID NO: 3084402 - RNA, 19 nt, Artificial Sequence
  Description of Artificial Sequence: Synthetic oligonucleotide
guuuucagaugucgaguga

SEQ ID NO: 3084403 - RNA, 19 nt, Artificial Sequence
  Description of Artificial Sequence: Synthetic oligonucleotide
gaugucgagugagaucuga

SEQ ID NO: 3084404 - RNA, 19 nt, Artificial Sequence
  Description of Artificial Sequence: Synthetic oligonucleotide
agaucugacuugguguaga

SEQ ID NO: 3084405 - RNA, 19 nt, Artificial Sequence
  Description of Artificial Sequence: Synthetic oligonucleotide
cuguacccuuuauauucag

SEQ ID NO: 3084406 - RNA, 19 nt, Artificial Sequence
  Description of Artificial Sequence: Synthetic oligonucleotide
uguguucucugaugccagu

SEQ ID NO: 3084407 - RNA, 19 nt, Artificial Sequence
  Description of Artificial Sequence: Synthetic oligonucleotide
cucugaugccaguuaagga

SEQ ID NO: 3084408 - RNA, 19 nt, Artificial Sequence
  Description of Artificial Sequence: Synthetic oligonucleotide
guucucugaugccaguuaa

SEQ ID NO: 3084409 - RNA, 19 nt, Artificial Sequence
  Description of Artificial Sequence: Synthetic oligonucleotide
acuugguguagaaagcuuu

SEQ ID NO: 3084410 - RNA, 19 nt, Artificial Sequence
  Description of Artificial Sequence: Synthetic oligonucleotide
acggacuuauugugucaag

SEQ ID NO: 3084411 - RNA, 19 nt, Artificial Sequence
  Description of Artificial Sequence: Synthetic oligonucleotide
gagaucugacuugguguag

SEQ ID NO: 3084412 - RNA, 19 nt, Artificial Sequence
  Description of Artificial Sequence: Synthetic oligonucleotide
gagugaguucauauuugca

SEQ ID NO: 3084413 - RNA, 19 nt, Artificial Sequence
  Description of Artificial Sequence: Synthetic oligonucleotide
guagaaagcuuucuugcau

SEQ ID NO: 3084414 - RNA, 19 nt, Artificial Sequence
  Description of Artificial Sequence: Synthetic oligonucleotide
agcuuuacuguacccuuua

SEQ ID NO: 3084415 - RNA, 19 nt, Artificial Sequence
  Description of Artificial Sequence: Synthetic oligonucleotide
gacuuauugugucaagcuu

SEQ ID NO: 3084416 - RNA, 19 nt, Artificial Sequence
  Description of Artificial Sequence: Synthetic oligonucleotide
gaguucauauuugcacuga

SEQ ID NO: 3084417 - RNA, 19 nt, Artificial Sequence
  Description of Artificial Sequence: Synthetic oligonucleotide
auguguucucugaugccag

SEQ ID NO: 3084418 - RNA, 19 nt, Artificial Sequence
  Description of Artificial Sequence: Synthetic oligonucleotide
auguguuuucagaugucga

SEQ ID NO: 3084419 - RNA, 19 nt, Artificial Sequence
  Description of Artificial Sequence: Synthetic oligonucleotide
agacauacauaaggcuucu

SEQ ID NO: 3084420 - RNA, 19 nt, Artificial Sequence
  Description of Artificial Sequence: Synthetic oligonucleotide
acuguacccuuuauauuca

SEQ ID NO: 3084421 - RNA, 19 nt, Artificial Sequence
  Description of Artificial Sequence: Synthetic oligonucleotide
gaucugacuugguguagaa

SEQ ID NO: 3084422 - RNA, 19 nt, Artificial Sequence
  Description of Artificial Sequence: Synthetic oligonucleotide
gugucaagcuuuacuguac

SEQ ID NO: 3084423 - RNA, 19 nt, Artificial Sequence
  Description of Artificial Sequence: Synthetic oligonucleotide
gucgagugaguucauauuu

SEQ ID NO: 3084424 - RNA, 19 nt, Artificial Sequence
  Description of Artificial Sequence: Synthetic oligonucleotide
gucaccugcauguguuuuc

SEQ ID NO: 3084425 - RNA, 19 nt, Artificial Sequence
  Description of Artificial Sequence: Synthetic oligonucleotide
ggguuugucaccugcaugu

SEQ ID NO: 3084426 - RNA, 19 nt, Artificial Sequence
  Description of Artificial Sequence: Synthetic oligonucleotide
uuauugugucaagcuuuac

SEQ ID NO: 3084427 - RNA, 19 nt, Artificial Sequence
  Description of Artificial Sequence: Synthetic oligonucleotide
guucauauuugcacugaaa

SEQ ID NO: 3084428 - RNA, 19 nt, Artificial Sequence
  Description of Artificial Sequence: Synthetic oligonucleotide
cgagugaguucauauuugc

SEQ ID NO: 3084429 - RNA, 19 nt, Artificial Sequence
  Description of Artificial Sequence: Synthetic oligonucleotide
cuucucaccugugugaugu

SEQ ID NO: 3084430 - RNA, 19 nt, Artificial Sequence
  Description of Artificial Sequence: Synthetic oligonucleotide
gacggacuuauugugucaa

SEQ ID NO: 3084431 - RNA, 19 nt, Artificial Sequence
  Description of Artificial Sequence: Synthetic oligonucleotide
gugaugucuuugcuucuca

SEQ ID NO: 3084432 - RNA, 19 nt, Artificial Sequence
  Description of Artificial Sequence: Synthetic oligonucleotide
ggacuuauugugucaagcu

SEQ ID NO: 3084433 - RNA, 19 nt, Artificial Sequence
  Description of Artificial Sequence: Synthetic oligonucleotide
gucgagugagaucugacuu

SEQ ID NO: 3084434 - RNA, 19 nt, Artificial Sequence
  Description of Artificial Sequence: Synthetic oligonucleotide
gucuuugcuucucaccugu

SEQ ID NO: 3084435 - RNA, 19 nt, Artificial Sequence
  Description of Artificial Sequence: Synthetic oligonucleotide
gcacugaaaggcuuuccca

SEQ ID NO: 3084436 - RNA, 19 nt, Artificial Sequence
  Description of Artificial Sequence: Synthetic oligonucleotide
aagcuuuacuguacccuuu

SEQ ID NO: 3084437 - RNA, 19 nt, Artificial Sequence
  Description of Artificial Sequence: Synthetic oligonucleotide
auucaggguuugucaccug

SEQ ID NO: 3084438 - RNA, 19 nt, Artificial Sequence
  Description of Artificial Sequence: Synthetic oligonucleotide
ugucaccugcauguguuuu

SEQ ID NO: 3084439 - RNA, 19 nt, Artificial Sequence
  Description of Artificial Sequence: Synthetic oligonucleotide
gaaagcuuucuugcauucu

SEQ ID NO: 3084440 - RNA, 19 nt, Artificial Sequence
  Description of Artificial Sequence: Synthetic oligonucleotide
guguuuucagaugucgagu

SEQ ID NO: 3084441 - RNA, 19 nt, Artificial Sequence
  Description of Artificial Sequence: Synthetic oligonucleotide
guuugucaccugcaugugu

SEQ ID NO: 3084442 - RNA, 19 nt, Artificial Sequence
  Description of Artificial Sequence: Synthetic oligonucleotide
uugucaccugcauguguuu

SEQ ID NO: 3084443 - RNA, 19 nt, Artificial Sequence
  Description of Artificial Sequence: Synthetic oligonucleotide
caagcuuuacuguacccuu

SEQ ID NO: 3084444 - RNA, 19 nt, Artificial Sequence
  Description of Artificial Sequence: Synthetic oligonucleotide
cuuugcuucucaccugugu

SEQ ID NO: 3084445 - RNA, 19 nt, Artificial Sequence
  Description of Artificial Sequence: Synthetic oligonucleotide
cgagugagaucugacuugg

SEQ ID NO: 3084446 - RNA, 19 nt, Artificial Sequence
  Description of Artificial Sequence: Synthetic oligonucleotide
ugaugucgagugaguucau

SEQ ID NO: 3084447 - RNA, 19 nt, Artificial Sequence
  Description of Artificial Sequence: Synthetic oligonucleotide
gaugucgagugaguucaua

SEQ ID NO: 3084448 - RNA, 19 nt, Artificial Sequence
  Description of Artificial Sequence: Synthetic oligonucleotide
caccugugugaugucuuug

SEQ ID NO: 3084449 - RNA, 19 nt, Artificial Sequence
  Description of Artificial Sequence: Synthetic oligonucleotide
cggacuuauugugucaagc

SEQ ID NO: 3084450 - RNA, 19 nt, Artificial Sequence
  Description of Artificial Sequence: Synthetic oligonucleotide
gaugccaguuaaggacgga

SEQ ID NO: 3084451 - RNA, 19 nt, Artificial Sequence
  Description of Artificial Sequence: Synthetic oligonucleotide
uucuugcauucuagacaua

SEQ ID NO: 3084452 - RNA, 19 nt, Artificial Sequence
  Description of Artificial Sequence: Synthetic oligonucleotide
uucucaccugugugauguc

SEQ ID NO: 3084453 - RNA, 19 nt, Artificial Sequence
  Description of Artificial Sequence: Synthetic oligonucleotide
ggacggacuuauuguguca

SEQ ID NO: 3084454 - RNA, 19 nt, Artificial Sequence
  Description of Artificial Sequence: Synthetic oligonucleotide
cuuuauauucaggguuugu

SEQ ID NO: 3084455 - RNA, 19 nt, Artificial Sequence
  Description of Artificial Sequence: Synthetic oligonucleotide
gguuugucaccugcaugug

SEQ ID NO: 3084456 - RNA, 19 nt, Artificial Sequence
  Description of Artificial Sequence: Synthetic oligonucleotide
ccuuuauauucaggguuug

SEQ ID NO: 3084457 - RNA, 19 nt, Artificial Sequence
  Description of Artificial Sequence: Synthetic oligonucleotide
caguuaaggacggacuuau

SEQ ID NO: 3084458 - RNA, 19 nt, Artificial Sequence
  Description of Artificial Sequence: Synthetic oligonucleotide
cugugugaugucuuugcuu

SEQ ID NO: 3084459 - RNA, 19 nt, Artificial Sequence
  Description of Artificial Sequence: Synthetic oligonucleotide
ggugugacuugcaguagaa

SEQ ID NO: 3084460 - RNA, 19 nt, Artificial Sequence
  Description of Artificial Sequence: Synthetic oligonucleotide
ccugcauguguuuucagau

SEQ ID NO: 3084461 - RNA, 19 nt, Artificial Sequence
  Description of Artificial Sequence: Synthetic oligonucleotide
gacuugguguagaaagcuu

SEQ ID NO: 3084462 - RNA, 19 nt, Artificial Sequence
  Description of Artificial Sequence: Synthetic oligonucleotide
agaugucgagugagaucug

SEQ ID NO: 3084463 - RNA, 19 nt, Artificial Sequence
  Description of Artificial Sequence: Synthetic oligonucleotide
guguucucugaugucgagu

SEQ ID NO: 3084464 - RNA, 19 nt, Artificial Sequence
  Description of Artificial Sequence: Synthetic oligonucleotide
gugugaugucuuugcuucu

SEQ ID NO: 3084465 - RNA, 19 nt, Artificial Sequence
  Description of Artificial Sequence: Synthetic oligonucleotide
aguuaaggacggacuuauu

SEQ ID NO: 3084466 - RNA, 19 nt, Artificial Sequence
  Description of Artificial Sequence: Synthetic oligonucleotide
gcauguguuuucagauguc

SEQ ID NO: 3084467 - RNA, 19 nt, Artificial Sequence
  Description of Artificial Sequence: Synthetic oligonucleotide
gccaguuaaggacggacuu

SEQ ID NO: 3084468 - RNA, 19 nt, Artificial Sequence
  Description of Artificial Sequence: Synthetic oligonucleotide
caggguuugucaccugcau

SEQ ID NO: 3084469 - RNA, 19 nt, Artificial Sequence
  Description of Artificial Sequence: Synthetic oligonucleotide
guguucucugaugccaguu

SEQ ID NO: 3084470 - RNA, 19 nt, Artificial Sequence
  Description of Artificial Sequence: Synthetic oligonucleotide
gagugagaucugacuuggu

SEQ ID NO: 3084471 - RNA, 19 nt, Artificial Sequence
  Description of Artificial Sequence: Synthetic oligonucleotide
gcuuuacuguacccuuuau

SEQ ID NO: 3084472 - RNA, 19 nt, Artificial Sequence
  Description of Artificial Sequence: Synthetic oligonucleotide
ccaguuaaggacggacuua

SEQ ID NO: 3084473 - RNA, 19 nt, Artificial Sequence
  Description of Artificial Sequence: Synthetic oligonucleotide
ccugugugaugucuuugcu

SEQ ID NO: 3084474 - RNA, 19 nt, Artificial Sequence
  Description of Artificial Sequence: Synthetic oligonucleotide
ccacagucuuuacauucau

SEQ ID NO: 3084475 - RNA, 19 nt, Artificial Sequence
  Description of Artificial Sequence: Synthetic oligonucleotide
ucuaagaucaucaagaagu

SEQ ID NO: 3084476 - RNA, 19 nt, Artificial Sequence
  Description of Artificial Sequence: Synthetic oligonucleotide
auauuugaaacuaaaaucc

SEQ ID NO: 3084477 - RNA, 19 nt, Artificial Sequence
  Description of Artificial Sequence: Synthetic oligonucleotide
aacucuuuccaguucaugg

SEQ ID NO: 3084478 - RNA, 19 nt, Artificial Sequence
  Description of Artificial Sequence: Synthetic oligonucleotide
uuugaaacuaaaauccugc

SEQ ID NO: 3084479 - RNA, 19 nt, Artificial Sequence
  Description of Artificial Sequence: Synthetic oligonucleotide
cuuagcuucagccacaucc

SEQ ID NO: 3084480 - RNA, 19 nt, Artificial Sequence
  Description of Artificial Sequence: Synthetic oligonucleotide
cauauuugaaacuaaaauc

SEQ ID NO: 3084481 - RNA, 19 nt, Artificial Sequence
  Description of Artificial Sequence: Synthetic oligonucleotide
aaauucaguguccagaggu

SEQ ID NO: 3084482 - RNA, 19 nt, Artificial Sequence
  Description of Artificial Sequence: Synthetic oligonucleotide
augggaauccuuuucaugg

SEQ ID NO: 3084483 - RNA, 19 nt, Artificial Sequence
  Description of Artificial Sequence: Synthetic oligonucleotide
ugaaacuaaaauccugcag

SEQ ID NO: 3084484 - RNA, 19 nt, Artificial Sequence
  Description of Artificial Sequence: Synthetic oligonucleotide
uugaguagcauccauauuu

SEQ ID NO: 3084485 - RNA, 19 nt, Artificial Sequence
  Description of Artificial Sequence: Synthetic oligonucleotide
acuaaaauccugcaguuca

SEQ ID NO: 3084486 - RNA, 19 nt, Artificial Sequence
  Description of Artificial Sequence: Synthetic oligonucleotide
uauguagcugugcagcacg

SEQ ID NO: 3084487 - RNA, 19 nt, Artificial Sequence
  Description of Artificial Sequence: Synthetic oligonucleotide
acggaagggcacuagaccc

SEQ ID NO: 3084488 - RNA, 19 nt, Artificial Sequence
  Description of Artificial Sequence: Synthetic oligonucleotide
aagaucaucaagaagucca

SEQ ID NO: 3084489 - RNA, 19 nt, Artificial Sequence
  Description of Artificial Sequence: Synthetic oligonucleotide
ugagucuaagaucaucaag

SEQ ID NO: 3084490 - RNA, 19 nt, Artificial Sequence
  Description of Artificial Sequence: Synthetic oligonucleotide
acucuuuccaguucauggc

SEQ ID NO: 3084491 - RNA, 19 nt, Artificial Sequence
  Description of Artificial Sequence: Synthetic oligonucleotide
uucagccacauccacaaag

SEQ ID NO: 3084492 - RNA, 19 nt, Artificial Sequence
  Description of Artificial Sequence: Synthetic oligonucleotide
gaaacuaaaauccugcagu

SEQ ID NO: 3084493 - RNA, 19 nt, Artificial Sequence
  Description of Artificial Sequence: Synthetic oligonucleotide
aaugagucuaagaucauca

SEQ ID NO: 3084494 - RNA, 19 nt, Artificial Sequence
  Description of Artificial Sequence: Synthetic oligonucleotide
aauccugcaguucaggaau

SEQ ID NO: 3084495 - RNA, 19 nt, Artificial Sequence
  Description of Artificial Sequence: Synthetic oligonucleotide
aaugggaauccuuuucaug

SEQ ID NO: 3084496 - RNA, 19 nt, Artificial Sequence
  Description of Artificial Sequence: Synthetic oligonucleotide
guucaggaaucuuagcugg

SEQ ID NO: 3084497 - RNA, 19 nt, Artificial Sequence
  Description of Artificial Sequence: Synthetic oligonucleotide
uagucacucgcguaggugg

SEQ ID NO: 3084498 - RNA, 19 nt, Artificial Sequence
  Description of Artificial Sequence: Synthetic oligonucleotide
cuuuucaugguccucuuag

SEQ ID NO: 3084499 - RNA, 19 nt, Artificial Sequence
  Description of Artificial Sequence: Synthetic oligonucleotide
ugcaguucaggaaucuuag

SEQ ID NO: 3084500 - RNA, 19 nt, Artificial Sequence
  Description of Artificial Sequence: Synthetic oligonucleotide
aaaauccugcaguucagga

SEQ ID NO: 3084501 - RNA, 19 nt, Artificial Sequence
  Description of Artificial Sequence: Synthetic oligonucleotide
aguucaggaaucuuagcug

SEQ ID NO: 3084502 - RNA, 19 nt, Artificial Sequence
  Description of Artificial Sequence: Synthetic oligonucleotide
aaucuuagcuggaacuugg

SEQ ID NO: 3084503 - RNA, 19 nt, Artificial Sequence
  Description of Artificial Sequence: Synthetic oligonucleotide
aguaacucuuuccaguuca

SEQ ID NO: 3084504 - RNA, 19 nt, Artificial Sequence
  Description of Artificial Sequence: Synthetic oligonucleotide
ugaguagcauccauauuug

SEQ ID NO: 3084505 - RNA, 19 nt, Artificial Sequence
  Description of Artificial Sequence: Synthetic oligonucleotide
uggucugcuucuuugugcg

SEQ ID NO: 3084506 - RNA, 19 nt, Artificial Sequence
  Description of Artificial Sequence: Synthetic oligonucleotide
uuucaugguccucuuagcu

SEQ ID NO: 3084507 - RNA, 19 nt, Artificial Sequence
  Description of Artificial Sequence: Synthetic oligonucleotide
aagaaguccaggcaggcuu

SEQ ID NO: 3084508 - RNA, 19 nt, Artificial Sequence
  Description of Artificial Sequence: Synthetic oligonucleotide
uccauauuugaaacuaaaa

SEQ ID NO: 3084509 - RNA, 19 nt, Artificial Sequence
  Description of Artificial Sequence: Synthetic oligonucleotide
aaacuaaaauccugcaguu

SEQ ID NO: 3084510 - RNA, 19 nt, Artificial Sequence
  Description of Artificial Sequence: Synthetic oligonucleotide
aaguaacucuuuccaguuc

SEQ ID NO: 3084511 - RNA, 19 nt, Artificial Sequence
  Description of Artificial Sequence: Synthetic oligonucleotide
uccaguucauggcaauggg

SEQ ID NO: 3084512 - RNA, 19 nt, Artificial Sequence
  Description of Artificial Sequence: Synthetic oligonucleotide
aacaggcagacuugaguag

SEQ ID NO: 3084513 - RNA, 19 nt, Artificial Sequence
  Description of Artificial Sequence: Synthetic oligonucleotide
uuagcuucagccacaucca

SEQ ID NO: 3084514 - RNA, 19 nt, Artificial Sequence
  Description of Artificial Sequence: Synthetic oligonucleotide
aacuaaaauccugcaguuc

SEQ ID NO: 3084515 - RNA, 19 nt, Artificial Sequence
  Description of Artificial Sequence: Synthetic oligonucleotide
aaauccugcaguucaggaa

SEQ ID NO: 3084516 - RNA, 19 nt, Artificial Sequence
  Description of Artificial Sequence: Synthetic oligonucleotide
uuucccguagucacucgcg

SEQ ID NO: 3084517 - RNA, 19 nt, Artificial Sequence
  Description of Artificial Sequence: Synthetic oligonucleotide
agccacauccacaaagucc

SEQ ID NO: 3084518 - RNA, 19 nt, Artificial Sequence
  Description of Artificial Sequence: Synthetic oligonucleotide
uugguaauggugccgaaau

SEQ ID NO: 3084519 - RNA, 19 nt, Artificial Sequence
  Description of Artificial Sequence: Synthetic oligonucleotide
uugaaacuaaaauccugca

SEQ ID NO: 3084520 - RNA, 19 nt, Artificial Sequence
  Description of Artificial Sequence: Synthetic oligonucleotide
aggaaucuuagcuggaacu

SEQ ID NO: 3084521 - RNA, 19 nt, Artificial Sequence
  Description of Artificial Sequence: Synthetic oligonucleotide
uaaaauccugcaguucagg

SEQ ID NO: 3084522 - RNA, 19 nt, Artificial Sequence
  Description of Artificial Sequence: Synthetic oligonucleotide
gaaauucaguguccagagg

SEQ ID NO: 3084523 - RNA, 19 nt, Artificial Sequence
  Description of Artificial Sequence: Synthetic oligonucleotide
aauucaguguccagagguc

SEQ ID NO: 3084524 - RNA, 19 nt, Artificial Sequence
  Description of Artificial Sequence: Synthetic oligonucleotide
aagggcacuagacccuggg

SEQ ID NO: 3084525 - RNA, 19 nt, Artificial Sequence
  Description of Artificial Sequence: Synthetic oligonucleotide
ucaugguccucuuagcuuc

SEQ ID NO: 3084526 - RNA, 19 nt, Artificial Sequence
  Description of Artificial Sequence: Synthetic oligonucleotide
uaauggugccgaaauucag

SEQ ID NO: 3084527 - RNA, 19 nt, Artificial Sequence
  Description of Artificial Sequence: Synthetic oligonucleotide
uccucuuagcuucagccac

SEQ ID NO: 3084528 - RNA, 19 nt, Artificial Sequence
  Description of Artificial Sequence: Synthetic oligonucleotide
aguccaggcaggcuuuccc

SEQ ID NO: 3084529 - RNA, 19 nt, Artificial Sequence
  Description of Artificial Sequence: Synthetic oligonucleotide
cuuagcuggaacuugguaa

SEQ ID NO: 3084530 - RNA, 19 nt, Artificial Sequence
  Description of Artificial Sequence: Synthetic oligonucleotide
acuugaguagcauccauau

SEQ ID NO: 3084531 - RNA, 19 nt, Artificial Sequence
  Description of Artificial Sequence: Synthetic oligonucleotide
uucaguguccagaggucgg

SEQ ID NO: 3084532 - RNA, 19 nt, Artificial Sequence
  Description of Artificial Sequence: Synthetic oligonucleotide
agcugugcagcacggaagg

SEQ ID NO: 3084533 - RNA, 19 nt, Artificial Sequence
  Description of Artificial Sequence: Synthetic oligonucleotide
acaggcagacuugaguagc

SEQ ID NO: 3084534 - RNA, 19 nt, Artificial Sequence
  Description of Artificial Sequence: Synthetic oligonucleotide
auuugaaacuaaaauccug

SEQ ID NO: 3084535 - RNA, 19 nt, Artificial Sequence
  Description of Artificial Sequence: Synthetic oligonucleotide
uuuucaugguccucuuagc

SEQ ID NO: 3084536 - RNA, 19 nt, Artificial Sequence
  Description of Artificial Sequence: Synthetic oligonucleotide
uuccguauguagcugugca

SEQ ID NO: 3084537 - RNA, 19 nt, Artificial Sequence
  Description of Artificial Sequence: Synthetic oligonucleotide
cuaagaucaucaagaaguc

SEQ ID NO: 3084538 - RNA, 19 nt, Artificial Sequence
  Description of Artificial Sequence: Synthetic oligonucleotide
uagcauccauauuugaaac

SEQ ID NO: 3084539 - RNA, 19 nt, Artificial Sequence
  Description of Artificial Sequence: Synthetic oligonucleotide
guagcauccauauuugaaa

SEQ ID NO: 3084540 - RNA, 19 nt, Artificial Sequence
  Description of Artificial Sequence: Synthetic oligonucleotide
uccugguuccguauguagc

SEQ ID NO: 3084541 - RNA, 19 nt, Artificial Sequence
  Description of Artificial Sequence: Synthetic oligonucleotide
cuaaaauccugcaguucag

SEQ ID NO: 3084542 - RNA, 19 nt, Artificial Sequence
  Description of Artificial Sequence: Synthetic oligonucleotide
gucuaagaucaucaagaag

SEQ ID NO: 3084543 - RNA, 19 nt, Artificial Sequence
  Description of Artificial Sequence: Synthetic oligonucleotide
auucaguguccagaggucg

SEQ ID NO: 3084544 - RNA, 19 nt, Artificial Sequence
  Description of Artificial Sequence: Synthetic oligonucleotide
aauggugccgaaauucagu

SEQ ID NO: 3084545 - RNA, 19 nt, Artificial Sequence
  Description of Artificial Sequence: Synthetic oligonucleotide
auggugccgaaauucagug

SEQ ID NO: 3084546 - RNA, 19 nt, Artificial Sequence
  Description of Artificial Sequence: Synthetic oligonucleotide
gacccugggaagcaacagg

SEQ ID NO: 3084547 - RNA, 19 nt, Artificial Sequence
  Description of Artificial Sequence: Synthetic oligonucleotide
uaagaucaucaagaagucc

SEQ ID NO: 3084548 - RNA, 19 nt, Artificial Sequence
  Description of Artificial Sequence: Synthetic oligonucleotide
aacuugguaauggugccga

SEQ ID NO: 3084549 - RNA, 19 nt, Artificial Sequence
  Description of Artificial Sequence: Synthetic oligonucleotide
acccugggaagcaacaggc

SEQ ID NO: 3084550 - RNA, 19 nt, Artificial Sequence
  Description of Artificial Sequence: Synthetic oligonucleotide
acauccacaaagucccucu

SEQ ID NO: 3084551 - RNA, 19 nt, Artificial Sequence
  Description of Artificial Sequence: Synthetic oligonucleotide
uagcugugcagcacggaag

SEQ ID NO: 3084552 - RNA, 19 nt, Artificial Sequence
  Description of Artificial Sequence: Synthetic oligonucleotide
gaaucuuagcuggaacuug

SEQ ID NO: 3084553 - RNA, 19 nt, Artificial Sequence
  Description of Artificial Sequence: Synthetic oligonucleotide
cuucuuugugcgcuccugg

SEQ ID NO: 3084554 - RNA, 19 nt, Artificial Sequence
  Description of Artificial Sequence: Synthetic oligonucleotide
gguccucuuagcuucagcc

SEQ ID NO: 3084555 - RNA, 19 nt, Artificial Sequence
  Description of Artificial Sequence: Synthetic oligonucleotide
agucuaagaucaucaagaa

SEQ ID NO: 3084556 - RNA, 19 nt, Artificial Sequence
  Description of Artificial Sequence: Synthetic oligonucleotide
cuuugugcgcuccugguuc

SEQ ID NO: 3084557 - RNA, 19 nt, Artificial Sequence
  Description of Artificial Sequence: Synthetic oligonucleotide
aauccuuuucaugguccuc

SEQ ID NO: 3084558 - RNA, 19 nt, Artificial Sequence
  Description of Artificial Sequence: Synthetic oligonucleotide
agcuggaacuugguaaugg

SEQ ID NO: 3084559 - RNA, 19 nt, Artificial Sequence
  Description of Artificial Sequence: Synthetic oligonucleotide
uccguauguagcugugcag

SEQ ID NO: 3084560 - RNA, 19 nt, Artificial Sequence
  Description of Artificial Sequence: Synthetic oligonucleotide
aucaagaaguccaggcagg

SEQ ID NO: 3084561 - RNA, 19 nt, Artificial Sequence
  Description of Artificial Sequence: Synthetic oligonucleotide
cacggaagggcacuagacc

SEQ ID NO: 3084562 - RNA, 19 nt, Artificial Sequence
  Description of Artificial Sequence: Synthetic oligonucleotide
gaagcaacaggcagacuug

SEQ ID NO: 3084563 - RNA, 19 nt, Artificial Sequence
  Description of Artificial Sequence: Synthetic oligonucleotide
cuggaacuugguaauggug

SEQ ID NO: 3084564 - RNA, 19 nt, Artificial Sequence
  Description of Artificial Sequence: Synthetic oligonucleotide
gaacuugguaauggugccg

SEQ ID NO: 3084565 - RNA, 19 nt, Artificial Sequence
  Description of Artificial Sequence: Synthetic oligonucleotide
agcauccauauuugaaacu

SEQ ID NO: 3084566 - RNA, 19 nt, Artificial Sequence
  Description of Artificial Sequence: Synthetic oligonucleotide
ucuuagcuggaacuuggua

SEQ ID NO: 3084567 - RNA, 19 nt, Artificial Sequence
  Description of Artificial Sequence: Synthetic oligonucleotide
ggugccgaaauucaguguc

SEQ ID NO: 3084568 - RNA, 19 nt, Artificial Sequence
  Description of Artificial Sequence: Synthetic oligonucleotide
ucaagaaguccaggcaggc

SEQ ID NO: 3084569 - RNA, 19 nt, Artificial Sequence
  Description of Artificial Sequence: Synthetic oligonucleotide
caguucauggcaaugggaa

SEQ ID NO: 3084570 - RNA, 19 nt, Artificial Sequence
  Description of Artificial Sequence: Synthetic oligonucleotide
gguaauggugccgaaauuc

SEQ ID NO: 3084571 - RNA, 19 nt, Artificial Sequence
  Description of Artificial Sequence: Synthetic oligonucleotide
uucaugguccucuuagcuu

SEQ ID NO: 3084572 - RNA, 19 nt, Artificial Sequence
  Description of Artificial Sequence: Synthetic oligonucleotide
guggucugcuucuuugugc

SEQ ID NO: 3084573 - RNA, 19 nt, Artificial Sequence
  Description of Artificial Sequence: Synthetic oligonucleotide
aguagcauccauauuugaa

SEQ ID NO: 3084574 - RNA, 19 nt, Artificial Sequence
  Description of Artificial Sequence: Synthetic oligonucleotide
gcagacuugaguagcaucc

SEQ ID NO: 3084575 - RNA, 19 nt, Artificial Sequence
  Description of Artificial Sequence: Synthetic oligonucleotide
uucaggaaucuuagcugga

SEQ ID NO: 3084576 - RNA, 19 nt, Artificial Sequence
  Description of Artificial Sequence: Synthetic oligonucleotide
cuuucccguagucacucgc

SEQ ID NO: 3084577 - RNA, 19 nt, Artificial Sequence
  Description of Artificial Sequence: Synthetic oligonucleotide
uagacccugggaagcaaca

SEQ ID NO: 3084578 - RNA, 19 nt, Artificial Sequence
  Description of Artificial Sequence: Synthetic oligonucleotide
agaucaucaagaaguccag

SEQ ID NO: 3084579 - RNA, 19 nt, Artificial Sequence
  Description of Artificial Sequence: Synthetic oligonucleotide
cagaggucggggaaguaac

SEQ ID NO: 3084580 - RNA, 19 nt, Artificial Sequence
  Description of Artificial Sequence: Synthetic oligonucleotide
guucauggcaaugggaauc

SEQ ID NO: 3084581 - RNA, 19 nt, Artificial Sequence
  Description of Artificial Sequence: Synthetic oligonucleotide
uuugugcgcuccugguucc

SEQ ID NO: 3084582 - RNA, 19 nt, Artificial Sequence
  Description of Artificial Sequence: Synthetic oligonucleotide
ggaacuugguaauggugcc

SEQ ID NO: 3084583 - RNA, 19 nt, Artificial Sequence
  Description of Artificial Sequence: Synthetic oligonucleotide
uuuccaguucauggcaaug

SEQ ID NO: 3084584 - RNA, 19 nt, Artificial Sequence
  Description of Artificial Sequence: Synthetic oligonucleotide
aggucggggaaguaacucu

SEQ ID NO: 3084585 - RNA, 19 nt, Artificial Sequence
  Description of Artificial Sequence: Synthetic oligonucleotide
uucuuugugcgcuccuggu

SEQ ID NO: 3084586 - RNA, 19 nt, Artificial Sequence
  Description of Artificial Sequence: Synthetic oligonucleotide
ugggaauccuuuucauggu

SEQ ID NO: 3084587 - RNA, 19 nt, Artificial Sequence
  Description of Artificial Sequence: Synthetic oligonucleotide
guccaggcaggcuuucccg

SEQ ID NO: 3084588 - RNA, 19 nt, Artificial Sequence
  Description of Artificial Sequence: Synthetic oligonucleotide
ugggaagcaacaggcagac

SEQ ID NO: 3084589 - RNA, 19 nt, Artificial Sequence
  Description of Artificial Sequence: Synthetic oligonucleotide
caacaggcagacuugagua

SEQ ID NO: 3084590 - RNA, 19 nt, Artificial Sequence
  Description of Artificial Sequence: Synthetic oligonucleotide
guaauggugccgaaauuca

SEQ ID NO: 3084591 - RNA, 19 nt, Artificial Sequence
  Description of Artificial Sequence: Synthetic oligonucleotide
cuccugguuccguauguag

SEQ ID NO: 3084592 - RNA, 19 nt, Artificial Sequence
  Description of Artificial Sequence: Synthetic oligonucleotide
aguucauggcaaugggaau

SEQ ID NO: 3084593 - RNA, 19 nt, Artificial Sequence
  Description of Artificial Sequence: Synthetic oligonucleotide
ucggggaaguaacucuuuc

SEQ ID NO: 3084594 - RNA, 19 nt, Artificial Sequence
  Description of Artificial Sequence: Synthetic oligonucleotide
augagucuaagaucaucaa

SEQ ID NO: 3084595 - RNA, 19 nt, Artificial Sequence
  Description of Artificial Sequence: Synthetic oligonucleotide
gggaaguaacucuuuccag

SEQ ID NO: 3084596 - RNA, 19 nt, Artificial Sequence
  Description of Artificial Sequence: Synthetic oligonucleotide
uaacucuuuccaguucaug

SEQ ID NO: 3084597 - RNA, 19 nt, Artificial Sequence
  Description of Artificial Sequence: Synthetic oligonucleotide
ggggaaguaacucuuucca

SEQ ID NO: 3084598 - RNA, 19 nt, Artificial Sequence
  Description of Artificial Sequence: Synthetic oligonucleotide
ggcacuagacccugggaag

SEQ ID NO: 3084599 - RNA, 19 nt, Artificial Sequence
  Description of Artificial Sequence: Synthetic oligonucleotide
caggaaucuuagcuggaac

SEQ ID NO: 3084600 - RNA, 19 nt, Artificial Sequence
  Description of Artificial Sequence: Synthetic oligonucleotide
ugguuccguauguagcugu

SEQ ID NO: 3084601 - RNA, 19 nt, Artificial Sequence
  Description of Artificial Sequence: Synthetic oligonucleotide
cugugcagcacggaagggc

SEQ ID NO: 3084602 - RNA, 19 nt, Artificial Sequence
  Description of Artificial Sequence: Synthetic oligonucleotide
ucaggaaucuuagcuggaa

SEQ ID NO: 3084603 - RNA, 19 nt, Artificial Sequence
  Description of Artificial Sequence: Synthetic oligonucleotide
ucuuugugcgcuccugguu

SEQ ID NO: 3084604 - RNA, 19 nt, Artificial Sequence
  Description of Artificial Sequence: Synthetic oligonucleotide
caguucaggaaucuuagcu

SEQ ID NO: 3084605 - RNA, 19 nt, Artificial Sequence
  Description of Artificial Sequence: Synthetic oligonucleotide
cuagacccugggaagcaac

SEQ ID NO: 3084606 - RNA, 19 nt, Artificial Sequence
  Description of Artificial Sequence: Synthetic oligonucleotide
gaaguaacucuuuccaguu

SEQ ID NO: 3084607 - RNA, 19 nt, Artificial Sequence
  Description of Artificial Sequence: Synthetic oligonucleotide
uucccguagucacucgcgu

SEQ ID NO: 3084608 - RNA, 19 nt, Artificial Sequence
  Description of Artificial Sequence: Synthetic oligonucleotide
aagcaacaggcagacuuga

SEQ ID NO: 3084609 - RNA, 19 nt, Artificial Sequence
  Description of Artificial Sequence: Synthetic oligonucleotide
ggaauccuuuucauggucc

SEQ ID NO: 3084610 - RNA, 19 nt, Artificial Sequence
  Description of Artificial Sequence: Synthetic oligonucleotide
ggaaguaacucuuuccagu

SEQ ID NO: 3084611 - RNA, 19 nt, Artificial Sequence
  Description of Artificial Sequence: Synthetic oligonucleotide
cucuuuccaguucauggca

SEQ ID NO: 3084612 - RNA, 19 nt, Artificial Sequence
  Description of Artificial Sequence: Synthetic oligonucleotide
gaguagcauccauauuuga

SEQ ID NO: 3084613 - RNA, 19 nt, Artificial Sequence
  Description of Artificial Sequence: Synthetic oligonucleotide
ugguccucuuagcuucagc

SEQ ID NO: 3084614 - RNA, 19 nt, Artificial Sequence
  Description of Artificial Sequence: Synthetic oligonucleotide
agcacggaagggcacuaga

SEQ ID NO: 3084615 - RNA, 19 nt, Artificial Sequence
  Description of Artificial Sequence: Synthetic oligonucleotide
gcaaugggaauccuuuuca

SEQ ID NO: 3084616 - RNA, 19 nt, Artificial Sequence
  Description of Artificial Sequence: Synthetic oligonucleotide
auccauauuugaaacuaaa

SEQ ID NO: 3084617 - RNA, 19 nt, Artificial Sequence
  Description of Artificial Sequence: Synthetic oligonucleotide
ugccgaaauucagugucca

SEQ ID NO: 3084618 - RNA, 19 nt, Artificial Sequence
  Description of Artificial Sequence: Synthetic oligonucleotide
agacuugaguagcauccau

SEQ ID NO: 3084619 - RNA, 19 nt, Artificial Sequence
  Description of Artificial Sequence: Synthetic oligonucleotide
gaauccuuuucaugguccu

SEQ ID NO: 3084620 - RNA, 19 nt, Artificial Sequence
  Description of Artificial Sequence: Synthetic oligonucleotide
ggaagcaacaggcagacuu

SEQ ID NO: 3084621 - RNA, 19 nt, Artificial Sequence
  Description of Artificial Sequence: Synthetic oligonucleotide
acucgcguagguggucugc

SEQ ID NO: 3084622 - RNA, 19 nt, Artificial Sequence
  Description of Artificial Sequence: Synthetic oligonucleotide
guagucacucgcguaggug

SEQ ID NO: 3084623 - RNA, 19 nt, Artificial Sequence
  Description of Artificial Sequence: Synthetic oligonucleotide
guccucuuagcuucagcca

SEQ ID NO: 3084624 - RNA, 19 nt, Artificial Sequence
  Description of Artificial Sequence: Synthetic oligonucleotide
ugguaauggugccgaaauu

SEQ ID NO: 3084625 - RNA, 19 nt, Artificial Sequence
  Description of Artificial Sequence: Synthetic oligonucleotide
uccaggcaggcuuucccgu

SEQ ID NO: 3084626 - RNA, 19 nt, Artificial Sequence
  Description of Artificial Sequence: Synthetic oligonucleotide
ucugcuucuuugugcgcuc

SEQ ID NO: 3084627 - RNA, 19 nt, Artificial Sequence
  Description of Artificial Sequence: Synthetic oligonucleotide
ggcaaugggaauccuuuuc

SEQ ID NO: 3084628 - RNA, 19 nt, Artificial Sequence
  Description of Artificial Sequence: Synthetic oligonucleotide
agguggucugcuucuuugu

SEQ ID NO: 3084629 - RNA, 19 nt, Artificial Sequence
  Description of Artificial Sequence: Synthetic oligonucleotide
uggugccgaaauucagugu

SEQ ID NO: 3084630 - RNA, 19 nt, Artificial Sequence
  Description of Artificial Sequence: Synthetic oligonucleotide
ccauauuugaaacuaaaau

SEQ ID NO: 3084631 - RNA, 19 nt, Artificial Sequence
  Description of Artificial Sequence: Synthetic oligonucleotide
gcuucagccacauccacaa

SEQ ID NO: 3084632 - RNA, 19 nt, Artificial Sequence
  Description of Artificial Sequence: Synthetic oligonucleotide
cauccauauuugaaacuaa

SEQ ID NO: 3084633 - RNA, 19 nt, Artificial Sequence
  Description of Artificial Sequence: Synthetic oligonucleotide
agacccugggaagcaacag

SEQ ID NO: 3084634 - RNA, 19 nt, Artificial Sequence
  Description of Artificial Sequence: Synthetic oligonucleotide
ugcuucuuugugcgcuccu

SEQ ID NO: 3084635 - RNA, 19 nt, Artificial Sequence
  Description of Artificial Sequence: Synthetic oligonucleotide
gguggucugcuucuuugug

SEQ ID NO: 3084636 - RNA, 19 nt, Artificial Sequence
  Description of Artificial Sequence: Synthetic oligonucleotide
guauguagcugugcagcac

SEQ ID NO: 3084637 - RNA, 19 nt, Artificial Sequence
  Description of Artificial Sequence: Synthetic oligonucleotide
gaggucggggaaguaacuc

SEQ ID NO: 3084638 - RNA, 19 nt, Artificial Sequence
  Description of Artificial Sequence: Synthetic oligonucleotide
uguagcugugcagcacgga

SEQ ID NO: 3084639 - RNA, 19 nt, Artificial Sequence
  Description of Artificial Sequence: Synthetic oligonucleotide
ucacucgcguagguggucu

SEQ ID NO: 3084640 - RNA, 19 nt, Artificial Sequence
  Description of Artificial Sequence: Synthetic oligonucleotide
ccguauguagcugugcagc

SEQ ID NO: 3084641 - RNA, 19 nt, Artificial Sequence
  Description of Artificial Sequence: Synthetic oligonucleotide
ugcagcacggaagggcacu

SEQ ID NO: 3084642 - RNA, 19 nt, Artificial Sequence
  Description of Artificial Sequence: Synthetic oligonucleotide
gacuugaguagcauccaua

SEQ ID NO: 3084643 - RNA, 19 nt, Artificial Sequence
  Description of Artificial Sequence: Synthetic oligonucleotide
auguagcugugcagcacgg

SEQ ID NO: 3084644 - RNA, 19 nt, Artificial Sequence
  Description of Artificial Sequence: Synthetic oligonucleotide
guuccguauguagcugugc

SEQ ID NO: 3084645 - RNA, 19 nt, Artificial Sequence
  Description of Artificial Sequence: Synthetic oligonucleotide
caggcaggcuuucccguag

SEQ ID NO: 3084646 - RNA, 19 nt, Artificial Sequence
  Description of Artificial Sequence: Synthetic oligonucleotide
cccguagucacucgcguag

SEQ ID NO: 3084647 - RNA, 19 nt, Artificial Sequence
  Description of Artificial Sequence: Synthetic oligonucleotide
agggcacuagacccuggga

SEQ ID NO: 3084648 - RNA, 19 nt, Artificial Sequence
  Description of Artificial Sequence: Synthetic oligonucleotide
gcauccauauuugaaacua

SEQ ID NO: 3084649 - RNA, 19 nt, Artificial Sequence
  Description of Artificial Sequence: Synthetic oligonucleotide
gaagggcacuagacccugg

SEQ ID NO: 3084650 - RNA, 19 nt, Artificial Sequence
  Description of Artificial Sequence: Synthetic oligonucleotide
ggcagacuugaguagcauc

SEQ ID NO: 3084651 - RNA, 19 nt, Artificial Sequence
  Description of Artificial Sequence: Synthetic oligonucleotide
cagccacauccacaaaguc

SEQ ID NO: 3084652 - RNA, 19 nt, Artificial Sequence
  Description of Artificial Sequence: Synthetic oligonucleotide
gugccgaaauucagugucc

SEQ ID NO: 3084653 - RNA, 19 nt, Artificial Sequence
  Description of Artificial Sequence: Synthetic oligonucleotide
agcuucagccacauccaca

SEQ ID NO: 3084654 - RNA, 19 nt, Artificial Sequence
  Description of Artificial Sequence: Synthetic oligonucleotide
gcaguucaggaaucuuagc

SEQ ID NO: 3084655 - RNA, 19 nt, Artificial Sequence
  Description of Artificial Sequence: Synthetic oligonucleotide
gggaauccuuuucaugguc

SEQ ID NO: 3084656 - RNA, 19 nt, Artificial Sequence
  Description of Artificial Sequence: Synthetic oligonucleotide
agcaacaggcagacuugag

SEQ ID NO: 3084657 - RNA, 19 nt, Artificial Sequence
  Description of Artificial Sequence: Synthetic oligonucleotide
gggcacuagacccugggaa

SEQ ID NO: 3084658 - RNA, 19 nt, Artificial Sequence
  Description of Artificial Sequence: Synthetic oligonucleotide
ucuuagcuucagccacauc

SEQ ID NO: 3084659 - RNA, 19 nt, Artificial Sequence
  Description of Artificial Sequence: Synthetic oligonucleotide
cuugguaauggugccgaaa

SEQ ID NO: 3084660 - RNA, 19 nt, Artificial Sequence
  Description of Artificial Sequence: Synthetic oligonucleotide
uccuuuucaugguccucuu

SEQ ID NO: 3084661 - RNA, 19 nt, Artificial Sequence
  Description of Artificial Sequence: Synthetic oligonucleotide
ugcgcuccugguuccguau

SEQ ID NO: 3084662 - RNA, 19 nt, Artificial Sequence
  Description of Artificial Sequence: Synthetic oligonucleotide
caggcagacuugaguagca

SEQ ID NO: 3084663 - RNA, 19 nt, Artificial Sequence
  Description of Artificial Sequence: Synthetic oligonucleotide
ucccguagucacucgcgua

SEQ ID NO: 3084664 - RNA, 19 nt, Artificial Sequence
  Description of Artificial Sequence: Synthetic oligonucleotide
uugugcgcuccugguuccg

SEQ ID NO: 3084665 - RNA, 19 nt, Artificial Sequence
  Description of Artificial Sequence: Synthetic oligonucleotide
gcaacaggcagacuugagu

SEQ ID NO: 3084666 - RNA, 19 nt, Artificial Sequence
  Description of Artificial Sequence: Synthetic oligonucleotide
cugguuccguauguagcug

SEQ ID NO: 3084667 - RNA, 19 nt, Artificial Sequence
  Description of Artificial Sequence: Synthetic oligonucleotide
gccgaaauucaguguccag

SEQ ID NO: 3084668 - RNA, 19 nt, Artificial Sequence
  Description of Artificial Sequence: Synthetic oligonucleotide
acuugguaauggugccgaa

SEQ ID NO: 3084669 - RNA, 19 nt, Artificial Sequence
  Description of Artificial Sequence: Synthetic oligonucleotide
aucuuagcuggaacuuggu

SEQ ID NO: 3084670 - RNA, 19 nt, Artificial Sequence
  Description of Artificial Sequence: Synthetic oligonucleotide
cggggaaguaacucuuucc

SEQ ID NO: 3084671 - RNA, 19 nt, Artificial Sequence
  Description of Artificial Sequence: Synthetic oligonucleotide
agaggucggggaaguaacu

SEQ ID NO: 3084672 - RNA, 19 nt, Artificial Sequence
  Description of Artificial Sequence: Synthetic oligonucleotide
ccgaaauucaguguccaga

SEQ ID NO: 3084673 - RNA, 19 nt, Artificial Sequence
  Description of Artificial Sequence: Synthetic oligonucleotide
cugcuucuuugugcgcucc

SEQ ID NO: 3084674 - RNA, 19 nt, Artificial Sequence
  Description of Artificial Sequence: Synthetic oligonucleotide
gcacuagacccugggaagc

SEQ ID NO: 3084675 - RNA, 19 nt, Artificial Sequence
  Description of Artificial Sequence: Synthetic oligonucleotide
agucacucgcguagguggu

SEQ ID NO: 3084676 - RNA, 19 nt, Artificial Sequence
  Description of Artificial Sequence: Synthetic oligonucleotide
ggaagggcacuagacccug

SEQ ID NO: 3084677 - RNA, 19 nt, Artificial Sequence
  Description of Artificial Sequence: Synthetic oligonucleotide
gcuuucccguagucacucg

SEQ ID NO: 3084678 - RNA, 19 nt, Artificial Sequence
  Description of Artificial Sequence: Synthetic oligonucleotide
acuagacccugggaagcaa

SEQ ID NO: 3084679 - RNA, 19 nt, Artificial Sequence
  Description of Artificial Sequence: Synthetic oligonucleotide
cagacuugaguagcaucca

SEQ ID NO: 3084680 - RNA, 19 nt, Artificial Sequence
  Description of Artificial Sequence: Synthetic oligonucleotide
aggcaggcuuucccguagu

SEQ ID NO: 3084681 - RNA, 19 nt, Artificial Sequence
  Description of Artificial Sequence: Synthetic oligonucleotide
gucugcuucuuugugcgcu

SEQ ID NO: 3084682 - RNA, 19 nt, Artificial Sequence
  Description of Artificial Sequence: Synthetic oligonucleotide
caaugggaauccuuuucau

SEQ ID NO: 3084683 - RNA, 19 nt, Artificial Sequence
  Description of Artificial Sequence: Synthetic oligonucleotide
ugugcgcuccugguuccgu

SEQ ID NO: 3084684 - RNA, 19 nt, Artificial Sequence
  Description of Artificial Sequence: Synthetic oligonucleotide
gguuccguauguagcugug

SEQ ID NO: 3084685 - RNA, 19 nt, Artificial Sequence
  Description of Artificial Sequence: Synthetic oligonucleotide
ccaguucauggcaauggga

SEQ ID NO: 3084686 - RNA, 19 nt, Artificial Sequence
  Description of Artificial Sequence: Synthetic oligonucleotide
gaaguccaggcaggcuuuc

SEQ ID NO: 3084687 - RNA, 19 nt, Artificial Sequence
  Description of Artificial Sequence: Synthetic oligonucleotide
gcuucuuugugcgcuccug

SEQ ID NO: 3084688 - RNA, 19 nt, Artificial Sequence
  Description of Artificial Sequence: Synthetic oligonucleotide
augguccucuuagcuucag

SEQ ID NO: 3084689 - RNA, 19 nt, Artificial Sequence
  Description of Artificial Sequence: Synthetic oligonucleotide
gcacggaagggcacuagac

SEQ ID NO: 3084690 - RNA, 19 nt, Artificial Sequence
  Description of Artificial Sequence: Synthetic oligonucleotide
ggcuuucccguagucacuc

SEQ ID NO: 3084691 - RNA, 19 nt, Artificial Sequence
  Description of Artificial Sequence: Synthetic oligonucleotide
gcuggaacuugguaauggu

SEQ ID NO: 3084692 - RNA, 19 nt, Artificial Sequence
  Description of Artificial Sequence: Synthetic oligonucleotide
cacuagacccugggaagca

SEQ ID NO: 3084693 - RNA, 19 nt, Artificial Sequence
  Description of Artificial Sequence: Synthetic oligonucleotide
ggucugcuucuuugugcgc

SEQ ID NO: 3084694 - RNA, 19 nt, Artificial Sequence
  Description of Artificial Sequence: Synthetic oligonucleotide
cacucgcguagguggucug

SEQ ID NO: 3084695 - RNA, 19 nt, Artificial Sequence
  Description of Artificial Sequence: Synthetic oligonucleotide
aggcagacuugaguagcau

SEQ ID NO: 3084696 - RNA, 19 nt, Artificial Sequence
  Description of Artificial Sequence: Synthetic oligonucleotide
gcaggcuuucccguaguca

SEQ ID NO: 3084697 - RNA, 19 nt, Artificial Sequence
  Description of Artificial Sequence: Synthetic oligonucleotide
ccugguuccguauguagcu

SEQ ID NO: 3084698 - RNA, 19 nt, Artificial Sequence
  Description of Artificial Sequence: Synthetic oligonucleotide
ucgcguagguggucugcuu

SEQ ID NO: 3084699 - RNA, 19 nt, Artificial Sequence
  Description of Artificial Sequence: Synthetic oligonucleotide
ggaaucuuagcuggaacuu

SEQ ID NO: 3084700 - RNA, 19 nt, Artificial Sequence
  Description of Artificial Sequence: Synthetic oligonucleotide
aggcuuucccguagucacu

SEQ ID NO: 3084701 - RNA, 19 nt, Artificial Sequence
  Description of Artificial Sequence: Synthetic oligonucleotide
gcugugcagcacggaaggg

SEQ ID NO: 3084702 - RNA, 19 nt, Artificial Sequence
  Description of Artificial Sequence: Synthetic oligonucleotide
cagcacggaagggcacuag

SEQ ID NO: 3084703 - RNA, 19 nt, Artificial Sequence
  Description of Artificial Sequence: Synthetic oligonucleotide
cuugaguagcauccauauu

SEQ ID NO: 3084704 - RNA, 19 nt, Artificial Sequence
  Description of Artificial Sequence: Synthetic oligonucleotide
cguauguagcugugcagca

SEQ ID NO: 3084705 - RNA, 19 nt, Artificial Sequence
  Description of Artificial Sequence: Synthetic oligonucleotide
gucacucgcguaggugguc

SEQ ID NO: 3084706 - RNA, 19 nt, Artificial Sequence
  Description of Artificial Sequence: Synthetic oligonucleotide
ggcaggcuuucccguaguc

SEQ ID NO: 3084707 - RNA, 19 nt, Artificial Sequence
  Description of Artificial Sequence: Synthetic oligonucleotide
ccucuuagcuucagccaca

SEQ ID NO: 3084708 - RNA, 19 nt, Artificial Sequence
  Description of Artificial Sequence: Synthetic oligonucleotide
ccguagucacucgcguagg

SEQ ID NO: 3084709 - RNA, 19 nt, Artificial Sequence
  Description of Artificial Sequence: Synthetic oligonucleotide
uccagaggucggggaagua

SEQ ID NO: 3084710 - RNA, 19 nt, Artificial Sequence
  Description of Artificial Sequence: Synthetic oligonucleotide
guaacucuuuccaguucau

SEQ ID NO: 3084711 - RNA, 19 nt, Artificial Sequence
  Description of Artificial Sequence: Synthetic oligonucleotide
caagaaguccaggcaggcu

SEQ ID NO: 3084712 - RNA, 19 nt, Artificial Sequence
  Description of Artificial Sequence: Synthetic oligonucleotide
guagguggucugcuucuuu

SEQ ID NO: 3084713 - RNA, 19 nt, Artificial Sequence
  Description of Artificial Sequence: Synthetic oligonucleotide
gugcagcacggaagggcac

SEQ ID NO: 3084714 - RNA, 19 nt, Artificial Sequence
  Description of Artificial Sequence: Synthetic oligonucleotide
cuucagccacauccacaaa

SEQ ID NO: 3084715 - RNA, 19 nt, Artificial Sequence
  Description of Artificial Sequence: Synthetic oligonucleotide
cgcguagguggucugcuuc

SEQ ID NO: 3084716 - RNA, 19 nt, Artificial Sequence
  Description of Artificial Sequence: Synthetic oligonucleotide
gcgcuccugguuccguaug

SEQ ID NO: 3084717 - RNA, 19 nt, Artificial Sequence
  Description of Artificial Sequence: Synthetic oligonucleotide
ccagaggucggggaaguaa

SEQ ID NO: 3084718 - RNA, 19 nt, Artificial Sequence
  Description of Artificial Sequence: Synthetic oligonucleotide
gcguagguggucugcuucu

SEQ ID NO: 3084719 - RNA, 19 nt, Artificial Sequence
  Description of Artificial Sequence: Synthetic oligonucleotide
gugcgcuccugguuccgua

SEQ ID NO: 3084720 - RNA, 19 nt, Artificial Sequence
  Description of Artificial Sequence: Synthetic oligonucleotide
cucgcguagguggucugcu

SEQ ID NO: 3084721 - RNA, 19 nt, Artificial Sequence
  Description of Artificial Sequence: Synthetic oligonucleotide
cauccacaaagucccucuu

SEQ ID NO: 3084722 - RNA, 19 nt, Artificial Sequence
  Description of Artificial Sequence: Synthetic oligonucleotide
cucuuagcuucagccacau

SEQ ID NO: 3084723 - RNA, 19 nt, Artificial Sequence
  Description of Artificial Sequence: Synthetic oligonucleotide
ggucggggaaguaacucuu

SEQ ID NO: 3084724 - RNA, 19 nt, Artificial Sequence
  Description of Artificial Sequence: Synthetic oligonucleotide
ccuuuucaugguccucuua

SEQ ID NO: 3084725 - RNA, 19 nt, Artificial Sequence
  Description of Artificial Sequence: Synthetic oligonucleotide
gucggggaaguaacucuuu

SEQ ID NO: 3084726 - RNA, 19 nt, Artificial Sequence
  Description of Artificial Sequence: Synthetic oligonucleotide
gcuccugguuccguaugua

SEQ ID NO: 3084727 - RNA, 19 nt, Artificial Sequence
  Description of Artificial Sequence: Synthetic oligonucleotide
ccaggcaggcuuucccgua

SEQ ID NO: 3084728 - RNA, 19 nt, Artificial Sequence
  Description of Artificial Sequence: Synthetic oligonucleotide
gcagcacggaagggcacua

SEQ ID NO: 3084729 - RNA, 19 nt, Artificial Sequence
  Description of Artificial Sequence: Synthetic oligonucleotide
cguagucacucgcguaggu

SEQ ID NO: 3084730 - RNA, 19 nt, Artificial Sequence
  Description of Artificial Sequence: Synthetic oligonucleotide
gggaagcaacaggcagacu

SEQ ID NO: 3084731 - RNA, 19 nt, Artificial Sequence
  Description of Artificial Sequence: Synthetic oligonucleotide
cgcuccugguuccguaugu

SEQ ID NO: 3084732 - RNA, 19 nt, Artificial Sequence
  Description of Artificial Sequence: Synthetic oligonucleotide
cguagguggucugcuucuu

SEQ ID NO: 3084733 - RNA, 19 nt, Artificial Sequence
  Description of Artificial Sequence: Synthetic oligonucleotide
uacaccugcacaaugcccg

SEQ ID NO: 3084734 - RNA, 19 nt, Artificial Sequence
  Description of Artificial Sequence: Synthetic oligonucleotide
acucguggggaacacagcc

SEQ ID NO: 3084735 - RNA, 19 nt, Artificial Sequence
  Description of Artificial Sequence: Synthetic oligonucleotide
aagugcaggucucucuccc

SEQ ID NO: 3084736 - RNA, 19 nt, Artificial Sequence
  Description of Artificial Sequence: Synthetic oligonucleotide
aaaggacucggggaagugc

SEQ ID NO: 3084737 - RNA, 19 nt, Artificial Sequence
  Description of Artificial Sequence: Synthetic oligonucleotide
agagcuaccucccgugacc

SEQ ID NO: 3084738 - RNA, 19 nt, Artificial Sequence
  Description of Artificial Sequence: Synthetic oligonucleotide
uuguacaccugcacaaugc

SEQ ID NO: 3084739 - RNA, 19 nt, Artificial Sequence
  Description of Artificial Sequence: Synthetic oligonucleotide
uguacaccugcacaaugcc

SEQ ID NO: 3084740 - RNA, 19 nt, Artificial Sequence
  Description of Artificial Sequence: Synthetic oligonucleotide
cuggaucagagcuaccucc

SEQ ID NO: 3084741 - RNA, 19 nt, Artificial Sequence
  Description of Artificial Sequence: Synthetic oligonucleotide
uuguucagccuccaguugu

SEQ ID NO: 3084742 - RNA, 19 nt, Artificial Sequence
  Description of Artificial Sequence: Synthetic oligonucleotide
acauuguucagccuccagu

SEQ ID NO: 3084743 - RNA, 19 nt, Artificial Sequence
  Description of Artificial Sequence: Synthetic oligonucleotide
ucugucucgguguuguaca

SEQ ID NO: 3084744 - RNA, 19 nt, Artificial Sequence
  Description of Artificial Sequence: Synthetic oligonucleotide
ucguggggaacacagccag

SEQ ID NO: 3084745 - RNA, 19 nt, Artificial Sequence
  Description of Artificial Sequence: Synthetic oligonucleotide
cacgcuaguccacuggucg

SEQ ID NO: 3084746 - RNA, 19 nt, Artificial Sequence
  Description of Artificial Sequence: Synthetic oligonucleotide
ugcacaaugcccgugacau

SEQ ID NO: 3084747 - RNA, 19 nt, Artificial Sequence
  Description of Artificial Sequence: Synthetic oligonucleotide
uccaguuguagccacccac

SEQ ID NO: 3084748 - RNA, 19 nt, Artificial Sequence
  Description of Artificial Sequence: Synthetic oligonucleotide
agaucuuccucuccagcag

SEQ ID NO: 3084749 - RNA, 19 nt, Artificial Sequence
  Description of Artificial Sequence: Synthetic oligonucleotide
uggaucagagcuaccuccc

SEQ ID NO: 3084750 - RNA, 19 nt, Artificial Sequence
  Description of Artificial Sequence: Synthetic oligonucleotide
gauguagaucuuccucucc

SEQ ID NO: 3084751 - RNA, 19 nt, Artificial Sequence
  Description of Artificial Sequence: Synthetic oligonucleotide
cucgguguuguacaccugc

SEQ ID NO: 3084752 - RNA, 19 nt, Artificial Sequence
  Description of Artificial Sequence: Synthetic oligonucleotide
caagcgaugccugcaaagg

SEQ ID NO: 3084753 - RNA, 19 nt, Artificial Sequence
  Description of Artificial Sequence: Synthetic oligonucleotide
cacaaugcccgugacauug

SEQ ID NO: 3084754 - RNA, 19 nt, Artificial Sequence
  Description of Artificial Sequence: Synthetic oligonucleotide
aagcgaugccugcaaagga

SEQ ID NO: 3084755 - RNA, 19 nt, Artificial Sequence
  Description of Artificial Sequence: Synthetic oligonucleotide
gaugccugcaaaggacucg

SEQ ID NO: 3084756 - RNA, 19 nt, Artificial Sequence
  Description of Artificial Sequence: Synthetic oligonucleotide
gucggcaucgggcacguag

SEQ ID NO: 3084757 - RNA, 19 nt, Artificial Sequence
  Description of Artificial Sequence: Synthetic oligonucleotide
guuguacaccugcacaaug

SEQ ID NO: 3084758 - RNA, 19 nt, Artificial Sequence
  Description of Artificial Sequence: Synthetic oligonucleotide
aucagagcuaccucccgug

SEQ ID NO: 3084759 - RNA, 19 nt, Artificial Sequence
  Description of Artificial Sequence: Synthetic oligonucleotide
uggggcccgacacucgugg

SEQ ID NO: 3084760 - RNA, 19 nt, Artificial Sequence
  Description of Artificial Sequence: Synthetic oligonucleotide
agcgaugccugcaaaggac

SEQ ID NO: 3084761 - RNA, 19 nt, Artificial Sequence
  Description of Artificial Sequence: Synthetic oligonucleotide
aacacagccaggccuggau

SEQ ID NO: 3084762 - RNA, 19 nt, Artificial Sequence
  Description of Artificial Sequence: Synthetic oligonucleotide
uccacuggucggcaucggg

SEQ ID NO: 3084763 - RNA, 19 nt, Artificial Sequence
  Description of Artificial Sequence: Synthetic oligonucleotide
auuguucagccuccaguug

SEQ ID NO: 3084764 - RNA, 19 nt, Artificial Sequence
  Description of Artificial Sequence: Synthetic oligonucleotide
uucagccuccaguuguagc

SEQ ID NO: 3084765 - RNA, 19 nt, Artificial Sequence
  Description of Artificial Sequence: Synthetic oligonucleotide
gaagugcaggucucucucc

SEQ ID NO: 3084766 - RNA, 19 nt, Artificial Sequence
  Description of Artificial Sequence: Synthetic oligonucleotide
uggggaccccagaaguggg

SEQ ID NO: 3084767 - RNA, 19 nt, Artificial Sequence
  Description of Artificial Sequence: Synthetic oligonucleotide
gacauuguucagccuccag

SEQ ID NO: 3084768 - RNA, 19 nt, Artificial Sequence
  Description of Artificial Sequence: Synthetic oligonucleotide
cuggccggcgcgcauaggg

SEQ ID NO: 3084769 - RNA, 19 nt, Artificial Sequence
  Description of Artificial Sequence: Synthetic oligonucleotide
cuaccucccgugaccagcg

SEQ ID NO: 3084770 - RNA, 19 nt, Artificial Sequence
  Description of Artificial Sequence: Synthetic oligonucleotide
agguggggaccccagaagu

SEQ ID NO: 3084771 - RNA, 19 nt, Artificial Sequence
  Description of Artificial Sequence: Synthetic oligonucleotide
ucagagcuaccucccguga

SEQ ID NO: 3084772 - RNA, 19 nt, Artificial Sequence
  Description of Artificial Sequence: Synthetic oligonucleotide
cagaaguggggcccgacac

SEQ ID NO: 3084773 - RNA, 19 nt, Artificial Sequence
  Description of Artificial Sequence: Synthetic oligonucleotide
acacucguggggaacacag

SEQ ID NO: 3084774 - RNA, 19 nt, Artificial Sequence
  Description of Artificial Sequence: Synthetic oligonucleotide
augccugcaaaggacucgg

SEQ ID NO: 3084775 - RNA, 19 nt, Artificial Sequence
  Description of Artificial Sequence: Synthetic oligonucleotide
ucucccacucgucugucuc

SEQ ID NO: 3084776 - RNA, 19 nt, Artificial Sequence
  Description of Artificial Sequence: Synthetic oligonucleotide
gguguuguacaccugcaca

SEQ ID NO: 3084777 - RNA, 19 nt, Artificial Sequence
  Description of Artificial Sequence: Synthetic oligonucleotide
agcgcggggaagcaggaca

SEQ ID NO: 3084778 - RNA, 19 nt, Artificial Sequence
  Description of Artificial Sequence: Synthetic oligonucleotide
acgcuaguccacuggucgg

SEQ ID NO: 3084779 - RNA, 19 nt, Artificial Sequence
  Description of Artificial Sequence: Synthetic oligonucleotide
guggggaccccagaagugg

SEQ ID NO: 3084780 - RNA, 19 nt, Artificial Sequence
  Description of Artificial Sequence: Synthetic oligonucleotide
guguuguacaccugcacaa

SEQ ID NO: 3084781 - RNA, 19 nt, Artificial Sequence
  Description of Artificial Sequence: Synthetic oligonucleotide
aguccacuggucggcaucg

SEQ ID NO: 3084782 - RNA, 19 nt, Artificial Sequence
  Description of Artificial Sequence: Synthetic oligonucleotide
ggggaagcaggacagcugc

SEQ ID NO: 3084783 - RNA, 19 nt, Artificial Sequence
  Description of Artificial Sequence: Synthetic oligonucleotide
ucggcaucgggcacguagu

SEQ ID NO: 3084784 - RNA, 19 nt, Artificial Sequence
  Description of Artificial Sequence: Synthetic oligonucleotide
gaagcaggacagcugcgca

SEQ ID NO: 3084785 - RNA, 19 nt, Artificial Sequence
  Description of Artificial Sequence: Synthetic oligonucleotide
guggggaacacagccaggc

SEQ ID NO: 3084786 - RNA, 19 nt, Artificial Sequence
  Description of Artificial Sequence: Synthetic oligonucleotide
aagcaggacagcugcgcaa

SEQ ID NO: 3084787 - RNA, 19 nt, Artificial Sequence
  Description of Artificial Sequence: Synthetic oligonucleotide
uggggaacacagccaggcc

SEQ ID NO: 3084788 - RNA, 19 nt, Artificial Sequence
  Description of Artificial Sequence: Synthetic oligonucleotide
ccaguuguagccacccacg

SEQ ID NO: 3084789 - RNA, 19 nt, Artificial Sequence
  Description of Artificial Sequence: Synthetic oligonucleotide
gugacauuguucagccucc

SEQ ID NO: 3084790 - RNA, 19 nt, Artificial Sequence
  Description of Artificial Sequence: Synthetic oligonucleotide
accucccgugaccagcgcg

SEQ ID NO: 3084791 - RNA, 19 nt, Artificial Sequence
  Description of Artificial Sequence: Synthetic oligonucleotide
agcaggacagcugcgcaag

SEQ ID NO: 3084792 - RNA, 19 nt, Artificial Sequence
  Description of Artificial Sequence: Synthetic oligonucleotide
ucgucugucucgguguugu

SEQ ID NO: 3084793 - RNA, 19 nt, Artificial Sequence
  Description of Artificial Sequence: Synthetic oligonucleotide
agaaguggggcccgacacu

SEQ ID NO: 3084794 - RNA, 19 nt, Artificial Sequence
  Description of Artificial Sequence: Synthetic oligonucleotide
ugcaaaggacucggggaag

SEQ ID NO: 3084795 - RNA, 19 nt, Artificial Sequence
  Description of Artificial Sequence: Synthetic oligonucleotide
acuggucggcaucgggcac

SEQ ID NO: 3084796 - RNA, 19 nt, Artificial Sequence
  Description of Artificial Sequence: Synthetic oligonucleotide
aggucucucucccacucgu

SEQ ID NO: 3084797 - RNA, 19 nt, Artificial Sequence
  Description of Artificial Sequence: Synthetic oligonucleotide
agccuccaguuguagccac

SEQ ID NO: 3084798 - RNA, 19 nt, Artificial Sequence
  Description of Artificial Sequence: Synthetic oligonucleotide
uguucagccuccaguugua

SEQ ID NO: 3084799 - RNA, 19 nt, Artificial Sequence
  Description of Artificial Sequence: Synthetic oligonucleotide
gaaguggggcccgacacuc

SEQ ID NO: 3084800 - RNA, 19 nt, Artificial Sequence
  Description of Artificial Sequence: Synthetic oligonucleotide
uggccggcgcgcauagggg

SEQ ID NO: 3084801 - RNA, 19 nt, Artificial Sequence
  Description of Artificial Sequence: Synthetic oligonucleotide
aguuguagccacccacgau

SEQ ID NO: 3084802 - RNA, 19 nt, Artificial Sequence
  Description of Artificial Sequence: Synthetic oligonucleotide
uaguccacuggucggcauc

SEQ ID NO: 3084803 - RNA, 19 nt, Artificial Sequence
  Description of Artificial Sequence: Synthetic oligonucleotide
ucccacucgucugucucgg

SEQ ID NO: 3084804 - RNA, 19 nt, Artificial Sequence
  Description of Artificial Sequence: Synthetic oligonucleotide
cucccacucgucugucucg

SEQ ID NO: 3084805 - RNA, 19 nt, Artificial Sequence
  Description of Artificial Sequence: Synthetic oligonucleotide
gcaagcgaugccugcaaag

SEQ ID NO: 3084806 - RNA, 19 nt, Artificial Sequence
  Description of Artificial Sequence: Synthetic oligonucleotide
uguuguacaccugcacaau

SEQ ID NO: 3084807 - RNA, 19 nt, Artificial Sequence
  Description of Artificial Sequence: Synthetic oligonucleotide
guacaccugcacaaugccc

SEQ ID NO: 3084808 - RNA, 19 nt, Artificial Sequence
  Description of Artificial Sequence: Synthetic oligonucleotide
caggacagcugcgcaagcg

SEQ ID NO: 3084809 - RNA, 19 nt, Artificial Sequence
  Description of Artificial Sequence: Synthetic oligonucleotide
ugucucgguguuguacacc

SEQ ID NO: 3084810 - RNA, 19 nt, Artificial Sequence
  Description of Artificial Sequence: Synthetic oligonucleotide
cccacgauguagaucuucc

SEQ ID NO: 3084811 - RNA, 19 nt, Artificial Sequence
  Description of Artificial Sequence: Synthetic oligonucleotide
ggaagugcaggucucucuc

SEQ ID NO: 3084812 - RNA, 19 nt, Artificial Sequence
  Description of Artificial Sequence: Synthetic oligonucleotide
accagcgcggggaagcagg

SEQ ID NO: 3084813 - RNA, 19 nt, Artificial Sequence
  Description of Artificial Sequence: Synthetic oligonucleotide
gaccccagaaguggggccc

SEQ ID NO: 3084814 - RNA, 19 nt, Artificial Sequence
  Description of Artificial Sequence: Synthetic oligonucleotide
ugccugcaaaggacucggg

SEQ ID NO: 3084815 - RNA, 19 nt, Artificial Sequence
  Description of Artificial Sequence: Synthetic oligonucleotide
aguggggcccgacacucgu

SEQ ID NO: 3084816 - RNA, 19 nt, Artificial Sequence
  Description of Artificial Sequence: Synthetic oligonucleotide
acccacgauguagaucuuc

SEQ ID NO: 3084817 - RNA, 19 nt, Artificial Sequence
  Description of Artificial Sequence: Synthetic oligonucleotide
ggaucagagcuaccucccg

SEQ ID NO: 3084818 - RNA, 19 nt, Artificial Sequence
  Description of Artificial Sequence: Synthetic oligonucleotide
cgugacauuguucagccuc

SEQ ID NO: 3084819 - RNA, 19 nt, Artificial Sequence
  Description of Artificial Sequence: Synthetic oligonucleotide
gugaccagcgcggggaagc

SEQ ID NO: 3084820 - RNA, 19 nt, Artificial Sequence
  Description of Artificial Sequence: Synthetic oligonucleotide
ugcgcaagcgaugccugca

SEQ ID NO: 3084821 - RNA, 19 nt, Artificial Sequence
  Description of Artificial Sequence: Synthetic oligonucleotide
agugcaggucucucuccca

SEQ ID NO: 3084822 - RNA, 19 nt, Artificial Sequence
  Description of Artificial Sequence: Synthetic oligonucleotide
agcugcgcaagcgaugccu

SEQ ID NO: 3084823 - RNA, 19 nt, Artificial Sequence
  Description of Artificial Sequence: Synthetic oligonucleotide
cacagccaggccuggauca

SEQ ID NO: 3084824 - RNA, 19 nt, Artificial Sequence
  Description of Artificial Sequence: Synthetic oligonucleotide
gacagcugcgcaagcgaug

SEQ ID NO: 3084825 - RNA, 19 nt, Artificial Sequence
  Description of Artificial Sequence: Synthetic oligonucleotide
cugcaaaggacucggggaa

SEQ ID NO: 3084826 - RNA, 19 nt, Artificial Sequence
  Description of Artificial Sequence: Synthetic oligonucleotide
cagagcuaccucccgugac

SEQ ID NO: 3084827 - RNA, 19 nt, Artificial Sequence
  Description of Artificial Sequence: Synthetic oligonucleotide
caggucucucucccacucg

SEQ ID NO: 3084828 - RNA, 19 nt, Artificial Sequence
  Description of Artificial Sequence: Synthetic oligonucleotide
gucugucucgguguuguac

SEQ ID NO: 3084829 - RNA, 19 nt, Artificial Sequence
  Description of Artificial Sequence: Synthetic oligonucleotide
gaucagagcuaccucccgu

SEQ ID NO: 3084830 - RNA, 19 nt, Artificial Sequence
  Description of Artificial Sequence: Synthetic oligonucleotide
cacucguggggaacacagc

SEQ ID NO: 3084831 - RNA, 19 nt, Artificial Sequence
  Description of Artificial Sequence: Synthetic oligonucleotide
cauuguucagccuccaguu

SEQ ID NO: 3084832 - RNA, 19 nt, Artificial Sequence
  Description of Artificial Sequence: Synthetic oligonucleotide
ucucgguguuguacaccug

SEQ ID NO: 3084833 - RNA, 19 nt, Artificial Sequence
  Description of Artificial Sequence: Synthetic oligonucleotide
ggaagcaggacagcugcgc

SEQ ID NO: 3084834 - RNA, 19 nt, Artificial Sequence
  Description of Artificial Sequence: Synthetic oligonucleotide
cugucucgguguuguacac

SEQ ID NO: 3084835 - RNA, 19 nt, Artificial Sequence
  Description of Artificial Sequence: Synthetic oligonucleotide
ugcaggucucucucccacu

SEQ ID NO: 3084836 - RNA, 19 nt, Artificial Sequence
  Description of Artificial Sequence: Synthetic oligonucleotide
gugcaggucucucucccac

SEQ ID NO: 3084837 - RNA, 19 nt, Artificial Sequence
  Description of Artificial Sequence: Synthetic oligonucleotide
cuggucggcaucgggcacg

SEQ ID NO: 3084838 - RNA, 19 nt, Artificial Sequence
  Description of Artificial Sequence: Synthetic oligonucleotide
ucggggaagugcaggucuc

SEQ ID NO: 3084839 - RNA, 19 nt, Artificial Sequence
  Description of Artificial Sequence: Synthetic oligonucleotide
ccacccacgauguagaucu

SEQ ID NO: 3084840 - RNA, 19 nt, Artificial Sequence
  Description of Artificial Sequence: Synthetic oligonucleotide
ucccgugaccagcgcgggg

SEQ ID NO: 3084841 - RNA, 19 nt, Artificial Sequence
  Description of Artificial Sequence: Synthetic oligonucleotide
gacuggccggcgcgcauag

SEQ ID NO: 3084842 - RNA, 19 nt, Artificial Sequence
  Description of Artificial Sequence: Synthetic oligonucleotide
ugacauuguucagccucca

SEQ ID NO: 3084843 - RNA, 19 nt, Artificial Sequence
  Description of Artificial Sequence: Synthetic oligonucleotide
ccugcaaaggacucgggga

SEQ ID NO: 3084844 - RNA, 19 nt, Artificial Sequence
  Description of Artificial Sequence: Synthetic oligonucleotide
agcagccggccuccgacug

SEQ ID NO: 3084845 - RNA, 19 nt, Artificial Sequence
  Description of Artificial Sequence: Synthetic oligonucleotide
ugcccgugacauuguucag

SEQ ID NO: 3084846 - RNA, 19 nt, Artificial Sequence
  Description of Artificial Sequence: Synthetic oligonucleotide
aaguggggcccgacacucg

SEQ ID NO: 3084847 - RNA, 19 nt, Artificial Sequence
  Description of Artificial Sequence: Synthetic oligonucleotide
cacuggucggcaucgggca

SEQ ID NO: 3084848 - RNA, 19 nt, Artificial Sequence
  Description of Artificial Sequence: Synthetic oligonucleotide
uccucuccagcaggcagca

SEQ ID NO: 3084849 - RNA, 19 nt, Artificial Sequence
  Description of Artificial Sequence: Synthetic oligonucleotide
ccacuggucggcaucgggc

SEQ ID NO: 3084850 - RNA, 19 nt, Artificial Sequence
  Description of Artificial Sequence: Synthetic oligonucleotide
acaccugcacaaugcccgu

SEQ ID NO: 3084851 - RNA, 19 nt, Artificial Sequence
  Description of Artificial Sequence: Synthetic oligonucleotide
cucguggggaacacagcca

SEQ ID NO: 3084852 - RNA, 19 nt, Artificial Sequence
  Description of Artificial Sequence: Synthetic oligonucleotide
caaaggacucggggaagug

SEQ ID NO: 3084853 - RNA, 19 nt, Artificial Sequence
  Description of Artificial Sequence: Synthetic oligonucleotide
gggaacacagccaggccug

SEQ ID NO: 3084854 - RNA, 19 nt, Artificial Sequence
  Description of Artificial Sequence: Synthetic oligonucleotide
cugcgcaagcgaugccugc

SEQ ID NO: 3084855 - RNA, 19 nt, Artificial Sequence
  Description of Artificial Sequence: Synthetic oligonucleotide
ccucccgugaccagcgcgg

SEQ ID NO: 3084856 - RNA, 19 nt, Artificial Sequence
  Description of Artificial Sequence: Synthetic oligonucleotide
agccaggccuggaucagag

SEQ ID NO: 3084857 - RNA, 19 nt, Artificial Sequence
  Description of Artificial Sequence: Synthetic oligonucleotide
guucagccuccaguuguag

SEQ ID NO: 3084858 - RNA, 19 nt, Artificial Sequence
  Description of Artificial Sequence: Synthetic oligonucleotide
ggccacgcuaguccacugg

SEQ ID NO: 3084859 - RNA, 19 nt, Artificial Sequence
  Description of Artificial Sequence: Synthetic oligonucleotide
gacucggggaagugcaggu

SEQ ID NO: 3084860 - RNA, 19 nt, Artificial Sequence
  Description of Artificial Sequence: Synthetic oligonucleotide
ggacucggggaagugcagg

SEQ ID NO: 3084861 - RNA, 19 nt, Artificial Sequence
  Description of Artificial Sequence: Synthetic oligonucleotide
caguuguagccacccacga

SEQ ID NO: 3084862 - RNA, 19 nt, Artificial Sequence
  Description of Artificial Sequence: Synthetic oligonucleotide
gcuaccucccgugaccagc

SEQ ID NO: 3084863 - RNA, 19 nt, Artificial Sequence
  Description of Artificial Sequence: Synthetic oligonucleotide
gggcccgacacucgugggg

SEQ ID NO: 3084864 - RNA, 19 nt, Artificial Sequence
  Description of Artificial Sequence: Synthetic oligonucleotide
gagcuaccucccgugacca

SEQ ID NO: 3084865 - RNA, 19 nt, Artificial Sequence
  Description of Artificial Sequence: Synthetic oligonucleotide
agcuaccucccgugaccag

SEQ ID NO: 3084866 - RNA, 19 nt, Artificial Sequence
  Description of Artificial Sequence: Synthetic oligonucleotide
gcagcagccggccuccgac

SEQ ID NO: 3084867 - RNA, 19 nt, Artificial Sequence
  Description of Artificial Sequence: Synthetic oligonucleotide
acucgucugucucgguguu

SEQ ID NO: 3084868 - RNA, 19 nt, Artificial Sequence
  Description of Artificial Sequence: Synthetic oligonucleotide
cugcacaaugcccgugaca

SEQ ID NO: 3084869 - RNA, 19 nt, Artificial Sequence
  Description of Artificial Sequence: Synthetic oligonucleotide
ggggaacacagccaggccu

SEQ ID NO: 3084870 - RNA, 19 nt, Artificial Sequence
  Description of Artificial Sequence: Synthetic oligonucleotide
ugaccagcgcggggaagca

SEQ ID NO: 3084871 - RNA, 19 nt, Artificial Sequence
  Description of Artificial Sequence: Synthetic oligonucleotide
caggcagcagccggccucc

SEQ ID NO: 3084872 - RNA, 19 nt, Artificial Sequence
  Description of Artificial Sequence: Synthetic oligonucleotide
cucggggaagugcaggucu

SEQ ID NO: 3084873 - RNA, 19 nt, Artificial Sequence
  Description of Artificial Sequence: Synthetic oligonucleotide
ggaccccagaaguggggcc

SEQ ID NO: 3084874 - RNA, 19 nt, Artificial Sequence
  Description of Artificial Sequence: Synthetic oligonucleotide
gacacucguggggaacaca

SEQ ID NO: 3084875 - RNA, 19 nt, Artificial Sequence
  Description of Artificial Sequence: Synthetic oligonucleotide
ccagcaggcagcagccggc

SEQ ID NO: 3084876 - RNA, 19 nt, Artificial Sequence
  Description of Artificial Sequence: Synthetic oligonucleotide
accccagaaguggggcccg

SEQ ID NO: 3084877 - RNA, 19 nt, Artificial Sequence
  Description of Artificial Sequence: Synthetic oligonucleotide
gcaggucucucucccacuc

SEQ ID NO: 3084878 - RNA, 19 nt, Artificial Sequence
  Description of Artificial Sequence: Synthetic oligonucleotide
gcccgugacauuguucagc

SEQ ID NO: 3084879 - RNA, 19 nt, Artificial Sequence
  Description of Artificial Sequence: Synthetic oligonucleotide
uaccucccgugaccagcgc

SEQ ID NO: 3084880 - RNA, 19 nt, Artificial Sequence
  Description of Artificial Sequence: Synthetic oligonucleotide
cgcauaggggccacgcuag

SEQ ID NO: 3084881 - RNA, 19 nt, Artificial Sequence
  Description of Artificial Sequence: Synthetic oligonucleotide
ccuccaguuguagccaccc

SEQ ID NO: 3084882 - RNA, 19 nt, Artificial Sequence
  Description of Artificial Sequence: Synthetic oligonucleotide
acaaugcccgugacauugu

SEQ ID NO: 3084883 - RNA, 19 nt, Artificial Sequence
  Description of Artificial Sequence: Synthetic oligonucleotide
aggacucggggaagugcag

SEQ ID NO: 3084884 - RNA, 19 nt, Artificial Sequence
  Description of Artificial Sequence: Synthetic oligonucleotide
ggaacacagccaggccugg

SEQ ID NO: 3084885 - RNA, 19 nt, Artificial Sequence
  Description of Artificial Sequence: Synthetic oligonucleotide
gaccagcgcggggaagcag

SEQ ID NO: 3084886 - RNA, 19 nt, Artificial Sequence
  Description of Artificial Sequence: Synthetic oligonucleotide
gggaccccagaaguggggc

SEQ ID NO: 3084887 - RNA, 19 nt, Artificial Sequence
  Description of Artificial Sequence: Synthetic oligonucleotide
cagccggccuccgacuggc

SEQ ID NO: 3084888 - RNA, 19 nt, Artificial Sequence
  Description of Artificial Sequence: Synthetic oligonucleotide
gccggccuccgacuggccg

SEQ ID NO: 3084889 - RNA, 19 nt, Artificial Sequence
  Description of Artificial Sequence: Synthetic oligonucleotide
cgauguagaucuuccucuc

SEQ ID NO: 3084890 - RNA, 19 nt, Artificial Sequence
  Description of Artificial Sequence: Synthetic oligonucleotide
ggccggcgcgcauaggggc

SEQ ID NO: 3084891 - RNA, 19 nt, Artificial Sequence
  Description of Artificial Sequence: Synthetic oligonucleotide
cucccgugaccagcgcggg

SEQ ID NO: 3084892 - RNA, 19 nt, Artificial Sequence
  Description of Artificial Sequence: Synthetic oligonucleotide
ccuccgacuggccggcgcg

SEQ ID NO: 3084893 - RNA, 19 nt, Artificial Sequence
  Description of Artificial Sequence: Synthetic oligonucleotide
gaacacagccaggccugga

SEQ ID NO: 3084894 - RNA, 19 nt, Artificial Sequence
  Description of Artificial Sequence: Synthetic oligonucleotide
ccggccuccgacuggccgg

SEQ ID NO: 3084895 - RNA, 19 nt, Artificial Sequence
  Description of Artificial Sequence: Synthetic oligonucleotide
uccgacuggccggcgcgca

SEQ ID NO: 3084896 - RNA, 19 nt, Artificial Sequence
  Description of Artificial Sequence: Synthetic oligonucleotide
uggucggcaucgggcacgu

SEQ ID NO: 3084897 - RNA, 19 nt, Artificial Sequence
  Description of Artificial Sequence: Synthetic oligonucleotide
ggcaucgggcacguaguac

SEQ ID NO: 3084898 - RNA, 19 nt, Artificial Sequence
  Description of Artificial Sequence: Synthetic oligonucleotide
ggggaccccagaagugggg

SEQ ID NO: 3084899 - RNA, 19 nt, Artificial Sequence
  Description of Artificial Sequence: Synthetic oligonucleotide
gcagccggccuccgacugg

SEQ ID NO: 3084900 - RNA, 19 nt, Artificial Sequence
  Description of Artificial Sequence: Synthetic oligonucleotide
cucgucugucucgguguug

SEQ ID NO: 3084901 - RNA, 19 nt, Artificial Sequence
  Description of Artificial Sequence: Synthetic oligonucleotide
ccaggccuggaucagagcu

SEQ ID NO: 3084902 - RNA, 19 nt, Artificial Sequence
  Description of Artificial Sequence: Synthetic oligonucleotide
gggaagugcaggucucucu

SEQ ID NO: 3084903 - RNA, 19 nt, Artificial Sequence
  Description of Artificial Sequence: Synthetic oligonucleotide
cuccaguuguagccaccca

SEQ ID NO: 3084904 - RNA, 19 nt, Artificial Sequence
  Description of Artificial Sequence: Synthetic oligonucleotide
gcugcgcaagcgaugccug

SEQ ID NO: 3084905 - RNA, 19 nt, Artificial Sequence
  Description of Artificial Sequence: Synthetic oligonucleotide
guccacuggucggcaucgg

SEQ ID NO: 3084906 - RNA, 19 nt, Artificial Sequence
  Description of Artificial Sequence: Synthetic oligonucleotide
ggggcccgacacucguggg

SEQ ID NO: 3084907 - RNA, 19 nt, Artificial Sequence
  Description of Artificial Sequence: Synthetic oligonucleotide
gcgcauaggggccacgcua

SEQ ID NO: 3084908 - RNA, 19 nt, Artificial Sequence
  Description of Artificial Sequence: Synthetic oligonucleotide
cagcugcgcaagcgaugcc

SEQ ID NO: 3084909 - RNA, 19 nt, Artificial Sequence
  Description of Artificial Sequence: Synthetic oligonucleotide
gcaggacagcugcgcaagc

SEQ ID NO: 3084910 - RNA, 19 nt, Artificial Sequence
  Description of Artificial Sequence: Synthetic oligonucleotide
cagccuccaguuguagcca

SEQ ID NO: 3084911 - RNA, 19 nt, Artificial Sequence
  Description of Artificial Sequence: Synthetic oligonucleotide
gcgcggggaagcaggacag

SEQ ID NO: 3084912 - RNA, 19 nt, Artificial Sequence
  Description of Artificial Sequence: Synthetic oligonucleotide
ccugcacaaugcccgugac

SEQ ID NO: 3084913 - RNA, 19 nt, Artificial Sequence
  Description of Artificial Sequence: Synthetic oligonucleotide
gccuggaucagagcuaccu

SEQ ID NO: 3084914 - RNA, 19 nt, Artificial Sequence
  Description of Artificial Sequence: Synthetic oligonucleotide
cuccgacuggccggcgcgc

SEQ ID NO: 3084915 - RNA, 19 nt, Artificial Sequence
  Description of Artificial Sequence: Synthetic oligonucleotide
acuggccggcgcgcauagg

SEQ ID NO: 3084916 - RNA, 19 nt, Artificial Sequence
  Description of Artificial Sequence: Synthetic oligonucleotide
cguggggaacacagccagg

SEQ ID NO: 3084917 - RNA, 19 nt, Artificial Sequence
  Description of Artificial Sequence: Synthetic oligonucleotide
ccagaaguggggcccgaca

SEQ ID NO: 3084918 - RNA, 19 nt, Artificial Sequence
  Description of Artificial Sequence: Synthetic oligonucleotide
ggcccgacacucgugggga

SEQ ID NO: 3084919 - RNA, 19 nt, Artificial Sequence
  Description of Artificial Sequence: Synthetic oligonucleotide
ccacgcuaguccacugguc

SEQ ID NO: 3084920 - RNA, 19 nt, Artificial Sequence
  Description of Artificial Sequence: Synthetic oligonucleotide
cggggaagcaggacagcug

SEQ ID NO: 3084921 - RNA, 19 nt, Artificial Sequence
  Description of Artificial Sequence: Synthetic oligonucleotide
gccaggccuggaucagagc

SEQ ID NO: 3084922 - RNA, 19 nt, Artificial Sequence
  Description of Artificial Sequence: Synthetic oligonucleotide
cgaugccugcaaaggacuc

SEQ ID NO: 3084923 - RNA, 19 nt, Artificial Sequence
  Description of Artificial Sequence: Synthetic oligonucleotide
ggggaagugcaggucucuc

SEQ ID NO: 3084924 - RNA, 19 nt, Artificial Sequence
  Description of Artificial Sequence: Synthetic oligonucleotide
gccacgcuaguccacuggu

SEQ ID NO: 3084925 - RNA, 19 nt, Artificial Sequence
  Description of Artificial Sequence: Synthetic oligonucleotide
guggggcccgacacucgug

SEQ ID NO: 3084926 - RNA, 19 nt, Artificial Sequence
  Description of Artificial Sequence: Synthetic oligonucleotide
gcuaguccacuggucggca

SEQ ID NO: 3084927 - RNA, 19 nt, Artificial Sequence
  Description of Artificial Sequence: Synthetic oligonucleotide
gccacccacgauguagauc

SEQ ID NO: 3084928 - RNA, 19 nt, Artificial Sequence
  Description of Artificial Sequence: Synthetic oligonucleotide
cgcuaguccacuggucggc

SEQ ID NO: 3084929 - RNA, 19 nt, Artificial Sequence
  Description of Artificial Sequence: Synthetic oligonucleotide
gcaaaggacucggggaagu

SEQ ID NO: 3084930 - RNA, 19 nt, Artificial Sequence
  Description of Artificial Sequence: Synthetic oligonucleotide
gccuccgacuggccggcgc

SEQ ID NO: 3084931 - RNA, 19 nt, Artificial Sequence
  Description of Artificial Sequence: Synthetic oligonucleotide
gggccacgcuaguccacug

SEQ ID NO: 3084932 - RNA, 19 nt, Artificial Sequence
  Description of Artificial Sequence: Synthetic oligonucleotide
gcgcgcauaggggccacgc

SEQ ID NO: 3084933 - RNA, 19 nt, Artificial Sequence
  Description of Artificial Sequence: Synthetic oligonucleotide
agccggccuccgacuggcc

SEQ ID NO: 3084934 - RNA, 19 nt, Artificial Sequence
  Description of Artificial Sequence: Synthetic oligonucleotide
cuaguccacuggucggcau

SEQ ID NO: 3084935 - RNA, 19 nt, Artificial Sequence
  Description of Artificial Sequence: Synthetic oligonucleotide
gcgaugccugcaaaggacu

SEQ ID NO: 3084936 - RNA, 19 nt, Artificial Sequence
  Description of Artificial Sequence: Synthetic oligonucleotide
gccuccaguuguagccacc

SEQ ID NO: 3084937 - RNA, 19 nt, Artificial Sequence
  Description of Artificial Sequence: Synthetic oligonucleotide
cucucccacucgucugucu

SEQ ID NO: 3084938 - RNA, 19 nt, Artificial Sequence
  Description of Artificial Sequence: Synthetic oligonucleotide
cagcgcggggaagcaggac

SEQ ID NO: 3084939 - RNA, 19 nt, Artificial Sequence
  Description of Artificial Sequence: Synthetic oligonucleotide
cccgugaccagcgcgggga

SEQ ID NO: 3084940 - RNA, 19 nt, Artificial Sequence
  Description of Artificial Sequence: Synthetic oligonucleotide
gcgcaagcgaugccugcaa

SEQ ID NO: 3084941 - RNA, 19 nt, Artificial Sequence
  Description of Artificial Sequence: Synthetic oligonucleotide
gccggcgcgcauaggggcc

SEQ ID NO: 3084942 - RNA, 19 nt, Artificial Sequence
  Description of Artificial Sequence: Synthetic oligonucleotide
cagccaggccuggaucaga

SEQ ID NO: 3084943 - RNA, 19 nt, Artificial Sequence
  Description of Artificial Sequence: Synthetic oligonucleotide
cccgacacucguggggaac

SEQ ID NO: 3084944 - RNA, 19 nt, Artificial Sequence
  Description of Artificial Sequence: Synthetic oligonucleotide
gcggggaagcaggacagcu

SEQ ID NO: 3084945 - RNA, 19 nt, Artificial Sequence
  Description of Artificial Sequence: Synthetic oligonucleotide
ccgacacucguggggaaca

SEQ ID NO: 3084946 - RNA, 19 nt, Artificial Sequence
  Description of Artificial Sequence: Synthetic oligonucleotide
ggcagcagccggccuccga

SEQ ID NO: 3084947 - RNA, 19 nt, Artificial Sequence
  Description of Artificial Sequence: Synthetic oligonucleotide
ccacgauguagaucuuccu

SEQ ID NO: 3084948 - RNA, 19 nt, Artificial Sequence
  Description of Artificial Sequence: Synthetic oligonucleotide
ggcgcgcauaggggccacg

SEQ ID NO: 3084949 - RNA, 19 nt, Artificial Sequence
  Description of Artificial Sequence: Synthetic oligonucleotide
cagcagccggccuccgacu

SEQ ID NO: 3084950 - RNA, 19 nt, Artificial Sequence
  Description of Artificial Sequence: Synthetic oligonucleotide
ccagcgcggggaagcagga

SEQ ID NO: 3084951 - RNA, 19 nt, Artificial Sequence
  Description of Artificial Sequence: Synthetic oligonucleotide
ggggccacgcuaguccacu

SEQ ID NO: 3084952 - RNA, 19 nt, Artificial Sequence
  Description of Artificial Sequence: Synthetic oligonucleotide
ggccuggaucagagcuacc

SEQ ID NO: 3084953 - RNA, 19 nt, Artificial Sequence
  Description of Artificial Sequence: Synthetic oligonucleotide
cgacacucguggggaacac

SEQ ID NO: 3084954 - RNA, 19 nt, Artificial Sequence
  Description of Artificial Sequence: Synthetic oligonucleotide
cgugaccagcgcggggaag

SEQ ID NO: 3084955 - RNA, 19 nt, Artificial Sequence
  Description of Artificial Sequence: Synthetic oligonucleotide
gcccgacacucguggggaa

SEQ ID NO: 3084956 - RNA, 19 nt, Artificial Sequence
  Description of Artificial Sequence: Synthetic oligonucleotide
gcacaaugcccgugacauu

SEQ ID NO: 3084957 - RNA, 19 nt, Artificial Sequence
  Description of Artificial Sequence: Synthetic oligonucleotide
cgcaagcgaugccugcaaa

SEQ ID NO: 3084958 - RNA, 19 nt, Artificial Sequence
  Description of Artificial Sequence: Synthetic oligonucleotide
cgcggggaagcaggacagc

SEQ ID NO: 3084959 - RNA, 19 nt, Artificial Sequence
  Description of Artificial Sequence: Synthetic oligonucleotide
ggccuccgacuggccggcg

SEQ ID NO: 3084960 - RNA, 19 nt, Artificial Sequence
  Description of Artificial Sequence: Synthetic oligonucleotide
cggccuccgacuggccggc

SEQ ID NO: 3084961 - RNA, 19 nt, Artificial Sequence
  Description of Artificial Sequence: Synthetic oligonucleotide
ccgugaccagcgcggggaa

SEQ ID NO: 3084962 - RNA, 19 nt, Artificial Sequence
  Description of Artificial Sequence: Synthetic oligonucleotide
ccgugacauuguucagccu

SEQ ID NO: 3084963 - RNA, 19 nt, Artificial Sequence
  Description of Artificial Sequence: Synthetic oligonucleotide
cacccacgauguagaucuu

SEQ ID NO: 3084964 - RNA, 19 nt, Artificial Sequence
  Description of Artificial Sequence: Synthetic oligonucleotide
ccggcgcgcauaggggcca

SEQ ID NO: 3084965 - RNA, 19 nt, Artificial Sequence
  Description of Artificial Sequence: Synthetic oligonucleotide
cggcaucgggcacguagua

SEQ ID NO: 3084966 - RNA, 19 nt, Artificial Sequence
  Description of Artificial Sequence: Synthetic oligonucleotide
cgcgcauaggggccacgcu

SEQ ID NO: 3084967 - RNA, 19 nt, Artificial Sequence
  Description of Artificial Sequence: Synthetic oligonucleotide
cgucugucucgguguugua

SEQ ID NO: 3084968 - RNA, 19 nt, Artificial Sequence
  Description of Artificial Sequence: Synthetic oligonucleotide
cccacucgucugucucggu

SEQ ID NO: 3084969 - RNA, 19 nt, Artificial Sequence
  Description of Artificial Sequence: Synthetic oligonucleotide
ccccagaaguggggcccga

SEQ ID NO: 3084970 - RNA, 19 nt, Artificial Sequence
  Description of Artificial Sequence: Synthetic oligonucleotide
cgacuggccggcgcgcaua

SEQ ID NO: 3084971 - RNA, 19 nt, Artificial Sequence
  Description of Artificial Sequence: Synthetic oligonucleotide
cggggaagugcaggucucu

SEQ ID NO: 3084972 - RNA, 19 nt, Artificial Sequence
  Description of Artificial Sequence: Synthetic oligonucleotide
ccgacuggccggcgcgcau

SEQ ID NO: 3084973 - RNA, 19 nt, Artificial Sequence
  Description of Artificial Sequence: Synthetic oligonucleotide
cggcgcgcauaggggccac

SEQ ID NO: 3084974 - RNA, 19 nt, Artificial Sequence
  Description of Artificial Sequence: Synthetic oligonucleotide
ggucggcaucgggcacgua

SEQ ID NO: 3084975 - RNA, 19 nt, Artificial Sequence
  Description of Artificial Sequence: Synthetic oligonucleotide
agauacuugggcuuguagc

SEQ ID NO: 3084976 - RNA, 19 nt, Artificial Sequence
  Description of Artificial Sequence: Synthetic oligonucleotide
ucaagcuccacaauacacg

SEQ ID NO: 3084977 - RNA, 19 nt, Artificial Sequence
  Description of Artificial Sequence: Synthetic oligonucleotide
gauacuugggcuuguagcc

SEQ ID NO: 3084978 - RNA, 19 nt, Artificial Sequence
  Description of Artificial Sequence: Synthetic oligonucleotide
aucacugcagaucgcaucc

SEQ ID NO: 3084979 - RNA, 19 nt, Artificial Sequence
  Description of Artificial Sequence: Synthetic oligonucleotide
auagccaucaccucucuuc

SEQ ID NO: 3084980 - RNA, 19 nt, Artificial Sequence
  Description of Artificial Sequence: Synthetic oligonucleotide
gagugaaccaacuucccgg

SEQ ID NO: 3084981 - RNA, 19 nt, Artificial Sequence
  Description of Artificial Sequence: Synthetic oligonucleotide
uuggagugaaccaacuucc

SEQ ID NO: 3084982 - RNA, 19 nt, Artificial Sequence
  Description of Artificial Sequence: Synthetic oligonucleotide
cuucaaagaacccagugac

SEQ ID NO: 3084983 - RNA, 19 nt, Artificial Sequence
  Description of Artificial Sequence: Synthetic oligonucleotide
aaagaacccagugaccugg

SEQ ID NO: 3084984 - RNA, 19 nt, Artificial Sequence
  Description of Artificial Sequence: Synthetic oligonucleotide
aauguccaggcauccaggg

SEQ ID NO: 3084985 - RNA, 19 nt, Artificial Sequence
  Description of Artificial Sequence: Synthetic oligonucleotide
uuuaauggcggucaccagu

SEQ ID NO: 3084986 - RNA, 19 nt, Artificial Sequence
  Description of Artificial Sequence: Synthetic oligonucleotide
caauacacgacucggacag

SEQ ID NO: 3084987 - RNA, 19 nt, Artificial Sequence
  Description of Artificial Sequence: Synthetic oligonucleotide
aauggcggucaccaguuuc

SEQ ID NO: 3084988 - RNA, 19 nt, Artificial Sequence
  Description of Artificial Sequence: Synthetic oligonucleotide
aacccagugaccuggggag

SEQ ID NO: 3084989 - RNA, 19 nt, Artificial Sequence
  Description of Artificial Sequence: Synthetic oligonucleotide
agugaaccaacuucccggc

SEQ ID NO: 3084990 - RNA, 19 nt, Artificial Sequence
  Description of Artificial Sequence: Synthetic oligonucleotide
ucaaagaacccagugaccu

SEQ ID NO: 3084991 - RNA, 19 nt, Artificial Sequence
  Description of Artificial Sequence: Synthetic oligonucleotide
uucacuggcacugagccag

SEQ ID NO: 3084992 - RNA, 19 nt, Artificial Sequence
  Description of Artificial Sequence: Synthetic oligonucleotide
uuucugugucuacauagcc

SEQ ID NO: 3084993 - RNA, 19 nt, Artificial Sequence
  Description of Artificial Sequence: Synthetic oligonucleotide
ugggcuuguagccucaagc

SEQ ID NO: 3084994 - RNA, 19 nt, Artificial Sequence
  Description of Artificial Sequence: Synthetic oligonucleotide
acuucaaagaacccaguga

SEQ ID NO: 3084995 - RNA, 19 nt, Artificial Sequence
  Description of Artificial Sequence: Synthetic oligonucleotide
uccacaauacacgacucgg

SEQ ID NO: 3084996 - RNA, 19 nt, Artificial Sequence
  Description of Artificial Sequence: Synthetic oligonucleotide
gaaacuugcuuucuguguc

SEQ ID NO: 3084997 - RNA, 19 nt, Artificial Sequence
  Description of Artificial Sequence: Synthetic oligonucleotide
cuuggagugaaccaacuuc

SEQ ID NO: 3084998 - RNA, 19 nt, Artificial Sequence
  Description of Artificial Sequence: Synthetic oligonucleotide
ucugugucuacauagccau

SEQ ID NO: 3084999 - RNA, 19 nt, Artificial Sequence
  Description of Artificial Sequence: Synthetic oligonucleotide
ugagcuggagauacuuggg

SEQ ID NO: 3085000 - RNA, 19 nt, Artificial Sequence
  Description of Artificial Sequence: Synthetic oligonucleotide
accaguuuccgaaacuugc

SEQ ID NO: 3085001 - RNA, 19 nt, Artificial Sequence
  Description of Artificial Sequence: Synthetic oligonucleotide
uguccaggcauccagggaa

SEQ ID NO: 3085002 - RNA, 19 nt, Artificial Sequence
  Description of Artificial Sequence: Synthetic oligonucleotide
ugugucuacauagccauca

SEQ ID NO: 3085003 - RNA, 19 nt, Artificial Sequence
  Description of Artificial Sequence: Synthetic oligonucleotide
agcuccacaauacacgacu

SEQ ID NO: 3085004 - RNA, 19 nt, Artificial Sequence
  Description of Artificial Sequence: Synthetic oligonucleotide
uucuccuugagcuggagau

SEQ ID NO: 3085005 - RNA, 19 nt, Artificial Sequence
  Description of Artificial Sequence: Synthetic oligonucleotide
uucaaagaacccagugacc

SEQ ID NO: 3085006 - RNA, 19 nt, Artificial Sequence
  Description of Artificial Sequence: Synthetic oligonucleotide
caaauguccaggcauccag

SEQ ID NO: 3085007 - RNA, 19 nt, Artificial Sequence
  Description of Artificial Sequence: Synthetic oligonucleotide
ugucacuucaaagaaccca

SEQ ID NO: 3085008 - RNA, 19 nt, Artificial Sequence
  Description of Artificial Sequence: Synthetic oligonucleotide
ugucuacauagccaucacc

SEQ ID NO: 3085009 - RNA, 19 nt, Artificial Sequence
  Description of Artificial Sequence: Synthetic oligonucleotide
cucaccacaaauguccagg

SEQ ID NO: 3085010 - RNA, 19 nt, Artificial Sequence
  Description of Artificial Sequence: Synthetic oligonucleotide
gucacuucaaagaacccag

SEQ ID NO: 3085011 - RNA, 19 nt, Artificial Sequence
  Description of Artificial Sequence: Synthetic oligonucleotide
gcuacugucacuucaaaga

SEQ ID NO: 3085012 - RNA, 19 nt, Artificial Sequence
  Description of Artificial Sequence: Synthetic oligonucleotide
cucaagcuccacaauacac

SEQ ID NO: 3085013 - RNA, 19 nt, Artificial Sequence
  Description of Artificial Sequence: Synthetic oligonucleotide
aaauguccaggcauccagg

SEQ ID NO: 3085014 - RNA, 19 nt, Artificial Sequence
  Description of Artificial Sequence: Synthetic oligonucleotide
aaacuugcuuucugugucu

SEQ ID NO: 3085015 - RNA, 19 nt, Artificial Sequence
  Description of Artificial Sequence: Synthetic oligonucleotide
gguucacuggcacugagcc

SEQ ID NO: 3085016 - RNA, 19 nt, Artificial Sequence
  Description of Artificial Sequence: Synthetic oligonucleotide
uguagccucaagcuccaca

SEQ ID NO: 3085017 - RNA, 19 nt, Artificial Sequence
  Description of Artificial Sequence: Synthetic oligonucleotide
cacaauacacgacucggac

SEQ ID NO: 3085018 - RNA, 19 nt, Artificial Sequence
  Description of Artificial Sequence: Synthetic oligonucleotide
uuaauggcggucaccaguu

SEQ ID NO: 3085019 - RNA, 19 nt, Artificial Sequence
  Description of Artificial Sequence: Synthetic oligonucleotide
acaauacacgacucggaca

SEQ ID NO: 3085020 - RNA, 19 nt, Artificial Sequence
  Description of Artificial Sequence: Synthetic oligonucleotide
aucaccucucuucuuggag

SEQ ID NO: 3085021 - RNA, 19 nt, Artificial Sequence
  Description of Artificial Sequence: Synthetic oligonucleotide
ucuucuuggagugaaccaa

SEQ ID NO: 3085022 - RNA, 19 nt, Artificial Sequence
  Description of Artificial Sequence: Synthetic oligonucleotide
uacauagccaucaccucuc

SEQ ID NO: 3085023 - RNA, 19 nt, Artificial Sequence
  Description of Artificial Sequence: Synthetic oligonucleotide
uccgaaacuugcuuucugu

SEQ ID NO: 3085024 - RNA, 19 nt, Artificial Sequence
  Description of Artificial Sequence: Synthetic oligonucleotide
gacucggacagcgagggcc

SEQ ID NO: 3085025 - RNA, 19 nt, Artificial Sequence
  Description of Artificial Sequence: Synthetic oligonucleotide
agccagggcagcuuuaaug

SEQ ID NO: 3085026 - RNA, 19 nt, Artificial Sequence
  Description of Artificial Sequence: Synthetic oligonucleotide
auacacgacucggacagcg

SEQ ID NO: 3085027 - RNA, 19 nt, Artificial Sequence
  Description of Artificial Sequence: Synthetic oligonucleotide
gccagggcagcuuuaaugg

SEQ ID NO: 3085028 - RNA, 19 nt, Artificial Sequence
  Description of Artificial Sequence: Synthetic oligonucleotide
ugaaccaacuucccggcua

SEQ ID NO: 3085029 - RNA, 19 nt, Artificial Sequence
  Description of Artificial Sequence: Synthetic oligonucleotide
ucaccucucuucuuggagu

SEQ ID NO: 3085030 - RNA, 19 nt, Artificial Sequence
  Description of Artificial Sequence: Synthetic oligonucleotide
ucaccacaaauguccaggc

SEQ ID NO: 3085031 - RNA, 19 nt, Artificial Sequence
  Description of Artificial Sequence: Synthetic oligonucleotide
gagcuggagauacuugggc

SEQ ID NO: 3085032 - RNA, 19 nt, Artificial Sequence
  Description of Artificial Sequence: Synthetic oligonucleotide
uacugucacuucaaagaac

SEQ ID NO: 3085033 - RNA, 19 nt, Artificial Sequence
  Description of Artificial Sequence: Synthetic oligonucleotide
aauacacgacucggacagc

SEQ ID NO: 3085034 - RNA, 19 nt, Artificial Sequence
  Description of Artificial Sequence: Synthetic oligonucleotide
agcuggagauacuugggcu

SEQ ID NO: 3085035 - RNA, 19 nt, Artificial Sequence
  Description of Artificial Sequence: Synthetic oligonucleotide
cacuucaaagaacccagug

SEQ ID NO: 3085036 - RNA, 19 nt, Artificial Sequence
  Description of Artificial Sequence: Synthetic oligonucleotide
ucuacauagccaucaccuc

SEQ ID NO: 3085037 - RNA, 19 nt, Artificial Sequence
  Description of Artificial Sequence: Synthetic oligonucleotide
cuucuuggagugaaccaac

SEQ ID NO: 3085038 - RNA, 19 nt, Artificial Sequence
  Description of Artificial Sequence: Synthetic oligonucleotide
uggagugaaccaacuuccc

SEQ ID NO: 3085039 - RNA, 19 nt, Artificial Sequence
  Description of Artificial Sequence: Synthetic oligonucleotide
acacgacucggacagcgag

SEQ ID NO: 3085040 - RNA, 19 nt, Artificial Sequence
  Description of Artificial Sequence: Synthetic oligonucleotide
guuuccgaaacuugcuuuc

SEQ ID NO: 3085041 - RNA, 19 nt, Artificial Sequence
  Description of Artificial Sequence: Synthetic oligonucleotide
ggagugaaccaacuucccg

SEQ ID NO: 3085042 - RNA, 19 nt, Artificial Sequence
  Description of Artificial Sequence: Synthetic oligonucleotide
auccagggaacucccguuc

SEQ ID NO: 3085043 - RNA, 19 nt, Artificial Sequence
  Description of Artificial Sequence: Synthetic oligonucleotide
uuccgaaacuugcuuucug

SEQ ID NO: 3085044 - RNA, 19 nt, Artificial Sequence
  Description of Artificial Sequence: Synthetic oligonucleotide
aguuuccgaaacuugcuuu

SEQ ID NO: 3085045 - RNA, 19 nt, Artificial Sequence
  Description of Artificial Sequence: Synthetic oligonucleotide
acuugcuuucugugucuac

SEQ ID NO: 3085046 - RNA, 19 nt, Artificial Sequence
  Description of Artificial Sequence: Synthetic oligonucleotide
gggccaucacugcagaucg

SEQ ID NO: 3085047 - RNA, 19 nt, Artificial Sequence
  Description of Artificial Sequence: Synthetic oligonucleotide
uucuuggagugaaccaacu

SEQ ID NO: 3085048 - RNA, 19 nt, Artificial Sequence
  Description of Artificial Sequence: Synthetic oligonucleotide
agggccaucacugcagauc

SEQ ID NO: 3085049 - RNA, 19 nt, Artificial Sequence
  Description of Artificial Sequence: Synthetic oligonucleotide
gaacccagugaccugggga

SEQ ID NO: 3085050 - RNA, 19 nt, Artificial Sequence
  Description of Artificial Sequence: Synthetic oligonucleotide
cuugagcuggagauacuug

SEQ ID NO: 3085051 - RNA, 19 nt, Artificial Sequence
  Description of Artificial Sequence: Synthetic oligonucleotide
gaaccaacuucccggcuac

SEQ ID NO: 3085052 - RNA, 19 nt, Artificial Sequence
  Description of Artificial Sequence: Synthetic oligonucleotide
acgacucggacagcgaggg

SEQ ID NO: 3085053 - RNA, 19 nt, Artificial Sequence
  Description of Artificial Sequence: Synthetic oligonucleotide
ucccguucuagcuucuccu

SEQ ID NO: 3085054 - RNA, 19 nt, Artificial Sequence
  Description of Artificial Sequence: Synthetic oligonucleotide
guagccucaagcuccacaa

SEQ ID NO: 3085055 - RNA, 19 nt, Artificial Sequence
  Description of Artificial Sequence: Synthetic oligonucleotide
cuagcuucuccuugagcug

SEQ ID NO: 3085056 - RNA, 19 nt, Artificial Sequence
  Description of Artificial Sequence: Synthetic oligonucleotide
caagcuccacaauacacga

SEQ ID NO: 3085057 - RNA, 19 nt, Artificial Sequence
  Description of Artificial Sequence: Synthetic oligonucleotide
ucuuggagugaaccaacuu

SEQ ID NO: 3085058 - RNA, 19 nt, Artificial Sequence
  Description of Artificial Sequence: Synthetic oligonucleotide
gcuuguagccucaagcucc

SEQ ID NO: 3085059 - RNA, 19 nt, Artificial Sequence
  Description of Artificial Sequence: Synthetic oligonucleotide
ccccucaccacaaaugucc

SEQ ID NO: 3085060 - RNA, 19 nt, Artificial Sequence
  Description of Artificial Sequence: Synthetic oligonucleotide
caucacugcagaucgcauc

SEQ ID NO: 3085061 - RNA, 19 nt, Artificial Sequence
  Description of Artificial Sequence: Synthetic oligonucleotide
cugcagaucgcauccccgc

SEQ ID NO: 3085062 - RNA, 19 nt, Artificial Sequence
  Description of Artificial Sequence: Synthetic oligonucleotide
acuucccggcuacugucac

SEQ ID NO: 3085063 - RNA, 19 nt, Artificial Sequence
  Description of Artificial Sequence: Synthetic oligonucleotide
gucuacauagccaucaccu

SEQ ID NO: 3085064 - RNA, 19 nt, Artificial Sequence
  Description of Artificial Sequence: Synthetic oligonucleotide
ucacuucaaagaacccagu

SEQ ID NO: 3085065 - RNA, 19 nt, Artificial Sequence
  Description of Artificial Sequence: Synthetic oligonucleotide
gaacucccguucuagcuuc

SEQ ID NO: 3085066 - RNA, 19 nt, Artificial Sequence
  Description of Artificial Sequence: Synthetic oligonucleotide
cuuuaauggcggucaccag

SEQ ID NO: 3085067 - RNA, 19 nt, Artificial Sequence
  Description of Artificial Sequence: Synthetic oligonucleotide
cacgacucggacagcgagg

SEQ ID NO: 3085068 - RNA, 19 nt, Artificial Sequence
  Description of Artificial Sequence: Synthetic oligonucleotide
caaagaacccagugaccug

SEQ ID NO: 3085069 - RNA, 19 nt, Artificial Sequence
  Description of Artificial Sequence: Synthetic oligonucleotide
aagcuccacaauacacgac

SEQ ID NO: 3085070 - RNA, 19 nt, Artificial Sequence
  Description of Artificial Sequence: Synthetic oligonucleotide
cuccuugagcuggagauac

SEQ ID NO: 3085071 - RNA, 19 nt, Artificial Sequence
  Description of Artificial Sequence: Synthetic oligonucleotide
ugcagaucgcauccccgca

SEQ ID NO: 3085072 - RNA, 19 nt, Artificial Sequence
  Description of Artificial Sequence: Synthetic oligonucleotide
ggcuacugucacuucaaag

SEQ ID NO: 3085073 - RNA, 19 nt, Artificial Sequence
  Description of Artificial Sequence: Synthetic oligonucleotide
cuacugucacuucaaagaa

SEQ ID NO: 3085074 - RNA, 19 nt, Artificial Sequence
  Description of Artificial Sequence: Synthetic oligonucleotide
agaacccagugaccugggg

SEQ ID NO: 3085075 - RNA, 19 nt, Artificial Sequence
  Description of Artificial Sequence: Synthetic oligonucleotide
cacaaauguccaggcaucc

SEQ ID NO: 3085076 - RNA, 19 nt, Artificial Sequence
  Description of Artificial Sequence: Synthetic oligonucleotide
cugucacuucaaagaaccc

SEQ ID NO: 3085077 - RNA, 19 nt, Artificial Sequence
  Description of Artificial Sequence: Synthetic oligonucleotide
cuggcacugagccagggca

SEQ ID NO: 3085078 - RNA, 19 nt, Artificial Sequence
  Description of Artificial Sequence: Synthetic oligonucleotide
ucaccaguuuccgaaacuu

SEQ ID NO: 3085079 - RNA, 19 nt, Artificial Sequence
  Description of Artificial Sequence: Synthetic oligonucleotide
cuugcuuucugugucuaca

SEQ ID NO: 3085080 - RNA, 19 nt, Artificial Sequence
  Description of Artificial Sequence: Synthetic oligonucleotide
uugcuuucugugucuacau

SEQ ID NO: 3085081 - RNA, 19 nt, Artificial Sequence
  Description of Artificial Sequence: Synthetic oligonucleotide
uugggcuuguagccucaag

SEQ ID NO: 3085082 - RNA, 19 nt, Artificial Sequence
  Description of Artificial Sequence: Synthetic oligonucleotide
acugcagaucgcauccccg

SEQ ID NO: 3085083 - RNA, 19 nt, Artificial Sequence
  Description of Artificial Sequence: Synthetic oligonucleotide
uuuccgaaacuugcuuucu

SEQ ID NO: 3085084 - RNA, 19 nt, Artificial Sequence
  Description of Artificial Sequence: Synthetic oligonucleotide
caccaguuuccgaaacuug

SEQ ID NO: 3085085 - RNA, 19 nt, Artificial Sequence
  Description of Artificial Sequence: Synthetic oligonucleotide
caacuucccggcuacuguc

SEQ ID NO: 3085086 - RNA, 19 nt, Artificial Sequence
  Description of Artificial Sequence: Synthetic oligonucleotide
caccucucuucuuggagug

SEQ ID NO: 3085087 - RNA, 19 nt, Artificial Sequence
  Description of Artificial Sequence: Synthetic oligonucleotide
gcuuuaauggcggucacca

SEQ ID NO: 3085088 - RNA, 19 nt, Artificial Sequence
  Description of Artificial Sequence: Synthetic oligonucleotide
cacugcagaucgcaucccc

SEQ ID NO: 3085089 - RNA, 19 nt, Artificial Sequence
  Description of Artificial Sequence: Synthetic oligonucleotide
aguccccucaccacaaaug

SEQ ID NO: 3085090 - RNA, 19 nt, Artificial Sequence
  Description of Artificial Sequence: Synthetic oligonucleotide
aagaacccagugaccuggg

SEQ ID NO: 3085091 - RNA, 19 nt, Artificial Sequence
  Description of Artificial Sequence: Synthetic oligonucleotide
uacacgacucggacagcga

SEQ ID NO: 3085092 - RNA, 19 nt, Artificial Sequence
  Description of Artificial Sequence: Synthetic oligonucleotide
caggacccugccuccaggg

SEQ ID NO: 3085093 - RNA, 19 nt, Artificial Sequence
  Description of Artificial Sequence: Synthetic oligonucleotide
ugcuuucugugucuacaua

SEQ ID NO: 3085094 - RNA, 19 nt, Artificial Sequence
  Description of Artificial Sequence: Synthetic oligonucleotide
gccaucaccucucuucuug

SEQ ID NO: 3085095 - RNA, 19 nt, Artificial Sequence
  Description of Artificial Sequence: Synthetic oligonucleotide
cuacauagccaucaccucu

SEQ ID NO: 3085096 - RNA, 19 nt, Artificial Sequence
  Description of Artificial Sequence: Synthetic oligonucleotide
agcgagggccaucacugca

SEQ ID NO: 3085097 - RNA, 19 nt, Artificial Sequence
  Description of Artificial Sequence: Synthetic oligonucleotide
uccaggguucacuggcacu

SEQ ID NO: 3085098 - RNA, 19 nt, Artificial Sequence
  Description of Artificial Sequence: Synthetic oligonucleotide
cuggagauacuugggcuug

SEQ ID NO: 3085099 - RNA, 19 nt, Artificial Sequence
  Description of Artificial Sequence: Synthetic oligonucleotide
ucacuggcacugagccagg

SEQ ID NO: 3085100 - RNA, 19 nt, Artificial Sequence
  Description of Artificial Sequence: Synthetic oligonucleotide
ugccuccaggguucacugg

SEQ ID NO: 3085101 - RNA, 19 nt, Artificial Sequence
  Description of Artificial Sequence: Synthetic oligonucleotide
acaaauguccaggcaucca

SEQ ID NO: 3085102 - RNA, 19 nt, Artificial Sequence
  Description of Artificial Sequence: Synthetic oligonucleotide
auacuugggcuuguagccu

SEQ ID NO: 3085103 - RNA, 19 nt, Artificial Sequence
  Description of Artificial Sequence: Synthetic oligonucleotide
aacuucccggcuacuguca

SEQ ID NO: 3085104 - RNA, 19 nt, Artificial Sequence
  Description of Artificial Sequence: Synthetic oligonucleotide
cugccuccaggguucacug

SEQ ID NO: 3085105 - RNA, 19 nt, Artificial Sequence
  Description of Artificial Sequence: Synthetic oligonucleotide
cagggaacucccguucuag

SEQ ID NO: 3085106 - RNA, 19 nt, Artificial Sequence
  Description of Artificial Sequence: Synthetic oligonucleotide
uccccucaccacaaauguc

SEQ ID NO: 3085107 - RNA, 19 nt, Artificial Sequence
  Description of Artificial Sequence: Synthetic oligonucleotide
uggggaguccccucaccac

SEQ ID NO: 3085108 - RNA, 19 nt, Artificial Sequence
  Description of Artificial Sequence: Synthetic oligonucleotide
cuuguagccucaagcucca

SEQ ID NO: 3085109 - RNA, 19 nt, Artificial Sequence
  Description of Artificial Sequence: Synthetic oligonucleotide
acugagccagggcagcuuu

SEQ ID NO: 3085110 - RNA, 19 nt, Artificial Sequence
  Description of Artificial Sequence: Synthetic oligonucleotide
ugagccagggcagcuuuaa

SEQ ID NO: 3085111 - RNA, 19 nt, Artificial Sequence
  Description of Artificial Sequence: Synthetic oligonucleotide
uucccggcuacugucacuu

SEQ ID NO: 3085112 - RNA, 19 nt, Artificial Sequence
  Description of Artificial Sequence: Synthetic oligonucleotide
accuggggaguccccucac

SEQ ID NO: 3085113 - RNA, 19 nt, Artificial Sequence
  Description of Artificial Sequence: Synthetic oligonucleotide
gcagcuuuaauggcgguca

SEQ ID NO: 3085114 - RNA, 19 nt, Artificial Sequence
  Description of Artificial Sequence: Synthetic oligonucleotide
gacagcgagggccaucacu

SEQ ID NO: 3085115 - RNA, 19 nt, Artificial Sequence
  Description of Artificial Sequence: Synthetic oligonucleotide
uggcggucaccaguuuccg

SEQ ID NO: 3085116 - RNA, 19 nt, Artificial Sequence
  Description of Artificial Sequence: Synthetic oligonucleotide
acauagccaucaccucucu

SEQ ID NO: 3085117 - RNA, 19 nt, Artificial Sequence
  Description of Artificial Sequence: Synthetic oligonucleotide
agugaccuggggagucccc

SEQ ID NO: 3085118 - RNA, 19 nt, Artificial Sequence
  Description of Artificial Sequence: Synthetic oligonucleotide
cucucuucuuggagugaac

SEQ ID NO: 3085119 - RNA, 19 nt, Artificial Sequence
  Description of Artificial Sequence: Synthetic oligonucleotide
aacuugcuuucugugucua

SEQ ID NO: 3085120 - RNA, 19 nt, Artificial Sequence
  Description of Artificial Sequence: Synthetic oligonucleotide
gccuccaggguucacuggc

SEQ ID NO: 3085121 - RNA, 19 nt, Artificial Sequence
  Description of Artificial Sequence: Synthetic oligonucleotide
uccuugagcuggagauacu

SEQ ID NO: 3085122 - RNA, 19 nt, Artificial Sequence
  Description of Artificial Sequence: Synthetic oligonucleotide
ccgaaacuugcuuucugug

SEQ ID NO: 3085123 - RNA, 19 nt, Artificial Sequence
  Description of Artificial Sequence: Synthetic oligonucleotide
cuccaggguucacuggcac

SEQ ID NO: 3085124 - RNA, 19 nt, Artificial Sequence
  Description of Artificial Sequence: Synthetic oligonucleotide
guccccucaccacaaaugu

SEQ ID NO: 3085125 - RNA, 19 nt, Artificial Sequence
  Description of Artificial Sequence: Synthetic oligonucleotide
ggcuuguagccucaagcuc

SEQ ID NO: 3085126 - RNA, 19 nt, Artificial Sequence
  Description of Artificial Sequence: Synthetic oligonucleotide
ccacaaauguccaggcauc

SEQ ID NO: 3085127 - RNA, 19 nt, Artificial Sequence
  Description of Artificial Sequence: Synthetic oligonucleotide
cuggggaguccccucacca

SEQ ID NO: 3085128 - RNA, 19 nt, Artificial Sequence
  Description of Artificial Sequence: Synthetic oligonucleotide
ucuccuugagcuggagaua

SEQ ID NO: 3085129 - RNA, 19 nt, Artificial Sequence
  Description of Artificial Sequence: Synthetic oligonucleotide
guucacuggcacugagcca

SEQ ID NO: 3085130 - RNA, 19 nt, Artificial Sequence
  Description of Artificial Sequence: Synthetic oligonucleotide
gaccuggggaguccccuca

SEQ ID NO: 3085131 - RNA, 19 nt, Artificial Sequence
  Description of Artificial Sequence: Synthetic oligonucleotide
ggucaccaguuuccgaaac

SEQ ID NO: 3085132 - RNA, 19 nt, Artificial Sequence
  Description of Artificial Sequence: Synthetic oligonucleotide
gacccugccuccaggguuc

SEQ ID NO: 3085133 - RNA, 19 nt, Artificial Sequence
  Description of Artificial Sequence: Synthetic oligonucleotide
ugaccuggggaguccccuc

SEQ ID NO: 3085134 - RNA, 19 nt, Artificial Sequence
  Description of Artificial Sequence: Synthetic oligonucleotide
cugugucuacauagccauc

SEQ ID NO: 3085135 - RNA, 19 nt, Artificial Sequence
  Description of Artificial Sequence: Synthetic oligonucleotide
aggacccugccuccagggu

SEQ ID NO: 3085136 - RNA, 19 nt, Artificial Sequence
  Description of Artificial Sequence: Synthetic oligonucleotide
gccucaagcuccacaauac

SEQ ID NO: 3085137 - RNA, 19 nt, Artificial Sequence
  Description of Artificial Sequence: Synthetic oligonucleotide
gcggucaccaguuuccgaa

SEQ ID NO: 3085138 - RNA, 19 nt, Artificial Sequence
  Description of Artificial Sequence: Synthetic oligonucleotide
caucaccucucuucuugga

SEQ ID NO: 3085139 - RNA, 19 nt, Artificial Sequence
  Description of Artificial Sequence: Synthetic oligonucleotide
cagcuuuaauggcggucac

SEQ ID NO: 3085140 - RNA, 19 nt, Artificial Sequence
  Description of Artificial Sequence: Synthetic oligonucleotide
ccaggguucacuggcacug

SEQ ID NO: 3085141 - RNA, 19 nt, Artificial Sequence
  Description of Artificial Sequence: Synthetic oligonucleotide
gucaccaguuuccgaaacu

SEQ ID NO: 3085142 - RNA, 19 nt, Artificial Sequence
  Description of Artificial Sequence: Synthetic oligonucleotide
cagcgagggccaucacugc

SEQ ID NO: 3085143 - RNA, 19 nt, Artificial Sequence
  Description of Artificial Sequence: Synthetic oligonucleotide
caccacaaauguccaggca

SEQ ID NO: 3085144 - RNA, 19 nt, Artificial Sequence
  Description of Artificial Sequence: Synthetic oligonucleotide
uaauggcggucaccaguuu

SEQ ID NO: 3085145 - RNA, 19 nt, Artificial Sequence
  Description of Artificial Sequence: Synthetic oligonucleotide
acucggacagcgagggcca

SEQ ID NO: 3085146 - RNA, 19 nt, Artificial Sequence
  Description of Artificial Sequence: Synthetic oligonucleotide
aggaggucccaggacccug

SEQ ID NO: 3085147 - RNA, 19 nt, Artificial Sequence
  Description of Artificial Sequence: Synthetic oligonucleotide
gggcuuguagccucaagcu

SEQ ID NO: 3085148 - RNA, 19 nt, Artificial Sequence
  Description of Artificial Sequence: Synthetic oligonucleotide
ccagggcagcuuuaauggc

SEQ ID NO: 3085149 - RNA, 19 nt, Artificial Sequence
  Description of Artificial Sequence: Synthetic oligonucleotide
ggggaguccccucaccaca

SEQ ID NO: 3085150 - RNA, 19 nt, Artificial Sequence
  Description of Artificial Sequence: Synthetic oligonucleotide
uccaggcauccagggaacu

SEQ ID NO: 3085151 - RNA, 19 nt, Artificial Sequence
  Description of Artificial Sequence: Synthetic oligonucleotide
gcagaucgcauccccgcac

SEQ ID NO: 3085152 - RNA, 19 nt, Artificial Sequence
  Description of Artificial Sequence: Synthetic oligonucleotide
cagugaccuggggaguccc

SEQ ID NO: 3085153 - RNA, 19 nt, Artificial Sequence
  Description of Artificial Sequence: Synthetic oligonucleotide
aaccaacuucccggcuacu

SEQ ID NO: 3085154 - RNA, 19 nt, Artificial Sequence
  Description of Artificial Sequence: Synthetic oligonucleotide
gccaucacugcagaucgca

SEQ ID NO: 3085155 - RNA, 19 nt, Artificial Sequence
  Description of Artificial Sequence: Synthetic oligonucleotide
ggguucacuggcacugagc

SEQ ID NO: 3085156 - RNA, 19 nt, Artificial Sequence
  Description of Artificial Sequence: Synthetic oligonucleotide
cacuggcacugagccaggg

SEQ ID NO: 3085157 - RNA, 19 nt, Artificial Sequence
  Description of Artificial Sequence: Synthetic oligonucleotide
gcgagggccaucacugcag

SEQ ID NO: 3085158 - RNA, 19 nt, Artificial Sequence
  Description of Artificial Sequence: Synthetic oligonucleotide
ccacaauacacgacucgga

SEQ ID NO: 3085159 - RNA, 19 nt, Artificial Sequence
  Description of Artificial Sequence: Synthetic oligonucleotide
aacucccguucuagcuucu

SEQ ID NO: 3085160 - RNA, 19 nt, Artificial Sequence
  Description of Artificial Sequence: Synthetic oligonucleotide
ccguucuagcuucuccuug

SEQ ID NO: 3085161 - RNA, 19 nt, Artificial Sequence
  Description of Artificial Sequence: Synthetic oligonucleotide
gaguccccucaccacaaau

SEQ ID NO: 3085162 - RNA, 19 nt, Artificial Sequence
  Description of Artificial Sequence: Synthetic oligonucleotide
ccucaccacaaauguccag

SEQ ID NO: 3085163 - RNA, 19 nt, Artificial Sequence
  Description of Artificial Sequence: Synthetic oligonucleotide
ggcagcuuuaauggcgguc

SEQ ID NO: 3085164 - RNA, 19 nt, Artificial Sequence
  Description of Artificial Sequence: Synthetic oligonucleotide
ggcacugagccagggcagc

SEQ ID NO: 3085165 - RNA, 19 nt, Artificial Sequence
  Description of Artificial Sequence: Synthetic oligonucleotide
accucucuucuuggaguga

SEQ ID NO: 3085166 - RNA, 19 nt, Artificial Sequence
  Description of Artificial Sequence: Synthetic oligonucleotide
ggcauccagggaacucccg

SEQ ID NO: 3085167 - RNA, 19 nt, Artificial Sequence
  Description of Artificial Sequence: Synthetic oligonucleotide
ggaggucccaggacccugc

SEQ ID NO: 3085168 - RNA, 19 nt, Artificial Sequence
  Description of Artificial Sequence: Synthetic oligonucleotide
ggaacucccguucuagcuu

SEQ ID NO: 3085169 - RNA, 19 nt, Artificial Sequence
  Description of Artificial Sequence: Synthetic oligonucleotide
ccucaagcuccacaauaca

SEQ ID NO: 3085170 - RNA, 19 nt, Artificial Sequence
  Description of Artificial Sequence: Synthetic oligonucleotide
caguuuccgaaacuugcuu

SEQ ID NO: 3085171 - RNA, 19 nt, Artificial Sequence
  Description of Artificial Sequence: Synthetic oligonucleotide
gcuggagauacuugggcuu

SEQ ID NO: 3085172 - RNA, 19 nt, Artificial Sequence
  Description of Artificial Sequence: Synthetic oligonucleotide
acccagugaccuggggagu

SEQ ID NO: 3085173 - RNA, 19 nt, Artificial Sequence
  Description of Artificial Sequence: Synthetic oligonucleotide
ucggacagcgagggccauc

SEQ ID NO: 3085174 - RNA, 19 nt, Artificial Sequence
  Description of Artificial Sequence: Synthetic oligonucleotide
gcauccagggaacucccgu

SEQ ID NO: 3085175 - RNA, 19 nt, Artificial Sequence
  Description of Artificial Sequence: Synthetic oligonucleotide
gugaaccaacuucccggcu

SEQ ID NO: 3085176 - RNA, 19 nt, Artificial Sequence
  Description of Artificial Sequence: Synthetic oligonucleotide
ccuggggaguccccucacc

SEQ ID NO: 3085177 - RNA, 19 nt, Artificial Sequence
  Description of Artificial Sequence: Synthetic oligonucleotide
agcuucuccuugagcugga

SEQ ID NO: 3085178 - RNA, 19 nt, Artificial Sequence
  Description of Artificial Sequence: Synthetic oligonucleotide
uuguagccucaagcuccac

SEQ ID NO: 3085179 - RNA, 19 nt, Artificial Sequence
  Description of Artificial Sequence: Synthetic oligonucleotide
ccaguuuccgaaacuugcu

SEQ ID NO: 3085180 - RNA, 19 nt, Artificial Sequence
  Description of Artificial Sequence: Synthetic oligonucleotide
cauccagggaacucccguu

SEQ ID NO: 3085181 - RNA, 19 nt, Artificial Sequence
  Description of Artificial Sequence: Synthetic oligonucleotide
cgaaacuugcuuucugugu

SEQ ID NO: 3085182 - RNA, 19 nt, Artificial Sequence
  Description of Artificial Sequence: Synthetic oligonucleotide
ucccggcuacugucacuuc

SEQ ID NO: 3085183 - RNA, 19 nt, Artificial Sequence
  Description of Artificial Sequence: Synthetic oligonucleotide
cccggcuacugucacuuca

SEQ ID NO: 3085184 - RNA, 19 nt, Artificial Sequence
  Description of Artificial Sequence: Synthetic oligonucleotide
ccagugaccuggggagucc

SEQ ID NO: 3085185 - RNA, 19 nt, Artificial Sequence
  Description of Artificial Sequence: Synthetic oligonucleotide
gugaccuggggaguccccu

SEQ ID NO: 3085186 - RNA, 19 nt, Artificial Sequence
  Description of Artificial Sequence: Synthetic oligonucleotide
ggcggucaccaguuuccga

SEQ ID NO: 3085187 - RNA, 19 nt, Artificial Sequence
  Description of Artificial Sequence: Synthetic oligonucleotide
cccucaccacaaaugucca

SEQ ID NO: 3085188 - RNA, 19 nt, Artificial Sequence
  Description of Artificial Sequence: Synthetic oligonucleotide
caggguucacuggcacuga

SEQ ID NO: 3085189 - RNA, 19 nt, Artificial Sequence
  Description of Artificial Sequence: Synthetic oligonucleotide
cuucccggcuacugucacu

SEQ ID NO: 3085190 - RNA, 19 nt, Artificial Sequence
  Description of Artificial Sequence: Synthetic oligonucleotide
gagccagggcagcuuuaau

SEQ ID NO: 3085191 - RNA, 19 nt, Artificial Sequence
  Description of Artificial Sequence: Synthetic oligonucleotide
cugagccagggcagcuuua

SEQ ID NO: 3085192 - RNA, 19 nt, Artificial Sequence
  Description of Artificial Sequence: Synthetic oligonucleotide
ccaacuucccggcuacugu

SEQ ID NO: 3085193 - RNA, 19 nt, Artificial Sequence
  Description of Artificial Sequence: Synthetic oligonucleotide
gagggccaucacugcagau

SEQ ID NO: 3085194 - RNA, 19 nt, Artificial Sequence
  Description of Artificial Sequence: Synthetic oligonucleotide
ccggcuacugucacuucaa

SEQ ID NO: 3085195 - RNA, 19 nt, Artificial Sequence
  Description of Artificial Sequence: Synthetic oligonucleotide
ggacccugccuccaggguu

SEQ ID NO: 3085196 - RNA, 19 nt, Artificial Sequence
  Description of Artificial Sequence: Synthetic oligonucleotide
cccaggacccugccuccag

SEQ ID NO: 3085197 - RNA, 19 nt, Artificial Sequence
  Description of Artificial Sequence: Synthetic oligonucleotide
cccagugaccuggggaguc

SEQ ID NO: 3085198 - RNA, 19 nt, Artificial Sequence
  Description of Artificial Sequence: Synthetic oligonucleotide
ggagauacuugggcuugua

SEQ ID NO: 3085199 - RNA, 19 nt, Artificial Sequence
  Description of Artificial Sequence: Synthetic oligonucleotide
ccuccaggguucacuggca

SEQ ID NO: 3085200 - RNA, 19 nt, Artificial Sequence
  Description of Artificial Sequence: Synthetic oligonucleotide
cuugggcuuguagccucaa

SEQ ID NO: 3085201 - RNA, 19 nt, Artificial Sequence
  Description of Artificial Sequence: Synthetic oligonucleotide
gggaguccccucaccacaa

SEQ ID NO: 3085202 - RNA, 19 nt, Artificial Sequence
  Description of Artificial Sequence: Synthetic oligonucleotide
cauagccaucaccucucuu

SEQ ID NO: 3085203 - RNA, 19 nt, Artificial Sequence
  Description of Artificial Sequence: Synthetic oligonucleotide
ggccaucacugcagaucgc

SEQ ID NO: 3085204 - RNA, 19 nt, Artificial Sequence
  Description of Artificial Sequence: Synthetic oligonucleotide
ggaguccccucaccacaaa

SEQ ID NO: 3085205 - RNA, 19 nt, Artificial Sequence
  Description of Artificial Sequence: Synthetic oligonucleotide
ggacagcgagggccaucac

SEQ ID NO: 3085206 - RNA, 19 nt, Artificial Sequence
  Description of Artificial Sequence: Synthetic oligonucleotide
cggacagcgagggccauca

SEQ ID NO: 3085207 - RNA, 19 nt, Artificial Sequence
  Description of Artificial Sequence: Synthetic oligonucleotide
acccugccuccaggguuca

SEQ ID NO: 3085208 - RNA, 19 nt, Artificial Sequence
  Description of Artificial Sequence: Synthetic oligonucleotide
ccuugagcuggagauacuu

SEQ ID NO: 3085209 - RNA, 19 nt, Artificial Sequence
  Description of Artificial Sequence: Synthetic oligonucleotide
ccagggaacucccguucua

SEQ ID NO: 3085210 - RNA, 19 nt, Artificial Sequence
  Description of Artificial Sequence: Synthetic oligonucleotide
ccugccuccaggguucacu

SEQ ID NO: 3085211 - RNA, 19 nt, Artificial Sequence
  Description of Artificial Sequence: Synthetic oligonucleotide
cgagggccaucacugcaga

SEQ ID NO: 3085212 - RNA, 19 nt, Artificial Sequence
  Description of Artificial Sequence: Synthetic oligonucleotide
ccaucacugcagaucgcau

SEQ ID NO: 3085213 - RNA, 19 nt, Artificial Sequence
  Description of Artificial Sequence: Synthetic oligonucleotide
gggcagcuuuaauggcggu

SEQ ID NO: 3085214 - RNA, 19 nt, Artificial Sequence
  Description of Artificial Sequence: Synthetic oligonucleotide
cgacucggacagcgagggc

SEQ ID NO: 3085215 - RNA, 19 nt, Artificial Sequence
  Description of Artificial Sequence: Synthetic oligonucleotide
cacugagccagggcagcuu

SEQ ID NO: 3085216 - RNA, 19 nt, Artificial Sequence
  Description of Artificial Sequence: Synthetic oligonucleotide
cggucaccaguuuccgaaa

SEQ ID NO: 3085217 - RNA, 19 nt, Artificial Sequence
  Description of Artificial Sequence: Synthetic oligonucleotide
gcacugagccagggcagcu

SEQ ID NO: 3085218 - RNA, 19 nt, Artificial Sequence
  Description of Artificial Sequence: Synthetic oligonucleotide
cccguucuagcuucuccuu

SEQ ID NO: 3085219 - RNA, 19 nt, Artificial Sequence
  Description of Artificial Sequence: Synthetic oligonucleotide
cggcuacugucacuucaaa

SEQ ID NO: 3085220 - RNA, 19 nt, Artificial Sequence
  Description of Artificial Sequence: Synthetic oligonucleotide
cucggacagcgagggccau

SEQ ID NO: 3085221 - RNA, 19 nt, Artificial Sequence
  Description of Artificial Sequence: Synthetic oligonucleotide
cccugccuccaggguucac

SEQ ID NO: 3085222 - RNA, 19 nt, Artificial Sequence
  Description of Artificial Sequence: Synthetic oligonucleotide
uccacuuccacacagaugg

SEQ ID NO: 3085223 - RNA, 19 nt, Artificial Sequence
  Description of Artificial Sequence: Synthetic oligonucleotide
aaagugaucuuccuuagag

SEQ ID NO: 3085224 - RNA, 19 nt, Artificial Sequence
  Description of Artificial Sequence: Synthetic oligonucleotide
aacagcuucauucucagug

SEQ ID NO: 3085225 - RNA, 19 nt, Artificial Sequence
  Description of Artificial Sequence: Synthetic oligonucleotide
aaacugggcuucuaggucc

SEQ ID NO: 3085226 - RNA, 19 nt, Artificial Sequence
  Description of Artificial Sequence: Synthetic oligonucleotide
uugagcauggugaaguagg

SEQ ID NO: 3085227 - RNA, 19 nt, Artificial Sequence
  Description of Artificial Sequence: Synthetic oligonucleotide
ucuuccuuagaguuggagg

SEQ ID NO: 3085228 - RNA, 19 nt, Artificial Sequence
  Description of Artificial Sequence: Synthetic oligonucleotide
cuuccuuagaguuggaggc

SEQ ID NO: 3085229 - RNA, 19 nt, Artificial Sequence
  Description of Artificial Sequence: Synthetic oligonucleotide
ugaucuuccuuagaguugg

SEQ ID NO: 3085230 - RNA, 19 nt, Artificial Sequence
  Description of Artificial Sequence: Synthetic oligonucleotide
uuccuugucacuuccuggg

SEQ ID NO: 3085231 - RNA, 19 nt, Artificial Sequence
  Description of Artificial Sequence: Synthetic oligonucleotide
gaugaaacugggcuucuag

SEQ ID NO: 3085232 - RNA, 19 nt, Artificial Sequence
  Description of Artificial Sequence: Synthetic oligonucleotide
guaaggaugugauggaggc

SEQ ID NO: 3085233 - RNA, 19 nt, Artificial Sequence
  Description of Artificial Sequence: Synthetic oligonucleotide
uucgcuaccggccaccuug

SEQ ID NO: 3085234 - RNA, 19 nt, Artificial Sequence
  Description of Artificial Sequence: Synthetic oligonucleotide
uuuccuugucacuuccugg

SEQ ID NO: 3085235 - RNA, 19 nt, Artificial Sequence
  Description of Artificial Sequence: Synthetic oligonucleotide
agaagugcagaugaaacug

SEQ ID NO: 3085236 - RNA, 19 nt, Artificial Sequence
  Description of Artificial Sequence: Synthetic oligonucleotide
augaaacugggcuucuagg

SEQ ID NO: 3085237 - RNA, 19 nt, Artificial Sequence
  Description of Artificial Sequence: Synthetic oligonucleotide
ucauucucagugucgcugg

SEQ ID NO: 3085238 - RNA, 19 nt, Artificial Sequence
  Description of Artificial Sequence: Synthetic oligonucleotide
uagaguuggaggccuacag

SEQ ID NO: 3085239 - RNA, 19 nt, Artificial Sequence
  Description of Artificial Sequence: Synthetic oligonucleotide
agugaucuuccuuagaguu

SEQ ID NO: 3085240 - RNA, 19 nt, Artificial Sequence
  Description of Artificial Sequence: Synthetic oligonucleotide
ugccucaacagcuucauuc

SEQ ID NO: 3085241 - RNA, 19 nt, Artificial Sequence
  Description of Artificial Sequence: Synthetic oligonucleotide
ucaacagcuucauucucag

SEQ ID NO: 3085242 - RNA, 19 nt, Artificial Sequence
  Description of Artificial Sequence: Synthetic oligonucleotide
agaguuggaggccuacagg

SEQ ID NO: 3085243 - RNA, 19 nt, Artificial Sequence
  Description of Artificial Sequence: Synthetic oligonucleotide
gucauuuccugguauuucc

SEQ ID NO: 3085244 - RNA, 19 nt, Artificial Sequence
  Description of Artificial Sequence: Synthetic oligonucleotide
aagugaucuuccuuagagu

SEQ ID NO: 3085245 - RNA, 19 nt, Artificial Sequence
  Description of Artificial Sequence: Synthetic oligonucleotide
ucuagguccagcuccccag

SEQ ID NO: 3085246 - RNA, 19 nt, Artificial Sequence
  Description of Artificial Sequence: Synthetic oligonucleotide
auuuccuugucacuuccug

SEQ ID NO: 3085247 - RNA, 19 nt, Artificial Sequence
  Description of Artificial Sequence: Synthetic oligonucleotide
ugugauggaggcuggagaa

SEQ ID NO: 3085248 - RNA, 19 nt, Artificial Sequence
  Description of Artificial Sequence: Synthetic oligonucleotide
gaagugcagaugaaacugg

SEQ ID NO: 3085249 - RNA, 19 nt, Artificial Sequence
  Description of Artificial Sequence: Synthetic oligonucleotide
caggguaaagugaucuucc

SEQ ID NO: 3085250 - RNA, 19 nt, Artificial Sequence
  Description of Artificial Sequence: Synthetic oligonucleotide
uguccugucauuuccuggu

SEQ ID NO: 3085251 - RNA, 19 nt, Artificial Sequence
  Description of Artificial Sequence: Synthetic oligonucleotide
aggccuacaggaccugucc

SEQ ID NO: 3085252 - RNA, 19 nt, Artificial Sequence
  Description of Artificial Sequence: Synthetic oligonucleotide
gaguuggaggccuacagga

SEQ ID NO: 3085253 - RNA, 19 nt, Artificial Sequence
  Description of Artificial Sequence: Synthetic oligonucleotide
ucucucaggguaaagugau

SEQ ID NO: 3085254 - RNA, 19 nt, Artificial Sequence
  Description of Artificial Sequence: Synthetic oligonucleotide
ucucaggguaaagugaucu

SEQ ID NO: 3085255 - RNA, 19 nt, Artificial Sequence
  Description of Artificial Sequence: Synthetic oligonucleotide
ggcuuuguggguaaggugg

SEQ ID NO: 3085256 - RNA, 19 nt, Artificial Sequence
  Description of Artificial Sequence: Synthetic oligonucleotide
aagugcagaugaaacuggg

SEQ ID NO: 3085257 - RNA, 19 nt, Artificial Sequence
  Description of Artificial Sequence: Synthetic oligonucleotide
gauggucuugagcauggug

SEQ ID NO: 3085258 - RNA, 19 nt, Artificial Sequence
  Description of Artificial Sequence: Synthetic oligonucleotide
gaaacugggcuucuagguc

SEQ ID NO: 3085259 - RNA, 19 nt, Artificial Sequence
  Description of Artificial Sequence: Synthetic oligonucleotide
guuggaggccuacaggacc

SEQ ID NO: 3085260 - RNA, 19 nt, Artificial Sequence
  Description of Artificial Sequence: Synthetic oligonucleotide
uaaagugaucuuccuuaga

SEQ ID NO: 3085261 - RNA, 19 nt, Artificial Sequence
  Description of Artificial Sequence: Synthetic oligonucleotide
uccagcuccccagagaccc

SEQ ID NO: 3085262 - RNA, 19 nt, Artificial Sequence
  Description of Artificial Sequence: Synthetic oligonucleotide
gguaagguggguaaggaug

SEQ ID NO: 3085263 - RNA, 19 nt, Artificial Sequence
  Description of Artificial Sequence: Synthetic oligonucleotide
auggucuugagcaugguga

SEQ ID NO: 3085264 - RNA, 19 nt, Artificial Sequence
  Description of Artificial Sequence: Synthetic oligonucleotide
gguaaagugaucuuccuua

SEQ ID NO: 3085265 - RNA, 19 nt, Artificial Sequence
  Description of Artificial Sequence: Synthetic oligonucleotide
cagauggucuugagcaugg

SEQ ID NO: 3085266 - RNA, 19 nt, Artificial Sequence
  Description of Artificial Sequence: Synthetic oligonucleotide
agugcagaugaaacugggc

SEQ ID NO: 3085267 - RNA, 19 nt, Artificial Sequence
  Description of Artificial Sequence: Synthetic oligonucleotide
acagcuucauucucagugu

SEQ ID NO: 3085268 - RNA, 19 nt, Artificial Sequence
  Description of Artificial Sequence: Synthetic oligonucleotide
uacaggaccuguccuguca

SEQ ID NO: 3085269 - RNA, 19 nt, Artificial Sequence
  Description of Artificial Sequence: Synthetic oligonucleotide
ucauuuccugguauuuccu

SEQ ID NO: 3085270 - RNA, 19 nt, Artificial Sequence
  Description of Artificial Sequence: Synthetic oligonucleotide
uuggcagcagcccaugcuc

SEQ ID NO: 3085271 - RNA, 19 nt, Artificial Sequence
  Description of Artificial Sequence: Synthetic oligonucleotide
ucaggguaaagugaucuuc

SEQ ID NO: 3085272 - RNA, 19 nt, Artificial Sequence
  Description of Artificial Sequence: Synthetic oligonucleotide
guauuuccuugucacuucc

SEQ ID NO: 3085273 - RNA, 19 nt, Artificial Sequence
  Description of Artificial Sequence: Synthetic oligonucleotide
auggaggcuggagaagugc

SEQ ID NO: 3085274 - RNA, 19 nt, Artificial Sequence
  Description of Artificial Sequence: Synthetic oligonucleotide
agacccucucgucuucagc

SEQ ID NO: 3085275 - RNA, 19 nt, Artificial Sequence
  Description of Artificial Sequence: Synthetic oligonucleotide
cacuuccugggcuuugugg

SEQ ID NO: 3085276 - RNA, 19 nt, Artificial Sequence
  Description of Artificial Sequence: Synthetic oligonucleotide
ugagcauggugaaguaggu

SEQ ID NO: 3085277 - RNA, 19 nt, Artificial Sequence
  Description of Artificial Sequence: Synthetic oligonucleotide
gaugugauggaggcuggag

SEQ ID NO: 3085278 - RNA, 19 nt, Artificial Sequence
  Description of Artificial Sequence: Synthetic oligonucleotide
augugauggaggcuggaga

SEQ ID NO: 3085279 - RNA, 19 nt, Artificial Sequence
  Description of Artificial Sequence: Synthetic oligonucleotide
ucuucccuuggcagcagcc

SEQ ID NO: 3085280 - RNA, 19 nt, Artificial Sequence
  Description of Artificial Sequence: Synthetic oligonucleotide
ugggcuucuagguccagcu

SEQ ID NO: 3085281 - RNA, 19 nt, Artificial Sequence
  Description of Artificial Sequence: Synthetic oligonucleotide
uuggaggccuacaggaccu

SEQ ID NO: 3085282 - RNA, 19 nt, Artificial Sequence
  Description of Artificial Sequence: Synthetic oligonucleotide
uccugguauuuccuuguca

SEQ ID NO: 3085283 - RNA, 19 nt, Artificial Sequence
  Description of Artificial Sequence: Synthetic oligonucleotide
uggccugccacucuucccu

SEQ ID NO: 3085284 - RNA, 19 nt, Artificial Sequence
  Description of Artificial Sequence: Synthetic oligonucleotide
ugauggaggcuggagaagu

SEQ ID NO: 3085285 - RNA, 19 nt, Artificial Sequence
  Description of Artificial Sequence: Synthetic oligonucleotide
ugguauuuccuugucacuu

SEQ ID NO: 3085286 - RNA, 19 nt, Artificial Sequence
  Description of Artificial Sequence: Synthetic oligonucleotide
cucaacagcuucauucuca

SEQ ID NO: 3085287 - RNA, 19 nt, Artificial Sequence
  Description of Artificial Sequence: Synthetic oligonucleotide
ccugguauuuccuugucac

SEQ ID NO: 3085288 - RNA, 19 nt, Artificial Sequence
  Description of Artificial Sequence: Synthetic oligonucleotide
gagaagugcagaugaaacu

SEQ ID NO: 3085289 - RNA, 19 nt, Artificial Sequence
  Description of Artificial Sequence: Synthetic oligonucleotide
uccccagagacccucucgu

SEQ ID NO: 3085290 - RNA, 19 nt, Artificial Sequence
  Description of Artificial Sequence: Synthetic oligonucleotide
cucagugucgcuggcuucg

SEQ ID NO: 3085291 - RNA, 19 nt, Artificial Sequence
  Description of Artificial Sequence: Synthetic oligonucleotide
cagcccaugcuccacuucc

SEQ ID NO: 3085292 - RNA, 19 nt, Artificial Sequence
  Description of Artificial Sequence: Synthetic oligonucleotide
uggguaaggaugugaugga

SEQ ID NO: 3085293 - RNA, 19 nt, Artificial Sequence
  Description of Artificial Sequence: Synthetic oligonucleotide
uuguggguaagguggguaa

SEQ ID NO: 3085294 - RNA, 19 nt, Artificial Sequence
  Description of Artificial Sequence: Synthetic oligonucleotide
uucuagguccagcucccca

SEQ ID NO: 3085295 - RNA, 19 nt, Artificial Sequence
  Description of Artificial Sequence: Synthetic oligonucleotide
uucucagugucgcuggcuu

SEQ ID NO: 3085296 - RNA, 19 nt, Artificial Sequence
  Description of Artificial Sequence: Synthetic oligonucleotide
uucccuuggcagcagccca

SEQ ID NO: 3085297 - RNA, 19 nt, Artificial Sequence
  Description of Artificial Sequence: Synthetic oligonucleotide
aagguggguaaggauguga

SEQ ID NO: 3085298 - RNA, 19 nt, Artificial Sequence
  Description of Artificial Sequence: Synthetic oligonucleotide
uggagaagugcagaugaaa

SEQ ID NO: 3085299 - RNA, 19 nt, Artificial Sequence
  Description of Artificial Sequence: Synthetic oligonucleotide
gcuggagaagugcagauga

SEQ ID NO: 3085300 - RNA, 19 nt, Artificial Sequence
  Description of Artificial Sequence: Synthetic oligonucleotide
uccuugucacuuccugggc

SEQ ID NO: 3085301 - RNA, 19 nt, Artificial Sequence
  Description of Artificial Sequence: Synthetic oligonucleotide
ggagaagugcagaugaaac

SEQ ID NO: 3085302 - RNA, 19 nt, Artificial Sequence
  Description of Artificial Sequence: Synthetic oligonucleotide
acagauggucuugagcaug

SEQ ID NO: 3085303 - RNA, 19 nt, Artificial Sequence
  Description of Artificial Sequence: Synthetic oligonucleotide
augcuccacuuccacacag

SEQ ID NO: 3085304 - RNA, 19 nt, Artificial Sequence
  Description of Artificial Sequence: Synthetic oligonucleotide
uguggguaagguggguaag

SEQ ID NO: 3085305 - RNA, 19 nt, Artificial Sequence
  Description of Artificial Sequence: Synthetic oligonucleotide
cuugagcauggugaaguag

SEQ ID NO: 3085306 - RNA, 19 nt, Artificial Sequence
  Description of Artificial Sequence: Synthetic oligonucleotide
ugucauuuccugguauuuc

SEQ ID NO: 3085307 - RNA, 19 nt, Artificial Sequence
  Description of Artificial Sequence: Synthetic oligonucleotide
agcuucauucucagugucg

SEQ ID NO: 3085308 - RNA, 19 nt, Artificial Sequence
  Description of Artificial Sequence: Synthetic oligonucleotide
ugggcuuuguggguaaggu

SEQ ID NO: 3085309 - RNA, 19 nt, Artificial Sequence
  Description of Artificial Sequence: Synthetic oligonucleotide
aguuggaggccuacaggac

SEQ ID NO: 3085310 - RNA, 19 nt, Artificial Sequence
  Description of Artificial Sequence: Synthetic oligonucleotide
guggguaagguggguaagg

SEQ ID NO: 3085311 - RNA, 19 nt, Artificial Sequence
  Description of Artificial Sequence: Synthetic oligonucleotide
uuagaguuggaggccuaca

SEQ ID NO: 3085312 - RNA, 19 nt, Artificial Sequence
  Description of Artificial Sequence: Synthetic oligonucleotide
uuuguggguaaggugggua

SEQ ID NO: 3085313 - RNA, 19 nt, Artificial Sequence
  Description of Artificial Sequence: Synthetic oligonucleotide
uggguaagguggguaagga

SEQ ID NO: 3085314 - RNA, 19 nt, Artificial Sequence
  Description of Artificial Sequence: Synthetic oligonucleotide
aucuuccuuagaguuggag

SEQ ID NO: 3085315 - RNA, 19 nt, Artificial Sequence
  Description of Artificial Sequence: Synthetic oligonucleotide
uccugucauuuccugguau

SEQ ID NO: 3085316 - RNA, 19 nt, Artificial Sequence
  Description of Artificial Sequence: Synthetic oligonucleotide
uccuuagaguuggaggccu

SEQ ID NO: 3085317 - RNA, 19 nt, Artificial Sequence
  Description of Artificial Sequence: Synthetic oligonucleotide
uagguccagcuccccagag

SEQ ID NO: 3085318 - RNA, 19 nt, Artificial Sequence
  Description of Artificial Sequence: Synthetic oligonucleotide
uggcagcagcccaugcucc

SEQ ID NO: 3085319 - RNA, 19 nt, Artificial Sequence
  Description of Artificial Sequence: Synthetic oligonucleotide
gugaucuuccuuagaguug

SEQ ID NO: 3085320 - RNA, 19 nt, Artificial Sequence
  Description of Artificial Sequence: Synthetic oligonucleotide
ugcuccacuuccacacaga

SEQ ID NO: 3085321 - RNA, 19 nt, Artificial Sequence
  Description of Artificial Sequence: Synthetic oligonucleotide
ccaugcuccacuuccacac

SEQ ID NO: 3085322 - RNA, 19 nt, Artificial Sequence
  Description of Artificial Sequence: Synthetic oligonucleotide
gcuucauucucagugucgc

SEQ ID NO: 3085323 - RNA, 19 nt, Artificial Sequence
  Description of Artificial Sequence: Synthetic oligonucleotide
gacccucucgucuucagcu

SEQ ID NO: 3085324 - RNA, 19 nt, Artificial Sequence
  Description of Artificial Sequence: Synthetic oligonucleotide
uccacacagauggucuuga

SEQ ID NO: 3085325 - RNA, 19 nt, Artificial Sequence
  Description of Artificial Sequence: Synthetic oligonucleotide
ucgcuaccggccaccuugg

SEQ ID NO: 3085326 - RNA, 19 nt, Artificial Sequence
  Description of Artificial Sequence: Synthetic oligonucleotide
ucuugagcauggugaagua

SEQ ID NO: 3085327 - RNA, 19 nt, Artificial Sequence
  Description of Artificial Sequence: Synthetic oligonucleotide
ucacuuccugggcuuugug

SEQ ID NO: 3085328 - RNA, 19 nt, Artificial Sequence
  Description of Artificial Sequence: Synthetic oligonucleotide
cuccccagagacccucucg

SEQ ID NO: 3085329 - RNA, 19 nt, Artificial Sequence
  Description of Artificial Sequence: Synthetic oligonucleotide
uuccacacagauggucuug

SEQ ID NO: 3085330 - RNA, 19 nt, Artificial Sequence
  Description of Artificial Sequence: Synthetic oligonucleotide
uuggccugccacucuuccc

SEQ ID NO: 3085331 - RNA, 19 nt, Artificial Sequence
  Description of Artificial Sequence: Synthetic oligonucleotide
uaaggaugugauggaggcu

SEQ ID NO: 3085332 - RNA, 19 nt, Artificial Sequence
  Description of Artificial Sequence: Synthetic oligonucleotide
cuuagaguuggaggccuac

SEQ ID NO: 3085333 - RNA, 19 nt, Artificial Sequence
  Description of Artificial Sequence: Synthetic oligonucleotide
gguauuuccuugucacuuc

SEQ ID NO: 3085334 - RNA, 19 nt, Artificial Sequence
  Description of Artificial Sequence: Synthetic oligonucleotide
agugucgcuggcuucgcua

SEQ ID NO: 3085335 - RNA, 19 nt, Artificial Sequence
  Description of Artificial Sequence: Synthetic oligonucleotide
cuucccuuggcagcagccc

SEQ ID NO: 3085336 - RNA, 19 nt, Artificial Sequence
  Description of Artificial Sequence: Synthetic oligonucleotide
gccacucuucccuuggcag

SEQ ID NO: 3085337 - RNA, 19 nt, Artificial Sequence
  Description of Artificial Sequence: Synthetic oligonucleotide
gauggaggcuggagaagug

SEQ ID NO: 3085338 - RNA, 19 nt, Artificial Sequence
  Description of Artificial Sequence: Synthetic oligonucleotide
gucgcuggcuucgcuaccg

SEQ ID NO: 3085339 - RNA, 19 nt, Artificial Sequence
  Description of Artificial Sequence: Synthetic oligonucleotide
gagacccucucgucuucag

SEQ ID NO: 3085340 - RNA, 19 nt, Artificial Sequence
  Description of Artificial Sequence: Synthetic oligonucleotide
ucugccucaacagcuucau

SEQ ID NO: 3085341 - RNA, 19 nt, Artificial Sequence
  Description of Artificial Sequence: Synthetic oligonucleotide
cuaccggccaccuuggccu

SEQ ID NO: 3085342 - RNA, 19 nt, Artificial Sequence
  Description of Artificial Sequence: Synthetic oligonucleotide
gucuugagcauggugaagu

SEQ ID NO: 3085343 - RNA, 19 nt, Artificial Sequence
  Description of Artificial Sequence: Synthetic oligonucleotide
cauucucagugucgcuggc

SEQ ID NO: 3085344 - RNA, 19 nt, Artificial Sequence
  Description of Artificial Sequence: Synthetic oligonucleotide
gugucgcuggcuucgcuac

SEQ ID NO: 3085345 - RNA, 19 nt, Artificial Sequence
  Description of Artificial Sequence: Synthetic oligonucleotide
acaggaccuguccugucau

SEQ ID NO: 3085346 - RNA, 19 nt, Artificial Sequence
  Description of Artificial Sequence: Synthetic oligonucleotide
ucgcuggcuucgcuaccgg

SEQ ID NO: 3085347 - RNA, 19 nt, Artificial Sequence
  Description of Artificial Sequence: Synthetic oligonucleotide
ugucgcuggcuucgcuacc

SEQ ID NO: 3085348 - RNA, 19 nt, Artificial Sequence
  Description of Artificial Sequence: Synthetic oligonucleotide
guaagguggguaaggaugu

SEQ ID NO: 3085349 - RNA, 19 nt, Artificial Sequence
  Description of Artificial Sequence: Synthetic oligonucleotide
cacuuccacacagaugguc

SEQ ID NO: 3085350 - RNA, 19 nt, Artificial Sequence
  Description of Artificial Sequence: Synthetic oligonucleotide
cugggcuuuguggguaagg

SEQ ID NO: 3085351 - RNA, 19 nt, Artificial Sequence
  Description of Artificial Sequence: Synthetic oligonucleotide
uaagguggguaaggaugug

SEQ ID NO: 3085352 - RNA, 19 nt, Artificial Sequence
  Description of Artificial Sequence: Synthetic oligonucleotide
cagcuucauucucaguguc

SEQ ID NO: 3085353 - RNA, 19 nt, Artificial Sequence
  Description of Artificial Sequence: Synthetic oligonucleotide
uccucugccucaacagcuu

SEQ ID NO: 3085354 - RNA, 19 nt, Artificial Sequence
  Description of Artificial Sequence: Synthetic oligonucleotide
gugauggaggcuggagaag

SEQ ID NO: 3085355 - RNA, 19 nt, Artificial Sequence
  Description of Artificial Sequence: Synthetic oligonucleotide
ucucagugucgcuggcuuc

SEQ ID NO: 3085356 - RNA, 19 nt, Artificial Sequence
  Description of Artificial Sequence: Synthetic oligonucleotide
gcuaccggccaccuuggcc

SEQ ID NO: 3085357 - RNA, 19 nt, Artificial Sequence
  Description of Artificial Sequence: Synthetic oligonucleotide
aggcuggagaagugcagau

SEQ ID NO: 3085358 - RNA, 19 nt, Artificial Sequence
  Description of Artificial Sequence: Synthetic oligonucleotide
aggaugugauggaggcugg

SEQ ID NO: 3085359 - RNA, 19 nt, Artificial Sequence
  Description of Artificial Sequence: Synthetic oligonucleotide
gcagaugaaacugggcuuc

SEQ ID NO: 3085360 - RNA, 19 nt, Artificial Sequence
  Description of Artificial Sequence: Synthetic oligonucleotide
auucucagugucgcuggcu

SEQ ID NO: 3085361 - RNA, 19 nt, Artificial Sequence
  Description of Artificial Sequence: Synthetic oligonucleotide
gcuuuguggguaagguggg

SEQ ID NO: 3085362 - RNA, 19 nt, Artificial Sequence
  Description of Artificial Sequence: Synthetic oligonucleotide
ggguaaggaugugauggag

SEQ ID NO: 3085363 - RNA, 19 nt, Artificial Sequence
  Description of Artificial Sequence: Synthetic oligonucleotide
aacugggcuucuaggucca

SEQ ID NO: 3085364 - RNA, 19 nt, Artificial Sequence
  Description of Artificial Sequence: Synthetic oligonucleotide
cucucaggguaaagugauc

SEQ ID NO: 3085365 - RNA, 19 nt, Artificial Sequence
  Description of Artificial Sequence: Synthetic oligonucleotide
cucuucccuuggcagcagc

SEQ ID NO: 3085366 - RNA, 19 nt, Artificial Sequence
  Description of Artificial Sequence: Synthetic oligonucleotide
ucccuuggcagcagcccau

SEQ ID NO: 3085367 - RNA, 19 nt, Artificial Sequence
  Description of Artificial Sequence: Synthetic oligonucleotide
gccuacaggaccuguccug

SEQ ID NO: 3085368 - RNA, 19 nt, Artificial Sequence
  Description of Artificial Sequence: Synthetic oligonucleotide
cucugccucaacagcuuca

SEQ ID NO: 3085369 - RNA, 19 nt, Artificial Sequence
  Description of Artificial Sequence: Synthetic oligonucleotide
cugggcuucuagguccagc

SEQ ID NO: 3085370 - RNA, 19 nt, Artificial Sequence
  Description of Artificial Sequence: Synthetic oligonucleotide
gcuggcuucgcuaccggcc

SEQ ID NO: 3085371 - RNA, 19 nt, Artificial Sequence
  Description of Artificial Sequence: Synthetic oligonucleotide
cuggcuucgcuaccggcca

SEQ ID NO: 3085372 - RNA, 19 nt, Artificial Sequence
  Description of Artificial Sequence: Synthetic oligonucleotide
cuacaggaccuguccuguc

SEQ ID NO: 3085373 - RNA, 19 nt, Artificial Sequence
  Description of Artificial Sequence: Synthetic oligonucleotide
gaggccuacaggaccuguc

SEQ ID NO: 3085374 - RNA, 19 nt, Artificial Sequence
  Description of Artificial Sequence: Synthetic oligonucleotide
gcuucuagguccagcuccc

SEQ ID NO: 3085375 - RNA, 19 nt, Artificial Sequence
  Description of Artificial Sequence: Synthetic oligonucleotide
cuucuagguccagcucccc

SEQ ID NO: 3085376 - RNA, 19 nt, Artificial Sequence
  Description of Artificial Sequence: Synthetic oligonucleotide
cuagguccagcuccccaga

SEQ ID NO: 3085377 - RNA, 19 nt, Artificial Sequence
  Description of Artificial Sequence: Synthetic oligonucleotide
agagacccucucgucuuca

SEQ ID NO: 3085378 - RNA, 19 nt, Artificial Sequence
  Description of Artificial Sequence: Synthetic oligonucleotide
ccucucgucuucagcuucc

SEQ ID NO: 3085379 - RNA, 19 nt, Artificial Sequence
  Description of Artificial Sequence: Synthetic oligonucleotide
cuggagaagugcagaugaa

SEQ ID NO: 3085380 - RNA, 19 nt, Artificial Sequence
  Description of Artificial Sequence: Synthetic oligonucleotide
ggucuugagcauggugaag

SEQ ID NO: 3085381 - RNA, 19 nt, Artificial Sequence
  Description of Artificial Sequence: Synthetic oligonucleotide
cugguauuuccuugucacu

SEQ ID NO: 3085382 - RNA, 19 nt, Artificial Sequence
  Description of Artificial Sequence: Synthetic oligonucleotide
gccucaacagcuucauucu

SEQ ID NO: 3085383 - RNA, 19 nt, Artificial Sequence
  Description of Artificial Sequence: Synthetic oligonucleotide
ggcuggagaagugcagaug

SEQ ID NO: 3085384 - RNA, 19 nt, Artificial Sequence
  Description of Artificial Sequence: Synthetic oligonucleotide
agcagcccaugcuccacuu

SEQ ID NO: 3085385 - RNA, 19 nt, Artificial Sequence
  Description of Artificial Sequence: Synthetic oligonucleotide
cuugucacuuccugggcuu

SEQ ID NO: 3085386 - RNA, 19 nt, Artificial Sequence
  Description of Artificial Sequence: Synthetic oligonucleotide
cagagacccucucgucuuc

SEQ ID NO: 3085387 - RNA, 19 nt, Artificial Sequence
  Description of Artificial Sequence: Synthetic oligonucleotide
uggcuucgcuaccggccac

SEQ ID NO: 3085388 - RNA, 19 nt, Artificial Sequence
  Description of Artificial Sequence: Synthetic oligonucleotide
acccucucgucuucagcuu

SEQ ID NO: 3085389 - RNA, 19 nt, Artificial Sequence
  Description of Artificial Sequence: Synthetic oligonucleotide
agaugaaacugggcuucua

SEQ ID NO: 3085390 - RNA, 19 nt, Artificial Sequence
  Description of Artificial Sequence: Synthetic oligonucleotide
agauggucuugagcauggu

SEQ ID NO: 3085391 - RNA, 19 nt, Artificial Sequence
  Description of Artificial Sequence: Synthetic oligonucleotide
uggaggccuacaggaccug

SEQ ID NO: 3085392 - RNA, 19 nt, Artificial Sequence
  Description of Artificial Sequence: Synthetic oligonucleotide
uugucacuuccugggcuuu

SEQ ID NO: 3085393 - RNA, 19 nt, Artificial Sequence
  Description of Artificial Sequence: Synthetic oligonucleotide
cuucauucucagugucgcu

SEQ ID NO: 3085394 - RNA, 19 nt, Artificial Sequence
  Description of Artificial Sequence: Synthetic oligonucleotide
ccacacagauggucuugag

SEQ ID NO: 3085395 - RNA, 19 nt, Artificial Sequence
  Description of Artificial Sequence: Synthetic oligonucleotide
cuuccugggcuuugugggu

SEQ ID NO: 3085396 - RNA, 19 nt, Artificial Sequence
  Description of Artificial Sequence: Synthetic oligonucleotide
gaucuuccuuagaguugga

SEQ ID NO: 3085397 - RNA, 19 nt, Artificial Sequence
  Description of Artificial Sequence: Synthetic oligonucleotide
agcccaugcuccacuucca

SEQ ID NO: 3085398 - RNA, 19 nt, Artificial Sequence
  Description of Artificial Sequence: Synthetic oligonucleotide
guccugucauuuccuggua

SEQ ID NO: 3085399 - RNA, 19 nt, Artificial Sequence
  Description of Artificial Sequence: Synthetic oligonucleotide
cacagauggucuugagcau

SEQ ID NO: 3085400 - RNA, 19 nt, Artificial Sequence
  Description of Artificial Sequence: Synthetic oligonucleotide
cucaggguaaagugaucuu

SEQ ID NO: 3085401 - RNA, 19 nt, Artificial Sequence
  Description of Artificial Sequence: Synthetic oligonucleotide
cuuccacacagauggucuu

SEQ ID NO: 3085402 - RNA, 19 nt, Artificial Sequence
  Description of Artificial Sequence: Synthetic oligonucleotide
cagcuccccagagacccuc

SEQ ID NO: 3085403 - RNA, 19 nt, Artificial Sequence
  Description of Artificial Sequence: Synthetic oligonucleotide
cccucucgucuucagcuuc

SEQ ID NO: 3085404 - RNA, 19 nt, Artificial Sequence
  Description of Artificial Sequence: Synthetic oligonucleotide
ggcuucgcuaccggccacc

SEQ ID NO: 3085405 - RNA, 19 nt, Artificial Sequence
  Description of Artificial Sequence: Synthetic oligonucleotide
gggcuucuagguccagcuc

SEQ ID NO: 3085406 - RNA, 19 nt, Artificial Sequence
  Description of Artificial Sequence: Synthetic oligonucleotide
gcuccacuuccacacagau

SEQ ID NO: 3085407 - RNA, 19 nt, Artificial Sequence
  Description of Artificial Sequence: Synthetic oligonucleotide
ggguaagguggguaaggau

SEQ ID NO: 3085408 - RNA, 19 nt, Artificial Sequence
  Description of Artificial Sequence: Synthetic oligonucleotide
ccucugccucaacagcuuc

SEQ ID NO: 3085409 - RNA, 19 nt, Artificial Sequence
  Description of Artificial Sequence: Synthetic oligonucleotide
cccaugcuccacuuccaca

SEQ ID NO: 3085410 - RNA, 19 nt, Artificial Sequence
  Description of Artificial Sequence: Synthetic oligonucleotide
gccugccacucuucccuug

SEQ ID NO: 3085411 - RNA, 19 nt, Artificial Sequence
  Description of Artificial Sequence: Synthetic oligonucleotide
ggaugugauggaggcugga

SEQ ID NO: 3085412 - RNA, 19 nt, Artificial Sequence
  Description of Artificial Sequence: Synthetic oligonucleotide
caacagcuucauucucagu

SEQ ID NO: 3085413 - RNA, 19 nt, Artificial Sequence
  Description of Artificial Sequence: Synthetic oligonucleotide
gcagcccaugcuccacuuc

SEQ ID NO: 3085414 - RNA, 19 nt, Artificial Sequence
  Description of Artificial Sequence: Synthetic oligonucleotide
agcuccccagagacccucu

SEQ ID NO: 3085415 - RNA, 19 nt, Artificial Sequence
  Description of Artificial Sequence: Synthetic oligonucleotide
cuuuguggguaaggugggu

SEQ ID NO: 3085416 - RNA, 19 nt, Artificial Sequence
  Description of Artificial Sequence: Synthetic oligonucleotide
ccuugucacuuccugggcu

SEQ ID NO: 3085417 - RNA, 19 nt, Artificial Sequence
  Description of Artificial Sequence: Synthetic oligonucleotide
ggccuacaggaccuguccu

SEQ ID NO: 3085418 - RNA, 19 nt, Artificial Sequence
  Description of Artificial Sequence: Synthetic oligonucleotide
cccagagacccucucgucu

SEQ ID NO: 3085419 - RNA, 19 nt, Artificial Sequence
  Description of Artificial Sequence: Synthetic oligonucleotide
ccuuggccugccacucuuc

SEQ ID NO: 3085420 - RNA, 19 nt, Artificial Sequence
  Description of Artificial Sequence: Synthetic oligonucleotide
cagaugaaacugggcuucu

SEQ ID NO: 3085421 - RNA, 19 nt, Artificial Sequence
  Description of Artificial Sequence: Synthetic oligonucleotide
ccccagagacccucucguc

SEQ ID NO: 3085422 - RNA, 19 nt, Artificial Sequence
  Description of Artificial Sequence: Synthetic oligonucleotide
ccugucauuuccugguauu

SEQ ID NO: 3085423 - RNA, 19 nt, Artificial Sequence
  Description of Artificial Sequence: Synthetic oligonucleotide
ccuacaggaccuguccugu

SEQ ID NO: 3085424 - RNA, 19 nt, Artificial Sequence
  Description of Artificial Sequence: Synthetic oligonucleotide
ccugggcuuuguggguaag

SEQ ID NO: 3085425 - RNA, 19 nt, Artificial Sequence
  Description of Artificial Sequence: Synthetic oligonucleotide
ccagagacccucucgucuu

SEQ ID NO: 3085426 - RNA, 19 nt, Artificial Sequence
  Description of Artificial Sequence: Synthetic oligonucleotide
ccuuagaguuggaggccua

SEQ ID NO: 3085427 - RNA, 19 nt, Artificial Sequence
  Description of Artificial Sequence: Synthetic oligonucleotide
cucucgucuucagcuuccu

SEQ ID NO: 3085428 - RNA, 19 nt, Artificial Sequence
  Description of Artificial Sequence: Synthetic oligonucleotide
cccuuggcagcagcccaug

SEQ ID NO: 3085429 - RNA, 19 nt, Artificial Sequence
  Description of Artificial Sequence: Synthetic oligonucleotide
caccuuggccugccacucu

SEQ ID NO: 3085430 - RNA, 19 nt, Artificial Sequence
  Description of Artificial Sequence: Synthetic oligonucleotide
cagugucgcuggcuucgcu

SEQ ID NO: 3085431 - RNA, 19 nt, Artificial Sequence
  Description of Artificial Sequence: Synthetic oligonucleotide
ggaggccuacaggaccugu

SEQ ID NO: 3085432 - RNA, 19 nt, Artificial Sequence
  Description of Artificial Sequence: Synthetic oligonucleotide
cugccucaacagcuucauu

SEQ ID NO: 3085433 - RNA, 19 nt, Artificial Sequence
  Description of Artificial Sequence: Synthetic oligonucleotide
gcuucgcuaccggccaccu

SEQ ID NO: 3085434 - RNA, 19 nt, Artificial Sequence
  Description of Artificial Sequence: Synthetic oligonucleotide
cuucgcuaccggccaccuu

SEQ ID NO: 3085435 - RNA, 19 nt, Artificial Sequence
  Description of Artificial Sequence: Synthetic oligonucleotide
cgcuaccggccaccuuggc

SEQ ID NO: 3085436 - RNA, 19 nt, Artificial Sequence
  Description of Artificial Sequence: Synthetic oligonucleotide
ccacuuccacacagauggu

SEQ ID NO: 3085437 - RNA, 19 nt, Artificial Sequence
  Description of Artificial Sequence: Synthetic oligonucleotide
ggccugccacucuucccuu

SEQ ID NO: 3085438 - RNA, 19 nt, Artificial Sequence
  Description of Artificial Sequence: Synthetic oligonucleotide
ccagcuccccagagacccu

SEQ ID NO: 3085439 - RNA, 19 nt, Artificial Sequence
  Description of Artificial Sequence: Synthetic oligonucleotide
aucaagugaauuuugaagc

SEQ ID NO: 3085440 - RNA, 19 nt, Artificial Sequence
  Description of Artificial Sequence: Synthetic oligonucleotide
uaaaauauagacaucaagu

SEQ ID NO: 3085441 - RNA, 19 nt, Artificial Sequence
  Description of Artificial Sequence: Synthetic oligonucleotide
agaagcaugauccugaagg

SEQ ID NO: 3085442 - RNA, 19 nt, Artificial Sequence
  Description of Artificial Sequence: Synthetic oligonucleotide
acagguaauuuucagaucc

SEQ ID NO: 3085443 - RNA, 19 nt, Artificial Sequence
  Description of Artificial Sequence: Synthetic oligonucleotide
aaaauauagacaucaagug

SEQ ID NO: 3085444 - RNA, 19 nt, Artificial Sequence
  Description of Artificial Sequence: Synthetic oligonucleotide
aaucucugaagccacacgc

SEQ ID NO: 3085445 - RNA, 19 nt, Artificial Sequence
  Description of Artificial Sequence: Synthetic oligonucleotide
ugaauuuugaagcagaaaa

SEQ ID NO: 3085446 - RNA, 19 nt, Artificial Sequence
  Description of Artificial Sequence: Synthetic oligonucleotide
uuugaagcagaaaagaagc

SEQ ID NO: 3085447 - RNA, 19 nt, Artificial Sequence
  Description of Artificial Sequence: Synthetic oligonucleotide
cagaaaagaagcaugaucc

SEQ ID NO: 3085448 - RNA, 19 nt, Artificial Sequence
  Description of Artificial Sequence: Synthetic oligonucleotide
uuuugaagcagaaaagaag

SEQ ID NO: 3085449 - RNA, 19 nt, Artificial Sequence
  Description of Artificial Sequence: Synthetic oligonucleotide
uuuucugauucuuaaaucc

SEQ ID NO: 3085450 - RNA, 19 nt, Artificial Sequence
  Description of Artificial Sequence: Synthetic oligonucleotide
aaauauagacaucaaguga

SEQ ID NO: 3085451 - RNA, 19 nt, Artificial Sequence
  Description of Artificial Sequence: Synthetic oligonucleotide
uucagauccuaaaauauag

SEQ ID NO: 3085452 - RNA, 19 nt, Artificial Sequence
  Description of Artificial Sequence: Synthetic oligonucleotide
aaacagguaauuuucagau

SEQ ID NO: 3085453 - RNA, 19 nt, Artificial Sequence
  Description of Artificial Sequence: Synthetic oligonucleotide
augagauccuaucucagcc

SEQ ID NO: 3085454 - RNA, 19 nt, Artificial Sequence
  Description of Artificial Sequence: Synthetic oligonucleotide
uuaaaucccagcacaaacc

SEQ ID NO: 3085455 - RNA, 19 nt, Artificial Sequence
  Description of Artificial Sequence: Synthetic oligonucleotide
aauuuucagauccuaaaau

SEQ ID NO: 3085456 - RNA, 19 nt, Artificial Sequence
  Description of Artificial Sequence: Synthetic oligonucleotide
aauuuugaagcagaaaaga

SEQ ID NO: 3085457 - RNA, 19 nt, Artificial Sequence
  Description of Artificial Sequence: Synthetic oligonucleotide
aauauagacaucaagugaa

SEQ ID NO: 3085458 - RNA, 19 nt, Artificial Sequence
  Description of Artificial Sequence: Synthetic oligonucleotide
uuucauuuuauuuauguuu

SEQ ID NO: 3085459 - RNA, 19 nt, Artificial Sequence
  Description of Artificial Sequence: Synthetic oligonucleotide
ugauucuuaaaucccagca

SEQ ID NO: 3085460 - RNA, 19 nt, Artificial Sequence
  Description of Artificial Sequence: Synthetic oligonucleotide
uuauuuauguuuauuuuau

SEQ ID NO: 3085461 - RNA, 19 nt, Artificial Sequence
  Description of Artificial Sequence: Synthetic oligonucleotide
uauuuucugauucuuaaau

SEQ ID NO: 3085462 - RNA, 19 nt, Artificial Sequence
  Description of Artificial Sequence: Synthetic oligonucleotide
uuuauuuucugauucuuaa

SEQ ID NO: 3085463 - RNA, 19 nt, Artificial Sequence
  Description of Artificial Sequence: Synthetic oligonucleotide
caucaagugaauuuugaag

SEQ ID NO: 3085464 - RNA, 19 nt, Artificial Sequence
  Description of Artificial Sequence: Synthetic oligonucleotide
uccuaaaauauagacauca

SEQ ID NO: 3085465 - RNA, 19 nt, Artificial Sequence
  Description of Artificial Sequence: Synthetic oligonucleotide
gauccuaaaauauagacau

SEQ ID NO: 3085466 - RNA, 19 nt, Artificial Sequence
  Description of Artificial Sequence: Synthetic oligonucleotide
uuuucagauccuaaaauau

SEQ ID NO: 3085467 - RNA, 19 nt, Artificial Sequence
  Description of Artificial Sequence: Synthetic oligonucleotide
uucauuuuauuuauguuua

SEQ ID NO: 3085468 - RNA, 19 nt, Artificial Sequence
  Description of Artificial Sequence: Synthetic oligonucleotide
aaugaggauggagaggacg

SEQ ID NO: 3085469 - RNA, 19 nt, Artificial Sequence
  Description of Artificial Sequence: Synthetic oligonucleotide
acuuucauuuuauuuaugu

SEQ ID NO: 3085470 - RNA, 19 nt, Artificial Sequence
  Description of Artificial Sequence: Synthetic oligonucleotide
gaagguggagaugagaucc

SEQ ID NO: 3085471 - RNA, 19 nt, Artificial Sequence
  Description of Artificial Sequence: Synthetic oligonucleotide
ugaaagaugaagguggaga

SEQ ID NO: 3085472 - RNA, 19 nt, Artificial Sequence
  Description of Artificial Sequence: Synthetic oligonucleotide
uguuuauuuuauuuucuga

SEQ ID NO: 3085473 - RNA, 19 nt, Artificial Sequence
  Description of Artificial Sequence: Synthetic oligonucleotide
uuacaggucacuuucauuu

SEQ ID NO: 3085474 - RNA, 19 nt, Artificial Sequence
  Description of Artificial Sequence: Synthetic oligonucleotide
aagguugucugaaagauga

SEQ ID NO: 3085475 - RNA, 19 nt, Artificial Sequence
  Description of Artificial Sequence: Synthetic oligonucleotide
uaaaucccagcacaaacca

SEQ ID NO: 3085476 - RNA, 19 nt, Artificial Sequence
  Description of Artificial Sequence: Synthetic oligonucleotide
uaauuuucagauccuaaaa

SEQ ID NO: 3085477 - RNA, 19 nt, Artificial Sequence
  Description of Artificial Sequence: Synthetic oligonucleotide
auggagaggacgcagacug

SEQ ID NO: 3085478 - RNA, 19 nt, Artificial Sequence
  Description of Artificial Sequence: Synthetic oligonucleotide
gaauuuugaagcagaaaag

SEQ ID NO: 3085479 - RNA, 19 nt, Artificial Sequence
  Description of Artificial Sequence: Synthetic oligonucleotide
cuuaaaucccagcacaaac

SEQ ID NO: 3085480 - RNA, 19 nt, Artificial Sequence
  Description of Artificial Sequence: Synthetic oligonucleotide
cagauccuaaaauauagac

SEQ ID NO: 3085481 - RNA, 19 nt, Artificial Sequence
  Description of Artificial Sequence: Synthetic oligonucleotide
ucugauucuuaaaucccag

SEQ ID NO: 3085482 - RNA, 19 nt, Artificial Sequence
  Description of Artificial Sequence: Synthetic oligonucleotide
aacagguaauuuucagauc

SEQ ID NO: 3085483 - RNA, 19 nt, Artificial Sequence
  Description of Artificial Sequence: Synthetic oligonucleotide
aaaagaagcaugauccuga

SEQ ID NO: 3085484 - RNA, 19 nt, Artificial Sequence
  Description of Artificial Sequence: Synthetic oligonucleotide
gagauuacaggucacuuuc

SEQ ID NO: 3085485 - RNA, 19 nt, Artificial Sequence
  Description of Artificial Sequence: Synthetic oligonucleotide
agaaacagguaauuuucag

SEQ ID NO: 3085486 - RNA, 19 nt, Artificial Sequence
  Description of Artificial Sequence: Synthetic oligonucleotide
gaagaaacagguaauuuuc

SEQ ID NO: 3085487 - RNA, 19 nt, Artificial Sequence
  Description of Artificial Sequence: Synthetic oligonucleotide
ucaagugaauuuugaagca

SEQ ID NO: 3085488 - RNA, 19 nt, Artificial Sequence
  Description of Artificial Sequence: Synthetic oligonucleotide
gaagcagaaaagaagcaug

SEQ ID NO: 3085489 - RNA, 19 nt, Artificial Sequence
  Description of Artificial Sequence: Synthetic oligonucleotide
uucugauucuuaaauccca

SEQ ID NO: 3085490 - RNA, 19 nt, Artificial Sequence
  Description of Artificial Sequence: Synthetic oligonucleotide
auagacaucaagugaauuu

SEQ ID NO: 3085491 - RNA, 19 nt, Artificial Sequence
  Description of Artificial Sequence: Synthetic oligonucleotide
gagaaggaguguuagcagc

SEQ ID NO: 3085492 - RNA, 19 nt, Artificial Sequence
  Description of Artificial Sequence: Synthetic oligonucleotide
ugagauccuaucucagccg

SEQ ID NO: 3085493 - RNA, 19 nt, Artificial Sequence
  Description of Artificial Sequence: Synthetic oligonucleotide
ugaagccacacgcaugugc

SEQ ID NO: 3085494 - RNA, 19 nt, Artificial Sequence
  Description of Artificial Sequence: Synthetic oligonucleotide
aaggaguguuagcagcagg

SEQ ID NO: 3085495 - RNA, 19 nt, Artificial Sequence
  Description of Artificial Sequence: Synthetic oligonucleotide
gaugagauccuaucucagc

SEQ ID NO: 3085496 - RNA, 19 nt, Artificial Sequence
  Description of Artificial Sequence: Synthetic oligonucleotide
ugagaaggaguguuagcag

SEQ ID NO: 3085497 - RNA, 19 nt, Artificial Sequence
  Description of Artificial Sequence: Synthetic oligonucleotide
gaaaagaagcaugauccug

SEQ ID NO: 3085498 - RNA, 19 nt, Artificial Sequence
  Description of Artificial Sequence: Synthetic oligonucleotide
ucagauccuaaaauauaga

SEQ ID NO: 3085499 - RNA, 19 nt, Artificial Sequence
  Description of Artificial Sequence: Synthetic oligonucleotide
uugucugaaagaugaaggu

SEQ ID NO: 3085500 - RNA, 19 nt, Artificial Sequence
  Description of Artificial Sequence: Synthetic oligonucleotide
uuucagauccuaaaauaua

SEQ ID NO: 3085501 - RNA, 19 nt, Artificial Sequence
  Description of Artificial Sequence: Synthetic oligonucleotide
ugauccugaagguugucug

SEQ ID NO: 3085502 - RNA, 19 nt, Artificial Sequence
  Description of Artificial Sequence: Synthetic oligonucleotide
uggagaugagauccuaucu

SEQ ID NO: 3085503 - RNA, 19 nt, Artificial Sequence
  Description of Artificial Sequence: Synthetic oligonucleotide
augaggauggagaggacgc

SEQ ID NO: 3085504 - RNA, 19 nt, Artificial Sequence
  Description of Artificial Sequence: Synthetic oligonucleotide
uugaagcagaaaagaagca

SEQ ID NO: 3085505 - RNA, 19 nt, Artificial Sequence
  Description of Artificial Sequence: Synthetic oligonucleotide
gauccuaucucagccgugg

SEQ ID NO: 3085506 - RNA, 19 nt, Artificial Sequence
  Description of Artificial Sequence: Synthetic oligonucleotide
gagaugagauccuaucuca

SEQ ID NO: 3085507 - RNA, 19 nt, Artificial Sequence
  Description of Artificial Sequence: Synthetic oligonucleotide
gguaccacaaucucugaag

SEQ ID NO: 3085508 - RNA, 19 nt, Artificial Sequence
  Description of Artificial Sequence: Synthetic oligonucleotide
uguggguaccacaaucucu

SEQ ID NO: 3085509 - RNA, 19 nt, Artificial Sequence
  Description of Artificial Sequence: Synthetic oligonucleotide
guaauuuucagauccuaaa

SEQ ID NO: 3085510 - RNA, 19 nt, Artificial Sequence
  Description of Artificial Sequence: Synthetic oligonucleotide
ugaagguugucugaaagau

SEQ ID NO: 3085511 - RNA, 19 nt, Artificial Sequence
  Description of Artificial Sequence: Synthetic oligonucleotide
ucugaaagaugaaggugga

SEQ ID NO: 3085512 - RNA, 19 nt, Artificial Sequence
  Description of Artificial Sequence: Synthetic oligonucleotide
uuauuuucugauucuuaaa

SEQ ID NO: 3085513 - RNA, 19 nt, Artificial Sequence
  Description of Artificial Sequence: Synthetic oligonucleotide
agaggacgcagacuguggg

SEQ ID NO: 3085514 - RNA, 19 nt, Artificial Sequence
  Description of Artificial Sequence: Synthetic oligonucleotide
agaaaagaagcaugauccu

SEQ ID NO: 3085515 - RNA, 19 nt, Artificial Sequence
  Description of Artificial Sequence: Synthetic oligonucleotide
agauccuaaaauauagaca

SEQ ID NO: 3085516 - RNA, 19 nt, Artificial Sequence
  Description of Artificial Sequence: Synthetic oligonucleotide
aguguuagcagcagggcag

SEQ ID NO: 3085517 - RNA, 19 nt, Artificial Sequence
  Description of Artificial Sequence: Synthetic oligonucleotide
ugaagcagaaaagaagcau

SEQ ID NO: 3085518 - RNA, 19 nt, Artificial Sequence
  Description of Artificial Sequence: Synthetic oligonucleotide
aaagaugaagguggagaug

SEQ ID NO: 3085519 - RNA, 19 nt, Artificial Sequence
  Description of Artificial Sequence: Synthetic oligonucleotide
guaccacaaucucugaagc

SEQ ID NO: 3085520 - RNA, 19 nt, Artificial Sequence
  Description of Artificial Sequence: Synthetic oligonucleotide
aagugaauuuugaagcaga

SEQ ID NO: 3085521 - RNA, 19 nt, Artificial Sequence
  Description of Artificial Sequence: Synthetic oligonucleotide
gaagccacacgcaugugcc

SEQ ID NO: 3085522 - RNA, 19 nt, Artificial Sequence
  Description of Artificial Sequence: Synthetic oligonucleotide
aagcagaaaagaagcauga

SEQ ID NO: 3085523 - RNA, 19 nt, Artificial Sequence
  Description of Artificial Sequence: Synthetic oligonucleotide
aaucccagcacaaaccaaa

SEQ ID NO: 3085524 - RNA, 19 nt, Artificial Sequence
  Description of Artificial Sequence: Synthetic oligonucleotide
uucuuaaaucccagcacaa

SEQ ID NO: 3085525 - RNA, 19 nt, Artificial Sequence
  Description of Artificial Sequence: Synthetic oligonucleotide
aagaagcaugauccugaag

SEQ ID NO: 3085526 - RNA, 19 nt, Artificial Sequence
  Description of Artificial Sequence: Synthetic oligonucleotide
agcaugauccugaagguug

SEQ ID NO: 3085527 - RNA, 19 nt, Artificial Sequence
  Description of Artificial Sequence: Synthetic oligonucleotide
cugauucuuaaaucccagc

SEQ ID NO: 3085528 - RNA, 19 nt, Artificial Sequence
  Description of Artificial Sequence: Synthetic oligonucleotide
aggaguguuagcagcaggg

SEQ ID NO: 3085529 - RNA, 19 nt, Artificial Sequence
  Description of Artificial Sequence: Synthetic oligonucleotide
aaagaagcaugauccugaa

SEQ ID NO: 3085530 - RNA, 19 nt, Artificial Sequence
  Description of Artificial Sequence: Synthetic oligonucleotide
acacgcaugugccuaagca

SEQ ID NO: 3085531 - RNA, 19 nt, Artificial Sequence
  Description of Artificial Sequence: Synthetic oligonucleotide
accacaaucucugaagcca

SEQ ID NO: 3085532 - RNA, 19 nt, Artificial Sequence
  Description of Artificial Sequence: Synthetic oligonucleotide
aagaaacagguaauuuuca

SEQ ID NO: 3085533 - RNA, 19 nt, Artificial Sequence
  Description of Artificial Sequence: Synthetic oligonucleotide
acaucaagugaauuuugaa

SEQ ID NO: 3085534 - RNA, 19 nt, Artificial Sequence
  Description of Artificial Sequence: Synthetic oligonucleotide
uagacaucaagugaauuuu

SEQ ID NO: 3085535 - RNA, 19 nt, Artificial Sequence
  Description of Artificial Sequence: Synthetic oligonucleotide
ugagauuacaggucacuuu

SEQ ID NO: 3085536 - RNA, 19 nt, Artificial Sequence
  Description of Artificial Sequence: Synthetic oligonucleotide
uaccacaaucucugaagcc

SEQ ID NO: 3085537 - RNA, 19 nt, Artificial Sequence
  Description of Artificial Sequence: Synthetic oligonucleotide
auuuugaagcagaaaagaa

SEQ ID NO: 3085538 - RNA, 19 nt, Artificial Sequence
  Description of Artificial Sequence: Synthetic oligonucleotide
cagcagggcagcaaugagg

SEQ ID NO: 3085539 - RNA, 19 nt, Artificial Sequence
  Description of Artificial Sequence: Synthetic oligonucleotide
caagugaauuuugaagcag

SEQ ID NO: 3085540 - RNA, 19 nt, Artificial Sequence
  Description of Artificial Sequence: Synthetic oligonucleotide
gacuguggguaccacaauc

SEQ ID NO: 3085541 - RNA, 19 nt, Artificial Sequence
  Description of Artificial Sequence: Synthetic oligonucleotide
ugugccuaagcaagggcuc

SEQ ID NO: 3085542 - RNA, 19 nt, Artificial Sequence
  Description of Artificial Sequence: Synthetic oligonucleotide
agggcagcaaugaggaugg

SEQ ID NO: 3085543 - RNA, 19 nt, Artificial Sequence
  Description of Artificial Sequence: Synthetic oligonucleotide
ucucugaagccacacgcau

SEQ ID NO: 3085544 - RNA, 19 nt, Artificial Sequence
  Description of Artificial Sequence: Synthetic oligonucleotide
uccugagaaggaguguuag

SEQ ID NO: 3085545 - RNA, 19 nt, Artificial Sequence
  Description of Artificial Sequence: Synthetic oligonucleotide
caaucucugaagccacacg

SEQ ID NO: 3085546 - RNA, 19 nt, Artificial Sequence
  Description of Artificial Sequence: Synthetic oligonucleotide
cagcaaugaggauggagag

SEQ ID NO: 3085547 - RNA, 19 nt, Artificial Sequence
  Description of Artificial Sequence: Synthetic oligonucleotide
gcagaaaagaagcaugauc

SEQ ID NO: 3085548 - RNA, 19 nt, Artificial Sequence
  Description of Artificial Sequence: Synthetic oligonucleotide
ucagccguggcuccugaga

SEQ ID NO: 3085549 - RNA, 19 nt, Artificial Sequence
  Description of Artificial Sequence: Synthetic oligonucleotide
cugagaaggaguguuagca

SEQ ID NO: 3085550 - RNA, 19 nt, Artificial Sequence
  Description of Artificial Sequence: Synthetic oligonucleotide
gaguguuagcagcagggca

SEQ ID NO: 3085551 - RNA, 19 nt, Artificial Sequence
  Description of Artificial Sequence: Synthetic oligonucleotide
agcaaugaggauggagagg

SEQ ID NO: 3085552 - RNA, 19 nt, Artificial Sequence
  Description of Artificial Sequence: Synthetic oligonucleotide
ucauuuuauuuauguuuau

SEQ ID NO: 3085553 - RNA, 19 nt, Artificial Sequence
  Description of Artificial Sequence: Synthetic oligonucleotide
ugaagguggagaugagauc

SEQ ID NO: 3085554 - RNA, 19 nt, Artificial Sequence
  Description of Artificial Sequence: Synthetic oligonucleotide
gacaucaagugaauuuuga

SEQ ID NO: 3085555 - RNA, 19 nt, Artificial Sequence
  Description of Artificial Sequence: Synthetic oligonucleotide
uccuaucucagccguggcu

SEQ ID NO: 3085556 - RNA, 19 nt, Artificial Sequence
  Description of Artificial Sequence: Synthetic oligonucleotide
gaagguugucugaaagaug

SEQ ID NO: 3085557 - RNA, 19 nt, Artificial Sequence
  Description of Artificial Sequence: Synthetic oligonucleotide
caugugccuaagcaagggc

SEQ ID NO: 3085558 - RNA, 19 nt, Artificial Sequence
  Description of Artificial Sequence: Synthetic oligonucleotide
ucuuaaaucccagcacaaa

SEQ ID NO: 3085559 - RNA, 19 nt, Artificial Sequence
  Description of Artificial Sequence: Synthetic oligonucleotide
cagggcagcaaugaggaug

SEQ ID NO: 3085560 - RNA, 19 nt, Artificial Sequence
  Description of Artificial Sequence: Synthetic oligonucleotide
uggcuccugagaaggagug

SEQ ID NO: 3085561 - RNA, 19 nt, Artificial Sequence
  Description of Artificial Sequence: Synthetic oligonucleotide
gguugucugaaagaugaag

SEQ ID NO: 3085562 - RNA, 19 nt, Artificial Sequence
  Description of Artificial Sequence: Synthetic oligonucleotide
ggagaugagauccuaucuc

SEQ ID NO: 3085563 - RNA, 19 nt, Artificial Sequence
  Description of Artificial Sequence: Synthetic oligonucleotide
auccuaucucagccguggc

SEQ ID NO: 3085564 - RNA, 19 nt, Artificial Sequence
  Description of Artificial Sequence: Synthetic oligonucleotide
gauccugaagguugucuga

SEQ ID NO: 3085565 - RNA, 19 nt, Artificial Sequence
  Description of Artificial Sequence: Synthetic oligonucleotide
guggagaugagauccuauc

SEQ ID NO: 3085566 - RNA, 19 nt, Artificial Sequence
  Description of Artificial Sequence: Synthetic oligonucleotide
auuacaggucacuuucauu

SEQ ID NO: 3085567 - RNA, 19 nt, Artificial Sequence
  Description of Artificial Sequence: Synthetic oligonucleotide
acgcaugugccuaagcaag

SEQ ID NO: 3085568 - RNA, 19 nt, Artificial Sequence
  Description of Artificial Sequence: Synthetic oligonucleotide
uauagacaucaagugaauu

SEQ ID NO: 3085569 - RNA, 19 nt, Artificial Sequence
  Description of Artificial Sequence: Synthetic oligonucleotide
gaaggaguguuagcagcag

SEQ ID NO: 3085570 - RNA, 19 nt, Artificial Sequence
  Description of Artificial Sequence: Synthetic oligonucleotide
cugaagguugucugaaaga

SEQ ID NO: 3085571 - RNA, 19 nt, Artificial Sequence
  Description of Artificial Sequence: Synthetic oligonucleotide
acuguggguaccacaaucu

SEQ ID NO: 3085572 - RNA, 19 nt, Artificial Sequence
  Description of Artificial Sequence: Synthetic oligonucleotide
gagaggacgcagacugugg

SEQ ID NO: 3085573 - RNA, 19 nt, Artificial Sequence
  Description of Artificial Sequence: Synthetic oligonucleotide
uugagauuacaggucacuu

SEQ ID NO: 3085574 - RNA, 19 nt, Artificial Sequence
  Description of Artificial Sequence: Synthetic oligonucleotide
cuaucucagccguggcucc

SEQ ID NO: 3085575 - RNA, 19 nt, Artificial Sequence
  Description of Artificial Sequence: Synthetic oligonucleotide
agaugagauccuaucucag

SEQ ID NO: 3085576 - RNA, 19 nt, Artificial Sequence
  Description of Artificial Sequence: Synthetic oligonucleotide
augugccuaagcaagggcu

SEQ ID NO: 3085577 - RNA, 19 nt, Artificial Sequence
  Description of Artificial Sequence: Synthetic oligonucleotide
agaaggaguguuagcagca

SEQ ID NO: 3085578 - RNA, 19 nt, Artificial Sequence
  Description of Artificial Sequence: Synthetic oligonucleotide
ccugaagguugucugaaag

SEQ ID NO: 3085579 - RNA, 19 nt, Artificial Sequence
  Description of Artificial Sequence: Synthetic oligonucleotide
cucugaagccacacgcaug

SEQ ID NO: 3085580 - RNA, 19 nt, Artificial Sequence
  Description of Artificial Sequence: Synthetic oligonucleotide
cacuuucauuuuauuuaug

SEQ ID NO: 3085581 - RNA, 19 nt, Artificial Sequence
  Description of Artificial Sequence: Synthetic oligonucleotide
agugaauuuugaagcagaa

SEQ ID NO: 3085582 - RNA, 19 nt, Artificial Sequence
  Description of Artificial Sequence: Synthetic oligonucleotide
agacaucaagugaauuuug

SEQ ID NO: 3085583 - RNA, 19 nt, Artificial Sequence
  Description of Artificial Sequence: Synthetic oligonucleotide
augauccugaagguugucu

SEQ ID NO: 3085584 - RNA, 19 nt, Artificial Sequence
  Description of Artificial Sequence: Synthetic oligonucleotide
acaggucacuuucauuuua

SEQ ID NO: 3085585 - RNA, 19 nt, Artificial Sequence
  Description of Artificial Sequence: Synthetic oligonucleotide
ggaagaaacagguaauuuu

SEQ ID NO: 3085586 - RNA, 19 nt, Artificial Sequence
  Description of Artificial Sequence: Synthetic oligonucleotide
gauuacaggucacuuucau

SEQ ID NO: 3085587 - RNA, 19 nt, Artificial Sequence
  Description of Artificial Sequence: Synthetic oligonucleotide
aagccacacgcaugugccu

SEQ ID NO: 3085588 - RNA, 19 nt, Artificial Sequence
  Description of Artificial Sequence: Synthetic oligonucleotide
aagcaugauccugaagguu

SEQ ID NO: 3085589 - RNA, 19 nt, Artificial Sequence
  Description of Artificial Sequence: Synthetic oligonucleotide
cugaaagaugaagguggag

SEQ ID NO: 3085590 - RNA, 19 nt, Artificial Sequence
  Description of Artificial Sequence: Synthetic oligonucleotide
gagauccuaucucagccgu

SEQ ID NO: 3085591 - RNA, 19 nt, Artificial Sequence
  Description of Artificial Sequence: Synthetic oligonucleotide
uacaggucacuuucauuuu

SEQ ID NO: 3085592 - RNA, 19 nt, Artificial Sequence
  Description of Artificial Sequence: Synthetic oligonucleotide
aaaucccagcacaaaccaa

SEQ ID NO: 3085593 - RNA, 19 nt, Artificial Sequence
  Description of Artificial Sequence: Synthetic oligonucleotide
auauagacaucaagugaau

SEQ ID NO: 3085594 - RNA, 19 nt, Artificial Sequence
  Description of Artificial Sequence: Synthetic oligonucleotide
cuguggguaccacaaucuc

SEQ ID NO: 3085595 - RNA, 19 nt, Artificial Sequence
  Description of Artificial Sequence: Synthetic oligonucleotide
cacgcaugugccuaagcaa

SEQ ID NO: 3085596 - RNA, 19 nt, Artificial Sequence
  Description of Artificial Sequence: Synthetic oligonucleotide
gguaauuuucagauccuaa

SEQ ID NO: 3085597 - RNA, 19 nt, Artificial Sequence
  Description of Artificial Sequence: Synthetic oligonucleotide
uccugaagguugucugaaa

SEQ ID NO: 3085598 - RNA, 19 nt, Artificial Sequence
  Description of Artificial Sequence: Synthetic oligonucleotide
aagguggagaugagauccu

SEQ ID NO: 3085599 - RNA, 19 nt, Artificial Sequence
  Description of Artificial Sequence: Synthetic oligonucleotide
gugaauuuugaagcagaaa

SEQ ID NO: 3085600 - RNA, 19 nt, Artificial Sequence
  Description of Artificial Sequence: Synthetic oligonucleotide
aucucugaagccacacgca

SEQ ID NO: 3085601 - RNA, 19 nt, Artificial Sequence
  Description of Artificial Sequence: Synthetic oligonucleotide
agcagaaaagaagcaugau

SEQ ID NO: 3085602 - RNA, 19 nt, Artificial Sequence
  Description of Artificial Sequence: Synthetic oligonucleotide
uggagaggacgcagacugu

SEQ ID NO: 3085603 - RNA, 19 nt, Artificial Sequence
  Description of Artificial Sequence: Synthetic oligonucleotide
agguaauuuucagauccua

SEQ ID NO: 3085604 - RNA, 19 nt, Artificial Sequence
  Description of Artificial Sequence: Synthetic oligonucleotide
agauuacaggucacuuuca

SEQ ID NO: 3085605 - RNA, 19 nt, Artificial Sequence
  Description of Artificial Sequence: Synthetic oligonucleotide
gcaugugccuaagcaaggg

SEQ ID NO: 3085606 - RNA, 19 nt, Artificial Sequence
  Description of Artificial Sequence: Synthetic oligonucleotide
cacacgcaugugccuaagc

SEQ ID NO: 3085607 - RNA, 19 nt, Artificial Sequence
  Description of Artificial Sequence: Synthetic oligonucleotide
ggcagcaaugaggauggag

SEQ ID NO: 3085608 - RNA, 19 nt, Artificial Sequence
  Description of Artificial Sequence: Synthetic oligonucleotide
gccguggcuccugagaagg

SEQ ID NO: 3085609 - RNA, 19 nt, Artificial Sequence
  Description of Artificial Sequence: Synthetic oligonucleotide
ggauggagaggacgcagac

SEQ ID NO: 3085610 - RNA, 19 nt, Artificial Sequence
  Description of Artificial Sequence: Synthetic oligonucleotide
ggagaggacgcagacugug

SEQ ID NO: 3085611 - RNA, 19 nt, Artificial Sequence
  Description of Artificial Sequence: Synthetic oligonucleotide
caaugaggauggagaggac

SEQ ID NO: 3085612 - RNA, 19 nt, Artificial Sequence
  Description of Artificial Sequence: Synthetic oligonucleotide
agccguggcuccugagaag

SEQ ID NO: 3085613 - RNA, 19 nt, Artificial Sequence
  Description of Artificial Sequence: Synthetic oligonucleotide
ggaguguuagcagcagggc

SEQ ID NO: 3085614 - RNA, 19 nt, Artificial Sequence
  Description of Artificial Sequence: Synthetic oligonucleotide
ccugagaaggaguguuagc

SEQ ID NO: 3085615 - RNA, 19 nt, Artificial Sequence
  Description of Artificial Sequence: Synthetic oligonucleotide
auccugaagguugucugaa

SEQ ID NO: 3085616 - RNA, 19 nt, Artificial Sequence
  Description of Artificial Sequence: Synthetic oligonucleotide
aggucacuuucauuuuauu

SEQ ID NO: 3085617 - RNA, 19 nt, Artificial Sequence
  Description of Artificial Sequence: Synthetic oligonucleotide
ucucagccguggcuccuga

SEQ ID NO: 3085618 - RNA, 19 nt, Artificial Sequence
  Description of Artificial Sequence: Synthetic oligonucleotide
ugccuaagcaagggcucug

SEQ ID NO: 3085619 - RNA, 19 nt, Artificial Sequence
  Description of Artificial Sequence: Synthetic oligonucleotide
aggacgcagacugugggua

SEQ ID NO: 3085620 - RNA, 19 nt, Artificial Sequence
  Description of Artificial Sequence: Synthetic oligonucleotide
ccuaucucagccguggcuc

SEQ ID NO: 3085621 - RNA, 19 nt, Artificial Sequence
  Description of Artificial Sequence: Synthetic oligonucleotide
ccacaaucucugaagccac

SEQ ID NO: 3085622 - RNA, 19 nt, Artificial Sequence
  Description of Artificial Sequence: Synthetic oligonucleotide
aggauggagaggacgcaga

SEQ ID NO: 3085623 - RNA, 19 nt, Artificial Sequence
  Description of Artificial Sequence: Synthetic oligonucleotide
uguuagcagcagggcagca

SEQ ID NO: 3085624 - RNA, 19 nt, Artificial Sequence
  Description of Artificial Sequence: Synthetic oligonucleotide
gcagcagggcagcaaugag

SEQ ID NO: 3085625 - RNA, 19 nt, Artificial Sequence
  Description of Artificial Sequence: Synthetic oligonucleotide
ccuaaaauauagacaucaa

SEQ ID NO: 3085626 - RNA, 19 nt, Artificial Sequence
  Description of Artificial Sequence: Synthetic oligonucleotide
agacuguggguaccacaau

SEQ ID NO: 3085627 - RNA, 19 nt, Artificial Sequence
  Description of Artificial Sequence: Synthetic oligonucleotide
guuagcagcagggcagcaa

SEQ ID NO: 3085628 - RNA, 19 nt, Artificial Sequence
  Description of Artificial Sequence: Synthetic oligonucleotide
uaucucagccguggcuccu

SEQ ID NO: 3085629 - RNA, 19 nt, Artificial Sequence
  Description of Artificial Sequence: Synthetic oligonucleotide
gauggagaggacgcagacu

SEQ ID NO: 3085630 - RNA, 19 nt, Artificial Sequence
  Description of Artificial Sequence: Synthetic oligonucleotide
agauccuaucucagccgug

SEQ ID NO: 3085631 - RNA, 19 nt, Artificial Sequence
  Description of Artificial Sequence: Synthetic oligonucleotide
gaggacgcagacugugggu

SEQ ID NO: 3085632 - RNA, 19 nt, Artificial Sequence
  Description of Artificial Sequence: Synthetic oligonucleotide
gcagacuguggguaccaca

SEQ ID NO: 3085633 - RNA, 19 nt, Artificial Sequence
  Description of Artificial Sequence: Synthetic oligonucleotide
cucagccguggcuccugag

SEQ ID NO: 3085634 - RNA, 19 nt, Artificial Sequence
  Description of Artificial Sequence: Synthetic oligonucleotide
cagguaauuuucagauccu

SEQ ID NO: 3085635 - RNA, 19 nt, Artificial Sequence
  Description of Artificial Sequence: Synthetic oligonucleotide
cagccguggcuccugagaa

SEQ ID NO: 3085636 - RNA, 19 nt, Artificial Sequence
  Description of Artificial Sequence: Synthetic oligonucleotide
cgcaugugccuaagcaagg

SEQ ID NO: 3085637 - RNA, 19 nt, Artificial Sequence
  Description of Artificial Sequence: Synthetic oligonucleotide
caugauccugaagguuguc

SEQ ID NO: 3085638 - RNA, 19 nt, Artificial Sequence
  Description of Artificial Sequence: Synthetic oligonucleotide
aucucagccguggcuccug

SEQ ID NO: 3085639 - RNA, 19 nt, Artificial Sequence
  Description of Artificial Sequence: Synthetic oligonucleotide
ggguaccacaaucucugaa

SEQ ID NO: 3085640 - RNA, 19 nt, Artificial Sequence
  Description of Artificial Sequence: Synthetic oligonucleotide
ggacgcagacuguggguac

SEQ ID NO: 3085641 - RNA, 19 nt, Artificial Sequence
  Description of Artificial Sequence: Synthetic oligonucleotide
agccacacgcaugugccua

SEQ ID NO: 3085642 - RNA, 19 nt, Artificial Sequence
  Description of Artificial Sequence: Synthetic oligonucleotide
caggucacuuucauuuuau

SEQ ID NO: 3085643 - RNA, 19 nt, Artificial Sequence
  Description of Artificial Sequence: Synthetic oligonucleotide
cuccugagaaggaguguua

SEQ ID NO: 3085644 - RNA, 19 nt, Artificial Sequence
  Description of Artificial Sequence: Synthetic oligonucleotide
agguggagaugagauccua

SEQ ID NO: 3085645 - RNA, 19 nt, Artificial Sequence
  Description of Artificial Sequence: Synthetic oligonucleotide
agguugucugaaagaugaa

SEQ ID NO: 3085646 - RNA, 19 nt, Artificial Sequence
  Description of Artificial Sequence: Synthetic oligonucleotide
cugaagccacacgcaugug

SEQ ID NO: 3085647 - RNA, 19 nt, Artificial Sequence
  Description of Artificial Sequence: Synthetic oligonucleotide
guggcuccugagaaggagu

SEQ ID NO: 3085648 - RNA, 19 nt, Artificial Sequence
  Description of Artificial Sequence: Synthetic oligonucleotide
gggaagaaacagguaauuu

SEQ ID NO: 3085649 - RNA, 19 nt, Artificial Sequence
  Description of Artificial Sequence: Synthetic oligonucleotide
gugccuaagcaagggcucu

SEQ ID NO: 3085650 - RNA, 19 nt, Artificial Sequence
  Description of Artificial Sequence: Synthetic oligonucleotide
ggggaagaaacagguaauu

SEQ ID NO: 3085651 - RNA, 19 nt, Artificial Sequence
  Description of Artificial Sequence: Synthetic oligonucleotide
gcuccugagaaggaguguu

SEQ ID NO: 3085652 - RNA, 19 nt, Artificial Sequence
  Description of Artificial Sequence: Synthetic oligonucleotide
gguggagaugagauccuau

SEQ ID NO: 3085653 - RNA, 19 nt, Artificial Sequence
  Description of Artificial Sequence: Synthetic oligonucleotide
gcaugauccugaagguugu

SEQ ID NO: 3085654 - RNA, 19 nt, Artificial Sequence
  Description of Artificial Sequence: Synthetic oligonucleotide
gccacacgcaugugccuaa

SEQ ID NO: 3085655 - RNA, 19 nt, Artificial Sequence
  Description of Artificial Sequence: Synthetic oligonucleotide
ccacacgcaugugccuaag

SEQ ID NO: 3085656 - RNA, 19 nt, Artificial Sequence
  Description of Artificial Sequence: Synthetic oligonucleotide
ggcuccugagaaggagugu

SEQ ID NO: 3085657 - RNA, 19 nt, Artificial Sequence
  Description of Artificial Sequence: Synthetic oligonucleotide
ccguggcuccugagaagga

SEQ ID NO: 3085658 - RNA, 19 nt, Artificial Sequence
  Description of Artificial Sequence: Synthetic oligonucleotide
gcagggcagcaaugaggau

SEQ ID NO: 3085659 - RNA, 19 nt, Artificial Sequence
  Description of Artificial Sequence: Synthetic oligonucleotide
gggcagcaaugaggaugga

SEQ ID NO: 3085660 - RNA, 19 nt, Artificial Sequence
  Description of Artificial Sequence: Synthetic oligonucleotide
aacggaaggcucuagaagc

SEQ ID NO: 3085661 - RNA, 19 nt, Artificial Sequence
  Description of Artificial Sequence: Synthetic oligonucleotide
aaaauauauggcuagcaag

SEQ ID NO: 3085662 - RNA, 19 nt, Artificial Sequence
  Description of Artificial Sequence: Synthetic oligonucleotide
auuuauucaguuuagcauc

SEQ ID NO: 3085663 - RNA, 19 nt, Artificial Sequence
  Description of Artificial Sequence: Synthetic oligonucleotide
ucuaagaguacacagacac

SEQ ID NO: 3085664 - RNA, 19 nt, Artificial Sequence
  Description of Artificial Sequence: Synthetic oligonucleotide
uaugcauucauggacaacg

SEQ ID NO: 3085665 - RNA, 19 nt, Artificial Sequence
  Description of Artificial Sequence: Synthetic oligonucleotide
uuguaauggacccagaaca

SEQ ID NO: 3085666 - RNA, 19 nt, Artificial Sequence
  Description of Artificial Sequence: Synthetic oligonucleotide
uuagaggaugcuuauauag

SEQ ID NO: 3085667 - RNA, 19 nt, Artificial Sequence
  Description of Artificial Sequence: Synthetic oligonucleotide
agaagguucuaguagauuc

SEQ ID NO: 3085668 - RNA, 19 nt, Artificial Sequence
  Description of Artificial Sequence: Synthetic oligonucleotide
auacacaucauuuauucag

SEQ ID NO: 3085669 - RNA, 19 nt, Artificial Sequence
  Description of Artificial Sequence: Synthetic oligonucleotide
uauaguuuguaauggaccc

SEQ ID NO: 3085670 - RNA, 19 nt, Artificial Sequence
  Description of Artificial Sequence: Synthetic oligonucleotide
gacacaacaauguacagac

SEQ ID NO: 3085671 - RNA, 19 nt, Artificial Sequence
  Description of Artificial Sequence: Synthetic oligonucleotide
acauacacaucauuuauuc

SEQ ID NO: 3085672 - RNA, 19 nt, Artificial Sequence
  Description of Artificial Sequence: Synthetic oligonucleotide
uguuagaagguucuaguag

SEQ ID NO: 3085673 - RNA, 19 nt, Artificial Sequence
  Description of Artificial Sequence: Synthetic oligonucleotide
aauuagaggaugcuuauau

SEQ ID NO: 3085674 - RNA, 19 nt, Artificial Sequence
  Description of Artificial Sequence: Synthetic oligonucleotide
uauauggcuagcaagacau

SEQ ID NO: 3085675 - RNA, 19 nt, Artificial Sequence
  Description of Artificial Sequence: Synthetic oligonucleotide
ugagaaaauauauggcuag

SEQ ID NO: 3085676 - RNA, 19 nt, Artificial Sequence
  Description of Artificial Sequence: Synthetic oligonucleotide
uguuuaugcauucauggac

SEQ ID NO: 3085677 - RNA, 19 nt, Artificial Sequence
  Description of Artificial Sequence: Synthetic oligonucleotide
acugagaaaauauauggcu

SEQ ID NO: 3085678 - RNA, 19 nt, Artificial Sequence
  Description of Artificial Sequence: Synthetic oligonucleotide
cuuauauaguuuguaaugg

SEQ ID NO: 3085679 - RNA, 19 nt, Artificial Sequence
  Description of Artificial Sequence: Synthetic oligonucleotide
auauaguuuguaauggacc

SEQ ID NO: 3085680 - RNA, 19 nt, Artificial Sequence
  Description of Artificial Sequence: Synthetic oligonucleotide
uauauaguuuguaauggac

SEQ ID NO: 3085681 - RNA, 19 nt, Artificial Sequence
  Description of Artificial Sequence: Synthetic oligonucleotide
ucauuuauucaguuuagca

SEQ ID NO: 3085682 - RNA, 19 nt, Artificial Sequence
  Description of Artificial Sequence: Synthetic oligonucleotide
uaugcuacugagaaaauau

SEQ ID NO: 3085683 - RNA, 19 nt, Artificial Sequence
  Description of Artificial Sequence: Synthetic oligonucleotide
aaauauauggcuagcaaga

SEQ ID NO: 3085684 - RNA, 19 nt, Artificial Sequence
  Description of Artificial Sequence: Synthetic oligonucleotide
  modified_base (2)..(2): a, c, u, g, unknown or other
gnuucuaugcuacugagaa

SEQ ID NO: 3085685 - RNA, 19 nt, Artificial Sequence
  Description of Artificial Sequence: Synthetic oligonucleotide
uucucuuagguguuuaugc

SEQ ID NO: 3085686 - RNA, 19 nt, Artificial Sequence
  Description of Artificial Sequence: Synthetic oligonucleotide
gguguuuaugcauucaugg

SEQ ID NO: 3085687 - RNA, 19 nt, Artificial Sequence
  Description of Artificial Sequence: Synthetic oligonucleotide
aauauauggcuagcaagac

SEQ ID NO: 3085688 - RNA, 19 nt, Artificial Sequence
  Description of Artificial Sequence: Synthetic oligonucleotide
aucauuacaucuuccguuc

SEQ ID NO: 3085689 - RNA, 19 nt, Artificial Sequence
  Description of Artificial Sequence: Synthetic oligonucleotide
uacacagacacaacaaugu

SEQ ID NO: 3085690 - RNA, 19 nt, Artificial Sequence
  Description of Artificial Sequence: Synthetic oligonucleotide
agcaucauuacaucuuccg

SEQ ID NO: 3085691 - RNA, 19 nt, Artificial Sequence
  Description of Artificial Sequence: Synthetic oligonucleotide
ucuaguagauuccagcuau

SEQ ID NO: 3085692 - RNA, 19 nt, Artificial Sequence
  Description of Artificial Sequence: Synthetic oligonucleotide
uuuguaauggacccagaac

SEQ ID NO: 3085693 - RNA, 19 nt, Artificial Sequence
  Description of Artificial Sequence: Synthetic oligonucleotide
acaauguacagacacaaaa

SEQ ID NO: 3085694 - RNA, 19 nt, Artificial Sequence
  Description of Artificial Sequence: Synthetic oligonucleotide
cacaacaauguacagacac

SEQ ID NO: 3085695 - RNA, 19 nt, Artificial Sequence
  Description of Artificial Sequence: Synthetic oligonucleotide
aaaauuagaggaugcuuau

SEQ ID NO: 3085696 - RNA, 19 nt, Artificial Sequence
  Description of Artificial Sequence: Synthetic oligonucleotide
uucuugacugcacaguagc

SEQ ID NO: 3085697 - RNA, 19 nt, Artificial Sequence
  Description of Artificial Sequence: Synthetic oligonucleotide
uucuaugcuacugagaaaa

SEQ ID NO: 3085698 - RNA, 19 nt, Artificial Sequence
  Description of Artificial Sequence: Synthetic oligonucleotide
acaucauuuauucaguuua

SEQ ID NO: 3085699 - RNA, 19 nt, Artificial Sequence
  Description of Artificial Sequence: Synthetic oligonucleotide
ucaguuuagcaucauuaca

SEQ ID NO: 3085700 - RNA, 19 nt, Artificial Sequence
  Description of Artificial Sequence: Synthetic oligonucleotide
uuuauucaguuuagcauca

SEQ ID NO: 3085701 - RNA, 19 nt, Artificial Sequence
  Description of Artificial Sequence: Synthetic oligonucleotide
aagacaucccuguuuucuc

SEQ ID NO: 3085702 - RNA, 19 nt, Artificial Sequence
  Description of Artificial Sequence: Synthetic oligonucleotide
uuauauaguuuguaaugga

SEQ ID NO: 3085703 - RNA, 19 nt, Artificial Sequence
  Description of Artificial Sequence: Synthetic oligonucleotide
uaagaguacacagacacaa

SEQ ID NO: 3085704 - RNA, 19 nt, Artificial Sequence
  Description of Artificial Sequence: Synthetic oligonucleotide
uaauggacccagaacacca

SEQ ID NO: 3085705 - RNA, 19 nt, Artificial Sequence
  Description of Artificial Sequence: Synthetic oligonucleotide
uguguuagaagguucuagu

SEQ ID NO: 3085706 - RNA, 19 nt, Artificial Sequence
  Description of Artificial Sequence: Synthetic oligonucleotide
agaacaccaggucuaagag

SEQ ID NO: 3085707 - RNA, 19 nt, Artificial Sequence
  Description of Artificial Sequence: Synthetic oligonucleotide
uuuagcaucauuacaucuu

SEQ ID NO: 3085708 - RNA, 19 nt, Artificial Sequence
  Description of Artificial Sequence: Synthetic oligonucleotide
aguuuagcaucauuacauc

SEQ ID NO: 3085709 - RNA, 19 nt, Artificial Sequence
  Description of Artificial Sequence: Synthetic oligonucleotide
cauucauggacaacggaag

SEQ ID NO: 3085710 - RNA, 19 nt, Artificial Sequence
  Description of Artificial Sequence: Synthetic oligonucleotide
uugacugcacaguagcaag

SEQ ID NO: 3085711 - RNA, 19 nt, Artificial Sequence
  Description of Artificial Sequence: Synthetic oligonucleotide
uucaguuuagcaucauuac

SEQ ID NO: 3085712 - RNA, 19 nt, Artificial Sequence
  Description of Artificial Sequence: Synthetic oligonucleotide
uuagcaucauuacaucuuc

SEQ ID NO: 3085713 - RNA, 19 nt, Artificial Sequence
  Description of Artificial Sequence: Synthetic oligonucleotide
aggaugcuuauauaguuug

SEQ ID NO: 3085714 - RNA, 19 nt, Artificial Sequence
  Description of Artificial Sequence: Synthetic oligonucleotide
gaaaauauauggcuagcaa

SEQ ID NO: 3085715 - RNA, 19 nt, Artificial Sequence
  Description of Artificial Sequence: Synthetic oligonucleotide
ugcuacugagaaaauauau

SEQ ID NO: 3085716 - RNA, 19 nt, Artificial Sequence
  Description of Artificial Sequence: Synthetic oligonucleotide
auucauggacaacggaagg

SEQ ID NO: 3085717 - RNA, 19 nt, Artificial Sequence
  Description of Artificial Sequence: Synthetic oligonucleotide
gcuuauauaguuuguaaug

SEQ ID NO: 3085718 - RNA, 19 nt, Artificial Sequence
  Description of Artificial Sequence: Synthetic oligonucleotide
guuagaagguucuaguaga

SEQ ID NO: 3085719 - RNA, 19 nt, Artificial Sequence
  Description of Artificial Sequence: Synthetic oligonucleotide
aucauuuauucaguuuagc

SEQ ID NO: 3085720 - RNA, 19 nt, Artificial Sequence
  Description of Artificial Sequence: Synthetic oligonucleotide
uauggcuagcaagacaucc

SEQ ID NO: 3085721 - RNA, 19 nt, Artificial Sequence
  Description of Artificial Sequence: Synthetic oligonucleotide
uguaauggacccagaacac

SEQ ID NO: 3085722 - RNA, 19 nt, Artificial Sequence
  Description of Artificial Sequence: Synthetic oligonucleotide
ugcuuauauaguuuguaau

SEQ ID NO: 3085723 - RNA, 19 nt, Artificial Sequence
  Description of Artificial Sequence: Synthetic oligonucleotide
uaguagauuccagcuaucg

SEQ ID NO: 3085724 - RNA, 19 nt, Artificial Sequence
  Description of Artificial Sequence: Synthetic oligonucleotide
  modified_base (11)..(11): a, c, u, g, unknown or other
ccagcuaucgnuucuaugc

SEQ ID NO: 3085725 - RNA, 19 nt, Artificial Sequence
  Description of Artificial Sequence: Synthetic oligonucleotide
acaucuuccguucuugacu

SEQ ID NO: 3085726 - RNA, 19 nt, Artificial Sequence
  Description of Artificial Sequence: Synthetic oligonucleotide
  modified_base (4)..(4): a, c, u, g, unknown or other
ucgnuucuaugcuacugag

SEQ ID NO: 3085727 - RNA, 19 nt, Artificial Sequence
  Description of Artificial Sequence: Synthetic oligonucleotide
uacacaucauuuauucagu

SEQ ID NO: 3085728 - RNA, 19 nt, Artificial Sequence
  Description of Artificial Sequence: Synthetic oligonucleotide
aggcucuagaagcaaagag

SEQ ID NO: 3085729 - RNA, 19 nt, Artificial Sequence
  Description of Artificial Sequence: Synthetic oligonucleotide
aacaccaggucuaagagua

SEQ ID NO: 3085730 - RNA, 19 nt, Artificial Sequence
  Description of Artificial Sequence: Synthetic oligonucleotide
cacagacacaacaauguac

SEQ ID NO: 3085731 - RNA, 19 nt, Artificial Sequence
  Description of Artificial Sequence: Synthetic oligonucleotide
uagaggaugcuuauauagu

SEQ ID NO: 3085732 - RNA, 19 nt, Artificial Sequence
  Description of Artificial Sequence: Synthetic oligonucleotide
uaguuuguaauggacccag

SEQ ID NO: 3085733 - RNA, 19 nt, Artificial Sequence
  Description of Artificial Sequence: Synthetic oligonucleotide
ucucuuagguguuuaugca

SEQ ID NO: 3085734 - RNA, 19 nt, Artificial Sequence
  Description of Artificial Sequence: Synthetic oligonucleotide
  modified_base (16)..(16): a, c, u, g, unknown or other
agauuccagcuaucgnuuc

SEQ ID NO: 3085735 - RNA, 19 nt, Artificial Sequence
  Description of Artificial Sequence: Synthetic oligonucleotide
acagacacaacaauguaca

SEQ ID NO: 3085736 - RNA, 19 nt, Artificial Sequence
  Description of Artificial Sequence: Synthetic oligonucleotide
caggucuaagaguacacag

SEQ ID NO: 3085737 - RNA, 19 nt, Artificial Sequence
  Description of Artificial Sequence: Synthetic oligonucleotide
  modified_base (5)..(5): a, c, u, g, unknown or other
aucgnuucuaugcuacuga

SEQ ID NO: 3085738 - RNA, 19 nt, Artificial Sequence
  Description of Artificial Sequence: Synthetic oligonucleotide
auauauggcuagcaagaca

SEQ ID NO: 3085739 - RNA, 19 nt, Artificial Sequence
  Description of Artificial Sequence: Synthetic oligonucleotide
acacauacacaucauuuau

SEQ ID NO: 3085740 - RNA, 19 nt, Artificial Sequence
  Description of Artificial Sequence: Synthetic oligonucleotide
agaaaauauauggcuagca

SEQ ID NO: 3085741 - RNA, 19 nt, Artificial Sequence
  Description of Artificial Sequence: Synthetic oligonucleotide
gguucuaguagauuccagc

SEQ ID NO: 3085742 - RNA, 19 nt, Artificial Sequence
  Description of Artificial Sequence: Synthetic oligonucleotide
ucuuagguguuuaugcauu

SEQ ID NO: 3085743 - RNA, 19 nt, Artificial Sequence
  Description of Artificial Sequence: Synthetic oligonucleotide
gaagguucuaguagauucc

SEQ ID NO: 3085744 - RNA, 19 nt, Artificial Sequence
  Description of Artificial Sequence: Synthetic oligonucleotide
  modified_base (19)..(19): a, c, u, g, unknown or other
aguagauuccagcuaucgn

SEQ ID NO: 3085745 - RNA, 19 nt, Artificial Sequence
  Description of Artificial Sequence: Synthetic oligonucleotide
ugcacaguagcaagugugu

SEQ ID NO: 3085746 - RNA, 19 nt, Artificial Sequence
  Description of Artificial Sequence: Synthetic oligonucleotide
agaggaugcuuauauaguu

SEQ ID NO: 3085747 - RNA, 19 nt, Artificial Sequence
  Description of Artificial Sequence: Synthetic oligonucleotide
uucauggacaacggaaggc

SEQ ID NO: 3085748 - RNA, 19 nt, Artificial Sequence
  Description of Artificial Sequence: Synthetic oligonucleotide
aagaguacacagacacaac

SEQ ID NO: 3085749 - RNA, 19 nt, Artificial Sequence
  Description of Artificial Sequence: Synthetic oligonucleotide
caucuuccguucuugacug

SEQ ID NO: 3085750 - RNA, 19 nt, Artificial Sequence
  Description of Artificial Sequence: Synthetic oligonucleotide
ucauggacaacggaaggcu

SEQ ID NO: 3085751 - RNA, 19 nt, Artificial Sequence
  Description of Artificial Sequence: Synthetic oligonucleotide
  modified_base (6)..(6): a, c, u, g, unknown or other
uaucgnuucuaugcuacug

SEQ ID NO: 3085752 - RNA, 19 nt, Artificial Sequence
  Description of Artificial Sequence: Synthetic oligonucleotide
cugcacaguagcaagugug

SEQ ID NO: 3085753 - RNA, 19 nt, Artificial Sequence
  Description of Artificial Sequence: Synthetic oligonucleotide
ggucuaagaguacacagac

SEQ ID NO: 3085754 - RNA, 19 nt, Artificial Sequence
  Description of Artificial Sequence: Synthetic oligonucleotide
auuacaucuuccguucuug

SEQ ID NO: 3085755 - RNA, 19 nt, Artificial Sequence
  Description of Artificial Sequence: Synthetic oligonucleotide
ucccuguuuucucuuaggu

SEQ ID NO: 3085756 - RNA, 19 nt, Artificial Sequence
  Description of Artificial Sequence: Synthetic oligonucleotide
gaaggcucuagaagcaaag

SEQ ID NO: 3085757 - RNA, 19 nt, Artificial Sequence
  Description of Artificial Sequence: Synthetic oligonucleotide
gagaaaauauauggcuagc

SEQ ID NO: 3085758 - RNA, 19 nt, Artificial Sequence
  Description of Artificial Sequence: Synthetic oligonucleotide
uuagaagguucuaguagau

SEQ ID NO: 3085759 - RNA, 19 nt, Artificial Sequence
  Description of Artificial Sequence: Synthetic oligonucleotide
guacacagacacaacaaug

SEQ ID NO: 3085760 - RNA, 19 nt, Artificial Sequence
  Description of Artificial Sequence: Synthetic oligonucleotide
augcuuauauaguuuguaa

SEQ ID NO: 3085761 - RNA, 19 nt, Artificial Sequence
  Description of Artificial Sequence: Synthetic oligonucleotide
guuuaugcauucauggaca

SEQ ID NO: 3085762 - RNA, 19 nt, Artificial Sequence
  Description of Artificial Sequence: Synthetic oligonucleotide
caacggaaggcucuagaag

SEQ ID NO: 3085763 - RNA, 19 nt, Artificial Sequence
  Description of Artificial Sequence: Synthetic oligonucleotide
uagguguuuaugcauucau

SEQ ID NO: 3085764 - RNA, 19 nt, Artificial Sequence
  Description of Artificial Sequence: Synthetic oligonucleotide
auggcuagcaagacauccc

SEQ ID NO: 3085765 - RNA, 19 nt, Artificial Sequence
  Description of Artificial Sequence: Synthetic oligonucleotide
aaguguguuagaagguucu

SEQ ID NO: 3085766 - RNA, 19 nt, Artificial Sequence
  Description of Artificial Sequence: Synthetic oligonucleotide
uuuaugcauucauggacaa

SEQ ID NO: 3085767 - RNA, 19 nt, Artificial Sequence
  Description of Artificial Sequence: Synthetic oligonucleotide
aaacucacacauacacauc

SEQ ID NO: 3085768 - RNA, 19 nt, Artificial Sequence
  Description of Artificial Sequence: Synthetic oligonucleotide
  modified_base (18)..(18): a, c, u, g, unknown or other
guagauuccagcuaucgnu

SEQ ID NO: 3085769 - RNA, 19 nt, Artificial Sequence
  Description of Artificial Sequence: Synthetic oligonucleotide
ucuugacugcacaguagca

SEQ ID NO: 3085770 - RNA, 19 nt, Artificial Sequence
  Description of Artificial Sequence: Synthetic oligonucleotide
uucuaguagauuccagcua

SEQ ID NO: 3085771 - RNA, 19 nt, Artificial Sequence
  Description of Artificial Sequence: Synthetic oligonucleotide
cauuuauucaguuuagcau

SEQ ID NO: 3085772 - RNA, 19 nt, Artificial Sequence
  Description of Artificial Sequence: Synthetic oligonucleotide
agcaagacaucccuguuuu

SEQ ID NO: 3085773 - RNA, 19 nt, Artificial Sequence
  Description of Artificial Sequence: Synthetic oligonucleotide
ugcauucauggacaacgga

SEQ ID NO: 3085774 - RNA, 19 nt, Artificial Sequence
  Description of Artificial Sequence: Synthetic oligonucleotide
uccguucuugacugcacag

SEQ ID NO: 3085775 - RNA, 19 nt, Artificial Sequence
  Description of Artificial Sequence: Synthetic oligonucleotide
uggcuagcaagacaucccu

SEQ ID NO: 3085776 - RNA, 19 nt, Artificial Sequence
  Description of Artificial Sequence: Synthetic oligonucleotide
uauucaguuuagcaucauu

SEQ ID NO: 3085777 - RNA, 19 nt, Artificial Sequence
  Description of Artificial Sequence: Synthetic oligonucleotide
  modified_base (17)..(17): a, c, u, g, unknown or other
uagauuccagcuaucgnuu

SEQ ID NO: 3085778 - RNA, 19 nt, Artificial Sequence
  Description of Artificial Sequence: Synthetic oligonucleotide
aagguucuaguagauucca

SEQ ID NO: 3085779 - RNA, 19 nt, Artificial Sequence
  Description of Artificial Sequence: Synthetic oligonucleotide
uacaucuuccguucuugac

SEQ ID NO: 3085780 - RNA, 19 nt, Artificial Sequence
  Description of Artificial Sequence: Synthetic oligonucleotide
agacacaacaauguacaga

SEQ ID NO: 3085781 - RNA, 19 nt, Artificial Sequence
  Description of Artificial Sequence: Synthetic oligonucleotide
acaacggaaggcucuagaa

SEQ ID NO: 3085782 - RNA, 19 nt, Artificial Sequence
  Description of Artificial Sequence: Synthetic oligonucleotide
caaguguguuagaagguuc

SEQ ID NO: 3085783 - RNA, 19 nt, Artificial Sequence
  Description of Artificial Sequence: Synthetic oligonucleotide
uuacaucuuccguucuuga

SEQ ID NO: 3085784 - RNA, 19 nt, Artificial Sequence
  Description of Artificial Sequence: Synthetic oligonucleotide
auggacccagaacaccagg

SEQ ID NO: 3085785 - RNA, 19 nt, Artificial Sequence
  Description of Artificial Sequence: Synthetic oligonucleotide
uagcaucauuacaucuucc

SEQ ID NO: 3085786 - RNA, 19 nt, Artificial Sequence
  Description of Artificial Sequence: Synthetic oligonucleotide
cuuagguguuuaugcauuc

SEQ ID NO: 3085787 - RNA, 19 nt, Artificial Sequence
  Description of Artificial Sequence: Synthetic oligonucleotide
cagaacaccaggucuaaga

SEQ ID NO: 3085788 - RNA, 19 nt, Artificial Sequence
  Description of Artificial Sequence: Synthetic oligonucleotide
cugagaaaauauauggcua

SEQ ID NO: 3085789 - RNA, 19 nt, Artificial Sequence
  Description of Artificial Sequence: Synthetic oligonucleotide
aucccuguuuucucuuagg

SEQ ID NO: 3085790 - RNA, 19 nt, Artificial Sequence
  Description of Artificial Sequence: Synthetic oligonucleotide
guuuguaauggacccagaa

SEQ ID NO: 3085791 - RNA, 19 nt, Artificial Sequence
  Description of Artificial Sequence: Synthetic oligonucleotide
gcuacugagaaaauauaug

SEQ ID NO: 3085792 - RNA, 19 nt, Artificial Sequence
  Description of Artificial Sequence: Synthetic oligonucleotide
uuccguucuugacugcaca

SEQ ID NO: 3085793 - RNA, 19 nt, Artificial Sequence
  Description of Artificial Sequence: Synthetic oligonucleotide
auuagaggaugcuuauaua

SEQ ID NO: 3085794 - RNA, 19 nt, Artificial Sequence
  Description of Artificial Sequence: Synthetic oligonucleotide
guguguuagaagguucuag

SEQ ID NO: 3085795 - RNA, 19 nt, Artificial Sequence
  Description of Artificial Sequence: Synthetic oligonucleotide
  modified_base (12)..(12): a, c, u, g, unknown or other
uccagcuaucgnuucuaug

SEQ ID NO: 3085796 - RNA, 19 nt, Artificial Sequence
  Description of Artificial Sequence: Synthetic oligonucleotide
guaauggacccagaacacc

SEQ ID NO: 3085797 - RNA, 19 nt, Artificial Sequence
  Description of Artificial Sequence: Synthetic oligonucleotide
aauggacccagaacaccag

SEQ ID NO: 3085798 - RNA, 19 nt, Artificial Sequence
  Description of Artificial Sequence: Synthetic oligonucleotide
gaugcuuauauaguuugua

SEQ ID NO: 3085799 - RNA, 19 nt, Artificial Sequence
  Description of Artificial Sequence: Synthetic oligonucleotide
ucauuacaucuuccguucu

SEQ ID NO: 3085800 - RNA, 19 nt, Artificial Sequence
  Description of Artificial Sequence: Synthetic oligonucleotide
guguuuaugcauucaugga

SEQ ID NO: 3085801 - RNA, 19 nt, Artificial Sequence
  Description of Artificial Sequence: Synthetic oligonucleotide
uuagguguuuaugcauuca

SEQ ID NO: 3085802 - RNA, 19 nt, Artificial Sequence
  Description of Artificial Sequence: Synthetic oligonucleotide
uuuucucuuagguguuuau

SEQ ID NO: 3085803 - RNA, 19 nt, Artificial Sequence
  Description of Artificial Sequence: Synthetic oligonucleotide
caguuuagcaucauuacau

SEQ ID NO: 3085804 - RNA, 19 nt, Artificial Sequence
  Description of Artificial Sequence: Synthetic oligonucleotide
guucuaguagauuccagcu

SEQ ID NO: 3085805 - RNA, 19 nt, Artificial Sequence
  Description of Artificial Sequence: Synthetic oligonucleotide
aaggcucuagaagcaaaga

SEQ ID NO: 3085806 - RNA, 19 nt, Artificial Sequence
  Description of Artificial Sequence: Synthetic oligonucleotide
agacaucccuguuuucucu

SEQ ID NO: 3085807 - RNA, 19 nt, Artificial Sequence
  Description of Artificial Sequence: Synthetic oligonucleotide
cauacacaucauuuauuca

SEQ ID NO: 3085808 - RNA, 19 nt, Artificial Sequence
  Description of Artificial Sequence: Synthetic oligonucleotide
guuuagcaucauuacaucu

SEQ ID NO: 3085809 - RNA, 19 nt, Artificial Sequence
  Description of Artificial Sequence: Synthetic oligonucleotide
gacugcacaguagcaagug

SEQ ID NO: 3085810 - RNA, 19 nt, Artificial Sequence
  Description of Artificial Sequence: Synthetic oligonucleotide
acaacaauguacagacaca

SEQ ID NO: 3085811 - RNA, 19 nt, Artificial Sequence
  Description of Artificial Sequence: Synthetic oligonucleotide
uagcaagacaucccuguuu

SEQ ID NO: 3085812 - RNA, 19 nt, Artificial Sequence
  Description of Artificial Sequence: Synthetic oligonucleotide
gacaacggaaggcucuaga

SEQ ID NO: 3085813 - RNA, 19 nt, Artificial Sequence
  Description of Artificial Sequence: Synthetic oligonucleotide
aaauuagaggaugcuuaua

SEQ ID NO: 3085814 - RNA, 19 nt, Artificial Sequence
  Description of Artificial Sequence: Synthetic oligonucleotide
accaggucuaagaguacac

SEQ ID NO: 3085815 - RNA, 19 nt, Artificial Sequence
  Description of Artificial Sequence: Synthetic oligonucleotide
cucuagaagcaaagagaug

SEQ ID NO: 3085816 - RNA, 19 nt, Artificial Sequence
  Description of Artificial Sequence: Synthetic oligonucleotide
ucuaugcuacugagaaaau

SEQ ID NO: 3085817 - RNA, 19 nt, Artificial Sequence
  Description of Artificial Sequence: Synthetic oligonucleotide
auaguuuguaauggaccca

SEQ ID NO: 3085818 - RNA, 19 nt, Artificial Sequence
  Description of Artificial Sequence: Synthetic oligonucleotide
gaguacacagacacaacaa

SEQ ID NO: 3085819 - RNA, 19 nt, Artificial Sequence
  Description of Artificial Sequence: Synthetic oligonucleotide
guucuugacugcacaguag

SEQ ID NO: 3085820 - RNA, 19 nt, Artificial Sequence
  Description of Artificial Sequence: Synthetic oligonucleotide
caucccuguuuucucuuag

SEQ ID NO: 3085821 - RNA, 19 nt, Artificial Sequence
  Description of Artificial Sequence: Synthetic oligonucleotide
aucuuccguucuugacugc

SEQ ID NO: 3085822 - RNA, 19 nt, Artificial Sequence
  Description of Artificial Sequence: Synthetic oligonucleotide
acacagacacaacaaugua

SEQ ID NO: 3085823 - RNA, 19 nt, Artificial Sequence
  Description of Artificial Sequence: Synthetic oligonucleotide
cuaagaguacacagacaca

SEQ ID NO: 3085824 - RNA, 19 nt, Artificial Sequence
  Description of Artificial Sequence: Synthetic oligonucleotide
augcauucauggacaacgg

SEQ ID NO: 3085825 - RNA, 19 nt, Artificial Sequence
  Description of Artificial Sequence: Synthetic oligonucleotide
agguguuuaugcauucaug

SEQ ID NO: 3085826 - RNA, 19 nt, Artificial Sequence
  Description of Artificial Sequence: Synthetic oligonucleotide
cauggacaacggaaggcuc

SEQ ID NO: 3085827 - RNA, 19 nt, Artificial Sequence
  Description of Artificial Sequence: Synthetic oligonucleotide
uuaugcauucauggacaac

SEQ ID NO: 3085828 - RNA, 19 nt, Artificial Sequence
  Description of Artificial Sequence: Synthetic oligonucleotide
ccuguuuucucuuaggugu

SEQ ID NO: 3085829 - RNA, 19 nt, Artificial Sequence
  Description of Artificial Sequence: Synthetic oligonucleotide
guguuagaagguucuagua

SEQ ID NO: 3085830 - RNA, 19 nt, Artificial Sequence
  Description of Artificial Sequence: Synthetic oligonucleotide
cuaguagauuccagcuauc

SEQ ID NO: 3085831 - RNA, 19 nt, Artificial Sequence
  Description of Artificial Sequence: Synthetic oligonucleotide
gacccagaacaccaggucu

SEQ ID NO: 3085832 - RNA, 19 nt, Artificial Sequence
  Description of Artificial Sequence: Synthetic oligonucleotide
cuuccguucuugacugcac

SEQ ID NO: 3085833 - RNA, 19 nt, Artificial Sequence
  Description of Artificial Sequence: Synthetic oligonucleotide
caucauuacaucuuccguu

SEQ ID NO: 3085834 - RNA, 19 nt, Artificial Sequence
  Description of Artificial Sequence: Synthetic oligonucleotide
  modified_base (9)..(9): a, c, u, g, unknown or other
agcuaucgnuucuaugcua

SEQ ID NO: 3085835 - RNA, 19 nt, Artificial Sequence
  Description of Artificial Sequence: Synthetic oligonucleotide
  modified_base (14)..(14): a, c, u, g, unknown or other
auuccagcuaucgnuucua

SEQ ID NO: 3085836 - RNA, 19 nt, Artificial Sequence
  Description of Artificial Sequence: Synthetic oligonucleotide
  modified_base (8)..(8): a, c, u, g, unknown or other
gcuaucgnuucuaugcuac

SEQ ID NO: 3085837 - RNA, 19 nt, Artificial Sequence
  Description of Artificial Sequence: Synthetic oligonucleotide
  modified_base (15)..(15): a, c, u, g, unknown or other
gauuccagcuaucgnuucu

SEQ ID NO: 3085838 - RNA, 19 nt, Artificial Sequence
  Description of Artificial Sequence: Synthetic oligonucleotide
cuugacugcacaguagcaa

SEQ ID NO: 3085839 - RNA, 19 nt, Artificial Sequence
  Description of Artificial Sequence: Synthetic oligonucleotide
auggacaacggaaggcucu

SEQ ID NO: 3085840 - RNA, 19 nt, Artificial Sequence
  Description of Artificial Sequence: Synthetic oligonucleotide
gaacaccaggucuaagagu

SEQ ID NO: 3085841 - RNA, 19 nt, Artificial Sequence
  Description of Artificial Sequence: Synthetic oligonucleotide
cacaguagcaaguguguua

SEQ ID NO: 3085842 - RNA, 19 nt, Artificial Sequence
  Description of Artificial Sequence: Synthetic oligonucleotide
  modified_base (13)..(13): a, c, u, g, unknown or other
uuccagcuaucgnuucuau

SEQ ID NO: 3085843 - RNA, 19 nt, Artificial Sequence
  Description of Artificial Sequence: Synthetic oligonucleotide
auauggcuagcaagacauc

SEQ ID NO: 3085844 - RNA, 19 nt, Artificial Sequence
  Description of Artificial Sequence: Synthetic oligonucleotide
uagaagguucuaguagauu

SEQ ID NO: 3085845 - RNA, 19 nt, Artificial Sequence
  Description of Artificial Sequence: Synthetic oligonucleotide
caagacaucccuguuuucu

SEQ ID NO: 3085846 - RNA, 19 nt, Artificial Sequence
  Description of Artificial Sequence: Synthetic oligonucleotide
agguucuaguagauuccag

SEQ ID NO: 3085847 - RNA, 19 nt, Artificial Sequence
  Description of Artificial Sequence: Synthetic oligonucleotide
cccuguuuucucuuaggug

SEQ ID NO: 3085848 - RNA, 19 nt, Artificial Sequence
  Description of Artificial Sequence: Synthetic oligonucleotide
uuauucaguuuagcaucau

SEQ ID NO: 3085849 - RNA, 19 nt, Artificial Sequence
  Description of Artificial Sequence: Synthetic oligonucleotide
gcuagcaagacaucccugu

SEQ ID NO: 3085850 - RNA, 19 nt, Artificial Sequence
  Description of Artificial Sequence: Synthetic oligonucleotide
  modified_base (10)..(10): a, c, u, g, unknown or other
cagcuaucgnuucuaugcu

SEQ ID NO: 3085851 - RNA, 19 nt, Artificial Sequence
  Description of Artificial Sequence: Synthetic oligonucleotide
uguuuucucuuagguguuu

SEQ ID NO: 3085852 - RNA, 19 nt, Artificial Sequence
  Description of Artificial Sequence: Synthetic oligonucleotide
acaccaggucuaagaguac

SEQ ID NO: 3085853 - RNA, 19 nt, Artificial Sequence
  Description of Artificial Sequence: Synthetic oligonucleotide
acggaaggcucuagaagca

SEQ ID NO: 3085854 - RNA, 19 nt, Artificial Sequence
  Description of Artificial Sequence: Synthetic oligonucleotide
acaucccuguuuucucuua

SEQ ID NO: 3085855 - RNA, 19 nt, Artificial Sequence
  Description of Artificial Sequence: Synthetic oligonucleotide
  modified_base (7)..(7): a, c, u, g, unknown or other
cuaucgnuucuaugcuacu

SEQ ID NO: 3085856 - RNA, 19 nt, Artificial Sequence
  Description of Artificial Sequence: Synthetic oligonucleotide
uggacaacggaaggcucua

SEQ ID NO: 3085857 - RNA, 19 nt, Artificial Sequence
  Description of Artificial Sequence: Synthetic oligonucleotide
cucuuagguguuuaugcau

SEQ ID NO: 3085858 - RNA, 19 nt, Artificial Sequence
  Description of Artificial Sequence: Synthetic oligonucleotide
augcuacugagaaaauaua

SEQ ID NO: 3085859 - RNA, 19 nt, Artificial Sequence
  Description of Artificial Sequence: Synthetic oligonucleotide
aguguguuagaagguucua

SEQ ID NO: 3085860 - RNA, 19 nt, Artificial Sequence
  Description of Artificial Sequence: Synthetic oligonucleotide
gcucuagaagcaaagagau

SEQ ID NO: 3085861 - RNA, 19 nt, Artificial Sequence
  Description of Artificial Sequence: Synthetic oligonucleotide
caccaggucuaagaguaca

SEQ ID NO: 3085862 - RNA, 19 nt, Artificial Sequence
  Description of Artificial Sequence: Synthetic oligonucleotide
guuuucucuuagguguuua

SEQ ID NO: 3085863 - RNA, 19 nt, Artificial Sequence
  Description of Artificial Sequence: Synthetic oligonucleotide
cacauacacaucauuuauu

SEQ ID NO: 3085864 - RNA, 19 nt, Artificial Sequence
  Description of Artificial Sequence: Synthetic oligonucleotide
aguuuguaauggacccaga

SEQ ID NO: 3085865 - RNA, 19 nt, Artificial Sequence
  Description of Artificial Sequence: Synthetic oligonucleotide
gcaucauuacaucuuccgu

SEQ ID NO: 3085866 - RNA, 19 nt, Artificial Sequence
  Description of Artificial Sequence: Synthetic oligonucleotide
gaggaugcuuauauaguuu

SEQ ID NO: 3085867 - RNA, 19 nt, Artificial Sequence
  Description of Artificial Sequence: Synthetic oligonucleotide
acucacacauacacaucau

SEQ ID NO: 3085868 - RNA, 19 nt, Artificial Sequence
  Description of Artificial Sequence: Synthetic oligonucleotide
acccagaacaccaggucua

SEQ ID NO: 3085869 - RNA, 19 nt, Artificial Sequence
  Description of Artificial Sequence: Synthetic oligonucleotide
acacaacaauguacagaca

SEQ ID NO: 3085870 - RNA, 19 nt, Artificial Sequence
  Description of Artificial Sequence: Synthetic oligonucleotide
cucacacauacacaucauu

SEQ ID NO: 3085871 - RNA, 19 nt, Artificial Sequence
  Description of Artificial Sequence: Synthetic oligonucleotide
gacaucccuguuuucucuu

SEQ ID NO: 3085872 - RNA, 19 nt, Artificial Sequence
  Description of Artificial Sequence: Synthetic oligonucleotide
cauuacaucuuccguucuu

SEQ ID NO: 3085873 - RNA, 19 nt, Artificial Sequence
  Description of Artificial Sequence: Synthetic oligonucleotide
ggcuagcaagacaucccug

SEQ ID NO: 3085874 - RNA, 19 nt, Artificial Sequence
  Description of Artificial Sequence: Synthetic oligonucleotide
ggaaggcucuagaagcaaa

SEQ ID NO: 3085875 - RNA, 19 nt, Artificial Sequence
  Description of Artificial Sequence: Synthetic oligonucleotide
gcaagacaucccuguuuuc

SEQ ID NO: 3085876 - RNA, 19 nt, Artificial Sequence
  Description of Artificial Sequence: Synthetic oligonucleotide
  modified_base (3)..(3): a, c, u, g, unknown or other
cgnuucuaugcuacugaga

SEQ ID NO: 3085877 - RNA, 19 nt, Artificial Sequence
  Description of Artificial Sequence: Synthetic oligonucleotide
cuagcaagacaucccuguu

SEQ ID NO: 3085878 - RNA, 19 nt, Artificial Sequence
  Description of Artificial Sequence: Synthetic oligonucleotide
ggacaacggaaggcucuag

SEQ ID NO: 3085879 - RNA, 19 nt, Artificial Sequence
  Description of Artificial Sequence: Synthetic oligonucleotide
ccaggucuaagaguacaca

SEQ ID NO: 3085880 - RNA, 19 nt, Artificial Sequence
  Description of Artificial Sequence: Synthetic oligonucleotide
ggaugcuuauauaguuugu

SEQ ID NO: 3085881 - RNA, 19 nt, Artificial Sequence
  Description of Artificial Sequence: Synthetic oligonucleotide
gcaaguguguuagaagguu

SEQ ID NO: 3085882 - RNA, 19 nt, Artificial Sequence
  Description of Artificial Sequence: Synthetic oligonucleotide
gcacaguagcaaguguguu

SEQ ID NO: 3085883 - RNA, 19 nt, Artificial Sequence
  Description of Artificial Sequence: Synthetic oligonucleotide
cccagaacaccaggucuaa

SEQ ID NO: 3085884 - RNA, 19 nt, Artificial Sequence
  Description of Artificial Sequence: Synthetic oligonucleotide
ccguucuugacugcacagu

SEQ ID NO: 3085885 - RNA, 19 nt, Artificial Sequence
  Description of Artificial Sequence: Synthetic oligonucleotide
cggaaggcucuagaagcaa

SEQ ID NO: 3085886 - RNA, 19 nt, Artificial Sequence
  Description of Artificial Sequence: Synthetic oligonucleotide
  modified_base (1)..(1): a, c, u, g, unknown or other
nuucuaugcuacugagaaa

SEQ ID NO: 3085887 - RNA, 19 nt, Artificial Sequence
  Description of Artificial Sequence: Synthetic oligonucleotide
uauauucugagccugaagc

SEQ ID NO: 3085888 - RNA, 19 nt, Artificial Sequence
  Description of Artificial Sequence: Synthetic oligonucleotide
aguacuaaguucuucaagg

SEQ ID NO: 3085889 - RNA, 19 nt, Artificial Sequence
  Description of Artificial Sequence: Synthetic oligonucleotide
uuaguauucaaucugccca

SEQ ID NO: 3085890 - RNA, 19 nt, Artificial Sequence
  Description of Artificial Sequence: Synthetic oligonucleotide
ucugauauacauuuagaag

SEQ ID NO: 3085891 - RNA, 19 nt, Artificial Sequence
  Description of Artificial Sequence: Synthetic oligonucleotide
agagcuuuaguauucaauc

SEQ ID NO: 3085892 - RNA, 19 nt, Artificial Sequence
  Description of Artificial Sequence: Synthetic oligonucleotide
auucaaucugcccaguucc

SEQ ID NO: 3085893 - RNA, 19 nt, Artificial Sequence
  Description of Artificial Sequence: Synthetic oligonucleotide
aauuuuaaggcucucaauu

SEQ ID NO: 3085894 - RNA, 19 nt, Artificial Sequence
  Description of Artificial Sequence: Synthetic oligonucleotide
ucuucuggaauuuacagug

SEQ ID NO: 3085895 - RNA, 19 nt, Artificial Sequence
  Description of Artificial Sequence: Synthetic oligonucleotide
ucuucugauauacauuuag

SEQ ID NO: 3085896 - RNA, 19 nt, Artificial Sequence
  Description of Artificial Sequence: Synthetic oligonucleotide
uaugacaaaaucucaacca

SEQ ID NO: 3085897 - RNA, 19 nt, Artificial Sequence
  Description of Artificial Sequence: Synthetic oligonucleotide
aaagacuaugugucgcugc

SEQ ID NO: 3085898 - RNA, 19 nt, Artificial Sequence
  Description of Artificial Sequence: Synthetic oligonucleotide
ugauauacauuuagaagag

SEQ ID NO: 3085899 - RNA, 19 nt, Artificial Sequence
  Description of Artificial Sequence: Synthetic oligonucleotide
cugauauacauuuagaaga

SEQ ID NO: 3085900 - RNA, 19 nt, Artificial Sequence
  Description of Artificial Sequence: Synthetic oligonucleotide
ugugguaugacaaaaucuc

SEQ ID NO: 3085901 - RNA, 19 nt, Artificial Sequence
  Description of Artificial Sequence: Synthetic oligonucleotide
aaaauuuuaaggcucucaa

SEQ ID NO: 3085902 - RNA, 19 nt, Artificial Sequence
  Description of Artificial Sequence: Synthetic oligonucleotide
auauacauuuagaagagac

SEQ ID NO: 3085903 - RNA, 19 nt, Artificial Sequence
  Description of Artificial Sequence: Synthetic oligonucleotide
uguuagaaagacuaugugu

SEQ ID NO: 3085904 - RNA, 19 nt, Artificial Sequence
  Description of Artificial Sequence: Synthetic oligonucleotide
auacauuuagaagagacag

SEQ ID NO: 3085905 - RNA, 19 nt, Artificial Sequence
  Description of Artificial Sequence: Synthetic oligonucleotide
uugugaaucacaguugugg

SEQ ID NO: 3085906 - RNA, 19 nt, Artificial Sequence
  Description of Artificial Sequence: Synthetic oligonucleotide
auuuagaagagacagcaga

SEQ ID NO: 3085907 - RNA, 19 nt, Artificial Sequence
  Description of Artificial Sequence: Synthetic oligonucleotide
auauucugagccugaagcc

SEQ ID NO: 3085908 - RNA, 19 nt, Artificial Sequence
  Description of Artificial Sequence: Synthetic oligonucleotide
uucucuguuagaaagacua

SEQ ID NO: 3085909 - RNA, 19 nt, Artificial Sequence
  Description of Artificial Sequence: Synthetic oligonucleotide
ucuguuagaaagacuaugu

SEQ ID NO: 3085910 - RNA, 19 nt, Artificial Sequence
  Description of Artificial Sequence: Synthetic oligonucleotide
agagacagcagacucagag

SEQ ID NO: 3085911 - RNA, 19 nt, Artificial Sequence
  Description of Artificial Sequence: Synthetic oligonucleotide
aguucuucaaggaaugacc

SEQ ID NO: 3085912 - RNA, 19 nt, Artificial Sequence
  Description of Artificial Sequence: Synthetic oligonucleotide
uauacauuuagaagagaca

SEQ ID NO: 3085913 - RNA, 19 nt, Artificial Sequence
  Description of Artificial Sequence: Synthetic oligonucleotide
uuucuucuggaauuuacag

SEQ ID NO: 3085914 - RNA, 19 nt, Artificial Sequence
  Description of Artificial Sequence: Synthetic oligonucleotide
uuuaguauucaaucugccc

SEQ ID NO: 3085915 - RNA, 19 nt, Artificial Sequence
  Description of Artificial Sequence: Synthetic oligonucleotide
uuagaaagacuaugugucg

SEQ ID NO: 3085916 - RNA, 19 nt, Artificial Sequence
  Description of Artificial Sequence: Synthetic oligonucleotide
ucgaguuugugaaucacag

SEQ ID NO: 3085917 - RNA, 19 nt, Artificial Sequence
  Description of Artificial Sequence: Synthetic oligonucleotide
uuuccauugccuauuuucc

SEQ ID NO: 3085918 - RNA, 19 nt, Artificial Sequence
  Description of Artificial Sequence: Synthetic oligonucleotide
uuuuccauugccuauuuuc

SEQ ID NO: 3085919 - RNA, 19 nt, Artificial Sequence
  Description of Artificial Sequence: Synthetic oligonucleotide
uuuagaagagacagcagac

SEQ ID NO: 3085920 - RNA, 19 nt, Artificial Sequence
  Description of Artificial Sequence: Synthetic oligonucleotide
agucuucucuguuagaaag

SEQ ID NO: 3085921 - RNA, 19 nt, Artificial Sequence
  Description of Artificial Sequence: Synthetic oligonucleotide
uucuggaguacuaaguucu

SEQ ID NO: 3085922 - RNA, 19 nt, Artificial Sequence
  Description of Artificial Sequence: Synthetic oligonucleotide
ugauagucuucucuguuag

SEQ ID NO: 3085923 - RNA, 19 nt, Artificial Sequence
  Description of Artificial Sequence: Synthetic oligonucleotide
augacaaaaucucaaccag

SEQ ID NO: 3085924 - RNA, 19 nt, Artificial Sequence
  Description of Artificial Sequence: Synthetic oligonucleotide
uucugauauacauuuagaa

SEQ ID NO: 3085925 - RNA, 19 nt, Artificial Sequence
  Description of Artificial Sequence: Synthetic oligonucleotide
uuucuucugauauacauuu

SEQ ID NO: 3085926 - RNA, 19 nt, Artificial Sequence
  Description of Artificial Sequence: Synthetic oligonucleotide
guuagaaagacuauguguc

SEQ ID NO: 3085927 - RNA, 19 nt, Artificial Sequence
  Description of Artificial Sequence: Synthetic oligonucleotide
uuuacaguggauuuuccau

SEQ ID NO: 3085928 - RNA, 19 nt, Artificial Sequence
  Description of Artificial Sequence: Synthetic oligonucleotide
uugugguaugacaaaaucu

SEQ ID NO: 3085929 - RNA, 19 nt, Artificial Sequence
  Description of Artificial Sequence: Synthetic oligonucleotide
gauguuucuucugauauac

SEQ ID NO: 3085930 - RNA, 19 nt, Artificial Sequence
  Description of Artificial Sequence: Synthetic oligonucleotide
guaugacaaaaucucaacc

SEQ ID NO: 3085931 - RNA, 19 nt, Artificial Sequence
  Description of Artificial Sequence: Synthetic oligonucleotide
acauuuagaagagacagca

SEQ ID NO: 3085932 - RNA, 19 nt, Artificial Sequence
  Description of Artificial Sequence: Synthetic oligonucleotide
uguuucuucugauauacau

SEQ ID NO: 3085933 - RNA, 19 nt, Artificial Sequence
  Description of Artificial Sequence: Synthetic oligonucleotide
ugagccugaagccuaauaa

SEQ ID NO: 3085934 - RNA, 19 nt, Artificial Sequence
  Description of Artificial Sequence: Synthetic oligonucleotide
agcuuuaguauucaaucug

SEQ ID NO: 3085935 - RNA, 19 nt, Artificial Sequence
  Description of Artificial Sequence: Synthetic oligonucleotide
uggaguacuaaguucuuca

SEQ ID NO: 3085936 - RNA, 19 nt, Artificial Sequence
  Description of Artificial Sequence: Synthetic oligonucleotide
agcauuucgaguuugugaa

SEQ ID NO: 3085937 - RNA, 19 nt, Artificial Sequence
  Description of Artificial Sequence: Synthetic oligonucleotide
aaauuuuaaggcucucaau

SEQ ID NO: 3085938 - RNA, 19 nt, Artificial Sequence
  Description of Artificial Sequence: Synthetic oligonucleotide
aagccuaauaaggcagucc

SEQ ID NO: 3085939 - RNA, 19 nt, Artificial Sequence
  Description of Artificial Sequence: Synthetic oligonucleotide
cugcuguauauucugagcc

SEQ ID NO: 3085940 - RNA, 19 nt, Artificial Sequence
  Description of Artificial Sequence: Synthetic oligonucleotide
aauuuacaguggauuuucc

SEQ ID NO: 3085941 - RNA, 19 nt, Artificial Sequence
  Description of Artificial Sequence: Synthetic oligonucleotide
uaaggcaguccauuucugg

SEQ ID NO: 3085942 - RNA, 19 nt, Artificial Sequence
  Description of Artificial Sequence: Synthetic oligonucleotide
aaucucaaccagauguuuc

SEQ ID NO: 3085943 - RNA, 19 nt, Artificial Sequence
  Description of Artificial Sequence: Synthetic oligonucleotide
agacagcagacucagagcu

SEQ ID NO: 3085944 - RNA, 19 nt, Artificial Sequence
  Description of Artificial Sequence: Synthetic oligonucleotide
uacauuuagaagagacagc

SEQ ID NO: 3085945 - RNA, 19 nt, Artificial Sequence
  Description of Artificial Sequence: Synthetic oligonucleotide
uaguauucaaucugcccag

SEQ ID NO: 3085946 - RNA, 19 nt, Artificial Sequence
  Description of Artificial Sequence: Synthetic oligonucleotide
cuaaguucuucaaggaaug

SEQ ID NO: 3085947 - RNA, 19 nt, Artificial Sequence
  Description of Artificial Sequence: Synthetic oligonucleotide
aaccagauguuucuucuga

SEQ ID NO: 3085948 - RNA, 19 nt, Artificial Sequence
  Description of Artificial Sequence: Synthetic oligonucleotide
cuuuaguauucaaucugcc

SEQ ID NO: 3085949 - RNA, 19 nt, Artificial Sequence
  Description of Artificial Sequence: Synthetic oligonucleotide
uauucaaucugcccaguuc

SEQ ID NO: 3085950 - RNA, 19 nt, Artificial Sequence
  Description of Artificial Sequence: Synthetic oligonucleotide
ugacaaaaucucaaccaga

SEQ ID NO: 3085951 - RNA, 19 nt, Artificial Sequence
  Description of Artificial Sequence: Synthetic oligonucleotide
ucaaccagauguuucuucu

SEQ ID NO: 3085952 - RNA, 19 nt, Artificial Sequence
  Description of Artificial Sequence: Synthetic oligonucleotide
aagacuaugugucgcugcu

SEQ ID NO: 3085953 - RNA, 19 nt, Artificial Sequence
  Description of Artificial Sequence: Synthetic oligonucleotide
cugaagccuaauaaggcag

SEQ ID NO: 3085954 - RNA, 19 nt, Artificial Sequence
  Description of Artificial Sequence: Synthetic oligonucleotide
gaguacuaaguucuucaag

SEQ ID NO: 3085955 - RNA, 19 nt, Artificial Sequence
  Description of Artificial Sequence: Synthetic oligonucleotide
ugaaucacaguugugguau

SEQ ID NO: 3085956 - RNA, 19 nt, Artificial Sequence
  Description of Artificial Sequence: Synthetic oligonucleotide
gaagagacagcagacucag

SEQ ID NO: 3085957 - RNA, 19 nt, Artificial Sequence
  Description of Artificial Sequence: Synthetic oligonucleotide
uacaguggauuuuccauug

SEQ ID NO: 3085958 - RNA, 19 nt, Artificial Sequence
  Description of Artificial Sequence: Synthetic oligonucleotide
aaggcaguccauuucugga

SEQ ID NO: 3085959 - RNA, 19 nt, Artificial Sequence
  Description of Artificial Sequence: Synthetic oligonucleotide
agccuaauaaggcagucca

SEQ ID NO: 3085960 - RNA, 19 nt, Artificial Sequence
  Description of Artificial Sequence: Synthetic oligonucleotide
ugguaugacaaaaucucaa

SEQ ID NO: 3085961 - RNA, 19 nt, Artificial Sequence
  Description of Artificial Sequence: Synthetic oligonucleotide
ugugaaucacaguuguggu

SEQ ID NO: 3085962 - RNA, 19 nt, Artificial Sequence
  Description of Artificial Sequence: Synthetic oligonucleotide
gagccugaagccuaauaag

SEQ ID NO: 3085963 - RNA, 19 nt, Artificial Sequence
  Description of Artificial Sequence: Synthetic oligonucleotide
uucuggaauuuacagugga

SEQ ID NO: 3085964 - RNA, 19 nt, Artificial Sequence
  Description of Artificial Sequence: Synthetic oligonucleotide
auuuacaguggauuuucca

SEQ ID NO: 3085965 - RNA, 19 nt, Artificial Sequence
  Description of Artificial Sequence: Synthetic oligonucleotide
uucgaguuugugaaucaca

SEQ ID NO: 3085966 - RNA, 19 nt, Artificial Sequence
  Description of Artificial Sequence: Synthetic oligonucleotide
uaauaaggcaguccauuuc

SEQ ID NO: 3085967 - RNA, 19 nt, Artificial Sequence
  Description of Artificial Sequence: Synthetic oligonucleotide
uacuaaguucuucaaggaa

SEQ ID NO: 3085968 - RNA, 19 nt, Artificial Sequence
  Description of Artificial Sequence: Synthetic oligonucleotide
ucuucaaggaaugaccaaa

SEQ ID NO: 3085969 - RNA, 19 nt, Artificial Sequence
  Description of Artificial Sequence: Synthetic oligonucleotide
aguuucuucuggaauuuac

SEQ ID NO: 3085970 - RNA, 19 nt, Artificial Sequence
  Description of Artificial Sequence: Synthetic oligonucleotide
aaaccaucuugauagucuu

SEQ ID NO: 3085971 - RNA, 19 nt, Artificial Sequence
  Description of Artificial Sequence: Synthetic oligonucleotide
uagaaagacuaugugucgc

SEQ ID NO: 3085972 - RNA, 19 nt, Artificial Sequence
  Description of Artificial Sequence: Synthetic oligonucleotide
uucuggagcauuucgaguu

SEQ ID NO: 3085973 - RNA, 19 nt, Artificial Sequence
  Description of Artificial Sequence: Synthetic oligonucleotide
guugugguaugacaaaauc

SEQ ID NO: 3085974 - RNA, 19 nt, Artificial Sequence
  Description of Artificial Sequence: Synthetic oligonucleotide
uggaauuuacaguggauuu

SEQ ID NO: 3085975 - RNA, 19 nt, Artificial Sequence
  Description of Artificial Sequence: Synthetic oligonucleotide
aucucaaccagauguuucu

SEQ ID NO: 3085976 - RNA, 19 nt, Artificial Sequence
  Description of Artificial Sequence: Synthetic oligonucleotide
acuaaguucuucaaggaau

SEQ ID NO: 3085977 - RNA, 19 nt, Artificial Sequence
  Description of Artificial Sequence: Synthetic oligonucleotide
gagcauuucgaguuuguga

SEQ ID NO: 3085978 - RNA, 19 nt, Artificial Sequence
  Description of Artificial Sequence: Synthetic oligonucleotide
ucuucucuguuagaaagac

SEQ ID NO: 3085979 - RNA, 19 nt, Artificial Sequence
  Description of Artificial Sequence: Synthetic oligonucleotide
gaguuugugaaucacaguu

SEQ ID NO: 3085980 - RNA, 19 nt, Artificial Sequence
  Description of Artificial Sequence: Synthetic oligonucleotide
uuugugaaucacaguugug

SEQ ID NO: 3085981 - RNA, 19 nt, Artificial Sequence
  Description of Artificial Sequence: Synthetic oligonucleotide
uauucugagccugaagccu

SEQ ID NO: 3085982 - RNA, 19 nt, Artificial Sequence
  Description of Artificial Sequence: Synthetic oligonucleotide
gagacagcagacucagagc

SEQ ID NO: 3085983 - RNA, 19 nt, Artificial Sequence
  Description of Artificial Sequence: Synthetic oligonucleotide
uccuucuggaguacuaagu

SEQ ID NO: 3085984 - RNA, 19 nt, Artificial Sequence
  Description of Artificial Sequence: Synthetic oligonucleotide
acaguggauuuuccauugc

SEQ ID NO: 3085985 - RNA, 19 nt, Artificial Sequence
  Description of Artificial Sequence: Synthetic oligonucleotide
agccugaagccuaauaagg

SEQ ID NO: 3085986 - RNA, 19 nt, Artificial Sequence
  Description of Artificial Sequence: Synthetic oligonucleotide
ucacaguugugguaugaca

SEQ ID NO: 3085987 - RNA, 19 nt, Artificial Sequence
  Description of Artificial Sequence: Synthetic oligonucleotide
agaaagacuaugugucgcu

SEQ ID NO: 3085988 - RNA, 19 nt, Artificial Sequence
  Description of Artificial Sequence: Synthetic oligonucleotide
uuagaagagacagcagacu

SEQ ID NO: 3085989 - RNA, 19 nt, Artificial Sequence
  Description of Artificial Sequence: Synthetic oligonucleotide
ucuugauagucuucucugu

SEQ ID NO: 3085990 - RNA, 19 nt, Artificial Sequence
  Description of Artificial Sequence: Synthetic oligonucleotide
agacucagagcuuuaguau

SEQ ID NO: 3085991 - RNA, 19 nt, Artificial Sequence
  Description of Artificial Sequence: Synthetic oligonucleotide
ugaagccuaauaaggcagu

SEQ ID NO: 3085992 - RNA, 19 nt, Artificial Sequence
  Description of Artificial Sequence: Synthetic oligonucleotide
cuucuggaauuuacagugg

SEQ ID NO: 3085993 - RNA, 19 nt, Artificial Sequence
  Description of Artificial Sequence: Synthetic oligonucleotide
cuguuagaaagacuaugug

SEQ ID NO: 3085994 - RNA, 19 nt, Artificial Sequence
  Description of Artificial Sequence: Synthetic oligonucleotide
acaaaaucucaaccagaug

SEQ ID NO: 3085995 - RNA, 19 nt, Artificial Sequence
  Description of Artificial Sequence: Synthetic oligonucleotide
guauauucugagccugaag

SEQ ID NO: 3085996 - RNA, 19 nt, Artificial Sequence
  Description of Artificial Sequence: Synthetic oligonucleotide
uuccuucuggaguacuaag

SEQ ID NO: 3085997 - RNA, 19 nt, Artificial Sequence
  Description of Artificial Sequence: Synthetic oligonucleotide
auagucuucucuguuagaa

SEQ ID NO: 3085998 - RNA, 19 nt, Artificial Sequence
  Description of Artificial Sequence: Synthetic oligonucleotide
gguaugacaaaaucucaac

SEQ ID NO: 3085999 - RNA, 19 nt, Artificial Sequence
  Description of Artificial Sequence: Synthetic oligonucleotide
ugcuguauauucugagccu

SEQ ID NO: 3086000 - RNA, 19 nt, Artificial Sequence
  Description of Artificial Sequence: Synthetic oligonucleotide
uuacaguggauuuuccauu

SEQ ID NO: 3086001 - RNA, 19 nt, Artificial Sequence
  Description of Artificial Sequence: Synthetic oligonucleotide
uuucuggagcauuucgagu

SEQ ID NO: 3086002 - RNA, 19 nt, Artificial Sequence
  Description of Artificial Sequence: Synthetic oligonucleotide
auuucgaguuugugaauca

SEQ ID NO: 3086003 - RNA, 19 nt, Artificial Sequence
  Description of Artificial Sequence: Synthetic oligonucleotide
cuucuggaguacuaaguuc

SEQ ID NO: 3086004 - RNA, 19 nt, Artificial Sequence
  Description of Artificial Sequence: Synthetic oligonucleotide
uugauagucuucucuguua

SEQ ID NO: 3086005 - RNA, 19 nt, Artificial Sequence
  Description of Artificial Sequence: Synthetic oligonucleotide
caguggauuuuccauugcc

SEQ ID NO: 3086006 - RNA, 19 nt, Artificial Sequence
  Description of Artificial Sequence: Synthetic oligonucleotide
cucuguuagaaagacuaug

SEQ ID NO: 3086007 - RNA, 19 nt, Artificial Sequence
  Description of Artificial Sequence: Synthetic oligonucleotide
aucacaguugugguaugac

SEQ ID NO: 3086008 - RNA, 19 nt, Artificial Sequence
  Description of Artificial Sequence: Synthetic oligonucleotide
aggcaguccauuucuggag

SEQ ID NO: 3086009 - RNA, 19 nt, Artificial Sequence
  Description of Artificial Sequence: Synthetic oligonucleotide
accaucuugauagucuucu

SEQ ID NO: 3086010 - RNA, 19 nt, Artificial Sequence
  Description of Artificial Sequence: Synthetic oligonucleotide
cauuucgaguuugugaauc

SEQ ID NO: 3086011 - RNA, 19 nt, Artificial Sequence
  Description of Artificial Sequence: Synthetic oligonucleotide
cuucugauauacauuuaga

SEQ ID NO: 3086012 - RNA, 19 nt, Artificial Sequence
  Description of Artificial Sequence: Synthetic oligonucleotide
ugccuauuuuccuucugga

SEQ ID NO: 3086013 - RNA, 19 nt, Artificial Sequence
  Description of Artificial Sequence: Synthetic oligonucleotide
uggauuuuccauugccuau

SEQ ID NO: 3086014 - RNA, 19 nt, Artificial Sequence
  Description of Artificial Sequence: Synthetic oligonucleotide
uuccauugccuauuuuccu

SEQ ID NO: 3086015 - RNA, 19 nt, Artificial Sequence
  Description of Artificial Sequence: Synthetic oligonucleotide
cacaguugugguaugacaa

SEQ ID NO: 3086016 - RNA, 19 nt, Artificial Sequence
  Description of Artificial Sequence: Synthetic oligonucleotide
uuuuccuucuggaguacua

SEQ ID NO: 3086017 - RNA, 19 nt, Artificial Sequence
  Description of Artificial Sequence: Synthetic oligonucleotide
aguuugugaaucacaguug

SEQ ID NO: 3086018 - RNA, 19 nt, Artificial Sequence
  Description of Artificial Sequence: Synthetic oligonucleotide
guacuaaguucuucaagga

SEQ ID NO: 3086019 - RNA, 19 nt, Artificial Sequence
  Description of Artificial Sequence: Synthetic oligonucleotide
aaucacaguugugguauga

SEQ ID NO: 3086020 - RNA, 19 nt, Artificial Sequence
  Description of Artificial Sequence: Synthetic oligonucleotide
guuugugaaucacaguugu

SEQ ID NO: 3086021 - RNA, 19 nt, Artificial Sequence
  Description of Artificial Sequence: Synthetic oligonucleotide
cauuucuggagcauuucga

SEQ ID NO: 3086022 - RNA, 19 nt, Artificial Sequence
  Description of Artificial Sequence: Synthetic oligonucleotide
acucagagcuuuaguauuc

SEQ ID NO: 3086023 - RNA, 19 nt, Artificial Sequence
  Description of Artificial Sequence: Synthetic oligonucleotide
gaaagacuaugugucgcug

SEQ ID NO: 3086024 - RNA, 19 nt, Artificial Sequence
  Description of Artificial Sequence: Synthetic oligonucleotide
gaaaccaucuugauagucu

SEQ ID NO: 3086025 - RNA, 19 nt, Artificial Sequence
  Description of Artificial Sequence: Synthetic oligonucleotide
ugucgcugcuguauauucu

SEQ ID NO: 3086026 - RNA, 19 nt, Artificial Sequence
  Description of Artificial Sequence: Synthetic oligonucleotide
uaugugucgcugcuguaua

SEQ ID NO: 3086027 - RNA, 19 nt, Artificial Sequence
  Description of Artificial Sequence: Synthetic oligonucleotide
uccauugccuauuuuccuu

SEQ ID NO: 3086028 - RNA, 19 nt, Artificial Sequence
  Description of Artificial Sequence: Synthetic oligonucleotide
ucucuguuagaaagacuau

SEQ ID NO: 3086029 - RNA, 19 nt, Artificial Sequence
  Description of Artificial Sequence: Synthetic oligonucleotide
aguggauuuuccauugccu

SEQ ID NO: 3086030 - RNA, 19 nt, Artificial Sequence
  Description of Artificial Sequence: Synthetic oligonucleotide
uucaaucugcccaguuccu

SEQ ID NO: 3086031 - RNA, 19 nt, Artificial Sequence
  Description of Artificial Sequence: Synthetic oligonucleotide
guucuucaaggaaugacca

SEQ ID NO: 3086032 - RNA, 19 nt, Artificial Sequence
  Description of Artificial Sequence: Synthetic oligonucleotide
gcuuuaguauucaaucugc

SEQ ID NO: 3086033 - RNA, 19 nt, Artificial Sequence
  Description of Artificial Sequence: Synthetic oligonucleotide
gauauacauuuagaagaga

SEQ ID NO: 3086034 - RNA, 19 nt, Artificial Sequence
  Description of Artificial Sequence: Synthetic oligonucleotide
uucuucaaggaaugaccaa

SEQ ID NO: 3086035 - RNA, 19 nt, Artificial Sequence
  Description of Artificial Sequence: Synthetic oligonucleotide
uguauauucugagccugaa

SEQ ID NO: 3086036 - RNA, 19 nt, Artificial Sequence
  Description of Artificial Sequence: Synthetic oligonucleotide
acaguugugguaugacaaa

SEQ ID NO: 3086037 - RNA, 19 nt, Artificial Sequence
  Description of Artificial Sequence: Synthetic oligonucleotide
guuucuucuggaauuuaca

SEQ ID NO: 3086038 - RNA, 19 nt, Artificial Sequence
  Description of Artificial Sequence: Synthetic oligonucleotide
caaucugcccaguuccuuc

SEQ ID NO: 3086039 - RNA, 19 nt, Artificial Sequence
  Description of Artificial Sequence: Synthetic oligonucleotide
uaaguucuucaaggaauga

SEQ ID NO: 3086040 - RNA, 19 nt, Artificial Sequence
  Description of Artificial Sequence: Synthetic oligonucleotide
uuucgaguuugugaaucac

SEQ ID NO: 3086041 - RNA, 19 nt, Artificial Sequence
  Description of Artificial Sequence: Synthetic oligonucleotide
uagucuucucuguuagaaa

SEQ ID NO: 3086042 - RNA, 19 nt, Artificial Sequence
  Description of Artificial Sequence: Synthetic oligonucleotide
aaccaucuugauagucuuc

SEQ ID NO: 3086043 - RNA, 19 nt, Artificial Sequence
  Description of Artificial Sequence: Synthetic oligonucleotide
gacaaaaucucaaccagau

SEQ ID NO: 3086044 - RNA, 19 nt, Artificial Sequence
  Description of Artificial Sequence: Synthetic oligonucleotide
gagcuuuaguauucaaucu

SEQ ID NO: 3086045 - RNA, 19 nt, Artificial Sequence
  Description of Artificial Sequence: Synthetic oligonucleotide
uuuccuucuggaguacuaa

SEQ ID NO: 3086046 - RNA, 19 nt, Artificial Sequence
  Description of Artificial Sequence: Synthetic oligonucleotide
cagacucagagcuuuagua

SEQ ID NO: 3086047 - RNA, 19 nt, Artificial Sequence
  Description of Artificial Sequence: Synthetic oligonucleotide
gcugcuguauauucugagc

SEQ ID NO: 3086048 - RNA, 19 nt, Artificial Sequence
  Description of Artificial Sequence: Synthetic oligonucleotide
agauguuucuucugauaua

SEQ ID NO: 3086049 - RNA, 19 nt, Artificial Sequence
  Description of Artificial Sequence: Synthetic oligonucleotide
gacuaugugucgcugcugu

SEQ ID NO: 3086050 - RNA, 19 nt, Artificial Sequence
  Description of Artificial Sequence: Synthetic oligonucleotide
gaaucacaguugugguaug

SEQ ID NO: 3086051 - RNA, 19 nt, Artificial Sequence
  Description of Artificial Sequence: Synthetic oligonucleotide
gauagucuucucuguuaga

SEQ ID NO: 3086052 - RNA, 19 nt, Artificial Sequence
  Description of Artificial Sequence: Synthetic oligonucleotide
guggauuuuccauugccua

SEQ ID NO: 3086053 - RNA, 19 nt, Artificial Sequence
  Description of Artificial Sequence: Synthetic oligonucleotide
uggagcauuucgaguuugu

SEQ ID NO: 3086054 - RNA, 19 nt, Artificial Sequence
  Description of Artificial Sequence: Synthetic oligonucleotide
ccauuucuggagcauuucg

SEQ ID NO: 3086055 - RNA, 19 nt, Artificial Sequence
  Description of Artificial Sequence: Synthetic oligonucleotide
cuucaaggaaugaccaaaa

SEQ ID NO: 3086056 - RNA, 19 nt, Artificial Sequence
  Description of Artificial Sequence: Synthetic oligonucleotide
ucagagcuuuaguauucaa

SEQ ID NO: 3086057 - RNA, 19 nt, Artificial Sequence
  Description of Artificial Sequence: Synthetic oligonucleotide
gccuauuuuccuucuggag

SEQ ID NO: 3086058 - RNA, 19 nt, Artificial Sequence
  Description of Artificial Sequence: Synthetic oligonucleotide
ucuggagcauuucgaguuu

SEQ ID NO: 3086059 - RNA, 19 nt, Artificial Sequence
  Description of Artificial Sequence: Synthetic oligonucleotide
accagauguuucuucugau

SEQ ID NO: 3086060 - RNA, 19 nt, Artificial Sequence
  Description of Artificial Sequence: Synthetic oligonucleotide
gaagccuaauaaggcaguc

SEQ ID NO: 3086061 - RNA, 19 nt, Artificial Sequence
  Description of Artificial Sequence: Synthetic oligonucleotide
gugucgcugcuguauauuc

SEQ ID NO: 3086062 - RNA, 19 nt, Artificial Sequence
  Description of Artificial Sequence: Synthetic oligonucleotide
agcagacucagagcuuuag

SEQ ID NO: 3086063 - RNA, 19 nt, Artificial Sequence
  Description of Artificial Sequence: Synthetic oligonucleotide
ucgcugcuguauauucuga

SEQ ID NO: 3086064 - RNA, 19 nt, Artificial Sequence
  Description of Artificial Sequence: Synthetic oligonucleotide
uggaaaccaucuugauagu

SEQ ID NO: 3086065 - RNA, 19 nt, Artificial Sequence
  Description of Artificial Sequence: Synthetic oligonucleotide
ucuggaguacuaaguucuu

SEQ ID NO: 3086066 - RNA, 19 nt, Artificial Sequence
  Description of Artificial Sequence: Synthetic oligonucleotide
gcuguauauucugagccug

SEQ ID NO: 3086067 - RNA, 19 nt, Artificial Sequence
  Description of Artificial Sequence: Synthetic oligonucleotide
caucuugauagucuucucu

SEQ ID NO: 3086068 - RNA, 19 nt, Artificial Sequence
  Description of Artificial Sequence: Synthetic oligonucleotide
gugguaugacaaaaucuca

SEQ ID NO: 3086069 - RNA, 19 nt, Artificial Sequence
  Description of Artificial Sequence: Synthetic oligonucleotide
gacucagagcuuuaguauu

SEQ ID NO: 3086070 - RNA, 19 nt, Artificial Sequence
  Description of Artificial Sequence: Synthetic oligonucleotide
uauuuuccuucuggaguac

SEQ ID NO: 3086071 - RNA, 19 nt, Artificial Sequence
  Description of Artificial Sequence: Synthetic oligonucleotide
aguugugguaugacaaaau

SEQ ID NO: 3086072 - RNA, 19 nt, Artificial Sequence
  Description of Artificial Sequence: Synthetic oligonucleotide
auaaggcaguccauuucug

SEQ ID NO: 3086073 - RNA, 19 nt, Artificial Sequence
  Description of Artificial Sequence: Synthetic oligonucleotide
cuguauauucugagccuga

SEQ ID NO: 3086074 - RNA, 19 nt, Artificial Sequence
  Description of Artificial Sequence: Synthetic oligonucleotide
gugaaucacaguuguggua

SEQ ID NO: 3086075 - RNA, 19 nt, Artificial Sequence
  Description of Artificial Sequence: Synthetic oligonucleotide
auuuuccauugccuauuuu

SEQ ID NO: 3086076 - RNA, 19 nt, Artificial Sequence
  Description of Artificial Sequence: Synthetic oligonucleotide
gccugaagccuaauaaggc

SEQ ID NO: 3086077 - RNA, 19 nt, Artificial Sequence
  Description of Artificial Sequence: Synthetic oligonucleotide
aguauucaaucugcccagu

SEQ ID NO: 3086078 - RNA, 19 nt, Artificial Sequence
  Description of Artificial Sequence: Synthetic oligonucleotide
ccugaagccuaauaaggca

SEQ ID NO: 3086079 - RNA, 19 nt, Artificial Sequence
  Description of Artificial Sequence: Synthetic oligonucleotide
cuaauaaggcaguccauuu

SEQ ID NO: 3086080 - RNA, 19 nt, Artificial Sequence
  Description of Artificial Sequence: Synthetic oligonucleotide
cuggaguacuaaguucuuc

SEQ ID NO: 3086081 - RNA, 19 nt, Artificial Sequence
  Description of Artificial Sequence: Synthetic oligonucleotide
ugugucgcugcuguauauu

SEQ ID NO: 3086082 - RNA, 19 nt, Artificial Sequence
  Description of Artificial Sequence: Synthetic oligonucleotide
ccuauuuuccuucuggagu

SEQ ID NO: 3086083 - RNA, 19 nt, Artificial Sequence
  Description of Artificial Sequence: Synthetic oligonucleotide
cagagcuuuaguauucaau

SEQ ID NO: 3086084 - RNA, 19 nt, Artificial Sequence
  Description of Artificial Sequence: Synthetic oligonucleotide
augugucgcugcuguauau

SEQ ID NO: 3086085 - RNA, 19 nt, Artificial Sequence
  Description of Artificial Sequence: Synthetic oligonucleotide
ggaaaccaucuugauaguc

SEQ ID NO: 3086086 - RNA, 19 nt, Artificial Sequence
  Description of Artificial Sequence: Synthetic oligonucleotide
ugcccaguuccuucaguuu

SEQ ID NO: 3086087 - RNA, 19 nt, Artificial Sequence
  Description of Artificial Sequence: Synthetic oligonucleotide
ggaguacuaaguucuucaa

SEQ ID NO: 3086088 - RNA, 19 nt, Artificial Sequence
  Description of Artificial Sequence: Synthetic oligonucleotide
ggagcauuucgaguuugug

SEQ ID NO: 3086089 - RNA, 19 nt, Artificial Sequence
  Description of Artificial Sequence: Synthetic oligonucleotide
cuggagcauuucgaguuug

SEQ ID NO: 3086090 - RNA, 19 nt, Artificial Sequence
  Description of Artificial Sequence: Synthetic oligonucleotide
agacuaugugucgcugcug

SEQ ID NO: 3086091 - RNA, 19 nt, Artificial Sequence
  Description of Artificial Sequence: Synthetic oligonucleotide
cuggaauuuacaguggauu

SEQ ID NO: 3086092 - RNA, 19 nt, Artificial Sequence
  Description of Artificial Sequence: Synthetic oligonucleotide
auucugagccugaagccua

SEQ ID NO: 3086093 - RNA, 19 nt, Artificial Sequence
  Description of Artificial Sequence: Synthetic oligonucleotide
guuucuucugauauacauu

SEQ ID NO: 3086094 - RNA, 19 nt, Artificial Sequence
  Description of Artificial Sequence: Synthetic oligonucleotide
gauuuuccauugccuauuu

SEQ ID NO: 3086095 - RNA, 19 nt, Artificial Sequence
  Description of Artificial Sequence: Synthetic oligonucleotide
cuugauagucuucucuguu

SEQ ID NO: 3086096 - RNA, 19 nt, Artificial Sequence
  Description of Artificial Sequence: Synthetic oligonucleotide
acuaugugucgcugcugua

SEQ ID NO: 3086097 - RNA, 19 nt, Artificial Sequence
  Description of Artificial Sequence: Synthetic oligonucleotide
cucagagcuuuaguauuca

SEQ ID NO: 3086098 - RNA, 19 nt, Artificial Sequence
  Description of Artificial Sequence: Synthetic oligonucleotide
auguuucuucugauauaca

SEQ ID NO: 3086099 - RNA, 19 nt, Artificial Sequence
  Description of Artificial Sequence: Synthetic oligonucleotide
cuucucuguuagaaagacu

SEQ ID NO: 3086100 - RNA, 19 nt, Artificial Sequence
  Description of Artificial Sequence: Synthetic oligonucleotide
cugagccugaagccuaaua

SEQ ID NO: 3086101 - RNA, 19 nt, Artificial Sequence
  Description of Artificial Sequence: Synthetic oligonucleotide
cuaugugucgcugcuguau

SEQ ID NO: 3086102 - RNA, 19 nt, Artificial Sequence
  Description of Artificial Sequence: Synthetic oligonucleotide
guauucaaucugcccaguu

SEQ ID NO: 3086103 - RNA, 19 nt, Artificial Sequence
  Description of Artificial Sequence: Synthetic oligonucleotide
gcaguccauuucuggagca

SEQ ID NO: 3086104 - RNA, 19 nt, Artificial Sequence
  Description of Artificial Sequence: Synthetic oligonucleotide
ggaauuuacaguggauuuu

SEQ ID NO: 3086105 - RNA, 19 nt, Artificial Sequence
  Description of Artificial Sequence: Synthetic oligonucleotide
ccaucuugauagucuucuc

SEQ ID NO: 3086106 - RNA, 19 nt, Artificial Sequence
  Description of Artificial Sequence: Synthetic oligonucleotide
ucugagccugaagccuaau

SEQ ID NO: 3086107 - RNA, 19 nt, Artificial Sequence
  Description of Artificial Sequence: Synthetic oligonucleotide
ccagauguuucuucugaua

SEQ ID NO: 3086108 - RNA, 19 nt, Artificial Sequence
  Description of Artificial Sequence: Synthetic oligonucleotide
gcagacucagagcuuuagu

SEQ ID NO: 3086109 - RNA, 19 nt, Artificial Sequence
  Description of Artificial Sequence: Synthetic oligonucleotide
cugcccaguuccuucaguu

SEQ ID NO: 3086110 - RNA, 19 nt, Artificial Sequence
  Description of Artificial Sequence: Synthetic oligonucleotide
ggauuuuccauugccuauu

SEQ ID NO: 3086111 - RNA, 19 nt, Artificial Sequence
  Description of Artificial Sequence: Synthetic oligonucleotide
ccuucuggaguacuaaguu

SEQ ID NO: 3086112 - RNA, 19 nt, Artificial Sequence
  Description of Artificial Sequence: Synthetic oligonucleotide
ccuaauaaggcaguccauu

SEQ ID NO: 3086113 - RNA, 19 nt, Artificial Sequence
  Description of Artificial Sequence: Synthetic oligonucleotide
guccauuucuggagcauuu

SEQ ID NO: 3086114 - RNA, 19 nt, Artificial Sequence
  Description of Artificial Sequence: Synthetic oligonucleotide
caguuucuucuggaauuua

SEQ ID NO: 3086115 - RNA, 19 nt, Artificial Sequence
  Description of Artificial Sequence: Synthetic oligonucleotide
gacagcagacucagagcuu

SEQ ID NO: 3086116 - RNA, 19 nt, Artificial Sequence
  Description of Artificial Sequence: Synthetic oligonucleotide
gcauuucgaguuugugaau

SEQ ID NO: 3086117 - RNA, 19 nt, Artificial Sequence
  Description of Artificial Sequence: Synthetic oligonucleotide
cagcagacucagagcuuua

SEQ ID NO: 3086118 - RNA, 19 nt, Artificial Sequence
  Description of Artificial Sequence: Synthetic oligonucleotide
cgaguuugugaaucacagu

SEQ ID NO: 3086119 - RNA, 19 nt, Artificial Sequence
  Description of Artificial Sequence: Synthetic oligonucleotide
gccuaauaaggcaguccau

SEQ ID NO: 3086120 - RNA, 19 nt, Artificial Sequence
  Description of Artificial Sequence: Synthetic oligonucleotide
aaaaugacccuguacagcc

SEQ ID NO: 3086121 - RNA, 19 nt, Artificial Sequence
  Description of Artificial Sequence: Synthetic oligonucleotide
agaaagaacacacacacac

SEQ ID NO: 3086122 - RNA, 19 nt, Artificial Sequence
  Description of Artificial Sequence: Synthetic oligonucleotide
aaagaacacacacacacac

SEQ ID NO: 3086123 - RNA, 19 nt, Artificial Sequence
  Description of Artificial Sequence: Synthetic oligonucleotide
uauuauacuuccaaacucg

SEQ ID NO: 3086124 - RNA, 19 nt, Artificial Sequence
  Description of Artificial Sequence: Synthetic oligonucleotide
aaggagaaagaacacacac

SEQ ID NO: 3086125 - RNA, 19 nt, Artificial Sequence
  Description of Artificial Sequence: Synthetic oligonucleotide
caaauuuucaguaauguac

SEQ ID NO: 3086126 - RNA, 19 nt, Artificial Sequence
  Description of Artificial Sequence: Synthetic oligonucleotide
uguacacaaaccuugacag

SEQ ID NO: 3086127 - RNA, 19 nt, Artificial Sequence
  Description of Artificial Sequence: Synthetic oligonucleotide
gaaaauaccaguuacuguc

SEQ ID NO: 3086128 - RNA, 19 nt, Artificial Sequence
  Description of Artificial Sequence: Synthetic oligonucleotide
guuacugucaaaaugaccc

SEQ ID NO: 3086129 - RNA, 19 nt, Artificial Sequence
  Description of Artificial Sequence: Synthetic oligonucleotide
uuuaauuagaguauauuau

SEQ ID NO: 3086130 - RNA, 19 nt, Artificial Sequence
  Description of Artificial Sequence: Synthetic oligonucleotide
uauacaauacaaauuuuca

SEQ ID NO: 3086131 - RNA, 19 nt, Artificial Sequence
  Description of Artificial Sequence: Synthetic oligonucleotide
uauauuauacuuccaaacu

SEQ ID NO: 3086132 - RNA, 19 nt, Artificial Sequence
  Description of Artificial Sequence: Synthetic oligonucleotide
uaaugcaaaagcuuuauac

SEQ ID NO: 3086133 - RNA, 19 nt, Artificial Sequence
  Description of Artificial Sequence: Synthetic oligonucleotide
auauuauacuuccaaacuc

SEQ ID NO: 3086134 - RNA, 19 nt, Artificial Sequence
  Description of Artificial Sequence: Synthetic oligonucleotide
uuuuaauuagaguauauua

SEQ ID NO: 3086135 - RNA, 19 nt, Artificial Sequence
  Description of Artificial Sequence: Synthetic oligonucleotide
aauacaaauuuucaguaau

SEQ ID NO: 3086136 - RNA, 19 nt, Artificial Sequence
  Description of Artificial Sequence: Synthetic oligonucleotide
aauuagaguauauuauacu

SEQ ID NO: 3086137 - RNA, 19 nt, Artificial Sequence
  Description of Artificial Sequence: Synthetic oligonucleotide
uuuucaguaauguacacaa

SEQ ID NO: 3086138 - RNA, 19 nt, Artificial Sequence
  Description of Artificial Sequence: Synthetic oligonucleotide
uuauacaauacaaauuuuc

SEQ ID NO: 3086139 - RNA, 19 nt, Artificial Sequence
  Description of Artificial Sequence: Synthetic oligonucleotide
uagaguauauuauacuucc

SEQ ID NO: 3086140 - RNA, 19 nt, Artificial Sequence
  Description of Artificial Sequence: Synthetic oligonucleotide
aacucgauacacuagaaau

SEQ ID NO: 3086141 - RNA, 19 nt, Artificial Sequence
  Description of Artificial Sequence: Synthetic oligonucleotide
ucugaacauaauaugagga

SEQ ID NO: 3086142 - RNA, 19 nt, Artificial Sequence
  Description of Artificial Sequence: Synthetic oligonucleotide
ucaucugaacauaauauga

SEQ ID NO: 3086143 - RNA, 19 nt, Artificial Sequence
  Description of Artificial Sequence: Synthetic oligonucleotide
uucaguaauguacacaaac

SEQ ID NO: 3086144 - RNA, 19 nt, Artificial Sequence
  Description of Artificial Sequence: Synthetic oligonucleotide
agaacacacacacacacuc

SEQ ID NO: 3086145 - RNA, 19 nt, Artificial Sequence
  Description of Artificial Sequence: Synthetic oligonucleotide
aaggaaaggagaaagaaca

SEQ ID NO: 3086146 - RNA, 19 nt, Artificial Sequence
  Description of Artificial Sequence: Synthetic oligonucleotide
uaauuagaguauauuauac

SEQ ID NO: 3086147 - RNA, 19 nt, Artificial Sequence
  Description of Artificial Sequence: Synthetic oligonucleotide
ugcaacauaagaugcaaag

SEQ ID NO: 3086148 - RNA, 19 nt, Artificial Sequence
  Description of Artificial Sequence: Synthetic oligonucleotide
  modified_base (6)..(6): a, c, u, g, unknown or other
aaaagngagagaagaaagg

SEQ ID NO: 3086149 - RNA, 19 nt, Artificial Sequence
  Description of Artificial Sequence: Synthetic oligonucleotide
auacuuccaaacucgauac

SEQ ID NO: 3086150 - RNA, 19 nt, Artificial Sequence
  Description of Artificial Sequence: Synthetic oligonucleotide
ucaguaauguacacaaacc

SEQ ID NO: 3086151 - RNA, 19 nt, Artificial Sequence
  Description of Artificial Sequence: Synthetic oligonucleotide
cauaauaugaggaaguuaa

SEQ ID NO: 3086152 - RNA, 19 nt, Artificial Sequence
  Description of Artificial Sequence: Synthetic oligonucleotide
uagaaauuggcaaugcaac

SEQ ID NO: 3086153 - RNA, 19 nt, Artificial Sequence
  Description of Artificial Sequence: Synthetic oligonucleotide
aauguacacaaaccuugac

SEQ ID NO: 3086154 - RNA, 19 nt, Artificial Sequence
  Description of Artificial Sequence: Synthetic oligonucleotide
ugaacauaauaugaggaag

SEQ ID NO: 3086155 - RNA, 19 nt, Artificial Sequence
  Description of Artificial Sequence: Synthetic oligonucleotide
guauauuauacuuccaaac

SEQ ID NO: 3086156 - RNA, 19 nt, Artificial Sequence
  Description of Artificial Sequence: Synthetic oligonucleotide
uauacuuccaaacucgaua

SEQ ID NO: 3086157 - RNA, 19 nt, Artificial Sequence
  Description of Artificial Sequence: Synthetic oligonucleotide
uuaauuagaguauauuaua

SEQ ID NO: 3086158 - RNA, 19 nt, Artificial Sequence
  Description of Artificial Sequence: Synthetic oligonucleotide
aucugaacauaauaugagg

SEQ ID NO: 3086159 - RNA, 19 nt, Artificial Sequence
  Description of Artificial Sequence: Synthetic oligonucleotide
  modified_base (5)..(5): a, c, u, g, unknown or other
aaagngagagaagaaagga

SEQ ID NO: 3086160 - RNA, 19 nt, Artificial Sequence
  Description of Artificial Sequence: Synthetic oligonucleotide
aaaccuugacaguaugauc

SEQ ID NO: 3086161 - RNA, 19 nt, Artificial Sequence
  Description of Artificial Sequence: Synthetic oligonucleotide
gucaaaaugacccuguaca

SEQ ID NO: 3086162 - RNA, 19 nt, Artificial Sequence
  Description of Artificial Sequence: Synthetic oligonucleotide
auuagaguauauuauacuu

SEQ ID NO: 3086163 - RNA, 19 nt, Artificial Sequence
  Description of Artificial Sequence: Synthetic oligonucleotide
aaccuugacaguaugauca

SEQ ID NO: 3086164 - RNA, 19 nt, Artificial Sequence
  Description of Artificial Sequence: Synthetic oligonucleotide
aguaugaucaucugaacau

SEQ ID NO: 3086165 - RNA, 19 nt, Artificial Sequence
  Description of Artificial Sequence: Synthetic oligonucleotide
uuagaguauauuauacuuc

SEQ ID NO: 3086166 - RNA, 19 nt, Artificial Sequence
  Description of Artificial Sequence: Synthetic oligonucleotide
aaauuuucaguaauguaca

SEQ ID NO: 3086167 - RNA, 19 nt, Artificial Sequence
  Description of Artificial Sequence: Synthetic oligonucleotide
gaugcaaaggaaaauacca

SEQ ID NO: 3086168 - RNA, 19 nt, Artificial Sequence
  Description of Artificial Sequence: Synthetic oligonucleotide
agcuuuauacaauacaaau

SEQ ID NO: 3086169 - RNA, 19 nt, Artificial Sequence
  Description of Artificial Sequence: Synthetic oligonucleotide
ucaaaaugacccuguacag

SEQ ID NO: 3086170 - RNA, 19 nt, Artificial Sequence
  Description of Artificial Sequence: Synthetic oligonucleotide
aucaucugaacauaauaug

SEQ ID NO: 3086171 - RNA, 19 nt, Artificial Sequence
  Description of Artificial Sequence: Synthetic oligonucleotide
guaauguacacaaaccuug

SEQ ID NO: 3086172 - RNA, 19 nt, Artificial Sequence
  Description of Artificial Sequence: Synthetic oligonucleotide
caucugaacauaauaugag

SEQ ID NO: 3086173 - RNA, 19 nt, Artificial Sequence
  Description of Artificial Sequence: Synthetic oligonucleotide
accaguuacugucaaaaug

SEQ ID NO: 3086174 - RNA, 19 nt, Artificial Sequence
  Description of Artificial Sequence: Synthetic oligonucleotide
agaugcaaaggaaaauacc

SEQ ID NO: 3086175 - RNA, 19 nt, Artificial Sequence
  Description of Artificial Sequence: Synthetic oligonucleotide
ggagaaagaacacacacac

SEQ ID NO: 3086176 - RNA, 19 nt, Artificial Sequence
  Description of Artificial Sequence: Synthetic oligonucleotide
acuuccaaacucgauacac

SEQ ID NO: 3086177 - RNA, 19 nt, Artificial Sequence
  Description of Artificial Sequence: Synthetic oligonucleotide
ugaucaucugaacauaaua

SEQ ID NO: 3086178 - RNA, 19 nt, Artificial Sequence
  Description of Artificial Sequence: Synthetic oligonucleotide
ugcaaaggaaaauaccagu

SEQ ID NO: 3086179 - RNA, 19 nt, Artificial Sequence
  Description of Artificial Sequence: Synthetic oligonucleotide
acaauacaaauuuucagua

SEQ ID NO: 3086180 - RNA, 19 nt, Artificial Sequence
  Description of Artificial Sequence: Synthetic oligonucleotide
aguauauuauacuuccaaa

SEQ ID NO: 3086181 - RNA, 19 nt, Artificial Sequence
  Description of Artificial Sequence: Synthetic oligonucleotide
auguacacaaaccuugaca

SEQ ID NO: 3086182 - RNA, 19 nt, Artificial Sequence
  Description of Artificial Sequence: Synthetic oligonucleotide
caacauaagaugcaaagga

SEQ ID NO: 3086183 - RNA, 19 nt, Artificial Sequence
  Description of Artificial Sequence: Synthetic oligonucleotide
uaauaugaggaaguuaaaa

SEQ ID NO: 3086184 - RNA, 19 nt, Artificial Sequence
  Description of Artificial Sequence: Synthetic oligonucleotide
uacacuagaaauuggcaau

SEQ ID NO: 3086185 - RNA, 19 nt, Artificial Sequence
  Description of Artificial Sequence: Synthetic oligonucleotide
aggaaaauaccaguuacug

SEQ ID NO: 3086186 - RNA, 19 nt, Artificial Sequence
  Description of Artificial Sequence: Synthetic oligonucleotide
uaagaugcaaaggaaaaua

SEQ ID NO: 3086187 - RNA, 19 nt, Artificial Sequence
  Description of Artificial Sequence: Synthetic oligonucleotide
cuuuauacaauacaaauuu

SEQ ID NO: 3086188 - RNA, 19 nt, Artificial Sequence
  Description of Artificial Sequence: Synthetic oligonucleotide
uaauguacacaaaccuuga

SEQ ID NO: 3086189 - RNA, 19 nt, Artificial Sequence
  Description of Artificial Sequence: Synthetic oligonucleotide
gaguauauuauacuuccaa

SEQ ID NO: 3086190 - RNA, 19 nt, Artificial Sequence
  Description of Artificial Sequence: Synthetic oligonucleotide
uguacagccuuguaaugca

SEQ ID NO: 3086191 - RNA, 19 nt, Artificial Sequence
  Description of Artificial Sequence: Synthetic oligonucleotide
uaugaucaucugaacauaa

SEQ ID NO: 3086192 - RNA, 19 nt, Artificial Sequence
  Description of Artificial Sequence: Synthetic oligonucleotide
ucgauacacuagaaauugg

SEQ ID NO: 3086193 - RNA, 19 nt, Artificial Sequence
  Description of Artificial Sequence: Synthetic oligonucleotide
agaaauuggcaaugcaaca

SEQ ID NO: 3086194 - RNA, 19 nt, Artificial Sequence
  Description of Artificial Sequence: Synthetic oligonucleotide
aaugcaacauaagaugcaa

SEQ ID NO: 3086195 - RNA, 19 nt, Artificial Sequence
  Description of Artificial Sequence: Synthetic oligonucleotide
acaguaugaucaucugaac

SEQ ID NO: 3086196 - RNA, 19 nt, Artificial Sequence
  Description of Artificial Sequence: Synthetic oligonucleotide
aguuacugucaaaaugacc

SEQ ID NO: 3086197 - RNA, 19 nt, Artificial Sequence
  Description of Artificial Sequence: Synthetic oligonucleotide
uggcaaugcaacauaagau

SEQ ID NO: 3086198 - RNA, 19 nt, Artificial Sequence
  Description of Artificial Sequence: Synthetic oligonucleotide
aaacucgauacacuagaaa

SEQ ID NO: 3086199 - RNA, 19 nt, Artificial Sequence
  Description of Artificial Sequence: Synthetic oligonucleotide
uuuauacaauacaaauuuu

SEQ ID NO: 3086200 - RNA, 19 nt, Artificial Sequence
  Description of Artificial Sequence: Synthetic oligonucleotide
gagaagaaaggaaaggaga

SEQ ID NO: 3086201 - RNA, 19 nt, Artificial Sequence
  Description of Artificial Sequence: Synthetic oligonucleotide
ugucaaaaugacccuguac

SEQ ID NO: 3086202 - RNA, 19 nt, Artificial Sequence
  Description of Artificial Sequence: Synthetic oligonucleotide
  modified_base (2)..(2): a, c, u, g, unknown or other
gngagagaagaaaggaaag

SEQ ID NO: 3086203 - RNA, 19 nt, Artificial Sequence
  Description of Artificial Sequence: Synthetic oligonucleotide
aaauuggcaaugcaacaua

SEQ ID NO: 3086204 - RNA, 19 nt, Artificial Sequence
  Description of Artificial Sequence: Synthetic oligonucleotide
cucgauacacuagaaauug

SEQ ID NO: 3086205 - RNA, 19 nt, Artificial Sequence
  Description of Artificial Sequence: Synthetic oligonucleotide
uccaaacucgauacacuag

SEQ ID NO: 3086206 - RNA, 19 nt, Artificial Sequence
  Description of Artificial Sequence: Synthetic oligonucleotide
cuagaaauuggcaaugcaa

SEQ ID NO: 3086207 - RNA, 19 nt, Artificial Sequence
  Description of Artificial Sequence: Synthetic oligonucleotide
gacaguaugaucaucugaa

SEQ ID NO: 3086208 - RNA, 19 nt, Artificial Sequence
  Description of Artificial Sequence: Synthetic oligonucleotide
ugcaaaagcuuuauacaau

SEQ ID NO: 3086209 - RNA, 19 nt, Artificial Sequence
  Description of Artificial Sequence: Synthetic oligonucleotide
uacacaaaccuugacagua

SEQ ID NO: 3086210 - RNA, 19 nt, Artificial Sequence
  Description of Artificial Sequence: Synthetic oligonucleotide
aacacacacacacacucuu

SEQ ID NO: 3086211 - RNA, 19 nt, Artificial Sequence
  Description of Artificial Sequence: Synthetic oligonucleotide
aacauaagaugcaaaggaa

SEQ ID NO: 3086212 - RNA, 19 nt, Artificial Sequence
  Description of Artificial Sequence: Synthetic oligonucleotide
acaaauuuucaguaaugua

SEQ ID NO: 3086213 - RNA, 19 nt, Artificial Sequence
  Description of Artificial Sequence: Synthetic oligonucleotide
cauaagaugcaaaggaaaa

SEQ ID NO: 3086214 - RNA, 19 nt, Artificial Sequence
  Description of Artificial Sequence: Synthetic oligonucleotide
acuagaaauuggcaaugca

SEQ ID NO: 3086215 - RNA, 19 nt, Artificial Sequence
  Description of Artificial Sequence: Synthetic oligonucleotide
  modified_base (3)..(3): a, c, u, g, unknown or other
agngagagaagaaaggaaa

SEQ ID NO: 3086216 - RNA, 19 nt, Artificial Sequence
  Description of Artificial Sequence: Synthetic oligonucleotide
caaaagcuuuauacaauac

SEQ ID NO: 3086217 - RNA, 19 nt, Artificial Sequence
  Description of Artificial Sequence: Synthetic oligonucleotide
  modified_base (4)..(4): a, c, u, g, unknown or other
aagngagagaagaaaggaa

SEQ ID NO: 3086218 - RNA, 19 nt, Artificial Sequence
  Description of Artificial Sequence: Synthetic oligonucleotide
uuuuauuagccaaccuuuu

SEQ ID NO: 3086219 - RNA, 19 nt, Artificial Sequence
  Description of Artificial Sequence: Synthetic oligonucleotide
aaaauaccaguuacuguca

SEQ ID NO: 3086220 - RNA, 19 nt, Artificial Sequence
  Description of Artificial Sequence: Synthetic oligonucleotide
aaggaaaauaccaguuacu

SEQ ID NO: 3086221 - RNA, 19 nt, Artificial Sequence
  Description of Artificial Sequence: Synthetic oligonucleotide
caaaaugacccuguacagc

SEQ ID NO: 3086222 - RNA, 19 nt, Artificial Sequence
  Description of Artificial Sequence: Synthetic oligonucleotide
uuccaaacucgauacacua

SEQ ID NO: 3086223 - RNA, 19 nt, Artificial Sequence
  Description of Artificial Sequence: Synthetic oligonucleotide
auaccaguuacugucaaaa

SEQ ID NO: 3086224 - RNA, 19 nt, Artificial Sequence
  Description of Artificial Sequence: Synthetic oligonucleotide
aacauaauaugaggaaguu

SEQ ID NO: 3086225 - RNA, 19 nt, Artificial Sequence
  Description of Artificial Sequence: Synthetic oligonucleotide
uugacaguaugaucaucug

SEQ ID NO: 3086226 - RNA, 19 nt, Artificial Sequence
  Description of Artificial Sequence: Synthetic oligonucleotide
aaaggagaaagaacacaca

SEQ ID NO: 3086227 - RNA, 19 nt, Artificial Sequence
  Description of Artificial Sequence: Synthetic oligonucleotide
uuauacuuccaaacucgau

SEQ ID NO: 3086228 - RNA, 19 nt, Artificial Sequence
  Description of Artificial Sequence: Synthetic oligonucleotide
auacaaauuuucaguaaug

SEQ ID NO: 3086229 - RNA, 19 nt, Artificial Sequence
  Description of Artificial Sequence: Synthetic oligonucleotide
uuacugucaaaaugacccu

SEQ ID NO: 3086230 - RNA, 19 nt, Artificial Sequence
  Description of Artificial Sequence: Synthetic oligonucleotide
cuugacaguaugaucaucu

SEQ ID NO: 3086231 - RNA, 19 nt, Artificial Sequence
  Description of Artificial Sequence: Synthetic oligonucleotide
aaugacccuguacagccuu

SEQ ID NO: 3086232 - RNA, 19 nt, Artificial Sequence
  Description of Artificial Sequence: Synthetic oligonucleotide
uuguaaugcaaaagcuuua

SEQ ID NO: 3086233 - RNA, 19 nt, Artificial Sequence
  Description of Artificial Sequence: Synthetic oligonucleotide
aggaaaggagaaagaacac

SEQ ID NO: 3086234 - RNA, 19 nt, Artificial Sequence
  Description of Artificial Sequence: Synthetic oligonucleotide
augcaaaggaaaauaccag

SEQ ID NO: 3086235 - RNA, 19 nt, Artificial Sequence
  Description of Artificial Sequence: Synthetic oligonucleotide
gcaacauaagaugcaaagg

SEQ ID NO: 3086236 - RNA, 19 nt, Artificial Sequence
  Description of Artificial Sequence: Synthetic oligonucleotide
aauuggcaaugcaacauaa

SEQ ID NO: 3086237 - RNA, 19 nt, Artificial Sequence
  Description of Artificial Sequence: Synthetic oligonucleotide
cugaacauaauaugaggaa

SEQ ID NO: 3086238 - RNA, 19 nt, Artificial Sequence
  Description of Artificial Sequence: Synthetic oligonucleotide
acauaagaugcaaaggaaa

SEQ ID NO: 3086239 - RNA, 19 nt, Artificial Sequence
  Description of Artificial Sequence: Synthetic oligonucleotide
cacacacacacacucuuac

SEQ ID NO: 3086240 - RNA, 19 nt, Artificial Sequence
  Description of Artificial Sequence: Synthetic oligonucleotide
caguaugaucaucugaaca

SEQ ID NO: 3086241 - RNA, 19 nt, Artificial Sequence
  Description of Artificial Sequence: Synthetic oligonucleotide
aagcuuuauacaauacaaa

SEQ ID NO: 3086242 - RNA, 19 nt, Artificial Sequence
  Description of Artificial Sequence: Synthetic oligonucleotide
auaagaugcaaaggaaaau

SEQ ID NO: 3086243 - RNA, 19 nt, Artificial Sequence
  Description of Artificial Sequence: Synthetic oligonucleotide
uacugucaaaaugacccug

SEQ ID NO: 3086244 - RNA, 19 nt, Artificial Sequence
  Description of Artificial Sequence: Synthetic oligonucleotide
gaucaucugaacauaauau

SEQ ID NO: 3086245 - RNA, 19 nt, Artificial Sequence
  Description of Artificial Sequence: Synthetic oligonucleotide
aguaauguacacaaaccuu

SEQ ID NO: 3086246 - RNA, 19 nt, Artificial Sequence
  Description of Artificial Sequence: Synthetic oligonucleotide
gaacauaauaugaggaagu

SEQ ID NO: 3086247 - RNA, 19 nt, Artificial Sequence
  Description of Artificial Sequence: Synthetic oligonucleotide
cuuguaaugcaaaagcuuu

SEQ ID NO: 3086248 - RNA, 19 nt, Artificial Sequence
  Description of Artificial Sequence: Synthetic oligonucleotide
gcaaugcaacauaagaugc

SEQ ID NO: 3086249 - RNA, 19 nt, Artificial Sequence
  Description of Artificial Sequence: Synthetic oligonucleotide
acacuagaaauuggcaaug

SEQ ID NO: 3086250 - RNA, 19 nt, Artificial Sequence
  Description of Artificial Sequence: Synthetic oligonucleotide
uacagccuuguaaugcaaa

SEQ ID NO: 3086251 - RNA, 19 nt, Artificial Sequence
  Description of Artificial Sequence: Synthetic oligonucleotide
gaaagaacacacacacaca

SEQ ID NO: 3086252 - RNA, 19 nt, Artificial Sequence
  Description of Artificial Sequence: Synthetic oligonucleotide
aagaacacacacacacacu

SEQ ID NO: 3086253 - RNA, 19 nt, Artificial Sequence
  Description of Artificial Sequence: Synthetic oligonucleotide
caauacaaauuuucaguaa

SEQ ID NO: 3086254 - RNA, 19 nt, Artificial Sequence
  Description of Artificial Sequence: Synthetic oligonucleotide
caguuacugucaaaaugac

SEQ ID NO: 3086255 - RNA, 19 nt, Artificial Sequence
  Description of Artificial Sequence: Synthetic oligonucleotide
caaugcaacauaagaugca

SEQ ID NO: 3086256 - RNA, 19 nt, Artificial Sequence
  Description of Artificial Sequence: Synthetic oligonucleotide
auuauacuuccaaacucga

SEQ ID NO: 3086257 - RNA, 19 nt, Artificial Sequence
  Description of Artificial Sequence: Synthetic oligonucleotide
cgauacacuagaaauuggc

SEQ ID NO: 3086258 - RNA, 19 nt, Artificial Sequence
  Description of Artificial Sequence: Synthetic oligonucleotide
uacuuccaaacucgauaca

SEQ ID NO: 3086259 - RNA, 19 nt, Artificial Sequence
  Description of Artificial Sequence: Synthetic oligonucleotide
auuggcaaugcaacauaag

SEQ ID NO: 3086260 - RNA, 19 nt, Artificial Sequence
  Description of Artificial Sequence: Synthetic oligonucleotide
caguaauguacacaaaccu

SEQ ID NO: 3086261 - RNA, 19 nt, Artificial Sequence
  Description of Artificial Sequence: Synthetic oligonucleotide
gaagaaaggaaaggagaaa

SEQ ID NO: 3086262 - RNA, 19 nt, Artificial Sequence
  Description of Artificial Sequence: Synthetic oligonucleotide
cacuagaaauuggcaaugc

SEQ ID NO: 3086263 - RNA, 19 nt, Artificial Sequence
  Description of Artificial Sequence: Synthetic oligonucleotide
gaaauuggcaaugcaacau

SEQ ID NO: 3086264 - RNA, 19 nt, Artificial Sequence
  Description of Artificial Sequence: Synthetic oligonucleotide
acccuguacagccuuguaa

SEQ ID NO: 3086265 - RNA, 19 nt, Artificial Sequence
  Description of Artificial Sequence: Synthetic oligonucleotide
cacaaaccuugacaguaug

SEQ ID NO: 3086266 - RNA, 19 nt, Artificial Sequence
  Description of Artificial Sequence: Synthetic oligonucleotide
acacacacacacucuuaca

SEQ ID NO: 3086267 - RNA, 19 nt, Artificial Sequence
  Description of Artificial Sequence: Synthetic oligonucleotide
acauaauaugaggaaguua

SEQ ID NO: 3086268 - RNA, 19 nt, Artificial Sequence
  Description of Artificial Sequence: Synthetic oligonucleotide
acugucaaaaugacccugu

SEQ ID NO: 3086269 - RNA, 19 nt, Artificial Sequence
  Description of Artificial Sequence: Synthetic oligonucleotide
gcaaaagcuuuauacaaua

SEQ ID NO: 3086270 - RNA, 19 nt, Artificial Sequence
  Description of Artificial Sequence: Synthetic oligonucleotide
acaaaccuugacaguauga

SEQ ID NO: 3086271 - RNA, 19 nt, Artificial Sequence
  Description of Artificial Sequence: Synthetic oligonucleotide
ggaaaggagaaagaacaca

SEQ ID NO: 3086272 - RNA, 19 nt, Artificial Sequence
  Description of Artificial Sequence: Synthetic oligonucleotide
acucgauacacuagaaauu

SEQ ID NO: 3086273 - RNA, 19 nt, Artificial Sequence
  Description of Artificial Sequence: Synthetic oligonucleotide
agaguauauuauacuucca

SEQ ID NO: 3086274 - RNA, 19 nt, Artificial Sequence
  Description of Artificial Sequence: Synthetic oligonucleotide
auaauaugaggaaguuaaa

SEQ ID NO: 3086275 - RNA, 19 nt, Artificial Sequence
  Description of Artificial Sequence: Synthetic oligonucleotide
aaaugacccuguacagccu

SEQ ID NO: 3086276 - RNA, 19 nt, Artificial Sequence
  Description of Artificial Sequence: Synthetic oligonucleotide
ccaaacucgauacacuaga

SEQ ID NO: 3086277 - RNA, 19 nt, Artificial Sequence
  Description of Artificial Sequence: Synthetic oligonucleotide
caaacucgauacacuagaa

SEQ ID NO: 3086278 - RNA, 19 nt, Artificial Sequence
  Description of Artificial Sequence: Synthetic oligonucleotide
guaaugcaaaagcuuuaua

SEQ ID NO: 3086279 - RNA, 19 nt, Artificial Sequence
  Description of Artificial Sequence: Synthetic oligonucleotide
accuugacaguaugaucau

SEQ ID NO: 3086280 - RNA, 19 nt, Artificial Sequence
  Description of Artificial Sequence: Synthetic oligonucleotide
guaugaucaucugaacaua

SEQ ID NO: 3086281 - RNA, 19 nt, Artificial Sequence
  Description of Artificial Sequence: Synthetic oligonucleotide
cuuccaaacucgauacacu

SEQ ID NO: 3086282 - RNA, 19 nt, Artificial Sequence
  Description of Artificial Sequence: Synthetic oligonucleotide
augaucaucugaacauaau

SEQ ID NO: 3086283 - RNA, 19 nt, Artificial Sequence
  Description of Artificial Sequence: Synthetic oligonucleotide
caaaccuugacaguaugau

SEQ ID NO: 3086284 - RNA, 19 nt, Artificial Sequence
  Description of Artificial Sequence: Synthetic oligonucleotide
ugacccuguacagccuugu

SEQ ID NO: 3086285 - RNA, 19 nt, Artificial Sequence
  Description of Artificial Sequence: Synthetic oligonucleotide
acacaaaccuugacaguau

SEQ ID NO: 3086286 - RNA, 19 nt, Artificial Sequence
  Description of Artificial Sequence: Synthetic oligonucleotide
guacacaaaccuugacagu

SEQ ID NO: 3086287 - RNA, 19 nt, Artificial Sequence
  Description of Artificial Sequence: Synthetic oligonucleotide
gaacacacacacacacucu

SEQ ID NO: 3086288 - RNA, 19 nt, Artificial Sequence
  Description of Artificial Sequence: Synthetic oligonucleotide
cacacucuuacacacuuuu

SEQ ID NO: 3086289 - RNA, 19 nt, Artificial Sequence
  Description of Artificial Sequence: Synthetic oligonucleotide
ccuguacagccuuguaaug

SEQ ID NO: 3086290 - RNA, 19 nt, Artificial Sequence
  Description of Artificial Sequence: Synthetic oligonucleotide
gcuuuauacaauacaaauu

SEQ ID NO: 3086291 - RNA, 19 nt, Artificial Sequence
  Description of Artificial Sequence: Synthetic oligonucleotide
augcaacauaagaugcaaa

SEQ ID NO: 3086292 - RNA, 19 nt, Artificial Sequence
  Description of Artificial Sequence: Synthetic oligonucleotide
augacccuguacagccuug

SEQ ID NO: 3086293 - RNA, 19 nt, Artificial Sequence
  Description of Artificial Sequence: Synthetic oligonucleotide
cugucaaaaugacccugua

SEQ ID NO: 3086294 - RNA, 19 nt, Artificial Sequence
  Description of Artificial Sequence: Synthetic oligonucleotide
gcaaaggaaaauaccaguu

SEQ ID NO: 3086295 - RNA, 19 nt, Artificial Sequence
  Description of Artificial Sequence: Synthetic oligonucleotide
acacacacacacacucuua

SEQ ID NO: 3086296 - RNA, 19 nt, Artificial Sequence
  Description of Artificial Sequence: Synthetic oligonucleotide
ccuuguaaugcaaaagcuu

SEQ ID NO: 3086297 - RNA, 19 nt, Artificial Sequence
  Description of Artificial Sequence: Synthetic oligonucleotide
gccuuguaaugcaaaagcu

SEQ ID NO: 3086298 - RNA, 19 nt, Artificial Sequence
  Description of Artificial Sequence: Synthetic oligonucleotide
gacccuguacagccuugua

SEQ ID NO: 3086299 - RNA, 19 nt, Artificial Sequence
  Description of Artificial Sequence: Synthetic oligonucleotide
guacagccuuguaaugcaa

SEQ ID NO: 3086300 - RNA, 19 nt, Artificial Sequence
  Description of Artificial Sequence: Synthetic oligonucleotide
cccuguacagccuuguaau

SEQ ID NO: 3086301 - RNA, 19 nt, Artificial Sequence
  Description of Artificial Sequence: Synthetic oligonucleotide
acacacucuuacacacuuu

SEQ ID NO: 3086302 - RNA, 19 nt, Artificial Sequence
  Description of Artificial Sequence: Synthetic oligonucleotide
ccuugacaguaugaucauc

SEQ ID NO: 3086303 - RNA, 19 nt, Artificial Sequence
  Description of Artificial Sequence: Synthetic oligonucleotide
gacagagacaucaagaucc

SEQ ID NO: 3086304 - RNA, 19 nt, Artificial Sequence
  Description of Artificial Sequence: Synthetic oligonucleotide
uucgacagagacaucaaga

SEQ ID NO: 3086305 - RNA, 19 nt, Artificial Sequence
  Description of Artificial Sequence: Synthetic oligonucleotide
gacaucaagauccuggaga

SEQ ID NO: 3086306 - RNA, 19 nt, Artificial Sequence
  Description of Artificial Sequence: Synthetic oligonucleotide
agagacaucaagauccugg

SEQ ID NO: 3086307 - RNA, 19 nt, Artificial Sequence
  Description of Artificial Sequence: Synthetic oligonucleotide
acacccuccuaacacaagg

SEQ ID NO: 3086308 - RNA, 19 nt, Artificial Sequence
  Description of Artificial Sequence: Synthetic oligonucleotide
aagcagacacccuccuaac

SEQ ID NO: 3086309 - RNA, 19 nt, Artificial Sequence
  Description of Artificial Sequence: Synthetic oligonucleotide
ucgacagagacaucaagau

SEQ ID NO: 3086310 - RNA, 19 nt, Artificial Sequence
  Description of Artificial Sequence: Synthetic oligonucleotide
agugaagcagacacccucc

SEQ ID NO: 3086311 - RNA, 19 nt, Artificial Sequence
  Description of Artificial Sequence: Synthetic oligonucleotide
gaagcagacacccuccuaa

SEQ ID NO: 3086312 - RNA, 19 nt, Artificial Sequence
  Description of Artificial Sequence: Synthetic oligonucleotide
auucgacagagacaucaag

SEQ ID NO: 3086313 - RNA, 19 nt, Artificial Sequence
  Description of Artificial Sequence: Synthetic oligonucleotide
gagacaucaagauccugga

SEQ ID NO: 3086314 - RNA, 19 nt, Artificial Sequence
  Description of Artificial Sequence: Synthetic oligonucleotide
cagcccauucgacagagac

SEQ ID NO: 3086315 - RNA, 19 nt, Artificial Sequence
  Description of Artificial Sequence: Synthetic oligonucleotide
agacaucaagauccuggag

SEQ ID NO: 3086316 - RNA, 19 nt, Artificial Sequence
  Description of Artificial Sequence: Synthetic oligonucleotide
cagugaagcagacacccuc

SEQ ID NO: 3086317 - RNA, 19 nt, Artificial Sequence
  Description of Artificial Sequence: Synthetic oligonucleotide
acccuccuaacacaaggca

SEQ ID NO: 3086318 - RNA, 19 nt, Artificial Sequence
  Description of Artificial Sequence: Synthetic oligonucleotide
cacccuccuaacacaaggc

SEQ ID NO: 3086319 - RNA, 19 nt, Artificial Sequence
  Description of Artificial Sequence: Synthetic oligonucleotide
agcagacacccuccuaaca

SEQ ID NO: 3086320 - RNA, 19 nt, Artificial Sequence
  Description of Artificial Sequence: Synthetic oligonucleotide
ugaagcagacacccuccua

SEQ ID NO: 3086321 - RNA, 19 nt, Artificial Sequence
  Description of Artificial Sequence: Synthetic oligonucleotide
agccccagcccauucgaca

SEQ ID NO: 3086322 - RNA, 19 nt, Artificial Sequence
  Description of Artificial Sequence: Synthetic oligonucleotide
acagagacaucaagauccu

SEQ ID NO: 3086323 - RNA, 19 nt, Artificial Sequence
  Description of Artificial Sequence: Synthetic oligonucleotide
ccauucgacagagacauca

SEQ ID NO: 3086324 - RNA, 19 nt, Artificial Sequence
  Description of Artificial Sequence: Synthetic oligonucleotide
cauucgacagagacaucaa

SEQ ID NO: 3086325 - RNA, 19 nt, Artificial Sequence
  Description of Artificial Sequence: Synthetic oligonucleotide
gccccagcccauucgacag

SEQ ID NO: 3086326 - RNA, 19 nt, Artificial Sequence
  Description of Artificial Sequence: Synthetic oligonucleotide
agcccauucgacagagaca

SEQ ID NO: 3086327 - RNA, 19 nt, Artificial Sequence
  Description of Artificial Sequence: Synthetic oligonucleotide
agacacccuccuaacacaa

SEQ ID NO: 3086328 - RNA, 19 nt, Artificial Sequence
  Description of Artificial Sequence: Synthetic oligonucleotide
gcccauucgacagagacau

SEQ ID NO: 3086329 - RNA, 19 nt, Artificial Sequence
  Description of Artificial Sequence: Synthetic oligonucleotide
cgacagagacaucaagauc

SEQ ID NO: 3086330 - RNA, 19 nt, Artificial Sequence
  Description of Artificial Sequence: Synthetic oligonucleotide
cagccccagcccauucgac

SEQ ID NO: 3086331 - RNA, 19 nt, Artificial Sequence
  Description of Artificial Sequence: Synthetic oligonucleotide
cagcagccccagcccauuc

SEQ ID NO: 3086332 - RNA, 19 nt, Artificial Sequence
  Description of Artificial Sequence: Synthetic oligonucleotide
cccauucgacagagacauc

SEQ ID NO: 3086333 - RNA, 19 nt, Artificial Sequence
  Description of Artificial Sequence: Synthetic oligonucleotide
ccagcccauucgacagaga

SEQ ID NO: 3086334 - RNA, 19 nt, Artificial Sequence
  Description of Artificial Sequence: Synthetic oligonucleotide
ccccagcccauucgacaga

SEQ ID NO: 3086335 - RNA, 19 nt, Artificial Sequence
  Description of Artificial Sequence: Synthetic oligonucleotide
ccagcagccccagcccauu

SEQ ID NO: 3086336 - RNA, 19 nt, Artificial Sequence
  Description of Artificial Sequence: Synthetic oligonucleotide
uucauaaucucccagagac

SEQ ID NO: 3086337 - RNA, 19 nt, Artificial Sequence
  Description of Artificial Sequence: Synthetic oligonucleotide
caaacaaccucaaucaucg

SEQ ID NO: 3086338 - RNA, 19 nt, Artificial Sequence
  Description of Artificial Sequence: Synthetic oligonucleotide
cuauugguaauaaagcucc

SEQ ID NO: 3086339 - RNA, 19 nt, Artificial Sequence
  Description of Artificial Sequence: Synthetic oligonucleotide
uuaaggacgaucuuauucc

SEQ ID NO: 3086340 - RNA, 19 nt, Artificial Sequence
  Description of Artificial Sequence: Synthetic oligonucleotide
uuaucgacgacacaacucc

SEQ ID NO: 3086341 - RNA, 19 nt, Artificial Sequence
  Description of Artificial Sequence: Synthetic oligonucleotide
uugguaauaaagcuccagg

SEQ ID NO: 3086342 - RNA, 19 nt, Artificial Sequence
  Description of Artificial Sequence: Synthetic oligonucleotide
uaaagcuccagguucaucc

SEQ ID NO: 3086343 - RNA, 19 nt, Artificial Sequence
  Description of Artificial Sequence: Synthetic oligonucleotide
uuuaaggacgaucuuauuc

SEQ ID NO: 3086344 - RNA, 19 nt, Artificial Sequence
  Description of Artificial Sequence: Synthetic oligonucleotide
uucuucaaguccccgaugg

SEQ ID NO: 3086345 - RNA, 19 nt, Artificial Sequence
  Description of Artificial Sequence: Synthetic oligonucleotide
aaggauucccgucuauugg

SEQ ID NO: 3086346 - RNA, 19 nt, Artificial Sequence
  Description of Artificial Sequence: Synthetic oligonucleotide
acaacucccagcucgaacg

SEQ ID NO: 3086347 - RNA, 19 nt, Artificial Sequence
  Description of Artificial Sequence: Synthetic oligonucleotide
aacaaccucaaucaucgug

SEQ ID NO: 3086348 - RNA, 19 nt, Artificial Sequence
  Description of Artificial Sequence: Synthetic oligonucleotide
ucuauugguaauaaagcuc

SEQ ID NO: 3086349 - RNA, 19 nt, Artificial Sequence
  Description of Artificial Sequence: Synthetic oligonucleotide
auggauuucauaaucuccc

SEQ ID NO: 3086350 - RNA, 19 nt, Artificial Sequence
  Description of Artificial Sequence: Synthetic oligonucleotide
aucaguuucuucaaguccc

SEQ ID NO: 3086351 - RNA, 19 nt, Artificial Sequence
  Description of Artificial Sequence: Synthetic oligonucleotide
uuucuuuccgagacggucg

SEQ ID NO: 3086352 - RNA, 19 nt, Artificial Sequence
  Description of Artificial Sequence: Synthetic oligonucleotide
uugcaaacaaccucaauca

SEQ ID NO: 3086353 - RNA, 19 nt, Artificial Sequence
  Description of Artificial Sequence: Synthetic oligonucleotide
guugcaaacaaccucaauc

SEQ ID NO: 3086354 - RNA, 19 nt, Artificial Sequence
  Description of Artificial Sequence: Synthetic oligonucleotide
ucaaucaucgugacugcgg

SEQ ID NO: 3086355 - RNA, 19 nt, Artificial Sequence
  Description of Artificial Sequence: Synthetic oligonucleotide
uaucaguuucuucaagucc

SEQ ID NO: 3086356 - RNA, 19 nt, Artificial Sequence
  Description of Artificial Sequence: Synthetic oligonucleotide
aggacgaucuuauuccagc

SEQ ID NO: 3086357 - RNA, 19 nt, Artificial Sequence
  Description of Artificial Sequence: Synthetic oligonucleotide
aaagcuccagguucauccc

SEQ ID NO: 3086358 - RNA, 19 nt, Artificial Sequence
  Description of Artificial Sequence: Synthetic oligonucleotide
auuccccucgaauuuaucg

SEQ ID NO: 3086359 - RNA, 19 nt, Artificial Sequence
  Description of Artificial Sequence: Synthetic oligonucleotide
guaauaaagcuccagguuc

SEQ ID NO: 3086360 - RNA, 19 nt, Artificial Sequence
  Description of Artificial Sequence: Synthetic oligonucleotide
cauggauuucauaaucucc

SEQ ID NO: 3086361 - RNA, 19 nt, Artificial Sequence
  Description of Artificial Sequence: Synthetic oligonucleotide
aauuuaucgacgacacaac

SEQ ID NO: 3086362 - RNA, 19 nt, Artificial Sequence
  Description of Artificial Sequence: Synthetic oligonucleotide
acgaucuuauuccagcggg

SEQ ID NO: 3086363 - RNA, 19 nt, Artificial Sequence
  Description of Artificial Sequence: Synthetic oligonucleotide
gaauuuaucgacgacacaa

SEQ ID NO: 3086364 - RNA, 19 nt, Artificial Sequence
  Description of Artificial Sequence: Synthetic oligonucleotide
uaauaaagcuccagguuca

SEQ ID NO: 3086365 - RNA, 19 nt, Artificial Sequence
  Description of Artificial Sequence: Synthetic oligonucleotide
accucaaucaucgugacug

SEQ ID NO: 3086366 - RNA, 19 nt, Artificial Sequence
  Description of Artificial Sequence: Synthetic oligonucleotide
ucgaauuuaucgacgacac

SEQ ID NO: 3086367 - RNA, 19 nt, Artificial Sequence
  Description of Artificial Sequence: Synthetic oligonucleotide
aacgaccgagcccuggccc

SEQ ID NO: 3086368 - RNA, 19 nt, Artificial Sequence
  Description of Artificial Sequence: Synthetic oligonucleotide
gauuucauaaucucccaga

SEQ ID NO: 3086369 - RNA, 19 nt, Artificial Sequence
  Description of Artificial Sequence: Synthetic oligonucleotide
uuuaucgacgacacaacuc

SEQ ID NO: 3086370 - RNA, 19 nt, Artificial Sequence
  Description of Artificial Sequence: Synthetic oligonucleotide
ucgguguugcacuugacgc

SEQ ID NO: 3086371 - RNA, 19 nt, Artificial Sequence
  Description of Artificial Sequence: Synthetic oligonucleotide
ugguaauaaagcuccaggu

SEQ ID NO: 3086372 - RNA, 19 nt, Artificial Sequence
  Description of Artificial Sequence: Synthetic oligonucleotide
aucuuauuccagcgggugc

SEQ ID NO: 3086373 - RNA, 19 nt, Artificial Sequence
  Description of Artificial Sequence: Synthetic oligonucleotide
gaaggauucccgucuauug

SEQ ID NO: 3086374 - RNA, 19 nt, Artificial Sequence
  Description of Artificial Sequence: Synthetic oligonucleotide
aucgguguugcacuugacg

SEQ ID NO: 3086375 - RNA, 19 nt, Artificial Sequence
  Description of Artificial Sequence: Synthetic oligonucleotide
gacuuucuuuccgagacgg

SEQ ID NO: 3086376 - RNA, 19 nt, Artificial Sequence
  Description of Artificial Sequence: Synthetic oligonucleotide
cauaaucucccagagacac

SEQ ID NO: 3086377 - RNA, 19 nt, Artificial Sequence
  Description of Artificial Sequence: Synthetic oligonucleotide
ucuaauuccccucgaauuu

SEQ ID NO: 3086378 - RNA, 19 nt, Artificial Sequence
  Description of Artificial Sequence: Synthetic oligonucleotide
acggucguugcaaacaacc

SEQ ID NO: 3086379 - RNA, 19 nt, Artificial Sequence
  Description of Artificial Sequence: Synthetic oligonucleotide
uucaaguccccgauggugu

SEQ ID NO: 3086380 - RNA, 19 nt, Artificial Sequence
  Description of Artificial Sequence: Synthetic oligonucleotide
gacgaucuuauuccagcgg

SEQ ID NO: 3086381 - RNA, 19 nt, Artificial Sequence
  Description of Artificial Sequence: Synthetic oligonucleotide
ucuuauuccagcgggugcc

SEQ ID NO: 3086382 - RNA, 19 nt, Artificial Sequence
  Description of Artificial Sequence: Synthetic oligonucleotide
uuucauaaucucccagaga

SEQ ID NO: 3086383 - RNA, 19 nt, Artificial Sequence
  Description of Artificial Sequence: Synthetic oligonucleotide
auuuaucgacgacacaacu

SEQ ID NO: 3086384 - RNA, 19 nt, Artificial Sequence
  Description of Artificial Sequence: Synthetic oligonucleotide
gcugcuaucaguuucuuca

SEQ ID NO: 3086385 - RNA, 19 nt, Artificial Sequence
  Description of Artificial Sequence: Synthetic oligonucleotide
ucauggauuucauaaucuc

SEQ ID NO: 3086386 - RNA, 19 nt, Artificial Sequence
  Description of Artificial Sequence: Synthetic oligonucleotide
aucucccagagacacgugg

SEQ ID NO: 3086387 - RNA, 19 nt, Artificial Sequence
  Description of Artificial Sequence: Synthetic oligonucleotide
cuaucaguuucuucaaguc

SEQ ID NO: 3086388 - RNA, 19 nt, Artificial Sequence
  Description of Artificial Sequence: Synthetic oligonucleotide
uaaucucccagagacacgu

SEQ ID NO: 3086389 - RNA, 19 nt, Artificial Sequence
  Description of Artificial Sequence: Synthetic oligonucleotide
gugacugcggcucuaauuc

SEQ ID NO: 3086390 - RNA, 19 nt, Artificial Sequence
  Description of Artificial Sequence: Synthetic oligonucleotide
caucauggauuucauaauc

SEQ ID NO: 3086391 - RNA, 19 nt, Artificial Sequence
  Description of Artificial Sequence: Synthetic oligonucleotide
ccgucuauugguaauaaag

SEQ ID NO: 3086392 - RNA, 19 nt, Artificial Sequence
  Description of Artificial Sequence: Synthetic oligonucleotide
agcucgaacgaccgagccc

SEQ ID NO: 3086393 - RNA, 19 nt, Artificial Sequence
  Description of Artificial Sequence: Synthetic oligonucleotide
aucaucgugacugcggcuc

SEQ ID NO: 3086394 - RNA, 19 nt, Artificial Sequence
  Description of Artificial Sequence: Synthetic oligonucleotide
caaucaucgugacugcggc

SEQ ID NO: 3086395 - RNA, 19 nt, Artificial Sequence
  Description of Artificial Sequence: Synthetic oligonucleotide
auugguaauaaagcuccag

SEQ ID NO: 3086396 - RNA, 19 nt, Artificial Sequence
  Description of Artificial Sequence: Synthetic oligonucleotide
gauggugucaucgguguug

SEQ ID NO: 3086397 - RNA, 19 nt, Artificial Sequence
  Description of Artificial Sequence: Synthetic oligonucleotide
acaaccucaaucaucguga

SEQ ID NO: 3086398 - RNA, 19 nt, Artificial Sequence
  Description of Artificial Sequence: Synthetic oligonucleotide
ucgacgacacaacucccag

SEQ ID NO: 3086399 - RNA, 19 nt, Artificial Sequence
  Description of Artificial Sequence: Synthetic oligonucleotide
aggagaaggauucccgucu

SEQ ID NO: 3086400 - RNA, 19 nt, Artificial Sequence
  Description of Artificial Sequence: Synthetic oligonucleotide
cagguucaucccaucaugg

SEQ ID NO: 3086401 - RNA, 19 nt, Artificial Sequence
  Description of Artificial Sequence: Synthetic oligonucleotide
uuccccucgaauuuaucga

SEQ ID NO: 3086402 - RNA, 19 nt, Artificial Sequence
  Description of Artificial Sequence: Synthetic oligonucleotide
ucauaaucucccagagaca

SEQ ID NO: 3086403 - RNA, 19 nt, Artificial Sequence
  Description of Artificial Sequence: Synthetic oligonucleotide
ugcuaucaguuucuucaag

SEQ ID NO: 3086404 - RNA, 19 nt, Artificial Sequence
  Description of Artificial Sequence: Synthetic oligonucleotide
aguuucuucaaguccccga

SEQ ID NO: 3086405 - RNA, 19 nt, Artificial Sequence
  Description of Artificial Sequence: Synthetic oligonucleotide
ucaguuucuucaagucccc

SEQ ID NO: 3086406 - RNA, 19 nt, Artificial Sequence
  Description of Artificial Sequence: Synthetic oligonucleotide
agacacgugguccuuaaaa

SEQ ID NO: 3086407 - RNA, 19 nt, Artificial Sequence
  Description of Artificial Sequence: Synthetic oligonucleotide
gacgcggacuuucuuuccg

SEQ ID NO: 3086408 - RNA, 19 nt, Artificial Sequence
  Description of Artificial Sequence: Synthetic oligonucleotide
uaaggacgaucuuauucca

SEQ ID NO: 3086409 - RNA, 19 nt, Artificial Sequence
  Description of Artificial Sequence: Synthetic oligonucleotide
gaucuuauuccagcgggug

SEQ ID NO: 3086410 - RNA, 19 nt, Artificial Sequence
  Description of Artificial Sequence: Synthetic oligonucleotide
uugggcugcuaucaguuuc

SEQ ID NO: 3086411 - RNA, 19 nt, Artificial Sequence
  Description of Artificial Sequence: Synthetic oligonucleotide
uauugguaauaaagcucca

SEQ ID NO: 3086412 - RNA, 19 nt, Artificial Sequence
  Description of Artificial Sequence: Synthetic oligonucleotide
uuucuucaaguccccgaug

SEQ ID NO: 3086413 - RNA, 19 nt, Artificial Sequence
  Description of Artificial Sequence: Synthetic oligonucleotide
aggauucccgucuauuggu

SEQ ID NO: 3086414 - RNA, 19 nt, Artificial Sequence
  Description of Artificial Sequence: Synthetic oligonucleotide
auggugucaucgguguugc

SEQ ID NO: 3086415 - RNA, 19 nt, Artificial Sequence
  Description of Artificial Sequence: Synthetic oligonucleotide
gucuauugguaauaaagcu

SEQ ID NO: 3086416 - RNA, 19 nt, Artificial Sequence
  Description of Artificial Sequence: Synthetic oligonucleotide
gacgacacaacucccagcu

SEQ ID NO: 3086417 - RNA, 19 nt, Artificial Sequence
  Description of Artificial Sequence: Synthetic oligonucleotide
cuuucuuuccgagacgguc

SEQ ID NO: 3086418 - RNA, 19 nt, Artificial Sequence
  Description of Artificial Sequence: Synthetic oligonucleotide
uccagcgggugccaguuug

SEQ ID NO: 3086419 - RNA, 19 nt, Artificial Sequence
  Description of Artificial Sequence: Synthetic oligonucleotide
gucguugcaaacaaccuca

SEQ ID NO: 3086420 - RNA, 19 nt, Artificial Sequence
  Description of Artificial Sequence: Synthetic oligonucleotide
aucauggauuucauaaucu

SEQ ID NO: 3086421 - RNA, 19 nt, Artificial Sequence
  Description of Artificial Sequence: Synthetic oligonucleotide
ucucccagagacacguggu

SEQ ID NO: 3086422 - RNA, 19 nt, Artificial Sequence
  Description of Artificial Sequence: Synthetic oligonucleotide
cucgaauuuaucgacgaca

SEQ ID NO: 3086423 - RNA, 19 nt, Artificial Sequence
  Description of Artificial Sequence: Synthetic oligonucleotide
acucccagcucgaacgacc

SEQ ID NO: 3086424 - RNA, 19 nt, Artificial Sequence
  Description of Artificial Sequence: Synthetic oligonucleotide
ugcaaacaaccucaaucau

SEQ ID NO: 3086425 - RNA, 19 nt, Artificial Sequence
  Description of Artificial Sequence: Synthetic oligonucleotide
uugacgcggacuuucuuuc

SEQ ID NO: 3086426 - RNA, 19 nt, Artificial Sequence
  Description of Artificial Sequence: Synthetic oligonucleotide
cgucuauugguaauaaagc

SEQ ID NO: 3086427 - RNA, 19 nt, Artificial Sequence
  Description of Artificial Sequence: Synthetic oligonucleotide
uaucgacgacacaacuccc

SEQ ID NO: 3086428 - RNA, 19 nt, Artificial Sequence
  Description of Artificial Sequence: Synthetic oligonucleotide
aaucaucgugacugcggcu

SEQ ID NO: 3086429 - RNA, 19 nt, Artificial Sequence
  Description of Artificial Sequence: Synthetic oligonucleotide
ggauuucauaaucucccag

SEQ ID NO: 3086430 - RNA, 19 nt, Artificial Sequence
  Description of Artificial Sequence: Synthetic oligonucleotide
aguuugggcugcuaucagu

SEQ ID NO: 3086431 - RNA, 19 nt, Artificial Sequence
  Description of Artificial Sequence: Synthetic oligonucleotide
uccagguucaucccaucau

SEQ ID NO: 3086432 - RNA, 19 nt, Artificial Sequence
  Description of Artificial Sequence: Synthetic oligonucleotide
agcgggugccaguuugggc

SEQ ID NO: 3086433 - RNA, 19 nt, Artificial Sequence
  Description of Artificial Sequence: Synthetic oligonucleotide
cuucaaguccccgauggug

SEQ ID NO: 3086434 - RNA, 19 nt, Artificial Sequence
  Description of Artificial Sequence: Synthetic oligonucleotide
uugcacuugacgcggacuu

SEQ ID NO: 3086435 - RNA, 19 nt, Artificial Sequence
  Description of Artificial Sequence: Synthetic oligonucleotide
ugggcugcuaucaguuucu

SEQ ID NO: 3086436 - RNA, 19 nt, Artificial Sequence
  Description of Artificial Sequence: Synthetic oligonucleotide
uuuccgagacggucguugc

SEQ ID NO: 3086437 - RNA, 19 nt, Artificial Sequence
  Description of Artificial Sequence: Synthetic oligonucleotide
ggacgaucuuauuccagcg

SEQ ID NO: 3086438 - RNA, 19 nt, Artificial Sequence
  Description of Artificial Sequence: Synthetic oligonucleotide
uccccucgaauuuaucgac

SEQ ID NO: 3086439 - RNA, 19 nt, Artificial Sequence
  Description of Artificial Sequence: Synthetic oligonucleotide
aaggacgaucuuauuccag

SEQ ID NO: 3086440 - RNA, 19 nt, Artificial Sequence
  Description of Artificial Sequence: Synthetic oligonucleotide
cuuuccgagacggucguug

SEQ ID NO: 3086441 - RNA, 19 nt, Artificial Sequence
  Description of Artificial Sequence: Synthetic oligonucleotide
uccccgauggugucaucgg

SEQ ID NO: 3086442 - RNA, 19 nt, Artificial Sequence
  Description of Artificial Sequence: Synthetic oligonucleotide
aaccucaaucaucgugacu

SEQ ID NO: 3086443 - RNA, 19 nt, Artificial Sequence
  Description of Artificial Sequence: Synthetic oligonucleotide
ucuucaaguccccgauggu

SEQ ID NO: 3086444 - RNA, 19 nt, Artificial Sequence
  Description of Artificial Sequence: Synthetic oligonucleotide
uucuuuccgagacggucgu

SEQ ID NO: 3086445 - RNA, 19 nt, Artificial Sequence
  Description of Artificial Sequence: Synthetic oligonucleotide
aagcuccagguucauccca

SEQ ID NO: 3086446 - RNA, 19 nt, Artificial Sequence
  Description of Artificial Sequence: Synthetic oligonucleotide
aacucccagcucgaacgac

SEQ ID NO: 3086447 - RNA, 19 nt, Artificial Sequence
  Description of Artificial Sequence: Synthetic oligonucleotide
uaauuccccucgaauuuau

SEQ ID NO: 3086448 - RNA, 19 nt, Artificial Sequence
  Description of Artificial Sequence: Synthetic oligonucleotide
aauuccccucgaauuuauc

SEQ ID NO: 3086449 - RNA, 19 nt, Artificial Sequence
  Description of Artificial Sequence: Synthetic oligonucleotide
cucccagcucgaacgaccg

SEQ ID NO: 3086450 - RNA, 19 nt, Artificial Sequence
  Description of Artificial Sequence: Synthetic oligonucleotide
ucccagagacacguggucc

SEQ ID NO: 3086451 - RNA, 19 nt, Artificial Sequence
  Description of Artificial Sequence: Synthetic oligonucleotide
gguguugcacuugacgcgg

SEQ ID NO: 3086452 - RNA, 19 nt, Artificial Sequence
  Description of Artificial Sequence: Synthetic oligonucleotide
cucaaucaucgugacugcg

SEQ ID NO: 3086453 - RNA, 19 nt, Artificial Sequence
  Description of Artificial Sequence: Synthetic oligonucleotide
agguucaucccaucaugga

SEQ ID NO: 3086454 - RNA, 19 nt, Artificial Sequence
  Description of Artificial Sequence: Synthetic oligonucleotide
ugacugcggcucuaauucc

SEQ ID NO: 3086455 - RNA, 19 nt, Artificial Sequence
  Description of Artificial Sequence: Synthetic oligonucleotide
acugcggcucuaauucccc

SEQ ID NO: 3086456 - RNA, 19 nt, Artificial Sequence
  Description of Artificial Sequence: Synthetic oligonucleotide
auaaagcuccagguucauc

SEQ ID NO: 3086457 - RNA, 19 nt, Artificial Sequence
  Description of Artificial Sequence: Synthetic oligonucleotide
aaacaaccucaaucaucgu

SEQ ID NO: 3086458 - RNA, 19 nt, Artificial Sequence
  Description of Artificial Sequence: Synthetic oligonucleotide
uucaucccaucauggauuu

SEQ ID NO: 3086459 - RNA, 19 nt, Artificial Sequence
  Description of Artificial Sequence: Synthetic oligonucleotide
gagacggucguugcaaaca

SEQ ID NO: 3086460 - RNA, 19 nt, Artificial Sequence
  Description of Artificial Sequence: Synthetic oligonucleotide
auaaucucccagagacacg

SEQ ID NO: 3086461 - RNA, 19 nt, Artificial Sequence
  Description of Artificial Sequence: Synthetic oligonucleotide
acgaccgagcccuggcccg

SEQ ID NO: 3086462 - RNA, 19 nt, Artificial Sequence
  Description of Artificial Sequence: Synthetic oligonucleotide
guccccgauggugucaucg

SEQ ID NO: 3086463 - RNA, 19 nt, Artificial Sequence
  Description of Artificial Sequence: Synthetic oligonucleotide
uguugcacuugacgcggac

SEQ ID NO: 3086464 - RNA, 19 nt, Artificial Sequence
  Description of Artificial Sequence: Synthetic oligonucleotide
aauaaagcuccagguucau

SEQ ID NO: 3086465 - RNA, 19 nt, Artificial Sequence
  Description of Artificial Sequence: Synthetic oligonucleotide
auucccgucuauugguaau

SEQ ID NO: 3086466 - RNA, 19 nt, Artificial Sequence
  Description of Artificial Sequence: Synthetic oligonucleotide
gaacgaccgagcccuggcc

SEQ ID NO: 3086467 - RNA, 19 nt, Artificial Sequence
  Description of Artificial Sequence: Synthetic oligonucleotide
gacugcggcucuaauuccc

SEQ ID NO: 3086468 - RNA, 19 nt, Artificial Sequence
  Description of Artificial Sequence: Synthetic oligonucleotide
uauuccagcgggugccagu

SEQ ID NO: 3086469 - RNA, 19 nt, Artificial Sequence
  Description of Artificial Sequence: Synthetic oligonucleotide
ugccaguuugggcugcuau

SEQ ID NO: 3086470 - RNA, 19 nt, Artificial Sequence
  Description of Artificial Sequence: Synthetic oligonucleotide
cacaacucccagcucgaac

SEQ ID NO: 3086471 - RNA, 19 nt, Artificial Sequence
  Description of Artificial Sequence: Synthetic oligonucleotide
agacggucguugcaaacaa

SEQ ID NO: 3086472 - RNA, 19 nt, Artificial Sequence
  Description of Artificial Sequence: Synthetic oligonucleotide
cgacacaacucccagcucg

SEQ ID NO: 3086473 - RNA, 19 nt, Artificial Sequence
  Description of Artificial Sequence: Synthetic oligonucleotide
ggucguugcaaacaaccuc

SEQ ID NO: 3086474 - RNA, 19 nt, Artificial Sequence
  Description of Artificial Sequence: Synthetic oligonucleotide
gauucccgucuauugguaa

SEQ ID NO: 3086475 - RNA, 19 nt, Artificial Sequence
  Description of Artificial Sequence: Synthetic oligonucleotide
ggugucaucgguguugcac

SEQ ID NO: 3086476 - RNA, 19 nt, Artificial Sequence
  Description of Artificial Sequence: Synthetic oligonucleotide
caaccucaaucaucgugac

SEQ ID NO: 3086477 - RNA, 19 nt, Artificial Sequence
  Description of Artificial Sequence: Synthetic oligonucleotide
ugacgcggacuuucuuucc

SEQ ID NO: 3086478 - RNA, 19 nt, Artificial Sequence
  Description of Artificial Sequence: Synthetic oligonucleotide
ucaucgugacugcggcucu

SEQ ID NO: 3086479 - RNA, 19 nt, Artificial Sequence
  Description of Artificial Sequence: Synthetic oligonucleotide
uccgagacggucguugcaa

SEQ ID NO: 3086480 - RNA, 19 nt, Artificial Sequence
  Description of Artificial Sequence: Synthetic oligonucleotide
agagacacgugguccuuaa

SEQ ID NO: 3086481 - RNA, 19 nt, Artificial Sequence
  Description of Artificial Sequence: Synthetic oligonucleotide
ggacuuucuuuccgagacg

SEQ ID NO: 3086482 - RNA, 19 nt, Artificial Sequence
  Description of Artificial Sequence: Synthetic oligonucleotide
uuccgagacggucguugca

SEQ ID NO: 3086483 - RNA, 19 nt, Artificial Sequence
  Description of Artificial Sequence: Synthetic oligonucleotide
acgacacaacucccagcuc

SEQ ID NO: 3086484 - RNA, 19 nt, Artificial Sequence
  Description of Artificial Sequence: Synthetic oligonucleotide
gcaaacaaccucaaucauc

SEQ ID NO: 3086485 - RNA, 19 nt, Artificial Sequence
  Description of Artificial Sequence: Synthetic oligonucleotide
uuauuccagcgggugccag

SEQ ID NO: 3086486 - RNA, 19 nt, Artificial Sequence
  Description of Artificial Sequence: Synthetic oligonucleotide
ugcggcucuaauuccccuc

SEQ ID NO: 3086487 - RNA, 19 nt, Artificial Sequence
  Description of Artificial Sequence: Synthetic oligonucleotide
ucaaguccccgaugguguc

SEQ ID NO: 3086488 - RNA, 19 nt, Artificial Sequence
  Description of Artificial Sequence: Synthetic oligonucleotide
ucgaacgaccgagcccugg

SEQ ID NO: 3086489 - RNA, 19 nt, Artificial Sequence
  Description of Artificial Sequence: Synthetic oligonucleotide
cagcucgaacgaccgagcc

SEQ ID NO: 3086490 - RNA, 19 nt, Artificial Sequence
  Description of Artificial Sequence: Synthetic oligonucleotide
gcggcucuaauuccccucg

SEQ ID NO: 3086491 - RNA, 19 nt, Artificial Sequence
  Description of Artificial Sequence: Synthetic oligonucleotide
ucguugcaaacaaccucaa

SEQ ID NO: 3086492 - RNA, 19 nt, Artificial Sequence
  Description of Artificial Sequence: Synthetic oligonucleotide
cucuaauuccccucgaauu

SEQ ID NO: 3086493 - RNA, 19 nt, Artificial Sequence
  Description of Artificial Sequence: Synthetic oligonucleotide
guuucuucaaguccccgau

SEQ ID NO: 3086494 - RNA, 19 nt, Artificial Sequence
  Description of Artificial Sequence: Synthetic oligonucleotide
agaaggauucccgucuauu

SEQ ID NO: 3086495 - RNA, 19 nt, Artificial Sequence
  Description of Artificial Sequence: Synthetic oligonucleotide
gcuaucaguuucuucaagu

SEQ ID NO: 3086496 - RNA, 19 nt, Artificial Sequence
  Description of Artificial Sequence: Synthetic oligonucleotide
gguaauaaagcuccagguu

SEQ ID NO: 3086497 - RNA, 19 nt, Artificial Sequence
  Description of Artificial Sequence: Synthetic oligonucleotide
caguuugggcugcuaucag

SEQ ID NO: 3086498 - RNA, 19 nt, Artificial Sequence
  Description of Artificial Sequence: Synthetic oligonucleotide
aucgacgacacaacuccca

SEQ ID NO: 3086499 - RNA, 19 nt, Artificial Sequence
  Description of Artificial Sequence: Synthetic oligonucleotide
caguuucuucaaguccccg

SEQ ID NO: 3086500 - RNA, 19 nt, Artificial Sequence
  Description of Artificial Sequence: Synthetic oligonucleotide
uuugggcugcuaucaguuu

SEQ ID NO: 3086501 - RNA, 19 nt, Artificial Sequence
  Description of Artificial Sequence: Synthetic oligonucleotide
gugucaucgguguugcacu

SEQ ID NO: 3086502 - RNA, 19 nt, Artificial Sequence
  Description of Artificial Sequence: Synthetic oligonucleotide
ccagguucaucccaucaug

SEQ ID NO: 3086503 - RNA, 19 nt, Artificial Sequence
  Description of Artificial Sequence: Synthetic oligonucleotide
cucccagagacacgugguc

SEQ ID NO: 3086504 - RNA, 19 nt, Artificial Sequence
  Description of Artificial Sequence: Synthetic oligonucleotide
gacacaacucccagcucga

SEQ ID NO: 3086505 - RNA, 19 nt, Artificial Sequence
  Description of Artificial Sequence: Synthetic oligonucleotide
uucccgucuauugguaaua

SEQ ID NO: 3086506 - RNA, 19 nt, Artificial Sequence
  Description of Artificial Sequence: Synthetic oligonucleotide
aaguccccgauggugucau

SEQ ID NO: 3086507 - RNA, 19 nt, Artificial Sequence
  Description of Artificial Sequence: Synthetic oligonucleotide
acgcggacuuucuuuccga

SEQ ID NO: 3086508 - RNA, 19 nt, Artificial Sequence
  Description of Artificial Sequence: Synthetic oligonucleotide
ugucaucgguguugcacuu

SEQ ID NO: 3086509 - RNA, 19 nt, Artificial Sequence
  Description of Artificial Sequence: Synthetic oligonucleotide
ucccgucuauugguaauaa

SEQ ID NO: 3086510 - RNA, 19 nt, Artificial Sequence
  Description of Artificial Sequence: Synthetic oligonucleotide
aaucucccagagacacgug

SEQ ID NO: 3086511 - RNA, 19 nt, Artificial Sequence
  Description of Artificial Sequence: Synthetic oligonucleotide
ccccucgaauuuaucgacg

SEQ ID NO: 3086512 - RNA, 19 nt, Artificial Sequence
  Description of Artificial Sequence: Synthetic oligonucleotide
gguucaucccaucauggau

SEQ ID NO: 3086513 - RNA, 19 nt, Artificial Sequence
  Description of Artificial Sequence: Synthetic oligonucleotide
cuugacgcggacuuucuuu

SEQ ID NO: 3086514 - RNA, 19 nt, Artificial Sequence
  Description of Artificial Sequence: Synthetic oligonucleotide
cuaauuccccucgaauuua

SEQ ID NO: 3086515 - RNA, 19 nt, Artificial Sequence
  Description of Artificial Sequence: Synthetic oligonucleotide
acuugacgcggacuuucuu

SEQ ID NO: 3086516 - RNA, 19 nt, Artificial Sequence
  Description of Artificial Sequence: Synthetic oligonucleotide
cugcuaucaguuucuucaa

SEQ ID NO: 3086517 - RNA, 19 nt, Artificial Sequence
  Description of Artificial Sequence: Synthetic oligonucleotide
auuccagcgggugccaguu

SEQ ID NO: 3086518 - RNA, 19 nt, Artificial Sequence
  Description of Artificial Sequence: Synthetic oligonucleotide
guucaucccaucauggauu

SEQ ID NO: 3086519 - RNA, 19 nt, Artificial Sequence
  Description of Artificial Sequence: Synthetic oligonucleotide
cgguguugcacuugacgcg

SEQ ID NO: 3086520 - RNA, 19 nt, Artificial Sequence
  Description of Artificial Sequence: Synthetic oligonucleotide
caucgguguugcacuugac

SEQ ID NO: 3086521 - RNA, 19 nt, Artificial Sequence
  Description of Artificial Sequence: Synthetic oligonucleotide
gacggucguugcaaacaac

SEQ ID NO: 3086522 - RNA, 19 nt, Artificial Sequence
  Description of Artificial Sequence: Synthetic oligonucleotide
ccucaaucaucgugacugc

SEQ ID NO: 3086523 - RNA, 19 nt, Artificial Sequence
  Description of Artificial Sequence: Synthetic oligonucleotide
cccgauggugucaucggug

SEQ ID NO: 3086524 - RNA, 19 nt, Artificial Sequence
  Description of Artificial Sequence: Synthetic oligonucleotide
ucccagcucgaacgaccga

SEQ ID NO: 3086525 - RNA, 19 nt, Artificial Sequence
  Description of Artificial Sequence: Synthetic oligonucleotide
gcgggugccaguuugggcu

SEQ ID NO: 3086526 - RNA, 19 nt, Artificial Sequence
  Description of Artificial Sequence: Synthetic oligonucleotide
gccaguuugggcugcuauc

SEQ ID NO: 3086527 - RNA, 19 nt, Artificial Sequence
  Description of Artificial Sequence: Synthetic oligonucleotide
cccagcucgaacgaccgag

SEQ ID NO: 3086528 - RNA, 19 nt, Artificial Sequence
  Description of Artificial Sequence: Synthetic oligonucleotide
cagcgggugccaguuuggg

SEQ ID NO: 3086529 - RNA, 19 nt, Artificial Sequence
  Description of Artificial Sequence: Synthetic oligonucleotide
guuugggcugcuaucaguu

SEQ ID NO: 3086530 - RNA, 19 nt, Artificial Sequence
  Description of Artificial Sequence: Synthetic oligonucleotide
ucgugacugcggcucuaau

SEQ ID NO: 3086531 - RNA, 19 nt, Artificial Sequence
  Description of Artificial Sequence: Synthetic oligonucleotide
acuuucuuuccgagacggu

SEQ ID NO: 3086532 - RNA, 19 nt, Artificial Sequence
  Description of Artificial Sequence: Synthetic oligonucleotide
ccagcucgaacgaccgagc

SEQ ID NO: 3086533 - RNA, 19 nt, Artificial Sequence
  Description of Artificial Sequence: Synthetic oligonucleotide
caacucccagcucgaacga

SEQ ID NO: 3086534 - RNA, 19 nt, Artificial Sequence
  Description of Artificial Sequence: Synthetic oligonucleotide
cuuauuccagcgggugcca

SEQ ID NO: 3086535 - RNA, 19 nt, Artificial Sequence
  Description of Artificial Sequence: Synthetic oligonucleotide
gcucgaacgaccgagcccu

SEQ ID NO: 3086536 - RNA, 19 nt, Artificial Sequence
  Description of Artificial Sequence: Synthetic oligonucleotide
ccaguuugggcugcuauca

SEQ ID NO: 3086537 - RNA, 19 nt, Artificial Sequence
  Description of Artificial Sequence: Synthetic oligonucleotide
gagacacgugguccuuaaa

SEQ ID NO: 3086538 - RNA, 19 nt, Artificial Sequence
  Description of Artificial Sequence: Synthetic oligonucleotide
cccucgaauuuaucgacga

SEQ ID NO: 3086539 - RNA, 19 nt, Artificial Sequence
  Description of Artificial Sequence: Synthetic oligonucleotide
ccucgaauuuaucgacgac

SEQ ID NO: 3086540 - RNA, 19 nt, Artificial Sequence
  Description of Artificial Sequence: Synthetic oligonucleotide
ccagcgggugccaguuugg

SEQ ID NO: 3086541 - RNA, 19 nt, Artificial Sequence
  Description of Artificial Sequence: Synthetic oligonucleotide
ugcacuugacgcggacuuu

SEQ ID NO: 3086542 - RNA, 19 nt, Artificial Sequence
  Description of Artificial Sequence: Synthetic oligonucleotide
aguccccgauggugucauc

SEQ ID NO: 3086543 - RNA, 19 nt, Artificial Sequence
  Description of Artificial Sequence: Synthetic oligonucleotide
ggcugcuaucaguuucuuc

SEQ ID NO: 3086544 - RNA, 19 nt, Artificial Sequence
  Description of Artificial Sequence: Synthetic oligonucleotide
uggugucaucgguguugca

SEQ ID NO: 3086545 - RNA, 19 nt, Artificial Sequence
  Description of Artificial Sequence: Synthetic oligonucleotide
aucgugacugcggcucuaa

SEQ ID NO: 3086546 - RNA, 19 nt, Artificial Sequence
  Description of Artificial Sequence: Synthetic oligonucleotide
gagaaggauucccgucuau

SEQ ID NO: 3086547 - RNA, 19 nt, Artificial Sequence
  Description of Artificial Sequence: Synthetic oligonucleotide
gcacuugacgcggacuuuc

SEQ ID NO: 3086548 - RNA, 19 nt, Artificial Sequence
  Description of Artificial Sequence: Synthetic oligonucleotide
ggcucuaauuccccucgaa

SEQ ID NO: 3086549 - RNA, 19 nt, Artificial Sequence
  Description of Artificial Sequence: Synthetic oligonucleotide
guugcacuugacgcggacu

SEQ ID NO: 3086550 - RNA, 19 nt, Artificial Sequence
  Description of Artificial Sequence: Synthetic oligonucleotide
gcucuaauuccccucgaau

SEQ ID NO: 3086551 - RNA, 19 nt, Artificial Sequence
  Description of Artificial Sequence: Synthetic oligonucleotide
ggagaaggauucccgucua

SEQ ID NO: 3086552 - RNA, 19 nt, Artificial Sequence
  Description of Artificial Sequence: Synthetic oligonucleotide
gcggacuuucuuuccgaga

SEQ ID NO: 3086553 - RNA, 19 nt, Artificial Sequence
  Description of Artificial Sequence: Synthetic oligonucleotide
cgaacgaccgagcccuggc

SEQ ID NO: 3086554 - RNA, 19 nt, Artificial Sequence
  Description of Artificial Sequence: Synthetic oligonucleotide
ucaucccaucauggauuuc

SEQ ID NO: 3086555 - RNA, 19 nt, Artificial Sequence
  Description of Artificial Sequence: Synthetic oligonucleotide
cucgaacgaccgagcccug

SEQ ID NO: 3086556 - RNA, 19 nt, Artificial Sequence
  Description of Artificial Sequence: Synthetic oligonucleotide
caaguccccgaugguguca

SEQ ID NO: 3086557 - RNA, 19 nt, Artificial Sequence
  Description of Artificial Sequence: Synthetic oligonucleotide
cgacgacacaacucccagc

SEQ ID NO: 3086558 - RNA, 19 nt, Artificial Sequence
  Description of Artificial Sequence: Synthetic oligonucleotide
acacaacucccagcucgaa

SEQ ID NO: 3086559 - RNA, 19 nt, Artificial Sequence
  Description of Artificial Sequence: Synthetic oligonucleotide
uuccagcgggugccaguuu

SEQ ID NO: 3086560 - RNA, 19 nt, Artificial Sequence
  Description of Artificial Sequence: Synthetic oligonucleotide
cacuugacgcggacuuucu

SEQ ID NO: 3086561 - RNA, 19 nt, Artificial Sequence
  Description of Artificial Sequence: Synthetic oligonucleotide
ucuuuccgagacggucguu

SEQ ID NO: 3086562 - RNA, 19 nt, Artificial Sequence
  Description of Artificial Sequence: Synthetic oligonucleotide
cgcggacuuucuuuccgag

SEQ ID NO: 3086563 - RNA, 19 nt, Artificial Sequence
  Description of Artificial Sequence: Synthetic oligonucleotide
cgagacggucguugcaaac

SEQ ID NO: 3086564 - RNA, 19 nt, Artificial Sequence
  Description of Artificial Sequence: Synthetic oligonucleotide
ccaucauggauuucauaau

SEQ ID NO: 3086565 - RNA, 19 nt, Artificial Sequence
  Description of Artificial Sequence: Synthetic oligonucleotide
ggauucccgucuauuggua

SEQ ID NO: 3086566 - RNA, 19 nt, Artificial Sequence
  Description of Artificial Sequence: Synthetic oligonucleotide
cgaauuuaucgacgacaca

SEQ ID NO: 3086567 - RNA, 19 nt, Artificial Sequence
  Description of Artificial Sequence: Synthetic oligonucleotide
guguugcacuugacgcgga

SEQ ID NO: 3086568 - RNA, 19 nt, Artificial Sequence
  Description of Artificial Sequence: Synthetic oligonucleotide
cagagacacgugguccuua

SEQ ID NO: 3086569 - RNA, 19 nt, Artificial Sequence
  Description of Artificial Sequence: Synthetic oligonucleotide
cccagagacacgugguccu

SEQ ID NO: 3086570 - RNA, 19 nt, Artificial Sequence
  Description of Artificial Sequence: Synthetic oligonucleotide
cugcggcucuaauuccccu

SEQ ID NO: 3086571 - RNA, 19 nt, Artificial Sequence
  Description of Artificial Sequence: Synthetic oligonucleotide
cccgucuauugguaauaaa

SEQ ID NO: 3086572 - RNA, 19 nt, Artificial Sequence
  Description of Artificial Sequence: Synthetic oligonucleotide
gggugccaguuugggcugc

SEQ ID NO: 3086573 - RNA, 19 nt, Artificial Sequence
  Description of Artificial Sequence: Synthetic oligonucleotide
accgagcccuggcccgauu

SEQ ID NO: 3086574 - RNA, 19 nt, Artificial Sequence
  Description of Artificial Sequence: Synthetic oligonucleotide
caucgugacugcggcucua

SEQ ID NO: 3086575 - RNA, 19 nt, Artificial Sequence
  Description of Artificial Sequence: Synthetic oligonucleotide
cgaucuuauuccagcgggu

SEQ ID NO: 3086576 - RNA, 19 nt, Artificial Sequence
  Description of Artificial Sequence: Synthetic oligonucleotide
ccgagacggucguugcaaa

SEQ ID NO: 3086577 - RNA, 19 nt, Artificial Sequence
  Description of Artificial Sequence: Synthetic oligonucleotide
cggucguugcaaacaaccu

SEQ ID NO: 3086578 - RNA, 19 nt, Artificial Sequence
  Description of Artificial Sequence: Synthetic oligonucleotide
cgugacugcggcucuaauu

SEQ ID NO: 3086579 - RNA, 19 nt, Artificial Sequence
  Description of Artificial Sequence: Synthetic oligonucleotide
gugccaguuugggcugcua

SEQ ID NO: 3086580 - RNA, 19 nt, Artificial Sequence
  Description of Artificial Sequence: Synthetic oligonucleotide
ggugccaguuugggcugcu

SEQ ID NO: 3086581 - RNA, 19 nt, Artificial Sequence
  Description of Artificial Sequence: Synthetic oligonucleotide
ccccgauggugucaucggu

SEQ ID NO: 3086582 - RNA, 19 nt, Artificial Sequence
  Description of Artificial Sequence: Synthetic oligonucleotide
cguugcaaacaaccucaau

SEQ ID NO: 3086583 - RNA, 19 nt, Artificial Sequence
  Description of Artificial Sequence: Synthetic oligonucleotide
gaccgagcccuggcccgau

SEQ ID NO: 3086584 - RNA, 19 nt, Artificial Sequence
  Description of Artificial Sequence: Synthetic oligonucleotide
cggcucuaauuccccucga

SEQ ID NO: 3086585 - RNA, 19 nt, Artificial Sequence
  Description of Artificial Sequence: Synthetic oligonucleotide
cgagcccuggcccgauuua

SEQ ID NO: 3086586 - RNA, 19 nt, Artificial Sequence
  Description of Artificial Sequence: Synthetic oligonucleotide
ccgagcccuggcccgauuu

SEQ ID NO: 3086587 - RNA, 19 nt, Artificial Sequence
  Description of Artificial Sequence: Synthetic oligonucleotide
gggcugcuaucaguuucuu

SEQ ID NO: 3086588 - RNA, 19 nt, Artificial Sequence
  Description of Artificial Sequence: Synthetic oligonucleotide
ccagagacacgugguccuu

SEQ ID NO: 3086589 - RNA, 19 nt, Artificial Sequence
  Description of Artificial Sequence: Synthetic oligonucleotide
cgaccgagcccuggcccga

SEQ ID NO: 3086590 - RNA, 19 nt, Artificial Sequence
  Description of Artificial Sequence: Synthetic oligonucleotide
cgauggugucaucgguguu

SEQ ID NO: 3086591 - RNA, 19 nt, Artificial Sequence
  Description of Artificial Sequence: Synthetic oligonucleotide
acugauuaaacuuagaaag

SEQ ID NO: 3086592 - RNA, 19 nt, Artificial Sequence
  Description of Artificial Sequence: Synthetic oligonucleotide
aaauaaaacaccccgagca

SEQ ID NO: 3086593 - RNA, 19 nt, Artificial Sequence
  Description of Artificial Sequence: Synthetic oligonucleotide
uaguaaauaaaacaccccg

SEQ ID NO: 3086594 - RNA, 19 nt, Artificial Sequence
  Description of Artificial Sequence: Synthetic oligonucleotide
auuaguaaauaaaacaccc

SEQ ID NO: 3086595 - RNA, 19 nt, Artificial Sequence
  Description of Artificial Sequence: Synthetic oligonucleotide
aacuuagaaagcuaaguuc

SEQ ID NO: 3086596 - RNA, 19 nt, Artificial Sequence
  Description of Artificial Sequence: Synthetic oligonucleotide
aaguguuaugauuuuauuc

SEQ ID NO: 3086597 - RNA, 19 nt, Artificial Sequence
  Description of Artificial Sequence: Synthetic oligonucleotide
augauuuuauucuuuagac

SEQ ID NO: 3086598 - RNA, 19 nt, Artificial Sequence
  Description of Artificial Sequence: Synthetic oligonucleotide
guaaaugaguauuugaugc

SEQ ID NO: 3086599 - RNA, 19 nt, Artificial Sequence
  Description of Artificial Sequence: Synthetic oligonucleotide
agauuaguaaauaaaacac

SEQ ID NO: 3086600 - RNA, 19 nt, Artificial Sequence
  Description of Artificial Sequence: Synthetic oligonucleotide
uuauucuuuagacaaacca

SEQ ID NO: 3086601 - RNA, 19 nt, Artificial Sequence
  Description of Artificial Sequence: Synthetic oligonucleotide
augcccaaaucauagaucc

SEQ ID NO: 3086602 - RNA, 19 nt, Artificial Sequence
  Description of Artificial Sequence: Synthetic oligonucleotide
aguguuaugauuuuauucu

SEQ ID NO: 3086603 - RNA, 19 nt, Artificial Sequence
  Description of Artificial Sequence: Synthetic oligonucleotide
uuugaugcccaaaucauag

SEQ ID NO: 3086604 - RNA, 19 nt, Artificial Sequence
  Description of Artificial Sequence: Synthetic oligonucleotide
uaugauuuuauucuuuaga

SEQ ID NO: 3086605 - RNA, 19 nt, Artificial Sequence
  Description of Artificial Sequence: Synthetic oligonucleotide
aaaugaguauuugaugccc

SEQ ID NO: 3086606 - RNA, 19 nt, Artificial Sequence
  Description of Artificial Sequence: Synthetic oligonucleotide
gagauuaguaaauaaaaca

SEQ ID NO: 3086607 - RNA, 19 nt, Artificial Sequence
  Description of Artificial Sequence: Synthetic oligonucleotide
acauuuuggagacugcagc

SEQ ID NO: 3086608 - RNA, 19 nt, Artificial Sequence
  Description of Artificial Sequence: Synthetic oligonucleotide
uuuagacaaaccaagguaa

SEQ ID NO: 3086609 - RNA, 19 nt, Artificial Sequence
  Description of Artificial Sequence: Synthetic oligonucleotide
uuuaauguaucucucgggu

SEQ ID NO: 3086610 - RNA, 19 nt, Artificial Sequence
  Description of Artificial Sequence: Synthetic oligonucleotide
ugaacaaguagguuuaaug

SEQ ID NO: 3086611 - RNA, 19 nt, Artificial Sequence
  Description of Artificial Sequence: Synthetic oligonucleotide
uaauguaucucucggguag

SEQ ID NO: 3086612 - RNA, 19 nt, Artificial Sequence
  Description of Artificial Sequence: Synthetic oligonucleotide
aaacaccccgagcagaggc

SEQ ID NO: 3086613 - RNA, 19 nt, Artificial Sequence
  Description of Artificial Sequence: Synthetic oligonucleotide
aauaaaacaccccgagcag

SEQ ID NO: 3086614 - RNA, 19 nt, Artificial Sequence
  Description of Artificial Sequence: Synthetic oligonucleotide
gaggcaagggcauuaaacg

SEQ ID NO: 3086615 - RNA, 19 nt, Artificial Sequence
  Description of Artificial Sequence: Synthetic oligonucleotide
aaaucauagauccaaucau

SEQ ID NO: 3086616 - RNA, 19 nt, Artificial Sequence
  Description of Artificial Sequence: Synthetic oligonucleotide
ugagauuaguaaauaaaac

SEQ ID NO: 3086617 - RNA, 19 nt, Artificial Sequence
  Description of Artificial Sequence: Synthetic oligonucleotide
aacugauuaaacuuagaaa

SEQ ID NO: 3086618 - RNA, 19 nt, Artificial Sequence
  Description of Artificial Sequence: Synthetic oligonucleotide
guaaauaaaacaccccgag

SEQ ID NO: 3086619 - RNA, 19 nt, Artificial Sequence
  Description of Artificial Sequence: Synthetic oligonucleotide
uuaguaaauaaaacacccc

SEQ ID NO: 3086620 - RNA, 19 nt, Artificial Sequence
  Description of Artificial Sequence: Synthetic oligonucleotide
uaacugauuaaacuuagaa

SEQ ID NO: 3086621 - RNA, 19 nt, Artificial Sequence
  Description of Artificial Sequence: Synthetic oligonucleotide
gauuaguaaauaaaacacc

SEQ ID NO: 3086622 - RNA, 19 nt, Artificial Sequence
  Description of Artificial Sequence: Synthetic oligonucleotide
uucuuuagacaaaccaagg

SEQ ID NO: 3086623 - RNA, 19 nt, Artificial Sequence
  Description of Artificial Sequence: Synthetic oligonucleotide
aagguaacugauuaaacuu

SEQ ID NO: 3086624 - RNA, 19 nt, Artificial Sequence
  Description of Artificial Sequence: Synthetic oligonucleotide
agauccaaucaucggaacc

SEQ ID NO: 3086625 - RNA, 19 nt, Artificial Sequence
  Description of Artificial Sequence: Synthetic oligonucleotide
aaucauagauccaaucauc

SEQ ID NO: 3086626 - RNA, 19 nt, Artificial Sequence
  Description of Artificial Sequence: Synthetic oligonucleotide
aaucaucggaaccuccagg

SEQ ID NO: 3086627 - RNA, 19 nt, Artificial Sequence
  Description of Artificial Sequence: Synthetic oligonucleotide
uaaauaaaacaccccgagc

SEQ ID NO: 3086628 - RNA, 19 nt, Artificial Sequence
  Description of Artificial Sequence: Synthetic oligonucleotide
aagcuaaguucacaauugg

SEQ ID NO: 3086629 - RNA, 19 nt, Artificial Sequence
  Description of Artificial Sequence: Synthetic oligonucleotide
aacguuccugacgacaugc

SEQ ID NO: 3086630 - RNA, 19 nt, Artificial Sequence
  Description of Artificial Sequence: Synthetic oligonucleotide
ucuuuagacaaaccaaggu

SEQ ID NO: 3086631 - RNA, 19 nt, Artificial Sequence
  Description of Artificial Sequence: Synthetic oligonucleotide
aaagcuaaguucacaauug

SEQ ID NO: 3086632 - RNA, 19 nt, Artificial Sequence
  Description of Artificial Sequence: Synthetic oligonucleotide
agagcuucugaacaaguag

SEQ ID NO: 3086633 - RNA, 19 nt, Artificial Sequence
  Description of Artificial Sequence: Synthetic oligonucleotide
aaaccaagguaacugauua

SEQ ID NO: 3086634 - RNA, 19 nt, Artificial Sequence
  Description of Artificial Sequence: Synthetic oligonucleotide
uaaaugaguauuugaugcc

SEQ ID NO: 3086635 - RNA, 19 nt, Artificial Sequence
  Description of Artificial Sequence: Synthetic oligonucleotide
ugauuaaacuuagaaagcu

SEQ ID NO: 3086636 - RNA, 19 nt, Artificial Sequence
  Description of Artificial Sequence: Synthetic oligonucleotide
cuaaguucacaauugggug

SEQ ID NO: 3086637 - RNA, 19 nt, Artificial Sequence
  Description of Artificial Sequence: Synthetic oligonucleotide
aguauuugaugcccaaauc

SEQ ID NO: 3086638 - RNA, 19 nt, Artificial Sequence
  Description of Artificial Sequence: Synthetic oligonucleotide
cugauuaaacuuagaaagc

SEQ ID NO: 3086639 - RNA, 19 nt, Artificial Sequence
  Description of Artificial Sequence: Synthetic oligonucleotide
ucguaaaugaguauuugau

SEQ ID NO: 3086640 - RNA, 19 nt, Artificial Sequence
  Description of Artificial Sequence: Synthetic oligonucleotide
augccaaacauuuuggaga

SEQ ID NO: 3086641 - RNA, 19 nt, Artificial Sequence
  Description of Artificial Sequence: Synthetic oligonucleotide
uaaaacaccccgagcagag

SEQ ID NO: 3086642 - RNA, 19 nt, Artificial Sequence
  Description of Artificial Sequence: Synthetic oligonucleotide
uuaugauuuuauucuuuag

SEQ ID NO: 3086643 - RNA, 19 nt, Artificial Sequence
  Description of Artificial Sequence: Synthetic oligonucleotide
ucauagauccaaucaucgg

SEQ ID NO: 3086644 - RNA, 19 nt, Artificial Sequence
  Description of Artificial Sequence: Synthetic oligonucleotide
uugucucgcaguucaaucg

SEQ ID NO: 3086645 - RNA, 19 nt, Artificial Sequence
  Description of Artificial Sequence: Synthetic oligonucleotide
uuuauucuuuagacaaacc

SEQ ID NO: 3086646 - RNA, 19 nt, Artificial Sequence
  Description of Artificial Sequence: Synthetic oligonucleotide
guauuugaugcccaaauca

SEQ ID NO: 3086647 - RNA, 19 nt, Artificial Sequence
  Description of Artificial Sequence: Synthetic oligonucleotide
aacaaguagguuuaaugua

SEQ ID NO: 3086648 - RNA, 19 nt, Artificial Sequence
  Description of Artificial Sequence: Synthetic oligonucleotide
guuuaauguaucucucggg

SEQ ID NO: 3086649 - RNA, 19 nt, Artificial Sequence
  Description of Artificial Sequence: Synthetic oligonucleotide
uauuugaugcccaaaucau

SEQ ID NO: 3086650 - RNA, 19 nt, Artificial Sequence
  Description of Artificial Sequence: Synthetic oligonucleotide
aauuggguguugcugagau

SEQ ID NO: 3086651 - RNA, 19 nt, Artificial Sequence
  Description of Artificial Sequence: Synthetic oligonucleotide
acuuagaaagcuaaguuca

SEQ ID NO: 3086652 - RNA, 19 nt, Artificial Sequence
  Description of Artificial Sequence: Synthetic oligonucleotide
auucuuuagacaaaccaag

SEQ ID NO: 3086653 - RNA, 19 nt, Artificial Sequence
  Description of Artificial Sequence: Synthetic oligonucleotide
agguuuaauguaucucucg

SEQ ID NO: 3086654 - RNA, 19 nt, Artificial Sequence
  Description of Artificial Sequence: Synthetic oligonucleotide
uagaaagcuaaguucacaa

SEQ ID NO: 3086655 - RNA, 19 nt, Artificial Sequence
  Description of Artificial Sequence: Synthetic oligonucleotide
uaagcucaaaguguuauga

SEQ ID NO: 3086656 - RNA, 19 nt, Artificial Sequence
  Description of Artificial Sequence: Synthetic oligonucleotide
caugccaaacauuuuggag

SEQ ID NO: 3086657 - RNA, 19 nt, Artificial Sequence
  Description of Artificial Sequence: Synthetic oligonucleotide
uaaguucacaauugggugu

SEQ ID NO: 3086658 - RNA, 19 nt, Artificial Sequence
  Description of Artificial Sequence: Synthetic oligonucleotide
uuuuggagacugcagccag

SEQ ID NO: 3086659 - RNA, 19 nt, Artificial Sequence
  Description of Artificial Sequence: Synthetic oligonucleotide
caaaucauagauccaauca

SEQ ID NO: 3086660 - RNA, 19 nt, Artificial Sequence
  Description of Artificial Sequence: Synthetic oligonucleotide
aucauagauccaaucaucg

SEQ ID NO: 3086661 - RNA, 19 nt, Artificial Sequence
  Description of Artificial Sequence: Synthetic oligonucleotide
aauguaucucucggguagc

SEQ ID NO: 3086662 - RNA, 19 nt, Artificial Sequence
  Description of Artificial Sequence: Synthetic oligonucleotide
gguuuaauguaucucucgg

SEQ ID NO: 3086663 - RNA, 19 nt, Artificial Sequence
  Description of Artificial Sequence: Synthetic oligonucleotide
cauuaaacguuccugacga

SEQ ID NO: 3086664 - RNA, 19 nt, Artificial Sequence
  Description of Artificial Sequence: Synthetic oligonucleotide
aguagguuuaauguaucuc

SEQ ID NO: 3086665 - RNA, 19 nt, Artificial Sequence
  Description of Artificial Sequence: Synthetic oligonucleotide
cauuuuggagacugcagcc

SEQ ID NO: 3086666 - RNA, 19 nt, Artificial Sequence
  Description of Artificial Sequence: Synthetic oligonucleotide
agaggcaagggcauuaaac

SEQ ID NO: 3086667 - RNA, 19 nt, Artificial Sequence
  Description of Artificial Sequence: Synthetic oligonucleotide
gagcuucugaacaaguagg

SEQ ID NO: 3086668 - RNA, 19 nt, Artificial Sequence
  Description of Artificial Sequence: Synthetic oligonucleotide
accuccaggagcuaggucu

SEQ ID NO: 3086669 - RNA, 19 nt, Artificial Sequence
  Description of Artificial Sequence: Synthetic oligonucleotide
aaguagguuuaauguaucu

SEQ ID NO: 3086670 - RNA, 19 nt, Artificial Sequence
  Description of Artificial Sequence: Synthetic oligonucleotide
gaacaaguagguuuaaugu

SEQ ID NO: 3086671 - RNA, 19 nt, Artificial Sequence
  Description of Artificial Sequence: Synthetic oligonucleotide
aaacauuuuggagacugca

SEQ ID NO: 3086672 - RNA, 19 nt, Artificial Sequence
  Description of Artificial Sequence: Synthetic oligonucleotide
uguugcugagauuaguaaa

SEQ ID NO: 3086673 - RNA, 19 nt, Artificial Sequence
  Description of Artificial Sequence: Synthetic oligonucleotide
aaucguaaaugaguauuug

SEQ ID NO: 3086674 - RNA, 19 nt, Artificial Sequence
  Description of Artificial Sequence: Synthetic oligonucleotide
aucguaaaugaguauuuga

SEQ ID NO: 3086675 - RNA, 19 nt, Artificial Sequence
  Description of Artificial Sequence: Synthetic oligonucleotide
ucaaucguaaaugaguauu

SEQ ID NO: 3086676 - RNA, 19 nt, Artificial Sequence
  Description of Artificial Sequence: Synthetic oligonucleotide
uuagacaaaccaagguaac

SEQ ID NO: 3086677 - RNA, 19 nt, Artificial Sequence
  Description of Artificial Sequence: Synthetic oligonucleotide
cauagauccaaucaucgga

SEQ ID NO: 3086678 - RNA, 19 nt, Artificial Sequence
  Description of Artificial Sequence: Synthetic oligonucleotide
cugagauuaguaaauaaaa

SEQ ID NO: 3086679 - RNA, 19 nt, Artificial Sequence
  Description of Artificial Sequence: Synthetic oligonucleotide
aacauuuuggagacugcag

SEQ ID NO: 3086680 - RNA, 19 nt, Artificial Sequence
  Description of Artificial Sequence: Synthetic oligonucleotide
uuaaacguuccugacgaca

SEQ ID NO: 3086681 - RNA, 19 nt, Artificial Sequence
  Description of Artificial Sequence: Synthetic oligonucleotide
auuaaacuuagaaagcuaa

SEQ ID NO: 3086682 - RNA, 19 nt, Artificial Sequence
  Description of Artificial Sequence: Synthetic oligonucleotide
uaaacguuccugacgacau

SEQ ID NO: 3086683 - RNA, 19 nt, Artificial Sequence
  Description of Artificial Sequence: Synthetic oligonucleotide
agacaaaccaagguaacug

SEQ ID NO: 3086684 - RNA, 19 nt, Artificial Sequence
  Description of Artificial Sequence: Synthetic oligonucleotide
ucucggguagcaagaaucc

SEQ ID NO: 3086685 - RNA, 19 nt, Artificial Sequence
  Description of Artificial Sequence: Synthetic oligonucleotide
uuaagcucaaaguguuaug

SEQ ID NO: 3086686 - RNA, 19 nt, Artificial Sequence
  Description of Artificial Sequence: Synthetic oligonucleotide
guaucucucggguagcaag

SEQ ID NO: 3086687 - RNA, 19 nt, Artificial Sequence
  Description of Artificial Sequence: Synthetic oligonucleotide
uucugaacaaguagguuua

SEQ ID NO: 3086688 - RNA, 19 nt, Artificial Sequence
  Description of Artificial Sequence: Synthetic oligonucleotide
ugccaaacauuuuggagac

SEQ ID NO: 3086689 - RNA, 19 nt, Artificial Sequence
  Description of Artificial Sequence: Synthetic oligonucleotide
uuggguguugcugagauua

SEQ ID NO: 3086690 - RNA, 19 nt, Artificial Sequence
  Description of Artificial Sequence: Synthetic oligonucleotide
uccguaucugccuuugucu

SEQ ID NO: 3086691 - RNA, 19 nt, Artificial Sequence
  Description of Artificial Sequence: Synthetic oligonucleotide
uguuaugauuuuauucuuu

SEQ ID NO: 3086692 - RNA, 19 nt, Artificial Sequence
  Description of Artificial Sequence: Synthetic oligonucleotide
auccguaucugccuuuguc

SEQ ID NO: 3086693 - RNA, 19 nt, Artificial Sequence
  Description of Artificial Sequence: Synthetic oligonucleotide
uuugucucgcaguucaauc

SEQ ID NO: 3086694 - RNA, 19 nt, Artificial Sequence
  Description of Artificial Sequence: Synthetic oligonucleotide
aucaucggaaccuccagga

SEQ ID NO: 3086695 - RNA, 19 nt, Artificial Sequence
  Description of Artificial Sequence: Synthetic oligonucleotide
guagguuuaauguaucucu

SEQ ID NO: 3086696 - RNA, 19 nt, Artificial Sequence
  Description of Artificial Sequence: Synthetic oligonucleotide
uuagaaagcuaaguucaca

SEQ ID NO: 3086697 - RNA, 19 nt, Artificial Sequence
  Description of Artificial Sequence: Synthetic oligonucleotide
ucggguagcaagaauccgu

SEQ ID NO: 3086698 - RNA, 19 nt, Artificial Sequence
  Description of Artificial Sequence: Synthetic oligonucleotide
cucucggguagcaagaauc

SEQ ID NO: 3086699 - RNA, 19 nt, Artificial Sequence
  Description of Artificial Sequence: Synthetic oligonucleotide
aagggcauuaaacguuccu

SEQ ID NO: 3086700 - RNA, 19 nt, Artificial Sequence
  Description of Artificial Sequence: Synthetic oligonucleotide
cuuuagacaaaccaaggua

SEQ ID NO: 3086701 - RNA, 19 nt, Artificial Sequence
  Description of Artificial Sequence: Synthetic oligonucleotide
caucggaaccuccaggagc

SEQ ID NO: 3086702 - RNA, 19 nt, Artificial Sequence
  Description of Artificial Sequence: Synthetic oligonucleotide
gacaaaccaagguaacuga

SEQ ID NO: 3086703 - RNA, 19 nt, Artificial Sequence
  Description of Artificial Sequence: Synthetic oligonucleotide
aguaaauaaaacaccccga

SEQ ID NO: 3086704 - RNA, 19 nt, Artificial Sequence
  Description of Artificial Sequence: Synthetic oligonucleotide
uaucucucggguagcaaga

SEQ ID NO: 3086705 - RNA, 19 nt, Artificial Sequence
  Description of Artificial Sequence: Synthetic oligonucleotide
ucacaauuggguguugcug

SEQ ID NO: 3086706 - RNA, 19 nt, Artificial Sequence
  Description of Artificial Sequence: Synthetic oligonucleotide
gcauuaaacguuccugacg

SEQ ID NO: 3086707 - RNA, 19 nt, Artificial Sequence
  Description of Artificial Sequence: Synthetic oligonucleotide
uagguuuaauguaucucuc

SEQ ID NO: 3086708 - RNA, 19 nt, Artificial Sequence
  Description of Artificial Sequence: Synthetic oligonucleotide
cuuagaaagcuaaguucac

SEQ ID NO: 3086709 - RNA, 19 nt, Artificial Sequence
  Description of Artificial Sequence: Synthetic oligonucleotide
auuaaacguuccugacgac

SEQ ID NO: 3086710 - RNA, 19 nt, Artificial Sequence
  Description of Artificial Sequence: Synthetic oligonucleotide
guuaugauuuuauucuuua

SEQ ID NO: 3086711 - RNA, 19 nt, Artificial Sequence
  Description of Artificial Sequence: Synthetic oligonucleotide
aaugaguauuugaugccca

SEQ ID NO: 3086712 - RNA, 19 nt, Artificial Sequence
  Description of Artificial Sequence: Synthetic oligonucleotide
gaaagcuaaguucacaauu

SEQ ID NO: 3086713 - RNA, 19 nt, Artificial Sequence
  Description of Artificial Sequence: Synthetic oligonucleotide
uuaauguaucucucgggua

SEQ ID NO: 3086714 - RNA, 19 nt, Artificial Sequence
  Description of Artificial Sequence: Synthetic oligonucleotide
ugcugagauuaguaaauaa

SEQ ID NO: 3086715 - RNA, 19 nt, Artificial Sequence
  Description of Artificial Sequence: Synthetic oligonucleotide
ugucucgcaguucaaucgu

SEQ ID NO: 3086716 - RNA, 19 nt, Artificial Sequence
  Description of Artificial Sequence: Synthetic oligonucleotide
ucugccuuugucucgcagu

SEQ ID NO: 3086717 - RNA, 19 nt, Artificial Sequence
  Description of Artificial Sequence: Synthetic oligonucleotide
uucacaauuggguguugcu

SEQ ID NO: 3086718 - RNA, 19 nt, Artificial Sequence
  Description of Artificial Sequence: Synthetic oligonucleotide
agcuaaguucacaauuggg

SEQ ID NO: 3086719 - RNA, 19 nt, Artificial Sequence
  Description of Artificial Sequence: Synthetic oligonucleotide
acaaguagguuuaauguau

SEQ ID NO: 3086720 - RNA, 19 nt, Artificial Sequence
  Description of Artificial Sequence: Synthetic oligonucleotide
caaacauuuuggagacugc

SEQ ID NO: 3086721 - RNA, 19 nt, Artificial Sequence
  Description of Artificial Sequence: Synthetic oligonucleotide
ucaucggaaccuccaggag

SEQ ID NO: 3086722 - RNA, 19 nt, Artificial Sequence
  Description of Artificial Sequence: Synthetic oligonucleotide
ucgcaguucaaucguaaau

SEQ ID NO: 3086723 - RNA, 19 nt, Artificial Sequence
  Description of Artificial Sequence: Synthetic oligonucleotide
acaauuggguguugcugag

SEQ ID NO: 3086724 - RNA, 19 nt, Artificial Sequence
  Description of Artificial Sequence: Synthetic oligonucleotide
uccaaucaucggaaccucc

SEQ ID NO: 3086725 - RNA, 19 nt, Artificial Sequence
  Description of Artificial Sequence: Synthetic oligonucleotide
guagcaagaauccguaucu

SEQ ID NO: 3086726 - RNA, 19 nt, Artificial Sequence
  Description of Artificial Sequence: Synthetic oligonucleotide
cacaauuggguguugcuga

SEQ ID NO: 3086727 - RNA, 19 nt, Artificial Sequence
  Description of Artificial Sequence: Synthetic oligonucleotide
caagguaacugauuaaacu

SEQ ID NO: 3086728 - RNA, 19 nt, Artificial Sequence
  Description of Artificial Sequence: Synthetic oligonucleotide
uagacaaaccaagguaacu

SEQ ID NO: 3086729 - RNA, 19 nt, Artificial Sequence
  Description of Artificial Sequence: Synthetic oligonucleotide
acaugccaaacauuuugga

SEQ ID NO: 3086730 - RNA, 19 nt, Artificial Sequence
  Description of Artificial Sequence: Synthetic oligonucleotide
agaaagcuaaguucacaau

SEQ ID NO: 3086731 - RNA, 19 nt, Artificial Sequence
  Description of Artificial Sequence: Synthetic oligonucleotide
aggcaagggcauuaaacgu

SEQ ID NO: 3086732 - RNA, 19 nt, Artificial Sequence
  Description of Artificial Sequence: Synthetic oligonucleotide
aaacguuccugacgacaug

SEQ ID NO: 3086733 - RNA, 19 nt, Artificial Sequence
  Description of Artificial Sequence: Synthetic oligonucleotide
gguaacugauuaaacuuag

SEQ ID NO: 3086734 - RNA, 19 nt, Artificial Sequence
  Description of Artificial Sequence: Synthetic oligonucleotide
agggcauuaaacguuccug

SEQ ID NO: 3086735 - RNA, 19 nt, Artificial Sequence
  Description of Artificial Sequence: Synthetic oligonucleotide
auaaaacaccccgagcaga

SEQ ID NO: 3086736 - RNA, 19 nt, Artificial Sequence
  Description of Artificial Sequence: Synthetic oligonucleotide
aaaacaccccgagcagagg

SEQ ID NO: 3086737 - RNA, 19 nt, Artificial Sequence
  Description of Artificial Sequence: Synthetic oligonucleotide
accaagguaacugauuaaa

SEQ ID NO: 3086738 - RNA, 19 nt, Artificial Sequence
  Description of Artificial Sequence: Synthetic oligonucleotide
aaccaagguaacugauuaa

SEQ ID NO: 3086739 - RNA, 19 nt, Artificial Sequence
  Description of Artificial Sequence: Synthetic oligonucleotide
caaguagguuuaauguauc

SEQ ID NO: 3086740 - RNA, 19 nt, Artificial Sequence
  Description of Artificial Sequence: Synthetic oligonucleotide
gguagcaagaauccguauc

SEQ ID NO: 3086741 - RNA, 19 nt, Artificial Sequence
  Description of Artificial Sequence: Synthetic oligonucleotide
uucaaucguaaaugaguau

SEQ ID NO: 3086742 - RNA, 19 nt, Artificial Sequence
  Description of Artificial Sequence: Synthetic oligonucleotide
gauuaaacuuagaaagcua

SEQ ID NO: 3086743 - RNA, 19 nt, Artificial Sequence
  Description of Artificial Sequence: Synthetic oligonucleotide
caaucaucggaaccuccag

SEQ ID NO: 3086744 - RNA, 19 nt, Artificial Sequence
  Description of Artificial Sequence: Synthetic oligonucleotide
aaccuccaggagcuagguc

SEQ ID NO: 3086745 - RNA, 19 nt, Artificial Sequence
  Description of Artificial Sequence: Synthetic oligonucleotide
gaugcccaaaucauagauc

SEQ ID NO: 3086746 - RNA, 19 nt, Artificial Sequence
  Description of Artificial Sequence: Synthetic oligonucleotide
uugaugcccaaaucauaga

SEQ ID NO: 3086747 - RNA, 19 nt, Artificial Sequence
  Description of Artificial Sequence: Synthetic oligonucleotide
ucucgcaguucaaucguaa

SEQ ID NO: 3086748 - RNA, 19 nt, Artificial Sequence
  Description of Artificial Sequence: Synthetic oligonucleotide
gauccaaucaucggaaccu

SEQ ID NO: 3086749 - RNA, 19 nt, Artificial Sequence
  Description of Artificial Sequence: Synthetic oligonucleotide
auagauccaaucaucggaa

SEQ ID NO: 3086750 - RNA, 19 nt, Artificial Sequence
  Description of Artificial Sequence: Synthetic oligonucleotide
gaguauuugaugcccaaau

SEQ ID NO: 3086751 - RNA, 19 nt, Artificial Sequence
  Description of Artificial Sequence: Synthetic oligonucleotide
auuuuggagacugcagcca

SEQ ID NO: 3086752 - RNA, 19 nt, Artificial Sequence
  Description of Artificial Sequence: Synthetic oligonucleotide
aaguucacaauuggguguu

SEQ ID NO: 3086753 - RNA, 19 nt, Artificial Sequence
  Description of Artificial Sequence: Synthetic oligonucleotide
ucaaaguguuaugauuuua

SEQ ID NO: 3086754 - RNA, 19 nt, Artificial Sequence
  Description of Artificial Sequence: Synthetic oligonucleotide
guucaaucguaaaugagua

SEQ ID NO: 3086755 - RNA, 19 nt, Artificial Sequence
  Description of Artificial Sequence: Synthetic oligonucleotide
gcaagaauccguaucugcc

SEQ ID NO: 3086756 - RNA, 19 nt, Artificial Sequence
  Description of Artificial Sequence: Synthetic oligonucleotide
cuucugaacaaguagguuu

SEQ ID NO: 3086757 - RNA, 19 nt, Artificial Sequence
  Description of Artificial Sequence: Synthetic oligonucleotide
ggagacugcagccagagcu

SEQ ID NO: 3086758 - RNA, 19 nt, Artificial Sequence
  Description of Artificial Sequence: Synthetic oligonucleotide
uagauccaaucaucggaac

SEQ ID NO: 3086759 - RNA, 19 nt, Artificial Sequence
  Description of Artificial Sequence: Synthetic oligonucleotide
ccaaacauuuuggagacug

SEQ ID NO: 3086760 - RNA, 19 nt, Artificial Sequence
  Description of Artificial Sequence: Synthetic oligonucleotide
guaucugccuuugucucgc

SEQ ID NO: 3086761 - RNA, 19 nt, Artificial Sequence
  Description of Artificial Sequence: Synthetic oligonucleotide
cguaaaugaguauuugaug

SEQ ID NO: 3086762 - RNA, 19 nt, Artificial Sequence
  Description of Artificial Sequence: Synthetic oligonucleotide
gaauccguaucugccuuug

SEQ ID NO: 3086763 - RNA, 19 nt, Artificial Sequence
  Description of Artificial Sequence: Synthetic oligonucleotide
uggguguugcugagauuag

SEQ ID NO: 3086764 - RNA, 19 nt, Artificial Sequence
  Description of Artificial Sequence: Synthetic oligonucleotide
aucggaaccuccaggagcu

SEQ ID NO: 3086765 - RNA, 19 nt, Artificial Sequence
  Description of Artificial Sequence: Synthetic oligonucleotide
aauccguaucugccuuugu

SEQ ID NO: 3086766 - RNA, 19 nt, Artificial Sequence
  Description of Artificial Sequence: Synthetic oligonucleotide
uuccugacgacaugccaaa

SEQ ID NO: 3086767 - RNA, 19 nt, Artificial Sequence
  Description of Artificial Sequence: Synthetic oligonucleotide
augaguauuugaugcccaa

SEQ ID NO: 3086768 - RNA, 19 nt, Artificial Sequence
  Description of Artificial Sequence: Synthetic oligonucleotide
guucacaauuggguguugc

SEQ ID NO: 3086769 - RNA, 19 nt, Artificial Sequence
  Description of Artificial Sequence: Synthetic oligonucleotide
gacgacaugccaaacauuu

SEQ ID NO: 3086770 - RNA, 19 nt, Artificial Sequence
  Description of Artificial Sequence: Synthetic oligonucleotide
ugcagccagagcuucugaa

SEQ ID NO: 3086771 - RNA, 19 nt, Artificial Sequence
  Description of Artificial Sequence: Synthetic oligonucleotide
auuuuauucuuuagacaaa

SEQ ID NO: 3086772 - RNA, 19 nt, Artificial Sequence
  Description of Artificial Sequence: Synthetic oligonucleotide
ugcccaaaucauagaucca

SEQ ID NO: 3086773 - RNA, 19 nt, Artificial Sequence
  Description of Artificial Sequence: Synthetic oligonucleotide
auccaaucaucggaaccuc

SEQ ID NO: 3086774 - RNA, 19 nt, Artificial Sequence
  Description of Artificial Sequence: Synthetic oligonucleotide
agguaacugauuaaacuua

SEQ ID NO: 3086775 - RNA, 19 nt, Artificial Sequence
  Description of Artificial Sequence: Synthetic oligonucleotide
ggcauuaaacguuccugac

SEQ ID NO: 3086776 - RNA, 19 nt, Artificial Sequence
  Description of Artificial Sequence: Synthetic oligonucleotide
guguugcugagauuaguaa

SEQ ID NO: 3086777 - RNA, 19 nt, Artificial Sequence
  Description of Artificial Sequence: Synthetic oligonucleotide
uagcaagaauccguaucug

SEQ ID NO: 3086778 - RNA, 19 nt, Artificial Sequence
  Description of Artificial Sequence: Synthetic oligonucleotide
gcaguucaaucguaaauga

SEQ ID NO: 3086779 - RNA, 19 nt, Artificial Sequence
  Description of Artificial Sequence: Synthetic oligonucleotide
agcuucugaacaaguaggu

SEQ ID NO: 3086780 - RNA, 19 nt, Artificial Sequence
  Description of Artificial Sequence: Synthetic oligonucleotide
ccaaaucauagauccaauc

SEQ ID NO: 3086781 - RNA, 19 nt, Artificial Sequence
  Description of Artificial Sequence: Synthetic oligonucleotide
ccaagguaacugauuaaac

SEQ ID NO: 3086782 - RNA, 19 nt, Artificial Sequence
  Description of Artificial Sequence: Synthetic oligonucleotide
caagggcauuaaacguucc

SEQ ID NO: 3086783 - RNA, 19 nt, Artificial Sequence
  Description of Artificial Sequence: Synthetic oligonucleotide
cucggguagcaagaauccg

SEQ ID NO: 3086784 - RNA, 19 nt, Artificial Sequence
  Description of Artificial Sequence: Synthetic oligonucleotide
aucugccuuugucucgcag

SEQ ID NO: 3086785 - RNA, 19 nt, Artificial Sequence
  Description of Artificial Sequence: Synthetic oligonucleotide
gggcauuaaacguuccuga

SEQ ID NO: 3086786 - RNA, 19 nt, Artificial Sequence
  Description of Artificial Sequence: Synthetic oligonucleotide
gcuaaguucacaauugggu

SEQ ID NO: 3086787 - RNA, 19 nt, Artificial Sequence
  Description of Artificial Sequence: Synthetic oligonucleotide
guuccugacgacaugccaa

SEQ ID NO: 3086788 - RNA, 19 nt, Artificial Sequence
  Description of Artificial Sequence: Synthetic oligonucleotide
auuugaugcccaaaucaua

SEQ ID NO: 3086789 - RNA, 19 nt, Artificial Sequence
  Description of Artificial Sequence: Synthetic oligonucleotide
guugcugagauuaguaaau

SEQ ID NO: 3086790 - RNA, 19 nt, Artificial Sequence
  Description of Artificial Sequence: Synthetic oligonucleotide
ugacgacaugccaaacauu

SEQ ID NO: 3086791 - RNA, 19 nt, Artificial Sequence
  Description of Artificial Sequence: Synthetic oligonucleotide
agacugcagccagagcuuc

SEQ ID NO: 3086792 - RNA, 19 nt, Artificial Sequence
  Description of Artificial Sequence: Synthetic oligonucleotide
acaaaccaagguaacugau

SEQ ID NO: 3086793 - RNA, 19 nt, Artificial Sequence
  Description of Artificial Sequence: Synthetic oligonucleotide
ucucucggguagcaagaau

SEQ ID NO: 3086794 - RNA, 19 nt, Artificial Sequence
  Description of Artificial Sequence: Synthetic oligonucleotide
uugcugagauuaguaaaua

SEQ ID NO: 3086795 - RNA, 19 nt, Artificial Sequence
  Description of Artificial Sequence: Synthetic oligonucleotide
acguuccugacgacaugcc

SEQ ID NO: 3086796 - RNA, 19 nt, Artificial Sequence
  Description of Artificial Sequence: Synthetic oligonucleotide
guaacugauuaaacuuaga

SEQ ID NO: 3086797 - RNA, 19 nt, Artificial Sequence
  Description of Artificial Sequence: Synthetic oligonucleotide
accccgagcagaggcaagg

SEQ ID NO: 3086798 - RNA, 19 nt, Artificial Sequence
  Description of Artificial Sequence: Synthetic oligonucleotide
cgacaugccaaacauuuug

SEQ ID NO: 3086799 - RNA, 19 nt, Artificial Sequence
  Description of Artificial Sequence: Synthetic oligonucleotide
caagaauccguaucugccu

SEQ ID NO: 3086800 - RNA, 19 nt, Artificial Sequence
  Description of Artificial Sequence: Synthetic oligonucleotide
uguaucucucggguagcaa

SEQ ID NO: 3086801 - RNA, 19 nt, Artificial Sequence
  Description of Artificial Sequence: Synthetic oligonucleotide
gccuuugucucgcaguuca

SEQ ID NO: 3086802 - RNA, 19 nt, Artificial Sequence
  Description of Artificial Sequence: Synthetic oligonucleotide
aacaccccgagcagaggca

SEQ ID NO: 3086803 - RNA, 19 nt, Artificial Sequence
  Description of Artificial Sequence: Synthetic oligonucleotide
agccagagcuucugaacaa

SEQ ID NO: 3086804 - RNA, 19 nt, Artificial Sequence
  Description of Artificial Sequence: Synthetic oligonucleotide
cgcaguucaaucguaaaug

SEQ ID NO: 3086805 - RNA, 19 nt, Artificial Sequence
  Description of Artificial Sequence: Synthetic oligonucleotide
cugacgacaugccaaacau

SEQ ID NO: 3086806 - RNA, 19 nt, Artificial Sequence
  Description of Artificial Sequence: Synthetic oligonucleotide
agaauccguaucugccuuu

SEQ ID NO: 3086807 - RNA, 19 nt, Artificial Sequence
  Description of Artificial Sequence: Synthetic oligonucleotide
auguaucucucggguagca

SEQ ID NO: 3086808 - RNA, 19 nt, Artificial Sequence
  Description of Artificial Sequence: Synthetic oligonucleotide
cguaucugccuuugucucg

SEQ ID NO: 3086809 - RNA, 19 nt, Artificial Sequence
  Description of Artificial Sequence: Synthetic oligonucleotide
guguuaugauuuuauucuu

SEQ ID NO: 3086810 - RNA, 19 nt, Artificial Sequence
  Description of Artificial Sequence: Synthetic oligonucleotide
cucgcaguucaaucguaaa

SEQ ID NO: 3086811 - RNA, 19 nt, Artificial Sequence
  Description of Artificial Sequence: Synthetic oligonucleotide
caaaccaagguaacugauu

SEQ ID NO: 3086812 - RNA, 19 nt, Artificial Sequence
  Description of Artificial Sequence: Synthetic oligonucleotide
ccaaucaucggaaccucca

SEQ ID NO: 3086813 - RNA, 19 nt, Artificial Sequence
  Description of Artificial Sequence: Synthetic oligonucleotide
auuggguguugcugagauu

SEQ ID NO: 3086814 - RNA, 19 nt, Artificial Sequence
  Description of Artificial Sequence: Synthetic oligonucleotide
gcaagggcauuaaacguuc

SEQ ID NO: 3086815 - RNA, 19 nt, Artificial Sequence
  Description of Artificial Sequence: Synthetic oligonucleotide
uccaggagcuaggucuaaa

SEQ ID NO: 3086816 - RNA, 19 nt, Artificial Sequence
  Description of Artificial Sequence: Synthetic oligonucleotide
gguguugcugagauuagua

SEQ ID NO: 3086817 - RNA, 19 nt, Artificial Sequence
  Description of Artificial Sequence: Synthetic oligonucleotide
ccgagcagaggcaagggca

SEQ ID NO: 3086818 - RNA, 19 nt, Artificial Sequence
  Description of Artificial Sequence: Synthetic oligonucleotide
gcccaaaucauagauccaa

SEQ ID NO: 3086819 - RNA, 19 nt, Artificial Sequence
  Description of Artificial Sequence: Synthetic oligonucleotide
ccguaucugccuuugucuc

SEQ ID NO: 3086820 - RNA, 19 nt, Artificial Sequence
  Description of Artificial Sequence: Synthetic oligonucleotide
gcucaaaguguuaugauuu

SEQ ID NO: 3086821 - RNA, 19 nt, Artificial Sequence
  Description of Artificial Sequence: Synthetic oligonucleotide
aguucacaauuggguguug

SEQ ID NO: 3086822 - RNA, 19 nt, Artificial Sequence
  Description of Artificial Sequence: Synthetic oligonucleotide
gccagagcuucugaacaag

SEQ ID NO: 3086823 - RNA, 19 nt, Artificial Sequence
  Description of Artificial Sequence: Synthetic oligonucleotide
ccugacgacaugccaaaca

SEQ ID NO: 3086824 - RNA, 19 nt, Artificial Sequence
  Description of Artificial Sequence: Synthetic oligonucleotide
uccugacgacaugccaaac

SEQ ID NO: 3086825 - RNA, 19 nt, Artificial Sequence
  Description of Artificial Sequence: Synthetic oligonucleotide
cucaaaguguuaugauuuu

SEQ ID NO: 3086826 - RNA, 19 nt, Artificial Sequence
  Description of Artificial Sequence: Synthetic oligonucleotide
aucucucggguagcaagaa

SEQ ID NO: 3086827 - RNA, 19 nt, Artificial Sequence
  Description of Artificial Sequence: Synthetic oligonucleotide
ugccuuugucucgcaguuc

SEQ ID NO: 3086828 - RNA, 19 nt, Artificial Sequence
  Description of Artificial Sequence: Synthetic oligonucleotide
caccccgagcagaggcaag

SEQ ID NO: 3086829 - RNA, 19 nt, Artificial Sequence
  Description of Artificial Sequence: Synthetic oligonucleotide
acaccccgagcagaggcaa

SEQ ID NO: 3086830 - RNA, 19 nt, Artificial Sequence
  Description of Artificial Sequence: Synthetic oligonucleotide
cccgagcagaggcaagggc

SEQ ID NO: 3086831 - RNA, 19 nt, Artificial Sequence
  Description of Artificial Sequence: Synthetic oligonucleotide
acgacaugccaaacauuuu

SEQ ID NO: 3086832 - RNA, 19 nt, Artificial Sequence
  Description of Artificial Sequence: Synthetic oligonucleotide
caauuggguguugcugaga

SEQ ID NO: 3086833 - RNA, 19 nt, Artificial Sequence
  Description of Artificial Sequence: Synthetic oligonucleotide
gaaccuccaggagcuaggu

SEQ ID NO: 3086834 - RNA, 19 nt, Artificial Sequence
  Description of Artificial Sequence: Synthetic oligonucleotide
gagacugcagccagagcuu

SEQ ID NO: 3086835 - RNA, 19 nt, Artificial Sequence
  Description of Artificial Sequence: Synthetic oligonucleotide
cagaggcaagggcauuaaa

SEQ ID NO: 3086836 - RNA, 19 nt, Artificial Sequence
  Description of Artificial Sequence: Synthetic oligonucleotide
ggcaagggcauuaaacguu

SEQ ID NO: 3086837 - RNA, 19 nt, Artificial Sequence
  Description of Artificial Sequence: Synthetic oligonucleotide
cugaacaaguagguuuaau

SEQ ID NO: 3086838 - RNA, 19 nt, Artificial Sequence
  Description of Artificial Sequence: Synthetic oligonucleotide
cugccuuugucucgcaguu

SEQ ID NO: 3086839 - RNA, 19 nt, Artificial Sequence
  Description of Artificial Sequence: Synthetic oligonucleotide
cugcagccagagcuucuga

SEQ ID NO: 3086840 - RNA, 19 nt, Artificial Sequence
  Description of Artificial Sequence: Synthetic oligonucleotide
gucucgcaguucaaucgua

SEQ ID NO: 3086841 - RNA, 19 nt, Artificial Sequence
  Description of Artificial Sequence: Synthetic oligonucleotide
cguuccugacgacaugcca

SEQ ID NO: 3086842 - RNA, 19 nt, Artificial Sequence
  Description of Artificial Sequence: Synthetic oligonucleotide
cggaaccuccaggagcuag

SEQ ID NO: 3086843 - RNA, 19 nt, Artificial Sequence
  Description of Artificial Sequence: Synthetic oligonucleotide
ccccgagcagaggcaaggg

SEQ ID NO: 3086844 - RNA, 19 nt, Artificial Sequence
  Description of Artificial Sequence: Synthetic oligonucleotide
gcagaggcaagggcauuaa

SEQ ID NO: 3086845 - RNA, 19 nt, Artificial Sequence
  Description of Artificial Sequence: Synthetic oligonucleotide
ucggaaccuccaggagcua

SEQ ID NO: 3086846 - RNA, 19 nt, Artificial Sequence
  Description of Artificial Sequence: Synthetic oligonucleotide
cccaaaucauagauccaau

SEQ ID NO: 3086847 - RNA, 19 nt, Artificial Sequence
  Description of Artificial Sequence: Synthetic oligonucleotide
gcuucugaacaaguagguu

SEQ ID NO: 3086848 - RNA, 19 nt, Artificial Sequence
  Description of Artificial Sequence: Synthetic oligonucleotide
ggguguugcugagauuagu

SEQ ID NO: 3086849 - RNA, 19 nt, Artificial Sequence
  Description of Artificial Sequence: Synthetic oligonucleotide
cggguagcaagaauccgua

SEQ ID NO: 3086850 - RNA, 19 nt, Artificial Sequence
  Description of Artificial Sequence: Synthetic oligonucleotide
ggguagcaagaauccguau

SEQ ID NO: 3086851 - RNA, 19 nt, Artificial Sequence
  Description of Artificial Sequence: Synthetic oligonucleotide
ccuuugucucgcaguucaa

SEQ ID NO: 3086852 - RNA, 19 nt, Artificial Sequence
  Description of Artificial Sequence: Synthetic oligonucleotide
cuccaggagcuaggucuaa

SEQ ID NO: 3086853 - RNA, 19 nt, Artificial Sequence
  Description of Artificial Sequence: Synthetic oligonucleotide
cgagcagaggcaagggcau

SEQ ID NO: 3086854 - RNA, 19 nt, Artificial Sequence
  Description of Artificial Sequence: Synthetic oligonucleotide
gccaaacauuuuggagacu

SEQ ID NO: 3086855 - RNA, 19 nt, Artificial Sequence
  Description of Artificial Sequence: Synthetic oligonucleotide
uuuacugacaucuuccuag

SEQ ID NO: 3086856 - RNA, 19 nt, Artificial Sequence
  Description of Artificial Sequence: Synthetic oligonucleotide
acuuuugcuggcaaaaucc

SEQ ID NO: 3086857 - RNA, 19 nt, Artificial Sequence
  Description of Artificial Sequence: Synthetic oligonucleotide
aacuuuugcuggcaaaauc

SEQ ID NO: 3086858 - RNA, 19 nt, Artificial Sequence
  Description of Artificial Sequence: Synthetic oligonucleotide
uuugccauggcccaugaac

SEQ ID NO: 3086859 - RNA, 19 nt, Artificial Sequence
  Description of Artificial Sequence: Synthetic oligonucleotide
ucaagaggaguuuucaggc

SEQ ID NO: 3086860 - RNA, 19 nt, Artificial Sequence
  Description of Artificial Sequence: Synthetic oligonucleotide
ugacaugcaggucaagagg

SEQ ID NO: 3086861 - RNA, 19 nt, Artificial Sequence
  Description of Artificial Sequence: Synthetic oligonucleotide
aagcauuggucguauucgc

SEQ ID NO: 3086862 - RNA, 19 nt, Artificial Sequence
  Description of Artificial Sequence: Synthetic oligonucleotide
uucuauaggaaucucuuuc

SEQ ID NO: 3086863 - RNA, 19 nt, Artificial Sequence
  Description of Artificial Sequence: Synthetic oligonucleotide
uauaggaaucucuuucucc

SEQ ID NO: 3086864 - RNA, 19 nt, Artificial Sequence
  Description of Artificial Sequence: Synthetic oligonucleotide
gucaagaggaguuuucagg

SEQ ID NO: 3086865 - RNA, 19 nt, Artificial Sequence
  Description of Artificial Sequence: Synthetic oligonucleotide
aaauccagaggccucucag

SEQ ID NO: 3086866 - RNA, 19 nt, Artificial Sequence
  Description of Artificial Sequence: Synthetic oligonucleotide
ucucaguuuacugacaucu

SEQ ID NO: 3086867 - RNA, 19 nt, Artificial Sequence
  Description of Artificial Sequence: Synthetic oligonucleotide
gaagcauuggucguauucg

SEQ ID NO: 3086868 - RNA, 19 nt, Artificial Sequence
  Description of Artificial Sequence: Synthetic oligonucleotide
uuugcuggcaaaauccaga

SEQ ID NO: 3086869 - RNA, 19 nt, Artificial Sequence
  Description of Artificial Sequence: Synthetic oligonucleotide
uuuauugcuuucuggacac

SEQ ID NO: 3086870 - RNA, 19 nt, Artificial Sequence
  Description of Artificial Sequence: Synthetic oligonucleotide
aacuccaguccuucuauag

SEQ ID NO: 3086871 - RNA, 19 nt, Artificial Sequence
  Description of Artificial Sequence: Synthetic oligonucleotide
uccuuuauugcuuucugga

SEQ ID NO: 3086872 - RNA, 19 nt, Artificial Sequence
  Description of Artificial Sequence: Synthetic oligonucleotide
aacuucucggcaaaccagc

SEQ ID NO: 3086873 - RNA, 19 nt, Artificial Sequence
  Description of Artificial Sequence: Synthetic oligonucleotide
auaggaaucucuuucuccu

SEQ ID NO: 3086874 - RNA, 19 nt, Artificial Sequence
  Description of Artificial Sequence: Synthetic oligonucleotide
uguugguagcguuugaaga

SEQ ID NO: 3086875 - RNA, 19 nt, Artificial Sequence
  Description of Artificial Sequence: Synthetic oligonucleotide
cuuccuagugacaugcagg

SEQ ID NO: 3086876 - RNA, 19 nt, Artificial Sequence
  Description of Artificial Sequence: Synthetic oligonucleotide
guugguagcguuugaagag

SEQ ID NO: 3086877 - RNA, 19 nt, Artificial Sequence
  Description of Artificial Sequence: Synthetic oligonucleotide
gcuggcaaaauccagaggc

SEQ ID NO: 3086878 - RNA, 19 nt, Artificial Sequence
  Description of Artificial Sequence: Synthetic oligonucleotide
ucuauaggaaucucuuucu

SEQ ID NO: 3086879 - RNA, 19 nt, Artificial Sequence
  Description of Artificial Sequence: Synthetic oligonucleotide
guagcguuugaagaggucg

SEQ ID NO: 3086880 - RNA, 19 nt, Artificial Sequence
  Description of Artificial Sequence: Synthetic oligonucleotide
ucuuccuagugacaugcag

SEQ ID NO: 3086881 - RNA, 19 nt, Artificial Sequence
  Description of Artificial Sequence: Synthetic oligonucleotide
caguuuacugacaucuucc

SEQ ID NO: 3086882 - RNA, 19 nt, Artificial Sequence
  Description of Artificial Sequence: Synthetic oligonucleotide
acugacaucuuccuaguga

SEQ ID NO: 3086883 - RNA, 19 nt, Artificial Sequence
  Description of Artificial Sequence: Synthetic oligonucleotide
ugaagcauuggucguauuc

SEQ ID NO: 3086884 - RNA, 19 nt, Artificial Sequence
  Description of Artificial Sequence: Synthetic oligonucleotide
uuuucuuugccauggccca

SEQ ID NO: 3086885 - RNA, 19 nt, Artificial Sequence
  Description of Artificial Sequence: Synthetic oligonucleotide
uugcuuucuggacacacug

SEQ ID NO: 3086886 - RNA, 19 nt, Artificial Sequence
  Description of Artificial Sequence: Synthetic oligonucleotide
uuuugcuggcaaaauccag

SEQ ID NO: 3086887 - RNA, 19 nt, Artificial Sequence
  Description of Artificial Sequence: Synthetic oligonucleotide
ucaguuuacugacaucuuc

SEQ ID NO: 3086888 - RNA, 19 nt, Artificial Sequence
  Description of Artificial Sequence: Synthetic oligonucleotide
cuucaugucagugcaagcc

SEQ ID NO: 3086889 - RNA, 19 nt, Artificial Sequence
  Description of Artificial Sequence: Synthetic oligonucleotide
uucucggcaaaccagcggu

SEQ ID NO: 3086890 - RNA, 19 nt, Artificial Sequence
  Description of Artificial Sequence: Synthetic oligonucleotide
ucguauucgcgcuucaugu

SEQ ID NO: 3086891 - RNA, 19 nt, Artificial Sequence
  Description of Artificial Sequence: Synthetic oligonucleotide
uagcguuugaagaggucgg

SEQ ID NO: 3086892 - RNA, 19 nt, Artificial Sequence
  Description of Artificial Sequence: Synthetic oligonucleotide
cuagcuucacaacuuuugc

SEQ ID NO: 3086893 - RNA, 19 nt, Artificial Sequence
  Description of Artificial Sequence: Synthetic oligonucleotide
cugacaucuuccuagugac

SEQ ID NO: 3086894 - RNA, 19 nt, Artificial Sequence
  Description of Artificial Sequence: Synthetic oligonucleotide
gucagugcaagccuccccg

SEQ ID NO: 3086895 - RNA, 19 nt, Artificial Sequence
  Description of Artificial Sequence: Synthetic oligonucleotide
cuuugaggaacuucucggc

SEQ ID NO: 3086896 - RNA, 19 nt, Artificial Sequence
  Description of Artificial Sequence: Synthetic oligonucleotide
uccccuuugaggaacuucu

SEQ ID NO: 3086897 - RNA, 19 nt, Artificial Sequence
  Description of Artificial Sequence: Synthetic oligonucleotide
uucaugucagugcaagccu

SEQ ID NO: 3086898 - RNA, 19 nt, Artificial Sequence
  Description of Artificial Sequence: Synthetic oligonucleotide
uuuucaggcuuuucuuugc

SEQ ID NO: 3086899 - RNA, 19 nt, Artificial Sequence
  Description of Artificial Sequence: Synthetic oligonucleotide
acuccaguccuucuauagg

SEQ ID NO: 3086900 - RNA, 19 nt, Artificial Sequence
  Description of Artificial Sequence: Synthetic oligonucleotide
guuuucaggcuuuucuuug

SEQ ID NO: 3086901 - RNA, 19 nt, Artificial Sequence
  Description of Artificial Sequence: Synthetic oligonucleotide
uuccuagugacaugcaggu

SEQ ID NO: 3086902 - RNA, 19 nt, Artificial Sequence
  Description of Artificial Sequence: Synthetic oligonucleotide
uugcuggcaaaauccagag

SEQ ID NO: 3086903 - RNA, 19 nt, Artificial Sequence
  Description of Artificial Sequence: Synthetic oligonucleotide
gugacaugcaggucaagag

SEQ ID NO: 3086904 - RNA, 19 nt, Artificial Sequence
  Description of Artificial Sequence: Synthetic oligonucleotide
ucuccuuuauugcuuucug

SEQ ID NO: 3086905 - RNA, 19 nt, Artificial Sequence
  Description of Artificial Sequence: Synthetic oligonucleotide
uugccauggcccaugaacu

SEQ ID NO: 3086906 - RNA, 19 nt, Artificial Sequence
  Description of Artificial Sequence: Synthetic oligonucleotide
cuuuauugcuuucuggaca

SEQ ID NO: 3086907 - RNA, 19 nt, Artificial Sequence
  Description of Artificial Sequence: Synthetic oligonucleotide
uccuucuauaggaaucucu

SEQ ID NO: 3086908 - RNA, 19 nt, Artificial Sequence
  Description of Artificial Sequence: Synthetic oligonucleotide
cuggacacacuguugguag

SEQ ID NO: 3086909 - RNA, 19 nt, Artificial Sequence
  Description of Artificial Sequence: Synthetic oligonucleotide
aagaggaguuuucaggcuu

SEQ ID NO: 3086910 - RNA, 19 nt, Artificial Sequence
  Description of Artificial Sequence: Synthetic oligonucleotide
uugguagcguuugaagagg

SEQ ID NO: 3086911 - RNA, 19 nt, Artificial Sequence
  Description of Artificial Sequence: Synthetic oligonucleotide
uuucaggcuuuucuuugcc

SEQ ID NO: 3086912 - RNA, 19 nt, Artificial Sequence
  Description of Artificial Sequence: Synthetic oligonucleotide
uccccgacgcuguucaugg

SEQ ID NO: 3086913 - RNA, 19 nt, Artificial Sequence
  Description of Artificial Sequence: Synthetic oligonucleotide
aauccagaggccucucagu

SEQ ID NO: 3086914 - RNA, 19 nt, Artificial Sequence
  Description of Artificial Sequence: Synthetic oligonucleotide
uugaagaggucggugcacg

SEQ ID NO: 3086915 - RNA, 19 nt, Artificial Sequence
  Description of Artificial Sequence: Synthetic oligonucleotide
agugcaagccuccccgacg

SEQ ID NO: 3086916 - RNA, 19 nt, Artificial Sequence
  Description of Artificial Sequence: Synthetic oligonucleotide
aagaggucggugcacgggu

SEQ ID NO: 3086917 - RNA, 19 nt, Artificial Sequence
  Description of Artificial Sequence: Synthetic oligonucleotide
caucuuccuagugacaugc

SEQ ID NO: 3086918 - RNA, 19 nt, Artificial Sequence
  Description of Artificial Sequence: Synthetic oligonucleotide
gcgguugaagcauuggucg

SEQ ID NO: 3086919 - RNA, 19 nt, Artificial Sequence
  Description of Artificial Sequence: Synthetic oligonucleotide
aggaacuucucggcaaacc

SEQ ID NO: 3086920 - RNA, 19 nt, Artificial Sequence
  Description of Artificial Sequence: Synthetic oligonucleotide
aguuuacugacaucuuccu

SEQ ID NO: 3086921 - RNA, 19 nt, Artificial Sequence
  Description of Artificial Sequence: Synthetic oligonucleotide
uauucgcgcuucaugucag

SEQ ID NO: 3086922 - RNA, 19 nt, Artificial Sequence
  Description of Artificial Sequence: Synthetic oligonucleotide
aaaauccagaggccucuca

SEQ ID NO: 3086923 - RNA, 19 nt, Artificial Sequence
  Description of Artificial Sequence: Synthetic oligonucleotide
gaaucccuuggcuagcuuc

SEQ ID NO: 3086924 - RNA, 19 nt, Artificial Sequence
  Description of Artificial Sequence: Synthetic oligonucleotide
ugaacuccaguccuucuau

SEQ ID NO: 3086925 - RNA, 19 nt, Artificial Sequence
  Description of Artificial Sequence: Synthetic oligonucleotide
cuguugguagcguuugaag

SEQ ID NO: 3086926 - RNA, 19 nt, Artificial Sequence
  Description of Artificial Sequence: Synthetic oligonucleotide
uggcccaugaacuccaguc

SEQ ID NO: 3086927 - RNA, 19 nt, Artificial Sequence
  Description of Artificial Sequence: Synthetic oligonucleotide
gaacuucucggcaaaccag

SEQ ID NO: 3086928 - RNA, 19 nt, Artificial Sequence
  Description of Artificial Sequence: Synthetic oligonucleotide
ucuuucuccuuuauugcuu

SEQ ID NO: 3086929 - RNA, 19 nt, Artificial Sequence
  Description of Artificial Sequence: Synthetic oligonucleotide
cuucacaacuuuugcuggc

SEQ ID NO: 3086930 - RNA, 19 nt, Artificial Sequence
  Description of Artificial Sequence: Synthetic oligonucleotide
ccuuugaggaacuucucgg

SEQ ID NO: 3086931 - RNA, 19 nt, Artificial Sequence
  Description of Artificial Sequence: Synthetic oligonucleotide
uauugcuuucuggacacac

SEQ ID NO: 3086932 - RNA, 19 nt, Artificial Sequence
  Description of Artificial Sequence: Synthetic oligonucleotide
gacaugcaggucaagagga

SEQ ID NO: 3086933 - RNA, 19 nt, Artificial Sequence
  Description of Artificial Sequence: Synthetic oligonucleotide
ugcuggcaaaauccagagg

SEQ ID NO: 3086934 - RNA, 19 nt, Artificial Sequence
  Description of Artificial Sequence: Synthetic oligonucleotide
aaucucuuucuccuuuauu

SEQ ID NO: 3086935 - RNA, 19 nt, Artificial Sequence
  Description of Artificial Sequence: Synthetic oligonucleotide
cuggcaaaauccagaggcc

SEQ ID NO: 3086936 - RNA, 19 nt, Artificial Sequence
  Description of Artificial Sequence: Synthetic oligonucleotide
aggcuuuucuuugccaugg

SEQ ID NO: 3086937 - RNA, 19 nt, Artificial Sequence
  Description of Artificial Sequence: Synthetic oligonucleotide
uugaggaacuucucggcaa

SEQ ID NO: 3086938 - RNA, 19 nt, Artificial Sequence
  Description of Artificial Sequence: Synthetic oligonucleotide
ugaagaggucggugcacgg

SEQ ID NO: 3086939 - RNA, 19 nt, Artificial Sequence
  Description of Artificial Sequence: Synthetic oligonucleotide
agcgguugaagcauugguc

SEQ ID NO: 3086940 - RNA, 19 nt, Artificial Sequence
  Description of Artificial Sequence: Synthetic oligonucleotide
caaaccagcgguugaagca

SEQ ID NO: 3086941 - RNA, 19 nt, Artificial Sequence
  Description of Artificial Sequence: Synthetic oligonucleotide
agugacaugcaggucaaga

SEQ ID NO: 3086942 - RNA, 19 nt, Artificial Sequence
  Description of Artificial Sequence: Synthetic oligonucleotide
cuuucuggacacacuguug

SEQ ID NO: 3086943 - RNA, 19 nt, Artificial Sequence
  Description of Artificial Sequence: Synthetic oligonucleotide
caugucagugcaagccucc

SEQ ID NO: 3086944 - RNA, 19 nt, Artificial Sequence
  Description of Artificial Sequence: Synthetic oligonucleotide
ucaugucagugcaagccuc

SEQ ID NO: 3086945 - RNA, 19 nt, Artificial Sequence
  Description of Artificial Sequence: Synthetic oligonucleotide
gucguauucgcgcuucaug

SEQ ID NO: 3086946 - RNA, 19 nt, Artificial Sequence
  Description of Artificial Sequence: Synthetic oligonucleotide
gagccguccccuuugagga

SEQ ID NO: 3086947 - RNA, 19 nt, Artificial Sequence
  Description of Artificial Sequence: Synthetic oligonucleotide
caguccuucuauaggaauc

SEQ ID NO: 3086948 - RNA, 19 nt, Artificial Sequence
  Description of Artificial Sequence: Synthetic oligonucleotide
gcuucacaacuuuugcugg

SEQ ID NO: 3086949 - RNA, 19 nt, Artificial Sequence
  Description of Artificial Sequence: Synthetic oligonucleotide
gaagaggucggugcacggg

SEQ ID NO: 3086950 - RNA, 19 nt, Artificial Sequence
  Description of Artificial Sequence: Synthetic oligonucleotide
cuauaggaaucucuuucuc

SEQ ID NO: 3086951 - RNA, 19 nt, Artificial Sequence
  Description of Artificial Sequence: Synthetic oligonucleotide
guauucgcgcuucauguca

SEQ ID NO: 3086952 - RNA, 19 nt, Artificial Sequence
  Description of Artificial Sequence: Synthetic oligonucleotide
uuggcuagcuucacaacuu

SEQ ID NO: 3086953 - RNA, 19 nt, Artificial Sequence
  Description of Artificial Sequence: Synthetic oligonucleotide
gaggccucucaguuuacug

SEQ ID NO: 3086954 - RNA, 19 nt, Artificial Sequence
  Description of Artificial Sequence: Synthetic oligonucleotide
ggagccguccccuuugagg

SEQ ID NO: 3086955 - RNA, 19 nt, Artificial Sequence
  Description of Artificial Sequence: Synthetic oligonucleotide
aaucccuuggcuagcuuca

SEQ ID NO: 3086956 - RNA, 19 nt, Artificial Sequence
  Description of Artificial Sequence: Synthetic oligonucleotide
ugaggaacuucucggcaaa

SEQ ID NO: 3086957 - RNA, 19 nt, Artificial Sequence
  Description of Artificial Sequence: Synthetic oligonucleotide
aguccuucuauaggaaucu

SEQ ID NO: 3086958 - RNA, 19 nt, Artificial Sequence
  Description of Artificial Sequence: Synthetic oligonucleotide
ugucagugcaagccucccc

SEQ ID NO: 3086959 - RNA, 19 nt, Artificial Sequence
  Description of Artificial Sequence: Synthetic oligonucleotide
uucuccuuuauugcuuucu

SEQ ID NO: 3086960 - RNA, 19 nt, Artificial Sequence
  Description of Artificial Sequence: Synthetic oligonucleotide
aggccucucaguuuacuga

SEQ ID NO: 3086961 - RNA, 19 nt, Artificial Sequence
  Description of Artificial Sequence: Synthetic oligonucleotide
uucaggcuuuucuuugcca

SEQ ID NO: 3086962 - RNA, 19 nt, Artificial Sequence
  Description of Artificial Sequence: Synthetic oligonucleotide
uucacaacuuuugcuggca

SEQ ID NO: 3086963 - RNA, 19 nt, Artificial Sequence
  Description of Artificial Sequence: Synthetic oligonucleotide
cuuuugcuggcaaaaucca

SEQ ID NO: 3086964 - RNA, 19 nt, Artificial Sequence
  Description of Artificial Sequence: Synthetic oligonucleotide
uggcaaaauccagaggccu

SEQ ID NO: 3086965 - RNA, 19 nt, Artificial Sequence
  Description of Artificial Sequence: Synthetic oligonucleotide
ucgcgcuucaugucagugc

SEQ ID NO: 3086966 - RNA, 19 nt, Artificial Sequence
  Description of Artificial Sequence: Synthetic oligonucleotide
guuugaagaggucggugca

SEQ ID NO: 3086967 - RNA, 19 nt, Artificial Sequence
  Description of Artificial Sequence: Synthetic oligonucleotide
cuccaguccuucuauagga

SEQ ID NO: 3086968 - RNA, 19 nt, Artificial Sequence
  Description of Artificial Sequence: Synthetic oligonucleotide
ugcuuucuggacacacugu

SEQ ID NO: 3086969 - RNA, 19 nt, Artificial Sequence
  Description of Artificial Sequence: Synthetic oligonucleotide
uuugaagaggucggugcac

SEQ ID NO: 3086970 - RNA, 19 nt, Artificial Sequence
  Description of Artificial Sequence: Synthetic oligonucleotide
gcauuggucguauucgcgc

SEQ ID NO: 3086971 - RNA, 19 nt, Artificial Sequence
  Description of Artificial Sequence: Synthetic oligonucleotide
ugacaucuuccuagugaca

SEQ ID NO: 3086972 - RNA, 19 nt, Artificial Sequence
  Description of Artificial Sequence: Synthetic oligonucleotide
ugguagcguuugaagaggu

SEQ ID NO: 3086973 - RNA, 19 nt, Artificial Sequence
  Description of Artificial Sequence: Synthetic oligonucleotide
ugcacggguccccggagcc

SEQ ID NO: 3086974 - RNA, 19 nt, Artificial Sequence
  Description of Artificial Sequence: Synthetic oligonucleotide
agcauuggucguauucgcg

SEQ ID NO: 3086975 - RNA, 19 nt, Artificial Sequence
  Description of Artificial Sequence: Synthetic oligonucleotide
acaucuuccuagugacaug

SEQ ID NO: 3086976 - RNA, 19 nt, Artificial Sequence
  Description of Artificial Sequence: Synthetic oligonucleotide
ccuagugacaugcagguca

SEQ ID NO: 3086977 - RNA, 19 nt, Artificial Sequence
  Description of Artificial Sequence: Synthetic oligonucleotide
ucggcaaaccagcgguuga

SEQ ID NO: 3086978 - RNA, 19 nt, Artificial Sequence
  Description of Artificial Sequence: Synthetic oligonucleotide
ggaacuucucggcaaacca

SEQ ID NO: 3086979 - RNA, 19 nt, Artificial Sequence
  Description of Artificial Sequence: Synthetic oligonucleotide
ggucaagaggaguuuucag

SEQ ID NO: 3086980 - RNA, 19 nt, Artificial Sequence
  Description of Artificial Sequence: Synthetic oligonucleotide
uccaguccuucuauaggaa

SEQ ID NO: 3086981 - RNA, 19 nt, Artificial Sequence
  Description of Artificial Sequence: Synthetic oligonucleotide
ucacaacuuuugcuggcaa

SEQ ID NO: 3086982 - RNA, 19 nt, Artificial Sequence
  Description of Artificial Sequence: Synthetic oligonucleotide
augucagugcaagccuccc

SEQ ID NO: 3086983 - RNA, 19 nt, Artificial Sequence
  Description of Artificial Sequence: Synthetic oligonucleotide
uggacacacuguugguagc

SEQ ID NO: 3086984 - RNA, 19 nt, Artificial Sequence
  Description of Artificial Sequence: Synthetic oligonucleotide
aggaaucucuuucuccuuu

SEQ ID NO: 3086985 - RNA, 19 nt, Artificial Sequence
  Description of Artificial Sequence: Synthetic oligonucleotide
augaacuccaguccuucua

SEQ ID NO: 3086986 - RNA, 19 nt, Artificial Sequence
  Description of Artificial Sequence: Synthetic oligonucleotide
gugcaagccuccccgacgc

SEQ ID NO: 3086987 - RNA, 19 nt, Artificial Sequence
  Description of Artificial Sequence: Synthetic oligonucleotide
ucuggacacacuguuggua

SEQ ID NO: 3086988 - RNA, 19 nt, Artificial Sequence
  Description of Artificial Sequence: Synthetic oligonucleotide
gcuagcuucacaacuuuug

SEQ ID NO: 3086989 - RNA, 19 nt, Artificial Sequence
  Description of Artificial Sequence: Synthetic oligonucleotide
auccagaggccucucaguu

SEQ ID NO: 3086990 - RNA, 19 nt, Artificial Sequence
  Description of Artificial Sequence: Synthetic oligonucleotide
gcuuuucuuugccauggcc

SEQ ID NO: 3086991 - RNA, 19 nt, Artificial Sequence
  Description of Artificial Sequence: Synthetic oligonucleotide
acuucucggcaaaccagcg

SEQ ID NO: 3086992 - RNA, 19 nt, Artificial Sequence
  Description of Artificial Sequence: Synthetic oligonucleotide
uucuuugccauggcccaug

SEQ ID NO: 3086993 - RNA, 19 nt, Artificial Sequence
  Description of Artificial Sequence: Synthetic oligonucleotide
uucuggacacacuguuggu

SEQ ID NO: 3086994 - RNA, 19 nt, Artificial Sequence
  Description of Artificial Sequence: Synthetic oligonucleotide
cguuugaagaggucggugc

SEQ ID NO: 3086995 - RNA, 19 nt, Artificial Sequence
  Description of Artificial Sequence: Synthetic oligonucleotide
aggucaagaggaguuuuca

SEQ ID NO: 3086996 - RNA, 19 nt, Artificial Sequence
  Description of Artificial Sequence: Synthetic oligonucleotide
ggaguuuucaggcuuuucu

SEQ ID NO: 3086997 - RNA, 19 nt, Artificial Sequence
  Description of Artificial Sequence: Synthetic oligonucleotide
gaggucggugcacgggucc

SEQ ID NO: 3086998 - RNA, 19 nt, Artificial Sequence
  Description of Artificial Sequence: Synthetic oligonucleotide
cuuggcuagcuucacaacu

SEQ ID NO: 3086999 - RNA, 19 nt, Artificial Sequence
  Description of Artificial Sequence: Synthetic oligonucleotide
gacaucuuccuagugacau

SEQ ID NO: 3087000 - RNA, 19 nt, Artificial Sequence
  Description of Artificial Sequence: Synthetic oligonucleotide
ccuuuauugcuuucuggac

SEQ ID NO: 3087001 - RNA, 19 nt, Artificial Sequence
  Description of Artificial Sequence: Synthetic oligonucleotide
acacuguugguagcguuug

SEQ ID NO: 3087002 - RNA, 19 nt, Artificial Sequence
  Description of Artificial Sequence: Synthetic oligonucleotide
uucgcgcuucaugucagug

SEQ ID NO: 3087003 - RNA, 19 nt, Artificial Sequence
  Description of Artificial Sequence: Synthetic oligonucleotide
ggacacacuguugguagcg

SEQ ID NO: 3087004 - RNA, 19 nt, Artificial Sequence
  Description of Artificial Sequence: Synthetic oligonucleotide
caggcuuuucuuugccaug

SEQ ID NO: 3087005 - RNA, 19 nt, Artificial Sequence
  Description of Artificial Sequence: Synthetic oligonucleotide
caggucaagaggaguuuuc

SEQ ID NO: 3087006 - RNA, 19 nt, Artificial Sequence
  Description of Artificial Sequence: Synthetic oligonucleotide
acuguugguagcguuugaa

SEQ ID NO: 3087007 - RNA, 19 nt, Artificial Sequence
  Description of Artificial Sequence: Synthetic oligonucleotide
auugcuuucuggacacacu

SEQ ID NO: 3087008 - RNA, 19 nt, Artificial Sequence
  Description of Artificial Sequence: Synthetic oligonucleotide
ucagugcaagccuccccga

SEQ ID NO: 3087009 - RNA, 19 nt, Artificial Sequence
  Description of Artificial Sequence: Synthetic oligonucleotide
aggaguuuucaggcuuuuc

SEQ ID NO: 3087010 - RNA, 19 nt, Artificial Sequence
  Description of Artificial Sequence: Synthetic oligonucleotide
ucccuuggcuagcuucaca

SEQ ID NO: 3087011 - RNA, 19 nt, Artificial Sequence
  Description of Artificial Sequence: Synthetic oligonucleotide
ggcccaugaacuccagucc

SEQ ID NO: 3087012 - RNA, 19 nt, Artificial Sequence
  Description of Artificial Sequence: Synthetic oligonucleotide
gaguuuucaggcuuuucuu

SEQ ID NO: 3087013 - RNA, 19 nt, Artificial Sequence
  Description of Artificial Sequence: Synthetic oligonucleotide
guuuacugacaucuuccua

SEQ ID NO: 3087014 - RNA, 19 nt, Artificial Sequence
  Description of Artificial Sequence: Synthetic oligonucleotide
ugccauggcccaugaacuc

SEQ ID NO: 3087015 - RNA, 19 nt, Artificial Sequence
  Description of Artificial Sequence: Synthetic oligonucleotide
cucucaguuuacugacauc

SEQ ID NO: 3087016 - RNA, 19 nt, Artificial Sequence
  Description of Artificial Sequence: Synthetic oligonucleotide
uggcuagcuucacaacuuu

SEQ ID NO: 3087017 - RNA, 19 nt, Artificial Sequence
  Description of Artificial Sequence: Synthetic oligonucleotide
uuucuccuuuauugcuuuc

SEQ ID NO: 3087018 - RNA, 19 nt, Artificial Sequence
  Description of Artificial Sequence: Synthetic oligonucleotide
aggucggugcacggguccc

SEQ ID NO: 3087019 - RNA, 19 nt, Artificial Sequence
  Description of Artificial Sequence: Synthetic oligonucleotide
uaggaaucucuuucuccuu

SEQ ID NO: 3087020 - RNA, 19 nt, Artificial Sequence
  Description of Artificial Sequence: Synthetic oligonucleotide
ggccucucaguuuacugac

SEQ ID NO: 3087021 - RNA, 19 nt, Artificial Sequence
  Description of Artificial Sequence: Synthetic oligonucleotide
acaugcaggucaagaggag

SEQ ID NO: 3087022 - RNA, 19 nt, Artificial Sequence
  Description of Artificial Sequence: Synthetic oligonucleotide
uuggucguauucgcgcuuc

SEQ ID NO: 3087023 - RNA, 19 nt, Artificial Sequence
  Description of Artificial Sequence: Synthetic oligonucleotide
cucggcaaaccagcgguug

SEQ ID NO: 3087024 - RNA, 19 nt, Artificial Sequence
  Description of Artificial Sequence: Synthetic oligonucleotide
acacacuguugguagcguu

SEQ ID NO: 3087025 - RNA, 19 nt, Artificial Sequence
  Description of Artificial Sequence: Synthetic oligonucleotide
uccagaggccucucaguuu

SEQ ID NO: 3087026 - RNA, 19 nt, Artificial Sequence
  Description of Artificial Sequence: Synthetic oligonucleotide
uuauugcuuucuggacaca

SEQ ID NO: 3087027 - RNA, 19 nt, Artificial Sequence
  Description of Artificial Sequence: Synthetic oligonucleotide
uggucguauucgcgcuuca

SEQ ID NO: 3087028 - RNA, 19 nt, Artificial Sequence
  Description of Artificial Sequence: Synthetic oligonucleotide
cccgacgcuguucauggcg

SEQ ID NO: 3087029 - RNA, 19 nt, Artificial Sequence
  Description of Artificial Sequence: Synthetic oligonucleotide
auuggucguauucgcgcuu

SEQ ID NO: 3087030 - RNA, 19 nt, Artificial Sequence
  Description of Artificial Sequence: Synthetic oligonucleotide
cacaacuuuugcuggcaaa

SEQ ID NO: 3087031 - RNA, 19 nt, Artificial Sequence
  Description of Artificial Sequence: Synthetic oligonucleotide
gcuucaugucagugcaagc

SEQ ID NO: 3087032 - RNA, 19 nt, Artificial Sequence
  Description of Artificial Sequence: Synthetic oligonucleotide
augcaggucaagaggaguu

SEQ ID NO: 3087033 - RNA, 19 nt, Artificial Sequence
  Description of Artificial Sequence: Synthetic oligonucleotide
agcguuugaagaggucggu

SEQ ID NO: 3087034 - RNA, 19 nt, Artificial Sequence
  Description of Artificial Sequence: Synthetic oligonucleotide
ugcaggucaagaggaguuu

SEQ ID NO: 3087035 - RNA, 19 nt, Artificial Sequence
  Description of Artificial Sequence: Synthetic oligonucleotide
aucccuuggcuagcuucac

SEQ ID NO: 3087036 - RNA, 19 nt, Artificial Sequence
  Description of Artificial Sequence: Synthetic oligonucleotide
auggcccaugaacuccagu

SEQ ID NO: 3087037 - RNA, 19 nt, Artificial Sequence
  Description of Artificial Sequence: Synthetic oligonucleotide
cagugcaagccuccccgac

SEQ ID NO: 3087038 - RNA, 19 nt, Artificial Sequence
  Description of Artificial Sequence: Synthetic oligonucleotide
gaaucucuuucuccuuuau

SEQ ID NO: 3087039 - RNA, 19 nt, Artificial Sequence
  Description of Artificial Sequence: Synthetic oligonucleotide
gaggaacuucucggcaaac

SEQ ID NO: 3087040 - RNA, 19 nt, Artificial Sequence
  Description of Artificial Sequence: Synthetic oligonucleotide
auucgcgcuucaugucagu

SEQ ID NO: 3087041 - RNA, 19 nt, Artificial Sequence
  Description of Artificial Sequence: Synthetic oligonucleotide
ucucggcaaaccagcgguu

SEQ ID NO: 3087042 - RNA, 19 nt, Artificial Sequence
  Description of Artificial Sequence: Synthetic oligonucleotide
agaggucggugcacggguc

SEQ ID NO: 3087043 - RNA, 19 nt, Artificial Sequence
  Description of Artificial Sequence: Synthetic oligonucleotide
gaacuccaguccuucuaua

SEQ ID NO: 3087044 - RNA, 19 nt, Artificial Sequence
  Description of Artificial Sequence: Synthetic oligonucleotide
cauggcccaugaacuccag

SEQ ID NO: 3087045 - RNA, 19 nt, Artificial Sequence
  Description of Artificial Sequence: Synthetic oligonucleotide
agaggccucucaguuuacu

SEQ ID NO: 3087046 - RNA, 19 nt, Artificial Sequence
  Description of Artificial Sequence: Synthetic oligonucleotide
cauuggucguauucgcgcu

SEQ ID NO: 3087047 - RNA, 19 nt, Artificial Sequence
  Description of Artificial Sequence: Synthetic oligonucleotide
ucggugcacggguccccgg

SEQ ID NO: 3087048 - RNA, 19 nt, Artificial Sequence
  Description of Artificial Sequence: Synthetic oligonucleotide
caagaggaguuuucaggcu

SEQ ID NO: 3087049 - RNA, 19 nt, Artificial Sequence
  Description of Artificial Sequence: Synthetic oligonucleotide
uagugacaugcaggucaag

SEQ ID NO: 3087050 - RNA, 19 nt, Artificial Sequence
  Description of Artificial Sequence: Synthetic oligonucleotide
ggcaaaccagcgguugaag

SEQ ID NO: 3087051 - RNA, 19 nt, Artificial Sequence
  Description of Artificial Sequence: Synthetic oligonucleotide
caaaauccagaggccucuc

SEQ ID NO: 3087052 - RNA, 19 nt, Artificial Sequence
  Description of Artificial Sequence: Synthetic oligonucleotide
agaggaguuuucaggcuuu

SEQ ID NO: 3087053 - RNA, 19 nt, Artificial Sequence
  Description of Artificial Sequence: Synthetic oligonucleotide
ggcaaaauccagaggccuc

SEQ ID NO: 3087054 - RNA, 19 nt, Artificial Sequence
  Description of Artificial Sequence: Synthetic oligonucleotide
gucggugcacggguccccg

SEQ ID NO: 3087055 - RNA, 19 nt, Artificial Sequence
  Description of Artificial Sequence: Synthetic oligonucleotide
uccuagugacaugcagguc

SEQ ID NO: 3087056 - RNA, 19 nt, Artificial Sequence
  Description of Artificial Sequence: Synthetic oligonucleotide
cuccccgacgcuguucaug

SEQ ID NO: 3087057 - RNA, 19 nt, Artificial Sequence
  Description of Artificial Sequence: Synthetic oligonucleotide
gugcacggguccccggagc

SEQ ID NO: 3087058 - RNA, 19 nt, Artificial Sequence
  Description of Artificial Sequence: Synthetic oligonucleotide
cuuucuccuuuauugcuuu

SEQ ID NO: 3087059 - RNA, 19 nt, Artificial Sequence
  Description of Artificial Sequence: Synthetic oligonucleotide
cuucuauaggaaucucuuu

SEQ ID NO: 3087060 - RNA, 19 nt, Artificial Sequence
  Description of Artificial Sequence: Synthetic oligonucleotide
gccauggcccaugaacucc

SEQ ID NO: 3087061 - RNA, 19 nt, Artificial Sequence
  Description of Artificial Sequence: Synthetic oligonucleotide
uugaagcauuggucguauu

SEQ ID NO: 3087062 - RNA, 19 nt, Artificial Sequence
  Description of Artificial Sequence: Synthetic oligonucleotide
ugcaagccuccccgacgcu

SEQ ID NO: 3087063 - RNA, 19 nt, Artificial Sequence
  Description of Artificial Sequence: Synthetic oligonucleotide
ggcuuuucuuugccauggc

SEQ ID NO: 3087064 - RNA, 19 nt, Artificial Sequence
  Description of Artificial Sequence: Synthetic oligonucleotide
guccccuuugaggaacuuc

SEQ ID NO: 3087065 - RNA, 19 nt, Artificial Sequence
  Description of Artificial Sequence: Synthetic oligonucleotide
ggaaucucuuucuccuuua

SEQ ID NO: 3087066 - RNA, 19 nt, Artificial Sequence
  Description of Artificial Sequence: Synthetic oligonucleotide
accagcgguugaagcauug

SEQ ID NO: 3087067 - RNA, 19 nt, Artificial Sequence
  Description of Artificial Sequence: Synthetic oligonucleotide
ggugcacggguccccggag

SEQ ID NO: 3087068 - RNA, 19 nt, Artificial Sequence
  Description of Artificial Sequence: Synthetic oligonucleotide
guugaagcauuggucguau

SEQ ID NO: 3087069 - RNA, 19 nt, Artificial Sequence
  Description of Artificial Sequence: Synthetic oligonucleotide
caugaacuccaguccuucu

SEQ ID NO: 3087070 - RNA, 19 nt, Artificial Sequence
  Description of Artificial Sequence: Synthetic oligonucleotide
ccuuggcuagcuucacaac

SEQ ID NO: 3087071 - RNA, 19 nt, Artificial Sequence
  Description of Artificial Sequence: Synthetic oligonucleotide
gcguuugaagaggucggug

SEQ ID NO: 3087072 - RNA, 19 nt, Artificial Sequence
  Description of Artificial Sequence: Synthetic oligonucleotide
aucuuccuagugacaugca

SEQ ID NO: 3087073 - RNA, 19 nt, Artificial Sequence
  Description of Artificial Sequence: Synthetic oligonucleotide
cagcgguugaagcauuggu

SEQ ID NO: 3087074 - RNA, 19 nt, Artificial Sequence
  Description of Artificial Sequence: Synthetic oligonucleotide
cgcuucaugucagugcaag

SEQ ID NO: 3087075 - RNA, 19 nt, Artificial Sequence
  Description of Artificial Sequence: Synthetic oligonucleotide
cccuuggcuagcuucacaa

SEQ ID NO: 3087076 - RNA, 19 nt, Artificial Sequence
  Description of Artificial Sequence: Synthetic oligonucleotide
ccuucuauaggaaucucuu

SEQ ID NO: 3087077 - RNA, 19 nt, Artificial Sequence
  Description of Artificial Sequence: Synthetic oligonucleotide
cacacuguugguagcguuu

SEQ ID NO: 3087078 - RNA, 19 nt, Artificial Sequence
  Description of Artificial Sequence: Synthetic oligonucleotide
gcuuucuggacacacuguu

SEQ ID NO: 3087079 - RNA, 19 nt, Artificial Sequence
  Description of Artificial Sequence: Synthetic oligonucleotide
cagaggccucucaguuuac

SEQ ID NO: 3087080 - RNA, 19 nt, Artificial Sequence
  Description of Artificial Sequence: Synthetic oligonucleotide
ccagcgguugaagcauugg

SEQ ID NO: 3087081 - RNA, 19 nt, Artificial Sequence
  Description of Artificial Sequence: Synthetic oligonucleotide
guccuucuauaggaaucuc

SEQ ID NO: 3087082 - RNA, 19 nt, Artificial Sequence
  Description of Artificial Sequence: Synthetic oligonucleotide
gguugaagcauuggucgua

SEQ ID NO: 3087083 - RNA, 19 nt, Artificial Sequence
  Description of Artificial Sequence: Synthetic oligonucleotide
gacacacuguugguagcgu

SEQ ID NO: 3087084 - RNA, 19 nt, Artificial Sequence
  Description of Artificial Sequence: Synthetic oligonucleotide
aaccagcgguugaagcauu

SEQ ID NO: 3087085 - RNA, 19 nt, Artificial Sequence
  Description of Artificial Sequence: Synthetic oligonucleotide
gcaagccuccccgacgcug

SEQ ID NO: 3087086 - RNA, 19 nt, Artificial Sequence
  Description of Artificial Sequence: Synthetic oligonucleotide
ccaugaacuccaguccuuc

SEQ ID NO: 3087087 - RNA, 19 nt, Artificial Sequence
  Description of Artificial Sequence: Synthetic oligonucleotide
gcaaaauccagaggccucu

SEQ ID NO: 3087088 - RNA, 19 nt, Artificial Sequence
  Description of Artificial Sequence: Synthetic oligonucleotide
cguauucgcgcuucauguc

SEQ ID NO: 3087089 - RNA, 19 nt, Artificial Sequence
  Description of Artificial Sequence: Synthetic oligonucleotide
agccuccccgacgcuguuc

SEQ ID NO: 3087090 - RNA, 19 nt, Artificial Sequence
  Description of Artificial Sequence: Synthetic oligonucleotide
cacuguugguagcguuuga

SEQ ID NO: 3087091 - RNA, 19 nt, Artificial Sequence
  Description of Artificial Sequence: Synthetic oligonucleotide
caagccuccccgacgcugu

SEQ ID NO: 3087092 - RNA, 19 nt, Artificial Sequence
  Description of Artificial Sequence: Synthetic oligonucleotide
gguagcguuugaagagguc

SEQ ID NO: 3087093 - RNA, 19 nt, Artificial Sequence
  Description of Artificial Sequence: Synthetic oligonucleotide
gccuccccgacgcuguuca

SEQ ID NO: 3087094 - RNA, 19 nt, Artificial Sequence
  Description of Artificial Sequence: Synthetic oligonucleotide
cucaguuuacugacaucuu

SEQ ID NO: 3087095 - RNA, 19 nt, Artificial Sequence
  Description of Artificial Sequence: Synthetic oligonucleotide
gcccaugaacuccaguccu

SEQ ID NO: 3087096 - RNA, 19 nt, Artificial Sequence
  Description of Artificial Sequence: Synthetic oligonucleotide
cgcgcuucaugucagugca

SEQ ID NO: 3087097 - RNA, 19 nt, Artificial Sequence
  Description of Artificial Sequence: Synthetic oligonucleotide
aagccuccccgacgcuguu

SEQ ID NO: 3087098 - RNA, 19 nt, Artificial Sequence
  Description of Artificial Sequence: Synthetic oligonucleotide
agccguccccuuugaggaa

SEQ ID NO: 3087099 - RNA, 19 nt, Artificial Sequence
  Description of Artificial Sequence: Synthetic oligonucleotide
ccauggcccaugaacucca

SEQ ID NO: 3087100 - RNA, 19 nt, Artificial Sequence
  Description of Artificial Sequence: Synthetic oligonucleotide
caacuuuugcuggcaaaau

SEQ ID NO: 3087101 - RNA, 19 nt, Artificial Sequence
  Description of Artificial Sequence: Synthetic oligonucleotide
cuuugccauggcccaugaa

SEQ ID NO: 3087102 - RNA, 19 nt, Artificial Sequence
  Description of Artificial Sequence: Synthetic oligonucleotide
gccguccccuuugaggaac

SEQ ID NO: 3087103 - RNA, 19 nt, Artificial Sequence
  Description of Artificial Sequence: Synthetic oligonucleotide
ccccuuugaggaacuucuc

SEQ ID NO: 3087104 - RNA, 19 nt, Artificial Sequence
  Description of Artificial Sequence: Synthetic oligonucleotide
gguccccggagccgucccc

SEQ ID NO: 3087105 - RNA, 19 nt, Artificial Sequence
  Description of Artificial Sequence: Synthetic oligonucleotide
cccggagccguccccuuug

SEQ ID NO: 3087106 - RNA, 19 nt, Artificial Sequence
  Description of Artificial Sequence: Synthetic oligonucleotide
ccucucaguuuacugacau

SEQ ID NO: 3087107 - RNA, 19 nt, Artificial Sequence
  Description of Artificial Sequence: Synthetic oligonucleotide
ggucggugcacgggucccc

SEQ ID NO: 3087108 - RNA, 19 nt, Artificial Sequence
  Description of Artificial Sequence: Synthetic oligonucleotide
gcacggguccccggagccg

SEQ ID NO: 3087109 - RNA, 19 nt, Artificial Sequence
  Description of Artificial Sequence: Synthetic oligonucleotide
gaggaguuuucaggcuuuu

SEQ ID NO: 3087110 - RNA, 19 nt, Artificial Sequence
  Description of Artificial Sequence: Synthetic oligonucleotide
ggguccccggagccguccc

SEQ ID NO: 3087111 - RNA, 19 nt, Artificial Sequence
  Description of Artificial Sequence: Synthetic oligonucleotide
ccaguccuucuauaggaau

SEQ ID NO: 3087112 - RNA, 19 nt, Artificial Sequence
  Description of Artificial Sequence: Synthetic oligonucleotide
uccccggagccguccccuu

SEQ ID NO: 3087113 - RNA, 19 nt, Artificial Sequence
  Description of Artificial Sequence: Synthetic oligonucleotide
gccucucaguuuacugaca

SEQ ID NO: 3087114 - RNA, 19 nt, Artificial Sequence
  Description of Artificial Sequence: Synthetic oligonucleotide
acggguccccggagccguc

SEQ ID NO: 3087115 - RNA, 19 nt, Artificial Sequence
  Description of Artificial Sequence: Synthetic oligonucleotide
gcaggucaagaggaguuuu

SEQ ID NO: 3087116 - RNA, 19 nt, Artificial Sequence
  Description of Artificial Sequence: Synthetic oligonucleotide
ccccgacgcuguucauggc

SEQ ID NO: 3087117 - RNA, 19 nt, Artificial Sequence
  Description of Artificial Sequence: Synthetic oligonucleotide
guccccggagccguccccu

SEQ ID NO: 3087118 - RNA, 19 nt, Artificial Sequence
  Description of Artificial Sequence: Synthetic oligonucleotide
ggucguauucgcgcuucau

SEQ ID NO: 3087119 - RNA, 19 nt, Artificial Sequence
  Description of Artificial Sequence: Synthetic oligonucleotide
ggcuagcuucacaacuuuu

SEQ ID NO: 3087120 - RNA, 19 nt, Artificial Sequence
  Description of Artificial Sequence: Synthetic oligonucleotide
cggagccguccccuuugag

SEQ ID NO: 3087121 - RNA, 19 nt, Artificial Sequence
  Description of Artificial Sequence: Synthetic oligonucleotide
cgguugaagcauuggucgu

SEQ ID NO: 3087122 - RNA, 19 nt, Artificial Sequence
  Description of Artificial Sequence: Synthetic oligonucleotide
cccaugaacuccaguccuu

SEQ ID NO: 3087123 - RNA, 19 nt, Artificial Sequence
  Description of Artificial Sequence: Synthetic oligonucleotide
cggugcacggguccccgga

SEQ ID NO: 3087124 - RNA, 19 nt, Artificial Sequence
  Description of Artificial Sequence: Synthetic oligonucleotide
gcgcuucaugucagugcaa

SEQ ID NO: 3087125 - RNA, 19 nt, Artificial Sequence
  Description of Artificial Sequence: Synthetic oligonucleotide
cggcaaaccagcgguugaa

SEQ ID NO: 3087126 - RNA, 19 nt, Artificial Sequence
  Description of Artificial Sequence: Synthetic oligonucleotide
ccggagccguccccuuuga

SEQ ID NO: 3087127 - RNA, 19 nt, Artificial Sequence
  Description of Artificial Sequence: Synthetic oligonucleotide
ccguccccuuugaggaacu

SEQ ID NO: 3087128 - RNA, 19 nt, Artificial Sequence
  Description of Artificial Sequence: Synthetic oligonucleotide
ccuccccgacgcuguucau

SEQ ID NO: 3087129 - RNA, 19 nt, Artificial Sequence
  Description of Artificial Sequence: Synthetic oligonucleotide
ccccggagccguccccuuu

SEQ ID NO: 3087130 - RNA, 19 nt, Artificial Sequence
  Description of Artificial Sequence: Synthetic oligonucleotide
cguccccuuugaggaacuu

SEQ ID NO: 3087131 - RNA, 19 nt, Artificial Sequence
  Description of Artificial Sequence: Synthetic oligonucleotide
uuuaccaucauuaaaaucc

SEQ ID NO: 3087132 - RNA, 19 nt, Artificial Sequence
  Description of Artificial Sequence: Synthetic oligonucleotide
caugugauuaauaacagcg

SEQ ID NO: 3087133 - RNA, 19 nt, Artificial Sequence
  Description of Artificial Sequence: Synthetic oligonucleotide
acagcguccacauaaauac

SEQ ID NO: 3087134 - RNA, 19 nt, Artificial Sequence
  Description of Artificial Sequence: Synthetic oligonucleotide
aauaacagcguccacauaa

SEQ ID NO: 3087135 - RNA, 19 nt, Artificial Sequence
  Description of Artificial Sequence: Synthetic oligonucleotide
aaugagacgguucauauau

SEQ ID NO: 3087136 - RNA, 19 nt, Artificial Sequence
  Description of Artificial Sequence: Synthetic oligonucleotide
aauacggacaccaacauug

SEQ ID NO: 3087137 - RNA, 19 nt, Artificial Sequence
  Description of Artificial Sequence: Synthetic oligonucleotide
cagaguauggaacugaugg

SEQ ID NO: 3087138 - RNA, 19 nt, Artificial Sequence
  Description of Artificial Sequence: Synthetic oligonucleotide
uguaguaacuuccacaagu

SEQ ID NO: 3087139 - RNA, 19 nt, Artificial Sequence
  Description of Artificial Sequence: Synthetic oligonucleotide
uaaaaucccaaccagagua

SEQ ID NO: 3087140 - RNA, 19 nt, Artificial Sequence
  Description of Artificial Sequence: Synthetic oligonucleotide
uucuccauuacauuuacca

SEQ ID NO: 3087141 - RNA, 19 nt, Artificial Sequence
  Description of Artificial Sequence: Synthetic oligonucleotide
gauccagaaguccagacag

SEQ ID NO: 3087142 - RNA, 19 nt, Artificial Sequence
  Description of Artificial Sequence: Synthetic oligonucleotide
ucauuaaaaucccaaccag

SEQ ID NO: 3087143 - RNA, 19 nt, Artificial Sequence
  Description of Artificial Sequence: Synthetic oligonucleotide
cauauauucagccaccuug

SEQ ID NO: 3087144 - RNA, 19 nt, Artificial Sequence
  Description of Artificial Sequence: Synthetic oligonucleotide
uauucagccaccuuggaac

SEQ ID NO: 3087145 - RNA, 19 nt, Artificial Sequence
  Description of Artificial Sequence: Synthetic oligonucleotide
acgaacguaaucuuucucg

SEQ ID NO: 3087146 - RNA, 19 nt, Artificial Sequence
  Description of Artificial Sequence: Synthetic oligonucleotide
uuucucgagugcaagaucc

SEQ ID NO: 3087147 - RNA, 19 nt, Artificial Sequence
  Description of Artificial Sequence: Synthetic oligonucleotide
aucauuaaaaucccaacca

SEQ ID NO: 3087148 - RNA, 19 nt, Artificial Sequence
  Description of Artificial Sequence: Synthetic oligonucleotide
acagacgacaauuucugac

SEQ ID NO: 3087149 - RNA, 19 nt, Artificial Sequence
  Description of Artificial Sequence: Synthetic oligonucleotide
aauuucugaccugauuagc

SEQ ID NO: 3087150 - RNA, 19 nt, Artificial Sequence
  Description of Artificial Sequence: Synthetic oligonucleotide
acgguucauauauucagcc

SEQ ID NO: 3087151 - RNA, 19 nt, Artificial Sequence
  Description of Artificial Sequence: Synthetic oligonucleotide
uccauuacauuuaccauca

SEQ ID NO: 3087152 - RNA, 19 nt, Artificial Sequence
  Description of Artificial Sequence: Synthetic oligonucleotide
aacguaaucuuucucgagu

SEQ ID NO: 3087153 - RNA, 19 nt, Artificial Sequence
  Description of Artificial Sequence: Synthetic oligonucleotide
auuaaaaucccaaccagag

SEQ ID NO: 3087154 - RNA, 19 nt, Artificial Sequence
  Description of Artificial Sequence: Synthetic oligonucleotide
acaugugauuaauaacagc

SEQ ID NO: 3087155 - RNA, 19 nt, Artificial Sequence
  Description of Artificial Sequence: Synthetic oligonucleotide
auuguaguaacuuccacaa

SEQ ID NO: 3087156 - RNA, 19 nt, Artificial Sequence
  Description of Artificial Sequence: Synthetic oligonucleotide
ugugauuaauaacagcguc

SEQ ID NO: 3087157 - RNA, 19 nt, Artificial Sequence
  Description of Artificial Sequence: Synthetic oligonucleotide
aaguacugcuuguuccugc

SEQ ID NO: 3087158 - RNA, 19 nt, Artificial Sequence
  Description of Artificial Sequence: Synthetic oligonucleotide
aagauccagaaguccagac

SEQ ID NO: 3087159 - RNA, 19 nt, Artificial Sequence
  Description of Artificial Sequence: Synthetic oligonucleotide
cugauuagcgucauuguag

SEQ ID NO: 3087160 - RNA, 19 nt, Artificial Sequence
  Description of Artificial Sequence: Synthetic oligonucleotide
auuuaccaucauuaaaauc

SEQ ID NO: 3087161 - RNA, 19 nt, Artificial Sequence
  Description of Artificial Sequence: Synthetic oligonucleotide
uccacauaaauacggacac

SEQ ID NO: 3087162 - RNA, 19 nt, Artificial Sequence
  Description of Artificial Sequence: Synthetic oligonucleotide
aacauuguugcaccucguc

SEQ ID NO: 3087163 - RNA, 19 nt, Artificial Sequence
  Description of Artificial Sequence: Synthetic oligonucleotide
auuaauaacagcguccaca

SEQ ID NO: 3087164 - RNA, 19 nt, Artificial Sequence
  Description of Artificial Sequence: Synthetic oligonucleotide
acaccaacauuguugcacc

SEQ ID NO: 3087165 - RNA, 19 nt, Artificial Sequence
  Description of Artificial Sequence: Synthetic oligonucleotide
acaauuucugaccugauua

SEQ ID NO: 3087166 - RNA, 19 nt, Artificial Sequence
  Description of Artificial Sequence: Synthetic oligonucleotide
uuagcgucauuguaguuag

SEQ ID NO: 3087167 - RNA, 19 nt, Artificial Sequence
  Description of Artificial Sequence: Synthetic oligonucleotide
uagcauuguaguaacuucc

SEQ ID NO: 3087168 - RNA, 19 nt, Artificial Sequence
  Description of Artificial Sequence: Synthetic oligonucleotide
auuacauuuaccaucauua

SEQ ID NO: 3087169 - RNA, 19 nt, Artificial Sequence
  Description of Artificial Sequence: Synthetic oligonucleotide
uuagaaauuucuccauuac

SEQ ID NO: 3087170 - RNA, 19 nt, Artificial Sequence
  Description of Artificial Sequence: Synthetic oligonucleotide
uagaaauuucuccauuaca

SEQ ID NO: 3087171 - RNA, 19 nt, Artificial Sequence
  Description of Artificial Sequence: Synthetic oligonucleotide
gaaaaucccuguuauuagc

SEQ ID NO: 3087172 - RNA, 19 nt, Artificial Sequence
  Description of Artificial Sequence: Synthetic oligonucleotide
auuucuccauuacauuuac

SEQ ID NO: 3087173 - RNA, 19 nt, Artificial Sequence
  Description of Artificial Sequence: Synthetic oligonucleotide
agacgguucauauauucag

SEQ ID NO: 3087174 - RNA, 19 nt, Artificial Sequence
  Description of Artificial Sequence: Synthetic oligonucleotide
guaguuagaaauuucucca

SEQ ID NO: 3087175 - RNA, 19 nt, Artificial Sequence
  Description of Artificial Sequence: Synthetic oligonucleotide
uuaauaacagcguccacau

SEQ ID NO: 3087176 - RNA, 19 nt, Artificial Sequence
  Description of Artificial Sequence: Synthetic oligonucleotide
ugauuaauaacagcgucca

SEQ ID NO: 3087177 - RNA, 19 nt, Artificial Sequence
  Description of Artificial Sequence: Synthetic oligonucleotide
acacaugugauuaauaaca

SEQ ID NO: 3087178 - RNA, 19 nt, Artificial Sequence
  Description of Artificial Sequence: Synthetic oligonucleotide
uuaccaucauuaaaauccc

SEQ ID NO: 3087179 - RNA, 19 nt, Artificial Sequence
  Description of Artificial Sequence: Synthetic oligonucleotide
ugcaagauccagaagucca

SEQ ID NO: 3087180 - RNA, 19 nt, Artificial Sequence
  Description of Artificial Sequence: Synthetic oligonucleotide
uggaacugauggaaaaucc

SEQ ID NO: 3087181 - RNA, 19 nt, Artificial Sequence
  Description of Artificial Sequence: Synthetic oligonucleotide
cauaaauacggacaccaac

SEQ ID NO: 3087182 - RNA, 19 nt, Artificial Sequence
  Description of Artificial Sequence: Synthetic oligonucleotide
uuauuagcauuguaguaac

SEQ ID NO: 3087183 - RNA, 19 nt, Artificial Sequence
  Description of Artificial Sequence: Synthetic oligonucleotide
aacgaacguaaucuuucuc

SEQ ID NO: 3087184 - RNA, 19 nt, Artificial Sequence
  Description of Artificial Sequence: Synthetic oligonucleotide
auaaauacggacaccaaca

SEQ ID NO: 3087185 - RNA, 19 nt, Artificial Sequence
  Description of Artificial Sequence: Synthetic oligonucleotide
acauuuaccaucauuaaaa

SEQ ID NO: 3087186 - RNA, 19 nt, Artificial Sequence
  Description of Artificial Sequence: Synthetic oligonucleotide
cacaaguacugcuuguucc

SEQ ID NO: 3087187 - RNA, 19 nt, Artificial Sequence
  Description of Artificial Sequence: Synthetic oligonucleotide
uuagcauuguaguaacuuc

SEQ ID NO: 3087188 - RNA, 19 nt, Artificial Sequence
  Description of Artificial Sequence: Synthetic oligonucleotide
auuguugcaccucgucacc

SEQ ID NO: 3087189 - RNA, 19 nt, Artificial Sequence
  Description of Artificial Sequence: Synthetic oligonucleotide
guaacuuccacaaguacug

SEQ ID NO: 3087190 - RNA, 19 nt, Artificial Sequence
  Description of Artificial Sequence: Synthetic oligonucleotide
auuucugaccugauuagcg

SEQ ID NO: 3087191 - RNA, 19 nt, Artificial Sequence
  Description of Artificial Sequence: Synthetic oligonucleotide
agaaauuucuccauuacau

SEQ ID NO: 3087192 - RNA, 19 nt, Artificial Sequence
  Description of Artificial Sequence: Synthetic oligonucleotide
ccuguuauuagcauuguag

SEQ ID NO: 3087193 - RNA, 19 nt, Artificial Sequence
  Description of Artificial Sequence: Synthetic oligonucleotide
cagacgacaauuucugacc

SEQ ID NO: 3087194 - RNA, 19 nt, Artificial Sequence
  Description of Artificial Sequence: Synthetic oligonucleotide
uuaaaaucccaaccagagu

SEQ ID NO: 3087195 - RNA, 19 nt, Artificial Sequence
  Description of Artificial Sequence: Synthetic oligonucleotide
auuguaguuagaaauuucu

SEQ ID NO: 3087196 - RNA, 19 nt, Artificial Sequence
  Description of Artificial Sequence: Synthetic oligonucleotide
uggaaaaucccuguuauua

SEQ ID NO: 3087197 - RNA, 19 nt, Artificial Sequence
  Description of Artificial Sequence: Synthetic oligonucleotide
cuccauuacauuuaccauc

SEQ ID NO: 3087198 - RNA, 19 nt, Artificial Sequence
  Description of Artificial Sequence: Synthetic oligonucleotide
auauauucagccaccuugg

SEQ ID NO: 3087199 - RNA, 19 nt, Artificial Sequence
  Description of Artificial Sequence: Synthetic oligonucleotide
ugauuagcgucauuguagu

SEQ ID NO: 3087200 - RNA, 19 nt, Artificial Sequence
  Description of Artificial Sequence: Synthetic oligonucleotide
guuauuagcauuguaguaa

SEQ ID NO: 3087201 - RNA, 19 nt, Artificial Sequence
  Description of Artificial Sequence: Synthetic oligonucleotide
aguaacuuccacaaguacu

SEQ ID NO: 3087202 - RNA, 19 nt, Artificial Sequence
  Description of Artificial Sequence: Synthetic oligonucleotide
cauuguugcaccucgucac

SEQ ID NO: 3087203 - RNA, 19 nt, Artificial Sequence
  Description of Artificial Sequence: Synthetic oligonucleotide
gagugcaagauccagaagu

SEQ ID NO: 3087204 - RNA, 19 nt, Artificial Sequence
  Description of Artificial Sequence: Synthetic oligonucleotide
aaaaucccuguuauuagca

SEQ ID NO: 3087205 - RNA, 19 nt, Artificial Sequence
  Description of Artificial Sequence: Synthetic oligonucleotide
uguuauuagcauuguagua

SEQ ID NO: 3087206 - RNA, 19 nt, Artificial Sequence
  Description of Artificial Sequence: Synthetic oligonucleotide
cacaugugauuaauaacag

SEQ ID NO: 3087207 - RNA, 19 nt, Artificial Sequence
  Description of Artificial Sequence: Synthetic oligonucleotide
aguacugcuuguuccugcg

SEQ ID NO: 3087208 - RNA, 19 nt, Artificial Sequence
  Description of Artificial Sequence: Synthetic oligonucleotide
ugagacgguucauauauuc

SEQ ID NO: 3087209 - RNA, 19 nt, Artificial Sequence
  Description of Artificial Sequence: Synthetic oligonucleotide
uuguaguuagaaauuucuc

SEQ ID NO: 3087210 - RNA, 19 nt, Artificial Sequence
  Description of Artificial Sequence: Synthetic oligonucleotide
caauuucugaccugauuag

SEQ ID NO: 3087211 - RNA, 19 nt, Artificial Sequence
  Description of Artificial Sequence: Synthetic oligonucleotide
cagaaguccagacagacga

SEQ ID NO: 3087212 - RNA, 19 nt, Artificial Sequence
  Description of Artificial Sequence: Synthetic oligonucleotide
uacugcuuguuccugcgcc

SEQ ID NO: 3087213 - RNA, 19 nt, Artificial Sequence
  Description of Artificial Sequence: Synthetic oligonucleotide
ucaaugagacgguucauau

SEQ ID NO: 3087214 - RNA, 19 nt, Artificial Sequence
  Description of Artificial Sequence: Synthetic oligonucleotide
gguucauauauucagccac

SEQ ID NO: 3087215 - RNA, 19 nt, Artificial Sequence
  Description of Artificial Sequence: Synthetic oligonucleotide
gaccugauuagcgucauug

SEQ ID NO: 3087216 - RNA, 19 nt, Artificial Sequence
  Description of Artificial Sequence: Synthetic oligonucleotide
aacuuccacaaguacugcu

SEQ ID NO: 3087217 - RNA, 19 nt, Artificial Sequence
  Description of Artificial Sequence: Synthetic oligonucleotide
gugauuaauaacagcgucc

SEQ ID NO: 3087218 - RNA, 19 nt, Artificial Sequence
  Description of Artificial Sequence: Synthetic oligonucleotide
gacaccaacauuguugcac

SEQ ID NO: 3087219 - RNA, 19 nt, Artificial Sequence
  Description of Artificial Sequence: Synthetic oligonucleotide
uaaauacggacaccaacau

SEQ ID NO: 3087220 - RNA, 19 nt, Artificial Sequence
  Description of Artificial Sequence: Synthetic oligonucleotide
auggaacugauggaaaauc

SEQ ID NO: 3087221 - RNA, 19 nt, Artificial Sequence
  Description of Artificial Sequence: Synthetic oligonucleotide
aaucuuucucgagugcaag

SEQ ID NO: 3087222 - RNA, 19 nt, Artificial Sequence
  Description of Artificial Sequence: Synthetic oligonucleotide
cacacaugugauuaauaac

SEQ ID NO: 3087223 - RNA, 19 nt, Artificial Sequence
  Description of Artificial Sequence: Synthetic oligonucleotide
cauuguaguaacuuccaca

SEQ ID NO: 3087224 - RNA, 19 nt, Artificial Sequence
  Description of Artificial Sequence: Synthetic oligonucleotide
ugauggaaaaucccuguua

SEQ ID NO: 3087225 - RNA, 19 nt, Artificial Sequence
  Description of Artificial Sequence: Synthetic oligonucleotide
ucugaccugauuagcguca

SEQ ID NO: 3087226 - RNA, 19 nt, Artificial Sequence
  Description of Artificial Sequence: Synthetic oligonucleotide
acugauggaaaaucccugu

SEQ ID NO: 3087227 - RNA, 19 nt, Artificial Sequence
  Description of Artificial Sequence: Synthetic oligonucleotide
auucagccaccuuggaacg

SEQ ID NO: 3087228 - RNA, 19 nt, Artificial Sequence
  Description of Artificial Sequence: Synthetic oligonucleotide
acguaaucuuucucgagug

SEQ ID NO: 3087229 - RNA, 19 nt, Artificial Sequence
  Description of Artificial Sequence: Synthetic oligonucleotide
cauuaaaaucccaaccaga

SEQ ID NO: 3087230 - RNA, 19 nt, Artificial Sequence
  Description of Artificial Sequence: Synthetic oligonucleotide
gaacguaaucuuucucgag

SEQ ID NO: 3087231 - RNA, 19 nt, Artificial Sequence
  Description of Artificial Sequence: Synthetic oligonucleotide
acauuguugcaccucguca

SEQ ID NO: 3087232 - RNA, 19 nt, Artificial Sequence
  Description of Artificial Sequence: Synthetic oligonucleotide
uuucugaccugauuagcgu

SEQ ID NO: 3087233 - RNA, 19 nt, Artificial Sequence
  Description of Artificial Sequence: Synthetic oligonucleotide
acaaguacugcuuguuccu

SEQ ID NO: 3087234 - RNA, 19 nt, Artificial Sequence
  Description of Artificial Sequence: Synthetic oligonucleotide
ucgagugcaagauccagaa

SEQ ID NO: 3087235 - RNA, 19 nt, Artificial Sequence
  Description of Artificial Sequence: Synthetic oligonucleotide
aacugauggaaaaucccug

SEQ ID NO: 3087236 - RNA, 19 nt, Artificial Sequence
  Description of Artificial Sequence: Synthetic oligonucleotide
aaucccuguuauuagcauu

SEQ ID NO: 3087237 - RNA, 19 nt, Artificial Sequence
  Description of Artificial Sequence: Synthetic oligonucleotide
uguuccugcgccaccaccu

SEQ ID NO: 3087238 - RNA, 19 nt, Artificial Sequence
  Description of Artificial Sequence: Synthetic oligonucleotide
uaguaacuuccacaaguac

SEQ ID NO: 3087239 - RNA, 19 nt, Artificial Sequence
  Description of Artificial Sequence: Synthetic oligonucleotide
ggaaaaucccuguuauuag

SEQ ID NO: 3087240 - RNA, 19 nt, Artificial Sequence
  Description of Artificial Sequence: Synthetic oligonucleotide
aaaucccuguuauuagcau

SEQ ID NO: 3087241 - RNA, 19 nt, Artificial Sequence
  Description of Artificial Sequence: Synthetic oligonucleotide
agcguccacauaaauacgg

SEQ ID NO: 3087242 - RNA, 19 nt, Artificial Sequence
  Description of Artificial Sequence: Synthetic oligonucleotide
auuagcauuguaguaacuu

SEQ ID NO: 3087243 - RNA, 19 nt, Artificial Sequence
  Description of Artificial Sequence: Synthetic oligonucleotide
cacauaaauacggacacca

SEQ ID NO: 3087244 - RNA, 19 nt, Artificial Sequence
  Description of Artificial Sequence: Synthetic oligonucleotide
guuagaaauuucuccauua

SEQ ID NO: 3087245 - RNA, 19 nt, Artificial Sequence
  Description of Artificial Sequence: Synthetic oligonucleotide
agaguauggaacugaugga

SEQ ID NO: 3087246 - RNA, 19 nt, Artificial Sequence
  Description of Artificial Sequence: Synthetic oligonucleotide
aaauacggacaccaacauu

SEQ ID NO: 3087247 - RNA, 19 nt, Artificial Sequence
  Description of Artificial Sequence: Synthetic oligonucleotide
agugcaagauccagaaguc

SEQ ID NO: 3087248 - RNA, 19 nt, Artificial Sequence
  Description of Artificial Sequence: Synthetic oligonucleotide
uuguaguaacuuccacaag

SEQ ID NO: 3087249 - RNA, 19 nt, Artificial Sequence
  Description of Artificial Sequence: Synthetic oligonucleotide
aauuucuccauuacauuua

SEQ ID NO: 3087250 - RNA, 19 nt, Artificial Sequence
  Description of Artificial Sequence: Synthetic oligonucleotide
ucuccauuacauuuaccau

SEQ ID NO: 3087251 - RNA, 19 nt, Artificial Sequence
  Description of Artificial Sequence: Synthetic oligonucleotide
auuagcgucauuguaguua

SEQ ID NO: 3087252 - RNA, 19 nt, Artificial Sequence
  Description of Artificial Sequence: Synthetic oligonucleotide
uaaucuuucucgagugcaa

SEQ ID NO: 3087253 - RNA, 19 nt, Artificial Sequence
  Description of Artificial Sequence: Synthetic oligonucleotide
uauauucagccaccuugga

SEQ ID NO: 3087254 - RNA, 19 nt, Artificial Sequence
  Description of Artificial Sequence: Synthetic oligonucleotide
acggacaccaacauuguug

SEQ ID NO: 3087255 - RNA, 19 nt, Artificial Sequence
  Description of Artificial Sequence: Synthetic oligonucleotide
aguuagaaauuucuccauu

SEQ ID NO: 3087256 - RNA, 19 nt, Artificial Sequence
  Description of Artificial Sequence: Synthetic oligonucleotide
aaaucccaaccagaguaug

SEQ ID NO: 3087257 - RNA, 19 nt, Artificial Sequence
  Description of Artificial Sequence: Synthetic oligonucleotide
ucauuguaguuagaaauuu

SEQ ID NO: 3087258 - RNA, 19 nt, Artificial Sequence
  Description of Artificial Sequence: Synthetic oligonucleotide
agacgacaauuucugaccu

SEQ ID NO: 3087259 - RNA, 19 nt, Artificial Sequence
  Description of Artificial Sequence: Synthetic oligonucleotide
uaguuagaaauuucuccau

SEQ ID NO: 3087260 - RNA, 19 nt, Artificial Sequence
  Description of Artificial Sequence: Synthetic oligonucleotide
uccagaaguccagacagac

SEQ ID NO: 3087261 - RNA, 19 nt, Artificial Sequence
  Description of Artificial Sequence: Synthetic oligonucleotide
auauucagccaccuuggaa

SEQ ID NO: 3087262 - RNA, 19 nt, Artificial Sequence
  Description of Artificial Sequence: Synthetic oligonucleotide
agacagacgacaauuucug

SEQ ID NO: 3087263 - RNA, 19 nt, Artificial Sequence
  Description of Artificial Sequence: Synthetic oligonucleotide
gacgguucauauauucagc

SEQ ID NO: 3087264 - RNA, 19 nt, Artificial Sequence
  Description of Artificial Sequence: Synthetic oligonucleotide
accugcgccacacauguga

SEQ ID NO: 3087265 - RNA, 19 nt, Artificial Sequence
  Description of Artificial Sequence: Synthetic oligonucleotide
uuucuccauuacauuuacc

SEQ ID NO: 3087266 - RNA, 19 nt, Artificial Sequence
  Description of Artificial Sequence: Synthetic oligonucleotide
guucauauauucagccacc

SEQ ID NO: 3087267 - RNA, 19 nt, Artificial Sequence
  Description of Artificial Sequence: Synthetic oligonucleotide
uucauauauucagccaccu

SEQ ID NO: 3087268 - RNA, 19 nt, Artificial Sequence
  Description of Artificial Sequence: Synthetic oligonucleotide
cuuggaacgaacguaaucu

SEQ ID NO: 3087269 - RNA, 19 nt, Artificial Sequence
  Description of Artificial Sequence: Synthetic oligonucleotide
acgacaauuucugaccuga

SEQ ID NO: 3087270 - RNA, 19 nt, Artificial Sequence
  Description of Artificial Sequence: Synthetic oligonucleotide
guaaucuuucucgagugca

SEQ ID NO: 3087271 - RNA, 19 nt, Artificial Sequence
  Description of Artificial Sequence: Synthetic oligonucleotide
gaguauggaacugauggaa

SEQ ID NO: 3087272 - RNA, 19 nt, Artificial Sequence
  Description of Artificial Sequence: Synthetic oligonucleotide
ccaacauuguugcaccucg

SEQ ID NO: 3087273 - RNA, 19 nt, Artificial Sequence
  Description of Artificial Sequence: Synthetic oligonucleotide
uauggaacugauggaaaau

SEQ ID NO: 3087274 - RNA, 19 nt, Artificial Sequence
  Description of Artificial Sequence: Synthetic oligonucleotide
caccucgucaccaugucuc

SEQ ID NO: 3087275 - RNA, 19 nt, Artificial Sequence
  Description of Artificial Sequence: Synthetic oligonucleotide
aucccuguuauuagcauug

SEQ ID NO: 3087276 - RNA, 19 nt, Artificial Sequence
  Description of Artificial Sequence: Synthetic oligonucleotide
aaccagaguauggaacuga

SEQ ID NO: 3087277 - RNA, 19 nt, Artificial Sequence
  Description of Artificial Sequence: Synthetic oligonucleotide
uucugaccugauuagcguc

SEQ ID NO: 3087278 - RNA, 19 nt, Artificial Sequence
  Description of Artificial Sequence: Synthetic oligonucleotide
uggaacgaacguaaucuuu

SEQ ID NO: 3087279 - RNA, 19 nt, Artificial Sequence
  Description of Artificial Sequence: Synthetic oligonucleotide
gauuaauaacagcguccac

SEQ ID NO: 3087280 - RNA, 19 nt, Artificial Sequence
  Description of Artificial Sequence: Synthetic oligonucleotide
cuuccacaaguacugcuug

SEQ ID NO: 3087281 - RNA, 19 nt, Artificial Sequence
  Description of Artificial Sequence: Synthetic oligonucleotide
aaaaucccaaccagaguau

SEQ ID NO: 3087282 - RNA, 19 nt, Artificial Sequence
  Description of Artificial Sequence: Synthetic oligonucleotide
guccacauaaauacggaca

SEQ ID NO: 3087283 - RNA, 19 nt, Artificial Sequence
  Description of Artificial Sequence: Synthetic oligonucleotide
uaccaucauuaaaauccca

SEQ ID NO: 3087284 - RNA, 19 nt, Artificial Sequence
  Description of Artificial Sequence: Synthetic oligonucleotide
ugcgccacacaugugauua

SEQ ID NO: 3087285 - RNA, 19 nt, Artificial Sequence
  Description of Artificial Sequence: Synthetic oligonucleotide
ucucgagugcaagauccag

SEQ ID NO: 3087286 - RNA, 19 nt, Artificial Sequence
  Description of Artificial Sequence: Synthetic oligonucleotide
guauggaacugauggaaaa

SEQ ID NO: 3087287 - RNA, 19 nt, Artificial Sequence
  Description of Artificial Sequence: Synthetic oligonucleotide
cuguuauuagcauuguagu

SEQ ID NO: 3087288 - RNA, 19 nt, Artificial Sequence
  Description of Artificial Sequence: Synthetic oligonucleotide
accaacauuguugcaccuc

SEQ ID NO: 3087289 - RNA, 19 nt, Artificial Sequence
  Description of Artificial Sequence: Synthetic oligonucleotide
accaucauuaaaaucccaa

SEQ ID NO: 3087290 - RNA, 19 nt, Artificial Sequence
  Description of Artificial Sequence: Synthetic oligonucleotide
ucauauauucagccaccuu

SEQ ID NO: 3087291 - RNA, 19 nt, Artificial Sequence
  Description of Artificial Sequence: Synthetic oligonucleotide
uugcaccucgucaccaugu

SEQ ID NO: 3087292 - RNA, 19 nt, Artificial Sequence
  Description of Artificial Sequence: Synthetic oligonucleotide
augugauuaauaacagcgu

SEQ ID NO: 3087293 - RNA, 19 nt, Artificial Sequence
  Description of Artificial Sequence: Synthetic oligonucleotide
gacgacaauuucugaccug

SEQ ID NO: 3087294 - RNA, 19 nt, Artificial Sequence
  Description of Artificial Sequence: Synthetic oligonucleotide
accugauuagcgucauugu

SEQ ID NO: 3087295 - RNA, 19 nt, Artificial Sequence
  Description of Artificial Sequence: Synthetic oligonucleotide
gaaguccagacagacgaca

SEQ ID NO: 3087296 - RNA, 19 nt, Artificial Sequence
  Description of Artificial Sequence: Synthetic oligonucleotide
uccagacagacgacaauuu

SEQ ID NO: 3087297 - RNA, 19 nt, Artificial Sequence
  Description of Artificial Sequence: Synthetic oligonucleotide
agcgucauuguaguuagaa

SEQ ID NO: 3087298 - RNA, 19 nt, Artificial Sequence
  Description of Artificial Sequence: Synthetic oligonucleotide
uucucgagugcaagaucca

SEQ ID NO: 3087299 - RNA, 19 nt, Artificial Sequence
  Description of Artificial Sequence: Synthetic oligonucleotide
ccaucauuaaaaucccaac

SEQ ID NO: 3087300 - RNA, 19 nt, Artificial Sequence
  Description of Artificial Sequence: Synthetic oligonucleotide
gaaauuucuccauuacauu

SEQ ID NO: 3087301 - RNA, 19 nt, Artificial Sequence
  Description of Artificial Sequence: Synthetic oligonucleotide
gaacugauggaaaaucccu

SEQ ID NO: 3087302 - RNA, 19 nt, Artificial Sequence
  Description of Artificial Sequence: Synthetic oligonucleotide
uuccacaaguacugcuugu

SEQ ID NO: 3087303 - RNA, 19 nt, Artificial Sequence
  Description of Artificial Sequence: Synthetic oligonucleotide
uaacagcguccacauaaau

SEQ ID NO: 3087304 - RNA, 19 nt, Artificial Sequence
  Description of Artificial Sequence: Synthetic oligonucleotide
cuuucucgagugcaagauc

SEQ ID NO: 3087305 - RNA, 19 nt, Artificial Sequence
  Description of Artificial Sequence: Synthetic oligonucleotide
cagcguccacauaaauacg

SEQ ID NO: 3087306 - RNA, 19 nt, Artificial Sequence
  Description of Artificial Sequence: Synthetic oligonucleotide
gagacgguucauauauuca

SEQ ID NO: 3087307 - RNA, 19 nt, Artificial Sequence
  Description of Artificial Sequence: Synthetic oligonucleotide
uuggaacgaacguaaucuu

SEQ ID NO: 3087308 - RNA, 19 nt, Artificial Sequence
  Description of Artificial Sequence: Synthetic oligonucleotide
aucccaaccagaguaugga

SEQ ID NO: 3087309 - RNA, 19 nt, Artificial Sequence
  Description of Artificial Sequence: Synthetic oligonucleotide
ggaacgaacguaaucuuuc

SEQ ID NO: 3087310 - RNA, 19 nt, Artificial Sequence
  Description of Artificial Sequence: Synthetic oligonucleotide
uaacuuccacaaguacugc

SEQ ID NO: 3087311 - RNA, 19 nt, Artificial Sequence
  Description of Artificial Sequence: Synthetic oligonucleotide
agcauuguaguaacuucca

SEQ ID NO: 3087312 - RNA, 19 nt, Artificial Sequence
  Description of Artificial Sequence: Synthetic oligonucleotide
acugcuuguuccugcgcca

SEQ ID NO: 3087313 - RNA, 19 nt, Artificial Sequence
  Description of Artificial Sequence: Synthetic oligonucleotide
cagacagacgacaauuucu

SEQ ID NO: 3087314 - RNA, 19 nt, Artificial Sequence
  Description of Artificial Sequence: Synthetic oligonucleotide
gacagacgacaauuucuga

SEQ ID NO: 3087315 - RNA, 19 nt, Artificial Sequence
  Description of Artificial Sequence: Synthetic oligonucleotide
aguauggaacugauggaaa

SEQ ID NO: 3087316 - RNA, 19 nt, Artificial Sequence
  Description of Artificial Sequence: Synthetic oligonucleotide
aaguccagacagacgacaa

SEQ ID NO: 3087317 - RNA, 19 nt, Artificial Sequence
  Description of Artificial Sequence: Synthetic oligonucleotide
gaacgaacguaaucuuucu

SEQ ID NO: 3087318 - RNA, 19 nt, Artificial Sequence
  Description of Artificial Sequence: Synthetic oligonucleotide
guugcaccucgucaccaug

SEQ ID NO: 3087319 - RNA, 19 nt, Artificial Sequence
  Description of Artificial Sequence: Synthetic oligonucleotide
caccuuggaacgaacguaa

SEQ ID NO: 3087320 - RNA, 19 nt, Artificial Sequence
  Description of Artificial Sequence: Synthetic oligonucleotide
gugcaagauccagaagucc

SEQ ID NO: 3087321 - RNA, 19 nt, Artificial Sequence
  Description of Artificial Sequence: Synthetic oligonucleotide
guaguaacuuccacaagua

SEQ ID NO: 3087322 - RNA, 19 nt, Artificial Sequence
  Description of Artificial Sequence: Synthetic oligonucleotide
ugcuuguuccugcgccacc

SEQ ID NO: 3087323 - RNA, 19 nt, Artificial Sequence
  Description of Artificial Sequence: Synthetic oligonucleotide
cucgagugcaagauccaga

SEQ ID NO: 3087324 - RNA, 19 nt, Artificial Sequence
  Description of Artificial Sequence: Synthetic oligonucleotide
ucccaaccagaguauggaa

SEQ ID NO: 3087325 - RNA, 19 nt, Artificial Sequence
  Description of Artificial Sequence: Synthetic oligonucleotide
ucagccaccuuggaacgaa

SEQ ID NO: 3087326 - RNA, 19 nt, Artificial Sequence
  Description of Artificial Sequence: Synthetic oligonucleotide
auggaaaaucccuguuauu

SEQ ID NO: 3087327 - RNA, 19 nt, Artificial Sequence
  Description of Artificial Sequence: Synthetic oligonucleotide
uccacaaguacugcuuguu

SEQ ID NO: 3087328 - RNA, 19 nt, Artificial Sequence
  Description of Artificial Sequence: Synthetic oligonucleotide
uuguugcaccucgucacca

SEQ ID NO: 3087329 - RNA, 19 nt, Artificial Sequence
  Description of Artificial Sequence: Synthetic oligonucleotide
uaauaacagcguccacaua

SEQ ID NO: 3087330 - RNA, 19 nt, Artificial Sequence
  Description of Artificial Sequence: Synthetic oligonucleotide
aguccagacagacgacaau

SEQ ID NO: 3087331 - RNA, 19 nt, Artificial Sequence
  Description of Artificial Sequence: Synthetic oligonucleotide
acuuccacaaguacugcuu

SEQ ID NO: 3087332 - RNA, 19 nt, Artificial Sequence
  Description of Artificial Sequence: Synthetic oligonucleotide
uguugcaccucgucaccau

SEQ ID NO: 3087333 - RNA, 19 nt, Artificial Sequence
  Description of Artificial Sequence: Synthetic oligonucleotide
ugcaccucgucaccauguc

SEQ ID NO: 3087334 - RNA, 19 nt, Artificial Sequence
  Description of Artificial Sequence: Synthetic oligonucleotide
cggacaccaacauuguugc

SEQ ID NO: 3087335 - RNA, 19 nt, Artificial Sequence
  Description of Artificial Sequence: Synthetic oligonucleotide
cccaaccagaguauggaac

SEQ ID NO: 3087336 - RNA, 19 nt, Artificial Sequence
  Description of Artificial Sequence: Synthetic oligonucleotide
agccaccuuggaacgaacg

SEQ ID NO: 3087337 - RNA, 19 nt, Artificial Sequence
  Description of Artificial Sequence: Synthetic oligonucleotide
ccagaaguccagacagacg

SEQ ID NO: 3087338 - RNA, 19 nt, Artificial Sequence
  Description of Artificial Sequence: Synthetic oligonucleotide
uuccugcgccaccaccugc

SEQ ID NO: 3087339 - RNA, 19 nt, Artificial Sequence
  Description of Artificial Sequence: Synthetic oligonucleotide
gacaauuucugaccugauu

SEQ ID NO: 3087340 - RNA, 19 nt, Artificial Sequence
  Description of Artificial Sequence: Synthetic oligonucleotide
cauuuaccaucauuaaaau

SEQ ID NO: 3087341 - RNA, 19 nt, Artificial Sequence
  Description of Artificial Sequence: Synthetic oligonucleotide
caaguacugcuuguuccug

SEQ ID NO: 3087342 - RNA, 19 nt, Artificial Sequence
  Description of Artificial Sequence: Synthetic oligonucleotide
gcaagauccagaaguccag

SEQ ID NO: 3087343 - RNA, 19 nt, Artificial Sequence
  Description of Artificial Sequence: Synthetic oligonucleotide
uacggacaccaacauuguu

SEQ ID NO: 3087344 - RNA, 19 nt, Artificial Sequence
  Description of Artificial Sequence: Synthetic oligonucleotide
auaacagcguccacauaaa

SEQ ID NO: 3087345 - RNA, 19 nt, Artificial Sequence
  Description of Artificial Sequence: Synthetic oligonucleotide
guacugcuuguuccugcgc

SEQ ID NO: 3087346 - RNA, 19 nt, Artificial Sequence
  Description of Artificial Sequence: Synthetic oligonucleotide
caaccagaguauggaacug

SEQ ID NO: 3087347 - RNA, 19 nt, Artificial Sequence
  Description of Artificial Sequence: Synthetic oligonucleotide
accucgucaccaugucucu

SEQ ID NO: 3087348 - RNA, 19 nt, Artificial Sequence
  Description of Artificial Sequence: Synthetic oligonucleotide
cauuacauuuaccaucauu

SEQ ID NO: 3087349 - RNA, 19 nt, Artificial Sequence
  Description of Artificial Sequence: Synthetic oligonucleotide
acauaaauacggacaccaa

SEQ ID NO: 3087350 - RNA, 19 nt, Artificial Sequence
  Description of Artificial Sequence: Synthetic oligonucleotide
gcauuguaguaacuuccac

SEQ ID NO: 3087351 - RNA, 19 nt, Artificial Sequence
  Description of Artificial Sequence: Synthetic oligonucleotide
guuccugcgccaccaccug

SEQ ID NO: 3087352 - RNA, 19 nt, Artificial Sequence
  Description of Artificial Sequence: Synthetic oligonucleotide
gucauuguaguuagaaauu

SEQ ID NO: 3087353 - RNA, 19 nt, Artificial Sequence
  Description of Artificial Sequence: Synthetic oligonucleotide
caaugagacgguucauaua

SEQ ID NO: 3087354 - RNA, 19 nt, Artificial Sequence
  Description of Artificial Sequence: Synthetic oligonucleotide
ccuuggaacgaacguaauc

SEQ ID NO: 3087355 - RNA, 19 nt, Artificial Sequence
  Description of Artificial Sequence: Synthetic oligonucleotide
auacggacaccaacauugu

SEQ ID NO: 3087356 - RNA, 19 nt, Artificial Sequence
  Description of Artificial Sequence: Synthetic oligonucleotide
accagaguauggaacugau

SEQ ID NO: 3087357 - RNA, 19 nt, Artificial Sequence
  Description of Artificial Sequence: Synthetic oligonucleotide
ccagacagacgacaauuuc

SEQ ID NO: 3087358 - RNA, 19 nt, Artificial Sequence
  Description of Artificial Sequence: Synthetic oligonucleotide
uucagccaccuuggaacga

SEQ ID NO: 3087359 - RNA, 19 nt, Artificial Sequence
  Description of Artificial Sequence: Synthetic oligonucleotide
cuuguuccugcgccaccac

SEQ ID NO: 3087360 - RNA, 19 nt, Artificial Sequence
  Description of Artificial Sequence: Synthetic oligonucleotide
caagauccagaaguccaga

SEQ ID NO: 3087361 - RNA, 19 nt, Artificial Sequence
  Description of Artificial Sequence: Synthetic oligonucleotide
ucccuguuauuagcauugu

SEQ ID NO: 3087362 - RNA, 19 nt, Artificial Sequence
  Description of Artificial Sequence: Synthetic oligonucleotide
cguaaucuuucucgagugc

SEQ ID NO: 3087363 - RNA, 19 nt, Artificial Sequence
  Description of Artificial Sequence: Synthetic oligonucleotide
cguccacauaaauacggac

SEQ ID NO: 3087364 - RNA, 19 nt, Artificial Sequence
  Description of Artificial Sequence: Synthetic oligonucleotide
cgucauuguaguuagaaau

SEQ ID NO: 3087365 - RNA, 19 nt, Artificial Sequence
  Description of Artificial Sequence: Synthetic oligonucleotide
ccagaguauggaacugaug

SEQ ID NO: 3087366 - RNA, 19 nt, Artificial Sequence
  Description of Artificial Sequence: Synthetic oligonucleotide
accaccugcgccacacaug

SEQ ID NO: 3087367 - RNA, 19 nt, Artificial Sequence
  Description of Artificial Sequence: Synthetic oligonucleotide
uagcgucauuguaguuaga

SEQ ID NO: 3087368 - RNA, 19 nt, Artificial Sequence
  Description of Artificial Sequence: Synthetic oligonucleotide
ccacaaguacugcuuguuc

SEQ ID NO: 3087369 - RNA, 19 nt, Artificial Sequence
  Description of Artificial Sequence: Synthetic oligonucleotide
cugcuuguuccugcgccac

SEQ ID NO: 3087370 - RNA, 19 nt, Artificial Sequence
  Description of Artificial Sequence: Synthetic oligonucleotide
gcgucauuguaguuagaaa

SEQ ID NO: 3087371 - RNA, 19 nt, Artificial Sequence
  Description of Artificial Sequence: Synthetic oligonucleotide
ugaccugauuagcgucauu

SEQ ID NO: 3087372 - RNA, 19 nt, Artificial Sequence
  Description of Artificial Sequence: Synthetic oligonucleotide
cgaacguaaucuuucucga

SEQ ID NO: 3087373 - RNA, 19 nt, Artificial Sequence
  Description of Artificial Sequence: Synthetic oligonucleotide
guccagacagacgacaauu

SEQ ID NO: 3087374 - RNA, 19 nt, Artificial Sequence
  Description of Artificial Sequence: Synthetic oligonucleotide
cagccaccuuggaacgaac

SEQ ID NO: 3087375 - RNA, 19 nt, Artificial Sequence
  Description of Artificial Sequence: Synthetic oligonucleotide
ccugauuagcgucauugua

SEQ ID NO: 3087376 - RNA, 19 nt, Artificial Sequence
  Description of Artificial Sequence: Synthetic oligonucleotide
gauuagcgucauuguaguu

SEQ ID NO: 3087377 - RNA, 19 nt, Artificial Sequence
  Description of Artificial Sequence: Synthetic oligonucleotide
gcuuguuccugcgccacca

SEQ ID NO: 3087378 - RNA, 19 nt, Artificial Sequence
  Description of Artificial Sequence: Synthetic oligonucleotide
cugauggaaaaucccuguu

SEQ ID NO: 3087379 - RNA, 19 nt, Artificial Sequence
  Description of Artificial Sequence: Synthetic oligonucleotide
gccaccuuggaacgaacgu

SEQ ID NO: 3087380 - RNA, 19 nt, Artificial Sequence
  Description of Artificial Sequence: Synthetic oligonucleotide
augagacgguucauauauu

SEQ ID NO: 3087381 - RNA, 19 nt, Artificial Sequence
  Description of Artificial Sequence: Synthetic oligonucleotide
accuuggaacgaacguaau

SEQ ID NO: 3087382 - RNA, 19 nt, Artificial Sequence
  Description of Artificial Sequence: Synthetic oligonucleotide
caacauuguugcaccucgu

SEQ ID NO: 3087383 - RNA, 19 nt, Artificial Sequence
  Description of Artificial Sequence: Synthetic oligonucleotide
gcguccacauaaauacgga

SEQ ID NO: 3087384 - RNA, 19 nt, Artificial Sequence
  Description of Artificial Sequence: Synthetic oligonucleotide
cgguucauauauucagcca

SEQ ID NO: 3087385 - RNA, 19 nt, Artificial Sequence
  Description of Artificial Sequence: Synthetic oligonucleotide
gccaccaccugcgccacac

SEQ ID NO: 3087386 - RNA, 19 nt, Artificial Sequence
  Description of Artificial Sequence: Synthetic oligonucleotide
ggacaccaacauuguugca

SEQ ID NO: 3087387 - RNA, 19 nt, Artificial Sequence
  Description of Artificial Sequence: Synthetic oligonucleotide
ccaccugcgccacacaugu

SEQ ID NO: 3087388 - RNA, 19 nt, Artificial Sequence
  Description of Artificial Sequence: Synthetic oligonucleotide
cgagugcaagauccagaag

SEQ ID NO: 3087389 - RNA, 19 nt, Artificial Sequence
  Description of Artificial Sequence: Synthetic oligonucleotide
caccugcgccacacaugug

SEQ ID NO: 3087390 - RNA, 19 nt, Artificial Sequence
  Description of Artificial Sequence: Synthetic oligonucleotide
caccaacauuguugcaccu

SEQ ID NO: 3087391 - RNA, 19 nt, Artificial Sequence
  Description of Artificial Sequence: Synthetic oligonucleotide
ccaccuuggaacgaacgua

SEQ ID NO: 3087392 - RNA, 19 nt, Artificial Sequence
  Description of Artificial Sequence: Synthetic oligonucleotide
caccaccugcgccacacau

SEQ ID NO: 3087393 - RNA, 19 nt, Artificial Sequence
  Description of Artificial Sequence: Synthetic oligonucleotide
gcaccucgucaccaugucu

SEQ ID NO: 3087394 - RNA, 19 nt, Artificial Sequence
  Description of Artificial Sequence: Synthetic oligonucleotide
ccucgucaccaugucucug

SEQ ID NO: 3087395 - RNA, 19 nt, Artificial Sequence
  Description of Artificial Sequence: Synthetic oligonucleotide
cccuguuauuagcauugua

SEQ ID NO: 3087396 - RNA, 19 nt, Artificial Sequence
  Description of Artificial Sequence: Synthetic oligonucleotide
cugaccugauuagcgucau

SEQ ID NO: 3087397 - RNA, 19 nt, Artificial Sequence
  Description of Artificial Sequence: Synthetic oligonucleotide
gcgccacacaugugauuaa

SEQ ID NO: 3087398 - RNA, 19 nt, Artificial Sequence
  Description of Artificial Sequence: Synthetic oligonucleotide
cugcgccacacaugugauu

SEQ ID NO: 3087399 - RNA, 19 nt, Artificial Sequence
  Description of Artificial Sequence: Synthetic oligonucleotide
ccugcgccacacaugugau

SEQ ID NO: 3087400 - RNA, 19 nt, Artificial Sequence
  Description of Artificial Sequence: Synthetic oligonucleotide
ccaccaccugcgccacaca

SEQ ID NO: 3087401 - RNA, 19 nt, Artificial Sequence
  Description of Artificial Sequence: Synthetic oligonucleotide
cgacaauuucugaccugau

SEQ ID NO: 3087402 - RNA, 19 nt, Artificial Sequence
  Description of Artificial Sequence: Synthetic oligonucleotide
ccauuacauuuaccaucau

SEQ ID NO: 3087403 - RNA, 19 nt, Artificial Sequence
  Description of Artificial Sequence: Synthetic oligonucleotide
cgccacacaugugauuaau

SEQ ID NO: 3087404 - RNA, 19 nt, Artificial Sequence
  Description of Artificial Sequence: Synthetic oligonucleotide
cgccaccaccugcgccaca

SEQ ID NO: 3087405 - RNA, 19 nt, Artificial Sequence
  Description of Artificial Sequence: Synthetic oligonucleotide
auuaaagucacccaggaac

SEQ ID NO: 3087406 - RNA, 19 nt, Artificial Sequence
  Description of Artificial Sequence: Synthetic oligonucleotide
gaaaguugugaacagaggc

SEQ ID NO: 3087407 - RNA, 19 nt, Artificial Sequence
  Description of Artificial Sequence: Synthetic oligonucleotide
cuugcagucagcauuaaag

SEQ ID NO: 3087408 - RNA, 19 nt, Artificial Sequence
  Description of Artificial Sequence: Synthetic oligonucleotide
uuuacauacuugcagucag

SEQ ID NO: 3087409 - RNA, 19 nt, Artificial Sequence
  Description of Artificial Sequence: Synthetic oligonucleotide
  modified_base (18)..(18): a, c, u, g, unknown or other
uugaaggucacuuccacng

SEQ ID NO: 3087410 - RNA, 19 nt, Artificial Sequence
  Description of Artificial Sequence: Synthetic oligonucleotide
aaaauggucacugauggca

SEQ ID NO: 3087411 - RNA, 19 nt, Artificial Sequence
  Description of Artificial Sequence: Synthetic oligonucleotide
aucuaggccaaauuccucc

SEQ ID NO: 3087412 - RNA, 19 nt, Artificial Sequence
  Description of Artificial Sequence: Synthetic oligonucleotide
agacuugaaggucacuucc

SEQ ID NO: 3087413 - RNA, 19 nt, Artificial Sequence
  Description of Artificial Sequence: Synthetic oligonucleotide
cauuuaaagaccucacugc

SEQ ID NO: 3087414 - RNA, 19 nt, Artificial Sequence
  Description of Artificial Sequence: Synthetic oligonucleotide
ggaaaauggucacugaugg

SEQ ID NO: 3087415 - RNA, 19 nt, Artificial Sequence
  Description of Artificial Sequence: Synthetic oligonucleotide
uuaaagucacccaggaaca

SEQ ID NO: 3087416 - RNA, 19 nt, Artificial Sequence
  Description of Artificial Sequence: Synthetic oligonucleotide
  modified_base (7)..(7): a, c, u, g, unknown or other
uuccacnggaaaaugguca

SEQ ID NO: 3087417 - RNA, 19 nt, Artificial Sequence
  Description of Artificial Sequence: Synthetic oligonucleotide
ucugaucuaggccaaauuc

SEQ ID NO: 3087418 - RNA, 19 nt, Artificial Sequence
  Description of Artificial Sequence: Synthetic oligonucleotide
ugaaaguugugaacagagg

SEQ ID NO: 3087419 - RNA, 19 nt, Artificial Sequence
  Description of Artificial Sequence: Synthetic oligonucleotide
cugaaaguugugaacagag

SEQ ID NO: 3087420 - RNA, 19 nt, Artificial Sequence
  Description of Artificial Sequence: Synthetic oligonucleotide
ugugaacagaggcugacug

SEQ ID NO: 3087421 - RNA, 19 nt, Artificial Sequence
  Description of Artificial Sequence: Synthetic oligonucleotide
ucugggaugagccauuuaa

SEQ ID NO: 3087422 - RNA, 19 nt, Artificial Sequence
  Description of Artificial Sequence: Synthetic oligonucleotide
aaagucacccaggaacacc

SEQ ID NO: 3087423 - RNA, 19 nt, Artificial Sequence
  Description of Artificial Sequence: Synthetic oligonucleotide
auuuaaagaccucacugcu

SEQ ID NO: 3087424 - RNA, 19 nt, Artificial Sequence
  Description of Artificial Sequence: Synthetic oligonucleotide
ucugaguugcccacugugg

SEQ ID NO: 3087425 - RNA, 19 nt, Artificial Sequence
  Description of Artificial Sequence: Synthetic oligonucleotide
aagagccugggucugaucu

SEQ ID NO: 3087426 - RNA, 19 nt, Artificial Sequence
  Description of Artificial Sequence: Synthetic oligonucleotide
acuacaauccggucguagg

SEQ ID NO: 3087427 - RNA, 19 nt, Artificial Sequence
  Description of Artificial Sequence: Synthetic oligonucleotide
ugaacagaggcugacuggg

SEQ ID NO: 3087428 - RNA, 19 nt, Artificial Sequence
  Description of Artificial Sequence: Synthetic oligonucleotide
ugggaugagccauuuaaag

SEQ ID NO: 3087429 - RNA, 19 nt, Artificial Sequence
  Description of Artificial Sequence: Synthetic oligonucleotide
aaagaccucacugcugcgc

SEQ ID NO: 3087430 - RNA, 19 nt, Artificial Sequence
  Description of Artificial Sequence: Synthetic oligonucleotide
cugaucuaggccaaauucc

SEQ ID NO: 3087431 - RNA, 19 nt, Artificial Sequence
  Description of Artificial Sequence: Synthetic oligonucleotide
ugggccuuuacauacuugc

SEQ ID NO: 3087432 - RNA, 19 nt, Artificial Sequence
  Description of Artificial Sequence: Synthetic oligonucleotide
gauggcaagagccuggguc

SEQ ID NO: 3087433 - RNA, 19 nt, Artificial Sequence
  Description of Artificial Sequence: Synthetic oligonucleotide
ugaucuaggccaaauuccu

SEQ ID NO: 3087434 - RNA, 19 nt, Artificial Sequence
  Description of Artificial Sequence: Synthetic oligonucleotide
ugaaacccaguccugggcc

SEQ ID NO: 3087435 - RNA, 19 nt, Artificial Sequence
  Description of Artificial Sequence: Synthetic oligonucleotide
aaguugugaacagaggcug

SEQ ID NO: 3087436 - RNA, 19 nt, Artificial Sequence
  Description of Artificial Sequence: Synthetic oligonucleotide
auagcugucagugagacuu

SEQ ID NO: 3087437 - RNA, 19 nt, Artificial Sequence
  Description of Artificial Sequence: Synthetic oligonucleotide
ggaugagccauuuaaagac

SEQ ID NO: 3087438 - RNA, 19 nt, Artificial Sequence
  Description of Artificial Sequence: Synthetic oligonucleotide
aaaguugugaacagaggcu

SEQ ID NO: 3087439 - RNA, 19 nt, Artificial Sequence
  Description of Artificial Sequence: Synthetic oligonucleotide
  modified_base (10)..(10): a, c, u, g, unknown or other
cacuuccacnggaaaaugg

SEQ ID NO: 3087440 - RNA, 19 nt, Artificial Sequence
  Description of Artificial Sequence: Synthetic oligonucleotide
acuugaaggucacuuccac

SEQ ID NO: 3087441 - RNA, 19 nt, Artificial Sequence
  Description of Artificial Sequence: Synthetic oligonucleotide
auugaaacccaguccuggg

SEQ ID NO: 3087442 - RNA, 19 nt, Artificial Sequence
  Description of Artificial Sequence: Synthetic oligonucleotide
aauuccuccugaaaguugu

SEQ ID NO: 3087443 - RNA, 19 nt, Artificial Sequence
  Description of Artificial Sequence: Synthetic oligonucleotide
ucagcauuaaagucaccca

SEQ ID NO: 3087444 - RNA, 19 nt, Artificial Sequence
  Description of Artificial Sequence: Synthetic oligonucleotide
ucuuaggcagaugagcacc

SEQ ID NO: 3087445 - RNA, 19 nt, Artificial Sequence
  Description of Artificial Sequence: Synthetic oligonucleotide
agcaccgcucacuacaauc

SEQ ID NO: 3087446 - RNA, 19 nt, Artificial Sequence
  Description of Artificial Sequence: Synthetic oligonucleotide
  modified_base (17)..(17): a, c, u, g, unknown or other
ugaaggucacuuccacngg

SEQ ID NO: 3087447 - RNA, 19 nt, Artificial Sequence
  Description of Artificial Sequence: Synthetic oligonucleotide
uugcagucagcauuaaagu

SEQ ID NO: 3087448 - RNA, 19 nt, Artificial Sequence
  Description of Artificial Sequence: Synthetic oligonucleotide
cugucagugagacuugaag

SEQ ID NO: 3087449 - RNA, 19 nt, Artificial Sequence
  Description of Artificial Sequence: Synthetic oligonucleotide
ugggccuucaggcucuuag

SEQ ID NO: 3087450 - RNA, 19 nt, Artificial Sequence
  Description of Artificial Sequence: Synthetic oligonucleotide
cagcauuaaagucacccag

SEQ ID NO: 3087451 - RNA, 19 nt, Artificial Sequence
  Description of Artificial Sequence: Synthetic oligonucleotide
aauggucacugauggcaag

SEQ ID NO: 3087452 - RNA, 19 nt, Artificial Sequence
  Description of Artificial Sequence: Synthetic oligonucleotide
cucacugcugcgcaggcgg

SEQ ID NO: 3087453 - RNA, 19 nt, Artificial Sequence
  Description of Artificial Sequence: Synthetic oligonucleotide
augagcaccgcucacuaca

SEQ ID NO: 3087454 - RNA, 19 nt, Artificial Sequence
  Description of Artificial Sequence: Synthetic oligonucleotide
ugcgcaggcggauugaaac

SEQ ID NO: 3087455 - RNA, 19 nt, Artificial Sequence
  Description of Artificial Sequence: Synthetic oligonucleotide
uugaaacccaguccugggc

SEQ ID NO: 3087456 - RNA, 19 nt, Artificial Sequence
  Description of Artificial Sequence: Synthetic oligonucleotide
acaauccggucguaggcac

SEQ ID NO: 3087457 - RNA, 19 nt, Artificial Sequence
  Description of Artificial Sequence: Synthetic oligonucleotide
cuuaggcagaugagcaccg

SEQ ID NO: 3087458 - RNA, 19 nt, Artificial Sequence
  Description of Artificial Sequence: Synthetic oligonucleotide
uuacauacuugcagucagc

SEQ ID NO: 3087459 - RNA, 19 nt, Artificial Sequence
  Description of Artificial Sequence: Synthetic oligonucleotide
  modified_base (16)..(16): a, c, u, g, unknown or other
gaaggucacuuccacngga

SEQ ID NO: 3087460 - RNA, 19 nt, Artificial Sequence
  Description of Artificial Sequence: Synthetic oligonucleotide
gaaaauggucacugauggc

SEQ ID NO: 3087461 - RNA, 19 nt, Artificial Sequence
  Description of Artificial Sequence: Synthetic oligonucleotide
ugcagucagcauuaaaguc

SEQ ID NO: 3087462 - RNA, 19 nt, Artificial Sequence
  Description of Artificial Sequence: Synthetic oligonucleotide
cuacaauccggucguaggc

SEQ ID NO: 3087463 - RNA, 19 nt, Artificial Sequence
  Description of Artificial Sequence: Synthetic oligonucleotide
agcauuaaagucacccagg

SEQ ID NO: 3087464 - RNA, 19 nt, Artificial Sequence
  Description of Artificial Sequence: Synthetic oligonucleotide
aagaccucacugcugcgca

SEQ ID NO: 3087465 - RNA, 19 nt, Artificial Sequence
  Description of Artificial Sequence: Synthetic oligonucleotide
uccugaaaguugugaacag

SEQ ID NO: 3087466 - RNA, 19 nt, Artificial Sequence
  Description of Artificial Sequence: Synthetic oligonucleotide
uaggccaaauuccuccuga

SEQ ID NO: 3087467 - RNA, 19 nt, Artificial Sequence
  Description of Artificial Sequence: Synthetic oligonucleotide
uacauacuugcagucagca

SEQ ID NO: 3087468 - RNA, 19 nt, Artificial Sequence
  Description of Artificial Sequence: Synthetic oligonucleotide
  modified_base (6)..(6): a, c, u, g, unknown or other
uccacnggaaaauggucac

SEQ ID NO: 3087469 - RNA, 19 nt, Artificial Sequence
  Description of Artificial Sequence: Synthetic oligonucleotide
gcucacuacaauccggucg

SEQ ID NO: 3087470 - RNA, 19 nt, Artificial Sequence
  Description of Artificial Sequence: Synthetic oligonucleotide
gugaacagaggcugacugg

SEQ ID NO: 3087471 - RNA, 19 nt, Artificial Sequence
  Description of Artificial Sequence: Synthetic oligonucleotide
auggcaagagccugggucu

SEQ ID NO: 3087472 - RNA, 19 nt, Artificial Sequence
  Description of Artificial Sequence: Synthetic oligonucleotide
gaugagccauuuaaagacc

SEQ ID NO: 3087473 - RNA, 19 nt, Artificial Sequence
  Description of Artificial Sequence: Synthetic oligonucleotide
ugugguguccgcacugucu

SEQ ID NO: 3087474 - RNA, 19 nt, Artificial Sequence
  Description of Artificial Sequence: Synthetic oligonucleotide
  modified_base (4)..(4): a, c, u, g, unknown or other
cacnggaaaauggucacug

SEQ ID NO: 3087475 - RNA, 19 nt, Artificial Sequence
  Description of Artificial Sequence: Synthetic oligonucleotide
aaauuccuccugaaaguug

SEQ ID NO: 3087476 - RNA, 19 nt, Artificial Sequence
  Description of Artificial Sequence: Synthetic oligonucleotide
ugagacuugaaggucacuu

SEQ ID NO: 3087477 - RNA, 19 nt, Artificial Sequence
  Description of Artificial Sequence: Synthetic oligonucleotide
ucacugauggcaagagccu

SEQ ID NO: 3087478 - RNA, 19 nt, Artificial Sequence
  Description of Artificial Sequence: Synthetic oligonucleotide
aauccggucguaggcacag

SEQ ID NO: 3087479 - RNA, 19 nt, Artificial Sequence
  Description of Artificial Sequence: Synthetic oligonucleotide
aagucacccaggaacacca

SEQ ID NO: 3087480 - RNA, 19 nt, Artificial Sequence
  Description of Artificial Sequence: Synthetic oligonucleotide
guaggcacagucugaguug

SEQ ID NO: 3087481 - RNA, 19 nt, Artificial Sequence
  Description of Artificial Sequence: Synthetic oligonucleotide
cugggucugaucuaggcca

SEQ ID NO: 3087482 - RNA, 19 nt, Artificial Sequence
  Description of Artificial Sequence: Synthetic oligonucleotide
uccuccugaaaguugugaa

SEQ ID NO: 3087483 - RNA, 19 nt, Artificial Sequence
  Description of Artificial Sequence: Synthetic oligonucleotide
gagacuugaaggucacuuc

SEQ ID NO: 3087484 - RNA, 19 nt, Artificial Sequence
  Description of Artificial Sequence: Synthetic oligonucleotide
uaaagaccucacugcugcg

SEQ ID NO: 3087485 - RNA, 19 nt, Artificial Sequence
  Description of Artificial Sequence: Synthetic oligonucleotide
ugaguugcccacuguggug

SEQ ID NO: 3087486 - RNA, 19 nt, Artificial Sequence
  Description of Artificial Sequence: Synthetic oligonucleotide
gucugaguugcccacugug

SEQ ID NO: 3087487 - RNA, 19 nt, Artificial Sequence
  Description of Artificial Sequence: Synthetic oligonucleotide
ggccuuuacauacuugcag

SEQ ID NO: 3087488 - RNA, 19 nt, Artificial Sequence
  Description of Artificial Sequence: Synthetic oligonucleotide
gcugacugggccuucaggc

SEQ ID NO: 3087489 - RNA, 19 nt, Artificial Sequence
  Description of Artificial Sequence: Synthetic oligonucleotide
  modified_base (8)..(8): a, c, u, g, unknown or other
cuuccacnggaaaaugguc

SEQ ID NO: 3087490 - RNA, 19 nt, Artificial Sequence
  Description of Artificial Sequence: Synthetic oligonucleotide
  modified_base (9)..(9): a, c, u, g, unknown or other
acuuccacnggaaaauggu

SEQ ID NO: 3087491 - RNA, 19 nt, Artificial Sequence
  Description of Artificial Sequence: Synthetic oligonucleotide
ucuaggccaaauuccuccu

SEQ ID NO: 3087492 - RNA, 19 nt, Artificial Sequence
  Description of Artificial Sequence: Synthetic oligonucleotide
gagccauuuaaagaccuca

SEQ ID NO: 3087493 - RNA, 19 nt, Artificial Sequence
  Description of Artificial Sequence: Synthetic oligonucleotide
uacaauccggucguaggca

SEQ ID NO: 3087494 - RNA, 19 nt, Artificial Sequence
  Description of Artificial Sequence: Synthetic oligonucleotide
caggcucuuaggcagauga

SEQ ID NO: 3087495 - RNA, 19 nt, Artificial Sequence
  Description of Artificial Sequence: Synthetic oligonucleotide
uaggcagaugagcaccgcu

SEQ ID NO: 3087496 - RNA, 19 nt, Artificial Sequence
  Description of Artificial Sequence: Synthetic oligonucleotide
  modified_base (3)..(3): a, c, u, g, unknown or other
acnggaaaauggucacuga

SEQ ID NO: 3087497 - RNA, 19 nt, Artificial Sequence
  Description of Artificial Sequence: Synthetic oligonucleotide
uaggcacagucugaguugc

SEQ ID NO: 3087498 - RNA, 19 nt, Artificial Sequence
  Description of Artificial Sequence: Synthetic oligonucleotide
gugguguccgcacugucug

SEQ ID NO: 3087499 - RNA, 19 nt, Artificial Sequence
  Description of Artificial Sequence: Synthetic oligonucleotide
agugagacuugaaggucac

SEQ ID NO: 3087500 - RNA, 19 nt, Artificial Sequence
  Description of Artificial Sequence: Synthetic oligonucleotide
ccuucaggcucuuaggcag

SEQ ID NO: 3087501 - RNA, 19 nt, Artificial Sequence
  Description of Artificial Sequence: Synthetic oligonucleotide
ugacugggccuucaggcuc

SEQ ID NO: 3087502 - RNA, 19 nt, Artificial Sequence
  Description of Artificial Sequence: Synthetic oligonucleotide
ggccauagcugucagugag

SEQ ID NO: 3087503 - RNA, 19 nt, Artificial Sequence
  Description of Artificial Sequence: Synthetic oligonucleotide
aaauggucacugauggcaa

SEQ ID NO: 3087504 - RNA, 19 nt, Artificial Sequence
  Description of Artificial Sequence: Synthetic oligonucleotide
guccugggccuuuacauac

SEQ ID NO: 3087505 - RNA, 19 nt, Artificial Sequence
  Description of Artificial Sequence: Synthetic oligonucleotide
ugagccauuuaaagaccuc

SEQ ID NO: 3087506 - RNA, 19 nt, Artificial Sequence
  Description of Artificial Sequence: Synthetic oligonucleotide
cucuuaggcagaugagcac

SEQ ID NO: 3087507 - RNA, 19 nt, Artificial Sequence
  Description of Artificial Sequence: Synthetic oligonucleotide
cuccugaaaguugugaaca

SEQ ID NO: 3087508 - RNA, 19 nt, Artificial Sequence
  Description of Artificial Sequence: Synthetic oligonucleotide
gggaugagccauuuaaaga

SEQ ID NO: 3087509 - RNA, 19 nt, Artificial Sequence
  Description of Artificial Sequence: Synthetic oligonucleotide
uugcccacugugguguccg

SEQ ID NO: 3087510 - RNA, 19 nt, Artificial Sequence
  Description of Artificial Sequence: Synthetic oligonucleotide
uggucacugauggcaagag

SEQ ID NO: 3087511 - RNA, 19 nt, Artificial Sequence
  Description of Artificial Sequence: Synthetic oligonucleotide
cuuuacauacuugcaguca

SEQ ID NO: 3087512 - RNA, 19 nt, Artificial Sequence
  Description of Artificial Sequence: Synthetic oligonucleotide
  modified_base (19)..(19): a, c, u, g, unknown or other
cuugaaggucacuuccacn

SEQ ID NO: 3087513 - RNA, 19 nt, Artificial Sequence
  Description of Artificial Sequence: Synthetic oligonucleotide
gucguaggcacagucugag

SEQ ID NO: 3087514 - RNA, 19 nt, Artificial Sequence
  Description of Artificial Sequence: Synthetic oligonucleotide
accucacugcugcgcaggc

SEQ ID NO: 3087515 - RNA, 19 nt, Artificial Sequence
  Description of Artificial Sequence: Synthetic oligonucleotide
cagugagacuugaagguca

SEQ ID NO: 3087516 - RNA, 19 nt, Artificial Sequence
  Description of Artificial Sequence: Synthetic oligonucleotide
uuccuccugaaaguuguga

SEQ ID NO: 3087517 - RNA, 19 nt, Artificial Sequence
  Description of Artificial Sequence: Synthetic oligonucleotide
uccggucguaggcacaguc

SEQ ID NO: 3087518 - RNA, 19 nt, Artificial Sequence
  Description of Artificial Sequence: Synthetic oligonucleotide
uaaagucacccaggaacac

SEQ ID NO: 3087519 - RNA, 19 nt, Artificial Sequence
  Description of Artificial Sequence: Synthetic oligonucleotide
ugagcaccgcucacuacaa

SEQ ID NO: 3087520 - RNA, 19 nt, Artificial Sequence
  Description of Artificial Sequence: Synthetic oligonucleotide
gaccucacugcugcgcagg

SEQ ID NO: 3087521 - RNA, 19 nt, Artificial Sequence
  Description of Artificial Sequence: Synthetic oligonucleotide
agaugagcaccgcucacua

SEQ ID NO: 3087522 - RNA, 19 nt, Artificial Sequence
  Description of Artificial Sequence: Synthetic oligonucleotide
  modified_base (14)..(14): a, c, u, g, unknown or other
aggucacuuccacnggaaa

SEQ ID NO: 3087523 - RNA, 19 nt, Artificial Sequence
  Description of Artificial Sequence: Synthetic oligonucleotide
augagccauuuaaagaccu

SEQ ID NO: 3087524 - RNA, 19 nt, Artificial Sequence
  Description of Artificial Sequence: Synthetic oligonucleotide
gcggauugaaacccagucc

SEQ ID NO: 3087525 - RNA, 19 nt, Artificial Sequence
  Description of Artificial Sequence: Synthetic oligonucleotide
gagccugggucugaucuag

SEQ ID NO: 3087526 - RNA, 19 nt, Artificial Sequence
  Description of Artificial Sequence: Synthetic oligonucleotide
ggcggauugaaacccaguc

SEQ ID NO: 3087527 - RNA, 19 nt, Artificial Sequence
  Description of Artificial Sequence: Synthetic oligonucleotide
guugugaacagaggcugac

SEQ ID NO: 3087528 - RNA, 19 nt, Artificial Sequence
  Description of Artificial Sequence: Synthetic oligonucleotide
caccgcucacuacaauccg

SEQ ID NO: 3087529 - RNA, 19 nt, Artificial Sequence
  Description of Artificial Sequence: Synthetic oligonucleotide
gcauuaaagucacccagga

SEQ ID NO: 3087530 - RNA, 19 nt, Artificial Sequence
  Description of Artificial Sequence: Synthetic oligonucleotide
gucacccaggaacaccaug

SEQ ID NO: 3087531 - RNA, 19 nt, Artificial Sequence
  Description of Artificial Sequence: Synthetic oligonucleotide
acugucugggaugagccau

SEQ ID NO: 3087532 - RNA, 19 nt, Artificial Sequence
  Description of Artificial Sequence: Synthetic oligonucleotide
gaugagcaccgcucacuac

SEQ ID NO: 3087533 - RNA, 19 nt, Artificial Sequence
  Description of Artificial Sequence: Synthetic oligonucleotide
cugauggcaagagccuggg

SEQ ID NO: 3087534 - RNA, 19 nt, Artificial Sequence
  Description of Artificial Sequence: Synthetic oligonucleotide
cucacuacaauccggucgu

SEQ ID NO: 3087535 - RNA, 19 nt, Artificial Sequence
  Description of Artificial Sequence: Synthetic oligonucleotide
uccgcacugucugggauga

SEQ ID NO: 3087536 - RNA, 19 nt, Artificial Sequence
  Description of Artificial Sequence: Synthetic oligonucleotide
gacuugaaggucacuucca

SEQ ID NO: 3087537 - RNA, 19 nt, Artificial Sequence
  Description of Artificial Sequence: Synthetic oligonucleotide
ugguguccgcacugucugg

SEQ ID NO: 3087538 - RNA, 19 nt, Artificial Sequence
  Description of Artificial Sequence: Synthetic oligonucleotide
cacuacaauccggucguag

SEQ ID NO: 3087539 - RNA, 19 nt, Artificial Sequence
  Description of Artificial Sequence: Synthetic oligonucleotide
uugugaacagaggcugacu

SEQ ID NO: 3087540 - RNA, 19 nt, Artificial Sequence
  Description of Artificial Sequence: Synthetic oligonucleotide
uagcugucagugagacuug

SEQ ID NO: 3087541 - RNA, 19 nt, Artificial Sequence
  Description of Artificial Sequence: Synthetic oligonucleotide
accgcucacuacaauccgg

SEQ ID NO: 3087542 - RNA, 19 nt, Artificial Sequence
  Description of Artificial Sequence: Synthetic oligonucleotide
caggcggauugaaacccag

SEQ ID NO: 3087543 - RNA, 19 nt, Artificial Sequence
  Description of Artificial Sequence: Synthetic oligonucleotide
uguccgcacugucugggau

SEQ ID NO: 3087544 - RNA, 19 nt, Artificial Sequence
  Description of Artificial Sequence: Synthetic oligonucleotide
ggccuucaggcucuuaggc

SEQ ID NO: 3087545 - RNA, 19 nt, Artificial Sequence
  Description of Artificial Sequence: Synthetic oligonucleotide
cuaggccaaauuccuccug

SEQ ID NO: 3087546 - RNA, 19 nt, Artificial Sequence
  Description of Artificial Sequence: Synthetic oligonucleotide
aguccugggccuuuacaua

SEQ ID NO: 3087547 - RNA, 19 nt, Artificial Sequence
  Description of Artificial Sequence: Synthetic oligonucleotide
gaucuaggccaaauuccuc

SEQ ID NO: 3087548 - RNA, 19 nt, Artificial Sequence
  Description of Artificial Sequence: Synthetic oligonucleotide
auacuugcagucagcauua

SEQ ID NO: 3087549 - RNA, 19 nt, Artificial Sequence
  Description of Artificial Sequence: Synthetic oligonucleotide
  modified_base (15)..(15): a, c, u, g, unknown or other
aaggucacuuccacnggaa

SEQ ID NO: 3087550 - RNA, 19 nt, Artificial Sequence
  Description of Artificial Sequence: Synthetic oligonucleotide
auggucacugauggcaaga

SEQ ID NO: 3087551 - RNA, 19 nt, Artificial Sequence
  Description of Artificial Sequence: Synthetic oligonucleotide
ccuuuacauacuugcaguc

SEQ ID NO: 3087552 - RNA, 19 nt, Artificial Sequence
  Description of Artificial Sequence: Synthetic oligonucleotide
ugggucugaucuaggccaa

SEQ ID NO: 3087553 - RNA, 19 nt, Artificial Sequence
  Description of Artificial Sequence: Synthetic oligonucleotide
gaacagaggcugacugggc

SEQ ID NO: 3087554 - RNA, 19 nt, Artificial Sequence
  Description of Artificial Sequence: Synthetic oligonucleotide
guccgcacugucugggaug

SEQ ID NO: 3087555 - RNA, 19 nt, Artificial Sequence
  Description of Artificial Sequence: Synthetic oligonucleotide
cagucugaguugcccacug

SEQ ID NO: 3087556 - RNA, 19 nt, Artificial Sequence
  Description of Artificial Sequence: Synthetic oligonucleotide
uccugggccuuuacauacu

SEQ ID NO: 3087557 - RNA, 19 nt, Artificial Sequence
  Description of Artificial Sequence: Synthetic oligonucleotide
agaccucacugcugcgcag

SEQ ID NO: 3087558 - RNA, 19 nt, Artificial Sequence
  Description of Artificial Sequence: Synthetic oligonucleotide
cauuaaagucacccaggaa

SEQ ID NO: 3087559 - RNA, 19 nt, Artificial Sequence
  Description of Artificial Sequence: Synthetic oligonucleotide
cugggaugagccauuuaaa

SEQ ID NO: 3087560 - RNA, 19 nt, Artificial Sequence
  Description of Artificial Sequence: Synthetic oligonucleotide
cacugauggcaagagccug

SEQ ID NO: 3087561 - RNA, 19 nt, Artificial Sequence
  Description of Artificial Sequence: Synthetic oligonucleotide
cugggccuuuacauacuug

SEQ ID NO: 3087562 - RNA, 19 nt, Artificial Sequence
  Description of Artificial Sequence: Synthetic oligonucleotide
agucugaguugcccacugu

SEQ ID NO: 3087563 - RNA, 19 nt, Artificial Sequence
  Description of Artificial Sequence: Synthetic oligonucleotide
ccugggucugaucuaggcc

SEQ ID NO: 3087564 - RNA, 19 nt, Artificial Sequence
  Description of Artificial Sequence: Synthetic oligonucleotide
gggccuucaggcucuuagg

SEQ ID NO: 3087565 - RNA, 19 nt, Artificial Sequence
  Description of Artificial Sequence: Synthetic oligonucleotide
cacugugguguccgcacug

SEQ ID NO: 3087566 - RNA, 19 nt, Artificial Sequence
  Description of Artificial Sequence: Synthetic oligonucleotide
ccuccugaaaguugugaac

SEQ ID NO: 3087567 - RNA, 19 nt, Artificial Sequence
  Description of Artificial Sequence: Synthetic oligonucleotide
ggucacugauggcaagagc

SEQ ID NO: 3087568 - RNA, 19 nt, Artificial Sequence
  Description of Artificial Sequence: Synthetic oligonucleotide
gcucuuaggcagaugagca

SEQ ID NO: 3087569 - RNA, 19 nt, Artificial Sequence
  Description of Artificial Sequence: Synthetic oligonucleotide
ugauggcaagagccugggu

SEQ ID NO: 3087570 - RNA, 19 nt, Artificial Sequence
  Description of Artificial Sequence: Synthetic oligonucleotide
ggcugacugggccuucagg

SEQ ID NO: 3087571 - RNA, 19 nt, Artificial Sequence
  Description of Artificial Sequence: Synthetic oligonucleotide
gguguccgcacugucuggg

SEQ ID NO: 3087572 - RNA, 19 nt, Artificial Sequence
  Description of Artificial Sequence: Synthetic oligonucleotide
aguugugaacagaggcuga

SEQ ID NO: 3087573 - RNA, 19 nt, Artificial Sequence
  Description of Artificial Sequence: Synthetic oligonucleotide
gcaccgcucacuacaaucc

SEQ ID NO: 3087574 - RNA, 19 nt, Artificial Sequence
  Description of Artificial Sequence: Synthetic oligonucleotide
  modified_base (12)..(12): a, c, u, g, unknown or other
gucacuuccacnggaaaau

SEQ ID NO: 3087575 - RNA, 19 nt, Artificial Sequence
  Description of Artificial Sequence: Synthetic oligonucleotide
gcacugucugggaugagcc

SEQ ID NO: 3087576 - RNA, 19 nt, Artificial Sequence
  Description of Artificial Sequence: Synthetic oligonucleotide
ucguaggcacagucugagu

SEQ ID NO: 3087577 - RNA, 19 nt, Artificial Sequence
  Description of Artificial Sequence: Synthetic oligonucleotide
aggccauagcugucaguga

SEQ ID NO: 3087578 - RNA, 19 nt, Artificial Sequence
  Description of Artificial Sequence: Synthetic oligonucleotide
gaaacccaguccugggccu

SEQ ID NO: 3087579 - RNA, 19 nt, Artificial Sequence
  Description of Artificial Sequence: Synthetic oligonucleotide
aggccaaauuccuccugaa

SEQ ID NO: 3087580 - RNA, 19 nt, Artificial Sequence
  Description of Artificial Sequence: Synthetic oligonucleotide
  modified_base (2)..(2): a, c, u, g, unknown or other
cnggaaaauggucacugau

SEQ ID NO: 3087581 - RNA, 19 nt, Artificial Sequence
  Description of Artificial Sequence: Synthetic oligonucleotide
gaguugcccacuguggugu

SEQ ID NO: 3087582 - RNA, 19 nt, Artificial Sequence
  Description of Artificial Sequence: Synthetic oligonucleotide
ucacugcugcgcaggcgga

SEQ ID NO: 3087583 - RNA, 19 nt, Artificial Sequence
  Description of Artificial Sequence: Synthetic oligonucleotide
gccuuuacauacuugcagu

SEQ ID NO: 3087584 - RNA, 19 nt, Artificial Sequence
  Description of Artificial Sequence: Synthetic oligonucleotide
ggcagaugagcaccgcuca

SEQ ID NO: 3087585 - RNA, 19 nt, Artificial Sequence
  Description of Artificial Sequence: Synthetic oligonucleotide
acugugguguccgcacugu

SEQ ID NO: 3087586 - RNA, 19 nt, Artificial Sequence
  Description of Artificial Sequence: Synthetic oligonucleotide
agagccugggucugaucua

SEQ ID NO: 3087587 - RNA, 19 nt, Artificial Sequence
  Description of Artificial Sequence: Synthetic oligonucleotide
acagucugaguugcccacu

SEQ ID NO: 3087588 - RNA, 19 nt, Artificial Sequence
  Description of Artificial Sequence: Synthetic oligonucleotide
ccauagcugucagugagac

SEQ ID NO: 3087589 - RNA, 19 nt, Artificial Sequence
  Description of Artificial Sequence: Synthetic oligonucleotide
gccugggucugaucuaggc

SEQ ID NO: 3087590 - RNA, 19 nt, Artificial Sequence
  Description of Artificial Sequence: Synthetic oligonucleotide
cugaguugcccacuguggu

SEQ ID NO: 3087591 - RNA, 19 nt, Artificial Sequence
  Description of Artificial Sequence: Synthetic oligonucleotide
aggcugacugggccuucag

SEQ ID NO: 3087592 - RNA, 19 nt, Artificial Sequence
  Description of Artificial Sequence: Synthetic oligonucleotide
ggauugaaacccaguccug

SEQ ID NO: 3087593 - RNA, 19 nt, Artificial Sequence
  Description of Artificial Sequence: Synthetic oligonucleotide
aggcucuuaggcagaugag

SEQ ID NO: 3087594 - RNA, 19 nt, Artificial Sequence
  Description of Artificial Sequence: Synthetic oligonucleotide
  modified_base (13)..(13): a, c, u, g, unknown or other
ggucacuuccacnggaaaa

SEQ ID NO: 3087595 - RNA, 19 nt, Artificial Sequence
  Description of Artificial Sequence: Synthetic oligonucleotide
uggcaagagccugggucug

SEQ ID NO: 3087596 - RNA, 19 nt, Artificial Sequence
  Description of Artificial Sequence: Synthetic oligonucleotide
cuucaggcucuuaggcaga

SEQ ID NO: 3087597 - RNA, 19 nt, Artificial Sequence
  Description of Artificial Sequence: Synthetic oligonucleotide
ucaggcucuuaggcagaug

SEQ ID NO: 3087598 - RNA, 19 nt, Artificial Sequence
  Description of Artificial Sequence: Synthetic oligonucleotide
caguccugggccuuuacau

SEQ ID NO: 3087599 - RNA, 19 nt, Artificial Sequence
  Description of Artificial Sequence: Synthetic oligonucleotide
uucaggcucuuaggcagau

SEQ ID NO: 3087600 - RNA, 19 nt, Artificial Sequence
  Description of Artificial Sequence: Synthetic oligonucleotide
ccaaauuccuccugaaagu

SEQ ID NO: 3087601 - RNA, 19 nt, Artificial Sequence
  Description of Artificial Sequence: Synthetic oligonucleotide
gcgcaggcggauugaaacc

SEQ ID NO: 3087602 - RNA, 19 nt, Artificial Sequence
  Description of Artificial Sequence: Synthetic oligonucleotide
gccuucaggcucuuaggca

SEQ ID NO: 3087603 - RNA, 19 nt, Artificial Sequence
  Description of Artificial Sequence: Synthetic oligonucleotide
cugcugcgcaggcggauug

SEQ ID NO: 3087604 - RNA, 19 nt, Artificial Sequence
  Description of Artificial Sequence: Synthetic oligonucleotide
gcacagucugaguugccca

SEQ ID NO: 3087605 - RNA, 19 nt, Artificial Sequence
  Description of Artificial Sequence: Synthetic oligonucleotide
aggcacagucugaguugcc

SEQ ID NO: 3087606 - RNA, 19 nt, Artificial Sequence
  Description of Artificial Sequence: Synthetic oligonucleotide
caagagccugggucugauc

SEQ ID NO: 3087607 - RNA, 19 nt, Artificial Sequence
  Description of Artificial Sequence: Synthetic oligonucleotide
cacugucugggaugagcca

SEQ ID NO: 3087608 - RNA, 19 nt, Artificial Sequence
  Description of Artificial Sequence: Synthetic oligonucleotide
guugcccacuguggugucc

SEQ ID NO: 3087609 - RNA, 19 nt, Artificial Sequence
  Description of Artificial Sequence: Synthetic oligonucleotide
ugucugggaugagccauuu

SEQ ID NO: 3087610 - RNA, 19 nt, Artificial Sequence
  Description of Artificial Sequence: Synthetic oligonucleotide
cugugguguccgcacuguc

SEQ ID NO: 3087611 - RNA, 19 nt, Artificial Sequence
  Description of Artificial Sequence: Synthetic oligonucleotide
caauccggucguaggcaca

SEQ ID NO: 3087612 - RNA, 19 nt, Artificial Sequence
  Description of Artificial Sequence: Synthetic oligonucleotide
caaauuccuccugaaaguu

SEQ ID NO: 3087613 - RNA, 19 nt, Artificial Sequence
  Description of Artificial Sequence: Synthetic oligonucleotide
cugacugggccuucaggcu

SEQ ID NO: 3087614 - RNA, 19 nt, Artificial Sequence
  Description of Artificial Sequence: Synthetic oligonucleotide
gcagaugagcaccgcucac

SEQ ID NO: 3087615 - RNA, 19 nt, Artificial Sequence
  Description of Artificial Sequence: Synthetic oligonucleotide
ugcugcgcaggcggauuga

SEQ ID NO: 3087616 - RNA, 19 nt, Artificial Sequence
  Description of Artificial Sequence: Synthetic oligonucleotide
gucugaucuaggccaaauu

SEQ ID NO: 3087617 - RNA, 19 nt, Artificial Sequence
  Description of Artificial Sequence: Synthetic oligonucleotide
cggauugaaacccaguccu

SEQ ID NO: 3087618 - RNA, 19 nt, Artificial Sequence
  Description of Artificial Sequence: Synthetic oligonucleotide
cggucguaggcacagucug

SEQ ID NO: 3087619 - RNA, 19 nt, Artificial Sequence
  Description of Artificial Sequence: Synthetic oligonucleotide
aggcggauugaaacccagu

SEQ ID NO: 3087620 - RNA, 19 nt, Artificial Sequence
  Description of Artificial Sequence: Synthetic oligonucleotide
ugcccacugugguguccgc

SEQ ID NO: 3087621 - RNA, 19 nt, Artificial Sequence
  Description of Artificial Sequence: Synthetic oligonucleotide
uacuugcagucagcauuaa

SEQ ID NO: 3087622 - RNA, 19 nt, Artificial Sequence
  Description of Artificial Sequence: Synthetic oligonucleotide
gaggcugacugggccuuca

SEQ ID NO: 3087623 - RNA, 19 nt, Artificial Sequence
  Description of Artificial Sequence: Synthetic oligonucleotide
guguccgcacugucuggga

SEQ ID NO: 3087624 - RNA, 19 nt, Artificial Sequence
  Description of Artificial Sequence: Synthetic oligonucleotide
agccugggucugaucuagg

SEQ ID NO: 3087625 - RNA, 19 nt, Artificial Sequence
  Description of Artificial Sequence: Synthetic oligonucleotide
ccugaaaguugugaacaga

SEQ ID NO: 3087626 - RNA, 19 nt, Artificial Sequence
  Description of Artificial Sequence: Synthetic oligonucleotide
cgcaggcggauugaaaccc

SEQ ID NO: 3087627 - RNA, 19 nt, Artificial Sequence
  Description of Artificial Sequence: Synthetic oligonucleotide
acugcugcgcaggcggauu

SEQ ID NO: 3087628 - RNA, 19 nt, Artificial Sequence
  Description of Artificial Sequence: Synthetic oligonucleotide
cagaugagcaccgcucacu

SEQ ID NO: 3087629 - RNA, 19 nt, Artificial Sequence
  Description of Artificial Sequence: Synthetic oligonucleotide
gggccuuuacauacuugca

SEQ ID NO: 3087630 - RNA, 19 nt, Artificial Sequence
  Description of Artificial Sequence: Synthetic oligonucleotide
cauagcugucagugagacu

SEQ ID NO: 3087631 - RNA, 19 nt, Artificial Sequence
  Description of Artificial Sequence: Synthetic oligonucleotide
ucacuacaauccggucgua

SEQ ID NO: 3087632 - RNA, 19 nt, Artificial Sequence
  Description of Artificial Sequence: Synthetic oligonucleotide
ggucguaggcacagucuga

SEQ ID NO: 3087633 - RNA, 19 nt, Artificial Sequence
  Description of Artificial Sequence: Synthetic oligonucleotide
gacugggccuucaggcucu

SEQ ID NO: 3087634 - RNA, 19 nt, Artificial Sequence
  Description of Artificial Sequence: Synthetic oligonucleotide
cugcgcaggcggauugaaa

SEQ ID NO: 3087635 - RNA, 19 nt, Artificial Sequence
  Description of Artificial Sequence: Synthetic oligonucleotide
gccauagcugucagugaga

SEQ ID NO: 3087636 - RNA, 19 nt, Artificial Sequence
  Description of Artificial Sequence: Synthetic oligonucleotide
gucugggaugagccauuua

SEQ ID NO: 3087637 - RNA, 19 nt, Artificial Sequence
  Description of Artificial Sequence: Synthetic oligonucleotide
ccaguccugggccuuuaca

SEQ ID NO: 3087638 - RNA, 19 nt, Artificial Sequence
  Description of Artificial Sequence: Synthetic oligonucleotide
ccucacugcugcgcaggcg

SEQ ID NO: 3087639 - RNA, 19 nt, Artificial Sequence
  Description of Artificial Sequence: Synthetic oligonucleotide
agucacccaggaacaccau

SEQ ID NO: 3087640 - RNA, 19 nt, Artificial Sequence
  Description of Artificial Sequence: Synthetic oligonucleotide
gcaggcggauugaaaccca

SEQ ID NO: 3087641 - RNA, 19 nt, Artificial Sequence
  Description of Artificial Sequence: Synthetic oligonucleotide
cguaggcacagucugaguu

SEQ ID NO: 3087642 - RNA, 19 nt, Artificial Sequence
  Description of Artificial Sequence: Synthetic oligonucleotide
ggucugaucuaggccaaau

SEQ ID NO: 3087643 - RNA, 19 nt, Artificial Sequence
  Description of Artificial Sequence: Synthetic oligonucleotide
auccggucguaggcacagu

SEQ ID NO: 3087644 - RNA, 19 nt, Artificial Sequence
  Description of Artificial Sequence: Synthetic oligonucleotide
cugucugggaugagccauu

SEQ ID NO: 3087645 - RNA, 19 nt, Artificial Sequence
  Description of Artificial Sequence: Synthetic oligonucleotide
gcugucagugagacuugaa

SEQ ID NO: 3087646 - RNA, 19 nt, Artificial Sequence
  Description of Artificial Sequence: Synthetic oligonucleotide
gagcaccgcucacuacaau

SEQ ID NO: 3087647 - RNA, 19 nt, Artificial Sequence
  Description of Artificial Sequence: Synthetic oligonucleotide
ccgcucacuacaauccggu

SEQ ID NO: 3087648 - RNA, 19 nt, Artificial Sequence
  Description of Artificial Sequence: Synthetic oligonucleotide
gugagacuugaaggucacu

SEQ ID NO: 3087649 - RNA, 19 nt, Artificial Sequence
  Description of Artificial Sequence: Synthetic oligonucleotide
cgcucacuacaauccgguc

SEQ ID NO: 3087650 - RNA, 19 nt, Artificial Sequence
  Description of Artificial Sequence: Synthetic oligonucleotide
cccaguccugggccuuuac

SEQ ID NO: 3087651 - RNA, 19 nt, Artificial Sequence
  Description of Artificial Sequence: Synthetic oligonucleotide
ccggucguaggcacagucu

SEQ ID NO: 3087652 - RNA, 19 nt, Artificial Sequence
  Description of Artificial Sequence: Synthetic oligonucleotide
gcugcgcaggcggauugaa

SEQ ID NO: 3087653 - RNA, 19 nt, Artificial Sequence
  Description of Artificial Sequence: Synthetic oligonucleotide
acccaguccugggccuuua

SEQ ID NO: 3087654 - RNA, 19 nt, Artificial Sequence
  Description of Artificial Sequence: Synthetic oligonucleotide
gcccacugugguguccgca

SEQ ID NO: 3087655 - RNA, 19 nt, Artificial Sequence
  Description of Artificial Sequence: Synthetic oligonucleotide
cagaggcugacugggccuu

SEQ ID NO: 3087656 - RNA, 19 nt, Artificial Sequence
  Description of Artificial Sequence: Synthetic oligonucleotide
gcaagagccugggucugau

SEQ ID NO: 3087657 - RNA, 19 nt, Artificial Sequence
  Description of Artificial Sequence: Synthetic oligonucleotide
  modified_base (5)..(5): a, c, u, g, unknown or other
ccacnggaaaauggucacu

SEQ ID NO: 3087658 - RNA, 19 nt, Artificial Sequence
  Description of Artificial Sequence: Synthetic oligonucleotide
gggucugaucuaggccaaa

SEQ ID NO: 3087659 - RNA, 19 nt, Artificial Sequence
  Description of Artificial Sequence: Synthetic oligonucleotide
cacugcugcgcaggcggau

SEQ ID NO: 3087660 - RNA, 19 nt, Artificial Sequence
  Description of Artificial Sequence: Synthetic oligonucleotide
cugggccuucaggcucuua

SEQ ID NO: 3087661 - RNA, 19 nt, Artificial Sequence
  Description of Artificial Sequence: Synthetic oligonucleotide
ccgcacugucugggaugag

SEQ ID NO: 3087662 - RNA, 19 nt, Artificial Sequence
  Description of Artificial Sequence: Synthetic oligonucleotide
  modified_base (1)..(1): a, c, u, g, unknown or other
nggaaaauggucacugaug

SEQ ID NO: 3087663 - RNA, 19 nt, Artificial Sequence
  Description of Artificial Sequence: Synthetic oligonucleotide
auaucaaacaccuucacuc

SEQ ID NO: 3087664 - RNA, 19 nt, Artificial Sequence
  Description of Artificial Sequence: Synthetic oligonucleotide
auauuuaugaacccauugc

SEQ ID NO: 3087665 - RNA, 19 nt, Artificial Sequence
  Description of Artificial Sequence: Synthetic oligonucleotide
acuguaaauauuuaugaac

SEQ ID NO: 3087666 - RNA, 19 nt, Artificial Sequence
  Description of Artificial Sequence: Synthetic oligonucleotide
aaugacauugcuuuugaug

SEQ ID NO: 3087667 - RNA, 19 nt, Artificial Sequence
  Description of Artificial Sequence: Synthetic oligonucleotide
aauauuuaugaacccauug

SEQ ID NO: 3087668 - RNA, 19 nt, Artificial Sequence
  Description of Artificial Sequence: Synthetic oligonucleotide
aacaccuucacucuaaaga

SEQ ID NO: 3087669 - RNA, 19 nt, Artificial Sequence
  Description of Artificial Sequence: Synthetic oligonucleotide
cuguaaauauuuaugaacc

SEQ ID NO: 3087670 - RNA, 19 nt, Artificial Sequence
  Description of Artificial Sequence: Synthetic oligonucleotide
augaacuucgccuucaggg

SEQ ID NO: 3087671 - RNA, 19 nt, Artificial Sequence
  Description of Artificial Sequence: Synthetic oligonucleotide
auguaauagguucuguugc

SEQ ID NO: 3087672 - RNA, 19 nt, Artificial Sequence
  Description of Artificial Sequence: Synthetic oligonucleotide
acuuuucucgcuuuugugc

SEQ ID NO: 3087673 - RNA, 19 nt, Artificial Sequence
  Description of Artificial Sequence: Synthetic oligonucleotide
uugagauaaucauugauug

SEQ ID NO: 3087674 - RNA, 19 nt, Artificial Sequence
  Description of Artificial Sequence: Synthetic oligonucleotide
uaacauuuaccucugacac

SEQ ID NO: 3087675 - RNA, 19 nt, Artificial Sequence
  Description of Artificial Sequence: Synthetic oligonucleotide
uugcuuuugaugaacuucg

SEQ ID NO: 3087676 - RNA, 19 nt, Artificial Sequence
  Description of Artificial Sequence: Synthetic oligonucleotide
uauuuaugaacccauugca

SEQ ID NO: 3087677 - RNA, 19 nt, Artificial Sequence
  Description of Artificial Sequence: Synthetic oligonucleotide
uugguuaacauuuaccucu

SEQ ID NO: 3087678 - RNA, 19 nt, Artificial Sequence
  Description of Artificial Sequence: Synthetic oligonucleotide
aaauaucaaacaccuucac

SEQ ID NO: 3087679 - RNA, 19 nt, Artificial Sequence
  Description of Artificial Sequence: Synthetic oligonucleotide
uuaacauuuaccucugaca

SEQ ID NO: 3087680 - RNA, 19 nt, Artificial Sequence
  Description of Artificial Sequence: Synthetic oligonucleotide
uauguaauagguucuguug

SEQ ID NO: 3087681 - RNA, 19 nt, Artificial Sequence
  Description of Artificial Sequence: Synthetic oligonucleotide
ugugcuguauguaauaggu

SEQ ID NO: 3087682 - RNA, 19 nt, Artificial Sequence
  Description of Artificial Sequence: Synthetic oligonucleotide
aaccgaaauaaucugagau

SEQ ID NO: 3087683 - RNA, 19 nt, Artificial Sequence
  Description of Artificial Sequence: Synthetic oligonucleotide
aauaucaaacaccuucacu

SEQ ID NO: 3087684 - RNA, 19 nt, Artificial Sequence
  Description of Artificial Sequence: Synthetic oligonucleotide
uuuaacaaguuguugugug

SEQ ID NO: 3087685 - RNA, 19 nt, Artificial Sequence
  Description of Artificial Sequence: Synthetic oligonucleotide
acauuuaccucugacacac

SEQ ID NO: 3087686 - RNA, 19 nt, Artificial Sequence
  Description of Artificial Sequence: Synthetic oligonucleotide
uuuaugaacccauugcaac

SEQ ID NO: 3087687 - RNA, 19 nt, Artificial Sequence
  Description of Artificial Sequence: Synthetic oligonucleotide
uaaauauuuaugaacccau

SEQ ID NO: 3087688 - RNA, 19 nt, Artificial Sequence
  Description of Artificial Sequence: Synthetic oligonucleotide
aaucugagaugguaaugac

SEQ ID NO: 3087689 - RNA, 19 nt, Artificial Sequence
  Description of Artificial Sequence: Synthetic oligonucleotide
ugauugguuaacauuuacc

SEQ ID NO: 3087690 - RNA, 19 nt, Artificial Sequence
  Description of Artificial Sequence: Synthetic oligonucleotide
uuugcaucagugcaguuga

SEQ ID NO: 3087691 - RNA, 19 nt, Artificial Sequence
  Description of Artificial Sequence: Synthetic oligonucleotide
uguaaauauuuaugaaccc

SEQ ID NO: 3087692 - RNA, 19 nt, Artificial Sequence
  Description of Artificial Sequence: Synthetic oligonucleotide
uucacucuaaagaauucag

SEQ ID NO: 3087693 - RNA, 19 nt, Artificial Sequence
  Description of Artificial Sequence: Synthetic oligonucleotide
ugagaugguaaugacauug

SEQ ID NO: 3087694 - RNA, 19 nt, Artificial Sequence
  Description of Artificial Sequence: Synthetic oligonucleotide
aauaaucugagaugguaau

SEQ ID NO: 3087695 - RNA, 19 nt, Artificial Sequence
  Description of Artificial Sequence: Synthetic oligonucleotide
ugagauaaucauugauugg

SEQ ID NO: 3087696 - RNA, 19 nt, Artificial Sequence
  Description of Artificial Sequence: Synthetic oligonucleotide
ggaaauaucaaacaccuuc

SEQ ID NO: 3087697 - RNA, 19 nt, Artificial Sequence
  Description of Artificial Sequence: Synthetic oligonucleotide
ucagggaaauaucaaacac

SEQ ID NO: 3087698 - RNA, 19 nt, Artificial Sequence
  Description of Artificial Sequence: Synthetic oligonucleotide
accucugacacacuggagg

SEQ ID NO: 3087699 - RNA, 19 nt, Artificial Sequence
  Description of Artificial Sequence: Synthetic oligonucleotide
uuuaccucugacacacugg

SEQ ID NO: 3087700 - RNA, 19 nt, Artificial Sequence
  Description of Artificial Sequence: Synthetic oligonucleotide
ucuguugcuuuuaacaagu

SEQ ID NO: 3087701 - RNA, 19 nt, Artificial Sequence
  Description of Artificial Sequence: Synthetic oligonucleotide
uuaugaacccauugcaacc

SEQ ID NO: 3087702 - RNA, 19 nt, Artificial Sequence
  Description of Artificial Sequence: Synthetic oligonucleotide
ugcuguauguaauagguuc

SEQ ID NO: 3087703 - RNA, 19 nt, Artificial Sequence
  Description of Artificial Sequence: Synthetic oligonucleotide
auugcuuuugaugaacuuc

SEQ ID NO: 3087704 - RNA, 19 nt, Artificial Sequence
  Description of Artificial Sequence: Synthetic oligonucleotide
gauugguuaacauuuaccu

SEQ ID NO: 3087705 - RNA, 19 nt, Artificial Sequence
  Description of Artificial Sequence: Synthetic oligonucleotide
augguaaugacauugcuuu

SEQ ID NO: 3087706 - RNA, 19 nt, Artificial Sequence
  Description of Artificial Sequence: Synthetic oligonucleotide
auggaacauacuuuucucg

SEQ ID NO: 3087707 - RNA, 19 nt, Artificial Sequence
  Description of Artificial Sequence: Synthetic oligonucleotide
uguugcuuuuaacaaguug

SEQ ID NO: 3087708 - RNA, 19 nt, Artificial Sequence
  Description of Artificial Sequence: Synthetic oligonucleotide
uaaucugagaugguaauga

SEQ ID NO: 3087709 - RNA, 19 nt, Artificial Sequence
  Description of Artificial Sequence: Synthetic oligonucleotide
auugcaaccgaaauaaucu

SEQ ID NO: 3087710 - RNA, 19 nt, Artificial Sequence
  Description of Artificial Sequence: Synthetic oligonucleotide
cacucuaaagaauucaguc

SEQ ID NO: 3087711 - RNA, 19 nt, Artificial Sequence
  Description of Artificial Sequence: Synthetic oligonucleotide
cucuaaagaauucagucuc

SEQ ID NO: 3087712 - RNA, 19 nt, Artificial Sequence
  Description of Artificial Sequence: Synthetic oligonucleotide
uggaacauacuuuucucgc

SEQ ID NO: 3087713 - RNA, 19 nt, Artificial Sequence
  Description of Artificial Sequence: Synthetic oligonucleotide
cagggaaauaucaaacacc

SEQ ID NO: 3087714 - RNA, 19 nt, Artificial Sequence
  Description of Artificial Sequence: Synthetic oligonucleotide
cuuuuaacaaguuguugug

SEQ ID NO: 3087715 - RNA, 19 nt, Artificial Sequence
  Description of Artificial Sequence: Synthetic oligonucleotide
uaugaacccauugcaaccg

SEQ ID NO: 3087716 - RNA, 19 nt, Artificial Sequence
  Description of Artificial Sequence: Synthetic oligonucleotide
cuucagggaaauaucaaac

SEQ ID NO: 3087717 - RNA, 19 nt, Artificial Sequence
  Description of Artificial Sequence: Synthetic oligonucleotide
uucagggaaauaucaaaca

SEQ ID NO: 3087718 - RNA, 19 nt, Artificial Sequence
  Description of Artificial Sequence: Synthetic oligonucleotide
auaaucauugauugguuaa

SEQ ID NO: 3087719 - RNA, 19 nt, Artificial Sequence
  Description of Artificial Sequence: Synthetic oligonucleotide
accgaaauaaucugagaug

SEQ ID NO: 3087720 - RNA, 19 nt, Artificial Sequence
  Description of Artificial Sequence: Synthetic oligonucleotide
uucuguugcuuuuaacaag

SEQ ID NO: 3087721 - RNA, 19 nt, Artificial Sequence
  Description of Artificial Sequence: Synthetic oligonucleotide
uuaccucugacacacugga

SEQ ID NO: 3087722 - RNA, 19 nt, Artificial Sequence
  Description of Artificial Sequence: Synthetic oligonucleotide
cauugcaaccgaaauaauc

SEQ ID NO: 3087723 - RNA, 19 nt, Artificial Sequence
  Description of Artificial Sequence: Synthetic oligonucleotide
ucuaaagaauucagucuca

SEQ ID NO: 3087724 - RNA, 19 nt, Artificial Sequence
  Description of Artificial Sequence: Synthetic oligonucleotide
uugugcuguauguaauagg

SEQ ID NO: 3087725 - RNA, 19 nt, Artificial Sequence
  Description of Artificial Sequence: Synthetic oligonucleotide
auuuaccucugacacacug

SEQ ID NO: 3087726 - RNA, 19 nt, Artificial Sequence
  Description of Artificial Sequence: Synthetic oligonucleotide
aaauaaucugagaugguaa

SEQ ID NO: 3087727 - RNA, 19 nt, Artificial Sequence
  Description of Artificial Sequence: Synthetic oligonucleotide
aacauuuaccucugacaca

SEQ ID NO: 3087728 - RNA, 19 nt, Artificial Sequence
  Description of Artificial Sequence: Synthetic oligonucleotide
gaaauaucaaacaccuuca

SEQ ID NO: 3087729 - RNA, 19 nt, Artificial Sequence
  Description of Artificial Sequence: Synthetic oligonucleotide
uguaauagguucuguugcu

SEQ ID NO: 3087730 - RNA, 19 nt, Artificial Sequence
  Description of Artificial Sequence: Synthetic oligonucleotide
ugcaaccgaaauaaucuga

SEQ ID NO: 3087731 - RNA, 19 nt, Artificial Sequence
  Description of Artificial Sequence: Synthetic oligonucleotide
aaacaccuucacucuaaag

SEQ ID NO: 3087732 - RNA, 19 nt, Artificial Sequence
  Description of Artificial Sequence: Synthetic oligonucleotide
agggaaauaucaaacaccu

SEQ ID NO: 3087733 - RNA, 19 nt, Artificial Sequence
  Description of Artificial Sequence: Synthetic oligonucleotide
uugauugguuaacauuuac

SEQ ID NO: 3087734 - RNA, 19 nt, Artificial Sequence
  Description of Artificial Sequence: Synthetic oligonucleotide
guaaauauuuaugaaccca

SEQ ID NO: 3087735 - RNA, 19 nt, Artificial Sequence
  Description of Artificial Sequence: Synthetic oligonucleotide
uaucaaacaccuucacucu

SEQ ID NO: 3087736 - RNA, 19 nt, Artificial Sequence
  Description of Artificial Sequence: Synthetic oligonucleotide
uuaacaaguuguugugugu

SEQ ID NO: 3087737 - RNA, 19 nt, Artificial Sequence
  Description of Artificial Sequence: Synthetic oligonucleotide
aguugagauaaucauugau

SEQ ID NO: 3087738 - RNA, 19 nt, Artificial Sequence
  Description of Artificial Sequence: Synthetic oligonucleotide
aaucauugauugguuaaca

SEQ ID NO: 3087739 - RNA, 19 nt, Artificial Sequence
  Description of Artificial Sequence: Synthetic oligonucleotide
ugaacuucgccuucaggga

SEQ ID NO: 3087740 - RNA, 19 nt, Artificial Sequence
  Description of Artificial Sequence: Synthetic oligonucleotide
ucacucuaaagaauucagu

SEQ ID NO: 3087741 - RNA, 19 nt, Artificial Sequence
  Description of Artificial Sequence: Synthetic oligonucleotide
ucauugauugguuaacauu

SEQ ID NO: 3087742 - RNA, 19 nt, Artificial Sequence
  Description of Artificial Sequence: Synthetic oligonucleotide
aacaaguuguugugugugu

SEQ ID NO: 3087743 - RNA, 19 nt, Artificial Sequence
  Description of Artificial Sequence: Synthetic oligonucleotide
gaugaacuucgccuucagg

SEQ ID NO: 3087744 - RNA, 19 nt, Artificial Sequence
  Description of Artificial Sequence: Synthetic oligonucleotide
uaacaaguuguugugugug

SEQ ID NO: 3087745 - RNA, 19 nt, Artificial Sequence
  Description of Artificial Sequence: Synthetic oligonucleotide
uuuugaugaacuucgccuu

SEQ ID NO: 3087746 - RNA, 19 nt, Artificial Sequence
  Description of Artificial Sequence: Synthetic oligonucleotide
gguucuguugcuuuuaaca

SEQ ID NO: 3087747 - RNA, 19 nt, Artificial Sequence
  Description of Artificial Sequence: Synthetic oligonucleotide
guugcuuuuaacaaguugu

SEQ ID NO: 3087748 - RNA, 19 nt, Artificial Sequence
  Description of Artificial Sequence: Synthetic oligonucleotide
gagauaaucauugauuggu

SEQ ID NO: 3087749 - RNA, 19 nt, Artificial Sequence
  Description of Artificial Sequence: Synthetic oligonucleotide
auacuuuucucgcuuuugu

SEQ ID NO: 3087750 - RNA, 19 nt, Artificial Sequence
  Description of Artificial Sequence: Synthetic oligonucleotide
cuuuugaugaacuucgccu

SEQ ID NO: 3087751 - RNA, 19 nt, Artificial Sequence
  Description of Artificial Sequence: Synthetic oligonucleotide
uuuuaacaaguuguugugu

SEQ ID NO: 3087752 - RNA, 19 nt, Artificial Sequence
  Description of Artificial Sequence: Synthetic oligonucleotide
aacccauugcaaccgaaau

SEQ ID NO: 3087753 - RNA, 19 nt, Artificial Sequence
  Description of Artificial Sequence: Synthetic oligonucleotide
uaaucauugauugguuaac

SEQ ID NO: 3087754 - RNA, 19 nt, Artificial Sequence
  Description of Artificial Sequence: Synthetic oligonucleotide
ccgaaauaaucugagaugg

SEQ ID NO: 3087755 - RNA, 19 nt, Artificial Sequence
  Description of Artificial Sequence: Synthetic oligonucleotide
cauggaacauacuuuucuc

SEQ ID NO: 3087756 - RNA, 19 nt, Artificial Sequence
  Description of Artificial Sequence: Synthetic oligonucleotide
uguugugugugugugugug

SEQ ID NO: 3087757 - RNA, 19 nt, Artificial Sequence
  Description of Artificial Sequence: Synthetic oligonucleotide
gaaauaaucugagauggua

SEQ ID NO: 3087758 - RNA, 19 nt, Artificial Sequence
  Description of Artificial Sequence: Synthetic oligonucleotide
gauaaucauugauugguua

SEQ ID NO: 3087759 - RNA, 19 nt, Artificial Sequence
  Description of Artificial Sequence: Synthetic oligonucleotide
aaguuguugugugugugug

SEQ ID NO: 3087760 - RNA, 19 nt, Artificial Sequence
  Description of Artificial Sequence: Synthetic oligonucleotide
uugcaaccgaaauaaucug

SEQ ID NO: 3087761 - RNA, 19 nt, Artificial Sequence
  Description of Artificial Sequence: Synthetic oligonucleotide
acuguggcauggaacauac

SEQ ID NO: 3087762 - RNA, 19 nt, Artificial Sequence
  Description of Artificial Sequence: Synthetic oligonucleotide
ugcaguugagauaaucauu

SEQ ID NO: 3087763 - RNA, 19 nt, Artificial Sequence
  Description of Artificial Sequence: Synthetic oligonucleotide
uucgccuucagggaaauau

SEQ ID NO: 3087764 - RNA, 19 nt, Artificial Sequence
  Description of Artificial Sequence: Synthetic oligonucleotide
gcaguugagauaaucauug

SEQ ID NO: 3087765 - RNA, 19 nt, Artificial Sequence
  Description of Artificial Sequence: Synthetic oligonucleotide
agugcaguugagauaauca

SEQ ID NO: 3087766 - RNA, 19 nt, Artificial Sequence
  Description of Artificial Sequence: Synthetic oligonucleotide
cuuugcaucagugcaguug

SEQ ID NO: 3087767 - RNA, 19 nt, Artificial Sequence
  Description of Artificial Sequence: Synthetic oligonucleotide
uuuugugcuguauguaaua

SEQ ID NO: 3087768 - RNA, 19 nt, Artificial Sequence
  Description of Artificial Sequence: Synthetic oligonucleotide
ugcuuuuaacaaguuguug

SEQ ID NO: 3087769 - RNA, 19 nt, Artificial Sequence
  Description of Artificial Sequence: Synthetic oligonucleotide
aucauugauugguuaacau

SEQ ID NO: 3087770 - RNA, 19 nt, Artificial Sequence
  Description of Artificial Sequence: Synthetic oligonucleotide
auaaucugagaugguaaug

SEQ ID NO: 3087771 - RNA, 19 nt, Artificial Sequence
  Description of Artificial Sequence: Synthetic oligonucleotide
guuguugugugugugugug

SEQ ID NO: 3087772 - RNA, 19 nt, Artificial Sequence
  Description of Artificial Sequence: Synthetic oligonucleotide
cauugauugguuaacauuu

SEQ ID NO: 3087773 - RNA, 19 nt, Artificial Sequence
  Description of Artificial Sequence: Synthetic oligonucleotide
agaugguaaugacauugcu

SEQ ID NO: 3087774 - RNA, 19 nt, Artificial Sequence
  Description of Artificial Sequence: Synthetic oligonucleotide
gagaugguaaugacauugc

SEQ ID NO: 3087775 - RNA, 19 nt, Artificial Sequence
  Description of Artificial Sequence: Synthetic oligonucleotide
ugaugaacuucgccuucag

SEQ ID NO: 3087776 - RNA, 19 nt, Artificial Sequence
  Description of Artificial Sequence: Synthetic oligonucleotide
guucuguugcuuuuaacaa

SEQ ID NO: 3087777 - RNA, 19 nt, Artificial Sequence
  Description of Artificial Sequence: Synthetic oligonucleotide
guaaugacauugcuuuuga

SEQ ID NO: 3087778 - RNA, 19 nt, Artificial Sequence
  Description of Artificial Sequence: Synthetic oligonucleotide
ucugacacacuggaggcac

SEQ ID NO: 3087779 - RNA, 19 nt, Artificial Sequence
  Description of Artificial Sequence: Synthetic oligonucleotide
cucgcuuuugugcuguaug

SEQ ID NO: 3087780 - RNA, 19 nt, Artificial Sequence
  Description of Artificial Sequence: Synthetic oligonucleotide
gcacuguaaauauuuauga

SEQ ID NO: 3087781 - RNA, 19 nt, Artificial Sequence
  Description of Artificial Sequence: Synthetic oligonucleotide
agguucuguugcuuuuaac

SEQ ID NO: 3087782 - RNA, 19 nt, Artificial Sequence
  Description of Artificial Sequence: Synthetic oligonucleotide
aacauacuuuucucgcuuu

SEQ ID NO: 3087783 - RNA, 19 nt, Artificial Sequence
  Description of Artificial Sequence: Synthetic oligonucleotide
ucgcuuuugugcuguaugu

SEQ ID NO: 3087784 - RNA, 19 nt, Artificial Sequence
  Description of Artificial Sequence: Synthetic oligonucleotide
uaauagguucuguugcuuu

SEQ ID NO: 3087785 - RNA, 19 nt, Artificial Sequence
  Description of Artificial Sequence: Synthetic oligonucleotide
uugcuuuuaacaaguuguu

SEQ ID NO: 3087786 - RNA, 19 nt, Artificial Sequence
  Description of Artificial Sequence: Synthetic oligonucleotide
uugugugugugugugugug

SEQ ID NO: 3087787 - RNA, 19 nt, Artificial Sequence
  Description of Artificial Sequence: Synthetic oligonucleotide
gguaaugacauugcuuuug

SEQ ID NO: 3087788 - RNA, 19 nt, Artificial Sequence
  Description of Artificial Sequence: Synthetic oligonucleotide
aaauauuuaugaacccauu

SEQ ID NO: 3087789 - RNA, 19 nt, Artificial Sequence
  Description of Artificial Sequence: Synthetic oligonucleotide
gcuuuuaacaaguuguugu

SEQ ID NO: 3087790 - RNA, 19 nt, Artificial Sequence
  Description of Artificial Sequence: Synthetic oligonucleotide
uguauguaauagguucugu

SEQ ID NO: 3087791 - RNA, 19 nt, Artificial Sequence
  Description of Artificial Sequence: Synthetic oligonucleotide
ugcuuuugaugaacuucgc

SEQ ID NO: 3087792 - RNA, 19 nt, Artificial Sequence
  Description of Artificial Sequence: Synthetic oligonucleotide
auuuaugaacccauugcaa

SEQ ID NO: 3087793 - RNA, 19 nt, Artificial Sequence
  Description of Artificial Sequence: Synthetic oligonucleotide
uuuucucgcuuuugugcug

SEQ ID NO: 3087794 - RNA, 19 nt, Artificial Sequence
  Description of Artificial Sequence: Synthetic oligonucleotide
acaaguuguugugugugug

SEQ ID NO: 3087795 - RNA, 19 nt, Artificial Sequence
  Description of Artificial Sequence: Synthetic oligonucleotide
aggcacuguaaauauuuau

SEQ ID NO: 3087796 - RNA, 19 nt, Artificial Sequence
  Description of Artificial Sequence: Synthetic oligonucleotide
cauacuuuucucgcuuuug

SEQ ID NO: 3087797 - RNA, 19 nt, Artificial Sequence
  Description of Artificial Sequence: Synthetic oligonucleotide
ugcaucagugcaguugaga

SEQ ID NO: 3087798 - RNA, 19 nt, Artificial Sequence
  Description of Artificial Sequence: Synthetic oligonucleotide
gcuuuugaugaacuucgcc

SEQ ID NO: 3087799 - RNA, 19 nt, Artificial Sequence
  Description of Artificial Sequence: Synthetic oligonucleotide
cacuguaaauauuuaugaa

SEQ ID NO: 3087800 - RNA, 19 nt, Artificial Sequence
  Description of Artificial Sequence: Synthetic oligonucleotide
aguuguugugugugugugu

SEQ ID NO: 3087801 - RNA, 19 nt, Artificial Sequence
  Description of Artificial Sequence: Synthetic oligonucleotide
guugagauaaucauugauu

SEQ ID NO: 3087802 - RNA, 19 nt, Artificial Sequence
  Description of Artificial Sequence: Synthetic oligonucleotide
gcaaccgaaauaaucugag

SEQ ID NO: 3087803 - RNA, 19 nt, Artificial Sequence
  Description of Artificial Sequence: Synthetic oligonucleotide
auuggcucuuugcaucagu

SEQ ID NO: 3087804 - RNA, 19 nt, Artificial Sequence
  Description of Artificial Sequence: Synthetic oligonucleotide
ugaacccauugcaaccgaa

SEQ ID NO: 3087805 - RNA, 19 nt, Artificial Sequence
  Description of Artificial Sequence: Synthetic oligonucleotide
ucgccuucagggaaauauc

SEQ ID NO: 3087806 - RNA, 19 nt, Artificial Sequence
  Description of Artificial Sequence: Synthetic oligonucleotide
uaccucugacacacuggag

SEQ ID NO: 3087807 - RNA, 19 nt, Artificial Sequence
  Description of Artificial Sequence: Synthetic oligonucleotide
cuguauguaauagguucug

SEQ ID NO: 3087808 - RNA, 19 nt, Artificial Sequence
  Description of Artificial Sequence: Synthetic oligonucleotide
uuucucgcuuuugugcugu

SEQ ID NO: 3087809 - RNA, 19 nt, Artificial Sequence
  Description of Artificial Sequence: Synthetic oligonucleotide
acacuggaggcacuguaaa

SEQ ID NO: 3087810 - RNA, 19 nt, Artificial Sequence
  Description of Artificial Sequence: Synthetic oligonucleotide
ugugugugugugugugugu

SEQ ID NO: 3087811 - RNA, 19 nt, Artificial Sequence
  Description of Artificial Sequence: Synthetic oligonucleotide
uaaugacauugcuuuugau

SEQ ID NO: 3087812 - RNA, 19 nt, Artificial Sequence
  Description of Artificial Sequence: Synthetic oligonucleotide
gaacuucgccuucagggaa

SEQ ID NO: 3087813 - RNA, 19 nt, Artificial Sequence
  Description of Artificial Sequence: Synthetic oligonucleotide
cuuuucucgcuuuugugcu

SEQ ID NO: 3087814 - RNA, 19 nt, Artificial Sequence
  Description of Artificial Sequence: Synthetic oligonucleotide
aucaaacaccuucacucua

SEQ ID NO: 3087815 - RNA, 19 nt, Artificial Sequence
  Description of Artificial Sequence: Synthetic oligonucleotide
acccauugcaaccgaaaua

SEQ ID NO: 3087816 - RNA, 19 nt, Artificial Sequence
  Description of Artificial Sequence: Synthetic oligonucleotide
ugacacacuggaggcacug

SEQ ID NO: 3087817 - RNA, 19 nt, Artificial Sequence
  Description of Artificial Sequence: Synthetic oligonucleotide
gugugugugugugugugug

SEQ ID NO: 3087818 - RNA, 19 nt, Artificial Sequence
  Description of Artificial Sequence: Synthetic oligonucleotide
gaugguaaugacauugcuu

SEQ ID NO: 3087819 - RNA, 19 nt, Artificial Sequence
  Description of Artificial Sequence: Synthetic oligonucleotide
guauguaauagguucuguu

SEQ ID NO: 3087820 - RNA, 19 nt, Artificial Sequence
  Description of Artificial Sequence: Synthetic oligonucleotide
acauacuuuucucgcuuuu

SEQ ID NO: 3087821 - RNA, 19 nt, Artificial Sequence
  Description of Artificial Sequence: Synthetic oligonucleotide
gcuuuugugcuguauguaa

SEQ ID NO: 3087822 - RNA, 19 nt, Artificial Sequence
  Description of Artificial Sequence: Synthetic oligonucleotide
gaacauacuuuucucgcuu

SEQ ID NO: 3087823 - RNA, 19 nt, Artificial Sequence
  Description of Artificial Sequence: Synthetic oligonucleotide
uugcaucagugcaguugag

SEQ ID NO: 3087824 - RNA, 19 nt, Artificial Sequence
  Description of Artificial Sequence: Synthetic oligonucleotide
uuguugugugugugugugu

SEQ ID NO: 3087825 - RNA, 19 nt, Artificial Sequence
  Description of Artificial Sequence: Synthetic oligonucleotide
agauaaucauugauugguu

SEQ ID NO: 3087826 - RNA, 19 nt, Artificial Sequence
  Description of Artificial Sequence: Synthetic oligonucleotide
caaccgaaauaaucugaga

SEQ ID NO: 3087827 - RNA, 19 nt, Artificial Sequence
  Description of Artificial Sequence: Synthetic oligonucleotide
acacacuggaggcacugua

SEQ ID NO: 3087828 - RNA, 19 nt, Artificial Sequence
  Description of Artificial Sequence: Synthetic oligonucleotide
augaacccauugcaaccga

SEQ ID NO: 3087829 - RNA, 19 nt, Artificial Sequence
  Description of Artificial Sequence: Synthetic oligonucleotide
ugguaaugacauugcuuuu

SEQ ID NO: 3087830 - RNA, 19 nt, Artificial Sequence
  Description of Artificial Sequence: Synthetic oligonucleotide
gaacccauugcaaccgaaa

SEQ ID NO: 3087831 - RNA, 19 nt, Artificial Sequence
  Description of Artificial Sequence: Synthetic oligonucleotide
auugauugguuaacauuua

SEQ ID NO: 3087832 - RNA, 19 nt, Artificial Sequence
  Description of Artificial Sequence: Synthetic oligonucleotide
gugcaguugagauaaucau

SEQ ID NO: 3087833 - RNA, 19 nt, Artificial Sequence
  Description of Artificial Sequence: Synthetic oligonucleotide
gcauggaacauacuuuucu

SEQ ID NO: 3087834 - RNA, 19 nt, Artificial Sequence
  Description of Artificial Sequence: Synthetic oligonucleotide
cagugcaguugagauaauc

SEQ ID NO: 3087835 - RNA, 19 nt, Artificial Sequence
  Description of Artificial Sequence: Synthetic oligonucleotide
uggaggcacuguaaauauu

SEQ ID NO: 3087836 - RNA, 19 nt, Artificial Sequence
  Description of Artificial Sequence: Synthetic oligonucleotide
aacuucgccuucagggaaa

SEQ ID NO: 3087837 - RNA, 19 nt, Artificial Sequence
  Description of Artificial Sequence: Synthetic oligonucleotide
cccauugcaaccgaaauaa

SEQ ID NO: 3087838 - RNA, 19 nt, Artificial Sequence
  Description of Artificial Sequence: Synthetic oligonucleotide
caguugagauaaucauuga

SEQ ID NO: 3087839 - RNA, 19 nt, Artificial Sequence
  Description of Artificial Sequence: Synthetic oligonucleotide
ccuucagggaaauaucaaa

SEQ ID NO: 3087840 - RNA, 19 nt, Artificial Sequence
  Description of Artificial Sequence: Synthetic oligonucleotide
ggaacauacuuuucucgcu

SEQ ID NO: 3087841 - RNA, 19 nt, Artificial Sequence
  Description of Artificial Sequence: Synthetic oligonucleotide
caucagugcaguugagaua

SEQ ID NO: 3087842 - RNA, 19 nt, Artificial Sequence
  Description of Artificial Sequence: Synthetic oligonucleotide
caaguuguugugugugugu

SEQ ID NO: 3087843 - RNA, 19 nt, Artificial Sequence
  Description of Artificial Sequence: Synthetic oligonucleotide
uggccacuguggcauggaa

SEQ ID NO: 3087844 - RNA, 19 nt, Artificial Sequence
  Description of Artificial Sequence: Synthetic oligonucleotide
cucaguggccacuguggca

SEQ ID NO: 3087845 - RNA, 19 nt, Artificial Sequence
  Description of Artificial Sequence: Synthetic oligonucleotide
gcaucagugcaguugagau

SEQ ID NO: 3087846 - RNA, 19 nt, Artificial Sequence
  Description of Artificial Sequence: Synthetic oligonucleotide
cuggaggcacuguaaauau

SEQ ID NO: 3087847 - RNA, 19 nt, Artificial Sequence
  Description of Artificial Sequence: Synthetic oligonucleotide
caaacaccuucacucuaaa

SEQ ID NO: 3087848 - RNA, 19 nt, Artificial Sequence
  Description of Artificial Sequence: Synthetic oligonucleotide
ucuuugcaucagugcaguu

SEQ ID NO: 3087849 - RNA, 19 nt, Artificial Sequence
  Description of Artificial Sequence: Synthetic oligonucleotide
ucucgcuuuugugcuguau

SEQ ID NO: 3087850 - RNA, 19 nt, Artificial Sequence
  Description of Artificial Sequence: Synthetic oligonucleotide
gaggcacuguaaauauuua

SEQ ID NO: 3087851 - RNA, 19 nt, Artificial Sequence
  Description of Artificial Sequence: Synthetic oligonucleotide
ggaggcacuguaaauauuu

SEQ ID NO: 3087852 - RNA, 19 nt, Artificial Sequence
  Description of Artificial Sequence: Synthetic oligonucleotide
guugugugugugugugugu

SEQ ID NO: 3087853 - RNA, 19 nt, Artificial Sequence
  Description of Artificial Sequence: Synthetic oligonucleotide
ucagugcaguugagauaau

SEQ ID NO: 3087854 - RNA, 19 nt, Artificial Sequence
  Description of Artificial Sequence: Synthetic oligonucleotide
gguuaacauuuaccucuga

SEQ ID NO: 3087855 - RNA, 19 nt, Artificial Sequence
  Description of Artificial Sequence: Synthetic oligonucleotide
gcuguauguaauagguucu

SEQ ID NO: 3087856 - RNA, 19 nt, Artificial Sequence
  Description of Artificial Sequence: Synthetic oligonucleotide
cauugcuuuugaugaacuu

SEQ ID NO: 3087857 - RNA, 19 nt, Artificial Sequence
  Description of Artificial Sequence: Synthetic oligonucleotide
cucuuugcaucagugcagu

SEQ ID NO: 3087858 - RNA, 19 nt, Artificial Sequence
  Description of Artificial Sequence: Synthetic oligonucleotide
guaauagguucuguugcuu

SEQ ID NO: 3087859 - RNA, 19 nt, Artificial Sequence
  Description of Artificial Sequence: Synthetic oligonucleotide
acuucgccuucagggaaau

SEQ ID NO: 3087860 - RNA, 19 nt, Artificial Sequence
  Description of Artificial Sequence: Synthetic oligonucleotide
cacuguggcauggaacaua

SEQ ID NO: 3087861 - RNA, 19 nt, Artificial Sequence
  Description of Artificial Sequence: Synthetic oligonucleotide
uucucgcuuuugugcugua

SEQ ID NO: 3087862 - RNA, 19 nt, Artificial Sequence
  Description of Artificial Sequence: Synthetic oligonucleotide
cgccuucagggaaauauca

SEQ ID NO: 3087863 - RNA, 19 nt, Artificial Sequence
  Description of Artificial Sequence: Synthetic oligonucleotide
cacuggaggcacuguaaau

SEQ ID NO: 3087864 - RNA, 19 nt, Artificial Sequence
  Description of Artificial Sequence: Synthetic oligonucleotide
gacacacuggaggcacugu

SEQ ID NO: 3087865 - RNA, 19 nt, Artificial Sequence
  Description of Artificial Sequence: Synthetic oligonucleotide
gccuucagggaaauaucaa

SEQ ID NO: 3087866 - RNA, 19 nt, Artificial Sequence
  Description of Artificial Sequence: Synthetic oligonucleotide
cauuuaccucugacacacu

SEQ ID NO: 3087867 - RNA, 19 nt, Artificial Sequence
  Description of Artificial Sequence: Synthetic oligonucleotide
cugagaugguaaugacauu

SEQ ID NO: 3087868 - RNA, 19 nt, Artificial Sequence
  Description of Artificial Sequence: Synthetic oligonucleotide
gugcuguauguaauagguu

SEQ ID NO: 3087869 - RNA, 19 nt, Artificial Sequence
  Description of Artificial Sequence: Synthetic oligonucleotide
cugacacacuggaggcacu

SEQ ID NO: 3087870 - RNA, 19 nt, Artificial Sequence
  Description of Artificial Sequence: Synthetic oligonucleotide
cgaaauaaucugagauggu

SEQ ID NO: 3087871 - RNA, 19 nt, Artificial Sequence
  Description of Artificial Sequence: Synthetic oligonucleotide
cuguggcauggaacauacu

SEQ ID NO: 3087872 - RNA, 19 nt, Artificial Sequence
  Description of Artificial Sequence: Synthetic oligonucleotide
gggaaauaucaaacaccuu

SEQ ID NO: 3087873 - RNA, 19 nt, Artificial Sequence
  Description of Artificial Sequence: Synthetic oligonucleotide
cuucgccuucagggaaaua

SEQ ID NO: 3087874 - RNA, 19 nt, Artificial Sequence
  Description of Artificial Sequence: Synthetic oligonucleotide
ccauugcaaccgaaauaau

SEQ ID NO: 3087875 - RNA, 19 nt, Artificial Sequence
  Description of Artificial Sequence: Synthetic oligonucleotide
ccacuguggcauggaacau

SEQ ID NO: 3087876 - RNA, 19 nt, Artificial Sequence
  Description of Artificial Sequence: Synthetic oligonucleotide
uuuauccuuauaaagaagc

SEQ ID NO: 3087877 - RNA, 19 nt, Artificial Sequence
  Description of Artificial Sequence: Synthetic oligonucleotide
accaaaaguggcuuuaucc

SEQ ID NO: 3087878 - RNA, 19 nt, Artificial Sequence
  Description of Artificial Sequence: Synthetic oligonucleotide
  modified_base (9)..(9): a, c, u, g, unknown or other
uaauuggunauuuugcaag

SEQ ID NO: 3087879 - RNA, 19 nt, Artificial Sequence
  Description of Artificial Sequence: Synthetic oligonucleotide
  modified_base (12)..(12): a, c, u, g, unknown or other
ucuuaauuggunauuuugc

SEQ ID NO: 3087880 - RNA, 19 nt, Artificial Sequence
  Description of Artificial Sequence: Synthetic oligonucleotide
uucauggcaaccaaaagug

SEQ ID NO: 3087881 - RNA, 19 nt, Artificial Sequence
  Description of Artificial Sequence: Synthetic oligonucleotide
uuuugcaggauaauucacg

SEQ ID NO: 3087882 - RNA, 19 nt, Artificial Sequence
  Description of Artificial Sequence: Synthetic oligonucleotide
  modified_base (8)..(8): a, c, u, g, unknown or other
aauuggunauuuugcaagg

SEQ ID NO: 3087883 - RNA, 19 nt, Artificial Sequence
  Description of Artificial Sequence: Synthetic oligonucleotide
  modified_base (13)..(13): a, c, u, g, unknown or other
uucuuaauuggunauuuug

SEQ ID NO: 3087884 - RNA, 19 nt, Artificial Sequence
  Description of Artificial Sequence: Synthetic oligonucleotide
uuucauggcaaccaaaagu

SEQ ID NO: 3087885 - RNA, 19 nt, Artificial Sequence
  Description of Artificial Sequence: Synthetic oligonucleotide
aauucacgaacccauuguc

SEQ ID NO: 3087886 - RNA, 19 nt, Artificial Sequence
  Description of Artificial Sequence: Synthetic oligonucleotide
ugcaggauaauucacgaac

SEQ ID NO: 3087887 - RNA, 19 nt, Artificial Sequence
  Description of Artificial Sequence: Synthetic oligonucleotide
uauaaagaagcacugguuu

SEQ ID NO: 3087888 - RNA, 19 nt, Artificial Sequence
  Description of Artificial Sequence: Synthetic oligonucleotide
  modified_base (5)..(5): a, c, u, g, unknown or other
uggunauuuugcaagguug

SEQ ID NO: 3087889 - RNA, 19 nt, Artificial Sequence
  Description of Artificial Sequence: Synthetic oligonucleotide
  modified_base (10)..(10): a, c, u, g, unknown or other
uuaauuggunauuuugcaa

SEQ ID NO: 3087890 - RNA, 19 nt, Artificial Sequence
  Description of Artificial Sequence: Synthetic oligonucleotide
gaagcacugguuuugcagg

SEQ ID NO: 3087891 - RNA, 19 nt, Artificial Sequence
  Description of Artificial Sequence: Synthetic oligonucleotide
uuaaacugcuccuggaucu

SEQ ID NO: 3087892 - RNA, 19 nt, Artificial Sequence
  Description of Artificial Sequence: Synthetic oligonucleotide
ugcaagguuggcuuuacag

SEQ ID NO: 3087893 - RNA, 19 nt, Artificial Sequence
  Description of Artificial Sequence: Synthetic oligonucleotide
cacucuuucuccuagguac

SEQ ID NO: 3087894 - RNA, 19 nt, Artificial Sequence
  Description of Artificial Sequence: Synthetic oligonucleotide
uuuacuucccugcauucug

SEQ ID NO: 3087895 - RNA, 19 nt, Artificial Sequence
  Description of Artificial Sequence: Synthetic oligonucleotide
uuuacagcucggcagggag

SEQ ID NO: 3087896 - RNA, 19 nt, Artificial Sequence
  Description of Artificial Sequence: Synthetic oligonucleotide
aaagaagcacugguuuugc

SEQ ID NO: 3087897 - RNA, 19 nt, Artificial Sequence
  Description of Artificial Sequence: Synthetic oligonucleotide
uucaguccaguuuccaugg

SEQ ID NO: 3087898 - RNA, 19 nt, Artificial Sequence
  Description of Artificial Sequence: Synthetic oligonucleotide
uggcuuuauccuuauaaag

SEQ ID NO: 3087899 - RNA, 19 nt, Artificial Sequence
  Description of Artificial Sequence: Synthetic oligonucleotide
cauucuggcaauucagucc

SEQ ID NO: 3087900 - RNA, 19 nt, Artificial Sequence
  Description of Artificial Sequence: Synthetic oligonucleotide
uuauccuuauaaagaagca

SEQ ID NO: 3087901 - RNA, 19 nt, Artificial Sequence
  Description of Artificial Sequence: Synthetic oligonucleotide
uuugcaggauaauucacga

SEQ ID NO: 3087902 - RNA, 19 nt, Artificial Sequence
  Description of Artificial Sequence: Synthetic oligonucleotide
aguggcuuuauccuuauaa

SEQ ID NO: 3087903 - RNA, 19 nt, Artificial Sequence
  Description of Artificial Sequence: Synthetic oligonucleotide
agaagcacugguuuugcag

SEQ ID NO: 3087904 - RNA, 19 nt, Artificial Sequence
  Description of Artificial Sequence: Synthetic oligonucleotide
uccuuauaaagaagcacug

SEQ ID NO: 3087905 - RNA, 19 nt, Artificial Sequence
  Description of Artificial Sequence: Synthetic oligonucleotide
uccguucuuaaacugcucc

SEQ ID NO: 3087906 - RNA, 19 nt, Artificial Sequence
  Description of Artificial Sequence: Synthetic oligonucleotide
cauugucuggccucgacgg

SEQ ID NO: 3087907 - RNA, 19 nt, Artificial Sequence
  Description of Artificial Sequence: Synthetic oligonucleotide
uucacgaacccauugucug

SEQ ID NO: 3087908 - RNA, 19 nt, Artificial Sequence
  Description of Artificial Sequence: Synthetic oligonucleotide
uaauucacgaacccauugu

SEQ ID NO: 3087909 - RNA, 19 nt, Artificial Sequence
  Description of Artificial Sequence: Synthetic oligonucleotide
cauggcaaccaaaaguggc

SEQ ID NO: 3087910 - RNA, 19 nt, Artificial Sequence
  Description of Artificial Sequence: Synthetic oligonucleotide
auaauucacgaacccauug

SEQ ID NO: 3087911 - RNA, 19 nt, Artificial Sequence
  Description of Artificial Sequence: Synthetic oligonucleotide
uggaucuucacucuuucuc

SEQ ID NO: 3087912 - RNA, 19 nt, Artificial Sequence
  Description of Artificial Sequence: Synthetic oligonucleotide
auucuggcaauucagucca

SEQ ID NO: 3087913 - RNA, 19 nt, Artificial Sequence
  Description of Artificial Sequence: Synthetic oligonucleotide
auucaguccaguuuccaug

SEQ ID NO: 3087914 - RNA, 19 nt, Artificial Sequence
  Description of Artificial Sequence: Synthetic oligonucleotide
uuauaaagaagcacugguu

SEQ ID NO: 3087915 - RNA, 19 nt, Artificial Sequence
  Description of Artificial Sequence: Synthetic oligonucleotide
aaccaaaaguggcuuuauc

SEQ ID NO: 3087916 - RNA, 19 nt, Artificial Sequence
  Description of Artificial Sequence: Synthetic oligonucleotide
auuuuacuucccugcauuc

SEQ ID NO: 3087917 - RNA, 19 nt, Artificial Sequence
  Description of Artificial Sequence: Synthetic oligonucleotide
gaaggggcauuuuacuucc

SEQ ID NO: 3087918 - RNA, 19 nt, Artificial Sequence
  Description of Artificial Sequence: Synthetic oligonucleotide
ucuucacucuuucuccuag

SEQ ID NO: 3087919 - RNA, 19 nt, Artificial Sequence
  Description of Artificial Sequence: Synthetic oligonucleotide
ucauggcaaccaaaagugg

SEQ ID NO: 3087920 - RNA, 19 nt, Artificial Sequence
  Description of Artificial Sequence: Synthetic oligonucleotide
cuuuauccuuauaaagaag

SEQ ID NO: 3087921 - RNA, 19 nt, Artificial Sequence
  Description of Artificial Sequence: Synthetic oligonucleotide
uaaagaagcacugguuuug

SEQ ID NO: 3087922 - RNA, 19 nt, Artificial Sequence
  Description of Artificial Sequence: Synthetic oligonucleotide
guucuuaaacugcuccugg

SEQ ID NO: 3087923 - RNA, 19 nt, Artificial Sequence
  Description of Artificial Sequence: Synthetic oligonucleotide
  modified_base (4)..(4): a, c, u, g, unknown or other
ggunauuuugcaagguugg

SEQ ID NO: 3087924 - RNA, 19 nt, Artificial Sequence
  Description of Artificial Sequence: Synthetic oligonucleotide
cauuccguucuuaaacugc

SEQ ID NO: 3087925 - RNA, 19 nt, Artificial Sequence
  Description of Artificial Sequence: Synthetic oligonucleotide
uauccuuauaaagaagcac

SEQ ID NO: 3087926 - RNA, 19 nt, Artificial Sequence
  Description of Artificial Sequence: Synthetic oligonucleotide
uucuccuagguacagcacu

SEQ ID NO: 3087927 - RNA, 19 nt, Artificial Sequence
  Description of Artificial Sequence: Synthetic oligonucleotide
aauucaguccaguuuccau

SEQ ID NO: 3087928 - RNA, 19 nt, Artificial Sequence
  Description of Artificial Sequence: Synthetic oligonucleotide
acuguggcuuucuuaauug

SEQ ID NO: 3087929 - RNA, 19 nt, Artificial Sequence
  Description of Artificial Sequence: Synthetic oligonucleotide
uuacuucccugcauucugg

SEQ ID NO: 3087930 - RNA, 19 nt, Artificial Sequence
  Description of Artificial Sequence: Synthetic oligonucleotide
  modified_base (2)..(2): a, c, u, g, unknown or other
unauuuugcaagguuggcu

SEQ ID NO: 3087931 - RNA, 19 nt, Artificial Sequence
  Description of Artificial Sequence: Synthetic oligonucleotide
  modified_base (11)..(11): a, c, u, g, unknown or other
cuuaauuggunauuuugca

SEQ ID NO: 3087932 - RNA, 19 nt, Artificial Sequence
  Description of Artificial Sequence: Synthetic oligonucleotide
uggcuuuacagcucggcag

SEQ ID NO: 3087933 - RNA, 19 nt, Artificial Sequence
  Description of Artificial Sequence: Synthetic oligonucleotide
auccuuauaaagaagcacu

SEQ ID NO: 3087934 - RNA, 19 nt, Artificial Sequence
  Description of Artificial Sequence: Synthetic oligonucleotide
uguggcuuucuuaauuggu

SEQ ID NO: 3087935 - RNA, 19 nt, Artificial Sequence
  Description of Artificial Sequence: Synthetic oligonucleotide
ucuuaaacugcuccuggau

SEQ ID NO: 3087936 - RNA, 19 nt, Artificial Sequence
  Description of Artificial Sequence: Synthetic oligonucleotide
agcacuguggcuuucuuaa

SEQ ID NO: 3087937 - RNA, 19 nt, Artificial Sequence
  Description of Artificial Sequence: Synthetic oligonucleotide
agguuguauguuucauggc

SEQ ID NO: 3087938 - RNA, 19 nt, Artificial Sequence
  Description of Artificial Sequence: Synthetic oligonucleotide
uauguuucauggcaaccaa

SEQ ID NO: 3087939 - RNA, 19 nt, Artificial Sequence
  Description of Artificial Sequence: Synthetic oligonucleotide
ucacgaacccauugucugg

SEQ ID NO: 3087940 - RNA, 19 nt, Artificial Sequence
  Description of Artificial Sequence: Synthetic oligonucleotide
aguuuccccaucuucggug

SEQ ID NO: 3087941 - RNA, 19 nt, Artificial Sequence
  Description of Artificial Sequence: Synthetic oligonucleotide
uuggcuuuacagcucggca

SEQ ID NO: 3087942 - RNA, 19 nt, Artificial Sequence
  Description of Artificial Sequence: Synthetic oligonucleotide
ucauuccguucuuaaacug

SEQ ID NO: 3087943 - RNA, 19 nt, Artificial Sequence
  Description of Artificial Sequence: Synthetic oligonucleotide
cuuaaacugcuccuggauc

SEQ ID NO: 3087944 - RNA, 19 nt, Artificial Sequence
  Description of Artificial Sequence: Synthetic oligonucleotide
uguauguuucauggcaacc

SEQ ID NO: 3087945 - RNA, 19 nt, Artificial Sequence
  Description of Artificial Sequence: Synthetic oligonucleotide
ugcauucuggcaauucagu

SEQ ID NO: 3087946 - RNA, 19 nt, Artificial Sequence
  Description of Artificial Sequence: Synthetic oligonucleotide
uuacagcucggcagggagg

SEQ ID NO: 3087947 - RNA, 19 nt, Artificial Sequence
  Description of Artificial Sequence: Synthetic oligonucleotide
  modified_base (14)..(14): a, c, u, g, unknown or other
uuucuuaauuggunauuuu

SEQ ID NO: 3087948 - RNA, 19 nt, Artificial Sequence
  Description of Artificial Sequence: Synthetic oligonucleotide
uucacucuuucuccuaggu

SEQ ID NO: 3087949 - RNA, 19 nt, Artificial Sequence
  Description of Artificial Sequence: Synthetic oligonucleotide
gguuguauguuucauggca

SEQ ID NO: 3087950 - RNA, 19 nt, Artificial Sequence
  Description of Artificial Sequence: Synthetic oligonucleotide
caggauaauucacgaaccc

SEQ ID NO: 3087951 - RNA, 19 nt, Artificial Sequence
  Description of Artificial Sequence: Synthetic oligonucleotide
cuuauaaagaagcacuggu

SEQ ID NO: 3087952 - RNA, 19 nt, Artificial Sequence
  Description of Artificial Sequence: Synthetic oligonucleotide
  modified_base (6)..(6): a, c, u, g, unknown or other
uuggunauuuugcaagguu

SEQ ID NO: 3087953 - RNA, 19 nt, Artificial Sequence
  Description of Artificial Sequence: Synthetic oligonucleotide
cuuucuccuagguacagca

SEQ ID NO: 3087954 - RNA, 19 nt, Artificial Sequence
  Description of Artificial Sequence: Synthetic oligonucleotide
uucuuaaacugcuccugga

SEQ ID NO: 3087955 - RNA, 19 nt, Artificial Sequence
  Description of Artificial Sequence: Synthetic oligonucleotide
uucggugcacuccacuucu

SEQ ID NO: 3087956 - RNA, 19 nt, Artificial Sequence
  Description of Artificial Sequence: Synthetic oligonucleotide
ggcaauucaguccaguuuc

SEQ ID NO: 3087957 - RNA, 19 nt, Artificial Sequence
  Description of Artificial Sequence: Synthetic oligonucleotide
ggaucuucacucuuucucc

SEQ ID NO: 3087958 - RNA, 19 nt, Artificial Sequence
  Description of Artificial Sequence: Synthetic oligonucleotide
uuguauguuucauggcaac

SEQ ID NO: 3087959 - RNA, 19 nt, Artificial Sequence
  Description of Artificial Sequence: Synthetic oligonucleotide
  modified_base (7)..(7): a, c, u, g, unknown or other
auuggunauuuugcaaggu

SEQ ID NO: 3087960 - RNA, 19 nt, Artificial Sequence
  Description of Artificial Sequence: Synthetic oligonucleotide
cugcauucuggcaauucag

SEQ ID NO: 3087961 - RNA, 19 nt, Artificial Sequence
  Description of Artificial Sequence: Synthetic oligonucleotide
  modified_base (18)..(18): a, c, u, g, unknown or other
uggcuuucuuaauugguna

SEQ ID NO: 3087962 - RNA, 19 nt, Artificial Sequence
  Description of Artificial Sequence: Synthetic oligonucleotide
uuuuacuucccugcauucu

SEQ ID NO: 3087963 - RNA, 19 nt, Artificial Sequence
  Description of Artificial Sequence: Synthetic oligonucleotide
agggaggaccaguuucccc

SEQ ID NO: 3087964 - RNA, 19 nt, Artificial Sequence
  Description of Artificial Sequence: Synthetic oligonucleotide
gguuuugcaggauaauuca

SEQ ID NO: 3087965 - RNA, 19 nt, Artificial Sequence
  Description of Artificial Sequence: Synthetic oligonucleotide
cuguggcuuucuuaauugg

SEQ ID NO: 3087966 - RNA, 19 nt, Artificial Sequence
  Description of Artificial Sequence: Synthetic oligonucleotide
gcaagguuggcuuuacagc

SEQ ID NO: 3087967 - RNA, 19 nt, Artificial Sequence
  Description of Artificial Sequence: Synthetic oligonucleotide
uccuagguacagcacugug

SEQ ID NO: 3087968 - RNA, 19 nt, Artificial Sequence
  Description of Artificial Sequence: Synthetic oligonucleotide
aaaaguggcuuuauccuua

SEQ ID NO: 3087969 - RNA, 19 nt, Artificial Sequence
  Description of Artificial Sequence: Synthetic oligonucleotide
aacccauugucuggccucg

SEQ ID NO: 3087970 - RNA, 19 nt, Artificial Sequence
  Description of Artificial Sequence: Synthetic oligonucleotide
aagcacugguuuugcagga

SEQ ID NO: 3087971 - RNA, 19 nt, Artificial Sequence
  Description of Artificial Sequence: Synthetic oligonucleotide
guauguuucauggcaacca

SEQ ID NO: 3087972 - RNA, 19 nt, Artificial Sequence
  Description of Artificial Sequence: Synthetic oligonucleotide
uggcaauucaguccaguuu

SEQ ID NO: 3087973 - RNA, 19 nt, Artificial Sequence
  Description of Artificial Sequence: Synthetic oligonucleotide
aagaagcacugguuuugca

SEQ ID NO: 3087974 - RNA, 19 nt, Artificial Sequence
  Description of Artificial Sequence: Synthetic oligonucleotide
  modified_base (3)..(3): a, c, u, g, unknown or other
gunauuuugcaagguuggc

SEQ ID NO: 3087975 - RNA, 19 nt, Artificial Sequence
  Description of Artificial Sequence: Synthetic oligonucleotide
ggcuuuacagcucggcagg

SEQ ID NO: 3087976 - RNA, 19 nt, Artificial Sequence
  Description of Artificial Sequence: Synthetic oligonucleotide
ucuggccucgacgggaagg

SEQ ID NO: 3087977 - RNA, 19 nt, Artificial Sequence
  Description of Artificial Sequence: Synthetic oligonucleotide
auugucuggccucgacggg

SEQ ID NO: 3087978 - RNA, 19 nt, Artificial Sequence
  Description of Artificial Sequence: Synthetic oligonucleotide
aaaguggcuuuauccuuau

SEQ ID NO: 3087979 - RNA, 19 nt, Artificial Sequence
  Description of Artificial Sequence: Synthetic oligonucleotide
ugcacuccacuucuucgug

SEQ ID NO: 3087980 - RNA, 19 nt, Artificial Sequence
  Description of Artificial Sequence: Synthetic oligonucleotide
aggauaauucacgaaccca

SEQ ID NO: 3087981 - RNA, 19 nt, Artificial Sequence
  Description of Artificial Sequence: Synthetic oligonucleotide
ccuagguacagcacugugg

SEQ ID NO: 3087982 - RNA, 19 nt, Artificial Sequence
  Description of Artificial Sequence: Synthetic oligonucleotide
gcuuuauccuuauaaagaa

SEQ ID NO: 3087983 - RNA, 19 nt, Artificial Sequence
  Description of Artificial Sequence: Synthetic oligonucleotide
cuucacucuuucuccuagg

SEQ ID NO: 3087984 - RNA, 19 nt, Artificial Sequence
  Description of Artificial Sequence: Synthetic oligonucleotide
ucaguccaguuuccauggg

SEQ ID NO: 3087985 - RNA, 19 nt, Artificial Sequence
  Description of Artificial Sequence: Synthetic oligonucleotide
guuuccccaucuucggugc

SEQ ID NO: 3087986 - RNA, 19 nt, Artificial Sequence
  Description of Artificial Sequence: Synthetic oligonucleotide
ggcuuuauccuuauaaaga

SEQ ID NO: 3087987 - RNA, 19 nt, Artificial Sequence
  Description of Artificial Sequence: Synthetic oligonucleotide
uucuucgugggccggucca

SEQ ID NO: 3087988 - RNA, 19 nt, Artificial Sequence
  Description of Artificial Sequence: Synthetic oligonucleotide
acgggaaggggcauuuuac

SEQ ID NO: 3087989 - RNA, 19 nt, Artificial Sequence
  Description of Artificial Sequence: Synthetic oligonucleotide
gggcauuuuacuucccugc

SEQ ID NO: 3087990 - RNA, 19 nt, Artificial Sequence
  Description of Artificial Sequence: Synthetic oligonucleotide
caguccaguuuccaugggc

SEQ ID NO: 3087991 - RNA, 19 nt, Artificial Sequence
  Description of Artificial Sequence: Synthetic oligonucleotide
aggaccaguuuccccaucu

SEQ ID NO: 3087992 - RNA, 19 nt, Artificial Sequence
  Description of Artificial Sequence: Synthetic oligonucleotide
uuucuccuagguacagcac

SEQ ID NO: 3087993 - RNA, 19 nt, Artificial Sequence
  Description of Artificial Sequence: Synthetic oligonucleotide
caagguuggcuuuacagcu

SEQ ID NO: 3087994 - RNA, 19 nt, Artificial Sequence
  Description of Artificial Sequence: Synthetic oligonucleotide
uacagcucggcagggagga

SEQ ID NO: 3087995 - RNA, 19 nt, Artificial Sequence
  Description of Artificial Sequence: Synthetic oligonucleotide
gaccaguuuccccaucuuc

SEQ ID NO: 3087996 - RNA, 19 nt, Artificial Sequence
  Description of Artificial Sequence: Synthetic oligonucleotide
ggaaggggcauuuuacuuc

SEQ ID NO: 3087997 - RNA, 19 nt, Artificial Sequence
  Description of Artificial Sequence: Synthetic oligonucleotide
auuccguucuuaaacugcu

SEQ ID NO: 3087998 - RNA, 19 nt, Artificial Sequence
  Description of Artificial Sequence: Synthetic oligonucleotide
cuccacuucuucgugggcc

SEQ ID NO: 3087999 - RNA, 19 nt, Artificial Sequence
  Description of Artificial Sequence: Synthetic oligonucleotide
ucacucuuucuccuaggua

SEQ ID NO: 3088000 - RNA, 19 nt, Artificial Sequence
  Description of Artificial Sequence: Synthetic oligonucleotide
aguccaguuuccaugggcu

SEQ ID NO: 3088001 - RNA, 19 nt, Artificial Sequence
  Description of Artificial Sequence: Synthetic oligonucleotide
ucuucggugcacuccacuu

SEQ ID NO: 3088002 - RNA, 19 nt, Artificial Sequence
  Description of Artificial Sequence: Synthetic oligonucleotide
ucuuucuccuagguacagc

SEQ ID NO: 3088003 - RNA, 19 nt, Artificial Sequence
  Description of Artificial Sequence: Synthetic oligonucleotide
uccaguuuccaugggcugu

SEQ ID NO: 3088004 - RNA, 19 nt, Artificial Sequence
  Description of Artificial Sequence: Synthetic oligonucleotide
auucacgaacccauugucu

SEQ ID NO: 3088005 - RNA, 19 nt, Artificial Sequence
  Description of Artificial Sequence: Synthetic oligonucleotide
auggcaaccaaaaguggcu

SEQ ID NO: 3088006 - RNA, 19 nt, Artificial Sequence
  Description of Artificial Sequence: Synthetic oligonucleotide
ccuuauaaagaagcacugg

SEQ ID NO: 3088007 - RNA, 19 nt, Artificial Sequence
  Description of Artificial Sequence: Synthetic oligonucleotide
guuuugcaggauaauucac

SEQ ID NO: 3088008 - RNA, 19 nt, Artificial Sequence
  Description of Artificial Sequence: Synthetic oligonucleotide
cuucccugcauucuggcaa

SEQ ID NO: 3088009 - RNA, 19 nt, Artificial Sequence
  Description of Artificial Sequence: Synthetic oligonucleotide
guuggcuuuacagcucggc

SEQ ID NO: 3088010 - RNA, 19 nt, Artificial Sequence
  Description of Artificial Sequence: Synthetic oligonucleotide
aggggcauuuuacuucccu

SEQ ID NO: 3088011 - RNA, 19 nt, Artificial Sequence
  Description of Artificial Sequence: Synthetic oligonucleotide
agguacagcacuguggcuu

SEQ ID NO: 3088012 - RNA, 19 nt, Artificial Sequence
  Description of Artificial Sequence: Synthetic oligonucleotide
uugcaggauaauucacgaa

SEQ ID NO: 3088013 - RNA, 19 nt, Artificial Sequence
  Description of Artificial Sequence: Synthetic oligonucleotide
gcaggauaauucacgaacc

SEQ ID NO: 3088014 - RNA, 19 nt, Artificial Sequence
  Description of Artificial Sequence: Synthetic oligonucleotide
uuugcaagguuggcuuuac

SEQ ID NO: 3088015 - RNA, 19 nt, Artificial Sequence
  Description of Artificial Sequence: Synthetic oligonucleotide
ucuggcaauucaguccagu

SEQ ID NO: 3088016 - RNA, 19 nt, Artificial Sequence
  Description of Artificial Sequence: Synthetic oligonucleotide
cacgaacccauugucuggc

SEQ ID NO: 3088017 - RNA, 19 nt, Artificial Sequence
  Description of Artificial Sequence: Synthetic oligonucleotide
uugucuggccucgacggga

SEQ ID NO: 3088018 - RNA, 19 nt, Artificial Sequence
  Description of Artificial Sequence: Synthetic oligonucleotide
guuguauguuucauggcaa

SEQ ID NO: 3088019 - RNA, 19 nt, Artificial Sequence
  Description of Artificial Sequence: Synthetic oligonucleotide
aguuuccaugggcugugca

SEQ ID NO: 3088020 - RNA, 19 nt, Artificial Sequence
  Description of Artificial Sequence: Synthetic oligonucleotide
uuuugcaagguuggcuuua

SEQ ID NO: 3088021 - RNA, 19 nt, Artificial Sequence
  Description of Artificial Sequence: Synthetic oligonucleotide
gggaggaccaguuucccca

SEQ ID NO: 3088022 - RNA, 19 nt, Artificial Sequence
  Description of Artificial Sequence: Synthetic oligonucleotide
aucuucggugcacuccacu

SEQ ID NO: 3088023 - RNA, 19 nt, Artificial Sequence
  Description of Artificial Sequence: Synthetic oligonucleotide
cuucggugcacuccacuuc

SEQ ID NO: 3088024 - RNA, 19 nt, Artificial Sequence
  Description of Artificial Sequence: Synthetic oligonucleotide
aaggggcauuuuacuuccc

SEQ ID NO: 3088025 - RNA, 19 nt, Artificial Sequence
  Description of Artificial Sequence: Synthetic oligonucleotide
cuggccucgacgggaaggg

SEQ ID NO: 3088026 - RNA, 19 nt, Artificial Sequence
  Description of Artificial Sequence: Synthetic oligonucleotide
guccaguuuccaugggcug

SEQ ID NO: 3088027 - RNA, 19 nt, Artificial Sequence
  Description of Artificial Sequence: Synthetic oligonucleotide
uuccguucuuaaacugcuc

SEQ ID NO: 3088028 - RNA, 19 nt, Artificial Sequence
  Description of Artificial Sequence: Synthetic oligonucleotide
ggggcauuuuacuucccug

SEQ ID NO: 3088029 - RNA, 19 nt, Artificial Sequence
  Description of Artificial Sequence: Synthetic oligonucleotide
uugcaagguuggcuuuaca

SEQ ID NO: 3088030 - RNA, 19 nt, Artificial Sequence
  Description of Artificial Sequence: Synthetic oligonucleotide
uccagguuguauguuucau

SEQ ID NO: 3088031 - RNA, 19 nt, Artificial Sequence
  Description of Artificial Sequence: Synthetic oligonucleotide
gcauucuggcaauucaguc

SEQ ID NO: 3088032 - RNA, 19 nt, Artificial Sequence
  Description of Artificial Sequence: Synthetic oligonucleotide
ccaguuuccccaucuucgg

SEQ ID NO: 3088033 - RNA, 19 nt, Artificial Sequence
  Description of Artificial Sequence: Synthetic oligonucleotide
gacgggaaggggcauuuua

SEQ ID NO: 3088034 - RNA, 19 nt, Artificial Sequence
  Description of Artificial Sequence: Synthetic oligonucleotide
ugucuggccucgacgggaa

SEQ ID NO: 3088035 - RNA, 19 nt, Artificial Sequence
  Description of Artificial Sequence: Synthetic oligonucleotide
acuucuucgugggccgguc

SEQ ID NO: 3088036 - RNA, 19 nt, Artificial Sequence
  Description of Artificial Sequence: Synthetic oligonucleotide
uucuggcaauucaguccag

SEQ ID NO: 3088037 - RNA, 19 nt, Artificial Sequence
  Description of Artificial Sequence: Synthetic oligonucleotide
ucuucgugggccgguccag

SEQ ID NO: 3088038 - RNA, 19 nt, Artificial Sequence
  Description of Artificial Sequence: Synthetic oligonucleotide
ggcauuuuacuucccugca

SEQ ID NO: 3088039 - RNA, 19 nt, Artificial Sequence
  Description of Artificial Sequence: Synthetic oligonucleotide
uuuccccaucuucggugca

SEQ ID NO: 3088040 - RNA, 19 nt, Artificial Sequence
  Description of Artificial Sequence: Synthetic oligonucleotide
ucggcagggaggaccaguu

SEQ ID NO: 3088041 - RNA, 19 nt, Artificial Sequence
  Description of Artificial Sequence: Synthetic oligonucleotide
ccagguuguauguuucaug

SEQ ID NO: 3088042 - RNA, 19 nt, Artificial Sequence
  Description of Artificial Sequence: Synthetic oligonucleotide
cuucuucgugggccggucc

SEQ ID NO: 3088043 - RNA, 19 nt, Artificial Sequence
  Description of Artificial Sequence: Synthetic oligonucleotide
uucccugcauucuggcaau

SEQ ID NO: 3088044 - RNA, 19 nt, Artificial Sequence
  Description of Artificial Sequence: Synthetic oligonucleotide
cucuuucuccuagguacag

SEQ ID NO: 3088045 - RNA, 19 nt, Artificial Sequence
  Description of Artificial Sequence: Synthetic oligonucleotide
  modified_base (19)..(19): a, c, u, g, unknown or other
guggcuuucuuaauuggun

SEQ ID NO: 3088046 - RNA, 19 nt, Artificial Sequence
  Description of Artificial Sequence: Synthetic oligonucleotide
cacugguuuugcaggauaa

SEQ ID NO: 3088047 - RNA, 19 nt, Artificial Sequence
  Description of Artificial Sequence: Synthetic oligonucleotide
cauuuuacuucccugcauu

SEQ ID NO: 3088048 - RNA, 19 nt, Artificial Sequence
  Description of Artificial Sequence: Synthetic oligonucleotide
uacagcacuguggcuuucu

SEQ ID NO: 3088049 - RNA, 19 nt, Artificial Sequence
  Description of Artificial Sequence: Synthetic oligonucleotide
gcacuccacuucuucgugg

SEQ ID NO: 3088050 - RNA, 19 nt, Artificial Sequence
  Description of Artificial Sequence: Synthetic oligonucleotide
acucuuucuccuagguaca

SEQ ID NO: 3088051 - RNA, 19 nt, Artificial Sequence
  Description of Artificial Sequence: Synthetic oligonucleotide
aucuucacucuuucuccua

SEQ ID NO: 3088052 - RNA, 19 nt, Artificial Sequence
  Description of Artificial Sequence: Synthetic oligonucleotide
uucgugggccgguccaggu

SEQ ID NO: 3088053 - RNA, 19 nt, Artificial Sequence
  Description of Artificial Sequence: Synthetic oligonucleotide
ggauaauucacgaacccau

SEQ ID NO: 3088054 - RNA, 19 nt, Artificial Sequence
  Description of Artificial Sequence: Synthetic oligonucleotide
ccaaaaguggcuuuauccu

SEQ ID NO: 3088055 - RNA, 19 nt, Artificial Sequence
  Description of Artificial Sequence: Synthetic oligonucleotide
acugguuuugcaggauaau

SEQ ID NO: 3088056 - RNA, 19 nt, Artificial Sequence
  Description of Artificial Sequence: Synthetic oligonucleotide
uggcaaccaaaaguggcuu

SEQ ID NO: 3088057 - RNA, 19 nt, Artificial Sequence
  Description of Artificial Sequence: Synthetic oligonucleotide
  modified_base (15)..(15): a, c, u, g, unknown or other
cuuucuuaauuggunauuu

SEQ ID NO: 3088058 - RNA, 19 nt, Artificial Sequence
  Description of Artificial Sequence: Synthetic oligonucleotide
ggccgguccagguuguaug

SEQ ID NO: 3088059 - RNA, 19 nt, Artificial Sequence
  Description of Artificial Sequence: Synthetic oligonucleotide
guccagguuguauguuuca

SEQ ID NO: 3088060 - RNA, 19 nt, Artificial Sequence
  Description of Artificial Sequence: Synthetic oligonucleotide
caaaaguggcuuuauccuu

SEQ ID NO: 3088061 - RNA, 19 nt, Artificial Sequence
  Description of Artificial Sequence: Synthetic oligonucleotide
uuccccaucuucggugcac

SEQ ID NO: 3088062 - RNA, 19 nt, Artificial Sequence
  Description of Artificial Sequence: Synthetic oligonucleotide
gauaauucacgaacccauu

SEQ ID NO: 3088063 - RNA, 19 nt, Artificial Sequence
  Description of Artificial Sequence: Synthetic oligonucleotide
gcagggaggaccaguuucc

SEQ ID NO: 3088064 - RNA, 19 nt, Artificial Sequence
  Description of Artificial Sequence: Synthetic oligonucleotide
cuucgugggccgguccagg

SEQ ID NO: 3088065 - RNA, 19 nt, Artificial Sequence
  Description of Artificial Sequence: Synthetic oligonucleotide
aaguggcuuuauccuuaua

SEQ ID NO: 3088066 - RNA, 19 nt, Artificial Sequence
  Description of Artificial Sequence: Synthetic oligonucleotide
auguuucauggcaaccaaa

SEQ ID NO: 3088067 - RNA, 19 nt, Artificial Sequence
  Description of Artificial Sequence: Synthetic oligonucleotide
cagggaggaccaguuuccc

SEQ ID NO: 3088068 - RNA, 19 nt, Artificial Sequence
  Description of Artificial Sequence: Synthetic oligonucleotide
uccccaucuucggugcacu

SEQ ID NO: 3088069 - RNA, 19 nt, Artificial Sequence
  Description of Artificial Sequence: Synthetic oligonucleotide
ccugcauucuggcaauuca

SEQ ID NO: 3088070 - RNA, 19 nt, Artificial Sequence
  Description of Artificial Sequence: Synthetic oligonucleotide
acagcacuguggcuuucuu

SEQ ID NO: 3088071 - RNA, 19 nt, Artificial Sequence
  Description of Artificial Sequence: Synthetic oligonucleotide
caucuucggugcacuccac

SEQ ID NO: 3088072 - RNA, 19 nt, Artificial Sequence
  Description of Artificial Sequence: Synthetic oligonucleotide
ccuggaucuucacucuuuc

SEQ ID NO: 3088073 - RNA, 19 nt, Artificial Sequence
  Description of Artificial Sequence: Synthetic oligonucleotide
gcuuuacagcucggcaggg

SEQ ID NO: 3088074 - RNA, 19 nt, Artificial Sequence
  Description of Artificial Sequence: Synthetic oligonucleotide
uggccucgacgggaagggg

SEQ ID NO: 3088075 - RNA, 19 nt, Artificial Sequence
  Description of Artificial Sequence: Synthetic oligonucleotide
cuuuacagcucggcaggga

SEQ ID NO: 3088076 - RNA, 19 nt, Artificial Sequence
  Description of Artificial Sequence: Synthetic oligonucleotide
ucgacgggaaggggcauuu

SEQ ID NO: 3088077 - RNA, 19 nt, Artificial Sequence
  Description of Artificial Sequence: Synthetic oligonucleotide
agcucggcagggaggacca

SEQ ID NO: 3088078 - RNA, 19 nt, Artificial Sequence
  Description of Artificial Sequence: Synthetic oligonucleotide
ucgugggccgguccagguu

SEQ ID NO: 3088079 - RNA, 19 nt, Artificial Sequence
  Description of Artificial Sequence: Synthetic oligonucleotide
ccaucuucggugcacucca

SEQ ID NO: 3088080 - RNA, 19 nt, Artificial Sequence
  Description of Artificial Sequence: Synthetic oligonucleotide
gguccagguuguauguuuc

SEQ ID NO: 3088081 - RNA, 19 nt, Artificial Sequence
  Description of Artificial Sequence: Synthetic oligonucleotide
gaggaccaguuuccccauc

SEQ ID NO: 3088082 - RNA, 19 nt, Artificial Sequence
  Description of Artificial Sequence: Synthetic oligonucleotide
cccaucuucggugcacucc

SEQ ID NO: 3088083 - RNA, 19 nt, Artificial Sequence
  Description of Artificial Sequence: Synthetic oligonucleotide
agcacugguuuugcaggau

SEQ ID NO: 3088084 - RNA, 19 nt, Artificial Sequence
  Description of Artificial Sequence: Synthetic oligonucleotide
ggccucgacgggaaggggc

SEQ ID NO: 3088085 - RNA, 19 nt, Artificial Sequence
  Description of Artificial Sequence: Synthetic oligonucleotide
cugguuuugcaggauaauu

SEQ ID NO: 3088086 - RNA, 19 nt, Artificial Sequence
  Description of Artificial Sequence: Synthetic oligonucleotide
acagcucggcagggaggac

SEQ ID NO: 3088087 - RNA, 19 nt, Artificial Sequence
  Description of Artificial Sequence: Synthetic oligonucleotide
cuggcaauucaguccaguu

SEQ ID NO: 3088088 - RNA, 19 nt, Artificial Sequence
  Description of Artificial Sequence: Synthetic oligonucleotide
cacuguggcuuucuuaauu

SEQ ID NO: 3088089 - RNA, 19 nt, Artificial Sequence
  Description of Artificial Sequence: Synthetic oligonucleotide
gcaaccaaaaguggcuuua

SEQ ID NO: 3088090 - RNA, 19 nt, Artificial Sequence
  Description of Artificial Sequence: Synthetic oligonucleotide
caguuuccaugggcugugc

SEQ ID NO: 3088091 - RNA, 19 nt, Artificial Sequence
  Description of Artificial Sequence: Synthetic oligonucleotide
  modified_base (17)..(17): a, c, u, g, unknown or other
ggcuuucuuaauuggunau

SEQ ID NO: 3088092 - RNA, 19 nt, Artificial Sequence
  Description of Artificial Sequence: Synthetic oligonucleotide
cagcacuguggcuuucuua

SEQ ID NO: 3088093 - RNA, 19 nt, Artificial Sequence
  Description of Artificial Sequence: Synthetic oligonucleotide
  modified_base (16)..(16): a, c, u, g, unknown or other
gcuuucuuaauuggunauu

SEQ ID NO: 3088094 - RNA, 19 nt, Artificial Sequence
  Description of Artificial Sequence: Synthetic oligonucleotide
cuggaucuucacucuuucu

SEQ ID NO: 3088095 - RNA, 19 nt, Artificial Sequence
  Description of Artificial Sequence: Synthetic oligonucleotide
gguuggcuuuacagcucgg

SEQ ID NO: 3088096 - RNA, 19 nt, Artificial Sequence
  Description of Artificial Sequence: Synthetic oligonucleotide
ucggugcacuccacuucuu

SEQ ID NO: 3088097 - RNA, 19 nt, Artificial Sequence
  Description of Artificial Sequence: Synthetic oligonucleotide
gucuggccucgacgggaag

SEQ ID NO: 3088098 - RNA, 19 nt, Artificial Sequence
  Description of Artificial Sequence: Synthetic oligonucleotide
ccaguuuccaugggcugug

SEQ ID NO: 3088099 - RNA, 19 nt, Artificial Sequence
  Description of Artificial Sequence: Synthetic oligonucleotide
cgugggccgguccagguug

SEQ ID NO: 3088100 - RNA, 19 nt, Artificial Sequence
  Description of Artificial Sequence: Synthetic oligonucleotide
gcacugguuuugcaggaua

SEQ ID NO: 3088101 - RNA, 19 nt, Artificial Sequence
  Description of Artificial Sequence: Synthetic oligonucleotide
gcauuuuacuucccugcau

SEQ ID NO: 3088102 - RNA, 19 nt, Artificial Sequence
  Description of Artificial Sequence: Synthetic oligonucleotide
caguuuccccaucuucggu

SEQ ID NO: 3088103 - RNA, 19 nt, Artificial Sequence
  Description of Artificial Sequence: Synthetic oligonucleotide
gguacagcacuguggcuuu

SEQ ID NO: 3088104 - RNA, 19 nt, Artificial Sequence
  Description of Artificial Sequence: Synthetic oligonucleotide
gccucgacgggaaggggca

SEQ ID NO: 3088105 - RNA, 19 nt, Artificial Sequence
  Description of Artificial Sequence: Synthetic oligonucleotide
caaccaaaaguggcuuuau

SEQ ID NO: 3088106 - RNA, 19 nt, Artificial Sequence
  Description of Artificial Sequence: Synthetic oligonucleotide
guacagcacuguggcuuuc

SEQ ID NO: 3088107 - RNA, 19 nt, Artificial Sequence
  Description of Artificial Sequence: Synthetic oligonucleotide
ggcaaccaaaaguggcuuu

SEQ ID NO: 3088108 - RNA, 19 nt, Artificial Sequence
  Description of Artificial Sequence: Synthetic oligonucleotide
cccugcauucuggcaauuc

SEQ ID NO: 3088109 - RNA, 19 nt, Artificial Sequence
  Description of Artificial Sequence: Synthetic oligonucleotide
gccgguccagguuguaugu

SEQ ID NO: 3088110 - RNA, 19 nt, Artificial Sequence
  Description of Artificial Sequence: Synthetic oligonucleotide
ucccugcauucuggcaauu

SEQ ID NO: 3088111 - RNA, 19 nt, Artificial Sequence
  Description of Artificial Sequence: Synthetic oligonucleotide
ccacuucuucgugggccgg

SEQ ID NO: 3088112 - RNA, 19 nt, Artificial Sequence
  Description of Artificial Sequence: Synthetic oligonucleotide
cucggcagggaggaccagu

SEQ ID NO: 3088113 - RNA, 19 nt, Artificial Sequence
  Description of Artificial Sequence: Synthetic oligonucleotide
cuccuagguacagcacugu

SEQ ID NO: 3088114 - RNA, 19 nt, Artificial Sequence
  Description of Artificial Sequence: Synthetic oligonucleotide
ggaggaccaguuuccccau

SEQ ID NO: 3088115 - RNA, 19 nt, Artificial Sequence
  Description of Artificial Sequence: Synthetic oligonucleotide
ugggccgguccagguugua

SEQ ID NO: 3088116 - RNA, 19 nt, Artificial Sequence
  Description of Artificial Sequence: Synthetic oligonucleotide
cacuucuucgugggccggu

SEQ ID NO: 3088117 - RNA, 19 nt, Artificial Sequence
  Description of Artificial Sequence: Synthetic oligonucleotide
ggaccaguuuccccaucuu

SEQ ID NO: 3088118 - RNA, 19 nt, Artificial Sequence
  Description of Artificial Sequence: Synthetic oligonucleotide
gcacuguggcuuucuuaau

SEQ ID NO: 3088119 - RNA, 19 nt, Artificial Sequence
  Description of Artificial Sequence: Synthetic oligonucleotide
gcucggcagggaggaccag

SEQ ID NO: 3088120 - RNA, 19 nt, Artificial Sequence
  Description of Artificial Sequence: Synthetic oligonucleotide
cucgacgggaaggggcauu

SEQ ID NO: 3088121 - RNA, 19 nt, Artificial Sequence
  Description of Artificial Sequence: Synthetic oligonucleotide
gugggccgguccagguugu

SEQ ID NO: 3088122 - RNA, 19 nt, Artificial Sequence
  Description of Artificial Sequence: Synthetic oligonucleotide
cgguccagguuguauguuu

SEQ ID NO: 3088123 - RNA, 19 nt, Artificial Sequence
  Description of Artificial Sequence: Synthetic oligonucleotide
gggccgguccagguuguau

SEQ ID NO: 3088124 - RNA, 19 nt, Artificial Sequence
  Description of Artificial Sequence: Synthetic oligonucleotide
ccgguccagguuguauguu

SEQ ID NO: 3088125 - RNA, 19 nt, Artificial Sequence
  Description of Artificial Sequence: Synthetic oligonucleotide
ccucgacgggaaggggcau

SEQ ID NO: 3088126 - RNA, 19 nt, Artificial Sequence
  Description of Artificial Sequence: Synthetic oligonucleotide
cgacgggaaggggcauuuu

SEQ ID NO: 3088127 - RNA, 19 nt, Artificial Sequence
  Description of Artificial Sequence: Synthetic oligonucleotide
  modified_base (1)..(1): a, c, u, g, unknown or other
nauuuugcaagguuggcuu

SEQ ID NO: 3088128 - RNA, 19 nt, Artificial Sequence
  Description of Artificial Sequence: Synthetic oligonucleotide
ucuuuguggagcuuaaugg

SEQ ID NO: 3088129 - RNA, 19 nt, Artificial Sequence
  Description of Artificial Sequence: Synthetic oligonucleotide
ugucauuggaggaagcugg

SEQ ID NO: 3088130 - RNA, 19 nt, Artificial Sequence
  Description of Artificial Sequence: Synthetic oligonucleotide
uuaauggguuccuugaaca

SEQ ID NO: 3088131 - RNA, 19 nt, Artificial Sequence
  Description of Artificial Sequence: Synthetic oligonucleotide
cuuuguggagcuuaauggg

SEQ ID NO: 3088132 - RNA, 19 nt, Artificial Sequence
  Description of Artificial Sequence: Synthetic oligonucleotide
aguguagggaccaacaggg

SEQ ID NO: 3088133 - RNA, 19 nt, Artificial Sequence
  Description of Artificial Sequence: Synthetic oligonucleotide
uucauaggcagcuucuucc

SEQ ID NO: 3088134 - RNA, 19 nt, Artificial Sequence
  Description of Artificial Sequence: Synthetic oligonucleotide
uggucagggguaaagacag

SEQ ID NO: 3088135 - RNA, 19 nt, Artificial Sequence
  Description of Artificial Sequence: Synthetic oligonucleotide
uccguggagaauuugagga

SEQ ID NO: 3088136 - RNA, 19 nt, Artificial Sequence
  Description of Artificial Sequence: Synthetic oligonucleotide
cucacguuguccuucauag

SEQ ID NO: 3088137 - RNA, 19 nt, Artificial Sequence
  Description of Artificial Sequence: Synthetic oligonucleotide
gaggaucuggucuuugugg

SEQ ID NO: 3088138 - RNA, 19 nt, Artificial Sequence
  Description of Artificial Sequence: Synthetic oligonucleotide
ucacauauccaggaagugg

SEQ ID NO: 3088139 - RNA, 19 nt, Artificial Sequence
  Description of Artificial Sequence: Synthetic oligonucleotide
aaagacagcagcuguccug

SEQ ID NO: 3088140 - RNA, 19 nt, Artificial Sequence
  Description of Artificial Sequence: Synthetic oligonucleotide
agaauuugaggaucugguc

SEQ ID NO: 3088141 - RNA, 19 nt, Artificial Sequence
  Description of Artificial Sequence: Synthetic oligonucleotide
uuuccuagcugcugcaggg

SEQ ID NO: 3088142 - RNA, 19 nt, Artificial Sequence
  Description of Artificial Sequence: Synthetic oligonucleotide
aguggucugucauuggagg

SEQ ID NO: 3088143 - RNA, 19 nt, Artificial Sequence
  Description of Artificial Sequence: Synthetic oligonucleotide
gaguguagggaccaacagg

SEQ ID NO: 3088144 - RNA, 19 nt, Artificial Sequence
  Description of Artificial Sequence: Synthetic oligonucleotide
uguagggaccaacagggug

SEQ ID NO: 3088145 - RNA, 19 nt, Artificial Sequence
  Description of Artificial Sequence: Synthetic oligonucleotide
aagacagcagcuguccugg

SEQ ID NO: 3088146 - RNA, 19 nt, Artificial Sequence
  Description of Artificial Sequence: Synthetic oligonucleotide
aacacaguccagacgaccg

SEQ ID NO: 3088147 - RNA, 19 nt, Artificial Sequence
  Description of Artificial Sequence: Synthetic oligonucleotide
cacguuguccuucauaggc

SEQ ID NO: 3088148 - RNA, 19 nt, Artificial Sequence
  Description of Artificial Sequence: Synthetic oligonucleotide
auuggaggaagcuggucac

SEQ ID NO: 3088149 - RNA, 19 nt, Artificial Sequence
  Description of Artificial Sequence: Synthetic oligonucleotide
uuuguggagcuuaaugggu

SEQ ID NO: 3088150 - RNA, 19 nt, Artificial Sequence
  Description of Artificial Sequence: Synthetic oligonucleotide
ugaguguagggaccaacag

SEQ ID NO: 3088151 - RNA, 19 nt, Artificial Sequence
  Description of Artificial Sequence: Synthetic oligonucleotide
gaauuugaggaucuggucu

SEQ ID NO: 3088152 - RNA, 19 nt, Artificial Sequence
  Description of Artificial Sequence: Synthetic oligonucleotide
accgucucgucacaguucg

SEQ ID NO: 3088153 - RNA, 19 nt, Artificial Sequence
  Description of Artificial Sequence: Synthetic oligonucleotide
cuucccuucgucauaguac

SEQ ID NO: 3088154 - RNA, 19 nt, Artificial Sequence
  Description of Artificial Sequence: Synthetic oligonucleotide
uucccuucgucauaguaca

SEQ ID NO: 3088155 - RNA, 19 nt, Artificial Sequence
  Description of Artificial Sequence: Synthetic oligonucleotide
guuccuugaacacagucca

SEQ ID NO: 3088156 - RNA, 19 nt, Artificial Sequence
  Description of Artificial Sequence: Synthetic oligonucleotide
cuuaauggguuccuugaac

SEQ ID NO: 3088157 - RNA, 19 nt, Artificial Sequence
  Description of Artificial Sequence: Synthetic oligonucleotide
guagggaccaacagggugg

SEQ ID NO: 3088158 - RNA, 19 nt, Artificial Sequence
  Description of Artificial Sequence: Synthetic oligonucleotide
ugaggaucuggucuuugug

SEQ ID NO: 3088159 - RNA, 19 nt, Artificial Sequence
  Description of Artificial Sequence: Synthetic oligonucleotide
ucagggguaaagacagcag

SEQ ID NO: 3088160 - RNA, 19 nt, Artificial Sequence
  Description of Artificial Sequence: Synthetic oligonucleotide
aauggguuccuugaacaca

SEQ ID NO: 3088161 - RNA, 19 nt, Artificial Sequence
  Description of Artificial Sequence: Synthetic oligonucleotide
auauccaggaaguggucug

SEQ ID NO: 3088162 - RNA, 19 nt, Artificial Sequence
  Description of Artificial Sequence: Synthetic oligonucleotide
agcuuaauggguuccuuga

SEQ ID NO: 3088163 - RNA, 19 nt, Artificial Sequence
  Description of Artificial Sequence: Synthetic oligonucleotide
ucauaggcagcuucuuccc

SEQ ID NO: 3088164 - RNA, 19 nt, Artificial Sequence
  Description of Artificial Sequence: Synthetic oligonucleotide
guuuccuagcugcugcagg

SEQ ID NO: 3088165 - RNA, 19 nt, Artificial Sequence
  Description of Artificial Sequence: Synthetic oligonucleotide
cagggguaaagacagcagc

SEQ ID NO: 3088166 - RNA, 19 nt, Artificial Sequence
  Description of Artificial Sequence: Synthetic oligonucleotide
cuggcgguuuccuagcugc

SEQ ID NO: 3088167 - RNA, 19 nt, Artificial Sequence
  Description of Artificial Sequence: Synthetic oligonucleotide
guaaagacagcagcugucc

SEQ ID NO: 3088168 - RNA, 19 nt, Artificial Sequence
  Description of Artificial Sequence: Synthetic oligonucleotide
gaaguggucugucauugga

SEQ ID NO: 3088169 - RNA, 19 nt, Artificial Sequence
  Description of Artificial Sequence: Synthetic oligonucleotide
cauaguacagcuccgugga

SEQ ID NO: 3088170 - RNA, 19 nt, Artificial Sequence
  Description of Artificial Sequence: Synthetic oligonucleotide
gagcuuaauggguuccuug

SEQ ID NO: 3088171 - RNA, 19 nt, Artificial Sequence
  Description of Artificial Sequence: Synthetic oligonucleotide
acaccuggcgguuuccuag

SEQ ID NO: 3088172 - RNA, 19 nt, Artificial Sequence
  Description of Artificial Sequence: Synthetic oligonucleotide
gaucuggucuuuguggagc

SEQ ID NO: 3088173 - RNA, 19 nt, Artificial Sequence
  Description of Artificial Sequence: Synthetic oligonucleotide
uaauggguuccuugaacac

SEQ ID NO: 3088174 - RNA, 19 nt, Artificial Sequence
  Description of Artificial Sequence: Synthetic oligonucleotide
ucgucauaguacagcuccg

SEQ ID NO: 3088175 - RNA, 19 nt, Artificial Sequence
  Description of Artificial Sequence: Synthetic oligonucleotide
ucagugagcccagguaacg

SEQ ID NO: 3088176 - RNA, 19 nt, Artificial Sequence
  Description of Artificial Sequence: Synthetic oligonucleotide
uggucaccaggcaugugag

SEQ ID NO: 3088177 - RNA, 19 nt, Artificial Sequence
  Description of Artificial Sequence: Synthetic oligonucleotide
aggaucuggucuuugugga

SEQ ID NO: 3088178 - RNA, 19 nt, Artificial Sequence
  Description of Artificial Sequence: Synthetic oligonucleotide
uccuucauaggcagcuucu

SEQ ID NO: 3088179 - RNA, 19 nt, Artificial Sequence
  Description of Artificial Sequence: Synthetic oligonucleotide
cuccguggagaauuugagg

SEQ ID NO: 3088180 - RNA, 19 nt, Artificial Sequence
  Description of Artificial Sequence: Synthetic oligonucleotide
aguccagacgaccgucucg

SEQ ID NO: 3088181 - RNA, 19 nt, Artificial Sequence
  Description of Artificial Sequence: Synthetic oligonucleotide
cauuggaggaagcugguca

SEQ ID NO: 3088182 - RNA, 19 nt, Artificial Sequence
  Description of Artificial Sequence: Synthetic oligonucleotide
aaguggucugucauuggag

SEQ ID NO: 3088183 - RNA, 19 nt, Artificial Sequence
  Description of Artificial Sequence: Synthetic oligonucleotide
uccuugaacacaguccaga

SEQ ID NO: 3088184 - RNA, 19 nt, Artificial Sequence
  Description of Artificial Sequence: Synthetic oligonucleotide
uaaagacagcagcuguccu

SEQ ID NO: 3088185 - RNA, 19 nt, Artificial Sequence
  Description of Artificial Sequence: Synthetic oligonucleotide
ggagaauuugaggaucugg

SEQ ID NO: 3088186 - RNA, 19 nt, Artificial Sequence
  Description of Artificial Sequence: Synthetic oligonucleotide
ucacguuguccuucauagg

SEQ ID NO: 3088187 - RNA, 19 nt, Artificial Sequence
  Description of Artificial Sequence: Synthetic oligonucleotide
ugagcccagguaacggaag

SEQ ID NO: 3088188 - RNA, 19 nt, Artificial Sequence
  Description of Artificial Sequence: Synthetic oligonucleotide
ucugucauuggaggaagcu

SEQ ID NO: 3088189 - RNA, 19 nt, Artificial Sequence
  Description of Artificial Sequence: Synthetic oligonucleotide
ugcugcaggggccucacgu

SEQ ID NO: 3088190 - RNA, 19 nt, Artificial Sequence
  Description of Artificial Sequence: Synthetic oligonucleotide
gucaccaggcaugugagug

SEQ ID NO: 3088191 - RNA, 19 nt, Artificial Sequence
  Description of Artificial Sequence: Synthetic oligonucleotide
ucacaguucggggugguca

SEQ ID NO: 3088192 - RNA, 19 nt, Artificial Sequence
  Description of Artificial Sequence: Synthetic oligonucleotide
ucuucccuucgucauagua

SEQ ID NO: 3088193 - RNA, 19 nt, Artificial Sequence
  Description of Artificial Sequence: Synthetic oligonucleotide
auggguuccuugaacacag

SEQ ID NO: 3088194 - RNA, 19 nt, Artificial Sequence
  Description of Artificial Sequence: Synthetic oligonucleotide
ucucgucacaguucggggu

SEQ ID NO: 3088195 - RNA, 19 nt, Artificial Sequence
  Description of Artificial Sequence: Synthetic oligonucleotide
aggaaguggucugucauug

SEQ ID NO: 3088196 - RNA, 19 nt, Artificial Sequence
  Description of Artificial Sequence: Synthetic oligonucleotide
uaguacagcuccguggaga

SEQ ID NO: 3088197 - RNA, 19 nt, Artificial Sequence
  Description of Artificial Sequence: Synthetic oligonucleotide
cagacgaccgucucgucac

SEQ ID NO: 3088198 - RNA, 19 nt, Artificial Sequence
  Description of Artificial Sequence: Synthetic oligonucleotide
gguuccuugaacacagucc

SEQ ID NO: 3088199 - RNA, 19 nt, Artificial Sequence
  Description of Artificial Sequence: Synthetic oligonucleotide
aguacagcuccguggagaa

SEQ ID NO: 3088200 - RNA, 19 nt, Artificial Sequence
  Description of Artificial Sequence: Synthetic oligonucleotide
gucucgucacaguucgggg

SEQ ID NO: 3088201 - RNA, 19 nt, Artificial Sequence
  Description of Artificial Sequence: Synthetic oligonucleotide
uccuagcugcugcaggggc

SEQ ID NO: 3088202 - RNA, 19 nt, Artificial Sequence
  Description of Artificial Sequence: Synthetic oligonucleotide
agugagcccagguaacgga

SEQ ID NO: 3088203 - RNA, 19 nt, Artificial Sequence
  Description of Artificial Sequence: Synthetic oligonucleotide
ggaccugaacaccuggcgg

SEQ ID NO: 3088204 - RNA, 19 nt, Artificial Sequence
  Description of Artificial Sequence: Synthetic oligonucleotide
gucauaguacagcuccgug

SEQ ID NO: 3088205 - RNA, 19 nt, Artificial Sequence
  Description of Artificial Sequence: Synthetic oligonucleotide
gagaauuugaggaucuggu

SEQ ID NO: 3088206 - RNA, 19 nt, Artificial Sequence
  Description of Artificial Sequence: Synthetic oligonucleotide
uucgggguggucagugagc

SEQ ID NO: 3088207 - RNA, 19 nt, Artificial Sequence
  Description of Artificial Sequence: Synthetic oligonucleotide
caggcaugugaguguaggg

SEQ ID NO: 3088208 - RNA, 19 nt, Artificial Sequence
  Description of Artificial Sequence: Synthetic oligonucleotide
cuucuucccuucgucauag

SEQ ID NO: 3088209 - RNA, 19 nt, Artificial Sequence
  Description of Artificial Sequence: Synthetic oligonucleotide
uguggagcuuaauggguuc

SEQ ID NO: 3088210 - RNA, 19 nt, Artificial Sequence
  Description of Artificial Sequence: Synthetic oligonucleotide
ugggaccugaacaccuggc

SEQ ID NO: 3088211 - RNA, 19 nt, Artificial Sequence
  Description of Artificial Sequence: Synthetic oligonucleotide
cuucauaggcagcuucuuc

SEQ ID NO: 3088212 - RNA, 19 nt, Artificial Sequence
  Description of Artificial Sequence: Synthetic oligonucleotide
uacagcuccguggagaauu

SEQ ID NO: 3088213 - RNA, 19 nt, Artificial Sequence
  Description of Artificial Sequence: Synthetic oligonucleotide
aagcuggucaccaggcaug

SEQ ID NO: 3088214 - RNA, 19 nt, Artificial Sequence
  Description of Artificial Sequence: Synthetic oligonucleotide
cacauauccaggaaguggu

SEQ ID NO: 3088215 - RNA, 19 nt, Artificial Sequence
  Description of Artificial Sequence: Synthetic oligonucleotide
guucgggguggucagugag

SEQ ID NO: 3088216 - RNA, 19 nt, Artificial Sequence
  Description of Artificial Sequence: Synthetic oligonucleotide
uguccuggggcgugggacc

SEQ ID NO: 3088217 - RNA, 19 nt, Artificial Sequence
  Description of Artificial Sequence: Synthetic oligonucleotide
cucgucacaguucggggug

SEQ ID NO: 3088218 - RNA, 19 nt, Artificial Sequence
  Description of Artificial Sequence: Synthetic oligonucleotide
uccaggaaguggucuguca

SEQ ID NO: 3088219 - RNA, 19 nt, Artificial Sequence
  Description of Artificial Sequence: Synthetic oligonucleotide
cuggucaccaggcauguga

SEQ ID NO: 3088220 - RNA, 19 nt, Artificial Sequence
  Description of Artificial Sequence: Synthetic oligonucleotide
uggucagugagcccaggua

SEQ ID NO: 3088221 - RNA, 19 nt, Artificial Sequence
  Description of Artificial Sequence: Synthetic oligonucleotide
ugugaguguagggaccaac

SEQ ID NO: 3088222 - RNA, 19 nt, Artificial Sequence
  Description of Artificial Sequence: Synthetic oligonucleotide
ucgggguggucagugagcc

SEQ ID NO: 3088223 - RNA, 19 nt, Artificial Sequence
  Description of Artificial Sequence: Synthetic oligonucleotide
aggcaugugaguguaggga

SEQ ID NO: 3088224 - RNA, 19 nt, Artificial Sequence
  Description of Artificial Sequence: Synthetic oligonucleotide
cacaguucgggguggucag

SEQ ID NO: 3088225 - RNA, 19 nt, Artificial Sequence
  Description of Artificial Sequence: Synthetic oligonucleotide
uuugaggaucuggucuuug

SEQ ID NO: 3088226 - RNA, 19 nt, Artificial Sequence
  Description of Artificial Sequence: Synthetic oligonucleotide
auaguacagcuccguggag

SEQ ID NO: 3088227 - RNA, 19 nt, Artificial Sequence
  Description of Artificial Sequence: Synthetic oligonucleotide
gggaccugaacaccuggcg

SEQ ID NO: 3088228 - RNA, 19 nt, Artificial Sequence
  Description of Artificial Sequence: Synthetic oligonucleotide
ucaccaggcaugugagugu

SEQ ID NO: 3088229 - RNA, 19 nt, Artificial Sequence
  Description of Artificial Sequence: Synthetic oligonucleotide
ggcaugugaguguagggac

SEQ ID NO: 3088230 - RNA, 19 nt, Artificial Sequence
  Description of Artificial Sequence: Synthetic oligonucleotide
gugggaccugaacaccugg

SEQ ID NO: 3088231 - RNA, 19 nt, Artificial Sequence
  Description of Artificial Sequence: Synthetic oligonucleotide
agggguaaagacagcagcu

SEQ ID NO: 3088232 - RNA, 19 nt, Artificial Sequence
  Description of Artificial Sequence: Synthetic oligonucleotide
agcuucuucccuucgucau

SEQ ID NO: 3088233 - RNA, 19 nt, Artificial Sequence
  Description of Artificial Sequence: Synthetic oligonucleotide
gguggucagggguaaagac

SEQ ID NO: 3088234 - RNA, 19 nt, Artificial Sequence
  Description of Artificial Sequence: Synthetic oligonucleotide
aucuggucuuuguggagcu

SEQ ID NO: 3088235 - RNA, 19 nt, Artificial Sequence
  Description of Artificial Sequence: Synthetic oligonucleotide
gucagggguaaagacagca

SEQ ID NO: 3088236 - RNA, 19 nt, Artificial Sequence
  Description of Artificial Sequence: Synthetic oligonucleotide
uuccuagcugcugcagggg

SEQ ID NO: 3088237 - RNA, 19 nt, Artificial Sequence
  Description of Artificial Sequence: Synthetic oligonucleotide
aggggccucacguuguccu

SEQ ID NO: 3088238 - RNA, 19 nt, Artificial Sequence
  Description of Artificial Sequence: Synthetic oligonucleotide
aacaccuggcgguuuccua

SEQ ID NO: 3088239 - RNA, 19 nt, Artificial Sequence
  Description of Artificial Sequence: Synthetic oligonucleotide
cuucgucauaguacagcuc

SEQ ID NO: 3088240 - RNA, 19 nt, Artificial Sequence
  Description of Artificial Sequence: Synthetic oligonucleotide
uggucuuuguggagcuuaa

SEQ ID NO: 3088241 - RNA, 19 nt, Artificial Sequence
  Description of Artificial Sequence: Synthetic oligonucleotide
gucacauauccaggaagug

SEQ ID NO: 3088242 - RNA, 19 nt, Artificial Sequence
  Description of Artificial Sequence: Synthetic oligonucleotide
guggucagggguaaagaca

SEQ ID NO: 3088243 - RNA, 19 nt, Artificial Sequence
  Description of Artificial Sequence: Synthetic oligonucleotide
ugcaggggccucacguugu

SEQ ID NO: 3088244 - RNA, 19 nt, Artificial Sequence
  Description of Artificial Sequence: Synthetic oligonucleotide
ucccuucgucauaguacag

SEQ ID NO: 3088245 - RNA, 19 nt, Artificial Sequence
  Description of Artificial Sequence: Synthetic oligonucleotide
ggaaguggucugucauugg

SEQ ID NO: 3088246 - RNA, 19 nt, Artificial Sequence
  Description of Artificial Sequence: Synthetic oligonucleotide
uggagaauuugaggaucug

SEQ ID NO: 3088247 - RNA, 19 nt, Artificial Sequence
  Description of Artificial Sequence: Synthetic oligonucleotide
ggucagugagcccagguaa

SEQ ID NO: 3088248 - RNA, 19 nt, Artificial Sequence
  Description of Artificial Sequence: Synthetic oligonucleotide
cagugagcccagguaacgg

SEQ ID NO: 3088249 - RNA, 19 nt, Artificial Sequence
  Description of Artificial Sequence: Synthetic oligonucleotide
gaccugaacaccuggcggu

SEQ ID NO: 3088250 - RNA, 19 nt, Artificial Sequence
  Description of Artificial Sequence: Synthetic oligonucleotide
acacaguccagacgaccgu

SEQ ID NO: 3088251 - RNA, 19 nt, Artificial Sequence
  Description of Artificial Sequence: Synthetic oligonucleotide
gaagcuggucaccaggcau

SEQ ID NO: 3088252 - RNA, 19 nt, Artificial Sequence
  Description of Artificial Sequence: Synthetic oligonucleotide
aacaggguggucaggggua

SEQ ID NO: 3088253 - RNA, 19 nt, Artificial Sequence
  Description of Artificial Sequence: Synthetic oligonucleotide
aggguggucagggguaaag

SEQ ID NO: 3088254 - RNA, 19 nt, Artificial Sequence
  Description of Artificial Sequence: Synthetic oligonucleotide
uuggaggaagcuggucacc

SEQ ID NO: 3088255 - RNA, 19 nt, Artificial Sequence
  Description of Artificial Sequence: Synthetic oligonucleotide
gugaguguagggaccaaca

SEQ ID NO: 3088256 - RNA, 19 nt, Artificial Sequence
  Description of Artificial Sequence: Synthetic oligonucleotide
guccuucauaggcagcuuc

SEQ ID NO: 3088257 - RNA, 19 nt, Artificial Sequence
  Description of Artificial Sequence: Synthetic oligonucleotide
ggaccaacaggguggucag

SEQ ID NO: 3088258 - RNA, 19 nt, Artificial Sequence
  Description of Artificial Sequence: Synthetic oligonucleotide
ucgucacaguucggggugg

SEQ ID NO: 3088259 - RNA, 19 nt, Artificial Sequence
  Description of Artificial Sequence: Synthetic oligonucleotide
cugaacaccuggcgguuuc

SEQ ID NO: 3088260 - RNA, 19 nt, Artificial Sequence
  Description of Artificial Sequence: Synthetic oligonucleotide
guggucugucauuggagga

SEQ ID NO: 3088261 - RNA, 19 nt, Artificial Sequence
  Description of Artificial Sequence: Synthetic oligonucleotide
ccuugaacacaguccagac

SEQ ID NO: 3088262 - RNA, 19 nt, Artificial Sequence
  Description of Artificial Sequence: Synthetic oligonucleotide
agcuccguggagaauuuga

SEQ ID NO: 3088263 - RNA, 19 nt, Artificial Sequence
  Description of Artificial Sequence: Synthetic oligonucleotide
uggagcuuaauggguuccu

SEQ ID NO: 3088264 - RNA, 19 nt, Artificial Sequence
  Description of Artificial Sequence: Synthetic oligonucleotide
ugaacaccuggcgguuucc

SEQ ID NO: 3088265 - RNA, 19 nt, Artificial Sequence
  Description of Artificial Sequence: Synthetic oligonucleotide
gguaaagacagcagcuguc

SEQ ID NO: 3088266 - RNA, 19 nt, Artificial Sequence
  Description of Artificial Sequence: Synthetic oligonucleotide
caugugaguguagggacca

SEQ ID NO: 3088267 - RNA, 19 nt, Artificial Sequence
  Description of Artificial Sequence: Synthetic oligonucleotide
ggaucuggucuuuguggag

SEQ ID NO: 3088268 - RNA, 19 nt, Artificial Sequence
  Description of Artificial Sequence: Synthetic oligonucleotide
guggagcuuaauggguucc

SEQ ID NO: 3088269 - RNA, 19 nt, Artificial Sequence
  Description of Artificial Sequence: Synthetic oligonucleotide
ucauuggaggaagcugguc

SEQ ID NO: 3088270 - RNA, 19 nt, Artificial Sequence
  Description of Artificial Sequence: Synthetic oligonucleotide
cugcaggggccucacguug

SEQ ID NO: 3088271 - RNA, 19 nt, Artificial Sequence
  Description of Artificial Sequence: Synthetic oligonucleotide
gggaccaacagggugguca

SEQ ID NO: 3088272 - RNA, 19 nt, Artificial Sequence
  Description of Artificial Sequence: Synthetic oligonucleotide
gcgguuuccuagcugcugc

SEQ ID NO: 3088273 - RNA, 19 nt, Artificial Sequence
  Description of Artificial Sequence: Synthetic oligonucleotide
auccaggaaguggucuguc

SEQ ID NO: 3088274 - RNA, 19 nt, Artificial Sequence
  Description of Artificial Sequence: Synthetic oligonucleotide
ggucugucauuggaggaag

SEQ ID NO: 3088275 - RNA, 19 nt, Artificial Sequence
  Description of Artificial Sequence: Synthetic oligonucleotide
aguucgggguggucaguga

SEQ ID NO: 3088276 - RNA, 19 nt, Artificial Sequence
  Description of Artificial Sequence: Synthetic oligonucleotide
caccuggcgguuuccuagc

SEQ ID NO: 3088277 - RNA, 19 nt, Artificial Sequence
  Description of Artificial Sequence: Synthetic oligonucleotide
acguuguccuucauaggca

SEQ ID NO: 3088278 - RNA, 19 nt, Artificial Sequence
  Description of Artificial Sequence: Synthetic oligonucleotide
gggguaaagacagcagcug

SEQ ID NO: 3088279 - RNA, 19 nt, Artificial Sequence
  Description of Artificial Sequence: Synthetic oligonucleotide
ccaggcaugugaguguagg

SEQ ID NO: 3088280 - RNA, 19 nt, Artificial Sequence
  Description of Artificial Sequence: Synthetic oligonucleotide
cuguccuggggcgugggac

SEQ ID NO: 3088281 - RNA, 19 nt, Artificial Sequence
  Description of Artificial Sequence: Synthetic oligonucleotide
gucagugagcccagguaac

SEQ ID NO: 3088282 - RNA, 19 nt, Artificial Sequence
  Description of Artificial Sequence: Synthetic oligonucleotide
gacgaccgucucgucacag

SEQ ID NO: 3088283 - RNA, 19 nt, Artificial Sequence
  Description of Artificial Sequence: Synthetic oligonucleotide
acgaccgucucgucacagu

SEQ ID NO: 3088284 - RNA, 19 nt, Artificial Sequence
  Description of Artificial Sequence: Synthetic oligonucleotide
agacagcagcuguccuggg

SEQ ID NO: 3088285 - RNA, 19 nt, Artificial Sequence
  Description of Artificial Sequence: Synthetic oligonucleotide
ggguuccuugaacacaguc

SEQ ID NO: 3088286 - RNA, 19 nt, Artificial Sequence
  Description of Artificial Sequence: Synthetic oligonucleotide
gcccagguaacggaaguag

SEQ ID NO: 3088287 - RNA, 19 nt, Artificial Sequence
  Description of Artificial Sequence: Synthetic oligonucleotide
ggaggaagcuggucaccag

SEQ ID NO: 3088288 - RNA, 19 nt, Artificial Sequence
  Description of Artificial Sequence: Synthetic oligonucleotide
cguuguccuucauaggcag

SEQ ID NO: 3088289 - RNA, 19 nt, Artificial Sequence
  Description of Artificial Sequence: Synthetic oligonucleotide
gcuccguggagaauuugag

SEQ ID NO: 3088290 - RNA, 19 nt, Artificial Sequence
  Description of Artificial Sequence: Synthetic oligonucleotide
uagggaccaacaggguggu

SEQ ID NO: 3088291 - RNA, 19 nt, Artificial Sequence
  Description of Artificial Sequence: Synthetic oligonucleotide
cacaguccagacgaccguc

SEQ ID NO: 3088292 - RNA, 19 nt, Artificial Sequence
  Description of Artificial Sequence: Synthetic oligonucleotide
uggcgguuuccuagcugcu

SEQ ID NO: 3088293 - RNA, 19 nt, Artificial Sequence
  Description of Artificial Sequence: Synthetic oligonucleotide
caguucgggguggucagug

SEQ ID NO: 3088294 - RNA, 19 nt, Artificial Sequence
  Description of Artificial Sequence: Synthetic oligonucleotide
gggguggucagugagccca

SEQ ID NO: 3088295 - RNA, 19 nt, Artificial Sequence
  Description of Artificial Sequence: Synthetic oligonucleotide
ccuagcugcugcaggggcc

SEQ ID NO: 3088296 - RNA, 19 nt, Artificial Sequence
  Description of Artificial Sequence: Synthetic oligonucleotide
cauauccaggaaguggucu

SEQ ID NO: 3088297 - RNA, 19 nt, Artificial Sequence
  Description of Artificial Sequence: Synthetic oligonucleotide
uggguuccuugaacacagu

SEQ ID NO: 3088298 - RNA, 19 nt, Artificial Sequence
  Description of Artificial Sequence: Synthetic oligonucleotide
ggucacauauccaggaagu

SEQ ID NO: 3088299 - RNA, 19 nt, Artificial Sequence
  Description of Artificial Sequence: Synthetic oligonucleotide
acaguccagacgaccgucu

SEQ ID NO: 3088300 - RNA, 19 nt, Artificial Sequence
  Description of Artificial Sequence: Synthetic oligonucleotide
cccuucgucauaguacagc

SEQ ID NO: 3088301 - RNA, 19 nt, Artificial Sequence
  Description of Artificial Sequence: Synthetic oligonucleotide
gaccgucucgucacaguuc

SEQ ID NO: 3088302 - RNA, 19 nt, Artificial Sequence
  Description of Artificial Sequence: Synthetic oligonucleotide
ccaacaggguggucagggg

SEQ ID NO: 3088303 - RNA, 19 nt, Artificial Sequence
  Description of Artificial Sequence: Synthetic oligonucleotide
gucugucauuggaggaagc

SEQ ID NO: 3088304 - RNA, 19 nt, Artificial Sequence
  Description of Artificial Sequence: Synthetic oligonucleotide
ggguaaagacagcagcugu

SEQ ID NO: 3088305 - RNA, 19 nt, Artificial Sequence
  Description of Artificial Sequence: Synthetic oligonucleotide
agcuggucaccaggcaugu

SEQ ID NO: 3088306 - RNA, 19 nt, Artificial Sequence
  Description of Artificial Sequence: Synthetic oligonucleotide
caguccagacgaccgucuc

SEQ ID NO: 3088307 - RNA, 19 nt, Artificial Sequence
  Description of Artificial Sequence: Synthetic oligonucleotide
gcuuaauggguuccuugaa

SEQ ID NO: 3088308 - RNA, 19 nt, Artificial Sequence
  Description of Artificial Sequence: Synthetic oligonucleotide
guggagaauuugaggaucu

SEQ ID NO: 3088309 - RNA, 19 nt, Artificial Sequence
  Description of Artificial Sequence: Synthetic oligonucleotide
cgucucgucacaguucggg

SEQ ID NO: 3088310 - RNA, 19 nt, Artificial Sequence
  Description of Artificial Sequence: Synthetic oligonucleotide
accuggcgguuuccuagcu

SEQ ID NO: 3088311 - RNA, 19 nt, Artificial Sequence
  Description of Artificial Sequence: Synthetic oligonucleotide
caacaggguggucaggggu

SEQ ID NO: 3088312 - RNA, 19 nt, Artificial Sequence
  Description of Artificial Sequence: Synthetic oligonucleotide
uucuucccuucgucauagu

SEQ ID NO: 3088313 - RNA, 19 nt, Artificial Sequence
  Description of Artificial Sequence: Synthetic oligonucleotide
auuugaggaucuggucuuu

SEQ ID NO: 3088314 - RNA, 19 nt, Artificial Sequence
  Description of Artificial Sequence: Synthetic oligonucleotide
cuggucuuuguggagcuua

SEQ ID NO: 3088315 - RNA, 19 nt, Artificial Sequence
  Description of Artificial Sequence: Synthetic oligonucleotide
agacgaccgucucgucaca

SEQ ID NO: 3088316 - RNA, 19 nt, Artificial Sequence
  Description of Artificial Sequence: Synthetic oligonucleotide
ccuucgucauaguacagcu

SEQ ID NO: 3088317 - RNA, 19 nt, Artificial Sequence
  Description of Artificial Sequence: Synthetic oligonucleotide
gugagcccagguaacggaa

SEQ ID NO: 3088318 - RNA, 19 nt, Artificial Sequence
  Description of Artificial Sequence: Synthetic oligonucleotide
guccagacgaccgucucgu

SEQ ID NO: 3088319 - RNA, 19 nt, Artificial Sequence
  Description of Artificial Sequence: Synthetic oligonucleotide
cguggagaauuugaggauc

SEQ ID NO: 3088320 - RNA, 19 nt, Artificial Sequence
  Description of Artificial Sequence: Synthetic oligonucleotide
acaggguggucagggguaa

SEQ ID NO: 3088321 - RNA, 19 nt, Artificial Sequence
  Description of Artificial Sequence: Synthetic oligonucleotide
agcuguccuggggcguggg

SEQ ID NO: 3088322 - RNA, 19 nt, Artificial Sequence
  Description of Artificial Sequence: Synthetic oligonucleotide
uccagacgaccgucucguc

SEQ ID NO: 3088323 - RNA, 19 nt, Artificial Sequence
  Description of Artificial Sequence: Synthetic oligonucleotide
guggucagugagcccaggu

SEQ ID NO: 3088324 - RNA, 19 nt, Artificial Sequence
  Description of Artificial Sequence: Synthetic oligonucleotide
ggcgugggaccugaacacc

SEQ ID NO: 3088325 - RNA, 19 nt, Artificial Sequence
  Description of Artificial Sequence: Synthetic oligonucleotide
ggcgguuuccuagcugcug

SEQ ID NO: 3088326 - RNA, 19 nt, Artificial Sequence
  Description of Artificial Sequence: Synthetic oligonucleotide
ccagacgaccgucucguca

SEQ ID NO: 3088327 - RNA, 19 nt, Artificial Sequence
  Description of Artificial Sequence: Synthetic oligonucleotide
agcccagguaacggaagua

SEQ ID NO: 3088328 - RNA, 19 nt, Artificial Sequence
  Description of Artificial Sequence: Synthetic oligonucleotide
caggggccucacguugucc

SEQ ID NO: 3088329 - RNA, 19 nt, Artificial Sequence
  Description of Artificial Sequence: Synthetic oligonucleotide
ucuggucuuuguggagcuu

SEQ ID NO: 3088330 - RNA, 19 nt, Artificial Sequence
  Description of Artificial Sequence: Synthetic oligonucleotide
cauaggcagcuucuucccu

SEQ ID NO: 3088331 - RNA, 19 nt, Artificial Sequence
  Description of Artificial Sequence: Synthetic oligonucleotide
accaggcaugugaguguag

SEQ ID NO: 3088332 - RNA, 19 nt, Artificial Sequence
  Description of Artificial Sequence: Synthetic oligonucleotide
acaguucgggguggucagu

SEQ ID NO: 3088333 - RNA, 19 nt, Artificial Sequence
  Description of Artificial Sequence: Synthetic oligonucleotide
accugaacaccuggcgguu

SEQ ID NO: 3088334 - RNA, 19 nt, Artificial Sequence
  Description of Artificial Sequence: Synthetic oligonucleotide
cugcugcaggggccucacg

SEQ ID NO: 3088335 - RNA, 19 nt, Artificial Sequence
  Description of Artificial Sequence: Synthetic oligonucleotide
gaacaccuggcgguuuccu

SEQ ID NO: 3088336 - RNA, 19 nt, Artificial Sequence
  Description of Artificial Sequence: Synthetic oligonucleotide
ggguggucagggguaaaga

SEQ ID NO: 3088337 - RNA, 19 nt, Artificial Sequence
  Description of Artificial Sequence: Synthetic oligonucleotide
gucauuggaggaagcuggu

SEQ ID NO: 3088338 - RNA, 19 nt, Artificial Sequence
  Description of Artificial Sequence: Synthetic oligonucleotide
acagcuccguggagaauuu

SEQ ID NO: 3088339 - RNA, 19 nt, Artificial Sequence
  Description of Artificial Sequence: Synthetic oligonucleotide
gucacaguucggggugguc

SEQ ID NO: 3088340 - RNA, 19 nt, Artificial Sequence
  Description of Artificial Sequence: Synthetic oligonucleotide
gcuucuucccuucgucaua

SEQ ID NO: 3088341 - RNA, 19 nt, Artificial Sequence
  Description of Artificial Sequence: Synthetic oligonucleotide
ccuggcgguuuccuagcug

SEQ ID NO: 3088342 - RNA, 19 nt, Artificial Sequence
  Description of Artificial Sequence: Synthetic oligonucleotide
cagcuguccuggggcgugg

SEQ ID NO: 3088343 - RNA, 19 nt, Artificial Sequence
  Description of Artificial Sequence: Synthetic oligonucleotide
cagcuccguggagaauuug

SEQ ID NO: 3088344 - RNA, 19 nt, Artificial Sequence
  Description of Artificial Sequence: Synthetic oligonucleotide
ggccucacguuguccuuca

SEQ ID NO: 3088345 - RNA, 19 nt, Artificial Sequence
  Description of Artificial Sequence: Synthetic oligonucleotide
agggaccaacagggugguc

SEQ ID NO: 3088346 - RNA, 19 nt, Artificial Sequence
  Description of Artificial Sequence: Synthetic oligonucleotide
augugaguguagggaccaa

SEQ ID NO: 3088347 - RNA, 19 nt, Artificial Sequence
  Description of Artificial Sequence: Synthetic oligonucleotide
ggucagggguaaagacagc

SEQ ID NO: 3088348 - RNA, 19 nt, Artificial Sequence
  Description of Artificial Sequence: Synthetic oligonucleotide
caccaggcaugugagugua

SEQ ID NO: 3088349 - RNA, 19 nt, Artificial Sequence
  Description of Artificial Sequence: Synthetic oligonucleotide
cgugggaccugaacaccug

SEQ ID NO: 3088350 - RNA, 19 nt, Artificial Sequence
  Description of Artificial Sequence: Synthetic oligonucleotide
uccuggggcgugggaccug

SEQ ID NO: 3088351 - RNA, 19 nt, Artificial Sequence
  Description of Artificial Sequence: Synthetic oligonucleotide
ggcagcuucuucccuucgu

SEQ ID NO: 3088352 - RNA, 19 nt, Artificial Sequence
  Description of Artificial Sequence: Synthetic oligonucleotide
ggguggucagugagcccag

SEQ ID NO: 3088353 - RNA, 19 nt, Artificial Sequence
  Description of Artificial Sequence: Synthetic oligonucleotide
ccucacguuguccuucaua

SEQ ID NO: 3088354 - RNA, 19 nt, Artificial Sequence
  Description of Artificial Sequence: Synthetic oligonucleotide
gggccucacguuguccuuc

SEQ ID NO: 3088355 - RNA, 19 nt, Artificial Sequence
  Description of Artificial Sequence: Synthetic oligonucleotide
guguagggaccaacagggu

SEQ ID NO: 3088356 - RNA, 19 nt, Artificial Sequence
  Description of Artificial Sequence: Synthetic oligonucleotide
gcaggggccucacguuguc

SEQ ID NO: 3088357 - RNA, 19 nt, Artificial Sequence
  Description of Artificial Sequence: Synthetic oligonucleotide
ccgucucgucacaguucgg

SEQ ID NO: 3088358 - RNA, 19 nt, Artificial Sequence
  Description of Artificial Sequence: Synthetic oligonucleotide
ggucaccaggcaugugagu

SEQ ID NO: 3088359 - RNA, 19 nt, Artificial Sequence
  Description of Artificial Sequence: Synthetic oligonucleotide
gcuguccuggggcguggga

SEQ ID NO: 3088360 - RNA, 19 nt, Artificial Sequence
  Description of Artificial Sequence: Synthetic oligonucleotide
gcgugggaccugaacaccu

SEQ ID NO: 3088361 - RNA, 19 nt, Artificial Sequence
  Description of Artificial Sequence: Synthetic oligonucleotide
ggagcuuaauggguuccuu

SEQ ID NO: 3088362 - RNA, 19 nt, Artificial Sequence
  Description of Artificial Sequence: Synthetic oligonucleotide
ccguggagaauuugaggau

SEQ ID NO: 3088363 - RNA, 19 nt, Artificial Sequence
  Description of Artificial Sequence: Synthetic oligonucleotide
gcugcaggggccucacguu

SEQ ID NO: 3088364 - RNA, 19 nt, Artificial Sequence
  Description of Artificial Sequence: Synthetic oligonucleotide
guccuggggcgugggaccu

SEQ ID NO: 3088365 - RNA, 19 nt, Artificial Sequence
  Description of Artificial Sequence: Synthetic oligonucleotide
cgguuuccuagcugcugca

SEQ ID NO: 3088366 - RNA, 19 nt, Artificial Sequence
  Description of Artificial Sequence: Synthetic oligonucleotide
cgggguggucagugagccc

SEQ ID NO: 3088367 - RNA, 19 nt, Artificial Sequence
  Description of Artificial Sequence: Synthetic oligonucleotide
ggucuuuguggagcuuaau

SEQ ID NO: 3088368 - RNA, 19 nt, Artificial Sequence
  Description of Artificial Sequence: Synthetic oligonucleotide
guacagcuccguggagaau

SEQ ID NO: 3088369 - RNA, 19 nt, Artificial Sequence
  Description of Artificial Sequence: Synthetic oligonucleotide
cgucauaguacagcuccgu

SEQ ID NO: 3088370 - RNA, 19 nt, Artificial Sequence
  Description of Artificial Sequence: Synthetic oligonucleotide
ggggccucacguuguccuu

SEQ ID NO: 3088371 - RNA, 19 nt, Artificial Sequence
  Description of Artificial Sequence: Synthetic oligonucleotide
cgaccgucucgucacaguu

SEQ ID NO: 3088372 - RNA, 19 nt, Artificial Sequence
  Description of Artificial Sequence: Synthetic oligonucleotide
gccucacguuguccuucau

SEQ ID NO: 3088373 - RNA, 19 nt, Artificial Sequence
  Description of Artificial Sequence: Synthetic oligonucleotide
ccugaacaccuggcgguuu

SEQ ID NO: 3088374 - RNA, 19 nt, Artificial Sequence
  Description of Artificial Sequence: Synthetic oligonucleotide
cgucacaguucgggguggu

SEQ ID NO: 3088375 - RNA, 19 nt, Artificial Sequence
  Description of Artificial Sequence: Synthetic oligonucleotide
aggaacuggaaucaaagac

SEQ ID NO: 3088376 - RNA, 19 nt, Artificial Sequence
  Description of Artificial Sequence: Synthetic oligonucleotide
ugaaguggaaauagagucg

SEQ ID NO: 3088377 - RNA, 19 nt, Artificial Sequence
  Description of Artificial Sequence: Synthetic oligonucleotide
uguggauccaguaucagga

SEQ ID NO: 3088378 - RNA, 19 nt, Artificial Sequence
  Description of Artificial Sequence: Synthetic oligonucleotide
uuuggacugagcaucugcg

SEQ ID NO: 3088379 - RNA, 19 nt, Artificial Sequence
  Description of Artificial Sequence: Synthetic oligonucleotide
guuguguugagucagguac

SEQ ID NO: 3088380 - RNA, 19 nt, Artificial Sequence
  Description of Artificial Sequence: Synthetic oligonucleotide
aaucaaagacacugcuuac

SEQ ID NO: 3088381 - RNA, 19 nt, Artificial Sequence
  Description of Artificial Sequence: Synthetic oligonucleotide
uguagaaggaacuggaauc

SEQ ID NO: 3088382 - RNA, 19 nt, Artificial Sequence
  Description of Artificial Sequence: Synthetic oligonucleotide
uccaguaucaggacauagg

SEQ ID NO: 3088383 - RNA, 19 nt, Artificial Sequence
  Description of Artificial Sequence: Synthetic oligonucleotide
aaagacacugcuuaccuuu

SEQ ID NO: 3088384 - RNA, 19 nt, Artificial Sequence
  Description of Artificial Sequence: Synthetic oligonucleotide
gacugguagaccaaguugg

SEQ ID NO: 3088385 - RNA, 19 nt, Artificial Sequence
  Description of Artificial Sequence: Synthetic oligonucleotide
uguugagucagguacgucu

SEQ ID NO: 3088386 - RNA, 19 nt, Artificial Sequence
  Description of Artificial Sequence: Synthetic oligonucleotide
gugaaguggaaauagaguc

SEQ ID NO: 3088387 - RNA, 19 nt, Artificial Sequence
  Description of Artificial Sequence: Synthetic oligonucleotide
aagcagggguuguagaagg

SEQ ID NO: 3088388 - RNA, 19 nt, Artificial Sequence
  Description of Artificial Sequence: Synthetic oligonucleotide
ucaaagacacugcuuaccu

SEQ ID NO: 3088389 - RNA, 19 nt, Artificial Sequence
  Description of Artificial Sequence: Synthetic oligonucleotide
gaaucaaagacacugcuua

SEQ ID NO: 3088390 - RNA, 19 nt, Artificial Sequence
  Description of Artificial Sequence: Synthetic oligonucleotide
gaaggaacuggaaucaaag

SEQ ID NO: 3088391 - RNA, 19 nt, Artificial Sequence
  Description of Artificial Sequence: Synthetic oligonucleotide
auugaacucgugcaggcag

SEQ ID NO: 3088392 - RNA, 19 nt, Artificial Sequence
  Description of Artificial Sequence: Synthetic oligonucleotide
uuggcauugaacucgugca

SEQ ID NO: 3088393 - RNA, 19 nt, Artificial Sequence
  Description of Artificial Sequence: Synthetic oligonucleotide
aucaaagacacugcuuacc

SEQ ID NO: 3088394 - RNA, 19 nt, Artificial Sequence
  Description of Artificial Sequence: Synthetic oligonucleotide
ugacugguagaccaaguug

SEQ ID NO: 3088395 - RNA, 19 nt, Artificial Sequence
  Description of Artificial Sequence: Synthetic oligonucleotide
caaguuggcauugaacucg

SEQ ID NO: 3088396 - RNA, 19 nt, Artificial Sequence
  Description of Artificial Sequence: Synthetic oligonucleotide
acacugcuuaccuuucgcc

SEQ ID NO: 3088397 - RNA, 19 nt, Artificial Sequence
  Description of Artificial Sequence: Synthetic oligonucleotide
uuguguugagucagguacg

SEQ ID NO: 3088398 - RNA, 19 nt, Artificial Sequence
  Description of Artificial Sequence: Synthetic oligonucleotide
uuguagaaggaacuggaau

SEQ ID NO: 3088399 - RNA, 19 nt, Artificial Sequence
  Description of Artificial Sequence: Synthetic oligonucleotide
aaggaacuggaaucaaaga

SEQ ID NO: 3088400 - RNA, 19 nt, Artificial Sequence
  Description of Artificial Sequence: Synthetic oligonucleotide
uggaaucaaagacacugcu

SEQ ID NO: 3088401 - RNA, 19 nt, Artificial Sequence
  Description of Artificial Sequence: Synthetic oligonucleotide
guggaaauagagucgcucc

SEQ ID NO: 3088402 - RNA, 19 nt, Artificial Sequence
  Description of Artificial Sequence: Synthetic oligonucleotide
ucacagacucccagcaagg

SEQ ID NO: 3088403 - RNA, 19 nt, Artificial Sequence
  Description of Artificial Sequence: Synthetic oligonucleotide
aguggaaauagagucgcuc

SEQ ID NO: 3088404 - RNA, 19 nt, Artificial Sequence
  Description of Artificial Sequence: Synthetic oligonucleotide
acugcuuaccuuucgccag

SEQ ID NO: 3088405 - RNA, 19 nt, Artificial Sequence
  Description of Artificial Sequence: Synthetic oligonucleotide
gaacuggaaucaaagacac

SEQ ID NO: 3088406 - RNA, 19 nt, Artificial Sequence
  Description of Artificial Sequence: Synthetic oligonucleotide
uugaacucgugcaggcagg

SEQ ID NO: 3088407 - RNA, 19 nt, Artificial Sequence
  Description of Artificial Sequence: Synthetic oligonucleotide
aggacauaggccuccguag

SEQ ID NO: 3088408 - RNA, 19 nt, Artificial Sequence
  Description of Artificial Sequence: Synthetic oligonucleotide
accauuacugggccgccgc

SEQ ID NO: 3088409 - RNA, 19 nt, Artificial Sequence
  Description of Artificial Sequence: Synthetic oligonucleotide
agcccacccacccagcagc

SEQ ID NO: 3088410 - RNA, 19 nt, Artificial Sequence
  Description of Artificial Sequence: Synthetic oligonucleotide
cucacagacucccagcaag

SEQ ID NO: 3088411 - RNA, 19 nt, Artificial Sequence
  Description of Artificial Sequence: Synthetic oligonucleotide
ugguagaccaaguuggcau

SEQ ID NO: 3088412 - RNA, 19 nt, Artificial Sequence
  Description of Artificial Sequence: Synthetic oligonucleotide
guaguguggauccaguauc

SEQ ID NO: 3088413 - RNA, 19 nt, Artificial Sequence
  Description of Artificial Sequence: Synthetic oligonucleotide
cuuuggacugagcaucugc

SEQ ID NO: 3088414 - RNA, 19 nt, Artificial Sequence
  Description of Artificial Sequence: Synthetic oligonucleotide
uucggagugccccaguagu

SEQ ID NO: 3088415 - RNA, 19 nt, Artificial Sequence
  Description of Artificial Sequence: Synthetic oligonucleotide
aguaguguggauccaguau

SEQ ID NO: 3088416 - RNA, 19 nt, Artificial Sequence
  Description of Artificial Sequence: Synthetic oligonucleotide
uacgucuggucaagcaggg

SEQ ID NO: 3088417 - RNA, 19 nt, Artificial Sequence
  Description of Artificial Sequence: Synthetic oligonucleotide
aaggcuuuggacugagcau

SEQ ID NO: 3088418 - RNA, 19 nt, Artificial Sequence
  Description of Artificial Sequence: Synthetic oligonucleotide
uggcauugaacucgugcag

SEQ ID NO: 3088419 - RNA, 19 nt, Artificial Sequence
  Description of Artificial Sequence: Synthetic oligonucleotide
cuggaaucaaagacacugc

SEQ ID NO: 3088420 - RNA, 19 nt, Artificial Sequence
  Description of Artificial Sequence: Synthetic oligonucleotide
agucagguacgucugguca

SEQ ID NO: 3088421 - RNA, 19 nt, Artificial Sequence
  Description of Artificial Sequence: Synthetic oligonucleotide
ucaagcagggguuguagaa

SEQ ID NO: 3088422 - RNA, 19 nt, Artificial Sequence
  Description of Artificial Sequence: Synthetic oligonucleotide
uccccuccuaccauuacug

SEQ ID NO: 3088423 - RNA, 19 nt, Artificial Sequence
  Description of Artificial Sequence: Synthetic oligonucleotide
aacucgugcaggcaggguu

SEQ ID NO: 3088424 - RNA, 19 nt, Artificial Sequence
  Description of Artificial Sequence: Synthetic oligonucleotide
uuucggagugccccaguag

SEQ ID NO: 3088425 - RNA, 19 nt, Artificial Sequence
  Description of Artificial Sequence: Synthetic oligonucleotide
uuaccuuucgccagcccac

SEQ ID NO: 3088426 - RNA, 19 nt, Artificial Sequence
  Description of Artificial Sequence: Synthetic oligonucleotide
aggcuuuggacugagcauc

SEQ ID NO: 3088427 - RNA, 19 nt, Artificial Sequence
  Description of Artificial Sequence: Synthetic oligonucleotide
gacacugcuuaccuuucgc

SEQ ID NO: 3088428 - RNA, 19 nt, Artificial Sequence
  Description of Artificial Sequence: Synthetic oligonucleotide
ucugcguccccuccuacca

SEQ ID NO: 3088429 - RNA, 19 nt, Artificial Sequence
  Description of Artificial Sequence: Synthetic oligonucleotide
caguaucaggacauaggcc

SEQ ID NO: 3088430 - RNA, 19 nt, Artificial Sequence
  Description of Artificial Sequence: Synthetic oligonucleotide
uaguguggauccaguauca

SEQ ID NO: 3088431 - RNA, 19 nt, Artificial Sequence
  Description of Artificial Sequence: Synthetic oligonucleotide
uugagucagguacgucugg

SEQ ID NO: 3088432 - RNA, 19 nt, Artificial Sequence
  Description of Artificial Sequence: Synthetic oligonucleotide
uggacugagcaucugcguc

SEQ ID NO: 3088433 - RNA, 19 nt, Artificial Sequence
  Description of Artificial Sequence: Synthetic oligonucleotide
aucugcguccccuccuacc

SEQ ID NO: 3088434 - RNA, 19 nt, Artificial Sequence
  Description of Artificial Sequence: Synthetic oligonucleotide
guacgucuggucaagcagg

SEQ ID NO: 3088435 - RNA, 19 nt, Artificial Sequence
  Description of Artificial Sequence: Synthetic oligonucleotide
caaggcuuuggacugagca

SEQ ID NO: 3088436 - RNA, 19 nt, Artificial Sequence
  Description of Artificial Sequence: Synthetic oligonucleotide
ccaguaucaggacauaggc

SEQ ID NO: 3088437 - RNA, 19 nt, Artificial Sequence
  Description of Artificial Sequence: Synthetic oligonucleotide
uugacugguagaccaaguu

SEQ ID NO: 3088438 - RNA, 19 nt, Artificial Sequence
  Description of Artificial Sequence: Synthetic oligonucleotide
cauaggccuccguagcugg

SEQ ID NO: 3088439 - RNA, 19 nt, Artificial Sequence
  Description of Artificial Sequence: Synthetic oligonucleotide
uccgugaaguggaaauaga

SEQ ID NO: 3088440 - RNA, 19 nt, Artificial Sequence
  Description of Artificial Sequence: Synthetic oligonucleotide
uucgccagcccacccaccc

SEQ ID NO: 3088441 - RNA, 19 nt, Artificial Sequence
  Description of Artificial Sequence: Synthetic oligonucleotide
cuuaccuuucgccagccca

SEQ ID NO: 3088442 - RNA, 19 nt, Artificial Sequence
  Description of Artificial Sequence: Synthetic oligonucleotide
guagaaggaacuggaauca

SEQ ID NO: 3088443 - RNA, 19 nt, Artificial Sequence
  Description of Artificial Sequence: Synthetic oligonucleotide
agacacugcuuaccuuucg

SEQ ID NO: 3088444 - RNA, 19 nt, Artificial Sequence
  Description of Artificial Sequence: Synthetic oligonucleotide
acugguagaccaaguuggc

SEQ ID NO: 3088445 - RNA, 19 nt, Artificial Sequence
  Description of Artificial Sequence: Synthetic oligonucleotide
ggaacuggaaucaaagaca

SEQ ID NO: 3088446 - RNA, 19 nt, Artificial Sequence
  Description of Artificial Sequence: Synthetic oligonucleotide
ugaacucgugcaggcaggg

SEQ ID NO: 3088447 - RNA, 19 nt, Artificial Sequence
  Description of Artificial Sequence: Synthetic oligonucleotide
acagacucccagcaaggcu

SEQ ID NO: 3088448 - RNA, 19 nt, Artificial Sequence
  Description of Artificial Sequence: Synthetic oligonucleotide
cagggguuguagaaggaac

SEQ ID NO: 3088449 - RNA, 19 nt, Artificial Sequence
  Description of Artificial Sequence: Synthetic oligonucleotide
cuccgugaaguggaaauag

SEQ ID NO: 3088450 - RNA, 19 nt, Artificial Sequence
  Description of Artificial Sequence: Synthetic oligonucleotide
uuuucggagugccccagua

SEQ ID NO: 3088451 - RNA, 19 nt, Artificial Sequence
  Description of Artificial Sequence: Synthetic oligonucleotide
uaucaggacauaggccucc

SEQ ID NO: 3088452 - RNA, 19 nt, Artificial Sequence
  Description of Artificial Sequence: Synthetic oligonucleotide
ccuccuaccauuacugggc

SEQ ID NO: 3088453 - RNA, 19 nt, Artificial Sequence
  Description of Artificial Sequence: Synthetic oligonucleotide
ugcagcucacuacuguuuu

SEQ ID NO: 3088454 - RNA, 19 nt, Artificial Sequence
  Description of Artificial Sequence: Synthetic oligonucleotide
uguguugagucagguacgu

SEQ ID NO: 3088455 - RNA, 19 nt, Artificial Sequence
  Description of Artificial Sequence: Synthetic oligonucleotide
guugagucagguacgucug

SEQ ID NO: 3088456 - RNA, 19 nt, Artificial Sequence
  Description of Artificial Sequence: Synthetic oligonucleotide
ucggagugccccaguagug

SEQ ID NO: 3088457 - RNA, 19 nt, Artificial Sequence
  Description of Artificial Sequence: Synthetic oligonucleotide
uuggacugagcaucugcgu

SEQ ID NO: 3088458 - RNA, 19 nt, Artificial Sequence
  Description of Artificial Sequence: Synthetic oligonucleotide
caagcagggguuguagaag

SEQ ID NO: 3088459 - RNA, 19 nt, Artificial Sequence
  Description of Artificial Sequence: Synthetic oligonucleotide
uccuaccauuacugggccg

SEQ ID NO: 3088460 - RNA, 19 nt, Artificial Sequence
  Description of Artificial Sequence: Synthetic oligonucleotide
auccaguaucaggacauag

SEQ ID NO: 3088461 - RNA, 19 nt, Artificial Sequence
  Description of Artificial Sequence: Synthetic oligonucleotide
aggccuccguagcugggcc

SEQ ID NO: 3088462 - RNA, 19 nt, Artificial Sequence
  Description of Artificial Sequence: Synthetic oligonucleotide
auuacugggccgccgcccu

SEQ ID NO: 3088463 - RNA, 19 nt, Artificial Sequence
  Description of Artificial Sequence: Synthetic oligonucleotide
ccgugaaguggaaauagag

SEQ ID NO: 3088464 - RNA, 19 nt, Artificial Sequence
  Description of Artificial Sequence: Synthetic oligonucleotide
ggacugagcaucugcgucc

SEQ ID NO: 3088465 - RNA, 19 nt, Artificial Sequence
  Description of Artificial Sequence: Synthetic oligonucleotide
caggguuguguugagucag

SEQ ID NO: 3088466 - RNA, 19 nt, Artificial Sequence
  Description of Artificial Sequence: Synthetic oligonucleotide
agguacgucuggucaagca

SEQ ID NO: 3088467 - RNA, 19 nt, Artificial Sequence
  Description of Artificial Sequence: Synthetic oligonucleotide
ggcauugaacucgugcagg

SEQ ID NO: 3088468 - RNA, 19 nt, Artificial Sequence
  Description of Artificial Sequence: Synthetic oligonucleotide
ucuggucaagcagggguug

SEQ ID NO: 3088469 - RNA, 19 nt, Artificial Sequence
  Description of Artificial Sequence: Synthetic oligonucleotide
cuccuaccauuacugggcc

SEQ ID NO: 3088470 - RNA, 19 nt, Artificial Sequence
  Description of Artificial Sequence: Synthetic oligonucleotide
ugagucagguacgucuggu

SEQ ID NO: 3088471 - RNA, 19 nt, Artificial Sequence
  Description of Artificial Sequence: Synthetic oligonucleotide
ggguuguagaaggaacugg

SEQ ID NO: 3088472 - RNA, 19 nt, Artificial Sequence
  Description of Artificial Sequence: Synthetic oligonucleotide
cuuucgccagcccacccac

SEQ ID NO: 3088473 - RNA, 19 nt, Artificial Sequence
  Description of Artificial Sequence: Synthetic oligonucleotide
cacugcuuaccuuucgcca

SEQ ID NO: 3088474 - RNA, 19 nt, Artificial Sequence
  Description of Artificial Sequence: Synthetic oligonucleotide
ugggcccucacagacuccc

SEQ ID NO: 3088475 - RNA, 19 nt, Artificial Sequence
  Description of Artificial Sequence: Synthetic oligonucleotide
acucccagcaaggcuuugg

SEQ ID NO: 3088476 - RNA, 19 nt, Artificial Sequence
  Description of Artificial Sequence: Synthetic oligonucleotide
ggcaggguuguguugaguc

SEQ ID NO: 3088477 - RNA, 19 nt, Artificial Sequence
  Description of Artificial Sequence: Synthetic oligonucleotide
ccacccagcagcuugcagc

SEQ ID NO: 3088478 - RNA, 19 nt, Artificial Sequence
  Description of Artificial Sequence: Synthetic oligonucleotide
agcagcuugcagcucacua

SEQ ID NO: 3088479 - RNA, 19 nt, Artificial Sequence
  Description of Artificial Sequence: Synthetic oligonucleotide
agggguuguagaaggaacu

SEQ ID NO: 3088480 - RNA, 19 nt, Artificial Sequence
  Description of Artificial Sequence: Synthetic oligonucleotide
gcauugaacucgugcaggc

SEQ ID NO: 3088481 - RNA, 19 nt, Artificial Sequence
  Description of Artificial Sequence: Synthetic oligonucleotide
ggacauaggccuccguagc

SEQ ID NO: 3088482 - RNA, 19 nt, Artificial Sequence
  Description of Artificial Sequence: Synthetic oligonucleotide
ugggccgccgcccuccgug

SEQ ID NO: 3088483 - RNA, 19 nt, Artificial Sequence
  Description of Artificial Sequence: Synthetic oligonucleotide
gagucagguacgucugguc

SEQ ID NO: 3088484 - RNA, 19 nt, Artificial Sequence
  Description of Artificial Sequence: Synthetic oligonucleotide
aaguuggcauugaacucgu

SEQ ID NO: 3088485 - RNA, 19 nt, Artificial Sequence
  Description of Artificial Sequence: Synthetic oligonucleotide
acauaggccuccguagcug

SEQ ID NO: 3088486 - RNA, 19 nt, Artificial Sequence
  Description of Artificial Sequence: Synthetic oligonucleotide
cugcuuaccuuucgccagc

SEQ ID NO: 3088487 - RNA, 19 nt, Artificial Sequence
  Description of Artificial Sequence: Synthetic oligonucleotide
aguguggauccaguaucag

SEQ ID NO: 3088488 - RNA, 19 nt, Artificial Sequence
  Description of Artificial Sequence: Synthetic oligonucleotide
uaccauuacugggccgccg

SEQ ID NO: 3088489 - RNA, 19 nt, Artificial Sequence
  Description of Artificial Sequence: Synthetic oligonucleotide
ugagcaucugcguccccuc

SEQ ID NO: 3088490 - RNA, 19 nt, Artificial Sequence
  Description of Artificial Sequence: Synthetic oligonucleotide
cauuacugggccgccgccc

SEQ ID NO: 3088491 - RNA, 19 nt, Artificial Sequence
  Description of Artificial Sequence: Synthetic oligonucleotide
ccuaccauuacugggccgc

SEQ ID NO: 3088492 - RNA, 19 nt, Artificial Sequence
  Description of Artificial Sequence: Synthetic oligonucleotide
gcagcuugcagcucacuac

SEQ ID NO: 3088493 - RNA, 19 nt, Artificial Sequence
  Description of Artificial Sequence: Synthetic oligonucleotide
gacugagcaucugcguccc

SEQ ID NO: 3088494 - RNA, 19 nt, Artificial Sequence
  Description of Artificial Sequence: Synthetic oligonucleotide
ugcaggcaggguuguguug

SEQ ID NO: 3088495 - RNA, 19 nt, Artificial Sequence
  Description of Artificial Sequence: Synthetic oligonucleotide
ugccccaguaguguggauc

SEQ ID NO: 3088496 - RNA, 19 nt, Artificial Sequence
  Description of Artificial Sequence: Synthetic oligonucleotide
agaccaaguuggcauugaa

SEQ ID NO: 3088497 - RNA, 19 nt, Artificial Sequence
  Description of Artificial Sequence: Synthetic oligonucleotide
cccuccuaccauuacuggg

SEQ ID NO: 3088498 - RNA, 19 nt, Artificial Sequence
  Description of Artificial Sequence: Synthetic oligonucleotide
ucccagcaaggcuuuggac

SEQ ID NO: 3088499 - RNA, 19 nt, Artificial Sequence
  Description of Artificial Sequence: Synthetic oligonucleotide
aucaggacauaggccuccg

SEQ ID NO: 3088500 - RNA, 19 nt, Artificial Sequence
  Description of Artificial Sequence: Synthetic oligonucleotide
gucaagcagggguuguaga

SEQ ID NO: 3088501 - RNA, 19 nt, Artificial Sequence
  Description of Artificial Sequence: Synthetic oligonucleotide
gccccaguaguguggaucc

SEQ ID NO: 3088502 - RNA, 19 nt, Artificial Sequence
  Description of Artificial Sequence: Synthetic oligonucleotide
acugagcaucugcgucccc

SEQ ID NO: 3088503 - RNA, 19 nt, Artificial Sequence
  Description of Artificial Sequence: Synthetic oligonucleotide
cacagacucccagcaaggc

SEQ ID NO: 3088504 - RNA, 19 nt, Artificial Sequence
  Description of Artificial Sequence: Synthetic oligonucleotide
agcaaggcuuuggacugag

SEQ ID NO: 3088505 - RNA, 19 nt, Artificial Sequence
  Description of Artificial Sequence: Synthetic oligonucleotide
gacauaggccuccguagcu

SEQ ID NO: 3088506 - RNA, 19 nt, Artificial Sequence
  Description of Artificial Sequence: Synthetic oligonucleotide
uaggccuccguagcugggc

SEQ ID NO: 3088507 - RNA, 19 nt, Artificial Sequence
  Description of Artificial Sequence: Synthetic oligonucleotide
ucaggacauaggccuccgu

SEQ ID NO: 3088508 - RNA, 19 nt, Artificial Sequence
  Description of Artificial Sequence: Synthetic oligonucleotide
uuucgccagcccacccacc

SEQ ID NO: 3088509 - RNA, 19 nt, Artificial Sequence
  Description of Artificial Sequence: Synthetic oligonucleotide
gucagguacgucuggucaa

SEQ ID NO: 3088510 - RNA, 19 nt, Artificial Sequence
  Description of Artificial Sequence: Synthetic oligonucleotide
guuguagaaggaacuggaa

SEQ ID NO: 3088511 - RNA, 19 nt, Artificial Sequence
  Description of Artificial Sequence: Synthetic oligonucleotide
cguagcugggcccucacag

SEQ ID NO: 3088512 - RNA, 19 nt, Artificial Sequence
  Description of Artificial Sequence: Synthetic oligonucleotide
ugcuuaccuuucgccagcc

SEQ ID NO: 3088513 - RNA, 19 nt, Artificial Sequence
  Description of Artificial Sequence: Synthetic oligonucleotide
guagcugggcccucacaga

SEQ ID NO: 3088514 - RNA, 19 nt, Artificial Sequence
  Description of Artificial Sequence: Synthetic oligonucleotide
aggguuguguugagucagg

SEQ ID NO: 3088515 - RNA, 19 nt, Artificial Sequence
  Description of Artificial Sequence: Synthetic oligonucleotide
uaccuuucgccagcccacc

SEQ ID NO: 3088516 - RNA, 19 nt, Artificial Sequence
  Description of Artificial Sequence: Synthetic oligonucleotide
cacccacccagcagcuugc

SEQ ID NO: 3088517 - RNA, 19 nt, Artificial Sequence
  Description of Artificial Sequence: Synthetic oligonucleotide
caggacauaggccuccgua

SEQ ID NO: 3088518 - RNA, 19 nt, Artificial Sequence
  Description of Artificial Sequence: Synthetic oligonucleotide
gggguuguagaaggaacug

SEQ ID NO: 3088519 - RNA, 19 nt, Artificial Sequence
  Description of Artificial Sequence: Synthetic oligonucleotide
ggagugccccaguagugug

SEQ ID NO: 3088520 - RNA, 19 nt, Artificial Sequence
  Description of Artificial Sequence: Synthetic oligonucleotide
cuaccauuacugggccgcc

SEQ ID NO: 3088521 - RNA, 19 nt, Artificial Sequence
  Description of Artificial Sequence: Synthetic oligonucleotide
guaucaggacauaggccuc

SEQ ID NO: 3088522 - RNA, 19 nt, Artificial Sequence
  Description of Artificial Sequence: Synthetic oligonucleotide
uacugggccgccgcccucc

SEQ ID NO: 3088523 - RNA, 19 nt, Artificial Sequence
  Description of Artificial Sequence: Synthetic oligonucleotide
cagacucccagcaaggcuu

SEQ ID NO: 3088524 - RNA, 19 nt, Artificial Sequence
  Description of Artificial Sequence: Synthetic oligonucleotide
uccguagcugggcccucac

SEQ ID NO: 3088525 - RNA, 19 nt, Artificial Sequence
  Description of Artificial Sequence: Synthetic oligonucleotide
auaggccuccguagcuggg

SEQ ID NO: 3088526 - RNA, 19 nt, Artificial Sequence
  Description of Artificial Sequence: Synthetic oligonucleotide
cucccagcaaggcuuugga

SEQ ID NO: 3088527 - RNA, 19 nt, Artificial Sequence
  Description of Artificial Sequence: Synthetic oligonucleotide
cuugacugguagaccaagu

SEQ ID NO: 3088528 - RNA, 19 nt, Artificial Sequence
  Description of Artificial Sequence: Synthetic oligonucleotide
cauugaacucgugcaggca

SEQ ID NO: 3088529 - RNA, 19 nt, Artificial Sequence
  Description of Artificial Sequence: Synthetic oligonucleotide
gcugggcccucacagacuc

SEQ ID NO: 3088530 - RNA, 19 nt, Artificial Sequence
  Description of Artificial Sequence: Synthetic oligonucleotide
cugguagaccaaguuggca

SEQ ID NO: 3088531 - RNA, 19 nt, Artificial Sequence
  Description of Artificial Sequence: Synthetic oligonucleotide
ggcccucacagacucccag

SEQ ID NO: 3088532 - RNA, 19 nt, Artificial Sequence
  Description of Artificial Sequence: Synthetic oligonucleotide
ugcguccccuccuaccauu

SEQ ID NO: 3088533 - RNA, 19 nt, Artificial Sequence
  Description of Artificial Sequence: Synthetic oligonucleotide
acgucuggucaagcagggg

SEQ ID NO: 3088534 - RNA, 19 nt, Artificial Sequence
  Description of Artificial Sequence: Synthetic oligonucleotide
ucgccagcccacccaccca

SEQ ID NO: 3088535 - RNA, 19 nt, Artificial Sequence
  Description of Artificial Sequence: Synthetic oligonucleotide
caggcaggguuguguugag

SEQ ID NO: 3088536 - RNA, 19 nt, Artificial Sequence
  Description of Artificial Sequence: Synthetic oligonucleotide
gcaggguuguguugaguca

SEQ ID NO: 3088537 - RNA, 19 nt, Artificial Sequence
  Description of Artificial Sequence: Synthetic oligonucleotide
caguaguguggauccagua

SEQ ID NO: 3088538 - RNA, 19 nt, Artificial Sequence
  Description of Artificial Sequence: Synthetic oligonucleotide
cagcuugcagcucacuacu

SEQ ID NO: 3088539 - RNA, 19 nt, Artificial Sequence
  Description of Artificial Sequence: Synthetic oligonucleotide
cuugcagcucacuacuguu

SEQ ID NO: 3088540 - RNA, 19 nt, Artificial Sequence
  Description of Artificial Sequence: Synthetic oligonucleotide
gcaggcaggguuguguuga

SEQ ID NO: 3088541 - RNA, 19 nt, Artificial Sequence
  Description of Artificial Sequence: Synthetic oligonucleotide
uggucaagcagggguugua

SEQ ID NO: 3088542 - RNA, 19 nt, Artificial Sequence
  Description of Artificial Sequence: Synthetic oligonucleotide
ccacccacccagcagcuug

SEQ ID NO: 3088543 - RNA, 19 nt, Artificial Sequence
  Description of Artificial Sequence: Synthetic oligonucleotide
gguuguguugagucaggua

SEQ ID NO: 3088544 - RNA, 19 nt, Artificial Sequence
  Description of Artificial Sequence: Synthetic oligonucleotide
caucugcguccccuccuac

SEQ ID NO: 3088545 - RNA, 19 nt, Artificial Sequence
  Description of Artificial Sequence: Synthetic oligonucleotide
cagguacgucuggucaagc

SEQ ID NO: 3088546 - RNA, 19 nt, Artificial Sequence
  Description of Artificial Sequence: Synthetic oligonucleotide
agcuugcagcucacuacug

SEQ ID NO: 3088547 - RNA, 19 nt, Artificial Sequence
  Description of Artificial Sequence: Synthetic oligonucleotide
acugggccgccgcccuccg

SEQ ID NO: 3088548 - RNA, 19 nt, Artificial Sequence
  Description of Artificial Sequence: Synthetic oligonucleotide
ggauccaguaucaggacau

SEQ ID NO: 3088549 - RNA, 19 nt, Artificial Sequence
  Description of Artificial Sequence: Synthetic oligonucleotide
cacccagcagcuugcagcu

SEQ ID NO: 3088550 - RNA, 19 nt, Artificial Sequence
  Description of Artificial Sequence: Synthetic oligonucleotide
uuacugggccgccgcccuc

SEQ ID NO: 3088551 - RNA, 19 nt, Artificial Sequence
  Description of Artificial Sequence: Synthetic oligonucleotide
gauccaguaucaggacaua

SEQ ID NO: 3088552 - RNA, 19 nt, Artificial Sequence
  Description of Artificial Sequence: Synthetic oligonucleotide
agcagggguuguagaagga

SEQ ID NO: 3088553 - RNA, 19 nt, Artificial Sequence
  Description of Artificial Sequence: Synthetic oligonucleotide
guccccuccuaccauuacu

SEQ ID NO: 3088554 - RNA, 19 nt, Artificial Sequence
  Description of Artificial Sequence: Synthetic oligonucleotide
ccccuccuaccauuacugg

SEQ ID NO: 3088555 - RNA, 19 nt, Artificial Sequence
  Description of Artificial Sequence: Synthetic oligonucleotide
cccaguaguguggauccag

SEQ ID NO: 3088556 - RNA, 19 nt, Artificial Sequence
  Description of Artificial Sequence: Synthetic oligonucleotide
cugggcccucacagacucc

SEQ ID NO: 3088557 - RNA, 19 nt, Artificial Sequence
  Description of Artificial Sequence: Synthetic oligonucleotide
cgugaaguggaaauagagu

SEQ ID NO: 3088558 - RNA, 19 nt, Artificial Sequence
  Description of Artificial Sequence: Synthetic oligonucleotide
gccgcccuccgugaagugg

SEQ ID NO: 3088559 - RNA, 19 nt, Artificial Sequence
  Description of Artificial Sequence: Synthetic oligonucleotide
gcuuaccuuucgccagccc

SEQ ID NO: 3088560 - RNA, 19 nt, Artificial Sequence
  Description of Artificial Sequence: Synthetic oligonucleotide
gcuugcagcucacuacugu

SEQ ID NO: 3088561 - RNA, 19 nt, Artificial Sequence
  Description of Artificial Sequence: Synthetic oligonucleotide
ccauuacugggccgccgcc

SEQ ID NO: 3088562 - RNA, 19 nt, Artificial Sequence
  Description of Artificial Sequence: Synthetic oligonucleotide
caaagacacugcuuaccuu

SEQ ID NO: 3088563 - RNA, 19 nt, Artificial Sequence
  Description of Artificial Sequence: Synthetic oligonucleotide
guguugagucagguacguc

SEQ ID NO: 3088564 - RNA, 19 nt, Artificial Sequence
  Description of Artificial Sequence: Synthetic oligonucleotide
ggaaucaaagacacugcuu

SEQ ID NO: 3088565 - RNA, 19 nt, Artificial Sequence
  Description of Artificial Sequence: Synthetic oligonucleotide
aguuggcauugaacucgug

SEQ ID NO: 3088566 - RNA, 19 nt, Artificial Sequence
  Description of Artificial Sequence: Synthetic oligonucleotide
cccagcagcuugcagcuca

SEQ ID NO: 3088567 - RNA, 19 nt, Artificial Sequence
  Description of Artificial Sequence: Synthetic oligonucleotide
gacucccagcaaggcuuug

SEQ ID NO: 3088568 - RNA, 19 nt, Artificial Sequence
  Description of Artificial Sequence: Synthetic oligonucleotide
cccucacagacucccagca

SEQ ID NO: 3088569 - RNA, 19 nt, Artificial Sequence
  Description of Artificial Sequence: Synthetic oligonucleotide
aggcaggguuguguugagu

SEQ ID NO: 3088570 - RNA, 19 nt, Artificial Sequence
  Description of Artificial Sequence: Synthetic oligonucleotide
ucgugcaggcaggguugug

SEQ ID NO: 3088571 - RNA, 19 nt, Artificial Sequence
  Description of Artificial Sequence: Synthetic oligonucleotide
agcugggcccucacagacu

SEQ ID NO: 3088572 - RNA, 19 nt, Artificial Sequence
  Description of Artificial Sequence: Synthetic oligonucleotide
gcagggguuguagaaggaa

SEQ ID NO: 3088573 - RNA, 19 nt, Artificial Sequence
  Description of Artificial Sequence: Synthetic oligonucleotide
ggccuccguagcugggccc

SEQ ID NO: 3088574 - RNA, 19 nt, Artificial Sequence
  Description of Artificial Sequence: Synthetic oligonucleotide
acccagcagcuugcagcuc

SEQ ID NO: 3088575 - RNA, 19 nt, Artificial Sequence
  Description of Artificial Sequence: Synthetic oligonucleotide
ccuuucgccagcccaccca

SEQ ID NO: 3088576 - RNA, 19 nt, Artificial Sequence
  Description of Artificial Sequence: Synthetic oligonucleotide
gcuuuggacugagcaucug

SEQ ID NO: 3088577 - RNA, 19 nt, Artificial Sequence
  Description of Artificial Sequence: Synthetic oligonucleotide
ccagcagcuugcagcucac

SEQ ID NO: 3088578 - RNA, 19 nt, Artificial Sequence
  Description of Artificial Sequence: Synthetic oligonucleotide
agacucccagcaaggcuuu

SEQ ID NO: 3088579 - RNA, 19 nt, Artificial Sequence
  Description of Artificial Sequence: Synthetic oligonucleotide
gucuggucaagcagggguu

SEQ ID NO: 3088580 - RNA, 19 nt, Artificial Sequence
  Description of Artificial Sequence: Synthetic oligonucleotide
gugcaggcaggguuguguu

SEQ ID NO: 3088581 - RNA, 19 nt, Artificial Sequence
  Description of Artificial Sequence: Synthetic oligonucleotide
gaacucgugcaggcagggu

SEQ ID NO: 3088582 - RNA, 19 nt, Artificial Sequence
  Description of Artificial Sequence: Synthetic oligonucleotide
cgucuggucaagcaggggu

SEQ ID NO: 3088583 - RNA, 19 nt, Artificial Sequence
  Description of Artificial Sequence: Synthetic oligonucleotide
ccgcccuccgugaagugga

SEQ ID NO: 3088584 - RNA, 19 nt, Artificial Sequence
  Description of Artificial Sequence: Synthetic oligonucleotide
gccgccgcccuccgugaag

SEQ ID NO: 3088585 - RNA, 19 nt, Artificial Sequence
  Description of Artificial Sequence: Synthetic oligonucleotide
gcaucugcguccccuccua

SEQ ID NO: 3088586 - RNA, 19 nt, Artificial Sequence
  Description of Artificial Sequence: Synthetic oligonucleotide
gcaaggcuuuggacugagc

SEQ ID NO: 3088587 - RNA, 19 nt, Artificial Sequence
  Description of Artificial Sequence: Synthetic oligonucleotide
cccacccagcagcuugcag

SEQ ID NO: 3088588 - RNA, 19 nt, Artificial Sequence
  Description of Artificial Sequence: Synthetic oligonucleotide
acccacccagcagcuugca

SEQ ID NO: 3088589 - RNA, 19 nt, Artificial Sequence
  Description of Artificial Sequence: Synthetic oligonucleotide
ccaguaguguggauccagu

SEQ ID NO: 3088590 - RNA, 19 nt, Artificial Sequence
  Description of Artificial Sequence: Synthetic oligonucleotide
cagcaaggcuuuggacuga

SEQ ID NO: 3088591 - RNA, 19 nt, Artificial Sequence
  Description of Artificial Sequence: Synthetic oligonucleotide
cccuccgugaaguggaaau

SEQ ID NO: 3088592 - RNA, 19 nt, Artificial Sequence
  Description of Artificial Sequence: Synthetic oligonucleotide
cuccguagcugggcccuca

SEQ ID NO: 3088593 - RNA, 19 nt, Artificial Sequence
  Description of Artificial Sequence: Synthetic oligonucleotide
ggcuuuggacugagcaucu

SEQ ID NO: 3088594 - RNA, 19 nt, Artificial Sequence
  Description of Artificial Sequence: Synthetic oligonucleotide
ggguuguguugagucaggu

SEQ ID NO: 3088595 - RNA, 19 nt, Artificial Sequence
  Description of Artificial Sequence: Synthetic oligonucleotide
cuggucaagcagggguugu

SEQ ID NO: 3088596 - RNA, 19 nt, Artificial Sequence
  Description of Artificial Sequence: Synthetic oligonucleotide
ccucacagacucccagcaa

SEQ ID NO: 3088597 - RNA, 19 nt, Artificial Sequence
  Description of Artificial Sequence: Synthetic oligonucleotide
ccagcccacccacccagca

SEQ ID NO: 3088598 - RNA, 19 nt, Artificial Sequence
  Description of Artificial Sequence: Synthetic oligonucleotide
ccuccgugaaguggaaaua

SEQ ID NO: 3088599 - RNA, 19 nt, Artificial Sequence
  Description of Artificial Sequence: Synthetic oligonucleotide
cucgugcaggcaggguugu

SEQ ID NO: 3088600 - RNA, 19 nt, Artificial Sequence
  Description of Artificial Sequence: Synthetic oligonucleotide
cguccccuccuaccauuac

SEQ ID NO: 3088601 - RNA, 19 nt, Artificial Sequence
  Description of Artificial Sequence: Synthetic oligonucleotide
gccagcccacccacccagc

SEQ ID NO: 3088602 - RNA, 19 nt, Artificial Sequence
  Description of Artificial Sequence: Synthetic oligonucleotide
gccuccguagcugggcccu

SEQ ID NO: 3088603 - RNA, 19 nt, Artificial Sequence
  Description of Artificial Sequence: Synthetic oligonucleotide
cugcguccccuccuaccau

SEQ ID NO: 3088604 - RNA, 19 nt, Artificial Sequence
  Description of Artificial Sequence: Synthetic oligonucleotide
ccguagcugggcccucaca

SEQ ID NO: 3088605 - RNA, 19 nt, Artificial Sequence
  Description of Artificial Sequence: Synthetic oligonucleotide
gggccgccgcccuccguga

SEQ ID NO: 3088606 - RNA, 19 nt, Artificial Sequence
  Description of Artificial Sequence: Synthetic oligonucleotide
cgugcaggcaggguugugu

SEQ ID NO: 3088607 - RNA, 19 nt, Artificial Sequence
  Description of Artificial Sequence: Synthetic oligonucleotide
gcguccccuccuaccauua

SEQ ID NO: 3088608 - RNA, 19 nt, Artificial Sequence
  Description of Artificial Sequence: Synthetic oligonucleotide
cagcagcuugcagcucacu

SEQ ID NO: 3088609 - RNA, 19 nt, Artificial Sequence
  Description of Artificial Sequence: Synthetic oligonucleotide
gugccccaguaguguggau

SEQ ID NO: 3088610 - RNA, 19 nt, Artificial Sequence
  Description of Artificial Sequence: Synthetic oligonucleotide
cggagugccccaguagugu

SEQ ID NO: 3088611 - RNA, 19 nt, Artificial Sequence
  Description of Artificial Sequence: Synthetic oligonucleotide
ggccgccgcccuccgugaa

SEQ ID NO: 3088612 - RNA, 19 nt, Artificial Sequence
  Description of Artificial Sequence: Synthetic oligonucleotide
ccuccguagcugggcccuc

SEQ ID NO: 3088613 - RNA, 19 nt, Artificial Sequence
  Description of Artificial Sequence: Synthetic oligonucleotide
cgccgcccuccgugaagug

SEQ ID NO: 3088614 - RNA, 19 nt, Artificial Sequence
  Description of Artificial Sequence: Synthetic oligonucleotide
cugggccgccgcccuccgu

SEQ ID NO: 3088615 - RNA, 19 nt, Artificial Sequence
  Description of Artificial Sequence: Synthetic oligonucleotide
ccgccgcccuccgugaagu

SEQ ID NO: 3088616 - RNA, 19 nt, Artificial Sequence
  Description of Artificial Sequence: Synthetic oligonucleotide
cgcccuccgugaaguggaa

SEQ ID NO: 3088617 - RNA, 19 nt, Artificial Sequence
  Description of Artificial Sequence: Synthetic oligonucleotide
cccacccacccagcagcuu

SEQ ID NO: 3088618 - RNA, 19 nt, Artificial Sequence
  Description of Artificial Sequence: Synthetic oligonucleotide
uuaacuacaauaaauauca

SEQ ID NO: 3088619 - RNA, 19 nt, Artificial Sequence
  Description of Artificial Sequence: Synthetic oligonucleotide
uacaauaaauaucacaggg

SEQ ID NO: 3088620 - RNA, 19 nt, Artificial Sequence
  Description of Artificial Sequence: Synthetic oligonucleotide
aaucaaugcacacaagugg

SEQ ID NO: 3088621 - RNA, 19 nt, Artificial Sequence
  Description of Artificial Sequence: Synthetic oligonucleotide
gauauuuacacauaacuac

SEQ ID NO: 3088622 - RNA, 19 nt, Artificial Sequence
  Description of Artificial Sequence: Synthetic oligonucleotide
acacauaacuacuaggacc

SEQ ID NO: 3088623 - RNA, 19 nt, Artificial Sequence
  Description of Artificial Sequence: Synthetic oligonucleotide
aaaaucaaugcacacaagu

SEQ ID NO: 3088624 - RNA, 19 nt, Artificial Sequence
  Description of Artificial Sequence: Synthetic oligonucleotide
agaagucuaaaaucaaugc

SEQ ID NO: 3088625 - RNA, 19 nt, Artificial Sequence
  Description of Artificial Sequence: Synthetic oligonucleotide
aagucuaaaaucaaugcac

SEQ ID NO: 3088626 - RNA, 19 nt, Artificial Sequence
  Description of Artificial Sequence: Synthetic oligonucleotide
uuucuuuucuuccacacag

SEQ ID NO: 3088627 - RNA, 19 nt, Artificial Sequence
  Description of Artificial Sequence: Synthetic oligonucleotide
uuuaacuacaauaaauauc

SEQ ID NO: 3088628 - RNA, 19 nt, Artificial Sequence
  Description of Artificial Sequence: Synthetic oligonucleotide
caauaaauaucacagggcc

SEQ ID NO: 3088629 - RNA, 19 nt, Artificial Sequence
  Description of Artificial Sequence: Synthetic oligonucleotide
uuuacacauaacuacuagg

SEQ ID NO: 3088630 - RNA, 19 nt, Artificial Sequence
  Description of Artificial Sequence: Synthetic oligonucleotide
uuacacauaacuacuagga

SEQ ID NO: 3088631 - RNA, 19 nt, Artificial Sequence
  Description of Artificial Sequence: Synthetic oligonucleotide
aacuacaauaaauaucaca

SEQ ID NO: 3088632 - RNA, 19 nt, Artificial Sequence
  Description of Artificial Sequence: Synthetic oligonucleotide
aguggagaagucuaaaauc

SEQ ID NO: 3088633 - RNA, 19 nt, Artificial Sequence
  Description of Artificial Sequence: Synthetic oligonucleotide
aaauccguugccuuuaacu

SEQ ID NO: 3088634 - RNA, 19 nt, Artificial Sequence
  Description of Artificial Sequence: Synthetic oligonucleotide
uguacagauauuuacacau

SEQ ID NO: 3088635 - RNA, 19 nt, Artificial Sequence
  Description of Artificial Sequence: Synthetic oligonucleotide
cacauaacuacuaggaccc

SEQ ID NO: 3088636 - RNA, 19 nt, Artificial Sequence
  Description of Artificial Sequence: Synthetic oligonucleotide
aauuucacagagucuccac

SEQ ID NO: 3088637 - RNA, 19 nt, Artificial Sequence
  Description of Artificial Sequence: Synthetic oligonucleotide
aauaucacagggccugggg

SEQ ID NO: 3088638 - RNA, 19 nt, Artificial Sequence
  Description of Artificial Sequence: Synthetic oligonucleotide
acaauaaauaucacagggc

SEQ ID NO: 3088639 - RNA, 19 nt, Artificial Sequence
  Description of Artificial Sequence: Synthetic oligonucleotide
auggcugagccuuuggacc

SEQ ID NO: 3088640 - RNA, 19 nt, Artificial Sequence
  Description of Artificial Sequence: Synthetic oligonucleotide
ucuaaaaucaaugcacaca

SEQ ID NO: 3088641 - RNA, 19 nt, Artificial Sequence
  Description of Artificial Sequence: Synthetic oligonucleotide
auuuacacauaacuacuag

SEQ ID NO: 3088642 - RNA, 19 nt, Artificial Sequence
  Description of Artificial Sequence: Synthetic oligonucleotide
auaaauaucacagggccug

SEQ ID NO: 3088643 - RNA, 19 nt, Artificial Sequence
  Description of Artificial Sequence: Synthetic oligonucleotide
aaaucaaugcacacaagug

SEQ ID NO: 3088644 - RNA, 19 nt, Artificial Sequence
  Description of Artificial Sequence: Synthetic oligonucleotide
gacaauuucacagagucuc

SEQ ID NO: 3088645 - RNA, 19 nt, Artificial Sequence
  Description of Artificial Sequence: Synthetic oligonucleotide
uugccuuuaacuacaauaa

SEQ ID NO: 3088646 - RNA, 19 nt, Artificial Sequence
  Description of Artificial Sequence: Synthetic oligonucleotide
gaagucuaaaaucaaugca

SEQ ID NO: 3088647 - RNA, 19 nt, Artificial Sequence
  Description of Artificial Sequence: Synthetic oligonucleotide
auaucacagggccuggggc

SEQ ID NO: 3088648 - RNA, 19 nt, Artificial Sequence
  Description of Artificial Sequence: Synthetic oligonucleotide
cagacaauuucacagaguc

SEQ ID NO: 3088649 - RNA, 19 nt, Artificial Sequence
  Description of Artificial Sequence: Synthetic oligonucleotide
aaguggagaagucuaaaau

SEQ ID NO: 3088650 - RNA, 19 nt, Artificial Sequence
  Description of Artificial Sequence: Synthetic oligonucleotide
cuacaauaaauaucacagg

SEQ ID NO: 3088651 - RNA, 19 nt, Artificial Sequence
  Description of Artificial Sequence: Synthetic oligonucleotide
uacagauauuuacacauaa

SEQ ID NO: 3088652 - RNA, 19 nt, Artificial Sequence
  Description of Artificial Sequence: Synthetic oligonucleotide
gagaagucuaaaaucaaug

SEQ ID NO: 3088653 - RNA, 19 nt, Artificial Sequence
  Description of Artificial Sequence: Synthetic oligonucleotide
aauccguugccuuuaacua

SEQ ID NO: 3088654 - RNA, 19 nt, Artificial Sequence
  Description of Artificial Sequence: Synthetic oligonucleotide
uccacacagaccaucagac

SEQ ID NO: 3088655 - RNA, 19 nt, Artificial Sequence
  Description of Artificial Sequence: Synthetic oligonucleotide
cuaaaaucaaugcacacaa

SEQ ID NO: 3088656 - RNA, 19 nt, Artificial Sequence
  Description of Artificial Sequence: Synthetic oligonucleotide
aucagacaauuucacagag

SEQ ID NO: 3088657 - RNA, 19 nt, Artificial Sequence
  Description of Artificial Sequence: Synthetic oligonucleotide
agcucugugccccuugccc

SEQ ID NO: 3088658 - RNA, 19 nt, Artificial Sequence
  Description of Artificial Sequence: Synthetic oligonucleotide
guugccuuuaacuacaaua

SEQ ID NO: 3088659 - RNA, 19 nt, Artificial Sequence
  Description of Artificial Sequence: Synthetic oligonucleotide
uacacauaacuacuaggac

SEQ ID NO: 3088660 - RNA, 19 nt, Artificial Sequence
  Description of Artificial Sequence: Synthetic oligonucleotide
cacaaguggacagagaaug

SEQ ID NO: 3088661 - RNA, 19 nt, Artificial Sequence
  Description of Artificial Sequence: Synthetic oligonucleotide
cagaccaucagacaauuuc

SEQ ID NO: 3088662 - RNA, 19 nt, Artificial Sequence
  Description of Artificial Sequence: Synthetic oligonucleotide
aauaaauaucacagggccu

SEQ ID NO: 3088663 - RNA, 19 nt, Artificial Sequence
  Description of Artificial Sequence: Synthetic oligonucleotide
cagagucuccacuaagugg

SEQ ID NO: 3088664 - RNA, 19 nt, Artificial Sequence
  Description of Artificial Sequence: Synthetic oligonucleotide
auccguugccuuuaacuac

SEQ ID NO: 3088665 - RNA, 19 nt, Artificial Sequence
  Description of Artificial Sequence: Synthetic oligonucleotide
uaaaaucaaugcacacaag

SEQ ID NO: 3088666 - RNA, 19 nt, Artificial Sequence
  Description of Artificial Sequence: Synthetic oligonucleotide
uauuuacacauaacuacua

SEQ ID NO: 3088667 - RNA, 19 nt, Artificial Sequence
  Description of Artificial Sequence: Synthetic oligonucleotide
auauuuacacauaacuacu

SEQ ID NO: 3088668 - RNA, 19 nt, Artificial Sequence
  Description of Artificial Sequence: Synthetic oligonucleotide
ucuuccacacagaccauca

SEQ ID NO: 3088669 - RNA, 19 nt, Artificial Sequence
  Description of Artificial Sequence: Synthetic oligonucleotide
ccaucagacaauuucacag

SEQ ID NO: 3088670 - RNA, 19 nt, Artificial Sequence
  Description of Artificial Sequence: Synthetic oligonucleotide
agagaaugcaggggcagcc

SEQ ID NO: 3088671 - RNA, 19 nt, Artificial Sequence
  Description of Artificial Sequence: Synthetic oligonucleotide
uuccacacagaccaucaga

SEQ ID NO: 3088672 - RNA, 19 nt, Artificial Sequence
  Description of Artificial Sequence: Synthetic oligonucleotide
agagucuccacuaagugga

SEQ ID NO: 3088673 - RNA, 19 nt, Artificial Sequence
  Description of Artificial Sequence: Synthetic oligonucleotide
uaaguggagaagucuaaaa

SEQ ID NO: 3088674 - RNA, 19 nt, Artificial Sequence
  Description of Artificial Sequence: Synthetic oligonucleotide
gauggcugagccuuuggac

SEQ ID NO: 3088675 - RNA, 19 nt, Artificial Sequence
  Description of Artificial Sequence: Synthetic oligonucleotide
acagagucuccacuaagug

SEQ ID NO: 3088676 - RNA, 19 nt, Artificial Sequence
  Description of Artificial Sequence: Synthetic oligonucleotide
uccguugccuuuaacuaca

SEQ ID NO: 3088677 - RNA, 19 nt, Artificial Sequence
  Description of Artificial Sequence: Synthetic oligonucleotide
guggacagagaaugcaggg

SEQ ID NO: 3088678 - RNA, 19 nt, Artificial Sequence
  Description of Artificial Sequence: Synthetic oligonucleotide
ucuucucccaccccaaauc

SEQ ID NO: 3088679 - RNA, 19 nt, Artificial Sequence
  Description of Artificial Sequence: Synthetic oligonucleotide
agacccucuucucccaccc

SEQ ID NO: 3088680 - RNA, 19 nt, Artificial Sequence
  Description of Artificial Sequence: Synthetic oligonucleotide
aaguggacagagaaugcag

SEQ ID NO: 3088681 - RNA, 19 nt, Artificial Sequence
  Description of Artificial Sequence: Synthetic oligonucleotide
ugagccuuuggaccacggg

SEQ ID NO: 3088682 - RNA, 19 nt, Artificial Sequence
  Description of Artificial Sequence: Synthetic oligonucleotide
ucacagagucuccacuaag

SEQ ID NO: 3088683 - RNA, 19 nt, Artificial Sequence
  Description of Artificial Sequence: Synthetic oligonucleotide
aaauaucacagggccuggg

SEQ ID NO: 3088684 - RNA, 19 nt, Artificial Sequence
  Description of Artificial Sequence: Synthetic oligonucleotide
auucccaccucgccagacc

SEQ ID NO: 3088685 - RNA, 19 nt, Artificial Sequence
  Description of Artificial Sequence: Synthetic oligonucleotide
uucucccaccccaaauccg

SEQ ID NO: 3088686 - RNA, 19 nt, Artificial Sequence
  Description of Artificial Sequence: Synthetic oligonucleotide
agauauuuacacauaacua

SEQ ID NO: 3088687 - RNA, 19 nt, Artificial Sequence
  Description of Artificial Sequence: Synthetic oligonucleotide
guggagaagucuaaaauca

SEQ ID NO: 3088688 - RNA, 19 nt, Artificial Sequence
  Description of Artificial Sequence: Synthetic oligonucleotide
acaauuucacagagucucc

SEQ ID NO: 3088689 - RNA, 19 nt, Artificial Sequence
  Description of Artificial Sequence: Synthetic oligonucleotide
uuucacagagucuccacua

SEQ ID NO: 3088690 - RNA, 19 nt, Artificial Sequence
  Description of Artificial Sequence: Synthetic oligonucleotide
ucagacaauuucacagagu

SEQ ID NO: 3088691 - RNA, 19 nt, Artificial Sequence
  Description of Artificial Sequence: Synthetic oligonucleotide
ucaaugcacacaaguggac

SEQ ID NO: 3088692 - RNA, 19 nt, Artificial Sequence
  Description of Artificial Sequence: Synthetic oligonucleotide
aguggacagagaaugcagg

SEQ ID NO: 3088693 - RNA, 19 nt, Artificial Sequence
  Description of Artificial Sequence: Synthetic oligonucleotide
cuucucccaccccaaaucc

SEQ ID NO: 3088694 - RNA, 19 nt, Artificial Sequence
  Description of Artificial Sequence: Synthetic oligonucleotide
acaaguggacagagaaugc

SEQ ID NO: 3088695 - RNA, 19 nt, Artificial Sequence
  Description of Artificial Sequence: Synthetic oligonucleotide
uaaauaucacagggccugg

SEQ ID NO: 3088696 - RNA, 19 nt, Artificial Sequence
  Description of Artificial Sequence: Synthetic oligonucleotide
aucaaugcacacaagugga

SEQ ID NO: 3088697 - RNA, 19 nt, Artificial Sequence
  Description of Artificial Sequence: Synthetic oligonucleotide
aauucccaccucgccagac

SEQ ID NO: 3088698 - RNA, 19 nt, Artificial Sequence
  Description of Artificial Sequence: Synthetic oligonucleotide
agucuaaaaucaaugcaca

SEQ ID NO: 3088699 - RNA, 19 nt, Artificial Sequence
  Description of Artificial Sequence: Synthetic oligonucleotide
ucucccaccccaaauccgu

SEQ ID NO: 3088700 - RNA, 19 nt, Artificial Sequence
  Description of Artificial Sequence: Synthetic oligonucleotide
ggacagagaaugcaggggc

SEQ ID NO: 3088701 - RNA, 19 nt, Artificial Sequence
  Description of Artificial Sequence: Synthetic oligonucleotide
uccacuaaguggagaaguc

SEQ ID NO: 3088702 - RNA, 19 nt, Artificial Sequence
  Description of Artificial Sequence: Synthetic oligonucleotide
ugcacacaaguggacagag

SEQ ID NO: 3088703 - RNA, 19 nt, Artificial Sequence
  Description of Artificial Sequence: Synthetic oligonucleotide
gucuaaaaucaaugcacac

SEQ ID NO: 3088704 - RNA, 19 nt, Artificial Sequence
  Description of Artificial Sequence: Synthetic oligonucleotide
cacacaaguggacagagaa

SEQ ID NO: 3088705 - RNA, 19 nt, Artificial Sequence
  Description of Artificial Sequence: Synthetic oligonucleotide
uggagaagucuaaaaucaa

SEQ ID NO: 3088706 - RNA, 19 nt, Artificial Sequence
  Description of Artificial Sequence: Synthetic oligonucleotide
acagcucugugccccuugc

SEQ ID NO: 3088707 - RNA, 19 nt, Artificial Sequence
  Description of Artificial Sequence: Synthetic oligonucleotide
gagccuuuggaccacggga

SEQ ID NO: 3088708 - RNA, 19 nt, Artificial Sequence
  Description of Artificial Sequence: Synthetic oligonucleotide
cacuguacagauauuuaca

SEQ ID NO: 3088709 - RNA, 19 nt, Artificial Sequence
  Description of Artificial Sequence: Synthetic oligonucleotide
uucuuuucuuccacacaga

SEQ ID NO: 3088710 - RNA, 19 nt, Artificial Sequence
  Description of Artificial Sequence: Synthetic oligonucleotide
accaucagacaauuucaca

SEQ ID NO: 3088711 - RNA, 19 nt, Artificial Sequence
  Description of Artificial Sequence: Synthetic oligonucleotide
uaacuacaauaaauaucac

SEQ ID NO: 3088712 - RNA, 19 nt, Artificial Sequence
  Description of Artificial Sequence: Synthetic oligonucleotide
uucccaccucgccagaccc

SEQ ID NO: 3088713 - RNA, 19 nt, Artificial Sequence
  Description of Artificial Sequence: Synthetic oligonucleotide
ugccuuuaacuacaauaaa

SEQ ID NO: 3088714 - RNA, 19 nt, Artificial Sequence
  Description of Artificial Sequence: Synthetic oligonucleotide
cacacagaccaucagacaa

SEQ ID NO: 3088715 - RNA, 19 nt, Artificial Sequence
  Description of Artificial Sequence: Synthetic oligonucleotide
uucacagagucuccacuaa

SEQ ID NO: 3088716 - RNA, 19 nt, Artificial Sequence
  Description of Artificial Sequence: Synthetic oligonucleotide
agaccaucagacaauuuca

SEQ ID NO: 3088717 - RNA, 19 nt, Artificial Sequence
  Description of Artificial Sequence: Synthetic oligonucleotide
cuuuaacuacaauaaauau

SEQ ID NO: 3088718 - RNA, 19 nt, Artificial Sequence
  Description of Artificial Sequence: Synthetic oligonucleotide
ucgccagacccucuucucc

SEQ ID NO: 3088719 - RNA, 19 nt, Artificial Sequence
  Description of Artificial Sequence: Synthetic oligonucleotide
aggccaagagggcugcuag

SEQ ID NO: 3088720 - RNA, 19 nt, Artificial Sequence
  Description of Artificial Sequence: Synthetic oligonucleotide
ucccaauucccaccucgcc

SEQ ID NO: 3088721 - RNA, 19 nt, Artificial Sequence
  Description of Artificial Sequence: Synthetic oligonucleotide
uggcugagccuuuggacca

SEQ ID NO: 3088722 - RNA, 19 nt, Artificial Sequence
  Description of Artificial Sequence: Synthetic oligonucleotide
agaaugcaggggcagccca

SEQ ID NO: 3088723 - RNA, 19 nt, Artificial Sequence
  Description of Artificial Sequence: Synthetic oligonucleotide
agcagaaggccaagagggc

SEQ ID NO: 3088724 - RNA, 19 nt, Artificial Sequence
  Description of Artificial Sequence: Synthetic oligonucleotide
cuguacagauauuuacaca

SEQ ID NO: 3088725 - RNA, 19 nt, Artificial Sequence
  Description of Artificial Sequence: Synthetic oligonucleotide
ccugccacagcucugugcc

SEQ ID NO: 3088726 - RNA, 19 nt, Artificial Sequence
  Description of Artificial Sequence: Synthetic oligonucleotide
ccuuuaacuacaauaaaua

SEQ ID NO: 3088727 - RNA, 19 nt, Artificial Sequence
  Description of Artificial Sequence: Synthetic oligonucleotide
ggcugcuagcccuggaugg

SEQ ID NO: 3088728 - RNA, 19 nt, Artificial Sequence
  Description of Artificial Sequence: Synthetic oligonucleotide
cuugccccucccaauuccc

SEQ ID NO: 3088729 - RNA, 19 nt, Artificial Sequence
  Description of Artificial Sequence: Synthetic oligonucleotide
gaccaucagacaauuucac

SEQ ID NO: 3088730 - RNA, 19 nt, Artificial Sequence
  Description of Artificial Sequence: Synthetic oligonucleotide
gucuccacuaaguggagaa

SEQ ID NO: 3088731 - RNA, 19 nt, Artificial Sequence
  Description of Artificial Sequence: Synthetic oligonucleotide
ucuccacuaaguggagaag

SEQ ID NO: 3088732 - RNA, 19 nt, Artificial Sequence
  Description of Artificial Sequence: Synthetic oligonucleotide
acauaacuacuaggacccc

SEQ ID NO: 3088733 - RNA, 19 nt, Artificial Sequence
  Description of Artificial Sequence: Synthetic oligonucleotide
cucccaauucccaccucgc

SEQ ID NO: 3088734 - RNA, 19 nt, Artificial Sequence
  Description of Artificial Sequence: Synthetic oligonucleotide
cacuaaguggagaagucua

SEQ ID NO: 3088735 - RNA, 19 nt, Artificial Sequence
  Description of Artificial Sequence: Synthetic oligonucleotide
ugccacagcucugugcccc

SEQ ID NO: 3088736 - RNA, 19 nt, Artificial Sequence
  Description of Artificial Sequence: Synthetic oligonucleotide
ccaauucccaccucgccag

SEQ ID NO: 3088737 - RNA, 19 nt, Artificial Sequence
  Description of Artificial Sequence: Synthetic oligonucleotide
aggggcagcccacuguaca

SEQ ID NO: 3088738 - RNA, 19 nt, Artificial Sequence
  Description of Artificial Sequence: Synthetic oligonucleotide
cuuccacacagaccaucag

SEQ ID NO: 3088739 - RNA, 19 nt, Artificial Sequence
  Description of Artificial Sequence: Synthetic oligonucleotide
ugcaggggcagcccacugu

SEQ ID NO: 3088740 - RNA, 19 nt, Artificial Sequence
  Description of Artificial Sequence: Synthetic oligonucleotide
caaguggacagagaaugca

SEQ ID NO: 3088741 - RNA, 19 nt, Artificial Sequence
  Description of Artificial Sequence: Synthetic oligonucleotide
ugcuagcccuggauggcug

SEQ ID NO: 3088742 - RNA, 19 nt, Artificial Sequence
  Description of Artificial Sequence: Synthetic oligonucleotide
gagaaugcaggggcagccc

SEQ ID NO: 3088743 - RNA, 19 nt, Artificial Sequence
  Description of Artificial Sequence: Synthetic oligonucleotide
ucccaccccaaauccguug

SEQ ID NO: 3088744 - RNA, 19 nt, Artificial Sequence
  Description of Artificial Sequence: Synthetic oligonucleotide
agacaauuucacagagucu

SEQ ID NO: 3088745 - RNA, 19 nt, Artificial Sequence
  Description of Artificial Sequence: Synthetic oligonucleotide
acuaaguggagaagucuaa

SEQ ID NO: 3088746 - RNA, 19 nt, Artificial Sequence
  Description of Artificial Sequence: Synthetic oligonucleotide
ccucccaauucccaccucg

SEQ ID NO: 3088747 - RNA, 19 nt, Artificial Sequence
  Description of Artificial Sequence: Synthetic oligonucleotide
cugagccuuuggaccacgg

SEQ ID NO: 3088748 - RNA, 19 nt, Artificial Sequence
  Description of Artificial Sequence: Synthetic oligonucleotide
uugccccucccaauuccca

SEQ ID NO: 3088749 - RNA, 19 nt, Artificial Sequence
  Description of Artificial Sequence: Synthetic oligonucleotide
caauuucacagagucucca

SEQ ID NO: 3088750 - RNA, 19 nt, Artificial Sequence
  Description of Artificial Sequence: Synthetic oligonucleotide
cagagaaugcaggggcagc

SEQ ID NO: 3088751 - RNA, 19 nt, Artificial Sequence
  Description of Artificial Sequence: Synthetic oligonucleotide
cagacccucuucucccacc

SEQ ID NO: 3088752 - RNA, 19 nt, Artificial Sequence
  Description of Artificial Sequence: Synthetic oligonucleotide
aucacagggccuggggcag

SEQ ID NO: 3088753 - RNA, 19 nt, Artificial Sequence
  Description of Artificial Sequence: Synthetic oligonucleotide
caaauccguugccuuuaac

SEQ ID NO: 3088754 - RNA, 19 nt, Artificial Sequence
  Description of Artificial Sequence: Synthetic oligonucleotide
ugccccucccaauucccac

SEQ ID NO: 3088755 - RNA, 19 nt, Artificial Sequence
  Description of Artificial Sequence: Synthetic oligonucleotide
cacagagucuccacuaagu

SEQ ID NO: 3088756 - RNA, 19 nt, Artificial Sequence
  Description of Artificial Sequence: Synthetic oligonucleotide
ugccccuugccccucccaa

SEQ ID NO: 3088757 - RNA, 19 nt, Artificial Sequence
  Description of Artificial Sequence: Synthetic oligonucleotide
aagagggcugcuagcccug

SEQ ID NO: 3088758 - RNA, 19 nt, Artificial Sequence
  Description of Artificial Sequence: Synthetic oligonucleotide
cuaaguggagaagucuaaa

SEQ ID NO: 3088759 - RNA, 19 nt, Artificial Sequence
  Description of Artificial Sequence: Synthetic oligonucleotide
gaaugcaggggcagcccac

SEQ ID NO: 3088760 - RNA, 19 nt, Artificial Sequence
  Description of Artificial Sequence: Synthetic oligonucleotide
accucgccagacccucuuc

SEQ ID NO: 3088761 - RNA, 19 nt, Artificial Sequence
  Description of Artificial Sequence: Synthetic oligonucleotide
gcucugugccccuugcccc

SEQ ID NO: 3088762 - RNA, 19 nt, Artificial Sequence
  Description of Artificial Sequence: Synthetic oligonucleotide
agccuuuggaccacgggaa

SEQ ID NO: 3088763 - RNA, 19 nt, Artificial Sequence
  Description of Artificial Sequence: Synthetic oligonucleotide
gccaagagggcugcuagcc

SEQ ID NO: 3088764 - RNA, 19 nt, Artificial Sequence
  Description of Artificial Sequence: Synthetic oligonucleotide
accccaaauccguugccuu

SEQ ID NO: 3088765 - RNA, 19 nt, Artificial Sequence
  Description of Artificial Sequence: Synthetic oligonucleotide
acacagaccaucagacaau

SEQ ID NO: 3088766 - RNA, 19 nt, Artificial Sequence
  Description of Artificial Sequence: Synthetic oligonucleotide
gagucuccacuaaguggag

SEQ ID NO: 3088767 - RNA, 19 nt, Artificial Sequence
  Description of Artificial Sequence: Synthetic oligonucleotide
ggggcagcccacuguacag

SEQ ID NO: 3088768 - RNA, 19 nt, Artificial Sequence
  Description of Artificial Sequence: Synthetic oligonucleotide
cucgccagacccucuucuc

SEQ ID NO: 3088769 - RNA, 19 nt, Artificial Sequence
  Description of Artificial Sequence: Synthetic oligonucleotide
augcacacaaguggacaga

SEQ ID NO: 3088770 - RNA, 19 nt, Artificial Sequence
  Description of Artificial Sequence: Synthetic oligonucleotide
caagagggcugcuagcccu

SEQ ID NO: 3088771 - RNA, 19 nt, Artificial Sequence
  Description of Artificial Sequence: Synthetic oligonucleotide
cagcccacuguacagauau

SEQ ID NO: 3088772 - RNA, 19 nt, Artificial Sequence
  Description of Artificial Sequence: Synthetic oligonucleotide
acacaaguggacagagaau

SEQ ID NO: 3088773 - RNA, 19 nt, Artificial Sequence
  Description of Artificial Sequence: Synthetic oligonucleotide
agucuccacuaaguggaga

SEQ ID NO: 3088774 - RNA, 19 nt, Artificial Sequence
  Description of Artificial Sequence: Synthetic oligonucleotide
ugugccccuugccccuccc

SEQ ID NO: 3088775 - RNA, 19 nt, Artificial Sequence
  Description of Artificial Sequence: Synthetic oligonucleotide
cagggccuggggcagagca

SEQ ID NO: 3088776 - RNA, 19 nt, Artificial Sequence
  Description of Artificial Sequence: Synthetic oligonucleotide
ggauggcugagccuuugga

SEQ ID NO: 3088777 - RNA, 19 nt, Artificial Sequence
  Description of Artificial Sequence: Synthetic oligonucleotide
guacagauauuuacacaua

SEQ ID NO: 3088778 - RNA, 19 nt, Artificial Sequence
  Description of Artificial Sequence: Synthetic oligonucleotide
gccuuuaacuacaauaaau

SEQ ID NO: 3088779 - RNA, 19 nt, Artificial Sequence
  Description of Artificial Sequence: Synthetic oligonucleotide
cacagcucugugccccuug

SEQ ID NO: 3088780 - RNA, 19 nt, Artificial Sequence
  Description of Artificial Sequence: Synthetic oligonucleotide
ucccaccucgccagacccu

SEQ ID NO: 3088781 - RNA, 19 nt, Artificial Sequence
  Description of Artificial Sequence: Synthetic oligonucleotide
cuagcccuggauggcugag

SEQ ID NO: 3088782 - RNA, 19 nt, Artificial Sequence
  Description of Artificial Sequence: Synthetic oligonucleotide
cuccacuaaguggagaagu

SEQ ID NO: 3088783 - RNA, 19 nt, Artificial Sequence
  Description of Artificial Sequence: Synthetic oligonucleotide
cagcucugugccccuugcc

SEQ ID NO: 3088784 - RNA, 19 nt, Artificial Sequence
  Description of Artificial Sequence: Synthetic oligonucleotide
gggcugcuagcccuggaug

SEQ ID NO: 3088785 - RNA, 19 nt, Artificial Sequence
  Description of Artificial Sequence: Synthetic oligonucleotide
agagggcugcuagcccugg

SEQ ID NO: 3088786 - RNA, 19 nt, Artificial Sequence
  Description of Artificial Sequence: Synthetic oligonucleotide
cccaccccaaauccguugc

SEQ ID NO: 3088787 - RNA, 19 nt, Artificial Sequence
  Description of Artificial Sequence: Synthetic oligonucleotide
augcaggggcagcccacug

SEQ ID NO: 3088788 - RNA, 19 nt, Artificial Sequence
  Description of Artificial Sequence: Synthetic oligonucleotide
ccaagagggcugcuagccc

SEQ ID NO: 3088789 - RNA, 19 nt, Artificial Sequence
  Description of Artificial Sequence: Synthetic oligonucleotide
ccuugccccucccaauucc

SEQ ID NO: 3088790 - RNA, 19 nt, Artificial Sequence
  Description of Artificial Sequence: Synthetic oligonucleotide
ggagaagucuaaaaucaau

SEQ ID NO: 3088791 - RNA, 19 nt, Artificial Sequence
  Description of Artificial Sequence: Synthetic oligonucleotide
cuggauggcugagccuuug

SEQ ID NO: 3088792 - RNA, 19 nt, Artificial Sequence
  Description of Artificial Sequence: Synthetic oligonucleotide
cccaauucccaccucgcca

SEQ ID NO: 3088793 - RNA, 19 nt, Artificial Sequence
  Description of Artificial Sequence: Synthetic oligonucleotide
ggccaagagggcugcuagc

SEQ ID NO: 3088794 - RNA, 19 nt, Artificial Sequence
  Description of Artificial Sequence: Synthetic oligonucleotide
caggggcagcccacuguac

SEQ ID NO: 3088795 - RNA, 19 nt, Artificial Sequence
  Description of Artificial Sequence: Synthetic oligonucleotide
gcugcuagcccuggauggc

SEQ ID NO: 3088796 - RNA, 19 nt, Artificial Sequence
  Description of Artificial Sequence: Synthetic oligonucleotide
gccccucccaauucccacc

SEQ ID NO: 3088797 - RNA, 19 nt, Artificial Sequence
  Description of Artificial Sequence: Synthetic oligonucleotide
ggggcagagcagaaggcca

SEQ ID NO: 3088798 - RNA, 19 nt, Artificial Sequence
  Description of Artificial Sequence: Synthetic oligonucleotide
cccugccacagcucugugc

SEQ ID NO: 3088799 - RNA, 19 nt, Artificial Sequence
  Description of Artificial Sequence: Synthetic oligonucleotide
gagggcugcuagcccugga

SEQ ID NO: 3088800 - RNA, 19 nt, Artificial Sequence
  Description of Artificial Sequence: Synthetic oligonucleotide
gcugagccuuuggaccacg

SEQ ID NO: 3088801 - RNA, 19 nt, Artificial Sequence
  Description of Artificial Sequence: Synthetic oligonucleotide
cccacuguacagauauuua

SEQ ID NO: 3088802 - RNA, 19 nt, Artificial Sequence
  Description of Artificial Sequence: Synthetic oligonucleotide
acagaccaucagacaauuu

SEQ ID NO: 3088803 - RNA, 19 nt, Artificial Sequence
  Description of Artificial Sequence: Synthetic oligonucleotide
cucuucucccaccccaaau

SEQ ID NO: 3088804 - RNA, 19 nt, Artificial Sequence
  Description of Artificial Sequence: Synthetic oligonucleotide
gcaggggcagcccacugua

SEQ ID NO: 3088805 - RNA, 19 nt, Artificial Sequence
  Description of Artificial Sequence: Synthetic oligonucleotide
caauucccaccucgccaga

SEQ ID NO: 3088806 - RNA, 19 nt, Artificial Sequence
  Description of Artificial Sequence: Synthetic oligonucleotide
ccacacagaccaucagaca

SEQ ID NO: 3088807 - RNA, 19 nt, Artificial Sequence
  Description of Artificial Sequence: Synthetic oligonucleotide
ucugugccccuugccccuc

SEQ ID NO: 3088808 - RNA, 19 nt, Artificial Sequence
  Description of Artificial Sequence: Synthetic oligonucleotide
gcuagcccuggauggcuga

SEQ ID NO: 3088809 - RNA, 19 nt, Artificial Sequence
  Description of Artificial Sequence: Synthetic oligonucleotide
ccaccccaaauccguugcc

SEQ ID NO: 3088810 - RNA, 19 nt, Artificial Sequence
  Description of Artificial Sequence: Synthetic oligonucleotide
cucugugccccuugccccu

SEQ ID NO: 3088811 - RNA, 19 nt, Artificial Sequence
  Description of Artificial Sequence: Synthetic oligonucleotide
caccccaaauccguugccu

SEQ ID NO: 3088812 - RNA, 19 nt, Artificial Sequence
  Description of Artificial Sequence: Synthetic oligonucleotide
cacagaccaucagacaauu

SEQ ID NO: 3088813 - RNA, 19 nt, Artificial Sequence
  Description of Artificial Sequence: Synthetic oligonucleotide
ccagacccucuucucccac

SEQ ID NO: 3088814 - RNA, 19 nt, Artificial Sequence
  Description of Artificial Sequence: Synthetic oligonucleotide
gccuggggcagagcagaag

SEQ ID NO: 3088815 - RNA, 19 nt, Artificial Sequence
  Description of Artificial Sequence: Synthetic oligonucleotide
gcacacaaguggacagaga

SEQ ID NO: 3088816 - RNA, 19 nt, Artificial Sequence
  Description of Artificial Sequence: Synthetic oligonucleotide
gugccccuugccccuccca

SEQ ID NO: 3088817 - RNA, 19 nt, Artificial Sequence
  Description of Artificial Sequence: Synthetic oligonucleotide
ggcagcccacuguacagau
